United States Patent Application Publication US 2004/0031072 A1 - sequence listing, part 14

SEQ ID NO: 61667 - DNA, 620 bp, Glycine max
  Clone ID: PAT_MRT3847_266C.1
ccacgcgtccgcgtccgggagcagctggagggctgctacctcctggctggtatcaagtacgagggcctgacggtgaagcagctgcagggaatccgcgacgcgctcccagagacctgcagactgctggtggcgaagaacactctggtggggaaagccatcgagggcaccccctgggaagcgctcaagccgtgcatgaagggtatgaatgcctggctcttcgtccacaccgaggaggtaccagccgcgctcaagccctaccgcgccttccagaaagaggagcgcgtcgaggagaccaacgacttcgtcggggccgtctttgagggcaagttttacgggcccggagacttcaaggcgctcgagactatgcccagccgcgccgaggtgtacgccacgctgctcggcgcgctgcagggacccgctacgtcgctcgtcgccacgctgcaggcgccagccaggatgtcgttgcggtgctctccgcgtacgtacgcaagctcgaagaggaggctggagccgcctagtggggttgtgaaatggttgtcatctccctttcactccctactttctgtttgtagaattctgtgtaccttaactggctcccagtcacatttgatttgatcaca

SEQ ID NO: 61668 - DNA, 448 bp, Glycine max
  Clone ID: PAT_MRT3847_26700C.1
gggggataaaaaacaaatcctttttgaatttaaaaaaccggcttttggcaacacctatttacggttccgggggagggaccccccccagggaccggaaggggatggcctggaacccaaggcttcccttttccttggggactaatccttatcccccctacctttaaaccttttttggggcccttaacccccccctttttttttttttttggataccatttaccccaaatttttttttccctctttaggctggggccaacccttggggtggatttaaagaggcttaaccgggcggaaaaataaaacccttttccaattttttaacccttaccccctggggaggggggtcccacaggggctagcacctttctttgctttaggagagccaacaaacttcttgaaatgggggttcttgaggaattggcaaaggcagggtttttgttttttgatc

SEQ ID NO: 61669 - DNA, 137 bp, Glycine max
  Clone ID: PAT_MRT3847_26701C.1
gaataacaacagataaggtaacattcaacgaaagaagcaaaccagtctaataacagatacaaacagcgctttaactatgcaagtaaaacgcacggaaaaattacgtacaactaaagagaactattcaaagccaaaga

SEQ ID NO: 61670 - DNA, 283 bp, Glycine max
  Clone ID: PAT_MRT3847_26702C.1
ttatttgacttaaatagtcaaacgatgattccacatgttagtgggggtatgttttaggttccaaattattccctgaccaataggggacgccaatcatgtaacgtggctgatctaaccagacatccttactacggcacaagctttggtgcgctacaagaaatcaccactggccttccgattgcttgaatcgaaacctcctaagtaacattgattttaactaggtaagcagtgcccgtgcttttactcgcggtgatgtgtcggcagggaggagtatactggagcc

SEQ ID NO: 61671 - DNA, 377 bp, Glycine max
  Clone ID: PAT_MRT3847_26703C.1
ggaaggggaaaagaaaaaaggcaaaaaaaagaaaatccgggaggtaattcaaaataaaaggacctggttcaggaaaaccctcgaaaagggccaatcttttaaaagtggcttttaaggaacaaagcccccccccccatgaaaaaagttaaaaaacagcccgttctatgattttacaatcttgaatcaacccccccagggatggaaaaacccctatagttaggaaccataggaatttataaaaaaaaagccggccaatttttcattttacttccgggccaaaaaaaatccaggtttccaaccccctttgacaaaaaaaaaacatggaaaccctgctaaatctggaaaggtgaaaccactcaaatcacagttaactgcaa

SEQ ID NO: 61672 - DNA, 442 bp, Glycine max
  Clone ID: PAT_MRT3847_26704C.1
ggctcgagggtgctcttgcgggtacagaggggtggatcaaaaccacatgttcgattgcagctcccgcgggctgaacattgtggatactcacgtgctgtgggtgatctataccaaggaccaactgtttcctgtatgcgaggaggactgcgatcgcagcgtgctctgttttgagtgggataacgactgacatgtagatcatgttgcaggagtgaccacgtggtggaatcaagcgtggaaactctgttagaggactgtgaatcatgtctgtacaccgatctaccactgcttatcctagccacgttggacgtgcaatcatgctacccccacgtgcatatgatagagttccatggagtgatgtaagtgcactatatgtaaactttgactcgacacaggagatgggcaagactacagtgctgcttccaaagttcattgacttgtgcct

SEQ ID NO: 61673 - DNA, 434 bp, Glycine max
  Clone ID: PAT_MRT3847_26705C.1
aagctcaatggaaatgagccacttgtaaccctcccgtccaagttctctcactccaattatcttcagttatctaaatgcgtgtttggaaacacgtccaacgaggtgaattcacgtcaattcagggctttggacgcggaagttacaccgggtagcattggccaagactcacgtgtggaagattcgacacagctccaaacatgctatattaatcagcctggcaacactgactaacattcatcctattcttttcattgatttcattttaaccagtgtttatatttaaagttgttgctgagaaattttcatttatatgtatccggtgaattctcctcagcaactccactttagttgaattcacacttttatttatttgcatatctctttggctttagctagtaagctaatacgttcaagactagaggtaatcttgagaa

SEQ ID NO: 61674 - DNA, 321 bp, Glycine max
  Clone ID: PAT_MRT3847_26706C.1
gaaatcataccatttaattttttttgttggaccaagggacgaaatatcgtaattttcaagggataactacttaacaataacggtaaagaatattattactgccttaaactttaagaggaaaagttttatttttttccaaaaatgttcgtcccagattggtggaatggttatcatctaactttattcccgtgggccggatacatattttattcaccaacgtgaggaactctcgattttaagctacattaggactataagaaccagctttgcaacctgaattgtgcccataggactttggacgcttaaaggtcttttctttcc

SEQ ID NO: 61675 - DNA, 438 bp, Glycine max
  Clone ID: PAT_MRT3847_26707C.1
gggggaaagtttttgtgtaaactatgtgttctccagtgagtctccgttatttacagtagaaccgttgaatccaggtaatgatccttgtaaatcagagccataaatatgacccattttggtccctcttgtttccagggatctcttgttttcctctgtgattggggtcaacacaggaactcgccctaccactgccaaaccatatcctttaagaccaacaaactttgctgggttgtttgtcataagccgcattgttcgaactcctatatccctcaaaatctgtgcaccaatcccatattcacgagcatcaacagctaagccgagttctatgtttgcttggaccgtgtcatgaccttgatcctgcaaattatacgctttaagtttgggaccaaggccaatgcctcttccctcatgacctcgaagatacacaactactcccct

SEQ ID NO: 61676 - DNA, 526 bp, Glycine max
  Clone ID: PAT_MRT3847_26708C.1
ggctcgaggaagatgtgggtgagtcaaagggtggtagtgatgatgtgataattgatgggcctgatacttcgtccttcactgcgtttctctattctctgttgtctacttcggattccggggataaaggtggtgaagctgattagaagaatgatgatgaggtggcaggtgatgactctttactatcagactcagccacgaaggaaagttttgatgtgaagaaaagtttgtgttccaggagcaaacattcacttggtagggccattcaccaaatgggtggatttagcaacagggatagcaattacaccgacgaaggtggtcgtgagatgaagcgcattgtgaaagagccattggcatgggctgtgtctggggttggtgatcatctgcctcaaatttctgagccttcaatgcttgtttacgagggtgtgcgaaatgccgggtatgcttcactgccggcacttattcgtggccggaaaaggtttatgctgtgcagcactaggaaacatggtatacacttttaactctttac

SEQ ID NO: 61677 - DNA, 193 bp, Glycine max
  unsure (1)..(193): unsure at all n locations
  Clone ID: PAT_MRT3847_26709C.1
ccancgcacgcgtacgtaagctcggaattcggctcgagcgancaanntanggnnttcncaancctcnncccttnttcgnnactagcctaatcaaaaccgnnacaancgattacaaanncaagcanannagngaaataatcatncattnctcggtgagaagagagagaggancggnaannngaccgggaaggag

SEQ ID NO: 61678 - DNA, 1207 bp, Glycine max
  Clone ID: PAT_MRT3847_2670C.1
actgccaaaggatgtttggagtgatagaattcctgattttcatcttctggatcaagctgaacaatctgctaaaaggcaaaagctgaaaatctgggagaattttgttgaaggagaggaagtatctaatggtgcagcagttgagaacaaacagcaagaagtacttaaggtaattgttacggaagtcttgggtggtggtaaattctatgttcagacagttggagatcaaaagattgcatccattcagcaacagcttgcttctttgaacctgaaggatgctcctgtgcttggtgctttcaatcctaagaagggtgacatagtcctttgttattttcatgctgacaaatcttggtaccgggcaatggttgtcaatacaccccgaggaccagttgaatcacctaacgacttgttcgaagtattctatattgattatggaaatcaagaagtagtaccctacagtcaactacggcctatcgatccatctgtatctgctgctcctggtattgcacaattgtgtagccttgcatatgtgaaggttccaaacttggaagaggattttgggcaagaagcagctgaatatttgagcgaactcactttaaacagtggcaaagagtttagggccaaggtcgaggagagagatacatctggagggaaagcgaaagggcagggtactgggacagtgcttgcggtaactctagtagctgtggattcggagatcagtgttaatgctgccatgctacaggaaggacttgctaggctagaaaaaaggaataggtgggacggaaaagaaagacaacaggcccttgacaatttggttccgttccagggcgaagctcgaaccagtaggcgtggaatgtggcagtatggagatatccagtctgatgacgaggacactgctcctcctgctagaaaggctggtggtagaaaatgagtgtattttaagaggggagataagttataaaatagacattttcaaagaaaatgagcaagttataggcatgaacattttaattcaaggtagaggaaaaaaatgccatatgtaatccttagtaagttttgttttgttttaaattttgttggtaggctgagacaattttttaaacttattttataataaaaggtgcatatggcaggtgtttcatatctcgggacagcagaggtattgttttatagaagtaataatttatcgcaattgaggttttaaacatgg

SEQ ID NO: 61679 - DNA, 317 bp, Glycine max
  Clone ID: PAT_MRT3847_26710C.1
cccacgcgtgcgatcgatcgttataattgaatagtcggtcatattatgtatctacggtcccgattccgacacgagggtgtggggatactacaatatgttcttctagctggaagatcaaaagtggctatcaaagatgtaatggcggtggactcatctattctagtttttatcttacaagcaacactaacatcggatctcctaccataaaagtggactgcattcatgcaaaaatagatgccccgagtagggaacaacacctactacaatgcactggaacggatatttaacttgactaacatgtgagacgccttggatat

SEQ ID NO: 61680 - DNA, 153 bp, Glycine max
  unsure (1)..(153): unsure at all n locations
  Clone ID: PAT_MRT3847_26711C.1
agggtcttggattattaccacggcttggaaatttggaaataaattaccaaagtntaattngttccagggccatggggatnaaaattgccagccctccctaagaaattgggggggtggatttccaaatggtccctgggaaattgaatggggcag

SEQ ID NO: 61681 - DNA, 249 bp, Glycine max
  Clone ID: PAT_MRT3847_26712C.1
tagaaacatacttacacacatgcctccggtcaacctattcggtactacaattgtactagcggtccaattccgtgcgtacgatatggtcgctctccgaatgaacacttgctatagtgcccatactccgtagtttattttctcaataattatgatttctttttaatcacacatcatattttactattataccattccttaaaaatgccttgaaacaacaaaagaatacatccatggctaacaatatagatc

SEQ ID NO: 61682 - DNA, 1084 bp, Glycine max
  Clone ID: PAT_MRT3847_26713C.1
cgcaaagaaggtcaatgccaatgagagcaacagtgatctgtgtgaggaggagaggcaccagcaccagcaccggcggcgcgacctccagtctgcaaggaggagagccgaaagccctcttcttcttctcaggaaaggagaagaaggacaccaagcatggaaagagagcaacagcagcaaaggtcaagcatcaaagaaaggagagttagtagatctcctagaagaagatcatcagagaacaccacaccttccaatgcaagaaacaacaatagcagcaacaacactagctcgaggccattcggctcgagtgggaagatggtttctgttcctgccactgtttcatcactggtgatggataagagtaacaataatggtggtggtggcggtggtggagaatctggagcaaccactggcatcaagaggatcacagtgaagagaaatgtgggtgctgcctctccgcggtcgcagtcgccagcaagagcaaatgggaatgctgcaagtggtaataaagctttcaatgagaatcagcagcagccatcccttagccgcagcaattcaaggaaagcagaacaatcaccttacaaaagaaatccattgagtgagattgaacctaactcccttgcttttccacattcaacagccaataatagcagcagcaaggtgcaaaacagacccaaaaaggaatttgaaacagaagctaatcagaaaacaaacggcagcagaactgcattggacaagggaatgaatgtaaattgcaagacaaaggtgcaacaagaggaagatgtgaaagtgcagtcttcaattactgataatgttgttgtgaaaacaatggtaccaccaggagttgacaacctaaaaccaccctatacattaacaagaagcagatcttcgaggcaatcgcgggacttagacctcaaccctgaagctctattgaatcctccacagtcctatgcttcactgctgcttgaagtcgcaacgaatttccatcagaagaacacaccacctgttattgcaacagcatgtgtcaccaaagcttgctctatcctcgaagctgttgctgatctcaactctaacgccggcttaaatt

SEQ ID NO: 61683 - DNA, 458 bp, Glycine max
  Clone ID: PAT_MRT3847_26714C.1
cccacgcgtccgcccacgcgtccggttcactcctctctcctcccctcctgcaaggacccaggcgatctctctctctctctctctctctctgtttcatatcatgaaacgctcaaacgacgacgtcgctgcccccgtccccgcctcaacctccaagccagtgttcctaaccaaagcccaacgcgagcaattggctctccagcgccgccaggaagaagtcgccgaccagaagcgccgccaggagcagctcctctcccgcaaccactcctccgatcccaaaccctcctccgaccgcgacagagacagagaaagagaccgagaccaccaccgagaccgggaccgcgatcgtgacagagacagagaacgcgagcgcgcgaacgcgcccggttggagaaactcgcggagcgtgagcgcgagaaggagcttgagtccatcaaggagcagtacctgtgctcgaaaaa

SEQ ID NO: 61684 - DNA, 657 bp, Glycine max
  Clone ID: PAT_MRT3847_26715C.1
accgtccgcccacgcgtccgcgcacgcgtggggttgaatagaagtgtctggaatccaatccgaagtggtttggtgtttgcgcgttcactcctctctcctcccctcctgcaattacccaagcgatctctctctctctctctctctctctgtttcatatcatgaaacgctcaaacgacgacgtcgctgcccccgtccccgcctcaacctccaagccagtgttcctaaccaaagcccaacgcgagcaattggctctccagcgccgccaggaagaagtcgccgaccagaagcgccgccaggagcagctcctctcccgcaaccactcctccgatcccaaaccctcctccgaccgcgacagagacagagaaagagaccgagaccaccaccgagaccgggaccgcgatcgtgacagagacagagaacgcgagcgcgagagggcccgcgatcgggatcgcgaagccgaacggcgcaacagagagagggagcgcgaagaggagagccgggcccgcgaacgcgcccggttggagaaactcgcggagcgtgagcgcgagaaggagcttgagtccatcaaggagcagtacctgggcttcgaaaaaagccgaagaagccgcggtcatcaaggcccagcgaggagtttccggttcttccttcggactggga

SEQ ID NO: 61685 - DNA, 358 bp, Glycine max
  Clone ID: PAT_MRT3847_26716C.1
ggaatgggtcaccaacaaacttaggggctgccttaagggtgattgtgaggacatatggattgacgcgtacttgggcatagggtcaccgacgctttacattaccattgcatacacctgttaacttatacgtatgaaccaaagaaacccttctcttaagtgtgcactggacaattgagactctgactgttcaaggcatggtatttggtcctgtaccctactcgatgactgtaagcaacgtggtacttctaatgacctttgaatagtgaactgtaaatatgtggaagataatattgtgggctcacttgatcttactactgctaaaaattttaacagatgaatggttgggctccagactata

SEQ ID NO: 61686 - DNA, 419 bp, Glycine max
  Clone ID: PAT_MRT3847_26717C.1
cttaatctcggcatggcaacccaagcttcacgatccgagattgaggttgtggtagacacgaccacctccaacgataacaacaatgaggaaccaacctcgttgtccttaacgtcgtccctgaattctatactaacaaaattccatgcaggttacttcagaataagcctctccctcggtggccaagctttgttgtggaagacactgatcgaatcatcatcatcaccaacacacgacacaagcgccgctctacgacgcgttctttgcacgcttccttccgcagcagctattcttgcactgtggtcgttggctctctttgctctcgtgttgctctctcttctttacctcctacggtgcttgttttactttaagatggtaaaggcggagttcttgcatcccgtaggggttaactacctcttcgc

SEQ ID NO: 61687 - DNA, 1113 bp, Glycine max
  Clone ID: PAT_MRT3847_26718C.1
agataatcctttttgtatttatactatttctttataaggaaacaaaaacttattacaatttcaaagaatattgaaacaatgatatggtaaaatattagaatacaatcaagaatctaccagaaagactatctcaaagtaggattcctccactcattaactagtgacaatataaacatattggatgattggataagaataaggacttggtcctttcttggaacctcaaagaatagccaacttatctgaaaaatccctgtggccaaaagaacttaaacactgaactccaaggttaaagaagcctcttgggaagtagtatagaggtaaagaggagaggcaaaaccaaggtattaatgaaaagaccattttgtgaagacgttgctgtaggaagagatggaagttttgtagttctattgcatgaggatggtagcgaatatgatgttgtgggccatggagctacaatgttgtcattaaggtcgcaaatgaatccaatccctgaagttccatcaaatactgcatttgaaggcaaactgggcaaaaggcagccagattcttgcaatccaacttgaagagaaaagtccttcaggcttatacgacaaagattataaacatttttggagacattttcttgctgcaatttctttccaagtgatgtagcacatttcaaggcttgcagattggttacaaaactctgttcttgcaaataggacacataacttttgatggctttgcagcaagctgtttggttatttatgagattcccgcattctttcacaacacttgtgacatttggtaaaaccaatgggcatactgagtgaagtattataacaacattgaacattgtcagacgtatgctttatattccaataaattagccaaaattgtaataatcaaacatgatataaggagagtgtatttctcttttattttctccttgctcacctctgtttaggttgcagtttgagagtcctctaaaaacactatttgcagtggatggatcaagtttattagccagccaacgaagaacaatattcttgcaatcattgatcctagttgttggccaaggcaagctatgatttccatctgaattagacaaatcattcaaggcaatttttc

SEQ ID NO: 61688 - DNA, 415 bp, Glycine max
  Clone ID: PAT_MRT3847_26719C.1
cttggggccaaccctggcccaatggttttgaaaccaaaagattcccaattttggcccctttttaattgggtaaaaaaaaaccccaatcccaggccccgggtaaaattcgggtgggccccccatggccaactaattgcctgaacccacccctggttttgattacctgggtgaacaacccccattgctttttcattttttttctttttgggggacatttttagaaaaacgtccctcaacccctttattttcagggcccttggtgaaccaccggccagggttttataaaaaaaaggtggggaacatttttggacccgtataccatgaaaacaaatcctccccaaacatgtgacatttacaaaaaacgtttcccccccagaggaacccaaatccctccccccttttgagccccgccccc

SEQ ID NO: 61689 - DNA, 376 bp, Glycine max
  Clone ID: PAT_MRT3847_2671C.1
cggttattatataacaaaaacaataatgtaaatgagggtcattaatgatcatgatgatctctcatacaaacaaaagcaaattaagaaattaaaaaattaatttttaattacaaaagaaagaaaaggaccaattggtcatcatcattgttctcctacatcaaacccatacacacatacagaatgcaaacacaaaataaagggtctttctattgatgaagtaaactaattggttaggtttcttcttaaccaccctaaagccttaataaccccttctctcaagatttacttattgtacaccgtcttccccaactcttccactaattgttcaacccagaatatccaattgtcattccaaacttttccatttttttatata

SEQ ID NO: 61690 - DNA, 619 bp, Glycine max
  unsure (1)..(619): unsure at all n locations
  Clone ID: PAT_MRT3847_26720C.1
acgcgtacgnaagctaggtttttggagagcggccgcccttggggccggggggggtgnnngaaatgatttggattgcgttttaatatgaattccgttttgtgntatttagttttaaattacgatttaaaaatttatgttnaaattaacgttaacggcgagatctattatcatttttcgcctgtcctcggnantttagggggggggggaattctcctatatttatggcctaccatacgatctgttntntaaataggtaaatgctcttttccgttgtggcttgcantggtntggccaatcattgtaggttttatggttgatgctctggaccaagttcttattatctctttttccgcttttgtgttcagtttatttatttttcttagtaaatgattcgctgcaaaaggatttttttttagtgaacgtgtcacagttaattactcctttttcttgtgagggcgaagaaacaatttctattttctctcctatttagtacgacgacgtggaatcaaattatcactatatttcttgctttttctacttcttcttccaggggcggggaaaaccccaaggggtttgcgggtttttttcttccatttggggccctcccttcaccaccccc

SEQ ID NO: 61691 - DNA, 161 bp, Glycine max
  Clone ID: PAT_MRT3847_26721C.1
ctcttcttcgtctcaaacctcttcgttccttcgattcattccatctcttccaaaatggccaaagatcatgtcgcggctcgtcactggagcgcaggcaaattggatatgctcgtgcctatgatgcaggggatgatgctggctgacagccggacctcaatgct

SEQ ID NO: 61692 - DNA, 454 bp, Glycine max
  Clone ID: PAT_MRT3847_26722C.1
aaaaaacaaattaaaaagttttacaaaaaaaaaaaaaacaaacaaaaataaacaaaaaatgcaacaaaaaaaaataatctatcatgcaaggggcggcccttttgggtggccccctctttaacaccgttgcgtctgacgtaatcctttttttttcgcgtctcattatttttgttgcccgcccgtttttttacagcggccggattggaaaaaccgtgggcttccgaaacttttgcgacctgcaacccatcctcctttgcccaggggacgcaatatggagtggggcattaagcgtggcccttcccaatttttcgcccttcataatggttacttggtcccccctttttaacggcccatcattggggggggttttggtgcctccccgccagtggttcctctttctcttgggaggggcttttacccttcgtgtcctttcttttttttcctcccctttttt

SEQ ID NO: 61693 - DNA, 382 bp, Glycine max
  Clone ID: PAT_MRT3847_26723C.1
tttacatttagaccatattaatcatcaggccataacttaagggattaaatgcatcgatctgattgcttttataattggaagctatgcgatctgcactgatgaagctggagttagatactcatttgggcctacaaccaaaaggagatcttctgttgtgtctagccaataggggaaggggggactcattatggagaaaagatgtgcactcatcactatatggatattgtgacatcccagcgcttatggggcttctctttgagctagaggacgtcgtcccatgagagagacagggaagaaagtgcactattcctagcttatcaagactgtgcattagaacacatagctctcaaaatatagactatataggatatggattcccaca

SEQ ID NO: 61694 - DNA, 310 bp, Glycine max
  Clone ID: PAT_MRT3847_26724C.1
gtgtttcatcctcaaaatacatctaattactgaggcaaaaaaaaattgcgaattacaaccacaaacaaattgatgctttttgtcaataatcttgcgggccattacttcaggaatattttggggggcaagaaccaacaaataggggattgtgaatgagacaccactgtgttcagacaaatccgagaatacctctctggttactgccaattgtccacttagacccttggttttaagaacagaaaaataaactcatgccggcaaatgaagctttctgtttttctcccagctttgggaatagtactagaagaaa

SEQ ID NO: 61695 - DNA, 820 bp, Glycine max
  Clone ID: PAT_MRT3847_26725C.1
atggaacgtataagatgctgatttatattttaatgatcagtagttggagattggaatggagcctggccatttggaggaaaacaaatgagaaagagtacttaaaaaaagtcacaaggccagctgggggaagcttaatttaaagcattaaaatcaaaatgaaaggaattgaataatttgaattggtccctcatgacagctcccctctaacgactcactttcactataagtaccaagtatttcatgcagcttttgtcagtcatcaggcacacaccaaacccttcttctctcttcccctgaaacatccctcctcttccaacaaaatcagtgaggatctgagaagaagaagcattggccagaggtggttcctccatgactgcaaggggcagcgaccccataaggggtcgtcttcggccacaaatggccttggccttggccattgctttgatttctatcactttggtttccgttaatgctgatggttacccttactattctcctcctccaccttatgaatacacctcaccacctcctcctccttacctctacaagtctcctccaccaccctctccttcacctcctcctccatactattataaatctccaccaccaccctctccctcacctccacccccttattattataagtctccaccaccaccttcaccatctcctccaccaccctattattacaagtctccacctccacctgaaaagtctcccgctccaactccctactactataagtctccaccaccaccttctccatctcctccaccaccctactattacaagtctccgccaccaccttctccttcccctc

SEQ ID NO: 61696 - DNA, 638 bp, Glycine max
  Clone ID: PAT_MRT3847_26726C.1
agtagaaatattttattggtgagaccccaccatctgcacaaagtggtcctggaatcaagctccttcctccttggcaatgcgatctttcttgagtggtcccataaatgctttcttctcctccatggtctggaagcgaccatggccaaatttggaggtggtgtcaatgaacttcaggtcaatcttctccagggcccgacgtttggtctgaaccagcaaggacttacgaagagtaagtactcgcttcttggtccccaccacacagcctttgagcatgatgaagtcattggtcacctcaccataatgcacaaagccacccagtgggttgatgctcttgtcagacaagtcatagtcagtagatgcattgttcttgatcagtttgccatccttgatgaggtagccttgaccaatcttgtaaatcttcttgttaatctctgttcggtgatggtagcctttctgcccagctcgagccacagagaaagcgacacgggcagggtgccaggctccaatacaggcaactttgcgcaaacctcgatgggtctttcggggcagtttctttgtatgccaacgactggttacccctttgtaccctttgccttttgtcacgccaatgacatcaatcatctcatcctgcccaaaca

SEQ ID NO: 61697 - DNA, 918 bp, Glycine max
  Clone ID: PAT_MRT3847_26727C.1
cggcggagggcttttaagtttgattttgaaaaggttgtgctgcttctctctctgtctcctcgttcgcttctttctctctctagggttttgggggttctgagtaaacgttgtaaaacatgcagctgacacttgaattcggagggggattggaacttctttgtgactccaagaagattcataatgtcaatattgagcaacacaatggagaagacaagttaatcatgaaagatttgctttcttgggtacagaccaacttgattaaggagaggcctgaaatgtttatgaaaggagatactgtgagacctggagttcttgtccttgtgaatgattgtgattgggagctaagtggtcagctgaacacatcactggaagacaaagatgtggtggtttttatatcaaccctgcatggtggttaaggcatagattaccaaatgtttatatgaaacagtgaactaagataactaaacaagttgactatcaaatttaatggcctaatatgtaaggtgctgttcacagtctttacttctaccgatatcaaatttggttattacacttttacagattttggcaaagttgtgatacttgtctaataaagtaacacttatttgatccaagggaactgggatgatgtatctttggttatgacattgtatactactgtaaggtctgatccatgagttgcttcacgcaaattattaaaacaaaaaaaatcaagatgatgaaaaaaaaaaaaaaaaaaaacacggggggcccctatgggggggcccccctaaagtacccaagcttgcgcccgcgggcatgcaacttattatatatttaatggggatacctaggtggggttttttggcgggcggttttcaactgcgggactggtaaacccctttaattccccaactaaaaaacctggcggaacatccc

SEQ ID NO: 61698 - DNA, 258 bp, Glycine max
  Clone ID: PAT_MRT3847_26728C.1
ccgtaggggacaataataagaagtgttggccaagagatgctagaatgaggcttatgaaacatgatgtcaatcttggaaggagtgtcttctgggatatgaagaatcgccttcctcgaagcatcacaacattggagtgggagaacagttttgtatctgctgacagcaaggataatccaaacttgcttttcagcatgtgtggatttcaagtgaggatacgtcctagaattagaatgactcaagaagcattgagtcacacaa

SEQ ID NO: 61699 - DNA, 177 bp, Glycine max
  Clone ID: PAT_MRT3847_26729C.1
cgaaaatgtggaagagacggggatatgtagaagacgtatttcaattgataaactcatggttcataggcctaaatctagctggcataggctacacagcctattttttcggattctttactgtccacgcttctttttatctcgtgatcttggatacgtacaacactgcgaagacattat

SEQ ID NO: 61700 - DNA, 282 bp, Glycine max
  Clone ID: PAT_MRT3847_2672C.1
ctcttgtgtatacagacactgcttgtagccaattgacaaacttcttgctgaagaaggaaatgggtggttgttttgggacaacacgtgccaatggccaaggatgaagcattagtttcgagatccaaaggagcaacaaaatttggtattgcaagcactagagctgtgatgttaacatgttttaaatttgtaaaaccaatgtgtgcttgttcattccattgtaattttgtatacttaccattgagaagattagttagtggtgcaattatgggcgtgcaacacggt

SEQ ID NO: 61701 - DNA, 406 bp, Glycine max
  Clone ID: PAT_MRT3847_26730C.1
tttctttttttccaaacgaattttcctttacctttcgcttgggggtctaatcactaacaataaacttgtctgatctacaataggcactcagtagggactcagaggtggtggaagatcaaaagggcatgatatgattggttttggtgtcataagaacaaaggctcgccttttaattaacccgaattatcttgagcaatatccgaagacctttgactcacttgcggtgagcaattgctctgcattttaagcagaattctgtccaatccttaagccttcgtaacggcctattgctccttttgatcccgaaacagataacccacccttccaaagcgtcgtaacgatgtgttcttgtggccctgctcgacattttcagcaaccttgtttactaattgccaaaacgcccctc

SEQ ID NO: 61702 - DNA, 175 bp, Glycine max
  unsure (1)..(175): unsure at all n locations
  Clone ID: PAT_MRT3847_26731C.1
taataatanaatgtgantnngttcattttattattattgttcttcaaaatgggaggctcttggaagaacaataataataaaatgaaccgtttcacattgtattttcgtggagtttgtntatcttctgtagctatatatttctatagtagactatataagnnnctctagtntaaaa

SEQ ID NO: 61703 - DNA, 176 bp, Glycine max
  unsure (1)..(176): unsure at all n locations
  Clone ID: PAT_MRT3847_26732C.1
agagggannatgcacngttttacttagggtctttttttaacaacattactggttctgaggttggttacttactggagagccgggcaaatgctcttgctggagacaatgctgtcaggatgatgctggagaaaatggcatcattgtgcgagttgtgcttacatgagcatacctataaa

SEQ ID NO: 61704 - DNA, 254 bp, Glycine max
  Clone ID: PAT_MRT3847_26733C.1
tacggctgcgagacgacagaaggggacattactaatgtgggatatgccggccaacatgacatcaatggtttaatagtttttaaatgggatttgacaatattggttaatcattcttatatgcatgatttaaaaaagaatatcacaaaaataaaaatgaaaaaacataattaaaattttgtttactgtttaatatttataaacttatgaactcaagagaaaccatgaatgatgagaagagaaaaggtagcaagttg

SEQ ID NO: 61705 - DNA, 212 bp, Glycine max
  Clone ID: PAT_MRT3847_26734C.1
gacccacacgtccagcggacagaagggttaccctcgaagagtacaaagcagcagtgagaacaatggggtggggaatccatggcactgatatcgattagtcttctcacgtgatcgactctgatggacattgcgacactcacatccaagcgtgcatcgcagattatcaggctgacgttgatgatgcgaccaacaagctcagaggcttcatcgct

SEQ ID NO: 61706 - DNA, 275 bp, Glycine max
  unsure (1)..(275): unsure at all n locations
  Clone ID: PAT_MRT3847_26735C.1
cncacacaacattggataaggcagattcagatgatggcgagtgagtcgnaaaactnggtgttcancggtcactgcacaganacnaatcaacattgccgttatcaagtattgggggaaaagagangaaaccctcatnttaccggttaangacagtatcacgtgtcactctngatnccatccanctctggcaccaccancactgctgccgtcagtcccgntttccaccaagatcgcatgtgcgntcaatggaaaggagatttctctntctgggggca

SEQ ID NO: 61707 - DNA, 291 bp, Glycine max
  Clone ID: PAT_MRT3847_26736C.1
gccttatccagtttagggtttcggttccttaccctacctttgacgtatcgaaaccttaaatttgggattaggtctgagcaatctggttggtagaacctttggtcttagagagtcaagttttatgtctggattagacgatcaaattcctactgccttcgatccttttgctgatgcacatgctgatgactcgggcgctgggtcaaaggaggatgcgcatattcgcgctcagcagccaaatggccggaacagcctgactaccgttcagggatggaaaaaagaatttagctatat

SEQ ID NO: 61708 - DNA, 305 bp, Glycine max
  unsure (1)..(305): unsure at all n locations
  Clone ID: PAT_MRT3847_26737C.1
aatcaaaaccaatcaaaactttattacacacttctttattgtgcatgcacgtccttctctcaacggaagacagaatcataccatagcttgatatcaacttaaactagtattaggaatgaattgaangaaaactgaataataaccgcagtatctaaggtataatattttacttatggggcaccttaatataccccacatgtgaagaattgacccctatagtatgggcgggaagaacataagcnncccaacaccttgaatgctccttgtggtagaaacaacccacacacttgcaatccttggtgcat

SEQ ID NO: 61709 - DNA, 439 bp, Glycine max
  Clone ID: PAT_MRT3847_26738C.1
ggaaaccccccaaaaaatatttaaaaaaaaacaaaattttaaaaaaaacggggggaaaaataaaaaaattttttacagaggggggtttccggaaattggggtttaaaacggggcagggatttccttttgggggttttttgtccaggggggtaaaaaaaaattcccaaatttgaaacaaaaaattttgaaaaaaaaaattgggccttttttttaaaaaaaaaacccgatttccgggaaaacgcctacccaaaaattgggggaaagacgggttccccatttccgggggactgggcaaacaaattttggggaatacccctggggaaagccaaaaacttcttttctttaaggatgggcccttttaaaaaaaggaaaccccttgaaaaagcttgggggggaccaccaccaattttggaaaaccggggccccaaaaaaactgggg

SEQ ID NO: 61710 - DNA, 358 bp, Glycine max
  Clone ID: PAT_MRT3847_26739C.1
gcatgcaaatcatgttgccggagcagtgagttagttccgctagatacaagtgtgattaaaataggcatccccgtaaaattttgagccataacacacccaaaatctgaaggtagtgcctaccataagcaatacctacatgagattaaaatttctcataagtcataattaactatactggcaaatggctatttctaattggaacaatctatatctccacttttaacctaaaacaagggttataaggagagtattcaatgccctatccctcctaatcttcctaaactactaaggagtaagtatctatctaacactggtcctataaaatctactctaattccccacaagaacattctaatga

SEQ ID NO: 61711 - DNA, 217 bp, Glycine max
  Clone ID: PAT_MRT3847_2673C.1
cctcccacctctcgggagacacgagctttgctggggatttgaatcgaaagtgtttgttaatgggtgaggtgaatcagagaagtcataagacagagaattgtaatccttatgagttattggcggtataaagctgctaccattgatgcgaggaaatttacttcgatctcatacaattctgtccgattatttcagacttcgattaccttcaacagatatg

SEQ ID NO: 61712 - DNA, 686 bp, Glycine max
  Clone ID: PAT_MRT3847_26740C.1
atggtagggtcagccccatgaaaagatcgtctcatctactaatagatctcaagaagttttagatctatactttgagtggctgcgaagtatcagcacgttggtaagtgccgagtgtatttggaatggcaatgcaatataaacaaaagcatgaagtgcttgcctttatgatgaagcaagagtttatcacaaccatggctttgcaaagatcttgttagagctggatcagaaactacatggaaaggtttcgatggaatggcatcagcgaataccagtgatgaaagtctgccccatatgtgggaataatgctggactaagcagcagctcactcaaactacatctgcagaaatcacatagaaagctatcatctgggagtgtagatagtgccatgactatggaaatccagaaagcattaacagctttgaagattagccgtggtgggagtgtcagccccacacaaagatcatctcatccactaatagatcaatagaaactgcaaatttatagattttgtgcattcaagtatcagcaggttagaaagttcgagtgtatttggaatggtgcaataaaaacaaatcgattaagtttctgcctttataatgaagcaacaatttatcacttccaaaaaaaaaaaaaaaaaaaaaaaaaataaaaaaaaaaaaaacaaatactttaaaatattcaaattg

SEQ ID NO: 61713 - DNA, 381 bp, Glycine max
  Clone ID: PAT_MRT3847_26741C.1
cgtactcgtccgcccacgcgtacgaaaagcttttatcaaactttgttgcaatttattggcttatcaaatgcttccgtctaatcctgacgacaaaatagatgaggtcgacaagattctttcaaaacttgatggaaaaattgaacgtaaaatggaccctttgatgtgtcgccataaccaaagacagaaatgcacagattgtctcccattggacccctacgatgaaaaatttctgcatgaaaaggacatcaaacacttgtcttttcatgcccatgtgcacaaattgaccgatttgcatggccgagggacgcgttcaaacaatgtgttggagaatgtgtgctgcaaactgcgcccgaactgggcgggtggccatttgccataccc

SEQ ID NO: 61714 - DNA, 1058 bp, Glycine max
  unsure (1)..(1058): unsure at all n locations
  Clone ID: PAT_MRT3847_26742C.1
cccgcgtccgggagattttagtgcatgaaaaacttatggctcaagtatctttaaataccgcagaatcagatgttctagtcatgaaacagaaggttgagcatgatttgcaagagatggtacagaagataactgtgtcaggtgccctgttgcagaaacttcagttaaattttgaggtgatcattaacaggattaatgctggttttgaagctgaagaattatattctcagcatcacaaagagtttttgtctggtctggaccatttggaagctgagctacaacaacttaattccagaaatcaggaccttgctcaagaaataataaagctagatacttcatcaagtgaccttgaaatgtgtaagctgaccttagcaacaatcaaagaggaaaagaaagatnttagagtcgtctttacaggaaaaaacagaagaatctactaagatttcatctgagcttgattttttgaagaagaacttggattctctacataatgagttgcatgctgagaaaactgtaaggcaacggctcgagaaaacaatttcagatcttaccacagaattgaatgagaagcaaagtcagctgcagggaaagaaagaattggagttgtctttagaggaaaaagcagaagaatctgccaagatttcatctgaactcaattttttggagaagagcttgcattctctgcataacgagttgcatgctgagaaaactgtcagagaaaagttggagaaaacagtttcagatcttaccacagaattgaatgagaagcaaagtcagctgcagggaaagaaagaattggagttgtctttagaggaaaaagcagaagaatctgccaagatttcatctgaacttaattttttggagaagagcttgcattctctgcataacgagttgcatgctgagaaaactgtcagagaaaagttggagaaaacagtttcagatcttaccacagaattgaatgagaagcaatgccaactgcaggattcttgtcnnaccgnccagtanntggtccncntaagncaattggngccggacntgatttgnaaaaatcaggatctcag

SEQ ID NO: 61715 - DNA, 540 bp, Glycine max
  Clone ID: PAT_MRT3847_26743C.1
gctcctttggggtctcaatttcaacttctggctgaacagcattctcaacaacagggttatgaatctttctcaagctacgtttaaccttttcaagctcactttgaggattttctagctctggatccaacacttggtgtggtatttttctgaaattacgttttggtttctcgaattcaggatttgtttgcaccagggctggttcaaaatttgcaataggaagcttcctggtagtgcgttttgacttggcgcagggccattattgtaattgatgaagcaacaagctgaaacaaatttgagtaaaacagatcaaaacactgatagaagtgtgtgctccagataatttatgcagcaatgtaggacaaagctccctttgtttccaggttcagatttaagtgatgtaaattatggtcagacaagaccagtattacacataattacataaatagaccaggagccaattcaagcatgttcatatataaacttggaaggtttacaaaaccacaggttttgacgtaatgtattattactttatggctcagc

SEQ ID NO: 61716 - DNA, 374 bp, Glycine max
  Clone ID: PAT_MRT3847_26744C.1
gggcccccaacccaacaaatactggatttcagggagcggatcctcaaaacataaattttcctttcaattttgccgggaacgaatcttagagttggctggtcccactctttttaacccatttgaaaatgaattccgtttgaacattaccaatttgtctttgcttttttaaggggcagaattacttaaatcaacggtttttatttccccctttacttttaagaaggtggataggactcatccaaaattacaagggcccaaaaaatattaatgcccttttttttaggacacccctttgcctgattagttctgtaatgaacactgcaaaatctacagattttttattttacgtaaaagggatcaccagccgattgggt

SEQ ID NO: 61717 - DNA, 545 bp, Glycine max
  Clone ID: PAT_MRT3847_26745C.1
cttttttttttttttttttttttttttttttttttttttttttttttttttttttttttttttttttttttttttttttttttttttttttttttttttttttttgggaaaaaaagtttaaagagttttttttaaaataaaggttaaattttaaccaactttggggaaaaattaatggggggaagcaaaaaaaaaacaagcccccaataaggggaaactttacggggggggttaaaaattggaaaaaccatcacgggccaaaaaggcaaactatttttttaattaaaagggggaaagccttttgggttaaaaaaagggggaaaaaaaacgacacccccaattgttttaaaaagggcataaggccgcattatgttaaaaagcccaaagtttcggggggaactgcaaccaaaaaaagggccaaagccctccccataaaatagggaacgggcctactggggggaaccatgcttccataaaaaacgttttggctttggggggtcggggtttgagaattttttttttaagggcctaaaggggttttcttc

SEQ ID NO: 61718 - DNA, 437 bp, Glycine max
  Clone ID: PAT_MRT3847_26746C.1
ggattaaaaacaaattcaaacggcccccagtggttattataaacaggcggctaccccatcgggtaaaggcccaaaaaacggaaattccgggaaagcaaacaaaaggtttttttggccaaaacaaattaacaagcccccaagcttattacaaaattaaaattacctggggggccctggaaaatttttcatcatcattatcaaaaaccccccttggataaaagcattaaagcgctcgaccttttgggggggctcaccccccacagcacaaaccacatttccaagggaccccaggccaatcatccctttttaataaaacacggggaggggccggattctattggcagccatcagttgcaaacccggcaaaactttggtatcaggggggacggggaaaagtttgttctcttcagccataaaatccccaaccttagaaaact

SEQ ID NO: 61719 - DNA, 511 bp, Glycine max
  Clone ID: PAT_MRT3847_26747C.1
tgaccccaatgaagtctacgtagtctccatggccaattctctgcagaacatcatgaaggatgtttatgatgggtttatcatcacgaagcctacctcaatctactctccctctcgtgctcatgagatgaaggaggcagaccagaacggccggcactctggttatggtgatacaaagggtgcaaggcatgccacgcttacccccaagatactatggatgagaatgatgcgtctgctcatgcggttgctccgggagtacagggaatcagacaagctcgtctaccacgtgttccatgatatggacatgagtgtgaaaggtaatgtcttcaaaatctagatagtcttcatggacagcatccacgctgacaaggctgaaaaggcaacagagactactctgtctgatgcttttgatgctaagcatgcagctaacagggctaggaggcatacgagacttgctcagcggctggagcgctgtactctaggcactattgacactgcatccactgcaccccag

SEQ ID NO: 61720 - DNA, 290 bp, Glycine max
  unsure (1)..(290): unsure at all n locations
  Clone ID: PAT_MRT3847_26748C.1
agagaatagctttaggtactgcaagagggttggtttacttgcatgagcaatgtgaccctaaaattattcaccgggatgtcaaancagccaacatagtgtgctggataaaactttgaagctgttgttggtgattttggtttaactaaacttttggatcataaagattcacatgtgaccacttgtgtgcgttgcacgggttggcccctttgttccaaatacctattcacaagcccattattaaaaaaaaccggtgtgtttgggttccgaatcttgctgtttgaactgatcac

SEQ ID NO: 61721 - DNA, 630 bp, Glycine max
  unsure (1)..(630): unsure at all n locations
  Clone ID: PAT_MRT3847_26749C.1
ggggccaatttaaatagttttattattccatgttacttgttttgggtccctgtggaacaaagctacaccttcttcttggactgacttaatccaccttttcaatggtggggcctgaagaagcaccaccagatgggggagctcctccacctgggaagccaccaggcattcccccaggcatgccacctgcactctggtacagcttggtaatgatagggttgcagactttctccagttctttctgctgatgctcaaattcttccttctctgcagtctggttcttatccagccagctgatgatttcattgcacttgtcaagaatcttctgtttgtcctcatcattgatcttgccttgaagtttctcatcttccacagttgctttcatgttgaaggcataggactccagtgagttcttggaggaaaccttatctctctgcttctcatcctcagccttgtacttctcagcttcttggaccatgcgctcaatatcttccttactcaagcggcccttgtcattggtgatggngatcttgttctcctttcctgtgctcttatctacagcagaaacattgaggatgccattggcatcgatgtcaaaagtaacctcaatctgagggaccccacggggttgct

SEQ ID NO: 61722 - DNA, 277 bp, Glycine max
  Clone ID: PAT_MRT3847_2674C.1
atttcggctcgagcgtttctaagtgtcattcattaaaaaaaactttaaaatttggaattttaattggcaaaatgaattaaagtcaaccagaggcaggaaggggtagcaaccttaaattatgttagaaggaaaaaagtattaactgtagcaaaagaagaagaagagagtatcaagacaattttgaccatatataacatgataaaataccaatatacagcatgcatgcatgacaacttagaatttataaacatgtttccatttggtttcctaggtttta

SEQ ID NO: 61723 - DNA, 148 bp, Glycine max
  Clone ID: PAT_MRT3847_26750C.1
cgttaagttgtgtgctactacggttcttctgtggggctattgaatacacgttagaccaggggacgttggtgttcgtcatcaactgactggagctctgcaaccctgagatgaaccaatccgtgtatttactcaaacaggcatggaagga

SEQ ID NO: 61724 - DNA, 365 bp, Glycine max
  Clone ID: PAT_MRT3847_26751C.1
gcttcgcatgacgctacttactgtctacaacataaccatcattagggctgccttcaactcctcattgcatttcccacttcatgtctttcatttacctcttatcctaagtctcctgctttctttctttcccattttctatctccatatcataccaaagcctttttcattctggccaaattgtctgtgccattcttcatgtaccttgattgtcttggctctgttctgaaaagggtttgtctgcctcatcagaattacctggaattcttggggaagtttctatccttgtctcgttctgaactggagtgtgtctacagatttttaaggtttgctcttttcttacttcagcatactcctttgagtaaatg

SEQ ID NO: 61725 - DNA, 411 bp, Glycine max
  Clone ID: PAT_MRT3847_26752C.1
tgtggtcgcgtgggcaggcgcggggggaaaatccaaccatagcatgcccttataatcgactaaggaccatggatatactggacaaaccacgccccgctcaaaaagaggctatcagagaacccacactcccaagccaaaagcatgctaaggaggaagtccgaagaccccgtccacgacctgcagtagggcgaggcccaagggcatcaaaaaggccgccaatacggaggccgccaagctggagaagctcctgcagcgccagaaaatcgccggcgagtgacacgccacagacaacctatcgactgccgaggaggacccactcagcggggactacagtgacgtgccgatggtggagctgcagcacaagacgccgaccgacgttggcgagtggacactcgttgaggctctcggcgg

SEQ ID NO: 61726 - DNA, 1417 bp, Glycine max
  Clone ID: PAT_MRT3847_26753C.1
tacggctgcgagaagcggacagaccggggcgtccgcagagccgtgggtttccactgttgatttgctccgtcttcacccagtgttcgaagagaagtctgtgacccagctagcgtcccatttgctctgtcgtacgtgtttggtggccatcgtcatcactgagctctgtcgaaaggtgtgtgtggctatctccattcgtctactcaggccctggtcaaggtgtgacgcgccgcttccgtgtcttaaccttcaatctcaatcatggccaaagctgaaggtggcaaggaatcaataaatgaacaagcgtagcaaatatgtatgctgcaatgaggactgagctcacacaattaccaaacccttataactgaactcgagatggggatttaaagccttttccctaaagagttaggctctattggaccgtacgattaagatcgttcggtgaaattgatcacgctggtgccgcataccctagcgttcctgttattctattgtggctgaaacaaaacagtgttgaacggcgaggtagaacgacgacccccttctgcgttttgaccttcaatctcaatcatggccaaagctgaaggtggcaaggaaccaataaatgaacaagcagtagcaaatatgtatgctgcaatgaggtctgagctcaaccaaatttactccaaaataactgaactggagatggaagttagtgagcacacattggttaccaatgccattcaaccacttgaccaatctagacgatgctatcgtatgattggaggggtgcttgtggagagaaccatcaaagaggtcttgcctgctgtgcagcgaaataaagaaggactcgaagaggttgtggcaaggcttaacgaggcgttggaaaagaagaaaaaggaaatttctgagtttgaggctaattataaaatcaggataaggaaggctgatgctgaggtgaaggatgaatctggtaggaaggaagggtctgctcaaggggttcttgtgggtcctgcaggtggaagtgaatgatttgtctatttttattttgtttgctcaaactagtggcctacaattgggtgcaggcagtttgatgatttgttttatatgtagactaagtgcgtgtctgaattagattcatgttccgtccatatagaagcaagtaaatgtaacttctgcatcattttgacgtggttttgctgcttgaacgtggatccaagacgtgtttccaaccacgctcattagcaagtataccttgcttgatatgaccttaagtttaattgcattgggctgaaaaaaattatcttcattggtttgtgtttatgtagatttttgtatgcaagaatagagcatataatcgtgtgatcaagctattttgtctctcttatgtatcgatatgtttcatcaggggtaaaatgcttttcctaagcaccttttgttt

SEQ ID NO: 61727 - DNA, 388 bp, Glycine max
  Clone ID: PAT_MRT3847_26754C.1
gttttcataattcctgaaacaggggaaggaaatggcctcacaacaacacatcgagaagatgcagctccgccagaacttccgcaatctctggcactctgatcttttgagtacaattcaagctgacaccccttattgttgcttttctctgtggtgtgcaccgtgtgtatcatatctactccgcaaacgagctctttacgatgatatgtcaagatacacatgttgtgctggttacatgccctgcagtggtcggtgtggagaaagtaaatgtcctgaactctgccttggtgcggaggatgtctgctgttttggaaattcagtggcctcaactcgatttctgttacaagatgaatttaatattcaaactacgcaatgtgataattgcattatt

SEQ ID NO: 61728 - DNA, 897 bp, Glycine max
  Clone ID: PAT_MRT3847_26755C.1
tacggctgcgagaagacgacagaagggggggatacaagagccatccctttccactgttgatttgctccgtcttcacccagtgttcgaagagaagtctgtgacccagctagcgtcccatttgctctgtcgtacgtgtttggtggccatcgtcatcactgagctctgtcgaaggtgtgtgtcgctatctccattcgtctactcaggccctgttcaaggtgtgtcgcgccgctgtcgtgtcgtacgaactgcttggctttgcggcttcagtatcggcttaccaaacccttactcatctgggatttaaagaatcatggccaaagctgaaggtggcaaggaaccagtaaatgaacaagcagtagcaaatatgtatgctgcaatgaggtctgagctcaaccaaatttactccaaaataactgaactggagatggaagttagtgagcacacattggttaccaatgccattcaaccacttgaccaatctagacgatgctatcgtatgattggaggggtgcttgtggagagaaccatcaaagaggtcttgcctgctgtgcagcgaaataaagaaggactcgaagaggttgtggcaaggcttaacgaggcgttggaaaagaagaaaaaggaaatttctgagtttgaggctaattataaaatcaggataaggaaggctgatgctgaggtgaaggatgaatctggtaggaaggaagggtctgctcaaggggttcttgtgggtcctgcaggtggaagtgaatgatttgtctatttttattttgtttgctcaaactagtggcctacaattgggtgcaggcagtttgatgatttgttttatatgtagactaagtgcgtgtctgaattagattcatgttccgtccatatagaagcaagtaaatgtaacttctg

SEQ ID NO: 61729 - DNA, 636 bp, Glycine max
  Clone ID: PAT_MRT3847_26756C.1
agtactaatttaattatcagtgcttatatatcttgaccagaagcaagcagaagtttttgcttcaacattagatgagtgaggtcacttaggatatccccttacaaatatgaagaaaatttctacaaaagagagaacggcatatatatatatatatatatatagtctaaccacaaggtcaaggagcctcttgggaaatgtcctcttgtactctcttggatatgctcctcaaacgatttgatgagatatagtcgagttttctttttaacttgggtgagacgtcttctttttcgtcaacaaaatgtagaaatgtctggatgcgagcagaacgtgagctgcaacgattagaaggaccaactttttgaggggattttttattgaattgccgtaccatcgataaaaaatagataagaagcgccaggaaacatgttattccacatattagaaacaggccccggaagctatttaatttaagctgttcatcctcagtactgtgaaaaccacaagccttttctgaaagccacttttcatggatcctttgaagttcaccattctcagatagggttagaatcgcagctgacatatcaattgcaagaggagagtctctcgggaatgcaaatccccatccacttttggcga

SEQ ID NO: 61730 - DNA, 500 bp, Glycine max
  Clone ID: PAT_MRT3847_26757C.1
tttcggttcaattcataaaaaaaactttcaaatatggatctcaagggccaatttcctcgtcattcaaaattgcacaagcttaactggattagacttttcaattaacactctctctggaaccattccagaaaatactgccactcttctaccatttgtgacatctcttgatcaatcttcaaataaattttctggagcaatacctatgagtcttgcaaattgtaccgaccttaatgcccttaaacttgatcagaatcgactaagttatcattttccccaacagttgggccttctccaacgacccaggacatttactgtgtcaaacaattctttgacggggcctgttccaaactttaccaatggtcatgttgtggtaaattattcaaataatgaagggctatgtggaccttcattgaggccttgccccaataattcaagcactggtcactgaagttgaatagaggtatcttgaattggaaaactaaagcaaatatggagtaata

SEQ ID NO: 61731 - DNA, 566 bp, Glycine max
  Clone ID: PAT_MRT3847_26758C.1
aaagaaaataagaaatagatgagattaaaacatcataggagaacaattacagagaaaaagggaaactaatttgaaccaattaaattcatttattggattttttttttagggggtaaatcagatgagtaaatcagcatagtagggtactccagtcgcaggcagccaagcatcacctattatgaaattagcaactgggaaattgacagcatctggggcattaatcacatggtaccctggccaagtaaccctattactagtgttagatccaggcccttgattatcaaattccgcataataaagggtgtccaaagcaaagtccccagaccaagctttccacccctttggatcgatcaaaccgtcgtccatgaaagactgcatataaagggttcttgaatattgcttccagggtcttcctaggtacgttttcggggtgccattgctaggggccaagtcactcgcggcgggtatgctacaattgtgtatggaggtgccggggttttggttaatgtcagaccttccctgggcgggaattgcattgaaatgattttgcaatgggagtcttgggt

SEQ ID NO: 61732 - DNA, 474 bp, Glycine max
  Clone ID: PAT_MRT3847_26759C.1
gctcgagcggctcgagtacggctgcgagaagacgacagaaggggataggcaaagaacacatagaatgtaattccaatattcgaatacatgatacaaaagagataatacaacccacatattattttaggatgagaattaacagataaaatagctaactataacctaacaattgaattacaatttagttacaactttctatctgattaacaattaacaacatgaatgacctctgtgttgcaatctcgatccaacccttggacatgttggcctttgtttgatgacaaaattcccccaccattccataaaaatgtcaccatgattatcctttgatataatagaaaaaaggtaaaagataccgatgaagatgtgtaattccgattctccatcactatatcttattcctttatatgatcaaagctagaatgccattaattagcaatttggtctttaaatatattatcttgggggaatatt

SEQ ID NO: 61733 - DNA, 383 bp, Glycine max
  Clone ID: PAT_MRT3847_2675C.1
tcaaatctaaaattgggtccagttttttaagatttcaaaattacaaaccgaaagtgaaattcatgtgattatccttgggaatacaaaatcaaacgtaagtccacagtaagcaactgattttgttattggacttaataaattgcgaatatctcacgaaacagaactgtagtaataattaatgacaagcattttaacccttacttgaagggtgagagtaatgaagttgcaacgaagataaccctgtagtaccagggtttttaagctgatcaagttgtttgttgccacggcgaagtaagtactcaatgtagagaaaatttttgcgatctacatcctccgcattacgccgaaactcttgcgatataattgactctatcttgcaccgt

SEQ ID NO: 61734 - DNA, 305 bp, Glycine max
  Clone ID: PAT_MRT3847_26760C.1
aaaaaaaacacacactttacacattttttccacaattaaaagaggggtggaaatttttaaattgaccgagctttctcaacaagaggggcatgtctaatttccttttttgaattaaacaaacgaaccaacgaaagaaaaccccatttcccgatcatgccgaggattccccattttcaaaaaatcttgcagtagcctgtggaacaaaaaaagctggcttaaaagttttaccagcaatttcaaaattttgagaaattcccaagaaaattttaaaaactgttgactgtttgggattgtcaataaggaaa

SEQ ID NO: 61735 - DNA, 597 bp, Glycine max
  Clone ID: PAT_MRT3847_26761C.1
cttaagtttttctgtgctgaggctaatagattcactggtcagttgcctgcatctctgttgaattctccttctcttcaaattcttaatctgagaggcaattctttgggtggctcagttaatttgaattgttctgcaatgaaaaatctaaccaccattgttcttggttataatcaattccattgtccagtcctcgttagtctatcaaattgcttgagattggaaggaattggtcatggctctgaccatttacattgtggggagattcctgttaatttcaagaaacttcagtccctaacccaactctcactttcatacaccggactacataatttgtcatcggcacttgaggttttaagtcactgcaggaacttaagtacgctactccttccatggaacttccataatgaacaaatgccacaaccacagggtcaaaatatagttttcagtaatctcaaggttcttgtcttatccaacagtcagataaaaggttcatttccaaaatggttaagtggatgcaagatgctgcagatgctggatctgtcgtggaatcatctcactggaagcattccttcatggattggcaacttgaacaatctc

SEQ ID NO: 61736 - DNA, 829 bp, Glycine max
  Clone ID: PAT_MRT3847_26762C.1
tttttcggctccaggcgaactatgcatcgctcccgctcccaaagttacattggcgcccgacgcagctgagttcgtaacaacgttgttaatgacttcattcccaaccccagtgaactatcaaccgctcccaaagttcacattggcgcccggggcaggctcagtttgtcaccgcgttaccaccgttgcgtagggctcgggaagctcggcatttggccattctcgctctgtgtgtttttctctctttcctcaagctttgttttgctttgctttggccgttttctctttgacctaagatctaaaattgtactttaattctgatattttgttgggtgaattaacacgaatccattttttgggttgaatacctgcctggagggtaggttctttggccttgcatgggagagaatcaatttcacacagcagaaaaatattgactaggatttatagatagcctttactttctttaaattgaatttctcaggtgcaaaataatttactacattgaagaattcagttagatactagctatatcattaactgccccaaaactctcaagctatatagttttatttcttaaggccacgtgtggagtaggattaagaataaggttacgtggtaattccagcatgcttcttagaaagggctaattggcaaccatgatctttggattggaaattttggcgaagtcacagtgcatagccattacaagactctcgtaaacagaatgtgctttaaaaacttgtgatcatagggaagaaattagatgtacagatatgcaaggtacacatggatgattcattagacatcacttcttcacaagctgagtcaa

SEQ ID NO: 61737 - DNA, 158 bp, Glycine max
  unsure (1)..(158): unsure at all n locations
  Clone ID: PAT_MRT3847_26763C.1
cagcatgaagaagagcttggtactttgtgagtgggccctacggcggccatgttttgagaaaacatccttgatgttatgtttaaacaagtttgacatatttgagaggaaggtactgagagctccgntcaatgtatgtgtttgtgnttaagattaccagc

SEQ ID NO: 61738 - DNA, 271 bp, Glycine max
  Clone ID: PAT_MRT3847_26764C.1
gggtttttaaaaaaaaaccttaacccttccgaactttttttttttttccctccttaacccaaagcctaaccaaaccttggtaacaagaaccaccgccaaagttttaaaataaaaaacccccttaagccaaaggttaagggggaaaccttccccggacgggggggaaaccaggtctcccaagaaaaacaaaaacgttccctcggcccaattttccagcttcggtcgcgtgcagacgaaaaaaaagctctgtttagggggccccaaaatcaat

SEQ ID NO: 61739 - DNA, 254 bp, Glycine max
  unsure (1)..(254): unsure at all n locations
  Clone ID: PAT_MRT3847_26765C.1
atacgcggacccctanactgacacatacacactattgcctcaaaacagacctaaacaccatcttgttcattttctaacaccgaatatgcaacaaagannaaaccaacacaaacactaacaataataacaagaataaatcatttgcttatacccttacatcttcttccattacaattaccatctgacaaaaatcacattcacttcccaagacattcatcaattataacttcattctaacttcacttaatcttcat

SEQ ID NO: 61740 - DNA, 393 bp, Glycine max
  Clone ID: PAT_MRT3847_26766C.1
ctgaaaatgatttgattttttaaagttagtgactaaggtacaaaagcaggatagtaaaaatgggtactgactgaaatactttccttcccaagttaccttcctagatctagagttgaatgaaaaaacttaattgttggttacatgtgtgctagatgatcaagagttttgaatagcaacagttggtggcgaagacactgttatgatatctggtaattgtggagcctggggctggtgaggaacgggtgtcactgtcgcatgctttctgctataaatctgcttagcaattataactatccttttccatcggttttcatcacctggattgccattacgttcttgtgcatcatcatgggttggttgtctagttttcagcaactggattgtataaagtat

SEQ ID NO: 61741 - DNA, 173 bp, Glycine max
  Clone ID: PAT_MRT3847_26767C.1
tctccatccacactaagatatggcttatccatctgtagcgctttttctgctcgctttttatccgctatccccctacaaccatacctgtgtctacccgcaaaagaggtccagctcatgcccctcaaaaaccccttacagtcctccggggcctatggaaatatgggttaactgga

SEQ ID NO: 61742 - DNA, 187 bp, Glycine max
  Clone ID: PAT_MRT3847_26768C.1
catgacattattatcactcttttggtcctccttgcaaagtttacattctcaaatgagtgtggaaaaaatcattttccattgaatacatatattttcaaatcatgcccaccctttgatttgatgaactgtggcaaatggttttgcacaccaactccaaggaaatttctagtttgcccccttccacttt

SEQ ID NO: 61743 - DNA, 267 bp, Glycine max
  Clone ID: PAT_MRT3847_26769C.1
gttatatatgagtgtagaactacactttgcgatctaactagcaccatgacctcgagggtgagacttatacttcatggaggtgaaattccaaaaaactatggtatataggtactcgaaatacctgtataactgtacttacactgattcatatgtattatgttaatcaagaatgtctatgaatcactatatcactgtgcgtattatacttgatatgatctatttatatacatttaattggttaccttttacgtaggaaccaagttcaat

SEQ ID NO: 61744 - DNA, 1361 bp, Glycine max
  Clone ID: PAT_MRT3847_2676C.1
atgctttttatatatttttaggattaaaatataatttggtctaaagtaacaacatatattgttccgaccctcacatctataaattagtccttgtaagtgtcaacgcactatcaagtttactgtcaacttgtaaataatttcacccctttaaggactaatttttatagacataaaaaaactttcgagactagagcaatacaaattaccagttggagtgaccaaattattgtgtctgcaagtaagtcagctaaaacgattgaatttgaaaaagaaagctacaggagagaaaaagagggaaaccaatagaattgatttgatgccatccttggtgagctcagagtcaggcatgatgaggatatccacaaagtctttctcagtggagcagagatcagataccctctgcatcttcttatgctccgcaattacctgatcaaataaggcatccaatgctccaaaagtagccttgaattcttgaatttggccagttagaaaatcaacccaacccaagaaaggaaagcgatcccccacagtgacaactccaagttgaatcatcgccctctttgcaagctctttgatcctgctgtgacaatcttctgtactgtatttctttccaagagcacatttacagatgatgttgtttgttgtttcaataagcaactcacttagattcacagaggaggatgcatcactcaagcttgcttcacgtatcttgttaatcaattctgcaacctcttcttctctgatgagactaagtgactgcacccttttggggctcagaagctcaaggacacatatttttcttttgtgtttccagctttctccataggatgcaaaaccaatgtcattacatccatacagcaaggtttttgctgctgtggttttgggtcggtttgagaaagttatgtcgtgagttttcatgatttccctgaccgcgtctggagatgaaaccaccaaggctcgagtctgccccaactgcaacaacatcagagaaccatgcttttgtgagagggttctaagagaatggtatggcaatttgcttagttgatgaagattgccaatgattggtagctttcttggggagggaggcagattgaaactgggtttgattttgggtcttcttgttagctttaacacaacaataacaagaagaaagaggaaaaggtattgatgaaaagtagaaacagagaaagctgttttaagttgctcatatggccattgtatagaagccattctttaaccacactaagactaatgagacacagacactataacatatatataggcatagccatcatcatggaatagttttgttcgttgtctcttctcaatgtgaacaccgcagctagctagcaagcccctca

SEQ ID NO: 61745 - DNA, 147 bp, Glycine max
  Clone ID: PAT_MRT3847_26770C.1
accacgcttccgataatttctaaactgtttgtcacacttacatgaaataacttaattacaggccctaccaagtctttaatcctttctttacatgtctcaatgcctactgtcaacctatgccaaatatctgcacattctccccctaac

SEQ ID NO: 61746 - DNA, 404 bp, Glycine max
  unsure (1)..(404): unsure at all n locations
  Clone ID: PAT_MRT3847_26771C.1
tccaaccttccccttccccttttaaaattccccggccgtttcaagttagaaaaaattcaacaaaacggtaagaaaaaatccccaaattactaaaaaatcaaccctttcctggttcccctggccccccctaaaaccgtaaacaattggtgttttaacctccgggaaaaaaaaaaaggtttaaagcactctctggtgtggaaggcaaaaacactaattctaaggaattaggtantggtaagtgaattacaaacaaacaagactttaagatttgagaactaaggcntaaggagctcgctaanggctgangaggcacttgccgagatgaaagttaatgaaaacaaaaatgaagtggctggtgatcgttccagtgatttggagaaagagcaaaaggaagggaatgaaga

SEQ ID NO: 61747 - DNA, 306 bp, Glycine max
  unsure (1)..(306): unsure at all n locations
  Clone ID: PAT_MRT3847_26772C.1
cgtccaacnccaaatacgacagaacgggactaattggaattatacagctgcaaactgtgaacggaaattaaggctcgtaagtttcgatttcggttgcacattggggtggtagcgttgcgaatgcaccaagtcttgaagaggaaaaacacaaagattcggaatactttagtcatttggatcctctaaatttgatggactatatctaatctaggaattcgttcctttaagtcttcaaagttcatctaaggtttgcctttacaatttggtatccatcagatcgattaacctgcatctatgggccgaaca

SEQ ID NO: 61748 - DNA, 336 bp, Glycine max
  Clone ID: PAT_MRT3847_26773C.1
gtccgatccgatttcacattgccgggaggacacgcttactaggccgccgccgcttttcaattcatatatgaacatttgcgccacctaaaaaaccgggatgtggtattggagttacacgaggggggcccatctcataccaatgggttgtacgagaggtctatttaaaaaacatataccggcaagggatgtatgatcatgcttgcctacttgggcattgagagcgtgactttggaacaaccggaagaactcagatatcatattctccggtttaaggatacggtctaatatgaaatcagattgttccgaaagatatatgaacattgctgcctccttatt

SEQ ID NO: 61749 - DNA, 345 bp, Glycine max
  Clone ID: PAT_MRT3847_26774C.1
tgcataatgaacaacaactctattctagatttaaagaagcttatgctgtcattttgtatcgcagaaatacagactcggtctcagaaaacctactcagcagcctagcatggttgctgcgttgggtagtagtgatccttacctgcagatggattcagtagaaggctttcgcactttgtcgggatcagtaggaatgttaagcaccacactaccatcatatgcatctggtggagtgttttgtaggctgaacccaccatctggcttgagaggagttaactctgcactttttcagcctgttctgtctcaaaacaatagcatgtctgcaaaagcatttggaaacatgcaact

SEQ ID NO: 61750 - DNA, 217 bp, Glycine max
  Clone ID: PAT_MRT3847_26775C.1
cccacgcgtccggcagaatgcttttcttgtttcacaggctgcagattggagatgctggactccacttataaaatcacaggcttttgatcatgtaggtgtttgccggctaaagtatgactgccgagagtgacgctccggtgattatggtgattgtatgcggcactacagtgaacaatacgtatgactaaggtgatcgtgtactattggatgtgccttc

SEQ ID NO: 61751 - DNA, 649 bp, Glycine max
  Clone ID: PAT_MRT3847_26776C.1
gtgaggctgcgtttgggtattgtgatctgaagaagctagaatccgaggcttcgtcgtttcgtgatgatcctcggcagccatgtggtccagccctcaagaagatgcaggctctctttgaaaaattagagcatggggttttcaatatctcgagaatgagagagtcagcaacaaatagatacaaagtcttccacatacctgtccaatggatgcttgataatggttttgttagccagatgaaactggcatctgtgaaattagccatgaagtacatgaagagagtctctggtgagcttgagacaagtggtggtggtggtcctgaagaagaggagctcattgtccaaggagttagatttgcatttcgagtacatcagtttgctggagggtttgatgtggagacaatgagagcattccaagaattgagagataaagcgaggtcatgcaatcttcaatgtcatagccagcaacagaaattcttttgtaggtctgcaacctgctagtcaatagtcatgatggagcaaacatagcttcagaaaaattagtagccccggttttgctgtatagatagtgacattttgcttgtgaataccaatagaatggccatcattttaccgggtgcaatcataattcatcattcattaaattatggctt

SEQ ID NO: 61752 - DNA, 469 bp, Glycine max
  Clone ID: PAT_MRT3847_26777C.1
tacgcagaagaacgatcagaatggggggtcgtgcgtgtggtgtgtaggacgtaatacacataagtcataagtcaattgagagatgaggacgtgtgttgacatgacacggtgttgtgatcgtgatcacaatcacaaaacccaataccctatatctatatcccataaaagcgttattatatctctcttcgatcaattcgaacctagcgaacatagattgtgctgtcttctattgccatgacgaccatccctgtttactcctacatcgctcctctccaaagaggattgctttttcgttttcgccgttttctccatcgattccgtcagccatgactgccgacacccacgccgctcctaatattaatcccaaaggtctcctctgcaaagtcgtcgtcggtgcttccaccgggtctattgcttctacatatgtgtttcctcttaatttcatcataactaggtttcatgttcactg

SEQ ID NO: 61753 - DNA, 474 bp, Glycine max
  Clone ID: PAT_MRT3847_26778C.1
atgtctatcaaatatcatgcatttttgtttttggccgaggtcgtgcagcaatattgggatcatttaggagcgagcggtactgacacaaaggaactatgctttgaaattgcagatatctggtctggttcagcgttttctcaaatgatcaaaaggcacttcggtgtttctgaacttgagcatctgagtgtgtctgaccttatggaactagagaaactgactcatgctgctctttcgcgaatcagatcagcaaagattgaggcactagaaaaaactaatgacgtcaataacgtggtgacacggtctattgactgtgatcaaacagatggggtctctaatggagctgaaagccactactctgggtctaacttgcacactcaacccttgaatttccaaggaaccatgccatggtctagctacttgccttttattatttctattttggttgaaacatggagcatcttgaagataatgtag

SEQ ID NO: 61754 - DNA, 346 bp, Glycine max
  Clone ID: PAT_MRT3847_26779C.1
ggttgcgtaacaaaacaggaccttgcaaatataaattttaagaacaaaggccttttgaacccaatttttaggggcccaaagcaaaaaactatttgacggtttttaatggattccagaggatggtagtctcggcgatcaggggggggactccatatggatccatattaaaagccggccttctgtcctaaaagaaacctttgccatttttctttggggcatttccaactttaatggagcttccacggttggccacacccaaaaaaaaggggttgatgcccgccatttaatgctttccagggagacgtctctcgttgccttatccatatgctggaatgggccccttggg

SEQ ID NO: 61755 - DNA, 669 bp, Glycine max
  Clone ID: PAT_MRT3847_2677C.1
gggtggaggaaattacacattgacttcagtcagtctttacgttttagctgtgtacctctgctctcacttccttccttccttccttcaattgttctaactcttagcagccatggcgagcaccaaagttcagagggttatgactcagcccattaacttgattttcaggtttcttcagagcaaagcacgcattcagatttggctatttgagcaaaaggatttgaggattgaaggcagaatcattggttttgatgaatacatgaatttggttcttgatgatgctgaagaagtgagcatcaagaagaagagcagaaagacattagggaggatccttcttaaaggagataacataactttaatgatgaacacggggaaatgatgaacactccaggacagttgtaaactatattcccatcaaacaagaaggcataattatctttccctttggtttgtattcatctaacaaactctcaaaccagaagctgatgattttatgattgaggaagtatagtaccaatattacaacatttccctcatttgttggctttcttcttttattgtttatttggtatcttattcaatcctttagagaagtttgttagatcgatttctttggatgtctttttgttgtatttgccaaggttttgcaaaaggcaaaatgtctattatgcc

SEQ ID NO: 61756 - DNA, 963 bp, Glycine max
  Clone ID: PAT_MRT3847_26780C.1
cgccaaggtgttggaacaacttagtggccaaaccccagtgttttccaaagcaaggtacactgttcgttcctttgggattagaagaaatccgaatagaaaaagaagctagctagggtttcggcgcgaagaagaatggggaagaagaaggtggagataaagcgaatcgagaacaaaagcactcggcagataacattctccaagaggcgcaatggattgatgaagaaagctcgcgagctatccattctctgcgatgcgaaggtggcgctgctcatcttctccagcaccggaaagctctacgagctctgcaacggtgacagtttggccgaggtcgtgcagcaatattgggatcatttaggagcgagcggtactgacacaaagtcgcaggaactatgctttgaaattgcagatatctggtctggttcagcgttttctcaaatgatcaaaaggcacttcggtgtttctgaacttgagcatctgagtgtgactgaccttatggaactagagaaactggttcatgctgctctttcgcgaatcagatcagcaaagatgcgattgatgatggaatctgtagagaatcttaagaaaaaggaacatatcttgagaaatgaaaatgagcttttggagaaacagattgaggcacagaaaaaagctgatgacgtcaataacgtggtgacacggtttattgactatgatcaaacagatcgggtgacgcataatctgctccctggtttgtaaatgcagctgaaagccaccactatggatataacttgcacgaattttccaattgtgtgcttaatacatgcatagggaactatgccatggtttagctacttgccttctgttatttctattctggttgaaacatggaccatctagagaagctcttaaacataatgttgccgtggggaagtttgcttcagctactagtctgtgcctaattaaattagtgacatattatatacc

SEQ ID NO: 61757 - DNA, 418 bp, Glycine max
  Clone ID: PAT_MRT3847_26781C.1
cccacgcgtacggccccatacagctatacccctaacacacaaccgtactgactaatgcagacgaggagacaaaccacctcgtccgcgtcaaacatctccttcacaagactctccttcagcaccatgcactctatcagcacatacttgaaaccagtgtacatccaacatagcacgagtgctcgaaagacatccgcatgatgactcgacaacacccactgaacatcacggcatcaccagcctaccaaccacaacttataagcatgcttgccaagctgacgaattcaaagaacgccttgcaaactgctgccttaactgcgtactctatgctctccactgcccttagttttccctctgatgcaaagatctcggctcttaatgagacatctcgaatactatcagctctgattgccaattattt

SEQ ID NO: 61758 - DNA, 1123 bp, Glycine max
  Clone ID: PAT_MRT3847_26782C.1
ggtgggacaaagagagaaaaccgaatagaacagagagagagagagagagagataatagtagaaggtcggagatagtaaagagagaaatccgaatagaaaaagaagctagctagggtttcggcgcgaagaagaatggggaagaagaaggtggagataaagcgaatcgagaacaaaagcactcggcagataacattctccaagaggcgcaatggattgatgaagaaagctcgcgagctatccattctctgcgatgcgaaggtggcgctgctcatcttctccagcaccggaaagctctacgagctctgcaacggtgacagtttggccgaggtcgtgcagcaatattgggatcatttaggagcgagcggtactgacacaaagtcgcaggaactatgctttgaaattgcagatatctggtctggttcagcgttttctcaaatgatcaaaaggcacttcggtgtttctgaacttgagcatctgagtgtgtctgaccttatggaactagagaaactgactcatgctgctctttcgcgaatcagatcagcaaagatgcgattgatgatggaatctgtagtgaatcttaagaaaaagattgaggcactagaaaaaactaatgacgtcaataacgtggtgacacggtctattgactgtgatcaaacagatggggtgacgcataatctgttcccaggtctctaatggagctgaaagccactactctgggtctaacttgcacactcaacccttgaatttccaagtgtgtgtttaatacatgcatagggaaccatgccatggtctagctacttgccttttattatttctattttggttgaaacatggagcatcttgaagataatgtagcctggggaactttgcttcagctactactttgtgcctaattaatttataataagtgacattagatgccatatggtattataagtctcataatgctaaaatttgggaacggttcacggtgaaagtaatggaaacaatcatgtggagggctccctggtttgtaaatgcagctgaaagccaccactatggatataacttgcacgaattttccaattgtgtgcttaatacatgcatagggaactatgccatggctgggctacttgccttctgt

SEQ ID NO: 61759 - DNA, 245 bp, Glycine max
  Clone ID: PAT_MRT3847_26783C.1
cgaaatgaaacatttaatttgcgtgcaatgcttttttgtaccattaatgattttccagcatatgggaacttgagcagttacagtgttaaaggccatcgtgcatgccccatctgtgaagaagacacaagttacatacaactgaaacatggaagaaaaacagtgtacactaggcatcgacgttttcttaaacctcatcatccttaccgacgattgaaaaaaacatttaatggaagtcaagagcatga

SEQ ID NO: 61760 - DNA, 246 bp, Glycine max
  Clone ID: PAT_MRT3847_26784C.1
ggaggtatgggaatctaaaacagcagatagtctaactctcatcacattctttctcacgttttctcaggctctagaggtcaggcaggtattgctcatcatcagtcttgcgaatcgcatgcttatacgacaatctcttacccatatcatcactcttgagcttagatgattgaatgcatggtgtacatctgcatgtgccaatttggcatactcgtcaatgtgaataaattaatcatagttctcatcttc

SEQ ID NO: 61761 - DNA, 404 bp, Glycine max
  Clone ID: PAT_MRT3847_26785C.1
aattaataatttttcaatcgcactttaattaacatgaacccggggttatggcttacgaacaattatgggcgaccaaataattattctatggcggaacgcatacacaaaataccggcccgatttcaaacacccaaaaacactgaaaaccctggggaaacccccaaataaaagatttggcaaaaactcccattttgcacactcgcgctatatcaaaaaggtcccaaccataattgattttcccaacttccgacacctaaacggataatggaccacccccctgaacatagcgtaactccactctggaggacgggatgcccccattaattaccatatttttcacacttgcctaagccctatgtttatcaatgtggcacacatgttttctatagacccgaaaggcttac

SEQ ID NO: 61762 - DNA, 226 bp, Glycine max
  Clone ID: PAT_MRT3847_26786C.1
ggctgagcaaaccgataaggctctcttgccacaaccaaccgcgttcgtcatctcaaaaaaaactgggacgggaatgagacccggaaagggtgggaaccgcttttggaaatccattgggcttggatttaagactcccagggaagcctttcgaaggaaccctaccatgtttattaaatgcccctttcattgtcaaagttatccagtccgcgccctgatcattgcctct

SEQ ID NO: 61763 - DNA, 1325 bp, Glycine max
  Clone ID: PAT_MRT3847_26787C.1
caggaactggtatttattatcaaagtcatattcgatgtcaacaagatgccacaactacaaaaaaaattgcgcacattgcaatctcaatgcaaacagtcaaatggaaccccaatcattaaaaaattaattcaaattaccccaaaaaagcgactgaattttttaaacatctttatacatccagccaacaaattaaaatggttaacaagaaaaaatacaaattcagaggtctggtattgatgtttaaaaaaggcaactgcttaagcatttctatcaattcgaacatcaatctctcggccactcagcttcatgccattcatcatccggcaggctctctcagccacctctggagactcaaacttaaccacaccgcaccccttggactttccgttctccatcttgatgtcggcgtacagcacgtggccacattcattgaacttgtcctttagcatcttccatgtaaaatcaaatgggagatttctcacaaatatctggcaggccttcctggctactccaggtgcatggcctccagctccgccaaaggaacctgcgaagcttcctccaaagttgccccgctccatctcaatggctcggtcaaagctagcacctccggctccacccatggccaggcccattcgctcaataccagcgcccaatgctgggcccatggcagggcccatacgttccaggctgttggcgcccattcgctccaggcccatgcgctcaagactgttggctcccatacgctccaggcccatgcgctccaggttgttggcgcccatgcgctccaggccggtggccatccgatccatcacaggacccatgcgctccaggctggcccccatgcctgtgggcaccatccgatccatgcttaggcccatgcgttcaatggcaggacccatgcgctctacaccagagcccatgcgctcaatggtttggcccacacggtcaatgggtgcggccatgcgctccaggccgaagcccatgccggcacccatgcgctccacgccagaaccaatgcgctccatggtctggcccatgcgctcaatactggaggccatgtggtcaaggcctagtgggcccatgcgctcaatgctggagcccatgcgctcaactgagcccatgcggtccatgaccaggcccatgcgctcaatctcagagcccactcgatccatgccatggcctaagcctgcgcccatgcgctccatgccagcaccgctaatgcggtcaatgccagggcccatcctctcgatcccagggacactgcctccagctccacctcctccctgttttgcaatgatctctcctctcttcagtgcattacttag

SEQ ID NO: 61764 - DNA, 457 bp, Glycine max
  Clone ID: PAT_MRT3847_26788C.1
ttcgaagctcatcaacaaaatggctgctactcgactctactcaaaaggccgaatccttggtcacaagcgaggaaagaggaactcgaggcccaaccagtctcttgttcagatcgagggtgtcgacaaccaggaggccgccaagcactacctcggaaagcgaattgcctacgtctacaaggccaagagggagatcaacggatcgagggttcgagttatctggggccgagttacgagaccacacggaaactctggtgtcgtcaagtcgaagttccgagtcaatcttcccgcccgagtgttcggtgcttcgtgccgaatcatgctctacccatccgccatctaaaccgactacccgcacagcgatatgatcgctaattctacctacctctaccacgttacgaccttgatgtaacaggttaccatgttccgcttttttccgaggcatgcagacatagcaaag

SEQ ID NO: 61765 - DNA, 169 bp, Glycine max
  Clone ID: PAT_MRT3847_26789C.1
cccctcagctgtgaaggatgtatgtgtgtagcccccacgggagcgccttttccttgacgagtatttttttttttgtctgtgtctggatgaaattgtatggcagggatatttgcacactactcaatgggatagaatcaatccagtgatacggttagagcctccatcagag

SEQ ID NO: 61766 - DNA, 577 bp, Glycine max
  Clone ID: PAT_MRT3847_2678C.1
ttcggaagatgtctgcaacagagtaagagggcaaaaccctagctttagtgtcttcccgcccatctcttgcaatctcatagattttagcagccatggcgagtaccaaagttcagagggttatgacccaacctattaacttgattttcaggtttcttcagagcaaagcgcgcatccagatttggctctttgagcaaaaggatttgaggattgaaggccgaatcattggttttgatgaatacatgaatttggttcttgatgatgctgaagaagtgaacgtcaagaagaaaagcagaaagacattagggaggatccttcttaaaggagacaacataaccttgatgatgaacacggggaaatgatgaacaacgctggcacagttgtaaacactgttcctatccaacaggagagaaaaaaatatctttccttttccagtttaattactgtttctcttgttgaaatcttgaatatgttgtgagagaaatattatcatgcatgaatctgtgaatttttaatacactagatgaattcttagttgagcagtttaacatattatattgccttcagtttgcctctatta

SEQ ID NO: 61767 - DNA, 280 bp, Glycine max
  Clone ID: PAT_MRT3847_26790C.1
ctcacatctgccctttcacttactaaataattttctcaaattcatcaatctgttctaatggggcttctatctttgtacacaaaaattcttcttactatattcctgatgacttgggtaatctctggcatgtgacacatactgcgttcatttcctactcaattacgatacactaggagattgtattataactgtatacctgtgataacactcatatttaaacatattatccttcacagactatccacatatctatacttacatttatgacacgacaattacc

SEQ ID NO: 61768 - DNA, 985 bp, Glycine max
  Clone ID: PAT_MRT3847_26791C.1
gttattgttttccaacagcttctccacctcccatggctgtacaagagttgcgcacaaccattcgagtgctacctccgcaagattgctatatttctactctgagaaacaatgtacgttcccgtgcttggggtgctgcaattggttgtagttataaagttgagcggtgctgcattgtaaagaaaggaggtggaactattgatcttgaaccttgccttacacatacctcaactgttgagcctacccttgcaccagttgctattgagcggacaattactactagggctgcagcttcgaatgcattgcggcagcaaagatttgtacgcgaagttacaatacagtacaacctctgcaatgaaccatggatcaaatatagtataagcattgttgctgacaagggtctaaaaaagccactctatacatctgctcgtttaaagaagggagaagttctttatctggagacacactcctgcagatatgagctctgttttactggagaaaagatggcgaaggctataccagcaactcagatgcatgacctagatacagagaagtctcaaaatcaccatcaccatcccacaaatggtgacaaagctgattctgataatgttatggttgatgtatttcgatggtctcgatgtaagaatcctctaccccagaaactgatgcgcacgattggaatccctctgcctcttgaacatgtggaggtgctagaggaaaacctggactgggaagatgtacagtggtcgcaaactggcgtttggattgcaggaaaggaatatacccttgctcgggtgcatttcttgtcaatgaattagttcattgtcctgttttgtttgaagggggggggggatagaaggggaacggtgctgggatgatgtaatgcatgtatacttttgagattaaactataaaaattatagtaccttttcatgtaactagaatatttagtttttaataaaaaaaatttaatgtttaatatttattta

SEQ ID NO: 61769 - DNA, 161 bp, Glycine max
  Clone ID: PAT_MRT3847_26792C.1
tgttaataataataattggattccaaaatcgtagcgtatcgttggtgcgattgaacgattcgatgggaagaggattattctagagcttgcccactggccgccgtctgtttttcaccccggaagattttcttgctggaacctctatccgttcttgaactttt

SEQ ID NO: 61770 - DNA, 283 bp, Glycine max
  Clone ID: PAT_MRT3847_26793C.1
aaaaacagtatcagaggaagtgaaggaatgtgcaactcagacggagattgcaggtcattgggttttctgctgggtcttccctttgcctttctctccctcctcctctcaatcgttggtctaattgtatggattgttggattgttgctgacatgcatatgcccctgctgcttgtgcctgaccgtaatagtggagcttgcgttagcattggtgaaggctccactgcatgtcatggagtggttcacttctcagatcccttgctgagttcctcttaattcttatcttc

SEQ ID NO: 61771 - DNA, 414 bp, Glycine max
  Clone ID: PAT_MRT3847_26794C.1
cggacgcgtgggctggaattgattgtggacaagaccatggaaatcaaaattaccaaggatcggatgaagggccttgcagtagactttttctctgcacgtacagattacagagtgctggcaacagagtgggcattggcagagctcatcaacaatcccaaggtgtagcaaaaggctcgcgaggaggtgtacagagtttcgggcacacatagactctttgacgaaattgacactcacaacattccttacattagaaccgttgtgaaggacacattcctaatgcacccagcaatacgagtggtcacaagaatgtgctctgaaaactgtgagattaaaggatgagtgatcccagagggagcatagattctattaaatgtctggcaggtaggaagggaccccaaatactgggacagacca

SEQ ID NO: 61772 - DNA, 403 bp, Glycine max
  unsure (1)..(403): unsure at all n locations
  Clone ID: PAT_MRT3847_26795C.1
aaatcaggncaacttaatcaagattttttaaaaccataatttcccccatatatttcatcctcaaggccttttgttcccaaaagccgggagggggggctttcccccaaaaacaaaaattttcctccaacttttaaaccttttttttttaaaaaaaattattttttcctttttacccccccaccccccacctttataccggggggggtttccccaaaagttttttttctccctccaacctttttaaaaggagatttttttaacaaacactctctttttttttttctgaattcccccccccccttggattttcccacaaataaccaaggggttcgcccctccccccaaaatcaaagcattttgattttctcttaacctcctggggggggcccccccttttttttaa

SEQ ID NO: 61773 - DNA, 266 bp, Glycine max
  Clone ID: PAT_MRT3847_26796C.1
cgaaggcctaagctaccaggagctcgctatctacagagtatccctctctttctctctctgtctgtgcaaaagctacgactctgtggtagactcctttagattaggcagtaagcttttatggggagtgtaaatggatgcttcgccgaggattagatcaacttgatcttacttgaaataatttagaaattttgacggactccgaaactaattctagagctctcccagaacaccatcagaatacgtgtgagattcagacccttgatgca

SEQ ID NO: 61774 - DNA, 336 bp, Glycine max
  Clone ID: PAT_MRT3847_26797C.1
gtctcctatcgcaagttccttataaggagagtttatattaaaaaatgttatttgatgatccatgcttgttactctgaagtggtaacactataccaactaatgtttgtcacatatcccttaatcatgtcagttactgaagttgaggcaaaaaaaaaaaaaaaaaaaaaaaaaaaaaaaaaaaaaaaaaaaaaaaaaaaaaaaaataaaaaaaaaaaaataaaaggaaaaaaaataataaaaataaaaaaaaaaaaaaaaaatttttaaatttgggggggccccccaataatattccccttcacccgggattttttttccggccgggccctttggggg

SEQ ID NO: 61775 - DNA, 508 bp, Glycine max
  Clone ID: PAT_MRT3847_26798C.1
gcgagaaactttgtatgggcatggttatttctcacttctcaccctcctttactttcttatgctaaatcctccttcccctatatctccaccctcaacccctttttctcattataacttttggtgcctagatggtgtgtgtgtgtgcgcgcgagagatctgagctcaattttcctctctcaagtcctggtcatgcttttccacagctttcttgaacttcttatgcatcttatatctctccacctccaggattttaagccctagaagctcaagaaagctgtgggagaatatggcaattcaggcttttaattgctttcatttggtaccatcacttgcaagatttcagagtacaaggtgaacacacacatcttcctcttcatcaattctctagtttcatccttatcttttcattcacggtaactctcactaccctctttcatcttataagttataccgggggtgtgatgttgatgagtgtaaattaaatatatgtgatctctttctctggaaa

SEQ ID NO: 61776 - DNA, 284 bp, Glycine max
  Clone ID: PAT_MRT3847_26799C.1
gcagtttcatttcaaagacttcaacagggcctttgggttcatgacaagagtgtgcctgcaggctgagaaactggaccaccatcctgaatggtttaacgtgtacaacaaggtccacatcacgctgagcacccatgagtgtgccggcctttcagaacgggacataaacctggccagcttcatcgaacaagtagcagtgtccatgacatagaccctgcccttcctctttgaattcttccgggggaaagggtgactgaactgggagtccagggagggagctgaggagc

SEQ ID NO: 61777 - DNA, 1105 bp, Glycine max
  Clone ID: PAT_MRT3847_2679C.1
gctgaggagaagacagaacagggtaagagggcaaaaccctagttttagtttcgtccctctgatggggtttaaccgtgtacctcttacttcttctacgaccatcatcttccttccttccttcaatcggttctaactcttagcagccatcgcgtgcttcaaagttcagagggttatgagtcaggccattatcttgattttgagatttctgcagagcaaagcacggattcagatttggctatttgagcaaaaggatttgaggattgaaggccgaaagagagggcaaaaccctagctttggagtcttccctcccatctcccacttcttgcaatctctgcagccatggcgagtaccaaagttcagagggttatgacccaacctattaacttgattttcaggtttcttcagagcaaagcgcgcattcagatttggctttttgagcagaaggatttgaggattgaaggccgaatcatcggttttgatgaatacatgaatttggttcttgatgatgctgaagaagtgaacgtcaagaagaaaagcagaaagacattagggaggatccttcttaaaggagacaacataaccttgatgatgaacacggggaaatgattaacactctggcacagttgtaaactccgttcctatccaacaagaaagaaaaattatctttccctttccagtttaattactgtttctcttgttaacatcttgaatatgttgtgggagaaatattatcatgtatgaattgtattcatctaacaaactctcaaaccggaagctgatgattttatgattaaggaagtatagtaccaatattacaacatttccctcatttgttagctttctccttttattatgtttattttgtatcttattcaatcctttatagaagtttgtttgatcaatttctttgggatgtctttttattgtatttgccaaggttttgcaagaggcaaatgtctattatgctggatatttaatattgcattttgataacattcacttctattaaaatggactgcttccaaatactgagtctgtgacaattactagaagatgacctcaaatatgccatagttctaatagcatttatggtgaggaagttgct

SEQ ID NO: 61778 - DNA, 292 bp, Glycine max
  unsure (1)..(292): unsure at all n locations
  Clone ID: PAT_MRT3847_267C.1
agataccgtactgatacaanacanattcacgttaacggcccacagcccggaattcggatctcggctcgaggctaaaacttaaattcatttctttttttctgttgcgaaagaactcttttggggatcagctatctgaaacaaaggagctgaaactcttcccaacatttcaagcctaactagccacatcaccaaatgaggctctagaaaggttgcgtgtagatagtaacgaatataacggaccggctttattacatactatatccatatctgactgtgaaagtttaacagagac

SEQ ID NO: 61779 - DNA, 2826 bp, Glycine max
  Clone ID: PAT_MRT3847_26800C.1
tcgcccacgcgtccggttattttatatttttgcttgttcacagctcaaatctcttgttctgcgccttcccaccgattatggctaacttgtcactcactcttgctatgatataaccgagtcagtcaagatgtgagaaaaaggattgtatatagactagtacaaagtttgaaagtgcaagggagattgaatataaaggtgattcagaacaagctttatgttctgccatggccttgtgtaggtgtctctcttttttttactggaaagaaagagaaaaaccagggtactgaggggtcttcaacaggggaacttaaagctcaacttgatgaagtacagcacccaaagattttgtcagagaattgtgatttgaagccagccacccttgacgttccagtacccagtggtgtgcagaagaattcaaggggcaatgtaagggttatgaatcttgagagtcctgtgaagactgaagtggaggaagcttatgaaggggaagatgagcatgaagaatcaccttccatcaagagggagctctctgattttgatctccaagtcctcgaagttgctgcaagcaaaggaggatgtgatccatcaagtgaagagataaaataccctagtttatacgaaaaccaagctaacattcaattggaagacaaagaccatgaatacagcaaaaagagttgtgacataattcaaagtggacatgtcagtgatcctgggattggcaaagctgaattttgtgcttctccaaagctcaagcgatcctgctctgacctggaaagaagggatgtactaagggagacttgtcatctctttccatcttcaaagtcacagtcttttgaggatttgcaggggttatcagcacatcagatggttaatctagaaagccccaggtctgtgatgactcaccgcagtgctgatagagtgatgttgaaaaggcattcctcaagtcaagttctcccttctagaagtaaaagactgtggtggaagttgttcctctggagccacaggaatatacatagatctcagttaagcaaatcgacacaaatacatcctgtgactgctgctttaaatagtcaatgtgggtactcctcagacacccttgaaccaaaacaagacaaggctttgagccatgtggaatcacattcaccaagctcatcgtttggggaatactttcagaaaagctgcgatgacagaaattttgataaccaaaggtggagcagatttcagaaagataattttggtttctggccacaaaatcaatgggtggctttctccacagaatcatcctcatatagcagagtggatgagtgggtgaaagatctcgaaattcagcagccacctcttgaggatgatttcaatgatgacaatattggaagcattgccttcccaccttctcctgatgatggtagatcaatggcaagaagcacagcccagttgattcaacatccagatgccaatctttcaaaggagatattgaatgccaatagtgtggtccagtccctgaacccagcctcaactgcagctcatatatcaagcattggcataaaagccatcccctctctttcacactttttcagtctccgctgtgtcaatttgtcgaacaatctcatagttcatatcacgcccggatttctcccaaagggtattcatacactgaatctgtcaagaaacaaaatcagcactattgaaggccttagagaattaacacggctgcgggtacttgacttaagttataatcgcatctcaagaattggacaaggattatcaaattgtaccctagtcaaagagctatatcttgctggaaacaagataagtgatgttgaggggctacataggttattgaagctaacagttctggacctgagctttaacaagatcgcaacaacaaaagcattaggccagctggtggctaactacaactcacttcaggccctgaatctgcttggaaatccaattcaaagcaacatcagtgatgatcagctgcgcaaagcagtttgtggtcttcttccaaagcttgtttacctgaacaagcaatctatcaagactcaaaggggacgagaaatactcactgatagtgttgccaaagctgcacttggtaacagcagccggacctcctacagaagagcactaaagaaaggtggcggccatggagggtcaagttccagtgtgcatagaagcagtgctagtgtttcccagaaaatcaggaacaggtcaaggagccaaactaaacatcattaggtgtctgtgaaaagctgcaattcatcagtatttctaagacttgataaaatggaggagtatttttcaaacttgtttttacccagtacttgcttcaacctgtaacccactctgtggaataagaaggctttgctgtgattgttgttgttttgtttcaacctgttagttatcatgggtgtttgattataccataaaggagactgctctagtcattgatagtctcttggtttaagacttgatgtaatgcagtcttcatcgtctccaatattagtgtgtggagcttgatgtcttcatctggctttctcaaatttaaacaattttgcatgcaaaacaataattggcctagcacgtactgttgctactgttgtcattatcatcaaaaccttgtgtgaaaagtgaatatgatggcatctgaacaattcatagaaggcatcatcaagtttaactcaaaagttgaaattggaaatgaaatataccgcaagataactcccagtacccgtgtgatatctatttgaaggtatcaaagaggaatgctgggaacttgtgtacaagctcccccactgatttatcctactatacactttttattgtttt

SEQ ID NO: 61780 - DNA, 488 bp, Glycine max
  Clone ID: PAT_MRT3847_26801C.1
ccaagacttgcaagactccacatgcactaggctctcttctctctgctctcatgcaacactgtgcacctccacagaggaggtttcctctggagagagggctttcccctccttggtggcccagtggggaggaagtttggtggggccaacagggccttctggcccaagaacacggcccacctccttacagaaagccccatgacttgaaaaaggctcggaaggtatccgtcctcgatgcagtcagcatacacatatatcctgattttgataaacccataagggtgcagacacacttaaccaccctgctagataagatgacagacgaggacagtgccacctggtccacagcatgatccaccagaggctggtattggactaaccgccaagtgcctcaaaatatgtgctgtaaaccaagaagaggaacatgatattgcacaaggcttgaagagaaagggcgcgctcggttttggtgatgctgaattggaccacga

SEQ ID NO: 61781 - DNA, 1163 bp, Glycine max
  Clone ID: PAT_MRT3847_26802C.1
gaacattcttataggtaagcttgtctgagagaaaaaaagttgtccttaatataactataacatcagctaatcctaataataatacaaactaaactgattggctctccttctcattgatttgtagttcatatcacgcccggatttctcccaaagggtattcatacactgaatctgtcaagaaacaaaatcagcactattgaaggccttagagaattaacacggctgcgggtacttgacttaagttataatcgcatctcaagaattggacaaggtcagtttctacattggttgatgcagtgatgctcaatgaaggttttcacttcttgaatttcctagacttgtgcagtattttctaaatacaattatctgccgtgttttatcaggattatcaaattgtaccctagtcaaagagctatatcttgctggaaacaagataagtgatgttgaggggctacataggttattgaagctaacagttctggacctgagctttaacaagatcgcaacaacaaaagcattaggccagctggtggctaactacaactcacttcaggccctgaatctgcttggaaatccaattcaaagcaacatcagtgatgaccagctgcgcaaagtagtttgtggtcttcttccaaagcttgtgtacctgaacaagcaatctatcaagcctcaaaggggacgagaaatactcactgatagtgttgccaaagctgcacttgggaacagcagccggaactcctacagaagagcactaaagaaaggtggtggccaaggagggtcaagttcctccagtgtgcatagaagcagtgctagtgtttcccagaaaagcaggaacaggtcaaggagccgaactaaacatcattagatgtctgtaaaaggtgcaattcatcagtatttataagacttgataaagtggaggagtatttttcaaacttgtttttacccaatatttgcttaaacctgtaacccaccctgtagaataaggtttggttatgtttgtttcaatttcaacctgttagttatcatgggtgtttgattatatgccataaaggagactgctctagtcaatgagattatgagagtctcttggtttaagacttgatgtaatgcagtcttcatcatctccaattttaatgtgtggaacttgacaatgctgaaaactt

SEQ ID NO: 61782 - DNA, 292 bp, Glycine max
  Clone ID: PAT_MRT3847_26803C.1
aaaaagcaaatgccttttcagtctcgggttccaatcaccgcctttcccccgaaccacattagaccaccttaccccctttgtccccaactcacccctagggggggctgaggccctttatccagctttaaacatataaaatggggggaattaggggtcatttaacccccaaaaaccataaattttttttttttaaatagctttagtggggaaaaactgggccttaatttggtgattaagggggccccccgggtaagggaagcaaaaatttttttgctaaccacaaacccccttt

SEQ ID NO: 61783 - DNA, 644 bp, Glycine max
  Clone ID: PAT_MRT3847_26804C.1
ccgtatatccatctttgaactcaggcacacttgtgcatattgctatcttgtcatgcactcgatgttgtttggtttgattcagcaaacttcaacaattgtacttcttggatttcacttcttcttttgatttaaccttcttctttgactatcttacttcaagcatactagtcctattgctgacatctattggtacttggatgttgctggccttaagagctccaaactttacatttggaatggcattgcattgttcttcgggtggttggttgcaaggattttcctgttcatgttccttttttaccacatagggacccgtttggatgaggtgaaggaagtctttctttttggtttttacaccttgatcatggtgccttctgtgttggcagttttgaacatattttggttctggaagattgcaagtggcatggttaaaactctcacaaaagcaaaacacagcaagtgagactgacaaatacactttgacatattatcttgattcttgaccaatgagatagccagtaattgttttatagtagagttacaatcaacattttttattttaacttgtaacctttactacagatggatattttaaatttgaatgttactcaattgaaatttttttagttgcaaattattatctc

SEQ ID NO: 61784 - DNA, 723 bp, Glycine max
  unsure (1)..(723): unsure at all n locations
  Clone ID: PAT_MRT3847_26805C.1
cttcctctctttaaatcctccaccagccaacaccctttttctcccctaactctctcacagatccaaaacccaaaaaagagaatagagtgagagaaagagaatcatggaattagaacaaaaccagagatgggaaggctatgtgaactggaggaacaagcctgctctcagtggctgcaatggtggcatgcttgctgcctcctttgttttagtggttgagatattggagaatctggcatttctagccaatgcaagcaatttggtgctgtatctgaggcagtacatgcacatgtccccttcaaaatctgccaacaatgtcacaaatttcatgggaacggccttcctccttgcccttcttggaggtttcttatctgatgcttttttcaccacttatcaaatctacctgataagtgcagtcattgaattcctgggattgattgttctcactgtgcaagctcgtgtgccatcactgaagccaccagcatgtgacgcatccactccatgcaatgaagttagtggtggaaaagcagcaatgctgtttgctgggctctatttggtggcacttggagttggaggaattaaggggtcattgccttcacatggtgctgagcaatttgatgacaacaccccatctggaaggaagaaaagatcaaccttcttcaactactntgtcttctgcttgncatttggtgcccttattgcagtcacatttgtggtgtgggttga

SEQ ID NO: 61785 - DNA, 482 bp, Glycine max
  Clone ID: PAT_MRT3847_26806C.1
ttctgtatctcagagcgtagatcagccaccctaaactcggaaactgccacagatctttgaaaaacatctgcaaaatcatttttaatgtaccactccctctccctccaagcaagattatccttctcaaactgtagtttctcatataaggcctgatactccaggacatctgatttcgacttttctatctgatctttaaccaattggaaagcatgggaagaagtaatacacttcaaattctttaaagtgttctgtagatcacacaactgtgtgaatattcgtattctttcctcatgaagacttttcagatccattaatcgagctgaaccttggtccaatagctccttcaaagtagattccatatcttgcaaatccttttgcttggctttgatcttatcactaggaaggtgtgtacttccaacatttaagactgggagaactgccccttttgcagcatctctctctgccttaagagttgcaagctt

SEQ ID NO: 61786 - DNA, 357 bp, Glycine max
  Clone ID: PAT_MRT3847_26807C.1
ggtaatttattgataatgttgaaagtggttaattcaatgtatctttatgtaatcatacctgaatgtgaaactcggaaggcacataaattttatcagaaatttcatagggtaggtagaatgactaaaaataggaaaaacagcaaaagagccaaaaagaacacagacaacagaaagaccaaatcatcaactcaagcagggatctcctatcctccaatcccttagcatgtctaattaagccctttaagatatcagtgaacctaaatacacaggctagtaaagcaagtccatacccaaaaagatatgcaagtaaaaactttagattgaaaatacctattgttctcatgcctaatgctggag

SEQ ID NO: 61787 - DNA, 591 bp, Glycine max
  Clone ID: PAT_MRT3847_26808C.1
cccacagcgtccgaaataagttattcagagtaaaaaaaaaaaaaaaaaaaaaaaaaaaaaaaaaaaaaaaaaaaaaaaaaaaaaaaaaaaaaaaaaaaaaaagagggctcaaaaaaaaaaaaataaaaattgcagaacaaaaaaagaaggaaaatgaggtatagaaaaagaaaaaaaaatgaaatacaggggcgcggggtttacaaaggaataacagtaaaaaccccgtgctaaaccaaattaattttcttacaaaacatccaaattcaatagctgggaaaagataaaaaaggcccgcaatggaaaaccctttcaaactactcaaacaacactgaatggaaaaacgcaccccccctgaaagagctcattaaacccggcaggtggggacataacaccctataaaacaggatacacctagtaaggcccctaatggcccccctcctttgggttactttacataactttcaagcaagagtaggacctttacccccccccgaaaaaagtttataaaaattcggagggacctcccattatgaaaaaagtccccccatatatgagggggaattaaaaaacccatcttatggattaccc

SEQ ID NO: 61788 - DNA, 196 bp, Glycine max
  unsure (1)..(196): unsure at all n locations
  Clone ID: PAT_MRT3847_26809C.1
caactnttgaaatacttgcagatccttgctgaacaaagttagcttaacatctaggggttgaaggaagatgttgcgctcacataaacattgatgttaaatccataatttgctagttgtttagcgcatcagctaaagcgttcgatctttttaacatatctcaaaccctggatggacttatccttgctaaaacgatcgc

SEQ ID NO: 61789 - DNA, 439 bp, Glycine max
  Clone ID: PAT_MRT3847_2680C.1
gtttccccgttgaactgaagaacggcgacaacctgatcaagcgcaactcccgcgagttcaccaccaccgttggcgacaacgtctccttcaagtccctgctcaagagcgccgagagcggcaacaccgtcctctccagcgtcgaccgtcagtgcggtttccccgaccgtcttgttctgcccatgggccacaaggccggagtctttttacgccctcttcgtcatggtcaccccctacggtgccgacgagcacgagcacgctgactactaccactccgagaaggtcaactaccagaccggcgtcaaggacatctactcctgcaacggactcatgaccgtcctcgacaaccgtcccctcggcttccccttcgaccgccagatcgagaacttcggccgcttctacatgcccaacatgtacttcaaggacgtcgtcatcttccaca

SEQ ID NO: 61790 - DNA, 295 bp, Glycine max
  Clone ID: PAT_MRT3847_26810C.1
gacctggtactttgaacaatgataaatcacggatcaggaccggaaaccactccttactcgcataaagattaaattgagatgcccgccaccttcttccacgatgcaatgttatttacactatatatcataccagcgactgacggtccctgtacagttcacagtccagcatgtctaacctgataggcagcaagcgcattgagctgagggcgccctacctagtgcttgaccactgctcacgcgtacaaccagaatacatctggattgactgctatggcggtcgactgggcaagagcat

SEQ ID NO: 61791 - DNA, 514 bp, Glycine max
  Clone ID: PAT_MRT3847_26811C.1
acttctttgatatcagtataatttttgttgtgtggagcaacagaaaataatgtgttttttcatatcaggtattgtgaggcctacttcgttttatacaacccaagcagcctccaagagggtggacgtaccaaaaggctatgctgcagtctatgttggagataagatgagacggttcacaattccagtatcatacttgaacgaaccttcatttcaagaattactcggtcaagcagaagaagaattcggattcgatcatccaatgggtggtctaacaataccatgcaaggaagaggagttcctaaaggttacctctcacttgaatgagctgtaattcatgctaacggagacggagatagattaaatgaggcaaatttgtacagatggcattttcttttttgtacagaatttaaaacctgttgcctgaatgagaatgcaacaaaagacattctttaggcacttttttctttttccaaatctcaattatatattgaaccgtaacattatcatatttaaa

SEQ ID NO: 61792 - DNA, 377 bp, Glycine max
  Clone ID: PAT_MRT3847_26812C.1
cacaaagggattaatccttgggcttaaaaaaaattgcttttttggggacctgccaaaatatggtcctttagaaacttggcagaagccacccttttttgcagggcggggcggttttgtttaataactggacacaccttaccatgtttttgccatggatgctcgggggggaattttgcatgttcccggaccttcactctatgcagtaattctgcaaccgcaacaagatctgatgaggtcccaaaagctttgacgacatgggcaaatgagtttcccccaaaaaaattgtgtgcaacacaaaacaagtgttcatcatcatcctcagaatcggtaccagggacacgagggacataaacagcttccgagccatacttgcctgg

SEQ ID NO: 61793 - DNA, 349 bp, Glycine max
  Clone ID: PAT_MRT3847_26813C.1
ggcacatacacacacccaactactacatccacattaggcacaactctagctacctgagcacaaatttgtagccatggcggggaagaggcacgaggcacaggattggaaaaatatgcggattattgatcttcggagacggcacaaccaagattatggaagccattggaagaagtcctagaagcccgttggacatgatgaactcggagaagcaatcaccgacgggtcctagaaagctatgacctcggaggagtaggtctaggaacagcggtggaactcgatataccaggaatatgcgcggaacacagccatgccggtgctccaatagacaccgagatcggcacgaaacatt

SEQ ID NO: 61794 - DNA, 309 bp, Glycine max
  Clone ID: PAT_MRT3847_26814C.1
aaaaaaaaaaaaaaaaaaaaaaaaaaaaaataaaaaaaaaaacaaaaaaaaaaaaaaagggggaaaaaaaaaaagaaaaaccagaaaaaaaaagggggcgggcgttttgggggatcaaggttatcgaccccgtgcttgcagggtgatattttttttttagggtcccctaattcaaatccatggccggtgttttaacaccatgtggactggaaaacccagggctttcccaaattaattcgcttgaaaacacatccctttttctcaggttgggaaataagaaaagggcccggcccctatggcctttccaaa

SEQ ID NO: 61795 - DNA, 592 bp, Glycine max
  Clone ID: PAT_MRT3847_26815C.1
cccgcgtccgttatgttcctaatggtagctagcttagccagcttttttttaagaaaagggttattagctttgctgcaccttgtgtgtgtgctgttgtgttgtgctgctcttgttttttagtgtggaagaatctgtaaagctcaggagggatagcgccatggatgatcttctcttcactcttgatcttctcttgcgctatccatcctgagtttcatggcttctatctacacacaatggatcttcagttttcaggagaaaccccccaaaagaaaaaaaaaaaaaataaaataaaattgttggtcttaatcttcatgcactactctacactactcaaaggttctttcagttttactacttcttttgtcgttctacttctttcatttttgtttgttatgtcaattttaatgactaacatcttttcttttctttttgttttcctaagtgaaagagagagcctaaagatgaagtaagtggaagaaaggtagaaaccaaaatgtgtcaaatcctcttgggttgtgtagagtgactctttatttacttcaaagttttctctttttaaagtgggtttaaaaggtggtgactagcccaaaaa

SEQ ID NO: 61796 - DNA, 384 bp, Glycine max
  Clone ID: PAT_MRT3847_26816C.1
gttcggattgcggcgacgtgagcggttcgctgcccgcgacgttgtgagaagtccactgaaccttatcatttagaggaagtatctaatggtgcacctgtggagaacaaacaacaagaagtgctcaaggtgacagtaacagaagtcttgggtggaggtaaattctatgtgcagcctgttggggatcaaaggatagcatccattcagcaacagctttcttttttgaaccttcaagaagctcctctgcttggagctttcaatcctaagaagggtgacacagtcctttgtctttttggtgctgataaatcttggtaccgggcaatggtagtcaatggacctcgaggacctgttgaatctccaaacgacatgtttgaagtattctatatt

SEQ ID NO: 61797 - DNA, 277 bp, Glycine max
  Clone ID: PAT_MRT3847_26817C.1
gttggatagagccactacatagcttacaagacaaactcttttttcatgtgcagtatcaaaatgatgtggtagcaactatggtagtggtagttggagctctaggaatttgagaggctgctagtgcacgatgtcgctacagctcggagtgattcatgaataatgttgtgttgtaagattgacaagaggaagttagctactgcgatggacaacgaaggtgcgtaccgcaccgactttgtgggatgatggaggcgcatattggtatgctattgagcatgat

SEQ ID NO: 61798 - DNA, 211 bp, Glycine max
  Clone ID: PAT_MRT3847_26818C.1
ggtggcaagagtcaatgtgtcgggggttgactgggaagataaaggaggaactgggatttaggatcttaccagggggaaaactgctcttcaacatgtgtgatggaaattcaccgatagatacactcttggtaggggacataaatggtgagtgctaacatgaagatatgcagctaacttgtagatctagcagcagctacatgccgagaggtct

SEQ ID NO: 61799 - DNA, 908 bp, Glycine max
  Clone ID: PAT_MRT3847_26819C.1
attcccacgcgtccgtcaacccccaaacgcccaaacgatgttagctgcaaaccccaccttaaaaatcgaagctttatgatcaccaccctagtgttgtgttggtgatgaatcctaggagcagcttgtgttcttctctgttcatgttcatcaccttgttggggcttcatgtgtacttcgcttcgtcgcaggtcgaagactacgtgagatgtctacggggcatcgaggacactgtctccgaccctcaggctcggctcgccacgtggaggttcgacaacacaacctccggtttcatctgcgacttcgagggcgtgtcatgctggggccgaagggagaaccgtgtcttaggtttggacctccgagatacgaagctttcgggtaataagatccctgaggctttgaagtactgtggaaagagcattcaaaggttggatcttgcttcagattcttttacttcgaagatcccacgtgagatatgcacttggatgccgtttttggtttcaatagatttgtcaagtaacaaactttctgggcatattccccctacgattgtgaactgttcttatttgaatgagttggtgttgtcaaataaccagctttctggctcaattccctctgagtttgggagtttaaacaggcttaagaagttttctgtggctaataataggcttagtgggacaattcctgagattttcaatgggtttgacagggagggttttgaggggaatagtaagaagaatgatattattattgttgctgctggggggtggctggtgtgggaagcggcatgggaaggagtaataaatttgtaaagttattcatcaaacaccttacattggtgattaatcaacactcaagttgttattagacaattagtgtttggtttaattatacttgaatatatttgagat

SEQ ID NO: 61800 - DNA, 512 bp, Glycine max
  Clone ID: PAT_MRT3847_2681C.1
aattcggctgcgagaagacgacagaagggtggttactcatgcaatggatgactataaatatgaattaacacaacatagatggaatacaaagatgtcagttaatttattccactaattgtgcttcaaatgagaattataattttaaatatgtactattaaatttacatttttttcattcattcacctagtttgtttttaatatttttttataagatgttaaattaattatcttcataaaaatgactataatagaataatgcatgagttatttatggataaagataactttatcactcatatgggtgggtctgatagtgataggtagtttcatttgtttatacaatcttctttgacttcatggaacaatatcatcaaaattaattttatagttatgttaaaaattaatcatattcaattatcttttttatagatctattatatttattaataaataagttctatactatggacatttaaggtgattttagttttttcataatataaattaataa

SEQ ID NO: 61801 - DNA, 428 bp, Glycine max
  Clone ID: PAT_MRT3847_26820C.1
gcggttaagaatgttccaaagagttaattgcaattggttgacatcagtgccctgctgatggcaaccaagtatgaagaaatctatccccctcaaatagggcttacactggtgaacaaatactggttatggataaaatcatactggccaagctggaatggactttgactatgccaacacctttggttttcctacttcattttatcaaggcatcagtcccagattaggagggattgtgctagattatttgtgagtttccactctacggttgggaatagagaggagaaggttgtgtacttaaagtattctgatcctgagaaaggagttgttgctatgcttccaccagctaaaaatcttctgcccgaaggttctaactctcaatagagttaatgaagcaaagggagaagcatggatagagtattatgcaggat

SEQ ID NO: 61802 - DNA, 220 bp, Glycine max
  Clone ID: PAT_MRT3847_26821C.1
gtcctcttgttgctgctcacgctcctgctcgtgctccctcggctgccgaggctgcaacctgtccccagtcttgccctactctgactcccccaccacctataccttgttcctgtgactgcctcctcttcaggctcattctcgtgctccttatgtgtgtgtgcccgctgctaactatggctgcacctgtctgcctaactgctcccgcatcccctgcacttgc

SEQ ID NO: 61803 - DNA, 882 bp, Glycine max
  Clone ID: PAT_MRT3847_26822C.1
aaagaacattaatcgatagagcaattgatccgtgaattgaaaggtaaggagatagtgcgtttgaatttttgaaagatagataacaacagcaacaccattatcactctaaaaaagcttcgttaccctgtggctgtgaaatccagaagattctgaaaacggattattactctttactctgatgataaacggagattgagtttttttttgttttttttttgttatgatctgtttggttgagggaaagagtgaagaagtggtttagtttggtcggtgagagtgaaaattaggtagtagcgtttgtttggtggttgttgtgttatgattttggtgcgaagaagctgagaagtgacggtgccatctctcctgcgacagttttttttattttctttgctttcaggaacgatgagtagtttccagaacggttcttcgccgcgttcgcggaacgcggcggagagtgacatagaggccggtacctccgctcgccgctctgatgacctcgacggcggcgatttctccgatccctttgacattgccaggaccaagaacgcttcggttgaacgccttaggcgctggagagcagcttatcttttcaaagcagctggtgtggggccagggagttttcccattaaacctcctccgatccccactgctggtgaatttccaattggacaagagcaacttgcttcaatttcaagggagcatgacactgctgctctgcaacaatatggaggggtcgtaggactatcaaatttggtgaaaaccaattcggagaagggtattcatggtgatgatgctgacttactaaaacgaaggaatgcatttggttccaacaattatcctcggaagaaaggaagaaactttctgatgtttatgtgggatgct

SEQ ID NO: 61804 - DNA, 394 bp, Glycine max
  Clone ID: PAT_MRT3847_26823C.1
gactatggtgagtcccacctgccgttcgtagattagaatatacaggcactcgatatctatcatgggccttagtgtaatttgcctatgcagagcttgagacttgattgaacattctggtaatttgaagatggatctctgattattcattcagctttagggtaatttgcaaacggaacactggcactagaatcagcatttaagtgatttggaatggagctcagtaccctggcatgaactactggaggagatcagtacacttggctcggatgggataatggttatcgtgaagcttaagggtaatcctatgtatgggttaggctagctagcattaggacccatacctgtctttgatttatggattgatccaaatgagacataggaatcatattccctt

SEQ ID NO: 61805 - DNA, 440 bp, Glycine max
  Clone ID: PAT_MRT3847_26824C.1
caagtacgacaaccaattgatgtagcctcgctcgagcgctacattgcggcaaatgtacctgagattcaggtcccgatagatgtcaagcagtttggttatggacagtcgaatccgacataccaattgaccgacaagaatggcaagaagtttgttatgaggaagaagcctccgggccagcttctctccaagactgctcacaaagtcgaccgagaataccgaatcatccatgcccttgagaagacagacgttccggtgccgaaggcctactgtctctgtcaagatgagagcgttatcggcaccgacttctacatcatggagttcctcgacggtcgcatcttcgaggacgcagcaatcccagatgtgactccagaggagcgaacaaagatgtggcactctgcaataaccacgctcgccaagttccatcgtgtaaacccgtcttc

SEQ ID NO: 61806 - DNA, 329 bp, Glycine max
  Clone ID: PAT_MRT3847_26825C.1
ggtacgcggatccagaatctaagtgtccgagcggatgcgcagctgctactaggccgccctcgcccttttttttttttttttttgaagccaaaaaagatgggtgggggtgacaaaacataagcatgctagtttcataacatatttcacgggttacaaagaactttatttacccttcacaatacacactatacacccagaaaaaaattgtcgaaaaaaaacaacgaagggtttaagtgcctccaaaaagcaaatggccgccttcctcaagacggaaaatttattgcacaaattcctcctgcctacgcaaagggagcattttttaaaggaaa

SEQ ID NO: 61807 - DNA, 313 bp, Glycine max
  Clone ID: PAT_MRT3847_26826C.1
tttttctttattttcattttttttttttttttttgtcttcttttgggatttggtttttatttttattttgcaaaacaggatactgaattcatctttctctcaaagtaatcacaagcctttgggacttttattcccgaaaccacccataactagtcctaagggagctgtttattacctagcctttcatagtaacccgctataaagggtgtcgaaaccaattactttccccacaggacccttagggttatacccagtacaaatcaggggggctctaacggggaaccaatttaccattttctttaaaacaccacga

SEQ ID NO: 61808 - DNA, 302 bp, Glycine max
  Clone ID: PAT_MRT3847_26827C.1
atgctattctcatgaatatgccaaatgctgctttttcaatgtggtgacattgcggtggagatctcgactacgacgtgtctaagctgactgctccctacattaaatgtacagtgtatttcttcatcgcgcttggaaagtgggctgaagacaccatcaattttgaggcttgtccccacaagctgctgctgcctggtgagatacatgaaaaagctcgatggcacttttcacaagaggaatttcttacagctcggacaactcaggtgcgtcctgcatacaactatgacgcctgatgggtgtgcata

SEQ ID NO: 61809 - DNA, 668 bp, Glycine max
  Clone ID: PAT_MRT3847_26828C.1
attcatttgagctgcaagcaactgatcctactgagatgggtcttgatgtgttcaaaagccgggccaactaaaatgattatagaaaatagtaggctttctggtgggagcagcactccttaagccttagttactcatggaaaatatcctagtttgtgggatggtcaacttgggtagttatggtcccaaactctcaattttccaagttgtggcataaattctattgcaccttttaacaagctttgcttgttccagtgtgttttattatgatttgtgatttatacgaccttgcgtttgagtgccaaaaaaaaaaaaaaaaaaaaaaaaaaaaaaaaaaaaaaaaaaaaaaaaaaaaaaaaaaaaaaaaaaaaaaaaaaaaaaaaaaaaaaaaaaaaaaaaaaaaaaaaaaaaaaaaaaaaaaggggggggccgttttaaagaatccaagtttacttccccgggctggcaaggtaaaagtttttttatagggcccccaaaattaaattcaggggccggggtttaaaaacggggggatgggaaaaaccctggggtaccccaattaaatcgcttggaaaaaaatccccttttccccagttggggaaaaacaaaaaaggcccccaccgatcgcctttccaaaaagttgcccaccctaaatggcaaagggaaccccc

SEQ ID NO: 61810 - DNA, 539 bp, Glycine max
  Clone ID: PAT_MRT3847_26829C.1
cccacgcgtccgctattttgctctgacattatctccctttaacaatctttcaggtatgtgcaaaaaaaaaaaaaaaaaaaaaaaaaaaaaaaaaaaaaaaaaaaaaaaaaaaaaaaaaaaaaaaaaaaaaaaaaaaaaaaaaaaaaaaaaaaaaaaaaaaaaaaaaaaaaaaaaaaaaaaaaaaaaaaaaaggggggggccgttttaagggatcaaagtttacttccccgggtttgcaaggtaaaagtttttttatagggcccccaaaattaaattaatggcccgggttttaaaaacttggggatgggaaaaacctgggggtacccaaattaaatcgcttggagaaaaatccccttttcccaagtgggggaaaaaccaaaaggccccgaaccgatcgcctttccaaaaatttgcccaccctaaatggcaaagggaaccccccttgtacgggcccataaagccgggggggggggggggttcccccaaggggaaccgttaaatttgcaaggcccttagccccggttcttttggtttttttc

SEQ ID NO: 61811 - DNA, 536 bp, Glycine max
  unsure (1)..(536): unsure at all n locations
  Clone ID: PAT_MRT3847_2682C.1
tgtagtagtagaagccatgnagggcctagagtcttcaggaagcaacagcttcactgtgagtagtagcagtggccaacatcactggggcaacagcatgtcatgttcttcatcatgggagccaaattctgctgactccaccgattgctggacttcttcaagattgagctccagagaggaggaggctcagaaaacacccttaggattgggatgtagtttgtcatctgaagccaagaagaagaagaagggtttgaacagcaaaaggagagagtgtgatcatgaacatagcggtggcattggacgtggcaggcttggttccaataaaggggtgtgtgtgtgatgatgatgatgatatcatgataccatgaattttcaccttttgtgatgtatgttagatgttcaatgaggtgttgacatttcttctgtttggagttgcgtacttgcaactgtttcttgtttcagcagggccaattcaagttgatctctctcatctacgtcatgttacttgtgctgtttatgaacaatttgtcattcttcct

SEQ ID NO: 61812 - DNA, 1915 bp, Glycine max
  Clone ID: PAT_MRT3847_26830C.1
ggtttcattacccaataatccccactttctataccattgccgtattgaccttttttgtattacaaccggccgaacacgacaacagcgccaatacaactttactttatacctaaacaccaaagtggaaacctacactacagttcaatcgaatctaccttgagctgtgctggatctcttcttcttcttcttctttcaccttaggctaccgagttaatggatccgagaggtgtactgatattagtggcggttctagttgcggaaattggctctgtcgccaacggaaatttagtgttcccggtggagcgtcggaaaaggagcctaagcgctgtcagagctcacgacgttcgccgtcgcggtcgaattctctccgccgtggatctcaacctcggcggcaatggtctccctaccgaaaccggtttgtattttacaaaacttgggcttggctctcctccgagggattattatgtgcaagttgatacaggaagtgacattctttgggtgaattgtgttgagtgctccagatgtcccaggaaaagtgatcttggtatagatttgactctttatgacccgaagggctccgaaacttcagatgtggtttcttgtgaccaagatttttgctctgccacgtttgacggtccaattcctggttgcaagtctgaaattccatgcccctacagcataacttacggagacggaagtgcaactactggatactatgtctaggattatcttacttataaccgtatcagtggctgtcttagtacttcgccagaaaatagcagcactaaaagtcagtacaactccattggtaccaagaatggcacactacaacgtggttttgaagagtattgaggttgatacagatattctacagcttccctcagatatatttgattctggaaatgcgaaggggacaataatagatagtggaacaaccttgacaattttcgtggtggtggaatatttgccattggggaagtggtggaaccaaaagtcagtacaactccattggtaccaagaatggcacactacaacgtggttttgaagagtattgaggttgatacagatattctacagcttccctcagatatatttgattctggaaatgggaaggggacaataatagatagtggaacaaccttggcttatcttcctgccatagtttatgatgaactgattccaaaggttatggcccggcagcctcgactgaaattatatcttgttgagcaacaatttcgttgttttcagtatactggaaatgttgatcgtggatttccagttgtcaagcttcattttgaagattctctatcactgacagtttatcctcatgactacctgttccagtttaaagatggtatctggtgtattggctggcagaaaagtgtggcacaaacaaagaatggaaaggacatgacccttcttggagatttggtgctatcaaacaaactagtgatatatgatcttgaaaatatggccattggatggactgactacaattgctcttccagcattaaagtgaaggatgaagcgactggaatagtacatacagtggttgcacacaatatttcttcagcttctaccttatttattggaagaatattgactttctttttgttgctaactgccatgctaaacaattaaattaacttggtcttgatataatagggatgacattcattcgattttgttgtaccataattcctgtgcagtgtggttgatatggtatagtcaatcattactcgtgtagatagaattgaaaaaggggcaaatatttttaagtttttttttcagtatttttttgtattattttttaaattgattaccaatgaatgtattgccttgactttttatgacgatgacgatggatattgctgttcattcaaaaggtagttaaataatacaatttacttgtagc

SEQ ID NO: 61813 - DNA, 684 bp, Glycine max
  Clone ID: PAT_MRT3847_26831C.1
agtatactttaaatgttgatcgtggatttccagttgtcaagcttcattttgaagattctctatcactgacagtttatcctcatgactacctgttccagtttaaagatggtatctggtgtattggctggcagaaaagtgtggcacaaacaaagaatggaaaggacatgacccttcttggagatttggtgctatcaaacaaactagtgatatatgatcttgaaaatatggccattggatggactgactacaattgctcttccagcattaaagtgaaggatgaagcgactggaatagtacatacagtgggtgcacacaatatttcttcagctactaccttatttatgggaagaatattgactttctttttgttgctaactaccatgctaaacaattaaattaacttggtcttgatataataagtatgtcattcattcaattttgttgtaccataattccttgaatgataaggtgtgcagtgtggttggtatggtatagtcaatcattactcgtgtagatagaattgagtcaattgacaaaggggcaaatatattttttttcagtatttttttgtattatttttcaaattgatttcctaatgaatgtattgccttgacattttatgacgaaaaagatgaatattgttgttcatttaaaagttagttaaatagtacaaatattacttgc

SEQ ID NO: 61814 - DNA, 491 bp, Glycine max
  Clone ID: PAT_MRT3847_26832C.1
tacggctgcgagaagacgacagaaggggatgatgacagcttaaaagagaagattgcagaaatgaacacagaattgctgaaacaaaaggcagaaatgctggaggagtattttggcattcatattgatgagcatggaaatgtctctagacttcctgtgatacttgaccagtacacacctgacatggatcatgtccctgaatttgctctttgtttgggcaatgatgttgattgggaagatgaaaagaattgcattcaagcagtttcagctgctttgggaaacttctatgctatgcatccactgatgttgcccaatccgtctggtgaaggtttgcttttttacaagaagagaaaaatgatggatggttatgctgaagagaatacctgtgataatactgggagtgacgtgattgacaataaagttgagcatgaaatgttttctgaagctgagactgcatgggcccagcgtgaatggtcaatacaacatgtgctttt

SEQ ID NO: 61815 - DNA, 1306 bp, Glycine max
  Clone ID: PAT_MRT3847_26833C.1
ccacgcgtaaaatgctcgcgtccggggaattggttcagacttgagttcagttcggtttcacacactaaaacgcaattgttcaaagttgaagctgaaagtgtctgaaactggaagttgatatctataaagcgctcactctgtcttaggtggggttttaagtgttgtgttaataacagaacttcatcgtgacaatggttttgataagtggcaacaacaaaagtgtcttacaacaaacaaatgatgagagggccaaagcacaaggtgttacagtgcttcagaattcacatcagcatggaaacaagaacattgaaagtgggcgtacacagaatgtggtcaactctgggttgaccaaagcaatatcaacaatggatgaattcaagtgtggatttccatcagaaggcctatcgaccacatcaaataaatggtggggaaatagtgatcgtgatgatcgtgcaggcgccaacgcgaatggagccaagagtcatcaacctgaagagaaagtaggggcagaaacagacaagatggcacacgaaacgggaaaagctgaaaaaagtgaaattcctcatggttcatctttattgaaagctgtgaggaaaagtgcggtggaagaaggaagagaagcattgaaattaggagtttttcgaggctatggcgtaaacaagctaggcaaaagagagaaaacattgctccaccaaatattcggatcttcattgccaaggtcatggatggatccatgattagaaggttgctgatatggctaaatgagagaacaagaggaccaattagacaaaactttattagaatatctgatacaagattagttttctagcgaccatggattgagttttattgaaaatgaattgtttaacattatgttgaagattcaaatcaatattgtgcctggtaagttattaaagctgaaccttgaggactcttcttcctgttctgtaagcatggacagacagatgcagaaaactataagaaaggctgtaactggataaatattagagaaaattatgaatttggtccttcaaaattggtaccatagatcaactttgtgcttgacattatgaaaattaagttgatgctgttggtaaatgtgttgggtcaaggtgcaaactgctacttatgatttttggcatttgcttctgttattctgttaattctgttaaaaatctgtttggactggggttagttctcttccccctgtttctccccatatatggaaaaagctgataactagatgattcccacctttgtaattttttttgcaacttaatcaggatactgattttgggtttccccc

SEQ ID NO: 61816 - DNA, 486 bp, Glycine max
  Clone ID: PAT_MRT3847_26834C.1
cgggtgcatacagctgtggacgaacttttggctctttaatgagcccataagaagccgcggactactgttagctagaaggtcgctggacccgctgaaggactagcgatctttttgatcgacagcaggcgaggaacttctagtcacttaattaatggttaatggtacttatggagaccgtgaccttatcaacatatgcccttgcctgttatatcataccagtagatcaatataactgtccacacaccattttagtataaagcttgcttggccagccaaaccatcttccagacagtgcaagaaggattgttgagatacaacatgactgcgtattgtatgaacatgtgaatgagtatgctaaattacatcgcatgaccattcctgtaggatgtgatttactcatgggcaaagcgagcatattatgccgatatgatacaaacaaatgacatctttgatggcagtatcatccgctgtgctataagacctgat

SEQ ID NO: 61817 - DNA, 439 bp, Glycine max
  Clone ID: PAT_MRT3847_26835C.1
aaaaaaaacccacccttcacacctttttacgacaattaaaagagggggggaaattttcaaatagacagagcatactcaacaagaggggcatggctaatttccttttttgaattaacccaccgacccaccgaaagaaaaccccatttccaaatcatgccaaggattcccctttttcaaaaaatctggcagtagcctggggaacaaaaaaagctggcataaaagtattccccgcaatttcaaaatcttgaaaaattcccaagaaaatatcaaaaactgtaaactgtttgggattgtcaataaggaaacccaagggccatgaagtttgatttgcccactcaaaactccccatttcaaaaccttttttaggaccccttccctttattgggaaaatcaattcccaggaatgggggtccgattttgcccccttacctgcctcaaa

SEQ ID NO: 61818 - DNA, 169 bp, Glycine max
  Clone ID: PAT_MRT3847_26836C.1
tcaagacctaatcaaagtgtactttgttgttgcggtcaactggaatctcacgtgccgtgacctagggaagcatgttcacttatgcaaatggggagcgtgagcggttcgattccgcgcccagtttacgtttgaaaacaaggccaacatcatgtctacatcttgactttag

SEQ ID NO: 61819 - DNA, 179 bp, Glycine max
  unsure (1)..(179): unsure at all n locations
  Clone ID: PAT_MRT3847_26837C.1
ttctctagatttgaaacaaatttttattcatggtnngcactcacttcaaatcgcctagtttatctaactgagtaccaccgaccacaanccnnttttnttatacaattatccaaattaaactaatccatcttaatcccaccataatatttatttaacataaactaaatttttttttttat

SEQ ID NO: 61820 - DNA, 1762 bp, Glycine max
  Clone ID: PAT_MRT3847_26838C.1
gatcgatttccctttgtgcttagatggaaaggaaaacaaagtggccctactgcaaatcgtgatgtagttttctatcggaaggctctggattccctaaaaccatgtgatgtggagtggctaccataccgaaacatggacagcatggtaattccagaacatatcaaaagcactttaattcttgggaggtcaaagacaatgctgatttgctttgacaaggcagaaagacatcttccaaatcgatgcttaaggcaatatggcatgcttcaatcaattccggatgatgtggagcgttgggagaggaagagtagaggagttgacggtggggttgatttgtcagggaaaatggaatctgagcttaatgactggatggaccgtcaggtgagtattgttgatggggatgagggtgtagatgaaagtgagtacatggagtggtatttgagaatcactcgtaagttcattggaaggcctatttctctgtcgtccgagtttcagagaacgaaaataaacaaatgtttgcagaatgctggtctgagggatattgcacacatagcggataccttttcaacaaaagggctagatccacaacaaattgaatcaatatcaaggataagatatattgcgcatgaatgtttgagagaccaatttggtggtccggtcatggcgtcagggagcacccaagttgaactagggaaaagggtcagaggtaaggagagggttagaagaaaaggaggaacaggtaaacgactgcgaaaggatggtgtggttcaatataatgccgttagtgaggatgaacaagcccagtactatggcactgctattgaggttggccaattacatctaagtcatattgaaagagagctgagtcatgcacaattatgtactgtagacaatgaagtcagtgttgtccagttgattcatgcaaatgctgatggtgagaatatgcagctctgtgatccacacattgaggttgatgaatcagatctaggctatgcagcaggtgaagaaaataatgaggacccagatgatgtggctgctgaatttagccatgaagaactaaagcacagagctggtgaagaaataaagcaagagcttaaccatttgactggagaggaaaacattgaggaactgaatgcagccaatgagattcattttgtgcaaccttcagagctttgtgatgttagtcacaactttgtgatgttagtcccgacgattcaacgcttgcagatgctgctgctgaggtcaatcactcgcaacttggtgactcaagtgtgatcaatccacaacaaagcagtccaactgacaatcttgttaattctcagctttctcacattaaccctgaaagtgaacttccttctgctaaaggagcaatggaagtgtctcaacattcttctattgaaactcgcgaggatatttcacagaatggtgattgtactgttgctgtatagggtggataccttacaatattgtagagaagcaaaattttttaggctgactcaatttaaaggtgtgacccttgtataattatttatattcattttttgatgcatagcttgcagctttttctatgcttgtgaattaaggtgcatgacatgcaacttaatcgctcaggcatccccaatacaatacaagaaatgggtgattatgcagtatcacattccctggttcctctggaaatgggtgtaaatgggagttcaaagtcgctaatactctttttgagtttctatagtgaagggcagaataagagttatcaaggttgtcttcc

SEQ ID NO: 61821 - DNA, 189 bp, Glycine max
  Clone ID: PAT_MRT3847_26839C.1
ggttgggccaccaaccatggctgtaattgcctcgatctcaggacacttcaaggcaattacagccatggttgggccagcaacatatctgtaattgccttcaagtgtcctggcatcgatgtgatcgttgaggacattgcgacatcccgactcagcgcgtgttagactcatcaactcacgatatgtgcacct

SEQ ID NO: 61822 - DNA, 445 bp, Glycine max
  Clone ID: PAT_MRT3847_2683C.1
cgcccttgtcgtcctttttttatatgggcttctcatgctttcaacttcgcacatatacacgctaacaatgaccatttgaaaaccgcacatgttcgttcagaagacgaaagtagtagacctctaaacactagcgttatgttcagacactctaatggtgatgatctccttgaccatcattatctccatgaccagactcgggaccaacctgcatataagccttgtgaagagcagcagggtcctcacgagcctgtgagaactcaccctttttgacacggtttggcgcatgccattgcacgaaggccttctatggatacatgaggtcaaacttatgaacaatcctggagaacacttgatccacactagtggagctcgaagtgatgcccacattcgatggcacttggcatggttggcttcaggggcaactgtttggggctgttagattata

SEQ ID NO: 61823 - DNA, 494 bp, Glycine max
  Clone ID: PAT_MRT3847_26840C.1
acgaaagtgctctcagtggtttgtttgaagaagctgactagcaaaatctgggactgcgaattgacgactttttttaattcggaccagcacctaatctgatgtgcaagacgtataaacttcgctaagacattaaaccattgatcatcccaaaaatactacacatgccgtgacgacgtgatgtccaatgaaccttttgggatgttgaaatagaatcacatgctctctgaaaaggagctgaaactaacacttgccctggcgtgaatttagaggcttggaacacatgtaatcaaaatatggggacagatccaaccgtgcaacaaaaactgtcttgctccttaaggtgggcggggactcctgataaacctaataaggggcctgtgaactcagcctttttggcaagaaatggcctccacggaaacaagcaccagtaaatttctgctccacggaaatcgccatacatctgaaaagggcctcttccaaaaaatggcgacaaa

SEQ ID NO: 61824 - DNA, 434 bp, Glycine max
  Clone ID: PAT_MRT3847_26841C.1
tccccctctccattcaattttctttctcttgctatctgaaaataaataaatgattattgtgctattcataaattgactgcagtttaatattattcttatatagtgccggatattgttgcgggttttcaaaaattaggttattgttttcatgcataaactcactttctgatatacataattctgttgagtgagccttttgaaattctacactcgctcttgcttaccatggattgtgcgcagaactagatacaaaataatttggtatttgttcccatgagttttaccccctcaacaatttgtactgtagaacatcatttgtactttttggcgtgtattaccaattacaaaaaagaagatcgccttcaatcaactggttaaatttggtttccatttcaccttcttccacttatgattttggtgatatgtttggtttc

SEQ ID NO: 61825 - DNA, 272 bp, Glycine max
  Clone ID: PAT_MRT3847_26842C.1
ggctcgagagaaccctgatcacaccagacattcggaccgttccagccgttcatgtcaatcattgggcacagagccgtctgtgctctccaagagctgattggtatggacgtacgatgacagaacacctcgttcagccgaaaacgaggcactggacgggttttctacccaagaaggcagcaaggctgccgttcagaacctgagcgatctcgccccaggcaaagcatgggaagaggcgaccgatagctaagcccagactgctaaggccgattggg

SEQ ID NO: 61826 - DNA, 187 bp, Glycine max
  Clone ID: PAT_MRT3847_26843C.1
aaaaacccggggcagggattttttcgagcaaacaacacaatacaacttaatgaaagaacggaaaaaattacataacccattgtggttaaatataacttttcgttgttcagttttatacatttaactcgatataaatggttcgcacaccaactggagccgaattcacagcttaggtaacaaagcatgc

SEQ ID NO: 61827 - DNA, 223 bp, Glycine max
  Clone ID: PAT_MRT3847_26844C.1
tcgtccgtgtcaaggcatggtcatgaattacgattgggagagaaaatcctatggtgcccaccagggagaatagcttgctatcacaagagattctctataagccaagtttatacaccatctaagcaccaagcatgatggaacatatacgctcctttggatattagaaagaactttctactatcattaaacttagatggtcatacctgaggaccaaatagtgtga

SEQ ID NO: 61828 - DNA, 916 bp, Glycine max
  unsure (1)..(916): unsure at all n locations
  Clone ID: PAT_MRT3847_26845C.1
ttcggcacgngaaaaaanatcacctcnnataangtnnatgnctgctatattgaanctcnnatgnccgtgcgnnccnnattgatggnctgntnnnntnngngatngcccaaaatctnntnatcgccaatgagaatccatgcagtcttctgcnttangtgcctcntcttccncntacnganctatctcatcgtcacacagcccccnnacngtncggtcgtgccctgctggaatcatcnntagccancacctccgactgcantgtcaatcnnnatgcccaataatgtcttaangnaatcntaagaganatnncnncaaggaagtgntccgangcatnnncctcgantgtttgtgctgaaaactnactatcaatgccctactgatgnnnaggcctggnaaanttnaccacnnanccnnggaggaattncacaccttncatttggtgggntgggggaagtaccncggtccgntaaactnaanataagacaatnttataactgntgtcanagctgnngtntnaggancnttaatnactacctgtactgnttccctgtncttcagattcntnatncgtatnttacactccntgtagctgaatgngntanttcacanntntnctttgangttcttnaaggggatggnnanctncccnnagttgcacaacctantggatcnttgaanaangtcgctnnanctcggaccagggggngcacganacngggnggcccaaacntaatcccttcaantcctggacaaatctcctcngatttnactgggaaatccctgccntgantcctgtnctcctggtataacccccnggcnaancnggcttttnccnaagaggccnnccnatnnnctcccccaaggacccccaannntgttaaagcnaatgnnaantnaaattcgnggggggccgntc

SEQ ID NO: 61829 - DNA, 304 bp, Glycine max
  Clone ID: PAT_MRT3847_26846C.1
gcgttgacacacacccagcgaggaccaaaagagaagaaatagatattacccttaaaaaacaacaccactccacttcttacagattctaaattcctaggcggaaaataaaaaaatcatcctgtctagacatccctaacgagggaccctttggatgagagaggctcaccccccacacccctataataaacgggtgcacaaactgtgggggccttattataaatgcaagaggcttttacggcttacagcaaacacttgccacactttttgtgctaaacctagagcgaagtgtagccccaacctcccc

SEQ ID NO: 61830 - DNA, 366 bp, Glycine max
  Clone ID: PAT_MRT3847_26847C.1
aaaccaaaaaaccttgttctttttggaaaaaagtcaccccttcaaaggacccgggacatccggggggggggcttaaaaggggaagggggggagaggcccccgaaagggggccccccactcctaaaggggcaccaaaaaccggggcaaccctctgcctatatggaaccggccggcccccaaatgggggccaaatctaaccccccccactgaagccacaaacccaaaggctttggggagcaggaaaaaaagaaccttaacttgggcatccaaaaaaaaaaacccgtcctttttttttccctttgggaaaaagggcgggggaaaaaaaggcccccctccgggcgaaaaaaggggggggggggggaaaat

SEQ ID NO: 61831 - DNA, 298 bp, Glycine max
  Clone ID: PAT_MRT3847_26848C.1
gtgtaacggggtgaacaaaaaaaaaacaaaccctaaaacttatccaatttaaaactgaaaaaaacacaacaatttccaaaaaagttccaatagacaaaaaaaactttacataaaaagcatcaaaccaaagaatttacaattaacctgacttctaaaaattggccaatttaaagaaatccaaatcaaatggctgcctgtcacaacggattatttcaaaacacaaccccaaatgtgtcccccccactgtaagtcatatataaaaacccatcttcacccttgttttccccaaaaattgcaa

SEQ ID NO: 61832 - DNA, 494 bp, Glycine max
  Clone ID: PAT_MRT3847_26849C.1
ctgaatgcacggtgctgtggatgatgagatcaacaattttacagttatccctggctgatgtagcaggtgctgaaaacttgtaatctgacacactcttaaaatccatgttaagtacaacaacttgggtgttttgatgcaccatggttggacggttttaacttaagggatgcttctttggttgaattaaaatgtgtgctttcgagaatgaattaggggtttatgcaaaattgctctcttttgtgaattttatttcaattgatagctttctgcttacttggtattccaatcattgcagtccgagctttcttattgtgtgggggaacattatcctacatttcgaaacagtgcgtaaattgtcctatggcttttcttaaggttgaatcatgtattggctttctttccggtgctagctattttagtattgttgatatatgaattaacactgttatcgaaaatactggtcaacccgacagcattcctccttgcctttgaac

SEQ ID NO: 61833 - DNA, 399 bp, Glycine max
  Clone ID: PAT_MRT3847_2684C.1
aatacatgatcaggtatatagcactggaatagcacatcactgatgaaactagagtactcaaccaattataaaagcatggtattagtatctcaattgacagggcagaaatctaagaccctgataatgggcaactaattgttttttacaggcattaacaagcttagacattggagatgtcctgtccaggagggctagcgcctacaaggtacgttgatccgatttccgatccagtgcaattgtgggagcgagaatctggctcacccatacagccgctggagtatcattgatgacctgaagctgctacacgaaagatcatggatgtgtagggaactagaaagatggaatttacagggcttcaatgaaaggataatacgatcggaagggctgcaatgacttaag

SEQ ID NO: 61834 - DNA, 292 bp, Glycine max
  Clone ID: PAT_MRT3847_26850C.1
gtaagctgcaattggctcgagattgttgaacaagggtttctctgactgcttcttcactttctctcgtttcaatcgaaaccaaaacaaaaacatgggcggataattcttcgtcggtggcaactggaaatgcaatgggaccactgaggaggttaagaagattgttactactttgaatgaggcttaagtccctggagaagaagtcgtataatttgttgagagccctccttttgtgttccttcctgttgtaaaaagtttgctgacccctgaattccatgttttgtcacaaaactgt

SEQ ID NO: 61835 - DNA, 309 bp, Glycine max
  unsure (1)..(309): unsure at all n locations
  Clone ID: PAT_MRT3847_26851C.1
attagngggagtagggcggccgctctgttaagcgagcgtctttcttcttccatcaccttaatcgccacgctgcttcttagcttgagaatggcacaagaccctttctattcacatgtgaatctggaaacgagggtcaccctgacaagcttttctaccaggtgtgtgatgcagngctcgatgcgtgccttgaacaggaccctgacagcaaggttgtctgtgagacatgcaccatgaccaacaaggtgatggactgtgtagagtcacaaccaaggccaacgtaaactatgagaagattgtgagggacacatg

SEQ ID NO: 61836 - DNA, 407 bp, Glycine max
  Clone ID: PAT_MRT3847_26852C.1
cagctccttggttcttacaaacactacttatgatccaacaacaatgcagttgctcaccctcatggccggcgtacgcactctcgctggcttctctgccgccggtccagctgaacctgttcacatacgagcaccttcagatctgcccatcgatgcaagatcagcccaagaaggagctggggacgccaacacctggatcaaagacaggttctgcgcttcaagcttcgcttcttgcggcaaagcaggaactaacggtgacccgggcaaccgatgcgctctggcatgcgaaaatattgctggaggtgttgctctgggccattgccagtgcagcaagggatggtaccctgacgagtgcatcactcttggaaatatgcgggtcgccacaagtgctgagtgaatgagatgcaact

SEQ ID NO: 61837 - DNA, 1561 bp, Glycine max
  Clone ID: PAT_MRT3847_26853C.1
cccacgcgtcaggaacgccgtaacccgtcatgggcgaaaaagaaaacccttcttgcagaatctgcaccaaccacaaccgcaaccgccatcaccccaaaaaacgttaagaaactaaccctaatccctctgatattcctcatctacttcgaggtcgcgggcgggccctacggcgaggagcccgcagtccaagccgcgggccccctcctcgccctcctgggcttcctcatcttccccttcatctggagcgtcccggaagccctaataaccgccgagctcaccaccgccctccccggcaacggcggcttcgtcctatgggcccaacgggccttcggcccattctgcggctccctcatgggcacttggaagttcctcagcggcgtcatcaacatcgcatcttttcccatcctctgcatcgaatacgtccagaaaatcttccccatcttcaactccggttggccccgccacgtggcggttctctcttcaaccctcgctctttcgttcctcaactacaccggtctcaccattgtcggctacgtcgccgttttactcgccgtcgtttccctctcacctttcatactaatgtccctcatcgcaatcccgaagataaaacctaataggtgggttagtttaggtcaaaagggtgtgaagaaagattggaacttgttcttcaacacgcttttctggaacttgaatttctgggacaacgtgagtactctagcaggggaagttgatgaaccgcataagacttttcctttggctctctttgttgctgtgattttcacttgcgtgtcttacttgataccattatttgctgtcactggagcggtctcggttgatcaaaccgaatgggaaaccggtttccacgcgcaggctgcggagatcatcgcggggaaatggttgaaaatatggattgaatttggcgcggttttgtccgcaattggacttttcgaggcacagttgagcagcagcgcataccagattctcggcatggcggagatcggaatattacctaagtttttcggagttcggtctaagtggttcgatacgccgtggctggggattttgatttcgaccatcataacgattggtgtgtcgtacatggacttcaccgacatcatttcctcggcgaatttcttgtacagtttggggatgttgttggagttcgcctcgtttctttggctgaggtggaaatctccctccattaagaggccttatcgtgttccgttgaagcttccacttttggtggtaatgtgtttggttccgtctgggtttctggttttgattatggttattgctacgaaaactgtttatttggtgagtggggttatgaccgtggctgggattgggttttttttgttcataaaactctgcaagacgaggaagtgggtggagtttgaacaagagaaagatgatgatggctttcaaaggtatgtgttgtgatttcaatcagagtttcagagtatctttctcgctgtataagtgtagtagcagtcttagattaagtccagtttgactctaaactattttaagaaataaaaattccctgtgtaattatttttaa

SEQ ID NO: 61838 - DNA, 759 bp, Glycine max
  Clone ID: PAT_MRT3847_26854C.1
ctcgagccgaatcggctcgagacggctgcgagaagacgacagaagggaccacacatggccacgcatgtcattaggacgccaccacagtttgacatattccttcctccgtttccaaagctgagatgatcctgctatgccaaaaacaatatgtttaagtgacaagccttcctcttcaacaatactgctaccattatgaagatgatcattcatggtctcaaattggagagctggtggaggttttactttcgcaaggcgatgagagatgcacttcttccaattgaaaaagtgggggctactttcccaatcctttaagtgatgaaagcaacaggtagttgcatcagagaagacaacggaaagccaagcagtggtagatataagaagtgctgctatggctacagcaaaggttccaatgcggcattggcgccactgacggcctccggatcgactgataggcaaaggacatagacgcgaattcgagccatagtcatagcaaaaggataaaacgatatagaggtgtttcctcagcaggaatagtgacacacacccgagccaaacttgtttccccctccaaaaagacagaaaaaacaggaaaatgttacaagtaagtgcatctttaggattcattagtttgagtggaaaattataactttttataagtttttccagaaaaagaaattgcaccccctcccaaaaacagataaaaggttgtctattagataagtattttattgcttgtttcctttgaagtattttcctcgg

SEQ ID NO: 61839 - DNA, 832 bp, Glycine max
  Clone ID: PAT_MRT3847_26855C.1
tctcgagccgaatcggctcgagacggcatgcgagaagtcgacagaaggggggaagtgtagcgaaatatgagatcagaaatcatgggtaaatcaaggtttcaagcactgttcctctaaccacacatggccacgcatgtcattaggacgccaccacaatttgacatactccttcctccgtttccaaagctgagatgatcctgctatgccaaaaacaatatgtttaagtgacaagccttcctgttcaacagtcctgctaccattatgaagatgagcattcatggtctcatattggagagctggtggaggtgttacttttgcaagacgatgagagatgcacttcttccaattgaaaaagtgggggctactttcccaatcctttaagtgatgaaagcaacaggtagttgcatcagagaagacaagggaaagccaagcagtggtagatataagaagtgctgctatggctacagcaaaggttccaatgcggcattggcgccactgacggcttctggatcgactgataggcaaaggacatagacgggaattcttgtcatagtcatgataggatgacacaatggtcttcaatgcttgagtcatcatcaccatcattccaatgtgcatgtctacctcccaccggcaggagagacacagtgaaatagcaaaaggataaaacgatatagaggtgtttcctcagcaggaatagtgacacacacccgagccaaacttgctacaccctgattgagaaactatggaatatgagggttcctattcctgttcgccaaatgctgaaagtgcagtgttggtgttgttgggtacttagaaagaactagtatgt

SEQ ID NO: 61840 - DNA, 468 bp, Glycine max
  Clone ID: PAT_MRT3847_26856C.1
acagttaaagctaccctctatagttgattgcgcttccctgcaacaacaaaaaaaaaccagggaggcaatgctccatgattacttaaatcgggtgccccttgccacgttcaaactacataagctctacaagaacccacagttcaaccactggaaagctcctggggatcaatctcaaccccaattgaagggctttgaccaccccaataatggaacactttggtgcacctcattcaaagactaactcaacaaattacacaacctgtttaacaaggtgtttgaacactctaaaacaccatcggattggttttatttttatgaacttaccctgttttattgaacatgtactgacttcggcactccattaggtcctggggtgatcttttgacttccaaaacccgcttgccaacccgttttatataccccgactccactgttttaccctttggttttgggaacgccaaagctact

SEQ ID NO: 61841 - DNA, 362 bp, Glycine max
  Clone ID: PAT_MRT3847_26857C.1
ggaagctatgagtttgaaacatccctatctatgtctttaattatatgttcctgaaacatcactctctaggctttaactttgaacctagctagctactatccctttgtttccttaaattagtttatctatatatatacacactcctgtgacaaacaatagtgtcttactgtcttatattgtccccttttactgctattccctctctgtctcctttctgtttttctgtcttacataacaaatagatacaaacattgaaattgttgagttttttttttttttgcattttattatattgtttctcatgatgttgagaacaactgaaaaggtgtgctacactcctgattttaatgagaaaccaatca

SEQ ID NO: 61842 - DNA, 834 bp, Glycine max
  unsure (1)..(834): unsure at all n locations
  Clone ID: PAT_MRT3847_26858C.1
tttgatattcgagagtcacaaattcgttaaattgaagagtaattctcaattattcgccccaacattcatgaacaaaggaaaatctgcacttttttttattggtaggaattgaagacagtgttagggggtttccaataactcaagcaccgctgctcaaccaactatgagcttctttaaagcttcaagtaagttcacacttctgtgtgatattccaaagacagctggtcccttattacttactataatcctcacctaagcatcacaaacagtggcaatgaatcttcatggaagctactcatcttcaatattggattgaaatggatcatcatttgtgttccaacagttaagcacatcactgagatatccatgatttgctatattgctagcactgtgactggttaccgtgaggtcccccaaatataggtctcatgtaggcatcatcgaacctcctccaatagcgatgtatggtgaacacaggactttctatcaacatggacaaacttgcctttgcgcggctgatgttggtcgctgctgactcctcaagggataggaaaggaagattcaagtcgtcaaatggtggacctgattctgaatggctgatgcttttccttgttgcactgtggggaagcagatatctaattagtggttttgtgagaaaaccaaacaccagtgtgctgaataggacaacaataatggnnnttggnnntnnttgttgcattaactggatcagtagtnnctccagnaaacgnnnactgnttgaaagccagnncaatggagnnagcnnccctcttnnnnnncnnnaccaatgatnntctgatgtttgaatgtgatact

SEQ ID NO: 61843 - DNA, 398 bp, Glycine max
  Clone ID: PAT_MRT3847_26859C.1
cgtcggccggtggcggagttggtagggtcgcctccgccgaccccaccaccgaccgcctcttcgccagctcgcccgtgccgccgcatttcctgcagcggccgggctccgaccacttcttgccacttgtgtcagtgccggcgttgcagcagcagcagcagcgccaccaccaccagcacttggcagtggcagcttccgcggcagctggccaccgccaatttggcttgccgccgaatgggcactttgagcttcccattttatcgaggatgggggctccggtgccgggttatgcggccgaggatgtggaatccggaaggaggaatgttcttactttgtttcctgctggatattaatgaatatgtttaatggttatattcaaagttttaaaaatttctgttgtg

SEQ ID NO: 61844 - DNA, 630 bp, Glycine max
  Clone ID: PAT_MRT3847_2685C.1
ccacgcgtccggttagaaagcagaggtggaaggcaatcatcaattgtgctatgtactactggagtggtattaagggtgctggtttccaaaggttctcattcgtcaaagacagggcgtgtgaaggatgagatttctggcatcactcacataattatggatgaaattcatgaaagggatcgatactcagacttcatgttggcaatcatcagagacatgctccctttatatcctcacctacgtctgatattaatgagtgctaccattgatgctgctagattttctcaatattttgggggctgcccaatcatccatgttccgggcttcacttatccggtcaaaactttctatttggaggatgttctttctattgtaaaatcccggcatgataatcatcttgatagtaccacatgtagtattccaaaaaacacttgtgagctaagtgaagaagagaagctttccattgatgaagctattaatttggcctggtctaatgatgagtgggacctgctgttagaattggtttcttcggaaggaaccccagaactatttaattaccaacattctttaactggtcttactccgttaatgggtgtttgctggaaaaggtagagggggtgatatgtgcatgct

SEQ ID NO: 61845 - DNA, 366 bp, Glycine max
  Clone ID: PAT_MRT3847_26860C.1
cccacgcgtccgtccacacgtgcgcccactcgttcgattaggaacttccgttcaaacagaggacccggttctggcattctgaaaggctttgtatggttgatcacttggatattcactactgtctgtttcgctctcttgaccgaccatcctggctccttcctcattatgctgtctgtcattcacttcgcagttcgcctcagcggggtgtttttcctccgggagatacttgacgacgcctccgccgacgccgacgccgatgaggtaaagtatttcggcgtattcaacgtcgttgctatggcaatggcgcttcttctgttggcgtatgggttcattcacagccccaggatgttggagtccagagtgttc

SEQ ID NO: 61846 - DNA, 727 bp, Glycine max
  Clone ID: PAT_MRT3847_26861C.1
gaatgacccttcacaggtttgggaacacttcctcttcttcgctgtggtatgagctcaactacattgagtccaagggaaggatgaagaagggtgatagggtgtggcagatagcgttcgggagtgggtttaaatgcaacagtgctgtgtggaagtgcaacagaagcattaagacaccggttgatgggccttgggctgattgcattgatcgttacccggtccatattcctgagatcgttaagctctaggatggagaattgttcaagaagataaagaaaattggttattactttggttccagttatgaaaaaaaaaaaatagatgagttcttttcataacccttctctttctgcttactgtagccgtaccacaaatctctcatttgtcagtcatattggttattttatcatatcatatcatcatatcccacttttcatatatatctttcttttacttttttctgtttattttccaaacaattacatgggcctcttgtgaattagcacagagatcgccgacggggaggggggggtctatgtgtttattcatgaatttgtgcaacatgtaagggaaacacagtttcaatttcaagtttgtatttgcttgcactattattggaaagcttgtaattaggacttgaaatattgtaagaagtgcttattttctttgttgttgttgttgtcttgtcagcgagatcatatcattaaattaaagtttcattagcatgacc

SEQ ID NO: 61847 - DNA, 922 bp, Glycine max
  Clone ID: PAT_MRT3847_26862C.1
cgacatatgtgtagcttataaaatctttagctaaatttgagcatcagagtcatggatgcttttcagttcaaagctattatttcagggattcttgcgcctgctagcatgcgccttgttttatcaatttaagaaaacactttgtggcaatacaaagaagatctgtagggcacctcaagcagcaggtgcatggcctatcattggccatttgcacctcttcaatgctcatcaactcacacacaaaacacttggcaaaatggctgagaaacatggtccaattttcacaataaagcttggttcatacaaagttctagtattgagtagctgggagatgccaaggagtggttctgtgtatgacaaagcattctaccagaccctcatgatttcaagcctcaaagcttaatgggctacaactatgtagatgtaaagggtcagaactatgagctcatcccttttggttctggaaggagagtatgccccggttcctcactggctctgcgtgtcgtgcacatggtcttggctagactcttacactctttcaatgttgcttctccttcaaatcaagctgtggacatgacagagagcattggactcacaaatttaaaagctactccacttgaagttctcctaactccacgtttagatacaaagctttatgagaactaaaattatatattatgctagtttttttcctcaaaattaggggaagcctcaaatcggggccttccatcatgtaataaatgttcaacggggttgcgctgctgttacactcatagttatcacatttaaatcagtcatcgacttgatcaaagtattgagtcattgggttaggaggggacccaatgagtcgttagttgactaacaaggttcaatgtaataataataataataataataaaattatacatataggatatatatataa

SEQ ID NO: 61848 - DNA, 425 bp, Glycine max
  Clone ID: PAT_MRT3847_26864C.1
gcacgaggcaactatatttataaaccctactctgataattaatgttttctgttccagtactttaattcactttgcaaaggagttacatgatttgatttaagggcctgcttgtttcctttcggttgtcgttttttttttatcttcttctaaactttgaaatgttaattaagctgcttttcgtttgtgtgaatttcttatgctttgacaaatgtcatttcatctacctctttgtgcctttgataaagaattatattaataattaatattgtaatactattttaatctaccccttctgttgtatcacattaatcatgctatgtttatttatttttttctgatttcaccttatctctttatttattgtataattttgtatgattaaatgctctttcttaaatggcaaaggtcaattcttttgtgtctca

SEQ ID NO: 61849 - DNA, 153 bp, Glycine max
  unsure (1)..(153): unsure at all n locations
  Clone ID: PAT_MRT3847_26865C.1
ctctctccatcatggctcacctgctccccttcctcgtcctcactctcctcgccgcaaccgcctccgnncaaaanatnaccaacgggacaactctttccnaccaactctctaaccaaaaccanaggccntgccaacggcaacgtcggctccgtc

SEQ ID NO: 61850 - DNA, 329 bp, Glycine max
  unsure (1)..(329): unsure at all n locations
  Clone ID: PAT_MRT3847_26866C.1
ttacgaattcgagctcggtacccggggatcctctagagtcgacctgcaggcttattcgatcctcctccccttctttcgcttgctattgattgagactcctgctaaagggtaaagggaaaaaagcgttagacctccctctccctgggatattactcttccagagaaactcgcagaaaagcaggaaatgaaactgttggtaatgcaactactgctacgaaggctgctcttattgatacaggtacanaagacttatactagcttctcccctaatcgatctctacccttcctctcatgggtcgagttagaacataccctctcctctattccta

SEQ ID NO: 61851 - DNA, 328 bp, Glycine max
  Clone ID: PAT_MRT3847_26867C.1
gtagctcatcaaaagggacaaaggaccttattgtatcaacttctaagcctccaaatcttcacattggcaggaaacaaaagaaggaacttcagcccagactttgcttctggaaaaggggagcctccagacacccctcgaaattcccgaattaacacaacttgcttgggtagatgacccaaaaacaagcacttacaaactcacccttttgtccaaaaactaaaaataattcactcacaaatcttgatacctgtgaatagctgcaacatttcaaactcttgactacggttcaaccattcgcggggtaggctgccattagtaagccctaaca

SEQ ID NO: 61852 - DNA, 2235 bp, Glycine max
  Clone ID: PAT_MRT3847_26868C.1
cacgcgtccgctttgtatcactgcgaattcacttaaaagcttgtcttcaatcgatgccagtcactttgtgatctgggtttttgtttctctaattcaaccgattgtctgattttcttttatttagaaattcatttgttttctttattcggtttaattgttatttcattacagatttctgaattcctcattttttaatatttctttttttctaatatttccaattctcattccaactctcttctcttatccacaacattatctttctgcattctgagtaagctggtttcatcatctattcaaatagcttccagcataatattttgaatttgactgctaaggaaagaccccatttttctgagttgtaaagtgacttatatttttttgagctgagaggaatatttggaatcaaggattgtgtgcttggttgaccagacttgctatctcagcaattgatgtgagatccacggggcgaaaaaagaagcaacttggccttatattattcatcagatgtctgcattctggagctgaggaaatgggttcttgcatctcaacaagcagtaggagtacttgtagcagcaagagcaatggagatatggtctctccatcttgcttagaaattggatgctgtggccaaaagagaacaaggagaacattctctgatcatgttatttctctccaccatttaccatccttacctagcagaattttctccaatggaaagagccgcggttcgtgcatatttacacagcagggccgcaagggtattaatcaggatgccatgattgtgtgggaagatttcatgtccgaagatactatcttttgtggtgtctttgatggccatggtccacatggtcatctagtggcgcgcaaagtgagggatgccttgccaattaagctaatttcatctttgcattctaatgaatctaagcgaaatgggtcaggtaaaacttgcttcaaagggaatgtaaaacctgatagtggagaatctgagaaggattgctctgcggaggataaactgaactcaacatggagggaagctttcatgaaggcatacaaggctatggacaaagagctcaggtctcatccgaatctggattgcttctgtagtgggagcactgctgtgactatagtgaagcagggttcaaatctgttcatgggctatatcggggattctcgagcaatcatgggatccaaggatagcaatgactccatggtggctattcggttgactgttgatttaaagcctgatttgccaagggaagcagaaagaataaacaagtgcagaggtagggtatttgctttgcaagatgagcctgaagtgcctagggtgtggttgccttttgatgatgcgccgggattagcaatggctagagcatttggtgatttctgcttgaaggagtatggtgtgatttctatacctgaattttctcaccggcagcttacagacagagatcacttcattgttcttgcctcagatgggttttggggtgtgggatgttttaagcaacgaggaggtggttgagatagtatcttcagcgccaacgcgatcatcagcggcaaggattctggtagattctgctgctagggagtggaaacacaaataccctacatcaaagatggatgactgtgctgtagtatgcttatttttggatgggaaaatggactcggaatctgattacgaggaacaaggcttttcttctgcaaccatccaaagcaaccattcaggtaaccccattgagtcagatgatggacaaaaatctgagccatcattgcaaaggaacttcactgtgagatcctcagaggaaaatgagacaaatggagcactatctgttgatgttgttgaagatgcaacatcatcagctgatgatcaaaactggtcaggtttggaaggggtcactcgtgtaaactcacttgtccaacttcctagattttctgaggaaaggccaaaatcttgaattcgtttgtttcatgaggactgtttattgtaatacatggcacaacactgaattcaagaaacaaaaattttctgcaaggggtattattttgatgcccttttgttggctaattacttgtagaaaactaagcatcttcaatggtgtaactggtggagtagctaacttatttttggtaaaccacaacaatctttaaaatgaattctaacaattgtcaaacgcagtttttaagatctattaagaacatgtttgtttaaacattgataagaaagtaattttgcca

SEQ ID NO: 61853 - DNA, 856 bp, Glycine max
  Clone ID: PAT_MRT3847_26869C.1
gtcttcgcaccttagaggacctgccaaaaggtgcatttgtgtgcgagtttgttggagaaattttatccatgaaagagttgcatgagaggaacttgaaatgcactgaaaatgggaaatatacatgcccagttttactggatgctaattgggattcaggatatgtgaaggacgaagaagctctatgcttagatgcagcttcctttggcaacactgccaggtttatcaatcacagatgttctgatgcaaacttgattgaaatcccagtcgaagttgaggatcctggtcattattactatcattttgcctttttcacttccagaaaaatatcagcacaggaagagctaacatgggactatggcattgactttgatgaccacgatcatcctgtcaagctgttccagtgcagatgtggcagtaaattctgcaggaacatgaagagatatagcagatctcttagatatgcgtcaattgcaggatgatagcctttctccgtgaaaccaattttgttgtctcaccgtgcggctggatgagatgtaatgaggtccagtctattacgagtggcgctttttgtctagtttagtggttgggagactcgttattttgtacagatctgcgaaaactatttataggcagactgacctagaaaggaaagagtgatcgtttattctgggatttattttgatatactttaggttcaaacttagataagaccaaaatggatgtttgcgaaagaaaaagaaacggttaggcggtagtgaaggtgaatattttagtttctaactgcagcgtttgtggggcttttaatatcaacgtactatgtgttggatttcatgatatgaaatactgtagttatttc

SEQ ID NO: 61854 - DNA, 369 bp, Glycine max
  Clone ID: PAT_MRT3847_2686C.1
aaccaataaatttaaaattttattagatattggagcttaatagacttcaagcagcaactcaaattaccattggcgtcaggttgcaaaccatttcattggtttccatcccttcaaatttattattggttcttaaaaattggaagtatccgttccttctggccaccccccccataaagggaatggggctccttcaaaaggtgcctcctgaactaacatccacccccttaatttttgcataaagcaaaaaattttttaaagcacgtttttttttttacaagcatccgaggatggcctacgtatttttttcaacacccgttagcaagggattagtcaaatataattgttggggccccttccaaaaattttttt

SEQ ID NO: 61855 - DNA, 214 bp, Glycine max
  Clone ID: PAT_MRT3847_26870C.1
attagacctcgagcggatgcacttaaggttacaatacaaagccctgtatgtgcatgtcggcggacacggtaatgatattgtctgagtcacacatgattaattctcatatgattttctttctctagaccattaatgaagtttgatgatcatcagctgctacctatcgtggacctcagtaacattgcgactatggctaacaacgtgatatagtggc

SEQ ID NO: 61856 - DNA, 1132 bp, Glycine max
  unsure (1)..(1132): unsure at all n locations
  Clone ID: PAT_MRT3847_26871C.1
gcttggactgtaacagaaactgagcatactttttcagaaacagaggattgcttggattttcatcaaccatcttctncaaataatcttcaacattgctttcttcaccaaaattagctgttgtaacatttgctgcatcaatcacttgtccactttcttctttggagggctttacaggttcagtcttttgtatttccatgtcactctgaatttcatgttttctatcttcattctcatcatcttcaatattccagagaaaactagtatatgctgcaagaacattgctgtcttgtggtgctgcttgaactgcacgttcaaaatagaccattgctctatccttgtcatgatggttctcccacaccagcttcgcatactgcatcaagatttcaccatcattaggatctgccacggtagcctgaagaaagtactcctgagctccttgaaggtctccattagattgtaaaagctgagcatactttttgagaaccaaagggtggcaggggtactcatcaaccatccgcttgtaatacccttcaagatcctcactttcttccaaactgggattaaatacatcatcgctgataaatttatcaaatcctacatcagcatcaaccccaagccctgctgccagatacatggggggactagctggctgaacatcttcctcctcaatactcaaattccgaatcccagttgaccaatcattattctcattctcattctctccttcctcaatcaaatccatcttgttactcccaaagctgaagtcaccactgcctgtagcttccaaactctgtccaaccaaaacagttctcttcaaaacttcttcaggggtgatgtcatcatctccatgaaggttgttgtatattgcaaatgatggggctgaatgcaaggttgttgactcaaattcatcctccatcactgaattggaagaactatccatggacatagctagcaacaagatctgccaatatctccaatttgctattagagttatcaaaattgagaaatgctaggaatgaaaaacagtgctaaaaaagaaaaggtcggcgttagatattgctagcgatgatatggtaaagagactatgttcatgagaaatagcgaaaacgagtatttctatactctaagtgat

SEQ ID NO: 61857 - DNA, 280 bp, Glycine max
  Clone ID: PAT_MRT3847_26872C.1
gaaaagaaggaggatctatttaagaaacagaaccaaacttacttacgcgcgtgcgggaggtactatgtcttgaaatttggaacatctagtaaattgggtaggcggagatacttataggacgggatgattactgaacttggcaacaaaacgtaccaatgcccgatatatagctttcttgacccagaatttttaaaagacaagaggagaggctggctcgccatttcaataatatgggcaaacaggattgtcagaggaactctctaccgtatggatcataaca

SEQ ID NO: 61858 - DNA, 203 bp, Glycine max
  Clone ID: PAT_MRT3847_26873C.1
gcaagtgcaaggcatagatgcactagttgtcccagacaaaaataagtgtcccatgatatcagatacgccaagatcagtgtcactcacttatactgagcgagccctcatataatcagtggccgcggccatctcaaatatatgggcagaaaatcagatcctgggatccaggaccattgtctgcacgtcattcacagacactgagg

SEQ ID NO: 61859 - DNA, 687 bp, Glycine max
  Clone ID: PAT_MRT3847_26874C.1
cctcaaaccaaaatgactcatttattaaacttgatgggtttataacaatcatataatgaatatagttcccaccatatacaggaaaaagcaactgaaaacaatatagaccaatatatcaagaacaaattttctgctaaagcgttgaagcaatctcaatcgggcaaatgaaactaaggggtttgaatcaaaactcattatcaatttaccttgtacataaaaaatcatataatcaaaacccaccctctgctaattattcaaaaaaaatttcactctagctaactatggcacacacacaacgtatgatacaagtctaatcttattcatgttccccaatcccagaatcgaaagttgagagtaatcagagtacccgtttcttttttaccttgagcttattaaggatttgttttccacaggaaatgcctagatgagacctccatatggattgtatgattgaaacaggcatacctgagccataaggatggacaagaggggcttcctaaggattcccaaaaggatttacagattgttgttggggagcccccctcatttgctgctggcggagaacatgaaacctcgttgttggtgggccaggaaacccctctaacccaaaagggggaccggcacctgtttttgaggaaaaaaacagaccgcgctttgcccgcttgcttcacttttcccccccggggg

SEQ ID NO: 61860 - DNA, 313 bp, Glycine max
  Clone ID: PAT_MRT3847_26875C.1
agggaaaaaactacttttttatttttcaagcaaaattcccaaattgtttgaaccaaccccggtgcaaaatcctttgggtaaaaaataccccggtgcgggggccaaataacagaagtccaacttttgcgggcaaaaccccaaacaaaacttgccaaaacttaaattttaagtaacattgttcatatgaaaaataaattcggcttagttcaaaagtaagttaaattgttcaaacaatttaaaggttgttttaaaactcgggggggggggttttttgtttctttaagcccttttttttggggatcggacccctggg

SEQ ID NO: 61861 - DNA, 375 bp, Glycine max
  Clone ID: PAT_MRT3847_26876C.1
gaagctagtttaacaaatccttgtgatcgtaaccaattcagaaaactacaacttatacattgtgttgacaacaacttggtgcaaattgacaggattctataatacatgaactgacatggacaatgcataaactacaatgaattaaagatgagatgatcctaacaatcgaagagtgagagaaattgtggagcaaagttggacagctgactaagcttatcttcgcatgcttgtgggacctttgaagtcatgaattagattgcactgctggaataataatcattgagccaacttactgaatgttatgccgtataccttacttctctaaagcacaagcattatggattttttaacattagctgttaaagctttaagaat

SEQ ID NO: 61862 - DNA, 281 bp, Glycine max
  Clone ID: PAT_MRT3847_26877C.1
aagcccccaattgggaggcctcctgtttccaaacctccagttgaaaaccccccattttataggcctccaggtgggaagccaccagggtccaagcccccagttaagaaacccccatggtacaagcccccattggaaaaaccacacgggtccaagcccccagttgagaaaccaccagtgtacaggcccccagttgaaaaacccccatttccaggcccccagttgaaaaacccccagtgtacaagcccccagttgaaaaaccaccagtgttcaagcccccagtt

SEQ ID NO: 61863 - DNA, 263 bp, Glycine max
  Clone ID: PAT_MRT3847_26878C.1
tacggctgcgagaggacgccagaaggggatacgctattgtactatcaattgcgaacttgtgaccatggctttcttcatcactacatcatagttagcactatagtaaaccttgggctttcattcatctatggctacccttattgctcccggccacgactctgcccaggaagttgctggagctctctgataggcggttgtaggatggggaactgatcagtgcactgccatagtagtttggggccagagagctgtgtatccgaggc

SEQ ID NO: 61864 - DNA, 402 bp, Glycine max
  Clone ID: PAT_MRT3847_26879C.1
attgcttttattgtattccccaactttgatgctccggcttgtgctgaacacagaaaactttaaccgaaaggctccttgaatcttgtagactaggtattaggacttaagggaatgtgagctctgccattgaaattgtatttaattggctaatatatttgtatccacagcaaagttgtgaccacctttgcaataatttaatatgaaagacacttgctagaagcatgattataaaaaaaaaaaaaaaaaaaaaaaaaaaaaaaaaaaaagaaaaaaaaaaaaaaaaaaaaaaaaaaaaaaacaaaaataaaaaaaaaaaaaaagggggaaagggcggcccaccgactttttaaccccgggaataaaatattaatcgggacccgggagggggcagggttccccttt

SEQ ID NO: 61865 - DNA, 278 bp, Glycine max
  unsure (1)..(278): unsure at all n locations
  Clone ID: PAT_MRT3847_2687C.1
tatanntaaagtatgaagtagatattatnttcttatgtttatnaataaatgttaatcantaatntccattagtttntattagtaaaggattgtaaattctgngatctgtncttatngtattactagatcaatcttatatnactaaatagntacttctagtnnatttgagtntcttaaanagagatttcaacccnaagaanatcnannnacntacactgcatccangttgntatngtagtngtagtatgactagcnacaatgaaatcntgaaccagaac

SEQ ID NO: 61866 - DNA, 1650 bp, Glycine max
  Clone ID: PAT_MRT3847_26880C.1
tcggtttcatttgcttaattggcctataaatggatttgatgatcaatagggaacaatagcaaatcagtgaagaggatatgagagaggagtcacttggactgattattggggtttccataggtgtggttattggactagttttggcaatttttgcgttcttctgccacaggtaccatcgaaagcgatcacagataggcaatagcagttctagaagggctgctaccatacctatcctcacaaatggtgctgattcttgtaccattctatcagactcaaccttaggtccagaatcaccgataaagtccccggatcaaatggcatgcccttctggcttgatgggtttaagaagagtagtaacatggtgtcagcatctggaatacctgaatattcatacaaggatttgcaaaaggcaacatataattttacaacactcatagggcaaggtgcatttggtcctgtatataaagctcagatgtctactggcgagactgtggcagtcaaagttcttgcaactaattctaagcaaggggagaaagaatttcagacagaggttatgttgttgggaaggttacatcatagaaatctggtcaatttggtcgggtattgtgcagaaaaaggacaacacatgcttgtatatgtctacatgagtaaagggagcttggcttcccacttgtatagtgaagagaatggagctcttggctgggatttgagggttcatatagctttagacgtagcaagaggcatagagtatcttcatgatggggcagttcctcccgtaatccatcgagatatcaaatcttctaacattctcttggaccagtccatgagagccagggttgctgattttggactctcaagagactcgtgagagatggtggataaacatgcagctattcggggtacctacctttggctatcttgaccccgagtatatatcttccggaacattcactaagaaagtgatgtatacagttttggggtgttgctctttgaaattatagctggcaggaatcctcagcagggtcttatggaatacgttgagcttgcagcaatgaacactgacggaaaagttgggtgggaggagatagttgattctcgcctccaaggaaactttgatttcaaggactgcagtaagatctctttctcccccttcaaaccatattgaggacaatggtagtggttgttacttttgggagatatatagtggcttaccatacaaaacaatttaaatttttggaagaaatctgttagggtcacattcactcagtatcctgagagtaccaggtaaagattatttattacacaataataattggtgtcttattgctttaaaagtaagttttaagtgattttttgtataaaatttaatggtcatgccacaaccattataaaatacctatctcaaatgacctatttgacatgaattttttaagttatttggtaaaatccttaaagttatcatagatgatggtttggcataagataatagtgtaaaactgtttacacggtaagtatagaatcaaatctctcttctttttattttttgctattataaaaaaaattcaataaatactttcaacttctgtttaattaatcatggacttgttaagacaacttagacacggttcttttcagtattttttttcaatt

SEQ ID NO: 61867 - DNA, 722 bp, Glycine max
  Clone ID: PAT_MRT3847_26881C.1
gggccccaaaaaaaaaaataagcttggcccccccggggttttaattttggatctctaaaaccgcccccccctttttttttttttttttttttttttttttttttttttttttttttttttttttttttttttttttttttttttttttttttttcttttttttttttggttttttttttttttttttctttttttttttttttttttgtttctcaaccttacttcattgtatttagttataaagacatttgctacagcttacaggggtcggtgctattgtcattattacattatctacaaaatcggatttgactatgatacactctgatgcatacatttttcttaaagaataccaatctttgccagattttgataccgatcccacaagatggctatgatgacctacctaaatactctactccaactcctttagaaaatcaacattatctacaaaaaccgacttccagccatctggatccaagcatgcagtaatttttgtgttgataccaggtaatgctccaggttcccgagtaatctttcctccagctagtttaattgcttctgcagttttgtacacattatctgtgcctattgcaatctgagcataagcatttcctttatcgtattaagtgactccataattgaaaggcaactccaaaacagtgcttttatcttctggaccataacccatcattgctatggggaacttgaattctggattg

SEQ ID NO: 61868 - DNA, 196 bp, Glycine max
  Clone ID: PAT_MRT3847_26882C.1
accaaatgttaagaatacctttttttgggactaggggggaagaccttcccgcaaactgaacaacaataagtatttacatatgtacaatgtatactaatttatcgggccaatgaacggggcaataaacagatgtaaattgaaatccatgtaatacagccttgcgacctctcggagctgagtaataatcccaacccca

SEQ ID NO: 61869 - DNA, 337 bp, Glycine max
  Clone ID: PAT_MRT3847_26883C.1
gtgttttttttttttttttttttttttttttttttttggccaaaaaaagaagaatatattttttaattctgctgctaccaagggccatcccataaaagttttaaatgaaaaaaggaaaccaaatgggtattttccaagcagtatcaagggccctattccaaggggggccgcaacaaactcaaaaattttacccaacatttggctgctgggggacccaaaatcccaggaaactaaagatattactttaaacggcccgccttgcccccctcatttttattcaaggccctttttgccaccccatagcctgcaaagttcatagcccctaaaggagcaatcc

SEQ ID NO: 61870 - DNA, 521 bp, Glycine max
  unsure (1)..(521): unsure at all n locations
  Clone ID: PAT_MRT3847_26884C.1
cacnaagcacancacaacaaaagggcaggggggaggggaaaccagngaaacgagagcccccccccagacaaggaaaaggaaaaacccgaaagccgcagccacacaataaaagagcagcggaggaagcaaaaagctccaaaaccaaaccagacaacactgacatcaccacggagtgggaatacaaaaccccacacaggtaaaagaaaagaaaagcggaggacaaactagaggcacacactgggagggagcagaccggcaggagaaagcaacaagccatccacaacggacccacagggcagaggccgagagccaagcaaccaaagaggcaccaaaaggcgaaacgagcccccaggcaacccaaaggagccagccccggggcaagagagaccccaaaaaaagggacccccgagccacaggagacaccccaaaccaacggcaaccccacccaacccgcacagaaaagagggggaacccgaaaccaagggaacgcaagggaccaagaacaaagacccggcccccca

SEQ ID NO: 61871 - DNA, 356 bp, Glycine max
  Clone ID: PAT_MRT3847_26885C.1
cgcacgcatccgtaagattcgacttcaggtcgtgttaatgccccttacattatctctgtttctgaaaaatctatcaccaaataagagcacgggttctttctatgaaacaacacaaaatctgactgggaaacataaactaattgcgttttttagcagagcagcccttgccatgtaccgaactaacgacaaagatggagcatgcccagaatatgacgcgtgccgtttatcccaggcacgggcgatacctaacaggatcatgcatgttccgtggcaagatgaactctaaagatgtggatgaacatatgataaacctgcagaacaaaaactcttcttacttagcctagtggattcccaac

SEQ ID NO: 61872 - DNA, 463 bp, Glycine max
  Clone ID: PAT_MRT3847_26886C.1
ggcttggaacctttgggctgatttatgtgcttgagagcccgccgcgagtcacaagtcagcccactgcgaggagaacacgaagccgcccgcccctcccgccgtcgtagcagccccggcagtacggttacgttacggtgtaggtcattaaaggcctttctcttgaacgaaaatcggtcacggcgagtgcctcctggaggcaaaacgtgtaagccccaggtccgtcgcggaagtatataatacttgagttcccaaaattaccttcgaagagcgtgccgaattaataaaggatcataccaacggtgaataacccagactagatctcaaaatagccaattaataagtccctccccacgtcagcgaatgtgaagcttactataatgatacacccacacctggtacagacaatattgcatctctcaacactttacatcacgaaaaatacggacacggggcggaggaaccc

SEQ ID NO: 61873 - DNA, 519 bp, Glycine max
  Clone ID: PAT_MRT3847_26887C.1
ggccgcctgcagtccggccggattctggtcgcccagcatcgtcggctggagaaacacagaggggacacaaaaataagtgcgtccaacggaatataaagcatgagaaaaatgccctcccctcgggtgtctctgatgcggttgggagtggggacagggagggtttgtcattaggtaaaggtaaagcagcacaagtgtcattcatttctctgcaatggatatggatctctagcattcgcattcatcccctccttttctccatgcctccgtcttcacccgttattttcttgtcctgaatgcattcccagaatgttgtagagatggaaggcaagacagaaattcgtatgacatcagctgctgcctttgttgaaggggggattcaagaatcctgtgatgatgcttgcagcatatgccttgaggagttttgtgcaagtgatccttcgacggtcactacctgcaagcatgagtttcacctgcagtgcattctcgaatggggtgagagaagctcccagcgtcctattt

SEQ ID NO: 61874 - DNA, 1359 bp, Glycine max
  unsure (1)..(1359): unsure at all n locations
  Clone ID: PAT_MRT3847_26888C.1
gttttctttgcagacatatcttggatcccatttccatcaggtcagtgcctatgtacttttttcagaaaggttggtggtgactggtgattgttgaagagaataatggcaacttcaactatggatattcttcatttccaccacactcctttttattgatcccactttggaatcaaaaggctagcaaaagagctgatggggtgattctatgggattatcatgtaatttgcattcagataaaacaaggagctgtccctccactagtgtgggacttagattcgactcttccttttccttcacctctaccatcatatgtgtctgaaacaattcgtccgtcttttcagcttttttctgattataatagattattcagagttgtgcatgccccgctatttcttcgttgttttgcatctgatagaagacacatgaaagattctggtggaaactggattgaagaacctcctcaacatgaacccatagttgccgaagatcgaacagtgcacaacctgaatgagtacattaacatatctgctgctgatgctattaccgatgttacaatcagttcagtcaaagatgcaatttctacccagaacacatgntgtggtgataaaggaaaaccagcttgaggaattcatttgtcagttatcttctttgcatagccacattcatattgttaattcggctcgaggaggaagtgaaggccaaatatccaaaagtttcatatgccgacctttaccagctagctggtgttgttccagtagaggtcactgggggtccaactatggactttgttccagggagaaaagattcattggaatctccagtagaagggtgtcttccggatgccgaacaagagaattactgagaggggagtcaaaagatttactgaagcttcccacagacaaggctctagttgaagatcctaatttccgcaagtatgttgaactatatgcgaaggatgaagatgcttttttcgcagattatgcaacctcatacaaaaaactcagagctcggcttcattttcaggaatcatcgttccatattggccaagggagttacaggaattgctattgtcttaaccgctgtgatcttgggttacttacgtgaactgaacaaaataaccaattgaagatctagagacgattattattaacttaaatgttctagtccccacaactggacacttgtttgattttcttctttccccaaaataaaaaagattgtaaataatttgtgcacttcaaatgtttccaaatattcttaaatataatctgcattttatatctttaattatgtttttatctaaataggtttatatgttactttttgaaaattaatatcatgcaacggtggaccaatcat

SEQ ID NO: 61875 - DNA, 1759 bp, Glycine max
  unsure (1)..(1759): unsure at all n locations
  Clone ID: PAT_MRT3847_26889C.1
tggaagtgcaccaattatatacaagcttttttatttgtgggaaagaagaaaatcaaacaagtgtcctgttgtggggactagaacatttatgttaataatagtctcttcaattggtttttttgttcagttcacgtaagtaacccaagatcaccgcggttaagacaatagcaattcctataactcccttggccaatatggaacgatgattcttgaaaataaagcccagctctgagagttttttgtgtgaggttgcataatctgagaaaaaagcatcttcatccttcgcatatagttcaacatacttgcggaaattaggatcttcaactagagccttgtctgtgggaagcttcagtaaatcttttgactcccctctcagcaattccacaaaataggaattatcaaacttcaaagggtcctttgtccattgaccatgaaagtcagaacgatctttatgtgccttacccaaagtgtgacctccggatagagccacaatgtctttgtcacttagacccatgcgataaaagatatctcttagatgcgacgcaccttgtttggcatctggaagacgcccctctgctggagattccaatgaatcttttctcccgggaacaaagttaatagttggccccccggtaacttctactgcaacaacaccagctagctggtaaaggtcggcatatgaaatttttggatgtttggccttcacttcctcacagaaggcaagtgctgtttccagtcccttgtttgctgcgtgattcaactcttgtctgtttctgatagaaccattagggcctcctgtgtttgttttagcatcgtaagtaccagcatcatgccacgctaatcgaagcatgagaggggcgcagtttctgttggagataagagcgcgaaggtcacgacgagccttctcgatttccttcagatactcagcatcaactctaggctttgccattgcacaagttaattataaattgcaggtgcaacgtgcactttgttttgtgggagctctaccatcatatgtgtctgaaacaattcgtccgtcttttcagcttttttctgattataatagattattcagagttgtgcatgccccgctatttcttcgttgttttgcatctgatagaagacacatgaaagattctggtggaaactggattgaagaacctcctcaacatgaacccatagttgccgaagatcgaacagtgcacaacctgaatgagtacattaacatatctgctgctgatgctattaccgatgttacaatcagttcagtcaaagatgcaatttctacccagacacatggtgtggtgataaaggaaaaccagcttgaggaattcatttgtcagttatcttctttgcaatagccacattcatattgtttggcatccacatatcaatacttccctggtttgcatatgttcagctgccatctttccatcaaagatgccggtcaaatagtgtttctcttcaaatggggtattgtaaaaatgtctcttctgaaagtgtctttttgagagtagtgtgcaaggaatgcaaatctaagccccattttgtttttcaggagcagaacacaatgttttgctttaattcttcagttgtgcccttggtttatagcaactatatgggtgatgtgaattttagaactggaatggagaatggtttcttctgtgatgtgttactaagttaaaacaggtgtaaaattnncttctttcccacaaataaaaaagcttgtatataattggtgcacttcaaaagtttccaa

SEQ ID NO: 61876 - DNA, 373 bp, Glycine max
  Clone ID: PAT_MRT3847_2688C.1
ggggctaatttaaaacccaaattccgatctggggcgcatatatgctgatcgggaaggtgaaaaatttaacaatgacctctcaacaaaagtcttttcaaatggtaatacagtattaaatcaatacggtaaataacctatgttatgatcctatcatcctatgggaagggtctagtcctggaatcaccgtttagcccaaaacgcgtttagaacccttctgataacgcttcctttgagagtacttccaacttcttcgtgcaccgtgaacgaagcgattctctttctcgccagaatactcgtgcggaggctctctcccaactccattggtctaattgctccgcgcttagtctaaatcactttaatacttcttctggta

SEQ ID NO: 61877 - DNA, 956 bp, Glycine max
  unsure (1)..(956): unsure at all n locations
  Clone ID: PAT_MRT3847_26890C.1
atactaataatttatgcatttatcaaagtaataagaagaataaattcttatttttctcgcacttcatgcaacttataattacaattacaactatgacaaacacgccaactgaactaaccattactataaatttatagttctagtgagcagagatacaattattacatttagaattcaccccctgaaaaatggagcactggagaatgttcctcctccattagggaaaagtgtgagaaagcagatgaggccaaggacaatgccccaagcatatctgctttcccctatagggctgatctcgtcttttgcaggtatttcttctccgccccgaaagaaggttgcaaacaatccccatgccaaacacagaacactcccactgagcccaccaacaccgagtaacaatgaagtggcaaacgataacagcatggcagtgcttcttccaaacatggcttgagcaatgcgacctccttctagcctcccacacggcaacatgttcaaagaagtcaccaccatccctgcataagcatcaaattctttagccatctaacatccccaatggtattatccaaccgttttttcccccaataaaagaaacaaaatatgttgttttcattcccctacaacttctggccaaggcatttggcaaggaaatacttgttaaaaatcaatgctgcggtaagattacaaatagttgctagtttcgctagaaatgaaaattcatgaatcatccaatttaccgtactcatgaccttaattaattttaacaaatgccattaaacctggatcaatgccagcttcagtcaaacaagtagcccggacattataaaattattagatctttagttctatagaatgtagacttgtattgtacattgaatcattattgtcaaaaaggaggaacanagatagaaatctcanaaaacccacctaaaagcccagcanatgcaagtggatcaaca

SEQ ID NO: 61878 - DNA, 427 bp, Glycine max
  Clone ID: PAT_MRT3847_26891C.1
aaaacaagaggattcccaacttttattaaaaaaaaattttccgacatgcaaaaacccaggtcaaagttccaaaaatatctttaaaaataccgtggggtgaaaaagggggctaggcctttttattgcaaaaacccccgacctttaagcagggcccctatagcttccaagggaaaaggggggccccatctttaacttagggaaccaaaatgagggcacggacaaggggggaggcccataccgaaaaaaaggatgcagggccaaactgagggccccaaagctaaaaaaatcctttaacaaaagaataagaatccccctttcagggacaagggtttttccaccacgccatttttaaaaaaagggcatggtagcctgtttcccagggaaaccttccaaaattccttttcaccgggggggccccatttcaaaa

SEQ ID NO: 61879 - DNA, 163 bp, Glycine max
  Clone ID: PAT_MRT3847_26892C.1
cgaggatggcaatctgaaagaaagatgtttggagaggggaatgtggaatcccttctggacctccgctcacagctattctctatagcatcttgaatgtgctgctcgttacatgtagcttttgaacattactgcgcctagctatggcttcacgcatgtctctaca

SEQ ID NO: 61880 - DNA, 267 bp, Glycine max
  Clone ID: PAT_MRT3847_26893C.1
gcgacacagctaactaggaatgcggcctgccacctcatttctgtgtatcgtctctaactggcctataaaattattgatttcgtgcaaactcaacaacatcttgtttaccaccccgaggatccagactagcgttatgggtctcttgctttctaggaatgagagttgaattgcttattcccttctacttctgtcaataaggactaaaaggactggagacccttgcaactgtagaacatgagatcagaggaccctcctgggaccgccccg

SEQ ID NO: 61881 - DNA, 674 bp, Glycine max
  Clone ID: PAT_MRT3847_26894C.1
gacagaaaacgttcaacttcttatattaatgtcaatgagtagtgctgcatactatagtatataagcaacatacattaaataaataaaaaaggaagaagcccttaacatatacccaaacaactgccaaagtgattccccttacattgatcatgacccttcatggtgctgcaatggttaacaattccacctaaagttgaatttcaagagcagggtggacatgttgagaaacttgtttgtgaggcacacttctgatgatgttgatcgtgttggtcatggttatggtattcatgttgatgttgacggtggtgatgatgatgatgagaggaactaccatgagcaccaccacatttctgaggtgggaacaatttttttgtcttttctgagcaacaacgtttgtggctatgatcttcatgttgatgttgatcatgctcatgatgatggtgatgatgagaggaattatcatgagagccaccacatccatttttgtggttatgcggtttagtagaagatctacaacattttcctccatggttgtgtccttttcgcagaagtaacatgctgttaaagatgaccaataggcatgttccaacatcagccacaactgctgcccaaacaagtggatgaccaccaatggccaaatcaagaatcgcagccttagtcatgattgaaaaaac

SEQ ID NO: 61882 - DNA, 155 bp, Glycine max
  Clone ID: PAT_MRT3847_26895C.1
gctagacttagctattcttacctcttggcatgaccattcaaatgtcttctttactcttagcttctcttgctgtattctatttcttctcctccttggagaagagttttgcctttaaagcagcaagaaaggaggacacagcaagcagcaatcttcat

SEQ ID NO: 61883 - DNA, 375 bp, Glycine max
  Clone ID: PAT_MRT3847_26896C.1
gaagggggaacagtggaacaccgcacccgttgttgcgatgctaagctttgcactgacacaacatctttctcttcttcgaagttgtattgtatctgttcacgacgctcttctcgcacattctttcgctcctctctcttttaccgtctctgtacttgctttctctctgactttacctcgctcgcttttcacatctaataagcacagtaagagttgaagaaagacagtaatttcaatgtacttgaggagaatacaatgcagagatcggacatgggctttggtgttgcagccatcgaaatacttctttaggccaagattctctgatcaacgatattttcaatctttgtcccctaagaccactgtggaaaaatatgcttc

SEQ ID NO: 61884 - DNA, 933 bp, Glycine max
  unsure (1)..(933): unsure at all n locations
  Clone ID: PAT_MRT3847_26897C.1
caaaagtgcctcactcaattcacgttcttggcttttatgtgctgcattttgttaaatgctgtgcgttcaagagggttccatctaggggaccaaccacgaacccgggcgttttacatgactctccagatctgagtcttttttctctttagtctttaccatgatgtgtgctacaaaagattgatgaagttgttggtgtcttgagtccatctttggtcagtgtatacctatattatatatataaactctctctctctctctcacacactcacacacacacacagtaacatacttgtgttgttctggtgtgaagtgtgaaagtgtggaatctgtgtccaattcaccatagtgcggaaatggctccaaggttggacttttccaattggtggaccaaggatacacagaagggaacaccagtggtggtgaaaatggagaaccccactttctctgttgtggagatcaatggtgctgatgctgcattcaggccagtggagaaaagccgtggcaagaatgctaaacaagtcacgtgggtgttgcttctcagggctcaccgtgctgttggctgtgtcacatggctcgccgccgtgctttgggctttgctcggagccattaagaagcggttgattcatggacagggtgtgtctgtggagagtgagagtgacaagttggaaaagggaaagttgctgtttagagtcattagagtgttccttgtgacttcattggcggttttggcctttgaggttgttgcttaccttcaaggttggcattttgggaaccccaatttgcacattcctcgtacctctgatttggaaggcttgctccacttggcttatgttgcttggttaacgtttcgtgccgagtacattgccccttctatacagggcactttcaagttttgngtttgtttgtttcttatccagtctgcggatcgcatgc

SEQ ID NO: 61885 - DNA, 521 bp, Glycine max
  Clone ID: PAT_MRT3847_26898C.1
ccacccaccaaacccacagtcttttcacccgcaaaaactgatccaaccccacctttatccattgcaatctcgtcaataacagccacctctagctcacccttattgctttccaccaaatattcacgtctatttcaaaattcaaattttgaaatttaaaattgtcattaatgaaagattcatttgaaaattcccattcctagaatatcaacgccgcaatgctctaccccctcccctccaccattttgtactcacggcgtacattggaaagagattcgcaaatggttcctccaccaaccaaatggaatacaccacatcattgatcttcatcttaatcaacctgttaatagcctccgaacttgaagtttgtatatcactctagcaacatccaaacgagtcttccttgttgttatccgttgtgatgaaattccctaagccaaacaccaacttatcaaagaatctatcattccatgcatcaagtggtatatcttgccatcttatccatgcatctctcccgtgaaact

SEQ ID NO: 61886 - DNA, 427 bp, Glycine max
  Clone ID: PAT_MRT3847_26899C.1
ggctcgagctgtagccgatttggatagtgcccttttatcactcatgctgggtcgtatgtcgcgttcgaatcacacttgctccctatattccttgtcggttagagctaatcttaatgaccgtaccacttttctgcgaatcatggtcgtcgccgtcgccattcgtcggaagccgagctacaacgctggcatctgcacgctctgtcccttatggagctcgcgcactgctactcacaggtacaccacctcagtgtcttccgtacgcagggcgctggaccgttcgcgcctggaactccgtctctgatgttgcgagaacctctatgctgcatatcagccgggagcgccagagacgagctcggctcgcttgtacagcactggagtgctataacgcggttcatagttcaaactacaggccaagaggttgtacctg

SEQ ID NO: 61887 - DNA, 2323 bp, Glycine max
  Clone ID: PAT_MRT3847_2689C.1
ccggattcccggctcgacccacgcgtccgccacgtcccccagaagcgctttccgccacctctatcccccctttacttttttctctcttttctgctttcccctttcgctcgtcgtgtggccccgcgacaccatcatcacgcacccttcctccttccttcatcctcggtattgcaataaatcacacaaatgggtgcttcaaaaaagtcggacgcgtgggcggacgcgtgggctcgaacctttatgttgctttagctctcaatgcttctctgaaacccgcgttcccattgctctttgcgccaatggccgagtcgtctccgccggcaacgccggaactgaaacccgagctcggtatcggatccgggtcgggtcggaaaccgggaataaggagagtgggtttgagagctgaaattgatacttcgccgccttttgggtctgtcaaggaagcggtgacccgtttcgaaacaaccggaccttggattcccttttacaattttggagaggcttataacagtgctgaagactttgacataaagagagtggaggaggaagcagcgaagttggaaaaggatttgatagtgaaagaactcgaaactcttgacgtgcttgaggaactgggagctaccaaagcaattttggaggaattaaagaagcagctacaatcagaagcattgaattgttttgcaactccgggtgggaattcatgtgaacagattggagttcctgttaaaaattgtgtgaatgatattaacaatgaggagcaggcattacaatgtaggagcccgtgggctactttatcacctgatctgttcatgatggagttaagacaagctaaaatgagccttggtaaaactataagtgatctcagggcgatacagtcttctgttgaagctttgaataagaagatgaagaaggataggctttttgttgagaggacccgtgagaagctagcatcaaagtttgctgctgtatctgctcaagaagtggccagaaaagaagcaaggttaactccacctgaagctactgtaggaacaagttgcacttgtcatcatctcctaaatgttgggaggagtttcaaatttgatactggacagtcaaatggaatgagtgaaacaagaatatctgaagtttcaaggcccttgcctgagtttggagagaatggatttagtattaagactgctgagatgaggtggtttgcggctaaaaagatggaagaagccgcaatagcagcagaagctgttgctcttgctgagattgaggctctatgcagccctgagatatcatcagaatttgctcctccagaatgtcagaaaatgccatttgccataggggagtgctctcctctgcaccccatagttcaaattcctcaagagtcaaccttgaagaaggtgatagattccaagttccaagttgacaaaataggttcttctaaattgactattttgaaaaaattggaggaagcaacagaagaagttatacgcagcaaacaaatcttaaatgaggcattaaacagtgttgaaagtgcaaacagaaagcaacatgctgctgaagaggcacttcggagatggattcctcaggatgatctaataggtcagccagtggataactatattaagcccaagaagttcaatcaagctggaaattgtcatgattgtcctctaccggatgtaaccaggtcgattacaatgaacaacgatccgaagccgatcttaaagtcttcagtttcaatgagagatgtacttagcaaaaagcaagttcctgaagaatatactacaactaaggagatggaagagccctctgaaagaaaggtagcattgagtcaaatgcttcgagcattgaggcaggatcaaactctgcctacaataccagagaaagatgggagcaatcaaaggcagttcatagcacagaggaaaaagtttggattcatccaaatatcactccccttgggaaagcgaagtaagaaaaaggcatgaatttaatcctattgcctatgcatggatcaatatccagaattcatgcatcagtgtcttgccattctttattgattcttatgttttgctgcttttttgttaagtcatacagaatttatgactgattttgtaaaatactcatctagtgagataaggctattgttgtgattgtttggttttgtaaactaagtttttcctgtgtgattgctcactttatgcaactggcctatgctttaacgagctagtagattttactaaagttgattgttaggattgatccactctatccctctccccagtaaagtactatgttcttcaatgttctttacaatttcaatttttatacagattatttg

SEQ ID NO: 61888 - DNA, 382 bp, Glycine max
  Clone ID: PAT_MRT3847_268C.1
ctgaacttgtttatagtaaacatttgagttctctagaggcatgcttaaagaatgctactgatggtaagttccctgagtgtggtttaatagatgatagagttaagtttcacaagcatttgatggaggcgcaagctgaatccttgttggatgactctggtgaggaagaggcgggggatgaacttgagaggatagtgtgtgactgtaaggatgggaggaagttgtgtggtagtaatagagtgaagtatgtgaaaccggagtcaaatgtggctgaactcgagagggtatatgagtatttagatgaaacgaatcgtgtgttagtgatagcgtgaacggcaagaaatcacattctaatggggatgacattggatcatgtatgtgactt

SEQ ID NO: 61889 - DNA, 442 bp, Glycine max
  Clone ID: PAT_MRT3847_26900C.1
ctcctaatgctacctccttagaaattgcttaatctttttcattcattcaattacttagcaaattgttagaaaatgcaacacaacatcttcgcctcaatgcgtagcttgaagatcatggacggttgcaagggcactcaggtctacgccatcaacccctccagcgccaccggcggtggaattggcgagaagcttctccaacagcttcacgaccacatcaaaagccacacccttagaaccaaatcggttcggaacttacaacctccgaacatgacgacgccgtcggaggttttcgtctccgacgggtcgctccttccttacggcctccccatgacggaccttctagagcccaaaattgaaccctccttggtgtgcggggattttgtcgaaaccctcgccggagtctaccgccgcaccgaggaccgccaccagttcgaccgctccg

SEQ ID NO: 61890 - DNA, 604 bp, Glycine max
  Clone ID: PAT_MRT3847_26901C.1
caacgaaatttcagtagacagaacatacaattataaaagggttacttccaaatgtgaatcaactacttgcaagttagccatcatatcgaatgcgtaagatttgcaactgaaggatttacaaaattatccgctagtgcaggagagaaattcacaggacaaaagtaaaaacctatcacaaggctccacgtcatcaacaagtacatgagcctcccaacaaaccatattaacaaagtgccaatcacattgcctacactttcctgaagaacatcctaatcaccagtatgattatcatttatcagtggaattatcaggttcaccatttgaataatcaatgcaacccacaacaggaattttgtgttcaaccaaaagcttccttgaacctgccaaggaggaatcaaaatcctttaacacaatagttggcaattgatcaatgccccaacctacaattttgcagatgacccgtgcataggccctgtgagctcgcttcctttttgtcttgagtatggcagtggagtggtgaattaatccaacacaatccttaaacctcttccataccttcttcccaatacctccacaaaccaaacaataaaaatccccttcttta

SEQ ID NO: 61891 - DNA, 383 bp, Glycine max
  Clone ID: PAT_MRT3847_26902C.1
aattcggctcgaggtgcccaattggacttctttgtttgctttcaacttacaatttctgtggtatgatttcataccttgttagttaccttacctatcatacatatgcatcatcttcaaatccactggagttccaaatcatttttggaagaaaaaataaaattatttccttccaaaaccctctttatgacaattagtgccaagatatatgtgtctatctttccaccttttttactttttttaaaataataaaaaaaaaacagagatcttattatttatgttctacaaccttttagagtagttaaattctttatgcagttggtcatgggaagtcccaattatgcttgattgaattccattgcttctcaccaagcaaagtcttatgt

SEQ ID NO: 61892 - DNA, 266 bp, Glycine max
  Clone ID: PAT_MRT3847_26903C.1
cagaaaagaaaggccgcctggcaaagtgataataatagcctttcttgtgcgtctcaattcatttgttctctgagtctcaacctacttccccaatcaatcatctttacctgtttggtcgataccatggctcttttccccggggggtttgaacatcccttggaaagaaggcaagataactctcgccccatgagagacccggggggtgatagaatacctgtgattggtgagaaagctgaaagaagcgacctccccagacctcgataaga

SEQ ID NO: 61893 - DNA, 152 bp, Glycine max
  Clone ID: PAT_MRT3847_26904C.1
agggaattaaattccaaattgaattgttaccaggaggggcaacggtaatgccttgccaaaatgatcattaaattcatgaccccccttatggcaaaggaacccaacttaaaaacttccttaagcaaccaaaaaccggtttcggccctggtccg

SEQ ID NO: 61894 - DNA, 208 bp, Glycine max
  Clone ID: PAT_MRT3847_26905C.1
gcaaaaagacaacagaagggcattggctcacaaaattataagaattggcaccatggtgccgcctccgaaacaaaaccaagccccgaagttccagattcaatgtccgaagaaacccacaggaaagaaaaaagacctgaggactatccacgaactctctctgttgttggagttaatgttctaaacggtatcagaattaatgagatgttaa

SEQ ID NO: 61895 - DNA, 750 bp, Glycine max
  Clone ID: PAT_MRT3847_26906C.1
gatggctctgattcatgtgcttttggaaagcaatcaactcactgacaagattccacctacccttggactagttcagagtctggaggtggtgcgcttagatggtaattcattaaatggacctgtgcctccaaacatcaacaatcttactcatgttcaagatctgtacttgtccaacaataaactgtcaggctccctgccaaaccttactggaatgaatgccctcagctatctggacatgagcaacaatagttttaagccattggattttccaggatggttttcaactcttaagtccttaacaacattaaagatggagagaacacaacttccaggacaggttcctacttctttgtttacacttatcaatttacagattgtggttctaaaagacaacaaaataaatggtaccttggatatcggctcctcctacagcaatcagctgcgacttgttgattttgagactaattcaattgacagctttgagcaaaaagacgaagttccaaatgtgaaaatcaagataatacttaaagataacccaatttgtcaagaaaatggagaactagaaagctactgctcctcttctcaacccaatgtctcatattcaacaccactaaataactgtcaacctggtacctgcagttcagaacagattcttagtcccaactgtatatgcgcatattcatattcaggaaccttaactttcaggtcaccctcctttttggactttgataacaaaacttactactcaat

SEQ ID NO: 61896 - DNA, 293 bp, Glycine max
  unsure (1)..(293): unsure at all n locations
  Clone ID: PAT_MRT3847_26907C.1
aaaaaaaggaannacaaagggancgcnggaagancccanccacaaacaaanncnccaggcnnnccnccaagggagccanccacccgcgcgaagcgagacanccngggcaaggagggcgccgnggaagagnncncgggaggcagcaacgggccaggggaaaccccggaagagcaagcgagaagccagaggaacagcgaagaagaaccccngcagggggggggncgncccggcccggancgcaancagggggnnccgacccacccagccgagccaccccgagaggcacaggaaaa

SEQ ID NO: 61897 - DNA, 370 bp, Glycine max
  Clone ID: PAT_MRT3847_26908C.1
gtcagccttgggcgcatcaccttcagctgcgactgcgagaaaaaaaattactatttcttgcccatcataccttgggcgagcaaaaaattaaatttaaccatgagggaaatcgtgcacatccaggctggtcagtgtggcaaccagatcggtgccaagttctgggaggtgatcagtgatgaacatggcatcgaccccaccggcacctaccacggggacagcgacctgcagctggaccgcatctctgtgtactacaatgaagccacaggtggcaaatatgttcctcgtgccatcctggtggatctagaacctgggaccatggactctgttcgctcaggtccttttggccagatctttagaccagacaactttg

SEQ ID NO: 61898 - DNA, 378 bp, Glycine max
  Clone ID: PAT_MRT3847_26909C.1
ccaacgcgctttttctgcttgagcaaaccattctagtcaatatattgggtggctatataataccacgttttatgggctattttttagcggacaaaacctaactggccatgtaactatcacgtgcatgcgacatggaagaatcaatgttgtgacacctattctacaaaagtataccaagaaaagcacacctcgcccttatgggggggctcgtcaaaaacacccaaacaaaaaccccccggcccgcccccgcaaaagcctttttataggggcacccaaaaaacacacaccggccggcgtttaccaacagctggacggggaaaaccccgggttgaccccgctatgtccctttgcaacacacccccttttccccgggggggc

SEQ ID NO: 61899 - DNA, 361 bp, Glycine max
  Clone ID: PAT_MRT3847_2690C.1
gagcaataaagatattgcaaattttcaccggccaaaagcactatggtatccccatgacaatgaggtggctgtcaaagaacaagggaaattgccaacacaaggacccatgaaaattattataaagagtttgggtggcaaggggagtaaactgcatgtcgatgttgaagaaactctctcttctgttaaagcaaaagcttccaaaaagctagattttaaggtatcagaaacagtgaaaatattttatttagggagggagcttgaagatcacaagtcacttgctgcacaaaatgttcaaccaaactccttgttacatcttgttcgtacaaagatacatttgtggccaaaagcacaaagggttcct

SEQ ID NO: 61900 - DNA, 427 bp, Glycine max
  Clone ID: PAT_MRT3847_26910C.1
gggtggcattgcattctgacgcttggatgatactttcaccttaacctcaatcaaggcctatatagctgagttccatacaaccttgctctttgtctatgccggcgtaggatcatccatagcctatggcaagttgacatcagatgcatcacttgatcctgatgggttactggcagctgctataagacacggttttgcactctttgatgcagattctgttggtgcacacatacttggtgggcatgacaaccctgttgtgaattatgaattgcatcttgaaggtcacatgaccatccttactgtctgaatctactggatagcacagcattgtgggctacatcgaggcatgagttgcttctcaactatggcacagagaggcttgtccacttcccatcctacagagtgggcgtatgggggttgggaggcagtt

SEQ ID NO: 61901 - DNA, 404 bp, Glycine max
  unsure (1)..(404): unsure at all n locations
  Clone ID: PAT_MRT3847_26911C.1
tcctggagttacttcccttgcgtttatttgcacatgacactttgataccctgtgttgtataacggcatatctaattccttttgaaagcactaattcatacaattgtacataccgcgagggatattagtgtaaaaatataaacaggggataactttgaaggaatattctatttcaaccagcaggagaaaccacactgaaactattggtataaactctcgcattgaagtttcatgttaagagcttacttactacatctgtattgttgaaaaactgctgatcatgtctgtgcaagcctttctgtgacttttgatgactgtaaccttgtaaaactatcttaattatgcagatatctggtgcgaagcangcatacgtttgccattgctcaacacaagcatcaccgtagt

SEQ ID NO: 61902 - DNA, 151 bp, Glycine max
  Clone ID: PAT_MRT3847_26912C.1
ctcaaatccagatcgtacggtgaccgaatgatgcagactctcgcctaccgcggagcgaacattcaagatgtccgctgcaacagcgccttctacgcctcttcggtgcacccaacaacaacaacaacaacaacaacgcagacgcagatgtgag

SEQ ID NO: 61903 - DNA, 805 bp, Glycine max
  unsure (1)..(805): unsure at all n locations
  Clone ID: PAT_MRT3847_26913C.1
ccacgcgtccgcaaaacatagatagatagaaaaaaaaaccaaaccactttctctctctatattcttcacaataacatcaccataattacacacaccctatagttccttcatctcgtttcatcgtcagttcattctctctctctcttctctctctatctaacttgtgttgaagagagattcattttcagcttttttttcttctatggctgagggttttgaggcttaccatgtgccacaacaaagcagaagagataagctgagggttgtggcgacacagaaccaacatggtctcgttgagccctcgtctttgcttcctttgtacgacccttcttcgtttatatcttctgatttgttgacaagcttccacancgggcaaaaacacancttgggttgtggggtggngggaggggcgggcgggggtccccgcgcnncgncgggcccgccgcgcgggggggggggcggggcggggccgggcggggggggggggggggcgggggcgggggggggggggggggggggggcgggcgggcgggggggcgggggcggggcgnccggggggggcgggggggggggcgggggggcgggccggggggggggggcgggggnggggggggggggggggnggggggggggcggcgggggggggggggnggggggggggggcgccggggcgggggggggggcgggccggcggggggggcggggggggggggccggggggccggggggggcgggggggggggggggggggggcgccggggggcgggggggggggcggggcgggggcgcgggggcggcggggggg

SEQ ID NO: 61904 - DNA, 3017 bp, Glycine max
  Clone ID: PAT_MRT3847_26914C.1
ccacgcgtccggggaacaggactagagggaagggtttggagggtaggaatgagaatttgtatgataggagggaaggtgggagaatggtgtctggtgagaggagcaatgttagaggcaatgtgggccataaaatggggcttgttgatcagcttgatcgccccgggccgccggccgggagtcacctccattcgggttcgggaaatgatgctggcattggtgaagttggtggtagggatggtaaacataaggaaattgggaggttgaggatggagggtgttcctgagtctggtggagggggtgctgatgttgatgtccttggggagcagttggctgattccttgttggtagaggatgagtctgatgacaggactaacttgaggcaacgccgtcgagagaaggatgttagattgtcggattcaagagggcagcagatcatgagccagcggggaagaatgtacagaaggcagatgatgtgtcgacgagccgattcggctcgccacatccttccacgcttacaggagatgcaacaacacaaacctaacttgtttatgagagctataagtcaccaccttctagtttcactactcgattggagaatctctacctcacgatcccttttttctcttagaaccatcatgtcacaatctgatcattcctctgcttttaccacacccagattagttctcaagaaggttttggccaaatctcaacatgaaggggatggagctgttgttagaagaggcattggaaggagcgagttgaagaacttggatcccttcctaatgttggatcacttctcagtatctcccccagcaggatttccggatcatccacaccgaggttttgaaaccgtcacctacatgctagagggaggcatcactcaccaagattttgctgggcacaagggtacaataagaaagggtgatgttcagtggatgaccgcaggcaggggaatcattcactctgaaatgcccgcagaagcaaacaacaacaagggattgcaactatggatcaatttatcatccagggacaaaatgatggagcctaactaccaagagcttccaagtgagaacataccaagagcagaaaaagatggggttgaagtgagagtgatagcaggagaagcaatgggagtgcattcgcctgtgtacacacgaacaccaaccatgtaccttgttttctgcatgatgcccggaactcagtggcatcagaggattccagagtcgtggaatgcctttgtttatacaattgaaggggaaggagtattcgggtgtccaagttcatccccaacagtggcacaccatgtccttgttttgagtcaaggtgatggccttagcgtatggaataactcttccaagcctttgaggtttgttctgattggaggccaaccactgaacgagccagttgttcagtatgggccttttgtgatgaacacacagtctgagattgagaagacaattgaagactatcactatggcaggaatggctttgagatgagcaagtattggatgtctcaacagtaatactatctattagatttaaataagaagcatgttttctcaatccttttcagtgtcacaggcgtagttatcaaagtcaaaaagctagtacgagctcaaaagaaaatactactattgcttattctatccttttcatttccatgtaatgaaagcttctagaatattaaaattgctgcccggacaactattggttgtggctctagtcatgatgggtcagcttatcttgattttttttcatacaaagggacattgatgattttaatgttcctttccttgcaatatatgggtctctaatacctcctgaagaagaaaaactgaagcaaaagaaattagtggcgttattggagaagttagttagcaaagaatggccaacagctaagctttatctctatggatcatgtgctaattcgtttggtgtttctaaaagtgacattgatgtttgccttgctattgaggaagcagacatggaaaaatctaagattataatgaaattggcggatattttgcaatcagataatctgcagaatgtgcaggcattgacgcgtgcacgtgttcccatagtaaagctcatggatccagtgacaggaatatcttgtgacatatgcattaacaatctcctagctgttgtgaataccaagcttcttcgggattatgcacacatagatccaaggttgcgtcagctggctttcattattaaacattgggctaagtcaagaagagtcaatgaaacttaccatgggaccttgtctagctatgcgtatgttttgatgtgcattcattttttacaaatgagaagacctgctatccttccatgcttgcaggagatggagacaacatattctgtaactgtggacgatgttcattgtgcttactttgatcaagttgaaaaactttgtgattttggtcgccataacaaggaatcaattgctcagcttgtgcggggatttttccattattgggcatattgtcatgattatgcaaatactgttatatctgtacgcactggaagcataatcagcgagagaaggactggacaagaaggataggtaatgatcgccatttgatatgtatagaggatccttttgaaatatctcatgatctaggtcgagtggtagataaacatagcatcaaagttctcagggaagagtttgaacgtgctgctgaagttatgcagaatgatccaaatccatgtattaaactttttgagccctatgttcccagttaattgattgttttgaatatagattttataggtttggtaatggacactcagcttgtaaagcttcttttgtcacatctcatatattaacctagtatcatgtttacaagtgtattttttagttagggttttaaatatgccatctcaatgtaaagaactttttggcctttgatcttttatttgaaaggcaagaattttttgttacgttgaacaagctcccaaggtattaaatggcttgtgaataattaattatatagtcacaatgaaattattctatc

SEQ ID NO: 61905 - DNA, 1251 bp, Glycine max
  Clone ID: PAT_MRT3847_26915C.1
cgcaccgcaacaaagaagaaaccatgctcgatggcgaagaagatcattcacgacaccactaggaagatgtctcagctgtgccagaaaatcgttcaggtcgacgtccggtggggattcctcaaaagggtatctttcgttggccactttttccgtttcatttggaacagacttgttgtttgctctgtcgccggaagcccatctcactaccggaaactacccctccgggacccctcttcttcgccgccggccaccgttgacgacgtcttctcctccgctgcaaccactactggcggctatgactccgattccgatttggtgaacctcaagatcagcttgttgggtgattgccatattggaaaaactacttttgtgatcaagtatgtggggaatgagcaagaaaagggaagcttacagatggaaggattgaatctaatggacaaaactttgtctgttcaaggagctcgtatttcgtttagaatatgggatgttgcaggagataaaaggtcccttgatcaaattcccatggcttgtaaagatgcagttgcaattttgattatgttcgatctcaccagtcggtgtacactaaatagtgttgttggatggtatagtaaagcaagaaagtggaatcagactgcaattcccattctaataggaaccaaatttgatgattttgttaaactccccccagatgtgcaatggacaattgtaacacaggcaagggcttatgcaagggcaatgaaagctactcttttcttttcaagtgcaagccacaacataaatgtcaacaaaattttcaagtttatcatggccaagctcttcaacttgccatggaaagtggaacgaaatttgacactaggagaacccacaattgacttttgaaatgttctttacattccgatttgtatgtaaatagcaggacaaagaagaatgagaaagaaagaaagaaaacaagtcaagtttttcatattggctgggacctatcaacattcaccacctagatacctaatttccatgtctcaataggccattttgactataggcttacccctgttgtggctgaggtcaaagcccacaggtcttgataatttaatttctacgtgccctgataaagaagaaattccatttccatataacttttgtatgatagatttttttattcgttagaaatatactttttaacacattttcttttataattgttcaatattaatttctaagaaattatagtattacgagtgagaatgtcttaat

SEQ ID NO: 61906 - DNA, 1598 bp, Glycine max
  Clone ID: PAT_MRT3847_26916C.1
ccggaattcccggctcgacccacgcgtccgctcccgagtttctctctacaagactctctttccttccaacctgcaacccaaactgccacgtcaccctctccccgtcgcgacccgcctcaatgaacggcggtggaggtgacttgccgccgtccaacggcggcgagttcctcctctctctcatccaacagcgcccccaccagccccacccccacccgccgcctcagtctccggcgatagatcccgccgtcgccgccatcggtcctacgatccccgttgcgccgccgctgtggcaaatcctctccgccgatcatccccaccaccaccaccaccaacctcaccctcaccatctcccaccaccctggtcccactctctctctcatctccgctttaccctccgaacttcttcgggttgccccataatgcgtttccccctcctcggacccacttccccatcacccctaactccgtcgctaacggcgtcaacgctaacattaacctcgcccatgatctgcgaaatctaggttttccaattgaagaaagccaccacaacaataataacaacaacaacgtggtcgatggtttcgttcatcatcatcatcaacagcagcagcagcagcatgaactgaagctgcagttcgggtctttacccacggttgcgtattccgccgccgaagtttcctccaatggtgactccttgctcaatttgaagttcaacagaggtgggaatgtggttcaccccacttcgaattcgagtgggaatgtggttcttcagggtaaccatgatgctggggagagagaaagaagaggacttgggggttatatggctggtgggtcgttaccccccgagacaagtagggttgcaccagggtttgggaacaggattagagggaagggtttggagggtaggaatgagaatttgtatggtaggagggaaggtgggagaatggtgtctggtgagaggagcaatgtgggacttgttgatcagcttgatcgtcctgggccaccggcccggagtcacctccattcgggttcggggaatgagaccagtggcattggtgaagttggtggtagggatagtaagcacaagggaggtgggagattgaggatggagggttttcctgagtctggtggaagggttgctgatgttgatgtccttggggagcagttagctgattccttgttggtagaggatgagtctgatgacaggactaacttgaggcaacgccgccgagagaaggatgttagatttttggattcaagaggacagcagataatgagccagcggggaagaatgtacagaaggcagatgatgtgtcgaagggacattgatgattttaatgttcctttccttgcaatatatgggtctctaatacctcctgaagaagaaaagctgaagcaaaagcaattagtagcgatattggagaaattagtcagcaaagaatggccaacatctaatctatatctctatggatcatgtgctaattcgtttggtgtttctaaaagtgacattgatgtttgccttgctattgaggaagcagacatggaaaaatctaagattataatgaaattggcggatattttgcaatcagataatctgc

SEQ ID NO: 61907 - DNA, 1092 bp, Glycine max
  Clone ID: PAT_MRT3847_26917C.1
cgagtcatgcttcaccaagattttgctgtgcacaaggttacaataagagctggtgatgttcaggtatgagtaacactattagttaatgttactgaaaagagaagattaattaggttgttagaatatattatttttgctcgtgcagtggatgaccgcaggaaggggaataattcactctgaaatgccagcagaagcaaacaacaacaagggattgcaactgtggatcaatttatcatccagggacaaaatgtaacatatcccaataactagctagttaaataaattgacaagttattattaactgtgtttgattttgagtcaggatcgagcctaattaccaagaacttccaagtgagaacatagcaacagcagaaaaagatggggttgaagtgagagtgatagcaggggaagcaatgggagtgcattcgcctgtgtacacacgaacaccaaccatgtaccttgttttctccatgatgcccaaaactcagtggaatcagagcattccagagtcgtggaatgcctttgtttatataattgaaggtgaaggagttttcgggtctccaacatcatccccaactgtgccacaccatgtccttgttttgactcaaggtgatggcctcagcgtatggaataactcttcaaagcctttgagatttgttctgattggaggccaaccacttaatgagccagttgttcagcatggcccttttgtgatgaacacgcagtctgagattgagaacacaattgaagactatcactatggcaggaatggctttgagatgagcaagtattggatgtctcaatagtaatagtaatcacaactctctctatctcatatcttatagatataaataaataaaaataagaagcctgttttctcaatccttttcagtgtcacaggcgtagctatcaaagtagtaggagctgaaaagaaaacaaatactactattgcttattctctcttttttcatttccatgtaatgaaagcttctagaagattaagattaaaattgctgctgggacaactattggttttggttgtggctcaagtcatgtcatgatgatgggtcagcttatcttgatttttctctc

SEQ ID NO: 61908 - DNA, 172 bp, Glycine max
  Clone ID: PAT_MRT3847_26918C.1
gaatcggtttactgataggtggacagaatggggggacttatctatgattgactccagttatgtgcgtccatcgtatccgtcaatacctcctttggattttgctatggatgtgttaagaatgacgaatgtttcttactatatgaatcatagttctgacttccaaagtctagtg

SEQ ID NO: 61909 - DNA, 511 bp, Glycine max
  Clone ID: PAT_MRT3847_26919C.1
gaattcatgtaacaaaaagtaacatatattggtcttcctgtttatttttggaatataataaactgttaaacaacaagcaacgcatgttatgcagatcagcacatcatacaagtgccgcgttttaccttccaaaaataatgacaaaaatatctcttcaatattttccttcggtactatgcaaaaaaccaaaaaggaaaatgaagacacagtcatgcaaataaaaagtttgacacaaaaaattgacattttttggggtggtttctgcacgaagcacgtgcttaggctcgtgtagtgttccttgttaggtatgtaggtcaaatgctgttttatttttatttatttgttcaattagttacgaataccatcttatatacaatgtgagtgagaggacttaggatcgaatttccccttcaatgcaaaggggaaatcaaagatataggggcctgtggtagaggaagaataacaaacaggtcaaaataagaatccggtccgtgacttgagataaccgatg

SEQ ID NO: 61910 - DNA, 926 bp, Glycine max
  Clone ID: PAT_MRT3847_2691C.1
cttttcttgaacttttggagattgggttgtctacttgtcttgggtctcacattatatggttgcctttatttaccaagtgaatatattctaatcctgaaggtgaggcaacaagcagaatcttgctctgttcaagtgctttgtcctgttaaatgtaatggaatgtggatggttttatctgtcaagaagcaacgatgtcttttcaacagtgttcaagaattggcagctcaattatgtaaaagtaatcttttgatctatacaactggaaagtgttttcttttatcataaaacgcttagcccttgcatctcttgataatttcttagaaactgtaattaaaatgctagttatttgaaaaaagaaaaagatttatagagtattttactcaactgagaagccatgtgtgctggagaagcttctctgtttctatctggaatcaagttttcagcaaagcctgcaagcaaggaggacaaagaaaagaaagcgggtaagtattaattaactgataagcatcaacggttttagacgagaaaggcaagtcggccttggaaggattacgcataaagcttccctatccagcttattatcattaggctttgtttccaatgctccattctctttttgtgcaacaagattgatgtcgcctagtaccagaggcatgtagaattgtagatatctttcgtatcgttgaaaatttgaaatctctctcatcaaacaactacatctccgtctaagacaggagatgtcacaaaatgtgccggaaccagttttattacagtcctgtgtggactactactatactcttttcaaattaaaatataggcaaaattaatcatttttttaaagcaatttcttagttataccttgatattaagaataaacaagagtcactagaaatgaaattcagttaatgggaagatatttttgtatg

SEQ ID NO: 61911 - DNA, 484 bp, Glycine max
  Clone ID: PAT_MRT3847_26920C.1
gccccaagacgagtaaaaaattaaaaagtaaaaaaaagggttaaagcattttcaagaaccaaaaccccacccccttaccattactcccaaaaagaaaaacgaaaaccccggggccgggggtggaccggggaatcggggaccggaccctgaaggcctaccaatttcccaaatagggagaaatattaaagcaagccggaaaaggggcatacctgggacaagggggaaatcgttaacagatgccaattccacacaaaatacaagcctgaagcataaagccaaaagcccgaggggcctaaggagagggctaacaaccgttaggcgcttagagcccactgcccactttaaaaaccggaaaccccccgggccccatggaataaggaaacccccaacgagcggggagaggcgatttgcggcccgggccccatggtggttttcctttacacacgggaaacgggcaaaagctctttcccccttacccctgggc

SEQ ID NO: 61912 - DNA, 220 bp, Glycine max
  unsure (1)..(220): unsure at all n locations
  Clone ID: PAT_MRT3847_26921C.1
gcatggtatacccttgctagcttcacagagatgtaatgtaaattctccaccaaacgcgtgcgntgtttttgntgttgtccanatgtataaaagatataatgagtgncntgtnnaggacactgagataaggaaaccaatgcatncntctanctnnattccttgcccnataagnctttctntgnagaantgttnanagtttnncnccntngccncaaagaag

SEQ ID NO: 61913 - DNA, 663 bp, Glycine max
  Clone ID: PAT_MRT3847_26922C.1
gatttcttccgcccaggctcgaggagacaagaagcatggtagcaatttcgctttacagagggaaccttcaccgagtaccggacgtgcctcgtcgatggccaatgccagcccccaaaatcactctcaaagacttcaaatcccttctcgctcgtcgctccaaggcactctcgcgccttcaaaaccctaactctacccctctccccaacggttcccaacccgaaccacctcccaccgttaccgttaatcacggcgaaggcccctccatcaccgtcgcccgagaagacggagatcgcaacgaaacgccgctcgtcgccgttagttccgacaagaaaccgctcgctggatctgattcggagaaacctcagctcgattccaagattgatgaggcttcggagaaaaaaacatctgacgctgtcgccgctccggaggaagaacagactgagccggtcgctgagaatgaggatctgcttaacgaagagaagacagctcaaaaccaaatttgacgaggcttcggttagattgaatgatgacggtcatgccgcgtcgttggttctgaagcagatattgaatgcggaggaggagttgaagagtcgtgataggatgaaaaggaaaaaggaaattgaggagaagttgcaagggttgaatgataataaacataacctg

SEQ ID NO: 61914 - DNA, 252 bp, Glycine max
  Clone ID: PAT_MRT3847_26923C.1
ccacgcgtccgagaatgcatccttttttattgaaagatgaagctccccatgagagcatatgagagatcagcccaagccagaaagtctattgagcacacgacaacaagtcgactctagcaagactggctccccaccaacaaaaggtgtactcaaaaaaatccgcctaagagagtaccccccaatactgatccgggaaaaaaccaccctgtgaagggccagggagcacacacccaagcatacaatttcgaacac

SEQ ID NO: 61915 - DNA, 909 bp, Glycine max
  Clone ID: PAT_MRT3847_26924C.1
atatatatatattgcaataggctccttatttagtgtccgaaaatctctcccttagtcataccaacaaagcaacaagcactacaaattcgctgtctcagtcccttcgttgccaactattttgcgtaggattttccttcttcacaacctcgtaataaattcgttaagttcctccttgtttggtcccaaaaatctgagaaccctctttcaatttctcttcctcaactccatcattcatcactgtccattattattgttattattaacaatggatcctatggagcttaagcgtgttttccaaatgttcgaccgaaacggtgacgggagaatctcattgaaggagttgagtgattcattggagaatctgggcatcttgatcccggacaaggaccttgctcagatgatcgagaggattgacgtgaacggagacggttgcgtggacatggatgagtttggggacttatacgagtccatcatggaggagcgtgacgaggaggaggacatgagggaggccttcaacgtcttcgatcagaaccgcgacggtttcatctccgtcgaggaactgcgaagggtgttggcctccctcggactcaaacaaggggggacccttgacgagtgcaagaagatgatcaccaaagtcgatgttgatggggatggcatggttaattacaaagagttcaggcaaatgatgaaggggggaggctttactgctcttagttagcctacgtttaatgcaaatcaaagcatgcgtgccattacaaaatctatcaaattttcaatttaattcaattcacatcttgtaaataagtttgcccatctacgagatttcattgattaatgacttaaaaaaaaaaaaaaaaaaaaaaaaaaaaaaaaaaaaaaaaaaaaaaaaaaaaaaaggggggggccccc

SEQ ID NO: 61916 - DNA, 175 bp, Glycine max
  Clone ID: PAT_MRT3847_26925C.1
cgccgcagtaccgtccgaatttccggtggaccacacgttcgcccacacgtgcgcccacacgtgcgaaaaaatataaaagcccttgggcttcatattctggggtgatccacgtatgggttttaaacacatcttgaaagagctcaaagattttcaaaaagattcttctacctcattc

SEQ ID NO: 61917 - DNA, 229 bp, Glycine max
  Clone ID: PAT_MRT3847_26926C.1
acaggagtaacctatgaccctagcggagccttctttcttcagtcgaacattgcataagccagtgggaacgtgtctgacgtgaagcatgctcttggtgacaaagttatagctagctctggatctagacgacatgtgactcaggctagagtgaagtgactgtatgatcagaaccacgatatcatgatgaatgctaaaggacctaagatagaaagagacattctctacctac

SEQ ID NO: 61918 - DNA, 612 bp, Glycine max
  Clone ID: PAT_MRT3847_26927C.1
ccacgcgtccgattagcccgaaattcaagaacaccgtgaggcatttgctacaccagaaaattcgggattcctatatgcaccctcagtttgtgtctgatgtaatgaagccactgcaaattgaacaactcatggaccaggaggttgttaatttatctggtggagagctccaaagagttgctatatgcctctgccttggaaagcctgcagatatctatctgattgatgaaccaagtgcttatcttgattcggagcagcgtattgtggcctcaaaggttatcaagagattcattcttcacgctaagaaaactgcatttattgttgagcatgatttcatcatggcaacatacttggctgacaaggtcattgtttatgaggggcgaccttctattgactgttctgccaatgcaccacagtctttagtatccgggatgaataaattcttatcgcatcttgacattacttttagaagagacccgaccaactataggccacgtataaacaagttggactctacaaaggacagggaacagaagtcggccgggtcctactactacctcgatgactaatgaggaagcacagattcttctggagagccatatggcgcatagtctt

SEQ ID NO: 61919 - DNA, 998 bp, Glycine max
  unsure (1)..(998): unsure at all n locations
  Clone ID: PAT_MRT3847_26928C.1
atgaaatcctcgtgcgttccgcagcttcctttgttcttccctgttctctccttgttccattgctatttcttcgttctttcctttttaatgctattttttacacttatacgcgtttaacagcaaattaaaactcattcatcttagttattcttgatcctcaaagttcacaacttattcatagaacagcacttaatcaagaaggacgttacctcggttaatttcattttctagattgcttatcagtctccaagttgagactttctgagtcagtacacttggatcactacctctggcattggcagagtattccttcaaaggggtaattcatcgtccaaaaattgttggggacaccttgtctttcgagggattgtttgctctacacaaggaattaaacgttatagaatttagtctgcagagaaatttgcaattctgatcagccacattttacctcacttacatccagcatcccaacgatcctgcaacattcgtaattacctcatgagattgaggcgtgatatctttgtgtgctgtttcactagcacatcttcagacacaatgcaaaaggaaaagcacagtaagttgaagtggcgaatctttccctacaaggaacttagaaaagccacaaataattttgatcgatttcatttcattggaaagagaggtggaaagacaggccttatcactcaatatcacggaaaacttgaggatggacgtgagattacaattcagcgctttaacggagaccagcgctacttattacaacagtttatcaatgaaactattatcctaaattacttgcctcacaaaatattgtgtcaattaccgggtgtgcttctcatcatgaggaatctctgctagtgacagaatacctatccaatggcaatcttgctgctcatcttcatagngaaaaggacgaaaagattacactaccttggcttaaacgatggtatagcatttgatattgaaatgcattgaacatcttcacaatatggcatcat

SEQ ID NO: 61920 - DNA, 242 bp, Glycine max
  Clone ID: PAT_MRT3847_26929C.1
ccgcaactccaatgtaagttgacagaccgactaaaagtgatatacaaatttatcatcaagttggctaccttaaatatgaaaaataaaaaataatttggagctttaccccttgaccgggggtttggcctgcctgactaacaaccttactttattggtgggaaacctaacttaattgggtttacgtctagcgaatcatacaaggggatagctagtaaaggaaaccatccattttaccctcagtt

SEQ ID NO: 61921 - DNA, 350 bp, Glycine max
  Clone ID: PAT_MRT3847_2692C.1
cgaggggaggagaaacagaacactctctcgcagaggcatcttaacattcctagtgaaggttaggcgcgtagaaaggacatgttcccacagagggtagattagaatatattgctgctactcggcatacaaacatgcgttgtgcgctttttatggtctcggaacagccttggtccttctaagaggagcagagaaatctgaggctttgatgccttatcacgtggccagagaacaaactgcgactgctctagactacatacttactcggagcagattgcaggaccagattaaggctcgcagactctgtatgataacagatgcctgcattagccataagagattgttaagaacca

SEQ ID NO: 61922 - DNA, 253 bp, Glycine max
  unsure (1)..(253): unsure at all n locations
  Clone ID: PAT_MRT3847_26930C.1
gttcctggagagngaactagagttcctatgtataaacagagatagtttagaagggtctaatgggtctagtctacttccaaaaaatgtaaaaagtcaccacaaagtggaggtaaaaatgagtttcggatgaacaatattttaggcnataataggtcataatatcnaaaaaataatgtccaaatgtcaagtataattgtaaaatcttatganatgtccaaacacttttatccaagtagncgtgtccaagtnaaac

SEQ ID NO: 61923 - DNA, 241 bp, Glycine max
  unsure (1)..(241): unsure at all n locations
  Clone ID: PAT_MRT3847_26931C.1
gcgcggaacgacngctacagcttgnaggtgggatncaatggacgtaaactaanttttgaggggagtccaanaagcattagagatagccatanganggtaagaganagccatgatggtctcatcatttacgcancatgggcgctgttcttctcgnggnngagacangnaagagntncaagctacgagnagnaggaaggatatggaaagaacagcagganccggcnagtggagtntgcatacc

SEQ ID NO: 61924 - DNA, 489 bp, Glycine max
  Clone ID: PAT_MRT3847_26932C.1
cacgaatttcatgaacttgtaatgacgactgggaatgatccaaatgttgagggctttgttggtggcttaaggcttgcttgggtggtacatttgagttgtgtaccatagtccaccatttgttttatctttctgataaaatactaatttctcaggtcatgagtgtaaaagcagttggcattgcgataaaacttacactggaaggtgcaaaccagactttccactttcaggcatgggtttttgcaatggtttctgtcacctgcatcattgtccaactaaattaccttaatatggccggtgctattttttttttctgtgcataattttttgcattacacattagctagctgttaaaaccaggtgtgctttcttcagatactttgttgcattctgttgctttgttttctgtgttttacatgtataacatatcctattgaacatgagttaggctgtttgtgtttgttgaaacttgtgattgatgaaaactatgtg

SEQ ID NO: 61925 - DNA, 360 bp, Glycine max
  Clone ID: PAT_MRT3847_26933C.1
tttacgcgtgggcggacgcgtgggcaagatgtcaggattgaatatgatgcatgtacaatttcaaatgattgtggttcattggttgttgccaaggttgtaaatcacaaacaaattgttggtttccatgttgctggaagcaaaggacgactgggatatgcttaattgaataccattggtgcgtcaagatggggcaagttcaaagggctaaactttacttggattttttccttgggagggtgatagccaagagggtagtggttaaattggggaattggaatttgggggctaatgttcactgcctaccaaaactaaattggtgggaacttccaaggaatggcaactggatttaccttgtgaaaa

SEQ ID NO: 61926 - DNA, 235 bp, Glycine max
  unsure (1)..(235): unsure at all n locations
  Clone ID: PAT_MRT3847_26934C.1
tcagaattcaatgacaatagatgcancacgcctccaatataaattcagaanacatgaagggnnngaaaaagttggaaaagtggaaaactcatggagcctattggcaactcttgtgagtcttctttttacaaagatgaanaagtggaagctgnggatcttcttctcgaggagtgctggttcttgataacttgttaaagataggccncaaggatgacaaggtgtcactctgatcctt

SEQ ID NO: 61927 - DNA, 304 bp, Glycine max
  Clone ID: PAT_MRT3847_26935C.1
gcccttcttcttcatcatcacgctccaaactcctccccattcttttaagctcttgtttcctctcaacatcactttcactcaatttttcattttcccaacattgcatgtagcagatccaaagctttcatacggactccaatgtcttgagtgtatgggttggaataaatgaagccgcagctcaaaattgctcttgctttagttgttagcttgctttggattcagcaatcattttgtgatgaaacttctgatacatctagcttaaacaagtggaggtgtagatgttctttccaagggaaccaaagct

SEQ ID NO: 61928 - DNA, 109 bp, Glycine max
  Clone ID: PAT_MRT3847_26936C.1
ccacgcgtccgagggcgcgaaacctacttccataacgcgagcggacgctccttgcattttatgacgcgcttacttgcatacatccaatattagcatatttaatctgatc

SEQ ID NO: 61929 - DNA, 339 bp, Glycine max
  Clone ID: PAT_MRT3847_26937C.1
gtgagacatagtttgacatcaatctctctccatctggctaagacggtcaactttgatgctgaccacagaaacacagcgcagcacacctcggcccatttcagccggcaactctggaaaaagccaaatcattctggaattttcattcatttgagagaaaagagaaaaacaacagttctttgtatctgctgaacgtggtgacatgattcgattagaataattgacataaccaattcatctattcattatatgttcaatctttcaacggattctgactgatgaacgtggagtgttgccttacatgatcgccaatacacgctttatcatatcgatacaaactct

SEQ ID NO: 61930 - DNA, 245 bp, Glycine max
  unsure (1)..(245): unsure at all n locations
  Clone ID: PAT_MRT3847_26938C.1
gtcgcatgcacgcgtacgtaagctcggaattcggctcgaggttattttaatgttatattctggtaaaaaaaaaaaaaaaaaaangggnggccgccgactagtganctcgtcgncccggganttantccnggncnggnacctgcnggngtaccagnttnccctanagtgngtcgtattanagcttggngtaatcanggtcatagctgttncctgngnnaaattgttanccgctcananttccanan

SEQ ID NO: 61931 - DNA, 266 bp, Glycine max
  Clone ID: PAT_MRT3847_26939C.1
cggctcgagattgtctcttatcatttgttcattgaagaacagagacctgtctggaaaatcgatctctacaaattcaattaaataatgatccccaaatgctgaaaaagtgaaatacagcaattcaacagataatagagcaatgtttagtatattcagctgtatctgtagaaactctttgacgaacctcaatttaaccaatttgatgaatacccagttctcttcttttctagagaaagatagttgcaacctcacctccctcactcaac

SEQ ID NO: 61932 - DNA, 741 bp, Glycine max
  Clone ID: PAT_MRT3847_2693C.1
gttttctctccctcttcgtattaaatattttaacactagttccttacttgaaatcataccttttatttttttggtgacttagccttaagccttcataaaaactgtcctttgatttcagcctttttcttcttcaaaaactgttgtaggatggaatgctaaaacacaaaggtacatatgaaataatatcacctgaggacattggacttgaaagaaccaatgaagtaggtattgtactgggaaagcttagctttctggacttatgtaagtcctcatggtacaagcataccggttatatttgagtgagtgcacaagaagttgtctgactatggcaggatgaaactctgcggataatgatgattcttggcctgctttattttgatgctcagaagcattctacttgttcatccatgcctggtggttgatatcagtggttgccatgctttgagaaagcgacttgaagttactatcacagtactttttgaggaagatggttatgtcttgcatgagtggccctgtataggggaaaatcccacttgaattacggacttgacctgagaagaatgtttgaggattattactcttctcattcttctagacttctagttatttttcttatttgtattttattactatttcagtacgttatatttaaatccattcccatctgattggatgatcatgaattaccttcctgcttgtatggattatacattattatagatatatactagctcttacttt

SEQ ID NO: 61933 - DNA, 289 bp, Glycine max
  Clone ID: PAT_MRT3847_26940C.1
cccacgcgtgcgtccacgcgtccgaacagcattcgatgcagtgacggtgaccttccaacaacagcactgacggtgcaaaaaatgtctctggtgacgagcgaggatatccagcacattctgcgtgtgctgaacaccaacgtggatgggaagcagaatatactgatcgcaatgacctacataaagggtattggatggagattctccaacatcgcttgcaagaaggctgatgttgacatgaacaaaatggctggagactgagactgctgctgagtagaatagtgagatgact

SEQ ID NO: 61934 - DNA, 491 bp, Glycine max
  Clone ID: PAT_MRT3847_26941C.1
gttttctaaacataaacattttattacttagctctgttgtcctttgacttaatataaaataaaaatttctattattttaaaaactttaactcttatttttgaactgttagatttaagtaaaacaagttcatactttttttattctcttgaggaatgcccatggggcattcttgttgagagtttcgtcaaatatcaaccagcgtttttgaatttcagaacttacatcccagtaagatgcgcccttgaaaggtaagtctagctggctacagagattaaggttctctaacatttgcttggttgccaggtgtttccgatgagactaaagatgttagaaaatatgctgaggtccagcccttagacctgtctgactgatggacagtgttctgttcttttatatgagtagatatgtcatataatatatgaatgtttatatataaagctgactgtctcaatgtattttattaataaaatgaacctatttgtttctctgg

SEQ ID NO: 61935 - DNA, 348 bp, Glycine max
  unsure (1)..(348): unsure at all n locations
  Clone ID: PAT_MRT3847_26942C.1
acgcgtacgtgaaacgcgaagacacactcatccacacccaaatccactgcgtcccccaccacgcgccgaggaagccgcacctccgcttccccaaatccactgcgacttctcctccacgcgcccccacgtccccgccaagaaccgcgccctgcgcgttcagtccacgcgcctctgggccgccaaggtcctctccttctccctcctcttgcgcgaccacctgctnctccgcgccgncgncttcaaccactcctgcgtcctctgcgtctccgctggcgccggccaggaggtcgccgcgctccgcctnctcggcatcgacgacgtcaccggcgtcgagatcctcgagtcccc

SEQ ID NO: 61936 - DNA, 474 bp, Glycine max
  Clone ID: PAT_MRT3847_26943C.1
ctagagcgctgagaaggttgaggacagcgtgtgagagagcaaagagaacactctcttctaccgcgcagacaactattgaaatcgattctttatacgaagggattgatttctatgctacaatcacgagggcgaggtttgaggaaatgaacatggatttgttcaggaagtgcatggaggtgttgctgatgctcttaaagctgttgacctgtatctggagcaaaacaatcttcaaatggaggttgaggtggagaccaggactcttgaggaagtggaagaagttttacattattcatctcaaacaaagacttctttgactcgaataatgttggacaatatggttgtacctctaccaaatggggatgtggacatatctatgctaaaagaagctgtgcagttgataaatgggagatatgagactgaggcatcaggcaatgtcacactagatactgtacataaaattgggcaaagcggagt

SEQ ID NO: 61937 - DNA, 3419 bp, Glycine max
  unsure (1)..(3419): unsure at all n locations
  Clone ID: PAT_MRT3847_26944C.1
aaaaggtgaacagaacgtgcttattttcgaccttggtggtggcacttttgatgtttcaatattgaccatcgaggaggggattttcgaagtgaaagccactgctggtgatactcatcttggaggtgaagattttgataacagaatggtgaatcactttgtttctgaattcagaaggaagaacaagaaggacatcagtgggaatgctagagcgttgagaaggttgaggacagcgtgtgagagagcaaagagaacactctcttctaccgcgcagacaactattgaaatcgattctttatacgaagggattgatttctatgctacaatcacgagggcgaggtttgaggaaatgaacatggatttgttcaggaagtgcatggagccggtggagaagtgtttgcgtgatgccaagatagacaagagtcatgttcatgaggttgtgcttgttggagggtccactaggatccccaaggttcagcaactcttgcaggatttcttcaatgggaaagagctttgcaagagcattaaccccgatgaagctgttgcatacggtgcttcagttcaagctgccatcttgagcggtgaaggagacgagaaggttcaggatttgttgctgctggatgttacacctctcagtctcgggctcgaaactgcgggtggtgttatgactgtactaattccgcggaacactacaattcccaccaagaaggagcagattttctcaacctattccgataaccaacccggggtgttgatccaagtgttcgaaggagaacgggctagaacaaaggacaacaatcttctcgggaagttcgagcttacagggatccctccagcaccaagaggagtgcctcagatcaatgtctgcttcgacatcgacgctaacgggattctgaatgtctctgcagaggataagactgctggtgtgaagaacaagatcacgatcacaaacgacaagggtaggttgagcaaggaggagattgagaagatggtgaaggatgcagagaggtacaaggcagaggatgaagaggtgaagaaaaaagtggaggctaaaaattcgcttgagaattacgcgtataacatgaggaacacgataaaggatgagaagataggagggaagctgagcccggatgagaagcagaagattgagaaggctgtggaggatgcgatacagtggttggagggaaaccagatggcggaagtggacgagtttgaggacaagcagaaggagttggaagggatctgcaaccccatcattgctaagatgtaccagggtgctgctggacctggtggagatgttcctatgggtgctgacatgcctgctgctggtgctggacctaaaattgaagaagttgactaagcttgtggaatatcactaacttcaactttgggttgcttctttcttattaggtgctctgccagagatgtaagctttaataatgtaagttttagtgatgtaaggtttcatgaatcgtgaataaggtctttttagtttcatgtgaatttcagagatgatggagcttgagattaatgtaatttttatactgtttggctttttaatgtaatgtgatttaaaaaccctttatccttcaananncngatcaggttatttttccantgttatgacaaaatgatataacttttcctcaaaggtcactcccaactttcatgccatctgcattgcctatcctcctctctggttgaagtcccaaaacaaacttgataaaatcttcaaattaatagtgccagaaacaccagtcaataatttccccaacttcgaaatcacgaattttgaaactgaagagaaaatattctcaaattgcgtttgaatatggctataagcgtgtgcaacaaacaagaattcttgctatgacccgttttttcacgctagagagatccaccacagcgtttccacctccactaagcctctcacttaaactcccaccgcaatcacattcaaaaggcaagaggctggtgataatgtcggcaacttaagtcacaagctctaggagaaaatacaagcacgtctctctccaaaagccttaccactcagtatttgggttcatttcttatagcctctcacttaaactcccaccgcaatcacattcaaaagtctgaatcatgttttgcaaactttccacaagggcaggaaggttgatcataatgtttgccactggaagttacaatctttaggatatcatatcagtcctatacgatatatcctgcggtgcacccaacttatgatttgaaggggattatcaaggaagcacttgaagtagatgctggggatacaggtgaggtaacatgcttggccacctctcaatttggcatgagaagtggaagcttatttataggcaaaggaggatgtcatcattgctggaattgcacctgcggagatgatatttcatgaggatgatccatctatgtaggtagagtggagtaaaaatgatggagattttgtcagtaaagggctacactttggaagagttcatggacgggctcataacattgttgtagctgaaagagtagtgctaaaactttatgcataggatgagtggcactggcaactttaatgaaggcaatggcaaatgcagcataccctgcatatatgttggagactagaaaaactgctccaggtcttcgtttagtggataagtgggcggtattaattggtggaggtcggaaccataggatgggtttgtttgatatggtgatgataaaagataatcatatatcagcagctggaggtgttgctgatgctcttaaagctgttgacctgtatctggagcaaaacaatcttcaaatggaggttgaggtggagaccaggactcttgaggaagtggaagaagttttacattattcatctcaaacaaagacttctttgactcgaataatgttggacaatatggttgtacctctaccaaatggggatgtggacatatctatgctaaaagaagctgtgcagttgataaatgggagatatgagactgaggcatcaggcaatgtcacactagatactgtacataaaattgggcaaagcggagtgacctacatttctagtggttcgttgactcattctgtgaaagcactagacatctccctcaaaattgataccgaattagcactcaaagttggaaggcgcactggacgagcttgattggccttcttaagatattactattatctatcaatattttgtatcgggtttttttccccctattttgtcacttttgtgtgactttttttttttcataggcaaataaaacaaatatatattatggagcacaagaagtgccatgatacacaaacagagttacccctatgctgatcaagacaggaatcttgttattcgtgaaataatatattgctaccatataaaataatatataagtggttaccgaaacaaaaaaaggcgccgccga

SEQ ID NO: 61938 - DNA, 922 bp, Glycine max
  Clone ID: PAT_MRT3847_26945C.1
aaccaacccggggtgttgatccaagtgttcgaaggagaacgagctagaacaaaggacaacaatcttcttgggaagtttgagcttactgggatccctccagcaccaagaggagtgcctcagatcaatgtctgcttcgacatcgacgctaacgggattctgaatgtctctgcagaggacaagactgctggtgtgaagaacaagatcacgatcaccaacgacaagggtaggctgagcaaggaggagattgagaagatgttgaaggatgcagagaggtacaaggcggaggatgaagaggtgaagaagaaggtggaggcgaaaaactcgcttgagaactacgcgtataatatgagaaacacaataaaggatgagaagattggagagaagttgagcccggatgagaaggagaagattgagaaggctgtggaggatgcgatacagtggttggaggggaaccagttggcggaagtggatgagtttgaggacaagcagaaggagttggaagggatctgcaaccccatcattgcgaaaatgtaccagggtgctgctgctagacctggtggagatgttcctacgggtgatgatgacatgcctggtgctggtggtgctggttctggcgcgggacctaagattgaagaagttgactaagcttgtgcatgtgactaactcaaaaactttggttaggttcttgttatttggtctaataatgtaagttttagtgatgatgtaaggtttcaggaatcgtgaataaggtcttttttgcttcatgtgatgagtgtaatatcagagatggagttgagattaatgtaattttttatacagtttgggcttttaaaatatgttttgattcagaaaaaaacgtttgttcctgtctgctttatcaattccccggagaaaattatgacgctttcttttcatgcatccc

SEQ ID NO: 61939 - DNA, 612 bp, Glycine max
  unsure (1)..(612): unsure at all n locations
  Clone ID: PAT_MRT3847_26946C.1
aattcggctcgagtagcagaagacgacagaaggggagaatcagaataaaggtcacttccaactttcatgccatctgcattgcctatcctcctctctcgttgaggtcccaaaacaaacttgataaaatcttcaaattaatggtgccagaaacaccagtcaataatttccccaacttcgaaatcacgaattttgaaactgaagagaaaatattctcaaattgcgtttgaatatggctataagctgcaacaaacaagaattcttgctacgacccgtttttcacactagagaatccaccacagcgtttctacctccactaagcctctcacttaaactcccaccgcaatcacattcaaaagtcaggagggttgttaaaatgtctgcaactgaagtcacaagctctaggatatcatacgagtcctttgcaataaagcctcctgagcacccaacttatgatttgaagggcattatcaagctagcacttgaagaagatgctggggatcgaggtgatgtaacatgcttggccaccattccatttgacatggaagtggaagcttattttttggcanaggaggatggcatcattgctggaatagctcttgcagagatgatatt

SEQ ID NO: 61940 - DNA, 498 bp, Glycine max
  Clone ID: PAT_MRT3847_26947C.1
tgctctatgatatttctttaaccgtcattgcatccaacaatgatattctcagttggatttacatctaacggagtgtttttctagttgattaatctcgtgcctgtaattggtctgcgaagaagctggacagaggggctcgcgagagagaaacatcgttactttaacgttagttcatgttgtactgttatttattttgcttcttactgtagttacttctcaaacgaattgaagaagggtagtggggtccacagtttaaggcctgtgattttttgtgctgagaagatgacgtggcgtttggttggttttgttttgttttagacttaagagagggactcatgtggtagagggcgaagagtatgattgtgtggccaaatgagtggatggatagataaaatgttcaacaagtgtaagggtctcaatgtaataatcgacatgtatgtatagacagtgtaagactcggatagatatgtgatatgtcaatagaatcgattaaattgc

SEQ ID NO: 61941 - DNA, 410 bp, Glycine max
  Clone ID: PAT_MRT3847_26948C.1
gaccaatggaagggcctcgatcgctttgtcttcgatgctcgtgtaagtgtgttttttaattttgataaacttggtgttgcttactctcaaacactgttttaggtttattgaacataattggcttaattacgaatgtagtgtaaaattattttaaatgatttaatttgatttctaaatttttaaatttgaaagattttacttagatcttcaattttttaaaaataaattaatttagtttttaagtttttaaaagattcgattttatcttaaaaataaatcaatttaatttttaaaaaattcaatttgtttctttttgaattcttaaaatttgagaatcaactaaatttatttttaagaatttgagaattaattagatattttataaattaaaactaaattaaattattttt

SEQ ID NO: 61942 - DNA, 448 bp, Glycine max
  Clone ID: PAT_MRT3847_26949C.1
ctcgagccgaatcggctcgagtttcatggttgatgatccaatggcgataactgaagaaaccacacatgttcctcctcggaagcgacagaatcttcttctagaaataccctcaagaacagaagagagttctcaagaatttgttgcaatcaaaatgccaccgacacccagttccaatcccactcctactccaaagagagtgaattttcttgtatcggacaccggcagatattgaaaaaccaaatactgcagctccagaagtttcctctacaggcactggagaaaagccttcaatctcaagatcattgtctcttactaagatatttactcctaggattaagagagcgtcgtcattaccactagatgaaattagacaatcaaacaatgaatcttctcaaggtgggagtgttggtggtcccttaaataaaagagaagcacagcggaagatagc

SEQ ID NO: 61943 - DNA, 702 bp, Glycine max
  Clone ID: PAT_MRT3847_2694C.1
agacagcgctatgaccgcgtacgcacgcgtgcgataacctggatcgcgccagaccggccgctctcgatctagaactagttttaatgttttttgaacacgccatagcttgcatattcggccacccggggctgaaaccccaagatcacctagggacccaccaccgataacttcgacatcaacgaccatttggccagccattagttcaaaaaatccatctagcttatgtattctacatttaaaaaaaaaaaaaacaaaaacaacacaaaaaaaaaaaaaatacaaaccaaaacaaaaaaacaacacaagtctcgcacaaaaaaaaaaaaaaaaaaaacggcggcccgcccttttcttttttttttttctaaaaccacgcactaaaaaaaacaaatccccgtcacccatttaaaaaaacattccaacgaaaaaaggtttactttttcacccccccttaaatcccacccaattttaaaccacacaccatttccaaaaaccttttttgggggggaaagaccccaataaaaataaaacaaaaaacccaaggccattataataaccctgtcccctaaactctttacccccaggcccacccaaggggggcacacaaaaaaaacccaaaaccccaaacaggttttttgccccatgtgaaaacaatgctagacaaaaaaaacccttatttcgcccctccccgacaaaaactaa

SEQ ID NO: 61944 - DNA, 438 bp, Glycine max
  Clone ID: PAT_MRT3847_26950C.1
ggaacaaaaaaaaattttttttccttaagcccccccttttagggccccatggcccaaaaggggttccgggcccaatacttaggggggggaaccccaaggggggggcattttttgcccccacaaaaaaaaacttttttttttcccagccaaaacttaaaaggggccctttttgccccagcaaaattttttattgccccccctctaaacaaaattttttaacccaagggttgggacttaattttaaggattattttttttggcccctttccccctaataatcccggccctttgggggggccccccccccccgggattattttttttttttcccccgggcccaatttccaattttatttcccggggctgggaaagttttttttttttttttggggcccctaatttaattttccgggcgggggttttaaaacgggggggggg

SEQ ID NO: 61945 - DNA, 2212 bp, Glycine max
  Clone ID: PAT_MRT3847_26951C.1
cacgcgtccgctttgtaacaggaaatgttactattttagttgtctcagtcatcattcatctcttgcatgcacccagcaatgtccggtatgggcattattggtgtctccaaggactgaaatttatttgcaagttggcttgctcttggaatctcaaattctgggtttcaagtttatttgctacagcaaaatgactagtacagaggaaaagcctgtgactgtgagtgaggaacatgatgcaagttcttgcagaagaacagtttctcttccagttcaaaaggttgatgatccaatggcgataactgaagaaaccacacatgttcctcctcggaagcgacagaatcttcttctagaaataccctcaagaacagaagagagttctcaagaatttgttgcaatcaaaatgccaccgacaccaagttccaatcccactcctactccaaagagagtgaattttcttgtgagttctcgctctgttgatcctccaacatatcattctcctgggccttcaacatcaagaagcaaatcatccattagaagcctgcttccaaaactgagcttcaggtatcgaacaccaacagatattgaaaaacctaatgctgcagctccagaaatttcctcttcaggcattggagaaaagtcttcaatctcaagatcattgtctcttactaagatatttactcctaggattaagagaacgtcatcattaccactggatgaaattagacaatcaaacaatgaatcttctcatggtggaagtgttggtggtcccttaaacaaaagagaaacccagcggaagatagctcgctctctttcagtacctgccaacgacaaggataaaagcataaggaggatggattcatttttccgtgttgttccttccactcctcaagtaaaagaaggaaatgaattgttggccacacccacaacaaatgacactgaaaatgaagatgctaatggtgaagatatagctgaagaagaggctgtttgtagaatctgtctggttgatttgtgtgaaggaggcgagaccttcaagttggaatgcagctgcaaaggtgaacttgctctggctcaccaagaatgtgcaattaaatggtttagtataaagggtaacaagacctgcgatgtgtgcaaggaggaagttcgaaacttacctgtcacactattacggatccaaagtgttcgaaatcggaataatggtggaaataggtctcaacttgaagatgtaaatggatacagagtttggcaggaagtcccagtgcttgtcattgttagcatgcttgcctatttctgtttccttgagcagctattggttggaaaaatgggaactggtgcaattgccatatctcttccattttcctgtgtattgggtctactctcctccatgacatcatcaacaatggtgaagagcaggttcatctggatttatgcatctgctcagtttgctctggtggttctctttgcacacatattttactccgtggttcatgtgcaagcagttctgtcaatccttctggctacatttgctggctttggtgtggtgatgagtggaagttctattcttgtggagttttttagatggaggagaagagtgcaggctctacaagagcagcaacatggcccggcagcacaaaatcctcgaactccaaacacgccgcgtccaggttcagggtcaggtccttccaatcacagtcaacctgtggtgcaaagtcaacagaactcaaatcagagctgaattgatgtgtttgtggtttctcttaacactaggggttgcagctgattgcttttcattctggatttggaagtacttattgtgtatagggaattaaactttattacttcgttacatattagacttcattgtacagattatggtagcgatagagtgacttagaatgtagctcatgctatgaaatttctgtctgtttatttgtactgggaacttcaattttcaactcatcaaaaccagaaggcttctggccttcctttttgcaagagtgacttagaatatagcttctcatgctatggaatatctgtttgtttatctgtactgggaatttcaattttcaactcatcaaaaccagaaggcatcttgccttcatttttgtaggcttgggtgaggtaatgattttgtttttgatcatgagagtgatgaagaagttttgttttttagtttgtcttggaggtttgatcatttgatggggcaataccaaat

SEQ ID NO: 61946 - DNA, 697 bp, Glycine max
  Clone ID: PAT_MRT3847_26952C.1
aaatctgaaacgttaggtgttttgagacattattgttgtaccacgatcgtactgcaataattcacatattaataatactactaccttcccgattgattctgtttgttgcagcgaatggttagaggaggcatcaccaaagcaagcttgtcgcttctcgggggagctaagagagccaagagtggactcagcaaattctcaggcactgctcaacctgcagaaagctctggaggagtttcaaagagtggtgggaagattgaggattcagcttgctggatcccacacccacgcacaggaatttacttcccaaaagggcatgagtgggtgatggatgatgttacagaggatgcagctcgtttaagccaaacttattggttcagaaatgttgatggtgttgacaaccccggacactaaccataatatatgtttcacaacaattattacgtaatccggaatcatatggtcctgaataatattcatgtggcatgttatcaactagttttcatacattagaaaatataccaatattatataaagattagtgtagtcttggaccatttaataatttctcttagttgaaggtgcaactgagttgtgactttttaagcatgcataatgactatttgtatcataaaaagtttattaagctatctgtatcacaagtttattaaacgtgcgtgatgagtctctttgctttttc

SEQ ID NO: 61947 - DNA, 241 bp, Glycine max
  Clone ID: PAT_MRT3847_26953C.1
gtcgactactgctgagaagaggctgatgagagacttcaagaggctcgtacaagacccaactgatgggatcaaaggtgcccctcaggataacaacatcctgctgtggaatgctgaggtatttgtgactgatgatactctatgggatggaagcacgttcaaagtaacgctccactgtactgaccactatgcatgtagaccactgattggactaagtgtgactcccatgtctgctccgagtgtt

SEQ ID NO: 61948 - DNA, 297 bp, Glycine max
  Clone ID: PAT_MRT3847_26954C.1
gccaggcgacacactattcgcgattatatgagatcgagggatcctgttattatggggatgatgataagaacagacctttggttctgaaaaacaggcgtacaagatggcgtgtacaggaacaatgtcggagccttaattatgctggacgaataacaggtgcgtgagatcaaaacttgcacttgattgctgccgcccaaccagctgctggggcacctacactcatcttaaccagctccaccggagcacgataagatcattgtgttagtctgcaaatgtttgaaggacatgtttaccatg

SEQ ID NO: 61949 - DNA, 501 bp, Glycine max
  Clone ID: PAT_MRT3847_26955C.1
tccaaaaccatttcccatcattaagcctattccaaagataattcctattgctaaacctattcctattccgatttataagcctatatcaaaatcaattcccattattaagcctgttccaaagataatccccattattaaaccaattccaattattaaacctgtaccaaaaccaattcccattattaagcctgtcccaaaactaccacttcaccctaaattcaagaaaccaattctaccaccattgccaattcacaagccaattccaactccataagaggataatactctatatctcgagctatatagttatccgttccatttctaatgcctttataagtaaagctgcatcgtatctcaattaaatttcgtactcttctcgtatactgtaatggaaaaataagtagttgatgctctctgttcaatgaagttctcggggttatcatgtgtagatcgattatattaatgcaaaagattgtatatgcagttattccttattatttt

SEQ ID NO: 61950 - DNA, 1685 bp, Glycine max
  Clone ID: PAT_MRT3847_26956C.1
cctaattctccaaattttctggctcctctgcgtgctcgttgaatccatcctaagtgacttgcttgctgaaggcgacacgaggtcggtagaaactaagaatgggggaagagaatgaagaaacaaaaacatttaaggatttgggcttatccgagtcattggtggaagcttgcgaaaaattgggttggaaaaatccattaaagatacagacagaagcaattcctcttgcattggaaggaaaagatgtgataggacttgcccaaactggttccggtaagactggagcttttgctcttcccatattgcatgccttattagaagcaccacgcccaaaagatttctttgcttgtgtgttgtctgccacaagagaacttgctattcaaattgcggaacagtttgaagctctaggttctgaaattggtgtcaagtgttccttgcttgttggaggaattgacatggtacaacaatccatcaagatagcaaagcagcctcgtcttgatgttgggactcctggacgagttatagatcacctaaaacacactaaaggattttctcttagtagattaaaatacttggtcttagatgaggcagataggttgttgaatgaggactttgaagaatcacttaatgagattttacaaatgattcctcgtgagcggaggacatttctgttttctgctacaatgactaagaaggtccagaagctgcaaagggtttgtttaaggaatcccgtgaagattgaagcatcatctaagtattccactgttgacacattgaagcagcagtatcgctttttgcctgctaaacacaaggattgctaccttgtatacattctcactgaaatggctggaagtacatcaatggtgttcactcgcacttgtgatgcaactcggcttctagctttgatccttaggaatcttggtctaaaggccatccccattaatggtcatatgagccagtcaaagagacttggagccttgaataagttcaaatctggggaatgcaatattctcctttgtactgatgtagctagtagaggactggatattccgactgtagatatggtgattaactatgacattcccacaaactccaaagattatatacatcgcgtgggaaggactgctcgtgcagggcgctctggggtcgccatttcccttgtaaatcagtatgaactggagtggtacattcaaatagagaagcttataggcaagaagctaccagagtatcctgcacaagaagaggaagttctgcttttggaagagcgtgttggtgaggccaaaagattagccgtcatgaaaatgaaggagactggagggaagaagaaacggaggggcgaagaagattatgatggagaggatatagacaagtacttgggtctcaaggaaggaaaatcatccaaaaagtttagaagaagatgagatcatatcactgccaatgagtgaattaatgcgacggataaatgaatcatatgaagccatgaaaaattgaggatagactgagatgtcaagcaacttgtgcgttgtagtacaattttgagcaaatttttgcattaaattaaaaaaaattgtatactaattgattgactatataaacaattttctagttatatttttgaaacgaatgtaaccatctaagtcgaacttacttggtttttgttgatggctgagaacgtttgacttgtgttt

SEQ ID NO: 61951 - DNA, 253 bp, Glycine max
  Clone ID: PAT_MRT3847_26957C.1
tctccacccaagcagggatgtagctgttcttgacttctcatacaagtttgataagaatatggtcaacgccaaacttcaccttctagctgtccctaaatagtttccttgggctaaaactgtatctgctgaagaattttcccctcaatggaaaatcacttttcttgaccacctttaaagcttcaagaagtggttagaggagttagaccccttccactgcttgaactggcaaacttattcaatagctaccatttaa

SEQ ID NO: 61952 - DNA, 979 bp, Glycine max
  Clone ID: PAT_MRT3847_26958C.1
ctgctcgagcggctcgagtacggctgcgagaagacgacagaaggggaagccttcaaatattttcctttttagctttgattagagtggcctagttgttgtttttctcaatgagaagggtttccactatgcattgcgcactttggcgcttctgtgttcccttgttgctacttgctagcttcagttatgctccttttgttttggcgacaactgaaatttcagggaatgaagtgagcactgatggaaaggttttaaatgaagagttagcaaaacctaatctacaaggacatgatgaagaagcaaagtttaaaggatttattccaaagccaattcccatagtgaagcctattccaaaaccatttcccatcattaagcctattccaaagataattcctattgctaaacctattcctattccgatttataagcctatatcaaaatcaattcccattattaagcctgttccaaagataatccccattattaaaccaattccaattattaaacctgtaccaaaaccaattcccattattaagcctgtcccaaaaccatttatagtgaaaaagcctatccctgttgagtcggaggaatttctaaaaccaaagcctttcttcaaaaagcctattcctaaactaccacttcaccctaaattcaagaaaccaattctaccaccattgccaattcacaagccaattccaactccataagaggatatataatactttatatctcgaactataaagttatccgttccatttctaatgcctttataagtaaagctacatcgtatctcaattaaatttcatactcctctcgtgtactgcatgtaatggaaaataagtagttgatgctctctgttcaatgaaattctcggtgttatcatttgtagatcgattatattaatgcaagagattgtatctgcagttattccttattatttaaataatgtttttaaaaaaaaaaaaaaaaaactcgagactag

SEQ ID NO: 61953 - DNA, 314 bp, Glycine max
  Clone ID: PAT_MRT3847_26959C.1
tttctctcgcaagattctctttcttcctctcagaaagctggtctgcaatccatagagttttgccttttccccttttcagcattgatcatttgattacacagtgcatgcaattgagtatcagtgttttcaatttgatagaagatattgattcattgattctttaggtcgatcattcgccatgaatgaaagcaagacaaagaatctaaatttgatagaattgagtcaaaatttcgccatgagtttctctgaccatactccatccttcatgaggtcaccggcgtcattttccacagacaccgatgccattgacgtga

SEQ ID NO: 61954 - DNA, 329 bp, Glycine max
  unsure (1)..(329): unsure at all n locations
  Clone ID: PAT_MRT3847_2695C.1
ggctatcacgggtgacgaagaagaggcaccatgcctagcactgtatacgtctgccgctctgctagcacttctgtgttcacactccaactataagatgctctgccccagttctaaaccctcaagagggcggactagaggtcaacaagaatgccaccggctctatagcctgacctgtacagaacttgangctactgtcatgtcggagaggcaaccccatcgatgactgttggaggcgggaccccccctgtaagcataacaagctgacgctaacagactgctcaatcgcactcagaagaaactacctcggcgggagatactggaggacctat

SEQ ID NO: 61955 - DNA, 727 bp, Glycine max
  Clone ID: PAT_MRT3847_26960C.1
cgcaaagagcaaccgaaattaaaacgcagaagaagtagaagaaactcgcgtcgtgtggtgaatcaaattcaatccgcagaagaaaacatgttactctttgcaacacttcttctcttttctctgcaatcgagtatcttaacaccgattccagtaaaacccactaaactctcttcgaatctctccgtcaccaactccgcctcttacggcgagagaatcagcagtagcacgcgccggagaaccatttcacccttcgaatcccgaatctcactcattttcgccctcgctcctcaagccaacactctctcccagcgacttctagcggacgtggctgccgagactgcgaaatacgtgtttccgaagagatttgaaaaccgcaatctcgaggaggcgttgatgagtggttattactactaattagttaattttcatcctctaatatatatatatttctgttaatttgttcctttttattgcgtaattaatcgtttctgtgttggagcttcgttgcagttccgaaccttgagactgtcgagttcaaagttctgagtagaagggaccagtatgagattagggaagtcgagccttactttgtggcagagacaacaatgcctggaaagagtgggtttgatttcaatggtgcttctcggtccttcaatgttctggctgagtaccattttgggtagaatacaactaaggagaaaatggagatgaatacacctgttttcac

SEQ ID NO: 61956 - DNA, 322 bp, Glycine max
  Clone ID: PAT_MRT3847_26961C.1
ggcggaggaaccggaaagcaccgtaaccaccggcgcccccgacgaatcgctgttcgataaaatcaccgaaaagcttcacggccacgattcttcttttatttccttttgggattccgattccaaaaaaaccgttccttcgtccgtaaaggatagggtttttcgccttttcgaaagggaaagacccgttcactccgttttgggccccggaaaacctgttgatgtttatttggggaggaccaaaaaattatctcctggcttccttggcgaacccactgctgttggggtccttttggagttgcttagatataacctgatcactttg

SEQ ID NO: 61957 - DNA, 190 bp, Glycine max
  Clone ID: PAT_MRT3847_26962C.1
gctctgtttctgcctctgagtaagcggctgaggaggccgaaccagcgaccttgtgggcatctcgcaaagtttaagtcatcatgggtaaggaaaagactcacatgaacattgtcgtcactggacatgtcgactctgggaaggcaactaccactggtcatctgatctacacgcttggacgtattgtcacgcg

SEQ ID NO: 61958 - DNA, 2583 bp, Glycine max
  Clone ID: PAT_MRT3847_26963C.1
tgataaagatgatcagttggctgtagaatttgttactgcagctgcaaacataagggctgcttcatttggcattcctctccaaaacctttttgaagctaaaggtattgctgggaatattgtgcatgccgtggcgactacaaatgctgtgattgctgggttgattgtcattgaagcaatcaaagtgctgaacaatgacattaaaaattatagaatgacatattgtctggagcatccagcaagaaacatgctgcttatgccggtggagccatttgaacctaacaaatcttgttatgtttgttctgagacacctttatcgcttgaaataaacaccaatcgttcaaagttgaaagacttggtcgaaaaaattgtcaaggcaaagcttgggatgaaccttcctcttattatgtgtgcttcaaacctgctttatgaagctggtgatgttgaggatgacatgggtgctatttatgaggccaaccttgaaaaggatcactctgatcttcctaccccagaatgtgcatgtcaaaggattaccgtagtggaaattgtgcaagaattaaccagccacaattacataaagcataggtacaattttaattaccccatcgaagtttgttcactgtattgtgtgggcgaaggacctactttttgctaagttatttggggacaagaatcaggacaatgatttaaatgttcgatcaagtgatgctgccagctcatccaaaaatgtagaggatgtatttgaacgtaggaaagatgaagacattgatcaatatggaacccaactttttgatcatgtttttgggtataacattgaattagctttgtctaatgaagagacatggaaaaatcgtaataggccaaaacctatatacagcaaggatatcctgtccgatgaaccggctcaacaaaatggaaatttggagaaaaaatatgaatctgatgaattatcagtttccgccatggcatccttgggcatgaagaacccacaggatatttggagtctcaaagaaaattctagaatatttcttgaagcatttagacttttttttacaaaaagggaaaaggagattggcaatctaagctttgataaagatgatcagttggctgtagaatttgttactgcagctgcaaacataagggctgcttcatttggcatccctctccaaaacctttttgaagctaaaggtattgctggtaatattgtgcatgctgttgcgactacaaatgctgtgattgctgggttgattgtcattgaagcaatcaaagtgctgaaaaatgacattaaaaattatagaatgacatattgtctggagcatcctgcaagaaacatgctgcttatgccagtggagccatttgaacctaacaaatcttgttatgtttgttctgagacacctttatcccttgaaataaacaccaatcgttcaaagttgaaagacttggtcgaaaaaattgtcaaggcaaagcttgggatgaaccttcctcttattatgtgtgcttcaaacctgctttatgaagctggtgatgttgaggatgacatggttgctatttatgaggccaaccttgaaaaggctctggctgagcttccttccccagtaactggtggcacaatgcttacggtagaggatatgcagcaggaattcgtttgcaatattaacatcaagcacagagaggagtttgatgaagagaaagaacctgatgggatggttctctcaggatggactcaaccagtgtcagcagcagaaaacaaagacaaatctgttggaaatggtgcaagcacctctgatgcattaataacagctgtggaatctgaaaaggatgatgagataactatagtttcagccttgaagaaacgaaaacttcccgacgaatctgatatttcaaatagtgcagctgaagcaaagaatcagaagcaattggaagtaattgacgatgaggatgatcttgtcatgcttgatggggatttaaacagcgttaaaaagagaagattgtcatagtctattgatgaactaaaatcaggatgaattcttgcatcctaattttgtattgataggagggggggtttggcgattcttttggccatagttgttaggaatgttgttagtcttttgcttgacatagatactgtttttcttccttgtgcctttctcagtaactgcaacatgtattattctcgctgatgcctgacagagaggatcactgacctcacaaattaacttgctcacactttacttagtgaacagaagttttgcaaattggtatcctattcaatgattgtcatgtaaaaactatattctagctttggaatgtatttatctttcatcaggtgaatctgtcatgaactcttagaaggacaccttttgattgagacatggcaatattaagtggcttgatgagtgcaatgtgtgaaagattcaatacaaatctgtttgatagtaaggaaatcaaaggtaaagggtgaactaagggaccaacgccctcatagatgtgaaagtgtctttgtataccaatcaatgtggctcaaatgaattgtaagtctgaaacagcatgaagtcataacgctttactaatttttttgcccctttc

SEQ ID NO: 61959 - DNA, 242 bp, Glycine max
  Clone ID: PAT_MRT3847_26964C.1
ctttttctgtatcaaatcgggcgaggcagcagcttctgatccactcatagcaaatacccaggagggtacctttggtcttccaccactagtgttattgttgttgctaacattaccgcttctcgtgggattagtagatccatggttgactgtgttagaattggcagttaccgttggtctcccagtcattctacactcccgagcataagggcctaccttgccacaaatatagcaacgatcttcct

SEQ ID NO: 61960 - DNA, 285 bp, Glycine max
  Clone ID: PAT_MRT3847_26965C.1
atttaagaaagatagtagcacagtccttaattaattttcattgtctagagaaaaactcaggcagcagaatgatttatgattagaggagtcgcggattcacttgccccctgtaataaaagttaggttgaattggattaaaaaggaccccatccttttttttttgtttttcccttccacgggccctttaatttaccactggaatcgccaatgcacttaaaggaccacccttgatctttttttttgcaaattgcaaatgcaaaagggaaaagcggattttgactccat

SEQ ID NO: 61961 - DNA, 463 bp, Glycine max
  Clone ID: PAT_MRT3847_26966C.1
gctaataatagatgttgaatatgtgtgtatttggtagaagtagtgttttgattgtgttggtacttgtgggtgttttgtggtggccaaacgatgctgggacaccaacgaaatggaaagcgaatataagcgttaaaaatagtttgggtggaaatatgggattaaacgtttattgtccccatattgatccaaagcagcactttctgggaactggggcttactatgaatgggtttattctggtggcattccatcgccaggagagacaccatttctttgttactttacatggcaaggtgcctctcactccactgatttgtgcgtcccagataaagataccggttgccaatttgccgattgggaaatcaaactaaatggattgtgtaggtactttggtgccggacctggggcctatgtttgctataaatggaataattaaataaacaaacttcagttcatgttttcccc

SEQ ID NO: 61962 - DNA, 310 bp, Glycine max
  Clone ID: PAT_MRT3847_26967C.1
gtctcagttcaaggtcaagtacaatgatgagcttatccccaatgctgcgtccatggtcactaatgaaaagggtattcttgctgatgctgagtcaccagggacaattgacgtgcgtgaggacggcatcagtgaaaacaacattgcatccaacaggacaccgcttagggagctgattttaactgctcctggtgatggtcagtatctgaatggtgtgatgctctatgaggaactcctttaccagagcgcagttgctagccagccctttgtgattgtgtggaaggaagctgtcgtgctgtctgacctgcaagtt

SEQ ID NO: 61963 - DNA, 417 bp, Glycine max
  Clone ID: PAT_MRT3847_26968C.1
gtttcaaatttggagcatcttcagaatttggtggtcattgactgcaaagggttggaatctttgagtgttgactccacctctgagcttcacatgttaaccatcttggattgcttagagttgaagactctccatctcaaaacttctaggctcaagtcttttcggtatcgtgggcctcttcctttgcttaggccagaatatcatttcaacctgcgtgatgccatgcttgatttcagattaggactaagctgcagtggtttaaagaccaaggattttgatgcaacccttttaacaataaagaactgtgaagttcttactctgtgtaaatggacttttgaggaattaatatggccatcgatttctcctctatctgggagcttcatattctataaattaagagagttatggtggattgacaac

SEQ ID NO: 61964 - DNA, 1333 bp, Glycine max
  Clone ID: PAT_MRT3847_26969C.1
ctgggatccaaaactaccacgggtttggcttgatttttccaaattgaacaaaactattttccaaggttctggagttattgatggctcaggaagcaaatggtgggcggcatcttgcaaaaagaacaagtccaatccttgcaaaggtgcaccaacagcatttacaattgatacaagttcatccataagggtgaaaggactaacaatccagaatagccaacagatgcattttactatatcacgatgtgattctgttagaattactggcgtgaaagtgtcagcacctggagacagcccaaacactgatggaattcatattagtgaatcaacaaatgtcataatccaagacagcaaaattggaacaggggatgattgcatatcaattgtcaatgctagctctaatatcaaaatgaagagaatttattgtggaccaggacatggaatcagcattggaagtctagggaaagacaactcaacaggcatagtcacgaaagtgattttggatacagcagttcttagggagactaccaacggtctcagaattaagacttggcagggaggttctggatatgttcgaggggtgcgttttcagaatgtgagggtggaaaactcgagccgattcggctcgagagaccaattttactgtgattctccaaccaattgtgaaaatcaggcatcagcagtggagataagcgaggtgatgtaccagaacataagtggcactacaatgagtgctaaggccattaaatttgactgcagtgactcagtcccatgcagcaaactagtccttagcaacgttgacttagagaaacaagatggctctgttgaaacatattgccactcagcacaaggctttccctatggtgtggttcacccttctgctgattgccttagttcaagtgacaaaacatctcaaattgaagagtcaactatagaggaagaagatattcgtcacactgaactataagtttgatttctaaagatgaattatactatttataacccttttattaatatgattttatatcaaatggggtaagagtaagatgcttgttttatgtcacacttaatcagtagtagtagtcatatgttgttggaggaggcttgagatgagtcagagacaaatcaagggaagtattggttattaaataattagacattacaacaaaattgatacgagagaattggcaattctagcatattccatcagcatcgatgaaacaaaagtgacatcgattttataatattgattgagattttattttaatatagtgttgtgtttgaaatttgtgtcactactattcgttactattaatgtattttggatttaattttt

SEQ ID NO: 61965 - DNA, 221 bp, Glycine max
  Clone ID: PAT_MRT3847_2696C.1
cataacagccatgaaaaccacactcttctcactctctcccttattcctgttcctactcttctcggtagtctaaggactcacccccagatgtgacacccaagaccatggctcaacccttgaagtttttcatgtgttcagcccctgtttcccatttaggccaccaaagccaccttcatgggcagagagtgttctttagctgtaggccaaggaccaagccaggc

SEQ ID NO: 61966 - DNA, 205 bp, Glycine max
  Clone ID: PAT_MRT3847_26970C.1
gcgtgcctcgctcggatcctgtatagctggtcggccgccgccctttttttttttttttttttcatgaaaaaaaaagagcttgcgttcctaccatcaaagaggcacacaggtgttactttccactgggggaaaactaagcatggccataaaataactgttctaattcatctacaacaactcataggatccatgcagagactatatg

SEQ ID NO: 61967 - DNA, 504 bp, Glycine max
  Clone ID: PAT_MRT3847_26971C.1
aaaattcttaaaaaatatagaaataagtgagaaaaagttattgagagacatgaataaaaacatttagataaatttaataactttttgattaagatttgtttgattgaaatattataaaataatattagtgacaatttatattaaatactataaaataatatattatgattatttcattggacattggatctaatacaatgaccgtaaattattttgatcaattttaggtcatacacgtgtaattaaacatgacaaagagatttgaaattggaataaatcacatgcaataaaattttatttttcttagtcaactattacaatataaaaaaaaaaataaatatagaaaagaataatactaccaaaatttcaagtgccttaatttttacagcatcactgcatcaactcttgtatgcaattaaaaaaaaaacccaaagtatagaattaaagttgcacttctcaactgactctaaagttatcacttggacaaaactcgtggtgaaaatt

SEQ ID NO: 61968 - DNA, 152 bp, Glycine max
  unsure (1)..(152): unsure at all n locations
  Clone ID: PAT_MRT3847_26972C.1
cggaattcctttttcgacttacgcgcccgacgcctccgaccagacgacagaaggggggancgnccnggggcttttaaaaaacaccgccgggcgaccgcaagagcccgagngcgagagaaaccagcgaccgaccccccgagaaagaaaaacaa

SEQ ID NO: 61969 - DNA, 352 bp, Glycine max
  Clone ID: PAT_MRT3847_26973C.1
gtctcgtcactccttgatttagccctactcttttcaccgccgtggacactttcgggatgggggtagttgcttactactacgactacattctgttccgatagttataacaagatcctgatcttgaatattaatacaacactcattttaactcccttaactacttcttggagcttgaagctcatattagccacaaactactacacctaaaaatagcactatcataatttatacaccttgaagtccaacctacgcaattacatacttgcacccaatctaaaccattccgccttcaactatcacaccaaaagctgcaatgtaactctgtacaaattgcattcacagcttctaattc

SEQ ID NO: 61970 - DNA, 467 bp, Glycine max
  Clone ID: PAT_MRT3847_26974C.1
aaaacaaggcataacccatttatgggccaaaaattgggaaaaaggtaaaaccaaacaaataaaactggggactaaaaagccaaaaaaaaccttcccggggaaaagttaaaaatctttaaaaggggaaaggggaaaaggaggggcctttttcaaaccccgaaaatttggaaggattttaagacgggggggaccctgtttttaatttgggcccaatttttttgggtggccccggggggaaaggggaaaaactcaccattcccaagggaaactgggctaaaaacaaaaaaaaaatatttgggacccttaacaaggaacccaaaggggggggacttttttccttaaacaattgggggaagcattacaaaaagggggcaaggcatgaccagggtttttgcaattatacaaacatatatatccccccacctaaaaccccgagatcaaaactttggggggccttgaggcagggg

SEQ ID NO: 61971 - DNA, 260 bp, Glycine max
  Clone ID: PAT_MRT3847_26975C.1
ggaacgcgtcccgagctactcactcactcatcatagctatatattaatccgcctcttttaatataacgcaaatcacctgacaattctgtatttttctcactgggccggcgggctagcgacaccaccaaatcaaaaacattgcactcgcgggcaaaacaccgctctgcaacacacgcacactatatttcatcacagacaacagaaagggggcatatccatcctaccgcttagacaaatttttaactctcgccctcacatct

SEQ ID NO: 61972 - DNA, 815 bp, Glycine max
  Clone ID: PAT_MRT3847_26976C.1
ccgggactcgggggatgagggggtgggtgcggttcccgtggatgttgtgatagagatattggtgcgagggggaataagggagtgggagcagatatcatgcgtgaagaagcagtgggcatctcttttccgctgcgattgcgaatgcttctggcaagctgcactttccttctattatccacaccaactcccactccctccccctccaacatggcctgttcctttacccaacaactccaagaggagattcattgctttatatattagtcaacacatctttgcctccgatcctccacacgagatccttggccacacctatctcttcttgaaagatcagcttcaaccttctattatgcctcctcatagtggaatacttcacggaaccatcattgatcagttcattgcttgcggcaagtccagggacgttgctcacgaacttgcttctcggatttggcttgctgtcgtcgacaatttggaccaaaaccatcactccttctccttacttaaacgccttgcccatgaaggggatgtttttcttccatacccttacaccagatcagtcaaagtacaatggagactgtttgagaagctttttactgatttccgtgattgcttcaaccatgtagattattatgatatgttgggatgtgccaagagcaggtttcacccaataccatctgcttggttaggttactagttagcaaattctaatgaagcctgccttatcaattctcttgtttaggaaaattgtttaccttccttcatgtgtaactgaagtcaatcaattctcattgtgaaaaatctcttatttttcacat

SEQ ID NO: 61973 - DNA, 167 bp, Glycine max
  Clone ID: PAT_MRT3847_26977C.1
cgcgcgcgcgaggtgtgattttgggaggatgagaatatgatactcagttactcgtaataaccatgtcttcttggacaacgcaagctaacctggcgaggcatgcaagtggtttcggtcttgggacatcagcgccaagggcatgctcactattgatggtgttggggtta

SEQ ID NO: 61974 - DNA, 818 bp, Glycine max
  Clone ID: PAT_MRT3847_26978C.1
aggatcgaatgagagagcgtttcctttccttgtctgcttagtttagtcgcagtgtcggtgaagacgacagaagggggatcaaacacagagagcgcagtccaaccctcaaaatgcattcattcggctacagagccaacgcgttgctaacctttgccgtaaccattctggcgcttatgtgcgctatggcttctgtatccgacaacttcaacacccccactccctctgcacaagtccaggttctgaacatcaactggtttcagaaacaacccaatggcaacgacgaggtcagcatgacgatgaatatttccgcagacttgcagtcccttttcacatggaacacaaaacaggtttttgtttttctagctgctgagtatgaaactcctaagaattccttgaatcagatatccctatgggatggtatcattccctctaaagagcatgcaaagttttggattcatacatcaaataaataccgcttcatcgaccaggggagcaatttgcgtggcaaagaatataacctgactatgcattggcatgttatgccgaagactggcaaaatgtttgctgataaaatagtcatgccaggttatcgattgcctcaggaatatagatgatgcccttcatgttaagctttttgctgtaactttaacctttcctataacgaatatagaaggttggttcaaagaactagaaagaggaagggaatttgtgttttggaaagtgaaatcaatatcgcatgaatgaatacttgaacattcataatttaatagaacgtttaaaaaaaaaaaaaaaaaaaacccgagactagttctctcccc

SEQ ID NO: 61975 - DNA, 643 bp, Glycine max
  Clone ID: PAT_MRT3847_26979C.1
ttccgggattcttttgatcaaacacagagagcgcagtcgtagaagaaaagaaatcctcacaatgcattcattcggctacagagccaatgcgttgctaacctttgccgtcaccattttggctcttatgtgcgccatggcctctgtatccgacaacttcaacacccccactccctctgcacaagtccaggtgttgaacatcaactggtttcagaaacagcccaatggcaatgacgaggagattccgctgcaaccccacacatcaggcacaagtctgaatcacacatccccttcgccatccgaacaccattgctgagcaacccaccgtgtttattcttcaattttaggtttaaggttatcatctcatgtaacaagcaacttaagttgttgcattgcagttggtataggttttggatgtaggaaacatccaattaacccagccttcaatgcttaaacatgacaaaattatcattgaatgatccttggttgcggcttacaagtaaatgtagttaaaacatggtgtacaggatactttctatcagtagattgttatgtcacataggctagagtctgaacaagcaaacacaaatgaaataaagagaactagtaaatgaattgcacagatcaaaggtgcttagcatttgcg

SEQ ID NO: 61976 - DNA, 371 bp, Glycine max
  unsure (1)..(371): unsure at all n locations
  Clone ID: PAT_MRT3847_2697C.1
gaggaaacgcccctctataggtgaagtttctcagttcatatcaagaataaagcaaaggcgacagcgccatctaacagaagataacttgtcatttgcaagcaataacttttctcgagctgtgagtcgattagaagatcgacaggttgaactaagtaggatgccaaccattaatctcacagaaactgtataaacataattgttgcttataaatgagaccaatgcagtttacggctaatctaatgaaacaacttctgttgcanaatattgaaatagtgttgacatttttaactcatggagtgaagggcaaattcaccatttgaaccttgacttctgatggaaaggagaaacaaagagttcctgcaaaaaaaaaa

SEQ ID NO: 61977 - DNA, 370 bp, Glycine max
  Clone ID: PAT_MRT3847_26980C.1
atattatcttttctttttttttttttttttttggggtgaggcccagcccaaatttcaagttttcttcccctggctgggaaattataaatttttttttaggggaaccaaaaataaaacaccgggccccggttttaaaaccttggaaaggggaaaacccggggggtccccaaataaaaggcttggagaaaaaacccctttttcccagggggggaaaaaaaaaaaaaggccccaccaatggccttttcaaaaaatgtgccaactttaatgggaaaagggcccccccctttatcgcccctttaaagccggggggggggggggtttccccccaggggacccttaaattttgcagggccctaaagccccccctttt

SEQ ID NO: 61978 - DNA, 253 bp, Glycine max
  unsure (1)..(253): unsure at all n locations
  Clone ID: PAT_MRT3847_26981C.1
aagagtgtaaaaaacgagaacagggttcatggagtaggagcacaaccggggctgctcanggaatcacataaacattccatcagcatgatacagggtcgacgaagacccaataaggtaccatccttctttagggcctggtttgacacttctggacaggaaaatccttccagaggatctaaaactaaatgggcaggattaggagcagctcttaatgcatttgggatttcatcccttacaggagcaagattcttac

SEQ ID NO: 61979 - DNA, 1564 bp, Glycine max
  Clone ID: PAT_MRT3847_26982C.1
gcgtttcactcgggcgaaggagggacgcgcgagagcagcgaggtgcagagctccgcgagcttaatgcgtaagaggaaatcagaaccgttggttggggttttggagttgatcaaggggcacgaacacagctcattgttcgagcgccgtcttgatagccagggggatacggatagatacaaagacctagtgaaacagcccatggacttggaaaccatacaattgagaccccaaaagggtcactattcctcatgcaccagtgcattcttccgcgacctcctcctcctcttcaccaacgccaccgtgttcttctcccatgactccctggaatcgcaggcggggcggcagctgcaccgccttgccaccgcggagatgaagaaccacggccaagcacaatcggatcctatcccccggaagaacgattcactccctacaaatgcaccaattagctaaaccagattctctcctttacaagaacaaagcctctggtcctatattggggtggcgcaaacgcagttcaatgcgacgcaaaccttcctctgccacctttggccaaaagggtgaccaacccgtcttcaatgacaagaaggaaaggccatcttctgatgcgaagccacccatgaagccctcttcttctgatacagacgaagaggagcttcccaaagctaaggaaaagcctgttactggagcaagaagcttgaggcggagcaacaagaacctcaatagtaatagtagtaataataataataagaaaccgtcctctatctccactcctaaggcagggtcctcggggaacaagccttcggagactgttaaaccggaaaagagaacgttccaagaaatgatttccaaagcttcatagttagcctcttttgttcctctcctgtatattaattattattattattattattattattattattattattgtcaaagcatgtgtttttttgctttaggaggaggaagtaacagcagcagcaaatgttggcggaggtggtaatggtgccaaagagcagaagaaaatggtgaacaatggaaagggagacaaagggaaagaaagggcatcaaggcataataacgttggaggaggttcaggctctgcggataaaaggaataataagaatacccacgcgtccgctcagtcaaagaggagtgttggtagacctccaaagaaagcagcagagacaaatgcaggtagtgcaaagcgtgggagagaaaatagtgctagtgctggaaaggataagcgccccaagaaacgttccaagaaatgattccaaatttcatggttagcctcttttgtttgtcctctgtatattaattattattattactattgtcaaagcatgtatttctttctttattttattttatactgctaatttattgatcagctgtagcctgtagtcagttgctaggtacatgtaacagtattttgatttgggctaaaaccttgtaacaacattgtcctcttggggactgcttttcttgattttttggtttaacaggaaagtatagtcaaagcttgtgcttgttttggtcaaaaactagaaaaacatggaaaatg

SEQ ID NO: 61980 - DNA, 190 bp, Glycine max
  Clone ID: PAT_MRT3847_26983C.1
tttcggccacgcgtgcggacacgcctccggagtgagcgagagagacataagcggcgcatcggctcattactctctgtgaggaaggcagaatccttcatggggatgatgcatggcacccttgcggcgttggatctctagatgggtgcccataacgaaagaggagctattggcccaggtcatcaccttgggt

SEQ ID NO: 61981 - DNA, 1881 bp, Glycine max
  unsure (1)..(1881): unsure at all n locations
  Clone ID: PAT_MRT3847_26984C.1
gctcgaggctggggaggcagtcagcacactctaatcgctggaaaccggattttatgtttcnttggcnagcgaancatacttgatctttgctaggagaggagagcatgcgggttactctcatttagcagtatatgcacacgaacagatatcaagccatacatagagctggattgcaactctagccggaatcagcaagaagtgagagcatgaactgaggtcagtgctatacatacagtacgcactcgagctgaagtttggactgtcgtaactccactttcggattatcatgaggaagaggagtgatgaatcaacacttccaggctccaaccccttcaccagggacacatgtaagtaaggtttccagcgattaacgtggagctaataattttcacctgcattaacatggtggatatttcatgtgttaaggtcggacgggcggacgcgtggggtcctatattgacaataggtgaatctttggttgaaagaatgagaaaacatagcgccattaatggtggtaaatatgtctccgtacatcttcgttttgaagaggatatggttgctttctcttgttgtgttttcgatggtggaaaacaggagagagaagactagagagggaaatttacaaaaccaggacgagttatacgtccaggagcaatcaggatcaatgggaagtgcccccttaccccattagaggttggcctcatgcttaggggaatgggtttcacgaagaacacatctatctttttggcatctggaaaaatatataatgccgagaaaacaatggctccgatacttgtttcctaatttacatactaggagaccctagcttctgaagaggagcttgctccatttaagaattattcttccaggatggctgctatagattacacagtttgtcttcaaagtgaggtgtttgtcacaactcagggaggcaacttccctcattttctgctgggtcacagagtcttgtatggtgacatgctaaaacaattaagccagataagcggaagttggcattactgtttgataatcccaatattgatggaaaagtcttaaacgtcaactgctgagcatgaggtcgcatagtgattccaagggagttgagctcaagagaccaaatgattctatatacagctttccatgcccagattgttatgtgccgtgccaacagaactgacgattcgagatcttcatcagcaacttgatctactcacagaatttgatgggtgtcatattacctatgactttgtgagcatgccttgctgctgctgatttctgatattgtgattgtttcatttttcccctttccatctggtgggagggcatacaccaattttcgggggtcgaaaaggattttgtagaaggtctcattgatctgatatatttggattgaatttcaagggagtggcatctttttttgtacacgatgccaattcagaacaaaatggcaaccgttccttctcctttgcaggaaactcttccagaacattcattgacagagatggtttcacatatgaacgagcacctgctgtgtggaacaagttgatgattgaagagctaaaatgacaaactcgtgttccttcacaccctgcctgtacattaacatggtggagtacgatatttcatgtgttaaggctgtggcaagctctctgtacatttacaaaattcagggtgtccctccatactatttattgttctgttctagattttttttttgtcctgttttcaattttgtattttgtttacccccatattgagggccccattgttagctgcgtaggtttatggttgtacgcatttgttattctttcacattggtgccccattgttttagcgatgataccagtgaatgtaattagttcaccattcatatttcatacc

SEQ ID NO: 61982 - DNA, 356 bp, Glycine max
  Clone ID: PAT_MRT3847_26985C.1
ggggcataggcaaaaaacaaccagacccaattctagaaaacccccaaggcaaaacaaaaaaaaaggaaaacttaaactttaaccagaaacacaattgggggccggggggtttttcaacatttcaaaaaaaaatttttcttcggggggggggaccaggagagagcaaaaaaaagggggcgacccgaggaaaaaccccaaccacaaccctgggttggggggaaagaaccaaaccccacccaaaaaagcttgggcccccaaagacaagggaagggcttattataacaacgcgcgggtcctggaagcaagttgggcgtttagtgagggggggcagggatggatacttttttggttcgggg

SEQ ID NO: 61983 - DNA, 430 bp, Glycine max
  unsure (1)..(430): unsure at all n locations
  Clone ID: PAT_MRT3847_26986C.1
caancttggtggcgatcacatgcccacaaggagatcacgtcacacattctgaacccagagatggtcatcgagaagctactgtcataaatgatagcagtgtgatgaaactgatgatactgcaagtgtctgacatgagagaaaggggacagaagatttctttcatgacgagaaccaatcctaaagtcttccgaacatatcttacaagcatgtgaacagccaatgatgacaaactatctcttacagcaacaactgatctgaccctttggagagaacatcggatgataacccaacacatgagggacctctgtaatgaagactaaacatacttggacactcatttcgctagatcttagtttaccacacatagcccncggccgtctctccagcagagatgaatggtccacactgaaatggtggtttatccatgtct

SEQ ID NO: 61984 - DNA, 282 bp, Glycine max
  unsure (1)..(282): unsure at all n locations
  Clone ID: PAT_MRT3847_26987C.1
caaagcacnaagcaaagctcatccttgagttaaaaaatngnagcagcttcttccatggctctctcatccccatccttggctggcaaggccgtgaagctgggnccatcagtcncagaagtgggaagggtgagttgangaagaccgtcatnaagcaggtgctcctcangnagccnatggtanggaccngtaccgnntnangtacttgngcccattctnnggnganagccngtcctnctaatggtgagttcccaggngactacggntggganangtgggcttccg

SEQ ID NO: 61985 - DNA, 472 bp, Glycine max
  Clone ID: PAT_MRT3847_26988C.1
tgaaaaactctggcataggtggagaggttaatcacttgcggaaggagcctatggatatagccatgaatgcaagaggtaactattgtagctctcctggctcttctgatgctgctactgaacatgagattttgctcaagagtgaagaaacaagaggagaatcagttgaaactttgaactcttgtgagttgagctgcagcaaccattgccttggatttatgcataataatatgctgccagataccaatctaagaccaaatcctgaggcatctattgcaaagaaacatactgaggaagtaatttctgaaatcctaggactatgtcaaggcaagtgcttgaagattagccatggtcagtcaccaaatgagcaatttagaagaagtgaacattttgatgagatgaaaactaggcttaagggtttggaatgcaagctgagagcacattctattcattacaagaatcaagcaccaatagt

SEQ ID NO: 61986 - DNA, 272 bp, Glycine max
  Clone ID: PAT_MRT3847_26989C.1
gattagaataatgcaatccagattatattacattacaataccaaagattcatgtgagacaaaaaagatcatgaaaagacctcctctacggtgggaaggcaggtctagatcatctgaagtgcgtgtgcacttgataattgggaggaaaacagaaacatgtgtttagaaccaagggagacgctacttcactttctagaacgaaccatacatatatggctggtagatcacgatgagtggccgaataccattacaggatgaactagaactagagct

SEQ ID NO: 61987 - DNA, 228 bp, Glycine max
  Clone ID: PAT_MRT3847_2698C.1
tgtgaatagtgaagcgttgagttgtttgcaagttgttcttttgatacaattaagattgtttttggttgtcttgattgtatacaaatcacacaaaaacaatcttaattgtatcaaaagaacaacttgcaaacaactcagattgtttttgtgtgatttgtatacaatcaagacaaccaaaattttcaatctcaaactacatggagttaatacatattatagcgtgagaat

SEQ ID NO: 61988 - DNA, 203 bp, Glycine max
  unsure (1)..(203): unsure at all n locations
  Clone ID: PAT_MRT3847_26990C.1
gtgaactgggctactggctgtcatcncttctttcatcttcttccacngtctgtctacacnacggacagagnntttttcacaccacagcnaaaagngcngcaatagagcccttcttctcccttctncttctctacccacacccaaacccaaaccaagttcttncttactaattcccttganaatgtaaaatcacagaaaaacaa

SEQ ID NO: 61989 - DNA, 506 bp, Glycine max
  Clone ID: PAT_MRT3847_26991C.1
ctaaaatccttaaaagcaatggtgctatcaccaacccccctatttttgctcgatattcttcttcttcttcttcaccctcagtgccttatgtttctaactaccagaaacaaacagctccatccccaacttcttcatctgggaatagaataagccctgcaattcttgtcatcatagtaattttagcagtggtgtttttcatcttgggtttccttcacttgcttgttagatttctcataaagcaaaggtcttcctccaattcatcaatttcccaatcaaatagataccctgacatgtctgaatcagatgcttaccagaggcagttacagcagctcttccatcttcatgactcaggtctggatcaggctttcatagatgctctcccagtctttttttacaaagagataattggcttgaacgagccttttgattgtgctgtttgcctctgagagttcttggaacaagacaagctcagattgcttcccatgtgtaaccatgccttttatatt

SEQ ID NO: 61990 - DNA, 456 bp, Glycine max
  unsure (1)..(456): unsure at all n locations
  Clone ID: PAT_MRT3847_26992C.1
atcattcctcctcttctttaaattttgatatctcatgtctctattcttacactcaaatccaccaaaaggtgcacgttgagtgttatgcttattttacctttattttgatctacagttcccctaacattgggtcaacacttaacaccatgccgtttaattagtagcaggggttgactgagcatgccacctccggtgaaaagtcaacactacagatgtcattccattcccactcctgccgcgaaaatcgggcaaaagaaaaacaagtgagacagagtggtagctagaaanacaatgagtcagaaacacaaagtagcattgccacaccgcaatattcccaatcgatgatacgaacaggagaagttgaaattaagcttactgcttgctttcacgaaagaacaagttgaatcgactcgacccagcaagcaaccatgttattgtagagtacaagaatgtata

SEQ ID NO: 61991 - DNA, 320 bp, Glycine max
  Clone ID: PAT_MRT3847_26993C.1
acggctgcgagaagacgacagaagggtctatgctaacaaagatcgtgaatgaaatatgcacttccctcagtgctatgtgaatgtgaatacgtgagactggactcatctggtatacatggacgatggaccttatgaagagttcttgagactgtcaagggggccatgcgacccaaacatgcatataaagatgagcccttgctgctggagcatcagaggaggctccaatgctaacttatgaacaaggatgaatgtatgggtgacctggagaaggggaacgtcgagacctcggcgaatatttattatatatgctcaaaacaatg

SEQ ID NO: 61992 - DNA, 921 bp, Glycine max
  Clone ID: PAT_MRT3847_26994C.1
gcacattctaacaagccctcttggtgtcttggttcttgatctttaaatattacctattggttattagctatttggctcgagccgctcgagcctcattaggcaatcaacaacacactttgtaattggcatcaaatggcaactgaagccgatgctcctgtcattcctcttctcactccctacaaaatgggtaacttcaatctgtcccatagagttgttttggccccgttgaccagaatgagatcttacaataacgttcctcagcctcatgctgtattgtattactctcagagaacttctccaggaggtcttttgataagtgaagccactggtgtctctgacactgctcaagggttggtgcacacacccggcatatggacaaaagagcaagttgaagcatggaaacccattgtgaatgcagttcatgccaaaggtggtgtattcttttgtcagatttggcatgttggaagggtctcaagtccagtttttcagccaaatgggcaagcaccaatatcttctactgacaagccactcaaacaaaatggcattgaggaagcacaagtcacaccaccaaggaggctaaggacagatgagattcctcatattgtcaatgacttcagagttgctgcaaggaatgctataaaagcaggttttgatggggttgagatccacggtgctcatggctacttacttgagcaattcattaaagacaaagtgaatgatcgaagtgatggatatggtggatcccttgagaaccgatgccgattcgctctggaagtggttgacgctgttgtgaaagagataggggcagaaaaagttggagttagactattccatttgacagagcaatgagagtgtggagattcagaaccctaatgattggcgccattcttcgctaatgccctcgcaaggataacattcctc

SEQ ID NO: 61993 - DNA, 350 bp, Glycine max
  Clone ID: PAT_MRT3847_26995C.1
gtgtttgtttttatctgtgttcggtaggtccttccttgcgctcctcctcgttcgttcgtgcgtgctccctcgcgtagatcggtcatggcgggcaccgagaccgtagctttccaggctgagatcaaccagctcctcagtgtgatcatcaacaccttctactccaacaaggaaaccatacttcgagaactcataagccacagcctctgatgcttcggacaagattagattcgagaggttgacggacacgagcgagctcgatgctcagacagagttgatcattcatatcattagcgacgagaggaacaatacgctgaccataggtgacagtgggattgtcatgaccaaagctg

SEQ ID NO: 61994 - DNA, 360 bp, Glycine max
  unsure (1)..(360): unsure at all n locations
  Clone ID: PAT_MRT3847_26996C.1
tcggcacgaggacaaatcaacaaaaaaaaggaaggaaacagaagaaagccattcaccagataaaactaggacaaaaatggagcatcaaagagtggttaatctcagttaaaaataaatgatacatcatatagatgtgttcccaagaaaacttacatctcctctgactcgccaactaactagtgagaagagtagatggcatctcattcatactgaaagaaatgtgtagtataggccactgacagaagagagaatttcatttcaaattcaattttgtctgacaaatataaattgttcagctctttctcttaggtgattaatgcacaagattttttttctannaaaaaaaaaaaaaaaaaaaaa

SEQ ID NO: 61995 - DNA, 213 bp, Glycine max
  Clone ID: PAT_MRT3847_26997C.1
cttaaactatttcggggggtggggtaaatttatttgcgcttggtttaactaatcgttgaacctttgaaagaaaaacccccctttatttaaatgcaaaagcgggaaatctgggccattgacaagggaaatgacctcttcagggaattcattaactggggtcccccaaggggggtttgggaagggaactgtccaaaataaagggtcagctacccc

SEQ ID NO: 61996 - DNA, 1020 bp, Glycine max
  Clone ID: PAT_MRT3847_26998C.1
atattaaattttaactaattttatatatatattgggtatcatcacatcattttattacaacatcctcttaatattctttcaacattttataaataaaatagtaaaatataaatagtagaatattccatattttaaaacctaaaaaatatattaatattttcttcaaattccagtggaggaaaacttaagttgaaacatctaatcagtttaatttgacataacatatagtaattagtaacaaactatcgagggaagaaagcagtcgtagacatcttattcacagaggacaaggaagaacgattggtggagtaacctgaagatgattcatgttcagctgaatgtcttctcattctgccatgcatgaaaaatgctggttctagagggaatggcatttcaagcgatgggttgctaagatatgaaacaatggttcccattgtaggcctatcatctggattttcttgtacacacaataaaccaatctgcatacacttttcaacttcgtttggaacataagactctagcagagttggatccagtaattgaaatgatgattcatccttccactaaatcaatataaactcacattgagaattcaacgaagagatgaacttggttaaaattgccggaacggttcccaatccaagtactcgacgaggaagctcatgctgcaaaacgtgctcaagaagagcagttccttcagcagagggcaaggattcgcagcctaagggaagaagaatcttgagaacttcaattttttgtggatgtatgcgctcatcttggagtaaggcaaactcccaccccctaaagcttttgtacccaattttattttattgaattactttataataacatacttttctagctgatcccacgcgtccgcccacgcgtccgtgaaaatgttgagattgaaatttcagtattcatttggaatgtctattgatttttcccttctaagggtagacaatgtcaagtaactacatgagaaaagtctataaatagttgaaaagattgttttgctgt

SEQ ID NO: 61997 - DNA, 366 bp, Glycine max
  Clone ID: PAT_MRT3847_26999C.1
gaactagaaaagccgcttatgtttatagcgtgaatgagaatattcttacttgggaacaacaccactccatggccctggctcaggaaaaaaatgtaattctttttaaaaaaaacccctcagttatcaatacacctggtatcacaactggcgtgtgtgtaaaatggaaatcattgaacaagaccttgagcccaagcgatgaatataaactccaaaaaccattggcactaaattaatagagctcccaatttagctggttcccacgctcaacaaaggatgaagctgtacctctagatcctacagaacatttgtggctgcctctatattcggtgattggacatgccccaaaggcacacctgatatttgcct

SEQ ID NO: 61998 - DNA, 173 bp, Glycine max
  Clone ID: PAT_MRT3847_2699C.1
gaatcacatgaggagcaagtcattgccgtgtttgacctcagaaatcataaccacgacgcgggattgggggcaacgcagctcacgctgccctcgggagcgcagatcatctcacatttcattctcctttatgctcctctctcaccatttttccgttaaaaagattattattctga

SEQ ID NO: 61999 - DNA, 109 bp, Glycine max
  Clone ID: PAT_MRT3847_269C.1
gtcagctgcttatgacactagaacatatcgcagacagagtttgataggatgaaactatggtttactcactactacgaatcttctgccacatgcagattactatagtgct

SEQ ID NO: 62000 - DNA, 424 bp, Glycine max
  Clone ID: PAT_MRT3847_26C.1
tgagcagtgatgatcgggccagtattaatctcgaggtcgacgacgctgactcgtccttttgtcgcccttttaatgaagaatttgtgaacaaaaacttatatgattgaccaagcaggaacggcgaaaagtgcattaataaataagagaacaataacatcgcatgtataaacataatgacacgctgttatctaaacttgagaagggtctgtgaccagatcaagaacaacccatgagaatattcggcttaatcgacttcatcaattttgggtccatgaccgcatccactgcctgctgcaggacgatccttatacatggatccacccggatcacggccaggactctggtacatatttggtatgaggggattacaagtggtctagaactcattgattttatcctcaaattcgtcagcctgagcaagtct

SEQ ID NO: 62001 - DNA, 342 bp, Glycine max
  Clone ID: PAT_MRT3847_27000C.1
gcgtggaagcacatatggaaatccatgagatgccggaagaggaactctttcgatatagtccacaccgttaccaccacagagtgctgcacttaaagcaactcactgaacggaatcctcctcatcagcacaatcaaaccatttctaaggcgtatctcatgcaaccttagaaagagttcgttaatctagggacatcatggaagtggcatctttttgaattccaccaagaaagggttcatattccgaacgatctgtgcctaccaatctttcatcagttgtagtcaagacactacgcaatcttggacaaggtagatccagttgccattctttgggagagcccaccaa

SEQ ID NO: 62002 - DNA, 116 bp, Glycine max
  Clone ID: PAT_MRT3847_27001C.1
cgacgaagctagaattcggatcgagcgcactgaagcctccacgcctttgtgtaactacattgatctttttttctgctccaagacgacacatgtgtgttccattgaagacaccgggg

SEQ ID NO: 62003 - DNA, 470 bp, Glycine max
  Clone ID: PAT_MRT3847_27002C.1
gaaaaacagacttactttgcatcggcgacacacatggagatctccggcaccggtctccgggaggtcagatacgtctgcggctatggaacccacacgcggtcccgcggcctgactcctggttttggggcgaggatggggatgggttctggctactgagacgaggggcattagcgggattaccagaacaccagaaagggtctaaccccaaagaagaccttgacgctgctcacgggattgtacagattacggcttgcatcggatcccgatagactcgacatgtactatgatctccagcacaacatcacctatgatgctggacatgtattactgacagacatagaagccatgtgagtcgacgagaaggaagtgaagaacaaacggacacatgacatgaggccgaactcaaagctgccaagatgaattgtgaatcttcttcatcatcatcgaacgaatcaagtgacagtgattga

SEQ ID NO: 62004 - DNA, 459 bp, Glycine max
  Clone ID: PAT_MRT3847_27003C.1
attatgaattacagcatgtaaccctcttcattgactacataacaaatgattatagtataacactagggacgacccagttatttaatcgcgttgtatcacggtctcgcctacccactgtacaactcttcgtgaactctctttgaaagtcacttcaaatcaacgagcgttagtattctgctggtcgaatgccaccatatatcatacccatcacttatgagaggttacgagactctcataccacacgagccactgaatgcaagcgacacatctcgcttaataaacactagctaactcaaccgttagctggtcctaataaaaaaataaccataatcttttaaatgaatatgtacttgtggacgctcattatgattaaaaataccattatagcctgaacgggtgtacgtgtatgcacaatctatttaaccgcaaggccttcgattataacaccaatcacccact

SEQ ID NO: 62005 - DNA, 255 bp, Glycine max
  Clone ID: PAT_MRT3847_27004C.1
gcgtccggcgaatgtgtctgcagagaaccttacggggtacccagtactccatgaaggatgttgaaatgtccaaatatgttcgtagcttgacactatttattgaagacaatcagtcaggatcagagatcactattgttcagatgaacggactgcatggtacaacagttgaaacacctgacatgaatggcttgactaagattgaggatcgttaactcctgggatgaggagattcaactttgctcctaatcacttctt

SEQ ID NO: 62006 - DNA, 1044 bp, Glycine max
  unsure (1)..(1044): unsure at all n locations
  Clone ID: PAT_MRT3847_27005C.1
cacgcgtccggttctgatggagctacttagctcaccagaggagggggagtgtgtaaattcttgttttgaatctcactgacttttgggcaggatgctataacacgagttcttccttcatgtaatgaagagatatgtgatgggaaaacattagatgttcaatgttctgatggagctattagctcgccagaggagggggagtgtgtaaattatagttgtgaatctcatgattttgggcaagatgctataacacgagttctgccttcatctaatgaagacatatgtgatngggaaaacattagatgttcccagggnnagaggtggctcctacagtgtgtaacaccaccagttcaatggtgcgtccggttgaaatttcttctaggcaaggggaacttgatgggactatactgagcaatcctgtttgtggttcatcaatagaagttgaggctaatggttccaatgatggtgcaaagaatatggcccccgtgaattctcaatcatctgaagaagatatcccaagtgtaaataccatgtccacatcaaattgtgagaatgctgcacaaatccatgaggctgatgacaataatggttcaaaaaaatgctgaaactctgaactcatctttgtctgatgaaagaatttcctcattgaattcaaaatcacctcaaggccatgtccgtaatgaaaatgccatgtgcatgcaaaattgtgaaaattttgcacagagccttgaggatgatgacagcaatggttcaaatagtgtcattccaaatccacctttgattgatgagagaaatgctgataggaccataatattaaatagagatgcacatgtgggaatggttgagactgtcaatttcactccttcaacagagcaaatatctggaggtgcagtagatgaagatggcctccccaaccacatttccgagaaatcgggtttagatagtgtgttgtccagaccacgtgaagcttatagtccccgtggtagctcagatgctgattggattattcttttcaatcaaccttcttttgagaaacaaaatcatgat

SEQ ID NO: 62007 - DNA, 816 bp, Glycine max
  Clone ID: PAT_MRT3847_27006C.1
ggggcttaacaaaaacccaaaaaacatgcatttgtgcctgaatttcttgacgaatcctaattcctaactaattctactcaacagtacattcaatccaccgctttgttcaactcaaatcctcaatcgctcgcgatttcttcttctggaattctcaaggatctcgataaatggcaaccactgcctgtttcatcattgttagcagaaatgacattcctatatatgaagctgaagttggagtagctgctaaaagggaggattctgctcagctgcatcaatttatccttcatgctgctctcgatattgttcaggaccttgcatggactactagcgctatgtacttgaaatcagtagacaggtttaatgaacttgtggtgtcagtgtatgttacagctggtcatactcgatttatgttgctacatgactcccgtaatgatgatggtatcaagagcttcttccaagaggtgcatgagctttacataaagactctccttaatcccctgtacttacctggctcccggatcacgtcatcacattttgatactaaagtccgagcccttgcacgaaagtatttgtagaaaccactaatttgtctgtggttgatagttcatatagcactgtggcccgactcttaaccttgttcgttcttgattacatttgaaaagctgtatttctttttctttatttccatgatttggcggcaagagtagatttgctgctgtctataatgtacctcagtcattagcaggtggtgcctgtttttgctaatgaaggcgattgttgacgagctatttaattgctagcggcttcatttgtgac

SEQ ID NO: 62008 - DNA, 991 bp, Glycine max
  Clone ID: PAT_MRT3847_27007C.1
cgagaagacgacagaagggggcttaacaaaaacccaaaaaaacatgcatttgttcctgaatttcttgacgaatcctaattcctaactaattctactcaacagtacattcaatccaccgctttgttcaactcaaatcctcaatcgctcgcgatttcttcttctggaattctcaaggatctcgataaatggcaaccactgcctgtttcatcattgttagcagaaatgacattcctatatatgaagctgaagttggagtagctgctaaagtatgcttatttatattttattttagttttttttatttatcaaaaaaaaaatttaacttgcttcttgctagatattggtttttctgactgttttaggtggtctcatgcatcaaatttaagttatgtgattttttagcctaattagtgtctgaaagattttttatgggggagttctacttgtgttgttatttgattgcctgattaatgttaatgcttatttgaatctcatgcatcacttgtcttgtgtggctttgtaagcactaagcaagggattattgtattcttcaccaaatttacaacattttgcaattccatgctaccttgagacagagggaagatgctgctcaactgcatcaatttatccttcatgctgctctcgatattgttcaggaccttgcatggactactagcgccatgtacttgaaatcagtagacaggtttaatgaacttgtggtgtcagtgtatgttacagctggtcatatcctttatacttgggattcttttatagtttagataaaaagaattgcattactcttgtttgttcacttttttttaatctttttttttccaaataaatgaagtactgagtacccaactttgaggaccaatcaatttagttagcttctttaattgtataattatgccattgtcactggcaggggagcaaaatataagtgcctagagtggagaagtcttaaactaaaagcttacagcaagcacatatc

SEQ ID NO: 62009 - DNA, 295 bp, Glycine max
  Clone ID: PAT_MRT3847_27008C.1
atggaattgggaagttggtcaatctggaatcacaaaggcttagttcatgtactagattagtggagttaacatatgcaatcacaagtcttattatactgaacttccttgtcatctctgagagcgtaagccttagtaagttaccagagatcatgggagagttgcgtactttagaaaatctcaattgcagaagttgcataagatgtgagtgatttgccatactcactcaaggagcttgagagcttatccactgtggtgtatgacgaagagagtgctgcattatggtaaccttgcaaaa

SEQ ID NO: 62010 - DNA, 247 bp, Glycine max
  Clone ID: PAT_MRT3847_27009C.1
ggcggggatacgctgagtttacgcatatcaataagcggaggaaaagattctaccaaggattccccaagtacacggcgagcgaaccgaggccgagcccaccatgaacatcggtcgccctcggcgtccgggttgtagtctggagcagcgtcctcagtcgcggaccgggaccaagtcccctggaagggggcgccagagacggtgagagccgcgtagtgcccggagactgtcggacctagatgcgctgtcg

SEQ ID NO: 62011 - DNA, 107 bp, Glycine max
  Clone ID: PAT_MRT3847_2700C.1
tcgcgatcacaggttaccgcaccttagaaccggaggcaaaagcaatcggtacgtgatctcaaggatctctcaatttcgttctacgtcgttgtgtacgatttcataag

SEQ ID NO: 62012 - DNA, 296 bp, Glycine max
  Clone ID: PAT_MRT3847_27010C.1
ggccgccctcgttctttttttttagttaaatgcatgagaagacttattgtaaaatcacgatggctagctaagtggtggagggacgttcattttgtgggactgtcaaatggaaattaaaaagacacattatgcggagctgaagtgacgtcacgagctattgaaccctaaaaattgattcacaagcttagccatacaggaggcaagtgtatcaactggtacctgattgagatgccttagtatacctcacgtattacatgtttattgtcagtaagtctcacaaagcttcgtccttggtg

SEQ ID NO: 62013 - DNA, 229 bp, Glycine max
  Clone ID: PAT_MRT3847_27011C.1
aaatatacttgtagctttactgctgctcttcaacgcgagcaaggatgaccttaatggggccagagcccaatgacgagctcctcttctacgtttacgaggtcgatatcgtgagagagagaacaaatgtctttgccgtggacatagactgtttcgatgtgccttgtactgcattccgaggacttgtgctaaacactcatccagttattgcccgcctccttgacgctttaaa

SEQ ID NO: 62014 - DNA, 304 bp, Glycine max
  Clone ID: PAT_MRT3847_27012C.1
cccactcgtacgcggacgcgtgggtttatacggacctaacggactctactctggctgtgtctgagacattaaagattgacgctaagcaattatcgcgtggagtacagaacttagatggagtccgaaagtagagaaaaactaaagggtgcacattgtgtatcgtgatttacagggtataactgacagaatatttaacacctataggcctagaacgggatcagatgatggacgtgcagttggatacaatcgctgctcacgcactaaaagtaggtagactatgaccgcacctggagatggataacag

SEQ ID NO: 62015 - DNA, 373 bp, Glycine max
  Clone ID: PAT_MRT3847_27013C.1
cccaagaggcgaataaacaaatttgaatgttgtttaacccacaatactttttttggcccaccaaacttaactggggggggatttttattagtatcagcttcatctttttccaattaaaaaaaaattttgcttcatactatcctatatttacattatacaaccccatatattttcacttgcaaattaatttattaggaaattaattagccctaccttttggatttacgcaaattaccaacctaattcaaataggacattccccaccataatctttccttaattgggttccctcaaaccatctttgaaaaagcgaaggcccacaatctaaaccaccctttattggagatagtggtgacaaaggaggcccattaaa

SEQ ID NO: 62016 - DNA, 638 bp, Glycine max
  unsure (1)..(638): unsure at all n locations
  Clone ID: PAT_MRT3847_27014C.1
ccacgcgtccgacggctgcnganaanacgacacagaaggggaaataaattaaaactaaaggaaaggccacatctaacgaggagcacacatcttagagaagaaatgaagcccatctttgccttgttcgtagtcttgtcgcttctcctggttgccaacatcaacttaagccatgcaagaaaagacctgggggattattggaagaaaatgatgaatgacgaacccatgcctgaagcaattaaagatcttattcaagatcaacaggtacaagatgcaacagcagatcattttataaggtacttcgatatgaagcctaatatcattttgtatcacacccatgttgtgtccaagaagcagcagcagcaaaaggcttttgaccacaagtttaaaccagtctcaaggaacggaaagtcatggttgaacaaaccataaaaaatggttgaaggctaaagctgttagaattaataataaaaagaaaatgaaagtacgtattaatcaagcaataaggaggtactgtattaagcaactaagattgtgcagtaattaaggttgctacttttaatttctccctatggaatgaatctctttattatcaaaaaaaaaaaaaaaaaaaaaaaaaaaaaagcggccgctctagagga

SEQ ID NO: 62017 - DNA, 371 bp, Glycine max
  Clone ID: PAT_MRT3847_27015C.1
ggccggggaaggggttcttttcccgtttgatttgggaaaacttgctaactacacttagacaaaggacttgctgcaaaaatcattatttaatcttcaccactttccaaaatgaccacagccgtcacagaccagagtttcaacctgaagttaaggggaaccctaaatcccttaagcccttttaacgctgcaagaaccacatttataccggttgcctggaaggctcaatctttaccagatgttaactgccccagattatacttggaaagatccttgtttttttcgaagaccccaatcaaacccacagtgctgggaatttcaactactatagttttatcaggattttttaaaacaactttatgggggccaagaac

SEQ ID NO: 62018 - DNA, 287 bp, Glycine max
  unsure (1)..(287): unsure at all n locations
  Clone ID: PAT_MRT3847_27016C.1
cgtccgcccacgcgttcgacaagactttgtatagaatctctcgatttagcaaacagntgcgtctcaatgcacaatgataatatcctgggtcttctcaagctatcaattaaaagaggcgttaatctttcaattcgcgatgctcgtaccacccatccacatgtcgtctgcaacataggttatcaaaagctgaatactctcgtcgaaaaaaacaactgcaaccctttctggaatgaagaattgaccctttctttaaaggacgttaaaaccccactacatttgaccgttta

SEQ ID NO: 62019 - DNA, 416 bp, Glycine max
  Clone ID: PAT_MRT3847_27017C.1
cggctgaattccacgcgtcgcgccaaaggaacgggtgcgttcatacatgcggacaaatattggtataccctagtatgcactcgattgatttctcgggctctctctcctgtgccaagaaaatgagagagtgcattgctatccacatcggccatagacagtgtccaactcggaaaccccggctgggatctctattggcttgtacacagcattaagccctatggacagatcccgattgacatgaccgtgggctgctgagacgacgcctccagcacattactaaggaagaccggggccgcaaagcacgtgccacgaccggctttgcagatcttgaaacccccgagctcgacggatcccgaaccggtgcataccgtgtgctgttcccccccgagctgctgatcagcagctatggaactccg

SEQ ID NO: 62020 - DNA, 406 bp, Glycine max
  Clone ID: PAT_MRT3847_27018C.1
ggttaatatatttcggattatttgacaatagcttatagttccctatagtatgatacacgaaaatgattgacatgaacttaatctttaaaactaatatttgaaccattactcgacaaactgaattttcaatcgttgactttagtttatgataggaggtgcaaaaagtcatgctatcttaccacaatttgtaaaggaagaagccccattttcaaaacccaaccaccaattgaccacatacaccctatttacatttccatgtcctaacaggcttaaactgtaaaactttccttcgacaccaccaccgtcatcaccacgttgactatatacattacaaacttacagaactccattaacgtaaatgctctacccagcattataatcacctgttccaattaaaataaaccca

SEQ ID NO: 62021 - DNA, 629 bp, Glycine max
  Clone ID: PAT_MRT3847_27019C.1
ccacgcgtccgaaaaaattctgggtcccttctcctttattgcagtatggagtgtcaactggttctcatttcccttttccccttaacttggttgtggctcaatgctgctgtactgtacttaatttctgaagttttaactttaaagttctaatctttgtgctaaactctcctgtctgcttcaaaagattcatacctgaggggagggatttctgctacagtctacattgtgctttaggaagtgtttttggttacaccatgcagctaatggttgtctctgcaaaagaagctgcactgcatttgttgtaaagtttttcttgttttgttgaaggacaacgaatctcttggagctactagtttcccatcatttggtggttgtttagtaagttggggcacttgtggttttgaagaacccctcttttcgtttttgctgtaagtccttcactaagtgtggattgagaagcttgaagacccaactctctcttttgaagactgtgtttgcttgcttcttttctaaattgctgctttcttttagaagaaccaaagagggcatcttggaattctatttgtacctttttttggtggggtgaagatagttgcttatccttttgaactaaaagggtgaaagctccc

SEQ ID NO: 62022 - DNA, 382 bp, Glycine max
  Clone ID: PAT_MRT3847_2701C.1
gggggatgcacagaaaagaaagcaaacggctgcagaaacttgaagagaatgttagtggaaatctatggatagtgcagcatttttaagaaactcatgattagtgacgataagtctaatcaatataatataattattgaggatttaaattgtggtttcatcgcaatccttaattgctggaaaatgggaaattgcagacaaacacatctgatgaggccataattgtgattgtgttcacgataaccccaaaaaccttgatgttgcggccaaaattgcagtcacggaccatttcttaaaactttgagtaataatatacacacgatttctcaaagacataataagtttaaaaagatgatatgtgagccgtagtcagaacacactcagc

SEQ ID NO: 62023 - DNA, 902 bp, Glycine max
  Clone ID: PAT_MRT3847_27020C.1
tacggctgcgagaagacgacagaagggaaccaacataaagttagaagctgaatttgacaacaacaaaaaaaaaaaaccagcctagttttccttgtctatataagcctaattattgcggtcaaggccaccactcacattaacatctcaagcaactagccttctcaaattgcatttctacttcctaatatcaaattgccttctcaaatttcgtacaagtggagacctgtattgttgctgattccaaaatcaattttaaacattggttttaaaactagaaaactggaaataatatgccctgtattgaatttttacaaaccagattactatagcaaaaaaagaaatcaactattcaaatcgggcaagctttcacaacatatagacctaccaattcaatatattcaaccttttaaacataatttcaatcagcaagttctatgtcacaaagtgttgtaacaagatataaaaggggccagtgtccctgacggtgtcaccaagaaagtggggaatgaaaaagtaaaacaccatccaacatgaaatacaattcaagctaaaaatgaatattccattgactgtatgattagctattgttaagtttggtggtttgatatctaaccagtgtcacaattccaagccaggtaggtacgagcagaacaaagagctttatggtcccttttttaatttttatagcaggatattatacatctactactacctgtttttgttcacaagaagaattaaaattcccaacattaaaagtggcataatcaattcccaacatttccaactaagatgggaaaaacccttctaaatggaactttagtacttcactcatgcaacctgatttgaccaaatggttcaataatgtatccctcatcatcttctcttattctttttcctcgtgc

SEQ ID NO: 62024 - DNA, 273 bp, Glycine max
  unsure (1)..(273): unsure at all n locations
  Clone ID: PAT_MRT3847_27021C.1
ttnnnttttttttccatgaaagaaangaaacatctgaggggtatattacacaaccgaacacccctacctagatgacaatccncggaaatgcaaactttacttacaaaaggggggacgaaaatgggtacaaaagaagaccactgtaggcaaaaaactccgagcatttgcccccaaaaccactgacatttaaagccccaccgggctaaaacaaaaacattccctcatgctggccaagaattcaacccacttattcctgggccaccaacaggaccc

SEQ ID NO: 62025 - DNA, 347 bp, Glycine max
  Clone ID: PAT_MRT3847_27022C.1
tttttaaatttaatgtaatatttgtatcacaatataacaaataaggagataaaaacatccaaagtcctagaacaataattcggcccattcagtcccgtcacacagctcatttattttgtgggccgtagcccataacatcaatgcccatttcccccaaattctcgtttcttctacgcactgcaccgcacttcacttcacttaacctcacttccattccccaaaataccaaattccaatggcagaagcagaatccgaagctctgcgcctcaaggccatggcggagtccaagttcaaaggctccaacaataacgccaaatccgctctaaagtacgctaagcgcgcccacc

SEQ ID NO: 62026 - DNA, 213 bp, Glycine max
  Clone ID: PAT_MRT3847_27023C.1
cttcgttaaaagatggaacatgattagaaagagaggcattcctgctgatgttcttgcacagcgagctcatgacttggacaaacacgttggtcaggagagcctcgagggtcaccatggtgctgaagaccagacatattgtactaaggcatgtaggtgtgcacaaatgatgaaccttatacactgtgttgatgccgtacgtaaactccttactgc

SEQ ID NO: 62027 - DNA, 583 bp, Glycine max
  unsure (1)..(583): unsure at all n locations
  Clone ID: PAT_MRT3847_27024C.1
gtgggttcttttttatataataccaagaacgaacaaaaaaaacaccctacgaaaaaaagacaaaaagcccactcatgattctatgaaaagaaaagaaagagaaataagaaaattttttttcaaaaaaaaccccccttggaaaaagaatggaaaaaaaaaccacacttccagcatatttaacatgaagtaaaaccaaccgaactaagggaggaaaaattaaagaggtggggggagagatgagggagaaaaaaagttgtatttacattgaggaaaactgggcgggaaatggcgcctactaggtggacaacaaagccgttgttcagacggggggaggaggttacaataccaagccaaatcattttattaaccatccatcacagacggagaacgcgctgtttattgatcactgccaggtggtggagggggggagagtactactccattaactctaccaacacaaccacgaggaggaccggctgtgccacgaccttttttggaagaaaaaaacaacccaagctgtcttgggggcccccttttcggtgcctgctttgataaaattatagncgaagaagtaccaccaaaa

SEQ ID NO: 62028 - DNA, 250 bp, Glycine max
  Clone ID: PAT_MRT3847_27025C.1
actaaccacgatgaattgaaacgaagtaaagtgccacttggtgctacaaagtagtcgagtggtccggggacattccagtaattgtcagtgacggcactgtggtcacgtataaatagcgaattgggtacactctgtcaagtagcggacaaatagagagctcaagctaagtgtgaggatgcttgacaaacctaaatacatgtctcatctatgaaaccaacaacactgagtgaagaatgcatatcaaacccat

SEQ ID NO: 62029 - DNA, 256 bp, Glycine max
  unsure (1)..(256): unsure at all n locations
  Clone ID: PAT_MRT3847_27026C.1
caaaattcggctccaggacaactctacagaggaatttagtcaccttcaaaaccaaaggatattggtttccaaattcatcttgagatggaaaatccatcgcaaagtgttttgcgattttgacgtctaggtaatgaagacaagagaggttgcagtgacaaatagcctctgtgaatggaattccttcggaggtgcagttgattctgaattttccatcagcatgtcttaccgnatgtcctgcaagaggataatagtaaaa

SEQ ID NO: 62030 - DNA, 187 bp, Glycine max
  Clone ID: PAT_MRT3847_27027C.1
ggctcgagatcaaacaccccccattcttatttagaatgacgcatgaatcgaacaacagtaagttgggcacatcttcagcaacaacatcatatacatgtcagggttactattatggacgctgaggcgctccattgtacaatctgttcctttttattcatacccaaacgggttgtgaagacttctgttg

SEQ ID NO: 62031 - DNA, 164 bp, Glycine max
  Clone ID: PAT_MRT3847_27028C.1
cgtaagctcggaattcggctcgagcacaaacagagactaaagctagtgttgggctcaaagctggcgttaaagatgattaattgactcattatactgctgactatgaaaccaaagatcctgtaatcttggccagcacaccatgtaacttctcaaccaggagttcc

SEQ ID NO: 62032 - DNA, 475 bp, Glycine max
  Clone ID: PAT_MRT3847_27029C.1
accaaaaccttcggaaataattttagactttgtggactgttcccttcaaccaacctgacccatgtactggagcatatacatatgtagaacgaaaaataacattaatgccaaactcccagaccccgaaagctcaaccagttaatgcctcaaaatttaaacccatccctaactctgccacgctgaggtaaacctttggaggacacaaacagctcagttccttgactcgatcacgctactattaatcctgaaaacattcaaagatgtggttggcctaaacctcctccagctatccttgggcgattgccgggtatgaactatgaatgccaaacactcactctgaggatgcatgctcttcgggtgggttatcttcaaacgtcttgctttccttgactgatacaaatactttcttgacattaacgccctcaaacttggctttatcctttttctgtgcatgagccttttcttcagcacttaa

SEQ ID NO: 62033 - DNA, 107 bp, Glycine max
  Clone ID: PAT_MRT3847_2702C.1
atcaaagcagaatgcagccctcttttaacgggaaacttttggggcagaaagggaggctttataccccctacaatttcgggccggaacaatcgatcctgacacaaaca

SEQ ID NO: 62034 - DNA, 562 bp, Glycine max
  Clone ID: PAT_MRT3847_27030C.1
ttctctacggcacaatagcttcctaagtctatacagctaacatattagcctttcaaaattaaacagataactatattttttatagtttttttttttttataatcattagatttaaatccaatgaccaatatcactgttgtaagaacagcatggcggcagagaatccatacaattatttgattaattctgtaataacaatgttagcatcacattaactttctacgttattaaagaagactataataggagaatcacatttgataaactttttaaaaattttcatctgttgacatgtgtcatcaactattttgaatataaaagaatttgaaaaatcaaattttaaaaaaaattaaatatgattatcccatgaaatttcttaactacaacatatctcaatgaactactaatgaattattaaaattgttacaacgttattatttgatgacatgaatttaaaaaattacttaaaataaatagcttcaattaaaagaaatatttaaagaactaaaaaaatctcatagaaattaaaagattatttaagtctaaactaaaatagaatttt

SEQ ID NO: 62035 - DNA, 271 bp, Glycine max
  Clone ID: PAT_MRT3847_27031C.1
aaatgtttcttttacacaaaacttacacaaccttcgcgtagtgtatttattaaacccccacaagcctgcaaacaaaccaaaaaaaaaataaaaaaaaataaaaactacccgctctctctaaaccatccaaacttacttacgcattcatccaacttcctctctcttttatatatatcacctacattcaattcactgccctcccttaatacaacttaattactaaaaaaactctatctttacccaacctaatttctcttcaattatatctttc

SEQ ID NO: 62036 - DNA, 387 bp, Glycine max
  Clone ID: PAT_MRT3847_27032C.1
tcggagtttcaacattcaacaatggtacctcaagctttgtcagtgcctgcgagtgccagcttcactatcgcttctcgcaccagaagtccctcccacctcgtattttctcacagttatggtgcaattgaagccaaggggaatccaccaataacacccgcagtgatgactcctggaggacctcttgatctctcatctgttttgtttaggaatcgtataatattcataggacaaccagtcaattcacaagtggctcagagagttatatcccagcttgtgactctagctactattgatgaaaatgcagatatactggtatatataaattgccctggtggaagcacatattctgtgttggcaatttatgattgcatgtcttggataaagccc

SEQ ID NO: 62037 - DNA, 1663 bp, Glycine max
  unsure (1)..(1663): unsure at all n locations
  Clone ID: PAT_MRT3847_27033C.1
acggcggcgaaacgacgacagaaggggatccctgtgccacctagtttcggagtttcaacattcaacaatggtacctcaagctttgtcagtgcctgcgagttccagcttggctatcgcttctcgcaccagaagtccctcccacctcgtattttctcaaagaaacccgtgctcgatagcttcttccttgccaaacccatatggccattcatcggaagttgggttatcaagtaaaagccgtggctttcctttaaaacatgatgagaaaaatatccatggtgctagtacaagttatggtgcaattgaagccaaggggaatccgccgataactccagcagtgatgactcctggaggacctcttgatctcacatctgttttgttcaggaatcgtataatcttcataggtcagccagtcaattcacaagtggctcagagagttatatcccagcttgtgactctagctactataaatgaaaatgcagacatactggtatatataaattgtcctggtggaagcacatattcagtgttggcaatttatgattgcatgtcttggataaagcccaaggttggtaccgtgtgttttggagtagctgcaagccaaggagcacttctccttgctggaggagagaagggaatgcgctatgcgatgccaaatgctcgcataacgatacatcaaccacagagtggatgtgggggtcatgttgaggatgtcagacgccaagtgaatgaagctgttcaatctcgccataaaattgacaagatgtatagtgtttttactggacagccattagagaaggtgcaacagtacacagagagggaccgttttctgtctgtttctgaggctttggagtttggtcttattgatggtgtcctggaaacagagtattgaatacattttatttgcaggatatatcttagaggttgaaaatgttaattcttgtcaaattgatattgcagaatttcatccattaatgataatttgcaaatgttgaggattgtattttcttcttagttccccaaaattatgctattgttaaagtaacttccatagaatggtgtaattttactattgtggagttcaaggtagctaacccatgtcgttttgatttgagtacctactacctaggtgctcgcatagtaaacccccacgtgcagtttgctgggtgttagaactgaaggagccatctgagttatgtttcaccagtaaactgttattttagtccctgaatttgtaaggttttgtcacgtcagtccctgaaactaagatgtcaaataagagtgcaaaatgacaatggcattaatctaaaattaaaaaaaaaacatatgacttaggtgataatattaacatatgtttggggattgatgagagtaagtagtgaaatttagagacttgtttgacatttttcttagtttcagatattaatatgacaatgctcaccaaatttagggatgaaaatggctttttatttcgagtttcactcatcccactgagggagagtacaatctaatatcccttgaatgcagatcattcttgcatataangtgggtcgtttcccatgggagccaagtaatattcacagccattttgaatattattcaacattctacctattgcagtggaagaaactacctcatcaaattgttgcagcaaaagggatgacct

SEQ ID NO: 62038 - DNA, 169 bp, Glycine max
  unsure (1)..(169): unsure at all n locations
  Clone ID: PAT_MRT3847_27034C.1
ctctctctagcnctntttctctctctagaatcacgatcatnaagtactgcaacaacaacnccacaaatttctgcgncgcattgcttgttgtnctcatactccattagcgncgntgtcgctgtctcaattncgcttcgctttccctntcttcntccactctttccagcga

SEQ ID NO: 62039 - DNA, 268 bp, Glycine max
  Clone ID: PAT_MRT3847_27035C.1
gttgttaattttttattgttttttttatgatgttaatacgaggaaacgggaaggtaaaaaggcaaaaaaaagacggcagaaaaacagacggaaggaggaccgtaataatgggagcaaagcatacggcaagtatacctgagacgcacagctggcataggaccgtaagaggcacacaagagagcgactgaacggacgactaggcataagtgatccactgataacgaggaacagtatcgaaatgcaagcaacactgactaagcatggctcg

SEQ ID NO: 62040 - DNA, 683 bp, Glycine max
  Clone ID: PAT_MRT3847_27036C.1
atgcataattctagattatatacttaaagagtaaatacaagagcaaatgtaagcaaagtactgatatatcgctatctactcaaacgacacaaggtcaactcactcaagctgctaacactatagagttacttctcacaactttaataagagttactcaaaattgctatcagtatcactacttcactagagttacttctcccacaactcgcaacaatcaataccatcaaccgcaaacagagtaacagataactagccttattcttaatttatagattatgtatttagattaaatgcatgaacaaccgcaaaataaagtactgaaatattacaatttactcactccaaggacccaaggtcaaactactcatgcttctaatttagtgctatttactagtatgaggaattgtctcatgatttgcatacacgaccaaactcttgctattctgtcgttgagaaataacaagatcaggggattttaaggtgtcataagtttattcctgagttcatttctcttctgatcaacacatcctgagctggtcaaagatgttatccagatatcatcggattttactggctcatcatcatcatttcctgtgccaactccagaagcatgcgtaagagttttacaatctgtagctcaccatgaccaaaactggcttcacggaattctgaccatattggct

SEQ ID NO: 62041 - DNA, 419 bp, Glycine max
  Clone ID: PAT_MRT3847_27037C.1
ggcggcgatggtgagcagaggttggagggagatgacaaggagtttgtggagagcggcggaggagttaaggattagggttccggcgtgggctcaggtgggttttgtgtcgtcaattttgcagaagtgtccggggatcgtgacactctctcttaaaatggaaagtgatgtggattccacgatactggcttgtattgcgttctcgtgccctaatttggcattcttggaaatctcggtctctgatcctgcagttaatcggatcagcgggggtgaatttgctcgatttgttgctgataaaaagagcctcaaaagcctcaagatggaaggttgttctaaccttggaggttttgttctttgttcgtctagtctttctaccctttggctgtctgatttatactctctgtctaaaatggtctttaatt

SEQ ID NO: 62042 - DNA, 273 bp, Glycine max
  Clone ID: PAT_MRT3847_27038C.1
gtcatcacaatggggttcctcgtgcaatttgttgtttttatgttattcccttggtttctgagtgtgagagctgaggaaaattactcatcacagcattgtgattttccagccatattcaactttggtgactccaattcggatactggttgcatggctgcagcattttaccctgaggttttgccatatggggaaacttttttccatgagccagttggtagagcttctgatggtcgccttatcataaatttcattgcccaccatctaggtttccca

SEQ ID NO: 62043 - DNA, 436 bp, Glycine max
  Clone ID: PAT_MRT3847_27039C.1
aattttcaactcaacaattattcctacgggactgatatcaaatcttactcagttgaattatttaaacatcaaagttgaccctgaagatgagcgatggaatgataatgttaatattgtttttgtggaaattattggattaaagaggttggagacagcgagtatatatatcccaaaggctagccttttgaaattcatgcctgtccacaaatccctcaatttcagattggttgttgggaatcatatgcgacgtttcatatcgcgtgtgacacctgaactggaggaaaaattcaaactttgtgactatagtttaaagtttgttaatggtgtaaatgttccaaacatagtgaagatgacgcttggaaacttcaaggccttatacctagaccgacatatgaccattaagagtctctctgatttttgagtgaggaatttatct

SEQ ID NO: 62044 - DNA, 265 bp, Glycine max
  Clone ID: PAT_MRT3847_2703C.1
ttctttaatctcgagggtcaagaaacaccttaaagagtaaaacaaggccgaaaatggccactattagatcaaccccaccccgaaaactttacggggaacgaaagccacctatactgccagagagggggggcttcaggcgaatactggagacaggtgcccctaaaaacaatctggtaaaaaaaaagcattgggggttccacttaacctctaggaccttaatattttcgctttgaaaaaaacctccccgaacaattgggctgcaacc

SEQ ID NO: 62045 - DNA, 825 bp, Glycine max
  unsure (1)..(825): unsure at all n locations
  Clone ID: PAT_MRT3847_27040C.1
tattattaaattataatgnnnannncnannncttgtannacaaaatggnantgttgcatttttnnnnnnannnannaaattagaatgttannncnttcaagaaagaaagtgtgtttacnngttcagataccaaaatattcatttatacggctgcgagaagacgacagaagggaagggtaataataaaaaaggcacttggacgattttcttgtggtatttatgtttgagttcagttcgttttacaatttacatatccataattatattcaattatataaataatatcatttttaaaaataattattgtgattcacataatttaacatttataaaaaaattagaacaaaatatgtttgagatctttttgtaaaatttaaaaaatattaatttggttctcataaaaaatttcgtattaatttggtctctataaaaattgtttaatttattttaaaatattttaaccatcatagactatttaattcctttacaagtataaatttattaatcatgtgttatcatcgaagattataaaaaatatgttttatttttgtagagatataaaaagttttatgaagatcaaattaatactttttaaatttacaaggaattttaaacatattttatcctaaaaattattaaaattattttacaaaatttaatgctgagtaattttaattgacaaataccacacccacatacactcacacatactaacactaatatgatttgattgtttaatatacaggacccttgaacagaacaaaaaggaaacagatgcagagtgaaacgtgatttgtttgaactttgaaattcaaagaaaaaatt

SEQ ID NO: 62046 - DNA, 248 bp, Glycine max
  Clone ID: PAT_MRT3847_27041C.1
ctcacatattgctaaaaaagcaattgaaaatccagagccttttgtgatgaagcctccaagagaaggaggaggtcttgtaccacttaaactttgactcaacactgtcggaaaaaaatgtcccggagagaaacttacccaatgcgctggggtgtcttttcaggaaacaatatttatggtgatgaattgagggaaacccttcttacattaccggaaaccacgctccacacacgatgcagcatacattccct

SEQ ID NO: 62047 - DNA, 288 bp, Glycine max
  unsure (1)..(288): unsure at all n locations
  Clone ID: PAT_MRT3847_27042C.1
nacgcatgcacgcgtacgtnagctcggaattcggctcgagctctccagcccctgctcccagccaggggctaaggaaggggagaaagacaggggagaaagactctgtaaatactatggcatttggctccacccatatcctctccgtcggaaggtttttgttgaagagccaaggcccttggaccacccctgctgggctccagagctgcaggggcttcctgcactaggaacagggtggggctgtcgccttagatcccaccgaaaccctccatcctcctccagcagctgtgt

SEQ ID NO: 62048 - DNA, 1150 bp, Glycine max
  Clone ID: PAT_MRT3847_27043C.1
acgagtacaagtctccacctccaccatctccatcaccaccacccccctactactacaagtcacctcctccaccatccccatcaccaccacctccatactactacaagtcacccccaccaccatctccatcacccccacctccttactattacaagtcacccccaccaccatctccatcaccaccaccaccctattactacaaatcacctccacccccatcaccttctccaccacctccttactactacaagagtcctcctccaccatctcccgtttctcatcctccctactactacaaatctcctccacccccaacgtcgtctcccccacctccttatcactacgtgagccctccaccaccaaccaagtctccaccaccaccagtttacatttatgcttcccctccaccacccatctacaagtaagcttggaattaagaagcagcaacaataataagtcatgttctagtattcattgtggaataaatttccgttccatttggagcagagttaagcatataatttgttatacaagttctttgaataagagtctgagtgtatcacctctaagctacgatcttcatgactcatatgaggttgcttctatttatttggtggccatttttcaagtgttgttcttactaagttcaaggaagcgacaaatcaaaaagattcaagacaaggaagcaagattagaaatgttgatatcaattcaggctgcttttagagctttcttatttgtttctttgtagattaatatggttgattgtgtatgatttcattcaaattattgtgaaattcttttaataaaaaaaaaaaaaaaaaactcgagactagttctctctctccttggattgactgggaataaggtggagaaactctgtgatctctgcaacattactgttaataagaacgcagtttttggtgatagcagtgccttggcccccggtggagtgcgaattggggcccctgccatgacttctaggggtttggttgaaaaggactttgagcagattggtgagttccttcaccgtgctgtgactctcacactggagatccagaaagagcatggcagacttctcaatgatttccacaagggcctcgtcaacaacaaggccattgaaaatctcaaaactgatgttgagaagttc

SEQ ID NO: 62049 - DNA, 792 bp, Glycine max
  Clone ID: PAT_MRT3847_27044C.1
cattggggagaatctttgtggtggagcttgagggcaggtcttatagatgcaagttctgcagaactcacttggcccttgcagatgatctcatctccagggcctttcattgccggagggggaaagcatacctattcaataatgccgtgaacttcacaattggaacaccagaagaaaggatgatgctttcaggattacatactgtcgcagatattttttgctgttgctgcggtcaaataattggctggaaatatgaatctgcacacgagaagagccaaaagtataaagaagggaagtttgttcttgaaagaggaaggattgttgatgaagttgatttctccactgagttctacatcgatagtcatgccagcatgagtgatgctgaagaaccttaaaacatgcgggctggccttgttggatcatgagaaagaatgcactgcttctgtatacgaacaataataatggtgacccatgaaaatgttcagaattaatagtttaatttggctatgttctttgtgttttttttgtacatcttcatcgctggaggcagctagcttttgtttgatcgcttaggtggtatatcaccgtgtgttttgcttggatttgtagtttttttgtgaaaagataatgattgttgttagttgaaggcagagtgcgcgctctcgcgagcgtccccgcggcccagtgcgcgcggggcggggggcgcgcgcgcgcgcgggcgcgcgcgcgcgcgcgcgcgcgcgcgcccgcccgcgcgcgtgcggtaacattggtgttgatgccttattccaaaaa

SEQ ID NO: 62050 - DNA, 387 bp, Glycine max
  unsure (1)..(387): unsure at all n locations
  Clone ID: PAT_MRT3847_27045C.1
gggtggggggggaaaaactggnngggagttttttgcaatactcaacagtttaatacagatttacaacgggtgatgattcccttcattagggaaaaaggggccttaaatactcactggatgttttcctaccaacacatcccaccaccgaaaaaagaaagggggaaaaaacacccggaaaacctgtgttgggcaagatattggccccctctatcactaagttcaaatactgagagggggaaatattattatttaacagggatggtgaccccccacccgcacttggacattctgggggaaactttggaaataaatgagcgggaagagggaaatttttgtggcaggggaaaacacaaaattttttttcaggaatgtgttccaaaaacaaat

SEQ ID NO: 62051 - DNA, 427 bp, Glycine max
  unsure (1)..(427): unsure at all n locations
  Clone ID: PAT_MRT3847_27046C.1
atattggaataaatttagtacctacacctcttttaactgaagcatcaaaatttgattcgaaccaattagtctcagcgggtttccataaaacttgtgtttgtgcactaattgaacaaattgctggcagtagcaagcatctgctccagtgggaattctttattgaagaaaacctaattattctatctcttccatatcacccatgtaaatttgaaaattttcgatgcaaactctgtatgtttcatttacatggctaagaccctgtgcctcactccatcacaagtgtgctgccatatgattctgtccggtatagaattgccaccaataggaattgttttgtttcattgtagattttgttaagctgaaatcttctttgatttgtactctatgctatggacttcttggttaattttaaaaannnnnnaannna

SEQ ID NO: 62052 - DNA, 340 bp, Glycine max
  Clone ID: PAT_MRT3847_27047C.1
agtggacctcagacagaacagggagggcagagggttatccctggcaggttttgtcagttggtttatttggcgctcggcatatctaactcgagtcatcagctggaggaacagattctatgtagctatcaactgggctactactcttgtgtttggccgtgatataagcagaatatgaaaactttttaggtaaataaaactctgcgtgtaatttttatggtaatccatgaaagtgtgagagagtgacatcctgaaagataaaaattcaaatttagtctttgagtgtacaaaaagtgtgacgtaggcaatttaataataaattagtccttaagttttatcactt

SEQ ID NO: 62053 - DNA, 1173 bp, Glycine max
  unsure (1)..(1173): unsure at all n locations
  Clone ID: PAT_MRT3847_27048C.1
gcaaattggagggagtaatttagataatttggcaaaagcaactgaacttgccaatgcttactgctatgatgagatcaacttcaactgtggatgcccgagtcctagagtagctggacgtggatgctttggcgtacgtcttatgcttgatcctaagtttgttgcagaggctatttcattaattgctgccaatacaaatgtacctgtcactgtcaaatgtcgaattggtgtggatgatcatgattcttacaatgaattgtgtgatttcatttacaaggtttcttctttgtcacctgctaagcatttcgtaattcactcaaggaaggcactgcttaagggcctcagcccagctgaaaatcggagtattcctccactgaaatatgagtacttttatggcctcttacgtgactttcccgacttatcatttacaatcaatggtggtattgctagtattgatgaggtcaatggagctctaaaggctggggctcatggtgttatggttggacgtgcagcatacaataacccttggcatattctgggacacgttgatactgcaatttatggtgcatcaagtagtggtcttacacgtcgtcaggtccttgagaaatatcaagtatatggggactcagtgttgcaacgatatggacttgggccatctctgcgagatattgtgaagcctttacttggctttttccattctgagcctgggaatggactttggaagcgcaaagcagattctgctgtccaaacttgcacgaaattaaatcattttttgaagaaacccttgtagcaattcctgactcagtcttggattcagctgttgtgaaaccacaatctggtcgtggagatatttttgccaacatatacagctcgctgcctccaccatatagaacaagagaagaggatgtcatataaatctatcagtagtctattatagtcaattgactccaagatgagatgtaacccattcgatgtagaaatttcaagtaaaaactagggaactgcaattttttgtggcttattcttttttactcttgattttggtgaaacatgtaatgtgttagcatctctttagaagaatgttgggtggcccatattattttatttcagataagaccaacgtggcattatttaaaggaaatggaaatggcagagccagtcttatcctctnaaaaa

SEQ ID NO: 62054 - DNA, 135 bp, Glycine max
  Clone ID: PAT_MRT3847_27049C.1
cgagctgaatgccaaactgaaaggtgcatacttgtttcattttgtaatcatcaacctgtttgcttgattattggaaccaactgatttttataattcttcgtttttatcaatgaattggtgcttagcagattttac

SEQ ID NO: 62055 - DNA, 1287 bp, Glycine max
  unsure (1)..(1287): unsure at all n locations
  Clone ID: PAT_MRT3847_2704C.1
tctctttaaggcactaaagcgtaagcagggtacgcccaggtatggtcttatgcgacaggcctcctggattgcggaggccgctcccaagctaggctgcagaagataacgttctctgttgcgcatccaatcccttcactgttgttttcccccaattcccagtcccacatagcttagaacttacgatctacaattttacaaatacaaatacccttctctctcacacaaaacactagtccctcccttcttccttgtctctttctcttctcaacaacatgcagatcttcgtcaagactttgactggcaagaccatcaccctcgaggtcgagagtagcgacaccatcgacaacgtcaaggccaagatccaggacaaggaaggtatccctcctgaccagcagaggttgatttttgctggtaagcagctggaagatggtcgcactcttgctgattataacatacaaaaggaatcaacacttcacttggtcttgaggctaaggggaggtaccatgattaaagtgaagactttaactgggaaagaaattgaaattgacattgaaccaactgatacaatcgaccggatcaaggaacgtgtagaagaaaaagagggaattccacctgtgcagcagagactcatatatgcaggtaagcagcttgctgatgacaaaacagctaaagagtacaacattgagggtggttctgtacttcacttggtgcttgcattgaggggtggtacttattagtgtagatgcatatcagaacccaaagacatgaaaggaagctctatacctgtcccgtctctgaagacatcattgttcttatgtgcttggttgtaattgaggctgctattggtggtcagtaactcagtatctttaagttgtatgctatttgaaaccctaagttggcctttataaagaatatctgaaaaccaatgatttaaaaccatagtttaggtacatattttgctttcttctgcttttcaagggagcaccaatgttaaccttcaaacgcttctgtcagtgtcagagaagtttatcttctgtagccttgtttgtgggtgtcttccgcttgaaaagagggaaatggaaggttgattgttcgtgttttaagccattttggaatggaatgttgtcaaaatgatggatcggattgaggtcatcggggcattgtagttgattttaaaatttttaatgtttggttttaggaggcttactttcgccttccttttcttggaaaaaaaaaaaaaaaaaaaaaaaaaancagctggccgctctagaggatcctagcttacgt

SEQ ID NO: 62056 - DNA, 138 bp, Glycine max
  unsure (1)..(138): unsure at all n locations
  Clone ID: PAT_MRT3847_27050C.1
aaaaatagaagganaatagacatcaccactgccacntacatacactccctcaaatacgtgtnacatgttgtttgtggtggcagttncttnncttcgccgataaacacttcttagntgctatctggtgcttcatgcnct

SEQ ID NO: 62057 - DNA, 601 bp, Glycine max
  unsure (1)..(601): unsure at all n locations
  Clone ID: PAT_MRT3847_27051C.1
cttccataaataaggattgtacccattgtctacacgaaaataaagactatcgatcttccaaaaatgtaaatgcttttactttatagtgtaaaaaaggaacaacaaaaaagaaacacaccctcatcttttccacctatcctacatcttatgttatctattttactaatatttgatagacaactgtgattgaagtttttttctttttgtttcttgctctttttcttgtgatgattgaggaagtaccctttttctggaaaagtaagttctacattgattaattgtattattcccatatttttttttagctgaatgaacagacatattttgacccatttagtagtgaaaagattgcagaggcaccaaaatttagtttctatcatctatgtcttgcatttcctacttttcaatgctcttccttgngaaagttctgttgaaaaggctatatatagatttctttgttatacttctcatactttttattctgtagtccgtagtttctagtaactatgtactttcctagtttgaattgcatgcataattgcatatcaatttgttctccctacatttttcaatcacatattggcatctcatcctgtacaca

SEQ ID NO: 62058 - DNA, 277 bp, Glycine max
  Clone ID: PAT_MRT3847_27052C.1
tcgggccaagatccgggagattttcatgccgtcactgtgctccaccatgaccgatggcaaaatcgactcctggaccaaatgctaaggcgactagctctcctagggccacagcgtaatcatcctctagtccgacaaggccgacatggacattgagaccttctactactgctacctcgccgtcatcgtcgtcgaggaaggctgtgccttcgatgatgattcccatatagactatcttgtctagaacgacgaccagatatctgatgcgaacatcagagcc

SEQ ID NO: 62059 - DNA, 354 bp, Glycine max
  Clone ID: PAT_MRT3847_27053C.1
ataatgagaattaccttgctataataacatcaaactgattcaaggtataacagtttttttgaaagaaaaaaaattatggttgcttatacttatagcctataggataaataatgaagttctctggcataaataaataaatgtacgtcaaactgttcttattttacttagtacatatcgctgataatgctgttatttttttttaaagactagtactggaaccaattgcactacaagctcattggttgacatttttatttcttccattttatcaaagttcaattgttcagattttgcaaaggtaagccgggtttcttttatttttttgggggggggggggaaattttttttttttta

SEQ ID NO: 62060 - DNA, 235 bp, Glycine max
  Clone ID: PAT_MRT3847_27054C.1
gatgacggggcgtccacacggccgcccaaacacgcccgattgtgtatgtgagtgcaaggatttgtctttcaaactaaacctaggttcactctctacggtaaggtcatgcattatcttgtcacgagggaattgaatggcactagtattcactcgatcaggagaacagaagctggacagattgtagggtatgctgttcttagttgtgaggcgaaggggactgaaccctatacatcat

SEQ ID NO: 62061 - DNA, 403 bp, Glycine max
  Clone ID: PAT_MRT3847_27055C.1
caataaaaattttccatggggcgccccttgaacatatacatcaagtgcataggatgaatagatcacatatgtgttctattgatgcatgcatagagaatttccctttcttaattgctgaaattctaaaagctccttcccaaacatggaaactttaaacaaaccaatattttcattattatccaaattatagggccactgacattaaatgccctgaagttaaagtttattctgagagaagaacattaccgaataggtgtggggggaggaatcatgattgaaatggcccctttctctgttgaccttccgctgggggaggccagaccaatgaggagtcctgttgacgggccatccacctttctttgggagcgggccgcactgaagaagccggcgacctctttctcct

SEQ ID NO: 62062 - DNA, 537 bp, Glycine max
  Clone ID: PAT_MRT3847_27056C.1
gtgcaaccgacctatactatgtagaattctctgtttttattccactgtgcaaacactttgcactttaatccttattcttagatcacgctatcgttctttctacgggcatcattcacgtctaccaagccgtttcctgagagccgtagatttacatgcgttgagctggcccaggggaatatcagacctggattctactgccgcaaagtctggaaggtgtttgctctatgatagctcactatcaaaccattatgcggctaatcttgcaactgaatatgattcctgtaataaccctaagcgaatattttacagaacgtttttgctagtatgactatgcggatagtgacgaggttgttgaccaagcttatcaagaacaattatggcaacttgattgcatggtcgtttctgggatatacagttgtgagattgaacgaatgcaaggatctgactatacacaagattgccctcactcttgaaatgagcaatgataacttaagcaatgaatcttgccagatctctgaacgtgagcgctataatatg

SEQ ID NO: 62063 - DNA, 973 bp, Glycine max
  Clone ID: PAT_MRT3847_27057C.1
ttcattcctttcctccacgggccaggcaacacaccaacttctccatcgtcttcgttggctcattcgattccttagcttcacatctccatggcgctgcaccggttactgaagaggaaaggaggcgtcgatgaacttaacgacgatttccctctcgcttctccggcaaccaagattcgccgtctcgacgctgagttgccgccaattttggaagaggacgaaccgttacctaacgaggagagagctctcgttctcttcaagcctctcgtccattccccttcctctttctctctcactctcgattctgaccttatgaaaggaattaggaacaatcaatatctgtggtccaaacaatgtgagcgcgtgacagagttagaatcacgtgaggaggaaaatgatgatgaattggctcttgtgccttgggtaccttcaccttcttaccagttctccgctgttgatgattctctcaacacaaatgtcgagttgatggaagctgatgaaatgggagaaggagaaggtgtgggatccatgatgatggatattgaacaagaagatgacactgacactgacgctaaaacttcaacatcaagcattcactacccaacgacacacggtggaataacagaggggttccagcaacactgcttgttaccaaagcttcctcacaacacctcaactcccattacatggacccgctgaaatttgttttgttttttattttgatagtatataccactattttctttgctgttaagcaaggttttctcctatttgggataaaggggtactagactagaacctagtggaccaaactagtatttagcttgcttttgcggtatgggaatctctccttggaagaggccatccaagtgcaacgaagaaaagaaattaatgtatataatgtcttgttgtcgccatctttgaattgctgcaaaggaatgatctggataagaaaagccaatttattactacagtt

SEQ ID NO: 62064 - DNA, 421 bp, Glycine max
  Clone ID: PAT_MRT3847_27058C.1
cacttatgatgcttgggtgggtgtgaattaacatacattttttttttgtcttaattctccgattcttcaagaaaaaaaaaactctaactaatctgaagtttgattggaaaaataaataaaatttaataaaaaattatttctatcaaggagcaaaattcgaatactacttaaaggatttaattttaatttcaacacattaatcacttgtactcaatcatttagttacattcaattctaatttgggtttcctttctgttgttttctttctaaataataataataaacaaaagaaaaaaactgcccaaacttgaatgagtaaaattcactgttgtcatttaaaatttgattccgatttgtatctttgatgtattcacgaaacctccatgctttctaggcaaaattataaagttcattctttttc

SEQ ID NO: 62065 - DNA, 226 bp, Glycine max
  Clone ID: PAT_MRT3847_27059C.1
tgtgagcaaaagtgtcagcaattggccacgaaccgtcaaaaggccgcgctctgggcaattttccagaggctccgaccccctgacgagcattacaaaaatccacgctcaagtccaaggtggcgaaaccccacaggactatcaagataccacgcgtatcctccttgaaactccctcttgcactactactgttacgaccctaccgcttaccgcatacctgtccaacttt

SEQ ID NO: 62066 - DNA, 656 bp, Glycine max
  Clone ID: PAT_MRT3847_2705C.1
acaagacttgaatacatttcatttcaattatacgtttccttatatacatcaggcacacagctaatcaattgatatgttaatcattacactagcatgcagcagtgtcatgatttcctcaggttcacaaacattggaagtttgaattccaattagccttgaatgcaacttgaatcttggcccaaaatttaattaggtataggccttgccatagcttcttgggaaagggataacgtccctgacattgccaaggccagttgcaaagagaaccataaggtcaaaccttagagtgaacccagagttgttcactgttccatttcgacgaagatctaggtaccattcatacttctctcgtggcaagcctaactcatcaatcctgccattcaatacaaaaaaacaaggaaaaagtttacctaagatgtttccaagaaaaagggcatcattactatttatcatcgggtttggcttctctaacgcgaaaaggactaaagcaggtaatctcaatcgctgctgagaaattcaactgttgatatttcaacacaatcataatttgctatgcatacgtgtaataacgatggtagattttctagttaacaatttgataaaaaaaagtcaacaactcaaattacatagtttaacctctaaaatgagttgctaaa

SEQ ID NO: 62067 - DNA, 398 bp, Glycine max
  Clone ID: PAT_MRT3847_27060C.1
aaaataacacacacttaacacataattcccacaactaaaaaagggggggaaatttccaaataggcagaccttactcaaccagaggggcatgaccaaggtcctttattgaattaaacaaaccaacaatcgaaagaaaacacaaattccatatcatgcacaggatcccccatttccaaaaaacctggcagcaccctgtggaacacaaaaagctggcataaaaattttacctgcaatttcaagctcttgaaaaattccccaaagaatttcaaaacccgcaaactgtttgggcctggcaatcaggaaactgaagtgccctgaacattgatttgcccacacaaaactccacatttgaaaaccatgtttaggaccccatacctctattgggaagatcaattccc

SEQ ID NO: 62068 - DNA, 349 bp, Glycine max
  Clone ID: PAT_MRT3847_27061C.1
cccacgcgtccgaattaaggttttttaaaaataatggcccctaaaacaattttcccaacactttttaagggggtcgaattttttcctttttttttcaacaatagggtttgggaccgcccttttggggtaggttaaagggccagggttaagctggtatgggttctgtttttggaattcctgggcatttccatgatcacacctaaggttttggcaccagattttgcttataactgggatggagggggttttggacctgggggtttaaagacctaacagggcccttttgaatgcacaggaggatgtagccggacacagtaccacaggccgggcatgtttttttgccaaaaat

SEQ ID NO: 62069 - DNA, 893 bp, Glycine max
  Clone ID: PAT_MRT3847_27062C.1
gaagcagcagaaaaagaaatggaagacgtgataacagaagcagcacccccatcaaggttcctggaagaagacctaaacatcttcacacccccatccccacctctccccaaacctttcctcatcttcccacacaataaacaaaccctcaaaccctctcttctcatcatcgccctctccccctcctccctcgctctcttcaaccaaaccctaaccctaaccctaaccccactcgcctccctcattctcccggaactccccctctccctccctgaccacaacgtttccatcctccccctctccccggacaccctcctcgcccccgtgcctttccccgtcccctcccaccgcgcccacgccgtcgcccgcgccctcctctctatccggcccgactccgtactcgtcctcgactccctcgaccccaccaacttccgcgggaagctctcctccgacgacgccgtcgcgttcaagctcgagacctccgccgagatgaaaagggctcacgatgagaagctcttgggggaggaattggattactacccttccgggagcgttgtggacgggctgggcgccgcgattctcgcacggtgccagctgatgaacgtcagggcgagcctctgcgtctcgtggcctcggtttgatatgtctgtggtggcgttgattaagggcttgcttcggcggggcgtgcttcgggggttcgagtttggtttgagtgatgacggggttttgaaaattgggaaggggtagggatagggttttgcattctgagttgtatatttgatttacagtgtaattttggataatatgaatgttttgatgcatggggactagttcggtatatgaattagtcgcaaacacagattttagaatttaaacattatgactgaagtaattga

SEQ ID NO: 62070 - DNA, 400 bp, Glycine max
  unsure (1)..(400): unsure at all n locations
  Clone ID: PAT_MRT3847_27063C.1
caggcagggaacaaaggaaaagatactaaagaccggaacattttctctgattgggaagttaaaactccaaaaaacaatgacgggggaagcgctacccgcgcggatagctggaggatccatatcccacggagggggggggaaagaattctttttttttttcgcaacnacccccataacaggagccatccttgagggcgggcaaaaaactactacatgcacaggacgaggtattatattttagtcccccaaaccacgagcatgtcattgtgggggtggcngcccaactactccaaataccggtgctcggtaactcgaatcatacgtggaggtgcacaggccaaggcggaggtatctggatacgcctttgagataagctccgcccggaccctgcagggatgaa

SEQ ID NO: 62071 - DNA, 362 bp, Glycine max
  Clone ID: PAT_MRT3847_27064C.1
gttgctcgcagctctatttttcatgtgattgggacctgttagaactatggttgaatgatatgtttggagaaaacattatggaaatatgcatctgataaaatgatttctgctgccttacatgttgattctgttgtctttattcctgttttcaggtccttgagcgggacgatattatgaataagttctacgaggtgacagctcagttggaacagtcattgggtggtatttcccatgataaacttgatatatcagatgaagttaaagagcaggtataaatatttcaattatatataaactattgtatgcatgcaagacagtgatattagtctgccaaatctgattcgttgaacgttccttcctct

SEQ ID NO: 62072 - DNA, 375 bp, Glycine max
  unsure (1)..(375): unsure at all n locations
  Clone ID: PAT_MRT3847_27065C.1
gttagnatatntganttgctggtgttttctgagtcttagtatgttagcagtcttattgggctaggnttctattgattgtgtngtgctacactagaacatgacctagattactagtaacatctgtacangtagtgntntctgnattttacagcaccagcacntnaattttatatcagccattganaattcttttnctccctttctcattcacatcaattatcttaatgtcaacagtctcttttttatatntgcattgggcatgtcatagtatgngaatacagcataggtcanaagtgactcatttaattttgctgggnganctacagancatngtgtgtntcagnttggnangtcnaaagtccagtgtggcttctc

SEQ ID NO: 62073 - DNA, 648 bp, Glycine max
  Clone ID: PAT_MRT3847_27066C.1
ctgaatcttatgcgggagataaaaatatcataaaatttgatggtgatcacaactcctctcgaccacagttcttttataattcaatttccattttcttctacaatgtcctccaccctcctcacactcctagagtttgtaagcttgagaaatattttgattttggggatttgaagactggttctgctgtgaatgagagtctattatatgggatactctctagtctacagtcagcaactactgatgctgcgagttcatcttctgctcctccaaacacttcaaattcaatcacagcatcagttagtgaacttatttcaaaagttgctccagtaatcgccgctgagtccatgatctttccatctgtccgagttatttttttctaaaacctttgttctgtttaattcattaattgcttttgattcaggagtccatgattagagaggaaccaaagcatggaaataatgaacctggccatgatgagcctgcagatatgaaggatgaacaaaatgacccgactgaagattacttctcatactgtagctcaactagagaaagctggggaagatgttctactttagtactcagcgatgaagaatcttatccagatttcagggatgatgataatggttctgaggtatttgcaacacccct

SEQ ID NO: 62074 - DNA, 149 bp, Glycine max
  Clone ID: PAT_MRT3847_27067C.1
gcgatacgacgacacaacggggagggaaatgatggagagaagccgaagaccaagacgaccgaacccaaagggctgaccgattagatcaatgacaaaggacaaggctctcagcagcatcattgggatcaggacacaactgtccctgttga

SEQ ID NO: 62075 - DNA, 1285 bp, Glycine max
  Clone ID: PAT_MRT3847_27068C.1
ccttctttgtttggcttttgaagtttgaacagtatttgcctatttggtttgccgctccaaatcccaatacactcactgttggtgactcataaaggcaccgtctttggattctcttccacttcgtctctgcgacgcaaaaatgggtcgaaaacgagcttccaaaaacagcgacagggttcaagcgttgcctactgttgtggaaccacagccttccaatggaaacatacaactgccaagggcactagaatctcagcttgaaatcccactccctgggcttacctcaccgaagcatccaaatttgttggtgggtagagcggaaatgcgtcatgcaaaaagcccggcgcaggagcaagtgaaccaagaccatgggcatcaaaagaagcctcctacacctgctaagaaaaaaatcaaattctgtggtgcatctgtgaggcgatcagaacgcattaaaagttcagttgtcaatcaccctaacaccaattgttacattgaagtcgttgaggatttaactgttagtgatggtgagaaagatgaagcagatactcaactggagcaggtattgttggcagagccagagatggagttcgagctgccgctggagcacgagcacgagtccgagccagagctggcagataatttgggagagaagaagagttggaaagaaaaagttgactgtgccttgcaaagaatagaagctcttgataagacagtagaattgttgaaatccaaggtagatgagaatattgccttttgtgaagccccgtctatggcatctataagttacaagagcatgtatattgactcacagaagaagattgaagctttaacagttgaaaatcaacgactaaatggaaagctggaaaatgctcttggcaaaattgaagcgtacgaaaaagagatccgtgttttagtggatgtattggataaaacgaaggatgctgttaaggatactatgattacaaatgtggcaaaaactatagaagccgctgttaatgtatcaactcaagcaatgcaaatccacaatgcgtgctctgcttctgcagttaagagaaagagaaatgaaaactgaagtaggaagctaatgctgcacgacttattcttatgtattgtaaaaagtagacacttgacacctaatgtgcttgaccagctgaccttgagcctgtggtgctttttaaccttttttgcatggatttctgcttgttaatgtggtcattttaaattctctgattttcatgtgtctctagttttacctgatggtgcataaaattcatacattctgtttttg

SEQ ID NO: 62076 - DNA, 359 bp, Glycine max
  Clone ID: PAT_MRT3847_27069C.1
aaaaaaaaaacacccggggaatttgggacaaacccaaattttgggggggcgttggcccataaactacagaaccctggaaaccaaccgcaatcaaatttggtccccctttggaatttgaatcccaatcccgggcctgggttatttaaccctttgtcccgggcccatggctggctgaaatttgtacccaaacatttttttttttggttcaaaaaaaaaggggaaaaatctttttgttcccggcccccttatgggaaaaaggggggagggccccccccgggggctttaagccctcggcttcccttttacttaaagagggggccctttgggccgttcacattttcttaaactggttaagccct

SEQ ID NO: 62077 - DNA, 362 bp, Glycine max
  Clone ID: PAT_MRT3847_2706C.1
atcacttgtgcgactgtgcgttccgtagtttatcatgatgcttcaccacatatgtacagggcgtgctcaacgatcgcaggtgctgctgccagtggatccgcaggtggtactaggggtggacttttcagaacacccatttctggtggcgagcatagagccacctaagctcacggtttacctagaccgcctttagcagtacggaattttatgtagcacgagagatttggtcatttgtgcactgccatgtgttgtatgcaccacctaccaccatgatctgcatttggtactctggctgatggttgaccatactcatcgagtcatacaatatctggatcatcaccacttgttacttacacaccgaa

SEQ ID NO: 62078 - DNA, 428 bp, Glycine max
  Clone ID: PAT_MRT3847_27070C.1
cttggttattttttttctttttcttgctgcttttttttatttttaaatttcttttctttttattggtttttgggtagaaaaagggtggaaaacctcaccctggatgaaaacccgcccatttcctgctaattggaattgagctggctgtttattcctatggccaaaatgcgatcataatctaccgggaaagtaaatttccaccctggagtggctgcttttcagaaaaaaaagccccccttgtgtggccccccctaaggtgtacaaaacagggaggcttgtagacaaacattaggtttggggggggcggggatttttataaccatagtgccctttggggggggccacatgcgggggtcaaaactaggggataacctgatataacactttcgggtggcctaggccctttttaagggggtttcctttccggg

SEQ ID NO: 62079 - DNA, 374 bp, Glycine max
  Clone ID: PAT_MRT3847_27071C.1
tccgggaaaagtcgaggctgcaacgttctttagcttcactctctttgtattttgaggtcctcgaattacaaatcctaggaggcttcgtagggcagcatgtgcgctgtaactgcgaacaataaaaagtagcgactgctattgtcaccccctttcttttttccccactaattaatatcaaagagggaaaatgattctttctcgcccgggaaatggaccagcgatattgaaatcatatcactctgataactttataatgtacttgctgaggttggttgcaaatatctcgcatatgtaagttttatggtatggatgacatttgttggcacatcataaatggaaaatttggctaattactccaactattcttatatgtc

SEQ ID NO: 62080 - DNA, 459 bp, Glycine max
  Clone ID: PAT_MRT3847_27072C.1
tttttttttttttttaaattcttctttatattatgggggattttattctttgtgggatttacagttcacccgttattataaccctccttcaaggtcataaaaaccaaccaaatatttagggtttttacaaaaaaaccttgaaaaaagcttaacttaatccccttttttttttaaaaggacaaaaaattttggtttttattttacccaataataattaacttcaacaagttttaatgcttggaacttgggttgtgaggaccgtggctttttgaaaaacattttttgtggctgaggtccccaataaaaaaacccacaaaaattttggccctttattttaacccccaaaggggttggccccttaggggggattgaacccttttttttagccggggtgaaaagtctaacctcccctgtgggaaaaaggtttaactccctaaaaaaaaattctggggcggaagg

SEQ ID NO: 62081 - DNA, 363 bp, Glycine max
  Clone ID: PAT_MRT3847_27073C.1
gaattttgagggagaattccaattatttgtagttaaaaagattaattccacccaagggggagtttgaggattttgggcacttacttcaaaggaggggggcatttttcttcaagcccttgggtatcccccaattacaccaatattccttggcaccagggagaaccattgggggaattcctaatttttggaggctttaatccggttcccttaattaaattttaaaggaatcccttgcaactcctgaaaagctgaaagattttgccaataacgcttcccaaactgttgaacttgattccataatctgggtaaagagtgatgaattggttccatcatattcaggaaatatggcaagagcagttgagg

SEQ ID NO: 62082 - DNA, 748 bp, Glycine max
  unsure (1)..(748): unsure at all n locations
  Clone ID: PAT_MRT3847_27074C.1
ccacgcgtccggtttaaggagtgttcaaaggaagttgaaattggaagtggttctaggagaataccttctcaagagaacctgaggaaggaaaagatgctacagattgcaagttcaaagacagatagccacacatttaagacaaagctacctaatggtaatatgatggagccaatcccaactacgaaaaaagatttctttccttcaagaagtaaaacactaagtcgagactttgaggagtctttaatgatgaaatctggaagcagattagatatatgtgcttcttccgctcagatagttatcttgaagcctggttctgataggatttgcaattgcaaccatgaagagaattgcatcaatttatcaggcactttacacgggagaaaaggtttagaagattttcttgaggaagtgagggagcggttggaatgtgaactgcaagggattagagctagtggaattgagacaccttacaatgaaaaactatctgatgctaaagaggtcagagaaagtgtgactagagatgctgaaccaaatttactccgctcagaataacaagatcatataaaagtaaaatgcagttcaatggaccaagttctccagaacttttcaacatagantaccagaagattcttgtcagagaggctaagaaatattgtaaaatggtgaactgcatttggacattccctgaagtggnctgttacaatgatagagttagactaaagcaggatactacnaaagtgtgcaaatg

SEQ ID NO: 62083 - DNA, 520 bp, Glycine max
  Clone ID: PAT_MRT3847_27075C.1
ggggccaattttttaacccccattcaactataaacaccaacaacccctccaaaaacaaaacccccggaaattttccccccaaaatcaaaaaaacaaaaggacccccacccgggcccccccaaaagggccccaaagttccaattttagctaaaaggtttacctaatttaagcaatcatcccacccccagttccccaaaaaaaaaaaattcttttaacaagctttttttttttacccccttgccaaaaaagggtaagcttttttttccaaaaaccccctttcttggggggaaatcccccaacaaaacccaaaattttcaaaggtcccatcccttgctggcaatgtttttaaaaaccccccccaaacccttaaaaaaaccctttccaaaaattgcccaagggctttggaaaaacccagggcgttacccggggaaaaaaaaccccaccttggcaattttttttgcaccattcattgcattaaaaaaatcttgcttgttggcaaaaacaagcaaaaagctttttt

SEQ ID NO: 62084 - DNA, 2722 bp, Glycine max
  Clone ID: PAT_MRT3847_27076C.1
tccttctcgtccgcccaccacgcgtccgcgaacgatcccattctctctattttctttcgactggtatcgggtacaggcacgtccgctgctttgtagtttcttcttggtggatccattcagatctcatccacgatgtgttgcatttgtttttcacgatgctgaacccgaagccgcgcttcttctaatcacacgacgactcattccgtacacttgacactctcgtcaacaatggccgatgttgccggagccacagtgagtccctctatcggtgaaaccaacgatgcgcagaagaatgtgttcgatttgggagcgtttgttggagacctaactttggaagatgatccaagcagcgatgatatatcattggaaggactagaacaggaactagaagagtgtaagaacaatgatgtagttgcaaatatactgtctaaaggtaccaaacttagggattatacaaaaggagttgagaacgatttgcgcaaagttgaattggattcaattcaggattatattaaagaaagtgataatctagtttctcttcacgatcaaattcatgattgtgatagtatcttgtcacagatggaaactcttctaagtggatttcaggctgaaattggttccattagttcagacataaagattctccaagagaagtctatggatatgagtttgagacttaagaatcgcaaggtggctgaatccaaattggctaagtttgtggaggacataataattcctccaaggatggttgacgttcttgttgatggagaggtcaatgaggaatatatgagaactcttgagattctcagtaataagagacggattccagacgtagattcatattttaaagcttcaaaagctctccttgtggtcccacctgagcttggtatgcgccggccgccagcagtttcaaaggtgtttgactttattgttcagaaactttatgcactgagaaagcccaaaacaaatatccaaatacttcaacaaagtgtccttttaaaatacaagtatgttgtttccttcctcaaggaacatggcaaggaaatatataatgaagttcatgcagcatacattgatacgatgaacaaggttcttagtgctcatttccgtgcttatatacaagcattggagaaactacaattggatatagcaacatataatgatttaattggtgtagagactagaagcagtggcctattcataagagcaagggaaccactgaagaatcgatctgctgtatttgctcttggggataggattaatatattgaaggatattgatgaacctgcattaattcctcatatagctgaagccagctccaataaatatccatatgaggtcctattcaggagcttgcagaagctgctgatggatactgctacttcagaatataatttctgtgatgatttctttggagaagaatctatattttatgaaattttttcaggtccatttggtgtcattgatgagcacttcaattctatacttccaaattgttatgatgctataggcctcatgcttatgattcaaataatacacaagcatcagctcatcatgtctcgaagacggattccatgcttggattcatatttagacaaggtcaatatatccttgtggcctcgatttaaattggtatttgacatgcacctcaacagcttgcgtaatgcaaatgtgaagacattatgggaagacgatgttcatcctcactatgtcatgaggcgttatgctgagtttactgcttcgcttatccatttaaacgctgaatgtggagatggtcagcttgatttgaatttggaacgacttagaatggctgttgatgacttacttatcaagcttgctaagaacttcccaaaaccaaaatcacaaacagtgtttcttataaacaattatgatatgacaattactgttctgaaggaagcaggtcctgaaggtgggaaaattcaaatgcactttgaggaactgctgaagagcaatacaacaatctttgtggaagaactgcttcaagaacattttaataatttaatcaagttcgtaaagtccaaagcctccgaggacccaacatcaaatccggataagcccataactgttgccgaagtcgagccactagtgaaggattttgcgagtaggtggaaggctgcaatagagctgatgcataaagacgttatcacttctttcagcaacttcttgtgtggtatggagatcttaagggctgcgttgactcagttgttgctttattacacaagactctcggattgcatcaagaggatcgttggtggttctgcattgaacaaggatcttgtttccatatcttcaatcatgtatgaaattaggaaatactcgcggactttctaatttgtcgaagatgccatagttatatactggatctaattcacaatcaatgatattccattcagtattatgccaaaaaacaactctcttggatcctgtatgtaaacgaaagatagtttgcttctttcgggacacccaaataagtgaactttttttgtgcaacctatttgggaattacaaaagtacaagtaaaagagaaagcacactattgttgtataattgcagacacatcagttgttcatgtttgtttttttcttatatatattttgagtattttcttgtagacttttttttatcaaaccatgatttaagcattctctatatatagccaatgacacttgatgcaataatagtgaaaaccatgaattcacag

SEQ ID NO: 62085 - DNA, 560 bp, Glycine max
  Clone ID: PAT_MRT3847_27077C.1
ctcacagggagcaacctctctccatacataatacagaggcctaagccccaacagagtttttctctctcaaaaacattaataccaattattcactgaatgccaaaacttctgtgcctatatatataaccacatgataactgtcgcacgagtcctgaattacctaaataactgcctaaagacacaaatgctagtatgctacacaacttcctaaattaccgtctaaaggcacatcacataaacggaccttgctatttatattaaatactgcaactgcacaataatttgaaccatttaatttggttgcactacaagtacaatagtctaattctattccttttcaagtactttttattgcacaccactcccctctaaatgaagatacaaaaattaattcctgttccctctttcgggagaagagatatatataggtgttttatgttgaattatagttccattttggtactttagcttgtattttaccttcttcataattttatgggtgttaacccaagtaatgatatccctttgaatgtttctaagtagcgaagccctattttata

SEQ ID NO: 62086 - DNA, 447 bp, Glycine max
  unsure (1)..(447): unsure at all n locations
  Clone ID: PAT_MRT3847_27078C.1
caacaaccacgcccaaaacacggggaaaagggaggccaaacaggaaaacacgacaaggacacaggcaaagccagggcannggaaacaaacccagcagccacgaaggggagcgaagaaggagaagggccacgggacagagaggngcagcaagaggcgcacaaagggcccaaagccagacacgcngaggcgaacgaagaaacccaagaaggccaacaaagccaagcacccaggggcaagcaccaacccccgggccaccaaagaaggngcaaaggncaagggggcgaacacaccaccagggaanccacacacacgggggggcaagccgaaacgccagaaaagggggccagggaggacacaaccagggccccagaggaccagccagccncggaacncgacggaggggaacaagaggaacccgagcacgaagagggcagaggaagaagcaaa

SEQ ID NO: 62087 - DNA, 610 bp, Glycine max
  Clone ID: PAT_MRT3847_27079C.1
attctgtataatgagaacaagatgctggttttgattcaacctaggacctgttttacaaaaacaaactatagaaagagtatatcttttatcaatacaatacttttcattcagttactgtataatgtgtggttcagtcaatctacatcttctaaatctatagcagtgtttagtatatggtactatggttactttaagttgatccaaagaaagagttcacaactcggtatgcacaattccttcgagtcaagactcttgaccaaactttttggtcaccaccttcagaccttcttcaacttaacgcactttgatccaccgtaacaaaaacattggcagccactgcttcatttgtttcaatcacaacacgattctcggacacgttcctcagagcatgattggggaaggtgctgcctgaggagcttaaagagtactgaacattctttatgaggttaggaaaaagcaaaacattgttaaaatcaacactccaagaggttccattcccttgcatagacattttggcaactgtggcctttaacttcatcccccttgcaatggttctatcaacaataacttgatcaatttgttggaaaggactatttgattggtcaagctg

SEQ ID NO: 62088 - DNA, 356 bp, Glycine max
  Clone ID: PAT_MRT3847_2707C.1
gcggctggcagactttttgtattagctgtacacccagggggaggaggcgggctgttggagaattttttgcgatggactcccacacagcgaggcagtccccacaaagggccacgcacacacaagtagaaccgacatgacctacccacggcaagccagcatcataagtggtgctgccggaacaatggagaacctacgcgccggctcgaccgcgtgaaccgagtcttacgggagacgcggagagcgtcaatatgcctttgtggtgtgtgctcgaagaactgaaacgcaaacgcttgacgactatataaaattggggagaaacatgacacgtgggagagattgtccggcgctcacaaaaa

SEQ ID NO: 62089 - DNA, 245 bp, Glycine max
  Clone ID: PAT_MRT3847_27080C.1
agctattcttctctgactcggtatgtgctggtcatttgttatggctggcttgatccggtcatgtgaaatcttaattcagttattatgtagtttaatagaagtcaaattgcattactctctgtcttgcttgtaaagatgaattgtttgacctagaatactcaagaggaatttaggacttcggaggaggtatgaacacatttattaggcatgattaatgctcaaagcaaggggacatgtgacaggag

SEQ ID NO: 62090 - DNA, 508 bp, Glycine max
  Clone ID: PAT_MRT3847_27081C.1
ttaccgctctacatgtgtagtagtaccaccttcttggggggggggggggggggggggggggggggggggacattcagaaaatgagggggaagaaaggccttagtagcatgggtggatgatgtctagtgaacgggagcgatgagcattataatgtgactggataacgggagcagaagaagataaaacaggagttggatgaagtaacagacaagttaaagaatagataaggacttggtagaagtgtttgcactaaagggcggtgtgccagacaaaatactgatgatggcagggttagtaaaggggtctttagggaagttactatccctggggcgactattagtaagagtaatcgatgttaaaaatattgggttaatgttgctcctaccggtattagtacctccgccgtcgcccagtattataggtattaaacgattgctagaaacgcaaaataaaaaatacgcaaagagctaaagaaaggggtagacatagctaagcaataactagcgca

SEQ ID NO: 62091 - DNA, 267 bp, Glycine max
  unsure (1)..(267): unsure at all n locations
  Clone ID: PAT_MRT3847_27082C.1
tgaaagtgatcccgtggagaatttggcagaacagagagggtattcagacaaattatagaaaccaccgatgaatcagtgagtagaatatgcttcttccttgaagattaactatccctagtgggcaacttgttaatgatgaattgaagacccttcaaaccgtgtgtgctaccttaggtaggcgtggaatatcaattatttccacactaggaacaaaantcattaaactaatgaacttactcagtcccttctagcgtggaattcgcaaca

SEQ ID NO: 62092 - DNA, 862 bp, Glycine max
  Clone ID: PAT_MRT3847_27083C.1
ggctcgagctctcgccatctacataacacctcaaattctgtgattcgggtaatggccaccagtggaggcgatgaggggcagaacaaccctgccctcgacccggatttggatgctccggatgacccggatcacgagttcgctgagttcgggtcgggttgcttctggggtgctgagttggcctttcagcgagttgtgggtgtggtgaagactgaggttggttacactcagggtcacactccggatccgaattacaaactggtttgcaccggaaccactaaccacgttgaagtggttcgggtccagttcgacccgaaggtttgcccctacaatgatctactcgctctcttttggtctcggcatgaccccacttccatcaaccgtcagggcaatgatgtgggtgcacagtatagatcaggaatatactactacaacgatacccaagctcgtttaggccaggaatcaaaagatgcaaaacaattggaactgaaggagaagattgtgacagaaatacttccagcaaagaggttttacaaagcagaggaataccatcaacaatatctggagaagggtggaggtcaaggcaacaaacaatccgcagaaaaaggctgcactgatcccatcaggtgctatggctgatgaatgatgatcactttcttgctgcacacttcaccatgtctggcttctatcagccatctgttgtgtactccaatataataatattatcaaaaataaaataagtcatggtgtatcttcagagtgctcatattgcaatctggactttagttgatcaatttgctattcatataaatgctttaaagtaaaagttatcattttgcatgaaaaaaaaaaaaaaaaaaaaaaa

SEQ ID NO: 62093 - DNA, 1406 bp, Glycine max
  Clone ID: PAT_MRT3847_27084C.1
cgcgagtatggaaagtttttccatgcttgtgttgtgcattgtccctgaatttgtacttgattctgggacgtcactcagtctgagtctgtttctgcaaatttcaaaaccctctctctcgttactcgccatcactagcgagtgctccttcttcttcttcgcgaaattcgtatgcgaagaaggaggtaggaattcacgctcctgcattctcagaccgtgagaattcctattgtgcctaaatatagcctttattctgcgaagtagaagctgagagaggttgaagatgggaggagatgattttgattggattactaatgatgagcttgaaattcacacctataactcttcgtcttcctgtttaaccttttctaatggggatgctggagaaggaggctcgtattcaggtttgtgttttctcagagtacttaactatctcgtgaatttgggatgttattgagaaattgtttctaaagtaattcagtaatatggtgaagaaaatgaagataaactacttgaagaacttctctcatacaaggctctggaaagttctccccaaccacagcagcgaattgagccagatccttgttcttcagagaatgcagggagctcttgggatgatttctctgatactgatattttttctgatgatgaagaaattgcaaaaactatgtctgagaatgatgataccttacggtctttggtgaaaatgggctacaaacaagaggaagctttagttgccatagaaagattaggcccaaatgcctcacttgaagaattggtagattttataggtgttgctcaaatggcaaaggctgaagatgctcttctgcctcctgaagaaaagttacaatacaatgactatgctaagtccaataaacgaagattttatgattatgaagtgctgggaaggaaaaagcctaggggatgtgagaagaaaatcctcaatgaagatgacgaggatgctgaagctcttcatcttccaaatccgatgattgggtttggtgtacctacagagtcaagcttcataacacacagaaggcttccagaagatgccattgggcctccttacttctattacgagaatgtagccttagcaccaaaaggtgtttggcaaacaatttcaagattcttgtatgatgttgaacctgagtttgtagattcgaagtttttctgtgctgcagccaggaaaaggggatatattcacaatctccccatccaaaataggttcccacttctaccacttccaccgcgcacaatacatgaggctttgcccctaacaaagaaatggtggccctcatgggatattaggaccaagcatactggctcttgagaggcaagctcgtctgcacttttggctaattccaagggcttgatcacttcctcagcatgggtatttctagagaaatggt

SEQ ID NO: 62094 - DNA, 381 bp, Glycine max
  Clone ID: PAT_MRT3847_27085C.1
gaattgtttccttaagtcaataaagtattcaattccttttattagtacagatggggggcatatatatatgcattgagctgttctaataaaaggaattgtttccttaagtcaataaagcattcaattctggaggcattattgatcttggtagagctcggatgtgcaacctttatattctttgacaaaaactggaaagaagaaattccaacagacaaaactggagattgtgatgcgatatatggattgctgattgagaatcggaatatcgtgatatgggttgctcttggaattgttatctgtgaggcccttcttttcctgttagcccttattgatagggctgcaaataggccagcagactatgatagtgatcaggagttcatt

SEQ ID NO: 62095 - DNA, 256 bp, Glycine max
  Clone ID: PAT_MRT3847_27086C.1
tgtcaaccgtgcccaagcccgtatgtatgttatatgcactggccataaatacatggttggtttccccaccagaaagaccaacaatgacattacctgcattgttagcaacggtggaagagtgcaatgcatgcaggtgtggccaccatttggcaagaaaaagtttgagactctctcctacctgggagacgctgatgatgcacaatcgttagaagaactacaattccgttttaggaacgaaggatctctagcttggatt

SEQ ID NO: 62096 - DNA, 353 bp, Glycine max
  unsure (1)..(353): unsure at all n locations
  Clone ID: PAT_MRT3847_27087C.1
cacntagnacnacagngntacagncngcaaagganttcccgcacaggcnaaagcagagaggagaganagtgcancgnanctganggcaaggcanngatgtcctngcgcgatacngnagatcggaggttgagcacanatggngtcngananataacgngagcnaagnnatgcgcnggatatggtnagnagcggtanactggctgtcacccgnggaggcatgaacggcacagganaccgcacttgacaacaagataatctcgccaatccattannaccatcctaacctcngaatatcccnctctctctcaatcntccataaatcactccactctctgtaacgcatcgcatttcat

SEQ ID NO: 62097 - DNA, 482 bp, Glycine max
  unsure (1)..(482): unsure at all n locations
  Clone ID: PAT_MRT3847_27088C.1
ggtggttggagaaggctcgagatgcagctgcaggagaggatccgcgtctagtatttggtggttgtggtatgaatttgagaagcctggtgtttgcagagtctgaagagctgagattggatcacatatactatctgattctagggttaaattttaattcactctaccctctcattctcttgctcacgcctcgcacgttttttgtctcttgctcactttactctgttcccttcccaatcgccacttagtcatcaccgtcgcgactcacgaggatactccacgatcgacgttccctcgacatccttcaacaaagtttccggcatctgttcgagcggagaggaggtcttgngggatggtgagggagcatttggtcttccaacagaaatccctaacgaaagggaagagaatttggtgcagacgcacgctaagggaagagaatttggtgcagacgcagggtcctggaatacttgaatgtgaagaacaga

SEQ ID NO: 62098 - DNA, 918 bp, Glycine max
  Clone ID: PAT_MRT3847_27089C.1
tctccatttggtggttggagaaggctcgagatgcagctgcaggagaggatccgcgtctagtatttggtagttgtgatatgaatttgagaagcctagtgtttgcagagtctgaaaagctgagattggatcacatatattatctgattctagggttaaattttaattcactctactgtctgactctcttgctcacgcctagcacgttttttttttctcttgctcactctactccgttcctttcccaatcgccactcaaccatcaccattgcgactcacgaggagactcagcctccacgaccgacgttccctcgacatccttcaacaaagttttcggcatttgtttgaggtgcatttctgtttatgcgttcagacttcataacttccttttctgcttttatgttttttttttgtttcacgaaagaacatagcagatttattcttgcttttatttcatgcactgttgttacttctcttctttattgtttattttattatttactgattccttttaatcgttgcccatggcttactctggagaatatgaataagataacgcgttagagatgttaatgttagatctgaagtacctaatcttctcaaaggcattcttttccttaccacatcgctcacccaattttttccaataaattttaagttatttcgttgaaaatttcaggggattgggtattttgaaaattcctactcatttccatgcaaaaacaccttcacccatgctctcttattaattgacataagctaccatataaacggagaggaggtcttgggggatggtgagggagcatttggtcttccaacaaaaatccctaacgaaagggaagagaatttggtgcagacgcacgctaagggaagagaatttggtgcatacgcagggtcctggaatacttgaatgtgaagaac

SEQ ID NO: 62099 - DNA, 1061 bp, Glycine max
  Clone ID: PAT_MRT3847_2708C.1
ccacgcgtccggtttagagacagaagttcctttactggtttatgaatttgttaacaatggtaccctttttgattttatacacaccgaaagaaaggtaaatgatgcaacttggaaaacccgtgtaaggatagcagcagaggcagctggagctctagcatatctgcattcagaagcctcaatacccattatccaccgagatgtgaagactgctaacgtactgttggatgacacttacactgccaaagtatctgattttggagcttcaaaattggttccacttgatcaaactgaattagccacaatagtgcaaggaacgattggttacttggacccagagtacatgcaaaccagccaactaacggagaaaagtgatgtctatagctttggggcagtgcttgtagagctgttaacaggggagaaaccttattcttttggcaggcctgaagagaaaagaagtcttgctaaccactttctatcttgcttgaaagaggattgcctgtttgatgttcttcaagatggcattttgaatgaagaaaatgaaaaggagattaagaaggttgcttttcttgctgcaaagtgcttgagagttaaaggggaggaaagacctagcatgaaggaagtggcaatggagttggagatgcatcagtggattaatacagacgcaaatctaaaggagtctgattacttggttcccaaggtatcatctatcgtttccgagcctggtgatagcagcagccctcaagagtatgacagccgtagggatcaagtactaccttctttgggtgatggaagatgatgccttggcatcataccctcccttttatatcaaagttctgttacaaccttttgaatctttatgaaaaatccatttaattgttttcatgagtgtgtatttgtgtgtacgtatgtattctagtatgctatatatgcacttagtatgtatgtatgtattctactttgtgcgtatgtatgtatgtctggattgactaattgtttaagcttctaatcaacggtttttgctaattcatggcaaaaaaaaaaccaaaaaatttacaaaaacc

SEQ ID NO: 62100 - DNA, 242 bp, Glycine max
  unsure (1)..(242): unsure at all n locations
  Clone ID: PAT_MRT3847_27090C.1
aaaaagnntcagcggtngagctcgagccgaatcggctcgagtcatcctacattttcttcaatgcggatggttgccagtggttatgaggcataccctgcctgtgtctgaaggacaaccaaaaattggtgggatcagtatgaagccttcgacccttctgatgaacaaaaaaaggattattcttgggtacaaaagaaccctgttatctaagactaccgtcaggaatcttcacctttttccacttc

SEQ ID NO: 62101 - DNA, 592 bp, Glycine max
  unsure (1)..(592): unsure at all n locations
  Clone ID: PAT_MRT3847_27091C.1
gtgaccaataccacactttgccactttatgcgaccaaacatccaagctgggctcgctcatgcttggaccaggaccttgaatgcatggtccgcctgcaactacctgtatctcaaactacttggacacgcttaaatgcatagagcacactcactgacatccaactactataacatatacgtgcgtgacaaatgcgggancatcttttgtctttttgaggacctggccttcgaccgttaccacagttgggccattctcctcatagactaacacaaacgtctaattgcttacggggaccccgtggcatcgttagatagcacgaactaattgagaccgctgccttactaccaaaggcatagtgtttgttatcactgctagggaacactacgacctgattcaacagtgccgtgttcttgacatgcatttcgaactcacgctcacacagaggacccaagaacgggaattgcgataggctgagacctgatgagcacagccatattaactactatctgtacaactatcttggtgcgatatcctgaatccttgctcatactgctctctgttattcctgtcatgatgagactgacacatatga

SEQ ID NO: 62102 - DNA, 2241 bp, Glycine max
  Clone ID: PAT_MRT3847_27092C.1
ggcgtgagcgtgaggtaaaacttgaacattatcttgtggcggtgaggtgggggttgggtttcaagttctatgtttctttccctcttccgtttattaacactcataccgcaccctcttcttcttcctctctttctctcttcttcgtcgctggccttgcctttcaagatccaaacctcttcccaatgaggaacctctctttcttcttcttcttcttcttcaccttcttcgccgccgtcagatctgatccctcagatcaccgctacaaagaaggcgaccccgtccctctctacgccaacaaagttggccccttccacaaccctagcgaaacctaccgttacttcgaccttcccttttgtgaaccaggtgatttgaaagagaagaaggaggcgctcggggaggtgctgaatggggaccgtttggttagcgcgccatacaagctggagttccagcgcgacaaggagttggtttccgtgtgcgacaggaagctctccaaacaggacgtggctcggttcagatccgcggtgaggaaggactactacttccagatgtactacgacgaccttcctatttggggcttcatagggaaggttgacaaggaagggaaggaccccagtgattataggtacttcctgtataagcacattcacttcgacgtcttctacaacaaggacagggtcattgagatcaatgtgcgcaccgatcccaatgcgctggtggatctcaccgaggatgctgaggttcaggccgagtttttgtacacggttaagtggaaggagactaacacgccattcgagaagaggatggacaagtactcgcagtcttcatcgctgccgcatcatttggaaatccactggttctcgattatcaactcctgtgtgacggtgttgctcttgaccgggttcctcgccaccattttgatgagggtgctcaagaatgattttgtcaagtatgcacatgatgaggagtctgcagaggatcaggaagagactgggtggaaatatatccatggggatgtgtttaggttccccaagtttaagtctctgtttgcggctgcgcttggatctggcactcagttgtttacccttacggtgttcatattcatattggctcttgttggtgtgttttatccatacaatcgaggggcgctgtttactgcactggttgtcatatatgcacttacttcggggattgctggatacactgcaacttcattctattgtcagttggaaggaacaaactgggttaggaatctgctgttgactggatgccttttctgtggacctctgtttctgactttctgctttctaaacactgttgcaattgcttacaaagctactgctgccctcccatttgggacgattgtggttatagttctcatatggacacttgttacgtctcctttgcttgtattgggagggattgctgggaagaatagcaaggctgaatttcaagctcctgttcggacaactaaatatccaagggagattccacctctgccttggtatcgtggaacaattcctcagatggcgatggcaggatttttgcctttcagtgctatatacattgaactttactatatatttgccagtgtttggggccacagaatttacaccatctacagcatcctgttcattgtcttcatcattctcttgattgttactgctttcatcactgtggcattgacatacttccagcttgctgctgaggatcatgagtggtggtggagatcattcctatgtggtggttcaactgggttatttatctatacctactgtctgtattactactatgcacgctccgacatgtctggattcatgcagacctcatttttcttcggatacatggcctgtatatgctacggtttcttcttaatgcttggaactgttggattccgtgctgctttgctctttgtccgccacatttatcgatccattaagtgtgagtaggcattttgtcctctcaagtccactagagcaattgtcttcatttcatagggaattctgtagaaaaattatagtaattttgcagttcttttgtgtactataagggaagctgggttgggtgggtttctggcttccagagcaacttgttagatggcaaagggtgcttttggggataacgtctgtgtactaccatctctttaaccaaactcttgcaatactttttggtccttatgaacattcttcaacatgtcaattttcaaacggtgtcaacatttaagttttccataaagattattgc

SEQ ID NO: 62103 - DNA, 565 bp, Glycine max
  Clone ID: PAT_MRT3847_27093C.1
aaataaaataataacatttttacctacccacattttaaatatctctcacgcatccctttgttatacgcccacactactgatcctcggagccaacacaagctgacacccgacagtttcacagcatggcgagacacatttaccgaaactcctcaccaccagggtcagagcatgcaaaaccgatatctagtgtgcctaaccgtcatttcccttactgtcatccacttacactgactcttagctcacgcacactcctaaccctcagacatagggaccttcagagacttgaaggcctataacaaaccatccgccatgactctttggtcatgctatgccttatggaactaggcaaccgacggatggtcactcacttggccaacctgacttatacgcggtcttacctgctcccctgactatacacgaatcaaccagactactggagacatcagcatggaactcatgcacagctagctcattaatatgatagtcacgcaacgcaccacactagacctcgatgataacaccttctgaggcccgatccactctcggatcgctttactatgaaacc

SEQ ID NO: 62104 - DNA, 717 bp, Glycine max
  Clone ID: PAT_MRT3847_27094C.1
tttacgtctgcgagaagacgacagatggggagaaacaaaagaaacaagaaaacaaaacgcgatggttgacgtcgacgttggaacctcggactcgccgaagcgccaccacaacaacggcttcctcgtaacaatatcggcggttctggcgctgctaacaaagcgcagagcagcgaagccgaccaaaggggatgagtggaagaaggaattgaagaagtcgcggccgaagaagcttctcagcaacataagaagcaaagcgcttttcggtcacaaccacaacaacaagaagaagctgcgaagcgtggaagagacacaacaagggtggggaaacggcggcgtttggcagaaggagattctcatgggtggcaagtgcgagccgttggatttctcgggtgtgatttattacgatggaaacgggaagcagctcagcgaaatccctctcaggtcgccacgcgctagccccatgcccggttacctcacgcgccgcctctgaaatctgaatgagtcatcaccaccgccatgccgatcttagattgtgcatgtctctattttttgagtaaatgttagtttattagttttataaatgctgcagattcaaatcccttccgtttgtttagctagtttaatttttaggttgttggaaacaatatttgaagacgtcgttttatagttttaacgtgtctaaggtttattccggcacatgaggtaatatcttttttc

SEQ ID NO: 62105 - DNA, 332 bp, Glycine max
  Clone ID: PAT_MRT3847_27095C.1
ccacgcgttcgtccacgcgatacgcctattaccataggtgtatttgaatagagaattgatctcactgtctcccataggacagaggcgtgctgacactgtgccaaggattgaaagaactgcctatgttgtcattcaattgcaacttgagaaaaaccgagtacaatatttaatcttgcaagattgaacataaaattaatttaacatgaatctcgacttaaactatcacattgactgcacttgcaattcttggccacatatgcaatcactctttatctatgggaccagacataactaaaccttatataacaactttgggattgcggacacgtggg

SEQ ID NO: 62106 - DNA, 827 bp, Glycine max
  Clone ID: PAT_MRT3847_27096C.1
tgaacagatgaaaattgatgtccgtatatgggactatatatatccatcgaagctttaagttaggacaagctagaaggtacggatattaattttctgtacaattcacaagaaaaatagcagtgccaattgtaataatatgtacatcaagcatctaaaggctttcataaatcatctttaaattcctacagagggagcaaaaaagcaaacaagaaataacattttctagtcatcagccaaggaaacccttccagtttcatacagatgatacatccaaagaggttcaatcaactcctttgcataggttaatttctccagctcatcatcattttcttctgcaatttccctctctatcctgggaaatatttcttgcagagaagagagcatcatgtcacccaatcccggtcatcaggtttaaacaacttaagacatacaaaccacaagagtcctaatgccatcccaaagtccttctgttctagcccaattactgaagaaaccatgaaaattacaccgactgcatccattatactgggaatttttttcagtaatataatcagcatttccataagcttggtgaatgctgagaatttttctggttgagaagattcatcatcttcagctttatttacttcaaagagctcagtcttggctaaaatcaagggccattttggaaaatgcaacttcatttgttcagatgcagttgaatgttcctcaccacagtcagtgtgttttatgatacttgtagatcccaatgccagaagcacatcaggaagccaagtctttgcggctgcaacaatacgcactgcatacccagagcgcatacatgattc

SEQ ID NO: 62107 - DNA, 558 bp, Glycine max
  Clone ID: PAT_MRT3847_27097C.1
tctgatcttccccactggaggtcgtcgtgaagggaggcggcgctggcatcttccacctccccatgttcgcagtggtgcactcggtgcggccgctgagtctccaactgcgaaagacttagatgcggcatcatcggagactcagatgtgaagaggagagtgcgccatttcgagagtcagagtggactaatttctatgcagagtctgtctctggcgagtgcgatttcgaaggcgcaaataagctccttcagggtgtcggcttcttcgaggagcttgagctccgccttgattacccagtcattggtctttgtgttcccgcaaattagcacgtcgtgaacattagattggttcattttggatttttgcgttcagatttgaatggggatgcattgcattctcggaatcgcaatgcactagtaagtcttctttaatttggcactgctggtgaatttggtgatattgtgaaagccaatttagtttcctgctctattaattgtcaattaattttgtttctaacattggcaccactagaaacttttgtcccaacactgccaatcagtt

SEQ ID NO: 62108 - DNA, 107 bp, Glycine max
  Clone ID: PAT_MRT3847_27098C.1
ggggaagaaacaccatttttatcaaactatgggaatttgataatcattacatatcgatcatatagtcataggaggggcgaaaattaaacgaaactcaaggaaactaa

SEQ ID NO: 62109 - DNA, 412 bp, Glycine max
  Clone ID: PAT_MRT3847_27099C.1
tcctcttttccgctgatgagagattggtaggcacacaacatgagggatatgatccttttcttggtggaatacaaaaatatgccacttccatgatgcccctagatgaagaaatactttctagaggttgcacaagatatggctgaggaatggtttgcatgcgttgatgaggaggacatctttctgggagcaaatgaagactgggatatgcttgattgataccatatgatgagccagttgtgcaagcttaaagcgccgaagtgtacttttgcttcttccctgtggagcgtgattggtaagaaggagtcgctcacatttgtgaattgaaatctcgtgtctatgctcctttgtctacaaacactaatttggtggaatctcccaaggaatgccaactggctctaccctgggataaatt

SEQ ID NO: 62110 - DNA, 489 bp, Glycine max
  Clone ID: PAT_MRT3847_2709C.1
gatctacctttagaccaattctaccatggatgctttggaaaaattttgcactttatgttttggattttcgttggttggtgacttagaatgtgatcattgattaagtggtggtactttgattctggcatacccttcattttgatcattgtaaaatccattgaggaatacgacagatcaggggaaaattgtcaactttagtataatcccgacatgggttatgatgcattcatggaaactggagatccagagatagtacatgcctcttatttctatttgtgttgtcatatatgttacaaaaacatcactggcttttacttttgttccatgttacacataccaatgatacctgataagctgtttcgatggttctgttatcactggggtatctagatgtcaacgggatgccattctgatgttcgaactatgcaactgagaactgattattgcgcagagcttttaatattctgctatgaataatgatcctgattg

SEQ ID NO: 62111 - DNA, 451 bp, Glycine max
  Clone ID: PAT_MRT3847_270C.1
cccactcgtgcttccacgcgtccgcccacgcgttcggacaagtgaacgtcttaagatactacagatcagaatgagcgcagggcacaatccaaatcatgggacaatgtcactctatctaggcgatcaaaacatatgtacgggtacatgccgtaactcagctattgtacattaaagggaggatgaactttggtgtaaccaagattggaaactgtgttctgattgtgcactgacgactcgtacctgaatgggcattgcaatagattctatggatagtacgatgtgatctgaggacatatatgtcacaacaacatggtctatgctaactggcaatttgcacaatcgtttaacagacccccgctgtaggaaccttaagacgcgtaagtacacattaatacgcgtgtaatgtatgatggcattgcacactagctatcgttatatctttaaaggttat

SEQ ID NO: 62112 - DNA, 144 bp, Glycine max
  unsure (1)..(144): unsure at all n locations
  Clone ID: PAT_MRT3847_27100C.1
accatgngcncgnnagcacaaactatnatgngccacggcaacagcagctggccacntcgacctacaatngggangcgtctccngnaggctcantccggagcggggcgagtgcangcccganncggcnncggcaataaaaaggct

SEQ ID NO: 62113 - DNA, 763 bp, Glycine max
  Clone ID: PAT_MRT3847_27101C.1
cgacctctcctcgctcgacgagtacctcagtgtgagcgttctgccatactcctgcgttcaatcgacttcaccatcttcttcttcttctgctgtctcccccatagatggattggcaagggcaaaagctagcggagcaactgatgcagataatgctgcttgcatttgctgtgattgcatttgttggtggatatgtcatggcttctttccaaatgatgattctcatatatgctgggggtgtggttttcaccaccttgctcactgtccccaattggccccttttcaatcgccatccacttacgtggttggatccaactgaggtggaaaagcatcccaagccacaaccatctgtcaatgtaactcaaaagaagaaacccgttaagaagtaggttttttttattataaaccttttttgggggatgatatatctttgaagtacttgatgctttgacagtaatttgcagttcttaacctcttcccccttcagtggatattacagtgtacaacaatttatttgctttcttttagacattacttatagttgtggatccaagtgagttagaaaagcatccaaagcctcaatcatctctgaatgtaaattcaaagaacaagtccgttaagaagtaggcttctttgacatatcttagtgctagtattttcttgagttaaaaaattcttgctttggcagaattttgtatttcttactcttcttccctccctttccccttcattggatattacgatgtactttacttctttggactgc

SEQ ID NO: 62114 - DNA, 310 bp, Glycine max
  Clone ID: PAT_MRT3847_27102C.1
cgcaagcaaactctcaacttgggggagctttttaagacacaacgagcggttttcatactggacatgcttgatgttggagatatttgggaacgcgctctctaatcgtcatcattgatcttgctgcttagatcacaaaaccctcgattctatgatgaatcaagggctactatttgctaagctgcagataagaactcacctcgctgctgactacagagtggtagattaccagaccttacatatgactggaaatggtctcatcaggtgtcattacatggagtgggaaaattaacattagtatctcgtactttcg

SEQ ID NO: 62115 - DNA, 274 bp, Glycine max
  Clone ID: PAT_MRT3847_27103C.1
ggctcgacggggtaaacttgctctctctcacttgcttattcctcccaaaagcaaaagacggtttccgttggaaggaataacgagagatattgagtctcatatctgattgtgcggcgacgatggagaccaccgacagcatcatatcccgggatcagatcgcacacgcatcggtgtgggtcggctgcgccgtctcttccggtttcagttcctcattcgaacgcttttcctgcgtcaacgtcggcagctctgaccccgacaacgacgatggcgacga

SEQ ID NO: 62116 - DNA, 365 bp, Glycine max
  unsure (1)..(365): unsure at all n locations
  Clone ID: PAT_MRT3847_27104C.1
cggatcagcaacgtctcatcttcgccggaaagcagctcgaggacggccgtaccctcgccgactacaacatccagaaggagtcaacccttcaccttgtccttcgtctccgtggtggcatgcagatcttcgttcagactctcactggcaaaaccattaccctagaggtcgaaagctctgacacattgaacacgtcaagggccagatccangaccagggaggaaatcccccagaaccacaacgtcttatcttcggcggaaaagcactttgaggacgggggcacctcggcgactatcaaattccgaaaggaattaaccctttacttcggccttcggctccgtggggggaatggaactttcctaagaacc

SEQ ID NO: 62117 - DNA, 426 bp, Glycine max
  Clone ID: PAT_MRT3847_27105C.1
gccctctagggtgtaacagataacatgagtatactctgacgggcttccaaaaggctctagagactgataaaggccgttgctggcacgctgctaagtatgctgacgctgttgcacccaacctgcctaggccgacatgcattctgataacccactcctgtggaagcaccccaatggatcatgacagtagaagcaattacagagtgcttaaagggaatggacgtgaacaccctcagaaaggctaatgagaagatggtcttggtggcgagctcttactccggaaaaaaccttatcctcttctgcctcaacaaggacaactgcgatgctctcctcaaccaggttacgcttatcgagccccactctcaaaaaggctgcaaaggggtaccggtaactttgaacaatgggattcatctcacagctaacggacgt

SEQ ID NO: 62118 - DNA, 112 bp, Glycine max
  unsure (1)..(112): unsure at all n locations
  Clone ID: PAT_MRT3847_27106C.1
ttcctntccgtntctaagctactnaagcaaacaaacccattncgnatagactgtgangncagggtttntntagcagctagagatggnagacggaagagggtccantttcgtg

SEQ ID NO: 62119 - DNA, 276 bp, Glycine max
  Clone ID: PAT_MRT3847_27107C.1
cgcccctggtcgctgccaccccagggatggagacgcaggggagtgggtggtcgggctccccatctaaaagcctgagggctctggggccacagcccatgtcatcccgggggggcctcctgtctaaccactttggcctccagccagacctccctctcccctcccagggcgacagcggtggtccctttgtgtgtgaggacagcatctctcggacgccacgttggcggctgtgtggcattgtgagttggggcactggctgtgccctggcccagaagccag

SEQ ID NO: 62120 - DNA, 697 bp, Glycine max
  Clone ID: PAT_MRT3847_27108C.1
gaaaccgtaattgttttttcatcaactactttattttttattccactaccaaagataggtaaaaccataaaacacaagcattcaaccaagttgtgattacaaataatcacataaaggaaaaggtaacaccaccgttaccttggtaattaacatttcaatgagcttgtaagagtgcgtaggagattatcaatatacatattttgtctttctctattcacaaataagtccttcatctctttaattctttccctatagatccttccttcttcttcaaccataaccagcctcagtgactcagctaccgagtcactcgtgaacaatccatctctttcatttctgggcacagaatagcccattttcttctcctccaatactctcgcatttattccttggtctgacaaaaacgttaacagaaccaacggcttctcattcagaatagcctccaccacagaggtccaacccgagtgagtcaagaagccaccaaccgccatgtgccccaaaatcttcaactgcggcgcccaagtggtgcacacaactccaagcgctttggtccgctcctcgaacccttctggtaaccgcaacacatctgggtcccacggcccacgctgaagcctcagcgcccagaaaaatggaagcttcgatttctccaaacccaaagctatctctgtcacttcgtcctgcctttggtttcgcttcg

SEQ ID NO: 62121 - DNA, 393 bp, Glycine max
  Clone ID: PAT_MRT3847_27109C.1
ggctcgagcattcatgcaaccactgcttccaatgcagcagaaagtagctctggaacatattgtccctgcgagtatcctagccctccgccagactatacatcctgttcggcagactagtacagcgttgctcggatggaagacagtgacagacacactccgcgcacagactctgtgtacccacagtattaattggctaaagagaggactatatctggagatgcatactatggctctcacatgatgcactatggcgatgccaggcttagcagcgatgctctcttccattatccgggtacagatactgctaacgataatttcactcctgtggatgaatactgcttatggtcaccttgcaagccagtcagccaacgtgatgctgatctcatccatttc

SEQ ID NO: 62122 - DNA, 383 bp, Glycine max
  Clone ID: PAT_MRT3847_2710C.1
ctgaggttgttgttgttgccaaggctgtaaatgatggtcccgcttctgtgcgtgatgctcttgaagccaacgccaaatccatgcaggcgcgtgccacgtcgaagcgtaccaataacaaggcggttaaggaccgtcaagccagcgtcactcctgagcaacacgagcgcaagtctcagttccctgaacgttatgcccagcagaagaagcacttgagccttcctttgttccccaccaccaccattggttccttccctcagaccaaagagattcgtattcagcgtaacaagttcaccaagggagagatcacccttgaacagtacgagaagttcatcgagaaagagattgaggacgtcatcaagatccaggatgagctcgacctcgat

SEQ ID NO: 62123 - DNA, 720 bp, Glycine max
  Clone ID: PAT_MRT3847_27110C.1
caccacctcactacacacgcttctctcttttgcttcacaaccaggataccatacttgtcattgttaccatatgctggagctgaagtagtgccctttctatacgactgtaggtcctaccattaaggggttcagtttgtttgatttctagcctacagtggtgttattgggtgtaaaagtcaatctgctggtttagaacccagtttctacaatgattctatccgcccttttaacttccgttggaattaatcttggcctctgttttttgtttttcaccctatattccatattgagaaagcagcctggtaatatcactgtctatgcaccacgcttagttgttgaaggaaaagttaaagagggtggtcattttaacttggaaaggttgttacctaatgctggttgggtgagacaagcatggcagccttctgaggaagattttttatcaaattcaggcttagatgctttcgtcttcatgcgcatatttatcttcagtttaaaagtattttcttttggtggaatcattggcacgttcattcttcttccaattaattatatggggagtcagcttagtgatgattcagattttcagcacaagtctttggactcattcagtatttctaatgtcaacaatggttcaaacaggttatgggtccatttttctgctgcatatattttcactggaattggttgctatcttctttattatgagtatttgtacctttc

SEQ ID NO: 62124 - DNA, 794 bp, Glycine max
  Clone ID: PAT_MRT3847_27111C.1
gaattccgggtcgccccgcgtccggtaatcatcatcgttttcatattttagagagagagagagagagattgtgcgatggctcaaggtgcgttttgataatcaaccaagttgcagaagcgatggatctggaggtggcagggcggcacgcgatgctgttcgacgacgacggcatggcggcgttcgtgaactcagcggaagctctggtcgaatggaactctctttccatcgaccgctacgatgtccgccatcttctctccgctcccctccccccgcgcctcaagcgccgccctcctccgcccgaacccgacctcgatcaccagcgctatctcgatctcccttcctcttctgccgacgatgaacaacaagattatggttcagatccagtgagttcaactggctttcatgctgtcgccttttcgtatggaaattctaatgtgtccacggagacaaaggacaacgataccaagtctagttttgatcctaaattcccagtaccagaaagcctactcaataacctgcctccaaatgagaaagtacatcagattatttcacggactgcaacatttgtcagcaaacatggaagccagtcagaaattattctgagggcgaaacaaggagacaatccaacttttggattcctgatgcccaatcatcatcttcatgcgtattttaggtttcttgttgatcaccaagaacttctgaaagttgacaaagatgatggaagctcaactgaggacatgaataggactcaggggcttgatcaatcaggtggtgcattgtctttgcttggatct

SEQ ID NO: 62125 - DNA, 372 bp, Glycine max
  Clone ID: PAT_MRT3847_27112C.1
acccacgcatcagcccctttttacgttgcagtcatcgagcgctacaacttttcaaatgtattgcacagattttgggtatactccattgataagcctcatattcaatgcagcaattttaatcgacgaattgacattcgtatcactggatacgattatacatccggtgtgtgacaatttcaagggtttttatacgtgcctagtgtgcacaagctgggtgtgcaaccaatacgtgtttggtggactatcttctgcctcaatctctcagactagggtctatggtggttctctctctcattaccaatcacctagtctggacccaatcatctacaatatgtggatccggtttaacatgatccatgatgtcggtgccaa

SEQ ID NO: 62126 - DNA, 510 bp, Glycine max
  Clone ID: PAT_MRT3847_27113C.1
acgcggcctcttccctctccctctctctctctctctctccttctgccaaccaacttcttctcctttttctgcaatgggttgtgctggatcttcacaatccaagcctgatggtgagccaccccttcttttcaatcctctcaaaacctcttctttgcattccctttttgttaaatctttaccgatttcatcatgggtcgctgtcaaaatcccttctttcttcttcttgtttcatggtattcgtgaacaagcatgtaattttgactctaaaaaattgtactagtttttaagggggagagaatcaggaaataaggtgcataggacaaacaaatttaaaacctttcttttgggttttagatatattgccacattttgtattgaacaatgaaagtcctaccctctgtaaccgtttggagcatttttttgtgtgagtgtgtttgtttttcaaagcaatttttgtcataggttgtttttttaatctgttggatgttgctagtggctgtatttggggta

SEQ ID NO: 62127 - DNA, 131 bp, Glycine max
  unsure (1)..(131): unsure at all n locations
  Clone ID: PAT_MRT3847_27114C.1
ctatttnctgttcccaatttgttttcgggatctctgttccacgnaacncntaaaatctgacgttaattnaccatgatntggaacacaacgtggtttcccatctggatccactgcatggtcnttctnaantg

SEQ ID NO: 62128 - DNA, 603 bp, Glycine max
  Clone ID: PAT_MRT3847_27115C.1
ggctctttaattcactctctattttgttgttaatcgaatttctctctcctttctttctctcttctcttgacgttgaaaatattacgagagagaaacgcaaggagagagaggaaaaccaaaaaatggttgtttccaaggtggttgtttttcttggtctgattctcgccgcccttatgtcagtggcttgctcccaatccgctgctccggctcctgctcctgctcccacaagcgatggcacctcaattgaccaagctgtagcgtatgttctaatgttggttgccttggttctaacttacatcatgcattaaggcaactacgagcaatgacacgccctaaattaattgatgagggctatagggcatttttatttcaaggacgtgtcaaaagcacttaggaggaagaaagattttttaattggaccgatgcatttttgtttatcttctcttgctccaaggataatctcattttgatttttcagttgtttatttattgtgcttgtatttttttttagttcgttagttattgactatggaatgaaggcaaagtaaataaataaaaagaaattgaaagagtgaaagtgtgtgatattaaaaatatatcaaa

SEQ ID NO: 62129 - DNA, 239 bp, Glycine max
  unsure (1)..(239): unsure at all n locations
  Clone ID: PAT_MRT3847_27116C.1
cccttgggctttttccctcannaacattgttcctttgtngttattctaggttncattaaacacacgcgtcgcgccaggtgtagnnnganacacantagccaanacaacagccaaatgtccatggtttagcgctcaagaaccttcccagaagaannaaaactgctcttgcctcatnaaaggaagntacgaattagactcaganngnantgnntanacnnangggntatgtttcttcncat

SEQ ID NO: 62130 - DNA, 180 bp, Glycine max
  Clone ID: PAT_MRT3847_27117C.1
cacggactctataacggactaatttcttttcggactgcacgagtgcgtctacatttattactaccggttgagaacgccggtggcagaacaagaggtgctaatttggagggagtgggaaccgcatcaaatcaccaagtgtgaaatgctgttgtggagataaccgtaagctacaaacgcatg

SEQ ID NO: 62131 - DNA, 2509 bp, Glycine max
  Clone ID: PAT_MRT3847_27118C.1
tccatgcgtccgcccacgcgtccgcccacgcgtgcgggcactaacatggattctccaaacgacaacagttgcactctcaagaaggagaagaattgcagtaacgtggattctcccaacgacaacagttttaactgccaagagggagaagaattgcagtcacatggattgtgcaaacgacaacagctgcactcccaagaaggagaagaattgcagtaacatggattcttcaaatgacaacagttgccctcccaagaaggagaagaattgcactaacatggattctccgcccctcattggtttcgtacttatctggccggagacgagtgatatgttttgctcgtcgagctgttagatttgctgctgaacaacgtggtattatttctcctacatttcttttgcaaaaggcaagtcttctgcgttcctcgggaagagttacccaaacacgcgttctgcaatgcaacaagaactttcaacgaagggaagctagtcaaatatttgcagagacccccaggctaactgctattggtatctagttatacttttgtagactgcaaaatggttgtcaacaggtgtccttgtttatccctgttgtgtggtgtaaatacatcctgaataaaaggtcgcacttagtgttttgatgtgttccgtgggaatacttaaggatgcatagtatagaggtacagggagccaacaggtattctgttcatggtagcaagcacttctagatcgtgtatttggtattattcgtttcagttaattcaagccaaaatgatcttaccccctagatatactcttgttgactccaccaccgccggccctgagtctgatactccaccactcgggacattgccaacgcgttcgcagacaaggaatcccctagttgatcactctcattgttaccaattgcaaaaagcgtaagggcagaaaataatgatcaagcatctcacgaccagacgatccaatcccttcacatgggcgaccatattgtgatgaggcgccccttgtcgtgttcaaggaccaccccttatgaaattgctagaacatcttaaccaagtggctcataccttttgacaggctcctttgaagagcatcttcacctcgtatccgcatgcacaccaattaagaaatcgcgtgttgtgtattgacggaagaatgataacaaaaagcatcaaaggacataaaccttacacagaaacaggaaggagttcaatgtacctcaccgggcatcaccaagacttgctcgaggtaaacctgtccagttggccaacaatgtgatgaatgaacagactctccaggttcctaaaagaaacttgaggaaaagtagaaacactctagatattgatatttctgaagaccaaacagtttctaaggaacaaccgcatcagcaagaagcagataaaatagaagacaaaaagccagaaattcaaattagctcaaacaaatcaagtgggaatttgaatgaagaaccccgtcacactggaaacataacacctcctgtgcatcattctaggaatataaactcactaacacatgaagagccattaaagcaaaatggacaggttgtcgagggtggatttgttacaacggagcaacaactatttgaaactggaacggtaaaccatgataattctgaattacagtactgtgctccgtttatgaattcttggtcagacccatgcctagaatttgcatttaagactcttacaggcgtgataccagtagaggaaaatttaacacttcaaggatgtttccaggaacctgttaactatcatgaacgaagggatggtggctcaatgttgccagatttaggatcttcctgcttttctcaaagtgatttttcgtttctccatgatacaggggttaagtccatgccggggcagcagccatcaataagttcttcattcctaccgttggaaaaaacgagcctgcaaggtttcgctggcgttgatcctcaaacacagttttctcagtgcaacaataattttcaaagaaggtaagctagttatatatttgtagctacctccaggataactgctattagtatctagttatacttttgtagactgcaaaatgtttgtcattaagtatccttttattttcctggtgacaattgtaaatacattgtgaacataaggtctcgcttagtgttttgctttgttcgttgagaagatctaggtaagcaaagtaaggaggtacaggagtccaactgttgtgacaatggtatctaactactgtagtttgtatctctagttattatttgtttcaagtggtattatttcttattttctttctccttcagaaaatgctgtaaaaggcatataagctctcaattgttataaagtagcttactttgagaaaataatttttttttagtttcttgatttaaaaaaaaaaaaaagaaggtaagctagttaaatatttgtaactaccttcaagataactgctattagtatctacctatacttttgtagactgcaaaatggttgtaagaaagtattcctttaatttt

SEQ ID NO: 62132 - DNA, 221 bp, Glycine max
  Clone ID: PAT_MRT3847_27119C.1
gccatggcatatttgtggtccaacattctcagcagtatgtattgagtgagatggtggtggttggtaagactttaacaatgggaatgctataatgggttgagacttgagacttaagagtgtcactagcctgtagatcatctttcatttaactgttaaaagattaaaaagggggagcttgtgttcagataagttttcatttctatatttctaccgaacatgat

SEQ ID NO: 62133 - DNA, 800 bp, Glycine max
  Clone ID: PAT_MRT3847_2711C.1
aaatttacaattaagcctaattttaacaaaatatgtcttggcgtgagacagaggcttattactgtctcttcacagaaaagaagaagaaaatcgaagatgagttacatggccaacagaaagtcccccgccgggttgcccccataaccacttcaagcacatattaatccattgttcaccctaccaaagctgcttcacctgagaggctttctcataacctttgtccacactgagtactgccacacacgcttcctcatatcaaggagtttcaatgcccttcatggctcaccagattttcgctttgaatccatcccagatggccttccaccacccttggatgctgatgctgatggtgatgttagtcaagacgtaccctctctttgtgactctatcagaaaaaacttcctccaaccttttcgtgaccttcttgctagacttaaccactctgccactgatggtctcattccctcagttacttgcttagtttctgacggtagcatggcctcctttactgtacgagctgctcaagaacttgcagtccctaatgttatctgttggcctgccagtgcctgttcattcttgtctctcatcaacattcccgctctcgttgaaaaaggtctcataccactcaaaggtacagtatactatatcaactatcgacttaattggagatatacaaggctgactcaaaagtggaaggaagatcaaaagtgtcttgagtggcttgaatcccaggaactcggatctgttgtttatgtgaattttggcagctttactgttatgtctgcagagtaaatgatgga

SEQ ID NO: 62134 - DNA, 1810 bp, Glycine max
  Clone ID: PAT_MRT3847_27120C.1
ccccttccattatccgttttctcttctcagccaggtcgttgagatgcacctaaaccccttattgctgagttcgaattcgctgcttgttcatagtttctttctttgattagttatcttcaaatacaaaagacggattgagggaagtcctcgttgtatttattctcctctagatcacagattaaatcaatggagttggacttaacaccgaagacggcagaagcattgtttgagggagatggtggaggttactacacttggtcaagttctcaagtgccactcctggctaagaataatgttggtgcaagtcgccttgtgcttcaccctcgtggctttgcccttcctcattatgcagattcatccaaaattggttatgtcattcaagggactgatggcgtaggtgggttggcactccccaccgcacgaggttccttccattcctttcttccggatcacagggaaaataaaaaacaatggagttggacttgacaccaaagacagcagaagtgttgtttgagggagatggtggaggttactacacttggtggagttctaaagtgccactgctggccaagaccaatgttggtgctggtcggttagtgcttcagcctcagggctttgctattcctcattattcagatatatccaaagtaggttatgtgcttcaagggaacgatggcgtagctgggatggccctccgcaacagtactactagagaagaggtggttgtgaagcttaagaagggagatgttataccagtacctattggaagtgtctcgtggtggttcaacgatggggactcagatcttgtcattgtttttcttggagaaacttcaaaggctcttattcctggcgaaattagttatttctttctaaccgggcttcaaggagttataggaggcttctctaatgagctcacaagcaaaatatatggtttggacaaagatggggtggaaaagctcacaaaaagccaaagtggggttgtgatcatcaaattagacaaaagccaatctttgcctaagccccaaatggaaataaccaaaaagctagtctataatatagatgttgcacaccccgaaaatgttgtggaaaatgctggaatagtcaaaaccttaacggagcaagattttccttttattggggatgttgggttaagtgtgattagagtgaaacttgaaccgggtgctattaaggcaccatcatacccaatcaaccctacggttcagttgatttacattgctagaggaagtggcaagattgaaattgtggactttagtgggaagtgtgcattagagactcaagttgaggctggtcatttgcttgttgtgccacaattctttgtggttgcacaaattgctggggaagaaggaattgagagttactctatcgtgacaactacaaagcctttatttgaagagttgggtggaagggcatcaatttggagcgccttgtcaccatctgtgcaacaagcatctcttcacgtggattcagaatttcaaagcctcttcatatccaagatcaaggaaaccacaaatctcattcctcccactactaattagtcactttgtttatgcatatatttatgtattttcaatgtatgatgttgagtgtttacttacccttgagttgcttttggagaaaaagtctgtgttgcgatcaaccagaaatgttaaaataaaccaagtgtgacaacctatttccaataatttcataaaatatgagttttatgtgctaataaagttgtatatggattggatatacttttggcccaaataatttatctccatttgatatctatatttttacaaaaaaa

SEQ ID NO: 62135 - DNA, 423 bp, Glycine max
  unsure (1)..(423): unsure at all n locations
  Clone ID: PAT_MRT3847_27121C.1
ggaccggccggaaaaaaacccgggacgacgagcacacttgttggcggccgcccccccccaaaacacggggggggcntctgaacaaaaacccacccaaaaccaacagggaaaacagcaataaaggcaccaagacgggcgagcaaagacgacaacaaaacaggacgggccacaaacacaaccccaaaaaacaagacaaggctaaaaaggaaaaacccaacaccaaagaacaagacaaggctataaagggaacaccaaaacaacaagacaagcctccaaccccaccaacctacacaacagcagccacagacacagggggaaagagaaaaccgcaacccacaaacacaatcccaacaaaaggagcaaccaaaaggccaagaacacgcccctgaaacggaaacaagccgaagacccggacagaaaacc

SEQ ID NO: 62136 - DNA, 184 bp, Glycine max
  Clone ID: PAT_MRT3847_27122C.1
ccgagaacaagattgggggaattttcaacacagagatgagatgagagtggaaaaggcattacgccagcgctatggtcgtttcttttaccgattaccatatggagaatccgcggttgatgtatatgatagaataacaggatgcatagaaacgctgagaacagatattaacattggacggtatcag

SEQ ID NO: 62137 - DNA, 301 bp, Glycine max
  Clone ID: PAT_MRT3847_27123C.1
tggaaaagagaacttcttgctgcaatacctgttgaggtgagatctttttacaattcattttcccgtgacttctcttaatttaactcaattcttggacctttattttcatttcagctctttcatcgttagcgttagtcgtatatacaaaaattgtggttgaaaaatgactccaatggatattgaatagggttcttttatacgcacgatttaattcttctttctttcttctttttaaatctctatgaacgaaccctaactgtgattgttgcatgtgcaatacacctgaacgctcgagagattc

SEQ ID NO: 62138 - DNA, 958 bp, Glycine max
  Clone ID: PAT_MRT3847_27124C.1
gttcggctcgagggagagaataatgaggcaaatgtctttctcatttatgaatatgtgtcaaatgggactttccagacttatctctctggagatagtccaggcaaggttttcaattggtcagagcgattgtctgtactaattaatgttgctaaggctgttcacttcctacacactggcatgatacctggtttcttcaaaaatcgacttaagaccaacaatatcttgctgaatgagaattggatggcaaagttgagtgactatggattatccattatatcagaagagactgatgcatgtggggtaaaaggagaaagttctgattcatggcaaatgaaaatgttagaggatgatgtttatagctttggattcatactactcgaggcacttgttggaccttcattatcagctaaaagagaagcaaatgtgctgaatgtaatggcatctttcaatagtcaagatggttggaaacaggttgtggacccagttttgcaagctacatgttctaaagagtctctattagttgtgatttccataacaaacaaatgtatatcttctgagtcatggagccgaccatccattgaagatgtcctttggaaccttcaatatgcatctcaaattcagggaacagctgatgggggataagagaatttgatactccactacttcagtgacagtgatagtaacttcttgagttttgcttcaaactgctccaaaagataacaactagctatttcaacatttcatcttttggatttcttagaattgtaggaaagaattggctgcatacaccaattcggtcaattttcatctagtaactactttggatctgtatagtattattactatttttgttattattataaggttattatttttagtcttgtgaactttaaaaaggggggggaaggggcggccgctttagtagcatccaaggcttacggtacggcgtggcatgcga

SEQ ID NO: 62139 - DNA, 452 bp, Glycine max
  Clone ID: PAT_MRT3847_27125C.1
agccaatgaatccaatggaattaatacccctgagtttttaacccaagacaaaatatgcccctccattttctggaagagtaaatcacccggctttgggcttccagaaatgccataactttagcttatttattttgcttgccaaacccataatgataactgccactgttttaccaaaaacaagttggaaaatttttccccaaaaacccaaaagttgggggacactttggtccctttttcacccaaaaagggccttttaaaagttttgtgcggcttaaaaaaatgaaatcttccatgcaaaaggattattcattggcccacattttggtttttcaagcccattgccttattaggccctccaacatttttatcctgtgaacttggatttataaggctgtaactggtttctaccctgcgataacatttttgtcctacaagggtttgaagccttcttt

SEQ ID NO: 62140 - DNA, 320 bp, Glycine max
  Clone ID: PAT_MRT3847_27126C.1
gggaaaggcccccaaaaattttaattttcttccaaaataacgaattttagttttacatacctgggggaattttataattaaaagaataaaacataagcttcgatgatttacgggtttttgcaggaaaaaaaatttttgatttacataggtttacatacccattcgggtcatgcaagggattttctgcacttcatttgggtaaaaccagacagccacctttcttaaaatccaaagccccttagagaactcaaaggcaaagagagtttgaagcaacccttggtcaagcacaaacccaaatgggggtggccctccataggtgg

SEQ ID NO: 62141 - DNA, 125 bp, Glycine max
  unsure (1)..(125): unsure at all n locations
  Clone ID: PAT_MRT3847_27127C.1
tctcnttggangaataaganaatggaggangaacaanacggaggttcgtttcnnncttcatantgcctgggngcctnangcttcacanggcaaatangtcctgccgtgaaccctacaaattccng

SEQ ID NO: 62142 - DNA, 240 bp, Glycine max
  unsure (1)..(240): unsure at all n locations
  Clone ID: PAT_MRT3847_27128C.1
agcgggcgcgttttnttttttttttggttttttttttttagctaggaacatcccttctgatactgagggtaaaagacacaatggccggaaaacagaaagttcattttttagttgctcatgtaaaaaatttcagatgaaaggggtgagaaacaaaattggaggaagccgacctgagaaaaacacacagcaagggacgtggaatgttatggataatatacattatatgggcaacgctaaaaa

SEQ ID NO: 62143 - DNA, 1178 bp, Glycine max
  unsure (1)..(1178): unsure at all n locations
  Clone ID: PAT_MRT3847_27129C.1
tttttttttttntaaaccaagattgaaagcggaaaacatattgattaataggcaaaatgaaacgagcagaacatgttatgttatactagaaattgttcttaactcgttgaaatacaggttgtaatgtatctaagagactgagtattcacacttgacagggattaggtaattaaaataagaataaatttggtggcctaaaaaagagacgcccaggtatgtggtgagaagctaaggccaaacatctccttcagccctgtaaagctcaataactttgcaacaaccgcagcactctccacgatgtgattcatatcggtgctgctccatatgcgattcgccagctgcttcctccggcgctttgaatccaattcaatgccccacttgctgaagagattcttcctctcttcctcggatagccttctctgcataagcttgaccagcacctctctttcccgctgaacacccttcgcgcttgaagcgttcatggactgatttccactggcaaatgtttctttgaggaaagataatcttctaaactccacctccatgtatatggagtcagttggatcacctctgaataaaagaaagaagtaagtcctgtggaacaatgatacattgcaggcttgccacagttccactatttctctttgctgctgcttgaattgcagaggccattccacaggagattcaggtgcctctaacattgaacccacacctacatctttcatattcttttcaaatctaaaagttgttgtctctgcttgctgatcctgatcatcatcaacaagctgcttctcatactcaagttttgccatttccttcatcccagcaacaaaagtttggaggctagtaacatcttcattagcatttgatctcatgctgttggctcttaactcatccatagaggggcttccaacagaagatggagagccattcattgacaattttgtggaagaaccataagttaatggaaggaactttctctgcaattcatctggtcttccagggaagcatttttcaaaactactggccggagtcctctccattactcccgctttctcaggagaactacttgtgtaatattccctacaactccagctccttagtaatttaaaattcctacaatttggcactgtctctgacatagtcataggagaatcattactcaattgtgatcgata

SEQ ID NO: 62144 - DNA, 264 bp, Glycine max
  Clone ID: PAT_MRT3847_2712C.1
gggccttcttcacacactgcgactcgtaacccgatatgtgggtgacttggtctctagaaactgaaccgccaggcactgcattcccctttgtttttgccatggataagctgatacacgactctgcaaagccatatttttgtacctacactgatgttatcagtgagtacccacttaaagtaatgattcaatttcacaacaccacggaggagaggcttccataattgtgacaaagagggccgagccatcaaaatatcttggcgttgt

SEQ ID NO: 62145 - DNA, 458 bp, Glycine max
  Clone ID: PAT_MRT3847_27130C.1
tctagctatctcgatcgaacgtgatccaagggtccgtgtcacgtgtgggcgccaaaaaccgccacgggtgggagggtgggtgacatcgtggttaggcagtccgtcagggtggacatagcctcgcactagtatcaatatcaccgaacgcaacccagcacgttggcggcccacaacagggtgccccaacagttatcaattatcaggtcgtagtggtcgtccaggttcatgatcacaaaattcgcgtggtgcatgttggcacagtaaaccggggtacgtggggtcctcacaaaactttaggtattagcggtggccgcctccaaaattccttcatggggggtgtgccacaaatacaacagagtgctagtcatatgtcacggctcattgtgagagcccggtgcgggcaaggctggcacgattattgttgtattggccgggcttatggttgcagttggccgtgg

SEQ ID NO: 62146 - DNA, 187 bp, Glycine max
  Clone ID: PAT_MRT3847_27131C.1
agagagactggtggtgacatattggactatctgatcgctggtccacgtagaggccttcaagaggattggagagaagcttcatgagattgagcaaaagctgatacagaagaagcaggactagacattgagaaaccgcagtgagcctgctaaaatgccttacactatgctctatacttctagtgatgag

SEQ ID NO: 62147 - DNA, 210 bp, Glycine max
  Clone ID: PAT_MRT3847_27132C.1
tttcatcttataaaaaatatcgggtggatactggtttattggggcagggaaaaataactatcacctcttcatagaacgcttacattgtcaaagtgtttataaatacccaagcgaagacgacgttcacacatttttggagtcaacagatctatccttgatgattcaacagacactaatcccagacctggaacgtgtctatacatagtcaca

SEQ ID NO: 62148 - DNA, 277 bp, Glycine max
  Clone ID: PAT_MRT3847_27133C.1
cacctccttgagcaaaaaaccccaaaaaaaggggccccccttttttatcgggtggatgggccacaattccctaacacccctggccttcttccaactaaaaaggaggggaaacctggccccttagggaaaaacaccccccccccaccataatcatacccaaaacattacattccattacaaaatttacaccccaaaagaaggggtccacattaaaaaagaaagaaaaattgggggaaaaaaaaacccaccaccatttttcataaaataaaacccgaaa

SEQ ID NO: 62149 - DNA, 629 bp, Glycine max
  Clone ID: PAT_MRT3847_27134C.1
gttcttactgatttaacagtgtcgatataggatttcaaggatgattctggagaccaaaggagcttcatggtgttaaaggttctttctctctgcatttacttgtctgagaaaagttaccgtggtctcctcaattcaacaggctcttctcccttcgtaagcatttgacacttctgattcttgatctgctgcaccactccttttctctgtgtaagcaatatccaaagttcaaacccttcctacaagaaacaagaacattgattaggaatgaagccgcggcaccgccgcctccacctcctctgctgccaccacccttttggcgtcaacacctgcatctatcattgatttgactttccacggcgaccatgtaggcttttcaaagatgtttcttgatggagtatgcgtcctatttctctcgatctgcggggctagttatcatcaggttctgggtggcgatatgaatatcatgtgagggttattgagggagcaattgggtttcttggccaccaaaagaagagggacccaacaccagaatgttgcggcctcaactgccacctcttggtcattgaatacgttgagatgtttatttaacagtgtccatgtacaattcaaggctgattctggagaccaaa

SEQ ID NO: 62150 - DNA, 269 bp, Glycine max
  unsure (1)..(269): unsure at all n locations
  Clone ID: PAT_MRT3847_27135C.1
tcgcccacgcgtncgccactcgtacactcaattcaagatgtaccccctcaaaaaacctctggggacatggtgaaaggacttgcatctcataaaccttcctccagaaaatgcatctatcacgcattgagatgcacagtacctgctcgtctcgatcggttatcaccattgcagatactattcgaagcctgcccatgtcttaaaataggatacatccatgcaaatgacgctatacctgacgttgatcgagatgatatgaaagttcacataat

SEQ ID NO: 62151 - DNA, 301 bp, Glycine max
  Clone ID: PAT_MRT3847_27136C.1
gtattctgtcgagcagggattatatagacttcaatagtaaacctgagaataggacataagttgacatgctccgaggcccacaaccaagtgggcttaacggataatactatcatttacaaggacacagatgaagggtgattacaaggatcgaaacccttacaactgagaccaggatgaccgtatccaacatcggtttcagacatagacaacatattaaagtaccctggatgacccccacaaggagctgttgaatacacatgggcatggtccacatcatcaagctctgagaagaaaaggtcaa

SEQ ID NO: 62152 - DNA, 139 bp, Glycine max
  Clone ID: PAT_MRT3847_27137C.1
aaagttggtccccctgaaggacccgtcccgaaattcccgggccaccccaccctgtccggttcaagaacgactattgagggagcaactacatccctgctctctaagattaaggatttccagtcttttcgttggggagagc

SEQ ID NO: 62153 - DNA, 177 bp, Glycine max
  unsure (1)..(177): unsure at all n locations
  Clone ID: PAT_MRT3847_27138C.1
gnngnccgcgcngncggtgcnctgtnnncggntcgcggcagttgannatccnnctancggagntgncngaatgtggcagtagnngtgnntcganangttcngtgaanttgcngagnncnnggaagantagtacaggttcgntgnggttgtgtcgaagnanttaangttgggtnttcc

SEQ ID NO: 62154 - DNA, 705 bp, Glycine max
  Clone ID: PAT_MRT3847_27139C.1
aattcggctcgagctcgagccgaaaataagaagaaataaagacaagtgtagtgtagggaaatcaagaggttgtttcggtgtttggtgtggaccgagacaacatgtcaaacttcaaggctggttatggccacttctcaacaaatgtcaaaggggtgtttgcagccggtgattgtcgccgtggtcagtccctggtggtgtgggcgatttcagagggacgacaagcagcagcacaggtcgacaactacctcgtcaaagaagacaaagaccaccggaatcaggatggccttgtcaagagacagcagggcctctacaagaagcagcatggaagcagcaaacacacggtgatgacttataggtggctcctctgatttttcatactcataaagttccaaaaggaattgcacagaataaaattgttccaagtttgagcaggagattcattggtttactttaaacgggaaaaataagaagaaataaagacaagtgtagtgtagggaaatcaagaggttgtttcggtgtttggtgtggtttcagggtataaagttgttgcagattcgagtgttcagttgttcaatgattgttttattcgggcttttattgttgggaaggttagcttttagttggtaatggtgatgacgattatatgtaatgaagtgtacagtttgataattattatttagaagtgacatcgtttcgattcttacc

SEQ ID NO: 62155 - DNA, 577 bp, Glycine max
  Clone ID: PAT_MRT3847_2713C.1
gaggttttagtctattctctaatctctcgcttcacaattcacatggctctggaagcttacgcagcagcaaaccctgacaaaatccacacagatgtcctcaccaaagctagggattcttgttacaaggctcgtgatgcgttctatgcctgcctggagaaggaatcggacaagaagcccacagagattgcatctgtgggtttgttatacccattagaatgcaaagagtgcaggaatgaatatgtcaaacagtgccgatcttcttgggtgaaacatttcgataggcaatactgccagaacaagagggttcagagacttttggatgacaaagggtcccggagaggtccgttgacgctcccacagccttacactttcaaacccattgcttgaattttatcaataattccatgtagaaatagtagtaataatgggtcgcaatgctgattccccttatagcttaagcatgactctttgctgtacattctctatgtgttgtctactttgagttcttactagttactatttcatgttgtgttgaatgattttccatttatttttaatatcacactgcaattagaac

SEQ ID NO: 62156 - DNA, 306 bp, Glycine max
  Clone ID: PAT_MRT3847_27140C.1
tttacgcatttttaaaataaatttatttgaaaaaatgggtgcattgacacacattaattattatgacaacattatgttgatttgctactactacaaatatttgtttcatgaatatgtgaagaacgggaccaagttggtccctacataactaggttgctgataaacatctttgttatgacggatttgctactcataaatagcaccttgtttttcttcctacagttgtgccgccaataagagcactttagttaaatgaatattgtttgctaatggaccctcctgtgcgattacacgtcctaatagaat

SEQ ID NO: 62157 - DNA, 315 bp, Glycine max
  Clone ID: PAT_MRT3847_27141C.1
ctcaagttgacagggctacctacatgctgcttgtaacattagaagagtttgtgccgtataaatcccataggccaacgaccccggaaaggccagaatctggtccccctatgtactaggctaatgagcgatcctccccacccatgatgaacatgccgcactacacccacctcttatctctatcctacatcatgcaactgagccagagcctcatccgcactcacaggttacgcatgatttctaggacctgatagtcgatgcacctactgcacatgatcatagcaaataaattgcctttctcactctttgctgctgcac

SEQ ID NO: 62158 - DNA, 270 bp, Glycine max
  Clone ID: PAT_MRT3847_27142C.1
cgtacgtcaagcctactgatcctgctgtgttaattctggtctgcgaacatggtgtgagcaagagcgaggggatagctgatctgctagctatggtagtgtcccatgcctttaaggtctgactgacgatttatgattacaaggggagttatgacaatcttgacgtgatcatcatgctcgtctaggatgcacattctgggcaacatcctattccacatgctgtcaactatgctccacaatgctcaaaaatgttctggtgtgagctcaatctca

SEQ ID NO: 62159 - DNA, 385 bp, Glycine max
  Clone ID: PAT_MRT3847_27143C.1
ggctgcctcaatgatctcttccccagctgttaccactgtcaaccgtgccggtgccggcatggttgctccattcactggcctcaagtccatggctggcttccccaccaagaaaaccaacaataacattacctccattactagcaacagtggaagagtgcaattcattcaggtgtaaccaccaattggcaagaacaaatttaaaactctttcctacctaccagaccgtaataatacacaattgagcaaaaaggtacagtaccttcgttaaaaaagatagattccttactacaaattcgaattaaaacacgatttcttataccctgaacacaacagatcaccacgatactacaataaacgctactagaccatatagaagcgtcctatg

SEQ ID NO: 62160 - DNA, 1234 bp, Glycine max
  Clone ID: PAT_MRT3847_27144C.1
ggacccaacgaatttgcaaaactcaaacgaatacgttttctctttctcttcaatttcacccttattagcatagcatattcatttccctttcttgaatcgttgtaagcgcattgcgattttgcccttatctttatttcaattttttgttctgtttttgttattcatttgggttaatttcgattcgaagcttaactgcgagaggggatatcagagaagttgattggcctcccattaataacagatctgaatgatctgatggagtctaaaggtgggaagaagaagtcgtctagtagtaagtcctttttgtacgaagctcctctcgattacatcattgaagacgttcgaccacacggtggaatcaagaagttcagatctgctgcttactccaactgcatccgcaagccatcctgagattccctaggtcgtgtgaggacgtagcccccttagtcctgcatctgctatatttttctagtctcttctcttctcctttttcttgttttcttccttgcccttttgttctctctacctacacagcaagactttgtttctttttgagtcaagatggctggctcagctattggtttcgaaggctacgaaaaaagacttgagatatcattttttgaacatggtgtgtttgctgaccctggaggaataggcctccgagcattgtccaaagaccaattggacgagattcttaaaccagcagagtgcactattgttgcatcactttcaaatgattatgttgactcttatgttctgtcagagtcaagcctgttcgtctatccttataaaattatcatcaaaacttgtgggactaccaaattgcttctgtccatccctgtcattctcaagttggctgatgctcttgacatagctgtgaaatctgtgaggtacactcgtggaagcttcattttccctggggcacagtcttttcctcaccgcagtttttccgaggaggtttctgttcttgacagctatttcagcaaccttggttctggtagcaaagcatatgttatgggtgacccttcaaagtcacagatttggcacatctactctgcaagtgcacagaccaaaggatcatctgaagctgtctatggcctagagatgtgcatgaccggtttagacaaggaaagtgcttctgtgtttttcaaggagaatacatcttcagcagcttcaatgaccgaaaattctggaattaggaagatccttccacagtctgatatatctgattttg

SEQ ID NO: 62161 - DNA, 1888 bp, Glycine max
  Clone ID: PAT_MRT3847_27145C.1
cccacgcgtccgtacggctgcgagagacgacagaaggggaccccacgaattgtgcaaaactcaaacgaatacgttttctctttctcttcaatttcacccttattagcattgtatattcctttcccttccttgaatcgttcttaattgcgagaggggatatcagagaagttgattggcctcccattaataacagatctgaatgatctgatggagtctaaagttgggaagaagaagtcgtctagtagtaagtcctttttgtacgaagctcctctcgattacatcattgaagacgttcgaccacacggtggaatcaagaagttcagatctgctgcttactccaactgcatccgcaagccatcctgagattccctaggtcgtgtgacgacatagcccccttagtcttgcatctgctatattattctagtctcttctcttcccctttttcttgttttcttccttgccccttttgttctctctacctatacagcaagactttgtttctttttgagtcaagatggctggctcagctattggtttcgaaggctatgaaaaaagactctgagatatcattttttgaacatgaatgtgtttgctgaccctgaaggaataggcctccgagcattgtccaaagaccaattggacgagattcttaaaccagcagagtgcatgtattgttgcatcactttcaaacgattatgttgactcttatgttctgtcagagacaagcctgttcatctatccttataaaattatcatcaaaacttgtgggactaccaaattgcttctgtccatccctgtcatcctcaagttggctgatgctcttgacattgctgtgaaatctgtgaggtacactgcatgaagtttcatttttcctggggcacagtcttttcctcccctccccttttgcacaggttttcctcaccgcagtttttccgaggaggtttctgttcttgacagctaaaagcttatgttatgggtgacccttcaaagtcacagatttggcacatctactctgcaagtgcacagaccaaagggtcatctgaagctgtctatggccttgagatgtgcatgaccggtttagaaaaggaaagcgcttctgtgtttttcaaggagaatacatcttcagcagctttgatgaccgaaaattctggaattaggaagatccttccacagtctgatatatctgattttgaatttgacccttgcggatattcaatgaatggaatagaagggggtgcaatatccaccatccatgtcactcctgaagatggtttcagttacgcaagtttcgaagctgttggttatgactttgatgagatggctctaggtgaacttgtggaaagagttttagcatgctttcgtccagcagagttttctgttgctttgcacattgacatgcatggcgaaaaacttaacaaatttcccttggacatcaaaggatactactgtggtgagaggagctatgaagagcttggagtaggtggtgcagttgtgtaccaatcatttgttcaaggctgtgatggcagtacatctcccaggtctattctgaaatgctgctggagtgaggatgagaacgaagatgaagtgagggagatataagtacttctggtttttatgttctgttatttatctttactgttgagtgtgttattacctaataaataaatttgggggttatgatgtgagagtgaagcaatgaacttattgtgtagcttcacttaatttgtgtgattatgcagatgtttttttcgtttctactgccaactcatatgggagactcttatatgaggctgttgcacttgtattttattttatataaataaatataaatataattatattataatgtaaaagttattagtgacaaatgctggcggtgatatttctt

SEQ ID NO: 62162 - DNA, 851 bp, Glycine max
  unsure (1)..(851): unsure at all n locations
  Clone ID: PAT_MRT3847_27146C.1
atactacgaaagcagtcacaggatggttcctctagccacattcatggtatctgccgtcggtggtcagttcaccaacttcatccaggcctgttacaccgactgcatcttcttcttcattgtcgcagaggcccccatctcatgttccaccttccaaagctgttgcagttattgccattttgaaggacaagagtgttgatgagttgcagaagtttttatctgacaaagatgcgtatcaacaatttttgcattcgcttgatcaggtcaacattcaaactaatgttactattcacttcctaattccaaagccacaaggccatccaatttggtgctgttaaggatgagctcaatcgccctgcaatcaaagtgaagaactctctgatattcaatgcatttgttctttgtcaagtgttgagggaaaaagcccggagtttcaagaacctcgggatttgaggtcaaatccttttcaagggggagggaatgatgcaatcctaccccacaagggcattggatagaaaactccaagtagattgggccagatatgcaagagaaggccctagggttcttatgagccttagggtagatttcgggcccatgggctaagtacgagcccacttatctttgtacatattagattaaggtttcattatttttgggccatgtatttagggctccataatgtaggtagggtaccatagaaatgtangattttcagcccttgtattttagggcacctagactagtttttgtattaggggtagttttgtaattttagatgcattaagtgaaaaaaaaatgtgtgtgttggaaaataaatttaattgaattaggagaagcccaatcnnnttaatttt

SEQ ID NO: 62163 - DNA, 1219 bp, Glycine max
  Clone ID: PAT_MRT3847_27147C.1
ggacaacctccacattttctccattgtaaaaagacacttgttagcattgccacaccttttaggcttgagtttattcctcaagtaaaggaaatgttggatgagggtttggttcgcaagagcttaaatccttgtgctttgttggtgcccaaaataggtattattaggcaccaaatccctatgataggtggtataatgaatgtgttgagtggttcaacactcttttgtaaaatcactcatgcacccaacatcttcatgatttgtgtacatagagactcattaggtaggtttgttcttattttttgtttcaatgcaaacctaggtgctcatgtgggacaccttaggtttgtcgtaattttttgtaggaataatcaacatgaaaatagagaaaaaggtatgttttattccattactgtccctaactttgtaagtagtgatcaaggggttcccatgaaccctaagagaataaaggtcattcctgagtggcccgctccaccaagtgtaagaaaaatttggggtttccaagacttaacaaacttttacaaaaggtttgccccgtatttttctatacttgtagcaccactcattgagttggtgaggaaccatgttccttcatgggaagatgcccatgaaatgagttttcagaccttaccttacttcagcatactaaacaccactaatacatatgtttttgttatttttacaggtgttgagggaaaaagcccagagtttcaagaacctcgggatttgaggtcaaatccttttcaagggggagggaatgatgcaatcctactccgcaagggcattggatagaaaaactccaagtagattgggccagagatgcaagagaaggccctagggttcttatgagccttagggtagatttcgggcccatgggctaagtacgagcccacttatctttgtaaatattagattaaggtttcattatttttgggccttgtatttagggctccataatgtaggtagggtaccctagaaatataggatttttcagcccttgtattttagggcacctagactagtttttgtattaggggtagttttgtaatttcacatgcactaagtggatatttgatgtgtgtggttggaaataaatttaattgaattggtagaagcccaatccaattaaattttagagggggaaaggtgagcatttgcttactacgccccattgccacatcatatagtcacactttgtgca

SEQ ID NO: 62164 - DNA, 333 bp, Glycine max
  Clone ID: PAT_MRT3847_27148C.1
agcacggaacacggcacgagcccacacaaaaccaaagtaaaaaaccagacacaacgcacgaagggggggggagaaggggagaaccaacgcgaagcccacccggcagaggagggccaccgacgaccaaagcgcgagagagagcacaagcgcacaaccaggacacggaagaaaccaagagcaccaacgaccgagagacaggaagaaccagggggacaggaaaagcggcccacgacccggagcaaaccaggaaagacaccgccaaagggaaagacgcgccaaaccacacaaggaccaacagccccgaaaacaaggcacaaccccagacccacaaaa

SEQ ID NO: 62165 - DNA, 476 bp, Glycine max
  Clone ID: PAT_MRT3847_27149C.1
gaacaacgaatgcgcgagggacagttgggatctttgtccagagacaataagctaagcccggcgtgacccgtttgatactcagtagcttcacaagacttttaggtgctagtttttttgtattattagtgggagtttgaattcgtgatttactccatatcttatcacatatttagtcatcgattcaatcttatatttttaactttccctagtcaacggaaactcgatctcgatcccaatcaaaatggattttattcatcaaacttgaggtgagatccagtaagtactcatggattcaatttttattgacatgcctagttggtcttgctccttactgtaatgcacgcaattagctagctggcgaacaaaagttgaacggcatgcttctacacaaccaagatgcctacagaagcaaagttttcttcaactatgagaagcgcctacggttgcatagtccacccgaaaaggcttttgaatac

SEQ ID NO: 62166 - DNA, 235 bp, Glycine max
  Clone ID: PAT_MRT3847_2714C.1
gggggactactactttctgggtcgcgtgctatcggcttccctcttcatcctctcagcatggcaaatgtttaatgaattggatgacactggtggacccattgcaaaggagttgattcccgcattcactgctctgacgacaattgtatcctccacactgggggttacgacaccagatatcaatgtgcggccagtccttagctctatcatatctctaaagggggttgaacgactcctc

SEQ ID NO: 62167 - DNA, 357 bp, Glycine max
  unsure (1)..(357): unsure at all n locations
  Clone ID: PAT_MRT3847_27150C.1
tccgggcagccccgcgtccgattttttcttccttcttagcanttcttccttcttatatctctcctttctcttgcttaccctcttctctttcctccaaaagatttcgactttgccggctcggtttctttgactccttacaccaaattctttgcttattgctgaaaacggcaattttgtggctttaggagctcagattcatttgggggtcacatccttgtatttgtttttgggtttgctttgacggtaagaataagtgatcaaaatcaggcctctttataatatagtttctggatcagtgttggatcggatgtgtagtatgtgccattattgtggtgtgggcttgacagaatcaaattt

SEQ ID NO: 62168 - DNA, 562 bp, Glycine max
  Clone ID: PAT_MRT3847_27151C.1
ggggtgaaacatttcagtataaaacttcattatgattgctagacattggcattatatttccacaattacaaatttggtagatttctagagacatgaatatcctcctttttgtttacaatcaaatagtcgaaagtccaaataaattttatagttaggcatgagaaaatagtgcagtgaagtatttattttcttgaaccatctctatgaactgcatatattacataagaaaactacgcagatttttccactatttttgtatatcccgttgaaaattttgggaacctaaaccattgttgacgaaatcgtgtaaatccatgaattttaagtcggaaacggatcctctttatttttcttccaaaggtgccccatctttgtttcaagacggcatactttgctgatcgcactagtttctttgtgtacctatatacttgatgttgtttggtctgatcattttcttctaagtttggacggtgcaggacctcaactaaactttccaaacgctctctcatgcttctttgaataaaacctttggagctctttacatggtatctaacataggcat

SEQ ID NO: 62169 - DNA, 1390 bp, Glycine max
  unsure (1)..(1390): unsure at all n locations
  Clone ID: PAT_MRT3847_27152C.1
cgagccacgctgccacaatatagttccgtgtatgttagtgcaaagtctggtccggtgacgcctcaatcttctgttcgttgggataatccaagcaaagagaaggttaatagtcatatcagaaaccggtccagccccttgcggaggttgttagaccctttattgaagcacaaggcatcagataaacacaattcagctcaaagcagtcaggcactagagggtggaagtgcaaattcaagcttcaggactattggtgtcaatgaatcactgctggctgaaaagagcaaaggatcatcagttcaaggcctcttgcagcttacaataaaaaatggagtgcccttgtttaaatttgtgctcaacaatgaaagaaagatttttgctgctaccaggaatagtttagcatcactcgagaagggtgatttaggcagctgttttacattctacctggttaatgaaattaagaaaaagagtggtggatggataagccatggaaacaaagaaaaaagctgtggctatgcctacaatgttattgctcagatgaagttttctagctctaaaattgccgaaccaaccaatcagaactccagtagaaagtgtatggttaaagaatatgttctggtgagtgttgaaatcggccgcggccgctcgcctcgagccgattcggctcgaggcgtggagctggcagctgttgttgttgagacctcatgcgaaaagaccactgaaggactgcatgatgataacaacatgctgaagaaaggatgctcaaagtgcttgacagatgaaagatgcttgtgcagttcaggagaaaatgaagcttctgattgcactactgttatacttccaggtggtgtacatggttcaccaaacaaaggtgaacctacacctttgatctatcgatggaaaaccgggggatcatgtgattgcgggggttgggacattggttgcagactgcttgtgctctccaaccagaaccagaattcaagtattccaaagagctataaaccttataatgatcgttttcaactttttgttaaggaaggaactgagaaagacacatcacttttcactttgttaccactgaaggatggtttctactcggttgaattcgactcaacaatcactcatttacaggcatttttcatttcagttgtggctttaagctgccagaaactaccaggttccttggaaatgggtagcatgcatgaagaggtccttaaccttaaggaacccagttccatgaacaacagaaaacttcangggaaagcacctttaaattatgctccaatacctncactatcccctgttggcagagtttagttcacaagaagtttactttttttgtgttcatacttcatagntattattactattagcttttaagatcattcagtag

SEQ ID NO: 62170 - DNA, 243 bp, Glycine max
  Clone ID: PAT_MRT3847_27153C.1
atggaggaaatgggaaagtgtagtgtagtatatgatatactagctaggcttgcctttaatgataaaggaaagcaatcatctgagatggttgttgtttctgttcctcattttcagtggggggtgttggagagtggagagaaggggaagacggttttggaagtgaagaagtgtgatgcaacacaatcagaaatggatcgaacaaaggacgtgagattttgtaagttggtggtggctctcatgtga

SEQ ID NO: 62171 - DNA, 234 bp, Glycine max
  unsure (1)..(234): unsure at all n locations
  Clone ID: PAT_MRT3847_27154C.1
gttggcaacaagttggatcatgaattactgtccaatgctccccatggctgctggcagagggtgnacggcgcctttggcactggcccaaccctacctgccggcactgctctggatgtacctggcgtactggcactcacagcatactctaggaagtcgatgaaagcaaggcttaccaatgcttaccatgtaatgtcaaccaataccttacgaacatgctgtacggaccactctcac

SEQ ID NO: 62172 - DNA, 316 bp, Glycine max
  Clone ID: PAT_MRT3847_27155C.1
agtgattgaagccagagctagagcaaatactagaaaagaaagtggaaaaattcggaacagaaggatgctgaaaaagtataatggaacagccacacatccaaggctttcagtattttgctcagataagcaattatatgcaatgcttgtagatgacaaaaataaaaagtgtttgttctatggaagcacgctgtatttatttatccgacaagaccctccttgtagcacgcttgaagttgctcaacgtgttggagaggcactggttaaagcttgtgttgatcttaacataaatgaaatattatcctatgattgcaatggg

SEQ ID NO: 62173 - DNA, 381 bp, Glycine max
  unsure (1)..(381): unsure at all n locations
  Clone ID: PAT_MRT3847_27156C.1
ggcataaaacaaaagtgcatcctttcaattgcagttctaacggaaaactctgatctaaccgaaaaggtcgaggccaaagtcgtcgtcgtcggactcgctctcggccttggcctcagcagcctggggcttcaaaccagccttggcgtcttcggaggaggccgcggcggcaggggcagccaaagcgtaggcctcggggttggcgaaaccctcgcggatggcgttcgcgtgctcaaactcgatctcggtcgcaattgcgatcgcgagcaggttcttgtaagcgttgaccacggtgtgcgaaacgctgggcaaggggngggtanttgagccccaaaaagacacaggtgatcgtcgagacgctgctcatgaagcgcgcgagcagat

SEQ ID NO: 62174 - DNA, 374 bp, Glycine max
  Clone ID: PAT_MRT3847_27157C.1
cccttccttagcccggaattccgcttgagggtgccccgtggattggacccctcgcatttttccgggcttattaaaccctgggtattaaccggccaaccccaaggttggtcctattttccccatccaaccctcaacctggtcctaaggaataatttccgtggaaggttccggcggacccgggaatattcgaccgtaacctttctccggggaatgtgattggcctctggccaaagaactcgattaaaagtatttaccgccaaatccgctgggtaattaaaaattaatgggtaaattattcctttaggagttattatttattatggtaatccaaaattcaacctgatgggtggaagccaaggttttaattaccgggt

SEQ ID NO: 62175 - DNA, 752 bp, Glycine max
  Clone ID: PAT_MRT3847_27158C.1
aagcgaaaaccgagtttgtatactcgataaattaagatggcggcgaagagcgacgacaaatccgcaccggcggctgcgaccgatgctggtgctgccggtgcgggcgcggcggcggcggcgggtgcgctgaatctgaccaaagaggtgcagacgcagaaggagtgggccaaagcgctcgtcatcacggccgacggcaaagtgttggccaacacgttcggccccaaagaggtgcgcgaagacgaaatcccggcgctgttggcggcgcacaacgaccgcgacacgacggtgggcaaaggcattgtggtcggcggtctgcactatgaggtgcaccggttccacgacgactacatttacggccgtcgcctgccgccgggtgagggtgccggcttctgcctgtaccgtcgcgtgcagaagaagagcaaaaaaccgtatttcttcgtcatcacttacctgccgccggcgctgtccgcccgcatcatcccacagctcgtcgccttcgtcgacaaacacatcgagtcgctgtaaggcattcccgatccttttgtcgggtgtcggcgtcggttcagcatctgcgatctgcatgtgcctgtggcaccgaccgctcttagcttcgcgcgctgttgggcagtgcgcagttacgccctgcgcaccgctgcgcccgcggcgcgaactttggctcttcgaacgcttccgctgcgctccgctatggcttcccgctcttttcgggtgtccgttgtgtctgcactttctcg

SEQ ID NO: 62176 - DNA, 679 bp, Glycine max
  unsure (1)..(679): unsure at all n locations
  Clone ID: PAT_MRT3847_27159C.1
ccacgcgtccgtccgatcctcactctatcttcgatgacgagctcaaactcgtgtgttctgactctcgtcggctaatttaattcaatataatactttcgataaataattactttgttttgttttttctatgaattgaatgaattactatgcttgattatttatttattttgaattgtttaggtggagattgcgctgaggaagaatttcaagtcttacggcgcgtggcatcatagaaaatgggtactcagcaaggggcattcgtccatagacaacgaaatgcgccttctgaatggttttcagaagatggatcctcggaattttcacgcctggaattaccgaaggtttgttgctgaactgatgaaacgatcggatgaggatgagttgaaatacacagaggaagtgatagggactaatttcagtaattactctgcttggcacaatcgtaggttggtatagctagcttgaagcttacttattcaaagggacattctggtgcttgctggctgtgcgccttttctgtatggtttcgctcattntattgcctagtatctttttcagaacttgtgaattgacaatagactgcttcgcttgtgtgtgcacgcgtctctgagaggcatgaaattgcaatgttaggaatgatggtgtatattgtatcacacgttttgctgacatatggtag

SEQ ID NO: 62177 - DNA, 311 bp, Glycine max
  Clone ID: PAT_MRT3847_2715C.1
tgacatattattttttgcttccatataacattacagaaaactccaagcgatctttctatttaaggcttaaagaaaaatattcatcctgtcacctttcatattaaacaaaacatagcagcctcatccctttaaatttaaacatccataattatcacctcatactcttatatcctaaacattcgaaaatatcacttatcaaaaacccaactctactatatataactcctgcaaaaactataaattaatccccaactcctatttccatattacttacacacaaacttccgttcaaaaagcccaaactaatccca

SEQ ID NO: 62178 - DNA, 586 bp, Glycine max
  unsure (1)..(586): unsure at all n locations
  Clone ID: PAT_MRT3847_27160C.1
gttgaccggaaatatatcagatgtttttggtgtatatccagagttggactacgttgatctgagtagcaataacttttatggccacatttcaccaaactgggcaaagtgtcctaatctcacaagccttaagatgtccaacaacaatntatctggtggtatacccccagaactcggccaggcacccaacttacgagtactagtcttgtcttcaaatcatctaacaggaaaatttccaaaagaacttgggaacttgaccgctttgttggagttatcaataggcgacaatgaactttctggcaacattcctgccgaaatagcagcctggtccggcattacacgtctcgagcttgcagcaaataatttaggtggcccggttccaaaacaggtgggagagttgcgcaagttactttacttgaacttgagcaagaatgaattcacagaaagcattccatcagaatttagccaattgcaatctcttcaagatctcgatcttagttgtaatttgctaaatggagaaataccagcagcacttgcgagtatgcaaagattggaaacactaaacctctcacacaacaatctctcagga

SEQ ID NO: 62179 - DNA, 197 bp, Glycine max
  Clone ID: PAT_MRT3847_27161C.1
acgggctctcacgggcggctatgctagataaacaataatgagatcactcgcccacgcaatgatgcgaaaaagggtagtgaccattgatccacacccagcacagcaaactcttgaaatagcacaagctcacttgaataaggccggaacgcaccagacaaacaatctgaggccaaacctacctcccagacgaactagga

SEQ ID NO: 62180 - DNA, 251 bp, Glycine max
  Clone ID: PAT_MRT3847_27162C.1
cgttatcacttccaagctagccaactgcatacacaatgagaggagaatactgtatcgccggagcttccgtcttctcgttcatctcggtcgtgttgatggtctttgccatcatcggacaagtcaacccgacttcgcttcctaaatccatctatatggtcaagctcgatgtcgccgcctacggtgccggtctgcaaaacgccatgaaatccgcacctaacggtctctacatgaccaacggttccgctcccctg

SEQ ID NO: 62181 - DNA, 402 bp, Glycine max
  Clone ID: PAT_MRT3847_27163C.1
gagaacccaattgggggtaggcgtttcaaaaaaatcaaagtccaatttccccaacaacggtggttttcattcaaaacacacccaaacccccccgaaaataacagaagggtttaatctcctttacttaaaaaaaacctaaaggtttaaaccaacacaaactcctcaaaactcgtcaaaacttctttagaacaggaactcaaaatgccagacccaaaatttcttccagcccatatcaaaatatggggatcacttcttaaatttctttggggcttgccccggctgggatgctggaacaactgtttcactgggggcaggggaatctttttttccaagaccttgggccaaacggtcctccctccgagcaattttttttttttcgctggccttgttcttgggacgttt

SEQ ID NO: 62182 - DNA, 141 bp, Glycine max
  Clone ID: PAT_MRT3847_27164C.1
gacctaaaaattgtaccgatatggcttcacttgtgtgtctccttttggccttgcatttcatgggtatcatgtcaggtgcgttaggagcaaatactgaagtgtttacaaaagagtctcggacgtctctatcgaggagaaccg

SEQ ID NO: 62183 - DNA, 309 bp, Glycine max
  Clone ID: PAT_MRT3847_27165C.1
gggccatacaaatttacaagggccaaccattggataaaagcaatttacagggttttccacgggcctaccggggatgaaagattgggcatgtttggatacccgttgaacgggaaaatcacacttttcaaagcaaccatgttttagttttatctgaaagtttgttggcgttagatttaactgttaccaaacatattggaaattcatccattattagcttgggcgcagatttttatttatatatatatatatatatatatatatatatatatatatatatatatatatatatatatatatatatatatatat

SEQ ID NO: 62184 - DNA, 387 bp, Glycine max
  Clone ID: PAT_MRT3847_27166C.1
tcctctagagcggccgctttgggttttttttttttttttttttttttctagccccccacgaagaaggaccacttcaaaattggaagcattactctttttctctctctcagtccaggatagatttaacataaaatttgaccccccctgtaaaagggtcaggaataatgtagggggaatctgccaagttttgcccaaaaactgaatctggttctaaaaatatatgacctcaggggcttattcaaaaaaaataaaataaaacattatcctatttcaggggtaaaaggtatagaaaaacctacaatacaaaggggtttaacggatatataaaaggttcctttaaaaatacaaacaacattttttttaaggaaacaggctttaataaaaata

SEQ ID NO: 62185 - DNA, 359 bp, Glycine max
  Clone ID: PAT_MRT3847_27167C.1
cttctgcatttgcatgttagaggagggacttaataaggttaaagatccaaagctttcaactttgaagttcgtatctcactctctttttggctgatctgtggacccaaacactcgtattgatcatgccctgtttgagctcactccatccataaccaggtgtgaccttcgtgttgatggtggaggtgtgagtgaaagacttgcttatgggctgctagaaccgattgtttataacctcatgagtgccaaggatcagattgccaaaggaggctattccatcgctctgcgtacacctggtggacatcctgagatggttagcatagccaccctgcagaggttagatagatttatatgcgccccag

SEQ ID NO: 62186 - DNA, 207 bp, Glycine max
  Clone ID: PAT_MRT3847_27168C.1
ggctcgaggaacattcttgtccccattgtttcacatcatactgttggacgtgctaacagctggcttcatcagtattaaacaaagtattgggattcatggggatatgataatgacgcctcttgtggttggccatggcgcatcagagacgctcatggttggcagtgacttcaaaggtgggaaatatcctcggcgctcgaagatgaaggg

SEQ ID NO: 62187 - DNA, 583 bp, Glycine max
  Clone ID: PAT_MRT3847_27169C.1
ggggctatttaatcgacctatgtccggtattcctccttcaattcaatccctcaataatatttgggtgatgtctatgaggaaatgctcgattggcgccgtcaggtgattctttctatttctcgataactttcgttgttaaatttcgagcgtctctatattggatgcgcctaaatcggacatccgagttacaagttatgaccatttgaatttctcaagatattccgttgttcaatgtcgagcgtcttgatatattatgatcctgaatatgatatccgtgtgaaaagttatgaccatttgaatttctcgagagcttccgttgttcaatttcgagcggctcgacatattatgcgcccgaatcggacatccgagttacaggttatgaccatttgaatttctcgagagattacgttgttcaatgtcgaccgcctcgatatattatgcggctgaatctgacctccgtgtggaaagttatgaccatctgaatttctcgagagcttccgacgtttaatttcgagcgttttcatatgtgatgcgcctgaatcgggcatctgagtgaaaagtatgaccatttgaattttcgaga

SEQ ID NO: 62188 - DNA, 858 bp, Glycine max
  Clone ID: PAT_MRT3847_2716C.1
aattcacatggctctggaagcttacgcagcagcaaaccctgacaaaatccacacagatgtcctcaccaaagctagggattcttgttacaaggctcgtgatgcgttctatgcctgcctggagaaggaatcggacaagaagcccacagagattgcatctgtgggtttgttatacccattagaatgcaaagagtgcaggaatgaatatgtcaaacagtgccgatcttcttgggtgaaacatttcgataggcaatactgccagaacaagagggttcagagacttttggatgacaaagggtcccggagaggggtgtaaactataaggatcttcttggcccctgttgaagatgggagatcacatcatggtatttctttgggtggatgtgaatgtgaagtacttatctataagtcagttgctaaaagaagttctataatgcttttttcttgttttccagtattttcagttcttgtgggatgttctagctcttggttttgactattcgcaatgtaattgtacacgctttgacaattttatagttccctcattggcattggtgttgtaaaagattgtagcaactgagtactgaacatgtttggtatctacgcattagtcagaactcaaaggaataaatggcccccacagccttacactttcaaacccattgcttgaattttatcaataattccatgtagaaatagtagtaataatgggtcgcaatgctgattccccttatagcttaagcatgactctttgctgtacattctctatgtgttgtctactttgagttcttactagttactatttcatgttgtgttgaatgattttccatttatttttaatatcacactgccattagcccc

SEQ ID NO: 62189 - DNA, 442 bp, Glycine max
  Clone ID: PAT_MRT3847_27170C.1
tgagaatgaaactccacaacaacatcattcaaacttttcaaaatgtcagatttgtaccttctgctactactaatgtcatttcattgggagagatgacatcacctgggtataggtatgttggtttaaattggggatgcaaggtacacttggtgttgcgagggcagaaaaattggagaaatctttgctacttggaaggacaagctttgagaagataaaattttctaatgaggtggttatttagaaattttaattgagggaggaattgttggagaacaattcaaatttcaaaataaatggagctgacgaagattcaaggagatttttttaggaatttgtttcttgttttaaagattaggatgtgataatatttggattttgtattgctatttagctctatatatagagccaaaaataaaaattctatagcatgttccatctaaga

SEQ ID NO: 62190 - DNA, 384 bp, Glycine max
  Clone ID: PAT_MRT3847_27171C.1
tccgtttcgcgtccgctaacacacaagaattctactgatggcaattatccagtggatccttggataccaaatgatgataatggcctctatcctgaaagtcaattaccttcaaaagctgtcgatggaaatgttgcatgtgccaggggacgtggtggtttacccaccactgattgcattagttctgcagctaacaatggctccccagatataatcaacacggagtcgctcagccactggggacaggtcagacaattgctgttcttactatagttgatccttttccagtaactttactggctgttctttttggcgttacgaatgaatagtgggcgtggtggcgcccctaaccctatgctgacgcgaactttttgagacctgtaaaag

SEQ ID NO: 62191 - DNA, 958 bp, Glycine max
  Clone ID: PAT_MRT3847_27172C.1
gcaggaagcatacatggattatggctacctaaaatcccttttgaaagacataatgctccacaagcaaagaaagaagccacattccagtgccaccccagcagcactaatgcgaaagctatcacttaacagaaccttcagcggcctcacacacagatactaccagcccgtgagccctgagcatgacatcgagaaccaacccattttggtgcactcagtgaagcgagatggtcatgaaaaatatgagactaattttcttatggctgcagaagaaggcggagagtacgagttggtgtacttcaagaggctcgatgatgagttcaacaaggttgacaagttctataggtccaaagtggaggaggtgatgaaggaagctgctgagttgaacaagcaaatggacgctttggtggctttcagggtgaaagttgagcacccaactgcgtcgtttgatggctccgttgagatgactcgtcttgcttctgatgtctctgcttcagccacggcattgcatgcttctacacccaggggtgtccagctgaaccgtgcacagacaggaagaattcccacactaattgaagatatcaaagaggaaggaagtacccatcatggtcattcagaggaatcccgggatagtgaaaaaggtgaagagattcaaactaccaacaaaagagttgaagtacagaaccagaagaagaagaatatcacccccatcaaacccatcagacctgcttctgtggaaatacttaaccgagtgcaactaaataacacttgtgagactcctcgttcgactattagaggcttcatcaagtaccctggccaaacagagataaacttcaccaaggaaaatttgagcaaagttgaagaaacactcaaactggcttttattgagttctatcaggagcttcgacttctaaagactacacctttctaaatgtgttggcatttttaaggtaatgaagaa

SEQ ID NO: 62192 - DNA, 467 bp, Glycine max
  Clone ID: PAT_MRT3847_27173C.1
ctttctcgtgcggggacgcgtgggcggacgcgtggggcgtccggtcgagagagaaaaagagataggttgagaaaaacgaagagtctctctcttctttatgtcagggcacaaatctttcacctcttcttctttcttctgacccatttcagaaggaaccaccaaaaaatagaggcagaaggttctagaagccgccaattctttttttttttttttggtttaatctgtctgagtccgagaggtttgtgattgtaacaatggattcctcgtgtgtcccaaacggtgatgtttccgggttcaaagataaggagccaatggttgaccctttcttggtcgaggctcttcagaaccctcgtcaccgtgtcaccattttgcggatggagctggatatccagaggttcctgaataatgcagatcagcagcattttgagtttcaacatttcccttcttcatatctcagactggctgca

SEQ ID NO: 62193 - DNA, 311 bp, Glycine max
  Clone ID: PAT_MRT3847_27174C.1
agcataaatggcgttatctaactgatactcaaggtacggtaacataataaaggatacttgggcctaggcctacttcgttgccataagaaaaagaatcaagaatggtcgaaggaaaacaagaaaggcacctacacaaatcgtattcaccatggcggatgtggggaaagattgtacaaaaaatttctatatgtgacactaaatagatggaaagacggaattgcataggctgatcatgagggaatatggacttgctcatagaagaatcacatttttagctgcaccaaaatgaacattgatccataatttgtcaa

SEQ ID NO: 62194 - DNA, 601 bp, Glycine max
  unsure (1)..(601): unsure at all n locations
  Clone ID: PAT_MRT3847_27176C.1
tttacgcgttgccaacaaaaacacaaacctctcttctctttctctctctctctctctccacaaattgctgaacctcttccgtcctcacttcaacgcagaagcgttcgtactttctagaacttggcgtcattcaggggaggaagtttggctacttactacgatattgatattcaacgccaatggttggattccagagtgaccataagcccgggaacaagtgcaatggtaattctaatagttttccggttccggatcgtcatgtacgacttatgagaggaagagagctaagaaaaagcagcaaggcatctcctgatagtaataatattagtaatgtggttagtgaatattctgagcataacctgcgcttaagagaagataatagtaactctgctgctccctttgaacgatacctggaaggagtggcagcagcagcagcagcagcacggggcgcaagggaagatgggagacctttcagacaacggcttttggtggtggccaataggctgcccgtctcagcantaaggaaaggcgaggatttgtggtctttggagataagtgctggtggcctggtgagcgctctcttaggtgtgaaggagtttga

SEQ ID NO: 62195 - DNA, 545 bp, Glycine max
  Clone ID: PAT_MRT3847_27177C.1
ttcttccaaaagaaatgcgttcgtgaccatgccatgtctgctactaaatgcgctctctctctctctacttttctatttaaaacccttccgtttctctattcctctttcagaagaaacctcaaaaacaaacctctcttctctttctctctctctctctctccgcaaattgctgaacctcttccgtcctcacttcaacgcagaagcgttcgtactttctagaacttggcgtcattcagattgcccactctctacgtacccgcattgtctgacttataagccctttgcccctaagtaacccagctggaaattgacacactaagccagaattgtctgtttgctttcagcgtccgctgatttccgaggcgtctccttagctggccttttgaacttgttcctgggaggaagtttggctacttactacgatattgatattcaacgccaatggttggattccagagtgaccataagccccggaacaagtgcaatggtaattctaatagttttccggttcccgatcgtcatgtacgacttatgagaggaagaga

SEQ ID NO: 62196 - DNA, 270 bp, Glycine max
  Clone ID: PAT_MRT3847_27178C.1
tgactgctgaaatacagcaaaagattttgcatttgccaacatcttgggactggagaaatgttcatggtatcaattttgtcagtcctgttcgaaaccaagcatcctgtggcagctgctactcatttgcttctatgggtatgctagaagcgagaatccgtatactaaccaacaattctcagaccccaatcctaagccctcaggaggttgtgtcttgtagccagtatgctcaaggctgtgaaggcggcttcccataccttattgcaggaaagt

SEQ ID NO: 62197 - DNA, 606 bp, Glycine max
  Clone ID: PAT_MRT3847_27179C.1
cagagaaacgagccgaacagagttgacagagaaacatcactcacagcgaaaatggcaaagagaacgctgctgaagctaaagccaagtctccacgttccgttacgtttcttccgcagctccactttggccctgacccgacccgttgccccgcttgcccgacccgaatccccctcgatatccctcttcaaaccctccaccgttcacttcccgggcatactcgcaaggcaaatggtcactgcgagatcgccacgtggtgcttcaaaaaggaacgatgaggaggaggaggacgatgatgatggttttgatgacgaggatggattcgatctcgacgatgagttcgacgattccgatgatggtgacggctttgatgacgaggaagaagaagagaaacccaagggaaaaaagaagaagacatggtgacttttttatgaaaataaaaaataaaatctttttatgtttgtttcttcggtatttgatcggtttcggattaatcagggttgtctctggtgtgtatgtgaattcccagtgttgaattttactttggtctttgtttcgtctgttgcttcgtttaaaaaaaaaaaaaaaaaactcgagactagttctctc

SEQ ID NO: 62198 - DNA, 189 bp, Glycine max
  Clone ID: PAT_MRT3847_2717C.1
gaattcgagctctgtacccggggatcctctagagtcgacctgcagctccatattgaatcctgcacctctcaaatttttaaaaatctcaaactgttccttttcattattatacatttccagaatagggtttttcataatagtaaaaaataacttccaccttttgaaataggtgtgtagtaaaaaatagtc

SEQ ID NO: 62199 - DNA, 1853 bp, Glycine max
  Clone ID: PAT_MRT3847_27180C.1
ctaagatgcgagtagatacacaattgaaaagacaaaccccccactctcacttactcacttctccggctatgcataaccccggcggcggcggaagcgacggcgtgtgccacgtggtggcgatgccgtttccggggagaggccacatcaacccgatgatgaacctgtgcaagatccttgcatcgaagagacccaacgagattctcataaccttcgtggtcaccgaggagtggcttggcttcatcggcgccgagcccaagccggacgccgtccgcctcgccgccatccccaacgtggtccctcccgagcgcctcaaagccgctaactttcccgcgttctatgaagccgtcgtgacagagatgcaggcgccgttcgagcggctcctcgatcggctccagccaccgccgacagcgatccttggctgcgtcgagctccgctggcccatcgccgtagccaatcggaggaatattccggtggctgcgttttggaccatgtcggcgtcgttttattccatgctgcatcaccttgatgtctttgcacgacaccggggtttgaccgtcgataaggatacgatggatggacaagccgagaacatcccgggaatttcttcagctcatttggcagaccttcgaactgtgcttcatgaaaatgatcaacgagtcatgcagcttgctttggaatgtatttcgaaagttcccagagcaaattatcttttactcaccacagtccaagagttagaagctgaaacaattgagtccttaaaagctatatttccctttccagtctatcctattggccctgctataccttatttagaactaggacaaaaccctttgaacaatgatcatagtcatgactatataaaatggctagattctcagccacctgaatcagtattgtacatttctttcggtagtttcctttcagtgtctactacccaaatggatcaaattgttgaagcactaaacagtagtgaagttcgttatctttgggtggctcgagccaatgcttcttttttgaaagaaaagtgtggagataagggcatggtggtgccatggtgtgaccaattgaaggtgttgtctcattcttccgttggtggattttggagccattgtggatggaattccactcttgaagctctctttgctggggtgccaatgctgacattccctcttttcttggatcaagttccaaatagcagccaaattgtggatgagtggaagaatgggtctaaggtagagacatcaaagttggacagtgaagttattgtggcaaaagaaaagatagaagaactagttaagaggtttatggatcttcaaagccaagagggaaaggagatcagagacagggcaagagaaatcaaggttatgtgtctcagagcgattgccgcagggggatcctcatatgggaaccttgatgcatttattagagacatttcaaaaccactgactcattaagcagcttgggatcaataacacaactaagcaatgtattaataaagggttggatattgttgttgaatgtaaggatgcatataacattgtaaaatgtctcgtaactgaaactgaagtgctctctgattctgatagctgaatttgtcctcttagattcagcaatttgagacgcttgctgcacattttgtgtaataacttatcaatgctaaagagtggagtttactgcagacatcaatgtcttgtatttgaatagagatgcttcattttagaagctttgcgagcgatacaagaaaaaccatacttaaggcagataatgctttaaatgaccagggagctgttacattatgttatctgtttagggtctatttgttagccatttcaaacaagtaaactgaagaaagt

SEQ ID NO: 62200 - DNA, 325 bp, Glycine max
  Clone ID: PAT_MRT3847_27181C.1
aaaaaaaaaaaaaacccccccgggatttaaaccctgataacctttaccaggtgggggccctaggggggcgctaaaatttttgccaaggggggaggggtggaaaaaggagggggcataccccccctgtataccttggccagggggcacattccttctttttttttggggggggctaaccggggggggaaggttttttacccccatttctaccaccaaatcccgggccgggggaaaaaagggggggggacactttgaggggctccccttacagattcgaaaccaaaaccatggcgttgtaaaagggtcctatgccagaagagaaatt

SEQ ID NO: 62201 - DNA, 386 bp, Glycine max
  Clone ID: PAT_MRT3847_27182C.1
ctgaccactacatccttagctataatccaacctgtctatattcccgaaatccaaaatatacaatgtttgttcagcgtctattccaatctataacactatttatccacctctctatcttatcttcaaatatatcattcatccattattaatattaatttttaatataatttgtatatacatttacattccaattaatgcctttcatctattgctttctccatacaaatgatcttagaccattcttactattattcttactatcctgtatttaactacatctattcacacatttaaccttttatggagcctttcttattaccttttttcctttcttcttctttaaattttaacccaattctgatattattttttatctattttttatt

SEQ ID NO: 62202 - DNA, 242 bp, Glycine max
  Clone ID: PAT_MRT3847_27183C.1
gcctggcctaccgcggcactcccggctgcacgctctgcttggcctcgccatgccggtggacctcagcaagtggtccgggcccttgagcctgcaagaagtggacgagcagccgcagcacccgctgcatgtcacctacgccggggcggcggtggacgagctgggcaaagtgctgacgcccacccaggttaagaattggaccaccagcatttcgtgggatggtcttgattcagggaagctctaca

SEQ ID NO: 62203 - DNA, 1624 bp, Glycine max
  Clone ID: PAT_MRT3847_27184C.1
ggctgcataagaggagaggcttaaggcttttctttacactgtccaaattgtgaattatttcaagaattccttccacaccttcaaagttagaagccatggaaacttctcatcctctttctattgaaagcttctcttatagttggttagtgaacctgaagccatcactagaaagcctagatggctccctcagaacttcccttgatgcttctgatgaaacttcttccttcattgaaatggatccaagaatgacaccttctaaaagattcttcagaaactcccaagatttcaaatttgacttcccaatctcgcagtcccctcgcactcttgttgatgctgatgagctcttctccaatggctacctcatgcccctttttgttgaatcattgaagatggaagcatttgaggcctctgatgtcattccaagcctaccttcctcttcacatgtgccaaagagtgtggttcctaatagtcattctagatgcccttcgttgaaaacgtgctaaacattattaattagaatatttctcaagtatctaaacttcttatgtacaagatagaggagttgcaaatgaggctaataacctgaaacagttgttaagagaactgagacagccgagaaaagggaaaactatgctgaaacatctgcacggattagtggggtttatgctgctgatgactggcgcaagtcctgtgattctggtgattctgaaagctcaatttatgaagcagttctccattgcaaaagatccattggtatgttcaaattcattgtgtatatcaattaagcatatgttgtgttcaaggttttaaattgcagtcacggtcacaatttcatcgtgatcttggatattgctggcaattatggctgcaattgcgatcgcaagagtccgaaaactttgacatagagaacgaaattgtggtcacagaacattttttaaaaccttgatgttgtgttcccttgatgacattttgtacattttgtgtggaactaacttggacatttgacacttcgtgtattgcaaaaagaatgaattaaggatgctgcaaaagggttgcgtttggagatcaaaaatgcaagagaaaagagaagataaagtgaaaagagagagatgatcaaggctaaacccccaagagcaactcctttgctccattatcctctgcttgaatgataaaggaattataataggaaataaaaatgtggttggtcaggcattttcaatctttatgatcaaattctgaagagaaaaaaaatatgtagtacaattttgtttgatcatctaatttaatatgggaaggaacacttttactaagatgagaatctgcctcctatttcagtaaagttcttattcaactgattttggaatcagaaatgtgtgctacaaaacaaattatgtacatatgattctaataacttggtatatatcttatctcctatgttattgccaaaaaaaaaatatatttataatttactataaataaatattaaaaaatataaaaaatttatctttattattaattataaaatatattttatctatatattttatatcttaaatatataaaaagggggggctctttttaaattctcaatttttacttacccttcttttcgattaaaatatct

SEQ ID NO: 62204 - DNA, 406 bp, Glycine max
  Clone ID: PAT_MRT3847_27185C.1
gagaagtgtaggatctggagcaggagaatagcgtgggcagcgtcagcgtgggctctgctgttccgatcggtctaagcagacgacgtcggtgggctctctgaagatgactgcaagaaggacgttgctcaggacagaggagctctcgctgagttctatgctgcttggtgtggacactgcataaagcttgctccagagtatgaaaagcttggtagcagctccaagaaagccaaatctgtttgaatcggcaaggttgactgcgatgagcataaaaatttgtgccccatgtatggagcctctgggtacccaacatttcagtggcttacaaaaggagctcttgcagccctacaggctggagggccacacactgctggatcacttgttgagtttgggaattccggaggcggaa

SEQ ID NO: 62205 - DNA, 265 bp, Glycine max
  Clone ID: PAT_MRT3847_27186C.1
cggagataacaacaccccaacaacgttttggggcgaaaattttttttaattttctttaaattacattcattctaccacccctttttgctatttttagcaaccttacccctttttttaattattgcaataacaccctcctgttgtaaattttcaacccctcccttttgttctaatcatacaagccccacccatttttttttttttttaaaccaaaaataaacctctgcttttcccaatggattccttccttgtcctgcaccttatc

SEQ ID NO: 62206 - DNA, 202 bp, Glycine max
  unsure (1)..(202): unsure at all n locations
  Clone ID: PAT_MRT3847_27187C.1
gtaacttctgaagatgaagttgtccgtttgttgaactgctctgatcattatgcagcactgggatcatgcggtatcaaaatattgatgttcatactaaagcgggaatacaggaaangcatgtggacnctataaatatggtataaagtcgagcttagaactcnatntatcatctatgatcgtaaggaagctantgnggcagagg

SEQ ID NO: 62207 - DNA, 395 bp, Glycine max
  unsure (1)..(395): unsure at all n locations
  Clone ID: PAT_MRT3847_27188C.1
cttgtgttaggcagctgctgtctggttacctttccattgtgtttttttagcctgctgggatgaggtgatatctgtcaaaattgtgactgaagagtgactgaagtttatttaagcacaagtcacttgactggggacacctgggaaactggctatgtctagccccatgtcagatttcaaaattaaacataaaaaaattagtttgaatggatttcagtgcagaagtctgctggagcagcactataaactgatgcgttttgaaaaaaaacccaggacagtatccttttaatcttaatcagcaattgttactacctataatacgaaactnttattggtgtttaccttgacgaaacagtaaatctgtttaaagtcatggaatgtttttaagtgtgaacact

SEQ ID NO: 62208 - DNA, 318 bp, Glycine max
  Clone ID: PAT_MRT3847_2718C.1
ggaatcaaggaagcttacctatatgaatgtagatagtacaagtaaatgattattctacaatgactacaaagaaaggtgctgccacaaatgaatgcatacactaacattacatatgcagccacattatttatacactgactaaagtcgttgggcgtgtcaagttgatctgcctgcactaacgaattgtcatgttcatgcctatttgactaaaaattagtcctacagggaacagatcgaacatttgagatttggaattcctggccaaagattgcgccaaggccgtcttcgacgccgaacctctaaggcaagtacaattat

SEQ ID NO: 62209 - DNA, 369 bp, Glycine max
  Clone ID: PAT_MRT3847_27190C.1
cttctcttctttctctagggttttaaccttagggtttcagtgttgtttcactcactctctcgctctctctctctcttccggcatagctttgccatggataggtaccagaaagtggagaggcctaagcctgagtctcccatcaatgagaacgagatccgaatcacgacgcagggcgctattcgcaactacatcacctatgccacttcgcttcttcagttaacacagtgtgaagaagatggctggtattaagagaagattatgtagtgattcagatattcatgctcttcacaaagaattggatgaagtttcatgtcctatctgcatggaccatccacataatgctgttctcctcctttgcagctctcatga

SEQ ID NO: 62210 - DNA, 341 bp, Glycine max
  Clone ID: PAT_MRT3847_27191C.1
cccacgcgtccgcgatgttcttgcgtccacgttaaatgatttaaagcaggaggccttgaactcttcttcttcgggtaagaagtttgctacaaaagaagcgaatttcacgagctcaatgaagctctacaccctggcgcagtgcacgcccgatttgtccacttctgactgcaacacgtgcttctcaagctccatcggtggctttccgaactgctgtgacggcaaacgaggtgcacgggtcctgcttcctggctgtagtgtcagatatgaactgtatcccttttacaatgtttccaccgtgtctcaccttccctctccatcttcagggaaaagcagtatctcta

SEQ ID NO: 62211 - DNA, 474 bp, Glycine max
  unsure (1)..(474): unsure at all n locations
  Clone ID: PAT_MRT3847_27192C.1
gaagaaaatcttgaagtcattaagagtgctgcgaatcttgaatttgctgaagcagttatattgggaaaccacgatgcctggtttactaaacagttctatggaaggtgagggttacatgtttggcctggaatcatcctgcgcttgtgtgtggtttcatatactgttgtgggaaaggctcacattgttagattctttcacgagacttaataagaattgctttgaaaaatgatacaatgctgggacagtaaacttacaatgtatgtgtacaatacatctttgatgttccaccacccccataaaaacatgcacaatgcgcgcacacacacacacaaagacaatcccatctgtttaatctttttgtgagtacaagttttatagtatgtcaaatgtataatttgtttgaagtttattatctgcccagtaggtgctagttgcaaatgctgatttctattccaatngtaactaacactttga

SEQ ID NO: 62212 - DNA, 148 bp, Glycine max
  Clone ID: PAT_MRT3847_27193C.1
tttcataagcaagaaaacttttatttagggggttttagatagtaatacatttccagttaatattttttcaacttacatgggtgggttaaaaggataactttgttcagatttcagttccttttattaaaggttcatttgttacaatata

SEQ ID NO: 62213 - DNA, 249 bp, Glycine max
  unsure (1)..(249): unsure at all n locations
  Clone ID: PAT_MRT3847_27194C.1
atntgtctcantcatatagttgggngtttcttaagcnagtggncgctgtaagcattgagtatngcagantattttacaannatatctcatnaagtgganttggngcaganttanatctaagctggagagaaagntttatntctgggcactgaggagtttgcagatgatgtnagnntgagcctnnngaaatggcaatgaantataatnctcccggtaatgatgttcatnatgagggcgngggatntcngc

SEQ ID NO: 62214 - DNA, 342 bp, Glycine max
  Clone ID: PAT_MRT3847_27195C.1
gttctacctatgcagacttcgagggggagatacttgggggtccggatggcggaactaatcattggaacttacgtgatggttggactcgcaccggtgggatcacaggttggtgctagactgtacgttgctaatatgtgcgactctcttgaatatgctggacaggactctgttccatcctaggacaaggaatatgatgatactggccctgtgggcccgcaagaagagtttgataaggcaatgaacgcatatggtgttgtgaagccatcggccatgcagccaagggggatagtttcattgtgcatgggacttgatgttatgcagaggccttagcctcaactggga

SEQ ID NO: 62215 - DNA, 995 bp, Glycine max
  Clone ID: PAT_MRT3847_27196C.1
tcactagtacttttggttttttgtgtcttttttgattataattacaagtatctatatccaatttatcttctacttataaataccaatacaagattaatattttcttacaacatttaacccatagagtacatgaaagtgaagttcattatttagtacaaaaccacaatctttctagtgaatcatacgtttactaggtctaaatagaaaactacacatgtaggctaaatacaaaatgtcagaccaaaggcgaaattgcagaaatataaaaacaggtataggtataaaagcaagtgcagaaatgaagataggaaccccatttgaaccatagtaataggttataaagaaggcactactgaatgctaccatcatgcttattattgagataaatagtgccaaaagtgcggatatcaactttaagggcagtgacttgagaaagtcttcctcggcatatcgagagataaggatggacaagaaaattaggattgaagccgaagatgagatcattgctatggaatctgataatgcaaatatcaagaatgttggtttccccaaataattggggcttccttctttatcgtcattgttaccacctggtacactgaatgcagcagtgaacactccctgttgtaataagagttgaaacaaccatgcaagacttagcagttctcttcatccacgactctcctttctcgagtaattcttcatgctccatggtgaatagttgacgaggaataatgccattagaatttcgtttctctatggatgatggtagcattatctttttcacctcctcaaaccatgacaactcgagcatcatttgaagagctgctccagaaactgcattaagtcgatctggtggtgcttgtcttgcagcataatgtagtaaattgttctcttgatcatcattaaaagttaatatgacctctttcattgggcctatttcatgtattaaattgaagatgctagcatgacgatgcaaaacagcaatatggatt

SEQ ID NO: 62216 - DNA, 230 bp, Glycine max
  unsure (1)..(230): unsure at all n locations
  Clone ID: PAT_MRT3847_27197C.1
cgtgttnatagttgcaagttatctgagcccagtttgtgtttcactcatacatcgtttgcagtaactacagaatctcatgctttctcgatcctcacatcaatttttctgattctgagatgcgcgccttctcttcactttcagatggatctgtctctgtagctcggaatcagactacaggagactatgctgggggcgagtttcaatttttcagatcctgtcgttgattcatt

SEQ ID NO: 62217 - DNA, 391 bp, Glycine max
  Clone ID: PAT_MRT3847_27198C.1
atgggcaaaaaagcaaatttagctggcggtgccaaataacaatgaaaatttataatgaggatttggtcaagactacaatcatagtactcaaatatatctagcatgcgggaaacttaatacatatcatagtaacaaactattatgggtggctactgttggttaaattaaactttcttgttctgccacaatgcgatctagggcactgtgagaattaccttgagcacctttgaagccctagagagcaaaagtggagatgtggccattggaaacgccattctgatgcacatgcccaatgttaacgtgatccgaagaatggtccttagcggaatgcaatgggttggtggaaaaggactctctacgagtgtaaagcttggtgatcatgccttgctcg

SEQ ID NO: 62218 - DNA, 450 bp, Glycine max
  Clone ID: PAT_MRT3847_27199C.1
ctgtctcgttttcagacgcgtgggcggacgcgtgggcggacgcgtgggcacgacgcctgggtgctgacgcgacttattgagaactgttagagtctcaaatatctgggtgatgagtgtccttgtgaataagtgaactagtatgtgatatttcattcacttaaataaagcgcattactatgtgcaatgagtgtggttaaacattataaaaataaagtaataggaatctgagtaaaaattaaacattttatgtttctttatcagtactctgtctaatttgaagtgcaagttggtgaaatcatgtattatgtgctctcactttcctattctggtatatggactttgtgggtagacatatctatttatttgttttccttcactatcttcttgaaacggaaacaatttgctgttcaaagtggtattatttgaaaaacacttcgcgcttttgagcaa

SEQ ID NO: 62219 - DNA, 1326 bp, Glycine max
  Clone ID: PAT_MRT3847_2719C.1
gctgtcacgcgagctcggacgcgtgcgcgaaggggtatagattgtgggagaaaaaccgatgcctcatcaatctccaaagagggagctatccccagatggcgtcgagtataattcacccaacaagaggccaaggaccaacacttaccaaccacaacaagaggccaaggtcaagaagaagaagaaccctttcaaaaagttcgtcacagaaaaaatagtagccgctaagacaatgggtgtaggggtttctggttcttctcccgcacatacatcgtcaagtaataatttagttccagggactacccccgaatccacgccaaaaaatgacaatcaaaaaacgtctcacgaatccaccacatcaaccgttaattcagtgggaaaatcaggagctagtgctggagaagtcaccgatgcaccagatgatccacaaactcctattcagacaactggtagtcgtcaattacaaacgacgccactctccattaagtcaagcactggtagcataccacacgttgattcacctggtaaaagtacgagactacaactgtttgaggcagagtcaggcgtcaaaatggatcttaggttgggctatggagattatgttgtgtcaatccagaagaggagcattatttcaagttcaacttatgagaatagaaaggaagacgcaaatcaattgcctcaaaaccctggcatgcagtttcttccatccgagatgctttctaacatgatagagaaggccggagagcaaatgttcgctaggtacctagaatggcttcgggatcatcatatgttaggaaagtcctctgtacccagaattgattattctgaccagtgacttccctacgttattttcttggatacaatttaagtcaataagtctggtgatttttatgttattttattttataaaaattaatttttttatctcgataattaatattaatatttattatcggctcttattgtattgattatcgagatacaattttaatttttattaaaaaaataacactaaaaacactaagtcgtgtcttatttttgttgtgttttccctatttagttgacttttgcttctgctatgtttccatgaatgctagctttggcaagaaccaagaagtatcttccttctaatcctcttctattgtatcattattactgggatagtaggttgtttctccactccctgggtggagatcgtagatgtaggttgttgttgtaataaatatgcatggtgtgttgtaccaaaaacaaagtaagatgcttctgtacgttctgttgctttaaattcattgaaataaattaaagtggggtttagttcaaaaaaaaata

SEQ ID NO: 62220 - DNA, 1595 bp, Glycine max
  Clone ID: PAT_MRT3847_271C.1
ctttgagagggttaacgggaagcttgtgaacattcttgaagggcttgagctgcacactgggattttcagtgctgctgagcagaagaggattgttaattatgtcgcctcgttgcaggaaatggggagaaagggggaattgaaagagcaaacgttttcagctccccaaaagtggatgaggggtaagggacgccaaaccatccaatttgggtgctgttacaattatgcagtggatagagatggtaacccacctggtattcttgggaatggaatggttgatcctatacctgctcttttcaaggtcattattcgacgtcttatcaagtggcatgtactccctcctacttgtgtgccagatagttgcattgttaatatctatgaagaaggggactgtatacctccacatatagataaccatgactttgttcgaccattttgcactgtatcatttcttagtgagtgcaatatagtttttggatcaaacttaaaaattgtaggccctggtgaatttgatggctcaattgctattccgttacctatgggatctgtacttgtcttgaacggaaatggagctgatgtagctaagcattgcgtgcctgcagttcctaccaaaaggatatcaatcacatttagaagaatggatgtgtccaagcggccttttgggtatgttccagaacccgatcttcaggggatccaaccattggcctatgaagttgagcaggaaaagaaatcaagtgggcacagacctagtcgtcacacaaagagacataaagacaggagaggaggtggcaggaatgatgcaatgggatctgcaactagaaatgataggttcttagagccccatgactcaaatctaaattcaccaagatctgcaactagaaatgataggttctcggagccccgtgactcaaatctaagttcacctagatctgcaactagaaatgataggttctcagagccccgtgactcgaatctaagttcatcaagatctgcaaataggtggagtaggaaacctggtagttaacagatgctgtgttattaggatccaaggttcctgtggttcacagttttctgatcgtaacaacccatgtgtggttgtgttcaagaaatcctttacatatcaagaagtttgttatggaggtattttcactttgtattctggggaagctttgcgcagcagctattttattatcagtgtattcacaagtcattgcggtgctgctgtggtaactttgtttcctgagcctctggcgctagtgtatatttgagtgtactttcgagttaataatggttgcaatttggctagaagttgtgattcgtctgttttttagtgccatgctaaaatgtggctgggctatattaggcattttgatatattttaagcttgatactctttatacagtactgatgactaaatagaaaatattcattgttgaggtaataatggttgcattgtgaggtcagcattcagcattgctagatttgctgggttgagacttgcagcagctggatcaaattacttcgaaattgcttgcttatgaaaagattggttgaagagtgctgttaaatacatcactgagatactttcgttttttgct

SEQ ID NO: 62221 - DNA, 328 bp, Glycine max
  Clone ID: PAT_MRT3847_27200C.1
aaaaaaaaatatttttgcctcctaaacaccacaatgggccaaaaaacccgaccggggggggggttttaaccaagaaaaacaatgtccccccaaacccccgcaccaaagggaacgtacctaaccccccccaagggggttatactaaaaaaaaaagggggaggcaaccaaagacggcgtagcacccaataaaaacaacgccaacaaaagaaatccgcccccaaaaatcgaacttaatgccggcaaaagacccgacggccactataaaacacaagcaacccccaaaggaaggacagaaatatcttggccggggcaccccccccaacctagc

SEQ ID NO: 62222 - DNA, 383 bp, Glycine max
  Clone ID: PAT_MRT3847_27201C.1
cggttgttgtccatcctacgaatcaaaatttaggttgaaagatcacttgtggagaatgccctcagggatcccaatgttgggaggggcgacagtagactttgggctgaaaaaccatgatcttaaaaaacgggaaactccaatggaggggatccaaactagggggcccaaaataattccccaccacttaaaatgacccccgcgtggcccaaaccgtgggctgccacatggttccccccaaatacagcccaacacaaattagtgattggcccgaagcccctgcccccaaagagaaaccgcctgggaggttaacaggcagtctttcatcgggggatttttttgcccgggataagcgccccccggaaacaacccccacctgtacaaaa

SEQ ID NO: 62223 - DNA, 297 bp, Glycine max
  Clone ID: PAT_MRT3847_27202C.1
gctatgcgtctgatatgatagggcgaattcataggttgcagatcattatgaccggaagcatggtcattcgtgtcttgcttccaataatatttcagattatgtgtactatagtgtgtacgatatagtcatgggaaagactatatgtctaatgagctggacaccgacttcgacagtcatggtttatatgatgcttaccttattcggtgtacactatagtatttgatataagactccacttaaaatggaaatttctcatgttactttgtcaagtctatgaatgattaggagtttaaggtg

SEQ ID NO: 62224 - DNA, 488 bp, Glycine max
  Clone ID: PAT_MRT3847_27203C.1
gcactcctgatcttctcgtgaatgtttttacttttttgttctaactctacccttttacaataataacagggtttggctggaatgaatatttacactcacaaattacaagcccgtttataatttgttcaattttatttataactacttttttttgaacgtcaaaatcctttctttcttttttttccatcgaccaatttactgatttgatcgatggactaaaaatgctggttacaaaatgcatcgcttcattcttataattagataaatcttttttattgggcgacaattattctatcttgccaaatttaaatggaataaatggcacttcgaaaaattgcttttttttcattaggctaagaatactttggacaattcttttaaaaatccttgccataaaactttgactaacccttggggctttttttataaacataactagaaacactttaaattttgcactcaaaacttttagaactcaaaaagcgaaa

SEQ ID NO: 62225 - DNA, 401 bp, Glycine max
  Clone ID: PAT_MRT3847_27204C.1
caggtgctgagtatatggctgcgacatacacatccattgataatttagaaagatccacagaatctattgctccagttctagaacccgatcccaatgatgtggtttccacaccaattttatctactctgcaaaccgatgagcctgatcctgatgatcaagagtttcagaggataaatgacaccacgactgctgtttgtaaccgtttgtctgaggctctggaaatgctaagaagtgaagttagtgcaatgcaagctacttcaatcctccaaactctcctaaaaataatcatgaatgtgattgaacaccctgaggtggaaaaatacaagagattactgaaggctaatccagtcattgagaggaatattgttaataataaagctgcctttggaaattctaatttt

SEQ ID NO: 62226 - DNA, 530 bp, Glycine max
  Clone ID: PAT_MRT3847_27205C.1
caattgttactattaagctccgttgtttcctgaaactcctccaacagaagcaacaaagccagcaaagaaaaaccaaaacctcctttccttaaaaccaatccatccaaatttcgttactatcttcgcttccaccaacccccaataacaaaattaaagcccaaacccacattaaccctcaatttcccaaaccgatcgtgctctctcgtgagagcatggtctccgctgaaaaaccaatgccagaaaccgaacacgcggcggcggagaacaacaccaacaccgccctgtttggaaaatacgaggtcggaaggctcctaggatgcggcgcgttcgcgaaggtttaccacgcgcgcaacaccgagactggccatagcgttgccgttaaagtcataagcaaaaaaaagctgaactcgtcaggtttaacctccaacgtgaaacgcgagatttccatcatgagccgtctgcaccaccccaacatcgtgaaactccatgaagtgctggcgacaaaaacaaagatctacttcatcttggaa

SEQ ID NO: 62227 - DNA, 1067 bp, Glycine max
  Clone ID: PAT_MRT3847_27206C.1
cccacgcgtccgctcaatcaccccctcgcactcgctcttcccttcctctggtggcgacaatgtcgactcctgctaggaagaggctgatgagagacttcagaaggctgcaccaggactttttaaacaaaacaacacttcatgaattccttttattgaagaaaagtatttacattcaacaaaatacaaatgaatgtcatcttgaattgcacaatgaaataactcgaatgttacaccgatagtataccatgtttctgtttgtacttaagtgtagttctttttccttcccccgatatttccatgtgttcaattatatctatatgacagttactaaaaatacaaaatgtcaaactttactagcccaaatatcatacaatggacatcttacgatacaacaacgtacaattttgctttgcctttcagaactgttttctgggctagcaagttaagcttgtgcttgattcaagggttgccttagcaagccacaataagccaggatcattccgtttcaacaccaagtaagcattttcctttccaagattgtcaaacataacatcttcgctgaagccaaccaaaaatagaatttccaaggcagctttattatttacaatattcctctcaatgactggattagccttccgtaatctcttgtatttttccacctcagggtgttcaatcacattcctgattatttttaggagagtttggaggattgaagtagcttgcattgcatatgtcagttaatgtaaaatagaattatgcgtgtcaatttactttggattgttgtcaaacattcaacaaagaagttgtagtttgctgaatgtaaatacttttcttcaataaaaggatttcctgtgcatcagacaaacggttacaaacagcagtcgtggtgtcatttatcctctgaaactcttgatcatcaggatcaggatcataggtttgcagagtagataaaattggtgtgaaaaaaaaataattgggatcgggttctagaactgccccaatagcttatgtggatctttataaattatcaatggatgtgtatgtagcagccatataatcagaaaatg

SEQ ID NO: 62228 - DNA, 284 bp, Glycine max
  Clone ID: PAT_MRT3847_27207C.1
acgcctacgaggttggtttattttgtttatctccagagagcacgaggcagtaattagttacatcatattcgaaacggacatatttcatagggaatcaatggtcaataacgttcatgattactccagcttgtcggactctagctatttaggggacgcctgcatcttctgcacagctgactgactaatggtgaactaaaacccacgattcgccccaggcatccaggttctcgggggacggccagagacttctatgccttcacgctgagggttaccatctttgcata

SEQ ID NO: 62229 - DNA, 293 bp, Glycine max
  Clone ID: PAT_MRT3847_27208C.1
tggttggcctgaggacaacaacaggagcagcaacaggaagagcaacctttggaagtgcggaaatatagagccgaattgtctgaacaagatatatttgtaatcccagcaggttatccagttggggtcaacgctacctcaaatctgaatttctttgcttttgggattaggggcgagaacaaccacaggaacctcctcgccggttcgcaagacaatggggtaagccacataactagtcaagtgccggagcctgccttccctgggtctggacaagctggtgagaaacttttaaagaa

SEQ ID NO: 62230 - DNA, 959 bp, Glycine max
  Clone ID: PAT_MRT3847_27209C.1
gagactcaaaatacatttttattttatttccttaattaggtagtagctaatgacacgtttactaaaatggatttcaatgtcaggttcaatagaggaaccaagggggaaacaatggtacattgagaaactttttcttattaaagagtaagagtgggtcgtgaatatatttttcagggagtacaattgagagcgactacactttaacctatagcaatggaacaacagagtgggttgccacatttgaggaatttggtcgcaagtgacaaccctgatgtcatgataattatggaggattttttactctatttacaacaaaaaataataacgatgaacgaattgcacagagtaaaaagaatgatttgtgtaggtggaatgccaaaaccgaaatgatcaatcatataatcacacaaacaaaactgtataatttgcttccatgtttatatccctgcctccggccacaactttgcggtggcgcctagaacctggtcttcgatctcttccgcgccttccaggacctctcctaacaaccttttccggcaaagtttcaacaggaggtggaggactgagagcaatagccactggagcaaccaggcgctccaatatatccctatggtatttctgaactacaaagttgcgtctttcacaatccaagaacatgagaaaatgaaaatccaccctggacaaaagtttgtccctgacagttgagaaactaatctggtccctagaagtgaatcggtcaacttcattgaaccaaagacatgtaaaaagatcactaatgggaacatgctctcgtactattacacatccttcaggaacatcacttataagaggaagtttggcctctgtatatggagtcagtccttcattcttgtaaaactcaatctgaaagtcaatagaggcattctcatactttccagcagctttatttgcttcggcctcaacaaatacatcaaagcgtc

SEQ ID NO: 62231 - DNA, 713 bp, Glycine max
  Clone ID: PAT_MRT3847_2720C.1
cctcgcgcccttcccccccttcgttttccccttctctctcttctcgctttctttcttcccaccttttctctgtttcttcttcttcttccattagttcctgctgaaagtcctaacacaacaccacccttcttcatcttcttatgtttttgacttgtggccaccactgtgacccatttctgtatcttctggcaaggttctatccgtttcttcttttggatcacccttttcactgttcgactccttcttgctatctgcttcgtcaatctgattattcatgggtgaaaagctaatttgttcacttgaataggtgtacagtgctaaagggttaagtttgaaacctagcctgctagttgcatcatcaggtcaaatccataactttctgggaatcaaacgatgatgatgtttgaagatatgggtttttgtggggatttggatatgttttctgctccccttggagaaggggacattaccacccggcaaactgagccagaggtgatagttgaggatgattatagtgatgaagaaattgatgtagacgagctcgagaggaggatgtggagggacaaaatgcgtctgaagcgattgaaggagcaaagtaaacctaaggaaggaattgatgctgtgaagcagaggcagtcccaagaacaagcaaggaggaaaaagatgtcaagggctcaagatggaatctttgagtacctgctgaagatgatgga

SEQ ID NO: 62232 - DNA, 240 bp, Glycine max
  Clone ID: PAT_MRT3847_27210C.1
cttgacatttgggctgttttttaacgaaggcaatgctgggaacctaagagattgcctcattatagacccagagaacatgagcctaaagctgaaggcagctgaagctaggcaactaggttgttacaagcacgcggtgcttaatggatcacagacgtctaggaactagtgcattcagaagcgcagatgagtcaacggtgtaatatgcgaagaacattaaatcatctatattccagaacgaaa

SEQ ID NO: 62233 - DNA, 361 bp, Glycine max
  Clone ID: PAT_MRT3847_27211C.1
gaaaaaatcccatattactggaccaaaatgaattgaaaaaaaaaacacacacacacacacataaaggaaagacacgtgtcaacagtatgtaccacacgcgaagagaggagatgtgatttttgttcactggcattgtttctaatctgtgtgtcgtgaggcaacaacaactatctctcatccttcttctttctgtatccgtaacacttgcaacacacatggctacaataaccaacacttttatattcaaaccccccatttttcatcacccaaagcagttttttttttccaaccgttcttttctacgctttctcaccaaatttaaaaccccctccggagcaaattttcggcggttgtttccaaa

SEQ ID NO: 62234 - DNA, 267 bp, Glycine max
  Clone ID: PAT_MRT3847_27212C.1
cccacgcgtccgggagggttccgagaagtttaagaagagcaatgaagcaatgagtggcgaagaaaaaaaagaggatccaatggagcatgaaatggaatcactcacccctgccaccgtcttttgcattaggctcaagcaacccaagtccaatttgctctacaaaatgagtgtccctgaaatttgtcgcaatttcagtgctgtttcctggtgtggaaaactgaatgctatagcttgtgcttctgaaacgtgtgcaaggattccaagctc

SEQ ID NO: 62235 - DNA, 881 bp, Glycine max
  unsure (1)..(881): unsure at all n locations
  Clone ID: PAT_MRT3847_27213C.1
tacggctgcgagaagacgacagaagggcaactgtgttaggttttttaatcaatgttgttgccttttttatcatttctggttgtggctttaatactttgatatacatagtccttgtaagtttcttgaataattcgttttcataattctcataaagattcttctttaggaaccatctgggaagtttgtgaatgggttaaaaaaagtttatcaaagctaaaattgtacgcttctaaatctaacattgtatttcctaacaaacacatgtaaggtaaggaatcctatttattttttatgaaccaatttgtgtttgaaatttaaatgacactattattctttaaataaaaaagtttgtctaacctaataacattggccaatttcaccccattagcccaagtagcatgaataataagaaaaaaaatgaagattattgatataattctataattaatttacatgtaagccaaagtggctcacacccattgcaagaatatgaaggattaatatcttcttcatggttagattctggaagtatattaaacattttcatttggtgagacatacctcgtaattatgattttctcattttcaataagaattctgaaaaccatcatgaactaccgtattattttccatgaactaacaattctcaagaagacacgaatcacattaatgaaaattaaattgattagaaagagaagaaatgattagttgaagagattcatttaatacagttaattgaagaacacaagccgacacataactcttcacccaacaaaaaaaataccatcagcaaataaaaaaaaaaaaaagaaaaaaaaagaaaacgggcgggccgctnctagagggcatnccaaggcttacggtacggcggtgcagtgcga

SEQ ID NO: 62236 - DNA, 355 bp, Glycine max
  Clone ID: PAT_MRT3847_27214C.1
gggagaagaatttgcatagagcaagcaaagcgggggagaatgagaggcagcatacacgaacaatggctacgtctctctctgtttcgccatctctctctctctcaagactctcttcatcgccaaagcgcttccactatctcgcccctcctttctctctctccctctcaccaactccctactctctctctccacgcgccgccgcaccttcatcgtccgcgccaaatctcatcacggctccgagcccgttcccgcccactacgacttcgatctcttcaccatctgcgcaggcagcggcggtgtccgatccgctcacttcgacgctaactacggcacttctgtcgccatctgcgatctt

SEQ ID NO: 62237 - DNA, 653 bp, Glycine max
  unsure (1)..(653): unsure at all n locations
  Clone ID: PAT_MRT3847_27215C.1
gctcactctcaacaagatagcacatctgtctatatataggtagttacacagttgttagcatctcaactaactctaacaaactaacagaaaataaacagttaagctaactccaactaactgcatacttaactgactgcacatttatctctaatacccccctcaaactcaagggggatgatttccatattggaactcagccacagtgaatttgtcttaaaaacataaacctagaaggtgccaaaggctttgtcgaagcatctacccattgatcaatagctggaatgtggcaaaccagaagttgctttgctagaactctctcaggaacagagaacacatcaatttccatatgcttagttcgagaatgaaccactggattgtgagataaggaaacaacactttcattatcacagaaaataattcgtgtaggaaaggaaacattcaactctgtcaaaagagtttgaatccaagacacttctgcagtagcttgtgctaaactcctatactcagcttctgtacttgaccttgctactatttgctgctttttggaccaccaagagactaagtttgtagcanaataaatggctgcacctgatgtggatatgcgatcttctggatctgaagcccaatcagcatcacataggcctttaatagga

SEQ ID NO: 62238 - DNA, 280 bp, Glycine max
  Clone ID: PAT_MRT3847_27216C.1
gcagattgctttgtgttttcagcacttttttgtttttatcacagaatcacttgcatatggttagtatgtttatattttaaattaaatgtgaaattatctttatagtatccacaagctttcagctcaattataaggagattcccccaaaaaaagaaagacaaaatcacttgcgtgtttggttttgccttaccttacgtgcataaaaagcataaaaaaatggggcacggatcctctttctgcataaacgtgagaatctgacgtgtgtaacctttgaagtgac

SEQ ID NO: 62239 - DNA, 364 bp, Glycine max
  unsure (1)..(364): unsure at all n locations
  Clone ID: PAT_MRT3847_27217C.1
gcgcgtgcgtacagctgtgagaagacgacagaaagggatacagcaggtgaagtgtgagctcctataccaatcctcatatgaaccgtacaatccgaaacggtgcaatggtgcttaccactccgagtgtcaactaggcgacaggtgtcctccgtcaaagagggatanaaacccngccatgattctgagacaaaaagactccacaagtgcggggtgtcaggggacaattcttataaaatatattccctttcttctctgatctacgataagcaccccacggtcgaactcctgagagacatgaccgaaaattgcgttgacaacttttggatggggatcgagtgcccctccacccacaatgaccgtggat

SEQ ID NO: 62240 - DNA, 444 bp, Glycine max
  Clone ID: PAT_MRT3847_27218C.1
ggggggaccccaaacccggctttttttgatggaaaaggggaacgggccctggggggaaaccgcaaaatttttttttaagggacaaaggtccccccccaaaattccccaaatccggggggcccccccccggcccttaaaaaacaaggggcccaaggggggcccttaaaagggtcccccccaaaagaaaaaagggggtctcccccgccaaaggggaaaactatggggggggtacaaaaaagggggggccctccccccgggagggggccccccaaaattcccccctaatagcggggaccgggggaaacttattttggggggttccaaggcccagaaatccccccaccgggggaggggggaaaactccctggggggaaaaaacccggggcttggccaagcgcctttagggcaattgggaaaatgggcaaaaggccggggccccagggg

SEQ ID NO: 62241 - DNA, 434 bp, Glycine max
  Clone ID: PAT_MRT3847_27219C.1
aataaaatatgcatatgcaactgaatttatataagccttgtaatcacaattaatttccttagaaaactaaaaatagatagtaatgtaaaaaaaaggaaagaaagaaaaacaaataaataactattaaaactatactgcggttgtagtaacattagctgtggcagttgtttgtagaagctaaactagcactagaaccaacttcaccaccaataatggtatcaccactgtcaccaccgccactcgtagcagcaactgcactactactaccaccaccacttcttaccgcggataccggcatggtggtcctctttcgcttcttcttcttataagggatcccttttgttttagcctgaccttctcttaccttcctgaggcaagtcctgccggccctggcgccgaatgggttggacttacgactttatccctttatttct

SEQ ID NO: 62242 - DNA, 249 bp, Glycine max
  Clone ID: PAT_MRT3847_2721C.1
gccatctacgtggcgactggctgtgaggtggatttgtatcccagtctcggtctatgctggtagctgaagtgcgggttcacagcttcagtgttttctatattcagtaggtgggccaagttgtgcctcctggtgtcgctgctttctacgcaggttactctcctgtgctgccgcttctccagggtttggttgtgaggcgcttggtggtgggtcgcccttctcaactggggtgctggcacctgcggctggtct

SEQ ID NO: 62243 - DNA, 529 bp, Glycine max
  Clone ID: PAT_MRT3847_27220C.1
taacggccgccctttttttttttttttttttttttttttttttttttttttttttttttttaccggaaaaacctttctttggaaatggagggcccaccaccttggggggaccaaaaaataataaaccggggctctttttaagtcccaaaaaacccccggaaccaacctagttctatcagcccggggcaaggaaacaaaatttccccctactttcacattacctccctattaggcagttaaaaagggaaaacccaatggccctcaaaattaaaggcctgggcgggcggaaaaccaacgcacaaccccaaactataaactcaaaaaaaggggggttaaccaaaaattccccttcccaaagggagggggaacccaatccttctctcacacaggatgggggtcaaaggaggggggccccccaaaccccagtccaaaacccaaaccgggaaattattcattcggcaggagaacaggcctcttctttactataagtggaagcacacagggccttccaaacataggccaacttttt

SEQ ID NO: 62244 - DNA, 819 bp, Glycine max
  unsure (1)..(819): unsure at all n locations
  Clone ID: PAT_MRT3847_27221C.1
cttgcatgcctgcaggagaattttatttttcaantcattgaagaacaccaacaattgaaagatatactttcatctccctggagaacaatctattctatttggtgattttgagaatatggattcattgttttctaagccaactgttaagtaacaaactgtatagtgacactagaaatcttacacacatagtttgtctcaaaatttgtttacgcaccttccaaaaagatgctgacaaccaagaaaacaaggttccacgatgagctcttttatttgaggatgatgctctctattgccaagggaccttttagctttgaggatactaaaactattgttggaacactttatctacttttcgagatgcatgctttgcaatgagatttttgcatcaagataaagaatacattgatgttgtcaaagaagctagcaattggggatcaagctattatttaaggaagctaattgttacaatgcttatctctattaacataaataggaccgagcatgtgtgggagcaaaacatgagagtatttagtatttagtggatgatattttgcatgagcagagacaactctctaacatacattgtgattattatttatttgtttgtataaatatgtcacttcacaaaataaatattctattgaaacccatgtcatatccaaccagatttgttacacctaccattggaaacaaaattgatatgggcagaaagagattgtaacaaagatcaattgaacactgagtttgaatctttgtttgcttctttaaatgatatgctacaccatttttattaaatacatattttatttaaaacatcta

SEQ ID NO: 62245 - DNA, 295 bp, Glycine max
  Clone ID: PAT_MRT3847_27222C.1
gtggaaaggaataactggagccatctcttacagtaatataattgctctacaaacaatcccacgcgagaacttcattgaacaggagagcagaactacttattctccattacaggacacgaaaggagtactaagtttattttgaggaaccatgcatctgtacttataaaggcctttataaatggaacccttaactttataggttgagatagacactcacactcttatgggctgggaaatgggttgccaattggaaatggaggtggaagtggttctttgaaattggggggaagtggtt

SEQ ID NO: 62246 - DNA, 217 bp, Glycine max
  Clone ID: PAT_MRT3847_27223C.1
gatgggacagatgatcattaggaccaagagaaacaaatggcagcacgtgggtgcgcgtttaccgacatcaccgcgtgcacagaacagcatcgatatcgaaaatctacctcgctttgatgctgatgaacacaacatactagagagtgctgactttgcgtttgggagggtgattatagccaacaaacaaatggtgttctggcacctcgtgctatatcac

SEQ ID NO: 62247 - DNA, 261 bp, Glycine max
  Clone ID: PAT_MRT3847_27224C.1
cagcattctccacagtttgtatactgtaggatttattggtattcgtgaggcaaacatctcatcctaatcatgtgacttgacagactactctagaatgaaggtcgtgataattcgatactacaattagcacatagcatccagcgtacgctaatccctctcagatgacactggcatagtgccgtatccggaggtgaatgcgcagttggagcttctgtgaacacacactctttggcttgagacattctgaaagtgcgtgagcac

SEQ ID NO: 62248 - DNA, 256 bp, Glycine max
  Clone ID: PAT_MRT3847_27225C.1
caaaaagatagaatcccaggcgaggagtcagatggaggggaaagagcaggatgactcgttgggagcgaacaagttccccgagatacagccgattgggacggcagcgcagagtcaagacgacggcaaggactaccaggagacggcgccggcgccgctggttgacaccgacggagtttaacgtcatggtcgtgttacagaccagggatagcagagtttgtggccacttttcatgctctctacatcgaccgtcttaacc

SEQ ID NO: 62249 - DNA, 333 bp, Glycine max
  Clone ID: PAT_MRT3847_27226C.1
ggaatccacacaatactttcgcgttcaataagcggatgggaaaactgactttacatcagggcgctatctggacagatacaagagtgcctatttgtatatgcagaggagcttacgcatacactgctcttatcatgaatacaccaaatgctgttctttgaatgttaaaatgtcaaattgctgatatcgtttataaaggtactaataaccattctacgctacataatactacgagaaactttataaatagcatttgtatagcagtctgttaacaccatccaatcagaggtttaatcccacatgaatgctctgccacacatagaatgaggcaaatgg

SEQ ID NO: 62250 - DNA, 525 bp, Glycine max
  Clone ID: PAT_MRT3847_27227C.1
tagagaaattatttaacttaaacgttgcccaactgcattccattccttgaaattattccactgaaatgtgccgcaggacccattggcgggactgcccacgttggcatgtcctgccagtgccaatggcgggtctctctcctctctccctgcctttatcagacctcgtcccactgctgccaatggcggcatcgccattcctgccattgccagtggcgttacaagcttcacgccagtaacaatggcggcacccacgtaaataacagaccccccttgcaatttgttttaaaacagaccctatttggtaaattgtttttaaaacaacccccctacagtaaatttgccgtcacttcacttataatactcaatcattcacgaattattttgcaaattagagggttcaaaacaaacaacataatcaaacaatttagacatagaagaaacaaaataacataagtcacaacaggaacgacaaataactatagtgaaaacatcacatcaactaggcataaaaaagacaattttata

SEQ ID NO: 62251 - DNA, 188 bp, Glycine max
  unsure (1)..(188): unsure at all n locations
  Clone ID: PAT_MRT3847_27228C.1
acgcatncgtccggacgggtgaagacaacagaacgggaggggaccctgagcaacacaaaacagattcactaagagtaatttcccttattttaatcatttattctttgctgctaatggctaacacatagtacccagtaaagggcatcccatttattcggagtaatcccaataattggccgatggcgagc

SEQ ID NO: 62252 - DNA, 274 bp, Glycine max
  Clone ID: PAT_MRT3847_27229C.1
acttaagggtctcttttggtctatgatttttttactgcttttcctttttttgaaactcatacgggagatgtttcatcttatactcctactaatggaattccactacagatggtcccatatcctcatctgacgatctgttcaatgctgccatcaaacccgctatcacagaaagtgcctgcatttgcacaaacggcacggcggcccagattacccccatgacccaagttgctggtcaaccaaaaaagggaccaccacaattcgcagaattaaaagc

SEQ ID NO: 62253 - DNA, 403 bp, Glycine max
  Clone ID: PAT_MRT3847_2722C.1
aacaaaaaaaaaaggcccctggagggggtttggggccaaagaatttaaaagttaaaaactggcccggggtttaaaaattgggaaaaaaaacaaaccacttggggcctactaatggggaaaaaaaacattttgttttggcggaaaacccaaatgaagggccccgggggggggctcatgccccttttttgggaaacccaaaataaagactggccacaactttcccaatattgaaaaggggttttaagggggggggatattttggataagtctggggaacattcaatatgacaggggctccccctccttgatccaatggcccaaggaactttttggccaaaaaaatttggaacaacttttggtccccgggaacaaaagggagtttaatttgttcaccaaggggggc

SEQ ID NO: 62254 - DNA, 589 bp, Glycine max
  unsure (1)..(589): unsure at all n locations
  Clone ID: PAT_MRT3847_27230C.1
attgttacactctttaacttccttcagtttctatttcccaaccaatcaatcaatcaaagtctctcaatattcctctttgtattttttttcccttttctccctttccattttccggtagcagttcgaatcgcttagcatttgcgctgctccaccgtgaaagaaaaaaacaaaacacacattaccaagagagagaagagagaagaaatcacagcattattatcttatcgtaactaattagtttaattagttaattaattggttataagttgtaaggccatgtttggcgaaaccgctccacgtccaaagttcgtgcaatcggagccgagaatgtcggcaacggaggtgctcaccgacgacgagttcgcgatgcgacgcagcagcacggtgtcgccgatgagctcttactgctccgagcccggaaggttaagcggcgaaggctcacccatgatgatgtcgccgtggaaccagacaacgaattcctcattctcgaaacctcattggtctcaagagcataacagcaccttgcatgtagcccacgnatgaacttctattcgacaagagggacacagcntgtccctcgctgcctccg

SEQ ID NO: 62255 - DNA, 185 bp, Glycine max
  Clone ID: PAT_MRT3847_27231C.1
tcagaagtactggagtgatccttgttgtgtgtacggaatgtcgcacagcgattccataccccttcatccatcttcccaatccgacatttaccagatcgagaacctcatcaatgccagcgttcaccagtcagtcccttcggcgagacctcccattcgcccacgcgcctccatccccgtctccgtct

SEQ ID NO: 62256 - DNA, 797 bp, Glycine max
  Clone ID: PAT_MRT3847_27232C.1
caagcttgctgcctgcagcatgttgtttacatttttaactattttttccatctatatttagttaaatactatgtgaggtgtcaaaataaaaggatgtaattggttgtgtatgcacatgtataaatattaatctctaaaacgatttattagtggatgtttagttttatcttttaaaaatttaatttatttttttatttttttattcggtctaattttttatcttttaaaaagttaactaataaaaattaaatcaaaccaaaaaataaaataaaagattacattaaacttaaaaataaaaaataaaactaaaataaatgaccaaatacatgattttgtcgatcttaaacaacagtaatgaaattaaccggtaactaccagttgtgtggaaattaatacggcgtcgtactatagacatgacgtatggtgattctccgtgcccgcgcgcgcactataacttgaataacaacccaatcataaggcgagcacgccttcttaacgtgcgcaccccctacccccctgctcaccccaaaccctatttaaacctacatccacgattcacgaacgactttgtcctttctctctctaactttccctctttctctctcttcttccgaacacaacacgacgttacgaagaaaagtcgcttcacgaaccttctcagaaacctccgcagattcttcacgaacccgcgcttcacgcctccctctctccctttttggaatgggattgaaaacctcatcgctcttcgatttcgagatttgccaccggaggttttgcttttgtggcgacgccttctg

SEQ ID NO: 62257 - DNA, 430 bp, Glycine max
  Clone ID: PAT_MRT3847_27233C.1
gactgtataagatgaattcatatgatataattcatttagcctatcgtcgaaaacttgcaacaacgatagcaaatatccaacacaagattattttaattgatatttatatgaaatacatagtaataagggagtcaaaattcttttcaggggattaaaacagaaacgagtaaataaaagggaggtgggttgattacatacaacaacagtgggtgattgactaaagatagtcgaattcatcttccttgaggtgggcaaaaaacttgacaggaccacgagctgggatgtcggtgagaaactgaaccttgtaaggaagattggcggagattcgcttaccgttccagaggccaacatactgcttgatctcgccttccagacccgtgaggtcaagctcggctactttggaggacgtggtacacctttacacccgcct

SEQ ID NO: 62258 - DNA, 239 bp, Glycine max
  Clone ID: PAT_MRT3847_27234C.1
ggtccggattccgggtcgacccacgcgtccgaagattggatgccaacaatctcgataaaacgcactgttcatgccaatacacaagggtgacatgaagaaaaatatcaaaatttcccggttttgataccattttattactgacatgacgaaaaagaagcgaagtggactttcccttgaacgaacgattcttcctttgttgagatagagtcgacaaactaagctaagcgttttgacatttt

SEQ ID NO: 62259 - DNA, 2006 bp, Glycine max
  unsure (1)..(2006): unsure at all n locations
  Clone ID: PAT_MRT3847_27235C.1
agatgtaagtgtgggtttttctgggtgtactagaaaaggcagttttggtttctggccatatctaatatctttagtttctttgttggggatccatcctttgttctgcaatctgcacgggtgcagttgggtaagctgcgaaaacgtggctgaatgcctctctcagccccacccaaagccctcaattccccaatccatcatccccatggaccctccttcttcccttccatttccaaaccaaaacaaaaacccattgggttaacccttttgcctctgaatcgcgcattcagaggcctcgaaatctccgtccctagcccctcctcgctccattcaaacgttgccaaacacgtcgacgttgccactctgagcaacctctgcgtcgacatcgttctcaatgtcccccagttgccccctccttcccctcttcaacgcaaggccttcatggaccgcttggcccaatctcctcctgacaagaaatattgggaagcaggtggaaactgcaatatggctatagcagctgcaaggttaggactcaactgcatatcaattggtcatgtgggtaatgaaatctatgggaaatttctgtcagatgtgcttcatgatgagggcattggtttggttgggatgattactaatgacgatatcgtcaacagttctggtagtagtgcctcttgtgaaactcttttatgttgggttcttcctgatcctttacaaagacatggtttttgcagtcgggctgatttttgcgaggagcctatattgcattggatgagtaaattgtccagtgaagttaaaatggctattaaaaattcaaaggtcttgctctgtaatggatatggatttgatgagctctctcctggtgcaatactcgaaggactggaaagagtctctccactgggaccccagatgaacaaagagctcttaatcagttactgagaataagagctcttaaccagttactgagaatgagtgatgttcttcttctaacttctgaggaggctgaggaattaaccggcataaacgatccaatattagcagggcaggagtttctcaaaagagggattcgcacaaaatgggtgattgtaaaaatgggttctaagggttcaattcttataacagcatcgagtgtagcttgtgcacctgcattcaaggtgaatgttattgacactgttggatgtggagacagttttgttgctgctattgtctatggttttatacataatatgccactggttaatacattggcaattgcaaatgcagtgggtgctgcaacagccatgggctgtggtgctggtaggaatgtagcaacactggagaatgtagtacatatattaagatcatcaaacctcagcgaagatgatgaattttggattgaaatacttgaaaagaatgtggttgctcaggaaataacatacctgtcaaatgttatgaacggaaacaaaaaccgtctcaaccttgtctcatttgacaaggttgcctctgagctcttgcctaagcttgaacttccacaaacagtggggaatgcgccaacttgataggttgtggaaaaatagattgaagtgcattcatgcgaaagaacacttctgattcttgggttcttggctttatcctgtaaaagtaaaaatttaagcattaagactgcagagttttatctctcttgggttacataaattgccgtagctaaattgctttgagcaagtacatgaaaggtagctagcttctcatcaagcactttaactgatttttggcatttcagtctcaacaggattcctttgattttgatgtcaaaggtatttttactccctgaaccagtggagcagagctcttatcctctgagatcccaatgtttttgcatcattttttgcatgaatgcttctcaaacagtgtatgtaatagtcttcatcttatcatagttgattgttgacgcagacagggaaagattgtttgtatgacttaaaatatttgattagggattactctacaatagtttgtctacnaaagggcggccg

SEQ ID NO: 62260 - DNA, 271 bp, Glycine max
  Clone ID: PAT_MRT3847_27236C.1
cagcgagtgagtgagcgaaccaggtagggtattcggtgttcccctcggctgtgttcgcacgcgacgatggggaccatccccgatccaggcgaattgagcgagttgagtcaacgagcttcgacgagttccagctccaaacctcactcatgaacagctgcaccctcctctggaaggagctgtccgagcacttctagtcgctcgagcaagacgtctaccacaaatgcgaagggctcaagcgctagattcacaccctggacaactccacctcgga

SEQ ID NO: 62261 - DNA, 570 bp, Glycine max
  Clone ID: PAT_MRT3847_27237C.1
aaaaaaacccattcttttattataattataacacaaaaaaagcttggggggaataaacattgaccctcagggatcaatctgcaacaaccaggaattacaaccttgaagggaaaacatcctcgaaaaaaaattttttaaagagttgcatatgggatatcgggaaatacatgaggacaatgacagaaccatcatttttgggaccttgaaaaaaaatccccctggcaaacggacacacatatcccaaaacaaaaggctcaggctttccccagccaaaatttgtttcatacaggggaatgtttatccacctcgggatttgaagggtagggttccctgcaaaaggggcattcctaccctctccttggctcgaaaacaaagcctttatggactccaattgctcctcacccaacgcaatatctaactgggaacttatatattcttccttgagcatttcaaccgcttttttaattttccgggcgggaaaactaaacggtttcgaggggatttctccagaaaaacattctgggggcactggccccgccaatgcattcccaaaataatttctcgggagag

SEQ ID NO: 62262 - DNA, 628 bp, Glycine max
  Clone ID: PAT_MRT3847_27238C.1
aaattatgcactgctgttgtcgaaaataatatcacaggcaatttggagtgagcaaatgagcctgttttccaaaaattcattgaccttttccgtttgtatgacagtgttggaatctataccattaactatgttggtcgtctaaaaaaaaaaaaaaaaaaaaaaaaaaaaaaaaaaaaaaaaaaaaaaaaaaaaaaaaaaaaaaaaaaaaaaaaaaaaaaaaaaaaaaaaaaacaaacacaaaaaaaaaaaaaaaaaaaaaaaaaaaaaaaaaaaaaaaaaaaaaaaaaaaaaaaaaaaaaaaaaaaagggggggcccttttaaagggtcaaatttttaaaaccccgggcctgcacctattttttttttttttggggccccaaaatttattccccggggcggaatttaacaaccgtgggggggggaaaaccccgggggtcccccatttaaacgcgttggggaaaatcccctttttcatgggggggaataaaaaaaaaaagggcccaacaatattccctttccaaaataagggcccaccctaaaggggaaataggccccccccttttgagcgggcttataaccccgggggggggggtggttccccccccctggccaacctttttttttttg

SEQ ID NO: 62263 - DNA, 241 bp, Glycine max
  Clone ID: PAT_MRT3847_27239C.1
acgcgtccaacggaagccaaaagacggactaatgggattatatttgagttcatatatctcaaagccatgaccaactctaaagtctctaatggtcactccgtcaccctacccatcattttggtggggctgaccatggcatactccaccgataacgtctctttcaacttcaactggttcaatacattctaatcatacatttagctccataaataagcagtatcccatccactagggtattaca

SEQ ID NO: 62264 - DNA, 346 bp, Glycine max
  Clone ID: PAT_MRT3847_2723C.1
cctatatccatgttgcaggttcaattgtatttcaaaatgaggaatactatggcagcctgcccaattagggattgagggcacactcatgtacaaaggttagcaacatcatctctgtagacttgcctgtttacacaggcttcacttatgccacaacagagtttgctacttaacgaagcgaatggatacttgttcagcacgtccatcaattgtttacgaacgggttgaccgaacatacaaatcgtttatcaactgatgtttacattggaggcgactcatactctggcattactattccagagattgaccatgaaatttctcttggaaatgaaaaaaggctccatccatg

SEQ ID NO: 62265 - DNA, 276 bp, Glycine max
  Clone ID: PAT_MRT3847_27240C.1
ttcttcttaacattttctctaatacgtttttttttcattttgttctaacacaataaagtccagttaaaatttctttcatcccttgataataatatcacacatcttatcacatcatcttttatcacctttatatacacatttttctcacatctttattattttttactttattaatactatacttataatcacaaaacatataacttcatcccaatgatattcattccatactctctaatcacacaaatttcactatcaattcctatccctttaatt

SEQ ID NO: 62266 - DNA, 708 bp, Glycine max
  Clone ID: PAT_MRT3847_27241C.1
ttgtagggttagagtaccattttcatcattccgcccagtgaaaccagatgatccagtgttagatccttttcttgtgcatactttgaccatacgctttgagcctagaagacagaggcctgttgaaggaaatgcaacaatgaaacaggatttaagaagctttaagcttatattggaatatattaaagccttgcctactgggcaagaaaccgattttgtattagtttcatgttctggactaggaattgagccttccaggcgggagcaggttcttaaagccaagagggctggtgaagattccttaagaagatctggccttggatacacaatagtccgtcctggtccattgcaggaagaacctggagggcagcgtgctctaatatttgatcaaggaaacagaatatcacaggtatgttacgagtatattgctgaggatggaagggagctttatgagctggttgcacacttgcccgacaaagcaaataactacttgacaccagcactctctgtcttagagaagaatacctgatcatcccttgttgagacaaaatacttcccagaagatttcataaatttgctacctacgttcttctacttctgcattggatcaatgcagaagtgattcatgtaactatttttcctgtatatatattcttgtgtagcacaaatctacgacttgagaaattcatttatttataaattcttcctttg

SEQ ID NO: 62267 - DNA, 3379 bp, Glycine max
  Clone ID: PAT_MRT3847_27242C.1
gttatattttagtctatgttatacaaaaagataataataatgaagttactatatagatagaacattaacaatcaatggaaaaaggaaaagctactaaattatgaaagcacaaacagcagttaatagcattgtatattcacatacacaatgaagactacttttctcggatcttcgaagttcgattcctttcttgaatggatgacagtcgtgtttggtcataaggacaggcgatcgtactcttcaaaaattttacaagtacgaatctgaaaagcaatagcagcgtgtcacacaacaacaacaacaacaatgatggtagtaataacaagaacctgcgtccttgactcttagcctgaacaacgtgatacccggagtactgtgaggaagatcgcggcagttgttagaggaggtttggagaatagactcgggattgggtgagatttctaggacaacacggtaggatgatgaggattctgtagatgccgttcttgatcgagaaggtcagatgtgcaactgagcaatcgctggagctaaaaatacaactgtgctggttgttgttgccagcagcagatttggtagcggattaattagaaatcctaggcgagcagtacagatgcagaaactgaagggcagtgtggtataattagggatacaggagattgaagataacattggtgacatcggtgatgacgtagttgatatatgcgtgaaggcatcacatgatactattggaggaaacaaaatctttgatgtatgtaaggcgtatattgctgtggatggaagggaatttttagaagatgattgagcacttgccagacaaagtaaataactacttgacaacagcactctctggctaaaagaagtagacctgatcatcccttgtggagacaaaatacttcccagaaacttacatgaatttgctacctacgttcttttacttctgcattggatcaatgcagaagtggttgatgtaactatttatgcttgaatattgattgctgtgttggacaactctgcgactggagaaattgatttttttaggaattctttcattaatggtggctatgtgaagctatacgaaaagctttctatgtccctagggtataatcatgaatactacagggcgagttgtctttctgtcggtggcgaggtgtgagctactgcataaattttggaagttggtccatcggcagagccaggtcggaggagattgtattatacaagaaaaagtacaaaagagggattttgtaggggtagtgtaccattttcgctatagcgcgctatcactgattagaacctaattgaacaccaatattgtaggagttgtgtactaaagtccggttaaagaatatgtagttcaagacaatcaagtcactacatttttctcggatgaaagttcataaacactaggtataaggttcaaacccgaaaggttccttataccgaaatacaatatcacatgttctttctcttattttttatacaaattatctttcggaaaatatattttaaaattttaaattatgtgggggaatgttggtaaatatttgtgttttaatttaaaatttaaaaatatatattaattccatcttataaaataaaatatttatttctagaattttcttaagattttgtttttagtagtaaaaataggctgttatatgtgtcttgaatacaatggattagtttccaacggtcatattttgtttgttgcttaaggtgatctgtgcctatatattatctttcattattcctaaaaagatgacagaacaacagtctcatttttttcttccataattttctatttcttctcttataaaaataacttatttcttgtgattaagaacatttatcttcataattttcggtgaaactttcgctttatacgatagcaaccaatttgttgtcgtatctttggagagaagcgcaatcaaattacgctcggaaccaactggttggctttccctgggagaggagcgctttcacgctttacttacccctgcagtgtgggtgctttaactctaaggatagtgtttacgcgtcttcaacccaggctatttaattctttcccttgattaaatttttcttggtgctcttagtatgatataatacataatacttgtgatgtcaattaaatttattttccttcagttattttgttatttaattaaaagaagttccaagacaatttaattcaattttttgtttccaacactactatttcctaagacatttaactgaacacaaatttccacacttcctaaggtagacccattttactggaagctcggtaacagcttcctgcttaccaaccttccaaaattgaggtcattatcctattatcttgtacatatttttaattactattgtctccctttcctgttaaataccatatgaacttctaaacacgtgcaagaatttacaaaggtccccgatttccttactttttaaaaatatttttctccactattttcccctatacgaactcgtgttttatttttaaacagtgtataattgcggtgtgctgatcctctattcattcttgtttcagaggcctgttgaaggaaatgcaacaatgaaacaggatttaagaagctttaagcttatattggaatatattaaagtcttgcctactgggcaagaaaccgattttgtattagtttcatgttctggactaggaattgagccttccaggcgggagcaggttcttaaagccaagagggctggtgaagattctctaagaagatctggccttggatacacaatagttcgtcctggtccattgcaggaagaacctggagggcagcgtgctctaatatttgatcaaggaaacagaatatcacagggcatcagctgtgctgatgtagctgatatatgtgtgaaggcactacatgatacaactgcaagaaacaaaagctttgatgtatgttacgagtatattgctgaggatggaagggagctttatgagctggttgcacacttgcccgacaaagcaaataactacttgacaccagcactctctgtcttagagaagaatacctgatcatcccttgttgagacaaaatacttcccagaagtaagatttcataaatttgctacctacgttcttctacttctgcattggatcaatgcagaagtgattcatgtaactatttttcctgtatatatattcttgtgtagcacaaatctacgacttgagaaattaatttatttataaattcttcctttgaaaattggaattatacaaaaaatatagatttcaatagttaaaatgcatcatacaatcaatgatatggatatatacatctcgccttgtataatgaaacaatagcttaaatatgattttggttgctataaatatactcatttcattttgactttt

SEQ ID NO: 62268 - DNA, 1267 bp, Glycine max
  Clone ID: PAT_MRT3847_27243C.1
ccggatttaaggttaagacccacgcgtccggttagaaaatttcttggagtttgttagaatgaaaatggaggggcttgatttgttcctagtagcaacgaatcatagaggcttcatttgtgtgtgcagtgcccttatcaaatttctcaagtgggtatgggtggtgttcttgaggccaccaaagaatctcaaagagtatggttcatgggccataatcactggctccactgatggaattggcaaggccatggcttttgaattggcatctaagggacttaaccttctcttggttggtagaaaccctctaaaacttgaggcaacatccaaggaaataagagatagacttgatgttgaggttaagtttgtggtcatagacatgcaaaaagttgagggagttgaaatagtaaaaaaagtagaggaagcaatagatggattggatataggtttgctagttaatggtgcaggcttggcttacccttatgctagattctttcatgaggttgatttggagcttatggatgctattataaaagtaaacttggagggagcaacttggatcacaaaggcagtgcttcccactatgatcaagaagaaaaagggagcaatagtgaacattggctctggttccactgttgtgcttccttcatatcctctagtcaccctctatgctgctacaaaagcataccttgcaatgttctcgagatgcatcagtttggaatacaagcatcaaggaattgacatccaatgtcaggttccattatttgtatcaacaaagatgaccaaaatgaagacatcaatttttgttccaacgccggctatgtatagtaaaacatgcacaagatggattggatacgaaaaactggttgagccatacttcctccattctgtgcaggggtttctcataagggcaattcctgattcattagtggattcctatatgctgcgctattttctttattggcgtggaagaggactctccaaggactccaacattaaaacatcagcagcatctaattctgaagaagcaaacatcattaatcaagatcatacaaattaagtcctagttcctataacaacatttatggaaagttgtggctgatcatggagacccccagtgaattaattatagttttttttttctctttttcttttctttttagatttgcctttcggtaaagtcgtttacctactttccactattgttagttttatacttataagttttatctgcaattggtcagcctttacttaatctagttattctttgaac

SEQ ID NO: 62269 - DNA, 112 bp, Glycine max
  unsure (1)..(112): unsure at all n locations
  Clone ID: PAT_MRT3847_27244C.1
agctcgatcgctcgagcagcattacatggccctgcggtgcattctcataggccatagcggtcgggatatccgntgagaaactagaactgaagcactaactgggaagagaccg

SEQ ID NO: 62270 - DNA, 148 bp, Glycine max
  Clone ID: PAT_MRT3847_27245C.1
accactcgtccggttgatcttcacaagcccaatttttactatcttatgcctatattattgcatatttctaaagtcagggaccactatactactgtcattacctatcttatttgcttatattgtctcaaacaactaccatactttcctt

SEQ ID NO: 62271 - DNA, 246 bp, Glycine max
  Clone ID: PAT_MRT3847_27246C.1
aacggttgcaacaagactacagaagggtctcctcattgtcgagtagtgttgttaggcgaaacatcagaagcgcggaataaattccttcaaacttgcagagaacttgtgagaaacactaataaagtattgagcgcagaatagaaattaaaaacaaaatatagacatattttatttaacttgaaatacccctcaattcatattgtataaccatatgtcattttgaccacataaattaactcaattata

SEQ ID NO: 62272 - DNA, 357 bp, Glycine max
  Clone ID: PAT_MRT3847_27247C.1
cgggagttcaaaaaaggagtgtggcgaaactgttttttcccacctatcccaaagcaataaaaagagtgattatccaaagagtgtaatatgacttgcccaacttctgaagaatcctttgatgtagctctattcataggtaacgacagaaattgccacgatactgtgatctccgcgtacaatatccctgtaacatcagacacataaaacacttatacaaaggctgcctccccgattgcagcgcttcagaaggcggtaactgtgaaccacgtcttccagatggatgtggatgtacaggtcctgcatacctcccgtgaggcgacataataaaaggagtagctgctatatcagatgctgcat

SEQ ID NO: 62273 - DNA, 490 bp, Glycine max
  Clone ID: PAT_MRT3847_27248C.1
ggggtcctcactcctcaatttagtccactggcatttccttttctcttgcctttccgataaccactttcaagtttcaagtgcagcttttctccattgcaaccccctcgacaaaacaaaaccatcaaaatcctcaggttgtgagtgagaaactgagaataatggtttctggatggagaaggacgtttcgcacatctaataccattccccaaaacacacacgaacctgaaatttgtgattattacaacaacatcaattcaagtcccaaaatcacttccaatttctcatttttctccaccccatcattgattcccacccgaaccaattcaccactttccaaacaccaatgcaattacaacaataatgcaagaactccctctcccaccaaacgctacagccccacatcgtttcatcaatccactccttcttccccaaactctccctcagccttctctcttctcaaatccaccttacgcttatccaaaagctcatg

SEQ ID NO: 62274 - DNA, 845 bp, Glycine max
  Clone ID: PAT_MRT3847_27249C.1
ccttggcacctcttcaccttcagtcttcactcacgcgcgccatcttctcagtcgccaccactccacgcccacgctgagaaaaggaatatgggtgatcggcaagtagttgaccaacaacacatgggtgatccacaactgccatcttctcctccctcaaaggatgatatggtttcatgtgttatggctttggaggctgctttgcttccctgtttgccagccagagaacttcaagcaatagaccgttctccccacccctcacatcaaattgatgtggataggtatgcaagagacttcatggaggctgccaagaagcttcagctttattttatcagcctgcaacgtgaggataagccaacaaaagttgaaatgcttagaaaggagatcgctctgatggaagaggaacttaacataaagaatgagctgataaaaaaacaagaaaatttaattcaggagtggaaaaaagagttgaaagatcagttggacaaacacaagattgagttggatagggtttagctaggggtgtgcaaaaatccaacacccgacccaagcccgaagaaaccgaagaaaaaacggttcgggagggtgcgtcatggtggcgtttgagttcggtgagtgaattggagtttgaaactgatctcttgctaatccgaaacccctcctatccaaaaaaagcaatgattggattttgccaagtcattttgagcctgaatctgcccgcccgatgaacacccctaggtttagtgtatgcttgtgctcctatgctcttcacatatttaaagactcggtgccacatttttggcatttatttttaaaaaaaacttcctctataatctttattattgctc

SEQ ID NO: 62275 - DNA, 177 bp, Glycine max
  Clone ID: PAT_MRT3847_2724C.1
tttacttttcttgccattgctggctggcaaagaatctttaaactgatttccgcacttagtcacttggtttcttcacaattcactccacaattaacttttgtcacttaccaccaagtcgttatgaatttagggttttctagcctacatccatcggtgattactctgtaatcaggaatc

SEQ ID NO: 62276 - DNA, 446 bp, Glycine max
  unsure (1)..(446): unsure at all n locations
  Clone ID: PAT_MRT3847_27250C.1
ctctaacaaaaaaaaacaacaaaaaaatcctcgatactttcttatctattaaattcgaactccantatttcttacgatattctatatcttgacactgtccanantacttnatttttttttaccttttatcanttaatataaaaccacattttaatcaattatcaatattctttccattcaattcaatatactttatacacttctaatataatatnaataaccttcttttttattttctattatctcnctctctantattaaacactcaaaccttatttttctattttaatatctcttacccattaattatataacttattaatcttaataatttttactcattcttaaatattaacactactcatatttcaaatttnaaaactntactattaaaacttttttacattttttttaaaaaaatttctttattctaaaaaattacaaca

SEQ ID NO: 62277 - DNA, 360 bp, Glycine max
  Clone ID: PAT_MRT3847_27251C.1
agcataatgagtcatgtccaacaatacaaggactatgaagtactgttacataacccggtgcaacatggcaacaacaggctcagaaccttggttcttttgtctcatgttcgtcttactgagactttttctttctttcaaacataaaaaaacaaacttttgagtcttgcttttttattgtttccttgggctttctttgtttcttggggccagaaaaaatgggtataggggagacgagttcgagccagagtttcaatctgcaccatcgtgaagtgaagaataagcaggaagcgttcataggggtatccaaaagtgggcatggcaatcaaggctgggcaaggtgaagagcaacataagttcgtg

SEQ ID NO: 62278 - DNA, 1442 bp, Glycine max
  Clone ID: PAT_MRT3847_27252C.1
aattcggcacccacggaggttctctctctctatctctctcccgccattgaagtaaagtaactatctatcgttctgagaatgagaatcaacgcattctgtgtctccgcctctgcttctatatattctccttttcctaatccacatggtgcgctactgcaagattggaagcttcggaagcataggtttagcttgaagctcacggcatttcctttgaattcgagttgcaggaagaggaggacaactttcatatgtgcagccaatcaagaagccgaggaggcttttaagaagactgttgaaattgataggctcatagatatgctcagagaagctaatcctcgcgaacttcagaaacttgttgttgaaaacatccttgctttcaatccaagcttttgggtgcgacttgcagcgagaactgatacttgcaagtctgacgatgataaaaaagattatgaagaattggctacaacggtcatgaatgtggtggattgcgtggtgcataagactaaagaaaagattgagtcttccacagatgtcctgaagggagtactaaaacctgtgattgatgctgaaggagagattccatggcctcccagagatcctcaggcactaacattgatggaaaaggaaataagtcaaagggagcaagaaggacagctggatgaagggttccttgctgaagttaatgcacagctacgacaagcaaaggaagatggtgataaaccggggcttgaggctatgatgcaaaaggtgttgcagctttatgcttccatagttctgtcaaaacgtagttatgccatgaaagggaaggaagttttgaaggatgagcaattccttgaaaccataatccaagctcccgaacaagaatggaacaatattttaatcaatggattgacaattggtgctggggatgtttccgcagaggatctctttgctgtcttaaagaaacgaattgaacgcgttttgattagaactgagggaggttcttaccaacagcggattctgacagaatacctgaaaggcattgaaactagagcagaggagattgttcaagtgctccaggggagaccacaatagcattttcttcgaacttgaaattggcttggcaattggatgtcatgagccaaaacattgttctgcatgatggtagaagtggtttattatttgaagaacagatcaagctaatacactaaggtggagaaatatagatgatcatatcttcaacaggtagcaatactcacgcggatcggaagattggctttcagaatacttcacgcaacagattaagtaatatatctcctgaagcaaaaacttaaaacaaaatatgtatatttattgtaatattcgaatctagcaaaattataaatctatctcactgtgtgtccttcctggagacactagttaaagagtaataattaatacattttattcaatattttaattat

SEQ ID NO: 62279 - DNA, 275 bp, Glycine max
  unsure (1)..(275): unsure at all n locations
  Clone ID: PAT_MRT3847_27253C.1
aacacaacacaaagtgtcanaaacacacacagttccaaactnnnatcncgcngcanacntctnttgttctcgtttccccactccctcattttcccttcctctacccgcatttttctntaancacccctcacacacttcacttatagagagagagaaagttcagtgcttttgtatagaatnaccaccccattaccctgcatacaccatttnatgncattgantccatctgggtcagtcacaataacagaagannaaaagaaaggnaaanacccctc

SEQ ID NO: 62280 - DNA, 261 bp, Glycine max
  Clone ID: PAT_MRT3847_27254C.1
agacaggataaagtgtaggttactggaaggatcaaatgcccaagaggtgagggcgatggttctggatatgcaagctaggttgttattggatatgcttgggaaaggaattgagtctgcattgataaattcttcagctttagttcctgagctatggcaagcatcaggtgaaacgttatccagcattgaccctgaatcaatggctgttgaacctgcactaattcccagtattcaggcttatgtggattcagttcttgattggct

SEQ ID NO: 62281 - DNA, 777 bp, Glycine max
  unsure (1)..(777): unsure at all n locations
  Clone ID: PAT_MRT3847_27255C.1
cacgcgtccggataattcaaacaagaataagaatagggaaaagaggaaaaaaataataataatagtaagcataaacattgaaatttgaaatttagcacaagctgagaaggtatttatgtatgtatatatataaataattacaaaccttaacagttgcaggactcattagaaatttggctccggcattaattgcactttttgcatcctcaatcctgagaacagttccaacctaagggcaatatctgttcagttcagacaaccgttgaagagaaatgtgatttcatgaaataatactgtatatgataggagtcttgatcatcaacatgttaaaacaatcataagaatgcaatagggtacctttacaagctagtaatatccagcaaggaagaaactaaaaaaaaatctaccatcttatagaaattttgtgtgcaatttcttgagaaattaatttattagtgttctagacaagactgaatcagaagaaggttagagactttcggtaaattttggggatgtcacttagaatttagaagaagtgttggaagctaggttgaacattcctcttaattgatgatatggtacttatccacatgcataacacattcaacactagatcaatttcaaatgcgtcaactttatatttttcccaaaatttctacaagacattgtgatttntgttagaaataatccacagaataaatcattattctcttaatgatagctaagtaaaattcagagagaagaccaaaaatcccagagtnaaggatcagcaattct

SEQ ID NO: 62282 - DNA, 252 bp, Glycine max
  Clone ID: PAT_MRT3847_27256C.1
ctccttcgcccctcacagactcgaaacgccatgcaaaacgacgccgtacccccatccgccaccttcgaaccctagtttctttttctccttcgagagagtaccgaagatggtggctaaaccgggttcggttccggacttcgaggcgctgcgggagctcttcaagcatcacatagagtccttcgattacatggtcgatgctggattagataccatgctcggacacatcaaacccgtcgaattttcgatgatttc

SEQ ID NO: 62283 - DNA, 505 bp, Glycine max
  unsure (1)..(505): unsure at all n locations
  Clone ID: PAT_MRT3847_27257C.1
ggatcaattcaaaaaaatatattttctatataggcagaagcacactttctatctagtttctcgatcaatccagataaaaaaaatactgatacgtgataactacaacagcaccagttacattcgagaaagtatgcaaacccaacaacagctgcattggctcccttgtcagtgtttttcctgcctgattttctgtatgaacaatccctttcccttcgaaaaactcgtccagcagcaagtgtgggattaagggaaggattagtatagcatcaatgccttgttaccttttaagttggggaagcacatacttagagaataaatacatctttgcatatatcgctatggcctgcttgcaaaatctacttacaatcttatttgagtaatggcccgggtccgaccccnaaaataaatcaatcatggcctgcaaaagcagatttaagcctctttttcataccatcatgaatgagaaagaagatcaccttcaccaggcaaaagaatctcaattctc

SEQ ID NO: 62284 - DNA, 378 bp, Glycine max
  Clone ID: PAT_MRT3847_27258C.1
ggctcgagggttcctctgatcgcgtcaaaaatattaaagtttgtttcctccgaccaggatccacgagagggggaacctctaacctggttcatggacgatagtgatgaagatcaaaaaccccccccccacaaagaacccaaccaagtgctggcaacatggcaacgccctgggcggagaagccttagatggacactcctgaaggttggggaggagaaggagactgggcaaatggggcatgcagaagaaagcgttgatacgaccgacataggtggttacacacgtctgcccagaaacgctgccaaattatgaacagaaaagcaccttgctcgttggaacccaatttgacactggccaggagaggcgctcccgcgctgctgg

SEQ ID NO: 62285 - DNA, 281 bp, Glycine max
  Clone ID: PAT_MRT3847_27259C.1
aggaattcccgggtcgaccacgcgtccgctaggtgacactttatcaatggcgggtggaggcataaccctaggatccaacgccgctaagaaggccacgtgaaggagcagaaaagccggactacaattccccgtctaacgtatcggcagggtgctgaagggcggaaagaacaccaagcgcgttgacaccgaagcccacaagtacctggacgacgtagtcggatatgtggctagtgaggtttaagaattgggtggaaacgctgggagagatgacatgaagactg

SEQ ID NO: 62286 - DNA, 279 bp, Glycine max
  Clone ID: PAT_MRT3847_2725C.1
gcagccctcacttgaattgaaggaccatcctgcctgtaatttctcatcaccacttcagtcaacaaaagatggtgatgatgaaatctctcccacttgttctaatagtacgtcttttcccactctaccaccaccttagcccagtccccgggcgcgggaccgaccgccccggccacgccctgcaccgcagccggcgggggccgagaaccctgcgggcccgcggcaggcatgatgggaatgctgaaaaagggggggtgggggacagccgtgatgcggctgctg

SEQ ID NO: 62287 - DNA, 210 bp, Glycine max
  Clone ID: PAT_MRT3847_27260C.1
cgggctcctacagattcttcatcaactgctattttggatcggaacctcttctgcggcgtagcaatgggacactctcctctttggaaatctcgggccggaaaactaatgtcctggttctcgcacttccctcgtgtgttggaaaccccctagattgatcatgaactaacgccttatgtgccacatgcaatgcttcccttgcaatccctcgga

SEQ ID NO: 62288 - DNA, 237 bp, Glycine max
  Clone ID: PAT_MRT3847_27261C.1
cccacgcgtccgaaaaaaaaaaaaaaaaaaaaaaaaaaaaaaaaaaaaaaaaaaaaaaaagaaaaagggacaaatatggcgttggtgtgggaggatcatactgaataaaaccattgcgtgcgtcgacattcctaattttttttgggcggcgaggcccaattttttgtctggtgtctgtgccccttcacgtctgggaaagccctgtctttacccaccttaattttgttgtagccctgg

SEQ ID NO: 62289 - DNA, 239 bp, Glycine max
  Clone ID: PAT_MRT3847_27262C.1
ctcttggcatcttggggtgggtccctcttttaagctattggcttctcttaacacaattgggtgtgccaattgccatagtcaccaaccaattaacaaaggtatatatatcatcatatcatcaccaaatgagaaatattgggttggtttttcttgtggtgggggctacttttgtgggaggcagccacagctggtagcttttaccaagactttgaaataacgtgcggtggtgagcgtgccaa

SEQ ID NO: 62290 - DNA, 217 bp, Glycine max
  Clone ID: PAT_MRT3847_27263C.1
tcctgcctactactacgaatcccctccacgaccaacatcacatgctccaccttaccactatatgaaccctccaccacctgtcgtccatctcctcctccacgcataccattacacatcaccacctactccttgcccatctcccgctcccaattacatttacaaatcacctccacctccactttacatatatacttccccacctccacctatctacaag

SEQ ID NO: 62291 - DNA, 613 bp, Glycine max
  Clone ID: PAT_MRT3847_27264C.1
gtttttttctcctcctacttagagccattagatcgaattcgatcatttcggatttgatctgatggttttggacttctaattagtctaagatggacaaggttacgaggttggcaacagaaaagggtgtggtggttttcaccaagagctcttgttgcctctgctatgcagtcaacattctgttccaagagcttggagtgatccctgtggttcatgaaattgacaaagaccctgagggcaaggaaatagagaaagctataacaaggttggggtgtcctacacctgttcctgcagtcttcatcggagggaagctggtggggtccaccaatgaagtcatgtccctccaccttagtggttcactcactcaactgctgaaaccatatcgagctttgtcttaaagaagggtgcacatgcaaattaaattaaaacatgttcctgctaccttaattggaagaataaacatgcagtatagtagtgtaactactaagtctataatattggatagtctatgcagtgatgcatgtgtgatgtagttaattaatttctagcatttgattattagctatatataattaatgcaatgtcataattattcttaatgaagttctatttatat

SEQ ID NO: 62292 - DNA, 1067 bp, Glycine max
  Clone ID: PAT_MRT3847_27265C.1
taagctcggaaggctgccatagttttctcctcctacttagagccattagatcgaattcgatcatttcggatttgatctgatggttttggacttctaattagtctaaggtaatctaaattagagtcctctctctctctctctctcatttttttacatttctttttttcttgtactttttgtctcttggaaaagaattttctatacactatatatcaagatggacaaggttacgaggttggcaacagaaaagggtgtggtggttttcaccaagagctcttgttgcctctgctatgcagtcaacattctgttccaagagcttggagtgatccctgtggttcatgaaattgacaaagaccctgagggcaaggaaatagagaaagctataacaaggttggggtgtcctacacctgttcctgcagtcttcatcggagggaagctggtggggtccaccaatgaagtcatgtccctccaccttagtggttcactcactcaactgctgaaaccatatcgagctttgtcttaaagaagggtgcacatgcaaattaaattaaaacatgttcctgctaccttaattggaagaataaacatgcagtatagtagtgtaactactaagtctataatattggatagtctatgcagtgatgcatgtgtgatgtagttaattaatttctagcatttgattattagctatatataattaatgcaatgtcataattattcttaatgaagttctatttatatacttgtactgatgtacgtccaagtaaatcatgttattgaaagtttaatttatataatcacgtagtactgttatttccgacccccaaggctctatagaagctgcctgtggagggcggcgccggcggtgaacggaacaacaacattttaaacacgttgagcggcgcgacatacaatatctacttattcaagggcctgaaacacgtccgccctgacttgtggttcttaagcatggccaacggaaacatatcggcttgatcaacctcctctgtttgtagcttggccatgtatgctctacacttgcccgttacatcatgatgccctccatc

SEQ ID NO: 62293 - DNA, 598 bp, Glycine max
  Clone ID: PAT_MRT3847_27266C.1
aggttatgcaatattaattatttaggtacctaataaagtttgaagatggcacaagttgaacttcgtgacgagcatgggaacccagttgaactaacagatgcatatgggaatccggtttggttaacggacgagaaaggcaacccggtgcacctcacggctgtggcaaccaatgcacacaaatctatgcttcagaatgacaccccacaagagcttcctcactccaagagttcaagctcgtctgaggatgaagggcatggagagaggatcaggaagggactgaaggataacatagaagaaaagttaccagctggagaaggagtagtgaaggagaataaacacaccacaattgctgcttctacttctacaacagatactagtgatgctaatcaccacccaaccactgagcatgagaagaagagtatcatagacaagattaaagaaaaattccaataaatcagcagtgaatattaatatatattcacgaattgaagctttgtttattttgtatgtttttttatgtcatggcatagttggtttttgagagtttcaaagcatatatcaataagagaaacgttattatgctcacaaaattttcaag

SEQ ID NO: 62294 - DNA, 502 bp, Glycine max
  Clone ID: PAT_MRT3847_27267C.1
gaattcggcacgagcgaataccacttcagggcacacactcctcaggatgcccagaagtggcacgatgtcatttccagcgttgtcggccaaaccaccaacgagttgcccacctcgcctgtgagccctgctggcgagcaagctcaccagaccttcccaccagctgagaccggcactgtcggcgccgctggtaccggtgccgctacatctaccattcccgagaagagcgccgccgacccaggcttgtcgtcgtatgagagggaggccgcccagcaggcagagttgacacccggcactgccactactggcaccgttcctgccaccgctaccactgccccatccaccactggctacccggctgagaagggtgccactggtgagaagatcatttgaaaaattacacaacagaaggatgcttcaaagcatcaggaggggtcagtgttcagcgacatgaattgatgcaatgatgcaatgcacgttatgccatatgcctatatagaggcct

SEQ ID NO: 62295 - DNA, 715 bp, Glycine max
  unsure (1)..(715): unsure at all n locations
  Clone ID: PAT_MRT3847_27268C.1
ggctcgaggaatgggcagctccattttttgccttcaccttatcctttcatcattttttcttttcactttcttgctggcagctgttaatggcagcaaaaagtgttacattgtatacatgggagctcattctcatggtcccagccctacgtctgctgacctcgaacttgccacggattctcattatgatttactaggttcaatctttggaagtcgggagaaggcgaaagaagcaattatttactcatataatagacacattaatggcttcgctgcgctacttgaggaggaagaagcagcagatattgcaaaaaacccaaatgtggtgtctgtgttcttgagcaaagaacataagttgcacactacccggtcatgggaatttcttggactacacagacgtggccagaactccgcatggcaaaagggaagatttggggaaaatacgataattggtaacattgacacaggtgtttggcctgaatcccaagcttcagtgataaaggatacggtaccgtcccatcaaaatggcgcggaggccctttgtcaaattaacaaactttccatgttcctcatgcaaatccatgcaacagaaaagctgattggagcaagatactataacanagctttcgaggcacataacggccaaactggatccattgctacataaagcacgtgacttttgtggggcatgggaccccatactctatcaattgcgggg

SEQ ID NO: 62296 - DNA, 3201 bp, Glycine max
  Clone ID: PAT_MRT3847_27269C.1
gttggcagtgagtagtagtgagattgaattgaggttgaagtgtgttgtgttgtggcaaagctcagaaaaagagagagagattgaagaagcgatttttttatatgaaattttgaagagtgaatgaaaaatctcaatcccatggatgcgcaattgaatttgagctgaatcggcgtcttttggatttctctcattcacacactactgactcgcctctaattatttaggcgcttccgctgcgtaatcccgagatattggagattgatgtgatgacatcttcatctacctatctgcatgcagtaatgaattgatacctctgatttttatctcatgctgatttatttgattaacatgttacagaacttgattaatcaggtacattttcatgatttgataaatatttcacaatactcgaaagatgtactgatacaatacccgacagctttgcatgggagatattgaatgatagtttgagacatacttgagggataggaacggcttattgcgacatagtataatctttgagatgcatttccttgagttacttgtaaaatgtaatttattgagataatgagatcatgtaatatagaactcatctttctatctttgtatgcgatctattttttttcagtcgtgcatcaaataataaacatattgatgttatggtataagaagaaaaatggagcatgttttggagaaaagatttcctcttaatgcagaagattacacattatatgaagaagtaggtgaaggcgttagtgcctgcgtatacagggctttctgggttgcattcaatgagatagtggccatcaaggttcttgatctagagaagttaattaatgacttggatggcattcgtagagaggtacagaccatgaacttgattgatcacccgaatgttttacgggcacattgctcttttactgctggacacaatctatgggttgtgatgccatacatggcaggggggtcttgccttcatataatgaaatctaactatcctgagggttttgaagggcctgttattgctactttattgcatgaagttctcaaagctcttgtctatcttcatgcgcatggtcacatacatagagatgtaaacagcacgaatatcctagttgattctactagcacgccaaaactagctgactttggagttacagcatgtcttttagatcttggaggtatcctgcaatctagaggtttgtttgtggaaaaaccttgttggatggttcctgaagttatgcagcaattacatggatatgatttttaagcagatatatggtcatttggtataacggcacttgaacttgctcatggtcatgccccattttccaagtatccacctatgaaagttttgcttatgactttacaaaatgcccctcctggtcttgattatgaaagagacaagagattttcaaaggctttcaaagagttggttgccacctgcttagtaaaagatccaaaaaagcgtccaagttcagaaaagcttttaaaacaccacttctttaaacaagcacgtgccagcaaatatctagctcgcaccattttagaaggccttgctcctttaggagatcgttttagattgctgaaggctaaacaggcagatttattggtgcagaacaaggctctttacgaggataaggatcaattatctcagaaagaatatattcgaggaattagtgcctggaattttaacctggaggatttgaaaagtcaagctgctcttattcaagatgatgacatacctaatgcagaagagtcacaaagggataagaagcaaaaagacagattggacgacttcaaagtttctgcagagaggctatcacctggagcagctaatcattcagatgatgcaccaacgcaggacaaggaggatggattcaacaatcttccggatttggagagctcacttgcttcatttcctagtaaacctcttcaagcacttaaaggatgctttgatatgtgtgaggatgacgtcaacaacagcagtccaagaaatttggatcatgatggaagaattgacaatgaaagttctgggacaagtacttcattacaacaaaatgctaccagtcatcaaaaaaagtttccaagtggttctttactacctgataattttctttttcccaaaaagattgttactgatggggacagggattatctacaaacaaagtattcttcagacaggaatcacagtggtccgttgcaatatcggcagaagagagacaccaacaaccttccattggttgatgacacatcggatggagcatttgtccagtttagggggcggtttaaggtcacgccggcagatctcagtccaatgggtccttcaaacagcacatctggcccacttgttagtcctaccagtccaccaaatccaaatttcctgtctgtagctattcttccatcactgcagtgcatcttgcaacagaacggtttgcagagggaagagattattaaattaataaaatatgcagagcaatcttctggcaagaatacagaatcaatggaggcagggatagttgatattttgcaggcaccacctgcaacaactagggagcgagagctgcattttcaggtgattcaactccagcagagcaatggaatcctttttgaggaattgcaaaaacaaaagatgaaaaatgttcagttggaaaaacagttgagcagtatgattaacaaagtggaaaagtgaacaagacatgaatgttgtcatgatttgactgatattgaacaacacccgacagatgttcagatacaacacccgacagatgttcagtggtaatattcaatgatggtttgagacatacttgagggatgggaacggctcattgcgacgtacactaatctttgatatgctattccttgagttacatgtaaaatgtaatttattgagataatgagatcatgtaatttaaactcatctttctctcttatatcctacctaaaaattacccttcagacttcatattaatgcaataactacatagcttagcttagtgatgctgcaagcctgtcttctgtgtttcaataaattcatatcacccggcaaccaaatccttcacatacatagaatgttgactggaatggctagtgttgaagtgtatttaacggttgatgcaaattctgacaataaatttccccagtgtattgtatttattcatctcatggttgaaaattatgatttttttgaatgttggccca

SEQ ID NO: 62297 - DNA, 781 bp, Glycine max
  Clone ID: PAT_MRT3847_2726C.1
ggagaatagaaaacccagaatctcgacaagacgattcttttcttttgtccccgaagagaaagagagatcttatctcctcttcctacaatgcccattccaataactctctctttcaatctcacccctgccccttttcatcgattcctattcttattatttattattcttgcttaggtaccccaaaaagtttttattcgctcgattggaattagggttttctttctctctctggctattcccgtttcccgctatctactcagcttctttcttttacttgattttctagggtttccttggatcgtaccctctcgggggattgcatgaaatgagcatgagctctgatctcttcataccttccaattttgtgcttcagcatttctacttggagatttctcattcttaagtttcacatgagcatggaagaggattgtctatattaattcattctttactcagtcgcaggctggctcttcctttttcactcaaaggcaaaactgttcacttcttgttaccgaggatctgattgcagctctgccccaacacctaagcatatacttattagggttttagctcaaccatttaccactgtactaggaatcctgtttgtcagcttcagtgttccatgttcatttcattccttcatttctgatgatattagtttccgccgattgcattatttggtcaaggcaagtaaagtaatcctttggtgctccccataattttgtgtttattagtcaataagaaagcttatggagggaatattgaagctggaaatgaatgc

SEQ ID NO: 62298 - DNA, 882 bp, Glycine max
  Clone ID: PAT_MRT3847_27270C.1
cccgcgtccgatttccgcctcactcactgaaactccgagcatgattagcaatggagtatgcactctccgcacgtgcctccgtttcccagcgagaccactattccgagaacctccgcgcttgttcagctgtcggcagcggtttctggtgactgcgtcggaaacgaagaagaaagagaaggtgattgtgatttctggacccaccggttccggcaagagccgcctcgcattggaactcgcaaagcgcctcaacggcgaaatcgtcagtgccgactccgtccaggtgtatcgggggcttgatgttggatctgcaaagccttccccaaatgaaagaaaggaggtaccacatcatctggttgacatactgcacccatctgaagactattctgttgggcagttttttgaggatgcaaggcaagctacaggatgtattcttgacaatggccgtgttcccatagttgtacgaggcactggattgtatttaagatggttcatatatggaaagccagatgtacctaaagcctctccagagattgtatctgaagcatatcaagagttagctgaactgcagaggaatgatgactgggatacagctgtgcagttggtggtaaaagcaggtgatccaaaggctcaatttctagcagtgaatgattggtaccgattacgacgtagcctagagattattaagtctagtggatcacctccttctgcttttcgggtaccatatgattctttcagggaacagggcgaatatggtgttgctgatggttctgagttgtctgatatgaatacttatggtgatgcaatggaaaaaaccaactcatcagagttagactacgagtttatgtgctgtttcctttctagccacagacttgacctctataa

SEQ ID NO: 62299 - DNA, 890 bp, Glycine max
  Clone ID: PAT_MRT3847_27271C.1
aaatagctgattggtttttagagttattatagggactggtgataatctttcagatttcaccttttctgaaaatgttactcatgcccatatctgtgcagaagaagccttaaatttccaaacggtttctgtggcaggaaagacatttttcatcacaaatctcgagcctatgaaattctgggaatttctctcacttttgttagaaggtcttgaatatcaaaggccattcatcaaacttcctgctaagttggtgcaatatattctctcagttttaaagtgggtacatgaaaagttgggatccagatactctggttatcctttattagttcacttttttcagttagcttcatacacccgaactttcaactgcatggcagctcagaaagatattggatactcaccaatagtctccctcgaggaataattcttcttccttctttttaaatttttacttttagcatcccctatattcttttcacttcccactgaaaactgaattatacgaaaagcagctttgcaacaaggtggtgagaaagtaaatgacgttttgttgtatagagaagagaagaaatcctttgcatacttccctgtgctggttttgttgttttactggtatttcctttctgagagaactttgatatcagctgctgcgagacttttgctgttttccacattacttttatatggacatggttttctgccatcaaagttatttggttttcatatacaaaggatacccacgacgtattttgagatctctgatacagcagtaaaagattcagttaccactacagtatatctttggaacaggggttttcaaaatataagtggcctggcccagggggacgattggtctgcattcttcaaggtaaaagatgcagtctccttttaaa

SEQ ID NO: 62300 - DNA, 399 bp, Glycine max
  Clone ID: PAT_MRT3847_27272C.1
ggaacaaacttttttaattatatggctggggaacaaactcgggatcaaagaaacagattatatacaaagaccagtccctaacacttatccaccctattagacacatacttataatacacatctatgaaaattacaaaatggattacataggcccgtgatccataaaccctaattgctagtgcaaacacaaccttgctctgaccaacaagacttcttgggacgcatatgaaatcactccttccgaaaatgaatctgcgatgatacgctgctactggcgctagacctgaagcctaatgagctcatactgtgcaaaaacactagtttgattcatctacacatctgacaggcagaacaccgacgagcatccagaattcgaacctgttatccatgtggggcata

SEQ ID NO: 62301 - DNA, 705 bp, Glycine max
  Clone ID: PAT_MRT3847_27273C.1
gccgcccttttttttttttttaacaagtaacaacatgcacacattcatataagctatcaaaatatagagattttctagtaatgatacaacaaactttaagaattaatgaatgcttgagcaactttagttacaaaaacccaacttaagcactccaagcgacctacttagttatctacggattaccaccaccatgatgacctacaaaatctatacattttatttttaatggtaaagaaaaagcgttcagaaatctgcaagtttttttttttttttgttcaccttaaatcagagtggtgattgggaagaatggcaagcgtgtcattaataccatctaaatcagcattgtctgatgatttttcttgctctgcaacaagcataagcatctctagacgcttgtcaaattgcaaagcactctcatctctcttgtcaagctcagcagcttcaatttcaagccatttctcacgtaaatcatcaagaagatttccttgatcggcattaagagcagatccaggaatcctcgggacagtggtacgaagagacgagtctccagatggtggaggcaaagtcaacaacattgcccgaaattctttagtatcagcaaatgtttcgaaattacaagcaattgtgtctagacaatattcccgaatcttgcaaacaccatacatgtctgctagtattaaccaatggcaaagttcttcaggtgac

SEQ ID NO: 62302 - DNA, 577 bp, Glycine max
  Clone ID: PAT_MRT3847_27274C.1
ggcggagaaacagaacggttcaaccatggccacgttacagtgcaactgcaattctcttgcactcaacaaacccagttattccagaagaagaagaagacaatttcttcaaccccttttctcatccactcgttttgtttcaagcaattcaatctgcacaagttccagtgccacaacttcaaggtggggttgtgctgtttctgctgttgtctcagaagagaacgctgttggttcctctttctctgcagctgatgtcttcaaactcacgtatttagagggaaacagttggatctggaatgtgggtgggataaacatattggttgatcctattttggtgggcaacttggattttggaattccttggctatatgatgctgctaagaaagtgttgcagaagttccagctcagtgatcttccggaaatcaattgcttactcattactcaaagccttgatgatcactgccatttgaagaccttaaagcctttctctcagaaattcccagatattagagttatagcaacccctaatgccaagggcttgttggatcctcttttcagaaatgttacatatttagaacct

SEQ ID NO: 62303 - DNA, 337 bp, Glycine max
  Clone ID: PAT_MRT3847_27275C.1
aacgttggcttcaaaagtcccaggttagagggatctaagcagggagacagctatttcccattctgaacagcagcatgaagagatgcctcgcatttatagaacttactggttggacttgatctttagagactttggaagacatccctctgacctacatttagacagttgataggattgtttgagagagaaaagttagaatgtaacttagaaactggcttttgagtgtctgttttaattcagacagtgagtgtatgaaatgaactttatgattttcctttccagaaagttgtctctacactcgagccgaattccgagcttacgtacgcgtgcatgcgac

SEQ ID NO: 62304 - DNA, 197 bp, Glycine max
  Clone ID: PAT_MRT3847_27276C.1
gtgacgggcatcatggtctcgtgagcagtgctattgttggatatgtgtgtgcttccggctatggctgtggttattcgtccagcaaagcactcttgttgcgtgaagggtcgcgtctactgtcgatcttgctcgtgctgggtttgcgattccagcaaccaagtacattgccggtgatgacagtatgttgcaatgcaaga

SEQ ID NO: 62305 - DNA, 353 bp, Glycine max
  Clone ID: PAT_MRT3847_27277C.1
ggggacgagacaacccaattacttacttacccaaaccagttgttgaagagagaggaattttattttttgtggtggtgattggggaactgagagagtgagtgagtggagtagcagaagagaagatgggatctgtgtgtatctgagactgtgcatcatccctgttcctaacgattcttgtggacagacagcgcactggtattttaaacaggcctgatgggttctagattcccatctcatcagctcagcaatggcctgtatgtatcaggtcgccctgaacagcccaaagaaagaactccaacaatgacctcagttgccatgccttacactggtggagacatcaagaaatcaggaga

SEQ ID NO: 62306 - DNA, 558 bp, Glycine max
  Clone ID: PAT_MRT3847_27278C.1
caaaaaaaaaaaaaaaaggttttaaagaaaattttggaaaattaaacggggaaacaaaaacctacaacgggacatgggaggggggaaaccctacaactacaaaaaaaaaaaaaacagggggtggaaaaaaaaaaaaaaaaaaaaaaacctgaaatttaattttccctaaacaaaggggggaaacgaaattttaaaaaaaaaaaaataaaaatttggggggaaggggggatttaaaaaaaaaaataaaaaaaggggggcggaaattgaagggggggggaaaaaaaggggggggccgttgccaaaccacctaaaagggggggggggggggtccccgggaaacccgggttcaaaaaaacaaccctcccctggaaaaccaacagggccacttttttttaattggggaaaaaaaaaccaccaaccccgccattttggggggtagccacgtaaccatccccgccatttgaaatggaaatggaaagggcttgtggcggcggcggcggctggcccccaacaaggggaagggggcccgcaagtttttcccctcggggggggggaaaa

SEQ ID NO: 62307 - DNA, 660 bp, Glycine max
  unsure (1)..(660): unsure at all n locations
  Clone ID: PAT_MRT3847_27279C.1
ataatactgatactactactagtgctttccttcactttttgttgcttgcagtagcacaagatgttaatagtgattttgcagtcctaaagtctctaagaggttcttggctaagcccaactcccaattgggagggttcagatccttgcaaggactgggaaggcattaagtgcaaaaactcacgtgttatttccatatcattatcagatattggcttgactggccacctttcaggagatattggatcactttctgagttggagattctggatctctcatacaataggggcctcacaggatcacttccacaagaaattggaaacttgaagaagctattaaaattagttctaagttggttgtggttttaactggtcgtattccagatgaaataggatttctagaacagcttgttttcttatctttaaactccaacaattttgttggaccaattccaccttctattggcaatctgtcaaatcttacttggctagatntagctgacaatcagcttgatgggatcattccaatatctagtggcactacctctggtcttgatatgttgcaaaaaacactgcactttcatcttgggaaggaataggctttcaagaaaaaatttctccaaaactttttacctcgaaaatgactctgatacatgggattttt

SEQ ID NO: 62308 - DNA, 306 bp, Glycine max
  Clone ID: PAT_MRT3847_2727C.1
aggcgtgcgaacaggcgtgaggggaaaacagaaggatatagctaaaaaacggttcactgcactgagatatgatataggacagactgtagtttacccatcacaacaagctgtactaactgtgcaatttagttcacactattggaatcagctacaaggcataggatggctctggtttgccgaaaccaacacgcatgtttaggacttaagtagcgtcagacgttgacactgttactcgacctggataaatatgaatggaccgtttgtgtttaaagaagataagagagattcttatttgctgccttagaa

SEQ ID NO: 62309 - DNA, 223 bp, Glycine max
  Clone ID: PAT_MRT3847_27280C.1
cccacgcgtcctcccactcgtccacccacgccttccaattcgagccaccactttttttgtcattcatttttatttttttttcgtactcaataacccttatcaatcattaatcaaccatattcttatacaacactataataacacacctccctctaatatacccacattcatacatttaccatctattctacaacaatcgccttatattaaatactcaaattaa

SEQ ID NO: 62310 - DNA, 633 bp, Glycine max
  Clone ID: PAT_MRT3847_27281C.1
gcttatattattatatatattatgggtttccacaattgccatgtattgatctacatagtaataagggaggtcgtgtggattgtcaatgatagagaacaccaggaatttgtaaagcagggtggaatttggagaagaaatcaatttctcaaccaaggagagtttatgtttggcatccattgaatatagtcatctgttccaaaaacaatagctcctagagttggcatgaaaattgagagcacagctatccctgcaaccttaagtggcacgccaattttgagcatgtctaggatttcaatatggccagtggcaaatcccactacatttgatggagttgaagttggaagtaagaaagcagttgccactgctccaggtaccataagaagaagaggatgcacatgcatagtcttggctatgttatatagaagtgggattagaagtgtggcagtggcaagtggcatcgttagatgtgatgaactctgtaataatgctactcataagactaacagcaggagcaatggcccagtatggtgtatcttccaagaaatccaaggctctggaaagcacgtctgctaggccactagattggactccatcagctaaagcaaaccctgctccaagaagccctgcagcccg

SEQ ID NO: 62311 - DNA, 669 bp, Glycine max
  unsure (1)..(669): unsure at all n locations
  Clone ID: PAT_MRT3847_27282C.1
cacgncgntccgggtaaagtttcgattacagcaactttacaaaagaactaagattatcaaatgaggaacacagagaacttctaggtcatgttaagtgcagatgatgtcttacaaaatataatggagtggagacaggcaggaggcaatcagcctgttgcgctgagtgctgggcaagctattcatgattcaattccaagaccaactatctgtgcatctcgtaagaagctgaagataactccatctgcaccatcacaatcttttggtgggccttctgtattttggccccaacccgtgtggtgcaccctcttcagccatcttcagtgtcaaaacgaggatccatttctggatctaatgccaacaagcacaaacctggccaagtattacctggggtatcttcagtaaaacgatacccttaatcaggactatgagtaaggaatcaaggacctaatacagatatttctggtactgccatgggtgacgctgccaaggtagcatcgatggattcattagctggtagaagagtgagaacaagatggcctgatgacaacaacttttatgaaggcattatctccgactacaatcgaactaaaagtatacatgctgtgctctatgacttgnggactgcaaatgaatcatgggaatgacataatctgtcagagatgactcctg

SEQ ID NO: 62312 - DNA, 181 bp, Glycine max
  Clone ID: PAT_MRT3847_27283C.1
ggaacatacagggggaagcaaagcttttttgctttggcttaatttatcccatgaatgaatcactgccaatgggatcatatgaacatccaagaggaaactttaaaattgtaatccccagacttgaaagaatataatcacccttataaggccactgggatgtgcatgcaatacaccaaaacaa

SEQ ID NO: 62313 - DNA, 293 bp, Glycine max
  Clone ID: PAT_MRT3847_27284C.1
aacgggacttaattcgcttttatggaaaaaaaaagggcatactggttatctataaagtttcaggccctatatagacccacaatcttgatacaaattttattaaagtcaggtaccgagagatccagagcgctacctgcagaggctcgtcaaggaggtccacatttccctagctccgacttaatcagggccatattttgccaaaactacgttgggggaagttaacccagctattaggcattaaaaggtgcttatccttcccgctttattaacaccaggctaaccactggcggatg

SEQ ID NO: 62314 - DNA, 267 bp, Glycine max
  Clone ID: PAT_MRT3847_27285C.1
gaagaaggcaagaaaggcagcagtgaaagaagaaaagagagaagcccggaaagcgaagaaagagctcaaaggcaggtataaatcagaaacgcagaaggctcagaaagttgctgctgttactggaccttcttccattcgcctaatggatggttgatctgtggcacgtttactgatgagtgacgactatgacagtcttgaatccaaaagaccgcctggagccctggacaaatgcatcaaatctatgaacgatgtatgataccagttcat

SEQ ID NO: 62315 - DNA, 303 bp, Glycine max
  unsure (1)..(303): unsure at all n locations
  Clone ID: PAT_MRT3847_27286C.1
gtacaaaagcatgcagttcaagatcttcgagaattggagcncagatactggctaagtctaattcaggtttatcaaagtggatgaaggatagccaatttcaagctgggcaacgnccgcagtatatgccttattgganngccctataacttcnggaagantcacttactnggggtgtganttatccgnaaggngatattcgcgnttccattggaaggttggnnctgannctgaacnagggttattnngggtccctaaggccaaaactggaaaaaccnttctcnnaaaacttcnaaggcccttgtt

SEQ ID NO: 62316 - DNA, 1194 bp, Glycine max
  Clone ID: PAT_MRT3847_27287C.1
aataagcatagagagaaaaaaagatgcaatatccttagtccacacccacccaccgaccccattccccggtaagaatgaagagaaggcgaatagcaacatgaagagagggccaaggaggatgaggacaaaatggtccatcaaataaaagaatccaaacgcattgatttctctctttgtcgtcttcgaaaaccatcaaaaacaggtgcaccccctaatgaccttaacctttagttcacctgccccattacccatccttgcattgctttcccatttccgttaccgttatcctcacttctctctctctcaacctcttatttatttattaaccctttattccacccctttcctctcccttcatcaagcacccaactttctgccacccccacaaaagggtgcttgcgtttctttctgtgatctcaaccatgaagcgtccactcacaccttcagccagcggcatgaagactaacaagaaagccaaggcgatggaaaatgacgaagacgtggaggggctggggcgtttcgacgacaaccttctgttcgaggtgttgaagcacgtggacgcgcggacgctggcgatggcgggatgcgtgaacaaacagtggcacaaaactgcgcaagacgagaggctctgggaactgatctgcacaaagcagtgggcaaacacagggtgcggtgagcaacagctgcgatccgtggtcctcgcgctcggtggcttccgtcgcctccacgcactttatctcttccctctctccaaacctcaacaactacaacaactaacatcatcttcatcctcttcctcttcctcctcggcctggggccccaccgtaccgcagatgattcgatcgaaaccgctacgtttggggaaagacgaggttcacctctctctttcgctcctctctattcgctactacgagaagatgaatttcaataacagaaccaccagatgattgatcattcttcttccataatccatccaccatccgcgtgttgttttttgttactattaatcaaacctaatctcggatttggactcttttttttccttaatttgtgcgatttatagatttcagttgccagatctgctttttattcgggcaattagtctaagccggacgtgttctgtaacttgtatgtactttgatttgataaatatataataatatatatgaattttgggatctaaaaaaccaaacg

SEQ ID NO: 62317 - DNA, 291 bp, Glycine max
  Clone ID: PAT_MRT3847_27288C.1
gcccgccctctttttttttttttttttttcaattcatattaaaagaaaaccaacaaaacaatccggcctattttacaattattacttccccccaaaacaaattcaaacctaaatcacacaaaatttacctccacataataatttatatatcaagacaaaccattcccacaatcattttttacttccctatttaaaaaatacaaaacttcacccaaaaaaaaacaatgatctctttatctaatcaaactttaacttcctacaaaaaaccatcctcctcccataaactattat

SEQ ID NO: 62318 - DNA, 312 bp, Glycine max
  unsure (1)..(312): unsure at all n locations
  Clone ID: PAT_MRT3847_27289C.1
ctcgagccgaatcggctcgagagagattcaggaaaaagttgtgttgaaattttcacaagaggaatttcttacagcttggncaantnaggtgcgnnctgcaacaccggtggtgtctgttaagcgttacctcattgagaacattggaacagatttacctttttaattcatcttgagttagcgtttacttttacccatgtaaaagtcctactgtctcttgctagaactagatcaaccttacaatgtggcagcagtgccattttcagagtaatttttatgtgattaatggatgagaaatgcaccagccaggttaat

SEQ ID NO: 62319 - DNA, 219 bp, Glycine max
  Clone ID: PAT_MRT3847_2728C.1
caagccctcacttggcgtgaacgaccatcctgcctctaacttctcataccactttagcccccgcaagatggagatgatgaagggcgcgcgccctcgttctagattgacaccatgcccgctcaccaccgccttagcccagatcccggtccgcgcagccaccggcccggtcggggcctccacccccgccggcccgggcccggtggccgtagtacccccggc

SEQ ID NO: 62320 - DNA, 363 bp, Glycine max
  Clone ID: PAT_MRT3847_27290C.1
ctcacgcgtccggaggagatcttgaaggtgtgtgcgtagtatgcatctgaagatgtggactcggcctgaagcgttgaatttggctgaatgcatatctgtatatgtagttgtgagatcgactgacataaagaggtctccgtaggcttattgaagctgccgaacgctcattgatgtaacgcacaagttgcgagccctttagagagccagtgatgagtggtaaaacctcgagagaggctgagctaattgacgagcttgctactgcatactttgacattaaatgtggtacatcgtgtgctagtactggctaacactcacgcattcacaacgccacgtgtatataagaggttgctagctagccaagct

SEQ ID NO: 62321 - DNA, 594 bp, Glycine max
  unsure (1)..(594): unsure at all n locations
  Clone ID: PAT_MRT3847_27291C.1
ccacgcgtccgcggacgcgtgggggaaacaccgccgccgccgcgccttccattccagtactcgcggaggaaaggaacaccagccagcgccatggtcacgtcgacgaccgccgccgccgtgctgtccccgccgtccgtggccgggcttcgcctggcgccgtctccccgggcgcgcgtggcgttccgcgcggcgccggcgcggcggtccgtggcggcgcgcgcggagctgagcccgtcgctggtgatcagcctgagcacgggcgtgtcgctcttcctgggccgcttcgtcttcttcaacttccagcgggagaacgtggcgaagcaggtgcccgagcagaacggcaagacgcacttcgacgccggcgacgagcgcgccaaggagttctcgggcctgctcaagtccaacgaccccgtgggcttcaacctcgtcgacgtcctcgcctggggctcgctcggccacatcgtcgcctactacatcctcgccacctccagcaacggatacgaccncaacttcttctgagcggccggctgcgggcatgttcttgagcctgcctgtattctactncgtgtgtgttgagccatatatctgatgctc

SEQ ID NO: 62322 - DNA, 179 bp, Glycine max
  Clone ID: PAT_MRT3847_27292C.1
cacttctggtcatcattgcagcaacatgcaggttttgagttgttggttattcaatatccattgacgccaaacggatcagccagctggatgatgagaagaagaagaagattatggagtgataggcagctcctctgaaatgggagcagaagctggaagctcgctgctgaaactaaagagag

SEQ ID NO: 62323 - DNA, 145 bp, Glycine max
  Clone ID: PAT_MRT3847_27293C.1
ccgacgcgtccggtttttgtgtgtaacatggattggctgttagaatggagggtcggaggaatgatataaaaaatgtgatggcagggatttagggcaaacgaagggagaatgtggtggaaaagtctgcatcatcaatagaaggaac

SEQ ID NO: 62324 - DNA, 930 bp, Glycine max
  Clone ID: PAT_MRT3847_27294C.1
tacggctgcgtgcggccgcttcggcataattgagcgatttttttattctcttctgcgttcttcccaccaacatcgaaaccatgtccaccgacttgcacctccacaacgacctgccccagctccgaatcgcctccgccgccgccgccgatgccgtcgtcaaaaccgacgacctcccctccgacgatgacgaccgcaacgccgtctcttccgtcatcactcaaaccgagaccgaaactgacggagccaccatcgtcgacgtcgccgtcgccgtcaacgtcaacgtcaacgtcaacgacgagaattaccgtactccgacttcgaaggagagcaaaattccagcgacgatgacgtgtccgccggcgccgaggaagccgaagctcgcctcctgcaaaagaaaacttcttgatgagtttcagttcttcgatgtcacgaataaggaggacatggacgccttcttcagatccacttttcctaagaagagctgcacttgtacatgatcaaaaatttccaaccttagcttcctcgaacaaccataccttcgaccctgtcgaactacgtaaattacacaattttatttttttttcatccaattccacttctttggttcaatttctttcttcttctttttttttttttaattttggttttttcatatgttatatgaatgaatttcactttgtataagatgtgaaatattggatcccgaatagtatatgttcattaatcgaaagaatcaacatagcgttgaattgtctccgttcctgttcattactcgtttcaacttgacatttgtttctatggtttggtttggtttgatgggtgttcttgattatgttggattacgagctcgattcttgtttatgtggattgttttgtgtgtgaatctcatgaatttggttctaattaccagcagaagagtagaattttttg

SEQ ID NO: 62325 - DNA, 215 bp, Glycine max
  Clone ID: PAT_MRT3847_27295C.1
tttataagcttttgggaatcataggggagaagcaaaggttaaattgtagttatcacaagaaatcctagttcagttttccaatcaaaattagaggtttatctcggtaatctgcataatataaggttgcattgaagggtaacatatctgattggggaattacacccaaagccttttagggacctggtcttagatttatcccttataggtggggtggg

SEQ ID NO: 62326 - DNA, 395 bp, Glycine max
  Clone ID: PAT_MRT3847_27296C.1
cgggtcgcggaaactcttgcgtctcattcgacatagctccaacgactcgataggcttatcattcctagaccacatcgctttacatagcctgtgtgagggatctagcctgctactctagaggtcgtgaaatcgacggcctcggctagaatcgtcgccctcgcttgcgcgaggaaagatcccacgctgcaaacgccgacctcagcgcctgggaccaaaataaccacccaactaaatgatattgatgccatgtgtagacatgatgtgacaaaacctctccgttgctgcctcccattgtcgttgacgatgactggactcctactgcacttgaatgaccaaacgaacttgaaactgctatatacacacctatgttgcttgagagactgcactcctctcat

SEQ ID NO: 62327 - DNA, 651 bp, Glycine max
  Clone ID: PAT_MRT3847_27297C.1
attcggctcgagcagagagattccgaggcggagactgcagttgctcaggtggaggagccgaccgaagttgagaggcttactcagatgctcaggaatgccgagtaccagcaagctactattgagtggctgcagtctgacaatcaggctgagctcttcgacaatctcttcagattcttgaacccgctctacctgcagcaggttacgtctctggttgcgctctcggtttcagctgccatcacgtcgagcttcgagaccaacgttgagctgcgtcttgagtggcttggcaccatcgtgtcgaacattgacacttcggaccccgacatccgcgacgttgcgcccaagatcatggacgtgctgtaccagcgcctgcagggtgcctacatgcaactcgcagaatcggtgccgcgcgatgacggcgcgctgcgcaagatggtcactttgaccaggcagatcgcagatgtgaggagggtgctttgagtgtgctcatcgtcttacaggcactcatcacagtgtgccggcgccgtgcgcttaacgaatcacagggtacgttggatgggcacagccaacctagcgttttgttttgtctgagaagatgggagagtggaagactagctggttgaaagtggcaatggacatgaacttatgaaccgg

SEQ ID NO: 62328 - DNA, 281 bp, Glycine max
  Clone ID: PAT_MRT3847_27298C.1
ttgtggtttcctttttttaaatttttttccaaaaacataaaggggcgccatatattttatttcaatactaacgaaacaaaccttactatttgttcatttaatcaaactagcaaacatattgccactctttcaaccttggctctaaatcttcataaacagagggtggtatccaaccggaggacattctgctatataaatagtcctatatccacacgccggggcatatcgtgatatccacgaacctttctttaacctaattatcactttgaaatgtgattccc

SEQ ID NO: 62329 - DNA, 357 bp, Glycine max
  Clone ID: PAT_MRT3847_27299C.1
tttgggttttttttttttttttttccttttttttctttttgcatattttttttttttttttttttttttttattgattcaaccacctgaattttttttttttggtgaaaaacacacaagcaaacaaaacaaaccttataaaaaaaaacaaaggtctcacatctccctaacctggaaaaaaaacagaaaaaacaatgtttcctggagcggcccaaaaaaaaaaccaaaatatgcacaagggccttacttaattattatagcaacggcaacccctaaggaaaagctgccctaattacttattttatattttatattgcgagaaaaaaaccaaacccggaatattccgacccgaccggag

SEQ ID NO: 62330 - DNA, 406 bp, Glycine max
  Clone ID: PAT_MRT3847_2729C.1
cccacgcgtccgcccacgcgtccgcccacgcgtccgtcttcccatattgttctcgtgtgttgtgtgtgtcagtgttttggggtgtgtgtgtgagtgagtgagagaaagagaaaaaaaaaaaagaaaaaaagagtgtcttgggcggtttggtttgggtttaacactttcatttcgaagatgccacgcccagggccaaggccttacgagtgcgtgagaagggcttggcacagcgagcgccaccaacccgtgagaggttccatcattcagcagattttcagggtcgtcaatgacgctcacagtcccgcgaccaagaagaacaaggaatggcaagagaagctccccgtggtggttctcaaggccgaagaaatcatgtactccaaagccaattccgaggcagagtacttga

SEQ ID NO: 62331 - DNA, 652 bp, Glycine max
  unsure (1)..(652): unsure at all n locations
  Clone ID: PAT_MRT3847_272C.1
ctggnnngcaaacaccgggaatcaaaaaagaaaggttaagggaccaaacacaatggcttcccacccggaaacccaagttctggttttttcattccaaaaaaaccccggaaaagaaaaaccctaatggaggataaacctaataaaaaaacctgccccattaaaggcataaccacattacctgaatcttgggctgagnnttactaacaagggaaggaacccgggggggggaaaggcccatggatccccaatttcttctttcccctggcccaacttccactcaaaatggtgaacccaaccggccaatggcaggcaagctatcaacatgggccgaaaaaaagccgcacacaccctttttcctggttcacaaggccagggcctgcataaaacccagggggcataattctcaactaaaaaactctctggcctccnnncattaagaattttccacaaaatggtggccctggtggatcccgatatatttaatgggaaccccctnnctggcagaaaaagaaaaccccccaaatttggaanctcctgaacccannntaatggccccaccggagctggaccatgccttcctaaaagtnnatggantnccgccccccnacatgggaacttaaaaaaatgggccnnnntaacnntttcatggccc

SEQ ID NO: 62332 - DNA, 576 bp, Glycine max
  Clone ID: PAT_MRT3847_27300C.1
tcgatactcgtgggagcgcccaggacatcactggcgattattgaattgaagtctctcagacgcacaaatacaaggagccaaccgacatcctcaaccttacattccatttccctacatttcttccctctctttcttttccattctcccttcacaattttcccacaaccttttttttcctttcatttttttaattttttttttttaaattcttccatcgtttttttccttccttcagagaaaataaaccataacgattttgtttcagctcttcttagctcaccccaaaccaaatccaattccatcactgcattgatccgtttccttcaaattattcagcaatggacgagttcggcgttttgaccgaaaagttcggtctcaaaccgcaaggaaaatccgctccaatggcaagggcaaagcgacctccgaatgtcgctgattcccaaacacgccccaatcccaaattcccccttaacggatccccgtctcaccaaaattccaccttcgatttcgattacggagttttcagcaacagcaacaccgacaacaaaacgcagcgtttcgacgacatctttggcg

SEQ ID NO: 62333 - DNA, 215 bp, Glycine max
  Clone ID: PAT_MRT3847_27301C.1
atctgcatctcaggatcgtcatccagccggacaatgcattgctgctctacgtccccgaaggctggggtatggctctctggtcttccctggcctactgtgcccgctatatcggccaagaacagctcgatcatgccgcgttcgagactggtcgtggcgccggtccggatgatttcccctcctgtctcacgtatgccgcccgtcatgagcaaatggtc

SEQ ID NO: 62334 - DNA, 437 bp, Glycine max
  Clone ID: PAT_MRT3847_27302C.1
ggctcgagcttcagtttcttatatatgcaagagcacaccacttacttgatcttctgtttctctctgttgttataaatttatgtccctttctcattattcttttattcttcatttaaacaagaaagaccagttcaatccctcttttacctttctttaagcagattttgatatttatatcccccaccctactctgttttattactatatgatacccatttctaatttgtttcatacatattatttaatttaactatgatagttggtgcagattattgcatagtatatatctcagttacaatataatttggcatctcttcttctcctagcttagcttcattttttttcaagagaaactaaacacttcacagaaaatgaaaaaaataaaataataatcaagctaaacatgctttagtaactcattaaaatctgtctagtga

SEQ ID NO: 62335 - DNA, 1213 bp, Glycine max
  Clone ID: PAT_MRT3847_27303C.1
aattcggctcgagcggctctccagcgtcgtcgtcgtcgtcgttgtcgttcttgaggacttacagcgtggatgatttgggggagaaattgaggatgttgaggccggagggaatgagaaatgattggttttctgtgacggagttgagtgagaggcttagaaggttgacgaagatggaggaggaggaggtggagaagcaagcccattccaatacccaatacggctgcaataaagacgtgctagatcatgtcagaggatccctcgtccggttggatcaaaatcaaactgaggccgctaagaaagcttcacgccagggacttagtatattgagccacttgaatgggactccaaccttctccctcgaccctcccaaaccccaccttgttgaaaagtactttcatccggataatatgtcctcctccgagaagttgaaaatcgagcttgccaaggttagagatgagtttaaaatgtccgactccgattgcggttctgcgcgtgttcaaattgcacaactcacaacaaagattaagcatctatcagcagttctacacaagaaggatgttcattctcgtaaaggtttgctagcaatggttcagaggagaaaaagattactgaaatacctcagaagaactgattgggattcctattgttttgttatctccaagctgggtctacgtgataatcccgatcatatttatagagctcgatctggtacggcgacataggatcacatatctggtggtcagatgaaagaaaactcaaaataagcaaaatggaaaaagaaaatcagctggttgatggaaagctggctgggttgtggaggtttcgttcaggtcagtcagggtgtaaaccaaactggtcaagtgctgaatcaccggtttttcaggtctggtttttacaactatgatccgcatatcagttactgatgtattccatttttctttctgtacgaggaggggattgatacgatggtcagcccatttaattattttttaccagccttgggttgaatttatgacaaatgttttcatttcccttgaattgtttgttttgcatgtttttggctgtcgttcccatttgaataatatatcatgaatcgtatttagaaaaaaaaaaaaaaaaaaaaaaaaaaaaaaaaaaaaaaaaaaaaaaaaaaaaaaaaaaaaaaaaaaaaaaaaaaaaaaaaaaaaaaaaaaaaaaaaaaaaaaaaaaaaaa

SEQ ID NO: 62336 - DNA, 256 bp, Glycine max
  unsure (1)..(256): unsure at all n locations
  Clone ID: PAT_MRT3847_27304C.1
gcgacaatgatgcttgtatttctactaatatattctaattaaatattctatttaatnttatggcatcctttacctcgacatatatataaataagnncaacatataaaaatgcgaaatttaatcaaattaattttattcaaatcacgtaaacaaatccacgtggataaaaaagtcatattcactttactattatcaaataaaacttattanaaacatctaccgctcaaaacaaggttgttcaagtttacaaaataac

SEQ ID NO: 62337 - DNA, 199 bp, Glycine max
  Clone ID: PAT_MRT3847_27305C.1
ggcaaaaggaacccgtcactgaccgtaccgactggcaccattcttttcttttaagacgatactacggtttagctgcggactgtgacgaaaaggggcacccctcaccctacgacaaacttgatctccttttggcacacaccggcccgatatggtgtacggtcagatcctacatgctctgagtttacttcagcaggcgccc

SEQ ID NO: 62338 - DNA, 267 bp, Glycine max
  Clone ID: PAT_MRT3847_27306C.1
ctcacgcgtccgcccacgcgtgggcagacgcgggggattttttttaaaatgacgtctgatctataaaccggaaaaaaaactgaatgatttctgaattcaagaatttttcaaatacttactaattctaggagtgcgattatttaaagggaagaaaaataatttattgggtggaaaacaactttatgaaacaatttttttttcaattttaatttaattggaggaccactctctttttgaaaaacgaacttttcgtaaaattaaaaatta

SEQ ID NO: 62339 - DNA, 332 bp, Glycine max
  Clone ID: PAT_MRT3847_27307C.1
acggggacacctatggtgacctcatttgacgaccttgaccaactccttgaccgtgctttctaggatggttaggactataaggagaatgctaaccttataagtgcagcagcaagtgcgaacactaggaaggacagtacttctgtgacgtcttagttgcaatgattgggcctgggattacccgtttcgagaaccaacaataaagcgaaacacaatggtgctcacaaagacagtcacatggtctacgcgctctacaagctcatggaccagaccatcgaggctgccaaagggcttgagaatatgttcacacctactgtcgatgacattgggaagga

SEQ ID NO: 62340 - DNA, 156 bp, Glycine max
  Clone ID: PAT_MRT3847_27308C.1
ctcacgcgtgcgcttagatgagcggacagagcattaatggccgcggaggcgagtattattgactcttttgctagctgggtccgtgccagtagatccttcgacctatgatactttgcttgtcacatatgaactagagaaagaggatcacacccgctt

SEQ ID NO: 62341 - DNA, 381 bp, Glycine max
  Clone ID: PAT_MRT3847_27309C.1
gccacacattcgaaaacacaatgttcatgtgtggatctgggtttgggacagcgatctctcacgctgacttacactatgacgaacgtatcgaaggctacatcaaaggctatcgacaagtcttttacgaccgctctactgaccacagatgaaccgctgaatcacctgaaataacacctaccctggagcctgcttaatgagaaacatgttacagaactgcttacaagaacgctacgaaagcagattcagaaaccgcattagtgtacttggaagtataggacaagcaatactacctgaatgaataccctgacctttatactgaccttaccgccacatctgcagccattgcttatataatggcatatatagcaacttccgacatga

SEQ ID NO: 62342 - DNA, 713 bp, Glycine max
  unsure (1)..(713): unsure at all n locations
  Clone ID: PAT_MRT3847_2730C.1
tttttaaataaatacacaagtgggggtgcaaagttgtggcactcaacaccaacataatggtgttagcataagagttatcacatatccagataattcaaattcaaagcagaaatgttacatcattaacgactaacaggctaaaagctcaacacactccagtgaaatctgtctcattcttcaattctcaatggcaccaaaggaaaacagtaaaatacaggaaacaccattaacaacattggctaaaaaaaaatccaagccacaaacagttgcagtttcacaaaggccaaggcttaagaccaaaactatataacacaattatatgtacgtagaagttgaatacacaacaaggcttaagtaactcaacaagttgtgcttacttccgcggctgtggcatctctaggagaatcaagagatatcacagtttcaaatgcaccaactagagccttgaccttgctcttccttagctcagcaagcatacttgcggtctcttcaatcacattattatacaaacgagggtgtctgtttcttcccttccacgttttgatgcctcaaaaccactttctcatcagatcctgattttgaagcctctatcttgcttctatccccaccaacctttctcccaacaattctcctattactttcttccacagtnttggagtttggccacaactttctctgatttggtgttagaagcatttacctcaccatcacca

SEQ ID NO: 62343 - DNA, 422 bp, Glycine max
  Clone ID: PAT_MRT3847_27310C.1
tctttttgtcttgaagtagtagtagtaataataataatacactgacaggagaaaggctttttgcgctgtcatctaatcatagtttgtcatatatggtaagtttgttgatttttacattacaactttaaaagtcatacctggcatgatttctgattggttgacggtgtaagaatttttgtactgatagtgcatgaaagttaaactctaaaaatgtttggaaagttagttttttttcaatatttcaatgttgtatatttttttggtgaaaattcaatgtcgtatatactaaggaatgagcatacaacattacattggtcttccaattattaatgataccaaattaatcctccaatgataattaatgtcattcgaattgtccttcaaggaccaatttgatggcacatatatatttggagaaataa

SEQ ID NO: 62344 - DNA, 359 bp, Glycine max
  Clone ID: PAT_MRT3847_27311C.1
gtaagctcggaattcggctttagggtgtaccgagccaccaaatatatcaggggacgcaacagcaccaaagggggcaatttctactgcaaacgcgtataccctgccactatactagtggcactcatgctaagctgaactgtaagctgcaactacccttcccgagaccaagagctaacctgacacggtcacatacactgccaggaccacatacaatgctgatacttcagagtctcctactgagaaacgtatgcgcaccactcggttcacccttgaaggcacaaacggactcacggaccttatcagcggcgccgctggcgttcgaggaagacactggtccgttggacttaaaaaacgggggg

SEQ ID NO: 62345 - DNA, 461 bp, Glycine max
  Clone ID: PAT_MRT3847_27312C.1
aattcggctcgaggtcagcccggtctctgttgcacacttctcgcagtacaagctaactatgttactactcaagcgacttgaaaacctaggcttccaaatatgtgcgcctgaaagtttggaaggaaatgaacagtcttgtgagaaaaaaataatgatgggccatgagtgtgtttccattgatgccagcaatgactttgtaacagtaactgcatcttctatcattaaagggaagcgtgtagaacagaacattcactgtaacatccttattggtacagatggtgcaggaagtactgtaagaaagcttgtaggaatagaaatgagaggtgaaaaggacttgcaaaaacttgttagtgtccatttctttagcaaagaccttggacagtttttgcttaaggagaatcctggtatgcttttttttatcttcaatgctgaagctatttgggtccttgttgctcatgatc

SEQ ID NO: 62346 - DNA, 259 bp, Glycine max
  Clone ID: PAT_MRT3847_27313C.1
ctacatgcaggcccagggcctcttactcggtcgtcactaccgccgggcatgccacctactcaacgcattcaaaatcgttctgaccgaactgcgattacgctacctcgacgacaagtgcctcaaggaactgaaggagtgagatcagtgcctgtcgatgctgggagaggctaaagtggacgacgatggagatgttgatgatatgaaggactctaacgccatgttctcggataaagattgcgaagatcgtgaaaactatata

SEQ ID NO: 62347 - DNA, 734 bp, Glycine max
  Clone ID: PAT_MRT3847_27314C.1
gatggaaatggaacaaccaatggggatgaagtgcgaaagggcgattgaaaaccgagtgatggtgctgagaatggagatatggaagaaggaaaagataaagatgtggtgaaaaggatggttactgtggaggactggcttctccagtttgcaaggatgttcaagaaccatgtagggtttgagtctgattcttatctagatactcatgagtatgcaatgaagctgtatgaagaagcaatagaggattcagtggcaagcaatgatgctcaagaactttttagaatggctgcggataaatttcaagagatggctgctttggctttgtttaattggggtagtgttcagatgtccctggcaaggaaccaaggtttctttttggaggatggggcaagagagtcttccttggagcatataaaagctgcatatgaattggcacaaaaggagtatgagaaagcagaaatgagatatgaagaagccttgaaaatcaaacctgacttctatgaagggtatcttgctcttgggcatcagcagtttgagcaagcaaggctgtgctggtgttatgcaatggcatgcaagaaggacttagaagctggcttttctgatgaggttcttaaactttataacaaggcagaggacagcatggagaaaggcattttgatgtgggaggagattgacgagcaccgtctgaatggactatccaaaccagataaacattaaagacagttctgagaaaatgg

SEQ ID NO: 62348 - DNA, 163 bp, Glycine max
  Clone ID: PAT_MRT3847_27315C.1
acatctcgagccggctcctgcagacgacccaacgggtcctataaagtgatgaatataagcttgaccatacataggtaaaagaagatatactgttttaaaacgtatgggcgttgtcgattctcactacagacaaggcgaagcatattgtagtaaagtacagtga

SEQ ID NO: 62349 - DNA, 309 bp, Glycine max
  Clone ID: PAT_MRT3847_27316C.1
accggtctcgaatgtcccgttcgaccgacccgtgcgatcacacttactgtccttcttctcttcgacgctacaatcttgataacagtggaatgccaggcgtacgatatgttccctgtcctaatgaacactggctatggcgcccgtactcctgaggttaaatgctcaattttgaagctttctatagaaactcacatcatcttttgctttaagaccattccttaaaagtgctttgaaacatcataagaatacatccatggcgaacaatatagatcagacttccattcagttaaccatcttgcttacttttat

SEQ ID NO: 62350 - DNA, 593 bp, Glycine max
  Clone ID: PAT_MRT3847_27317C.1
tagtgggcaatgtttgggacactgttgttgcctctccctttcttcgccaactcattcccattccttccttctcccaacaaaaacgagtttgttagattcatcactacaccttcacattgcaacctaaaaatctctcagtttaacggtttccgcttttgctacgtgtttcttttctgcgcgttccacctctctcagctagtgtccattgtagccacaacacaagctcttacagcggttttaagaaatatcagctaaggctttgctggacagcaacattgggctgaacttgctgatcaggtgatattggatgtgatgaagcttaaaacatggcttgcgagtgttttgttgctcactattgctgtgcttaccaatacattaggtgcatttgtgggggtaaacattggcactgatgtttctgatctgccatctgctacaaatatagttggcattctacaagctaatcaaattactcatgcgcgtctatatgatgctaacgcgcacttactacaggccctttaaacactaatattgaagtaattggtggtgtcaccaatgaggaggtcctgaggattggaagaatctccatcagcagc

SEQ ID NO: 62351 - DNA, 1982 bp, Glycine max
  Clone ID: PAT_MRT3847_27318C.1
cccacgcgtacggtctgtctagaacatttctctaccaatcaaataagagccaccagcaattcacggatctcttctttctctctctctctctccgagtctgttctgtagtgccacccacacccatcagggtttatgatcttttcctccaaatgctgaatcttccatctccatttttcacccgatttctttgccagggttccagaaatgtttaattttaaacaaagatgagtacgactgaattatctaatatgaagcaacctcctgttccgctggcaaccctgattggccaggagctacgaaatggaaaaattgaaaaaccttttgtgaagtatgggcaggctggcttggcaaagaaaggagaagattactttttaatcaagacagattgccagagagttcctggggattcatcaacactctatttctgtctttgcgatctttgatgggcacaacggtatatctgctgctatttttgcgaaggaaagcatactaagtaatgttttgagtgcaataccgcaagatatgggtagggatgagtggcttcaagctctgcctcgtgctctagttgttggttttgtaaaaactgacatagagtttcagaaaaaaggggaaacttctggaacaacagctacatttgttctgattgatagatggactgttactgttgcatctgtttgggatttccgttgcatattagatactgagggagctgttgtttctctcttgacagttgatcacagaattggaagaaaatgtagaaggagagggatcgcgttactgcttgtggtggtggtagatatacttccttcagatcatcgtattttacctgcggcttcttcgatggtggccgtgccgattgagcttctctagtttcattgaagacatcgacgtggtataattaattgtgcaactataagatgttaagcattggaatctttgaggaattgtttgaagagtttttagcgattcttacggtgatttgctggctgaattttctgtttagcttgaaaagtgatttcgtgggctgtgtagtctgccatgcaggtcaagccatgcgttgatgtacctgcagagcttgctgcatagctggtggttcaagaagctttaaggtcaagaggtctgaaggatgatacaacttgtcctcgttgtagaattattattgccttcagatcatcccgtgttgcctcagcaattccaagaaagaaacgtaacgtgctaacttacccttctatttttgggaaagaaatctcaaaactctacaaacataaggcaccaataagctttctgctgttggtgttgtggaggaattatttgaagagggttctgcaatgcttacagagaggttaggcaaggattttccatctaatacgaatcctgagattttccgctgtgcggtttgccaagcacagatcagcccccctgtgtggacagtttatcaatgaacactgggccttttttccccccagtatctaagccatgggaaggtccgttcctctgcacaaactgtcagaagaagaaagatgccatggaaggaaaaaggctagccctcagagacagcataataatatagtagtctagcaacatagtaaatattagtataatttttctctagcagtgtgagcatgcttgcttctacatttgggtggtgattgtcattggtgtgttaagaatgaggttgagatactagccatattaggtctattggaggttgttgcatgtttgtttttggcgtctgctcagctgttggactaactgatagaacaagcaatgttgtgttgtgtagaagataacttctagtagtttgattactaacggcttgtaattaactgacactttcattgttaccatttatagatttttttctgagtacacggaagcctctgtctcttaactctacgtgagtccatcactactacagcccaaatgcatctgtaaacagtaacccataaaaaaaaaaaaaaaaaaaaaaaaaaaaaaaaccc

SEQ ID NO: 62352 - DNA, 2183 bp, Glycine max
  Clone ID: PAT_MRT3847_27319C.1
cacgcgtccgagcaaagaaggctctcttcttctccgtcactgccactctcattgtctcttcttctctcttctctagggtttatcgccatttgatctcaagctctcttcccaaaatgccgtctccccctcttccacaatcggaccgctagtgcccctgcttttgccggtgtgcaatgtatgttttcttgctgcggttctggaaatgttgaattctgaactgagataaaatgagtaggatagaactatcgagggcgaagtcagcgccggttccattggggactctgattggtcgtgagcttcgaaatggaaaagttgaaaaaccttttgtgaagtatggacaagctggattggccaagaaaggagaagattactttctgatcaagacagattgcctcagggttcccggggatgcatcaacggcgttttctgtctttgctggagcatcaatttattcccacaatggttatgatatccataaggaattcttgattggcagatctttgatgggcacaatggtatatctgctgctatttttgcgaaggaaagcatactaagtaatgttttgagtgcaataccacaagatatcagtagggatgagtggcttcaagctctgcctcgtgctctagttgttggttttgtaaaaactgacatagagtttcagaaaaaaggggaaacttcaggaacaacagctacatttgttctggttgatggatggactgttactgttgcatctgttggggattcccgttgcatattagatactcaaggaggtgttgtttctctcttgacagttgatcacagattggaagaaaatgcagaagagagggaacgcgttactgccagtggtggtgaagtaggaagactcaatgtatttggaggcaatgaggtacaatgtaatctttctattcctttctaatcaggactttttcactagcctgttttggttccttaatacatctataggtagggcctcttcgctgttggcctggtggattgtgcctttctagatcaattggtgacacagacgtgggagaatttattgtcccaataccacatgtcaagcaagtgaagctatcaaatgctggtggaagacttattatagcttctgatggtatttgggatgctttatcttctgatatggctgccaagtcatgccggggtgtacctgcagagcttgctgcaaagctggtggttaaggcaggaagctctaaggtcaagagggctgaaggatgatacaacttgcctcgttgtagatattattccttcagatcatcctgtgttaccagcaattccaagaaagaaacgtagtgtgctaacttcccttctctttggaaagaaatctccaaactctacaaacaaaggcaacaataagctttctgctgttggtgttgtggaggaattatttgaagagggttctgcaatgcttacagagaggtaactgagactataattgctaaatttatatttgcaggatgccatttgaagtttaattgttgctttgcttcatcaccaacatggtggaaagtgagaataaatgatcctttttcccaataacattatgtgtgattcttaaatttccggacataaaaaatgcaggttaggcaaggattttccgtctaatccgaatcctgggattttccgctgtgcagtttgccaagcagatcagccctctgtggatagtgtatcaatgaacactgggtctttttttcccccagtatctaagccatgggaaggtctgttcctctgcacaaactgtcagaagaagaaagatgccatggaaggaaaaaggtctaccaggccctcagagacagcataataatatagtagtaatctagcaacatagtaaaatattagtatagtttttctctggcagtgtgagcatgcttgcttctacatttgggtggtgattgtcattggtgtgtaaggaatgaggttgagatagccatattaggtctattggaggttgtcgcaagtttgtttttggcgtgtgctctcagctgttggactgactgacagaacaagcaatgttgtttagtagataacttctattagtttgattactaacggcttgtaattaactggcaatttcattgttaccctttataggtttatttgtttttaacaacagtacacattatgttgtgtgtgactctgtcggacaacaggatatgctcaatctcctg

SEQ ID NO: 62353 - DNA, 1479 bp, Glycine max
  unsure (1)..(1479): unsure at all n locations
  Clone ID: PAT_MRT3847_2731C.1
ggcagattttcagggtcgtcaatgacgcccactgccccgccgcatcggccaaggttctcgtgtgttgtgtgtgtcagtgttttggggtgtgtgtgtgagtgagtgagagaaagagaaaaaaaaaaaagaaaaaaagagtgtcttggggcggtttggtttgggtttaacactttcatttcgaagatgccacgcccagggccaaggccttacgagtgcgtgagaagggcttggcacagcgagcgccaccaacccgtgagaggttccatcattcagcagattttcagggtcgtcaatgacgctcacagtcccgcgaccacctttctccaaggattcaacagcctccttgtctgcctcctaaacctgttgcggggaatcccttgaactatgcaaaagtcacaactcctgctgtgtcaccaattcctgtgccagattctatccacccaaatagcaggctcatgggttcctctaagtaccctttctcagaaggtatcccttctggtcatcaccagccattgacaatggaagctagacccccattgaacttgggttcagtttaccctttgtactatggttatgaagccagagatcccgacccgtggacgactgctacagataccacgtgttctgatacaatctttgttggcagaccagtcatttcagtccctgagccctcaggaattggtctatcggaaaacttctcctatggtacattccatcacgttgcaaacagaatgagaaaagagactgctgttggcactcaggaggcagcaccagatagggaatgtgacttgtctttgaggttgggtcaatgtctgcatccgtgttcaagcagcaaaagtagttcagcatatgaagtagatgatgttggtttaggagtttcaccggaaagctgcaagtttagccatttatccttgcagagaaatagagagttctgtttttatcctagagagacaggttatggcaccattgagtccacttctggtaaatgtaatgtagagggtgaagatctgaatttagaggcaactcttcggaagcgcaaagcacctttatgtggtaacaacgaggaagatgggcaattttgccggaatccaggggtcccatccaatcgttttactagtaggcctggttcgtacacactctcttgttgtatcatagtatatgcatttgcatttctagatagatgaatgatccaaaatgttgtttagtcctcgtatgtagactcttgatgtgtgcccctccttgtgaaaaattttagaaggaatggcaagagaagctccccgtggtggttctcaaggccgaagaaatcatgtactccaaagccaattccgaggcagagtacttgaatcctgatacgctctgggaccgcctcaatgatgccgttaacacaatcatacggagagatgagaccaccgagacaggagaccttttgcccccatgtgttgaagctgcacttaacctgngatgcaaacctgtgagaac

SEQ ID NO: 62354 - DNA, 2095 bp, Glycine max
  Clone ID: PAT_MRT3847_27320C.1
taccaatcaaatcacagtcacgggtagcaaagcaaggctctcttcttctccgtcactgccactctcattgtctcttcttctctcttctctagggtttatcgccatttgatctcaagctctcttcccaaaatgccgtctccccctcttccacaatcggaccgctagtgcccctgcttttgccggtatgttttcttgctgcggttctggaaatgttgaattctgaactgagataaaatgagtaggatagaactatcgagggcgaagtcagcgccggttccattggggactctgattggtcgtgagcttcgaaatggaaaagttgaaaaaccttttgtgaagtatggacaagctggattggccaagaaaggagaagattactttctgatcaagacagattgcctcagggttcccggggatgcatcaacggcgttttctgtctttgcggtctttgatgggcataacggtatatcagctgctatttttgcgaaggaaaacttgctaagtaatgttttgagtgcaatacctcaagatattagcagggatgcttggcttcaggctcttcctcgtgctctggttgttggttttgtgaagactgacatagagtttcagcaaaagggggaaacttctggaacaacagctacatttgttttggttgatggatggactatcactgttgcatctgtgggagattcccgctgcatatcagatactcagggaggtgtagtttctctcttgacagttgatcacagactggaagagaatgcagaagagagggagcgtgttactgccagcggtggtgaagtaggaagactcaatgtatttggaggcaatgaggttgggcctcttcgctgctggccaggtggattgtgcctatccagatcaataggcgacacggatgtgggagaatttattgtgccaataccacatgtaaagcaagtgaagctttccaatgttggtggaaggcttattatagcttctgatggtatttgggatgctttatcatccgatatggctgctaagtcttgtcgaggtctacctgcagagcttgctgcaaaactagtggttaaggaagctctaaggtcaagaggccttaaggatgatacaacctgccttgttgtagatattattccttcggacctccctgtattaccaccgattccaagaaagaaacataatatgctaacttcgcttctattttttggaaagaaatctgagaactctgtgaacaaagctaccaataagctttctgcagttggtgttgtggaggagttatttgaagagggttctgcaatgcttaccgaaaggtgagttttgagcctttacctgcctgcatgctatgtcttgaaatgtaatagcaacttaattgaacaagtgactggaattttattttttatttttgcatttgggtgtatatgcttgggaaattttttaaaattctgtattttcttaaaatgcaggctaggtaaggattttccgcttaataaaaattctggtattttccgttgtgcggtttgccaagtggaccaaccccctggtgatgatggtttatcagtgaactctgggccttttttctctccagcatctagtccattcctctgcacaaactgtcagaagaagaaagatgccatggaaggaaaaaggcctagcagagcctccattacagcatagtaattatctagtattacagtagtaacatagtaaatattagtataattttaccctggcagtgtgagcatgcttgattttacattttcggtggttattgtcatagacgtgtaagaaatgaggttgagaattgaggtaggcttagtagctgttttggaggttgctgcaagtttgactctggcttgtgctcagctgtaggactggctgacagaacaaacaagaaagttgtgtctggtagataaaaattctagtggaatctgctaacggcttgtatttgtaagtaaactgaagcttttgtggctgcctctctatcgagagtgcttcaatgctacagcccaaatgcatctgtatcttctaaacttgtgttgttatacaaatacaactacatgtctcgaatgtccctccgaattcgatgagtaagattcttgtg

SEQ ID NO: 62355 - DNA, 707 bp, Glycine max
  unsure (1)..(707): unsure at all n locations
  Clone ID: PAT_MRT3847_27321C.1
aattcggctcgagctgtaaccgaaaaaccaaaaaggacctcctttttgcgcgttgtctctctaccaatcaaatcacagtcacgcagcaaagcaacgctctctttttctccgtcactgccacttctcttctctagggtttatcgtcatttgatctcaacctctcttcctcccaaaatgccgtctccaccgcttccacaatcggaccgctagtgcccctgctttttccgatgtgcaatgtatattttgttcgctgctgcggttctggaaatgttgaattctgaactgagataagatgagtaggattgaattatcgagggcgaagtcagcgccggttccattggggactctgattggccgtgagcttcgaaatggaaaagttgaaaaaccttttgtgaagtatggacaatctggattggccaagaaaggagaagattactttctgatcaagacagattgcctcagggttcctggggatgcatcaacggctttttctgtctttgcggtctttgatgggcataacggtatatcagctgctatttttgcaaaggaaaacttgctaagtaatgttttgagtgcaataccacaagatattagcagggatgcttggcttcaggctcttcctcgtgctctggttgttggttttgtgaagactgacatagaggttcagcanaagggggaaacttctgggaacacagctacatttgttt

SEQ ID NO: 62356 - DNA, 256 bp, Glycine max
  Clone ID: PAT_MRT3847_27322C.1
ggctcgagcactaacatgcatggggcatgcttgttgtctatgtcggagctccatgtggtccctggggccatctggctaaacttgacgacacaatggatggactattaccgggcctgtttggcaagctattgacttcttggggccatagtcttcttggatgggcttgccttgatctggtgcacgatgttgagcaggaacgagcacgccacaaaattgaggcaacagctaccagctccgctgatcaggagagggggat

SEQ ID NO: 62357 - DNA, 426 bp, Glycine max
  Clone ID: PAT_MRT3847_27323C.1
ggggaaaaaacgggtttttttgatgggggttccccttgggccaaggaaaatccggcgttggccctaaaaaaaccggccccccaacccaagggggcgggggatttaaaaggggtcccgacccttgggggaaaagaaaaaaaaaaattctcaatgggcccaatttttttttttggcaagcttgttcaacaaaaaagctttttttataaaaacccttccctccttggaggaaccggggttttaatgacccggagtttttgccccccttcaaccataggaggcccgctaaaaggaatttgagaggggcctcccctgggtggcttaaaaaaaggcaaccccccatctgggggatccccccccgggctgggatccaccccctccaacactttaccgggcttaagcaaccccctcacaggggctttcaggttc

SEQ ID NO: 62358 - DNA, 435 bp, Glycine max
  Clone ID: PAT_MRT3847_27324C.1
aaaaagcaaaatttcttttctttgaaggcccaatttcttcacattacaaaattttttaattcgcacaaaaaggcaaagaaccctgcttcctgattaatttaaaacactggagcttttaatccccttcccaaccccttttttataagggggtttttaaaacctgaagcagctaaaagccctttttttttttcaccccttttcaaaaggggggggataaccatttttactggcccaaaggggatatacttgttaacctgaaaccctgctttgttaaaaccaagggaaagggcccctgacattccatataggggggcaaaatttagcttgggggtcacctttccaccccccaattaatatgtttttgttgcagccaattttcctgattaaaaattgggggggggaaaaacaacaaaaccaggcccgtttgcaattttt

SEQ ID NO: 62359 - DNA, 2390 bp, Glycine max
  Clone ID: PAT_MRT3847_27325C.1
gcaagatctctactccctctctctgagtctgttctattagggtttaggatcttttcctccaaatgctgaatcttccatctccatttttcacctgatttctttgacagggttccagagatgtttaattttaaacaaagatgagcagaactgaattatctaatatgaagcaacctcctgttcccctggcaaccctgattggccaggagttacggaatggaaaaatcgaaaagccttttgtgaagtatgggcaggctggcctggcaaagaaaggagaagattactttttaatcaaagcagattgccagagagttccaggggattcatcaacactgttttctgtctttgcgatctttgatgggcacaatggtatatctgctgctatttttgcgaaggaaagcatactaagtaatgttttgagtgcaataccacaagatatcagtagggatgagtggcttcaagctctgcctcgtgctctagttgttggttttgtgaaaactgacatagagtttcagaaaaagggggaaacttctggaacaacagctacatttgttttggttgatggatggactgtcactgttgcatctgttggggattcccgctgcatattagatactcagggaggtgttgtttctctcttgacagttgatcacagactggaagagaatgcagaagagagggagcgcgttactgccagcggtggtgaagtaggaagactcaatgtatttggaggcaatgaggttgggcctcttcgctgctggccaggtggattgtgcctatctagatctataggtgacacagacgtgggagaatttattgtgccaataccacatgttaagcaagtgaagctttcaaatgctggtggaaggcttattatagcttctgatggtatttgggatgctttatcatctgatatggctgctaagtcttgtcggggtctacctgcagagcttgctgcaaaactagtggttaaggaagctctaaggtcaagaggcctcaaggatgatacaacttgccttgttgtagatattattccttcggacctccctgtattaccaccaattccaagaaagaaacataatatgctaacttcgcttctattttttggaaagaaatctgagaactctgtgaacaaagctaccaataagctttctgcagttggtgttgtggaggagttatttgaagagggttctgcaatgcttaccgaaaggctaggtaaggattttccgcttaataaaaattctggtattttccgttgtgcggtttgccaagtggaccaaccccctggtgatgatggtttatcagtgaactctgggccttttttctctccagcatctaatccattcctctgcacaaactgtcagaagaagaaagatgccatggaaggaaaaaggcctagcagagcctccattacagcatagtaattatctagtattacagtagtaacatagtaaatattagtataatttttccctggcagtgtgagcatgcttgattttacattttcggtggttattgtcatagacgtgtaagaaatgaggttgagaattgaggtaggcttagtaggtgttttggaggttgctgcaagtttgattctggcttgtgctcagctgtaggactggctgacagaacaaacaagaaagttgtgtctggtagaaaaaaattctagtggaatctgctaacggcttgtatttgtaagtaaactgaagcttttgtggctgcctctgttttgagagtgcttcaatgctacagcccaaatgcatctgtatcttttaaacttatgttatacaaatacaactacatgtctcgaatgtccctccgaattcgatgagtaagattcttgtgaaaaaattggccctcggagacagcatagtaatatagtattctagcagcatagtaaatattagtataatttttctctggcagtgtgagcatgcttacttctacatttgggtggtgattgtcattggtgtgtaagaatgaggttgagatagccatattaggtctattggaggttgtcgcaagtttgtttttggcgtgtgctctcagctgttggactgactgacagaacaagcaatgttgtttagtagataacttctattagtttgattactaacggcttgtaattaactggcaatttcattgttaccctttataggtttatttgtttttaacaacagtacatgttgtgtgtgactctgtcggaacaggatatgctcaatctcgaattgtaagttttttttaacttgctacattattaagttgtgtctggtagataaaaattctagtggaatctgctaacggcttgtatttgtaagtaaactgaagcttttgtggctgcctctctatcgagagtgcttcaatgttacagcccaaatgcatctgtgtctttt

SEQ ID NO: 62360 - DNA, 145 bp, Glycine max
  Clone ID: PAT_MRT3847_27326C.1
tttaatagtttacttccacaatccaaagccaaggggaaattagtgaaatatacatgcgcggaacaaaataatacaataaagggttatctgccccaaactaaaagacatttgagattaaagaaaaactacagaagggcaaccaaaa

SEQ ID NO: 62361 - DNA, 197 bp, Glycine max
  Clone ID: PAT_MRT3847_27327C.1
agattttgcgaacaagccctttgtgcatgtctcgctccaacaaacaagctgcttctaagcactgtctctcgtggatcagcatctgtggaatcacaggcgcaagctgaaaagtgtaccactagcttgaggaagaaccgtgtcgtgcaatccgtcaccgtccatgcaggaaagtgaactgctgagatccgtgacccaac

SEQ ID NO: 62362 - DNA, 777 bp, Glycine max
  Clone ID: PAT_MRT3847_27328C.1
ttctcctccttccttgttgagagaagaattgatttggtctatggaggtggtagcgtgggtttgatgggtctagtttctcaggcggttcatgatggtgggcgccatgttctgggcgttatcccaaaaagcctcatgccaagagagataactggtgatcctattggggaagtgagagcagtatctgatatgcatcaaaggaaagctgagatggctcgtcaagctgatgcattcattgcccttcctgggggatatggaacactcgaagaattgctggaaatcattacatgggctcagcttgggatccacagcaaaccggtgggcctattgaatgtggatggattttacaattccttgttgtctttcattgacaaggccgttgatgaaggctttatttcaccaaaagcacgtcgcattatcgtgtcagcacccacagctaaagatttggttagggagctagaggaacatgtacctgagagagatgaagttgtatccaagttggtgtgggaagacaggctaaattatgtggtgcctgaatcagaagttgccatgtgaccgatctatgcgcttagtgggtgattgatgaatgaacaccatagttttggggtcttctatggatcattttgttgttttaaatgtattttgggtacataaaaatagtcaatatatatgggcataggaatcgtaggaccatacaccatcccttttttttgtttttccaatttatgttgatgcccctactatacagggaatgagggtagttaaaaaatatggaaaatc

SEQ ID NO: 62363 - DNA, 125 bp, Glycine max
  Clone ID: PAT_MRT3847_27329C.1
ttgttgtctctttcatgtgctcagtttagtgttttcacaagttgattggatgggatttgctttgtcttttggctcctagcctgttttggtttcctcttatgactttgctaccggagataaagaaa

SEQ ID NO: 62364 - DNA, 169 bp, Glycine max
  Clone ID: PAT_MRT3847_2732C.1
caggcaccggaccggaaccggggcgacccacgcgaccgcggacgttagagacccactacgaacgcacagcgccaggaaggcgggacacgcaaaaagacagaggggcaaacgcggagctaaccggaaggaggaaacacgggccacaacaaagcaaaccaagagaagaagg

SEQ ID NO: 62365 - DNA, 316 bp, Glycine max
  Clone ID: PAT_MRT3847_27330C.1
ttatcgaaaatactatctgacaagccaatccctcacaagaataagttagaaccagcaccggaagcaaactcctcattagagcagaaatacatgcgatgcaaggtcctaaggacagcatttcggcctattccggcttattctcaaacgaatctatcagagactccatctcacagatttttgaacacctgaaaaaataattggggataagttgacaggcaattaacgctagattcacatttaaagcttgcctacaaactcggcgagaggaaacaacagctcctgcttgcctttgcttgagctaatgcaaaggacaagc

SEQ ID NO: 62366 - DNA, 1113 bp, Glycine max
  Clone ID: PAT_MRT3847_27331C.1
ggctcgcttttcctttctttttctctcattccattcacattctcaacccaacacacaacttccaaccatattctctcgccacttcctcacatggacgcaaagagaaccctagagctcacggttttatcgttggaggagctccacgtggactggaagcacgccgcggagagcctctacgtggtggtacgggcagagtccatcaccagctactccacgggcacggccaccgaaagcggtggcaacccgtcgtggaacgagaagctggtagttgacgtgcccgtgcatgcgaggtccatcacgctggaggtgaagtgcaaggacgcccccagcgtgaaggacctcggcatcgcgaggatagccatctcggatttcctcggtggcggcacgatggcgccggagcagtgtttgcaatttttgagttacaggttgagggattgggaagggaggcgcagtggggtgattaatttttccgttagggttagggctacggagaaggcatgttcttgctccggggacgttgttattggcgttcccattttgtggaacaggtaaaggtgtgtttggggttacggtccggtggtgccaaatcgatcacgttgaagcactctttattttcacttccgttttttttctcacgtcgaaaacacgatttcttccacccatgggtgtatatggcccaagtgtctacaattattaatagaatgttttaattccatttaactttatcggcccatccggttatctttatctttttcttttttttgggctttttttattttacttcaattctccgtctcattgtgagaacagatttacgtttgtgtttgcaggcagaattagaatgaagcttagtcacatgcgtttcggtgcatgtgcagctcatggaattcgggtctatgaatacaagcttcaccagttagttatatattcatagtctctttcaataaaataggtactcctcttaattataagaagaagtgtaaatgtttttttttgtttctatttagagagatgtaactttcttctacgtatttagtgagaaaaattctattacttattattttttctttattagttgaaggttttttacattgaaatattaagccgatttct

SEQ ID NO: 62367 - DNA, 237 bp, Glycine max
  unsure (1)..(237): unsure at all n locations
  Clone ID: PAT_MRT3847_27332C.1
gngaaatccaagcgcgtgaaggcattccgatgtggtgaatttgatggatgtattgaaagggcggagtccgcccagggtatgccgttaaagaaaagagagaaatatgcacgcagagaagatgccattcttcatgctcttgaactcgagaagcaaatgttaaagaagcaagaaaaaataggactggagcaacttggtgtagcacaccaagtaaagaggagcaaatttgtttatcgccag

SEQ ID NO: 62368 - DNA, 317 bp, Glycine max
  Clone ID: PAT_MRT3847_27333C.1
ttgggttattctataatcacaggaggctattagtatatggcaggccgatgggggacactagactagacaactgtcagagaaacatccaaccagagaaccaagctgatagcagctcctaaatcctaacaatgctagagtgcctgccctatgatgaagggaaatcctcttgactgttggtagacattcggttgaaaaattcatatggagtaatcatggacgcggcagacatggacatggaaacccatctgggacccaaacctccgtcacaagcaaccaaaccaccttgcttcacccaaattcttacccggttggacaaa

SEQ ID NO: 62369 - DNA, 551 bp, Glycine max
  Clone ID: PAT_MRT3847_27334C.1
ggaacaaaataaaacaaacaaaaaaaccacaatacataacacccaaccctgcttttttgtgggaggggatcttcctgccttaaggcacaggacaggataaaaaatttttgtaaacatgaacaaaaagccaggtgggtcaaggctgctgggggagccacggggatactatacaaagggcagggctttttccaagaggctttaatccaccttttccatgcgcgaggcattcttattgccttccaaaggggggatctcatcaggaacagcagcactgggctcctttgcagtgacctcattttcatcgatgcccaagcctagtttaatcatgcggtaaatgcggttggagtgggtttggggatcctcaagtgagaaaccagaggagagcagagcagtttcaaacagcagcaccaccaggtccttgacagctttgtcgtttttgtttgcctcaaccttctgccgcaaggtcttcacgatggggtggtcaaggtttatctccaagtgttttttgggcattatgtaacccattgtaaagttgtctcacaatgcctggg

SEQ ID NO: 62370 - DNA, 996 bp, Glycine max
  Clone ID: PAT_MRT3847_27335C.1
ctctcaaaccaccccaacctacccctaccccaccagctgcggctcctcaacaaccattggttccctcattgccacaatcaccaagtgatgccaccccggacactgcagctgttgacattgttggaatcctgaggaaggcaaagtcattcaacatcctaatccgcctcatgaaaaccacccaattgatcaaccaactcaatgctcagcttctaactactaaatcaggcggcataacaattctttcacccgatgacagtgctttctcagagctcaaagtaggcttcctcaactctctctctgatggccaaaagctagaactcttgcaattccacgttctttcagactatgtctctagctccaactttgacactctgacgaaccctgtgagaacacttgcaggggctaaacctggaaaggtggaactgaatgtgataagttacggagggagtgtgaacatctcgacgggtgaggttaacaccaccatcactggcattatatataccgataagcatcttgctatatataaggtgggtaaggtgcttcttcctatggacttctttgctgttgctaaggcacctgcaaaagcaccctctttggctccagaaccttcaagtgatgcggcaaaggcacctaaagctgataaggatgagtcatcatcttcagatgcatcgcaggttaatcccactgaacagaactctggcatcgagaagatcagtgtgtacggaatgtgggtgtcccttgtttttggactggttctcctgattgcattttcatagtaaaccaaaataagttttgatgaatttaccaacgttcaagccagtagttaagttaccatattgttcatgttcaagatgtgttgttatgtgtaatgtgattgagagaaaggagtgaatactgtagtggtgaatttatcagactgggttgggggaatcttgtatttgactgattgttgtgcattcctttataaattgaagtgttatgacttatggtttcgtc

SEQ ID NO: 62371 - DNA, 1587 bp, Glycine max
  Clone ID: PAT_MRT3847_27336C.1
tatacggctgcgaaagacgacagaagggactccagataacagctggagatccgtggtgctccagcggaggggttgcacctgatggtacctttgtgagtgctggtggttttgacaccggagcaagaagcgttagatatatgggtcctaattgccaaaattgtgaatggagggaatacgacaacatattcggagcagacagatggtatgcaactcaacaaatccttccaaacggagaattcattttggtaggagggcgtagatcattcagctatgagttcatcccagtagaaggccaaaggggcgagaaaccctactttttcccattcttatacgaaacttcagacatagatgagaacaatctctacccttttgtgcacctttccacagatggaaacctcttcatcttctctaacaatcgttcccttcttctgaaccccaccacccacaaaattgttcgcacctttcccgtcttacccggtggctcccgcaactaccctgcctctggcatgtctgcccttctccccatcaaccttaacgaccccgccaccgccaccaaggctgaggtcatggtttgtggcggcaaccttcccgatgccttccatattgccgagactaccaaaatcttcctcccagctcttcgagactgcaacaggttaaccatttcggagccatttcctgagtgggagagcgagttgatgccttcagggagaacaatgggagaccttttggtcctccccaatggggacctcttgctcatcaatggtgcaaccatgggtacggctgcatggtgggatgctgacttgcctaactacacgcccgtgttgtacaaacccgaggaccctaaagggttgaggtttacggtgcttaagccaagccaaattgcgagaatgtaccactccacttccacggtgcttcccagtggaaagatttgggtttctggaagcaacacccacaatacctatagggacgtggataagttcccaactgagacaagagttgaagctttctctcctccttatttggacgccaactttgacaagtataggccacaaattgacgaggatgcttcggagaaagagttggcgtatggtggtttgtttgaggcaagtttctcggtggaagatggagctgagttaaccaagaataacattaaggtgtccatgtattctccacccttcactactcatggcttctctatgggacagaggcttttgtttctcaagattgacgagttaaacgtacaaggccaagaagggtcttacagggttagagtggaggcgcctccatccaatgccatagctcctcctggatactacttgctcttcgtcgtttaccgtggcttgcctgcagccaagggaatgtgggtgcacattcaatagagattttctaattcttcatttaatttgtatgctcaatcgaaattctaatttattagaaaagactttagtttctaattactatacattattattgcacgggtaatgctgcttattagtatgtgttttgaactaggttatattgcgtggccttcaaatattttatctgtacgtgtttggaaacccattaattacatgagaaatcgcattc

SEQ ID NO: 62372 - DNA, 745 bp, Glycine max
  Clone ID: PAT_MRT3847_27337C.1
ggctcgaggtgccttctcagaactcaaagcagggtttctcaactctctttctgatggacaaaagctcgagctcttacagttccatgttctttcagactatgtctctagctccaactttgatacactgacgaaccctgttagaacactagcaggggctaaacctggaaaggtggaactgaatgtgataagttacggagggagtgtgaacatctcaacgggtgaggttaacaccaccatcactggcattatatataccgataagcatcttgctatttataaggtggggaaagtgcttcttcctacggacttctttgcagttaccaaggcacctgcaaaatcaccctctttggctccagaaccttcaagtgacaccgcaaaggcacctaaagctgataaggacgagtcatcatcttcagattcgtcacaggttaatcccactgaacagaactctggcaccgagaagatcgctgtgtacggaatgtggatgtcacttggacttggagtacttctcatgagtgtgatgacaacataaaccagaaccaggaaaagatcatatctgaattttccaacgttgtagctagttactgcaccatatgctatatatattaataccgagagtgttacgatgagttatgtaattgtgagaaagaagtgatgaatttgttgaatactggatcacgggatctactgttgtatctatgaaattattctaaaacaagagtattatgctatggtcgcttctgtt

SEQ ID NO: 62373 - DNA, 1111 bp, Glycine max
  Clone ID: PAT_MRT3847_27338C.1
cccacgcgtccgacaaatcctaccatttgtactcctttccaaaagcctcagagccttcattcaccaaaactaaatcatgatgaaaaagcaatctctcttgtcctcctcactagcattgctagtttcatttttgtatttcaccaccactttagcccaattatcaccagcttctgcccctttcaaaccaccccaacctacccctatagcaccagctgcagccccaaaaccattggttccctcattgccacagtcaccaagtgattccacccctgacagtactccagctgttgacattgttggaatcctgaggaaggcaaagtcattcaacatcctaatccgcctcatgaaaaccacccaattgatcaaccaactcaatgctcagcttctcacaactaaatcaggcggcataaccattcttgcacctgatgacagtgccttctcagaactcaaagcaggcttcctcaactctctttctgatggacaaaagcttgaacttcttcaattccatgttctttcggactatgtgtctagttccaactttgatacactgacaaacccagtgagaacactagcaggggctaagcctggaaaggtggaactgaatgtgataagttacggagggagtgtgaacatctcaacgggtgaggttaacaccaccatcactggcattatatatactgataagcatcttgctatatataaggtgggtaaggtgcttcttcctatggacttctttgctgtggccaaggcacctgcaaaggcaccctctttggcaccagaaccttcagcaaaggctcctaaagctgataaggatccattatccccagattcctcagaatcatctcagattaattctacaaatgagaactctggcactgtgaaaatcaatgtgcatggaaagtgggtgtcccttgttcttggactagttctcatgactgtattctcatcataaaccattatttaccatgcagttaatattcaagagtgttatgattgtgagaaaggagtgattactgagtactatactggtaatatgagattgttgtatccctctatgaatttattctgagatatgctatgattgcttcaatacattttttatgcacattgc

SEQ ID NO: 62374 - DNA, 1252 bp, Glycine max
  Clone ID: PAT_MRT3847_27339C.1
attacagcccatgagccaatacaaatcctaccatttctactcctttccaaaagaaccagagccttcatttaccaaaactaaaatcatgatgaaaaagcaatgtctcttgtccttctcactagcactgctagtttcatttttgtatttcaccaccactttagcccaattatcaccagcttctgcccctcaaaaaccagcccaacctacccctacagcaccagctgcagctcctaaaccattggttccctcattgccacagtcaccaagtgattcaacccctgacagtactccagctgttgacattgttggaatcctgaggcaggcaaagtcattcaacatcctaatccgcctcatgaaaaccacccaattgatcaaccaactcaatgcacagctcctcactactaaatcaggcggcattaccattcttgcacccgatgacagttccttctcagaactcaaagcaggcttcctcaactctctttctgatggacagaagctcgagctcttacagttccatgttctttcagactacgtgtctagctccaattttgatactctgacgaatccagtgagaacacttgcaggggctaagccaggaaaggtggaactgaatgtgataagttatggtgggagtgtgaacatctcaacaggtgaggttaacaccaccatcactggcattgtatatactgataagcatcttgctatatataaggtggggaaggtgcttcttcctatggatttctttgctgtggccaaggcaccagcaaaggcaccttctctggcaccagaaccttcagcaaaggctcctaaagctgataaggatccattatccccagatacctcagaatcttctcaaactaatcccacaaccgagaactctggcacagtgaaaatcaatgtgcatggaaagtgggtatcccttgtttttggaatcattctcatgactgtattctcatcataaaccattgcataccatgtagttaatattcaagagtgttatgattgtgagaaaggagtgagtactgagtgctttagtggtgagtttatcagagtggattagggatatgagattgttgtatccctctatgaatttattctgaggtatgctatatatgattgcttcatatattttttatgcacacttccacggtggttggttcaatattttgcaattttatgatgtaatctgaagaaaaaaatcatcaaaactctgtcccaaatttaataataaaaatcaatagtttgttaaaaa

SEQ ID NO: 62375 - DNA, 971 bp, Glycine max
  Clone ID: PAT_MRT3847_2733C.1
ccacgcgtccggttcattttactttcgatcccctgttaaatacgtcaacattcctcaatctctttcaccttgatccctttcgctctcattgagtcattgtccaactctccataattatttctcttcgatctctcgctgtcaccatgatcgacggtgtagcaatatacaatattgtggcggctcttgtgccgctatatgtgcccatgatattagcctatgcctcagtcttgtggtggaagatcttcacaccggaacagtgttccggcataaaccgcttagtggcactgtactcggttccctttcttaatttcaatttcctagcctttaacaatccttatgctatgaacctcaggttcatagctgcagacactcttcaaaaagtcatcattttgggcgctctttttctatggagtgctttcacaaagtgtggtaacctcgattggaccatcacgcttttttctctttccactctaccaaacacactcatcgtgggcgtccctcttctgacggccatgtatggagactcatcaggtagcctgatgagtcaaatctttgtcatgcagggcgtcgtgtggttcactctaatgttgttcttgtacgaatacagaggcgccaagagcctaatttcgaaccaattccccgagaatggaggctccatcgcctcgtttactgttgattctgatgttaactctctcaacggtaacgagccgctgcaggccgacgtggaaatgaaggaaaatggagaacttcatgtggtggtgaggagccattcattcaacaatgactctccttgtaactgttcaacgtcaaaccattgtagcgaggcagagatctgttccatgcaacgatctttgagttttaatacaacacgtgatctcaaaagagagggttctaaagaggagatgtccaagatcgaccaggaaaaaatgtccaggaaggacgcttgtaatcacctttctaatggagtgaaa

SEQ ID NO: 62376 - DNA, 523 bp, Glycine max
  Clone ID: PAT_MRT3847_27340C.1
tacggctgcgagagacgacagaaggggggaacacaaagcagaagtagttcttgagataaaaacggaaaggccaaaggttgcaaagagagaagaaactaaagaggcttccaaactaccattcaaaagagagatgggaaaaacaattcaaagtgcagaagataggaggcctaaaacaggagaaataacttcagagtttgaaaaggttattgaattcaaacaagctgtagaaaaaatgcatgaaagtcacaacggagaacatcaaagagactcaaaagaagtcacacctaaaaaggaggtgaaacctccaacaataactccagagcaaggagttgaaaagtcaaagaaggaagatgtgtcacctatgcctatggcaatccaaagaaaagaacctcatgaattatcattgccaagcaaggactacgaaattccaaagatagagggagtacaacaagaaaaggaggggaaaagattcactcatgcactagaagcattcacttttaaaaaaaaaaaaaaaaaactcgag

SEQ ID NO: 62377 - DNA, 461 bp, Glycine max
  Clone ID: PAT_MRT3847_27341C.1
tacggctgcgagaagacgacagaagggggggtatctgcatctatgtgtttgtgcagtggggtcacatggaggagagagagagagattggacagctatagaacagctgggaggagagaaaggggttgggtctcctcaactcaacggcattactggaaagtcgccagtggtttaattataaaataactagtgggaatcagccaccacgtgcccttgtgaccgtcccttttagtaggataccccttataataatagtctcatcatttatatactttacctttgtcctcttccttgctactattaccatattatatatctacctctaccctaattccttcaccatatgtctaataattagtatcaaaattattagttcgagtgatattataagaatgtgattgagacttatgatgatgaatcgtatttttttaacgaagatggatccttttatttaattaatata

SEQ ID NO: 62378 - DNA, 164 bp, Glycine max
  Clone ID: PAT_MRT3847_27342C.1
agaaaacacaaatgatgggatggtaaatatgtcactcacttgagggcttaatacaacaattttgccttgatggacgcatgtgataccaatacatgtctgcacatttagtgaagaaaaaaatgattactccaaaccccaattttttatcccggggagacatttca

SEQ ID NO: 62379 - DNA, 256 bp, Glycine max
  unsure (1)..(256): unsure at all n locations
  Clone ID: PAT_MRT3847_27343C.1
gtcaggaagaacactggacaaacaggccgnaacagaagcaaacttaaagaaggctggctaccacacatgggaaaaatttctccaccccatatccatgtttnttgtagatcgaatattagagagtacggtgccatctatactgaanacaaatgagaacaagtagacgagaantaagaaggagaagcaactggcttcntcaatgatctcttccccagtgttaggtgnaaccgtgccgggtacnaggtatgggttncnc

SEQ ID NO: 62380 - DNA, 429 bp, Glycine max
  Clone ID: PAT_MRT3847_27344C.1
gcacgaggcttcgagaattcatggcttggaactaaagtttgggtttcgccatgcagtctctacttttttctcgttggtcccctgctaattttgtttgataaaagcaagatggtcttccaaggctattaaatcatttgcaatgcctgacttaagtatctgactcctggcactgaagcccttctcatgggggttctcattgaggtgatggcgggaaaattaccactgcacacgtacttcttggcatttggtctgaagtggattctcctggtcacaagattctgtcgactcttggctttaatgaagaaaaaaagctaaagagcttcttgagtcctcattttttaaacctggttgttcggatgattgatgcctgctttaatatgtattagcaagagttttgctttaattgcatattggtcgttgatgccattg

SEQ ID NO: 62381 - DNA, 270 bp, Glycine max
  Clone ID: PAT_MRT3847_27345C.1
gtagtagcaaggaaggaaagcaaattcgtaagttgacaacttgagttctaagggtgtgaaacataagtttttggaaattggattcttaatccgaacttttttgagtatgacgataggatctgtggagggaagagtagaaggtttctttctaatcggaactaaatcttcctttttttgtatagcagaagactgaagcaaaatagctattaaacgattctttttaccttattagaagacatctacattttttttaggctagacagaaatttt

SEQ ID NO: 62382 - DNA, 366 bp, Glycine max
  Clone ID: PAT_MRT3847_27346C.1
gccctctgctgaattgtggggccgttgtgttgaaatttgagacggaatgctggcggcttattaccggcgcgaggggggggggtacacgggcgcatctctggatagtggtgagagaaaaaaaagtgatgtaagaccaccacgatcttgcatgagcttatcacactattcgtttgggaggcagagggcgtgtccgaccatcaatatcgatcgaagtaaccggtggagatacccgtacctttggtgactggcatcaactacactgtgagtactaatgtctaccgtatgagctatgattacatccatatgtaggtgtgggttaaggaggtatggagatctggctaagatgcattaattggttgagcaccg

SEQ ID NO: 62383 - DNA, 937 bp, Glycine max
  Clone ID: PAT_MRT3847_27347C.1
cccacgcgtccgtacggctgcgagaagacgacagaagttgggctttctcatgtctctcccttctttagattatctttcatgtaagattagtccctcccagaaagccaattataaacaccctttatttgtgtttttggttttttttttcttttcttttttatttattttgttttgagttatggaagcttgttgctgcaaccttgaagtagatgtaaatggagaagagactttcatggtggacaagactgttattactcagtattcaaacaaatttgctagactatttggaaagtctagtggtgccacaggaaagcttaaagtaatattccatgattttccaggaggtgctgaaggctttgagcttatgttgaaattctgttacaacaatggaacagctgatataaacccttccaatttgtttcttgcacgttgtgctgctgagtacatggaaatgaaggaacccatggctgatgtttctaacttgttggagcaaactgaaaagtcactccaagagattagctattggacttggtcagatattttgattggtctgaaacagtgccagagtttactagttccagattcttctgtgatggtagagagatgcttggatactattgtggggaggcttgttttggccagtgaagcaagtccttgtccatcaactagttccacagacagttcttgggttcggtattcgtgtgactctaagagcactgagagtgtaaaaacaagtttctctcgtttaacatggtggtttgaagatctcctgtttttgagtcccttgttggttgcaatgttggttaagttaatgctttcacgaaagatggatcatgttgtgatcagcaagtttcttctctactatcagaaggccaaattttccactgctactacacatgagaagtgcaagatcatagaaatcctcgtgccgaattcc

SEQ ID NO: 62384 - DNA, 446 bp, Glycine max
  Clone ID: PAT_MRT3847_27348C.1
tccaagggaggtttcccgtcatcactgtatgacgtcctccttctttgggggggggggggggcgcgggtgaaaaaaaaagagactatagggaacagaaaagagactatagggaacagaaacaagaagagagggggtgggagggacaaaagagttaaatggcgagtttgaaaattttagaaagacggtcaatgcgagactaataagaagtcaggggtctgtcaagccgggcgacaccaatgtgattggtgtcgagttaggtaatacgcgtaagggtggggttcgcgagatggttcgtaagggcgatggcaatgttggggcgatttgttcggtacggaaggtaagcctggggggtagcgtgggatcaaatcaaatgtgaggtgggaaggcgttactgagaaaggtgctaagaagaggacccgcgggagaagtaggtgtcacttcaaggt

SEQ ID NO: 62385 - DNA, 331 bp, Glycine max
  unsure (1)..(331): unsure at all n locations
  Clone ID: PAT_MRT3847_27349C.1
actgcttggctggattgcagaaactagggtttttcgatggtgtcggttgttttccctctgtgcttgggcgtttacattttgggagggagcgaggtaaaaaaatttgcaatcacagaaggagagtaaaaggatgcgtgggtttcatttatgaatgaatggtagtagattttgaaatttgaatttgaattgtagacgtacgatgagagtaaaaaaaggaaagatgatgattgtattgcggcgtgtagagagaggatttgttcaattccaaatatgatactaactcataggttcagtaccatagtaggatcaggctanggttttataataagct

SEQ ID NO: 62386 - DNA, 404 bp, Glycine max
  Clone ID: PAT_MRT3847_2734C.1
tgttgccgccctttcttttttttttttttttttttttttttttttttttttttttttttttttttatttttacttctttttttttttttatttgtctggggggaaaccttccaatattacctttaataaccggttttaagatttttccatcaaacaaaacccctctaataaaaaagggaacattgtgttgtcaacaaataaaagtgggttatgactggccaaaaaaaacaggtacctggggctttaggagcatagttttaaagggccattaactttaaaaccatttttggggggggtaaaaccctttttctgattttccaaatttggggaaataaaattttatgtggctggctattttgccataaaaaggggctgggtctggaagggctacataaaaggaccct

SEQ ID NO: 62387 - DNA, 282 bp, Glycine max
  unsure (1)..(282): unsure at all n locations
  Clone ID: PAT_MRT3847_27350C.1
angatcatcgctgcattgctggagacnngtcaacacttcacatccttttttgcnttcnttcatcgncgcgantatcagtcaacatggntcanacttcatcggacaccgaagaaagtcgacattttcaacgagangtcttctagcatcgacaagattgaggatattacgactgcangcgaacatgnggancaaatcgcaaatctcttcggtattgaggcnacagcngatttcaaaggntgcttggctgatctccatggaccgtttctctnggtggtntntttt

SEQ ID NO: 62388 - DNA, 281 bp, Glycine max
  Clone ID: PAT_MRT3847_27351C.1
agttcggctcgagacgcgtcccagaagacgtcagaacggccctatttatgcaggatgttcctcaacaaatttgtccatatgtcctagttttattggatctttgacatcacaccactatacgagcatagtcatgtctcttgcctacatggtacatggtgcatgattgtatgtgtccaatatgtgaagactcaacgtctttataatattgtcatcatgtctcaacagtttggctcgtacatattggtacaagactaatttcttgagatatctaagtcagtcta

SEQ ID NO: 62389 - DNA, 452 bp, Glycine max
  Clone ID: PAT_MRT3847_27352C.1
accagaccaattcataatcccctattttttttctttacatttgaataatcatattgattatctgccaccacaatcgacgttaacgcgtgcccttgccattaatttgactgcgtgggacttagattagattaaatgcaatttttttgtagcccccaatttttgtcctttaatatttgtctcttaatttctttttcaattcgccactatattatgttgtgcctctagtctctgaactctgattgcttattagaatcagtatgtgtttgggtgagtgcttgtgaaattgattcttaattttgtaaaagttattacaaaattaaggattgggaaaggacttgttcggaagcagtttgctggcgagccgaatcagaccagatttggatgaggctttggagagtgcggttggagacaaagtccttggtttggaggagttgcatggtgcggacaagaga

SEQ ID NO: 62390 - DNA, 361 bp, Glycine max
  Clone ID: PAT_MRT3847_27353C.1
tggatgcgcgggcggacgcgggggggcacaggagggttttaaggctattatcaatcctcaccccactgcggacattctttatttaagaatctaatctgaacaattcgacgcaagtaaacaccacacacactaacaaaaatgaatggctgcctacaaattaaaacaaaaacccctactatctctctgtaagatctttaatctgaagatgaaaatcgcctgcaccggcaatgccgacgacggagtgatcatagataagctaagcaaaggcgctgatcccgtagccgatcgggaggacagggagcagtatctgccaatggaaaggcgaaaagtgcaacgccaaccaatgtaccattaataaaaa

SEQ ID NO: 62391 - DNA, 524 bp, Glycine max
  Clone ID: PAT_MRT3847_27354C.1
tctagctatctcgatcgaactgtccaaggtgctgtcaccttacaaacaaacaaacaaccaaagccggagtataattggtaatccaattcctcggccagggcggggtcctagaccggcgtgcgggtccgagaccagccccggggtccaccgtgcgcattggaggggatcaattcggggacatagggtgagattggagctaagggaagggtacgatctaaggagcagttgtcatgtatgcagtggacaaggcacgtgggggttttgcgagcgggatgggtaagtgggggaagtgcgcataagtagggaggagttaagggacggctagatggttaagggtggggggatgggagccgtgaagcagaagtggcggtcggttacagcaaggtcggacatagcgtgcgtagaaggcaggcgcgagcgtgagggcctaaggaggcacgtgccagaagacacaggacacaccgacacctcaaagccacgcacgatcaaagcggggaagtggtatgtggatgggtggacgagac

SEQ ID NO: 62392 - DNA, 368 bp, Glycine max
  Clone ID: PAT_MRT3847_27355C.1
gccacatagagagaaagataacaatttatgaggtagtaggcaatatatttggggggggtgtgttggggggggaggggggtgttcaattacaaaaacaaaaacatcctccttttagttttgttagccatagcaatagaaacgggatcgtcatcataagaagaaagcatcatcatatcacgattccagcaatacctgaaaatcaacactgcccaacccacccctcgttaccacaaatccgcctatttcctgatatcccaaggtaaagccctctccctggaatcccaaaacattcagtttttcgcatgcaatccacttttccttcttaaatgggaaagctcaaaccctaacctcccctccatcctccttta

SEQ ID NO: 62393 - DNA, 445 bp, Glycine max
  Clone ID: PAT_MRT3847_27356C.1
tcttttttcccaatgcaggatgttcaggttacaattgattggtttatttcctctcacgaatgtgttcccaggacctattgtgttttaaatccacaaaatttcttttgtgttaaaaaggtggatggggaaactgacttttccccagcgcactttccgaggtgataaaagaatgcttttttctatacggggaggagctggagcaaagaatgctattctcatgaatatgccaaatgctgttcttttaatggggagatatcttgttggagaacttaaatttgaagtttctaagatgacttcttcctacatttaatgagcagacgctttcttaatcgcatttgaaaatttggatgctgacaccattaatttggatgcttttccccacaagctggtgcagtttggtgagatttatgaaaaagttgtactgaaatttatacacgaggaattt

SEQ ID NO: 62394 - DNA, 205 bp, Glycine max
  Clone ID: PAT_MRT3847_27357C.1
tcggctttgacggacagggaagggtagtcgtttatggggttaactgctaagactcatccgttcgctaacagatactgataatgattgagttggaagctgttgctgaacactatctctgataactagttctgagatcacagacaatggtttctacggagcaacacccttaactgtaatatgtggtgattggatgtctagagtacac

SEQ ID NO: 62395 - DNA, 384 bp, Glycine max
  Clone ID: PAT_MRT3847_27358C.1
aattcggcaccaggttccaagctccgtttagtttctctatcattttttctgattcttctcagcctcacaccgcacttctctctctccacgcctcaccgcacccgattatttctcttcctccgaatgaatccgccggagattcccttcggcggagccccgctgccgaagaaagagcttcaactccagggtccgcggccgccgcctctcaaagtcagcaaagaatctcacaagatcaagaagccgccgccgcacccggcgcaccaccaccacaactacccccacgcgccgccggaccagaacctacaacaacagcgggaaccagtgataatctactccgtctccccgaaagtcatccacgtcacccccggcgacttcatggacgtg

SEQ ID NO: 62396 - DNA, 499 bp, Glycine max
  Clone ID: PAT_MRT3847_27359C.1
gagagataaggatgcagttctggggtttggcggtaagaacagaacaccatgatggggaagaagagaggtcaagttataaaagaaagatgcaaaagctcgaaaagtaaaacaagttctcgccatggtgcttattccagtgatgacatggacgacgatattgatacttttcataagctgagggacattgtcccccttgacttatatgatgatgctgaaaaatcgcaagatgaggatctacctattttttttgcacacgccactttttgctgaccctgatagaaggggtctaatggctcttacgctttcccagttgggtgagattctatcaccagctgcttgctccattgattgttcgctcaagcactataatgccgactcctatgttctatctgacttcagcctatgtgcttttgccttacggatcatcatcgcaacctgtggttgtacgtaagttattgctttcaattccacccatattgagctgcgttgatgtgctctg

SEQ ID NO: 62397 - DNA, 257 bp, Glycine max
  Clone ID: PAT_MRT3847_2735C.1
cgcaccagtcttacggcacgaatctcgagttgtttggagcgatccgagaccactctgtatcatgttgatttagcaggacctccttacaggagatgagcttctatctgactccttccgtccaaggaaattgagcatggaatgctgtgggaagctgacgcgaagtgccttgctaaaggagcagttgatgtaaacattgcggcatacccttctgatgagggtgaaagagaagatgacggtcccgatgatgcagctgataa

SEQ ID NO: 62398 - DNA, 175 bp, Glycine max
  Clone ID: PAT_MRT3847_27360C.1
aaatggcaagtcactggccgcggttttacatggtagagactgggaaaaccttggcgtaacccaacttaatcaccttcgcattcatccgcttggcgctagctggtgtaagagcgaaaaggcccggcccgatcgccctttccaacagtggctcacgttgaattggcaaatgggacgc

SEQ ID NO: 62399 - DNA, 648 bp, Glycine max
  unsure (1)..(648): unsure at all n locations
  Clone ID: PAT_MRT3847_27361C.1
ggctcgagtaggaatacagaatttttttcaaacacaaatgcctactcactcttttagtcttaggactagtaattataaaatgaaaaacaaaatcattaaaggtactattacttggaaagcattattactttattgataaaaataagtcaaacaactcttcagggacttctgctctgactcgacttatttattaaaaatattaatttgttttttttaattaatcaaattgatcagatttaattttgtaaaaagactattaaatttgataagttggtatttttatataattatacatacaatatttatatttaatatacatttactaatattaacattaataatatgtttgatagacctgtttgtttatttaagttggatggcttacttaggcatacagatttattcacttgtctatgagtcttttataaaagaaatcatataaatatgctttaagttagattaaaattttaaataaatcatgctaaaacttaaaaaacaatttgtaataaataaataagtcaggttgagataatataggatagacttatgcccactaaagtttggtgaatgcatncttaaagtacattntaagtaaataaatatatgtactaantatataaaatatctttgtgcacatatacattaaat

SEQ ID NO: 62400 - DNA, 651 bp, Glycine max
  Clone ID: PAT_MRT3847_27362C.1
aaaactaaaacacgttttaatgattaattcatcaacgagctaggctcaaacaaagcattgtagtaatctaaaggagtaaaataaaaatacaagttcgtgcaagggtacgagatgaggcaaattgagtttcccattcttccctcttagttttggaatcactttcttctttgagttaacaattttctagtaatcccacccaacatattgatccttcaaaatgtaagtatcaatcactttagtaacttcaattacaaatgttttactttaatccttaatattttcaaggccattttcaacacaaacctattttatcatcaaagtgttagaaacatattttttaacacactttcttcaaatatgtaatttctaattgtattttaaaaaagtgtgttaaaagaatgtgctactaacatttcttattcttaaaaaaatgaactcttgcaaaattaaggattacggtaaatatattgtaaattttggagtgatcgatgcttacaaattgatagacaaaaaagggtatttactcacaatttccccaggattcggggccagtggttgtcccaaggaatccaaaaccttgttggggcttgaaaagcaagttattatgactgtgatggtgctcgtaggattgttgttgctggtggcgatggt

SEQ ID NO: 62401 - DNA, 800 bp, Glycine max
  Clone ID: PAT_MRT3847_27363C.1
aggtattctattacactttcatacaattaattcttacatttccttagaacacaagcttctctcaaatttcaaagccaaaaaatgtcaaccaccattgatgtcccagaatcaagcaatgttgctaaagaaaaagcagttttagttgcaccctcaaggccaggagggtggaagaaaggggttgcaataatggactttattctaaggttaggtgccatagcagctgctcttggtgctgctgccactatgggaacaagtgatcaaacactccctttcttcactcagttctttcagtttgaggctagttatgatagcttcactacttttcagtttttcgttattacaatggcacttgtggctggctaccttgtgctgtcactacctttctctatcgtagccatcattcgcccccatgcagctggaccaaggcttttcctcatcatcttagacactgtgtttctcactctaacaactgctagtggtgcttcagctgctgccatagtttacttggcacacaatgggaaccaagactcaaactggcttgccatatgcaaccaatttggagatttctgtgcacagaccagttcggcagtggtgtcatccttcgttgctgtggttgtcttggtgttgttggttgtgctgtctgctttggctcttgggaagcgttgagaattaacatgcttatatatttcttgggtctttgacttaattatctgtatattgttcctcaggttttgaggtttccatcaagttaatgaattgtgtcctagtattgatttgggaagatgtttccatgaaatatt

SEQ ID NO: 62402 - DNA, 145 bp, Glycine max
  Clone ID: PAT_MRT3847_27364C.1
cgggttgtttcgttgttgtggatctatgttgtatcctctttctcccacaaaatttagtgacatactgaatttggtctgatatgacatgattttgattttgctgagtctctgattggtactgttgcatggacagacgccaactgct

SEQ ID NO: 62403 - DNA, 627 bp, Glycine max
  unsure (1)..(627): unsure at all n locations
  Clone ID: PAT_MRT3847_27365C.1
ataccgagtcttcaattccaatttcagtcacaaacaagtatacaattctagaacacaagcttctctcaaatttcaaagccaaaaaatgtcaaccaccattgatgtcccagaatcaagcaatgttgctaaagaaaaagtagttttagctgcaccctcaaggtctggagggtggaagaaaggggtagcaataatggactttattctaaggttaggtgccatagcagctgctcttggtgctgctgccacaatgggaaccagtgatcaaacactccctttctttactcagttctttcagtttgaagcaagttatgatagcttcactacttttcagttttttgttattacaatggcacttgtggctggctatcttgtgctgtcactacctttctctatagtagccatcatacgcccccatgcagttggaccaaggcttttcctcatcatcttagacacagtgtttctgactttggccactgctagtggtgcttcagctgctgccatcgtttacttggcacacaacgggaaccaagactcgaactggcttgccatatgcaaccaatnttggagatttttgcgcgcaaaccaggtggagcagtggtgtcatcgttcggttccgtggttatcttt

SEQ ID NO: 62404 - DNA, 360 bp, Glycine max
  Clone ID: PAT_MRT3847_27366C.1
gctccagaagaatcccaccacataaacacctttcttttccgttaccgtcccctcgtccgaatggggttgggggtcttttaaaattacagagcgcatctctatccacattggtcaggctgttatccaggtcttcaatgcttgctgggagctctactgcctctagcacggcatctgtcccgacgggcaaatgccatcagacaatactattggcggtggtgatgatgctttcaatactttcttcatcgagactggtgcttgaaagcacctgccatttgcagagtttgtatatcatgaacccactgttattgatgaggtgattaccccaacttactcgacagcttattcacccatagtagatca

SEQ ID NO: 62405 - DNA, 730 bp, Glycine max
  unsure (1)..(730): unsure at all n locations
  Clone ID: PAT_MRT3847_27367C.1
gatcgttggctatcagactcgttaggatggagagaccaatggttcatgtggatcctaccactggaaaagctgatggtccccatagaaagaaattaaggatgtatttggggatcgtcgctcgagacaaggtggacgttacatttgttaactagaaagaagtttttgcagctcagaaggatatgatttgggagggcattaaggctgaatttgatattctagaagcatccgaccaaaggacgaagaagaagatccttaagatggtaggagagcaatgaaggtagttaaagtcagatttgacctccaaatgggatctggcacaaggcaaggaggagggcgaaggcaatgtctgcaagaagtacaatattagcaaagaaaagtggcaacaattttgtcggagttgtagagacccttcatgggaggggttatgatttactaaaagaaaggttaatggaggaaaaacaaaagaaacgattggagcaagcagcccaatctggaagcacaaaaacaatcgttgatcctccatctcccattagacgacnagtgaagtgaaagatggctcgcaccaaaaaatctagagagatgatatttgaggcagcacgcgaaattgaagataggattgattcccttgaagaccagtcaacacagggcaactttgtcaccctggggcgttcgaatgtgctgactgctgncatttggcgaccagagcactctaactgtggttgtgctgcta

SEQ ID NO: 62406 - DNA, 406 bp, Glycine max
  Clone ID: PAT_MRT3847_27368C.1
ggattatctacctaccttggctgctgtgtcaccacctaccatccatggcctcgctggaagttccctctttggaactactgctctctttcaagctctctcgccacagtgtcacctatcatcaacttaatgactggtgtcgccgaagcaaagtatggagacacgaatgggatactttgatctcgaggacgcgtcgcacactacagggcagctggactggcatcgatcatatgcacctttattctactaccttttgagaagcgagcaatgtcatacattcgctgcatcattcacagacaggggattgcctctcctgttgctgatattgggatgtggtgtcacacttgcagactcaaaagcaactgcctcaagtgtcgtggtggggctccagaccggatcccacctatca

SEQ ID NO: 62407 - DNA, 626 bp, Glycine max
  Clone ID: PAT_MRT3847_27369C.1
ctctgcttgtgtggttgcctcactgccaacaagctcgccgctgatgagaaccccgtgcctgactgcaacggccctgatggcaagccatacgactccctagcttcgattcgcaaggactacaagcgacaggccgccaagaattacgctcctcccactgacgaggtcgtcaatggctggaaggacaactccgagaccgacgttaaggcttgcgaggaggctgctcacaagtgctacaagggccgccatctcgctcgcatcaaccaacgcaagtgcatggacaagctcggcttctggcagaccgttgctcgcttctataccaacgtccgcgacttgtgcgtctatggtgacgtggatggcccctctgaggaatacctcacgaatgcggccaagaagaagtgcaccaccggcactgacctcgccaagcgcctctgcatctgcaaggagatcattggctcctcaggccgcactagcgaaaagtacaacaagatgatgaatgttgagtaaggttgactcctgcctgaacatctctcacgtacgatgcattcaccctcttattctcccttttgtcactacttctcttggatgtgtcgtacgagtgagcttcgtataaaacacgacccttttgg

SEQ ID NO: 62408 - DNA, 855 bp, Glycine max
  Clone ID: PAT_MRT3847_2736C.1
aattcggctcgagatttcctataactttatggctaataagtatccaatgttcttttattttccttcaggtaagtccacagctatatggagacaactatccaaggttcttcacttattggactactgatgcatatcaaacaactgggtgctacaacttactctgttcaggctttattcaaaccaacaataggatagcaataggtgctgcaatttccccaagatccgctttcaacagaagacaatttgatattggcctaatgatttggaaggatccaaagcatgggcactggtggctggaattcgggtcaggactactagtagggtattggccagcaaacatgttcagtcacttgaggaaccatgcaagcatggtgcaatttggaggagaaattgtgaacactcgttcaaggggttaccacactggcacccaaatggggagtggcaattttgctgaagaagggtttagaaaagcagcatattttagaaacttacaagtggttgattgggacaatagcttgcttcctcttagaaatattcaccagttggctgatcattccaattgctataacataaggcagggaaccaacagtgtttggggcacttacttttactatggagggcctggaaggaatgtgagatgcccatgaagaaaatatagcaccccaatagagattatagaggtttttccctattacatgaatgtccactttgttccatttttttgttgttgttgaattattaatttggttcttatatttgtctgtatttattgttttggttctatacgtaaaaattgtaactttttagtctttagatgagtaaatttaatgtaggaaaaaatttatttttggttcc

SEQ ID NO: 62409 - DNA, 251 bp, Glycine max
  Clone ID: PAT_MRT3847_27370C.1
aatttctcgagcgataaaaatatctattggtcaacatagttatcatatggctggtgcttcccttgtagccattaatacaatatacttgatgaacaaagcctgctgattgcacattccacgctaacaaaggtaagatggactatcggacaggagctaatgtacatttgacactgcttatgtctactttttgcttttccagaccagatgtgacgtcttgattgcatgcattttgctggctacttgcttcatgt

SEQ ID NO: 62410 - DNA, 180 bp, Glycine max
  Clone ID: PAT_MRT3847_27371C.1
acatataagcataatctctggaaaaccttatctgatcctggctcatagccgacgaataaggatggggcaaactatgtggcctggtttggggttcagaatttaaccatagttttactcatttacatatatatattgaatgcacattctgtagcatacgatatcttgtatacggttgaatat

SEQ ID NO: 62411 - DNA, 676 bp, Glycine max
  Clone ID: PAT_MRT3847_27372C.1
attcccttcttattgctaattctacccattgttcaccgcgtccgcattcgtcctcattctcgtcgatctgctgttctccctcggcgttgtctctaacaacctcggcatcaactatcttcactgacaaatacaaccatttgccgtagctgcttatgcgagaccttcactgtcaacgacgacgagcttcgagcgcgtagaccactacgacttgtatgcgttcatactgaagagcctccgccggaagcagtttcgcagaggcttggatcgcccgcccaggggtattaacatttttatgcaagacttactggtcacggctgtcggtatgaacccatatcttgtgattatccgcctggatggaaatgacttacacacacgacctgatcagtgctatgctctgctgatacatcaagcttgaccagctagatcgatttatgtcatgatacatggatcctattttcctcctatctggagggaatacacgctattatggtagccacgtgatcacactgagatgatgatcgctgtattcatagcaccaggcaagtacaatgtcatgtcggagaacgcgctgcctggtgtgagcccaatgccgtgagaccttgatggagcatatgacaatcatggtagtgagtccgtagacgaacttcgtgtaccatgcgctcaacgtgctctttct

SEQ ID NO: 62412 - DNA, 254 bp, Glycine max
  Clone ID: PAT_MRT3847_27373C.1
atcccgtctctggtccgacgtccagccgctgggcaatagcaggcatgttgactcctaccgccctcttacagtctctgctgcattctttatcaagtcctgtcatgccaacgtgcaatccgtcctcgttcggaagagtggcaatctgaatcgcatagtacattccaagatcgccgtcactcggccagccactgctatctccaccccaggcaccgagggcgagggcaacacattgcgctcacgaacgcatcctggtc

SEQ ID NO: 62413 - DNA, 212 bp, Glycine max
  unsure (1)..(212): unsure at all n locations
  Clone ID: PAT_MRT3847_27374C.1
taatgggatacctatggtggctggggtgcgcatggtggaagtgccttttcggggaangaccctaccaaagttgacagaagtggtgcctatattgtaaggcaagctgcaaatagtgtcgtggcaaatgtccttgctaaaatgtgcattgtgcaagtttcctatgccattggtgtaccttaacccttgtcaatgtttcttgactcttatagaac

SEQ ID NO: 62414 - DNA, 399 bp, Glycine max
  Clone ID: PAT_MRT3847_27375C.1
ttggctagctcagaccataggaagcgaggcatgtgcgaatgcaagcgatctctggtcttggatggctgccaagggcggatgtgactaccatagtgcaggttgacaagttgcactcggcgcaggaggagaggaatgctcctgattgataccatatgattggcctactgttcaacatcgaagtgctggatttacctgggactccttacgtgtggccaaacatgatcgatatgaatgctctgacattgctgactaacacacaggagttctttgtcggatgtcttccagagcttatttggtggccactctcagtgaatggcaattatcctgaatgtgaaacaccttcacaagcggctggagtacaagttacatgagattgctaacgagaaggcacacccacca

SEQ ID NO: 62415 - DNA, 774 bp, Glycine max
  Clone ID: PAT_MRT3847_27376C.1
atgggcttaaccccaaatgatgatgacgatgatactcgaaggttatatgcatttaagttgtttggagaaatatttccaagtttttaatatacttacacactagtggttatgcaccagtgagacttcgttgaaagtggcttctgaggggaggagaaacagggagatccatttcttatctttcatcaagcatgcagaacgcattttccttcaaattacaagataagaagggcagattgcataggttcacatgtgatactcggagcatggcagaggttataacgtccgtcattcagagagtcggtgatgatattgaccccatggacctgccccaaattttgtatgaagatgaagaaaatgataaagttgtactggcttcggacagtgatcttgctgcagctgtggaccacgcaaagacggctggtttgaagggactgagattgcatttagactactctggaacacatggttatggaactgattcaagttcattaagttggaaatatgctaattcacaagcatgggcatcggcatacagtgccattgctgctggagctgcagttgttgctgccttaggtctattggcgtttgtgaggcgaagtcaatgataggaagaagcgagtttttgttgggggtacaggccaaaactgaaatgaggcctgttggaacttaggaggaggggcatacttttagcacttgccaatctgtaagttctaacattttgtatatccacttgtattcgaaaggaaggaacaacgtttttattctgctgtctat

SEQ ID NO: 62416 - DNA, 355 bp, Glycine max
  Clone ID: PAT_MRT3847_27377C.1
taccacgcattcgcacaaatattcgttcctctaaatgatcatctatacatcatatcataggtagagctattaacccactcgtcagatcacactgctattcatataatgccataaaggattatacaaaacctactaatcttcccttaaattcctcccaaaccaaaatgtacgttatgacctcctactcttatcaacttccaactcacatatactactctaatgtcacatcatattcggtaacatcacacttcaaaccattctacatgattcttcctatcacaaggctacttatatcactattcgtgagacttgagaatctacttatctaccgtatatacaagattgtataattccc

SEQ ID NO: 62417 - DNA, 554 bp, Glycine max
  Clone ID: PAT_MRT3847_27378C.1
actagttctaatcaaaactcaaattcgccattttttcacatgctattaaatatccccctaccctcaaatttagaacatctcaattttttttcatcctttgatttagaaataacttattttacactatatttaatttaaaggagacaaagtaaaacaaaagaagaaagaaatagaaaataagatgatcatttatgttgttggaaaaagaacaaagtgaaaaaaagaaaataatttttaacttaataaataatattttaatcataattttattattttattacttaatgccgaaaacgtaactgttatatctgatgatcttatctcataatttgtgtattaattttaagatacttttttccctttagttgttcaattttgtgcgtgtttgaattattggtgagttaatttcaacttccatttgcagaaatatgttatgtgttacttttgcggtggaggtaccttaggtctttaatcataaacagtgctatacttgttgctaacatgattaacaacatccatgtcatcataagttatgaaatcatcacgtcacataa

SEQ ID NO: 62418 - DNA, 552 bp, Glycine max
  Clone ID: PAT_MRT3847_27379C.1
ccttgatgccacatgcaaattgaagaagccactcatcaggacactggagaaggaaaagatagcagttattaaatatttcaaagcagtgagcttaattaattttacttcaaagtgggaattgaatgcatataatctcacctcagggattaaatctgtgtcaaatctaccggtgagaatatcctcataggaaacccaacaatgatccctggaaagggctattttgccaacaaccctgaacgaatgatattaagtaagcttattgagtttgaatcacctttatatacagatatttttctggctcacaagaatacttattaatttagcatcctatccttcctctaagagaacacagaaacgtgctactttatgacatcttgcatacaaagtaatatgcagaacgactagaccatatgctgttctggcctcattctagaaacatgcattcggaatttctcaaatataaaacataacacagatgatctacatattttttggagatcactcctgctgtgaatatgtagaaaaataatttgaggaaattaaagaagcaag

SEQ ID NO: 62419 - DNA, 277 bp, Glycine max
  unsure (1)..(277): unsure at all n locations
  Clone ID: PAT_MRT3847_2737C.1
cttacacttgnactattcatgaatacgctaatttaacactcaggtcatctcccatataaatatagctaattaaccagattgttgagggattctttaggtggtaaaaccaaaactatcattattgccacaatatccccttccattcactgtctggaataaacccttagtaccttggattatgcacaccgtgcctaaaatatcaagaacaaaccatagattaatcacaaaatgatgaaatctgcaatgattaatgatttgtattcagaaattgacagac

SEQ ID NO: 62420 - DNA, 276 bp, Glycine max
  unsure (1)..(276): unsure at all n locations
  Clone ID: PAT_MRT3847_27380C.1
nanncacangnangnnagctcgannntcgncancancntcnannncatcnngnngtngcngagngaantncccnaanccngcancgactnngnnattctattgcnnncacgtaanncnctnagtgnttngaccctnactnnnnnngccggnacntacnnatannntcntccnantncngtgctnatattcnaggntngnnnnggaanctcncnntcttgatncnggnccctgtntgcatnncaagattaanntgctcnccaancnatnagcgnctn

SEQ ID NO: 62421 - DNA, 240 bp, Glycine max
  Clone ID: PAT_MRT3847_27381C.1
cggaagacaggctttatcaagtaaccgacaaggagagcctgaaagcggagaataagcatggacgtaacgggtgccagggtgaaatcaagatacgataacaactccaaacgaaacacgagccagaaacataaacaatagacccgaaaggagccaatagaggaaggaacggacagcataagaagtagagcacactgccctgagaccagacaggaaacccgtacagccaagagaattaaagaa

SEQ ID NO: 62422 - DNA, 615 bp, Glycine max
  unsure (1)..(615): unsure at all n locations
  Clone ID: PAT_MRT3847_27382C.1
gcacgccctatggtcaccgccggtggtgtctcgtggtagagccttgttgatgtccctctctagtcattgtcgttctcgccgttgccgatcacgttctctagttgctagagccaccaaaaaagggtgcagtaagcaacttggaggttcaggaagtaacaaccttgtagatactgctatattgcgttccgtatctgtgtgtctgagcgtgaaaggagcatgcagtgccacactcttcctctggagttgattcgagaaattcttcggagattgcgggtgaaatctctcttgcaattgaattgtgtgtaagactccttcgcaggtcaaatcctttttttgtcgaatccattgatgtagagaattccagtgcagtgaatttacctctccctcttccatcatccccacgcaattggggcaaatataagatttatggtaccagcatcagaattttgggttcatgcagagggctcatacttttgcacatcangacgaggttggagaactatctcattctgtggaatccatcaacaggtgtacacaaacggttatccaatttgaaatttgattcaacagagtattattttctatatgggtctgggtatgacccatccacagatg

SEQ ID NO: 62423 - DNA, 681 bp, Glycine max
  Clone ID: PAT_MRT3847_27383C.1
aagcaattggaagtggtggagctcagcgagaacgcgctcaccggaaccgtcgagtcgtggttcttccttttgccgtcgctgcagcaagtggacttggccaacaacaccttcacgggggtgcagatctcgaggccactcgaggcgcgtgagggaagcagcaacagcaacctcgtcgcgctcaacctcgggtttaacagaatccgaggctacgcgcccgcgaatctcggcgcgtatcccgcgctgtcgttcctgtcgattcgctacaacgcgctgcgtggcgcaatcccgctggagtacgggcagatcaagtccatgaagaggctgttcctcgacggcaactttttcgtcggaaagccgccagcggggctaatggaggccggcacggcggtttccggcagcttgggggacaattgtctgcatgcgtgtccagggtcgtcgcagctgtgctcgcccgcacagaaacctagctctgtttgcaagcaagcctaccgtggtagaccaacaccgtaatctgttgtcggttaaaattaaaaagaaaaataaattataaataatagatagatttctattctattttttaaaaaggttctttgtatgtagaagtgcgttactatctgaataaaagacgatgtctgtgtaaagtgtaaactatggtctatggtaatgaatggtgtttatatt

SEQ ID NO: 62424 - DNA, 274 bp, Glycine max
  unsure (1)..(274): unsure at all n locations
  Clone ID: PAT_MRT3847_27384C.1
tggagatcatgaaaatgaacaattctatgggnaatcttataccaggngcaggatctgtggctattacttctggctcaagttctnngaaaacncgcatgattgtgggtgtgagtgttggggtggttggtgctgttgtctggctggactttcttgtactatgcaggaaaagaagaaggttggtgcaaaggcagtcaaagacatgggttccnctatccataaatgatggaactactctcataccngggaataaatatctaggcacaacactgatgcg

SEQ ID NO: 62425 - DNA, 1653 bp, Glycine max
  Clone ID: PAT_MRT3847_27385C.1
aatgaaatataatcatcaatgatatgacattctaaatacacacataatttgtcatgtaagtaacaacattaacattaaagaataaaaattaataataaaattaatttatcacacttttacatattcaaaaaataaatttatatcaccatccactcactcatacacccacactacagatccacggtgataacacaaactaacacccaacaaattaacaacaaaacaacccatctttagtcagaaaccacaccaccaagtttccaacatgcaaaacctcaatttcctctacctaaccatcatttccctcactctcatccacaactacagcatcctagtccaagccctaacctcaccctcagacattgcagcactcaaagccttcaaggcctcaatcaaaccctcctccatcacacaatggtcatgcctcgcctcatggaactttacaaccgacccatgctcactccctcgccgcacctccttcatttgcggcctcacctgcacccaagactccacaagaataaaccaaatcactctcgacccagcagggtactcaggcacactcaccccactaatctctcaactcacacaactcaccacactagacctcgctgaaaacaacttcttcggcccaatcccctcttcaatctcttcactctcaaacctccaaaccttaaccctccgatccaattccttctcgggcacaatcccttcctccataaccaccctcaaatcactcctatctcttgacctcgcacacaattccctctctgggtatctcccaaactcaatgaactccctcaccacactccgcagactcgatctcagcttcaacaaactaaccggttcaatcccaaagctcccatccaacttgctcgaactcgcgatcaaggccaattctctatctgggcctctccaaaaacagagctttgaagggatgaaccagttggaagtggtggagctcagcgagaacgcgctcaccggaaccgtggagtcgtggttcttccttttgccgtcgctgcagcaagtggacttggccaacaacaccttcacgggggtgcagatctcgaggccactcgcggcccgtggaggaagcagcagcagcagtggcaacagcaacctcgtcgcgctgaacctcgggtttaacagaatccgaggctacgcgcccgcgaatctcggcgcgtatcccgcgctgtctttcctgtcgattcggtacaacgcgctgcgtggcgcgatcccgctggagtacgggcagatcaagtccatgaagaggctgttcctcgacgggaactttttcgtcggaaagccgccggcggggctggtggcggccggaacagcggtttccggcagcctgggggacaattgcctgcaggcgtgcccagggtcgtcgcagctgtgctcccccgcgcagaaacctagctctgtttgcaagcaagcctaccgtggtagaccaacaccgtaatctgatgtcggttaaaattaaaaagaaaaacaattaaatagatttctattatacttttctttttctagtattttttataaaggttctttgtatgtagaaaagctgtgttagtgttactatctgaataaaagccgatgttgtaaagtgtaaaaaaaaaaaaaaaaaaaaaaaaaaaaaagggcggccctcgagcc

SEQ ID NO: 62426 - DNA, 350 bp, Glycine max
  Clone ID: PAT_MRT3847_27386C.1
gcacaaaagctattaacatttaacaaaagaattttccatgactttccatttttttttctcttcaggcaacgggggagaaggactttacctcgtaactaacaaaaccttgaatcttctacaacaggaaatccccgaacgaagaaggtagatttcatctttgggcagggaagcgggaccctccgctatcctgaccaaaagaattttggccatgcagttaaaagcccctaaaattgaccagccttagaccggtccaattcccgcaataagttgccacccacaaaaggctcttaagggataaaactttcatcatctcttttcaagcattcatataccagccccaactttgcata

SEQ ID NO: 62427 - DNA, 468 bp, Glycine max
  Clone ID: PAT_MRT3847_27387C.1
gaagtccttccttctgaattaagagagttaatcttgggaaaagatggagttgagttgggtggttggatgcctttgtacagctgatgtgaaggatttcatgctaaagattcacactgttaattatgctgaggaagtttgcttcaatgacttcttatccttgggtgatactcaagatggtgagaatggggataattactctgtttcaactgctgataagttactgcctattagttctcaagatttggctggattcaaccataactctgttgagtattcagaagaaaaggaaaagctggttttcatatgctcacatgctatggaacatatcaaacaaggcggttcagttcttattccttttgatcgacttggaactattttgcttcttttggaggaaatgacagcatcacttgaagcttcagatacaaagaaccctatacccatatcctttttaggtggttggtcctacta

SEQ ID NO: 62428 - DNA, 361 bp, Glycine max
  Clone ID: PAT_MRT3847_27388C.1
aaaatggggaacatgcacaaagaattgattctctggttttcatattgtttttcttattttagtttattgagacttggatatctttttcaatcaattttattgtttaactgctgagtgttatcgatcaaaaatatcaattttaaattattggtcttaatggattaagcaattttcctttttccctttttaattttaaaattgtgttcctttgccttttgaaactgtgtgtttggtaattggtaagaatggaattgatattaacaccaaaaaggtgctccttaatccaatcctttaaataaattgatgctcaaattcaccaaaatgttactggaatcaattttaatttgggaaaaattccaat

SEQ ID NO: 62429 - DNA, 772 bp, Glycine max
  unsure (1)..(772): unsure at all n locations
  Clone ID: PAT_MRT3847_27389C.1
atgcctctttcattgatgttgtattaatatccagtccaatgggtattatggggttgccctttcttactcgaacgaagggtttctcagctaagatatatgtaactgaagcatcggcaagaataggccagctaatgatggaggatcttgtatcaatgcatgcggaattcaggcagttttatggaccaggggaatcgaatttcccttcatggctgaggcatgaagagcttgaagtccttccttctgaattaagagagttaatcttgggaaaagatggagttgagttgggtggttggatgcctttgtacagtgcagctgatgtgaaggatttcatgctaaagattcacactgttaattatgctgaggaagtttgcttcaatggtacattggttataaaggcattcagctctggtatagaaataggcagttgtaattggatcctaaatagtccaaagggagatattgcttatctttcaggatccagcttcatttctgcacatgcaatgccttttgattaccacagtttacaggggacttgtgtgttaatttattcagacttcttatccttgggtgatactcaagatggtgagaatggggataattactctgtttcaactgctgataagttactgcctattagttctcaagatttggctggattcaaccataactctgttgagtattcagaagaaaaggaaaagctggttttcatatgctcacatgctatggaacatatcaaacaaggcggggtcagntcttattccttttgatcgac

SEQ ID NO: 62430 - DNA, 186 bp, Glycine max
  unsure (1)..(186): unsure at all n locations
  Clone ID: PAT_MRT3847_2738C.1
ctgatgatgacatcggctttggtcttattgacgacaccgcttgtactaacatgttcaggtaacagctgaacttttcgacaaccttaaacaacggaagttccacgcgctcctcacttgggcanaagaaggctcggcgcgcancgaagaaaaggagtgaagtgaacctcgggacggtgtgcgttctat

SEQ ID NO: 62431 - DNA, 239 bp, Glycine max
  Clone ID: PAT_MRT3847_27390C.1
caggatctacaccttcagtttctctcgttgctcttcgctttcctgttcttcaatctcgattctttcgttacatccacacaagatctttcggagggcaccgaagaacagccacaatacgacgtactacgaaactctcggcgtctccaacaacgcttcgcacgatgatctcaagaagcgcttacaagaaagccgccattaagaatcaccccgacaacggcggtgatcccgagaagtttaaa

SEQ ID NO: 62432 - DNA, 166 bp, Glycine max
  unsure (1)..(166): unsure at all n locations
  Clone ID: PAT_MRT3847_27391C.1
naagtgnacnnnnancgnaacntnngaatgncncgctcntnncgctcnanccagtcncngangcnntttcantcaagnngnttagacacganttanantgatggaacanngcttcagagntatggannancncctatgnggccctncnnngnncnnggaaggncat

SEQ ID NO: 62433 - DNA, 263 bp, Glycine max
  unsure (1)..(263): unsure at all n locations
  Clone ID: PAT_MRT3847_27392C.1
agcttacagacaagtcacacactgagacgacatcgnttcttgaattaaagatgaagacaacttctggaggaggaggaggagtaggagcagcagaaagtgataacagaactgccaccgtgggaattgaatttaccaagacaagaatggaatatccctactcgttcttcgaaaccaccgtggagcttcagcaactgttagtttgcacggaggccaggttctttcctggaaaacagaacttggtgaggagttactcttcataagta

SEQ ID NO: 62434 - DNA, 391 bp, Glycine max
  Clone ID: PAT_MRT3847_27393C.1
ctccgtcctaagtgctcctccgaccgtgtggtatagccctcaccgtcccgaatacttgcttgccctgtcggtgcagatcccatccctccatgacgctgaattccctgttgaatacccatgtcatcctgatgcattatccgctgacccggcgaccgtctccattaacacgtagctgtaggttattcacccccgatgtccaacgcttgtgacccttggcttgcccttgcccgagatccttgactagattgtagactcactcggcttaaacatacggttcccggcctgtgcacatatcttctcttagcacggcttgaatacttgggtacacctaccggttcgtcctcctgacatactcgctgtctgaactgttccggtcgttgccatcgggttc

SEQ ID NO: 62435 - DNA, 501 bp, Glycine max
  Clone ID: PAT_MRT3847_27394C.1
aaaatttgggtgctcttcgttggcgcctctcctcagacgagttgcttcagttggaggatgcagcaaatgaatcacctcgcaggatgatccaaaacattttccaaaccaggtatacatgtaacactaaaaaggcaaaccaaataaagagatacggaggatgcaatcatccaagtgttttacatgacttggcattcataacagataaaaccagtggcgggaccttcgcactcggttcgaaggaatgcatagtttactcaatggaggtcactggtttatatcatctggtatcattaaaggcagagagcaaacaagcttgtccaggaaaaatgacaacggatcaatctataacggcacaacaatggcgtaaactaatgcaagagtccatgccagtgatgccacaacgtagttttggacaatctcatcagataatattgctttgttgttaaaaattaaactgacggttagaaaagtacaatgaacaaatgccacgcttacattcac

SEQ ID NO: 62436 - DNA, 472 bp, Glycine max
  Clone ID: PAT_MRT3847_27395C.1
attctaaacaggttcattgatccctggtgaatgcgtgaataatcctttatagcacttgtaaagcttggagacgacagcatcatttaggtttacattacgcctaatgactaaggaaaccacattttacatttcctgtttgtttcaagcgcaaggagacatggcatcatggggccaaaacgatagcacttgatgagagagcccattaaaaactatgtcgacttggtttgtaaacaccggaactcacaaaagtgatggagcattttcaagcattcattctaggtgtttactactacaataacattcatgcggctgtgctcatgattcaacattccaaaacatttgactaataagccatggctagagatcacttgtgacaatatttgaatgttatctatcgcaatgcaacatgctcgaatgacgcggctgtcattgcaactagacttccttatgttagagctgctttacaaaatga

SEQ ID NO: 62437 - DNA, 359 bp, Glycine max
  Clone ID: PAT_MRT3847_27396C.1
cgcacgactacaaatgcgaacaatctttactttaaaactataacaaaacaactttcacttttacacataaaagaaggggggccattatacaatatttaagcgattctcgttcaactccttatggcatcaccgctgaaccggaccgtatctgcatctagagatcttgacgagctcggaaacacacatttgcgacagcgatcatagggaactgctgctgctggaaccgtcggacataacatcggtaccccctcctaacgatctccactcggaaattactcaagatcaaacttctactcttttggtgcaaatccttcacgcttactaactttttcaacataacttgtttctcctttctatgg

SEQ ID NO: 62438 - DNA, 1086 bp, Glycine max
  unsure (1)..(1086): unsure at all n locations
  Clone ID: PAT_MRT3847_27397C.1
gggcaataaaacagcaaaagtttcaattttgtttctgttgaattttctcgggttggtttgcagtagcaatggcggagacatagtggtttactggggccaagacgagagcgagggcacattgagcgaaacatgcaactctggactatacaaaatagtgaacataggctttctggcaaaatttggcggtgggcgggaaccagaaataaacctagcaggacactgcgaccctgcatcaaacggttgcaaaagtttgagcaaagacataaagaattgccagaagaggggcataaaggtgattctctcaattggaggtggcgagacaggttactccttgtcgtccgctaatgatgctacaaaggtggcagattacatatggaacaacttcttgggaggaaaatcatcaaagacaagaccattgggtgatgctgtgttggatggcgtggattttgacattgaagttggtggcggtgaaagcttctacgctgtgcttgcgaggagactctctcagcacagcaaaggagggggcagaaaagtgtacttaacagctgcaccacagtgtccattccctgatgaacaccagaatggagcactgtcaacagggctctttgactttgtttgggttcagttttacaacaatggtccatgtcagtttgagtctagtgaccccaccaagttccagaaatcgtggaaccagtggatctcgtccatcagggctaggaaaatttatgttggacttcctgcatctccatcgccagctacggctggtagtggctttgtgccaacacgaacgctcataacacaagtgttgccttttgtcaaaagatcgcccaagtatgggggagtaatgctctgggatagggctgctgataagcaaaccggatattccaccaacatcaagcccagtgtttgagattaatttggatataattataagtaaaagtaaaatccatgcaagtttgaaatttccttcgcttttgtaaaattcagtttccttgtgacgagtttaatttggtgtactcaagtacgttaataaacatctgtttcattanaaaaaaaaaaaaaaaaaaaaaaaaaaaaaaaaaaaaa

SEQ ID NO: 62439 - DNA, 417 bp, Glycine max
  Clone ID: PAT_MRT3847_27398C.1
ctctatgtaccatggtacatgaaaaaattaataacactagtttaagtagaaattaggtgtgaccattataatcccatagcacctaataatttcttattagtttacatgacaagaagaatatgttcttttgaatgatgtcttgtgtattcttttatgttcttttggatttgttttaatgtgcagggtttatggattggcctgatttgtgggttggcttgtcaaactgggactctctcatttttggcatggcgtgccaaatggactaaactgaatgtctccttggacagagattaaatccaaacaccatctgcttaacttgatgcttgctaatattggtcaatgaaaataatccacggagtctactatttttaaattcaattgcttgcaagaaaatggaaattgggtggacaaattttc

SEQ ID NO: 62440 - DNA, 334 bp, Glycine max
  Clone ID: PAT_MRT3847_27399C.1
cttctacaaagagaatgatcacctagcaaattttagttgcctaattcactttacacctaccgaggctccttctaactgaattgcagttttcttccttatgactctctcagaccatgatatgctgactattttgccgcctactgacaacactctcaatttgaagcacgatcttatggcgcttggagtagctcgtagccgaatctttgtctaatgcgcattagcgtatgatcccgccagctacggagtcgggtcgagccgaacccattggccaaggctctgcgccatgttaagcagcaaggtgcgatctgaagaacaaacctcctgcgctgaccag

SEQ ID NO: 62441 - DNA, 396 bp, Glycine max
  unsure (1)..(396): unsure at all n locations
  Clone ID: PAT_MRT3847_2739C.1
cacgcggactctcacgaacgtggggcccgcgggaacttacaaagcttcagtaacgtcagatatggcttccgtgaaaatctcggttgaaccgcaagtgctgagtttcaaggaaaatgaaaaaaaatcattcacggtcacattttcatcctcgggttcgccacagcaaagagtgaacgcttttggaagggtagaatggtccgatgggaagcacgtggttggaaccccaatttcgattaattggggttgatgcaaggttgacattgatgatagcggggacctcgtgcttgattggtgttggttctgtttgttccctgngagaaatgttgcaaaggggaaaaaatgtttggnctcatgtgtttcttttctttcccggggaacagcgttctaatcaatgat

SEQ ID NO: 62442 - DNA, 1251 bp, Glycine max
  Clone ID: PAT_MRT3847_273C.1
aattaaattgaatttgaatttgacatattcacggatcgggtacaatcggcttacatcctacttttaaatttcttgggggaagtcttcttgttgacaaaaaaaagtcctgaaatactatcttcttgaatgggttgtttacactgattattcatgtcccaacactattaattatccaacaaacaccaaatgagtgaatgagcgtgtcgacatgttgttactcattcaccttttcattctgggcttcttcaatttttccacaacaaccgaagctattgaccttaacagtaactacctgaatcacagctgttcaagcaacaaaaccttcactccaaacagtgcctaccaatctaacctccaaaccctcctcgcatccctatcttctcacgccaccactgcacaattctacaacaccacagcgggtggtggagacgtcggtgaaaccatttatggctccttcatgtgccgtggcgatgtcaccaaccacacgtgccaagaatgctttaaaactgcaacccaacaaataaccctaaggtgtccccactccaaagaggccttaatttggtaccacgaatgtttggttcgctattccaaccgttgttttttctccaccgtggaagagtggcctaggtttagcttcatggattataacgtaacgagttcaacaaaggaagaaggaagctatgggttctggttgttatccaaaacgttgagtgatgcagtgggtgaggctgcgaatgctggtcctgcgggcaccatgaaatttgcaacaaagaacgcaaccttgtctggggcccaggaagtttatactcttgttcagtgcacgccagatctatcaagccaagattgcagtaagtgtttgggtgatatcatgagagatatccccttgtgttgtcttggaaggataggaggaatggttctatatccaagctgcactttgatgtttgggataggacagttctacagagactttctcatggtacaccaaaatcaaaatcagaaaatgaaaagttcactacgaacaattgttataattgtcctccttgttgttgttgttccggtgatgctaagcttctttagctatcatttgatacgaagaaaagcaagaaagagaaattacaagattcttctaagagaaaattgtacgtattcttattgtaataaaaaattctttaatccatgtaagtttaaatttgcaaacttattttaacaattcaaacatttgtttagttggtcaggaaagtgtcactatag

SEQ ID NO: 62443 - DNA, 162 bp, Glycine max
  Clone ID: PAT_MRT3847_27400C.1
tatgctcacaactttaacactgcttttcaattatacatcacactcccttttactttcaccttcaaatccaccttagaatctatagatacaacacaactctaatatactttacaaatttttttccaacttaaatacttcatacatatcaaaaaattcttctta

SEQ ID NO: 62444 - DNA, 573 bp, Glycine max
  Clone ID: PAT_MRT3847_27401C.1
gtgctgacggagcccacgggccgggacatcggcctgcggtacgacctgggccgggagctgggacgcggcgagttcggggtgacgtacctgtgccgcgacagggaaacgaaggaggaattagcatgcaagagtatttccaagaagaagctacgaacggctattgatattgaagacgtgaggagggaggtggagatcatgcggcacctgcccaaacacccgaacgttgtgtcgttgaaggacacgtacgaggacgacgatgccgttcacctcgtcatggagctctgcgagggcggcgagctcttcgaccgtatcgttgcgcgcggccactacaccgagcgcgctgccaccactgtcaccagaaccatcgtcgaagtcgtgaaggtgtgccacgagcatggtgtgatgcatcgtgatctcaaacccgagaactttttgtttggaaacaagaagaaaacagcacccttgaaagttattgactttggattgtcggttttattcaaaccaggtgaaagattcaatgagatagttggaagcccatattacatggctccttgagtattaaagcgtaattat

SEQ ID NO: 62445 - DNA, 328 bp, Glycine max
  Clone ID: PAT_MRT3847_27402C.1
aatttttatttggtaagaacattaataataaaacttactgtcgggtacacttcataactgtgtaacaaaaaaactataggctctagtaaaaaaatcattaacattggggcaacacttttttcacaacccaagtatccctaatgtataagcacattctaaaaaaaaaacttcccactaacaggaaacacccctctgaggaaagccataaaagggccccctcacaaaaaaaagctttaatctacccatttgccaaaatttaaaggacaaaattcacgggtcaaataaaatttataaaactcagcgcaaaatcgctgccaatacaaaataa

SEQ ID NO: 62446 - DNA, 333 bp, Glycine max
  unsure (1)..(333): unsure at all n locations
  Clone ID: PAT_MRT3847_27403C.1
attcatccggacaacaacaanggcgggggggggttaattaaaaagaccgcggctgaccgccccccgnnggggtggcaggaccatcaaggcgcaggcgaatggacctcaaaacgaaaccttcaaaggtgagaactgaggggaacttggacccgacatcggtgagaacggtgcaggagacagaaggagaagcagctacaacacgccattccaagctgggggctacgacaccaccccaaatgcctacacgctagcttcgcggggagggctccaacgctgggagcagctattatcgttgggtctgggaggccaacagggccaacccaagaggagaaa

SEQ ID NO: 62447 - DNA, 242 bp, Glycine max
  Clone ID: PAT_MRT3847_27404C.1
ataaaaagacttataaaaatttatatttttttttaaacaacgggggcgcacttttttggtactaaatcacttaagcccccctttgaatctcacattttttttaacttcccaataagaataataataataataataacctgggccccgttttttgggaccaatcccctttggtgatgaaccctgaataaacccctcccaccttttatttcaaacccgggacctatggacccccgggggacccc

SEQ ID NO: 62448 - DNA, 586 bp, Glycine max
  Clone ID: PAT_MRT3847_27405C.1
aaaaaataatttcatttaataattaataaacataggacacaaataattaaaaactaaaaaattaataaagagtaacatgaaataagatgtgtgattcacaggttttttttttttattttaaaacaatcaactaataagaaagaatgtgtccaaggaaaatgtattcttaacatttgtctatttcaaaatatcatagtcaaaaacttgtcaaatttagaaagattaaataagaaaaaaaaaagtgagaggattcgatacataaaatattatataaactatttatttaaaaattaaaaattggggaaccaaattaaaataatgtaaatattttaggagtcaaaaacttaattataagcttatacatacatatatatatatatatatatatatatatatatatatatatatatataatattaaaaaatatatgaatattgatgtgtatttaaataatttttatatccatgtatttcttatatcatgcattttaatttatataaattctaactttaaaaaatattaatttatttctaaaatttccatattaaggtcttctacactgttaaaatacatgtattattttctc

SEQ ID NO: 62449 - DNA, 251 bp, Glycine max
  unsure (1)..(251): unsure at all n locations
  Clone ID: PAT_MRT3847_27406C.1
ctctattctctctccccctccccaattcattttgcccttatcttttccctaatttcaaccatacctggcctttgctccaatagaagatcggcccgggctactcctcnctcaacacctcttcctgcttcagttcaccatgctccttctacaacccctgctcatagcattatgcatatctatactttgtgtcattttatcaaccatcactcaacgttttgcttctcactctctaaagacaaatccacacaatt

SEQ ID NO: 62450 - DNA, 840 bp, Glycine max
  unsure (1)..(840): unsure at all n locations
  Clone ID: PAT_MRT3847_27407C.1
cccgcgtccgcaacgaagttatatttgctgccacaaattgtcttttcttcctcggtgtcttcgtcttcgattccttcccaaatctcaaaactgcgtctcggggatttgatttccgttcaattcccctcaaaattttgcgacttttcaaatccctgtttggcttttccatctgggttttcattcccgatcgatccgtgggtttgagattcagacaattagcattcatttcgggtttcaataaagttgatgcatttaaaatcttagtgggtaggtttgggattgttgtgatttgggggaaaaatggaatcaagtcggagagcggttgaatcgtactggcggtcgcgattgatcgattcagctacgtccgatgaagataaagtcgcacccgtttacaaattggaggaaatctgcgaacttttgcgttcttcgcatgttagtattgtgaaggaggtttccgagtttgtcttaaaacgtttggaacataaaagcccaattgttaaacagaaggctttaagattgataaagtatgcggttgggaagtctggtgtggagttcagaagggaaatgcagagacattcagtggcggttcgtcagttgtttcattacaagggacagctggatcctttgaaaggtgatgccctaaataaggctgtgagagacactgctcatggacactgctcatgaggctatctcagccatattttcagaagacaattaactcataatgagtaagccagcgcctgctgaagatctaaaccggcggatacaagggtttgggaatacaaactatgaaccgccgncagaagataagaanccttttatnngtgaggttgttggnnc

SEQ ID NO: 62451 - DNA, 531 bp, Glycine max
  Clone ID: PAT_MRT3847_27408C.1
ccacgcgtccgtgatgatcaattaaatattaaaataaattccttaacaaatattagaacactcatttgaatgtgatccatgggttcaatactatattaatcaaattaatatattaatcaagatagacatacaataatattctttaaagtcctgataacataaagtagcgttttactctcaacaaacataattacattatagtaatgtctttatatcagactaatttatgaacatacttttattgcaaactcatgattgataactttaatctaaactagcactatatggataagatcatgtttaagtatatacaatatctaattatcactttatttcttaagacacagaaaacgttaataaatgaatcacattttgttacggatcgatgtatgtttatgaaattaagtttgcttttcttcttgatgcggacctattataagagcttatagaaacgttcataactctgagacactaatctgagactctatcagttataggcactacaatgaccgtaagagacgaacagtctgc

SEQ ID NO: 62452 - DNA, 827 bp, Glycine max
  unsure (1)..(827): unsure at all n locations
  Clone ID: PAT_MRT3847_27409C.1
caatatccggactctctgcatctaattccaaaattgtgaaaaacccagaagcagaaggagcaatggcagataagccaagtcgatccctggttttattcggtgatgggttagctcgtttcatcgattcatcgcactctcactttcactctctcgcttctctatcttcctgcggttttttgagtctcccaaactctcccccctcagtttccagaaagcgaggatgagaggacagttcgagaagttgcagtgctgttggatgcatgtcccatttatttaaatatggggaaaatcagtgatagtgacaaccaagaggattcaccaaaacaaaccttgcctgataggtttatgggaatgaaagctgctattttgaccaacaattcaagcttgaagtcttttagtgccaaacttggatttagtgttcttaaattggatgagttagtggtaggaggttctgccgaggtcgtggcccttgagctgctcaagttgcttggctttcaagaagggaaggtgctggacagtgaccactttgatctggttttctttcacaatggagctggtgaacaaaaagtggttgctgctgatatgggatatatggatgccttggttggaggggtaatgagtcaaatgcaacctggatctgacatcagttcacgtctgcacttggtccgttgtcgtgagctatggcaaatatcttgggagggtgatgattctaagttttctgtgtcaaagagggtagatgagaagaatccccatctttcagtgctttatcctctacaagttatgctatggaaaggaggaattcctcgnaaaggatgtaaggcattata

SEQ ID NO: 62453 - DNA, 298 bp, Glycine max
  Clone ID: PAT_MRT3847_2740C.1
tccggtgcaggtaccgggccgggattcccgcgtcgcgccaatttaaatttgagcactaaccagtaccacttgcaatggctctaaaatatgaagaagtgatacttttgggcaagtgggtcagcccattttagtcacagatttgtcctatcttctaagccttaggggttatcttacaatattcttgtggttgatcatgtttacaagagtgctgaacttcttaggtacatccccttgcacaagtaggttccattttttgtcctacatttttgttcctcattcttcgtgttttcttattcta

SEQ ID NO: 62454 - DNA, 273 bp, Glycine max
  unsure (1)..(273): unsure at all n locations
  Clone ID: PAT_MRT3847_27410C.1
ctaatggaggctttgctgctaagcagagaccacttactaaactctgagaagcaccacganaatgttgatatagtgccaaaacaaaagcctcaaacactggattccctgttttcaaacatgaaagaacaaacaattttatttttgtcaattcaaaataatgttttgcaacccaatttacgttgaaataataagctcccattgataaaaagcccatcttccaactaaatttctcacaccattgtcaatttcattatatcacccttttaacctata

SEQ ID NO: 62455 - DNA, 1275 bp, Glycine max
  Clone ID: PAT_MRT3847_27411C.1
aattcggcaccagctctacactctctgcatctgattccaaaattgtgaaaaacccaaaagctgaataagcaatggccgataagccaagccgatccctggtcttattcggtgatgggttagctcgttccatcgattcatcgcactcccactttcactctctcgcttctctatcttcctgcggttttttgagtctcccaaattctgccccatcagaaagcgaggatgagaggacagttagagaatttgcagtgctgctggatgcatgccacacttattcaaatatgaaggggcaaatcagtgatcgtgacaaccaagaggatccaccaaaacaaaccttgcctgataggtttatcggaatgaaagctgctattttgaccaacaattcaagcttgaagtcttttagtgccaaacttggatttagtgttcttaaattggatgagttagtgggaggaggttctgctgaggttgtggcccttgagctgctcaagtttcttggctttaaagaagggaaggtgctggacagtgaccactttgatcttgttttctttcacattggagctggtgaacaaaaagtggttgctgctgatgtggggtatatggatgccttggttggaggggtaatgagtcaagcacaacctggatctgacatcagttcacgtctgcacttatccgttgtcatgagctatggcaatgtcttagaggctgatgattctaagttttctgtgttaaagagggtagatgagaagaactctcatctttcaatgctttatcctctccaaagttacactatgaagggaggaattcctcgaaaggatgtaagacattattctcccatgttaattgctcaatggcaatctgcggtgactcgcaaggataatgcagagagattttcttttgaagattttatggagcatggtggaaatcttacaataccagcagataggttcttgcatgagatagcctttaagctttggaaagctcccaagtatggagcctgatttcactttttggttttcttttcaacttcttgttggcttcttgttatagcagcagagctatttaaaaattctctgatgaacatgtttacttcgtaatctaaagtctaaagactctaaactctattccatcatgtaatagctaataagattttgatgagaacggtacaccaatccactcattcttttcttggcaatgtttcttgtaagcatatataagaaatctatatttgttaacctttttttatgtaataaaatgtctcttcaaattttttactaa

SEQ ID NO: 62456 - DNA, 139 bp, Glycine max
  Clone ID: PAT_MRT3847_27412C.1
ctgtcagttagtgagtgtcgggtacgacctttttgtgttgggtggcacgtaccccaattcctgggtatgcaatcaaatgcagagccagaccataactatttacaggcgagaagacggccaaccatcttacatgccaagg

SEQ ID NO: 62457 - DNA, 1829 bp, Glycine max
  Clone ID: PAT_MRT3847_27413C.1
aacattcagaaaaacttgtgttagtttacgaggtgctctctgtcaaggacgagtttacttctcactttggtcgaaagaaggagtcttctgtgtcttgcagtgtctctaccctacgcaaaggttcattctaatcatgtgagattctgatcaactctccaaatgtgccaaaaaccagacaactgaacaagtttatcagccaaatggacaagcacccatatgttctacggacaagccactcacaccccaaattcgaagtaatggcattgatcaagtacaatgtacccctccaaggagattaaggactgatgaaattccgcatattgtaaatgacttcagacttgctgcaaggaatgccatcaaacctggctagcggctgcgagaagacgacagaagggggaaattgaattcacacaagagatggcttctcctcttcttactccttacaagatgggcaaattcaatctgtcccatagagttgttttggcaccgctgaccagacagaggtcttacgacaacgtcccacaaccccatgccatcctctactactcccagagaacttccaacggaggccttctcattactgaagccactggcgtctctgacacggctcaaggctatccgcaaacccctggcatatggactaaagaccatgttcaagcttggaaacccattgtcgatgccgtccacgccaaaggcggtgttttcttctgtcagatttggcacgttggaagagtttcagattcagtttatcagccaaatggacaagcacccatatcttctacggacaagccactcacaccccaaattcgaagtaatggcattgatcaagtacaatttacccctccaaggagattaaggactgatgaaattccgcatattgtaaatgacttcagacttgctgcaaggaatgccatcgaagctggttttgatggggttgagatccatggggctcatggctacctgcttgagcaatttatgaaagataaagtgaatgaccgaacagacgaataaaaaatctgaatgccctcatagcctggtgcctatgagaaaggccttcaatggcacttttatagccgcaggaggttatgaccgccaagatgggatcaacgctgtagctgaaaacagggctgatcttgttgcttatggccgttggttcttggctaatccagatttgccaaaaagatttgctctcaatgcccctctcaacaagtatcaccgggagacattctacacttctgatccggttcttggttatactgactacccctttcttgatgatgaagaatccaatgccgtagcatcctagggtagaacctccatttttaataaccttatcttcccctgcaaattcatatttgcaatttggttggtcggattttcattcgcgtgttctttacatgcttctcctgctatggttttggatcccccttacacattttctaaattgtaagggagtgtaatatgtagaactattattgttgtattaatatcactggatcctaataagtgttgggctaaaggcctaaagctatatatgcaccttatatttcaatttgcaataccaaaaaaaaaaaaaataaacatgtaattctaaagagattgaaattagaagctgtcccctgccaagagacaatgctaacggaaatacgttaagtaaatagattccttttatctaatcattcaagggagttggtttggaatgggtgcggcctggtctggtgaaacctgtgatttgtaatgaaagctggggtgggctgttgttgctatcaaaaaggctcaacttttaaaaagcttttctttcccggcaaattcctatttgcaatttggtt

SEQ ID NO: 62458 - DNA, 285 bp, Glycine max
  Clone ID: PAT_MRT3847_27414C.1
cagctttactcaacgtgaatcatctaaattaccttcttttctgacactttccttctttgcaattaattgggtcgggcatggtataagtggggaaggagaaggacacaaggagttagatgcatgcaatgaatgagctttgtaagatcaatgtgctttaattaattattaattgattcaaggtccattacggtgtaaattctctctgcatttgcatttacggtttgtccggaaccaaatgttaacatccaacaagtaatgttattattgtaaaaaaaaaaaaaaaaa

SEQ ID NO: 62459 - DNA, 350 bp, Glycine max
  Clone ID: PAT_MRT3847_27415C.1
gcgaaatcaaatgtcaaagttgcttaaactcttagaatctccgcaattgaaaatacatctagaaacaatcatgagcacatcttgtcccaccaatcacaaatttgacttgaaattttggaggggcgaaaagagagaacacatggacattgtagtcttcttttactctcaataaagtataaagagaaatgtagggtagtgaaattttgggaatagaaatttacatgcttaataaattattgactctttctgcataaaatttctattgtgagttctatatattactgcttgagggtttctgcataaaattactgtcagaatcgtaaacggattattacattaaaaatatgcag

SEQ ID NO: 62460 - DNA, 1290 bp, Glycine max
  Clone ID: PAT_MRT3847_27416C.1
atctcctcttcttactccttacaagatgggcaaattcaatctgtcccataggtatctctatctctgtttttccttcctatttccatagatttcaattgctgattaattttgcttgcagagttgttttggcaccgctgaccagacagaggtcttacgacaacgtcccacaaccccatgccatcctctactactcccagagaacttccaacggaggccttctcattactgaagccactggcgtctctgacacggctcaaggctatccgcaaacccctggcatatggactaaagaccatgttcaagcttggaaacccacgcgtccgcccacgcgtccggtaatttcccccaccttttgctccttccaaatactaatgtttcaaataccctgccaaatactaccatcatatccatggctgtgcaaattgtaggttttgatggggttgagatccatggggctcatggctacctgcttgagcaatttatgaaagataaagtgaatgaccgaacagacgaatatggtggatcccttgagaaccgctgccgatttgctttggaagttgttgaagctgttgttaatgagataggggcggacagagttggaattaggctatcgccattcgcagaatattcagagtctggagactctaatccaaaagaattggggctttacatgatgaatgccctcaataagtatggtattctttactgtcacatggtggaaccaagaatgaagactgttggagaaaaaactgaatgccctcatagcctggtgcctatgagaaaggccttcaatggcacttttatagccgcaggaggttatgaccgccaagatgggatcaacgctgtagctgaaaacagggctgatcttgttgcttatggccgttggttcttggctaatccagatttgccaaaaagatttgctctcaatgcccctctcaacaagtatcaccgggagacattctacacttctgatccggttcttggttatactgactacccctttcttgatgatgaagaatccaatgccgtagcatcctagggtagaacctccatttttaataaccttatcttcccctgcaaattcatatttgcaatttggttggtcggattttcattcgcgtgttctttacatgcttctcctgctatggttttggatcccccttacacattttctaaattgtaagggagtgtaatatgtagaactattattgttgtattaatatcactggatcctaataagtgttgggctaaaggcctaaagctatatatgcaccttatatttcaatttgc

SEQ ID NO: 62461 - DNA, 295 bp, Glycine max
  Clone ID: PAT_MRT3847_27417C.1
ataggattaacagattatcatagggggcttttttaaggcccactagcccatattgacgcatactacttgaaaatgttaatcaagaaatcaaacctgcaccaattatataggcttgatcgcattggcattggaccttatacaaaccaggtcacgtactcaggcacagtagtgaattacaaatgccgatgtcgaacagtagcctccaactcctcacaggactcattttataagctaccatgagcctgaggcacataagcagagtgcatcattgacaggatctcatgcacgggtggcg

SEQ ID NO: 62462 - DNA, 418 bp, Glycine max
  Clone ID: PAT_MRT3847_27418C.1
ttttttttttttttttttttttttttttttttttttttttttttttttttttttttttttttttttaaacaaaaaaaacagggggcttttcactattttaacgaatttgaaggggttctacttcacccttccattgggggatcacttcttctcagggggggggaaataaaacaaatggggcaacttggggagcacaatcccccaattgcctcaaattaggggcccccccccaaaaaagggaggggaaaaaaataactttacaattttggcaaacacaaagctgcatattttacaatatatatattggaaccaacaaaaagcaattggtttttttcccaaaccgccttaaacctaaagccataaatgcccaagcatttggctaaactctgctctgggggttttttaccccaccaggaag

SEQ ID NO: 62463 - DNA, 189 bp, Glycine max
  Clone ID: PAT_MRT3847_27419C.1
cttggctaatgccatttttaatacattaggatcacagcctttcttccatacttgtatcaagagaagacgatcatgcttctgtctaaagactaaaaaactcttgctaaagaaatttcctctactttttacaaaagctcatgtttggtcttaaaacaaattcttattgcacacacaaagtaacctttgtct

SEQ ID NO: 62464 - DNA, 263 bp, Glycine max
  Clone ID: PAT_MRT3847_2741C.1
aacgtttaccattcgcatacaaatgaggaaaaaaggggacatgtgtggtccagatggcaaagtcatcgtctatcacaggtatcaaggtgcaacaaatttcttgcttttggtaggagccggatcgaaccccatgtttcttttgttacaaagcaattaaaccttttgttcttcaactacatgggttttaaatataatattttgccgcgaaaaaagacaggtttcacattttataactgggggaaggggaaggcgttcttttgata

SEQ ID NO: 62465 - DNA, 449 bp, Glycine max
  Clone ID: PAT_MRT3847_27420C.1
cgacaagatctaacgttaacgttatctaaatctcttttgaaagcaatttgtgttatttctcgagttcttgtttttatggtctaaagcaattatgggaagtttttttggtctttgtcaatatgcgcttattctacatgctaatatgcgcgtgttggatgatgaatcacctcaccgagtcttgggattttttttgggggggtaagttatgcgatgtaaccttatccttgcgcatactaggccacggcttccgtgcgccggtgatttttaagtaactttttgagttttgcgtttgctaacgtacgcgcacttttttattttcaccttttagcttttatcttcacaaggcggcaaaagagtagaaaataaaataacccagaaaataaacccttaacaaggagttgttgtttgtttgtttccttttgcggaactgggtggaagatatgaaatgc

SEQ ID NO: 62466 - DNA, 1151 bp, Glycine max
  Clone ID: PAT_MRT3847_27421C.1
ccgtcgcgagaagacgacagaaggggggtgaagtctggaaagacccacgtgccgccacgtgccggttcttcaatcttctagagagagagagagagagagagagagagagagatggcgttgaatcctcaaatgtttccaaatggaatgcccgttcctttcgtgaacgagatgtttgtgttggccagagacggccgttaatttcgaggccgataggtttctgcctctggcaatcatgggggtaatcgtcaaaacaaagggaatcgtgtatttgtcaaatattcggatggtcttcgttgctaaaagtccagttggacacttcactgcttttgatatgcctttgctttacatccatggtgaaaagtttaaccagccaatatttcactgcaacaatctctctggacatgttgaacctgtggtcccaaatgaccaacacagagctctttactcaacacactcatttaagatcttattcaaagagggaggctgtggaaccttcattccccttttcttcaatttgattacttcagtgaggcagtataatcaacacactaatatgcagacacaaaattatgtggatcctttgcaggcatctcagactccagttgatgagatgatgagacatgcgtatgttgatcctaatgatccaacaaaaatatttctgcaacaacccaattctgattctcagcttaggcgtcgaacatatcagccacaggcagatggaggccatgtctgagtctgaaatttcactctcctcactttcatcgtactatatatgggaattgtgcattaatacatcaaaataaataaaaatcttatgagactgtttggatctatgtttatagaatttattttagatcaatgtgattatataaaatttgattatgaagtaatgtaattttttttttgtttggataagagattgaagtgatttttaagaaaatgttggttggattttttgttgacattgaagcttcttataaaagtcatgatcattgtattaaaaaaaaaaaaaaaaaaaaaaaaaaaaaaaagggcgttgttattcatacgatagcagagacaattgttggttaatttcaagatagccagaagttgaaaagaatttattagagcaacaaacaaacatgtgattataaaaggattgatataaa

SEQ ID NO: 62467 - DNA, 770 bp, Glycine max
  Clone ID: PAT_MRT3847_27422C.1
acggctgcgagaagacgacagaaggggggtgaagtctggaaagaccagcgtgcaggttcttcaatcttctagagagagaaagttaaagattgaaatttggatcggagagagagagagagatggcgttgaatcctcaattgtttcctaatggaatgcccgttcctttcgtgaacgagatgtttgtgttggccagagacggcgtcgaattcgaggtcgataagattcctgcctctggaaatcatgggggtcatctcaaaacaaagggaatcgtgtatttgtcaaatattcggatggtcttcgttgctaaaagttcagttggacacttcactgcttttgatatgcctttgctttacatccatggtgaaaaatttaaccagcctatatttcactgcaacaatctttctggacatgttgagcctgtagtcccaaatgacgaacacagagctctttactctacacactcatttaagatcttattcaaagagggaggctgtggaaccttcatccctctcttcttcaatttgattacttcagtgaggcagtataatcaacatgctaatatgcagacacaaacttatgtggatcctttgcaggcatctcagactccggttgatgagatgatgagacacgcatatgttgatcctaatgatccgacaaaaatatttctgcaacaacccacttctgattctcaggttaggcgtcgaacatatcagccacagacagatggaggccatgtctaagtctgaaatacactctcctcacgttcatcg

SEQ ID NO: 62468 - DNA, 407 bp, Glycine max
  Clone ID: PAT_MRT3847_27423C.1
tttttatgattctcatgtatgcattaatgttatttaatcgaagagaatatggaaatttagtccaaatggctaaagcttcatccctcgttcagaatatattattttacaacactatctcaaccaacaatatgttaatttcaaatggactctttaatgtccaaagacctaacaataagaacccagatcccaaacatcaccattcttttcagttccttaacaggaagccagattcctatagaggctacaatattgctagtcaactgcagcatgctagggtctcactctcgcacaatctgtaggaatcctgctagcataccgaagacaagtctggaatcagaatggaggctgaggggaagaataagccgtgaagtaataaagaagtaacttgttcagcgatgttacacatg

SEQ ID NO: 62469 - DNA, 380 bp, Glycine max
  Clone ID: PAT_MRT3847_27424C.1
ggaaaaagtaaaaaggcaaaactgacatttttgaaggaatcacccccaaaggacaattaacccaaaaagaaaacaagctaaaactttagccataaacatttggaggattttttttaaaacttggagtttatataccccccatttgggacaaaacccccctggccataaaaaactagacaataagggccctattatccctgacccttttccgggaaaggaaaaaaatggggcctcaccaaggggggatataccagccacaaaaatcaacggacccagctaaatcctttagctgccgggattaaaaagaaaaaaaatcaaaatcaaaacacaaagccgggccttcctaacctggttttaagaaaatatggttaaaggttaac

SEQ ID NO: 62470 - DNA, 333 bp, Glycine max
  Clone ID: PAT_MRT3847_27425C.1
gggggtggggtttttaaaagggacgttttaaaaaaggccataaaacccaccccttgtttaaggaggggtatgggaaaaaccgcgggccaaataacggggggggtaaccggtgccaaaaaaataaagatttgaaacagggggaaccttccccaagagggtttttgacaatggccaggaacacaactccttagcgctaaaacttaaggggcccattggggccgggggttttaaccccccacggcctttaatatgggaatcgggggaaaatttttttggtttgcgggggtgaaaaaaaacaaaaaggggtttttaaaaacccggggcctgcccctt

SEQ ID NO: 62471 - DNA, 426 bp, Glycine max
  Clone ID: PAT_MRT3847_27426C.1
cataagctacgccataaaatgaacatccggtcggcatgtacgcacgaaatgtgcacaatctgaattgcaagagcgaagagaaatcactgcatgtaaataatatcacttactcattacaaaccatattacatgaaaacacccccatacactacactaaaagaaaacgagctcttgtccaatgatagaagtccacccagttttgagcatacacaacattaaaatctatcatcgggagacccactggtcagaacctggatgaaaatagccacctgaaatgccccttcattgtgttcaatgcaagcaaggaagggagcgcgacttgcattagggagccacaccgatgcagcatcggaaccatccaaggggaacttgccttgagaatacgtgggtaaacaaggaatcccccaaaccctaaaccttaacctt

SEQ ID NO: 62472 - DNA, 442 bp, Glycine max
  Clone ID: PAT_MRT3847_27427C.1
ttggaatcgtgaaagaatttatatatatgtagagagagagagggttgacggcgaattcgggaatggagagaaagtatttgtttggtgcatcccataatattatcttctttctctctcccaccacttccatcagccgcggcgaccaccagcactcacgttggaaccactgcaagccataaacacctccacgcctatcgcagcacaacctcccattccatttctctctagcgcagtgcacattcccctacccgaaccgaaccttcttcctcgcaaacaccccgaattcaacaatcttcccgaacttcatccccctccctccaccaacccttcctcttgaagcttctcgaaccttccaagccttcatattattcccagcatcaccagtacacaacgttgcagggatttgagccgatgaagttgttgaagcttagatccagcgact

SEQ ID NO: 62473 - DNA, 216 bp, Glycine max
  unsure (1)..(216): unsure at all n locations
  Clone ID: PAT_MRT3847_27428C.1
tacttttaagatatcagaactatataaaatctatgactagtgcgtaaataatgcagggaaatggtcggcnccactcatttcttgtacaactatattactttacacacaccctctccctgcattatttactcactattcatagattttatatcgctctctaacacattattgtccccaaccgttttcttggcttacttacgcactcattcttcgtca

SEQ ID NO: 62474 - DNA, 271 bp, Glycine max
  Clone ID: PAT_MRT3847_27429C.1
ggctgctgccgtgccgtaccggacctgccgggccggcccacgccacccgttcttttactgatgaaaggagagatgcatgttcaatcccttaaaggttctccctaacagcagctttagacgtcgtcatgtgtgacacactattatttatttgctctgaaggacgatgggtcctacgtgccacattctgaaggttagctcactacatcaaaacatttgtatcggagagagtatctggacacgtgaccatcaatagtgtgtataaccatgtaat

SEQ ID NO: 62475 - DNA, 190 bp, Glycine max
  Clone ID: PAT_MRT3847_2742C.1
cacacgcgtccgaccactcctccttactgctgctagaatacgacacaaactttttgggggtgacataaaagagcatcatataatacaactactatcttcaatacttacataattacttagttactacttaagatcctctctcatgtctttccttttttcttattagcttaccctattttgttttacctcc

SEQ ID NO: 62476 - DNA, 431 bp, Glycine max
  unsure (1)..(431): unsure at all n locations
  Clone ID: PAT_MRT3847_27430C.1
gaggaaaagaattaaattgcttcaactaatggagtctattttagttttcttaagggcacacacacctcacctcacatcggctaatgcatttaggaaaatgaaatcgcagccaaacttccaatctaagattcgaacaccaagctagcgtctcgagtaaacccctgactgaaaattaaaattatataagatttgcttaatggtgacaatgatcaaacatattacactaatgatgataaactttttattacttgcttcattagcattcagaatcaatttcatgcaccattgcacaagttctaatgaaaaatttgtggttgagactaatttggacacacacctcaatgagattagaaaatctgtnttactaaaatacaaaacagacagacagacaattagtgtgtgtttggattgacgtttcacctgctccaaac

SEQ ID NO: 62477 - DNA, 465 bp, Glycine max
  Clone ID: PAT_MRT3847_27431C.1
accaaaaaacccaccaaactatcatttcctcattttttaacgatgatgatgttgggggaaaaaatacctttgtttttagaggaacaacttttaatttccagcccccccctttaacccgaaaaaaaagagtaaaaaacaaaccctcccccccaaaaaatttgcaaatcaaaatcaaaatttttagattttcttttttaacaactaataattaaaaaataataatgatcatgcctatataggcctttaattaaataaaattcataaagacctcgatccgttcctcctaggacattgatattatatggggcctttgccttttaatatgggcagaagcaaactcatgatgatccccaacgcttttttccatcacagccttaaaagctttttgttttgagttaaagcaaaactgttgttgttgttgttggggggggggggggctatggccctcaaggctgccactggttg

SEQ ID NO: 62478 - DNA, 357 bp, Glycine max
  Clone ID: PAT_MRT3847_27432C.1
ttgggggacagtgatgctgcagtcaaacaccacacttcactttgattacgcttacccatacccgacatttgttactctaccagacataaaagtctaaggctacaagaaacatctctatgtacctgatgagacagaaactagttacactgctgcaggcatgtgcaccaagtctccgatggtgccatggacacttgcctccagcagtacccatacagcagatgctgctgctaaacatgcaccaaaacccactggagcatggacttaggaggaaccacgaccaaagtcaacggagaccacgagaagatagtgcgtgacaccagcaagaacatgcgcttggtgtgaaatagatgtgggact

SEQ ID NO: 62479 - DNA, 796 bp, Glycine max
  Clone ID: PAT_MRT3847_27433C.1
gtttcccccaggtctaatacggccccccttgggggaaactggtacccccggggggcccgtccgggatttattcccggggcgacggggcccctaatcgggggcccccccttttttttttttttttttttttttttaccaatgtcaaattaacttcattaactcgatcacttgaaatagttgtactcggaggatttcaaggacacgggaatcacaatctacaaggtacctatgtacatctctaatgtacagttccataggtaaagcaacagtgtacagaagcaaattcaatgtcatctgagcaccaccgactggaaagtaaaacaattaagaaaacctttcacttgtttttttgaagccaatcaaggatacccttttctgtatcagaaagcttcccatcctttgccttcaatgtcccttccatcaattcaaagtaatccttgtagttacgcttgtaataactctccagcctctctttgtcatttttctccttgttttcctctgatttcttctgatattttttaagaagctgagtcctagagtcaggttcaggtacttgcgtggtggcgattacagtggataagacaagtcctcttcttcccatttccacattggtgcttaaggttggtgtggtttttttggttgctacttttccttgtgttctgggaacagcttgcagattagatgaagcatacttgtttactgtaacagttagtgccatcaatatgctttgccctattgaactactcatcggatatttttcatctgtctcgtttagcaacaaccaagagttatcccg

SEQ ID NO: 62480 - DNA, 420 bp, Glycine max
  Clone ID: PAT_MRT3847_27434C.1
catactagacttataactgctgataatttgtgccgtccactaagggatttagatacaagatgccaatagggcacagtcaatgttcacaagatatagagtgagtcgcatctgcaacagaatgacatgacttataaaatatatattcgcacctacgcaagctagcatttttccttctgtcagtccataaacttaatgtgaaatcttccatagttactgttagaatgtgttaggacccaattgcaaggcatgggactagagtaccactcctcacatttgaagcatgggattccagtgagatttatagggtctagcgctctacaactacatcggctaacatttgtagtatgtttattcaaaggttctaatatcaattggcatcacagctttccaccatgtctttcagccacaaacgagctgtgc

SEQ ID NO: 62481 - DNA, 475 bp, Glycine max
  unsure (1)..(475): unsure at all n locations
  Clone ID: PAT_MRT3847_27435C.1
tcacgcgctccgtttagaatctaaaaacacanngaaactngnngctcaaagaaaggaccggaggtcgtatatgttcacgtcgcagaaggtcaacacaggttcacgaggtgaaactctaattctgattggagaacagaaccaagagctattaaggaagtgcatgtaagttttgttattggagtttggagaaaacttggatggagttctttatgtgtatttgatgttgctgttctctaattagaattggagtttcacctcgatgatgattcacataaataagtgtttacatggaaggtcaacagaggttctggaggagaaactctgattctgatggaagaatagcgcgaaaaacaattaagatactgcatgcaagttttgtccttttgactatagagaaaactaaagatggcagttctttatgtgtttttggcggagctttcagttagaattgaagtttcatctcaaaaattcgtga

SEQ ID NO: 62482 - DNA, 238 bp, Glycine max
  Clone ID: PAT_MRT3847_27436C.1
gagctaactaagcactttccacttcttgttattcaccctttcataggcgagcacaatgagagaattgggcgtggcagcaatactgtgttgaattgagagcttggacgatatggtctacactgaaggcgatgcatccatgaatactggcatgaatgactaagactttgcactgtacttcaatgccttaatatcttgactgctactttccataaccttattcttttacaggaacagacct

SEQ ID NO: 62483 - DNA, 268 bp, Glycine max
  Clone ID: PAT_MRT3847_27437C.1
ttgtggggggggttttttttttgggaggccaaccaggtattccataaaaaacttcagggacaccgacaagtaaaacaaaccacgactaggggttaaacaaaacaagcccataggataagcaaaaaaaccgaatgagacaggaagcgcctctggcagggacccgggggctccgctgataccaaggagcacaaacacattaccatcagaatcaagagccactataacggagtcgccctccttgatcactgtggcaagcatgtactcagcc

SEQ ID NO: 62484 - DNA, 770 bp, Glycine max
  unsure (1)..(770): unsure at all n locations
  Clone ID: PAT_MRT3847_27438C.1
gaattcgagctcgttacccggggatcctctagagtcgacctgcaggaggaaaacttctatttttttatggttggaagggtcatatcttcctgctctagtagaaaggtcctattcaatcttgatagcttccatgttgaacataagagagaactgcattcaaattttattatgactctccaaaagaactttcttttcaaatttttattcttatacctaacctaaaattaaaatgtaactaaaccgagtcagtttatggcatatgacatcctaatgtatcttctaaaatgctcaccatgcaaacataaccagaagtttctttttccaccaaatattttttcaagttgctgtgacatgtattgcctctgatataggataaactaacaaaaaacacttataggagaaaaaaaaatatggaggtaaaatgaatacagcttttctcacaagctaaaattaactcatgcactttcacttttgaataagttagatgatagagcttttcaaaagttgaggcggataagttgattttaacttattgattgaagtttaattcattttacctttctccttccggcagttctttttgagaaatttatccaaactgaccatgaaaggtgggaggttgtacaagaagcccactggacaagatccaggaatgacctttttgatatcttcaagcccaccaacatctttcccatttcaaatncgggaacctgcaaaagaaaaatccatacttcaaaattttctggtgcattgaggaacatatatttttt

SEQ ID NO: 62485 - DNA, 541 bp, Glycine max
  Clone ID: PAT_MRT3847_27439C.1
ggagagagctgtttggctcgagaaaaaacgaaccgggttttctttctttgtttctctctctctctctctctatttctcacataaaccgcctacatgcatgcggttcataaatcagcaaagccttgaaaagttgctgtgtgtgttcgaagaagacaacttttcctttattatttatttttctcactgagcttcagttaaagtagctagctagctagagggaattctgctgttttccatggctaaagcaggaaagtttttgttttgatctcaatcaagctcctgttatatacgagagagagagagagatgctgtgtttccaaagtaagagaaatccaattgaaggcctcataaagtttgatcaagagggatagcaatagcatcatatctatccatcacaccatgaataagatcagcaacttgagttgtgttaggagctctgatctcatagatgccaagcttgaagagcatcaactgtgtggatctaaacagtgccccggttgtggtcacaaatttgaagggaagccggactggttaggtctac

SEQ ID NO: 62486 - DNA, 832 bp, Glycine max
  Clone ID: PAT_MRT3847_2743C.1
gcgcgttaaactactcagctccacgcgtccgcacattggccaagagaaaattccagtgcgacgcgggcaagcagtacagtgtgaccgacctcaactacccttcgtttgcggtgttgtttgaatctgggggcgtggttaagcacacgcggactctcacgaacgtggggcccgcgggaacttacaaagcttcagtaacgtcagatatggcttccgtgaaaatctcggttgaaccgcaagtgctgagtttcaaggaaaatgaaaaaaaatcattcacggtcacattttcatcctcgggttcgccacagcaaagagtgaacgcttttggaagggtagaatggtccgatgggaagcacgtggttggaaccccaatttcgattaattggggttgatgcaaggttcatcactcactcgaatagggggtgtgtcttgattggttagtgattatagtatttatatgttactattattattatttaactttttttgcaaacaaaaatgttgggtttatccaggttgacattgatgatagcggggacctcgtgcttgattggtgttggttctgtttgttccctgggagaaatgttgcaaaggggaaaaaatgtttggctcatgtgtttcttttcttcccggtgtacagcgttctaatcattgatgaatatttttcgtcgaccatcttgacattaaagtttatgttcaactactttaaagtgaattcatttaactttccattttaatttaatgtttgcatcaaagccactagtagttgtaaccattctcgtacgctatatagatctacattaatggtattttcaaagtagctgatgttagtttc

SEQ ID NO: 62487 - DNA, 608 bp, Glycine max
  Clone ID: PAT_MRT3847_27440C.1
gtgaatttcgttgctgcaaatagtgagaatttgctgtctttggtcagagtggctccgagtgatcgcttcccctggtgcgacgaagtgaaatttcgttgctgcaaatagtgagaatttgctgtctttggtcagagtggctcagagtgatcgcttcccctggttccccgtcttctcatatgagttcgtctgtcttaacatctcaaggaatatttacaacttcaagaattggaagtagtgaatcccccaatagtggggcctcttcttcttttacccagcctatggaagatatgaatgaaaatgaagaaacagacttgctctcaatatcatggaatcaggactatgggtgctttgctgctggcacaagtcatgggtttcgtatctataattgtgagccttgcaaagaaactttcagacgtgatttaaaaagtggtggttttaaaattgtagagatgctgttccgatgcaatattctagcacttgttggtgctgtggctaattctcactatccaccaaataaagttttgatatgggatgatcatcagagcaggtgcattggtgaatttacattgaggtctgatgttcggggggtgaaatttagacgcgatcga

SEQ ID NO: 62488 - DNA, 2204 bp, Glycine max
  unsure (1)..(2204): unsure at all n locations
  Clone ID: PAT_MRT3847_27441C.1
gcacgagtatggattgactaaaaactaacctcttatattctagcaggctgcgttattcagaggtattcatttttctcttgtaaccgatgacacaaggaaaccattctgatctccccctctccgcaatgcaacgtcttgtaaatacgttgcagtcattattgagaattatttatctttgttctggctcactcccactgaaccctttttctcgtacgccgaggtataattttcttccttgaaattgtgggtatctccttactttggtaatgttttagcatgttttgtggttactcttatttgtgttgtttatacaaagatgcttttttgctttttgaatcttgttgtatctttaatatcaccattaaatcttactttttttcggtaggtgtaggtgggatgaaatgtagtagtttttctgctaaaattgagtgtttgatgcatttggtaatcttggctctgagtgattgcctccgctgaaatctccttttggcacttcacttatctatcccttggtcaactgaggttattaagtgcaacaaatgctggctggtgccccgtcttctcataatgagttcatctgtctcaaacatctcaaggaatatttccaacttcaagaattggaagtggtgaatcccccaatagtggggcctcttcttttacccagcctattggcagatatgaatgaaaatgacgaaacagacttgctctcaatatcatggaatcaggactatggttgctttgctgatggcacaagtcatggttttcgtatctataattgtgaaccttgcaaagaaactttcagacgtgattttaaaagcggtggttttaaaattgtagagatgctgttccgctgcaatattctagcacttgttggtgctgtagctaattctcactatccaccaaataaagttttgatatggcttatgatcatcagagcaggtgcattggtgaatttacatttaggtctgatgtacgtggagtgaaattaagacgcgatcgaattgtatgttgttcttgagcacaagatatatgtttataacttcacagatttgaagcttcttcatcagattgagactctggcaaatcctaaagggttgtgctggcattcacactattcaaatacatttgttttggctggttgataacttcacaaaggacaagttcgagttgaacacttcggactgaacgtgacaaaattgatcaatgctcatgattctcaaattgcatgcttcactctgacattggatgggctccttcttgcaactgctagtgtgaagggcactttaattagaatcttcaatacaatggatgggtctcgtttacaagaagtaagaagaggggtagatagagctgaaatcaacagtatagctttgtctccaaatgtccagtggttggcagcatcaagtgacagaggcactgttcatgtattcagcttgagagtgagagtgtctggggaggatagtttgactcagccaaatgcttttcaagggcctgcactgtttcatcagaattcttcatcttctttagatcccttgatttctccaaatactggtgctaaccccaattcatcattatctttcatgagaggagttttaccaaaatattttagctcagaatggtcatttgcccagttccacttgcctgaatacactcatttcattgtggcatttggatctcagaactctgtgataattgttggtatggatgggagtttctatagatgcagctttgatcaagtacatgggggagaggtggtgcagcaggagtatgttcgtttcttaaaatttgaaaataggcccaaataaaagttgctcaacatccttgccatgcagcaactatcctcaagccgcgtaaatatgtgtccagcaccaggcaataaactcttctcattttgtgtaaatatgattcccctgttttggaggatctggagatacattgttgtatatcctgtatattttggggggaaattgaaattgaaaaggagaaataccgatagcatcagctgcatcacaaataaatgacttactttttatatcactgtagcagtggccacaatgttttgctggagtatattgtcatgttacatggctccattcattcacatgtatatagttgcgtttgggactctcaatagtattaaatttantcggatatggtttgataatataaagaaactgaaacttatatactaccatacaacaaaa

SEQ ID NO: 62489 - DNA, 1422 bp, Glycine max
  Clone ID: PAT_MRT3847_27442C.1
gcgcctgccgtgccgcgccgccgaccacgcgtccgcctaccgcaccggttgaacaatccacacccaacattctcacaagtcacagccaaacaccatttcattaattcttgcagaatattgcttagttttgttttatctgaatttggaaacagcttttgaatggctttttcaagagttgcactgctaatatgcacggtcgggtattttgtgattgcctctgccggcaatttccaccaagattttgatatcacatggggagatggtcgggctaagatactcaacaatggagagcttctcactctgtcacttgacaaagcctctggctcgggtttccaatccaagaacgaatacctttttggcaaaattgacatgcaactcaaactagtccctggcaactctgctggcaccgtcactgcctactatttgtcttcaaaaggagcgacatgggatgagattgactttgaattcttgggcaatttgagcggcgacccatacatccttcacaccaacgtgtttagccaaggcaagggaaatagggagcaacaattctacctctggtttgacccaactgcagattttcacacctattccatcctatggaaccctcaacgtattgtcttctcagtggatggaagtccaattagggagttcaagaacatggagtcaaagggtgttccattccccaagaaccaggcaatgaggatatactcaagcctgtggaatgcagatgattgggccacaaggggaggtcttgttaagacagattggacacaggctcctttcacagcttcttacagaaacttcaatgccaatgcctgcactatgtcctccggaacttcatcttgcggttcaaacaacccttcctcttctaacaataatgtttggctctcagaagagttggattcaactgatcaggagaggctcaagtgggtgcagaagaattacatgatctacaattactgctctgacactcaaagatttccacagggccttccttcagagtgcaacacagcctaaagatatttagtttccctgtggattgatccagactccaattttcagctctctttggagtttcctttttttcttttcttttgtaattttcataatgataaattctttgattggttgtaaaagtttttttatacagtgttcaattcaaatggttcattctttctcagatttccttaataaattaaaatataatattgaattttccttgaagacgtgacaagagttgtgctttgcgaaaaaaaaaaaaaaaataatcatattctaccctactactatatttgcatctagtcatacatattgttcataaacttcggtaataggttaacatatataatactaatagagtgatgtgaaatattcgtggtgctgaatttcagttatcttcaacaggagcaacatgggatgaga

SEQ ID NO: 62490 - DNA, 422 bp, Glycine max
  Clone ID: PAT_MRT3847_27443C.1
tcataatcaaataccatttcattcattcttacatattgcttaattttatctgaattttgaaacaccttctgaatggctttttcaagagttgcattgttaatatgcacggtaattgggtattttgtgattgcctctgcgggcaatttttaccaagattttgatatcacttggggagatgggcgtgctaagatactcaacaatggcgagcttctcactctgtctcttgacaaagcctctggctcgggtttccaatccaagaacgaatacctttttggtaaaattgatatgcaactcaaactagttccaggcaactctgctggcaccgtcacagcctactacgtataatcatattctaccctactactatatttgcatctagtcatacatattgttcataaacttcggtaataggttaacatata

SEQ ID NO: 62491 - DNA, 444 bp, Glycine max
  Clone ID: PAT_MRT3847_27444C.1
ttcgctttttttttttctttttttttggataaaatatttttaaagcacaactgttataagtattataactaaagtcattaaggaactctgagaaagactgaaccattcgaatggaacactgcataaaaaaacttttacaaccaatcaaagaatttatcattatgaaaattacaaaagaaaagaaaaaaaggaaactccaaagagagcccaaaattggagtctggatcaatccacagggaaactaaatctctttaggctgtgttgcactctgaaggaaggccctgtggaaatctttgagggtcagagcagcacttgtggatcatgtaatgcttctgcacccacttgagcctgtcctgatcagatgaatccatctcttctgagagccaaacattattgttagaagaggaagggttgtttgaaccgcaggatgaagttccggaggac

SEQ ID NO: 62492 - DNA, 495 bp, Glycine max
  Clone ID: PAT_MRT3847_27445C.1
gtggtgaatttcagttgtcttcaaaaggagcgacatgggatgagattgactttgaattcttgggcaatttgagcggcgacccatacatccttcacaccaacgtgtttagccaaggcaagggaaatagggagcaacaattctacctctggtttgacccaactgcagattttcacacctattccatcctatggaaccctcaacgtattgtgtaagtttctagttattatgcaatcctcaagaatattatcataaaatagaatcgatacgtgtttttttttttttttcctaacttgtgctggaagcaactgattaagtgtgtgtttgttaattttgtttcatttcagcttctcagtggatggaagtccaattagggagttcaagaacatggagtcaaagggtgttccattccccaagaaccaggcaatgaggatatactcaagcctgtggaatgcatatgattgggccacaaggggaggtcttgttaatacaaattgg

SEQ ID NO: 62493 - DNA, 510 bp, Glycine max
  Clone ID: PAT_MRT3847_27446C.1
ggctcgagctttgtcaagactctgattggtataaccataatcctcgaggtatgaagctctgacaccattgacaacgtcaaggccaagattcaggactaggagtgaatcccgacagaccagcaacgtctactattttccggaaagcaacttgaagacgggcgcaccctaggcgacttcaacatacagaaggaatcaacgcttaacctcgggctccgtttacgagctggcatgcaaatctttgctatgaccctgatagtgatgactatgaccctagaagtcgacatgctacacaccatctacatccgtaaggctaagatccaggacatggatggtgtactgccacacctgcagacgctgatcttcgtcggtagcacctcgaggacggacgtacccttgctgactacaacatccataaggagtcaactcatgcacttgtgaagcatcttcgtggtagggtgcagatcgttagtatgacccttacgggtaatactattacccttgaggtgtata

SEQ ID NO: 62494 - DNA, 334 bp, Glycine max
  Clone ID: PAT_MRT3847_27447C.1
tcctctaaacggccgctttttttttttttttttttttttttttttgggtacatgactgattttcttttaggtaaatgatagtgaccgaatttttattaacaagtaatctatccaaatatcttaaagaattgaaatgatcaaagtggtttagaatatctagacttgtgatagtgacatcaattctagtttgtttaggatacaattattcttaaaaatgagacaaaatattatatacctttaatggatatataggtccacttagagcaagttatcattgatttccatgtgaaagattacccttctgtcgtcttctcgcaaccgtacggacgcgtgg

SEQ ID NO: 62495 - DNA, 368 bp, Glycine max
  unsure (1)..(368): unsure at all n locations
  Clone ID: PAT_MRT3847_27448C.1
aagcacggaaccaacagagcggccgctccaaacaacccttcacttctccaacccaccgcaagaccaaaccggcaagggacacgtaacaggggggcccgaaaaccaaggaaacaaaggacaaacagggcacgcaacaaaaggagaaaacccaaccancaaaaaaacccaaccaaacaaaggaaccgaccacccaaaccgccagccaggccaaaaagagagaagacaagaaagaaaccaccaggaaacacacccgaaacacggcaaccacagcacaacacacgcacaccggcccaggggcaccaaaaaagacagcaaggaccagcggggccccaagaccccgcgccaaaaaggaagaagggccccagggg

SEQ ID NO: 62496 - DNA, 653 bp, Glycine max
  Clone ID: PAT_MRT3847_27449C.1
taaaagtccctggctgtagctcaatagaggtcaacaatgttgtgcatgaattcttctccggggatggagttcattccacttcgaccatattgcaccatgcacttgatgagttggtaaaagaattgaagctggctgggtatgtgcctgacacatctttggtcttttatgcagacatagaggatgaagagattgatattgttctcagatatcacagtgagaaattggccattacttatggtcttctgaatactcctcctggaacaacaattcgtgtggtaaagaaccttagagtctgtgtggattgccataatgctgctaaatttatatcattgatctttggtaggcaaattattctaagagatgtccagcggtttcatcatttgaaagatgggaaatgctcctgtggggattactggtagtgaaatttgttgagtcaatttttattttttattaaaattttaaagagctggtctatttatttcacaaaaggcttgttcctgaaatgttgggaatgggtcatggtcatgattggcaaattcgataagtgaccagagttacataatacatgtttgtacaaattattaacttctaaggttcaggttcattttcattttcatgtaatgtaatttgttcatattgtctgtattttttga

SEQ ID NO: 62497 - DNA, 399 bp, Glycine max
  Clone ID: PAT_MRT3847_2744C.1
aaaagaaaactccctttcggctggaaacgtggctcaacacatccgctgatattaaaacacacttgcgtgtggacacaaccagcacttgcaacaacaccatgattattatcaaatcgccatcgcttggatcaaacagattaattataatctgttaataaccctagccttaaaaccattcttcatgagaagaacattggagtggcttggagtaggagaatgccctcgcaccacctggaaccgattcgttctcaaaacaaaagctgcctgcacctttatttgaacaaaagccaggtgctttcccaagctgattctgtgttccgcatttaaaagcaatttttccgcgagctggtgcataatctacctctccccgctaagatatgcatctttctggctagtact

SEQ ID NO: 62498 - DNA, 408 bp, Glycine max
  Clone ID: PAT_MRT3847_27450C.1
aaaaaaaacacacccttcccacctcattacgacaattaaaaaaggggcggattttttaaaaaaaacacaccatacccaacaaaaggggcatggctaattccctttgtggacttaaacaaacgacccccccaaggaaggccccatttccaaaacctgcataggatcccccattttcaaaaaatccggcaggaccctggggaacaaaaaaagcccccctaaaagtgttcccaccacctgcaaaatctggagaaattcccaaaaaaatatcaaaacctgcaaactgttggggattgccaattgggaaacccacgccccatgaattttgatttgccccctcaaaactcctcatttaaaaaccattattaagaccacttccctttattgggaagaacaatccccaggaagggg

SEQ ID NO: 62499 - DNA, 317 bp, Glycine max
  unsure (1)..(317): unsure at all n locations
  Clone ID: PAT_MRT3847_27451C.1
agccnctgtctctctctttttatctcgctcttatttcccccggagcgagccagcagttgtgttttttgcaaccccaggagcgtccaaccctaagaggagaagacgacgaacaggacaatggttaactgacgttgccttaatgcagtcttcgaaatttctattatctatacaatgatactaggtttgagggtaatacattctttaataaaatggatcgctttggtgggttccgctttcaccatcgacatttcttcatttccgccaagggatggcggttccgaaaatcggatcttccataacggagtcacccgctggaa

SEQ ID NO: 62500 - DNA, 285 bp, Glycine max
  unsure (1)..(285): unsure at all n locations
  Clone ID: PAT_MRT3847_27452C.1
aagaaaacaantntanagnaatataagtnaatattctttagnagaatcaaaangaatattaanttnaaataanttttagatagaaanaagacttaaaaaggnggatttgaaatgcgagatcnagaaacatatcttnncgtggnacgagtagtaagtagtcnatggttnggggcttnggcgggnctcttgggtagagatanaatcgtnttttccagatgnattgatatncctgtaattgnnaatcnagttnttgacanggaaaggggggaagnagattatagatcc

SEQ ID NO: 62501 - DNA, 1152 bp, Glycine max
  unsure (1)..(1152): unsure at all n locations
  Clone ID: PAT_MRT3847_27453C.1
cataaagcattccataggaatacacgttaaattatatacataactctcacaaacggaaactaaactacgttttttattttttctcaatcatgtcttctatataagtacaaaccttcacccatctcacatatcacaacactgtcacaaaggaaaagtacttttttttttaaaaaaattatcttatttgagtgtgatcgatggcatacccaaacccttatccggcgcaaccgtatccctccacctccgtgccgatgccggcggtgcccaccgccgtgatcggcccccagttctgtgcgccctacccgctggatctggcggtggtgaagaaggtgatgacgctctccgacggtaactttgtggtcaccgacgtcaacggcaacgtcgtcttcaaagttaagggatcgctcatgaccctccgtgaccgccgcatcctcgtcgacgccgccggcaaccccctcgtcaccctacgccggaagataatgaccgcgcatgatcgatggcaagctttcaggggtgaaagcacagaggccaaagatctaatctttactctgaagcgttcgtcccttatccagtttaagaccaaattagatgtgtttttggccaataacacaaaagaagatgtttgtgactttaaggtcaaaggtagttggttggaacgatcttgcgttgtttatgctggtgaatctaacaacatcgtagcccagatgcataaaaagcacacggttcagagtattttgattgggaaagaccaattcatggtcacagtgtatcccaacattgattatgcgttcgttgtggcactaattgttattcttgacgagattaacgaagatgagaaagaagattagagaaatgctacacattcagcaaatcgtgttgtactttttatcgacggtggcatatttccactgaagctattgtgtttgtttaggtgtttcgtctttctaatttatgagtaaataaaaatatttaaattcgagctgcattcaaaaaggaaaaaataaaaggaaaaaaagggcgccccccagaagtggacccggggatccataccgggccgccgggccggagcacgcacacgtgttcatttaattttgggtatagntaaattgcatagtccacacgcttcatacgcgtgtatagctaagttttttt

SEQ ID NO: 62502 - DNA, 199 bp, Glycine max
  Clone ID: PAT_MRT3847_27454C.1
gttcggctcgtggaacacttggctcgcatttagaacaccatcatcgataaggagattcacgttttgtaaatacatggttcctatgatggtcactcatttcgagcagcttgtggtggttgctatgtattctgtcattaccgctgggaaggttactccgtagggtagcatataatctttgcatgctggatagatggtctta

SEQ ID NO: 62503 - DNA, 858 bp, Glycine max
  Clone ID: PAT_MRT3847_27455C.1
ggctcgagctcgagccgttctttcatatcacaaaacaacatcactctcacaaacggaaactaaactacgttttttattttttccagacaataatactttaatatttgagtgtgatcgatggcatacccaaacccttatccggctcagccctatccctccgcctccgcgccgatgccggcggttccctccgccgtgatcggcccccagttctgcgcgccgtacccggtggatctggcggtggtgaagaaggtgatgaccatctctgacaacttcgttgtcaccgacgtcaacggcaacatcgtattcaaagttaagggatcgctcgcgaccctccgtgaccgccgcgtcctcctcgacgccgccggcaaccccctcgtcacccttcgccggaagataatgacggcacatgatcgatggcaagcttttaggggtgaaagcacagatgccaaagatctaatctttactctgaagcggtcgtcccttatccagtttaagaccaaattacatgtgtttttggccaataacaccaaagaagatgtttgtgactttaaggtcaaaggtagttggttggaacgatcctgcgttgtttatgctggtgaatctaacaacatcgttgcccagatgcataaaaagcacacggttcagagtattttgattgggaaagaccatttcatggtcacggtttatcccaacattgattatgcgttcatagtggcgctaatcgtgattcttgacgagattaacgacgatgagaaggaagattagaggaaagctatacattcagcgaatctttttgtttgtttaggtgtttcgtctttctaatttatgagtgaataaaaatatttaaattcgagctgc

SEQ ID NO: 62504 - DNA, 415 bp, Glycine max
  Clone ID: PAT_MRT3847_27456C.1
tagatgttcaattgaagcatgaagacttaagaattgatacctatagatctggtggttcaggtggtcagcatgcaaatacaaccaacagtgctgttagagtaacccacattccaacagggactatgattactatacaagatgagtgttctcaacatatggctagtgtttcaaaatatttggcaaggttcacatttaatattttttattggaaatgtgcatctttgttttgttttagtacatactctctctctctctctctctctatctctcccttttttgtatttataaagtgcttcaattaactccaaaaagctctctgtgagctggagttaataatagtgctacaattcctcttattgacatgtgattaactgtccctgaataaattttacctataactccaaaaaaaaaaaaa

SEQ ID NO: 62505 - DNA, 265 bp, Glycine max
  Clone ID: PAT_MRT3847_27457C.1
cacttgggatcatacatcattgaaaagggggaaaaaaaagatagaatgctgggggaaaaccccccccatgagcagaaaagcgggccacccaaaaacaaagaagggcggcaagcaaacgccgacgagcccaacggcgtctaatgggagcaagcagaacccagagaacacaaccggagaaggcccggactgggagaattcccgcagcagcaaggggggggaaaaagacgtagatcagggccacacgagggcttgatgcccaaagaga

SEQ ID NO: 62506 - DNA, 161 bp, Glycine max
  unsure (1)..(161): unsure at all n locations
  Clone ID: PAT_MRT3847_27458C.1
cgaatttgaaaaaaatgaattaatcttgttgtggatggctgaagatcttttgaagaaaccaaggtaaggtaggactttagaagaggttggtcatgagtattttgatgatttggtatttagatcatttttccaactttcanacacaattagaagtagttggc

SEQ ID NO: 62507 - DNA, 314 bp, Glycine max
  unsure (1)..(314): unsure at all n locations
  Clone ID: PAT_MRT3847_27459C.1
ttgnccgttacttactgggagcaacgacttcctctgtctccatgcatttcttcctcctcctctcaatagcccgtctctcagcttgttgctgagcagcatgtcaagctcccaccaccaaatcacacccctatatccgtcccattaagaacgaccccgcgacaaatgagtactacactacaggaggcattggaactcctaggcaaaactgtgattgagtcatagatctttctggtgaaaacttatgggacgagtgcgacactcattacaactaatcatcctacagacctatagctagtggatgaaagcgctgcccc

SEQ ID NO: 62508 - DNA, 194 bp, Glycine max
  Clone ID: PAT_MRT3847_2745C.1
tacagatgtgagtttactactcaagggggaacttcacagtcagataaagttgtgcggtgctgcctcctccgtatgcaacaacattggtctcatgtcacagccatttgtactctgtggacgtactcatgcagaacactgtgtatgattgccggattcataacgttgtaaacgtatattatatcacatgcattttt

SEQ ID NO: 62509 - DNA, 311 bp, Glycine max
  Clone ID: PAT_MRT3847_27460C.1
aacatcacaagccgatggttgctgacattcggatgcacaatatgttgcagattcagctaagtattcgggaatcacgagccactgtgagtggttacttccatcgcactgaagtagtacacttatagatcgcagcgtgcatagtgcagataccagcatctctcgcgatcggcaacaagattgctcgcttaaaacatggaatgcaacgttgtgctgcatcagtccaatggctaaatcaaagaattgctctctcaagatatgcccatgtaccgctggggaactttgaacttgactggcttatatttattgcggat

SEQ ID NO: 62510 - DNA, 952 bp, Glycine max
  Clone ID: PAT_MRT3847_27461C.1
aattcggctcgaggaaccaacgtgatcaccaccttgtggaatgcaagcactgtccaatccaatccatggcaaacgccaattcctgagattcagcgatttctctatgtgaaagcctaactaaagaccacgattttccgcatctagcgagcgtaacacatggccgaggagatcaatggcggaacgtccatggactccaccgaatcgcggtgggttatccaggacgaggacgaggacgcgtcggatttggagaacttcgacgctgatttgagatttagacgccacgctggcgtggtggattccgaggacgaagatgataacgcggaacagagactcattcgcactggtcctcgcatcgattccttcgacgtcgaggcccttgaagttcccggtgctcatagaagtgactatgaggacatcagtgtgggtaagaaaattgtattggcttttcagacacttggtgttgtctttggtgatgttggaacaagtccattatataccttcagtgttatgtttagaaaggcccctattaatggaaatgaagacattcttggagctttatcacttgtcttgtacactttaatcttgtttcctttattgaagtatgtcctggtggttctgtgggccaatgatgacggtgaaggtggtacttttgccttgtactccttgatctgtcgtcatgctaacgtgagtcttctccccaatcagttaccatccgatgcccgtatatcaagctttatgctgaaggtgccatcccctgagcttgaaaggtcattaaaaatcaaggaaagacttgagaattctctgactctgaagaagactctactaatattcgttcttgctggtacttctatggagattgctaatggtgttgttacaccagcgatgacagtactgtcatctgttgcggtttaaaagttggggtagatgcaatcaagaaagatgaagtggtgat

SEQ ID NO: 62511 - DNA, 443 bp, Glycine max
  Clone ID: PAT_MRT3847_27462C.1
gtaggaatgtttttttatgtgttaatacgactttgttaatttttttttttttttttccccccccgggggcttttttgcggcaaagtaaaccctttaaactggtttgggtttgggggatttttggccccttaaaaaataaactaaaaaccctttctttcggggggtttcttcatggataaatccccctggctaggtggtaaattataaattttttgaggccagaaattccccaaacaactgggcaaaaaatttttttttgttttaaaaaagggcagggctctaataccggggccctgagggaaaataaaaagggggagtactgttatgggccccacaaaccttatttttccctttttgggtggtggacctcatccccaagggcatgttctgggaaaggaacccatgtggacgagtagtccccgaaagggaaaggtttttatttt

SEQ ID NO: 62512 - DNA, 347 bp, Glycine max
  Clone ID: PAT_MRT3847_27463C.1
tctcgagccgattcggctcgagctattatgatttttagctattcaaagaatcaataggtatctatggtgagaaaacagggattggaaaagccaaaatgagagggatatacaatagagggtataggaaggaaaagctggtgatgtgtcaattcttatgtaaatccataacttattttcttttgttcttcttacttgactggccttgtaacctttaagattttcattatattggttgtaatcttgattgatgtgattaaattggatctatttgctacaaacaaaaaacaggatcaaagctagggttcattcacttcaagaaggagaaatatgacaagaatcacaccttt

SEQ ID NO: 62513 - DNA, 396 bp, Glycine max
  Clone ID: PAT_MRT3847_27464C.1
agcttcccttttttttttttttggggggtttttccccctttatggtttatcattttctttaagcgttccacttttttcttttaagagttcttttttttcttttctaaaacaaggggaaaaaaaaacccgggggggggaaaaaaacacacacaaaatcccccaaaaaaaaaatccccagcctctaaaaaaaaaaccgggggggccaaaaagggggccaaaaaaaaaaaaaagggtttcgctttatttgaacttccacgccaaaaaaaacctgggaaaaatttggtttcctaaacctgaaaaaaaaccccttttaacaaaatgccccccccacaccaaaagggttggtttcttttccaatttgggcaacaaaaaaaaaaatttcttttaaaggggggc

SEQ ID NO: 62514 - DNA, 383 bp, Glycine max
  Clone ID: PAT_MRT3847_27465C.1
caaaaaaaataaaatcaatatataaaccctaaagggggtttacttaaaaaggggaaaccaggaaattggggaaaaaaaattttattgccccggggcattcaagggttccccaactggttttggccacaaagaaattgtcaccccaagaccaaaaattaatttccttttttttttggggttgggaaacgccattaacagctagaacccgggggggatagcacctaagggaaacctttaaccttggggaaaccaattgtttccatccaaggaaaggttcttttcccaaagcaggaaccacctttaaaaaacaaaaaaggcttttaaccagaaaaataatccattttgtggggggataccattggccctttttattggggagattg

SEQ ID NO: 62515 - DNA, 694 bp, Glycine max
  Clone ID: PAT_MRT3847_27466C.1
gttaaaacatgttttgttttggaaactcaaaatcacactgtgaatgagtgcgaggactaaggaatagcaacttgctaaccccggaaaagacaaaaaaaaaaaaaaaagaaaagacctgaaatggattatcctaatcatcgtcgtcttcaacaactttttggccaaatcctctaggacctgccctggctctgcccaccttcttcttcttcttattcttattcttgcccttagcagcttcttctttctcaaacttgtctgtttctctcttctgcaggaaatctgtcactgctagatagacaaccccaatagtgatagcggataggccaacgaaagcaataaagaaaagagcggatacgactgtggccaccccttgatcggtggttttgtacaattgctccgcagcatccaccgcatcttcggcagcagcagcaggaggaggaggaagaagaaggggtcggaatctgctatgtttttgaagtactgggttgtgaaaaaggattacctttttggatggggaggtaaattggagagatggaagagtggtagtagttctaagagtagaagaagaagaagaagaagagaggaaggttgcaattcttggagatgaggatgcaaatgtggtggccattgctgcaatgcaatcctcaccactgcctcagcttccaactacttttatttctctgacgtggcaccg

SEQ ID NO: 62516 - DNA, 487 bp, Glycine max
  Clone ID: PAT_MRT3847_27467C.1
gtggtagtgcccaaacatgtaaccaatgaccagcaagatatctcaagaacatggatgagacttctttcctttgtacaagggatgaaccctcaaaagagagaaacaggtcaacatatagaagatgaaaatgagcatgtccatttgccttttattttagggcattctattgccaatattcacactctattggtggatgggtcattttctgatgctagcaagggggaaatggatgcagaaattgtttggagctcttgtaagaatgattcagatgatggagataatctaaggcatgcaaaggtaggacggagatctgaggaaagctctgcatgtaatgtgaccagtgggaatagtgccttagcttctagaaagtttcgtgagataaaagctgatgactcttctcagctgcctcttccacgttctgtcactttgttgatatatgagtgtttaagggctattgagaattggttgagagtcgagaatacccctg

SEQ ID NO: 62517 - DNA, 143 bp, Glycine max
  unsure (1)..(143): unsure at all n locations
  Clone ID: PAT_MRT3847_27468C.1
aannnnnnnnnggnnncaacaaatacaaatattgatgcaacatttaaataattgaacacattctgccctctatttgatgttacaatccgctgtgcttcaggaaacagggtattctacataaccatccggggttgggtgataat

SEQ ID NO: 62518 - DNA, 773 bp, Glycine max
  Clone ID: PAT_MRT3847_27469C.1
tgcgcgtccggttctctctctcacggcaacttgtttatctaatactcatctctctctggatttgtccttttcctcttttgagcgacaagggcgaaagagcttcttctgcaacttcgcctgctgcttcttcttcccgaacaacggtgtcgttttgcatctcctctgccaatactcaacttctcattctccgctttgtgactcctctcccttctacattctcgatccctcggatccgtgttcaacttcaactcgcttctcgcaaccaccgactcactcaactcaggggcgggaattctcttactaaattgatgacatggagcagtatgaaatacttgagcaaattggaaaaggtgcttttggttcagcgcttctagtgagacataagcatgaaaagaaaaaatatgtgttgaagaagattcgccttgctcgtcaaactgagcgctctcgtagatctgcacacctggagatggagcttatctctaaattaagaaacccattcattgtggagtacaaagattcatgggtagaaaagggttgttatgtctgcatcattataggttattgtgagggaggagatatggcggaagctataaagaaagctaatggtgtcctgtttcctgaggagaaactttgtaagtggctcgttcaacttcttatggctcttgactacttgcacatgaaccacattcttcaccgtgatgtcaagtgttcaaatatcttcctaacaaaagatcatgacattacgtctcgggggttttggacttgccaaaatg

SEQ ID NO: 62519 - DNA, 116 bp, Glycine max
  Clone ID: PAT_MRT3847_2746C.1
ctcgagctcgagccgttgttttagaaagtagacggcacgctctggcacggtagaagagagaccatagacgtcgtgctcagttccacagttgcaagagaaaccgttgatccgattcc

SEQ ID NO: 62520 - DNA, 619 bp, Glycine max
  unsure (1)..(619): unsure at all n locations
  Clone ID: PAT_MRT3847_27470C.1
ctctctctctctctcttgtatcgtggcaaagtaaaagtctctccctcacgggacagtggttttagctgagctctctctcactgcaatgcaatctctctctggatttgtccttttcttcctctgagcgataatggcgaaagagcttctcctgcaacttcgtctgctgcttcttcttcccgaacaacggtgtcgttttgcacctcctctgccaatgctcaacaacttcgcattctccgctttgtgactcctctcccttctacattctcgatccctcggatcccttcaacttcatctcgcttctcacatccaccgactcactcaactcaggggcgggagttctcttactaaatcgatgacatggagcagtatgaaatacttgagcaaattggaaaaggtgcttttggttcagcgcttcttgtgagacataagcatgaaaagaaaaaatatgtgttgaagaagattcgccttgctcggcaaactgagcgctctcgtagatctgcacacctggagatggagcttatctctaaatttagaaacccattcattggtgagtacaaagattcatgggtagaaaaaggttgntatgtctgcatcaatataagttattgtgaggggggag

SEQ ID NO: 62521 - DNA, 261 bp, Glycine max
  Clone ID: PAT_MRT3847_27471C.1
aactaactctaagtaagctactcatagatgaagagctgggcaaatctggtgcacccttacaagctatgaaagatagctgctagtgactgtctcacgaaaaacgtgacgcgtatgtgtaacgtattgtggggggctcctgaggacatggcgggtgattggacaccactagagtatggtaatagtgacaaaccggaaacgcaagaagccgattttgtcaatcgcgtatatgtgctacgggacttgaagttgcacagctcagat

SEQ ID NO: 62522 - DNA, 685 bp, Glycine max
  unsure (1)..(685): unsure at all n locations
  Clone ID: PAT_MRT3847_27472C.1
tagctcggaattcggctcgaggaaaaagagagagagagagagttaaaaaacaaaaagcgaaaaaggaaacgatattgcgaattaggaatttcatgaggcggtagcaatgcaggaggggatgatgacgagaatgggattgaaaggcctatgactcattccaaatattttcccgtttgaattattccttgagtgcgtgatcgtttttgaatatcagtcaacgcgttaagaatataattaacttgcttctttcgctaattcagaaccgaggtttggtttgatagttaattattcaagttgaggaataatttggaattgtgattgtgatgcttttgatgaactccatgcttcctttggtagacttttatggactttgtctcgccatagctacattctgaagctccatttgacactcaccccttgttgatggcgcgccctactcatcatgtcattgacatcacggggagttcccgaccttccacttcgtcttcttccacgccccatgataggcttgccaatgatgtggattttggtgccttgaattctaggactagaaggcgaggggatactacgcgtagtaggcagcataggagtcctttgaattcgggtttgtggatatgtgttgagttagtgatcacagtgagccagattgttgcatcgggtgttgttctgtctttgtcnaagcatg

SEQ ID NO: 62523 - DNA, 395 bp, Glycine max
  Clone ID: PAT_MRT3847_27473C.1
aatttttcatgaaaaggatatacagagatatatttctatatatcagttgtattccgaggatcaatatacaactttttcttgaattaacaaaaaaatttttaaataaatccatttacgataatgaagcaaatgcagaaagaatttataaaacaaatcaaagtataattcgctttatttgttttataaattctaactgcatttacgataatgaagcaaatgcagaaagaatttataaaacaaatcaaagtataattcgctttatttcaattttacacaaatattttcatactagaaatccgaattcacataattcttgtgacatctcctttttgtcacaagcatatgtattttttaatttattacacacccgaattattaacttatagatgtttatg

SEQ ID NO: 62524 - DNA, 425 bp, Glycine max
  Clone ID: PAT_MRT3847_27474C.1
tacggctgcgagaagacgacaaaaggggcccgtttttatggcaatcccttatttcattcctttgtggcttcctcttgtttttcttttcccgtgactgagagagtggacagcgacaccactgtcttcttcatgattctttgtccacgagtattcacatcacggcctacatacaatagtgaacgtaaactgcctgtctactctcgccggctgcatcggtctaacctggaaccccaacgacccttccagcagcctcaacttctatccggcgcgtgctcccaccgccaccatcgactagaacctcatcgtcttccacgtctactctttcagtttcttcctcttctgcaggctaagcgccctggcccttaagcatgacatgcgcctttcccctaccacctacttccaatatcccatctgcgccgaccacc

SEQ ID NO: 62525 - DNA, 909 bp, Glycine max
  Clone ID: PAT_MRT3847_27475C.1
acaaatcccacatgttctcacagataaaagagatacgttttggcaattcaattgatgaattaggagttgtaggtcacctctcttgcacctcataacagctctaaatcaacacacacaaatattagtcaaaaccgtaaattaaataacacactacttctacaatccataatatatatacacacacaatacaaaaaatatcaacagagtccccaacctcaatcaatccacatttaaattataagaaacgcccttcaagatacaaacaatgtcatctcgcattgttgcggagagcggcggagagtgtcgatcggaaccgacataatccacgacccgatccttctattcctggacgagccaacctcgggacttgattcaacgagcgcgtacatggtggtgaaggtgctgcagagaatcgcacagagcggaagcatcgtgatcatgtcgattcaccaaccgagttacagaatcctagggctactcgaccgcatgatcttcttatcacgcggccaaacagtgtacagcggttcaccctcgcagctaccgctatacttctcggagttcggtcatccgattccagaaaccgataacagaaccgagttcgcgttggacctgattcgcgaactggaaggctcaccagggggaacaaagagcttggtggagttcaacaagtcgtggcagagcatgacgaagcaccaccaggaaaaggaagaggaaagaaacggcttgtcgcccacggaagcaataagcgcgagcatctcgcgagggaaactggtatcaggggctagcaacacgaacccttacccgtcgtcgatggtgccaacttttgcgaaccagttttgggtggagatggcgaccctgtcgaaacggtcgtttttgaattctcgaagaatgcccgagtttgatggggat

SEQ ID NO: 62526 - DNA, 290 bp, Glycine max
  Clone ID: PAT_MRT3847_27476C.1
gaacaaactaaacacactcgagacgacttgtttttagacaaaccgaaaccatctgtgtggtgtattgcagaagaagggactgactactataccgaggataagcatgacagagtaatcaccggcacttcgtgtgtggacgagacgtatgacgcctcgaagaccgtcgaaaaccttagagatgataaactgtgagcggtgggctgcatacagatggcgacaaatgcactgttggtcaagcagactgactccatcgttcacccgttaagaacgcaaagctactaggtgcactg

SEQ ID NO: 62527 - DNA, 236 bp, Glycine max
  Clone ID: PAT_MRT3847_27477C.1
gtttcaatgggagacaaaggctttatcaagcctttgcttgaaaagcgaggtaaagtacatttcgataaggtgtgtattaaaccaggcaagccatttacatttgcagagattgactttcaatctacagagagcacaattctagcttttgggctacctggaaatcctgtcagctctttagtttgcttccatctctgtgggggtccctgcaatacgctaccctgcagggtggacaaatc

SEQ ID NO: 62528 - DNA, 471 bp, Glycine max
  Clone ID: PAT_MRT3847_27478C.1
ccacgcgtccgccttcttcttcttcttcttcttcttcttcttcttcttcttgttgtaattcttcaacttcaatcctgtcttgtctctttctctctcgctctttttttttttttgcttacctgcaaccggcttaagctgtggtaactccttcttttaattaatcactcttttgtttcggttattactcttattcttaatggccttaccagtgtgttgctcactgagaaaccaccaattttcagcatgacaaagataagtcctgaagttgaaatcaggatgccaatggaggcatttccaccagtttcagctgatgatgttattgaacaagaagctttcaatttgtcagaccaacacaagcgtatctcaattcgtgaccttgccaagaaatttgacaagaacttggctgcagctgctaagttgtctaatgaggcaaagctgagagaggtggcatctttggagggacatgttctt

SEQ ID NO: 62529 - DNA, 589 bp, Glycine max
  Clone ID: PAT_MRT3847_27479C.1
tccacgcgtccgcctcttctccttattcctcttctccttcttcttcttcctctccttcttcttcttcttcttcttcttcttcttcttcttcttgttgtaattcttcaacttcaatcctgtcttgtctctttctctctcgctctttttttttttttttgcttacctgcaaccggcttaagctgtggtaactccttcttttaattaatcactcttttgtttcggttattactcttattcttaaaccaccaattttcagcatgacaaagataagtcctgaagttgaaatcaggatgccaatggaggcatttccaccagtttcagctgatgtgagctttatttctaatagttttccgaaatacaaactggatgttgataatcaagttctggaagagccagttgaggataacctgggtccttctttgaaggatgttattgaacaagaagctttcaatttgtcagaccaacacaagcgtatctcagttcgtgaccttgccagtaaatttgacaagaacttggctgcagctgctaagttgtctaatgaggcaaagctgagaagagtggcatctttgggaggacatgttcttttgaa

SEQ ID NO: 62530 - DNA, 350 bp, Glycine max
  unsure (1)..(350): unsure at all n locations
  Clone ID: PAT_MRT3847_2747C.1
gttatgtcgcctagttctaatttccgcncaagcatcactacaaggcgaggtgttgtctcaagcagctcgcgatgccactgttggcattgagactgagccctctcatcctctcaccgcggatgctcgtcaaggagcacttcctaaaatctccggcgctcaaagaacttcacctcttatgccctttgagcccaaccgaccatcctccggaagaaattccttccccatgaanaattaccantcaactctccccgcgtnttgagaccctaaatttcaatgacgagaggctacagggtcccgcagcttccattctcgcctacctctccttgncaattcttaaaagaattttttaa

SEQ ID NO: 62531 - DNA, 394 bp, Glycine max
  unsure (1)..(394): unsure at all n locations
  Clone ID: PAT_MRT3847_27480C.1
attccaaaggggcatcttagtattctcaaattgcataattaaaagcagaacagtacattctgcacctgcccccctcctcccttgcaacaataaatattaataattgatacatagcaaaaatctcagcccaaaaccaaacaaatagtaacaagttaagtacatatttataccgatcccaaatcctatctaagtgcacaagatgactcgtgtgagagcaagagagaagcaagccatagagaagaagaacaaagaaacaaggtccctggaggaccatttccgaacctctttgttctccaccctcaaactcttggccctcctcaatgcatcaacctccttcaacaaatcaaattccaaccctttcttnttaaactcctccacgcacctccccagcaac

SEQ ID NO: 62532 - DNA, 507 bp, Glycine max
  Clone ID: PAT_MRT3847_27481C.1
ctcgagcttctccttattcctcttctccttcttcttcttcctctccttcttcttcttcttcttcttcttcttcttcttcttcttgttgtaattcttcaacttcaatcctgtcttgtctctttctctctcgctcttttttttttttttgcttacctgcaaccggcttaagctgtggtaactccttcttttaattaatcactcttttgtttcggttattactcttattcttaatggccttaccagtgtgttgctcactgagaaaccaccaattttcagcatgacaaagataagtcctgaagttgaaatcaggatgccaatggaggcatttccaccaatttcagctgatgtgagctttatttctaatagttttccgaaatacaaactggatgttgataatcaagttctggaagagccagttgaggataacctgggtccttctttgaaggatgttattgaacaagaagctttcaatttgtcagaccaacacaagcgtatctcagttcgtga

SEQ ID NO: 62533 - DNA, 749 bp, Glycine max
  Clone ID: PAT_MRT3847_27482C.1
caaatgggaaaaaacttaccctaacaactgatcccattcaaactgtttcaggacttggaagccatgtggagacacttctacgaaaatctaataccgattttaatgtagttatttctcaaatgaatggaaaagatcactcttcacattctactcattcatttaatgtggggagaatgaggataaagctatgcagaggttggattacaaaagcaagagagatttactccccatcaatgcagctatgtggagttagaagtgatatcgctaatgcagcgaaggcgttgttttggcaagcaagaaagggcctctcatttgtattaacctttgaatcagagagagacagaaatgcagccattatggttgccaggaaatatgctcttgattgcaatgtcgtgctcgctgggccagatgatctagtgtaggagcaaaatttaactgactgagtttttccatcaaacgtgagatttatcagattcttggtgtgagtatacatgtgtgcttgttttgttaaagatatgatttcatctttgtgattgggtttcactaattgagttgcattgttttaggcatgttttttatttgcctaatcatgttgtaccaaactcaactttttataattattagttcatttgttcattgtggctaatttgcatgtgctagttgtttcgtaatgtaaagcacatccgaaacaaggtatataccaaaatttcttaatgattatcggctcgtaaatttactgattaagactc

SEQ ID NO: 62534 - DNA, 2241 bp, Glycine max
  Clone ID: PAT_MRT3847_27483C.1
cagacttatgagtcagacctcccgcttgcttctcccgatttttctgttcaacttcaatcctgtcttgtctctttctcttttcttgttttgcttacctgcaaccggcttaagctgtgatcaccaattttcaacatgacaaagataagtcctgaagttgaaatcaggatgccaatggaggcatttccgccagtttcagctgatgtgagctttatttctaatagttttccgaagtacaaactggatgctgataatcaagttctggaagagccagttgaggataaccagggtccttctttgaaggacgttattgaacaagaagcttccaatttgtcagaccaacacaagcgtatctcagttcgtgaccttgccagtaaatttgacaagaacctggctgcagctgctaagttgtctaatgaggcaaagctaagagacgtggcatctttggagggacatgttcttttgaaaaagctaagagatgccttagaatctttaagaggccgttttgcaggaagaaacaaagaggatgtggagaaagctatctctatggtggaagctttagcagttaagttaacccaaaatgaaggagaattgattcaagagaagtttgaagtgaagaagcttgtaaactttctcaaacaggcttctgaagatgctaaaaatttggttaatcaagagaagtcttttgcttgtgccgaaattgaaagtgctagagctgtggtgctgagaattggggaggctcttgaagaacaagaaaaagcttcccaagcttctaaaccacaggatgtggatggactagtcgaagaggttcaagaggctagaagaatcaaattgttgcatcacccaagcaaggtgatggccatggaatatgaactacgtgctcttcaagagaagtttggagagaaatctatattttcaattaagcttcagaaagagctaatcatgagcaagaggaacgaggaaaataaatcttgtttatacatgttagatggttctgaagctttgggttcatatctgcgagtccagccttgctcagatgaagtgccacaggtttcgaaatgttctaaaccacaggatgcttgtcttctgaaggcagctggagggaagttatttcaggtgccaacaaatcaatatatgctcctgacccctctgatgttgggagaatcttacaagtagatattgtctcaaatgggaaaaagctcaccctaacaactaatcccattcaaactgtttcaggacttggaagccatgtggagacacttctacgaaaatctaatactgattttaatgtagttatttctcaaatgaatggaaaagatcactcatcccattctactcattcatttaatgtggggagaatgaggataaagctatgcagaggttggattacaaaagctagagagatttactccccatcaatgcagctatgtggcgttagaagtgatgtcgcgaatgcagcgaaggtgttgttttggcaagcaagaaagggcctctcatttgtattaacctttgaatcagagagagaccgaaattcagccattatggttgccaggaaatatgctcttgattgcaatgtcgtgcttgccgggccagatgatctagtgtaggagcaaaaattaactgactgagcttttccaacaaacgtgagatttatcagattcttggtgtgagtatacgtgtgtgcttgttttgttaaagaaagatatgatttcatctgtgattgggtttttcactaattgagttgcattgttttaggcatggtttttttatttgcctaatcatgttgtaccaaactcaacttttttttataattattagttcatttgttcattgtggctaatttgcatgtgctagttgttttgtaatgtaaagcatatccgaaacatggtctataccactattttagaatgattattggctcgtctgagtttttccatcaaacgtgagatttatcagattcttggtgtgagtatacatgtgtgcttgttttgttaaagatatgatttcatctttgtgattgggtttcactaattgagttgcattgttttaggcatgttttttatttgcctaatcatgttgtaccaaactcaactttttataattattagttcatttgttcattgtggctaattagcatgtgctagttgtttcgtaatgtaaagcacatccgaaacaaggtatataccaaaaaaaaaaaaaaaaaaaaaaaaaaaacattaaaaaaataaaaaacaaaaaaaaaaa

SEQ ID NO: 62535 - DNA, 379 bp, Glycine max
  Clone ID: PAT_MRT3847_27484C.1
ccggtcccgagtatcctgtacaacgcacgcgctcgctcactcgggggttctgcctctttcttgaaagctgccgcctaagagctcaacctccttttcacgatcccataagggttgaacaatcccaaaaatcatgctacgagatcacatgatcatgatggatacaccctcctagtgttgcctgtgtacatactatggactccattcctgatctccgagccgttgtcgaggtaagagatacattctatagctactagccagggaccaagccgggatgaatcacctgacttgcttggtgggtacgaggtccattgcacctagaacctgagggaggcatatcgcataaaaccgtactgacctatggaacgcccagaatgctata

SEQ ID NO: 62536 - DNA, 1163 bp, Glycine max
  unsure (1)..(1163): unsure at all n locations
  Clone ID: PAT_MRT3847_27485C.1
cggtccggattcccgggtcgacccacgcgtccggagcaaaactccagagctttaattgtccaatctggttcagttaaatgaagacatgtttatttagtattttaatttttttctcctggtgaaggagcattgagtagtaggcagaagacagtagtatcagccatccctattgcatcatgtcttctagcttttaggattctttcatagcttcatcttttctacattgcatgtcgtatgtcctcaatttacttcactaagctgggtttaattgtagttgttgatgaaaaaatggagtcttctatacttaaatgttgttttgattttgactcatcattgatatattcttatagaaggtctcattctatgtcgcaattttttttttaccagaccaccaattttcagcatgacaaagataagtcctgaagttgaaatcaggatgccaatggaggcatttccaccagtttcagctgatgtgagctttatttctaatagttttccgaaatacaaactggatgttgataatcaagttctggaagagccagttgaggataacctgggtccttctttgaaggatgttattgaacaagaagctttcaatttgtcagaccaacacaagcgtatctcagttcgtgaccttgccagtaaatttgacaagaacttggctgcagctgctaagttgtctaatgaggcaaagctgagagaggtggcatctttggagggacatgttcttttgaaaaagctaagagatgcattagaatctttaagaggacgttttgcaggaataaacaaagaggatgtggagaaagctatctctatggtggaagctttagcagttaagttaactcaaaacgaaggtgaattgattcaagagaagtttgaagtgaagaagcttgtaaactttctcaaacaggcttctgaagatgctaaaaagttggttaatcaagagaagtcttttgcttgtgccgaaattgaaagtgctagagcctgtggtgctgagaattgnggaggcgcttgaagacaaganaaagcttcccaagcttctaaaccacagatgtggatggactaattgaagaagttcaagaagctagaagaatcannatgntgcatcagccaagcagggtgatggccatggaatatgaactacgtgcttttagggatcaaat

SEQ ID NO: 62537 - DNA, 855 bp, Glycine max
  unsure (1)..(855): unsure at all n locations
  Clone ID: PAT_MRT3847_27486C.1
atgtttagcaatgatacctgattcccacaattctttcaaacccatgttcaaaaactgcttggactggcttctcaacaaccaaaatcaacaagggttttggggtgagtgtgatgccttntggaaaacccacattggaaacacttccggcaaccctagcttccattgttgcactcaaaaagtggaacaccggtgcattaatgatagacacaggtttggtcttcattgaaacaaatattgaaaagctgctcaaggatatcgacaacaattgtcctcgttggtttaggattgtttttccagccatggttcaactttcagagagtgttggtttagaaattgtgttcccagatgcagtgacagggtctgtgtcaaggatctttcaccgtcaacaatatcttcttaacaaggaggaacttgtggggaagcattgcttcccaccactgttatcatatcttgaagctttgccacctacatatacaataagtgaagaagatatacgtagcaatctcagtgatgatggttcagtgttccaatcaccctctgctactgcaaaagctttcatggctactgggaagattgagtgtctggcctatttacagtctctaattcaaagatgtcctgatggagttccacaaacgtaccccatggacgaggaacttataaagctttgcatggtaaacaaattacaaaggctagggttggctgagcacttcgttgaagagattgatgaaattttggccaaggtctacaggaactatgtggagcaagaatcatgggtaaaacctaccaatatggttgcagctcaactttcacaagactccttggcatntcatctcctaaggatgcatggatacatcg

SEQ ID NO: 62538 - DNA, 201 bp, Glycine max
  Clone ID: PAT_MRT3847_27487C.1
tcactagatgatctgcttataccatctctacagagtggggactccttatttgatgttgatacagttcacaggctactggtgaatttcttgcaacgggttgaagaggaagaaaccgaagattatgggtatgaatctgatgggttttgttcttctggccatggttctctgctaaaagtgggacagcttattgatgcttattta

SEQ ID NO: 62539 - DNA, 128 bp, Glycine max
  Clone ID: PAT_MRT3847_27488C.1
ggagacacactcaaacacaaaacggttgggtccacatcaaatacaagagagccatctaatacaagtaaaaaataaaagccttaactcctaccaatgcggctgaatcaaacccaacacactttcttttg

SEQ ID NO: 62540 - DNA, 407 bp, Glycine max
  unsure (1)..(407): unsure at all n locations
  Clone ID: PAT_MRT3847_27489C.1
attccctgctctacccacacgtccgactataactccatcttatncactcaattttatcatccaattccctaactgcacatacccacctacacgtgatttttataaagtgagtcctctttttctattactcctattaatttttatctctatatcattcataactatcttaattaccacactctaacttatccttctcttttttaacccctcctctattaaaaacaacattaaataattacatcattatatacaacttcaataacttcatatatattaactcccatctaccatcaattctcatacttctatttttcatcttttttcatcttcattctttccaccttttcttctatttattacacaatatcctatatttttacccccattaattcccacttatcttaatt

SEQ ID NO: 62541 - DNA, 187 bp, Glycine max
  Clone ID: PAT_MRT3847_2748C.1
cagttatgttttatttttaattttatcttctaaactctattcttcaatagaagctgaaatttgttttattttgatggctattttgcattaggtcgtacacctcaaacttttaatctcctttttaaaacttcaaacctcacaatgttgtctaaacccataattactggtgtttcactgaacaccatgt

SEQ ID NO: 62542 - DNA, 511 bp, Glycine max
  Clone ID: PAT_MRT3847_27490C.1
gcgattttgcactaactacagggctttaaataaggagactatccctgacaagtttcccattcctgtcattgaggagttactagatgaactaaagggaatttgttttggttttcttcgatgacatattgatatatagcgcatcatgggaacctaaaaagtctagagagagaaacactggatgggagagagataggtttagaggttaggcagctgagagagtgagcttcagggaggaccttcgacgggcctatgcaggaaacagggaaagacaccagcaacactacgttcgttcaaattggagggatcacaaggacatatcatccttctacttcacacgtttttctaatgaaatcactgagaaggagttgtggcaccattgatcttcatacccaatcgaagaaactacaatggaagaaggtacggttttgctagattcaaggggtgaacgacgctcactacctagcaaggcagttggacaagatcgtcattggcgagatgaaattatatgtta

SEQ ID NO: 62543 - DNA, 193 bp, Glycine max
  Clone ID: PAT_MRT3847_27491C.1
tttctggggatttgaggcccacaatgttgttcctgacatattgacaatgactacgggcattgcaaatggcattccccttgatgctgccgttactactcactagatcgaagaggtcttccccctactgaactactttgacacttttggcggcaaccctgtttatactgctgcaaggttggctgtgttaatagtc

SEQ ID NO: 62544 - DNA, 420 bp, Glycine max
  Clone ID: PAT_MRT3847_27492C.1
ctaccgattgccgttccaaggaaggtttcccgtcatcactgtatgacgtcctcctgtcgttggggggggggggggggggggggggggggggggggggggggggggggggggggggggggggggggaaaacccaaacccgggagttgggcaaagggaaccccatttggcattagaaaaaccaagtacgtaaaacggaatccgaaattgcgaacccgtaaagtgtccaaaaataaatggcccggttttaggggggcaaacgggtaaatggcccggtggaaaaacccccctttagtacctgggggaaagtaaaacacgttttttgaaaacggtctccaagacccaaaggttaggggccctacgaattttcgcaaggcaagagaacttcgcccccgtttggaaatttatatgggaaagtttggg

SEQ ID NO: 62545 - DNA, 396 bp, Glycine max
  Clone ID: PAT_MRT3847_27493C.1
ttttgttttttttttttttttttttttttttttttttttttttttcttttttttctaaggaaattaaaacatccctggaatttggggccaatccaaattttgcggttcttatggcccaccatgatcaccaccctggacaactgacagacctacaatttgaggcgccaacggagtttgcgctccaattccgggcatcgagtaattgaccctttttaccgagcccaattgtgacggaactttgaatccaagcattttcttttacgggtgataacaaagtgggaaatatcttcattttccatgcagccttccgtgactaagggggaactgcttccagcgggaagtttgcaccctaccgttctggttgaaccgaattaccttgctacttgcgcgggccag

SEQ ID NO: 62546 - DNA, 282 bp, Glycine max
  Clone ID: PAT_MRT3847_27494C.1
tttttcaatcacgtgttcaaatttactgctgggtcccctgttgcctcatttgccctattcaaattcagttccccttcatgtatctcttaaaacaaaacagaactgaactcgctgactgaaactcgcaaaaattagcggtttgcacagattgcactgtccaaccacgttcgatcgcgaatctctctcttcacacaaatccactttccttacttacgagcgaaccactctccaacgatatatagttgccccttccatttccttcgccttcagacaataccccaa

SEQ ID NO: 62547 - DNA, 466 bp, Glycine max
  Clone ID: PAT_MRT3847_27495C.1
gctcgagccgcaacacgcttctcccatctctcacttccacttctctccactctcctctctctgccccggtaacagtaacaccccattccccttctccagaagaaggcgaaagcgcttattcgccaatttcggctcccgcaaattccgcagaaaatgcaccgtccgcttctgcgccgttccctcctccgacaacaaccacccaaactggaacgccgatttcgccaattccgcgcgcagaaccgccacaaccttcgttctcaaacgaatttccaacaacaacaacaacaacaacaacaacaacgataacgatgttatcgttaccgaattacaagcaccaccgccatcggttcaattaggttcaaacttcaccggtttcagcgaggatcctatcggggataaactgaggacgcagctaggggtgatacacccgattcccctcccctccgaattaaccggaacgtcatcg

SEQ ID NO: 62548 - DNA, 679 bp, Glycine max
  Clone ID: PAT_MRT3847_27496C.1
ctatggcaatggcataggaggcacagtgttgagttgagtgtctccctctccctctccgctactgcaactctctctctgcttttccaattttactctgcaccgcaataatcataaacgacgccgtttgaatttccacgaaacccagatttcgtgggagcttatggcttccattcacgccaatctcgtccccaacttgtcctttaatcacttccagacaccaccatcatcgtaccttgttggtgctggtattgtgcaacgtggagttagtttgcgcaattgtagaaggaaggttccttgcataataaagtgtgaaaagaaagatgatgaagttgaacacattcagaatgtttcagttgagcgtccaccctattacagttacttggactccacctccggccagctcgagccggcctccggtgcccgagcgagtattccgggccaagagtattggcccgagggaactgctagtcgtgtgagggctgcaagggcacctgctccaactgctgaatcatcaacctctccaatgtctccatcttatggagccaagcctggaagtaggaggaagaattacaagacaactcctgtagtattttgtctcatcacacaacccattcttgtatcaaacgcctcgggttcgcgaggttcttctgaggttttgattgaatccttggaagagtct

SEQ ID NO: 62549 - DNA, 399 bp, Glycine max
  Clone ID: PAT_MRT3847_27497C.1
cgatatcatatcaaatataatagtgcgatagggaaacggttgttcctagcttgtattaaaaacaatccgcaatgatatgattatagtagcgaagtgaggatatatcatagacaacacatcctgcaaataggtgctcgactgaagctacttatatcacaaacgtattcgcgtggataataatgtacaagataaagtcacatgctcaaatattaatacaatttaaataggtgaaaaaatgtataagaaaattatatgtatatatatattgtttttacctttatatagaagtcatgaacgaaaagtaaagaatttaacaacaataaataatattggttttacaggaatagaacgaaagtcgttctttgagcctaatcaaaaaaaattattcttcattcttat

SEQ ID NO: 62550 - DNA, 145 bp, Glycine max
  Clone ID: PAT_MRT3847_27498C.1
cgacatgcgagttgagcttggcggcgatgtagtagcgcagccactcggggttcatgcccagcgacaggtacttgagcgggtccaggccggtgccgcggctcttgctcatcttctcgccgttgttgacggtcatgaagccgtgcac

SEQ ID NO: 62551 - DNA, 418 bp, Glycine max
  Clone ID: PAT_MRT3847_27499C.1
ctgaatctaccaacagcaacttcccaaaaccatgttgatttcggtgagtgaggttctgatgaaggtaaaggggaaaggataacaaagagtatcatcctatccttttatggaagaaagatagaaaacagaagttgaaaggtgcatgattggactagagcccatgcatgcagtctgatagttgtcctagtaggctggccagtagcggaaaaccgcattaccggcgtcaattgcggcagtgaatcgacggcagcgcttgctgatgacgtggcttctaaaaacgatggccacacactcactcacatgccttctgtcaatttctcaaaacttttcaattcaatcactattttattttggattatagtaacaggtacgcctcttgtttgttttttttaatttaactcttctaaaagtaaaaaat

SEQ ID NO: 62552 - DNA, 258 bp, Glycine max
  unsure (1)..(258): unsure at all n locations
  Clone ID: PAT_MRT3847_2749C.1
gtaataatagtgatgacnttgtattttttcattggatgaggtgagtgctggagagaaattctgtattggtgatatgcttatcatgtgtagtcacctcatccaaaaaagaattacgatgtcatcactcttattaccaaccgaaattttagaaccatgtgcagtcaaagatctatcatggaacgtgtcctgcctgtattgngccttatcactattatctttcccgtccaaggtagactatcctcattttcaaaaccacaa

SEQ ID NO: 62553 - DNA, 165 bp, Glycine max
  Clone ID: PAT_MRT3847_274C.1
attggcgatgactgatggctgttttatagggaaacaaatcgtgcgaccaatattaataaataattcaacacacggcgagaggaagggtgattataaaactggcccattgttgtttttttttttaccaagaggaggaacatctgattgatgtccattaacaggtct

SEQ ID NO: 62554 - DNA, 275 bp, Glycine max
  Clone ID: PAT_MRT3847_27500C.1
aaatagccacaactagcggatgcggggactttatattaactctctgagaaattcatgtcgtcaatgagacacatcctataactgggtttctgcccacgagctacaaaaatgacatttaccaatggctttatgcaacacaaatgtgacacatatacaaagaatatggtattcttctggggtatgtaactgcaacacgtgccccacaatattttgtgttaagccttaaacaatgaaccctctttagttgcgattgatatccttcaacgcaagcttca

SEQ ID NO: 62555 - DNA, 257 bp, Glycine max
  Clone ID: PAT_MRT3847_27501C.1
aagcgaggtgtgggggcaacacgtccccgtgaataactccattgaggcattgacagcaacacgtcatcgtttcgtgtgctgctaccgtctgggcgcacgttagactacacctgtcctatgtcatttgctccatcctcgtgcccccctctcgtcgtttttaaaccaaatactattagttatttaatatcattaagatattagtatatctatttctctttctctgtcatacataaccttttacaagagttattaaaata

SEQ ID NO: 62556 - DNA, 276 bp, Glycine max
  Clone ID: PAT_MRT3847_27502C.1
gaaagttttagatgcttttaactcatcaaaatttgtcccgtcaacatatactaagaaatacctcaagtatagcaaatgctcaccatggtttttctaattcgttttaatggaaacccaaaaaacaaaatgcattcgagaaattattaccaactgaactgattgctatacaaacttaattctattaattttaaacacttacacagtttcacgtatacaattatacaaacatcatagcttcaaaattacacaaagttacatagcttcaaaatctagtgc

SEQ ID NO: 62557 - DNA, 483 bp, Glycine max
  Clone ID: PAT_MRT3847_27503C.1
gcgagaagacgacagaagggagaccctatgttaaatgtttttattaatattgacttagtactgatagttgataatctacttttgaaattcccattttggaaataatgttcgatttttagcatagaatatctgaaatagtttgataagaccaattgggataaggaaatatagatgcatctataattacatattaagctctgattgtaatttgcatcttccaattttctatattaaagtgcaacagaatagaggctttgcttcttggttaataatgacgttgatgctccttccatcatttctgcatcattctaactgatattctaattagtaattaacattgttgaatcgtcaatagtttttttatgccaaagataaacatatagggtttgatacatgtataccgacagagatcagtataaaaatacacgaaaccacaatattgaagcagctcaagttaaattcgaaatggacacgtaataaaaa

SEQ ID NO: 62558 - DNA, 527 bp, Glycine max
  Clone ID: PAT_MRT3847_27504C.1
tcctttttttttttacaaagggtaacgcaccaccttcttcacatgtctaaacatgaatgcactaaattataacactacaagcccattaaataataataaaggatgagtaaagctaccaattgcttaaaaatgaaaacacaaattatagcacaaacaaacgtaggggaggagcccagatccttcttaaatgggtgccattcaccacattgattaaaagatgagttcaccttacaccccactcttcttttttttggcttccttcttgcttggcattccatgagattcttccttctcaggatgccaatttcacttttacttcttttctgctgcagtagggagattcccattcatgacctcagaactctgagggaccttcctttccttctctcttttgctttgtgacaaccttgaggcggtgggtcctcaccacgcgtcccatgcatcttgcacagccttcgtcacccttgattcatgctccttttggcttgtttgacatcgtttgttcctgtgcctctctttttatcagc

SEQ ID NO: 62559 - DNA, 364 bp, Glycine max
  Clone ID: PAT_MRT3847_27505C.1
ctcgagccagataaggtccatgcttattgaatggtgtgtgctcaccatcgagtgcgagagcattactgcatgggcccctacatgttgtatctatgtgtcttagtcataatgcaaaacaccctttcccactagggcgtctacccctttggctttttgctaattgccactagtactactagtactatactccatgtggtctcgatgaattcgccactgttcgttgttatttaaaacaacctcggtcaacactaacacatgtcacacaccaatatgattcctctttaaccatgaatcttccttcctttagcttttttccatcagggctttcttatgttattatgatttttactattttttcattctc

SEQ ID NO: 62560 - DNA, 313 bp, Glycine max
  Clone ID: PAT_MRT3847_27506C.1
ttaagaaaaaaatagaagcattttcagagactatggagaatttaagtactcatgcggataaatgctgtcgacagataacgagagcaaggactgtggttatacaaaatagaattaaaaaacctgagtgagatccctttggaatgtttcattgattacttacactttctcttgctggaatcttcctttgcttcaaataggtagaatacttcaataagctgcgtgcgtagaaagataaatgaatatagaacttgggcagaagattgctgtactttctaggtagagatagttggattacagatgattacaaatatgt

SEQ ID NO: 62561 - DNA, 324 bp, Glycine max
  unsure (1)..(324): unsure at all n locations
  Clone ID: PAT_MRT3847_27507C.1
gccgacccaaaatcccctttacgacccacacacaaaacctccaaacccaagaccacagaagggggcccaagggggctctaaaaaaaaaagaggcgaaaaaaaccacccacagcggccgaccaaaaggacccaagccaacgaacgccggcaagccacaacaaaccccccccacagggccccccaaaaacaaaacacaggccgccgacaaacaacccccngaccgggaaaaccccggcggnacccaaccaaagcgcccggcagcacaacccccccccgccaagcggcgaaacaacgaaaaggcccccaccgaacgcccnncccaac

SEQ ID NO: 62562 - DNA, 228 bp, Glycine max
  Clone ID: PAT_MRT3847_27508C.1
tttttttttttttttttttttttttaaaatacaataaatctcttacacttagacaggtttgttttcctacagtccttccacaaccaatctaacggtcttcttttaaaaaaaaataatgacttttttagcctcgaaccgttccctgtaaaaggcttcctccctacaaagttccaatgtctttaaagacaaaaaaactaaacccttaaaatgtacaatcttccgcccggt

SEQ ID NO: 62563 - DNA, 845 bp, Glycine max
  unsure (1)..(845): unsure at all n locations
  Clone ID: PAT_MRT3847_27509C.1
tggacggctggagaagggcacggaagggggtagagaacgagaaagagaatggagaagagggtagcaatattacaggaatggtttgaccgcgttgactcggagaaaagtggaagcataacagcggtgcagctaaagacagctcttgctgtgggcaacctggaatttccgctctcagtggttcagcaaatgatcaggatgtacgatttcgaccggaatggtactatgagctttcaagaatttgtttcactcaacaacttccttcttaaggttcaacatgcattttctgatctagagaggggtcgggttgtggttttcttgtacctgatgatgtatttgaggctttgggaaaaattggtttcatgctggattctcctgctttttactctgtctgtgagagctttgatcaaagtaaaaatgggaggtttcggctggatgacttaatatcaatctgtatattcttacaatcagcacggaacctatttaattcatttgatacagctaaacaaggcagagttactctcgatctgaatcaatttgtctattgtactgccaattgcagaatatgattcaactatatgacggtttgagaagatgattcacaaatactgcactttgtaataccataaagtcatcttagagtaagttaaattgtgatggtgttgtataagatgaaaacatctcgggtttggatactatttgtcatctgtctgcaaaatactgtggttttttttttctttccagatgatgtaattttgtttataaaacgtaagttgttataaaacatcttgagttatgataacttgtgaagttgattcctaaaaaaaaaaaaaatataanagnnnnaa

SEQ ID NO: 62564 - DNA, 255 bp, Glycine max
  Clone ID: PAT_MRT3847_2750C.1
gaagattcctctggtatttctttaagcaattactttttcggttcaaggcaactgaattgtgcattgatagttctgatgatgttgccatagttagaggtgtggattaataaatgctgccagatatatttggattaaattgcaagaatggagtgatgttgcggactttttggagatgaaaattgttgaaaatgattctagcaagcccacacaagatgatacaatggataatgactgtttttttgacgaagaaataag

SEQ ID NO: 62565 - DNA, 990 bp, Glycine max
  Clone ID: PAT_MRT3847_27510C.1
agacgacagaagggggaaacgaaagagaatggagaacagggtaatattacaggaatggtttgaccgcgttgactcggagaaaagtggaagcataacagcggtacagctgaagactgctcttgctgtgggcaacctggaatttccgctctcagttgttcagcaaatgatcaggtgagctgaccctcggatccatcttcttcttctctattttaacttcaatttttgttttcccttaggatgtacgatttcgacaggaatggtactatgagctttcaagaatttgttgcactcaacaacttccttcttaaggttcaacatgcattttctgatctagagagattaactaaatgatggacgaccttttggaaagaaactaataatatgaaggctcataaaccatgggagtatgggtgatgtgcttcctttccatgagggatggatgaggcataacacttgttaggttcattgatgcaggggtcgtggttttcttgtacctgatgatgtatttgaggctttgggaaaaattggtttcatgctggattctcctgctttttactctgtctgcgagagctttgatcaaagtaaaaatgggaggtttcggctggatgacttaatatcaatctgtatattcttacaatcagcacggaacctatttaattcatttgatacagctaaacaaggcagagttactctcgatctgaatcaatttgtctattgtactgccaattgcagaatatgattcaactatatgacggtttgagaagatgattcacaaatactgcactttgtaatcccataaagtcattttagagtaagttaaattgtgatggtgttgtataagatgaaaacatctcgggtttggatactatttgtcatctgtctgcaaaatactgtggttttttttttctttccagatgatgtaattttgtttataaaacgtaagttgttataaaacatcttgagttatgataacttgtgaagttgattccc

SEQ ID NO: 62566 - DNA, 812 bp, Glycine max
  Clone ID: PAT_MRT3847_27511C.1
acgaggaattatatatgtttataaatataaacaaaaaattaatacagtaaattgtcattaatctgtcttttttttctcttattttaaaaaatatcaaattctaaaatattcatttgaaataaaaattcgtcctcccctccaaaacctaacttccaaacatacccctaaatctctgttgcatctaatctaagagtttaatgcatagatcttgcacatttgttgatggccttggtggcacttttgatgtggatgttgaagatttggaaacatccagagctgatccattagcgaagattgttgatgggattaaccaaagtgaggctagacgtacggcactcatgcttttttgttttgtttacaaggatgctaatgcaaaggatgcatatattacatccattgatcgcaagggatttgatgtcctggcaaaagttagcagtccagttttgaaggatggtattgatggctaccaatggaaagaattcaggttcatgttcaaggaggaggcaaatgatgttgaaatgttctgtagtcaactagtcgaaatggaagaggaggtcatcaataaggtttcaacctctagtggactaaaatagaaatgataatgaccttggtcggatctatttttttgtataattttttttatcagctatagatatggcagctactcctgcaagagactgcacatcttgacatgtatcattagatttgttttttaatcttgtactttctatagttttcttcatcagttattacggtacaaggccgtcacttatggtataatgcagtttcaacttttaattttaaaaaaaaaa

SEQ ID NO: 62567 - DNA, 147 bp, Glycine max
  Clone ID: PAT_MRT3847_27512C.1
accaaagaaggggatttctgaaactaacaacaacacaatggaatcatcatggcaactgcctccccaatgctaatccaactacaagtttaccttcagggagggggctggtaacacccaatgtcctctctgccccctcagcacattaac

SEQ ID NO: 62568 - DNA, 390 bp, Glycine max
  Clone ID: PAT_MRT3847_27513C.1
cccacgcgtccgacgaaaagaagtgtttattcttggaattctttatctacccaggtggcacacaacccttgaaaacgcaagttcttgatcaaatggttttcaaatgtaaattgatttcgattgggtaaggaaattatagtttatgggaagaaattataattaattgaaattacaaaggatggcataaatacgaagagttggttagagattctccaaccaatctgattataattcaagctagtcgattagggagatacataacatgagataaggcttagattagaagaattacatcatattcttagtttctggaagaattatttaaaacaaaaaatcctaacaactattacagaaatatcatttaccaacttggtatgaaaatgcattaaa

SEQ ID NO: 62569 - DNA, 205 bp, Glycine max
  Clone ID: PAT_MRT3847_27514C.1
ctcggaccgcgagttgtatggatgttctgggaactgattattcatggatgcatccctgagaagctgttacacatgcacagtgattgctaatatgaaaatatacatagcagacagagctgttgaaatttactgcgccatagctattgttcaacatgctttgacaattacataaaactaacgactcttcgactaggttgagacatga

SEQ ID NO: 62570 - DNA, 210 bp, Glycine max
  unsure (1)..(210): unsure at all n locations
  Clone ID: PAT_MRT3847_27515C.1
tcttcttctggagctaantgcctaagcttaaatggcgtcgttttnntcttctctccctgccgtttccgctcgtcccatccccactagtgnacttccctctcagaaaactttctttcaaactncacccanttgcattnccaaaaatcancgncctccagtcaccccncanccaanannncgcagnnccncgcncntnancacccacancnc

SEQ ID NO: 62571 - DNA, 285 bp, Glycine max
  Clone ID: PAT_MRT3847_27516C.1
gcacgagaaatgaagggaagtggtttggttcatttttcccctgcctatccaaacacagtattattaataaatttttccctaggattattaagttatttaaattctgtattctgtatactttgattctgtttcggaagcatgttttaagtatttatttgagatggaccacattagtaagtatttgttttagatggaccacattagtaagtatttgttttagatctattttttacctgctggatgtgttgtaaaatggtcaaaatatataagattgtcttgtagata

SEQ ID NO: 62572 - DNA, 360 bp, Glycine max
  Clone ID: PAT_MRT3847_27517C.1
tacgtatcggtacaagaatacgtcaggctgggggggtaccacagacaggcaatgtcgtcagcacgtaaataacatgtacatccgtggaatatactatatcccatttgagaatcattacttgagtgagggaaccaccaccaccttagttaaaaaggggcggttagatcggacgtacgctatgatcggtggtgaccaaggcatgcatggaatcatcaagcggttcaaaacagtcacatctgttaactgcgttgcgggtcgattcaaatgatcaagagcgtgaaaatcatgacgtcacgcaacttacaccttctgcaccacatccggcattcatcatctgcgatgttgatcactaggagttca

SEQ ID NO: 62573 - DNA, 163 bp, Glycine max
  Clone ID: PAT_MRT3847_27518C.1
aacactcataatgatacctagataacaggcaattaattgaatgcattagactctggagcacttcatatgcatactgttgctgttacaattactggaattggaccctaacagtttcatactgcatgatttccaacctgcacaaaattgaccaatggaaagcctt

SEQ ID NO: 62574 - DNA, 664 bp, Glycine max
  unsure (1)..(664): unsure at all n locations
  Clone ID: PAT_MRT3847_27519C.1
aaggactcaccagtacctccacaggagcggcgaacttcggtgagactgcttacgntacaaggaacatgataaggggatgactgggcatgcccagaccacctgaaaggtgaaagcagccatggatgtattacattgaaagcgggacactctctggctgacgtttggatcgattaagcatgactggcagacacaccgatcgtcagtcagtataaccgctcgtccaacatcagaatgacctcactgtcacacatccaaggatgcataccagttattccaatagatacactcatggttagtntacgacttgatagagagtatggtattacatcagagagatagagactatcgaaaaacttccaatagacatgagcatacagagagaatgttgaaacacagcacatctgaggagaaccgaattgcctgaactgtacaattaataaaaatacacatttgcatgcagagagcatggtggatgaatatggactggactccgtctactacaaggactaagatctgacatcaacactcttgctctgcacaaaaggcttaaaggagagcacatgattaaagaccctgtgtagatgcctgcctactgacatgatgcacatgttgccaagcttctgggcgctgctacgagacacaaacggcatgaatatgagatact

SEQ ID NO: 62575 - DNA, 260 bp, Glycine max
  Clone ID: PAT_MRT3847_2751C.1
tttgtttttttgataacaatttttattgatttttgttatatgatgtaggatacggaggtaaagggtaaataggacccagcaataccacaaagcataaagagaggctgttatgttatggcaggcaaaggtgtcggttcagtggctaaagctgcagcagaatattagcatccttagcgtgagaagttggcaaaatataaagatgagtacgctaaagatgcgacgggatactgcgagccgggggcatggaagccgcttaacat

SEQ ID NO: 62576 - DNA, 456 bp, Glycine max
  Clone ID: PAT_MRT3847_27520C.1
tccgaattccgggtcgacccagcgtccgtacgctgggaaaaaaaacggaaggggaacccacaaagtgcgtaaaaaatgacacactccgcgtcaacattcgaaaggcataactggttttggacttcagctatgaccctatctatccttcatgccccactaaagcgaatttaccgctgggggagagctagcactctagctttcctatctgctgcaggggcaggcagcccttatctctgccagtgcgtcacttacaacatacaaaaccatggactcaggggtggattatgggacacactcattggtcaacaatatacttgagatagaactgacctctgaaccattgagcttagaacctgctgaggaatcgtgtgatcttcagagcgtgagtgagcaagatcccctgaaatcgctaacagaacgcgtgcttgataccctggctagcggaggatcaaataa

SEQ ID NO: 62577 - DNA, 293 bp, Glycine max
  Clone ID: PAT_MRT3847_27521C.1
tttcaaatttccaaagaatttgtaatatcaagatgattaaattatatgattacaacacacacacacatatcatatatatatatatatatatatatataagtaagcagatgcttatatttttgtatataaacctctaaaattatatctggatgcaaactattgaaagctaatgcgcaagcatcaaatttaatatcgggataaattgtgctggggatcaagacttgatgagccgagaataatctccatctttagcgttggggcaagcttatgggaaaccctaagattaaatctgg

SEQ ID NO: 62578 - DNA, 306 bp, Glycine max
  unsure (1)..(306): unsure at all n locations
  Clone ID: PAT_MRT3847_27522C.1
gtctcncncnctcgtacgtnagctcggtgntcgnctcncgtgcntcnttccacggcggcgntccnnnnttnatccgcgaacggaggnnctgcaccgtnnagngnggncgtncacgtnganggnggcccgtcnccagngnngttagnggctgtnggantctggagcagcgncgaaggnattgatacaagnggttcaagtnaccggtaccnttcctggtgtgatanctgagcngtggagatannnagtggcgnagtcgattanctagngcgaaaacccttcccntgacnngtnctgcntagccngacc

SEQ ID NO: 62579 - DNA, 291 bp, Glycine max
  Clone ID: PAT_MRT3847_27523C.1
gataagcaaaatttgaaactggatatacctgatgcacaccacaatatcctcgacgccatctccattttgctaagtgaacgccaagccattataggccttagctcgccgaagggctacatgaacaatttctatagctacataacatcactcagctaaacatacccgccaagaacttgtagggcaaactacgtacaaaaggagcattgggacactgtccaaataaatgataaaaagataaattggaaactgactccacttgcatgcagatccacttttattttcaaccaatca

SEQ ID NO: 62580 - DNA, 322 bp, Glycine max
  unsure (1)..(322): unsure at all n locations
  Clone ID: PAT_MRT3847_27524C.1
gtccnnngcacgcgtacgtaagctcggaattcggctcgaggtcgacagctgggggaagagaatgaggagtttgcactccgtgtacaacagctggtggccaaagaattgggccagatagggacacggctcacgccagcagacaaagcagaacacatgaagcgacagagacaccccagattacgcccccagtcagtgcagtcttcttttccttctcctcccagcccttcttctgatgtgcaatgaccattctcgctcaaagagtcaaggaggttttgccccatgtgccattgatgtctccagagagacctggctaggactgggt

SEQ ID NO: 62581 - DNA, 775 bp, Glycine max
  unsure (1)..(775): unsure at all n locations
  Clone ID: PAT_MRT3847_27525C.1
gcatgcctccngctcgtttattatgtaacttaaagaaaaagtgagacaaaattcctacgtttagtttgaatatgaaaagctaacttgtggtgttgatctgtcgcattgcttcaattttttgtcatttagcttcttcttgttgatttctcgtttcaaattctaagagtttgtttctgaagtaatttaaacatatgcaatgactaattcaaagtcccagccacagattccacggaaattgtccctttggcaccatatgatgaccctattcgctatataattctcaagccttgattctttcccacaactcgagtttcaaagaaaacctaataattacttagtcttgttattctctcttgcgttgatcattgcatttgatttcgtgatgatgagttctagagcttgtaagcctttttcttcctctcttttggcagcttcaaaattgttacttaaatcttcctctcgtgcccctccacttcaaattagtgctcttgttggctctatggtccctaaaattcaaggtaataatgattgatgcttgagagtatgttgggataattttttttataaatacttttaagaaaaaaataagaaaaataaataaaataatttttttataagctaaaattaatccaatacatatactgatttataggaattttatttacattagcttatctaanatttatattttacttattaagaagcttnttttttatggttggtctaatctaaatnnattttttaaatagcattcattaaaaaaaaatgaattgaa

SEQ ID NO: 62582 - DNA, 173 bp, Glycine max
  Clone ID: PAT_MRT3847_27526C.1
gcgtcacttttcacatctgctgttcctgcgcgtggacactcctcaggtatgccgagaccatagttacacataagagcgttagtcccgccggggacttccgtttgcactggtacatgtacgtgcagacctgtgtcactgatccaggactggctgcatcaacatggttgcatcgt

SEQ ID NO: 62583 - DNA, 281 bp, Glycine max
  Clone ID: PAT_MRT3847_27527C.1
accaaccttttcactcctttttcttctcttcctcttccatgacactttagaataccttcaaaggtccacccctcccatatcgtccacctcttcgtacgcctcaccttctgttacttctactctgctagttccctcgcccctaacatcggtcccctcagtctctcccccaagaagatcagaaaatatatcaccaaggaaacccccaatgacttgaaacgcctccccgtcaccatcaaactcaccttgcagaaccttcaatccaaggtcactattgtcccatc

SEQ ID NO: 62584 - DNA, 179 bp, Glycine max
  Clone ID: PAT_MRT3847_27528C.1
ctaaaaactaccatgaaatgcacacatttttttggtactagaagctaacagagcgtgggagtatatgggtgagaagtggctgcctcctattatacattctagatttaggcgtgataatgttcggaagaacaacaatttggatggggagttctgtgattgcagataagggtcattgactc

SEQ ID NO: 62585 - DNA, 481 bp, Glycine max
  Clone ID: PAT_MRT3847_27529C.1
gttgatcatcacttcctttccctcaaaattctaatggatgggaacaactacaattcctgggctgatcagtgggatgatgggccagaccctgtgatggttggttccaataacaaaaacagcaacgacaacaccgccaaatacaagcaaaagctcggtgagggttttggcaagaccaaagcagtggcctccaccggtgtgaagaagttgaaggatggtacctccgttggcctccactggatcaagaccaagtattccaaagccacacagaaacattgattgtaaactacatgctactttcagttttttgtttttctttattcgtgtctatgtcttcagtttggcctttgaattcctttattcttggtagtgtgtaattaagtatatgtgatccatgtatatggtgtatctgtattagtttcatagttgttatgttaagtttaattatatatgttagcttacacattatttttctacgtcaaaa

SEQ ID NO: 62586 - DNA, 226 bp, Glycine max
  Clone ID: PAT_MRT3847_2752C.1
gatgtcagagagcctgaaagtatagtacattctggaagacattcaagtaaaaggtcttctttcttacgatctataagccaagagtcactgggagtaggaaacagtggccgccattcattctcagcatcatttggtgtgcccacatctgttggcttcatagaacctgcaggtgaagggcctcaagatcctccttcaacagctccttcaccaccagaagtgcctcttt

SEQ ID NO: 62587 - DNA, 413 bp, Glycine max
  Clone ID: PAT_MRT3847_27530C.1
cccacccttccggttccgcagcggcaggtgaagtctatcagaggacgcgcccagccaagtggggggaaccaattcttgcaggcggtcgttcccctttttgcccgggattggactgcgtggaaatgagctgactgaaatcaactagtgacagctcaattcacacactatgcctttaacaggtccaatgaattgtctgtgaaagattacgtcgtcagagtccacatagtaacctatgtggagtgccagtacaatacaaacacttaagtgagctgctgaaacgactgctctcatgagagagtactatgtccttattatcgaccctgggatcaggaaaaactatgtcaataagtcatgctttgaaagaactcatggaaatagacgaagtgagtgaaaatgtattacaagttcactta

SEQ ID NO: 62588 - DNA, 229 bp, Glycine max
  Clone ID: PAT_MRT3847_27531C.1
ctgccggcctttttttttttctttctttgttattttcatcagtgattttttcagtccggggctccggggtgtttgcacaacaaagcgggccccatgcatcacataacggaccagaccgggaccgggcccgaggcgggactcggcgaacagcggcgccctcaagaagcggaagaggggccggcgcgaacaccagggaccggcaccgcgacagaaagaccacccggcccgc

SEQ ID NO: 62589 - DNA, 402 bp, Glycine max
  Clone ID: PAT_MRT3847_27532C.1
aaaagaggtaaaaccaataaggctaaaaatttttagcttttcccaaaacatactgtgtgatgaatttcacccttaaaacaaaatccccaaaaaaaagcccctgtcaatagcagtttataaactcaaaaaccctgcaatttcatgctttggagctgctcatgccctggagttttttttaacttaaaaacagtttccttgggggctttaaaaaaaagaaaaattcgggattgaagttttgcattttttgcaacaagcatttgagccttttttttttaaaaaattaactttacgttgggaacttttaactttgactgaagaacattaatcactttcaaggtttcctcggttccaggaccttttttactattcaagggtggttttagttttgataagcccttcttt

SEQ ID NO: 62590 - DNA, 523 bp, Glycine max
  Clone ID: PAT_MRT3847_27533C.1
aagtagttgggagctcttattataaaaccataaagaatggcttcaatgacccaccatttgatattcagcccagagtttcttttaagtatgctgcttcgagaggggtgtatggaaccccatttttctatgtcaatggattcttgttgcctgatactggagctgctgttgactacaagacttggagaaaggtcattgacccattggttggtgctaagaataagaagagtatccaaaatgaagagtcccttcatttcttcttgtgaaaattgtcggtatataaataaagtccagttgcattagccctgtatcagtgaaggaatctgaagaatgtatccgctgactaataatggaatcaaatgttataaaacattccttagtccatacatatacatatgtggcatgtattggaatatatgatacactgggcaatgatgatgtgatattccttggcctatgtttgaattttatgaaaggtgatagaatgaatattaaaaatataatgaaatgtaaaaaattaaaacct

SEQ ID NO: 62591 - DNA, 444 bp, Glycine max
  Clone ID: PAT_MRT3847_27534C.1
gataaaaccataaaaatttggttggaagagacaatccaaatcatcctacatcattccaacctagaattattacttactttagacattgtacacaaggattgaccacgggcatcaaaaaccggagcttgaaacagtgccaaattaattcccaacacatataatcaatgaaagaatgatgcactgcaggtttccactgctgcatcccacaagacatctgggcaaaaagaaaacaactacattttctctttgcatactaggggcagatttgggacatcctttagtattcgatgtaagatagctacaatcacattttcttcttcatttgcaagccaaacacaatatgaagcattgactgcaccttatctttttataagaagatacagaaaaagggggaaagaatatcaagggtggaagaaggtggaaaaattgaacaagaaaagagat

SEQ ID NO: 62592 - DNA, 511 bp, Glycine max
  Clone ID: PAT_MRT3847_27535C.1
aggagtagctgtcgatcgtatcgctaggaatgtgccaggtacctgtcacttcggcgtgccgaagttggagttcgagtccgttctaatctaaggcacgcacacgcacctttggagggagtgtgtgttcttaaaggtgccggcccaggccggtggtggttatggttaatcttagcttgtgggggccaaggggttacagatttgtagggagccatagaagtatgcattgtcttagcggtaggatgttctgagccaggctccggagtcgtcctcgtcgtcgccctgccctcgccaactttaaagcccttgggtattttaaacatctgtggtgtaacgggtctgtgttgtctttgtttaagttttaaaatcatattctggggattgatgttcgtattacggatggtctctcgcacaaacatgtcacgcccacgttgcgccgcatgcaacatcagggctgctagtgcgccaacggccggcaacaaaaacatccagcctccctagccaggtacagcag

SEQ ID NO: 62593 - DNA, 361 bp, Glycine max
  Clone ID: PAT_MRT3847_27536C.1
gtcttcccgcaaatcaagattttaattcaatctgcatggactaacaataacaatcaatgtcctagattgaaagttaattatttcccacttaaaagtgacttaatgatagtatcactcataccatcaacatgagggaacaaatggcctgcaccttgaagctcatgatactgaatccacggaagcttttgtgcaatgtatcgttgcactttaacaggcactatcaaatcttcatctccttgccaaatatggaccgaaccttcattatttggaaatggattttccagatccaatggactaaattcccagctaccaaatgcgagaattaagtctcggtgaacagtttcatgttcaccttgctgtc

SEQ ID NO: 62594 - DNA, 1418 bp, Glycine max
  Clone ID: PAT_MRT3847_27537C.1
aaattgtcgggggggggggagtgttctttggttttgctagttttgttggttttgttaatttgttagttgtgttaatttgttaatgttgttagtttcgtcggattttcagtttaatattttgggtcaattttgtgtgcacgtacgactttgcatgtttttctttgaattataggatatgttcaagaaatgggtaattgttttgaaaataaaagttcttgacattttgtgacttgaaatccttgattcttctctacatgtcatgatagttttgaaagctcaatttgaaagtgatgattttacctttgtgagaatttgagccatcatccatcattataatcatttggtgtgttttgccccattgattgcttgcacaatagccttggcttgattcttgttgatgcgtcctaattcacatgcatatttggaaatgattaaggcaattttgttcttataagcttctagccaaatggacttaccttgaattaattcctttgatagcccttttgagccttgtttccctttccttgttttgaagctcactacaagccttaagtgaaaaaccatgatattaccatatccttaaggaattttggagctttggaattgttttgggaataagtgtggggggtttttgtttcattggacaacttgttttgttggctatgcttcatgatgtattttgggccatacttgatgtacattgtatattggttaaatgttggacatgctgaatgaaatgttgtttctcaaaggatatagagtaaaaaaaaaaaaaaaaaagaaaaaaaaaagacaaaaaagaaaaaaaaaaaagaaaagcaattaagttgagtgaagtaagatcttaaatggcacaagattgatgaaactcttgtttctactcttcatgtttacgtttaatcttttcttctttatattttcgttttttttttcttaatatgcacttattcccctttgctcctctattcctttgggatttagccacttattccatatttctccataccttgtccttggccccattacaaccttaaaagaccttttgatcctcatgtgcttgtgtttatgggttgattgtcaattttagaatcttgccaagtttatgtggtgtttgctttcatgggtgctttgagggtaaatagtagcctagacacttgagagatagagtgtatatcttgtgaggctttatcacttttcattcttgagctgattaactattttgccatgattgggttgcttggatgattttcatgaatgtcttgactttttggatctccttatgttagatgttacccattcctttcattccttgatgttcattgagaaaaatgtgaatggtttttgtctttctctctttgatatcctaagattttgttcttttgttcattttttcccagcaattccatactgcaaaattt

SEQ ID NO: 62595 - DNA, 263 bp, Glycine max
  unsure (1)..(263): unsure at all n locations
  Clone ID: PAT_MRT3847_27538C.1
tttttaaaatatgtgtaanaatcagtganaaacagataataataaaaccttgtttttaattaaggtggtattttttanaaaattataagtnaaaaaaatganaacaaatatttngcagaaatatatacctctccttcttaatcattantcgtacttgccatttagtcacttgctgnattatggtgtgcttggagattttactgtgtccatgtttgatgatttgggcatttcatcnncgctggctaataaattggatgtattct

SEQ ID NO: 62596 - DNA, 148 bp, Glycine max
  unsure (1)..(148): unsure at all n locations
  Clone ID: PAT_MRT3847_27539C.1
cttgcatcaatttngcgctctcaactcgctgctgctcnncacaaaaacccttgntgttgctggggaaccatgagnaagtctccgcgcagagatctgnangtctttcgatttcaacgangangatgaggtcgcntcngntanacaccac

SEQ ID NO: 62597 - DNA, 264 bp, Glycine max
  Clone ID: PAT_MRT3847_2753C.1
ggtcttccttttttttaacaaagaacctatggattatgggcgaaataagtgcgggggagacaatgctatcaataaacataatcaaacacatttccctccgtttacaaatcatactctattttacaccccaagtgaccgcttatacacgcactaaatgaaaaagagagacctatgaacataaattacggtgccactttcactcataagccacacctaccaacaggtaccgagggtaaaagccctctaaaacaatacaactggacc

SEQ ID NO: 62598 - DNA, 192 bp, Glycine max
  Clone ID: PAT_MRT3847_27540C.1
ctgagtatactgagagctgactttcctaagtcattcgagacgggctataactaaaggatatgagccaatacataagactcttctgaaaatacacggtatatttcatctggggaagaggcttctaagagatgttagaaccgattaatccaagatgacataagatgtgttaatatccattactgatcaaaacac

SEQ ID NO: 62599 - DNA, 201 bp, Glycine max
  Clone ID: PAT_MRT3847_27541C.1
gtaatatctatacaaactgaagccagtagctgctacgctgaatgagaagcgacatcgcgcttattcaagaacgcttggacgctgcaaaggtggtccatattttgacccgtagtctacacgatattggaaagctctttggagacaactgccttggaaggtgatatgaacgagtcctctccacattgtttcagtgatatttac

SEQ ID NO: 62600 - DNA, 728 bp, Glycine max
  Clone ID: PAT_MRT3847_27542C.1
ggtaccgcctgcaggtacccgggtaccggaatctcccggggtcgacccacgcgtccgagcaattggattgtgatcagcttagtggctggtcttgtccagtagttgggcaacaaaatcatttatctgctttaagcttcttgaagagtagtaccttaaataattcaatacaaaattcctgccatcatgaaagctcaggcagtgattcgcatggaatctgtgataaaatggatgctactgatgtgttgatgaagacctcccatgaggtagtgatatcgagtcacatgtctaatcctctaaatccagagaattcaagctgcttatgtaaattcagtattcaagatagagagagtttgattgacagttgttcaggaatgggtcactttttgaaaaaatcatttgataatgatggaactgttgagccaaaggtgactgaaaagcacctgggacccctgaaatattctatgttatgccatgacattaataccattagcaatactttgagtggggaagccacaaaggaggatcaacctgacaataatacactcacttcacatttgtacggtttccaaccacaaaaatatggccatcagtgtaaccatcccagcattaatccccttagtgtgaaccctatgttgacaaggaattcaattcttcacctgatgggtaggaatgggggaaaataccaggctgatcatgaacaaactttgccgtacttcaattgttctact

SEQ ID NO: 62601 - DNA, 433 bp, Glycine max
  unsure (1)..(433): unsure at all n locations
  Clone ID: PAT_MRT3847_27543C.1
ttttttttagctcaaattataaggtagacattttgagctaaaaatgtctaccttataatttgcacacataaaattgacaaaatatgcttgccagttatgtctggaggttacaagaacttcaactttcatactaacatgatgtcagatgcttaaggtttgattcaccaaaaatatatgcttagggttggatacattttaataattcttcagtcacacctgctaagtaaaaaggacctcgagtgggtaaatgaatactgagaatgtttttccattctatcgctttagaaaaagaaaaaaaattgaagactatgtatataaccagaataanttacggaagtgcacctaattgaaacatctccattattatatgtaacaacctaatttaanccacattaaaatcttagacaactcagataataaaataatttttctt

SEQ ID NO: 62602 - DNA, 715 bp, Glycine max
  Clone ID: PAT_MRT3847_27544C.1
tgaaaggaatgaaagaacaatcatatatataatcaagattattataataaatatacttgctcatatattgaaatatgtttgaaaatttaagatcccttgctagtcgtctatagtttctaatattaatattaaattccaattaccaaaggaaaaataatatataaaagttcattaatttataaagcaaaaaagatgtttgatcatttagaaagcgatagagatggtgaagcattggagcttgacgcaggaggagatggaggagacccgtgcctatgaggaatgtcacttgccactgcttgaatgtcagcaccagtagtggcggttgatggagcagcagccatgttgtattgacgtgggtctatggctctctgttgcatggcccatgaagtttggcccagtggatcaaaaagtgaagacaaatcataggtggtggccgccgctgccgccacggtggcggacggtaggtctgcaatcgagaaaccgggcggtggtgccgccatcgtttgtggcagtggaagaggtggtggtggttgaggtaactccatttgagcaaggtggccatgtaggtaagagagttctgcttgtaagctcaccacctgttgctgaagggcaaagatgtgggaaacacagccataaacaggatctctgatccttgattgtgcttcataacaaatggtgatgaccgtatcaagcctcctatgcactggaaatgcta

SEQ ID NO: 62603 - DNA, 2363 bp, Glycine max
  Clone ID: PAT_MRT3847_27545C.1
ccacgcgtccgcgccagtgcgccaccatggccactcctggcaaagtgcagcgcctccggtgacgctgtctcgcagttccagcctctgatctgacactggtgttccgcgccccttcatgtcgtgcatctcctcgtccctccgccacgtctttgcgcagtgccgcccatggtcggagctcatcgacctgagctccatgtccggacctgacgcaccaccccaccaaatccaaacaccgcctaacgatgctgccatgaaatccgaccagatctgacctcgattgttgttactgaacattggttgtggtagtcggagagcaagcgtggcggatcactgccacaatggagacaacgcgccgccgcacagaccgcgactcgcatacgcgcgacccaagcatgtcgccatggagttagtggcttcagatgaatcttctagaaacttccctggaacaacaataaccatagaggaaaagcaaaactgggagtatgtttggattttgattctctggtttgattcacttgataattttggcaattgatttttgaccaataggattttatttgtgagtagattgctggtgcttagatgggtgacattagttctaagcttcatgggttgcggttggacttaagaatgttgaggattttttttaatggctggaatgtttatatttttctttttagtgtgggtggttaataatcaaatggtgtaattgtttttttttttttttatgaccatttgtattcggttatgggtttttgttgtagtgaatttatttgggattcatgttgaagtgagttgttggttattgatttatggtggctgaatgggaaattagggcctgtatttggaatttttcatcatttctatcgaaaattgtttatctacctatgttggtgtagctacattcagcgtctgtttccttggattttggttcaggtgggtgttagatggtggcaggcagtgattgatgcagtgtggtgatcctggaatttgggtgtattcctgggttttggggttttagtaatgttcagatgcacttgtacgttgaggaagacaagagcaatgaggaaaaagaagacaatttgggtttttttttttttttcattaaacagcatgtgcaacatgactgtttcaggttaacagaaaagaagactgtgacggtgtaagggtgcgtgtgtaatggaataaagaggagttttgaatgtaataaattctaaacaaagggagaccagcataatttattctttctttttcatttcagaatcttagaaatcttaaaatattaggagaaacagtattaaaaataaataaataaaaattttgagatttaagttttttatcccattaagatttaagttaaatcaatgactaggatgaattgttcattaatcatttaacagcaaattaataaagtgattcgtctgttgtatcattttggatttaatataatttacatttttttaaaaaaaaaataaagtgacctatttgaataacacccatagtttaagaatcaattaggaccaactcactattgtcttcttcttcttttccctcttgttatttcaaaatcatttctcatgtaaaaggagaattgtctcctgtgaacaaatgctgcaggagatagtagcagttgagaaatgctggaataagacaaaatgtgcaaaagcagcaaggtggaggaaaggctgtttttgttcggatttgaagtggtgtggtgcaggaaacaccaggaaagttgccttagatgcattctggaattggagccttcatttgcacgtctatcttttcttttctatcatatattttttttgttggtagacaagataatataaaaaaaattacactgagtgtatatgttaattaaactcatttatatgaactaaaagaggttgtgtaacttccccaaataaaaatgaaactaaacaaccccaagataaatgattggtgcaatcaaccatctttaaagtacacgagaattacaccaataatctatgattagattgtttaacccttaacccattattactgaggataaattttttttttttttttaaccaagcagttagacaacctaaaataaatacatattttactctatcttatattagcattatttaattttgaaatacttaaagaagaaggtaagtgtgtgagggtgtccgggtcgaaattgagtaaaaaatgaagtattaaggttatattcgataatactagttaaatagttaataaaaaattgaaaagttaacgagtaatagaaaattaaaaaactaatttattaaattaaaaatgttcgataaaattagttattgaaataattaagaaatataaaatgataagaaaataataaaatcatgatttatttt

SEQ ID NO: 62604 - DNA, 133 bp, Glycine max
  Clone ID: PAT_MRT3847_27546C.1
gagtggcagaggtttaaccatacatctcgtgtttactttacatgcgtcctggttactctcatggagttataagggaacggatcctcacgggccaaggccgtatgctacgtaagcaacagatcatcgggctgca

SEQ ID NO: 62605 - DNA, 385 bp, Glycine max
  Clone ID: PAT_MRT3847_27547C.1
ctgggagccacacccggtgactcttttgtccctatcacgctcgatccaattatgactaggccaaattcttctggctctctgattcgcatctgcattgggccttggatgaggatgagctccattgcttggctgccaatgtcataaccatcggtagcctgctccgtgcggaatgaatgacctatgctccttctagtgcggatcacacatcacacttgaatgatgctatactaggcgaatctctcagcactgaagaggatgacttcactcttccgagtgaggactatgctagcctagcctgtgatccttactgagaacagtgcatgcagatgctgtttaaacccatacgccagatcctgctggatcacaggatctgatagtgccttat

SEQ ID NO: 62606 - DNA, 320 bp, Glycine max
  Clone ID: PAT_MRT3847_27548C.1
ttcattcgggtcacttgggcagcggctactatgcgtttttttgtcagagaagacgacagtggcgaagcctactatgaactccatttcattctcatcttccaccaatcctcaaagcttaaagagcccatttcacagacaatcccaagcccgaagcctttcgctctcgttagccttatcattctcgcatctgaagaactttctgaagaagcctcacgccttccctttccttctctctggtatcctcttactcacttggatttttcttagaaatcagcactcttcttctcaattctcctctaggtatcaccaggctactgatt

SEQ ID NO: 62607 - DNA, 224 bp, Glycine max
  Clone ID: PAT_MRT3847_27549C.1
gctcgagctgaaactttgtttaactttctgttccctaacatcccagtattaaaatattgcttggcgttgaactttgatatttcagttggcgcgttaagtttaaacctttggtttcttctatttgtagattgaagatgataaaacaatcataccacggaattcattggttgatgttaaccagtcgggtcttctgatggttattattatcgacattactcctcgtt

SEQ ID NO: 62608 - DNA, 471 bp, Glycine max
  unsure (1)..(471): unsure at all n locations
  Clone ID: PAT_MRT3847_2754C.1
tacggctgcgagaagacgacagaagggatatataacaaatataatactattatacactaaaaatatttctcaattaattaaataattaaaaatatcaaattaaatgaaatgtttaatttttaatgtttaaactggaaagagaacagtaagaatgagaaaggaaacgtaacaatgaagggaagagaacagtgagaggaagagaagccaatacccaataggtgagggaagggttttcaaatttttttcttaaaatgaatctcagtctttgatttctggtgctacgagttatgtgcagaagaatggcaatggagacgtccatttctttgggggctcacgttgggaatgccaacagatagtcatcatagaatattactgtaaagtccacttatgtgaactcgcgtttccatatactntactaaaaaatatgtcaacatcactaaactgaaaaaacttagtaattacttaagttca

SEQ ID NO: 62609 - DNA, 226 bp, Glycine max
  Clone ID: PAT_MRT3847_27550C.1
ctcgagccgttttcttctcgaggtacacccttttttgtgcacaggatttcccgcacctcttgtttttccccctctttctttgttctccttcggttgaatcaatgggtgcagaggttaagatctggaaccccgttgaagtcgcattgcaagctctccatgactattcttttcagatttattcctcgcattttaccattgaccccttcctcgagctttttttaatggc

SEQ ID NO: 62610 - DNA, 526 bp, Glycine max
  Clone ID: PAT_MRT3847_27551C.1
ttctgtggctttgtttgtgggtgtctttatcttgaaaagagggtaaaggaagattgatgttcgtggaggttttaagtgatttcggaatggaatggtcgtaaaatgatggattgttatgacttatgagattgaggtcataggggcattggagatgattttaatgttgggttttggggcttctattggcacccaacatttttctctttgcattgctccttttttttttatataaatatctttattgaaaaatagattctgatgttattagaaaaaagttttttggaaactttttttttgggatgtaatttttacttaaaaaaaactttcaaaggattgattctagctttgacagtcagtctttattatgtgtttcagaatccatttgcataactgtaaacacaaaagttcttacttttcaaagtatgaaattaggaagcaagattttgtgttattgatgttgaatatctgtttgcctcattctaacggttaatcaaacacagacttagtctttgttaaaaaaaaaaaa

SEQ ID NO: 62611 - DNA, 177 bp, Glycine max
  Clone ID: PAT_MRT3847_27552C.1
ccttcttgtccgccgacaccggggctaaacacgggggggatgttaaaaaagtagcgggggaacaacccaaacggcaacaccgaccgggacattgggacagtgcgtgtagaagcaacacccaagggaggggaccggtgggcaccaagcacctcatcagtacgcagcaaccaacgaggt

SEQ ID NO: 62612 - DNA, 432 bp, Glycine max
  Clone ID: PAT_MRT3847_27553C.1
gatgagaagtgctttattggtcattttatacaagttgaatctgatcacctttgcggtggcggctgggtaggcggctgctgtggctggaacggcggaggctgcatccctggcggcagcatacctggagggaacatgccgggcggcatcccgaaaggcggcattcccattcccggcggcattgccatccctggcgggaaaggtccaggcctcatcccatggggcattccaccaggcgggaaaggaggacgacctccaggaggcatcatcatcggcattcccatattcggcggcattcccatcatcgtcatccccggcggcattcccatatttggtggcattcccggcggcattcccatatttggcggcattcccatgttcgggggcatgttgccctgcatctccggattcatcatgcctggagcaccggcggga

SEQ ID NO: 62613 - DNA, 167 bp, Glycine max
  Clone ID: PAT_MRT3847_27554C.1
attcttctacaagacttcttgccaataaaaatgcccccctgctgagaaatcagccccttcccgatatggtcccctaccaaagaacaggtggggcgaggcttgcaaacccctggcggggccaaatacaggttccaacccaagcacgctctttgctttatcaactgaag

SEQ ID NO: 62614 - DNA, 152 bp, Glycine max
  Clone ID: PAT_MRT3847_27555C.1
aatgctgcagattcagccctgccataactgttgtgcgtccgcacactcaggtgaagataagggacagtcgcctggtcatgataagacttcacgaaaacacattgtctgattatataataccaattgtggaggaggcctttcacaaggagcca

SEQ ID NO: 62615 - DNA, 680 bp, Glycine max
  Clone ID: PAT_MRT3847_27556C.1
acacgagatgccagattcctgtacaaaatttaaggtggataaagaatccgctctgtaaaattggggagagatcaacgtgtattctctcgagatatatataaaaggactgcacgagtttatctatgaagactaatttttcccaattattcttcgggggcttaaaaactacttaacttattcatagatagtgaccaaatagtcaatcagaatggttactcattttgaataataactttgtaattatttggcccctaaccgcaaacaagttaatggttcctgcattataaggctgacttcttccttttccccgtatttcatccaaaagatagccaaattcacctcaagtcacactaagaccgtccaattgcctcctggtactatctagctgatctctataaatcctcacaaaggtgatgtctctacttataagagttccaatgaatacctcttcaaacagtatgctagtatgagctaataaaaaatcttctgttgctagcttgggctgcaatagatgctagagagtcgtttcatgatagcctcaactaaaattatggaatcaatgaaaattcccagcaaaaatttcaaagaatcagcactagttgatgcttataactgaaaagtgcccaattcatgaccatgtcttgtaagaagtactttccgcccctcgacccattctagtc

SEQ ID NO: 62616 - DNA, 526 bp, Glycine max
  unsure (1)..(526): unsure at all n locations
  Clone ID: PAT_MRT3847_27557C.1
agatagtctcataggctttcttcctttaaagcctttagttataatctacacaatgcctgagagcgtaaattttataatgtcatttctgatcagtccttaagttacagaaataatatttttcctggtcaaggttgtcaaaatcatgattttacttgtaagatcatttggtcatatgatttgtatggagacatataatcccaatcacactgaggataactagttggtgagattgttgtcggattgccagggtagatcatgaaatcagttgcatcattgatcttctctctctctgctggtttcgaaccgaagactcgttgcttgggaaatgcattccaaaccatcaaatcgttcgggaaaccggcttgcatcattgatcttcatgtgctgggagatccaaaactcttacaggttttgaaaactgacctgtgactgaggcctcactgacctccttccaccacttgactgctctcagtccatcactgtgatctgttcctctntgtcattgatctttatctcataattcctg

SEQ ID NO: 62617 - DNA, 194 bp, Glycine max
  Clone ID: PAT_MRT3847_27558C.1
acgctcacgcgtacgtccacgcatcactaaatctttaattccactctaaataagaaatgcatacgactggctcttatccacatatatgatacgcactccatacaatttgactccactttagatgcttgggttcttaactgataatgatcatagctattgtcaagttctatatgcacattatggagcatcatttc

SEQ ID NO: 62618 - DNA, 451 bp, Glycine max
  Clone ID: PAT_MRT3847_27559C.1
gtcgcagctgaccctcgctcccgcccccgcctggagtccgacgtggaagttgctggctgactgggcttgcgaggaaaccgcctcggagctgcagccgaaggccaaggaatcactgaagatcggcgagggaggacagggggttcatcatgggtggctttttctcaagtatattttccagtctgtttggaactcgggaaatgagaattttaattttgggattagatggagcaggaaaaaccacaattttgtacagattacaagtgggagaagttgttactactatacctaccattggatttaatgtagagacggtgacgtacaaaaaccttaaattccaagtctgggatttaggaggacagacaagtatcaggccatactggagatgttactattcaaacacagatgcagtcatttatgtagtagacagttgtgaccgagaccgaattgcatt

SEQ ID NO: 62619 - DNA, 276 bp, Glycine max
  Clone ID: PAT_MRT3847_2755C.1
ggcgcattgaacgaagcttagggtttgtagtgtagcatgaataagcagcaatggccccgaatataagaccttaggtgagcaaaaaccctgaactgatcctgggaatcggacagtactccaagtcgcatatgtactacaataggggcatttgggctatcaaggccaaatacggtggcgttttatcgcggctcgacgctaaactcaagcccgatgcgactgctgaagaaccaatcaaattttaccctgctgatgacatcaaaaaacctcctgtcaaca

SEQ ID NO: 62620 - DNA, 372 bp, Glycine max
  unsure (1)..(372): unsure at all n locations
  Clone ID: PAT_MRT3847_27560C.1
ttgcatgcctgcagctgttgatacagttcagggcccagcactagcagcactgcaagttttaaaggtaattatttgttcttattctcatgtatcaaggtgacataatgctctgtatatttatagtttagttctagttttttttatatatattttttacactggttgtttcttaaatctattgagaataatttaattacacataataaaaaaaggatgacccagcatacaaggctccccacctaatgggatctgggaagggtagatgcagataatcttagccctacaaaggagagtctatttccaggatttgaacccatgacagctaggtcacaagatagcaatgctattgttgcaccaagaccccnccccccc

SEQ ID NO: 62621 - DNA, 244 bp, Glycine max
  Clone ID: PAT_MRT3847_27561C.1
aaaatcagactcgttgttcgaattatttttgcctgaagagcagatgggggcgaatagagttgatgaggattacgattatttgatcaaggcggtactgattgggggctctggggtgggaaaagcatacattttagtaaggtttaccaggggagaattaaggcctgggttaaaaactaccattgtggtggagtttgcctccagaaaaattaaggtagatttataattttttttgggtgagatttgg

SEQ ID NO: 62622 - DNA, 1285 bp, Glycine max
  Clone ID: PAT_MRT3847_27562C.1
cccggagccagctgccgccaataatgttgctactgatacggatgcaagggcggacccgtggggcgaagaaaatgttggcaccaaaaactcacacgtgcgaggctctttctctttctctgccacaaccgtcatctcctcctccggagcccgtgaacatcctcttccgccgccgccaactcctcagcgccaccgcatccaccatttccttcaatttcactgtccctttcacaacctctctgtccatgtcagagccggtagccagtgccggcggcctcttccaaatgcccccaccacgcctcatcaaccggtattttctggtgagagcgggtgagtcggagttcgagagcatgggagttatcaacacaaacccagtggagaagacttctgtggatagcggcttatctgaaagagggaagaaacagtctataaaatcagcttttgatttgaaagaaatgggagcgtgtgacaagggctgttggatctggtctgctattactcagagagcttaccagactgctgagattattgcttctgttaatggagttacccgtagttatatagtcccagaatacagctttctggatgcccgtggattaggtgcctttgaaggaaaaaagttggaatatgtttcagaagtgtatgcatcagatggtatatctccgaacatcaagcctcctcccattaatgacggaactccgaatgagagtgttgcagatgtttttgttcgtgtgacacagctcatgtcaattcttgaaactcagtattcgggtgacaccgttattattgtgtcgccagattctgacaacttgacaatccttcaggcaggtttgataggactagaccttcgaaggcacagggaactgtcttttgcacctggtgaagttcgctttgttgatcccaatgacattcccgtatataagcagcctgcatctgctatatataaatgttccaagaacccaccaaattgtaactaactgttttcttttggttcaaggtataacaggaatatggatatcgattaataatagttcaagttgtactgatgtttaattataaattaaaaaaacttactatcttaatacaaactaaagatgattagatggatgtgagttcatatatgtaagtgaaaacctaaagattaatttgagttttgtaagagatgatttgggccttggggtatccctgtcctgtataatggatatagttatccctgactctctttgtacttcaatttttccaagttgaagcatacaaagatggaaatttaaccatcaaatcttggggc

SEQ ID NO: 62623 - DNA, 523 bp, Glycine max
  Clone ID: PAT_MRT3847_27563C.1
ctccgaacatgaagcctcctcccattaatgacggaactccgaatgagagtgttgcagatgtttttgttcgtgtgacacagctcatgtcaattcttgaaactcagtattcgggtgacaccgttattattgtgtcgccagattctgacaacttgacaatccttcaggcaggtttgataggactagaccttcgaaggtatggttttaatcaaaagcttcaattaaggttttaattttggttactagttcagtagttctgcatcactttttttgttgctttttcttgaatttcaggcacagggaactgtcttttgcacctggtgaagttcgctttgttgatcccaatgacattcccgtatataagcagcctgcatctgctatatataaatgttccaagaacccaccaaattgtaactaactgttttcttttggttcaaggtataacaggaatatggatatcgattaataatagttcaagttgtactgatgtttaattataaattaaaaaaacttactatcttaatac

SEQ ID NO: 62624 - DNA, 375 bp, Glycine max
  Clone ID: PAT_MRT3847_27564C.1
atcctaccaacgggaccagggtccttaagaagccaaaatatattttagatccacatctccacttcgataagagatatactggaactcattaatacttccttattggatgagataagtggaaggggcataaaattactttttattaacacgctacaaactttacagggggctaggagaggaaacctgcaaattatggacgtacgaacatcacgctctccaatattaccaacggcacctgccatgtaacagccagtgcagcttgagaacagccatcgtcgtcagaatgaaaacgcctttgagatatgaacgaatagcgtttatctcaatcatgatggaactcgcgaaacaggttttattggacagacaataacacat

SEQ ID NO: 62625 - DNA, 402 bp, Glycine max
  unsure (1)..(402): unsure at all n locations
  Clone ID: PAT_MRT3847_27565C.1
cgcatagcgaagagcctctgggcaatggggtacgaagttttttgtttttctgttgaaaccataagaacatgagctattcgatatgctaggttttgtgatgaatatttatttattttcttataatttgactcggttaataaattgaaactgcaccgattttctaattctcttgtttggttagttgaaacaagttgaactacctagagaagataacacaagtctcgcaaattgaaactgttaccttttttttatatatactattttgcgttgtatataactcttataagctatatatctgtaacaaaaaaaaatataatttatatatctaatcaataatttctctataacttatacaaagaaggaagtgttaggacnnntttttttacccctaaaaaaggacac

SEQ ID NO: 62626 - DNA, 1360 bp, Glycine max
  Clone ID: PAT_MRT3847_27566C.1
ttctcattcttaaaaaaaaccctcattattccatcaaaactagctacaacaacatgtcgaacgtgttagcaggagaagaaagcgaaaaagttgttacctatgggtgggcagctagagacacctcgggaattctctccccattccactttatcagaagggcaaatggtgataatgatatcacactcgacgtactctattctgggatttgccacaccgatctccacatggtgaagaacgactttagaatatccatctatccaatggttcctgggcatgagattgtgggtaaggtgacaaaggttggtagaagagtcacaaaattcagtgttggtgacattgctggtgtgggtggctctgtgggttcgtgtggctcatgttcggactgcagcaacggcttctatgtatattgtccaaaaatgattttaacctacagtgcacactattatgatggaacaataacccaaggtggatactcaaataacatagtggttgatcagaactttgtcgtgctaatcccaaaatctcttccattagatggtgcagccccgttgctatgtgctggaatcacagtatacagcccaatgaaatattatgggcttgctcagcctgggttgcacttgggtgtggtgggcctgggaggcctaggtcatgtggctgtcaagtttgctaaggcttttggtatgcatgtcactgtgataagtacatctcccagcaagaaagaggaagcattggaaaagcttggtgctgatgaattcttggttagtctggaccagcaacaattgcaggatgccaggggcacaatggatgccattattgacacagtttcagctaatcactctatccaaccactaattgctttattgaaaacaagtggaaagttgattttggtaggtggaccaccctcgcctcttgaggtattagctatgcctttgcttttggggagaaagatgattgctggtagtgcaggaggtgggagagaagagattcaagagatgatggattttgcagcaaagcacaatatcacagcagatgtggaagtcattccaatggattacgtgaacactgcctttgagagactggaaaaaaatgatgttaaatatcgctttgtcattgatgtggcaaatacaataagctgcatgtccaattagagaaccacagatatgaaagtggtagccgaatattaattgaaggttgtggtaacttcaattctagttgtatcacctgatcactcgattcttctttttcacattccacatattccatattggctatccgacttgttttactggctatccgacttgttttacggtatttcaataaagtatgaataaattttgtgaatgtcatgttgaatctttcc

SEQ ID NO: 62627 - DNA, 2583 bp, Glycine max
  Clone ID: PAT_MRT3847_27567C.1
tctacaatattaggacgggagaaggctattgtagtcaaccttgagcaaatccggtgtataatcactgctgacgaggtcatcctaatgaattcattggatggtagtgttggtcagtataggttagaattatgcaaccggcttcagaatgaaaaagcggatgatctaccttttgaatttagggcactggagttggctctagaattgacatgcacatctttagatgctcaggtaaatgaactggaaatggaaatatatcctgtgctggatgaactagcctcatctatcagtactctaaatctggaacgtgttcgaagatttaaaggtcacttgcttgctttgactcaacgagttcagaaggttcgtgatgaaatagaacatctcatggatgatgatggtgacatggctgagatgtgcctaactgagaaaaagagaagatcggatacttgcacttttaatgattgttttcaaactcgtgcatcaggtagactaatttcaaagtcggctcctgcttcaccagagcgaacaattagtggagtccagatgttgcaaagggctttcagcagcattggaaattctagtaaacatggtagttcaatgggttcgtctgataatggggaaaggattgagccactggaaatgttgcttgaagcatattttattgtcattgataatactcttaacacgatattgtcggtatgagaaatttgacttactcagctgtagcattagaatctacccatgttgcttataacatataacagagtatttgtatgttggatatcatagtttttgctaatataactaaggtgtacatatataacattaaattagctcaggcatgccttcagccaatcagctgttacattctgatttttgctaatgagtagtccccatagtgactttttatgtaagctaacagcgtatgattttattatttaggcatggtgcttcatgcaaatgctaagtattgatttttttccttctggtaatgcagctcaaagaatacattgacgacacagaagattttatcaacataaaattggtatgctaagattaataatttgcaacattctctgtctattcctttatttctttgatactctaaactgtgtaaaccaggcagcgttacttttcactctatctattacagggaaatattcaaaaccagctaatacagtttgagttgcttcttacagcagctacattggtagctgcagtatttgctgctgtagcaggagtatttggaatgaactttgaaaccacagtttttgactatccatcgggattccattgggttttggtaattactggaattgcttgtatagcattgtattttgccctcctattctattttaggtacaagaaagtgctcgcagcttaaattgagtgtgcattctacctaagccatgttgaacaaggtgacagcttgctgccgcatacaacatctaagtctactcataactcactgcttcaacacggctggatacattgaagctttcaccatttcatcaatcaagatgccattgttatacttgggcaactatccatggtgcaggccaagatgtctctataatcccgtgatattttgaaggagtcataaacctttccatctctgctcttcttgtactcaaacaacaaatttgaatgatcaaaagcagttagttttacaaacccatagtcatagtctttaaagatgctccatttggttttgagggaagtaaatgctgaaaggcttgctccaccaccaccagctacaacatgtatggtcccatttaaggttcttcccttatagtggtgtttctcttcattagtgcagatattctgatctatggggcatgtcctctcataattgtgcacatggccatagatggcaatgtccaccttgtatttctgccagagcttttgaaaactctctctccccattggttcagcaaatgatccctcttctgcataacagatacaagaagaatatccaagtacgcgatgtgcaaggaaaattatccatggctgtttttgtctgtcaactgatgccaaacaatgctcaatgaacttgtattgttctgtgccttctctccaatcatgttcagtgtcagcaatacagaagcggaacatgccatagtcaattgaatacctggtgaaagagtgtagaaacgtaacattttccaaatacctgattaattctgttgagtattttctacctaaagctttaataccaaaagcattggtggactttggtataaaattatttcaaagcctcaatttgattatttactctttattgaatggcatttgtaattcttggtgattcactttcttcatgctcaaatcattaaacccaaaagaagataacctttctaaacgggaaaaatctaacaattcgctaatttattgattataatttgaagaaatgtatgaagtcatgtcgccataccaaagcttagccctgttagaagcaggggtgtagaacatagtctgtgccaacacaccacattctcccccagaatccatgttctcataaaaggatcctgttccaggccaatctcgctcatggttcccactgtaaaggacaaacggacgcgtggg

SEQ ID NO: 62628 - DNA, 565 bp, Glycine max
  unsure (1)..(565): unsure at all n locations
  Clone ID: PAT_MRT3847_27568C.1
ccacgcgtccgcgagaatgaatttttagtgtcacaccaaattcaaatagtaacatcaaaggcacagatacgtaaagtccaaatcaatccaatatgatggattagataatatactaaggtggtctacacgaatatttaataattctgaaataattaataatttgctgttaatttgaccttctatttttgtggtttccctacgaggatgattttttagtgtcacaccacattcaaatagtaatatcaaaggcacagatacgtaaagtccaaaaatcaaatgaacagatacgtaaagtccaaatctacccagcatgatggatttgataatatatattaagatggtctaaacgattttgacatattatatnttgtgtatctcttgaggcaccaaaaactattcatgaatgtcaagaataaacaataagaagaaaaatgtaagaatttttttaacagaaatgatatntatgttatttcataaagaatcaaatatcaatatattgaggggcataatttaaaagtatgtgtaataacatataatctagataccttagataagaaatggacaa

SEQ ID NO: 62629 - DNA, 287 bp, Glycine max
  Clone ID: PAT_MRT3847_27569C.1
attcccggctagccacgcgtccggaacgggaacacatatacgtttaacggccgtttataccgtggtgtctatggcggtctgtgggggtgactatagacagcgactgcactgaactatatcaatccattatacatatgtatgtacttatacatgccaagggagcccactctaaagggggtatgcagacggtcacgtgcaagcgataagataggaatcaagttatgtcatgaagaaaggaacggtgtttcgtcaatttacaatgtcgggactgaatgaacaggggttag

SEQ ID NO: 62630 - DNA, 983 bp, Glycine max
  Clone ID: PAT_MRT3847_2756C.1
tccgggtcagccacgcgtccgattttttatccccctaccttgtgttgggtgttgcagctgcaggctgattctgcggctatttctttctgtaggtacgtagtctagtctgtgtgtttggccttttgtcccttcttgtaaaactcaaatactttgagaattataagtgtatgtgttgtccataatcctaataagtttttcagactataaaaacaaagatgagatcaacataaaataatttaagcatgtttatatcatttgaccataagtcgatatcatattatctttcgtcttatggcctaaagacacaaaataagggtattattgatttgatatatgaactaacaatttcttcttttttatgatgtcaaataaattcaaatttttataataagcatattagagtaaacaaaagacaattcaaagtaaaagcttaacagattaggggggtttcaattgttgggtgaaatgggttaacagattaaggggggtttcaattgttgggtgaaatgggtgttgtttgtaacaccctacacgaattacactcgaattagaagaatttaaaggttgtacaaatataaaattatacaattgaggatgacttgaaaagagataatatatatatcaataatatatatatatttttcgataacctatcacttaagaacttcatagttaaacatgtttgatttaaattagttatgtgataagtgacattttggaaagtttttcagcaaacatatgagtaaagataaaacacataaaaaaaaattgtattgatatgtgaaaacaatcattgatcctaaaagtaacagaaataaattattgaagtataaaaaatgactacatacagaaaatactaaaaaatcagaagtcaaaaataaaaaaagttaccttgttaggaagagatttaattttgggtttacgccagggatttcaattccaaagaatccatgatcccaaattacttattctagtgattattt

SEQ ID NO: 62631 - DNA, 816 bp, Glycine max
  unsure (1)..(816): unsure at all n locations
  Clone ID: PAT_MRT3847_27570C.1
ggcttaattgtnnnnnnccnnnatctcaaatcttggannntaattcaggagtattcaaagatatagttcttaaaagaaacatnnnnnntggaccagtcttggtttatcccatgaatagaaacaagtggtacgataggatgtcagcatctataccagacgaggaggttttctacacagttggatttttgcactcaagtgggtttgatacttggaaagcatatgatgctcaaaacagtgaaattttggagttctgtagagatgctggcatcaaggtcaagcaatatcttcccaaccacagcacacaggaagattggacaaaccattttggtgctaaatggataaaattcttagaaagaaaacatcagtttgatccaagaatgattctatcaccagggcaaaaaatcttccacaaacaattacagccagtgttttaaatattttccctaattaaaaaaagtaaaatgttttatggtgggactaccccatttagatggctagctagggacaggtgtacatacagtgtgaccaagaccaagatggcttttgtatgctaaagtttgcattgctagctagagaaattaataaggtggggcattaaaggctgcatgagtacttttggcacctattatgctacatattaccttagatacgttaggttgacaaagtcgtactggtaggtacaagaagcacagttgtctctcacactgtctgtcacccaacttgctatatagtgtgtggagaaattcggatcatattgaagatgctgtgagttatagtcctccaatattaaatgtttaacgattctgtctttctctt

SEQ ID NO: 62632 - DNA, 220 bp, Glycine max
  Clone ID: PAT_MRT3847_27571C.1
ccccctcactcggaatccctccgattccactcgccttccttctctccgccaaaccctaatttccccttcgctcttccccatcaccacgacgcacccatttccgccactccgacaatgtcgctccagggcagcgccacgcacaacggcagcgtggcggcggcgtcgacggcgagcctgaggctgcggctgcagcctaacaacgagcacacagccgcatggc

SEQ ID NO: 62633 - DNA, 369 bp, Glycine max
  Clone ID: PAT_MRT3847_27572C.1
cggaaactttcacgaggttttcggagaaaaccaaactcggggctttgcatcgcaagtatcataccctttcctatcaaaattcttttgcctttccctaccaagggcgcccctcaaccgatatgtacgccactctctcatattactgataacgtgtatcaattcatgttgctcaaaagcaataactactacgtttatatccagagacgagatctgtatctggatctgggaatctctcaagcaaactttatttcatttggatatgatttgtgtcactacatagactgccaccccaatgcataatgtttacgttacaatatatgggtggatttcctgccatgaatgtgtttccaatacctattgagctttaaa

SEQ ID NO: 62634 - DNA, 381 bp, Glycine max
  Clone ID: PAT_MRT3847_27573C.1
gccaccatcaaatggtttccgatcagagttacaacccactgtcgtcgacgatggttttgaaaactacaggctatgtagatgtggagcaaaacaaatgagaacatgctattcaaattgcagagcagtttgaagctctaggttctgaaattggtgtcaaatgtgtcgtgcttgttggaggaattgacatggtacattaggcatctgtaaaaaggttgttgctaaggtcattcctggtgcacctaatgtaagatcaagtataacactcgaaattttgagtactaggaatataccataaggaaaaatcttattaggaccattctgttatattttttgtaaatatttgttattattatttgtgtattatgggttttatcctaagcc

SEQ ID NO: 62635 - DNA, 268 bp, Glycine max
  Clone ID: PAT_MRT3847_27574C.1
ggcttcctttgtatccttcctagtgctgcttcttgcagcccttatcctcatgcctcaagggcttgctacttactacaaaccaattaagaaggcacccgtggaccagcctccagtggacaaaccccccagggtacaaaccacccgggttataagccaaaaccaccgggttaacaacccaaaacacccgttttaccagccccccttttagaaagcccccctaccaaaaaccaccccttggaaaagggcccctcccgtaaaagggcacacc

SEQ ID NO: 62636 - DNA, 439 bp, Glycine max
  Clone ID: PAT_MRT3847_27575C.1
tcttactaaaaattaacctcgaataagagatcatatggcggacgctggttcagccgatcgtagaggacgtcgtggtggtcgccgtggaggccgtggacgccgcggagagggtggcgccgagggtggatcccgccgtggtggtgatcgccgtggtgctcgccgtggaggaaactctgcctctgcccgcgccggtggcaagggtgacgaggagaagtgggtccccgttaccaagcttggccgtttggctaaggatggtaagatccagcagctcgaggagatctacttgcactctctccccgttaaggagtaccatatcattgatgagtttttgggctccaagttgaaggatgaggccatgaatatcatgaccgtccggaattataccaccgtcgtgccgcgtagtcgattcaaggccttcgctgttgactgtgatctagag

SEQ ID NO: 62637 - DNA, 268 bp, Glycine max
  Clone ID: PAT_MRT3847_27576C.1
ttttgggtagtgtgcaacttgtacaccgtgatatacaaacaggcgggggacgagcgcgtgccacgagatagctcccctgtagacggacgcaagcatgagacactggacgtcgtataacaaggtaccgactgggaaaacactggcggtacccaaacaaagcgccgagtgggacaaccccgttgtgacagaaggcgaaatcgtggagaggcatgcaccgatcgccagttggaacagtagcgaagagggaagggccaatgggacgcgccaa

SEQ ID NO: 62638 - DNA, 344 bp, Glycine max
  Clone ID: PAT_MRT3847_27577C.1
tcgcttttttcaaaaggcgacatgaatatacaagatttatcgctgtttccttaaagaatatttataacaatttaagttaaattaattcttcaaaattcgctcaccgtttggtcgccggtgagcacccaaatattgatgctcgccgctgccaaagttgcatattggtgcggtacgccgaacctgcaatttgtctctatatggccgtcacaccgagcataagcatgacctgctccatctgctcgtacagcgccttcacaaggtcgtgcttacgttgggagaccaatggggcagcgcgaccactatcctttgacagttaattgaatcataaaaacaaaagaagatga

SEQ ID NO: 62639 - DNA, 551 bp, Glycine max
  Clone ID: PAT_MRT3847_27578C.1
agctcggatctcatttgatttttcaacgattcttcttctacgcgtcttcttcttcacactctcactcccaagtcccaatggcctcttctcctccctcttcctccgctattaaggatgccaaggtgcttatggttggcgctggcggaattggctgcgagcttctcaagaccctcgccctctccggtttccctgacattcacatcattgacatggacaccatagaagtcagtaacctgaacaggcaatttttatttcgacaattccatgttggacaatccaaggctaaagttgctagggatgctgtattaaaatttaggccccacataaacattacaccataccatgcaaatgtcaaagatcctgaattcaatgtggacttctttaagcaatttaatgttgttctaaatggactagacaatctagatgcacgccggcatgtgaatcgcttgtgcttggcagctaatgttcctttggttgaaagtggaactactgggttcctcggacaggtaactgtgcatgtcaagggaaaaacagagtgctatgagtgtcaa

SEQ ID NO: 62640 - DNA, 174 bp, Glycine max
  unsure (1)..(174): unsure at all n locations
  Clone ID: PAT_MRT3847_27579C.1
ggcccaggcccagagggactcttcgttttttaccctaattatgtcctttaaatgctgcattaattcactgtgcatgtcaaagggagagaggagggaatacggacagccaaagcgccggaacagccaagagccaccactagccaccactcagngcccctcttctcctccgtgaac

SEQ ID NO: 62641 - DNA, 356 bp, Glycine max
  Clone ID: PAT_MRT3847_2757C.1
gagacagaaacatcccatcattgtgtgttaaaaatgctctacaaacctattacctcataaatgcacgagagttacggactaggaatacaaaagcggcgtaacaacaatagcctacttccatgatactggttatgaaattaggatacgaccagataatcaaagggctatataccaacaacatcattgactgattagctgacttataacccacctgatacatgatacacgctagtcacaagccaattcggggtctaagctgttcaagcatcttgcagcagccaggaacgcagatcaagggtaccgatcagtgatggagaacatgtgcttcccaactttgccaaccggaataacgatct

SEQ ID NO: 62642 - DNA, 347 bp, Glycine max
  Clone ID: PAT_MRT3847_27580C.1
atgtgtttattcgtaaagttaagattcttaaagctcaaaagtttgatctaggaaaactgatggaggttcatggtgattactcagaagatgttggtgccaaggtggatagacctgctgatgaaaccttggttgaggaagcaactgaagtagttggagcttgatccggctgataatgcatttttgtttgtttagaattcctgttgcttttacaaatatttatttttcagttttgttttgacatttagaaacacatttgtttttgcaaatctaaatctgtttttttggcaaaggtttattggtacaacccaataaccaagaacggtatgaaaggcgtaattttcttaaaa

SEQ ID NO: 62643 - DNA, 432 bp, Glycine max
  Clone ID: PAT_MRT3847_27581C.1
cacacattaactcacctcttcaacaactctttaactctctacatacctacatacatactgagtagtctctctaatgtcgggtgagactttacatcattatcttaatatacacatctacaacagacactctttattattgagctaagatacttaccaatttctggacctcaactaatatatcgaagaaactcaattttcacagctctaaaccctgaatcctcactagaattctcagacacgtgttccaactatctgacttccctatctatactctcattgacacattccatgatcattatagatctttcaaatgtgtgcattttcctcatttcctcaccctgtacatctctctatgccatgattactcgactaacgtttgtaactatatcatccatagctgctcgttcactcttttatgacacccttatttta

SEQ ID NO: 62644 - DNA, 1165 bp, Glycine max
  Clone ID: PAT_MRT3847_27582C.1
gcaaaaaagaagcaaacaacacaatgagttctgaaaatttgatttttatatttatttttattatgttgttacacattagtttgggaaggtatgaatataggcataggaagaagcattatgatctagcgtagggagcgtataacgtagcttcgcgttgggaatatgcagaccataaggttgcagtacgaaaccttgaaagctacagtactcgaccttaagaaatttgaaaatgatgtgactataacagaatattctgccactttgttgcagctattggccacaatttcctcaaaagagaagttagttctagcaagttgcagccttgggggctagtatggtcaaatttttggagggatgaacatagaccttgctatggagaaattttgagaaaaggttgcagttggtgttttcttaacagcttttgctcgagacaccgaacatcacccatcttatgtcttggaacagaacaagtcgtctgaagacttagacaacgaatttgccccaagtggaaacaagaaatcattcatcttgggttctcagtacttgtccaataagcaacatcaactctctcccattgtggacctagaattggccaagacattggtaaggccatcatcactcttcattgaagatttgtctaagcaaaagaacttctccaaacatggatatggttcagttccacgtgcctatattgtttgcactgaggaccttgcaattccattggaatatcagctatggatgatccaaaatgctgggatcaatgacgttctaatgatcaaaggtgcagatcatgcagctatgtttagcaagcctagagaactattcaattctctccagaagatagctacaaaatatgactaggctataggttactttcatctgtacgttgtgtttgaatttgacttgtgttacaattataagatctcgtttagaaacatgactcccatgagacaaataaataaagccatagtcttgcaactactgcgtcatttccgatccatacacgcagggatctgtataaattttatttgataaaaatagaatgatatgaagttgtgttagttcttgtcaattcatgcgaccgaataaatgaaacttatcaaataaaaaaaaaaaaaaaaaaaaaaaaaaaaaaaaaaaaaaaaaaaaaaaaaaaaaaaaaaac

SEQ ID NO: 62645 - DNA, 446 bp, Glycine max
  Clone ID: PAT_MRT3847_27583C.1
ccgcgcctcctccccgcgccagagctcctgcggtggtcggtccgctgctgctgttggcgcgggctatttccacctgggttctcattcctctccccacacccacctctgcactgcgcgcccgcacgagttctccatctcaggggggtcccctgctgctgaatgctctgtctatttcttcaggggggccgccgcttcacgcctctcccaggtgggtatcgttcttaggcttatctcatgtttgtcccggacgaggtgtttgaattatctcaatgtctaaacctacttatgctaatcacatttttgagccaaacaaatttatagaaatggataatatgaatcacaattggatgtaaaaaaaaaaaaaaaaaactcgagactagcgcacttaacacatcacacagcaagagaaagagtaatagaatcgtggttcgtttgcagaagaagag

SEQ ID NO: 62646 - DNA, 358 bp, Glycine max
  Clone ID: PAT_MRT3847_27584C.1
accagggaagatatcaacaacttgtaggcacacttaattatctcactgtcaccataccaaacatcacatttgttgtcagtgtggtgagccaacccattcttgaatgctctctgtgatagtcattatgatgttgtcacatgtatccttcgatacatcaagaataaccaggctctgataccatgtaatagaagtgtttggtgtaatcgcgttgtgtcaagtatgaccacacctgatctttattaattggaaatagaatatcagatttctatataataatagatacaagataaacgtattctcacaagatcaaataaaaatattaggaaatgaatccaaatgaccttcctatttatttgtg

SEQ ID NO: 62647 - DNA, 330 bp, Glycine max
  Clone ID: PAT_MRT3847_27585C.1
ggctcgaggacatagcaaacgatccaaactgttcttttatttgcagcatcaaaaagagtggtaccgaccatggtagcggcacctggagctctctgttttcgaagggggctagcgcagctgccactacagccccagatggcggtggggtatatgccattatttcatcctcagcactctgataactctagagaagcggtgccgtatggcttggcacagcatgagatcaaacaacgtgacgatggtggctccggtgcttatgctcgcgaggatggcaccaccggcaagctccgtaagaaacccgagattgattggacgaagctccacgtggat

SEQ ID NO: 62648 - DNA, 381 bp, Glycine max
  Clone ID: PAT_MRT3847_27586C.1
aaagatagagcatgactattatcaagatataccgatgtgtgtgtctgagttctattttttaataataataatttgttgtctgtgtgcttgctcagtcagggtttgtgcctcttagcacaacataatatcgcattcacaactttaccaatagatttattggacctttgatgtaatagcttccatcctatacataaataattaatatcagggtttgatgctttgtctataatttgtagttttagtttgaaattcttcagtcaaggttaggctgttattggattgcaagtggtgtttttcatgcttgtgatctgacaatagaaatgtatttggtgcataatattactgatctaggatcattacgagttccatgtccctaactag

SEQ ID NO: 62649 - DNA, 275 bp, Glycine max
  Clone ID: PAT_MRT3847_27587C.1
ctcgagcgttcattttctttcactcctgtcctattcatacttcattattccctaccaaaccctcctaaacataatgttaatgataacacggggattggaaagaaaagttcattagtcttctaaagccttccataggtatactatggggattaggagagctattgttataactttcaaatggaaagacctcatagaagtttacaatatcttttgaagaaatgtacatacagttttgatggatgcaaggagctgttacaaattcaacatatatatgt

SEQ ID NO: 62650 - DNA, 522 bp, Glycine max
  Clone ID: PAT_MRT3847_27588C.1
atttgtgactatgtaattccaaattattgaagatgcctttgcagacttgcctactaatccacgctcagatcgttcatattcatggttcgacaactatctctaaatcgagcctcaattgagacgcattcatagaacatgatacaccgaggcttgaatatcagcttgatgacgaaaccaaagcaaattgtgatgcttgtcctgaaacacctgacctgagatctccttccccttttgaaaaacagatgtgtgcagtctacacacaagacactattacaaagctccaacatgacgttttctgtgcagatgatcgccatcttcccaaagacaatgatggtgcgactagtgctcatactgtgacagactgtgaatatcatcaaaactatatctgagaatggaacacatcaagctcatatatatcttatacatgtcatgtgttcgaatctaaaggatatctatgcggacaagctattgaagttctactaaaggacgaggtgttcatctttccaccctcgccctgatgaa

SEQ ID NO: 62651 - DNA, 424 bp, Glycine max
  Clone ID: PAT_MRT3847_27589C.1
ggaaaatattgtaaatacattaattatgaaggaaaatgtgtacacaagaaaacccaatgactcagaaatatgtataaatatatgaagtttcaaattacaaaacatgctcaaattacaagagatggattgcacatattaacctcaaaagtttgtataaaagtgtgtgtgctggaactcaaacattgactgtagttcctgtacaaaaaaaaaatactataaaaaatactcactgttcaacatgaaatcctcacgataaaccaaaaaactttccacgtggggtagatcggctccttctaaattcaagcgtggatgcattggttccttctttaagattgctacccgaaccattcacgactttgttttcaactttgctaaccaataaaggctctcctgtttgcactattcctattgattcaaggttctg

SEQ ID NO: 62652 - DNA, 136 bp, Glycine max
  Clone ID: PAT_MRT3847_2758C.1
attaccagctcattgatatctctttaacattcttcataattcaacaaaaaattgaccactgaaaattataaaagacaaactgccattaccacactctatacaattactatacatacgccttgccatcaaacctacc

SEQ ID NO: 62653 - DNA, 189 bp, Glycine max
  Clone ID: PAT_MRT3847_27590C.1
ggccgagcggccgctcgcgatctagaaccgttttcgtgttttgacccgcaaaattctaccggtaaattggctgagtaaaacatttttatgactcaaatttgcctgcctatcgcatatacaaaaacaaaggtcccttcacgtgagaaagagccggtagttcccaatcgcaccccacagacgaacccgaag

SEQ ID NO: 62654 - DNA, 657 bp, Glycine max
  unsure (1)..(657): unsure at all n locations
  Clone ID: PAT_MRT3847_27591C.1
attctcgggtcgacccacgcgtccgcccacgcgtccgcgcaatggccttttctaagctcagcatgcttgcacagcaaaggggtgatgcttatgcaaatgcagatgtaagggtttctctggaagagattgcatgtaaacaaggtcatgatgatgtctctaagctgacacctactgatattgcaattgagtcacttcataagatcgagagcttcgtcatcgagcacactgctgatagttcagctagcgacgcgcaagctgagtcgcagatccagaggatacagaccttgtagaaccttaatccctttgtttgccacatagagcatcgttgagttatttgtaaaggaatggaagaagggagctaataatccgaagtgtgccgttggctgaaacatcgcctgtcttcactcctggctctgcttctgttcgcttctcatcgtggtttgataccttggtggacatctatgctgacacctcatctcaccaaacatacttgcataccgtcgtcgcccgctcgaacgaagaaacanagtgccgtttggttcatatatttgtaatgtgatgggtaactgataatgttaaatcatatntgttttagtccaaccgtaatcagataccatactagatatcagtctatatgtaatgagtaactgataatgt

SEQ ID NO: 62655 - DNA, 349 bp, Glycine max
  Clone ID: PAT_MRT3847_27592C.1
ggggaaaaacaaatttgggggggatcttttaaaccgggaaaggaccccccccgaaaaaattttgaacaaaaaaccccggggtttaaggggtttaaaaaagggccacccgcccccccttaaaaaaaaactttgggaaaaaaaaacccccttttaaagggggctaaacccaagggacccccggggttcaggggtcaaaaaaatttttgggggggaaacccaaccccgggctttaattggggaaaaacacccctttaacaagggttgacaacccgaagggggggggcccctcccggaatggcaaaaaaaacattggggaaataaacccccttccaaacaaaaacaattttcc

SEQ ID NO: 62656 - DNA, 174 bp, Glycine max
  Clone ID: PAT_MRT3847_27593C.1
taaagaaaaaagcattctctgatggtgaacattatgaccgtcccataaagataagatcccgatcaggaaccacatcatgtcttgggtctcactcgaggtgggggtcccccaaaacttgaattataatttccccggttctctcggcgattcttgagggacaaattttataaacat

SEQ ID NO: 62657 - DNA, 885 bp, Glycine max
  Clone ID: PAT_MRT3847_27594C.1
ctgagtgcggcgcacagaacccgttgaaggcttgaagccaccccgacgccgtcgaagagagagcgagcaacaatgtcagacagagaagacaacgctcactcgtgaaggcgcggagaaccagttgaaggcttgaagccaccccgacgccggcgaagagagtaagagcaacaatgtctgacagagaagacaacgcccccgaggaattcacaaccgaacagggtatacaacaagacgaagagattcggaggattcaaagagaaaataaggccagggttgttcgtgaaggaaaagagcgtaggaggagatgggcccaaaaaataactcctcgaccatccaaagctggtaaaaaatctgaagatgtagaagactctgaaccacagcaagaatcaaatacagcagcaggatttcttcctgacaacattgtccaaatgcttgcagctcgtgagaaacaagttttcttatctgacaacaatgaggagaaagatgaaataaagcctaccacttctaggaagagaaaatcaaggaaatcaggtttgaaacctgttattttgagcgaaataggtcctcctccatgcttaaacagtgccttagatttcttgaagaagaagcaaatgtcagttcaaagatcttcttcggttttgaataattctaacaaagcatttcgtctcctttctcggtcaggggtgcttcgcagtaaatgaggattttcatttatttataaactttgttttttgctaagtgaggttagagttgcaatatttatttttaacctgttagcattggtgctgctgttggtctactgtactgtgtaacctaaagacatccttatgttttgtttggattagatgtgaaatacaaacaaaagaaaataaatagtaaggatat

SEQ ID NO: 62658 - DNA, 320 bp, Glycine max
  Clone ID: PAT_MRT3847_27595C.1
cctctatgttgtccaggcctgtagagaaggtccataatttattggagaacaacatgaacaacataagccatctggatcagttaagtgatgaagaaaggagcaagttaagggatttaagtaaacatacactggactcatggattgagatgacatcgggtacaaagaagatcatggagaagtattctgtgaatacttgcggctattgtcctgaggtccaggttggtcgcaaagaacataagttgagaatgtgcaaggcttcaaatcatcagtctcgaaatggtttacatgcatgataagaggcaacattaaatgatcttgtc

SEQ ID NO: 62659 - DNA, 488 bp, Glycine max
  Clone ID: PAT_MRT3847_27596C.1
aaaaaaaaggaaactcaatgatgtgcacattagcataaaggatttgacagagaattcaacacaaatcaataaaggtcagaatctaaagaacttcaaaacaattctcccagtaacaggaaatcaacaggggcattaattcatcaagaagcatacaaaatccgactatcgaagccttgtatttcctatagatgttccaaatgctcaattacaagttatgaaatgcaacttttagtctattaatctgcatgctttggcgctgcctttgctttttctagaagctcatccgggaccttctcatgttggcggtttgactcatcacacacccagctcatttctagctcaaaatctttgtcctttgcctcatcatgaactccatatataattttagccacttcaataaccccttgtcgacatgtcatatcagcaagctttaacttttcaatctctgttttagcagcctgcctgcccttcccaattgcagcaccgaa

SEQ ID NO: 62660 - DNA, 1062 bp, Glycine max
  Clone ID: PAT_MRT3847_27597C.1
tttttttttttttttcaacacaaatcaataaaggtcagcttctatagaacttcaaaacaattgtccaagaaacaggaaatcaataagggcattaaatcatcaagaagaatacaatatccaactatcgaagccttgtgtttcctatagatgtttcaaatgctcaattacaaagttatgaaatacaactttgaaataaacatttctagtccattaatctgcatccatttcttcaagagctgctttggccgctgcctttgctaattcaagaagctcatctggtaccttctcatgttggcggtttgattcatcacacacccagctcatttctaattcgaaatctttgtccttggcctcgtcatgaactccatatataattttagccacttcaataagcccttgtcgacatgtcatatcagcaagctttaacttttcaatctctgttttagcagcctgcctgcccttgccaattgcagcaccgaaatatctataagaaacaccagaaggttcgaccatgtacaactgtggttcatccctgtcataacctcctagtatgacaccacatccaaaaggtctgagccaccaatatagcgtacagaggtgcacataactagccacacggtcagcaagttccttaacaggaattggttcgccatatacactgtcatagttagttgcttcagacttggccctagcaacaatttgcctgccatcagctgctaatcctgctacagccatcccagagtgacgatgaacggagtgtattcttctattggaacccggaagcatcattttcgacggaataagcttctcaacgcccaacacaaccccatctttgcacttgatcccaataacagtcccgctgttatcgacggctttggcagcatactcgatctggaaaacacggccatcgggggagaaagtggtgacggagagatcgtaacctgttccgatgctgctcatctttttcggatgctggttttactttcgctggattttcttctttcttctttgagtttggctgtgctcaaccacagaggaatgtgaagagtattaagggggtca

SEQ ID NO: 62661 - DNA, 2343 bp, Glycine max
  Clone ID: PAT_MRT3847_27598C.1
gaaaggaaaaaaaaaaagttgtactttttgctaacaaaaggcaatcgctaaaatacgaaaaattacatgttattgtgacaggacagtccattaaaagctatttcagatggtcttggcaattctttcaacatcaacacaacatcccaagtgaggtaggccaccacatagggctcactttttatcttggcatcttaagaaaagtatgaaaaacgaatgataaacgaacacattaaattgttctgagtttcctagcaagaaaagggtacttgcttgcttctctggctcctaacatcagattcaggtcactcgggggtaaataaataaactttcttttgaggaggggggggaggggggggtggtgagaaagggttaaactaaaattaactctaacatcacaaaaaacccaaataaaaatcaaatatgaagtgaattatggccatggcctaataatgggtccggtcatgtttcttctcattaaagtgtgcaacaaatcatctcaaccacctcctaaggtcacctgttgaagaaggagaaacctcaccaccaccaccaccaatactctcagtgtagcaagaggagtagtttgattgttgctctaaccctccaaagtgtgatccactcacactcttgaagcttggactccttaaactatgtccatagtttccataactcactcccacaccataagggtcaggagcaggaaaagaaagccttttctttgctgatccaaccctgtccctctctggtgtggatggcctctgcctcggcgcgctttgcgaccgaattcgagcctttgcagactcagttgccgccatgtaattaggcaatgtagcagtagcaccaccactactagttccagttgaaacaatccttccattttggtacaagtttcctgtgtagtggtaattagacctcaagcttggtgtttggccaaagcagctcttgaagaaatggatgcagattaatggactagaaatgtttatttcaaagttgtatttcataactttgtaattgagcatttgaaacatctataggaaacacaaggcttcgatagttggatattgtattcttcttgatgatttaatgcccttattgatttcctgtttcttggacaattgttttgaagttctatagaagctgacctttattgattcgtgttgaataaaggaaactcaatgctgtgcacattagcataaaggatttgacagagaattcaacacaaatcaataaaggtcagaatctaaagaacttcaaaacaattctcccagtaacaggaaatcaacaagggcattaattcatcaagaagcatacaaaatccgactatcgaagccttgtatttcctatagatgttccaaatgctcaattacaagttatgaaatgcaactttgaaataaacatttctagtctattaatctgcatccatttcttcaagagctgctttggcagctgcctttgcttcttctagaagctcatccgggaccttctcatgttggcggtttgactcatcacacacccagctcatttctagctcaaaatctttgtcctttgcctcatcatgaactccatatataattttagccacttcaataaccccttgtcgacatgtcatatcagcaagctttaacttttcaatctctgttttagcagcctgcctgcccttcccaattgcagcaccgaaatatctataggaaacaccggaaggttcaaccatgtacaactgtggtccatccctgtcataacctcctagtatgacaccacatccaaaaggtctgcagccaccaatatagatctgagccaccaatatagcgtacagaggtgcacataactagccacacggtcagcaagttccttaacaggaattggttcgccatatacgctgtcatagttagtagcttcagacttagccctggcaacaatttgtctgccatcagctgctaatcctgctacagccatcccagagtgacgatgaacggagtgtattcttctattggaacccggaagcatcattttcgacggaataagcttctcaacgcccaacacaaccccatctttgcacttgatcccaataacagtcccgctgttgtcgacggctttagcggcatactcgatctggaaaacgcggccatcaggggagaaagtggtgaccgatagatcgtaacctgtaccgatgctactcatctttttcgaatgctgactttagtttcgcttctttttcttctttcttctgtgagtttcgttgtgcagcaccccagaggaatgaagaatataaaggggatctttgcttgctcaagagtttaactgcgtgactaaaaagttagtaaattgtacagatcgcctcgagcc

SEQ ID NO: 62662 - DNA, 449 bp, Glycine max
  unsure (1)..(449): unsure at all n locations
  Clone ID: PAT_MRT3847_27599C.1
gaaaaggtttcactttcaccgtacccttcatctctctttctcattctcattctcattccctatgccaatggcggtgaaacaatcgcaaccgggagatccaaaacccattctttcgcacaatgaagaataataaatcacccttctccgccgccaccttcactctcttcaacgctaccctgttaatcctctcttcactatcaccaactcatgccctcggttctgccgccaccctcgctgccacctcctccgccgtatgcggcatggtggcatcggagccgacgcggcgcattgcgtgctaccgccacggcgaagtcgtcgccgtcgcccccaacgtttcgttctcggcgatctccggcggccggagctacttctgcggccttcgctccggcaactacagcctnctctgctgggacaccctcttcggcttccaaagcaagaggctttacaac

SEQ ID NO: 62663 - DNA, 292 bp, Glycine max
  Clone ID: PAT_MRT3847_2759C.1
tttttaataacataaactaaaaattgggggggttattataccatctttggatacactccacaaataaaaatatacaaactgctactacctcaagttcattttacaacttatatataatactatcaccataaaacccaaatataggtccgaactacatattttcacttcaaaaataaaataacttctataaaattaaaagccattctctttttaaccccaatgacaatcacactattctctttgtaacatttcaaaccttcttacataccaagggcagtaatttatctatata

SEQ ID NO: 62664 - DNA, 256 bp, Glycine max
  Clone ID: PAT_MRT3847_275C.1
tgaagatctgaaattctggattcttaactggaatcagggttttggttttttgtcattatcttcctcagtaagcagtgtactctcccgcggagttttgtcgctctcttccgccaataacgacggcatatggcaccgtttggctgttggctacagcagcttagcatcttgggttatgtcatccagcttagcattgcagtcattctgctgataaattgtcctacggtttttgggtttgtaggattttcacaaagttgtt

SEQ ID NO: 62665 - DNA, 259 bp, Glycine max
  Clone ID: PAT_MRT3847_27600C.1
gttacatgcttttctcgcaaaggcaaaaatttaacctccaaaaccttacaaaagtttcaaaacaaatgcaatgcctttcacaaagcacactttaagggctttctattcttatttaaattggtactttccccatcaccaattaccattgtttaatctttttaatatccaccacacttataggcattttattttttttttcgctacgataaacctttaccttacttttttttgcccttaccaatttttcacttttcttttt

SEQ ID NO: 62666 - DNA, 145 bp, Glycine max
  Clone ID: PAT_MRT3847_27601C.1
gattttattcaagtttagcccagtggggtttttgttttgcccaagtcctgcccctatattgtaaaaggtctagctcctgctttaacgggatggtggggttcaaaaatatctaccaatacctcgggaaagcctaaaccactggctg

SEQ ID NO: 62667 - DNA, 340 bp, Glycine max
  Clone ID: PAT_MRT3847_27602C.1
gctgcgcgaacacgccggtgggggatgacaaccaatgggatcacgacttaaataccatcggatgttggggcattgacggacatgtgctcaccttaaacctccatgaaaaagtcaatatggagaaccgtgctctctctcagctccttctcgggatgggcccaaagcttgtcaacaagcatgacggatatagaagaaccgaggatcgtacctggatcgatgtgtgaattagcgtataataaatataagcgatggcaacggtggtgccttgtgacactcagcatagcctgtcttatagtagggcaatctgctattgttatccttggcagattgtatcatgatc

SEQ ID NO: 62668 - DNA, 385 bp, Glycine max
  Clone ID: PAT_MRT3847_27603C.1
cagaagttgaagaggaagaagaaggtgatgttgtggcttatttagtgccttcttggtcaacattatccattgaagtttttaatagttattggtctgtttgtcaggtagaaggctaacattgaagttgctcatctctctacagctggcaagagttatggtgtagatagaacgacaaacaacctggctgctgctgttgatgctgagttaagtgaattggtgccggaatccacttttttagattctgaacaagttggtgacagtgcatcaaacaaccagactgatgctgtgaatgctgaatcaagtgaattggttccagaatccacttgtttagagtctgaacaagttagttatagtgcaacaaacaaccagactgatgctgtggatg

SEQ ID NO: 62669 - DNA, 142 bp, Glycine max
  Clone ID: PAT_MRT3847_27604C.1
ccaccaggtaataataatacacgtagtacacttatactacagaacgtacacaacatctgatggaaagtaaaacatagcatacacactagtcaaactagaaaatgattatcttccttctttctgcaagttatttgaagccaca

SEQ ID NO: 62670 - DNA, 524 bp, Glycine max
  unsure (1)..(524): unsure at all n locations
  Clone ID: PAT_MRT3847_27605C.1
accggntcgaataccgggtcgacgacgcgtccgaagacacactcgttcatatatctctctgctcttctcttctcttctacctctcaaggtacttttcttctccctctaccaaatcctagattccgtggttcaatttcggatcttgcacttctggtttgctttgccttgctttttcctcaactgggtccatctaggatccatgtgaaactctactctttctttaatatctgcggaatacgcgtttgactttcagatctagtcgaaatcatttcataattgcctttctttcttttagcttatgagaaataaaatcactttttttttatttcaaaataaaccttgggccttgtgctgactgagatggggtttggtgattacagaattttagcgaattttgtaattgtacttgtttgtctgtagttttgttttgttttcttgtttctcatacattccttaggcttcaattttattcgagtataggtcacaataggaattcaaactttgagcaggggaattaatccctt

SEQ ID NO: 62671 - DNA, 411 bp, Glycine max
  Clone ID: PAT_MRT3847_27606C.1
cccacgcgtccgaaaaaaaaaaaaaaaaaaaaaaaaaaaaaaaaaaaaaaaaaaaaaaaaaaaaaaaaaaaaaaaaaaaaaaaaaaaaaaagggcgaaacaaacaaaaggaaccaaacttaaaaacgcgggcatggaacgaaataactctactatagggacccctaaatttagaaaaatggccgtggtaaaacaccggctaaactggaaaaacccgggtgttaccaaacttaattgcctggaaaaaaatcaccctttaacaggctggcctaaaagccaaaaggccacaatggatcacctttaaaaacaaatgggaagccccaagggacaacggaacaagccctgaggcagagcataaaacgcacagggagtggcgtatactcgcaagataactactaccctttccatggct

SEQ ID NO: 62672 - DNA, 244 bp, Glycine max
  Clone ID: PAT_MRT3847_27607C.1
cttttctaaggggctgccatttttggtagcctccctattctattacattgaatagaatatgaaaaagaaaaagaagattctaaagaaatctccctactattctttagaataatccaaaagaatatcaaattcaaataagttctacatagacgaaagacttaggaagggggatgcgagatgcgagatctaacaacatctgtctccaggggaccaatcactatggctctatggttcgcggctctct

SEQ ID NO: 62673 - DNA, 253 bp, Glycine max
  Clone ID: PAT_MRT3847_27608C.1
aataaattaatgacataaaaaggaaattaataattaacatgttttttatataaaggaaaaaaatgtacatatttattttgtgtaaaaagcactaaaggtggtaatagttaatgtaaagtaaatttttaaaagtttatttcttaaggtaaataaaacaattactcgatgtgtgtgtatatatatatatacacacacatcgtgtaattgttttatttcccttaagaaatagagttttaaatggaactcgtgcata

SEQ ID NO: 62674 - DNA, 721 bp, Glycine max
  Clone ID: PAT_MRT3847_27609C.1
ccctcgcgtccgctaaaaaccttaatggaaaaagggtaaatgaccttaaccagtgaaacaaaagtttagggactaaatcaaatttcgaaaaagtttagtgactaaaaacttagttaacccatatttttattaggctcatgattctaataatttgtattcaattttgatgtataaggctataagttttttaagttatgtaatcatatgtctctgcctcaaaagatgtttgacctcttggaatttagtattgtagtcaaatttttttatgatatattaacacagaattgaaagatggtgtaaaatcattttcattgttagtagacaaacttaaaatcattgtatttctctgaaatgaattatgaatggctgatttgcatgaagtttgcaactatattgttaattttgagtaactcatggaaggggaccactatatgtagcttgatagctgattctttcaagcagtcaggcagttatgtagctcttgcagttggagttttaaccatcaccagtcttaagtactccttattcagaacaagatgttaaattgcaactaagcattgtgtactttgtcttttacatgtttaggtgtggctctcaatgtgagccctgttgacggacactaatcctgacgaatcctttggtccatgaaattgaccacatgtacgagacagacaggagcagctacgagtcagctgacacaagctggacgcagaataatgca

SEQ ID NO: 62675 - DNA, 227 bp, Glycine max
  unsure (1)..(227): unsure at all n locations
  Clone ID: PAT_MRT3847_2760C.1
ctnggantnatattcatgtnagcggtgtcncctttgaggagcacaaganatgnaggagggcnaagngagntattngagagtgtcncaattggaaccgatgattttgctgacctttccgnagggaacntgcntgnnagctcaacntcgataanttctcntgngnntcaatgntgatggngatgtctnccggatctggagatggacctaagatgcttgggaagtctccc

SEQ ID NO: 62676 - DNA, 273 bp, Glycine max
  Clone ID: PAT_MRT3847_27610C.1
atgaggttcaatgattggttttgctgctgttaataatgcagttacagttgaagaagtggaggcattgcatgtgctgtttaaaaggttaagtagctccctgattgatgatgactcgattcacaaggaggagcttcaattggcactgtttcagaccccatatgggaaaaatcttttcctagatcgagtttttgatgttttcgaccaaaaaagaaacggtgtaatcgagtttgacgaatttgtccacgccctcagtgttttccatccatatgcccc

SEQ ID NO: 62677 - DNA, 1017 bp, Glycine max
  Clone ID: PAT_MRT3847_27611C.1
aattaaaaaaatgtttataaatgtttccagctagagtttgaagcacagacaacaaaacaaaaagtcaaaaggatgatgaacaaacatgataaggctcaccttaaaggtaaaatacacagatggctaatccagtgctagactttaccattgcatagaatgtatctgtcaagatgtttcagctgtagatatacctctaattgtcaagatgtttcagatggctaatccagtgctagactttaccattacaaactacaacacatgtaagtctgcatgatattttgaaaggaatgtgaactttcatatgactttggcctttctatagtcagtttattgtgtatggttcttatgccaaaagcaacatacaacacagttgtacttgaaaatctgatatctcctaaaagaatgaaaccgtgtcaactaacctgcaaaacttgtgttacaagtccaacacaactcctcccaaaatgaaagtattcaagttacaacaaaaggctcactgaaaggcccaataaaatcgcactcgggaaaaacaaaggctcaatcaagaaacatataaaacacaatggcgatgtagcataaggatcaccgaagagaacagtgcccagagaaaggttgcccaccaagccaaaaagaaagccacctccttgaagaaagcaaagccgggcagtaaatcattcaacatcgcaaaatttccaaaggaaacaccatcatcaatctgagacaatccaagaaagagaagcaccagcacaggagggccaaggaattgcaaaaccacaaggcacaagtagtgattatgcagaaacatcttcgccctactgtaatccaagtcaggaaccttgctagcatgaagcctttggtaccaagacaacaaagcttcattcagatacatctgcaggttaggcctcaaagccacaatctgcaacaaaccagaccccaacaagcaccacttcctgaagctaccaaaatcagaaggcaagaaccccacattccccaccaatttctcggccggacgcgtgg

SEQ ID NO: 62678 - DNA, 359 bp, Glycine max
  Clone ID: PAT_MRT3847_27612C.1
aacataccacacactcttcacatgctcaccatcaatatgagagggagtgaaatatcaagctgaccaacgcatactcaagaagaggcgcatgcctccttttccttactgcataaggctagccaacagacgcccaatttcacgattgtgcaatcatgccgaggattccgaattttctgaagatctgcggggacctgtggagcagaactagctggcatccgagtgttaccacattcttgcaaaatttccagagatttccaacagacatatcaactgctggggactgtttgcgatggtccataacgaaacccaagtgccattgaaccccgactggcccactctatactccccattttacagcc

SEQ ID NO: 62679 - DNA, 547 bp, Glycine max
  Clone ID: PAT_MRT3847_27613C.1
cctcgtgccgaatggaggaagagaaatttgagcttgtacagtaatccgttgggttttcatgaaattaaagataagtttgaagagagtgaagacaatggcctggatttggagctgaggcttggtcatcatccatagcatgcatatgcatatcatgctatatatatatatatatatatcaagcatatatatagatatatatatatatatatatatatatgtgcgcgctttttgagctctatcttatgacaattgtatagagatggcttgaagcagcaggaaatcaaagctcatgtggggcttcttctagtgaaaggtacccaggattcttatgaggaagttactactcaaataatttatctcatgaaaataatgtctagcactgaatctcactacccatgatttacaccagaagtactactgaagttactaattatgtgaatgtttcttttggtactcatttttgttcagttttttggtacgcagctccttgcttgttacaataaaaattaggtaattatttaaaaaaaaaaaaaaaaaaaaaaaaaaa

SEQ ID NO: 62680 - DNA, 177 bp, Glycine max
  Clone ID: PAT_MRT3847_27614C.1
tcgacctacacgtacgcgtacgcgtaatagccagctacgtccaacacattgcatgattcgaatcctgattgccacagcttcttatgggggcgtgaaacctatcaagtcaggaatatgccgatccttcattaatcataaccgtgtgatcaaaacaaaattaacgccactctaggactt

SEQ ID NO: 62681 - DNA, 261 bp, Glycine max
  unsure (1)..(261): unsure at all n locations
  Clone ID: PAT_MRT3847_27615C.1
agtgaagagagcaaattacattatttatagttctatgaaaagggagagaatttgttaagaggaatatcataataaacaatattcagtgtcatgtaattgtagctgacctcggctagtggaacaggacttttgttgttgttgtggtatggtcacaactcaccaagnnaccaagncaccaggngcaatnaaaacggtggaccattggataattaacactcattcacgcttttttaatttaaaaatttgcctaaaaatcccccc

SEQ ID NO: 62682 - DNA, 1081 bp, Glycine max
  unsure (1)..(1081): unsure at all n locations
  Clone ID: PAT_MRT3847_27616C.1
cggacttgtgggcggacgcgtgggtaaatttttagggttttataatccacattcttcgggttcgggcaagaagagagagaagacgcaattttgaccctcaatttcacagacctttaatcattcacgcgattcttcttgaaatctggttttggggcaatctccgtatttcgatattctggtgattatggaagcagattatggaaaggattgcaccaaatctgagaatagagaaaatctttcagttccccctggttttacgtccctgacatctttcattttgaaaagggatggaaatgttaagaaaagtgataaatctacagcctttcaaattgcatccgaacaagagccaatattcatggagactattcctgagatgaatgacattagtgcttatagacaggttcttatgcatcggccgtggataatcgcagaccagagcaatcaccacaaacttgaggaatctcacataaagcatcttcctatggatccccctttaaatgatggtcgtccaaaagggatcatacatggatgtccaaactgcagtaattgtgtgaaggtaacagcaaggtggcatcctgaggatgctataagagaagttttggaagaagctcctactttccacccaacagaagaggaattcanagacacacttaaatatattgcaagcatacgttccagagcagaaccttatggagcgtgcgattgtccctcctacttgctggaaaccaccatgctctcttgagaaaaagaacatatgggaaaagtctgaatttgttgctcagattcagcgaattgatggacaccaacttcagcatgcacaagaaattatggctagtgctagtggaaatacaaaaaccaagagaaaaagagatgtaaaagtagctttagactctcagcttggtaatagaaacaccagcactccaaataaccagaatgttcaaaaatgtgactgtgagtctgaacctggtcctaaattcagtctcaaaacattaaagaaatatgcagacatatttaagagtcagtactttgtttacaaggataagaagaagatcacaggttccaatataaaattagctataca

SEQ ID NO: 62683 - DNA, 254 bp, Glycine max
  Clone ID: PAT_MRT3847_27617C.1
tctgaattctgctcgagggaaacgtgcacttgttagccgcatgcttcagtatgttcttgaccatgttgtgttgcaaatcccatttcctgacattgtcataaaacgaactttggaaggcaaaccctatttggattattatgataaatttgatcttagattcccaaattttaatttcaatgtatctcatcatggtgactatgtggccatagcatctgaacctgtatgtcttgtgggggtagacattgtctcctatg

SEQ ID NO: 62684 - DNA, 1085 bp, Glycine max
  Clone ID: PAT_MRT3847_27618C.1
gagataactgtctccatgcactttctttcatggccgttcttttctccaatctcatcagcatcaccaacaacaccaaaccctgcttctctttcacctcaaaacccataatttgtggggccaagaacctcacttccaaacggagcctcatccttcaaactcctctggtctgcattggcattggcctaactcctcaagtctcagttgcgcaatcttcacctcaagagtcgtcgccgtccaaatcgcttctttctagcattgaaaacacgacatcttggtttcagttctacggtgatgggtttgccattcgagtcccaccggagtttaaggatatcacggaacctgaggatttggatgctggacagtctctttatggggacaaggcaaagacaaagactttttcagcacggtttgcatcttccgatggatcagagattctaagtgttgttactaagccaaccaatcaacttaaaatcaccttcttacaggctcagaatataactgatttaggttccctgaaggaagcagcaaaaatttttgttccagggggctcaaaaatttattctgcaagatcaataaaaataaaggaagatgagggttttacgacttactatttctatgaatttggtagagataaccagcacgtagcattgatggcaggggtcagcagtggaaaggcttttattgctggagcaactgcaccacagtccaagtgggacagcgatggtgtaaaacttcgttctgctgcaatatcattaaaaattctgtagactgtagccatgtactgaatttttttatctgggtatgtccactcattatttcaacacttcagtgatatggtttttaatattttcatgtatacatgtagtgtaatactgtcttctattttgattcaagatttttatataaacttcatagagtattgaaatagcatatgttttcctgtttctttttataagttactgaggtttgattctcacttactggtctttaaaagagaaaatgtattaagctgtttctcttaaaaaaaaaaaaaaaaaaaaaaaaaaaaaaaaaaaaaaaaaaaaaaaaaaaaaaaaaaaaaaaaa

SEQ ID NO: 62685 - DNA, 156 bp, Glycine max
  Clone ID: PAT_MRT3847_27619C.1
cacacatcttattgctaataatacaccacctttagcaacccagggcatatgtataaatcctactcctctatatttcatacatcacccaacaactaacccattttacttcttaaaaacatgcattgcttcgtcctctatcacctctgttgaaacaac

SEQ ID NO: 62686 - DNA, 451 bp, Glycine max
  Clone ID: PAT_MRT3847_2761C.1
gaaagaggtgccccataagcaaagccatagtagcataatagcaatgcctcaagaacgacaatgctcaattcagagttgtgtgcagcgtgtcgtctgatagcacgtaccaagtccctccaacttcaccatcaccgccacgtgcgtcactgcttccccttcttcttcttaaaccgcaatcccactcttcaggtttcacccttggctctcttccttgtgcaacgcgaaatcactcatcaccacgcgcctcttctccagctactactccctcgaacaggtctctgatgacgaatacgactgcgacttcgagaaccaacagtgagttgtttggaaaagtggttgttgctagcaaggtgcctcttcctaactactgtccagatttggatgacaaacgtccacaaagagaggtaataacttgggtgggaccagtgggtatggaacttcaacttatacc

SEQ ID NO: 62687 - DNA, 416 bp, Glycine max
  Clone ID: PAT_MRT3847_27620C.1
acgtggacaagctcataacaaggcttgtgtcaagggatgaggctcatattgtgttaatggagctaatgaaatggagaacgcaagggcttgatcctgtgtatgctcgtgctgtgcatatgaaggaaagagatcctgttactgggaaaatgaggcttgtgaatccacaaagtagtagacttgtgtgggaaacttatctcaccgagtttaagtccctgggaagagttgcagttaggctgattttccttcatgcaacctcgcgtggtttcaaatgtaattggtcttcgtggagatgggtgtgtagccaaggaaactccagagcagcactcgatagggcgcacaagttgatatttattgcagctcattccaaattcgaaagaaaggatttttccactgatgaagagaagaatgcggagttg

SEQ ID NO: 62688 - DNA, 215 bp, Glycine max
  Clone ID: PAT_MRT3847_27621C.1
cgataatatacaaaatttttagtctcaggggcaaatacacaggactgggggtttaatgatgaggagagaggggggaaaaccatctacaatttaacataacacaggctctttaaagacaaggcaaagaaccatgttgacgatcggcgagtgaagttcttggatctgcaatgaggcacaaaggagagccatactatagatgctggactaatggagga

SEQ ID NO: 62689 - DNA, 196 bp, Glycine max
  Clone ID: PAT_MRT3847_27622C.1
acgcgctgaagaaaatgtggaaccaagagagccatcatccttctctttctgggtgccacatacggcggcgaacctctcttgggacaaggtagaaaacatctacctttctgacctcaacgagattgaaatagacgccttgactgaactcaagtcaaatctcgaacaatctatctcggcgaacaccctttttgattca

SEQ ID NO: 62690 - DNA, 441 bp, Glycine max
  Clone ID: PAT_MRT3847_27623C.1
ctcagcaaatggaggggtaaaaccgaaaaccaacgacatattgtgacgccggggaacggctaaaataaataggcacggcttgtattgttaggcaaagcgggtaggctatcccagccaaaaaaatggttgtgaacagaactaaagaccgggggggcaagccagctcaaaaacagacaatgaaaggaaatggaaaactgggagggcaacaaacgcaggaaggctgcaaacaacctagaaaggtgaacagcactctaagcagccaccagagctcagtcggacccgtgggtgtgcccgggaaagccggcccgggacctgcgggcgtaacagctaagggggtagggagccaacttcaatggagacaaaatcaaggtcatagtctgaacctgtgggaaaatgactgaagcatccaactccgcacactatacgacccgtgcggataaa

SEQ ID NO: 62691 - DNA, 245 bp, Glycine max
  Clone ID: PAT_MRT3847_27624C.1
gtcgagccgattcggctcgagcgattgctcctctgatactttgtcacatacagacttcaggtccagtcatttccttttagagggtcttgagtcttgaagttccttattagataagagttatgcgaatcccttcagagaatctccaatatcgaatagttgaggcaaacccaaatccagttcacttcgtattcgttcaacaactcgtcacctgaaccgatgcatgtgagaggcgcagaacgacttcg

SEQ ID NO: 62692 - DNA, 852 bp, Glycine max
  Clone ID: PAT_MRT3847_27625C.1
agggattggagaaaattgagaacctccagagtcatgacaacacagagatttacgaaaaggcggtcaagattcttgagacatactggttggaggaggaagatgagactatgcctccaggggatgcttctcagtcagggttcaactttggtagcagtgacgctcctgctgtgccgtccggtggattcaactttaattagaagatattcatgctctactgggaatttcttcaattgcaggagttttggttggtctatctgtgaagtcctcctttatgacacgacagcagttgggggacaagtcaacgtcttgtcattgtcctaatgtccttgggttgtacgaggtccagcaagtaaatacatggttgctggactgccttgggtttttgcaatgcctgatatttcatatctcatggtgtaaaatgctttgtggctatatttttttgccaccgtagagaatactagagtcttctttctgccaagtgatcatttcatagaattaatgaatgctcagtctcgtgatttttttttcctttgttatatatgtcctagattggagtaaaaagttacgattgttggttttttggcaaatgccaaatgctactgcctatccattagttacaaggaacgttttggagtctttcttttatcctattcctttgtaagcttttttggttgaaaaagttccattatccatcacgttatgtaggtcccggtacatgtagtacttcaacttgggagttggggctatgttttcaaaagaaaatatgctgtaattaattgtgtatgctcggtgctattagcctattatttctatccgttcaatgctagttgtatactaacttaatgttttctc

SEQ ID NO: 62693 - DNA, 2371 bp, Glycine max
  Clone ID: PAT_MRT3847_27626C.1
cgggccggattacccgtcgacccacgcgtccgaaaaagaaacccaaaatctcttcggctctctctcttttccatatccatatatatccccaaaccctaccgttaggttccccaattcaacaccccgtgggccggtgcgctgcttctttgttcgtacggtttccgtcgattgcctccgaaacgatgtcgtatcgcccaagcgggaactccaggaccgaggtccgccgcaaccggtacaaggtggcggtggacgcggacgaaggtcggagacgacgagaggacacgatggtggagatccgcaagaaccgcagagaagagagtttgcagaagaagaggcgcgaaggattccaacctcagcagatacctgcgtccgttcactctagtttggtagagaagaagttggaacacctaccatctatggttactggtgtttggactgatgataataacctgcagctcgaggcgacgacgcagttccggaagctgctttcgattgaacgtagtccgccgattgaggaggttatacagactggtgtggtttctcgctttgttgagtttctcatgagggaagactttccacagttgcagtttgaggcagcctgggctttgacaaatatagcttctgggacgtctgaaaacaccaaggttgtcattgatcacggggctgtcccaattttcgtgaagctacttgcttctcctagtgatgatgtccgtgaacaggcagtgtgggcattaggcaatgtcgcgggggattcacctagatgtcgtgatcttgttctcagtcatggggctttgcttcctttgttggcacaattaaatgaacatgccaagctttctatgcttagaaatgctacctggacactttcaaacttctgcaggggcaagccacagcctccttttgatcaggttaaacctgcacttcctgctcttgcccgtcttatccattcaaacgatgaagaagtattgactgatgcatgttgggcactgtcatatctttctgatggcacaaatgataaaattcaagctgtaattgaagctggtgtttgtccccgacttgttgagctgctgctgcacccatccccttcagtgctaattcctgctcttcgaactgttggaaatattgtcactggagatgatatgcagactcaggttatcatcaatcaccaggctcttccttgccttcttaatctgttgaccaataattataaaaaaagcatcaagaaggaagcttgttggaccatatcaaacatcacagctggtaataaacagcagattcaggctgtgattgaggctaatctaattgctcctttggtcaatctgcttcaaaatgctgagtttgatatcaagaaagaagctgcttgggctatctcaaatgctacatccggtggttctcatgaacaaatcaagttcctagtaagccaagggtgtattaagcccttgtgtgatcttctcatctgtcctgatcctagaattgttacagtttgtctggaaggccttgaaaacatcttgaaggtgggagaagctgataaaaacataggaaatactggtgatgtgaatctatatgcccaaatgattgatgaagctgagggattggagaaaattgagaacctccagagtcatgacaacacagagatttacgaaaaggcggtcaagattcttgagacatactggttggaggaggaagatgagactatgcctccaggggatgcttctcagtcagggttcaactttggtagcagtgacgctcctgctgtgccgtccggtggattcaactttaattagaagatattcatgctctactggggagttttggttggtctatctgtgaagtcctcctttatgacacgacagcagttgggggacaagtcaacgtcttgtcattgtcctaatgtccttgggttgtacgaggtccagcaagtaaatacatggttgctggactgccttgggtttttgcaatgcctgatatttcatatctcatggtgtaaaatgctttgtggctatatttttttgccaccgtagagaatactagagtcttctttctgccaagtgatcatttcatagaattaatgaatgctcagtctcgtgatttttttttcctttgttatatatgtcctagattggagtaaaaagttacgattgttggtttttttggcaaatgccaaatgctactgcctatccattagttacaaggaacgttttggagtctttcttttatcctcttcctttgtaagcttttttagttgacgtttaccccaaagttccatttctcatcacgttatgtaggccccggtacatttacattatttatttagtacttcaacttgggactatgttttcaaaagaaaacatgctgcaattattgtgtagtctct

SEQ ID NO: 62694 - DNA, 3043 bp, Glycine max
  Clone ID: PAT_MRT3847_27627C.1
ccacgcgtccgctctgcactaaatattattgcccagatctcattgttagaggaatgcgggtttcttgagagagctctggaggagttgcacaaaaaagaatctaaaattgttgataaacttgtatacaaagaacaagaggtttcacttttagtaaagcttggtcacctagaagaaggcgaagctttgtaccaggcattactttccatgaatcctgataattatagatattatgaaggtctccaaaagtgtgttggattatatttaggtccgggccagtactctcctgatcaaatagatcggttagattcattgtacaaaacacttgtacaacaatataagtggtcttctgctgttaagagaataccactagattttctacaaggtgacaaatttcgagaagcagcagacaattatattaggcctctcctaaccaagggagttccatctctgttctctgatctatcatctttgtacaatcatcctgggaaggcagacattttggaacaacttattcttgagttagagcgttcaattaggatgtctggccaatatcctggaaggatggacaaagaacccccttcaactctcatgtggactttgtttttattggctcagcattatgacaggcgaggccaatatgaaattgctctttctaaaattgatgaagctatagaacatacacctacagtcattgatctatattctaagactcgagcgtactttgagggcagtcgcagctgtgcctctcccaactctgcctttaatcagatacgcaagagctctgaaaatgggagttcaaaccattcggtgggtgatcacaatgcggaatccggcacatcaaatggcaaactagaggcattcaaagatctcactatctgacaaagttgaacaggggctaaaaaaatggtttgcaagtaatacctagtttggactttggatgcctggtaatccaagctgcatttgaatccccacctaaactaggctgcagttcccgacaaggttcatactaagttttggtgccggtgttatcaaattctgaacacaagtcacggatgtattttcttttcacgagttctccctctccaaacttacatgtgttcgttccatttgcaaatgtgtataattttaccgcaattatgttttagggttgaattttttattctcaccctttttttttcccgagatgtttagagagaaggctccaaggatttgcaatttagtccaagttttactatttaggtagcagggagagctaaagaaattttaagtttctggtcctgcattcagcaggcccttatagagaatgacttttcgtacttatgtggaaatgcttaaatttcaagaccaattgcattcacatgcatactttcataaagcagcagctggtgctatcagatgctatattgagttgcatgattctcctccaaagtctacagcagaggaagatgataatatgtcaaagttgcttccttctcaaaaaaagaaaatgagacaaaagcagagaaaggcagaagcaagagccaaaaaggaggcagaagagaaaaatgaagagtcaagtgctagtggggtatcaaagtctgggaagcggcacgtaaaacctgttgatcctgatccaagcggggagaagttgttgcaggttgaagatccactgtcagaagctactaaatacttgaagttgctgcagaagaattcccctgattcagtggagacgcacttgctctcttttgaattatatacaaggaaaacaaaagattttgcttgccttggcaggcctgtaaagcagttactgagattggatgctgaacaccctgattctcatcgttgtttgattaaattcttccataaagtgggatccatgaatgctcctgtgaccgacagtgagaaactgatttggagtgtcttagaggctgagcgcccaactattagtcagctgcatgagaaatccctgtttgaggcaaacaactctttccttgaaaaacataaagattctttgatgcatagagcagcttttgcagaaatattgcatattttggattcaaacagaaagtctgaggctgttaagttcattgaagagtcaacaaataacattgtgcccagaaatggagcacttggaccaatcagggaatggaatcttaaagactgtattgcagttcacaagcttcttggaacagttcttgctgatcaggatgctggattgagatggaaggtgcgttgtgcagagtatttcccatattctacatactttgagggatgccacagctctgcctctcccaactcggccttcagtcagttacgtaagaactctgaaaatgagagtcctaaccattcagtgggtggtcaaaatgtgggctccatcacatcaaacgggaaactagaggcatttaaagatctcactatctaatcaagtcgaaatacatccatgaggctaaatatatatgcgtgttacccagcttggatgcttgcaaaaccaaacggcgtttgacacttccagaaacgactgtgttgcaatttgcagcaacaacggtcacagttttggtgcgggttatggcaaattctacacacgttattccgatgtattttctttgcatgatttcccccccccccccagctgtgaaatttatttggtttgcaaatgtgtataattttacctcaattatgtcttaggattgactttttcaatttgttcacccctttttttctgggaggtggtagaccggagctgcatggtctttgtaccgttgtcttagattttcattttggtcgttgggagagttacataatttttgttttctggtcctgtatccagtcaacatacatctaggagagcatgttgtatctttcctattttattggcttattcatcatgtataaacattatgtgaaaattttgctactggatgccaaaatgacatgtaattttggatgaattcagtaaaaaaaatggaggttaatattgctgttggaaaaatagaaattacagacaagtggatttgtacttggttcagatattagtcctaatttcaaagccttttgaagttggatt

SEQ ID NO: 62695 - DNA, 237 bp, Glycine max
  Clone ID: PAT_MRT3847_27628C.1
ggctcgagctcacattacattggaatgcttttcttttcgaacatgcacaccatggccaaggggaagatgccgtatgatgtttggagggatgccccacctaagggggagatagactttgccttgctaccttagcttgatttcacactgttggctggcatccacaaatggcatatgattgaccgccaatgagagatacactggtgaatgatcacggatatgagccaagagtggatcata

SEQ ID NO: 62696 - DNA, 306 bp, Glycine max
  unsure (1)..(306): unsure at all n locations
  Clone ID: PAT_MRT3847_27629C.1
tccgaacaccgaaaagttcatggaccaacaggacttcttgtccaggacagcacgtttggtcgttgtatgtcccttctatccagggtagggcataatgtgttccaagagctgaaccttaagtgagaagactggcgtaggatgtatgatagtgaacagaaccctatatatctgtnnatttgtcttcacatattccgaaccacccattttggagggtggcnnaaatccactggattctggttttgatttaatgatacccagtggagaatggccatagaagtattgatgcccataatacagtgctttatc

SEQ ID NO: 62697 - DNA, 609 bp, Glycine max
  Clone ID: PAT_MRT3847_2762C.1
ggccaggcactccccacttaaccaccacactctcttcttgttcactctacaccatttttgctattcttttaccttacgagttggataaggataaggatggcatagaccttcctatgtacctcatagtcggagacacgatggacaccctagacaagctctgggaccattttttaaatgctgacctctacgcttgactagagcaggaccgagacagcaaagatgcctgcgaaacatgcaccacagccaacttggccatggatcttctgtagaaatgacataccaaggcactcgtcgactaccagaacatagcgcgtgacaccggcacgaacattgtgtaaatctaaactgatgtgggactggatgccgacaactgcgcggacctagtcgacattgatcaggattaccatgattttgctcagggtggacacggtcaccttaccaaaaacacctgaataaattggtgctggtgaccatcgtcacatgttaggctatcccactgatgaaacccctgaattgctgccattgagccatgttcttgcaacaaaactcgggactcgtctcaccgaggttctcaagaacagtacctgcccttggctgatgcctgacggg

SEQ ID NO: 62698 - DNA, 513 bp, Glycine max
  Clone ID: PAT_MRT3847_27630C.1
gccaaaccgtcctcccacggcactgcgaacccccggagccgacggaataagaactctagcattacaatcgatgcagcctgaacttccggttctttcgccttgggttccggtccgcgaggtgaatttcctacgggcttgcaagcggcacgcagaagggatgcaggctgtgggggtggtgtccatagatagcatcagagagtgttcagcagcacccccttatgtgaacgggaggaggcttccttcaggttgcgtggtgcaagatatgcccaatggttattctagggtgacatgggtggagcaagcagaatatcggagaaagccaagttcaccacctctggtggggtttttggagctaaaacatggcgctgggtgctgagagaagtccctgcatggtgataagaaaaaaagactttttcgggtcgggtttggatctttaacacaaagcaagggtggtggttcgggtattcactcgggtcgaccccctttgtctgctttattctagtggcccccgtt

SEQ ID NO: 62699 - DNA, 343 bp, Glycine max
  Clone ID: PAT_MRT3847_27631C.1
ccacgcgtccggtggaggcaaaggagctcgaggacaacagagatctgatcgacgactttttcttgcgtgagggaatcggggtttgagctccgggttgtgtttttttggtgtcggcatagttcttgagggggagaggccgagcgcgtcgaagaagtggtggacgaagacggcaaagtcgttggcgaagaatgcaacgtttccatttattcgactaattacccattttagaaaatttcctcggtggataattttgtggaatgattagtgaattttttaatcttgcttttatgtttggtgaagtaggttaagtatacaatttcatgaatataaatgttggttttgg

SEQ ID NO: 62700 - DNA, 275 bp, Glycine max
  Clone ID: PAT_MRT3847_27632C.1
ccgaggtcaacgatccctcccttaccatcaaatcaattggccaccaatggtactgaacctacgagtacaccgactacggcggactaatcttcaactcctacatacttcccccattattcctagagccaggcgacctgcgactccttgacgttgacaatcgagtagtactcccgattgaagcccccattcgtatacataattacatcacaagacgtcttgcactcatgagctgtccccacattaggcttaaaaacagatgcaattcccggacgtct

SEQ ID NO: 62701 - DNA, 263 bp, Glycine max
  Clone ID: PAT_MRT3847_27633C.1
cacatatccaactatgaagctgggtttataaattaaatgttcacaatctctgcctttattatcagaaactgaaggatatggtcgatggctgaatataaagaaatttcgagggcttctactgagattgaaagaataaaactaaactctgagggctgtaatctaaatctagtaagtatatcagttacacttttacttatgttgtatttttgctatgattcgtgttggactttccccctatcccatattatagataatagactgtc

SEQ ID NO: 62702 - DNA, 725 bp, Glycine max
  unsure (1)..(725): unsure at all n locations
  Clone ID: PAT_MRT3847_27634C.1
ccacgcgtccgcatcattatcaccctcatcttcattttctgcaaacattccccttgctggtctagcttcctttattcatcgtcaaaccactatacagtgtacatcaacttcttcacaaaataatgtacccaatcccttttcccctcaagacattgcacccaatccctctccttcttagtctacaaatattgtttctgaacctgtcactcaaccagttgctaatgattctatcccagaacttccttcttccactgcttctgcatctgattcctcctcctcctatgagtcagcctcccattatcctattcctcacaattctcctcctatgcagaccagggctaagtctggtattgtgcaaaccagacttcatccctcattatttctcagagtcaaaatctgtcaaacaggcgtttcaggatcctaattgtcaggctgctgtagtggccacaatcgcagccaaaaatagtgtatgtagcagctattgaattgatatttttggaaaaacccaattttacccttaaaacagccctcaacctcttcttttcttttctctgagcaacatccaccctagtatatattgtatttgaatctatagaaatttttttgtttccttgatttttattatttatttgnatgttttaaaacctatggctntttgttgttaataatgaatatgtcatgaatttcgattattttgntgatgcctgagcatttatatgtatata

SEQ ID NO: 62703 - DNA, 126 bp, Glycine max
  unsure (1)..(126): unsure at all n locations
  Clone ID: PAT_MRT3847_27635C.1
gcccttgtcgttgttcacccataatcttgtttcgtcaataatgaagttatcttttaaataaaagcaacatttgtcgtagtaaaatgttctgtagttttttaaaatctanattctcatttttattaa

SEQ ID NO: 62704 - DNA, 378 bp, Glycine max
  Clone ID: PAT_MRT3847_27636C.1
agcaagcacagcaacaacaacagtgatgaaggagccaagagcttctcttcttcatctgattgtgacaatgacggtgaattggttccggaaataaaccagaaccaccaccactccaccactggtaagccgccaataatccacaacacccggcacaaggggttggttcaagtgagaaccagtctccaacaacaattgggggtgcacaggaaagggtgaaatttaaaagggcacacaaagaaactgcaaagataaaagagtcaaaggagaaagcaagagcaagagcaagggaaaggactacgtacaagattattatgtgcaatgttaacaccaacaacaacaacacaggaaggaaggtgcaacaacaagacttgaagaaaa

SEQ ID NO: 62705 - DNA, 420 bp, Glycine max
  Clone ID: PAT_MRT3847_27637C.1
agtttacaggattggcatgggcctgggataggaatagtagggggagggcgagtgccgatattgacaccaacagcatttaagattgagactgagagaaatgggattgtgcaagcgcaaagactatgtctttgaaatcaaacccaaattctggtgcagagggatggaaattggaaaagcggacgggaaccgaatgtgatagcaatagcatcagtggaagggcagggactgcaacgcaagaggatgaggttacagttgcaagggataggtccatttacgaatgggaatgcaggacctagagcgattgagatccacatacacataatgcgttaaagtggaatagggggaaagtgaatctgactcatggcaactgcacttgcgttaaaggaaagcgactgcctatatgtataggaggaggagcaa

SEQ ID NO: 62706 - DNA, 320 bp, Glycine max
  unsure (1)..(320): unsure at all n locations
  Clone ID: PAT_MRT3847_27638C.1
cccacgcgtccgcccacgcgtccggcgcccgtggcccgagacacccgacgccaccaccgcggggggttggttgcttctctcctcgaggcaccctgtcaaccatgtacggcggcgacagcgacaacagcgacggcggcagcgatgacctgcgccgcggcgacacgctggacttncggaacctgaaggtggtttccgccgtggggcgcggcgcgaagggagtggtgtttctggcgcggcagtccggcgcagcggcgggtggcggggagtgggtggcgttgaaggtggtgtcaaaggcgcttcttagaaaaaggaacaaaaac

SEQ ID NO: 62707 - DNA, 426 bp, Glycine max
  Clone ID: PAT_MRT3847_27639C.1
acgcccacgcgtccgcaagatccatagttggtgccttgtagtatgctaccattacacaaccagaaattagttttcgtgtcaacgacgtgtgccaattcatgtcaaagccctctgaacaacactggctagctgtgaagagaattctaaggaggtccacttcaggagccagcatttctcttggtcctaacttaatctcttggcgggctaagaaacaatcggttgtggcctggtcaagtactgaagccgagtatagaagcatggctctaattgctgcagaatcgacttggattcaaactcttctttatgaacttgaagctgcttacactactgctttaattctctttgacaataccagcactgtctcttttggctcataatcctgctcttcactcttaaacaaagcatatggagctggatctgtttttt

SEQ ID NO: 62708 - DNA, 2387 bp, Glycine max
  Clone ID: PAT_MRT3847_2763C.1
cgaggagggtgtgaagaaagaggtgccccataagctaagccatagcataatagcaatgcctcaagaacgacaatgcgcaattcaaagttgtgtgcagcgtctcttctcatagcacgtaccaagtccctcaaacttcaccatcacggtcacgtgcgtcactgtttccccttcttcttcttaaaccgtaatcccactcttcaggtttcacccttggctctcttccttgctgcaacgcgaaatcactcatcaccacgcgcctcttctccagctactactccctcgaacagttctctgatgacgaatacgactgcgacttcgagaaccaacaggcatcatctacggtggccaatgttgatgactggaaatggaaactcagcatgctgcttcgcagcaaaaatgaccaggagattgtatctagagacataggccatgtagaatgagagaaaaaaagactcattgctttatgcatctttacttaattactgtgatcgacttttaattattacttcacgcttttaaatgaatctttgtcctttcttttcaatcattgattggtaatttggtattgccatttatcgcaatgcacacagtgagttgtttggaaaagtggttgttgctagcaaggtgcctcttcctaactactgtccagatttggatgacaaacgtccacaaagagagttggtgattccactaagcttgcaaaggagggttgaggtgagggtttgttgcaggaataccttgatagacttcagctgaattctgcaaagacaactgatagcctggatgatttgaactccactaatcaagttaaagatatagacatggatgaaaatgctgattcttttgtggatgaatctgttatggaaaaggttctccagaagaggagtttgaggatgcgtaacatgcaaagagcttggcaggaatctcctgagggcaggaagatgctggaattccggaagtctctaccatcattcaaggagaagcaaggtttacttgaagctatagcacataatcagggcattcaccggctttgctgatgactaatctttgtcggagaatcttgctggtcacctttggtggggttctctccttccaaccacgtttttccgtctacaagacttgaacagttgaacccaagactttgcttccgggggattgagtccactaccacaaggtgattgttgtatctggagaggctggctgtggtaaaatcactcaacttcctcagtatgtattagaatcagagatagagtctggtcgtggagcattttgtagcattatttgcacacagcctcgaaggatctctgttatggcagtggcagagagagtgtcagcagagcgaggagagcctcttggtgaaacaaggttttttgataggttggcttcgaagttcgactagaaggaatgaaaggaaaaaacacccatctgctattttgtaccagtggtatattacttagaaggttgttgagtgatcgaaacctgactggtataacccatgtttttgttgatgaaattcatgaaagaggcatgaatgaagacttcttactgattgtgttaaaggatctgcttccacgctgtcgtgatttaagattggttttaatgagtgccaccttgaatgctgagcttttttcgaattatttcggaggtgctcctacatttcatattctgggtttcacctatccagttagagcacactttttagaagatattttgaaatgaccggatataaattgacttccttcaaccaaattgatgattacggtcaagagaaattgtggaagacacaaaagcaactagcaccacggaagaggaaaaaccagatcgctgctctcgttgaggatgctctttctaaatcaagctttgagaaatatagctccaaggcacgtgaatcactagcatcttgggcacctgactgcattgggtttaatctcattgaggctgttctatgccatatatgtcggaaggaacgaccgggtgctgtcttagtatttatgactgggtgggagaatataagctctttaagagatcagcttaaagcaatcctcttttaggagatcccaatagggttctgcttctaacatgtcatggttcaatggcaatttcagaacaggctgttatttccatttgttgattccctggactgtcatatcgcatcgccatgtacttctaaatctttattctttctctgtgtgatatgtatttctgattggcccatttctttttgttggcaacaaattgaaataagtcatttaattagtttttttcttctttaaaatttagttatataaagtaataatcaattttcttgttgctttaaaaagcttgttgtatattcaacaataaacaatctgttggtgcaattcaaaccgatccataagttattttct

SEQ ID NO: 62709 - DNA, 170 bp, Glycine max
  unsure (1)..(170): unsure at all n locations
  Clone ID: PAT_MRT3847_27640C.1
ccattangaaaaagaacggaaagtttccgctaacccttaacatgcacaggcagaagtttatttccaattggtgctcaggcactctggagaaaacataaaaatagattcctcttctcttattgcacttaagagatataccttacactcctatgtccggttggtcccaacat

SEQ ID NO: 62710 - DNA, 218 bp, Glycine max
  Clone ID: PAT_MRT3847_27641C.1
ttcggctcgaggttataatgcagattcatcccgtattcctgttaagacagtgcttactggatgaatctgcgggatataatgcaaaatgttgatgtgggtgataaacggaaggacatttactactaccacattgcattattctagggatgtctcttttagaacacatgacagcgcagagactcataaagctggttcctggctatttggcctatgacagc

SEQ ID NO: 62711 - DNA, 122 bp, Glycine max
  Clone ID: PAT_MRT3847_27642C.1
gtgcccttgtaaccctaccaaataacacttattaaagatatattcgacgtcgaacaaggcctgtaagatttacaaaatgttttgttaaatcagtgatgtaaaatgaactatactaacattat

SEQ ID NO: 62712 - DNA, 262 bp, Glycine max
  unsure (1)..(262): unsure at all n locations
  Clone ID: PAT_MRT3847_27643C.1
ggcttcgagagggagacacnngggaggcgaccntttggcggaattatggcgacgagcacgccccaccagcaccaggaggnngggagggcccnccccacggaagcagancagcaccccaagaaccaccgaangaagccccgggccaccaacgaggcgcgcgccaagcccaagagcngggagacccggaggaaaccgaaaaaggcgaagaagagcaanggccaagcgcgggccancaacgagacncgngagaagaacccaacca

SEQ ID NO: 62713 - DNA, 478 bp, Glycine max
  Clone ID: PAT_MRT3847_27644C.1
cgggaccttgaggaatgtccccgtaggcggcggctgccggaggaacaagaggagcagaggaagctccagcagcaacaccaggtcgccggcaaactccgatcgccaaaccgcgagtgccggctccgcttcaaccaccagtggctcctcttctgctgacttggtggccagcctcggtggcggcaccggggtgccaccgtctcttaggttcatggctccattgcatcaacttggggaccaccaccaccttggtggtggtggaggagaaatagggttaagctatggcttgaactatggcgcaatttctggtccaatgggaggaataggagacttgaatttccatataggaggcactttgagtgggggtggttctatgttatctggtttggaccaatggagggttccacaaactcaccaatttcccttcttgtctggtttggaagctacttcatcacatgggttgtacccttttgaaggtgct

SEQ ID NO: 62714 - DNA, 856 bp, Glycine max
  Clone ID: PAT_MRT3847_27645C.1
aaaagtgtgttgcttaacgttaacatgttccactaaaacagaaaaattaagagagaaagctgaaaattaatttgatggcgtgtaccaaagcgaccttcaccttttcacagtactgtagcgacaggtgcagcagcagcagaagaagaagaagagcctctgctgtttcattcttcaacggcaattcggtcatgaggctctcctctcatcgcggcgccttgcttacgaacaatgttttggagacgtccaagtctaaggacaagagcagcagcaacaataatattatattggtgagcgagaaacttggtgaagcagggcttaaagtgctacgcgaatggggcgacgttgaatgcgcgtacgatctctcacccgaggagctctgctcaaagatctcatgttgcgacgctttaatcgtgaggagcgccaccaaggtcacaagagaggtcttccaagcttccaaaggaagattaaaggttgtgggaagagctggtgtaggcattgacaacgtggacctccaggctgccaccgagtttggttgcatcgtcgtcaacgcacccacctccaacactgtcgctgctgcagagcttgccatcgcgcaccttgctgccatggcaagaaacgttgccagggctgatgcctccatgaaagcttccaagtgggagagaaacaagtacgttggtgtttctatggttgggaagacagtggcgataatgggatttggaaaagtgggatatgaagtggcgcggcgtgcaaaagcagcgttgggaatgaacgtggttgcgcatgatccctatgcctctgcggacagagcgagtgctattggggtccatcttgtgtccttcgatgaggcatctccacg

SEQ ID NO: 62715 - DNA, 395 bp, Glycine max
  Clone ID: PAT_MRT3847_27646C.1
gcagcatgtatgtagatgtctaatgggcttgtttctttcgctgaggaatcggattgatcatgattcattgatgtattgctcggtttgttatgaaaatttatcttaaggggggtctattattctcctaactcaaaaaaaaaaaacaaaaaataacaatgacaaaaaaaataaaaacactaaaactataccccaagaagatcagaaaaaacaatccactaagaaaccgacaaagactgaaagggcctgcgcgtcaccttcaagctcaccgatcataatcgtcaagccaatgtcactgtaatcccctacgtcgtcgacctcgttatcaaggcctttaaagagcccatacgcgaccgcaagatgaccactatcatctatctcaactgcaacatctcgct

SEQ ID NO: 62716 - DNA, 298 bp, Glycine max
  unsure (1)..(298): unsure at all n locations
  Clone ID: PAT_MRT3847_27647C.1
gtcgcangcacgcgtacgtnagctcggaattcggctcgagnttgtattgttcccttttaggtgacgattaggaagggattggcacacttaggtccttaagccccannacaggaaatggtgggatattctcaggtccgaatcctcatcaccttcctgattccccaccctgccatggcctggaactgactgggtggctgagggatgcacgaggacaaagactaccgagatccgactcctaaaggcagggtctgagtctgccagatggagggggtgctaagaggttggcccaggagtcagn

SEQ ID NO: 62717 - DNA, 284 bp, Glycine max
  Clone ID: PAT_MRT3847_27648C.1
ttcctttcttgggttcaaaccacctccaaaatccaatgttgacggagacgtcaattgacgaggaggccaaggataaggtgaagcaagaacttctgaccttgtgtgcatttactctaagacttcaaggcgaacactaagcttgaagttactctaattccactaataattggtgaaataagcgcaggaaaaataaataaacccatgttcttgtgcacgtgaatgatgccactacgtataaagatagtttttaaaggggcgaaagaaaaaaaaaaaaaacgggggcc

SEQ ID NO: 62718 - DNA, 320 bp, Glycine max
  Clone ID: PAT_MRT3847_27649C.1
gggttatatgttctcattcaatcaagtgacacattagcacatacgatcaatatgctgggaacaaacaccctaacgagcataataggatcatcatacaacccggacatctcgtccagcgtccactgggcttatctagcaatgatgcgtacacacctcttagcatatcagatgtggcacatgatcaggaatcacttgtgggggacaacctctcgggctaagaagccacttcaggcttgcaagagttatgggcacttgggaacgcctttaggaccccgcattgtgcaacagggactaggaccacccacgctaaaaagcggggc

SEQ ID NO: 62719 - DNA, 202 bp, Glycine max
  unsure (1)..(202): unsure at all n locations
  Clone ID: PAT_MRT3847_2764C.1
ancgcngcacgcgtacgtaagctcgganttcagacncgagtatgaannagtcagtagtaggnnttnaacccaanaaaanagagngtaggtgccngnggngcaagcnacaatggcaatccctggtnattcaatgnnacacgaggggtctttgattttgtcnttgatnnattgcacncgtgnncgtgnaaagtagtaataggnn

SEQ ID NO: 62720 - DNA, 310 bp, Glycine max
  unsure (1)..(310): unsure at all n locations
  Clone ID: PAT_MRT3847_27650C.1
gaagacttaatgaacattgagacatcataaagggaggaaaaagaatgncacaaacatgttgctacatattagtgacctgtttaaatatgtgaacgagtgcgtgcaaatccatccaaccaagaccgcaaaaactgtaggaacaataacaaggctgttggccacgccagagacacaattttgaatccaccaccccccccgggggggggggggggggccaacataatttaaaaaaagcccncccnnanaaaacacaagccaaaagaggaagaaccgcacaaccaaacccacacgcgaccgcacagagagccac

SEQ ID NO: 62721 - DNA, 155 bp, Glycine max
  Clone ID: PAT_MRT3847_27651C.1
aaattattgtatccatgttatgtttttggacgcgtgggtggatcccagaatatctgaccgagacccacaggcggcacaccagttatatagagaggcgggcaaaagctcgcgggaaacatgatcatagatgataactgggagaaagtgaaatgcct

SEQ ID NO: 62722 - DNA, 263 bp, Glycine max
  Clone ID: PAT_MRT3847_27652C.1
gtacagtcagactaggaattcggcctcgacgttattttttttactcttgtaagcaattcctggtgcccctcttgagctgtgatgaaactccatcatatgttgccacaccaccaacaaagaatttgggctgaaatattgtagtcccggctggccctgcttacagctcttttgggaaagggtggaccttgccttttggcttaacttggggaggtctaaatatgattacaaagctgtccctgctgatgattattctgaaaaagggg

SEQ ID NO: 62723 - DNA, 611 bp, Glycine max
  Clone ID: PAT_MRT3847_27653C.1
attagaattgttttgcacaattggtgatcacggtcaccacactaatgtttgatattaagcacaatcatcaaatactgtaattgtataactatttatttttacttatttacagatggagaacagccgttcttgcagcatagtcaattgatggaaaggggatgagagcacaggaaccaactgcatgttggaggcaatctgcctttggagatgatctttaagctctgatgaagtctcatggaagtccaattttggatgaatgcatagtccacttatgcacttgtaggatccaacagcagcaaatggccaagatggtcttactgatgcattttctgtcatttatttctttcccttcctgacgagagaaactcaaacaaatgggttgatttgtcttctgaacatgactttttaactgtcaatatcccaaaccattcctgcaacacagcattgaaaggtaatgcttttttgtctcacaaaacacgaataatcgaaaacctcgtaaacatcatcgaagtccacgaaccttgactccaataaccaaaacgacaagttcaaaggcgataaacgtaataaacgacacgttatcgttatcaagaggctttgagaaggtaccc

SEQ ID NO: 62724 - DNA, 408 bp, Glycine max
  Clone ID: PAT_MRT3847_27654C.1
ctctgtccctttctctctctcaaactaaaaactaaaacccattttcttctccaaaaccttcgactttcttttctctaaccgaaacgcgcttcgcagcacttcttctccactctctcacatctctgacccattgcgctatatttacgcactgtgtcaaattcccccataaaaccggtattgattcactagttaaggaggtagaaaggatttttgcttcaagtcctccagattcaatggagcttgagaaggcaaagcaaatgctgaaagagcatgagcaagcacttgttgacgccattgcaaggattgcagatgcatctgatggtgaaagtgatggagaacagccgttcttgcagcatggtcaattaatggaaaggggatgagagcacaggaaccaactgcatgttggag

SEQ ID NO: 62725 - DNA, 2452 bp, Glycine max
  Clone ID: PAT_MRT3847_27655C.1
ctgtccctttctctctcccaaactaaaaactaaaacccattttcttctccaaaaccttcgacttttctctaaccgaaacgcgcttcggaacatttcttcttcgctctctcacatcttccattgctccaactttcacgcactatcaaattccgacactactggtattggttctctccctcagatcaaaatagagttcggagaggtagcattgttactggcaatgaaaaatcttctgtaacttctattccacacttgaaattgcattgtgacatggaggctcaaattcatctacttgaacaggaagcttactctgctgtcttgcgtgctttcaaagctcagtctgatgctcttacttgggagaaggaaggtttgataactgagcttagaaaagagttgagggtttcagatgatgaacacagagagcttcttaccagggttaactctgatgaaataattcaccgtattagggagtggagacaaactggctgttaccaacctgcaaggcgcagcacatctcagacttttcatgacattttacctagtccaactgtttcagcttcccgaaaaaagcagaagacatcccattcgggtcagtcattgcctgctttatcttcagtgaagtctgtacagtatacatctgctggacctactggaggcaggcattttgcaaatcacaattctagtgctcttgcatctaatgcatctgctaccgaagcagcagcctttgatccattgattgggaagaaagtttggactcggtggcctgaagataaccacttttatgaggctgttgtaactgattacaaccctgctgatggccggcatgctttggtttatgatattaataaagtaaatgagacttgggaatgggttgatctcaaagagatctcacctgaggatataaaatgggaaggtgaagatcctggcattctccatagaggtggacatggtgggcaaggtggtggaggtaggaaattctttggccatggtggtgattctttaggtgcaggtagagggagaggtcatcccaggtttcaggccagacaagaatttctcccacctcaaaatggtattggaaggagagttttggatgacattgagttgctgaacacagattcactagttaaggaggtagaaagaatttttgctacaagtcctcaagattcaatggagcttgagaaggcaaagcaaatgctgaaagagcatgagcaagcacttgttgatgccattgcaaggattgcagatgcatctgatggtgaaagtgatggagaacagccgttcttgcagcatagtcaattgatggaaaggggatgagagcacaggaaccaactgcatgttggaggcaatctgcctttggagatgatctttaagctctgatgaagtctcatggaagtccaattttggatgaatgcatagtccacttatgcacttgtaggatccaacagcagcaaatggccaagatggtcttactgatgcattttctgtcatttatttctttcccttcctgactgttgccacatgtgcaagttttgtgctcaatgacgattttgaatatagagcttcaatatatcacttctcaggcacatcaaatgtaaaatacaataaattaatttattttttaccgagagaaactcaaacaaatgggttgatttgtcttctgaacatgactttttaactgtcaatatcccaaaccattcctgtaacacagcattgaaactgtaagagtataagcatcttgatggaagtataaaagggatggttgggtttcctgtatctcacgtgtgcaaggagcctccatctcaaaaaaaaaagattaaaattggattgaccatggtttgtgcttatagacatcgtatttgtggcataatcataagatgaaagggtattcttaaacgcaaataataatgtccagtatttgatcagtcaaacccaccagaagaaattaaaagaggggtttactgcagtagaaacatgggaatgacattgtaccataaaacataataattaatcctactcctgcataaggcaactcccataagaattcctaatttccatgtaaatccctctaaacagcagttcaaagactctaggctgggatcttgtacttaaaagaaagactagaaatttagttactcccagagtaagaaatttcttgttctctacctagaatgtgaactctgtcaacagaaaacctagttaaagggatagctcatacatatgagacagagtaaggcattttcatttgctccaaaagtactaaagaatttcacaaagaaaaacagcacttggaagagtttcatctatcatcaaacagcaagattgcaaattagtaattgactgattactttgccattgctacagggagaagttgtcaaacggacaagatggattttctcgaaacctgagcctggaaaatcgagcaatttcaagagatctcatctgcgctcgagcc

SEQ ID NO: 62726 - DNA, 1882 bp, Glycine max
  Clone ID: PAT_MRT3847_27656C.1
ggttcccttgaaccaaaccaaaacggcaaaaccaaatctatttctctgttcacattttgtgtcgactcgactcgactcttctatttaatactcgtacgaggtacaaacaacacaacaccctctgactctgtccctttctctctctcaaactaaaaactaaaacccattttcttctccaaaaccttcgactttcttttctctaaccgaaacgcgcttcgcagcacttcttctccactctctcacatctctgacccattgcgctatatttacgcactgtgtcaaattcccccataaaaccggtattgattctccctcagatcaaaatagagttctgagaggtagcagtgttactggcaatgaaaaatcttctgtagcttctattccgcactcaaaattgcattgtgacatggaggctcaaattcatctacttgaacaggaagcttactctgctgtcttgcgtgctttcaaagctcagtccgatgctcttacttgggagaaggaaggtttgataactgagcttagaaaagagttgagggtttctgatgatgaacacagagagcttcttaccagggttaactctgatgaaataattcaccgcattagggagtggagacaaactggctgttaccaacctgcaaggcgcagcacatctcagcctggtcatgacattttacctagtccaactgtttcagcttcccgaaaaaagcagaagacatcccattcgggtcaatcattgcctgctttatcttcagtgaagtctgtacagtatacttctgctggacctactggcggcaggcattttgcaaatcgcagttctagtgctcttgcgtctaatgtgcctgctgaagcagctgcctttgatccattgattgggaagaaagtttggactaggtggcctgaagataaccacttctatgaggctgttgtaactgattacaaccctgctgatggccggcatgctttggtttatgatattaataaagtaaatgagacttgggaatgggttgatctcaaagagatctcacctgaggatataagatgggaaggcgaagatcctggtgtactccatagaggtggacatggtgggcaaggtcgtggaggtaggaaattctttggccatggtggcgattcgttaggtgcaggaagagggagaggtcatcccaggtttcaggccagacaagaatttcttccacctcaaaatggtattggaaggcgagttttggatgacattgagttgctgaacactgattcactagttaaggaggtagaaaggatttttgcttcaagtcctccagattcaatggagcttgagaaggcaaagcaaatgctgaaagagcatgagcaagcacttgttgacgccattgcaaggattgcagatgcatctgatggtgaaagtgatggagaacagccgttcttgcagcatggtcaattaatggaaaggggatgagagcacaggaaccaactgcatgttggaggaaatctgtctttggagctgaagtctcatgggagtccaattttggttgaattcatagtccacctatatgcacttgtaggatccaacagcagcaaatggccgagatggtcttcttactgatgcattttgtcatttatttctttcccttcctgactgttgccacatgtgcgagttttgtgctcagtgacgattttgaatatagagcttcaatatatcacttgtcgggcacatcaattttttagtctgaaaaaaattgagcaatttcaagagatctgcgttgaactgcgttcaatggaattcgtctcgaaacgacgtctatccgatgcgcgttttgctttgttcaaaacttcggggatccttcgctgaagagatttcaggttttggttgatactgataaatcggctcgag

SEQ ID NO: 62727 - DNA, 160 bp, Glycine max
  unsure (1)..(160): unsure at all n locations
  Clone ID: PAT_MRT3847_27657C.1
atattacggntctgatgttccctatccagagtctactaggggcattctcccaggatggaacatcccagtacttaaccttgagtggatccaatctgtatgtcttctgtgccatatgcccagcaataatgccgaggctcctcagnttcatctgtgttctcat

SEQ ID NO: 62728 - DNA, 440 bp, Glycine max
  Clone ID: PAT_MRT3847_27658C.1
cgcagaaggaaccagacacgaaggtagggttttatcaactgagccccactaccattggagaaaccgttcaaggaaaagatctcgcactggttaaagttaaagaagcacgcgctgctgttggcttgacatcaagctacactccaactccatcgatggaacctggtttgcaaaaagacagacggttaactgaggaaaattttggaaggacgactcacgttgcacataacgctaatcaaccccaagagaaagatctgctggagggaaacattccctatgaattaaatcacgctctagattggaaaaagtttccttaccaaagcacaattcgttaggggaaaaaccctcaaaaatgatttaatcggagctggttaaattcctcagaaaaatttcctggaagggagatcaagaaaaacccataaagaatgatgccagaatgagac

SEQ ID NO: 62729 - DNA, 1261 bp, Glycine max
  unsure (1)..(1261): unsure at all n locations
  Clone ID: PAT_MRT3847_27659C.1
ccacgcgtccgcagaacttcatactaatagataataagttaataacatacttgattgggtcaagaatttatatatgtcggcatatgaataaaattgcactatattcctcatgcatgatagcatgagaagttattcaaaggattggaaggattccaattcatttgttcatgcaatcagcaatgggcatcattccttaattaaaaattgttaaagattattaaagttagaagccactcaacaagtaaatatttttttgcagttacagaagaaaagaacatgccagttaaaaacaggatatgcaaacaaaaaaccagacagcaattttttgaaaaattatacgtaccaggccaagcacaagagggtatatgagctccagctggaagtttagtcggaagtggtgaagcttgttgattaggatgttttgactgacttctactcatagatccattccagtgctcatggtgatcctcctcatcattaccttctgaagagaaagaagtgatcatcaagtcttaaaagtggattgaaagagtatcaaagatatctttgaggatataacagtgacaagggcgtagtctagaagaacaaatcatatagaanaatcttcagctaatcatgtaaagacattgtgagtgcattaatagaacaataaatggatgaccatttcacttgcagtgtatcatcaaatactatagtgtatctatattagtctaactcacaccaaaggtttaaaatactttgtagtatctacaaactattttcatgccggaagaaaactttccatttaaaaagcagattttgttgcctcatcatatgaaaccttttgcaaaaacattccgaggaaacatataaaaaagacctcaaagcttttaccacacgtatgcaactattgtcaatctcatatcattcaattggaaaagatttgacaaagtggattggaggtaaaagttgacaggttgatgtctacggaaacaagagaaaagtaaaagagcaaaacacaggcgtattttgataagtttgagttattagtaaggccacaaaagagatacgtcaggataatttttaaaggaatttccaagccaagaggacaatgccttgatgcaccaaagaagtaatgcataaaagaagaccaaagagggattaaatgaatgaccaaagcctcaaggataaatagatagagcataatatcatcattcaaaatattacacggtaatattaagggtttcaaaaggaccatcaaattcacatgataatctaaccc

SEQ ID NO: 62730 - DNA, 222 bp, Glycine max
  unsure (1)..(222): unsure at all n locations
  Clone ID: PAT_MRT3847_2765C.1
ggacgcgtggggccggacgcagctcgttacacctggttcgttccataagctgccgctgaaatcagtgttcagagaaacattgtcatgccccgataaattctctaggaatttaattggtatgtaatgaaagtggaaaggtacattacatttgtttagaaaatattatgccatcaacaaattagaaaaaaaaaaaannnnnnnnnnnnnnnnnnnnnnnnnnaa

SEQ ID NO: 62731 - DNA, 408 bp, Glycine max
  Clone ID: PAT_MRT3847_27660C.1
ggacccacccagccgtccgtcaaatagagtagtaaacacaatggttgataatttcgtattcgttctatcggtgtataagcaaatgagagagatagagagagggaaaaaggttgttaccaacagcagacaaaaacagtgttgcttgattccgcggtggcgagaaccgacgtgagcggcaggaggagaggcgcggaacggaggtcttcagggatttctgacgtgctctgttctcgaccctcggaggtgtttccgggtcaacgtttcaagatccgcatcaaagtgttatcatggcatttcagatctggaacaacagcaacaacccaccaatgtatgatggtcgagaataagcatgaacaacatgggccggtgagaggaagaaacagaagtggtgctgcaaggatagttggg

SEQ ID NO: 62732 - DNA, 763 bp, Glycine max
  Clone ID: PAT_MRT3847_27661C.1
tttagattcttctctgttaaactccctccctgccaccctatctacacgagcaaccttgttgtccttgcaatgacctacttctattaatactaccgaaataaccatgtccgggaaaccacttaattctccacgcctccttgcaatggctgactcggatctctcttcaagtcaaatttctacacattctactgattcaggaaatcgagggtcttccaaagttgaattttctgaagatgaggaaaccctcatcatcaggatgtataaactggtaggggagaggtggtctataattgctggaaggattcctggaagaacagcagaggaaatagagaagtattggacttcaagattctcgggctctagtgaatgaagctccggagtactacgattggtgttcagtctaggacgagcaagaagattttgggtgcaagattagtgtgattttgtgggacataaaaactgaattaaagttggcatagtttataggtatttgtattggctataaaaaaagaagtggggcagcaactatagaagctggtttgtgttatatttctccatcttgaaatgttccttggtgtgatattttccatcttgaaatgttccttggtgattggtcttttctgaattgtacttagtgctgttcatcttcgtgtatcttattcatttaccattttggctttttatcttgcgtctgaaatctgtattggaaatgagaattaattagagacaggttcagtattgtcattcttagtttaattacgta

SEQ ID NO: 62733 - DNA, 406 bp, Glycine max
  Clone ID: PAT_MRT3847_27662C.1
gtttgcctttccttaaaaccgctcacagatgcaatcgctgctggagtacaagaatgtgtcagtgactctctacttcttcgtgatcgatgtcttaagggaacgaacatgactctgtgagctggccacatacttcatgcatcattatcttttacactctgggatgattcgctgagacactctcctatttgatttaggactgcgtgtcagacttaaacttatgctggctgtttctcagctctctgtataatgctcgagttcaagcatggtgaaatcttggattagtgctgccactctcctatctgaggtaggactccgtgggcagactgtactataactctccgtgcggtgactctctccttctcactgagccgcattgacgttcaaagtggtcgtatatgcacaacac

SEQ ID NO: 62734 - DNA, 325 bp, Glycine max
  Clone ID: PAT_MRT3847_27663C.1
ggctcgagctttctgcttgcgtggtaacgaaagcaaccttccagacccgtgtcaaacattacttgacaagcgggggaagcttctgagcggccgcaccgcagtgggacaccaacgctaccactgtccttaccaacctatcaagataggacccattgccataaaccgtgcgacagtctgatcctcaccacgtgactgatatgtacgaatcagaacaggacgacatggatcaatctagcacgtgacgactgactcaacgacaatgactccagggagaggaggaggcagatgctgagtgcacaaagacggaaggtgaagatggagcact

SEQ ID NO: 62735 - DNA, 517 bp, Glycine max
  Clone ID: PAT_MRT3847_27664C.1
ggctcgagctttctttggcttctggggtcatgcttgcgttagagaatttctattacagactgttgcttatagtttctggatatatgcataacactgagattgcaattgatgctctttccgtttgtgtgactatttatggttgggagtccatgataccactagcatttttgggcgcaaccggggtgcgtgtagcaaatgagcttggtgcaggcaatgcaaaaggtgcaagatttgcaactgtggtttctgtggtaactactttatttgtgggatttatattttggttggtaattgtgtccttcaacaagaatcttgccttgatctttacatcgagctcttccgttatccaaatggtcaatgagctggcaatgttgttagcttttactgttcttcttaattgcattcaaccagttctttcaggggtggcagttgggtctggtcgtcaagcaatagtggcttatataaacattggcagttactacttgattggaatacctcttggggttctcctcggctg

SEQ ID NO: 62736 - DNA, 392 bp, Glycine max
  Clone ID: PAT_MRT3847_27665C.1
cggccgaatttcttttcgctccacgcgccttctcgcgtccggccgcaccttacaaccgggcacatatgttatcggtacttgatttcaagaatcacccaacttattgctacttcactgtgtacgatgtcttaagggaacgaaaatgactctctgtgctggtcacagacttagtgaatcaaattctttcccactctaagcttatttgctgaacactctcctatttgatataggacttcatgtcagattaaaacttaaatctgtttcttacccagatcatgtgtcaattccaagttcacgctggtgaaactacggattagtgctcccactctcctatctgcgataggacttagcgggtagacaaaactatatcattgctttcttttactcacttc

SEQ ID NO: 62737 - DNA, 249 bp, Glycine max
  Clone ID: PAT_MRT3847_27666C.1
aataaaagcaccgatgatcctaaattcgaaccttgcgcttatttgagacactactccaatcaaaggagcgaaatcaaggcagcttgatgagggcacaaaccggtatgaaacgagcacaccatgtgaaggcgggtgcacactatgaccaccaatacagtgaaggtgaccaccaccaccaatggagattcatataccgccaccaccaagtgcgtattcatgaccaacaccaattgcagacaacaaaccacc

SEQ ID NO: 62738 - DNA, 522 bp, Glycine max
  Clone ID: PAT_MRT3847_27667C.1
aatttattcacttaaataaagcgcattactatgtgcaatgagtgtgtttaaatatcaaaaaaaaaaaaaaaaaaaaaaaaaaaaaaaaaaaaaaaaaaaaaaaaaaaaaaaaaaaaaaaacaaaaataaaaaaaaaaaaaaaaaaaaagataaccatacatgacattaccttccgggcctccccccctggaagcagcggatgacccaagaatggtgtcacagaagcaaaactgaaggttgccataaactgctttggaaggattggaaggaactctcttgaggaaactgccacgagacgcaaagactcccctaaagatgtcattgccatcaacgacaccggcagttgtgacacaagcctctaaccttctcaaatacgagtccctcctcggaaccttcaatgctgatgacaagcctgttggcaccaacgccatctccggggatgaaaaggaaatcaaagttgtttctgaccgcaaccctgccaaccttgctaggaaggacttgtggatagactcggtgattgaa

SEQ ID NO: 62739 - DNA, 374 bp, Glycine max
  Clone ID: PAT_MRT3847_27668C.1
gaaggaaattttttcccggctttaaaaaaaaaacgggctgggggaaaaagttggctgccttttccgggtttcctttccccaggttcgggggggggggaaagcccaaacttttttcctttttgaccccctaaaaaaaacccctttggatttggattcttttggggggggggcaaaccacctttggaaaccccatttaagaaggggggggtttttttcatacccaaaaaatggacccttggggggccaaccccggtgtttttcacctttttttacccccccctttccccccatttgggtttgtttaccgggtccccgggggggcctcccctaagctttttttgccccttttccaaaggttttttgttcctggggcc

SEQ ID NO: 62740 - DNA, 314 bp, Glycine max
  unsure (1)..(314): unsure at all n locations
  Clone ID: PAT_MRT3847_27669C.1
gcggagcaaagggcgggggcgattcaaaacctanggggcaaataaaaacgaaggcgttgcaaaagcccgaagaagacaaaaatcgaaacatgcaaacgaccgattacgaatcaaatcggggggaattgagaaaccgcgtgcgtgcgtgcgtgcgtcgtatcttgaacgacgcgagctggatcaaaacggcaacaccgaactgaacggaacgggagagaaagtaaaagctctgtaagaattaatgcgtatatattatgcgagagagagagagagagagtcctctgatttgtttttgggaggagaatcggctgatt

SEQ ID NO: 62741 - DNA, 443 bp, Glycine max
  Clone ID: PAT_MRT3847_2766C.1
cgcctcgaccgacgcgtccgcacccctcaacttttgctcactattttacctttctctccctcactgtatctgtgatctttgagaatctcatttgcatttgtatcgcaaagtggagtcacttgtgcttgataaactcccaaatggtcaatcctactacacttaaacactgttaccgacttcatctagctttagcccatcttcatatgttgggccattttttatctccttcaactcattatcaaatggttgcgatgtagaatcccttcttttctcatcaagaggcgtctctctggttcattagaaacacaatccccatttcttaagatgaaggattgctagatgcttattgaaaatggttgcagctgtgtaaatcactggtaatgtcacagtaattgctggccagttcaagaaatccgagtcttaacacaatttcaaattttatt

SEQ ID NO: 62742 - DNA, 466 bp, Glycine max
  unsure (1)..(466): unsure at all n locations
  Clone ID: PAT_MRT3847_27670C.1
gaatttagagatggactaatccgaaactgaagaatatctgacctatacgttatttactataatcatcgtggccactggggaccgttgccaaacccatggtattagcatataagcgccccattcattgttggactatctattggtgcccacacagttggtattatcaggtaaggtagaaatcccctgaacagcaactcacattgtatatccccgtctacagtgtaaatgtttctaatggaactcgtttttgcgaacacctnttctactaggagaccgaatcccctcaggggaaaggtgttttgcccggcccttagacagatcacagactcgtgctacctactttgcctttgtgtgggggcctgataacagagagaccagctcagaccacccttaccgtacccattagactactcccacacttatcaagganctcgactgttttggatctttccaatgcatgttgctt

SEQ ID NO: 62743 - DNA, 283 bp, Glycine max
  Clone ID: PAT_MRT3847_27671C.1
tgctctctttatcttttgcgccttcaccacctcatacctaccttcaggcatcgctgatttcgagctcgataatgaaggtaaccctcttgaaaatggaggcacatatcatatctcgtcagacataacatcatttggcggaataagagcagccccaacgggaaatgaaagatgccctctgactgcggtgcactctcgcaatgagctcgacaaagggattgcaacaatcatctcgtccgcatatcgaatccgttttatcgccgaaggccatcctttgagccttaag

SEQ ID NO: 62744 - DNA, 430 bp, Glycine max
  Clone ID: PAT_MRT3847_27672C.1
aaaaaatgaagataaaatagtgtatcttgcatccatgattgatttaaacaagccataagcatagagtttaattgaaatctattgtcagttgaaactgagtagttatcagtggaaagatgagggaagggtgcagcaaagtatgcgtcacaggagctagtggttacatagcttcctctctggtgaagaagctcttgaccaagggtcacagcgtgcatgcaactctcagagacttgagtttgtataagaacgagtcaaaggtgagcctcttaaagagccttccacaatcagaaggaaaactggtgctgtttgaagctgatatttacaacccaaatgactgtgaccatgcaattgaaggctgtgagtttgtctttcatgttgctactcccatgatccatgatcctggctcccagtacaagaatacttctgaagc

SEQ ID NO: 62745 - DNA, 783 bp, Glycine max
  unsure (1)..(783): unsure at all n locations
  Clone ID: PAT_MRT3847_27673C.1
ggcacaaagattttatacaatagatagcgctatcagtttctttttttctttttctttccctcaacggatatctaatttaatcacaactctcataggatctatgcacattacaccatatagttatttttaaaggaaaaaagaaaagggcaaaacaaaacaaaattggaaagagaaaacaagaaaccgtttttttgttcagataaacaagcaatctttcatctctggtcttgaaatccaatgcttttccttccaccaatattaagtgaaagaccttgggatctacaaactgggggatcttcaaagagagacaaagagagctgtttatgtgcaagaccaatgtcaatgagaataaggcctgaagatggatcattcacaatgatatccttcactggtaaccataggaaaagctcttcctgagacagaccctccaaccccttgagctgaccaaaactaaggtttgctctaaccacagtttcaaacaaaactcttgtttcatacttggtcatgcaaggaccatccaagtttacctccaaacgacccctttggtccaaattgtatgactttacaccatcgaanncagccctgctggtaggccatggcttcggagaagctcatgaatagaagaatatgaagctgccactgagactgagaaaggaagaagaacaacaacaaacaagacaagaaagatggcctgtaaagatctgtgcggtggcatagacatgttgagagacttgagaatgagtagtagtagtgatagtgaaggaggaaaggaagataatgcgc

SEQ ID NO: 62746 - DNA, 250 bp, Glycine max
  Clone ID: PAT_MRT3847_27674C.1
gcgggccggacggaatagcgggcgccccgcgcttttttaccacacaaggccccagcaagccgggggaaatagcaaaccaaaaccgggccacaacacaacaccagaagcccaacaaaaccaacacaacggcacagacaaaaagcagggcaaagaaaaaaaagcgcgcgcacaaacactgaacccgaggaccacagcacaaggggcgagcaccagcaggacacccaagcacggcacccgcaaccccagagcc

SEQ ID NO: 62747 - DNA, 305 bp, Glycine max
  Clone ID: PAT_MRT3847_27675C.1
ttttggccgatacttttaaaaggattacttaaaatttacacacgaaccgggcatatataaaattctgatacacataatctaaaattgataatatatagcataacaaaaagcatatgatctgtaagccaattcccattctcttgttgcaatcacagcgaccatttgtatagaggtataacctacaagatccataatctgttgcaaaagtatgaagtaactgttggcactactagatgataaaatctttattcctaaaataatgtcaacgatatgggcattgatcagacgtcttatacaaaacacat

SEQ ID NO: 62748 - DNA, 149 bp, Glycine max
  unsure (1)..(149): unsure at all n locations
  Clone ID: PAT_MRT3847_27676C.1
aaagtctgcangcaacacgtacgtgaagntacggaaattcggctcgnagtnnanaatnccggctncggcagctgcagagcgaaaaangcaagnncgcatttagtctgcatgtgtntnaattttcttncgcgtaagngnctgtagtaggt

SEQ ID NO: 62749 - DNA, 331 bp, Glycine max
  Clone ID: PAT_MRT3847_27677C.1
ctgccacacgacctcccacggggacgcaatgaccacctcagggcttcattggacgcagggatgatataccagaccctagccagcctgtacaggctactcgctctgatgttgccggtcctgctcgtgcataaggatcttgaagtataagacgaataagtatttcgtgttatgctttgagatagtcgtactcgaatggatgagaacttggatcatgtaggggagagttctttattgttttaaagaccgatactcagttaaatctggatggtaatgagcggttgagaatacatgtcggaacttgaaacttcataataattgtttgattgcatat

SEQ ID NO: 62750 - DNA, 397 bp, Glycine max
  Clone ID: PAT_MRT3847_27678C.1
agcgaccgtccataggacactttaatgaacacattctgactcatgggccaaaacataaaggggactatcgtgatcatgcagaagaatgtgtcgcatatgatccgcggctcatgctatgaccgcatcaacctctccatggttcacgtctcatgcagtgcacatccatcaaccacattgctaccctcatacatctgcgttcaactaatgacagctaccatgtctgccggtgccatcaggaaaaaccagaagggccactaaggagccaggtactattacagtacaccccatacgcagctcctgcagaagcatactaggctccccttgactggagcggtgacgcaccattcccgggtgcatgttatatgaacaactcctggcgttgcaagatctacctcct

SEQ ID NO: 62751 - DNA, 455 bp, Glycine max
  Clone ID: PAT_MRT3847_27679C.1
tattgccggaacgacgagcttttttttcggcgggcggcctatgaaacttttggtgaggttaatcaaacaaaacacagcggattttatggccttatagtacataaagggagaagatacacatattgtgctgtacacgagggcggcgtacatgaacaaaatgcaagaacaacaataagagattgtgtgcatgaacgtctataaaatacacccaattagcatgttaaacactttgacatgggagacacggatactattataaccgtaaggtcacctaaaacttacgactgacagaggccaataaaaaaaggccttgggctgatgcaacacactgatataaatgagtgagaccaccaggtgtgaaggcattactaactcaccaatataacatggtagattttactgttgaaagaacactgataatacatggtagagaaaactcatcaattcacgggggg

SEQ ID NO: 62752 - DNA, 228 bp, Glycine max
  unsure (1)..(228): unsure at all n locations
  Clone ID: PAT_MRT3847_2767C.1
gtcgcangcacgcgtacgtaagctcggaattcggctcgagntanccatnngcnatggntaatacnccntcnaatncntcaattcncctctccctnntgctattggncatngccctctcnctcgctgagtcncaatctttcatcggngtaaactanggccaggtcgnnnacaancttccggcgnngganganacggccagnctnctcaantncancaccatcggaaann

SEQ ID NO: 62753 - DNA, 414 bp, Glycine max
  Clone ID: PAT_MRT3847_27680C.1
attaattatagcatcaatggccgacgcaaagaaaattttttacccaaaaaatcgaggcaggaaaggtactagttcctctcatacagaaactacccagaaacaagaacgcaagtttaccatgaaagatgtttgctattactcccaaccaagcaatattcctcctaaggattctgattcttcaagccagcaacagcaagcacgcacctttaccatgaaagacttttgctattataccaaaccaaacaatcctcccagtgtttccgatgcttcaacctctagggctggaacaccattacccactattaaaaagtcttttgctcgcaggacttggagctagtggatgaccacaccaaattattcctcatatctcatcatcaaccttcctagttcttagcaatattcaccacctactcg

SEQ ID NO: 62754 - DNA, 265 bp, Glycine max
  Clone ID: PAT_MRT3847_27681C.1
acgtggtgttgttactgctgatctcagctcgtgtctcttctcttgagttctctcttcccctatcgtttgcttgatcgtctccatctgagcgtgtatagaggtaactcccatgatcatatgagcacaatgtgtggtattctgctgggcttggttgttctgatgactgtcgagccaagaggggccgcgtgcttgagctctctcgcagatcgcagcagcgtggacctgattggagtcggctccatctccatggtgactgcgttctggc

SEQ ID NO: 62755 - DNA, 418 bp, Glycine max
  Clone ID: PAT_MRT3847_27682C.1
aaacaggaaactggaaaaaacaaagtttgggtgccaattcaaaacttgggggggataaaaaaaccttctcaccctgggtaaaatttttccccctggaaaaaaattcccgaaacccccccgaaagttcccccccggggtcctttgaaaaaaacttgaaaaaggcggggaaaagggggggggataaccgatttgattttaaaaaaagcgggggccttttggggggggcccttagaaaaaaagagggtcaaaaatcggaaaccctcgttgaccttgccgggggccaggggggcccacccccccttgtaggcttcgtaggccttgggccccttgtttccctggggggcctccaggaaagggggggcccgtgatttttccaaattcgaaatcggggggtccttctcccccttgagcccctccg

SEQ ID NO: 62756 - DNA, 230 bp, Glycine max
  Clone ID: PAT_MRT3847_27683C.1
attgagtctgttagatttgaatttaactcaaattgctgggacagggagtagtagatgaaaatgatatggttttgcaattaagacttatgagaggcactcttgtggcactgacaactttcaaggtatacttatatgggctgttgctcattgtataagctcaaactgcctgttgaaaaggaatgcttcatgtgtgataaatttatccaaatctgatgatttataaaacttgt

SEQ ID NO: 62757 - DNA, 518 bp, Glycine max
  Clone ID: PAT_MRT3847_27684C.1
gaataaatgtgtgtgctgttatcctacttcaaaaaaaaaaaaaaaaaaaaaaaaaaaaaaaaaaaaaaaaaaaaaaaaaaataaaaaaaaaaaaaaaaaaaaaaaaaaaaaaaaaaaaaaaaaaaaaaaaaaaaaaaaaaaaaaaaaaaaaaaaaaggatacgaaaagagaaaataaaaaaaaaaaaacaaaggttgggttaggtggatattttttaaaagggagttaaatggaaaaaacatgggcgttccctatttaaataacttaaaaaaaaaacccctttgcaccacttaaaaaaatggggaaaaggccaaaaattatggcttttaaaaatatttgaaaaaaaaaaaatggcaaatgggcctcccattaaaacgaccaataaggggcgggggttgaaacgttttcgagaaggggaatcaaaaaaggggaaagggccgtaccccccaataatatcaataatttgccttgttttatgacaaccccccccttttttctaaaaaagcttttaaagcggg

SEQ ID NO: 62758 - DNA, 133 bp, Glycine max
  Clone ID: PAT_MRT3847_27685C.1
cgctcgttgtgaattactcttacatttcatagcccttcatttcattcattgctcgcttctgtttctgttccaaagttactcacttgtgttgaatttactacctaactttttgtcttcttaatggggggctgtc

SEQ ID NO: 62759 - DNA, 393 bp, Glycine max
  Clone ID: PAT_MRT3847_27686C.1
ccacacccgtccgggggaatggtggtttcgttctttaacatttttccctaatttttttttttttttttggcctttaatccaaaaccttattctttttaacaatcgggggggcttcctcaaccagggcccatccttggccggggattcttttgggggggttggttttttttcggtttccaggggctaccaatccgtttttaaatttggatcagccatgttaatgggttttgatgaaaatgatggggccgatgttttaaggggggggtttttttgcccatttggttctgggatttttgatatcgtgggatattgctgccccattgccgaaaggcttccattgggggcaagaaatggggtttgccctgtttgtgctttgagggggggggttgtttt

SEQ ID NO: 62760 - DNA, 999 bp, Glycine max
  Clone ID: PAT_MRT3847_27687C.1
cggaaaccagaagaagagaatgggggggagcttgtttttggaggtgctgatcctgctcactacaagggcaaacatacttatgtaccagttacacggaaaggatattggcagtttgacatgggagatgtgcttattgctggtaaacccactggatactgtgctgatgactgctcagcaattgcggactctggaacttctttattggctggtccaacgactgtggttactatgataaatcaagcaatcggagcatctggagttgtaagcaaagaatgcagatccgttgtcaatcaatatggacaaacaatcttggaattgctcttggctgaagcaaagccaaaaaagatctgctcacaaattggattgtgtacctttgatgggactcatggtgttagcatgggtattgagagtgtggtggataagaatgaaagaaaatcatctggtagcattcgggatgctggttgttctgcatgtgagatggctgttatttggatgcagaaccagctgaggcagaatcagacagaggataggataatagactatgccaatgagctttgtgataaattgcctaacccaatgggacaatcatcggttgactgtgaaaagctctcttcaatgcctattgtttcgttcactattggtggaaaagtttttgatctttcccctcaggagtatatactgaaggtgggagaaggtcctgaagcccaatgcattagtggctttactgctttagatgttcctcctcctcgtggccctctatggatccttggagatgtcttcatggggcgttatcacacaatctttgattatggtaagctgagagtcggatttgctgaagcagcatagagaatgttcttgagtctcaccggacgacaaccgcacttttttagtagtttattttctttcgtcttctttttttgggttcagaaaattggttataccaaacaagatattacatcatggaagcacaacttccatctgaatattttcaaccgttac

SEQ ID NO: 62761 - DNA, 1289 bp, Glycine max
  unsure (1)..(1289): unsure at all n locations
  Clone ID: PAT_MRT3847_27688C.1
atgggggggagctngntnnnggaggtgctgatcctgctcactacaagggcaaacatacttatgtaccagttacttctgaaaggatattggcagtttgacatgggagaagagcttattgctttttttttattgganacngngctgatttgtgggcagcaanngcggacncnggaacnncnnnannggcnggncctacggctgcgagaagacgacagaagggggtacaaacaaatgcttctgaccatatgatcaaaatacatgattatgtatttgtagactgtaattaccatgataaatcaagcaatcggagcagctggagttgtaagcaaagaatgcaggtccgttgtcaatcaatatggacaaacaatcttggaattgctcttggctgaagcaaagccaaaaaagatctgctcacaaattggattgtgtacctttgatgggactcatggtgttagcatgggtatcgagagtgtggtggataagaatgaaaaaaaatcatctggtggcattcgggatgctggttgttctgcatgtgagatggctgttatttggatgcagaaccagctgaggcagaatcagacagaagataggataatagactatgccaatgagctttgtgaaaaattgcctaacccaatgggaccatcatccgttgactgtggaaagctctcttcaatgcctattgtttcctttactattggtggaaaagtttttgacctttcccctgaggagtatatactgaaggtgggtgaaggtcctgaagcccaatgcattagtggctttactgctttggatgttcctcctcctcgtggtcctctatggatccttggagatgtcttcatggggcgctatcacaccatctttgattatggtaagttgagagtcggatttgctgaggcagcatagagaatgttctcatgtctctcagggcagcaaccgcacttttctagtagtttattttcggttcagaaaattggttataccaaacaatatattacatcatggaagcacagttgtgcttccatactgaatattttcaatcgttatctgcttatagtttgtatacctttgcaatcagaatgtgcctaaaattgtggttgtatatattaatatcctcacagtccctcccccaatgtattgaatagcttagcagatgaatgtggggtagtgtggctgttaggctatgtatgcttccttagttgaatggtgtgaatatgacttttgtgattccttattttctttcagctcttatgtttggcaagatgcatttatgatatgttagatgcttc

SEQ ID NO: 62762 - DNA, 305 bp, Glycine max
  Clone ID: PAT_MRT3847_27689C.1
ttttacaagcgtaattttttgcttaataacgttatgtgatcggtgatgctattattactggtatgtttgagtcattcttttttttagttttaagaaaaaaattgtacaacaatttattttaatactttttaaatatttttattatgttttattattttttatattgcataattttataatggaacatcgtaaaatagaataataaacttattttatctatttctaacttacaatagtttctaaaattttaaaactgaaactcaaccctcaaaattaaaactaggtttaattttgaattatttcaa

SEQ ID NO: 62763 - DNA, 1034 bp, Glycine max
  unsure (1)..(1034): unsure at all n locations
  Clone ID: PAT_MRT3847_2768C.1
gttgaggttgaagtgagggagaaggagagagttgaagttgcagcaaaggatgcatatgcactggttgggtcccgacgtacctgtgttcgaccccaatttcacttacaatcatcatcgtccctacttatacgacgatgacctctttccaaacgacgccgtttcggcccgtcgccacgatgccgtttcagcccatcaccacgacggaacctcacctctcccactgggcatggattggagccctccgccgcgcctatgggagggtcgcagcactgtttggccgcgtcatcctcccaccggatggagcttctgcgtcacgcttccttcatgggttaccgctccccaatcccctccttctgatcccgtcgccttttttagggttcaagtcggtgtacaatctccccaagcaatcaccacttctcgactattactacgcagatttagtgatttcgtcaatctcttttctcaactgaaaaaggaatttcccataaaagatctgcctacacctccacccaaaaagatactcagaattaaaagtcacactgtgttggaagagcgacgccttttattagctgattggatggaaaagttgttatcggacgttgatgtatcaagaagtgccccggtggcaatatttcttgagctagaagctgctgctagatcatcatttcatgatgtgaacgagcatgtttcggatgaagcatctgccaatgctactacaccctcacaaatgatccaagatacctcacctggttctgtaaaagctcatggttcatctgcagcaatagttcctggtaacgatgaagtttctgagctgggaacaccacaacatggaatggataaccgttctgatcaaattatggataattcaacattggaacatggcttaattaatccaactgaaacggatgttcattatgccacatccagcgaaaacttcgtttataaggataatattacagacaaagtcactgggtatactgctgatgctatagctcttcacctagatggantgagttacaccngctgnacgagtt

SEQ ID NO: 62764 - DNA, 1718 bp, Glycine max
  Clone ID: PAT_MRT3847_27690C.1
cctcctgcggctcctgctaggctggctatttgcctggtgttgggggacaacggggtgtggggatttggggtactggagaccatcggtctggttttctcctgttttgccagacaggtacttgttgggtgttggggacatgcgtaatttctttgcccctctagaatcaccaagagagctggggaagcaagtagattacagttagtggaagctataatccaagttttggaagacaacaccgcgagtgagactcatgaatgggaactagtgaaattgaaatcatatgccttgatttctccatatttaccaaagaaataatagaatggaatagaaaggccttcaagaggatgtaaaacctcaaacacttaatattagaaatggcaaattttccaaaggtcccagataccttccaaatagtttgagaatattggaatggtggagatatccttcgaattgtttaccatctgattttaatccgaaaaaacttgtcatatgcaagtcacccaatagttgctttacgtcatctgagttggatggcttatccaaggcaagtttaaagagtacattttcctcaccacggaatattttcctcatggatctactcgacattccgtaatgagtgagcttttgtatccgtatcgaagaatccggttatctactcggcagctattgaatcagcaaccgctggtacagtaagcggtgttcaaatagccgttgttgggatcttctccgctgctagctcttcttcttactaggttttgcttagcaagcatcttcagaaaattagagggattccgccaaatttaaggtttttctttgcaataaactgtaaatccttgacttccttgggtacaagcatgttcctaaatcaggaactgcatgaggctgctggaaccactgtgtttcatttcccggaagcaaggattctagagtggtttgatcaccaaagcagggcaccttcaagttctttctctcgttattgcacctgtgggtaataacagttctggattgtttagtcccaaacccatggtgttcatcaatgtcaaagctcatgaatctgtcattagttggggtgatgaaatggttacatatgtgggtgtgataaagacttcattccttaaagcaagcggagtccatgtaatcaaacaggaaagaagcacggaggatattcaatttgctggactagagtgttcatttggggtgcatgtaggagttcaaattgttgtttcagtggtgacaaaaaaaacaaatttgcttgtgttcgagaaactgaatgctataggattgtgaattagtagtaaattattttcacttcatactttgaaatagcatattcagcttaatagtaatcctaataggctgtgaaattgtttgaagaaatgggaaaatgggtattagtaatattggatagtgaagacaatcgttttgtttataaagtgttttgagagacaggaacttgttggttgtttggaagattcataatttcttttcccttctttaaaatgggagaaatgagaaactattatcagtagacgtggcagcatctggagcagtgtaagcatatttttcgtgggcatgttgctttgaagttccattagttatgggaaaagcatttttaatgtctcagtcaatacatatttacatcatctgaaacttttttttcttttgcaggttcaagtttttccttctaattgctagtatgatcagactgctggctatga

SEQ ID NO: 62765 - DNA, 351 bp, Glycine max
  Clone ID: PAT_MRT3847_27691C.1
aaatccaaaacagctttaatttgccagcttagtaagacaaatagtacattctctcacaaactttttttaacacaacttttattatgggataagcggggctctcattatatgagggcacatatgctatttaacgaatctcatttattgttcagggggattcacccaataatagaaaacattttaaacaatttactatcagttgggtgggtagcattcctaaaaaaataaaaaatgttaataccacactttaacacttgcggcagaaacagataacataacccatgaaatttttgacattagcacaaacaaaacccagggttgcatgtggaattggatgtttcaataaagcat

SEQ ID NO: 62766 - DNA, 357 bp, Glycine max
  Clone ID: PAT_MRT3847_27692C.1
gtggggggggtttttttttttaataataatcatcgtcatattcatataaagtaatataccttcttccaaatttaggaaaaaaaaccataacttaaacttttctatcaaaaaaaaataaaaatacattacttaattttcaaattaaaaacaaataattctggagaggggtaaattttcttagcagaacagaagtgcttttttttaaaaattaaactttaattgcctatggagggaactcttcttccttccttattctgggggtctcttttgtgacttcgcaaggggccaggccacgtgattctaggaggatccagggggacacctaaatgcggcctggacccgaccctaacgagaaga

SEQ ID NO: 62767 - DNA, 475 bp, Glycine max
  Clone ID: PAT_MRT3847_27693C.1
aattcggctcgagtacggctgcgagaagacgacagaagggggaatccaaactctcactcttctgagctctcatttgccaaaaatcatgaggcaaaagaccaacaacgcagattctagtggttttttgggaagcatttcttccaattttctcagatcagtctcttcttcaaatcgcaaacccacttcttcaaaccctaaacccccaaagtctgacactgaaaacactcctccgactacccatccaaacattcccatcaatcttcaccaccaatcaaagcccaacgacccattttctcacagcaactcacatgtgaaggttgtggtgagaattagacctgaaaatagcaatggaaaagagggagatttgaaaattaagaaggtttcttctgatgccttgtgtgttggggacagaaagtttacgtttgatgaagtttttgatgccaactccaatcaggaagatgttttcagtcagtgg

SEQ ID NO: 62768 - DNA, 1306 bp, Glycine max
  Clone ID: PAT_MRT3847_27694C.1
ccacgcgtccggcttagccagaacagtacacaataggtccctatgatccctttacctgaaacactagttagtgactctctctgcgttaccaaaatgggtcgaaaacgtgcttccaaaaacacccacagggctctagtgttgcctactgttgtaaaaccacagccttccaatgtgaggcgatctgaacgcattaaaagtaaaagtttagttgttagtcaccctaacaccaattgtgacattgaagtcattgagtatataactctcagcgatggtgagaaagatgaagcagatactcaactggagcacgagtcggagctggcagataatttaggtgaaaagaagagtttggaacaaaaaattaactgtgccttgcaaagaatagatgctcttaataaggcagtagaattgttgaaatccaagctattttataagtggacgagaatattgccttttgtgaagccccatttaggagcatgtatattgactcacaaaagaagattaaagctttagcaagtgaaaatcaaagactaaatggaaagctggaaaatgctcttggcgaaaattgaagtggtatgtttctagattgttattatagtccttttgattcttattatggcataaggcctttttatttaatatcataatctcttgcaaattttttgattttccttgtcatgggttatcataatgttattaacatctttatgatttgaaaaaaatgtcatgatccatgagcatttgaagaattcatttctttcattaactgttactttcagttttggatcaagaaccttacttaagatggataatttcataaaatggttcttgtggttgtgaccacaatactatgagtttttttgtcctgtatgtagttttgtatctgaactttatatgagtatcaagagtatcaccttagaaggtaccttgaaattaattaaaccgtatttgttaattaattgagcttttagttaacttgatgtatctcagattatccttgatgactctacattgtagtacgaaaaagagattcgtgttttggtagatgtattgggtaaaacgaaggatgctgtttaaggatactatgatttcaaatgtggcaaaaactttagaagcatcaactcaagcaatcctaattcacaatgcatgctctgcttttgcagttaagagaaagagaaatgaaagctgaacaacttattattatgtattgtaaaaagtaaattacaaactttgagcctattggtgcttttgaacctttttgcatggatttctgcttgttaatgtggtccttttgaattctgtgattctc

SEQ ID NO: 62769 - DNA, 225 bp, Glycine max
  Clone ID: PAT_MRT3847_27695C.1
gaatgaccctcttgttgcgtatgctaagcctatctgggggttggacacctatctcaatatgtgggctcacgagtgcactgtgtgtgccatttacgaagctatgacgtatgatcggtgaagcgagcctgcaacttggaattccttgactcccgagctggcgatcccgatcattcattaactaaacacgtttaagatggagatacctttgcgtatagactgtcgcat

SEQ ID NO: 62770 - DNA, 281 bp, Glycine max
  Clone ID: PAT_MRT3847_27696C.1
gctatctcatggtaaaaactccaaactgcagtacagatgtcatgaaatttactgttgtggacacaagtttggccagtgaacagatgactaaagtggcagaactgagaagcttgccatttgaagttttaaaagcttgtacttttgacaatgactcagatgatgagaatacttctgcagagcaaacaaatgaatccgagtctgtcaataccacatgcttggaaagggggaagaatggcattactaaagccaataataccacatgcttggaaagggggaagaat

SEQ ID NO: 62771 - DNA, 509 bp, Glycine max
  Clone ID: PAT_MRT3847_27697C.1
cccccaacctatttatatattcggaacctggagggggggatttttttccaatgaattccccccccccccagttttaaatttggggggcaattacaatccaaaaggggtggggggaaaatttttttaaagggccccccagacagaaaacttttttttcccccccaaagggtgccctcccgttttttaaccataaaaggggtaaaccaaaaatttaaaggggcttgaaataaggttttttaaccttttttttaggaacagggacggggaaaacccttttttttaaaaaggccttcatttaattcatttttggattccccgggaaatgaaactttttaaaaaaattaaaattggttccttcccccgggggccccgtggggtttttgttttttttttaaaggttttttttttcggtagttggaaaaaccctattttttttaagggggacctttcttttttttttttttaaccctggaaaataaaccttgaacacgggggccttgggggttttt

SEQ ID NO: 62772 - DNA, 367 bp, Glycine max
  Clone ID: PAT_MRT3847_27698C.1
tcccttgcgtccgctcagactatatggttcgggtcgggattcaccacaacgccaggggagatggatatgtccaaagccagctgtttgcacaatcgtgctccaggttctattgtcgagggtcgttcgtcatattaatatttcatcattttgctttcctctgaaacctggcagcagggtcttttgtgagccctgaaagctgatttctcatttcattttacgggactgtagaggttgactatttgagagctgctggatccttccctttcttgttgagaagatgctgttgttggcttcattaaccagcagttatccagttctagaatgacgctggttgcattataatggttgctatgatggatttttacag

SEQ ID NO: 62773 - DNA, 125 bp, Glycine max
  Clone ID: PAT_MRT3847_27699C.1
ttgatacttacgatgacctaaggtgttcttctgcaagtacaatgatcccatctatgtaaaaatggaaaagttagaaactatgataaaactggcttcagaccgaaatatacaccagggtcctattg

SEQ ID NO: 62774 - DNA, 591 bp, Glycine max
  Clone ID: PAT_MRT3847_2769C.1
actgagcatcgtctagctatctcgatcgaactgtccaaggtcctgtcacttctaatacacacgacaaaaccagcctctccggcagtatacaccgcgccgctctccgcctccgctgatgcgctcttctcctccctcatcgcgcccgccgaccacctcctcaatttcagatcaagccgccgtccccgccacacatcaccgccaggtcccgcagacctctacgcttcacacgtgtgcaacgggctgaccgggtagcagtaccggtcccaacagggattcaactcaccaacacagcaccccacaccgatcacagaggctgtgtaaaattgtaccggtagttctgtttataataacaattctgcgtttgatatgtgtgtgcggaagtaggtactgcaggccatggcccacctacggtaaaacaatataccatgaacgtctgctttaaaaggctggtgcttatgtggaaatcttaattataactgtatgcacctgcagtggttgggttatcaaacatgccaccaaacaaccaagacccacgcagcggaaacagtaacctagagcctcagtagctgccatagggactataatcccctg

SEQ ID NO: 62775 - DNA, 153 bp, Glycine max
  Clone ID: PAT_MRT3847_276C.1
accggtcgtacgacggctgcgagagggggacagattgggatggttttgcacagttgtagctgcacagccaccgttaccaccgaccttggtatcgtccaaggaacccctttggaagacacatcgaatcggatttgctcgcaagctcaactccca

SEQ ID NO: 62776 - DNA, 263 bp, Glycine max
  Clone ID: PAT_MRT3847_27700C.1
atttcaaacctttctgggggtattatttaggttttcaggaaaacatatgtttttacaaatttgggggggaaaaaactccccccttttcaacaaaataatttgcgaacataccgcgggccaatttaaaaggacgtcaaactgccatcaagggaagggactctggcgaattttcaaaaactttgttcgcggacaaaataaattattaccgggggatcaacctttactacttacgccggaatacttcctcctactttgcgctgaaa

SEQ ID NO: 62777 - DNA, 271 bp, Glycine max
  unsure (1)..(271): unsure at all n locations
  Clone ID: PAT_MRT3847_27701C.1
tcagcatgttccatgcttttgaatttttcgctttgttaatgaaagnctaacgcacctgttctagttgccgcgttggcgagaaatccagtttccgatttgctccattgaggcatattcactattctgcaagggttgcctctactttctctttccatgcaactattcttattaattcgttcaattgtcgattgcacatttaggttgaacgaaccttacggcttgcactgcaccaccattatctcttaaaggacgcccgccctctaatacactc

SEQ ID NO: 62778 - DNA, 710 bp, Glycine max
  Clone ID: PAT_MRT3847_27702C.1
gagaaggctgtgaagaggataatgattgaggaagaagcaattgaaatgaggaacagaacaaaggtgctttcgcagttagctaagcaggccgtggaaggaggaggatcatccgattctgatttgaaagctttaattgaggagttaagttcattgagccactaatataccccgtaactacagtatgcacaggttgagtagatttcctcgagagatgttttgctatctaaatttcaataatttgaactaaattagtttcaagtcctaagaacttacatttcgagatatgcttaattcaacataaccctgttgtaacatttgttcgatttcttatgcaagccaaatttcacatttaagccttagtgttaaactgttaatgatcctcactcatagaacttgttcatatcttgtgaaccaactggataaaatattgattagaagcatgaaccttcaattcattatacctaagtttagcagaggtgaatggcatcttcggaatcaaggagaagcaaagaagtcaacagcaaaggggaaggaagttgcagataggagggatgagagtctttctgttgctcttctagctctaattgatgtggttggaattttcatcaattggatttggaagtattgaattagttttcctaactcggtcatagatgcacatggaaattcacggtttcaaagagaacgtgaaaagtgaaaactatgtgcta

SEQ ID NO: 62779 - DNA, 554 bp, Glycine max
  unsure (1)..(554): unsure at all n locations
  Clone ID: PAT_MRT3847_27703C.1
ggctcgagattctccttcgattcaattcaattccttatcttccccgttttcttgctcttcttgttccagttcttgaactcacccagctagctgaattccgaaaaagcccttttcttgtcccgaaatgccgaaccccttttcttccgcttagccaccaccaacccgccgtcgatccccgtttaagatgatcgtccgcacctacggccgccgcaaaggaaccctctcgggaacgtattcgggctcgtcctctctaaacgacgacgtttcggagccattcagggattccttatctcaggagattgacgaccctctctgcggcttcgcgttctcctcccaggactcgtcctcgcagcattggtccttcttcgattcggagatcggcgacttcggaaacggcaccggcgcatgcggagcaagggagtcgaagagggcgaatcgggcgccggcggaggggattccggcgacgtcgacgctgatggaggcgcangagttcggagagatgatggagcacgttgacgaggtcaatttcgctctcgacggtctccgcaagggtc

SEQ ID NO: 62780 - DNA, 888 bp, Glycine max
  Clone ID: PAT_MRT3847_27704C.1
cgccgcccactgcctctcacagccccccctcttctcctctgtgtgactctcccctcctccaatcaacactaacatcttctcacaacagcatcactaatccttttcctttgtgtttattttccatcttccattaatatgggtgttgttactcagatttatgatacccctgctgctgtgcctcctactaggcttttcaaagccatgacattagatttccataacctcttcccaaagcttgtggatagcatccacagcattgttttcacccaaggaaatggtggtcctggcaccatcaagaagatcaccaccattgaaggtgacaaaaccaagtatgtgctgcacagagttgatgcaattgatgaggctaactttgtatataacttcagcataactgagggcactgccttggctgacacattggagaaggtctcattcgagagccaattggtggaagctccaaatggaggatccattaggaaggtaagtgtccaatttttcaccaaaggcgatgctacgcttagtgaggaggagctcactgccaacaaagccaagatccaagggcttgtaaagctagttgaagggtaccttttggcaaatcctgattattgaaggtctttgtagttaattaataagagtttgactatggtgcaaattaataagccttgatggatttgcaggctcagcaccaaggctttcttctatgatattttctaaatttttctttgttatgaattgggagattaatcaatcataaattaatagtgtggttttgtaaaaaaaaaaaaaaaaaaaaaaaaaaaaaaaagacttgaaatatagttgttaaacagtccatttggacaggaacgaaatattcgtaaccaaaaaacgtgaaattcttaataaaaa

SEQ ID NO: 62781 - DNA, 375 bp, Glycine max
  Clone ID: PAT_MRT3847_27705C.1
ctccagcccacactcacacacaatgggtcacgcagccgggctccgcgcgggtacgcgctatgctttctcgagagacttcaagaagaagggtatgatccctctctcgacctacctcaagcagtacaaggtcggtgatatcgtcgatgtcgtagccaacggtgcggtccagaagggtatgccctacaaggtctaccacggcgagaccggtatcgtctacaacgtcaccaagtccgctgtcggtgtcatcctccagaagcaggtcggcaaccgatacatggagaagcgcatcaacgtccgcatcgagcacgttcgccactcccgctcacgagaagacttcctcaagcgcgtcaagctcaacttcgccaagcaacaaaa

SEQ ID NO: 62782 - DNA, 420 bp, Glycine max
  Clone ID: PAT_MRT3847_27706C.1
attttgccgtctgcaccgcgccgcgcacgcagccagcgatggctcagcctccacggcggcaagcgctcaaggttatcctccttggagattcaggtgtgggaaagacctcgctgatgaaccaatatgtgagcaacaagttcacgagccagtacaagacaaccatcggcgcagactttatgaacaaggaaacagccatcgatggcaagctggcaacattgcaaatatgggataccgctggacaagagcgcttccagagcctcggctcggcgttctatcgcggtgcagattgctgttgtctcgttttcgatgtcaacaaccaaaagtcattcgagtcgctggagagctggcaagaagagttcatgatacaggctgctcccgatacgtccagtgggcccttcccgttcgtggtgctgcgtaata

SEQ ID NO: 62783 - DNA, 223 bp, Glycine max
  Clone ID: PAT_MRT3847_27707C.1
gaaaccagtcgacattggtaatgtactttccagactttcaactgcaggcacgtggtttactcctaaactaattctcaaccatcagtgtatcaaggcattggcgggaaatgctcataagttccacacttaccatattttggaaactgaaaaaagaattgagaccattattaaactacagatccttacgggaatttaatatttaattcaattattatttaccggc

SEQ ID NO: 62784 - DNA, 424 bp, Glycine max
  Clone ID: PAT_MRT3847_27708C.1
ttggaatgtttggcaatgcactttagattattccggagttcaaaagctttccactttctaccaattatatgcatttagagttaggcatatcatgaaaaggacctaaaattgaatgattgaactagttagcatctttctgccactaattgtgtgagcggtcataaacttgattttgagcgatcttgattttaggtgaaggggaatttgaagtgaagtgatttatgattggaagtttttattttggaagtaattttgtagtgaaagttagtatcaaaatttcaacttagcacagaagttgtatatatattttttaggagcgaagttaatttttaatcattgtaactaaatatgcaaaagtttgccaaaattatgttttgttccatgcaaatctgtgtttcgtgagctgaaatgctcccccatacta

SEQ ID NO: 62785 - DNA, 248 bp, Glycine max
  Clone ID: PAT_MRT3847_27709C.1
ctcgagccgattttatgttgagaaatttgagtgttttttttttgtccacccatgttttgttgacacaaatgagctttcaattcaagtggtttatcttatttattggaattttggtaacttttactcgcccgttattaccatattgaaaaattgaacttttcttttttactagacccatttttgtgaccttattttgctgttttttataataaaaaaatgatccatagtattttgttgaaaattctgtt

SEQ ID NO: 62786 - DNA, 362 bp, Glycine max
  Clone ID: PAT_MRT3847_2770C.1
aaaaaacaaaacggggaaaaccgacttttttttaaggggattgaaagggaccacccccctcaaatataaacataggctccctgggatgggacatgggccatattttttttttttataaaaaaattatttattggttattatttaaaaagaggggcttattctaacaccatgaggctgggtttttgtgccacttttaaacggggggagccttggtgaaacttggggttgaccaaaggaccccaatttcttttattcttaaactcaaacacttgactttttgaaagggtgtaaaaatgggcaaaaacctttgggggaaaggccctaaaacaatcttaaaaatactactgactgggtgggggggg

SEQ ID NO: 62787 - DNA, 1279 bp, Glycine max
  Clone ID: PAT_MRT3847_27710C.1
cagcaaccacaaacaacacctcataaaagcaagcaaacacacaaaagaaagtaccctagagccgaatcggctcgagcggctcgagacggctgcaaaacagacaacagaagggggcaccagtcaacaaaaaataaaacaacacataataagcaagcaaaacacacacaaaaggaaataccatatattatacacaaaccaaaccatatatcttattctattttctctacctctctaccactctctttctttctccttctcctcaaccataatcatggagaatattggagaagagtacaagcattactgggagaccaacatgttcctccaaacccaagaacttggcagttggggattggatgaggctttatcagggtactacgattcgagttccccggatggtgccgcttcatctgcagcatcaaagaacattgtttccgagaggaatcggaggaagaaactcaatgaaaggctctttgcgcttagatcggtggtacctaacattagcaagatggacaaggcttcgattattaaggatgctattgattacatccagcacttgcacgagcaagagaagattatccaagctgagataatggaacttgaatcagggatgccaaagaagagtccaagttatgattttgagcaggagctgcttcctgtggttctcaggtccaagaagaagagaacagagcagctatatgattgtgttacttcaagaaactccccaattgaagtccttgagctgagggttacacacatgggggagaaaattggtgtggtcagtttgacatgcagcaaaaggacagacacaatggtgaaactgtgtgaagtgttcgaatctttgaagctcaagatcatcactgctaacatcacttcgttttcagataggcttttgaagatagtcttcattgaggcaaatgaagatgagaaagatcatttgcagataaagatccagacagccattaaagctcttaataatgaccctttaagccccatgagcatttgaggaagaaaatatataaattggggttctcattttggggtcactagtatataaatagaaagtttaggaaccgtgggttttataggagtttctcgtatttggtttcgttaccccctttttttcttcgcactcaacattccccttaatcaggactcttcttcaactttattatcagggaaagtttgctagtttcatccccttgtgtgcttagtgtatcaattaatgttattcttataataaaaagttcacttcacatcatcgtggatcttttgtttt

SEQ ID NO: 62788 - DNA, 806 bp, Glycine max
  Clone ID: PAT_MRT3847_27711C.1
cggcgtacgagaaaatccgcctcagagggctcttctcgttctcttttacattccaaagccaacaaaacaaaaaactcactaaccctaaccctacccccacccttttgaaatgaacttcaaaccctggctctctttcctcctcttggccctggccctggccatggtggctgaggcttctagtgttcatcatgaatatggcttccatgttaatgctgtggtccatgatctcattggagatgacaatgagatgttgctagattccgaatccaatcgccgaaccctcaccgggcgacaacggtacattagctatggtgccctaaatgccaacaatgtgccatgtggtaaccgtggaagatcctactacaattgccagcagaggggtcgtgccaacccttacaatcgtggttgcaccaaaatcacacattgtgctagagacaccagctagatgaacaagtcatgaagctggagagggaaatatatatgatatataattatatgttatataataaagtattaattgtggttctagaataacttacgtgagttcttgccacacttttctacataagcctcccattgaacagattctattttaatttgttgggggaggttatttaattaattttttattcaattttcgagtgtttgtgatgctaatgttatatggggactaattaattggtctctctctctataaaaatttttaaaaaaaaaaccgtgtacaattcttttcctcttgttttcaaatatatatggagcctatagaaaaatatctaataaattaaaaaatttagaaagaaaaaaca

SEQ ID NO: 62789 - DNA, 513 bp, Glycine max
  Clone ID: PAT_MRT3847_27712C.1
taattattcctaccaggcaaaagttcatcacattcacaacttgtaattattcctaccaggcaaaagttcatcacctcttcttgttctcaccaaatagactatttgacccagagatccatgagtcagacaatgaaactccattcatagacttttgttgcagatctattcatctggtgaaattcgttgaccatgtcttatatttttttcgtcctttctctatttgctttgctctatccttggttctaaccatgaccaatacacatcttctttctctatttgctttgctctatccttggttctaaccatgaccaatacacatcttcaacgtaacgaccatgattttcttgattaattaaataaagtaaaagttctaactcttttgttatatttaattagcttatttaatagtcacaattacatgattatttcttatcctccataaaagacatgatcgatacccacacaaattgatttgttgcatatctactcagatctatgtgttagttgagtgaa

SEQ ID NO: 62790 - DNA, 428 bp, Glycine max
  Clone ID: PAT_MRT3847_27713C.1
tcgaccgcgcgtccggccacgcgtccgcgacagaaggggacttgggttatacaagataaaaaccatacaccaaactcagccacaatggaaaagttttttataaaaaaaaaataagaggtacaaaagttggaaggaattgggataattaagttccatggttatgtcatggtgtcatttcacaccaaaataaaactaacttacaataagttaattatataaattctatcacaatcttatattaatttaccttaaaattaggatcaagatgttgaacccttgtcctttaaagcattacctccactttaagagaaatttgaactcatgataagaggatgggttattttacttgatatgttatttgaaatggaaactataaacaaaaaataattggagattattaatgaacaaagtcaccaccccttaaaaac

SEQ ID NO: 62791 - DNA, 648 bp, Glycine max
  Clone ID: PAT_MRT3847_27714C.1
caaactcacgctaacactcttccaaccttcaatggactccatttgccctattgggttgcagtgtgccactgaaatctctgctcttctctctcctccctctcctcttcaagttcagaaatattatcacgaccttttgactgcaagagggtgcagtggtatcaaagtcaaacaggatggcaactttggaaaaggtttatatgcagacatggacttcaaagagggggaactggttctgaaggaccccatgcttgtaggagctcaacatcccctcaacaagattgattgtttggtgtgtagcttctgcttttgttttattggttccatagaacttcaaattggaaggaggctttacatgcaacatctaagggccaatgagagtcatggttgtgaagtgggaagctcttcaaaacactgtcatgaaatggattcttctgatgaagaggagagcacacaacaatgtacttctggtagttccaaaactaaagttcctctccctgaaggtattgtggaatcgttaatgaacggccaattggtgttgcctttctccgagaagttttccttgccgccagctgttccatgccctggtggatgtggagaagcttactattgcagtcaatacctgtagcatgtcatgtgcagaggctgatt

SEQ ID NO: 62792 - DNA, 498 bp, Glycine max
  Clone ID: PAT_MRT3847_27715C.1
tgcaagtccaaatctaacattttcatggggtcctttggattccaactcttcttcatggttagagttttatcatgctgttaaggacactgtggatcaagaagagaggttgctaccacaagattgtatggctacatgttcatagtgaccacttagtaaattgttccctagatgatatatactataggttgtaatagattggttagatatgatgaaatttggtcaatagcatacaatggtttttctcaaaggacagagtgtatatagataggcagggatgcagaagagtgcaagtttcccattctgatgttggaggaaatgaaggtttttatgtctggtgagtttacacagatgagatagatctatatgctataatcaaaattttataattaagaattattttgtttctcttgcaaaatggaatcttggcgttttattctcatataattgtttaaccttaagaatgtttaatcagatcaatttgtatactctctttcaaaa

SEQ ID NO: 62793 - DNA, 367 bp, Glycine max
  Clone ID: PAT_MRT3847_27716C.1
cagctatgctggcatacttgtatcctaggtgtacaatcaagagctattgcttttacattgtcggtttacagaccatgaaggactataaggacgttgacactggctgagtcaacttagagtgcaggacctactagaatcatctatgggtgcacctatttgtactaacaatctaaactgcggatgtcgatgttcctattttactcattttccaaggatggtggattatactcatggggactctgctttggattgcatatttcgtgaacgaagggtgagcagataatttgacccaacgaagtggtcatgtaatgattgaagcagtgacttgtagacacaaactagcttgattcatggccacgagatttgt

SEQ ID NO: 62794 - DNA, 943 bp, Glycine max
  Clone ID: PAT_MRT3847_27717C.1
aaactcacatgcatgtatctatgaatgatggaaccaccacaaacgaggttgatgatcaacgttttcatagtgagtttcttagcactacttgtgaacttggtggtgggagtgctcggcgctgataactatagcagagatgattttcctcttgactttgttttcggttcaggaacctctgcttatcaggtggaaggagctgctaacaaagatggaagaactcctagcatctgggacacctttgcctacgctggatatgcccatggagaaaatggagatgtagcctgtgatgggtaccacaagtacaaggaagatgtgcagctaatgctggaaacagggcttgatgcctatagattttcgatttcatggtcaagattgttaccaaatggcagaggacccgtcaatcccaaaggattacagtactacaacaatctcatcaacgaacttatcagcaatggaatccaaccacatgccacgctacacaactttgatcttccacaggtacttgaagatgaatatggaggatggattagtcgtgacatcatgtgtgttcctgatctcttgtactataattcattacaaaaaggggtatttttgcatggtctttcctggatttgtttgagttgctagatggatacaagtcgagctttggcctatactacgttgatagggatgatccagagttgaagagatacccaaagctctctgcaaaatggtacaaccggtttttgaagggtagaaggacctctatagttggaactattgaacttgagaaggatccatcacttgtttttgtttcccaattatttgagtaggttctttattaatttcttttcacaagatcatgcttagtggtgttattagctatgcttacttttccttgtatacatacataaaataagaatttatgtggagggagcctagctgcccgggcaaaattcctctc

SEQ ID NO: 62795 - DNA, 314 bp, Glycine max
  Clone ID: PAT_MRT3847_27718C.1
gcgccaaattctgtcttctagcgcaagtgatttcagaactgcagtggtgagcaaaaatattatcgcctcaagctactgcaatgcatgagggaactatagcaattatcattgatagctctgaaagtactgactgcaacatagttggagcaatgcttttggttgatacttatcataccaatcctgaaaatgcaagaagtagtatttttgttgcgcctgtcataggcggaaggcccaatcgggtggttacatgttcgaataccattacgcagattgaaccacacatgaatacaaggtgtcagcaacagagtaccact

SEQ ID NO: 62796 - DNA, 1840 bp, Glycine max
  Clone ID: PAT_MRT3847_27719C.1
ggctcgattcaatgaagaaaattaaaacgaacatgcatgtatctatgaatgatggaaccaccacaaacgaggttgatgatcaacgttttcatagtgagtttcttagcactacttgtgaacttggtggtgggagtgctcggcgctgataactatagcagagatgattttcctcttgactttgttttcggttcaggaacctctgcttatcaggtggaaggagctgctaacaaagatggaagaactcctagcatctgggacacctttgcctacgctggatatgcccatggagaaaatggagatgtagcctgtgatgggtaccacaagtacaaggaagatgtgcagctaatgctggaaacagggcttgatgcctatagattttcgatttcatggtcaagattgttaccaaatggcagaggacccgtcaatcccaaaggattacagtactacaacaatctcatcaacgaacttatcagcaatggaatccaaccacatgccacgctacacaactttgatcttccacaggtacttgaagatgaatatggaggatggattagtcgtgacatcataagagacttcacatactacgcagaagtatgttttagagagtttggtgacagagtgttgtattggaccactgtaaatgagcccaatgttttcgccttaggtggttatgatcagggaaacagcccacctcgacgatgttctcccccattttgtgctacaaacgacacaatgggcaactcaacatatgaaccctacttggctgttcatcatattttgttatcacattcttcagctgctagattgtactggagaaaatatagggacaaacaacatggatttgttggtatctctatttacacgtttgggatttttcctcaaacaaatacagaaaaagacagggtagcatctcaacgagcccgtgatttttttgttggttggattatggaacccctgcaatatggagactatcccatttccatgaagacaaatgcaggtgaaagaattccggccttcacaaatcatgaatctaaacaagttaagggttcatttgacttcataggcgtaattcactacaccaatctcaatgtctcagacaattctgacgcccttaagaaccaactgagagatttcactgcagacatggcggcaaatatctttggagaggatctgttttcaaatgaagagtaccttataacaccgtggggtttgcgtcaagagttgaataaattcaagctcctttatgggaatcctcctatatttattcatgaaaatggtcaacggacagcaagtaattcgtcactgcaagacgtgacaagggtgaaatacttgcatggatatattggtagcgtgcttgatgccttaagagatggatcaaatataaaggggtattttgcatggtctttcctggatttgttcgagttgctagatggatacaagtcgagctttggcctatactacgttgatagggatgatccacagttgaagagatacccaaagctctctgtaaaatggtacaaccggtttttgaagggtagaaggacctctatattggacctatttgaacttgagcaggatccaatcacttgtttttgtttcccaattatttgagtaggttctttattaatttcttttcacaagatcatgcttagtggtgttattagctatgcttacttttccttgtatacatacataaaataagaatttatgtggagggagcctagctgcccgggcaaaattcctctcaaatattggtaatgtttaaaagagatattccttttctgaagatattttactaaaagtaatatgtgaaatgtaatttagagtaaaagctttcatc

SEQ ID NO: 62797 - DNA, 263 bp, Glycine max
  unsure (1)..(263): unsure at all n locations
  Clone ID: PAT_MRT3847_2771C.1
gggaagttgcaaagggacatctttgctcgaaatgcaatccacttctacaagattagttcagctattggtgttgttagttcacatagtaatttgccccaaaagctgaatgatggcttagacattgatttgtcacttgttcgtatcttgtgggttgatggttcaggacagcatagatgtcgtgcggttcctaaaaaacgtttcaatgatattgttgcaaagaatggggttggcttagcattgcgactttgggattctntcttata

SEQ ID NO: 62798 - DNA, 555 bp, Glycine max
  Clone ID: PAT_MRT3847_27720C.1
gtggggcctaaaccctcccctgattttatggtgggaaacaaaacaaaataaggccttttggaacaaagattcaaaggaatactgaacagggtggtattaacaatacttaacataatttgcgtcttgaaacataacacattaagggcgtgcctcatttgggggggagccgactttttcactgcaaaaagggggggtttccttataaccaaaccaaccaaaacaaggggtttttttgaacaaaactagagcctttactttgagggctgcagccattttaatgccattttggtacggatcaaaaaaagggaaatccaagtctttagtgcctcaaacaaactcaaccagtgttttggatgccagcgaaaacacccttgatagtgagaatgagggtgttttctaaaccaggaacatatttacttgttggggccaggtttataaggtcatacgctgatttccgctgcctttgcaaatacctttgatatgggggggcgcaccttcacattgtccttgagataccgggttcggttaaatgggtaaacttggacaattttgggg

SEQ ID NO: 62799 - DNA, 962 bp, Glycine max
  Clone ID: PAT_MRT3847_27721C.1
cgattatgctacacaaggagcacatggtggattctcagggaattttctggacgggaattctcaagctggggattctcgctttggttctggaaatgactttatgtctcaggactacatgggccatggatcacaaggtcttttcactcaggtgggattcactgatcccttgcaagatgatgcaacgcaaagccatttcagtgtggcaaatgccaaccctcttcagtcccagatgagttctctttactcccaaccttttgctcactacaaccacagccgcttaacatgcaggctacccaacagcagcctcaggctcagaactcccaaaatcagaaaatccactataacggttgaggaactttaggagcttaatgtggctttgatgggttatatagtctttgcaatcagcaactggggttgtgcctgtcttttgtgctgaaatacgtttgcatgagacatccgaaggattgccttgggatagctataccgaggaactggtatatatgatttgagttgatggaattttggggcattacgaagatacaagcaggcgcatcccgggctgaaaaatgataagataaccccctttaccttactgaagttttgtattgtttgggattaaggtgaaattgttcgagaaagcattacatggaatggttttgtcgaaagggttttaatcttgaagcagaaggggcggtttacatgtcggtgaaatactgaatatagtaatccatactgcaccaatcatcgccaaggaagttattattgtacagaaggcagggatgcggtgaaccctttcagctcttcctgacatgtaatttaaactcgatattatagacacaagttatatatgcaactattgccactcagaattttctgtggcatataaaggtgtgataattgttttccatgtaaattagttatcttataattgcaaccaaagggggggggggggggggggtggg

SEQ ID NO: 62800 - DNA, 387 bp, Glycine max
  Clone ID: PAT_MRT3847_27722C.1
ggaagacgagggagaatgagggttggattcaagggcggtgacgcggttgataaggctatcaagcttttccgaaacgtggatatggctagtagcgagtttggcaattgcctcctgaaggcgatcaaaggacttggaacgggtagattcagccatggctcaatgaaagcaccagttggtatgacccgaggtcaaggctagaattcgaggttctagcacctcctagagaaaaggtaaagaaaaggaatttttttcgtattattgatttctgctttctggaattacattgatttctatttataagctttccatttgattctagaattatgtaattctaacagaatttggcatatgtgccttggaggaatttgcaaaaagatatgggtcatg

SEQ ID NO: 62801 - DNA, 5181 bp, Glycine max
  Clone ID: PAT_MRT3847_27723C.1
ggaacgtagctgtggaccagctagctgaaaagataagtgctactggattaaaggttgtgaggctttgcgcaaagtccaagggaagctgtgagttctcctgttgagcatttaactctccactatcaggttcgacatcttgacacatcagacaagagtgaacttcataagttacaacagctgaaggatgagcaaggcgaactttctagcagtgatgagaaaaaatacaaagcacttaagcgagcacgcgtcagggagatttctcagagtgctgatgtgatctgctgtacatgtgttggtgctggagatcctcggcttgcaaattttaggttccgtcaggtacttattgatgagtccactcaagcaactgaacctgagtgcctcatacccttggttcttggagcaaagcaggttgttcttgttggtgatcattgtcagcttggtccagttattatgtgcaagaaagcagcccgtgctgggttagcacagtcactttttgaacgcctagttctacttggtgtcaaaccaattaggttgcaggttcagtaccgtatgcatccatgcctttcagaatttccctcaaacagtttctatgaaggcactctgcaaaatggagtcactgttaatgaaaggaagtcttctggaattgattttccttggccagtgccaaaccgtcccatgtttttttatgttcagatgggacaagaagagataagtgctagtggaacatcttatttaaataggactgaggctgcaaatgttgaaaagattgtaactactttcttaaaaagtggtgtggtaccaagtcagattggtgtgataacaccttatgaggggcaaagagcttatattgtgaactatatgtcaagaaatggtgctctcaggcagcagctttacaaggagattgaggttgctagcgttgattcctttcaaggaagggagaaagactacatcattctgtcttgtgttagaagtaatgaacatcagggcattggattcctgaatgatcctaggaggctcaatgttgctttgacacgagcaagatatggcattgttattttgggaaaccctaaagttttgagcaagcagcctctatggaatagtttattgactcactacaaggagcatgagtgcttagttgaagggcctttaaataacttgaagcaaagtatggttcagttccagaaacccaagaagatttacaatgaacgaaggcttttttatgggggtggacctggaattgcatctaatgataattttggtaacgttggatctggtgctggcacaagttcagatcggaggagcagtcgaggaaggggatcttatatacctcctggtccaccaaatggaactcataagcctggagtgcatcctgctggatatcctcctgtgccaagggttcctttgcctcattttcatggtggtccccaatctcaaccatatgccattccatctcgcggggcagttcatggacccgttggggcagttcctcatgttccatctccagggagtcgaggttttggggctgggagaggtaattctggtgctcctccaattggcaatcatctacctcatcaacaaggcacccaacagcctattgggaatattggatctacatttaacttccctgctctagagaatcccaacagccagccatctgttggtggtccatcatctcaacctgggtttgccaacaatatgcctgttcaaggtgctggccaatcatttcgtgatcaattttctatgcctggaatgtcccaggacttcttgggcgatgacttcaaaagccagggatctcatgttccgtataatgtcactgatttctctacgcaggcttctcaaagtggatatgctgttgattatgctacacaaggagcacaaggtggattcccagggaattttcttaaccagaattctcaagctggatattctcgctttggttctggaaacgactttatgtcacaggactacatgggccatggatcacaaggccttttcactcaggtggggttcagtgatcccttgcaagatgatgcaacacagagccatttcagtgtggcaaatgccaaccctcttcagtcccagatgaattctctttactcccaaccttttgctcactacaacacacagccgcttaacatgcaggctacccaacagcagcctcaggctcagaactcccaaaatcagaaaatccactataacgtttgaggaactttaggagcttaatgtggctttgatgggttatagtctttgcaatcagcaactgggtttgtgcctgtcttttgtgctgaaatacgtttgcatgtgacatccgaaggattgccttgggatagctatatcgaggaattggtatatatgatttcagttgatggaagtttggggcattacgaagatacaagcaggcgcatcccgggctgaaaattgataagataaccccctttaccgtactgaagttttgtattgtttgggattaaggtgaaattgttcgagaaagcattacatggaatggttttgtcgaaagggtttcgatcttgaagcagaaggggcagtttacatgtcggtgaaatactgaatatagtaatccatacggcaccaatcatcgccaaggaagttattattgtacagaaggcagggatgcggtgaaccctttcagctcttcctgacatgtaatttttcaactcgatattatagacacaagttatattatgcaactattgccactcgtaattttctgtggcatataaaggtgtgataattgtttccttgtaaatgggtttgccgataggggcttcatctgggtgctgtgggggcggtttacgcggcggtgttttaccgcctggtgtattccttactgcacctggcagcgccaaggaagttattatctcttttgtaggacggttgatttgtgaatgattctcggaggttcaatgtatctttgtcacgagcaagatatggcattgttattataggaaaccctaaagttatgagcaaacagcctctatggaatagtttattgactcactacaaggtagttcttgtgttttgagattttactgtcggtggtattttttttggtttaaccagaggtatctgaggcttcttatttggcacccgactaatcctctcccattttggggtaaagtggtacctctagttgcaactccatgcccatgctggggactgaaccccggaccttggttaagggacccaagtgccaaaccacttgtgccaacaacttttggttactgccgatggtattgatttcataaaaaatgtgctggtatagcaagaaccacaagttgatttgaaatgtttttgctaattgtagaattctattttttataattgcccgtttatgattcatcattaaaagttctcccatttagtaagagtgatttcatattgatctcttttctatagtgttgttttgttttctaaaaaagctgagcttttcttccccacttcctaaacaggaacatgagtgcttagttgaagggcctttaaataacttgaagcaaagtatggttcagttccagaaacccaagaagatttacaatgaacgaaggcttttttatgggggtggacctggaattgcggctaatgataattttggtagtgttggatctggagctggcacaagttcagatcggaggagcagtcgaggaaggggatcttatatacctcctggtccaccaaatggaactcataagcctggagtgcatcctgctggatatcctgtgccaagggttcctttgcctccttttcatggtggtccccaatctcaaccatatgccattccatctcgcggggcagttcatggacccgttggggcagttcctcatgttccatctccagggagtcgaggttttggggctgggagaggtaattctggtgctccaatcggcaatcatctaccacatcaacaaggcacccaacagcctattgggaatattggatctacatttaacttccctgctctagagaatcccaacagccagccatctgttggtggtccatcatctcaacctgggtttgccaacaatatgcctgttcaaggtgctggccaatcatttcgagatcaattttctatgcctggaatgtcccaggacttcttgggcgatgacttcaaaagccaggggtctcatgttccttataatgtcactgatttctctacacaggcttctcaaagtggatatgctgtcgattatgctacacaaggagcacaaggtggattctcagggaattttcttaaccagaattctcaagctggatattctcgctttggttctggaaatgactttatgtctcaggttgttgaagtttgctagcaatgagcattttcccacatgattttggttgacgtgtcctttatgctctaattttctcttttaattcacaggactacatgggccatggatcacaaggtcttttcactcaggtgggattcactgatcccttgcaagatgatgcaacgcaaagccatttcagtgtggcaaatgccaaccctcttcagtcccagatgagttctctttactcccaaccttttgctcactacaacacacagccgcttaacatgcaggctacccaacagcagcctcaggctcagaactcccaaaatcagaaaatccactataacggttgaggaactttaggagcttaatgtggctttgatgggttatatagtctttgcaatcagcaactggggttgtgcctgtcttttgtgctgaaatacgtttgcatgagacatccgaaggattgccttgggatagctataccgaggaactggtatatatgatttgagttgatggaattttggggcattacgaagatacaagcaggcgcatcccgggctgaaaaatgataagataaccccctttaccttactgaagttttgtattgtttgggattaaggtgaaattgttcgagaaagcattacatggaatggttttgtcgaaagggttttaatcttgaagcagaaggggcggtttacatgtcggtgaaatactgaatatagtaatccatactgcaccaatcatcgccaaggaagttattattgtacagaaggcagggatgcggtgaaccctttcagctcttcctgacatgtaatttaaactcgatattatagacacaagttatatatgcaactattgccactcagaattttctgtggcatataaaggtgtg

SEQ ID NO: 62802 - DNA, 185 bp, Glycine max
  Clone ID: PAT_MRT3847_27724C.1
aggatcgacagaaggggagaccacgacgaaagacaaactgaatagccaaacacagaggcccaaagagaacatgagcagaaatgacagccgaaccaggacataacaagaaaaagcgcacgcggggggaaaccagaaaaagcacccagggacaaagacaggcaaagttggagaaagccacacactca

SEQ ID NO: 62803 - DNA, 361 bp, Glycine max
  Clone ID: PAT_MRT3847_27725C.1
ccatctaaacctaaatgtctggtttttcaaccacacaatccagagaatacacccggacacggccaggtactcatgatctgagtattacatatattagactatactcataccccaggtcacctatataggagatagctcctggaataacatgcaaaacaaactactgacatggaggctgagagctgaaagcgaagccatcctaattttattatcacatcagacatttcaatttcatctgagcgaccagttctcaagatgcataaactttgagagattgccttgagaggtaaattatcgctcgggactgtgatgaaaggctctggattacaatgcctgttgcaatttctctaacaaacaaaac

SEQ ID NO: 62804 - DNA, 211 bp, Glycine max
  Clone ID: PAT_MRT3847_27726C.1
tgggatttgcaaaaaggggtcctccttgggtcccggaataatttggggcaaggtctcttcttggttctgaacgctgcttaaatggtgggcttgatggtcatttgggcacggattgcaaagctggggaattgaagaataagtggtaaccggcttgtgggagaaaagacatatagaaaagaactgcaagaacagccccaaaataattgagcac

SEQ ID NO: 62805 - DNA, 911 bp, Glycine max
  Clone ID: PAT_MRT3847_27727C.1
cccccacgcgtccggaagaaagctgcacgagtggtgtttatcccttctccaggagttggtcatcttgtgcccaccattgagttcgccaagcttctcatcaaccacgatgagcgtctctggatcagtgtgttggtaatggacaccacaagtgctgcttacacagagtcccttgcatcccaacgtctccagttcatcaacctccccgaatcaccctccaaatctgaaccagcaatgacctctctcctcgaacaacaaaaaccacacgtcaaacaagctgtctccaacctcatctctgacgactccgccccagcactcgccgcctttgtcgtggacatgttctgcacaaccatgattgatgtggccaaagacttgaaggttccttcgctggtcttcttcacctcaggccttgcctttcttggtttgatgcttcatcttcacaccctgagggaacaggacaagacccacttcagggagtcccaaactcacttgctcatcccctccttcgccaacccagtcccgccaacagctttgccttctcttgtgctcgacaaggactgggaccccattttcttggcctacggggctggcctcaagaaagccgatgctattatagtaaattcattccaggagctggaatcccgtgcggtgagctccttctcctcccacgccatttatccggttggacccatgctaaacccaaaccccaagtcccatttccaggatgataacgacagggacatcctcgactggctagacagtcagcctccctcctctgtagtattcctgtgcttcgggagcaagggttcttttggagaggaccaggtcagggagattgcacgtgctcttcaggacagtggcctccgcttcctatggtccctgcggaaacctccccccagtgattccagtttcat

SEQ ID NO: 62806 - DNA, 1467 bp, Glycine max
  Clone ID: PAT_MRT3847_27728C.1
acgggtggtcgtggaattccatctttggttatcgttgatcctttttggcagcaacactatgtttaccctgatgagaaaagtttcaacttttcttcactgtgtgattttctttctgagtttcttaatggaaccttacttccataccagcagtcagaacatgttcttcaaggtcaaagggaggccacccatcctccatttgttaatttggattttcatgaggtggattctatacctcgaatcatggctcatactttctctgaacttgttattggttttaacctttctaacaaagaaaatacttctaattcatggaataaagatgtcctggtcttgtttagcaatagctggtgctcattttgccaaagaatggaaatggttgttcgtgaagtatatcgggccatcaagggctatgtggatatgttaaacaggggatctcagaatgtgaaagaaaatttgaatcatgtcatgatgaagcttccggaaatctacttgttggactgtacattgaatgactgtgatttgatactgaagtctgtagatcagagggaagtttatcctgctctgatattatttccagcagaaaagaagcagcctcttctttatgaaggagatatggctgtaattgacgttatgaagtttgtggctgagcacggaagtaacttccatcaacttataagagacaaagtggcagttttgtgggtatctgaaggagcagtcaagaatcagaacttacatgatactttgcaaactgatatccacccggaatcacttcattcacgtaacaaatatcatggagccccaggtccagacagaatgctagaccaggtggtcagacctaacctgatgaattcacctgcatcaaatgaactgcatgaagcatcacctcacgtggttattggttcagtgttaattgccacagaaaagcttttgggggttcatccatttgatggatcaaagattctcattgttgcagccaatcaagtaactggatttcaaggtcttattctcaacaaacatatacaatggagttttctgcctaaattggaagaaggcttggaaaatttgaaagaggctcctctgtccctggggggtccagtaatgaaaactggaatgcctcttttatccttaactagaacagtttccggaaataatttacctgaaatcatccctggaatttacttccttgatcaagtaacaacaattcgtaaaattgaggagctgaagtcagcaaatcaaccggttggggattactggtttttcttggggtattcaagttggggatggaaccagttatatgatgagatggcggaaggagcttggaacttgagtgaggatgcaacgagaaatttaaattggccgtgattgccatttattgtccatctttactgttgtgctaataacatttctttcatccttctaaatgatagaattaatttactaagcatacagtagaaagtaatttccagc

SEQ ID NO: 62807 - DNA, 112 bp, Glycine max
  unsure (1)..(112): unsure at all n locations
  Clone ID: PAT_MRT3847_27729C.1
ggatggagcccagagtgtgatnaactcatcatggcggccattaanncagaactatgttgacatgggacgagatnctgtcnccactgaggtacagaatcgangtgttnncatg

SEQ ID NO: 62808 - DNA, 257 bp, Glycine max
  Clone ID: PAT_MRT3847_2772C.1
attaaacacaagtagaactctttattttataatgtatatcatatatgataaagggaggcttatacatgtacctcttccagctattaaactgttcaacactatcagttcacttctactaatatgtggaatcgaattatgtatgatattatatctgtcatatcaaatccaattatccatcgatacattgagtggcaaatcatcaattaccatgtgaggatatctgccctggccacattcaactgcgaccactattgatt

SEQ ID NO: 62809 - DNA, 585 bp, Glycine max
  Clone ID: PAT_MRT3847_27730C.1
ccacgcgtccgctctctctctctttagatgaataataataataataattaaggtgtctctgtctctgtctgtgtctgtgtttctgtttccgacccattgactccgatgaattccccacccaagttgttgttgctgtctcttctctttctcactctcttcactctttcttcctcctcctccctcccggagctccgatctctcctcgaattcaagaaaggcataacccgagatccggagaagcttctagactcatgggcccccaccaccgtcgccgagtccaccgccacgtgtccttcctcctggcagggcgtggtctgcgacgaggagtccggcaacgtcactggaatcgtcctcgaccgcctcaacctcggcggcgagctcaagttccacactctcctcaacctcaagatgctcagaaacctctcgctctccggcaacgacttcaccggccgcctaccgccgtcgctgggatcactttcgtcactccagcatttggatctttcgcagaacaagttctacggccccatcccggcgcggatcaacgacctttggggcctcaattacctcaatttgtccaacaacaac

SEQ ID NO: 62810 - DNA, 207 bp, Glycine max
  Clone ID: PAT_MRT3847_27731C.1
cacgatttgcaatctggatatagtggtaaaattagaagaagcgtttgagtaattcactatagtaaatacaagttctaaggagtctaggaattatttcaaataattgttgttgactaaggagttaaatttttagtcctattttctagccctgtaattaaatgtgacaaaaagtttattccaatggaaataaaataagagtgtagttta

SEQ ID NO: 62811 - DNA, 240 bp, Glycine max
  Clone ID: PAT_MRT3847_27732C.1
aaaaaacgcctttcagcatttccaaaaaccgggtgatcagttttggtgtttacggggtcagaatccaatcgagtccttaacaggctaaaaactttacaaaaaaaaagggggggggtttaaaaattcaaacgagtccttagcaaactaaaaacatcacaaaaatggaaaaatcccagtgggggaaaaaaaaagtggcgggctcgtgattggttccgaatccaacagaaaaattgcggacaa

SEQ ID NO: 62812 - DNA, 547 bp, Glycine max
  Clone ID: PAT_MRT3847_27733C.1
ggctcgatcgctgcgtaatcagatcatatggtatggagcatggcagaggcggtcgagtaaggaaaaagaggagctgacctcaacccttgtaagttggacaatgacttgactattggcgtgatctctttgctttctaggatcattaatacaggaaaattaaagtatccttttgctaataaagctcatttgaaaacagtggcatttgctccaaccaaattcactacaaaagggaaaaatacatgcagtatcattttaaggactggtcggctagaattcggctcacactgatacatgacgcttttcgagtgagggagaactccatagaaattagaaggagagagagaaatagaaactaaattttgaattcttttttttcctactcttgtatcagtcattacaatagtatatatagccatgccacacctaagaacaaaatacaataacaaaatgcagttacagaatgctaacaattgccaaatgctttctagaacctactgacttattactcgggcttaggcctcatatctaaaagaaacatatggaaata

SEQ ID NO: 62813 - DNA, 1324 bp, Glycine max
  Clone ID: PAT_MRT3847_27734C.1
gttccttggactgaggaggaagaagagaaattgaggagcctgttcacaagatttgagttcgatgatgcaacaacaagagacatcttaggaagactgtacttgaatgactcggtagattccaggccaaatgtggctcaacaacttgtttggtctatcagcacttgtgaggatgcaaatgccagaaatgaaatgaagtcactagtcaagggtcttctttgcaaaagctctgtgtatgagaagaaccatcttgacctcagcaaggaggatctatatgctgtttgtgactcgtgtttgagttcacttatcagtctctttgaggaggcatctgacaccacccctcctgaaaggttgatgaagaaggactcaaacaagcctctgattgagcgaatatcaagacaggttgacaacatcaactggttgctggaaattatgcttgatggacaagtggcagcggactttgtggatatatgggcacatcagcaacaacttcttaaaatgcatgacattgcatcccctatgatcagatatgaactcagtagagtgtcagcaatcttatttgttgcaatgggtacaagaaaactgcaatgccctttggaagctagatcagggcttctccaagcatggtttggacctatgctgttggactttggttggctgcagagatgcagaaaagggcttgatatgaggaccttggaagaggctatggggcagacacttcttactctacctttaaagcagcagtatgtgctgttcatggaatggtttcgccatttctcaaggcatggaactgagtgcccaaatatgagcaaggcattccagatttggtggcgcagatctttcttaagaggctctgagacttatgctgttgaatcaagataaatggtactgtggtttctcatttctagtgtgtgtagagttggaataaattagacattttgaataacgtagataagtaggatcattgtcttagcagcttcatgactaactggtgtcaaattttctagattttttccccttcattatttgtttgcttgcctgagctgaatgaaaagctgaaggctcctactgtattttctatgactgctgcccatgctttgcaacttgattgggtacacttgggtgtaaatggaataatgctatgttgttgggtacacttgattgctgagaagatattcctgctggaagagggatgtgtataaagcaaacaaaccccaatctgcattgaatcaagagctttgactagatttcatctgctaataacctatttattttgaagatttgtacctaaccatttgttaagataagttatgagaaatagttatgc

SEQ ID NO: 62814 - DNA, 213 bp, Glycine max
  Clone ID: PAT_MRT3847_27735C.1
cctcagattgacatggggatgcaggcatacatattgtcatggatccctaggttttgactaactgtgaagtttgctttgaaactactaatctcaccctaccgattgtgggtgatacattttgcctcgattctctgacttgggatgttggcgattcaggacttatctgaaaatggtggttcaccaaacaaccatatctttttcccgcgagcaccg

SEQ ID NO: 62815 - DNA, 663 bp, Glycine max
  Clone ID: PAT_MRT3847_27736C.1
tgaactttcacttattcaatttctcaccatacaaattaaagtcatcttctgcgttatatctttggctgccattaatgtttccccaccaactctttcatgccatatagaatgatagctacttaattatatctttctccgcagctacttaatttcttctcataaattctgaggtttaatagtttagtcatcatcaaaacagcaagagcaagcatgagatcagtaagttcccctggtttcttcttccttttgtttcttgctgcctttagctttgccaactttgcttctggagccactctgcttcaagatgaagtgaaagctctggaagatatagccaagacacttgggaagaaggactgggatttcaacgtagatccgtgcagtggacaacgtaattggacttctgcggttcaagtgaaagggagtgaaaacaatgtcacatgtgattgtacctttgccaatggcaccgtctgccatgtcaccaacatacttttgaaatcacaaaacctccctggcactctccctcgggatttgttcaggttgcctttcctccaagaaattgaccttactcgcaactacctaaacggcacaactcctaaagaatggggctccacaaaacttgccataatttccctcacacgaaatcgatccacacgctcaataccc

SEQ ID NO: 62816 - DNA, 126 bp, Glycine max
  unsure (1)..(126): unsure at all n locations
  Clone ID: PAT_MRT3847_27737C.1
caacatgctcgtcctactctaggagggtctaaggattacccctaccctcgtaggggaagaactagnngaccaccggccaaatcagatcctaaatgngagaggaggctgaatanggcctcgagctta

SEQ ID NO: 62817 - DNA, 365 bp, Glycine max
  Clone ID: PAT_MRT3847_27738C.1
taacaaaccatctatgcagataaagcaggcttccatgactctggtcaagacatacgtgaaaagagtgacaatggagcttgaatccattcggaattcagacagagaatccattcaagattctcttctgcttcagggcatgcattttgcatatagggctcatcaggtttttttttttttttaccactctgcagattcttttgtcattagttttgattttcccgaaattttgaggctgcaaatctgtaacttgtaaaggttcagaaatttgtctctagaacaaatcataaattgatgcaataaaaaaaaactattcctgttcctgaaaccagattgctgtttcatgctttaaaaaaattaagattgcc

SEQ ID NO: 62818 - DNA, 269 bp, Glycine max
  Clone ID: PAT_MRT3847_27739C.1
gagaagacgacagaaggggatccaaacagttggtttgaaattgaaacaatacactagaacccttcaaaacttccacacataaataaatgatttgggacttgtgaaaacttcccatcatttagcttctcacacaagaattttgaacttcactctatcatggaggaaggggtggaagcagatgaagtggtaaggtcattgagcagcttgaggatgaacatagggtctttgagcaggaggagttgggtctcagaaactgttccagagatgtg

SEQ ID NO: 62819 - DNA, 586 bp, Glycine max
  Clone ID: PAT_MRT3847_2773C.1
cgtaagctcggttttcggctcgcgggcagcatcataagccaaagcagcttcatggctctgatgccaaactcaatttaccagaactctctatcaaatctcaatctcagtgtccaccaccatcaccaccaccaccttcttctgttaccaacaacactcaaatggaaaacctgcagcagattcaaaacaattacatagacatggctacgtgttctaatttcaacaacatcaataatccagaagtttccatggcctctcagcaggttggagttggaccaatttacaccagtgactccatcgtgtctcttcccttggacaccaatcccaagcctgtggagaatgaggtcgagtttcgtccatcgtgggcgacaatgaacgagggtttgccggttttcgatgattccatttgggctgaagctgctatgtctctagattttcctcacattgcagcagagactgcgatttacgcgtcggggaacaacttggctgatgttggtgtctgggactctctgcaaaccccatggtgcatgtaatttcatcacaacaactctgaagggcaatggaagtcacaagctatagcttttcttct

SEQ ID NO: 62820 - DNA, 769 bp, Glycine max
  unsure (1)..(769): unsure at all n locations
  Clone ID: PAT_MRT3847_27740C.1
tacggctgcgagaagacgacagaaggggactacctcaaaaacaacactacaatagcataacccttcgaagtcgtcgtttatctctcctcgttcgcatcttcaccctttccctgtctctcagaaagatgaaggtggtcgctgcgtatctgctcgccgtcctcggtggcaacaacaccccctccaccgatgacatcaaggaaatcctcggctccgttggaatagaggcagatgaagataggattgaatcgttcttgtctgaagttaagggtaaggatatagttgagctaattgctgccggtaaggaaaagctggcctcggtgccttctggtggcggtggtgccgttgccgtcgccgctgctcctggtggaggtggcggtggtgctgctccggctgctgaggtaaagaaagaggaaaaggtggaggagaaagaggaatctgatgatgatatgggtttcagtctcttcgattaattggtgtagtctattcagctttttttagtccagaacatattctcaattaacactagagcattgagtttgtcaaagttttgttctaaggagtaatttagtctgtttttatatcaatgaccaaacaagttggatgaatttggttttatattttagtatctttaaagttatggaatttcattctggtaaaatctcatacacgcttattccttgttttactttttgaatatagttattatgttaagtgacaaaaattaatgaattatgccattaaaattacgcccaaaaaaaaaaaaanaaaa

SEQ ID NO: 62821 - DNA, 720 bp, Glycine max
  Clone ID: PAT_MRT3847_27741C.1
ctttcagcaaaaccaaaccctagcagcactacttcaaaaagaacagcgccatagcataacccttggaagtcgccgtttgttttcttttcgttcgcatcttctctctctctcagaaagatgaaggtggtcgccgcgtatttgctcgccgtcctcggtggcaacaacagcccctccgccgatgtcatcaaggaaatccttggctccgttggagtagaagcagatgaagataggattgaatcgtttttgtctgaagttaagggtaaggatatagttgagcttattgctgccggtagggaaaagttggccacggttccttctggtggtggtggtgccgttgccgtcgccgcagctcctgggggaggtgctgctgctgctgctcctgctgctgaggcaaagaaggaggaaaaggtggaggagaaagaggaatctgatgatgatatgggtttcagtctcttcgattaattggtgtagtctattcagcttttttgttcagaacatattcttaattaacactagagcatgagtttgtcaaagttttgttctaaggagtaatttactgtgttttttaatatcaatgaccaaccaagttggatgaatttggtttgatattttagtgttttgatgttatggaatttcattttggtaaaaatcagtcaaacttaattctgtttttaaaaaaaaaaaaaaaaaaaaaaaaaaaaaaaaaaaaaaaaaaaaagg

SEQ ID NO: 62822 - DNA, 460 bp, Glycine max
  Clone ID: PAT_MRT3847_27742C.1
ccacgcgtccgaccgtttcgtctcgcctgttcagtttccttctcctcttcccgcagcccggtttgccgaccaggttccaccgttccagagtagccaagcgaatcccgtgtctggttcgcgcgatggcggaggagcagtccaacccccagcaccagcaagcggaggagagggaggttatggtggagcagcagcagccgaggagggccccgaagctgaggtacctggacttcgtccaggtggcggctgcccaggccgcggtgtgcctcgctgggctctacggcctcgccaaggaccacgccggcccgctccgccccagcgttgacgccgtcgagtctgccgtcaagggcgtcgttagccccgtctacgaccgcttcggcggcctgccgctcgacgtcctcgccttcgtcgaccgcaaggtggacgacacggtgcacgaggtggacaagcaccttccgggcgc

SEQ ID NO: 62823 - DNA, 882 bp, Glycine max
  Clone ID: PAT_MRT3847_27743C.1
ggctcgagctaacagtctgctagtcttcttagcttgtgttagttgataattcttggaggtgaaagtctggaagttttagcaatttttttccatttaatttatgcagtcttttatatatgtttggaaacgtccttcactccttctatattgtattattcaacaaatgctggacggcattttatactcacatggtttaagaaaaaaggaatttgagactttaaattcagcaaaactgaatgatgatgtcaatagaggactcgtttcatatctgacttcttggctaatacacaaagcagcaaccttcgtttcaaccttttgtatcacttgtttaatttatttaggattccaagtttttctctctttttcttttttccccagcctaaataccatacgagtttatcttcaatccttgttggtggagaattgggcgaatatggcttgaactactttgatcgttgtgcctgtcagctgcattcaattttcacaccggtctttacttcgatccttcttcttctttttttgaggttttctattttggtttcaaggtgaaacggagtaattgtttctcccctgtcttggggtgttctatttttatttctgtaagttgatgaatggggttgaggattatggcaaatcacgcgggtctttgcttcaattattttagttgagcatcataattcatatttttaggtctgggaaatcgtatgtattttgcttttaagcgaatagcattcaatatgctggtttctttgagttgtatcctacgattaaccatgtagtctttcttagcaagacgataaactggggatattgtcttggggaatattttgttgagcttcatggaatgagaggaaaaaaagaggcaagtgtagacttgatatg

SEQ ID NO: 62824 - DNA, 308 bp, Glycine max
  Clone ID: PAT_MRT3847_27744C.1
aaaaattacatttaccctgcaaaccgaaaaacttgacaaaaggcataaggaattagctgccgtcgacaatcgaggatcaactgccatttaccctgacccttggcaaaaaccatgaaaccaaaacaaaaggcaaaagaagggaaaacttccgggaaccaagaataaatttgaactacaggttgcagtttgatttgacattgggcccaaagccgaatttccgggcgacggccgcggacatgcaaagttttagatagggtaaactgacaccaaagcccaggccactggccgacaacgtaaaaaccgggaaa

SEQ ID NO: 62825 - DNA, 483 bp, Glycine max
  Clone ID: PAT_MRT3847_27745C.1
tttgctttgttgttaataaaaattttctcttctttctttctctcttgaagttggaaagaaaggcaaggagagaaagagaaaacaaaaaatggtagtttccagggtggttgtttttcttggtctcattcttgcaacccttgtgtcattggcttgctcccaatccgctgctccggctcctgctcccacaagtgatggcacctcaattgaccaaactgtagcgtatatcctaatgttggttgcattggttctgacttacatcatgcattaagccaactacgagcaatgacacttcctaaattaattgagggatatagggcatttttatttcaaggacgtgccacaagcacttaggaggaagaaagatattttaattggaccgatgcatttttgtgtatcttctcttgctccaaggatagtctcattttgatttttcagttgtttatttattgggctttgtactctatttcgttatcggtagttatt

SEQ ID NO: 62826 - DNA, 491 bp, Glycine max
  Clone ID: PAT_MRT3847_27746C.1
attaattaaattttgtcttataacatcccactaacaaaaactagcaactaatatttgtgaataataaaaaaattgtcttatgacaatattcagcataagagctttatgatcccaggcctggggtttgtagtctaatccacatatctttaccaaagccagtgcaaggaattcactgccagtgtcaagcataggactcaaccttgtaaataccaacttagattactaattgatttgttgtagttgatgagacgaatttactaatggcatgctgagtttatttacgaagtaaatagtcaaattagtccgtataggatctaaccctagtcatattaaaccctcaatgacttaaattacacttgaagtccttgaatatgcattctttggtccagtcagtcctcatgtaacaagtttaggagactaattgaacagatctaatacattcattgaggattaatttaatgattaaatgcatatttaggagccagatatgt

SEQ ID NO: 62827 - DNA, 302 bp, Glycine max
  Clone ID: PAT_MRT3847_27747C.1
ggacggaagcgagggattcgggtcgggggcgaatacatgaaaacattcaatgggtttcttttgctactaaggggggggggcttcaccatttagaacggtgctcggcggtggggctatgagacaagaggtggttttggaataaaaatggatgacaaaatgccacaacacgggtattattaatattgtggggcacaatattcccttaatgttggcccaagctacatggataacaagaatttccggcatttacttggagaaattcgatcttaactacttgagaaactttccaaggtgcggcatgc

SEQ ID NO: 62828 - DNA, 2176 bp, Glycine max
  Clone ID: PAT_MRT3847_27748C.1
tttcgtccgtttttgttcataaattgtttggagactgacgttgttggtgtatgaaatttcgtgctcaaggacgcatctgaggaagctgaagaaggaaaaaggaagataagatcacacacatcacaattcacaacacaacacaacacttgacaaagaaggaagaaagggaggtttgcatcagaaaaagacacgccccaccccttccctttcctccgcttgcgccatctttctctctctgtgacgcttcaaatactcgccaatgcctcaatctcaattcccattctcttctcctctctgagactctctccatatcgtcaccgtcactgccatggaggatgccaatcttcagaggctccattgctccgtcaaaaactacgattggggtctcccaggtcgcgtctccgaggttgccagactccacgcgctcaattccgcgtctgaattccacgcggaggacccttacgccgagctttggatgggtacccatgattcaggcccttcctttttagcttcctccaatggaaatgagaatggtgtctccctcaaggcttggatttccgagaaccctgatgtgctcggtcacaaggttcttcacaaatggggttctgatctccctttcttgttcaaggtgctgtctgtggggaaggccttgtcaattcaagctcacccggataaggagttggcaaggactctgcataagttgcaccctgatttgtataaagatggcaatcacaaacctgagatggcccttgcactcactaattttgaggctctctgtggattcatcactctcaaggagctcaagggtgtgcttcatactgttcctgaaattgtggaactggttggtgctacaaatacaaacctggtcttacaaactaatgatcaggatggtgaagagaaggtcaaacctgttctgcaggcagtgttcaccgacctcatgtcagctagtaaagatagagtaacggatgcagtaaacagattgaaaagccgtctgcttaaggagagtgaggtgaggcagttgacagataaagagcagctggtgctgcggttggaaaaacaatacccagctgatgttggtgtcatagcagccttctttcttaaccatgtaaaactcaatcctggtgaagctttgttcctcggggcaagtgaaccacatgcatatttatctggggagtgtgttgaatgcatggcaacttctgacaatgttgtgcgagctggcctaactcccaaacacagagatgtccagaccctttgctccatgctcacatacaaacagggttctcctgaaatcttgcgtggagtatctgttaatccatatgtaaataaatatactccaccatttgaggaatttgagattgatcgttgcattcttcctcaaggggaaacagtggtgttcccagcagttccaggtccttcgatctttttggtcacagttggtgaaggaacaatgaatacaggattacccaaaggacatgtggtcaccgaaggtgatgttctttttgccgcagctaacactgagattagtgttactagtgcatccgagttgaatttgtacagaacaggggtaaatagcaagttttttcaagcttcataagtttcaacaggggatcacccaaatttttattttttttggtcatatgctgttgggagtcaaataatgcaactatctgttgcgtgtaatagaagcagtttaatgtacatgcaagagtaaaaaaaatcacttagtatattgagtcttagagaaatgttcattatagaacggtgggttgtcaattgtcattcgtttgttgttcataataatgttcgttaaaggtcttttgcaatggtattcctattaatcattttatatcaataaatgaagggcctttatttattttgtcaaatgcttttgggagtcgaataatgcaactatgtgttgcgtgtaatagaagcagtttagtgtacatgcaagagtaaaaaaactaaaatcacgtagtatattgagtcatagagaaaaaagttcattatagcgaggtgggttgtcaattgtcattcgtttgttgttcataataatgttcgttaaaagccttttcggatgacattcctatttatctatttattatatcaataaatgaagggcctacagatattttttttgggagagaaaaaaggggaaaaattttttagggaccccccc

SEQ ID NO: 62829 - DNA, 469 bp, Glycine max
  Clone ID: PAT_MRT3847_27749C.1
caaaaatatgtatatttcaacggtccaaccttcggtaatcatcgcccctccaataaaaaaaaaggggggaggggggaagaagaattttttaatatattaacaatctcagacgactacaaaagcctaattaaacaattaacttgccaatacataggagattacatttttcacaacccaactatatcagaaggatgatactatgcctatcaacctgcttacatattaatccaaccatatacctttgcatgacgctaacgactattgactgctctatacgatcaagcttattgctatcaaaatcgcacaggaaaaacttcctttactgactgctttttacctccatttgtatttttggcggtgggatatcaattcattcttgaggtatcactatcatctatctcttctgggcccgtgacctactccagactgctagctttttccactttcagcattatccacatatcaacat

SEQ ID NO: 62830 - DNA, 394 bp, Glycine max
  Clone ID: PAT_MRT3847_2774C.1
aaaccgggaacggacaattttttaatggaacaagagctcattattcatgaaagcctccaaaggggaaaacaacattgtttaaggcccctccatgactaaagaataattctcaggatttttttttataaaaattaaggggcaacttaaaggcttgttttgagagcttaatcattgtccaagggattaggccccttaaaagtcctttcccctttgttgcttcccaggggggcactcctttggtttccaacgtttccaaagattttggatcccttcttttccaactttttttttttaggtgatttgttttcaaaagattacttaccaaagtcctcaaatgggtccctgagaattaacttttcccatgggttgaaaccaaccctctttaaattcttgg

SEQ ID NO: 62831 - DNA, 617 bp, Glycine max
  Clone ID: PAT_MRT3847_27750C.1
agaccctttgttctatgctcacatacaaaacagggttctcctgagatcttgcatggagtttctgttaatccatatgtaaataaatatactcccccatttgaggaatttgagattgatcgttgcattcttcctcaaggggaaacagtggtgttcccagcagttccaggtccttccatctttttggtcacagttggtgaaggaacaatgaacacaggatcccccaaaggtcatgtggtcaccgaaggtgatgttctttttgcagctgctaacactgagattagggttactagtgcatccgagttgcatctgtacagaacaggggtaaatagcaagttttttcaagcttcctaagtttcaacaggggatcacccaattttattttttttgtcatatgcttttgggagtcgaataatgcaactatgtgttgcgtgtaatagaagcagtttagtgtacatgcaagagtaaaaaatctaaaatcacgtagtatattgagtcatagagaaaaaagttcattatagcgaggtgggttgtcaattgtcattcgtttgttgttcataataatgttcgttaaaagccttttcggatgacattcctatttatctatttattatatcaat

SEQ ID NO: 62832 - DNA, 1010 bp, Glycine max
  Clone ID: PAT_MRT3847_27751C.1
gcctcctggggtttatacattgcaggacttgagagcatatgggaaggagaaggggtggtgtccatactatttagcacgacatatggtgcagtttgccaacgtggtggtgtatagctatcagtatttgcttgatccgaaggtggctggaataatatctaaagaaatgcagaaagagtcagttgttgtgtttgatgaagatggctgcgaggagacgacagatggggaagcacttagtgtgagtgtgaggaggcagactattgaaggtgctagaagaaatcttaataggatgcgtcaggaaattgacaagttcaaggccactgatgcaggtagactccgtgctgaatacaacaggcttgtcgaaggtttggcactaagaggagacctgcctgctactgatgcctggcttgcaaatccggccttgcctgatgatatactaaaggaggctgtacctggaaatattcgccgggctgagcattttattcatgttttgcgtagattagttcaataccttgaagggcgcttggatactgagaatgtggagaaggagagccctgttagctttgttgtttctattcttaaccatgccggaattgaccaaaaagcactaaagttctgttatgatcgccttcattctttgatgatgacattggaaattacagacaccgatgagttccttcatatccaaactatatgtgattttgccacccttgtaggaacatatgctcgtggtttttctatatattcttcatttgccaaagaaggaaatctcagtgacctatttgctaaaggagaggctttttcaactctctttaatgttattggaattggagttggaattcaattagcatctaccatctgtgcatcaatgcagggaaagttagttgcgggtcctctcctttcaataatacatttatacagtgtgtctgaagaaatgagagcaactcctatcaatacgttgaatccacgaagaactgcaatggttgtggctgattttctcaaggcaggaattg

SEQ ID NO: 62833 - DNA, 451 bp, Glycine max
  Clone ID: PAT_MRT3847_27752C.1
cagaagtacaggacagctagatatatacctgagtcatctgaaggtactcaagtaacatatgcattgtattatatattccttatgtatactgtataggtaatgttttgcgtgttagttaggatgaggagatcattggctattgaataaattttggatgtatgccaagttgataattctcatcaaatttcatattaattggatactagtttggcgtatataaaaaaaattggaatttacataaaatatgcttttcaaacaaacaagaaagaaaatcatctattcaccttatattagatatatagtacgttattgaatggtgtaagtgaagtcttacattggttctagtggatcttaagccctttgtctggaatattgtgattatatgagcttggcttctccttacgcatatggaatcagagctattttgcttcctttccccctcctaattact

SEQ ID NO: 62834 - DNA, 265 bp, Glycine max
  Clone ID: PAT_MRT3847_27753C.1
tttccaaactcccttcgtgtgaaggataagtggaatgtttcttttctccaaattttgccaactgattaaggcttacatcccaaacagagggatcgttttggccatagatttgggtttgttagatgttggagcgtatctgatattcgtatgttagggatgaagttagacaacatttttattggagattggaaattgaacgttcatgttaccaaaattgttcaaggggaggtgaaagtgcaacgacaggtcagtggatatggaaaga

SEQ ID NO: 62835 - DNA, 450 bp, Glycine max
  Clone ID: PAT_MRT3847_27754C.1
ggctcgagatgggaaagcaacttttggagaggttttcaaggttttctttgccttaacaattacagcagttggtgtttcccagagtagtgccttggctccagatactaacaaggccaaagattctgcagcctcaatatttgaaattcttgacagcaaaccagctattgactccagcagtgatgagggcacaacattagacacagtaaaaggtgaaattgaacttcaacaagtcagcttttgttacccaacaaggcctaatattcaaattttcaaagacatgtgtctaaccatgccaactggaaagaccgttgccttggttggagaaagtggcagtggaaaatcaacagtgatcagcctcttagagagattttacaaccctgactctggacgcatactaattgatggagtggatataaaagaaattcaaactaactggctgaggcagcaaat

SEQ ID NO: 62836 - DNA, 287 bp, Glycine max
  unsure (1)..(287): unsure at all n locations
  Clone ID: PAT_MRT3847_27755C.1
ctnatgtggaaccangtanctgtagatananananaggacagnngatccgctccactccangtgctgctgcaagcctgcctaatacaggtctaaattgaactgctgtgganngagtgtggngtctnctcanaaggngngtttcactgacctggttcnacagttcaaagtaacaggagnaanaaccacnaagttgtgaatcttggcatggtgnctgataaatacagtgtgtgcaccatatttaaggttatgggcnantctggagatccantgcatgtncagccagctc

SEQ ID NO: 62837 - DNA, 1452 bp, Glycine max
  Clone ID: PAT_MRT3847_27756C.1
atgcggctgtgagaggacaacgggacgtggggatagagaagcgaaagaaaccaaaccacaatgaaataaaaagccccttttgtagaacagtgatacattcgctttctatttcttcctcatctcgtacgtttcgtggatccttactcaacgcaacacaacacaacacagaaaaattatgagttccaaaggtgttggtgaagattgcctgggatgggcagcaagagatgcatccggagttctatcaccttacaaattcagtcgcaggactcctgggaatgaagatgttcttattaaaattacacactgtggtgtttgcttcgccgatgtagtttggacaaggaataaacatggtgactcaaagtatcctgttgtgcctggtcacgagattgctgggattgtgacaaaggttggctccaatgtccaccgttttaaggttggtgaccatgttggagtggggacttatgtcaactcatgtagggattgtgaacattgtaatgacagagaagaagttcattgtaccaagggatctgttttcacttttaatggtgttgattttgatggtacaattacaaaaggaggatactccagttacatagtagtccatgagaggtactgcttcatgataccaaaaagctatgcattggcttcagcagctcctttgctttgtgctggaattactgtttattcaccgatggtgcgccacaagatgaatcaacctggtaaatctcttggagtgattggtcttggtggcctcggtcatatggcagtgaaatttggaaaggcatttggtttgagtgtgacggttttcagcactagtatatccaagaaagaggaggcactgagcctgcttggtgcagacaaatttgttgtttcatctaatcaagaggaaatgacggcattggctaaatcgttggactttataatcgacacagcatctggtgatcacccgtttgatccttacatgtcactgttgaagacatatggtgtttttgtcctagttggtttcccaagtcaagtcaaattcagccctgcaagccttaatataggatcaaagactgtagccggaagtgttacaggtggtacaaaagatatacaggagatgattgacttctgtgctgcaaacgagattcacccaaatatagaggtaattccaatcgagtatgccaatgaagctcttgagaggctcatcaatagggacgtcaagtaccggtttgtgatagatattgagaactccctgaaagaaaaataagttgtacttgttgcctcctaaattgggcatgattggacttcaccttgttcgataaacaagatgttcatagttcataattacttacatagaggtgatttcaatggagtatgcgatgtaaatgttgaattttccttaattattttgggaactaatattatttgactattataatattttggattatgaaataataataattatgg

SEQ ID NO: 62838 - DNA, 520 bp, Glycine max
  Clone ID: PAT_MRT3847_27757C.1
taaatcgttggactttataatcgacacagcatctggtgatcactcgtttgatccttacatgtcactgctgaagacatatggtgtttttgtcctagttggtttccctagtcaagtcaaatttatccctgcaagccttaatataggatcaaagactgttgccggaagtgttacaggtggtacaaaagatatacaggagatgattggcttctgtgctgcaaacgagattcacccaaatatagaggtgattccaatcgagtatgccaatgaagctcttgagaggctcataaatagggacgtcaagtaccggtttgtaatagatgttgagaattccctgaaagaaaaatgagttgttgcctcccaaattggacattattggacttcaccttgttcgataaataatgatggtcggagttcgtaatttacttacatagagttgatttgaattttctttaattattttgtgaactaatattatgtgattataagaatattttggatttttaaataataataattatgg

SEQ ID NO: 62839 - DNA, 711 bp, Glycine max
  Clone ID: PAT_MRT3847_27758C.1
gggataatgaacatgacgtgggtgtttgggaagtcgctgacctaatggggggtactgggcttccgaatgaggcagttgtaaccaaggaagaggtccaacacctcacttttctgtgcaaatctgaaattgattctgctggccggataacagctggagttctacggctatttaagctagaaggctctgttggccagtctgcaattgatcagcttggcaacctaggtatgctgccaaattttcttatgtaacaatgcttttaattaggaataagttcttattttataaagagcttttcgtgatcattcagccttacatacagctgggaagtatacttaaaatttaccaattaccaaagtcattgctgttgtcacgacccactcttagactatgaccggccacagactataatttccttagtctaattagtttaagaatcctaactcaaaatcacaattaaaagatcatccaaaagggattaccggaaattcaacaaaatttcctctaaaaataggtcaaaccccatattgattaacttgtaaaaacatatcatacatccaaacaaatctatatataaatatatgtctcgatccaacacttaaatatcaaggccacaaattacaacatagatccttgacatactgtccaacatatcaattgatagtgatgttggtcataaaaactaatcatcaaagtgtctcaaaacatcataat

SEQ ID NO: 62840 - DNA, 182 bp, Glycine max
  Clone ID: PAT_MRT3847_27759C.1
catgatattactctaatcatgtctgcttcagagtcagcatgttttcacatgcttctgctaatgatcaaaatccagttatccatcttgtttgaaatgcagaaattcatgattaattttaactgttttatatttttgtttacaaaattaattggtttgggaattaaaatttggtggttggctga

SEQ ID NO: 62841 - DNA, 549 bp, Glycine max
  unsure (1)..(549): unsure at all n locations
  Clone ID: PAT_MRT3847_2775C.1
agagtgacaaaaaatatatntagaatcaaatacatatagtgtttcattacaccaatccaaataccaatattctctccaatggttaaatatcttcattgggtatcttcgcatcaaagtttcattacaccagagtttatgtaatttaattggtgctctaagtaaatcatctagattcctacacaacttttttatacttgacaaagtatatttaattcaactatggaatgatattagccttagggagctataaccacaatcttgcctgagcaattaccaaaccgaacaaagtaaccatttccctgcaaaacaagaaatttaaatgttatcataatatttcaagttttacaattaataaataagaaagatgaggaactatatcatgaantataaaagtttcaatgtgatgaagaaaaaaaagtgactatcatgcctcagctaaaagcaaacaagtatgtcacatcattttaaaacaatcacaacaatctaatttagaggtaatagttntataaaagaacctatgatggtgatccattggtgcaccacctatta

SEQ ID NO: 62842 - DNA, 494 bp, Glycine max
  Clone ID: PAT_MRT3847_27760C.1
ggccaaaagttcactgcttgttcatgtaggtccttgattgggaaattagaaatgcttttttctttccttctctattcttcgaagaaccttataatgtgaaacagttgtagcgagtggtgattatttctttattttattcacaaaaataagcaaataatgtccaaagtgaagatagtgacagcacagaatgagccccaagagagaagatgctaaagatgaacaaccagaaataaccgaaggtgatgtggctcgatttgagacctttcatggacgtttggataaaattaaaacgatcaagtttctgcttgcaatgcaaaggagatgtattgattactgctaacgtgtcttcatttcaatcatagacttgttaattcaattcttttcggagtttggatcatgcatcttcaagtcccacatcaacctagacatggtgtgtcccacaagtgcacattattgattcttttcctgtgaaagttcatgcactgatttcatca

SEQ ID NO: 62843 - DNA, 387 bp, Glycine max
  Clone ID: PAT_MRT3847_27761C.1
aaaacaaaatttaacgcgggctggaatgacccatgagccacaccaatcaatttgcaaacatatttgcattaacgccaacatatcttcaacataacccacgaacacaacagcccgcaccacatgttcctgagtcataaacgacaacacctccatgatgggcatatcggcacattgctgcattccccttttgaaaaaatcccctttgtgggtaaaagactacactccccacaggccaaaacataacaaagaaaccggcaagttactaaaatatttgagacctggaacaagaattaacaaaaacaacttcttaggaacgacaattagcatgggacccttggttgctcttcaaacaagggtaggattctctgctggagaagtcctccacac

SEQ ID NO: 62844 - DNA, 354 bp, Glycine max
  Clone ID: PAT_MRT3847_27762C.1
cttctgatgacatggaattatctggaattgttgggttgaatggaactacatatatggaatctgatacgagtaaagtgcctctgcgaactgtagaaatcctggctttttgccatgcattgctattagttgagaataagctgtgcggtgatcctcttgagaaggctgaacttaacggaattgactggagttataaatctgatgccaggacacttgcaaaagaggtatatggccatcctgtccaaattgctcatcggtgccattttggattctatttctaacgacatgaaactgagcatcgcacatcatgaggaatattctctctttgacaagggcgccccataagttgtacattaa

SEQ ID NO: 62845 - DNA, 212 bp, Glycine max
  Clone ID: PAT_MRT3847_27763C.1
agaggacacagaccgagtaggtgttgatctttctttgatgcttgctccctcctcatccatggctaaattaattctagattatcctcttacgccatatttcctaaataaaattccccgattaaccatcgcgctacccacaaaatctaatcttcttgccatttttttctgagcatttagctgccgcttgctttagattgtttttcgacatcctc

SEQ ID NO: 62846 - DNA, 776 bp, Glycine max
  unsure (1)..(776): unsure at all n locations
  Clone ID: PAT_MRT3847_27764C.1
gaaacctggcgcgtcatgcttcttcgaatgcaaccgcaaccaaagccagttattactctaccatctccactcaaaccctaaccaacaaaccctgaacccaccacgacaaatttcccactctcactttcattccggcacgaacaaaaccctaacccgatggagaaccgaaccacccaggttcggtgcccggagaaccaggagctggccacctacgtgtggaacaagtggaaggaaatggcgcagcaacccaaaggcatttctgacaacatcgacatgaccctttccaaggcccactttaatctctgtaactccaaaacccccattcgaaccatcaaagatttctctcaagtcaagggtgtggggaaaatgattttgaagctcatgcaggggttttttgggactggttctgaaccagaagacttgactaaaaagggaaaaagaactaaaggaaccaaacgttatatgcctcagaggaactctgtggcatatgcattgttgataaccctttacaggggaacttcaagcgggaatgaatttatgcataaacaggaactaattgacgcttccgaagcaagtgggctatctcgagtgccgattgcgccagaaaaagggaaaggaaaacctggacattttggaagttcttcacgggattggtatagtggatggagttgcatgaagaccttgatagctaagggattaanttgtaaaatcaagttgcccctgctaagtacatgctaactcaagaaggtaaggaagcagcacgcgattgtcttgca

SEQ ID NO: 62847 - DNA, 461 bp, Glycine max
  unsure (1)..(461): unsure at all n locations
  Clone ID: PAT_MRT3847_27765C.1
ccaaaaccatcttctttttcttgtacccactttcattatttcagcttaccgcgttggacgatataaacataaaagcctcttcaatattcaattagcccctattgagaaacattcacaattatatatatttgtattcctatatggcaatgcaatattcattctcgagttggagccgcaggttacccatggagattatggtgcttgccttgtgcatccttgtgcttttgcatggaaatccttcaactgctcgcttattagtgaacggtagcagaagattgtctgtgttgacggagaggagaaacctggtccaaagtggcctcggccaaacacctcccatggggtggaatagctggaatcattttggctgcgatgttaatgaaagtgtagttcgagaaacagctgatgcaatgatgtcaacggngctcgctgctttggggtaccaatatgtaaatatagatgac

SEQ ID NO: 62848 - DNA, 326 bp, Glycine max
  Clone ID: PAT_MRT3847_27766C.1
agttattggcgatgatattataataaactcagttccctgctaactgaagcaagaacaataagactagtatagtctgctgcattcacactgaggttagctgaactcggcagcaatataaacaggaaggttaatagactttcgacctctagctgtgacagctaggaccaattctagggcgagaataagctcgtgagctaagtagtggctttaccacccgtctaattgcatggtctgactactagcctcacaggtcacagcacagttaagaagctgaaacttcatgggcatgtaaactttagagagatgctgaaaaccatgcgtgctca

SEQ ID NO: 62849 - DNA, 259 bp, Glycine max
  unsure (1)..(259): unsure at all n locations
  Clone ID: PAT_MRT3847_27767C.1
gacccgctagaagaaatgggaagtgacccccatagagtacagatagggtcagacccacactgcaaatatacgcagcaaaaccgttatagttcccgtcatacgcttccgagtcgaaccggtcnggactcatgtacgcacacgtgccgacatatgaggtacacgctcacagcgagcggcacatgagcttgctgactgcgaagtctgtaatcttaacatccacttctgagcgtacttaggagatactgggctatatgtcgcg

SEQ ID NO: 62850 - DNA, 201 bp, Glycine max
  unsure (1)..(201): unsure at all n locations
  Clone ID: PAT_MRT3847_27768C.1
gatctctgtattttatcaaactgccatacactggccctggctaatttagcttgacgccatactttccaccaccaaagtcatcagttgatgctgcaaacattatctggggacttacnncnnnnctcctgagcttgctttagaatccatacncttgccatagacatactttttcacagccaaatcccactgacccaactccta

SEQ ID NO: 62851 - DNA, 838 bp, Glycine max
  Clone ID: PAT_MRT3847_27769C.1
ggaatgcaaattgagtaattcatcaccaaataattttgctctctccgtcacatttctaaggacaccctccatcaagtacatatctttagtaggaatcctttgttttgcactttggataattaacaacagggagcttaaaaatggaagcttgtcatgacatttatagcatttaaaaaggagtacaaagagtacaaatacaatcaatagaaaactaatcaaaatgtcaaaatttgaagcatagcatcttcccgcaatgtggatcagcaacatcagttgtcgccgagaaactctctagaaagagaacttgaaagctcccgcattagtatccgcgacagaatcccagaaggaaagtttcctttgctggatctttctctcttcttctttccgagtcaattcatcaatttctccaggaaaataagcctcgatagcattcttaaacttatcgtacaaattcagtcgatcccttgttccagataccagtgtgctagcatttggacttttcaaaaaatccaatacatttatcaaatttctcctactgacatagttttgggttatggctatagattcctccagattgatcaccaaatgccaccatccactaggcacaaagatcacctctccagctttaatacgcactcaattggtttcttgttccaatttttggtggcgccatagaagttcatgaaccattcaattattgaaacaggagatgccacatccgcaccatcaggactaggatgaacgccaggcggaatcacatcaggaggaaacaaaatccatttcttggaccccttgatcactgcattccaagccgaagttgatttcggatcaacatgga

SEQ ID NO: 62852 - DNA, 1895 bp, Glycine max
  Clone ID: PAT_MRT3847_2776C.1
gtttacttcagtccaaactgaacacactactcagaccgataacgaacaagaactctactattactattaatcaaccaaaatctctcttcactccaaacagaacacactagcgagaaaaaaagtgataagcccaaaaactctgcgttctctcacaaattaaacagcgtcactatcgcatagtgattgagttttgcggtgtactgtgttgcgaagtctgtgtatcagatttgtggacatgggtgcttatgatcaagtttctcttaagccattggattcttctagaaagaggaaaagtaggagcagagggtatgggactagatccgtggctgagactattgcaaagtggaaggaatacaacgaacacctttattctggcaaagatgatagtagaacaactccaaaggcaccggctaaaggttcgaagaaagggtgcatgaaagggaagggaggacctcaaaactctcagtgtaactacagaggagttaggcagaggacatgggggaaatgggttggtgagattagggagcccaatagaggaagcaggctttggttgggtaccttctcttctgcccaggaagctgctcttgcctatgatgaagctgctagagctatgtatggtccttgtgcacgcctcaattttcccggcatcacagattatgcttcttttaaggaatcgttgaaggaatcttcgatggccgcatcgtcctcttgttcttcggcagaaactgcaacatctgacactactactacaacatccaaccaatcggaggtttgtgctgttgaggatgttatcgagaatcctcgacttgtcaatgtgaatgataaggttaacgattgtcataaggcttacgtatctgcctcaccaactagtagaatgaagcaagagcctaaggatgaggctgtggaccacatggacacaggggctggggaaattcaagatgtcggactagaaggaacacatgatactgggcaggttgcagagaatgtaaataaagatcagatggatttgtcatggattgatggctttgactttattgacgattacttgaagagcttttccgcggatgagttatttcaggtggatgaacttttggggcttatagataataacccaattgataactctgtgttgatgcaaggtttggattttggacaaatgggttttcctggagatggtaatcctcaggttgacgatactccttcaagctttatttatcagttgcaaaatccagatgccaagttgttaggaagtttgccccatatggagcagacaccatcgggtgttgattatggattagatttcttgaaaacagtggagtcaggggattataatggtggaggggaagaaccgcgatttcttaatttggatgatgatctgaaccctgattcaaatggcatgcaagcaaggaaggatgactagagaaggcgacgtgcataagtctatcatctgcctcattttcaactggttcgagcatctgctagtaatctgtctcttaggttgttgtcccctttttagctatatacaggtgcataagaggaatacaactatacaactaatacaagaaatttgatttgtttatgttcttttaatatgctaattctctgtaagattttttaaaatggagaatttagctgtgacaatatttgttaattctttttacttacatgttttttgggattcaaattggactgcctttaactacataggtggagctgaggagtagactgtttgaagtcgtttggctgactatagttgagcactgatttggatacaaaatttctttgttatgtaccatggagaactattatatctcgagtatattatatcgttgctcactttttgtgtataaaaactgaacaagtagtggaatgtatatatatataataactattct

SEQ ID NO: 62853 - DNA, 299 bp, Glycine max
  Clone ID: PAT_MRT3847_27770C.1
agagcactaaaggagactgacatggccttgtgtacgctaaacattgacaagagtcctgttttagtggcttacatcaatgaatcagtatgggctaaaagagcatatattgttgatggaatactgcactcactataagaaggtaaagggcttatatacactctgtcatgaagctcttgacgaagacaccatgtagaagtgtgatagtcaatggggatgcctccaaaagccatatttatttgctcatgtcaatagaaattcagacctttgcatcgttaagaggaatgttataaatgctgctt

SEQ ID NO: 62854 - DNA, 1524 bp, Glycine max
  Clone ID: PAT_MRT3847_27771C.1
aattcggctcgagcacgcactcatgagataccattaccagcgtggtctcaccgacattatttataaagaaagaaaacgtgtaattccttccttcctagctacctaataaagaacacagtcattttggaccgcgagcatgctgctttgtttgcttttgaaacggttgatttgagtccaagcaaaagaaaattcccacaaaccacgacctctgattcttgctcatgtctttcacatttagatttatgtgttgtgatgaaattattgcatggtgatatgatatacggctaaaaagggaaggataaaaagagcattattatgtttacgtgtttaattagtatatatagatagggaaatgacaatcacttgactaactacattagcattgatattgttattacagggagcagagggtctgggcgaacaccactcgactgggacagccgaatgaaaatagccctaggagcagcaagagggctgacatgcctccatgtggcaggcaaggtggtccacggcaacatcaaatcttccaacatcctcctccggggacccgaccatgatgccggcgtttcggacttcggcctcaaccccttgttcggaaacggagccccgtcgaaccgtgtggcgggataccgggcacccgaagtggtcgaaacccggaaggtgagcttcaagtccgacgtgtacagcttgggagtgttgctgctggagcttctaacgggaaaagcgccaaaccaagcctcgctcggggaagagggcattgatcttcccaggtgggttcagtcagttgtgcgtgaagaatggaccgcagaagtgttcgatgcggagctcatgaggttccaaaacatcgaggaggagatggttcaactgttgcaaattgctatggcgtgcgtttccgttgtgccggatcagaggcctagcatgcaagacgtggtgcgtatgattgaggacattaaccgtggcgagacagatgatggcttgagacaatcttctgatgacccttccaaaggatccgagggtcacacaccacccccagagtcaaggactccacctaggtcactcacaccttaacaaattactagacttgttgattgaatgaaaattcaaaaaagaggaaaggacaacacacggtggtgggtcgttcttacaaaaaaaaaaataaagaggggcatacatcgatcccagagtcaaggactccacctagctctctcacaccataacaaattactaaaagcctttcttcttcttcttcttcttcttcttcatcattcaatgaaattcaaaaaaaaggtgctgggtcgctcttatactgtgaattacggcgcccgctttcttcccgtctattttcccccctcattgtatttcatttcattttttttcttcttattaaattccaatgatttttacagatgggagtttgaaaattgttcatggagttaaagggggggggggggggggtgagttcaatgaaccgattcagattggctatttcatgaaattttaattgcaattgacctcataacttat

SEQ ID NO: 62855 - DNA, 915 bp, Glycine max
  Clone ID: PAT_MRT3847_27772C.1
aattcggctcgagccatactcgtgctgcgcgcgtggacccttacttcccttctccaacagcatttgtcgagtcttcaccaaacaatcgtgtgaccacgacgacgatggagatgcttcggagaagcagcagaagactcttcgcctccgcgtgtctgtggttgcttctgtcaccgtcaccgtcaccgtcaccgctgagtgtcgttagcgccgcccacggcgcgttcaacgtgaagtgcaagtatcaggaccgcaccctctccgccctctaagcccacgactacgcttctatatgctggatgttggtcaattaacaaagatatcttgtttttcatttagaatataggagaagaaagtgttttttatggttaagaccactgaaatcctactgccagcttcaactagcatgagttcactttacattccaattacagtttacacatgacaccttcagcttcaaagaatcttttaaaccaaaattttaataccactgaaatgatcacctcgttaaccagttgaggcctacattccatttagagtgtagatgtgctgagacatgtcactgatgacttaagaagaaatcactaatcaatatctagcaaggacaggcaagagtagagcttatagggcttgggcaatcctcacctcataagctagtttttgggttaagttagcccaaattcaatagagctcgcataaattgatttattgaaatggacatacatatcattatgaggtgagaaatgccgattctgtacacactcatatataagcaaaaaagtgatcttttaagttggacttaaatataagcaaatttaactaattttgtcttattcaatgcgatcattcctaaaacatccctcatttaattgaaattcaaatttcaatgactcttttttattcatgataaccagttcc

SEQ ID NO: 62856 - DNA, 402 bp, Glycine max
  unsure (1)..(402): unsure at all n locations
  Clone ID: PAT_MRT3847_27773C.1
gtttgcatatatatatatatccagcataagatgtttgaaattgttttatctatgaatactattggtaggcccattaatgcataaaaattaacgatggagagaaaattcgtttcaaacctaaatatatgcataaagacccaaaattaataataaaagaatataatgaaaaatcattatcttttcgttaatcattcaacacttatctttcttgagtgagcaatgagtaagatgcatgttttctgtctctagtgaagggatcttgtagggacattcaactcttatcttttttttagttgcatcgatcatgatcttctcatanatactcatcttagggacattcaacttcgtgaaaaatagctaaagcgaagagaacaccatgtgattaaattcttgcattttgtt

SEQ ID NO: 62857 - DNA, 280 bp, Glycine max
  Clone ID: PAT_MRT3847_27774C.1
tcggctcgagtaaacttcttactgatgtgaagttgtactagggtcagcatattcctgtctctaatatcagtgtagggcgaaatcatgcagttcgaatacccttaatggcacaggatgagattctgtcttctgatgcaagtgacttcataactgtgttggtgcataaaaatagcacgcctcaagctactgcaattcatgtgggagctatagagattatcattgaaagtttcgcaagtcctgaatgcaacatagttggtgcaatgcttttggttgataacta

SEQ ID NO: 62858 - DNA, 388 bp, Glycine max
  Clone ID: PAT_MRT3847_27775C.1
gggaggccccctgggtttttaaaaaccaaaaaaaaaaaaggggctttttttggccaaccaaaaattttcccccccaaaaaaatttttttcaatttggggcccaccaaggccccaaaaggaaaaagaaaaaggcaaattctatttccagggggtccttttttggccattttttccaacatggggcacccccccaattcctttgggggcctgggaaaattggaaaagggggggcccccccctcccaaaatccacccccccgggggaaaatttaagggcctggaagcagaaaaactaaccccccagggcccttttttccttttccacaaaccccacctatttcaaaccccccctttttttttccctttgtggggggggccctttttcaaaa

SEQ ID NO: 62859 - DNA, 419 bp, Glycine max
  Clone ID: PAT_MRT3847_27776C.1
gccttatacaagataaagcaggtattttccaacaccggcctcagtgacagggcacaggttttgcaactacataaaatatatatggagcatagcttctttttttttttttttttctgagggcgccacccaaggaagtggtaacaactgccggctctttttggcataaatattgatttggaagtgacagaaaaccactttacaacattaggtttctataataacccctcccccctttggagctctatggggaaattctcttctttttttggcagccttgtaattaaccactcgtggtggtggtgttgagggcggaaagctatggattttgtttctggcacttggcttggtatttttgccctttactggttcttcccattcaaacccattttgccctcaaccttacaattttttttttttcc

SEQ ID NO: 62860 - DNA, 434 bp, Glycine max
  Clone ID: PAT_MRT3847_27777C.1
ggcatttggataggattaaggaaaaagtggtattgaaggtgttacaagaggaatttctaccagctgggtcaactaaggtgcgtcctacaccacctttgtgggttgatgggtgtccatattggtttgcttttgggccatggatagttcagtggtctaacaataccagggtggaattttgtcaattgggggttaaagtttgacaaaccaataaacaaattatgtggtgcattatggggctcaaaatcctgggtattttcagggttctttcgtctttttgggtaccccattcctcaggtcttatttcacaaagcaaactgggtttggaatcaaatggcaaccagtgaagaacccaccattgaattttggattcttaagcaaagcagagcttttgtcaaatttttctattggaccttctcggtggagggaattttagt

SEQ ID NO: 62861 - DNA, 807 bp, Glycine max
  Clone ID: PAT_MRT3847_27778C.1
atcagttatgatattctgcatgatggggccttttcctagtgaaaactactgatctattcttttaagaatggtggatggcagaacgtggcgaaaaactgaaatttcgccatataaacacaccattgtgccttatggcacaaccatggcggccctcccttcacaaattgcctatggtggttggcaaaaaatccaccacgtcattccgccatggcagcaccatgatctttatttaacaacagtgatatgattttaagttgaggtgttgtcaaatcaaagcgatcaatatggcggcttaaaacaatcactgattttttctgggccattgttaactacataggcttgttttttgcaactatgttctcgatggaaaagtcagatgcctacagaaaaggttctgttggtaagaaatgggatggcggtgctcctggaggaggtcctggtggtggtggcggcggtggtggcggtccccgaggtcctcctcgtgggggtcttgacaatgttcgtgggctagatagtataaggggacgtgatcatagttcacttcctgcctgcggttcctgctgtggctgaatgttagagatccaatttgtgtatatgccttttatatgttacggtttgtatctggtgttgaactggtataatatgtaaacaaacatcgatacgactttcaagctttatatgtggccataagctgaaataacaaaatttaactatattgacgtatattgatagaaaaaaaaagaaaaattactatttgtatacccttacagaactcttttcttctgttatgagcttagttcatggctt

SEQ ID NO: 62862 - DNA, 525 bp, Glycine max
  Clone ID: PAT_MRT3847_27779C.1
ccgggaaccctaaaattttccgataacgaaatggcatccaccgccggcgcagccgcgaggtctattttccgttcatgttccgctcgccgtgccgcgttccgtctcggctccgatgctaaagcggctcggtctccgttccgtgtcgcttccaacaaacctctctcgcaatctacactcaggtgtcccgttgaattgagcttttgtgtggaatccatgctaccgtaccatagcgcaactgcttctgctttgatgacttcgatgctatccgtctctcgccacagctatggttggcttcctgaagatgcataaaaggctgccattttattcacccggatgttaaagtctaaaggcaaataagttgaaattgtattgtgacatgttggataaagttttgtaatgtctatccttgttatttggaaattttgtatggaatcaactagggatttttaatgaatgcagaattgatgcttgttatgcatccttccctcttgactagtttaaatccaaaatccatgctttctgtct

SEQ ID NO: 62863 - DNA, 156 bp, Glycine max
  Clone ID: PAT_MRT3847_2777C.1
tcgtagttttgtgcagaatacaaaggaccgtcttttgcgaaactttttaagtctttgaggttacgcaggaccaaaaacagacaccatgttatcaataacaatacggtgagatctaaacagtggaggggcgaacaagaacattaacaacatatgctt

SEQ ID NO: 62864 - DNA, 993 bp, Glycine max
  Clone ID: PAT_MRT3847_27780C.1
agggggcccagttggaaactttttccctgaaaaatgatggggttatcagaattagaggagctactgctttttcagtggcccccagaattttaaaaacaccaccatgttttgtatcgaaagatggtaaagcctctgttgagactgatggccctttccccgctgattactttgagcttttggaacaaaggcttttccttattcaaaggtatgggggagggattttgttcccacccttacccttgcatatgcaaaaaggccgtttccggatttgaacccctggcccccaagtccccaaggcccaacttttccgctgccccagggctcgccccccctgtgttgatcgccaaagccggtaaatttttccccataaaaaaggttttgacccccccaaaatgccatttttgtagtcataatcccggaaaaattccaatatttcccccgtcccccttaaataaacatttatttggttccctctaatgttgcaaaaaaaaaaatttgtaacgtggccttcctatgtggccccccttcgaaggggtcgcataagcctttttttgtaacagaagaataaaaacagaaagtttcaacattattgggattataaacaaaagaaagaaaattacaaagattaaaagtgaaaaaaacaagtagtatatttacaagaatggaaaaggtatttaaaccaccctaaacaatataagaaaaaatggttggacttatagttgtgtatcatgtacactcagacacatgctaattgaacaccaagattggtgtctttgttattgaatcaaccaacaggccagagtagctgcagatttggctataaaggataacagacagctaatggtgagtaacatatgatagtagttttattaggaattaggaatccagaactaaagttgcacacactaaagtgaggagctaatctattatagagcctgtaatgaaaccatcttaacctggaccatttggcagcacagaaacagaatcattttt

SEQ ID NO: 62865 - DNA, 653 bp, Glycine max
  unsure (1)..(653): unsure at all n locations
  Clone ID: PAT_MRT3847_27781C.1
ggaaccttcactaaccctaaaattttccgataacgaaatggcatccaccgccggcgcagccgcgaggtctattttccgttcatgttccgctcgccgtgccgcgttccgtctcggctccgatgctaaagcggctcggtctcgttccgtgtcgcttccaacaaacctctctcgcaatctacactcaggtgtcccgttgaattgagcttttgtgtggaatccatgctaccgtaccatagcgcaactgcttctgctttgatgacttcgatgctatccgtctctcgccacagctatggttggcttcctgaagattgcaatgatgatgtgtgataagtgttctgaagattgaagcaatcttttatgtacaaatctggttcgtgagacagtgttttgactgagccattggatggacaaattgagtcccaaaacctgaaaggaactttaaaaacctagatcgcctgacttctgttctttcttatttcagatgcataaaaggctgccattttattcacncggatgttaaagtctaaaggcaaataagttgaaattgtattgtgacatgttggataaagttttgtaatgtctatccttggtatttggaaattttggatggaatcaactaagggatttttaatgaatgcagaaattgatgcctt

SEQ ID NO: 62866 - DNA, 668 bp, Glycine max
  Clone ID: PAT_MRT3847_27782C.1
aaaaagaagaccttataaaggccagtataactttgatactaatatttccgacagctatacatattttaagcggagggtaacatatatacacttaacatgaaatagctagtcatcctacgcttacaaagtggtaaccaagtaataacataaaaaaattgggtcctgaatcctgatagttttaatatatatatatatatattaaacaggtggcagccccggtcgaaagagttccccccaaaaaaatttaattagcaagctggtgggttaagtatccctccaaaaacagctttagcattggagcaagaggatacaaaagttgtattgtgaggaccgccagaataagccaaatctacatcggctatctcaacaccctcgcaggggttgcttgtgctgcattgcagagacactgcaatgtttgagactgtagttccttgtatcttacggaaatgaatattgctgatcttccacaccgaagttgatggcgttgtcttcttgttggagccataactctggtcaataatgataggattctgaacacccttcatgatgagaccttcataggtaatgttcgtagcttccgccggcactgtccccatccacgttttgatttctgcaccgttggtcgtattcacgaacgtgcaattcgtaacgctgatgccgttcacgct

SEQ ID NO: 62867 - DNA, 415 bp, Glycine max
  Clone ID: PAT_MRT3847_27783C.1
aggacgcgtgggaaaactctccgatcacgaaatggcatccaccgccggcgcagccgcgaggtctattttccgttcatgttccgctcgccgtgcctcgttccgtctcggctccgatgctaaagcggctcggtctccgttccgtgtcgctttcaacaaacctctctcgcaatctacactcaggtgtcccgttgaattgagcttttgtgtggaatccatgctaccgtaccatagcgcaactgcttctgctttgatgacttcgatgctatccgtctatcgccacagctatggttggcttcctgaaggtagcttacaacatctgtaggattccttgtgttctttcttcaattgaattttcgggcacagagaagactatttgaagatcaagaagcaaggttggcatgacatggacctcttt

SEQ ID NO: 62868 - DNA, 449 bp, Glycine max
  Clone ID: PAT_MRT3847_27784C.1
ctctctccatttcccatttcttctcaactctccgtttcccatttttgttcctctcttctgaactctctgttcctctccattcttctgaactctctgtttatctcaaaacttcatgagtaacggttcataaacacaaaacctttttgtgtttaggtccttttttggtggtgtaatggttcaatatattttttggcatgttgtttgcagagaaggtggaagaacacactttagctgcgatttttatctcgatcactaaaggtgtgacctttttgtttatctttatgagctttgtgtttctcaccatttttttgttgcgcaggtatgtattttcatgtgggtatctcttgcgttcaattatttttggatgttcctaacctctctatggtccagagctctcgatttctctcgatgatggtagctgtgacctttgtggtgctctcgatcgctaa

SEQ ID NO: 62869 - DNA, 971 bp, Glycine max
  Clone ID: PAT_MRT3847_27785C.1
cccacgcgtccgcccactcgtccgcggactcgtgggcgacagaaggggttttgtagaaccctacactactctaaagtgagtgtggaaccttcactaaccctaaaattttccgataacgaaatggcatccaccgccggcgcagccgcgaggtctattttccgttcatgttccgctcgccgtgccgcgttccgtctcggctccgatgctaaagcggctcggtctccgttccgtgtcgtttacaacaaatttttctcgcaatctacactcaggtgtcccgttgaattgaccttttgtgtggaaaccttgctaccgtacgatagcgcaactgcttctgctttgatgacttcgatgctatccgtctctcgccgcagctatggttggcttcctgaaggcaaagagaagactatttgaagatcaagaagcaagattgcaatgatgatgtgtgataagtgttctgaagattgaagcaatcttttatgtacaaatctggttcgtgagacagtgttttgactgagccattggatggacaaattgagtcccaaaacctgaaaggaactttaaaaacctagatcgcctgacttctgttctttcttatttcagatgcataaaaggctgccattttattcacccggatgttaaagtctaaaggcaaataagttgaaattgtattgtgacatgttggataaagttttgtaatgtctatccttgttatttggaaattttgtatggaatcaactagggatttttaatgaatgcagaattgatgcttgttatgcatccttccctcttcaaaaagtttgttgcccttggattcttttaagtgggcatggtgaattttattaagctggattctcccaaaaggttaactttgtattttaaaaaaaaaaattggtctcttatttatgaatcatattgttcaaagtttatgcatcttgagtaaaattgtctgaaataaaaaaatcggttggcat

SEQ ID NO: 62870 - DNA, 748 bp, Glycine max
  Clone ID: PAT_MRT3847_27786C.1
tacggctgcgagaagacgacataaggggacaaatcacaatatatatcattcacattcactaaagaggaagatgaagttataaaaaaaaaaaaagcctggtatacagaggagatggcttgcagggtgcagaaaagaatttcgctgcgcagaaaacttcacattctccgagtccttacctactcaaactctgccaagagaacctcccttgccaagagtaccgttctacgcttatacaagctaaagctcgcactggaaactgtcaaaagacagtatgaaaacctattagccaccagaagagagtgcgttaggctattgaaccatgtcaaagagagcaaggatgtgaaaatagagaaggtaggggcaggaacttttatggtgagggtcacatgtgagaaaggaggtgacaatctggtggctatattaaaggcatttgatgagatgtgcctggatgttcagcaagcgagagtttcatgtgaaaatggtttttttctggaagccattgctgtggctgaggaccaaacgctggatgtaagagatatcactgaagtgcttctaaaagcaattggaaagcagagtggtgaaaaggactcgcagatgtttgacaaatgctgtgattcgtgactttttttaagtactttaatttgttcaacatcctgtgtatctcaaactagttaataccaatttcacgttaatcttcttttcaaaaaaaaaaaaaaaaaaaaaaaaaaaaagcggccgctctagagga

SEQ ID NO: 62871 - DNA, 466 bp, Glycine max
  Clone ID: PAT_MRT3847_27787C.1
gaacggcaaagtttcaagggattatatgattactttttgacttttgtttagatcccaagagctgggacataaaatccattgggcaagaatgattaacggtttattaacaagctaaaatgggtgcttaattttgaaaacgacaatgccaaatgtcttaggtggccccaaaaaaaaaaagaaaactcccgggatacctaccggggttttctataaatgaaaatgaaaaagaaaggcccccaatgggtttcaaacctcccctttgggcacaaacatgtttataaacaatttgatgcctgcccccaggggtttgggcttttttttcaaacacccccaaaaactttttgtgttgaggggaaaagacgaaaaacccttaatttgggaactgctttaacaagaaactatccctcctcaacaaaaaaattattattcttcgggggaaacaccacccctatcccggggtggcaaa

SEQ ID NO: 62872 - DNA, 922 bp, Glycine max
  Clone ID: PAT_MRT3847_27788C.1
ccacgcgtccggaagaacatacacgcataaggggactttgtgtgattaaactctaggtgaatttaagaggaccccacttgctagtatttcatactcatctaaatagttgtgctaattaagctatttgtttgttttgttttgtttatgcatcttgaattgatcggtgtgtgcattaatttgtacaattgtgcaacagcctaacacatcccacgtggctcatacatttcctagattttcagcttgctattcccagcatcatgtgattaaacaggctctatggttttttaatatttggatccaccattcctctttttggtgtcatcattatcatcattgtaatctaaccaatactataatgctttgctttgttttgctacccctcttcctctcctgtcatagcctctccatcaaatgatcaatcacttaacagctgcctcccactgcccgtacatcttgtatctctcctttgtgggaattcactgtgagtagatgctactaacacatctttaaggagcatcattcatcattgtttttttttttcttttgtgttcaatgtggaaaagtgctttaactaaacagctgtgaaggcttgtcactgaaataaagcactgcattaaggccaagccaccactctcctcttttccattggtggatctttttttctctcttttaataggaaatcattggtatgagtttcagctttgctgatccttctgcggctctgccaatctctattagtattattagacccttttgatatataaaaccttcaattacaatgctttacttccttatatcttttgtctcctttctcatcctttccaagtccttcaccagtaagcctttctcatcaggggagagagggatcaaattagggtcaattgggttttgggggagcctttcaagttggttagtttctagg

SEQ ID NO: 62873 - DNA, 296 bp, Glycine max
  Clone ID: PAT_MRT3847_27789C.1
aagattcaaacaagggggacccatttttcccttaactgaaaggaaacctgtaaacctgaaccttttcccccttgcctttgggtcggcatggtcacttttcttcttacatttttccaagctttcattgctgcctaaacaatctaaaaaaaaaaattaaaacacctcttaggttccctttaaaacaatattttttaattaaataatttacaaatgcccaccctgcttgcttttttttggccgaaaaaaatttggttggggaattttcctcaaaacatcctccaagaacagggttccag

SEQ ID NO: 62874 - DNA, 504 bp, Glycine max
  Clone ID: PAT_MRT3847_2778C.1
aaaaaaaaaagggggcccaggagaaaactttggggaaaaaaaaaaactttgaaaggaaacttggggcttttaaacaaaccccccggataagggggggccctatataaaaaaaaaaaatggggcccaaaaaaaaaaagcaaaacccggggggggggggaaataaaccagttacaaacccctatagaaattaggggggttttaaaaaagggggccctctttacgggggccgaaaaaaaaaattccacaaaaattcctggttttttgggttaacctaagggggggccaaaaacaccccaacgggggtttgggaaacatggcaaaaggatttgaaaaaggtgggggcccccaaaaaaaattaaatacccggggcaagtaagggtttgaaaccaaaaccaaaaccaatctggggggaaaaaccaaaaattttgggggggacatatccaccaaacggggttaaaaggaaattgggcccccatgcccgtgggcatgggagggaatttttgc

SEQ ID NO: 62875 - DNA, 2287 bp, Glycine max
  unsure (1)..(2287): unsure at all n locations
  Clone ID: PAT_MRT3847_27790C.1
aattgatcggcgtgtgcattaatttgtacaattgtgcaacagcctaacacatcccacgtggctcatacatttccgagattttcagctggctattccgagcatcatgtgattaaacaggctctatggttntttaatatttggatccaccattcctctttttggtgtcatcattatcataattcggctcgagaatctaaccaatactataataatgctttgctttgttttgctacccctcctcctcctcctccgtctctcatagcctctctccatcaaatgatcaatcacttaacagctgcctcccactgcccgtacatcttgtttctctcctttgtgggaattcactgtgtctagatgctactaacacatttttaaggagcatcattcatcattgtttttgtgttcaatgcggataagtgctttaactaaccagctgtgaaggcttgtcggttgtgtagtagtagtttacaactttacatacataagtgataagtccttcactgaaagaaagcactgcattaaggccaagtcaccactctcctcttccattggtggatctttttttttctctcttttaatagggaaaccattggtgtgtgtttcagctttgctgatccttctgttgtttctgccaatctctgttagtatttagacccttttgatatacgaagccttcaattacaatgctttacttcgtcatatctttcgtctcctttctcatcctttccaagtctttcaccagcaggcctttctcatcaggggagagagggatcaaaccagggtcaattgggttttgggggagtctttcaagttggttagtttctaggctcaagaaaggaagtacaacaggcaccaccccttttagtttttttcagttttctcttggcatgtcattgaaaaagaatagtttagtgtctaaggtggagaatgaggaggaggaggggaatgtttctctcttggatttgcctgatttgccattggaatgcatccttgagcacctttcaccagctgaattatgcagggtggcaacagtgtgcacatctctgagggatagatgtaggagtgatcatttatggaagaaacacatggagaggaaatggggtaaggtgtttggtgatgctgcttataggcaatggaaatggcatgtagcttccaagaacagagaaaaaatctcctccaaccagcacaatcagaaaggaatatttgctttccttcgtggtggttttctccccttcatatggatcaaagcaaaatcagaaaagggcacagagtcaagtagctcattaccagaagattcaatagcagctttatatctttctcttgaaagtggcaaattttggttccctgctcaagtctataaccgtgagaatggtcatgctgggttcatgctctcatgttatgatgcccaactatgctatgattctcgatccgacacttttctggcaaggtactcgcctcatgggagatggacaactgaggaaaacatacaatgggaccggctaagagtgccaccaattgctacttctccacatgctcttcacatctctgactgtttggatgacttgagacctggagatcacattgagattcagtggagaagaaacaaagaatttccttatggttggtggtatggtgtcattggtcatttggaacaatgtcaaggacatgggaaccattgccattgtcactataatgatatggtgattttggagttcacacagtacagtgctggatccagatggagacaaaccgtgataaacagaaagcatcatgtagaaaaaggcaatgaaatagatggtttttatggaggaatcaggaagctgcatagcaaggaagaaattgcaaggtggaagaacctctggccaactaaaattgtgatacataattgacttgatagcttagaatttttgtaaattaagcagtcacccttcctaaaatgtgaaggattactttgtcacagaacgatgtcattcctaacaattggaataaacttggaaagagtgcatggaggatttttcagaggctgtaacatgtgtaccacgacataacaattagtgtatatgttgcagttttcttatacgtgtctatatataatatatagaagaacattggtgcatagtgcatactcctgtttagctgaagcagagagaaggttcattagctccttgattgtgattagttttcaagttggcaaaattgtgtagcggtttggctcttactcggagaacaaaattaattaagcgagataattagagatggcaaaaatatccatatttgtggaaaaaaa

SEQ ID NO: 62876 - DNA, 242 bp, Glycine max
  Clone ID: PAT_MRT3847_27791C.1
aaaacaattctacttaatcggtaccactcgttctgattcagaattacaatactaaggaggaggcatagaacgagtgtatctaaacgtattactcttcacttactctaacaagaaggaaggatggaaggcagaatcagaaagccctatttgatttatcggttattatcccttgatgaaaatgaaaaggcgcggtatcagctcggaatggataatcgtattcgtatacgcttttcttgggaggt

SEQ ID NO: 62877 - DNA, 997 bp, Glycine max
  Clone ID: PAT_MRT3847_27792C.1
gatcttttctatgtttgtccggctgaattatataaatcttgctgaatagatgtgtccgtctctttttggtaggacagtctaaagactgtaaagttgtctacagatctgtgctctagcattaatggcttggtatcatcttttgtggctttattgcaggaagaaaacccatcacgagagagcacaattgtaagaacagctggtaaacttactcccttccaattcaacaggattccagagatcattgatggtaatgttcccttggcaactcgaagaacgccagaagagatataatctcaaatccaatgaatctgtttcctcagaatctttctgtcctctctgcaacagcccactcgacaagagtgagattactgattggagtaatattgatagccacagaagtagtgatattttttataatacctgctgttcaagttgtcggtttcagatacttccaagtgattccatggcaatggaacaattttatatggatttgcctcagtcggtggttggccgagcaaagcaagccaacaatggtaatttgagtctgctaagggaacaaattcaagattacctgctctcagatggtgaagatgaaacataggactacttttttacattgaggctctatgttgaagggataaatactggttgtggtaatttaatttacagtttgagtgagtgagaggtttccgttggcctttggctaatacaaaaaagagttatagagcactgagcttcactaatttttgagagcatatttaagcagggatagattagatagctaatttttatgtatccttggcaattctaagagagataaagttgagtccgaatactcgttggaggcatcaaggttattgagatattgctttagcatttatttgcgtctattgtattttatgggaaatgttggaccaagacaacagtaaagaaattattttgcaacttgtgactagtatgtatggcattgtttttccccccgaaaaaaaaaaagggg

SEQ ID NO: 62878 - DNA, 272 bp, Glycine max
  Clone ID: PAT_MRT3847_27793C.1
cacgttcaccacaactaagaaatagacgctatactgggtcgcttaaatctctgggccagctcttaccactattattcgtcccagtaccctcattctagcttcaatcatttccattattcccatcgctggcttctccacttcaacgaccatcaataacccaatctccatttctagatacatttctagacttcaatgcacgcacctttcaaatccatatagccagaaattcactccatctcctaaatacctaccaaaccttacttattcacaat

SEQ ID NO: 62879 - DNA, 311 bp, Glycine max
  Clone ID: PAT_MRT3847_27794C.1
agtggatgccagggtttggtgaaccaaaatgactccattccattcccctgaaagaagattgaaaagggggaatgaaagtttgaagggggtacacacccttacccggtgccttatagaaaatattattagacctttgatttttttaactagggcaactacactggcttttgaattccaaattttatttggttaataataataagcagaattggagccttacctttgaataccttcatgaaaacttaaaacttaaaattcttaaggtatggggtttaatggaaggaaaaattccaaaaggcgttggacctttt

SEQ ID NO: 62880 - DNA, 607 bp, Glycine max
  unsure (1)..(607): unsure at all n locations
  Clone ID: PAT_MRT3847_27795C.1
cggtccggnaattacccgggtacggctcgagcatcttcttcactttcttttccccctttcggtttcgcacctcaaacccgacatcaatcttcatcccgttcctgttccccttcctctctgtttctccattcccactcgtggagttactctccttacttttcttttctctcccgtcgcttccacagcaaccacgaccctgaattttaggctttgggattgagattctttcttcttctttttttgattttttttaacttctgtgagggagaaaggggagaatgtcgaagaagaaagttagcggcaacaccatgacgctgaaggacttccatggcggttcaattccctctgatctccctctaccttctgctcccggcgtgactgtgaggacttcagatcgtgctggttttgatcggccgtcggcgtgggggacaccgatgggccggtcggatcattggtctcggccgcacacgtcgccggcaactaggcattatgatgacaaaaccccgtttttgtcacacactgccccaattggcaggaatttggtggggatgagagggaagccccctgatggtggttcgatgccacgtaggacaatcagtgatgagag

SEQ ID NO: 62881 - DNA, 134 bp, Glycine max
  Clone ID: PAT_MRT3847_27796C.1
acagccaaaagggttggcagatagatcttctagaagagacccaagtgggtgcggaggtgcttggtttacaatcctaaccttaagcctatttcttacaactcacatatgtcaatttgcaaaatcattttttttta

SEQ ID NO: 62882 - DNA, 701 bp, Glycine max
  unsure (1)..(701): unsure at all n locations
  Clone ID: PAT_MRT3847_27797C.1
tttttataaaaaccataggtatggaggcaataaagggatgggtaagattattatgggagataatttttcctctaatacaattgtgtattcaattcaagattcaaatttattatcaagttgaaataatcttgtatccgttgatcaagtgtttgatgatttttttctcttttgatattaaaatattttttctatgttaaaatgttttatgattgtgaaccattttgttaatagaacatatcctttcaagaggttattggttaagttagatatgattattatcaacatcaaaattcaaaattgtttgttggatatttagcataacaaaatatttcaaactcaaattagttgattaagttgaattaatttcatgttagatatatctacatactcggnggtgtttgtggaccatttgnttattttctttttctttatttttcattttaatggcaagcaaaatacagcaaccgaagcaatccagcggggccagcaacatttatgtcaatttaaggctacacgagttcctataatgaatgggctaaatagaaggtatcgccgcttgttagtgttacatcgttgatgtcaattctgagttcatttgtgtggatttctgatttttatctcatcacatagcaatgttgatgaattgacagtgncacaagtagtattaactattttgagatttccaagtgcatgcatgaatg

SEQ ID NO: 62883 - DNA, 499 bp, Glycine max
  unsure (1)..(499): unsure at all n locations
  Clone ID: PAT_MRT3847_27798C.1
gnnnnaggggngggngcngnannnngnncnngnnncncnnccnnngnnnnttgtttttttttttcacataaaggggggaagggccttataaagggtgggttaattccagggtttatacccttttgggaaacaaaaaaaaataactttttttacccccttaaaatgcgggttccatattgaacaaaaaagaaacttttttaattccctgaaaactccatttttaatggggcttgcaattgccacccttgttttgttttttttatagaccctaaaaaaaaaaatttgtttgctcaaaaaatggcccgaccctgactagtttaggtataaaaatattgttccaaaaaaaacaaaccaaggggttttcccattgaaaaagggaacctacaaggtttgcacaaatggttagggaaaaaacacggggccttttttaagggccataaaaactgaaagttttttccaaaaaagggttttaaaaatagaggggtttggcaagcttttt

SEQ ID NO: 62884 - DNA, 366 bp, Glycine max
  Clone ID: PAT_MRT3847_27799C.1
ggctaattatcttgctgttgattattacaagaggagtgaaggaggaggttcgtttcaagccgtggacactctgaatgggaagctcttgtgtggttgtaatgatgtgcatgcgtgtgtgcctggatctacttcacaagcttgctcagcatagaaagcatagcaacgagcttcttgaaatgtttcatcccacgcttcctggttctgaataccatattttatgcagccacagggttaccaaatgtatttgattgacaactatgaatgcgttggttatagttaatagaacatgtttaaatttgtaagcgaaaatcataggaaaccttcggtgtttcaatatgaagatgcttcttttgggcagattacaac

SEQ ID NO: 62885 - DNA, 680 bp, Glycine max
  Clone ID: PAT_MRT3847_2779C.1
cagaacttgaagaagcttacggaggtcttcggtgtagagtgggccaacgatgctatcgttcccaaggtcatggctatggcccagcaccccaactacctctaccgaatgactacatgcttcgccgtctcaacactggcgcctgcactgagtctggatgtcattgaacagtccatcatccccatgatggacaagctggtcaatgacgatatccccaacatcagattcaacgtggcgaagtcatatggtcagctcatcaacacgctcaagcagctgcttgagcaaggtactgtcatcgctctcgagaaggctggtacaccgggccagggttgccagaaggctacagatgtcattaccaagagcatcctgccgaccctcgagaagctccagcaagtcgacgatgtagatgtacgatactttgcgacgacggccgcacaaagtttcacggatgcgatgcagacttagaagatccagcttcgtccgtgttcttgaatgtgcagaatgacatcatgaatagcatcaacgatggttaatgatatggaacggctgcaaagaagggcatggcggtgagaaaacagcgtaagccgaaagccctgtaggtgtagttccaagctttgttttatgagagttgagtgggctagtagttgggctcactggcaataaaccacaaagattacccagtt

SEQ ID NO: 62886 - DNA, 377 bp, Glycine max
  Clone ID: PAT_MRT3847_277C.1
ggccatatgcgcggaggaataggtgggaatcaaaatgcaaaggagactgaagattctgctattttcaggccatatgcgcggaggaataggtccaaaccaaatcatggtcctcgtggggcttcaagggatgtgaagggaataatatctgatacaaacaaacaaaaggaccacaatgttctttctgtttctaagccaaagcctacaggtttaaatggcgaggtactttctaaagatccaacatctaataatccactgggcaatgagttggttggtgcccgagcttgtcaaacagctagtggcaatgccagtgttcctgaagacaacttggatattggcatgaataaaaacttcaaagaagatcaacgaattataccttc

SEQ ID NO: 62887 - DNA, 828 bp, Glycine max
  Clone ID: PAT_MRT3847_27800C.1
tgcacagtatactttcagttgttgcatatccttgtgcttggtcctggaagcattggcgaaggagagtcaaaattagttgccttcaggaatatgtcaagtctgaatatgaccattcttgtctacgttcctgtcgatcacgagctttgtacaaagggatgaaggttggggcaactccggatttaatggtagcatacattgatttttttcttggtggtgatgagaagcgattagacattgtatcaattatacagaagagatttcccatgtgcataatttttggtggggatgggagctacatggcaccttataatcttcacaatgatacactgttgaccaacctccttggtcagcatgtcccggcaactgtttggaatcgcttggtagctggactgaatgctcagttaaggactgtaaggcatggatcaattcgtactgcactaggtcctgttgttgattggataaatagccatgcaaacccccaacttgagtttcatggagttaaaattgagcttggatggttccaagcaacagcttctggttactatcagcttggtatcgtggtagcagttggggattattcccttcttgatttgcaccagtctgatacttgggttggcacagatgaattaatgaggaaaaatgtggcacatggaagaaagaatgttaagcagctgcagcatagttggccatacataagcaattcattatctcttaaaaggataactggaggaattaatggtggcctaataaatgatgctaccttaaaatcattggactttcgaagggactttttattgccacttttctgctactggtaagcaatgctaa

SEQ ID NO: 62888 - DNA, 1087 bp, Glycine max
  Clone ID: PAT_MRT3847_27801C.1
ccctcgcaacttgaagcttcgattctgtgtaatttctgcagtcggcaactcttccctttctcttgaagcttctattctgtgctgttgctgaatcagaatggatggtgctgtgttggcatgtacagatggagcagttcttcccgtcagtcaagtgtttgatgcaattagagagcttgggaatggagggcttgagcaatgggatcctcttgttcttacttctgcctcactcttaagcaagttgcctgtggattcttcctctgttgattttgtgattttaatctggctgtcaattgattgtcctgtggatcaactgattcaagaaattcttagagtgttaaaagtagatggtacaattcttattcgcaagtcatctcagtctgctgtgggttcatttgataagataatatcttctcttgagaacaagttattgttggcagggtttacagaaccacaagttttacaatcagctgggatcaaagctaaaaagccttcatggaaaattggttcgtcttttgcgctaaagaaggtgattaggagttcacctaaaatgcaaattgattttgattcagatctgattgatgaagatagtcttttgactgaagaagatttaaagaaaccccagcttccacctggtgattgtgaaattgggagcacaagaaaagcctgcaaaaattgcacctgtgggagggctgaagaggaggaaaaagtattgaagttaggattgacaacagaacagattgataatcctcaatcagcttgtggcaattgtgggctaggggatgctttcaggtgcagtacctgcccttacaagggactgcctgccttcaaattgggcgagaaggttgcactgtccggtaactttcttgctgcagacatataaatggataaagttgcggtaacgatttgttatgggaatggtattatataattttttatttagtatggaattgtcatcaattatgttaatgctagcagaacaattcatcagagttgttttgatacaattttacgtatgacaacacgagggattcgagttttccggatattatagagctgcaatgtcattgtcttttgtctcaaaaaaaaa

SEQ ID NO: 62889 - DNA, 565 bp, Glycine max
  unsure (1)..(565): unsure at all n locations
  Clone ID: PAT_MRT3847_27802C.1
ggctcgagcataccccttcctctctttgcctccccttcttcctcaacactttcctagtgccagttaagacaaacaataccaaagcatatttcaattgaagttacacaaattactagcatatcatatcatatatttggtgtgttgtcttaggacatatatatgggtaacgcagactatgcatacccttcgggtatgaacgtggagtgcgtgcaccgagtggccattcctccccctcaacccttcttcaagtccctaaagtactctatgaaagagacttttttcccagatgacccgtttaggaagttcaagaaccagccagcctctaagaggttcctgcttgggcttcagtacttcttccccatctttgagtgggcacccaaatacaccctgcacttgcttaaatcagacctcatctctggcatcaccattgctagcttggccattcctcaaggcatcagttatgccaagctagccaacctccctcctgttcttggactgtattcgagctgtataccgccattgatctantgcatgatgggaagctcaagggatttggcagtgggaa

SEQ ID NO: 62890 - DNA, 270 bp, Glycine max
  Clone ID: PAT_MRT3847_27803C.1
ttatgggatagcgtcatcatacaaagcatcgaattcaaaaactaagttgattgcttgtgctttgctttattcctcaaaaccaaacatgtcgaacacatgcggcaactgtgactgctctgacaagactaactgcaccaagggaaacagctatggtgttatatgtgagactgagaatagctacattgagactgttgacattgatgttccatctactgatcattgatgggaagtgcaagtgtgtcacttactgcacttgcacggactggactt

SEQ ID NO: 62891 - DNA, 694 bp, Glycine max
  unsure (1)..(694): unsure at all n locations
  Clone ID: PAT_MRT3847_27804C.1
gtgtttttcatgcntgttggcttccccgaattgatcttgcccactgtttttctctacatgttcttgataggggtatggaactttagatatagaccaaggtaccctcctcacatgaacacaagaatctcacaggctgaggcagtgcacccggatgagttagatgaagagtttgacactttccctacgagccggagcccggacctagtgagaatgaggtacgatcgcttgaggagtgtggctggaaggattcaaacagtggttggtgatttggccagccagggagagaggattcaggcactgttaagctggagagacccgcgtgctacatccatatttattacattgtgtctcctatctgcgttggtgctctatgttactccttttcaggcagtggctggtttggcagggttttacatcatgaggcatcccagatttcgccacaggctgccatgtaccccagtcaacttcttccggcgcctccctgcaagaacagattgtatgctataatgtagtagtagtgtatgtgatgtttcaaaccagttttttctcctatttattgttttatctggtattgactgtgtttttattatgtaacgctttagttgtgatattcccaagctagctcaagctggccagacttctaatttgtatgtggattcttttgctgctgttctgggctttgacttgcaaaaaa

SEQ ID NO: 62892 - DNA, 156 bp, Glycine max
  Clone ID: PAT_MRT3847_27805C.1
gaccccgcgcccgctcggctttatatactcatgagatgtctccatcaattcaagactatgattccagcgagagaacttgtgaagaccttgcaatgtccctttatgcatgctaatgctacaatgcggtcctccaatgtggatgaaaggcaaaatcta

SEQ ID NO: 62893 - DNA, 428 bp, Glycine max
  Clone ID: PAT_MRT3847_27806C.1
cgcacatgttacttactagtttgaaataaaagaaaagtctcttccttactcacttgcttttttgtgcttgttttttttttcttcattcattttttatccttttattcttcattcattttttttttttatctttttcttcatcatcatctattgttgtttttcttatttttatccttcttcatctattatttttattttatcaatctttttattcctcttttcaatatatttttaatttattactaaatcataataagaatcaaatgtaatttttactttcaaatccattcatttactctcattaaaatcacgacatatataggtttttaaaataaatttgtaaattaaaattgaaatttaagaattaaatatcaaattaactatatttgaacgatgtgttataatcttatcttttaatttaatttact

SEQ ID NO: 62894 - DNA, 905 bp, Glycine max
  unsure (1)..(905): unsure at all n locations
  Clone ID: PAT_MRT3847_27807C.1
taaatatttttcaatgaatatggatgatcaatccacaagtatgaaattaagcatagaagagagacaatgaaactgaaataacattaaataaatagtaaaaatcgttacattaagagtgtttgattgcaaagatcccaacaatgagttttttaacctctcattgtcatgagaggcttaaaattacaaaaatggtgaagagtggtggaagagaatggagggaaaatggagaggaattgggaagattgctccaaaatgaatgggtcccccctcttggatgtgccctaggttgctcttcagtgtgggaagctaaatgaatatgttccctctcttttttccacttaaaacgcaactcagttctgatttcacgattttgtgcgctaagcgaggaataagtggtcatgcactaaaggcgccttcacgtgacacttgacttccaaagtgtcttcttcgaactaagcgagggctgccccctgaacaatcgcgtcgcactgaatgtgtatgacgcgttgagcgagagtctttagaccttcaactctctttcatgtcttcttctgtgtttctaaaaaaaatacaccaccaaacaatataaatttatcagtttaagtacttactgaacaaaaactcaaaggatgtcaagatcctaatggttcacacaaaaaaaggcaataaaaggatgaaaaatttgataatttctatgtgacctaaatccaaaatatacttatatatgcncaatagttatcacattaatgnaatggattaattaaaaaaaaatntgaatttaaaggctatgcnttaataatttaaattaggaaaccttntaaactcagggattatgatgaattcttttggttaacccattagnaaatcatattaacttttttccttgggtaaataaggttaccagg

SEQ ID NO: 62895 - DNA, 295 bp, Glycine max
  Clone ID: PAT_MRT3847_27808C.1
cgcggcgaacagcggcgtcaggttgacgaacaggccggcggtggtcggccccaccgcggccaccgcccgtccccacagtccgtaggccaccagcgacgggccgacgacgatgtaggcgatcgcggcgaacaccgccagcgaccactcgggctggcgtggccaggccagtgcctccacgccggccgcaccaccggcccagagcagaccgaagagcgtctgcaccagcaggaattcatgccactcccaggcgcgcggctggccgtccgcaccggtgacctgcgggcgtgccgcgccg

SEQ ID NO: 62896 - DNA, 134 bp, Glycine max
  Clone ID: PAT_MRT3847_27809C.1
gactgaaaatttgaagaaaacactaatctaaatcctgatactgaatcaataacacactggttcaatactaccattctctaacgctatcattatcaacacatctgctcaatacactacttgcatatgatgattac

SEQ ID NO: 62897 - DNA, 466 bp, Glycine max
  Clone ID: PAT_MRT3847_2780C.1
ctccccttttttttttttttttttttttgaaaaaaaccagagttttatgtaagactgaatttctatcttagccaactttgtcttttaaagttgcaataaacagcaatatccacgcataccaaaaatgctcattcctaaaagatgctcattctcaagtttgtccctaagtagagacacaacttaaggtaaatgctgcaggtctgaaatgaacaacattgttttcacagttcaactaccactaataggttaagggacaaaaaacaatgagcctttttttttatcatctaaatgaacaaaagtttctaaactttgagctagcatcatacttttaactttgaaacattttcttctgaatcatctacctgcaagggcctctgaaaggcaaaaggaggtggtggcggatcaacactcaatgtaccatcaagtactcttactacctcccccatggaaggtctccgacgttcat

SEQ ID NO: 62898 - DNA, 2741 bp, Glycine max
  Clone ID: PAT_MRT3847_27810C.1
gctcggaattcggctcgagtgcttaatggttaagacttaagaagagtagttagttagtagtaattttgttcttgtctttgtctcattggactcaacagagagaacgagacacgtagaacgatctttgcgtttccgagtctccaagtcctctgttttacactgctgcgcgagacttcatttcattttgtgattataaatacgcaactcaattacccaacccaactttcttttctttaacagcaaaaataagagggacacgacaggccatgcactcggaatacctcaatacgacaaaatcaaaattcccacttcctttttcttctttttttgttctttgttttttgtttaataagaaacttcgagaagaaagtaaaaggttcaatttttacccttttttcttcccagaagcgatctctaaagccgacccattttggaattcggaaaacccagtgctgatcgctctctgggtgttcccaaaatgaagcttcggagatcttcgctgtgcgtctttctagggtttctggtgctgttcctttcgccgccgccatcaatggcgaaattcgtggtggagaagaacagcttgacggtgacgtcgccggacgacatcaagggcacgcacgatagcgcgattgggaacttcgggataccccaatacggaggcagcatggctgggaacgtgttgtacccaaaggacaacaaaaagggttgcaaggagttcgatgagtatgggatttccttcaaatccaaacccggtgctcttcccactatcgttttgctcgatcgaggaaattgcttctttgctttgaaggtatggaatgcacagaaggctggagcttctgctgttcttgtttcggatgatattgaggaaaagttgataaccatggacactcctgaggaggatgggtcatctgcaaaatacatagagaacataacaataccatctgctctcattgagaaaagttttggtgaaaagttgaaggttgccataagtaatggggatatggtcaacgtcaatcttgattggagagaggctgtcccccacccggatgaccgtgtggagtatgaattgtggaccaacagcaatgacgagtgtggagttaaatgtgatatgttgatggaatttgtgaaagattttaagggtgcggcacagaatattggagaaaggtggttatactcaatttacaccccattatataacttggtactgtcctcaggcatttacattgagcaaacagtgcaagtcccagtgcataaatcatggaagatattgtgctccggatcctgagcaagatttcagcactggttatgatgggaaagatgtggttattgaaaatttaaggcagctatgtgttttcaaggtggcaaatgaaaccaaaaagccttgggtgtggtgggactatgtcactgattttcaaattagatgcccaatgaaggagaaaaagtataacaagaaatgtgctgatgctgtcattgaatcacttggccttgatattaaaaagattgaaaggtgcatgggagatccaaatgctgattctgaaaatcctgttttgaaagaagagcaagatgcccaagttggtaaggggtcacgaggtgatgttaccatattgcctactctagttgtcaataatagacagtatcgaggaaaattggagaaaggtgctgttatgaaagctatctgtgctggttttgaagaaactaccgaaccagctgtttgtttgagcagtgatgtggagacaaatgagtgtttggagaataatggtggttgttggcaggataaagtagctaacatcaccgcatgcaaggatacgttccgtgggagagtatgtgaatgccccctggtggatggtgtgcaatttaaaggagacggttatacaacctgtgcagctagtggacctgggcgttgcaagataaacaatggaggttgttggcatgaagctaggaatggacatgcatattctgcttgttcggatgatggaggggttaaatgcaagtgtcctgcaggctttaaaggtgatggtgtcaaaaattgtgaagacattgacgaatgcaaagagaagaaagcttgtcagtgccctgaatgtagctgcaagaatacttggggaagctatgactgcacttgcagtggggatcttttgtatataagggaccacgacacttgcataagtaaaactgccagtcaggagggaagatcagcttgggctgctttttgggttattttaattggcttagttgtggctgctgcaggggcataccttgtgtacaaatatagaataaggtcatatatggattctgaaatcagagccatcatggcacagtatatgcccttggacagccaaggagaaattgtaaatcacgtgagcgaagaaagagcgtgaattgtcagtctctttggatattgtgtgtgaagcctgggtgtggcttaccctgtgtacccttttgagttcagattctgagcatttgaatttgatagactctgtatcatatggacaataaaaggttcagaattagatagttatcctacgctttttattggggatgtagcaaattgtatacttaatttaggccagacttttttaagttatttcatttcactagattctaggatttctgtttatgtgacttcttgagttccacacttgtgattgtaacctatcgtgttttttttagtacaggcttaagttaacattgttgttcttcttcccaaaaaaaaaaaaaaaaaaaaaaaaaaatattgcatatgt

SEQ ID NO: 62899 - DNA, 546 bp, Glycine max
  unsure (1)..(546): unsure at all n locations
  Clone ID: PAT_MRT3847_27811C.1
ggtccggatttcccgggacaaccacgcgtccgcacttatacaaaattctgagataagttgtaaagactcagagaaaagttatggcaaagaaggagatgaaatctaccggagtgacaattatgatcatgattatgttgggctatgcacaagctaattataattctccatttgtgaaaattgagcctaacaacacaacggataaacttacatgtcctgcacagtgtggtatagattgcttcattgctaacattgcatatccaatatgttttgctatttgcgtagcaaaatgtcctaaaaagccacccctaagtgtctacaattgtatgattggttgtggcaagtacaaatccaccgacgctaacatagatgctcgtgatctttcggcggtaaatgcttgtttgctagagtgtgaaaaaagtgacaatttgttataagaatgttaaaaaatgaaggtgttagcagaaataatactcatgtataattgtaataaacaaatattaatcaatgagtaacacctgttttttatttttcatanaaaaaanaaaa

SEQ ID NO: 62900 - DNA, 1079 bp, Glycine max
  Clone ID: PAT_MRT3847_27812C.1
cggccgctcgagccggcgggcgggttttcgaggacgtgagctgggtttcacggccgtacgccttagctgcgggggaagtcacacacatttactcactcactgtgagagcggcgaagaagaagaagaacaataatgaaggacgccggaaagagccacaaggcgaatgcaaagctgtcgccggagacgcggaaggatcggaaatcggcgacggggctgagtggatcgccgaagaagggaggccacggcgggaagttcacgtggatcggcaacggctacgagaacgtcgagatggagcacggtgctatggacgccaaggacccgaacttcgaggatccagcggagatcgccgccgtgtgatcgcggtggtttccggtgacgagatctgtacatactaataattgctaagagacgcggttttcgaattcaataatatgaagcaagtaggagaagaagcgctttctgtgattgattgttatagatctgatctgtctctggaatttggtagtggcatggcacttgtgttgttgtacatatatcgaatggtcttggaagtgcgtgcactcatattcgcattcaagtttctacgagcttttgttatcaacgataattgaattttcaattttcaagtttattaagtgtttcagtctccacgaaaaaaaaaaaaaaaaaaaaaaaaaaaaaaaaaaaaaaaaaaaaaaaaaaaaaaaaaaaaaaaaaaaaaaaaaaaaaaaaaaaaaaaaaccccccgggccgaaaaaaagggaaatcaaacccccaaaaaggggttttaaaacatttggggccccgggggttttggggttttccaaaaggggttttttttttagggcccccaaatcgtttttgggggccccccaaaaaaatccaactttaaaaatttccgggggaacccccgggaacccccccaagggggggttttccccggggggaaatttaaaaaaggggggggggaaaaaaggggggggagggaataaagggggggttccccggggaaaaatttgaaaaaagggggaggggggaaaaagggggggaaccaaaaaaaaaagggggggtttcccggg

SEQ ID NO: 62901 - DNA, 401 bp, Glycine max
  Clone ID: PAT_MRT3847_27813C.1
cccacaaaacgagggcccttttttttttaaaagttggccccgaatggggaaaaaggaaaaaacctccttcccacttttttcaacccactgggaatgggcctcacattttaaataaaaggcttttaaattttccaatcaagggatcccaaaaggcaggctgttcctagttcccgtttttaaaaatcaacagaagggtttttttttatctattaccctatctggcttttcccccctattgggcagccaacatttgggggggcgggagtccttttttggggcaatggccggcttactatgccttctttgggaagaaaatagatggacccctggcctagtccattggccatttggggattttcgggggccggaaaacccaaaaggggggtaccctttttgttttt

SEQ ID NO: 62902 - DNA, 863 bp, Glycine max
  unsure (1)..(863): unsure at all n locations
  Clone ID: PAT_MRT3847_27814C.1
gggcgccagagagggtgagaccgctgggaagcttatgtggctgcgctgcatagaagaaaaaagggggcacacagtttactcactaactcactgtgagagcaaagaagaagaagaatgaaggacgccggaaagagccacaaggcgaacggaaagctgtcgccggagactcggaaggatcggaagtcggcgacggggctgagcggatcgccgaagaagggaggccacggcgggaagttcacgtggatcggccacggctacgagcaagttgagatgccgcacggtgctatggacgccaaggacccgaacttcgaggatcctgtggagatcgccaccgtgtgatcgcggtggtttccggtggccaggtctgtaaatagtagtaattggcgaaacgtgttttttcgtgttcaataatgtgaagcgaatcggagaagaagcgttttctgtgattgattgttatagatctgatctatctgcggtatttggtagtagcatggcacttgttgtacatatatcgtcttggagttggaagtgcactcgtatccaaaactatttataatttttttagaacttaaatatgttttttttcaaagtaatttagtgttgtttttgattcagtctttagtgttgtttttgattcagtctctataggatgtgatatttttaaagtgttttaaatcgttttgaagtgtaaaaaaatattttaaacagaaaaaaaaaatattatctaaaatacaggataaaaaataataaaatatattttacaaggattaaaataaaataaattattaaaaagaanacaataaaaaatattaaattattagaacgnaaaaatatatttaaatttttttatattaaataaaact

SEQ ID NO: 62903 - DNA, 1025 bp, Glycine max
  Clone ID: PAT_MRT3847_27815C.1
ggcacacagtttactcactaactcactgtgagagcaaagaagaagaagaagtgacacacatttactcactcactgtgagagcggcgaagaagaagaagaacaataatgaaggacgccggaaagagccacaaggcgaatgcaaagctgtcgccggagacgcggaaggatcggaaatcggcgacggggctgagtggatcgccgaagaagggaggccacggcgggaagttcacgtggatcggcaacggctacgagaacgtcgagatggagcacggtgctatggacgccaaggacccgaacttcgaggatccggtggagatcgccgccgtgtgatcgcggtggtttccggtggccaggtctgtaaatagtagtaattggcgaaacgtgttttttcgtgttcaataatgtgaagcgaatcggagaagaagcgttttctgtgattgattgttatagatctgatctatctgcggtatttggtagtagcatggcacttgttgtacatatatcgtcttggagttggaagtgcactcgtatccaaaactatttataatttttttataacttaaatatgttttttttcaaagtaaaaaaaaaaaaaagattcaaaaaaaaaaaaaaaaagcggccgcttttttttttttttttttttttaggaagattgattgcatttaataattaagaaaatgttctaagatattgcagaatttatttcaacaccaggaaggctaccaaatccaaagataatgaaaagattgtctacggaacagattgcaattaactatatttttcaaaagtccttacagttaaaaaatgcacgttgtctcgagatgaacacaaaaatttcaagtaacaaaaccaaagcaagttgctcctaggagagaacagccatgacatctgagactctcaaggtaatatagtcagaaccatctttgcccttgaagtcatttccagcatatttggagtacaaaactgtgttccccggagtcacggacaacggttttctgttgccttcctcgtccagatgcccc

SEQ ID NO: 62904 - DNA, 1267 bp, Glycine max
  Clone ID: PAT_MRT3847_27816C.1
cctgtttctctattgccagcaagcgtggctggggagccagttccttatgagaaaagcttttggggtgctatggaggatccagtgcgatatttagttaccttcattgcattctcacaaattggtgttatggtggctccaacaactataacctcacaatatcttgctcccgtttggaggggtgcagtgattgtttcatttgtatggtttttgcatagatggaaaacaaatgtttttgcacggtcgttgtctagtcaaagtttacttgggcttgatagggagaaagtgtttgctctagacaaaatctcatctattggtctatttgtgattggtataatggctttggctgaggcttgtggtgtggccgtgcaatctgttgtgaccgttggtggtataggaggtgtggctactgcttttgctgccaaggacattcttggcaatgtgttcagtggtttatctatgcagttttcaaagcccttttcaattggagatacaataaaagctggctcaatagagggtcaagtggtggaaatgggtcttacttccacatcattgctgagttcggagaagttcccagtcattgtgccaaactcattttttttctagtcaggttattgtgaacaagtcccgtgctgaatatcttgccattattaccaaaattccactgcaaactgaggatttaagtaagattcccccgatatcagatgatgtgaaaagcatgctcagatcaaatgcaaaggttttcttagggaaagatgttccctactgtttcttatcccgtatagaaagttcatatgcagaattgactcttggatacaacctcaaacatatgcgcaagatgaattatactccgcagaacaagatattctcctacaggcagttcaaatcattaagaatcatggggttgctcttggcagcacatggcaagacacgtcttctaaatgatgtgctctgcgtgatggcaattttggaagtgattgcaaacatcgtgagctttagcttttactaatacaatgcccgcaaggttattaatttgtcattcgttcacacagaaaacagttttccagtactagtaaacagttttccagtactagtttgacatgtgtagttggttttagttttgatttactaaaagaatacaaaaaaaaattcattatgagtgaattgtggaattatccctttatgaagttcctgtttttttatgttaataataataataataaaactaagttactataattgcgggccagtgcacgaggctctctaaaaa

SEQ ID NO: 62905 - DNA, 1256 bp, Glycine max
  Clone ID: PAT_MRT3847_27817C.1
ctgaaaatctccatattcttgttgagtggctgtggatggatcagatagatatagcaagcaacttttttcatctgtgttgtgccgaactttcaatgtaaaatcgattcatctgtttgcccaaaagaaaaacgaacatattcttgttgagtggctcttgatagctgataaaggtgacttttctggtaaaaatctctcccagatgtcaaatgttgcgaactcgacaaatattatgtggcatgactgtccaattcagaaacaagatagacagcagctgcttcagcaaaaaggctgtgttatatggctaactggcctcagtggttcaggaaaaagcactattgcatgtgctttgagtcgaagcttgcactccaaaggaaaactgtcttacatccttgatggtgacaatattcggcatggtctaaaccaagatcttagtttcagagcagaagatcgttctgaaaacattagaaggattggtgaggtggcaaaactctttgcagatgctggtgttatttgcatcactagtttaatatcaccataccaaaaggatagagatgcatgcagagcactaattccaaaaggagattttattgaggttttcatagatgttccactacatgtgtgtgaagctagggacccaaagggactctacaagcttgctcgagctggaaagatcaaaagtttcactggtatagatgatccatatgaaccaccgtgtagttgtgagatagtattacaacagaaaggaagtgactgtaagtctcccagtgatatggctgaagaagtgatatcctacttggaggagaacggatacctgcgggcttgacttcatttttaaagcctttctttgttaattgctttaaagggccctttcttgtaacctgtagttatgttgtgtgaaatgtaatttttggcacataaaaacttgctccctccatatttatcattctttacgtgacacagtcgagtttttcaattaaaaaaaaaaaaaagatagcactcgacaatatgtcatgtggagattagctgggaccatggtagtcccaaatcatgtaataatttctcccttccagcagtaaggaaatcatcgtttcctgtgcatctgctttagtccaaaataaaaaaaggtagagccttgaggaaggactaagaagttagcgcagcttggtacagcacctaggaagaaagtattactattagtgaatatggtttgtatcttttagccaataattggttgttgtggaatgtgtagagccttg

SEQ ID NO: 62906 - DNA, 154 bp, Glycine max
  unsure (1)..(154): unsure at all n locations
  Clone ID: PAT_MRT3847_27818C.1
tcctctcacctcaanccatcctncaacatctatcttccacactctactcatcttggggggggggggggatttaacnagtttccttcttattatcctnactgctactatctcacatctccttccatgccaacaaagatctacttgggaggaggac

SEQ ID NO: 62907 - DNA, 372 bp, Glycine max
  Clone ID: PAT_MRT3847_27819C.1
tataaaagacattatgtggtattttcctaatcatactctgtgggttacatgtcgattatcatccatacttactcaataaaatgtcaaccattttctctgctatcacaaccccatccatcaccctcgcatgtttagtacaaaaacatcctctcgcgttctcatctcccgttctttttttgtcagcaatggtcaatgtgtgaagagtgactttctccatttatcaaaagccttcttctgtgaatgaaattatttcaagcatgttgtggatgatttgcatcttttatggcatatgtcaactcctcattcattttaatcccaattcatggcccttttggataatagacttatcacttaaagaaaccttctaccctt

SEQ ID NO: 62908 - DNA, 425 bp, Glycine max
  Clone ID: PAT_MRT3847_2781C.1
actcactagaggttgtgctactcaatacattctcctctttaaaatatatgagcaaatatgctgagactgttcccatactggccaacgctgagctctactcagaacatacaagcgtatgagacctcctcccattagcacttatgggggcgttactctatccgcctagagaggagcgcgccgctctcaccgggcctcactggcttacttattctcggagacatcttgaggatggagggggtgttctagggctgtgtccctaatctggctatagagtacggtgaggacgttcctctcctaatggggtaactgcgaatagacgccatctacgaccccgtcggcgagcaggaggttctccaagtccaagacaacatcttgtccaacctgccaaccactatcgcgatgagctaccttacctacgaccgcgc

SEQ ID NO: 62909 - DNA, 329 bp, Glycine max
  Clone ID: PAT_MRT3847_27820C.1
agtaagaattttgttttagcagtagcatccgtctagaaaatgatgacacgagtgggatacaccataaaattcgggcagaacaaaagaaggcacacgcgcgctgaaattgacagacggcatttccggtcaagaaaacagacggacacaacacagatgcgaacgggcgcaacctacgcacttacaaatgcgcgaaaacatgcgcgtgtatcccatcaccatgcagggccatgaaaattgtcagaagacccacacagctccagcatccatggcaaagtcactatatacggagtgcgaggacacccaatggacagcctcacatttgggaaaca

SEQ ID NO: 62910 - DNA, 324 bp, Glycine max
  unsure (1)..(324): unsure at all n locations
  Clone ID: PAT_MRT3847_27821C.1
gagaagtgtcagatctgcgacatgatatatcgtgggcatcatcagcgtgggctctgctgttccaatcggtctaaacagacgacgtcggtgagctctctgaagataactggcngtagaaggacacgttgcttcaggacagcaagacctgctcgctagagttctatagctccttaggagtggacactgcataaagcttgctccagactgtgaaaagcttgatagcagcttcaagaaagccaaatccgtttgaatcggcaaggttgactgcgatgagcataaaaatgtgtgcagcatgtatgagacctctgggtacccaacatttca

SEQ ID NO: 62911 - DNA, 537 bp, Glycine max
  Clone ID: PAT_MRT3847_27822C.1
gttaattgcttctatttctatatgcaaattatgaatatttaaatatgtcattttcttatgaatggcaattaaccaggctcgatagcagaatccataaaggataccatggcagggggaagggaaccttttcattgttacatgggagagcttgtgttacaataaattgctattatttttttattaatgacctgttctgaggaaattttaagaactgactcataactgtgattgcaataacttttcaatcaatattcaattgccatggagtagataacagttatgtcaattacagatttctttgctattactatatctactgtggtgtcaataggactaaaatcccaacgtccctattcagatgtttcttttagcaaatcaagctttctctctgatataaaaatcatggtaggatcgagaaacctctacaccccgatgatatctcaattcttggaagaatatattcttaaattctctgcaagcagatctttgacccatccgccccagttataatatccaataatcactgtacccatcccc

SEQ ID NO: 62912 - DNA, 253 bp, Glycine max
  Clone ID: PAT_MRT3847_27823C.1
gtgggggaaatttaaccaaggggttgcattgtttttttccaatcaataaccatttggtgaaaaattaatttcttggtccttaccggtaaaatataaactttacaaattgaacaaaattcagggtaacttcatccctttaatcaactgggatgaccaatttttttaatgaatacgggtttcaaccaactcctatactggctgcatttttggaagaattttttggacattccctcaatgggaatgatttactttt

SEQ ID NO: 62913 - DNA, 424 bp, Glycine max
  Clone ID: PAT_MRT3847_27824C.1
gaactctgggcgacaacccgcccagcacaagtgtccggcctacagtctgaacccgccgcaccctaaacgcgcccaggaggctccggacatgggactttattgtgacaacttcatgtaccaacagcacaacctgcaccccagccacagggcgaccaacttcatcatcggggacttcacccgccaagctaacccttacttatggctggggggccctggggtcatcaactcacccagatacagtcctacccctgtgccttacatacctgcttgcttagagacacccagttggaattactgtccttctgtgccgactttggtggatcctatctgggctggatgtatgtggcgctctacaaagagttcctaaatagggagagaccttcttactcgtactagtccttttagtttttatattcatatagcc

SEQ ID NO: 62914 - DNA, 194 bp, Glycine max
  Clone ID: PAT_MRT3847_27825C.1
ctcgttaatgctaataactagtttaccttaagcacaaattgttcagcacttgaactctctattctagccaccaacaaagagcaccaaagggactataaagcactaagctagtgtgagcttatgtagaggttgttagctatgttgatcttatttcaaggtttgatcataaatcatgatatacatctttgagcttt

SEQ ID NO: 62915 - DNA, 295 bp, Glycine max
  Clone ID: PAT_MRT3847_27826C.1
gatgaaaagggcaagggatgaaatgtattcttgccattaattcaaacgcggctttggttgattacagggggattcgtatagacaaaaccaagtccctagaagccaatggggacgaagaggcggcaattgaagttattttaatcctggaacaaagactttccaaaaggctaataccaatggggtttttatctatgttaaggaggctcaagacatgtttcacgccctaagagagaaaggcgacatgttccctgtggtgctgaaagatgttaaggaccacctgcacgacactgccagt

SEQ ID NO: 62916 - DNA, 351 bp, Glycine max
  Clone ID: PAT_MRT3847_27827C.1
ggacgtcggctcgaggttaaatcttcgtacgttctcttttccttagagacactcatcagaaaaaaggatatctgggatttggtggaaaaggacgcctctcccattgaatccggacacaccatatttaacggcgggtttattggcaccgaccatggttggaagaaggtgtcctttcccaagaatcaggataagattactgtgtacgcccttaacggggggcaggattgctgagccttgtcgggcaagcttgatactaaaggacctctgtacaccaatgaataaaggatacggtcgatataaatgtgtgccatgggaactttcacctaactctcttggacgatgataaactct

SEQ ID NO: 62917 - DNA, 235 bp, Glycine max
  unsure (1)..(235): unsure at all n locations
  Clone ID: PAT_MRT3847_27828C.1
aacagaagaacaaccaccaccacacacaatgggtcgcgtgagaacaaaaacggtgaagaaatcctcccgccnagtgattaaangtaataantcgcgcatgaccctcgatttcacacnaacnaaaaaattactcgaagaantggcaatcatcccttccaagaggnncggaacaagatcgcgggtttctccagcattcatgaagcgatccaaaaggtccgttncgcggaattcctaa

SEQ ID NO: 62918 - DNA, 794 bp, Glycine max
  unsure (1)..(794): unsure at all n locations
  Clone ID: PAT_MRT3847_27829C.1
cccacgcgtccgcgtagctcttatacctttcacatctttcatccttttcatatctcatcgtgctaaatctcataacatgacttacctttttttggatatgtaaaccaaaatcttcaatcattgagatcaatatgaacatcaacttgcgcttgatcgagagattctaaagatgaagattcaagaaattaaaggtgtggaagcaacaaaggaagatgaaactaactttgctttgtggtaggtaattcttggtctcaaagtgttggaacaaacattattcttagattcgtttaattttattgaaaagttgacgtttattgagtatttaattgttttatgaattttaaatttattttacaatttttaatttatgtaatttgacatttgggccattacaatttaaattttaaatagtccaagtctaaaattaaataattacggttcattttaaaattaaacataaaaaacaagtttaaactttcaaagtttgatgaggccgaaataactttctaaaattacagtaaaagaaaaagaaataacttntcttcgttttcattccatacatttacgcagtcacacagtcatcaatcttagccttcaattttttttctcaacttctacgcaattaataaaataaaagaagaaaaaattagccacggggatcttgactacgtgattgaatgcgtgaagcctaactgcagaaaatccaggtcccaaaaaaaaggtgcagaatcccttaaccccacacataataaggttgtcgttaaaataccctagatcaccccaaagtcttaata

SEQ ID NO: 62919 - DNA, 600 bp, Glycine max
  Clone ID: PAT_MRT3847_2782C.1
atgaccgtgtcatacaaggattggcacgaaatgctcccattcgcgttacacggttatcgaacttcagtgcgaacgtcaactggggcaacgccgttctcattggtatatgggatggaggctgtgttaccgtttgagggtaagcgcttaacagccatgagtcatgggcgcgtgtaccagcaaagaatgaagagtgcattcgacaagaaagtacgtttgcgcaagttccatgagggagaccttgtgctaaagaaaatgtcccatgctgtcaaggacaatcgagggaaatgggccccgaattacgaagggccttttgttgtgaagagggctttctccggaggagccctggtgcttaccaacatggatggtgaagagttaccttcacccgggcaggatcatcttgagctaccttctggggtagggaaaaaacataaacagcagaaaccaatcaaggtacacaggaacggatgcaagtggggatggggtcacgaccgactgatcgtcgcccctttctccatgctaagcaagcagagaacgtcgctgcaaggcagcccccaatggggcatgccacattgtccccgttctcttgctattgatgcctaa

SEQ ID NO: 62920 - DNA, 366 bp, Glycine max
  Clone ID: PAT_MRT3847_27830C.1
ggagagagagccacacttacactgatgcgcatctaacacttaaaccttctattcagagcctgcaaactaatactgggtggacgagaacacagcccaggacgccgacacttctacctctcatccttaaatcaaattctgcataaccaaccacatcatcctcataaagaccaatggtcgcggattccttctggacaccaactccaacagtgacactcaactattctgcttctactcctactgtctcaccaccgagaggcggcctggccctcatatatacattgaacgatggatcattctggtcaccggcgtacactaggcatcgcacgaagacaattccaaaacgcacctggggagtatggagagatt

SEQ ID NO: 62921 - DNA, 656 bp, Glycine max
  Clone ID: PAT_MRT3847_27831C.1
ggtaggttcacaagtgagccacccatgccattgcctcttgaaggctcgtttcatgagagccagagccagagccagagccagacccggccgaggcgtcggagcaccaactaccataactcactctttgggataatgtcagcagtacacaatggggaaattcggctcgagctcgctgcgaattcggctcgagatgcaaggaatggtatgaagagtagtagtgctagtagtagtgcacttggtccaactagagttatcattagttgccctgagaagggtgaggttgttgggaagcttgttttactacctggaagctttcaagagctagttgagattggagccaagaaatttggtttctatcctaataaggttgtatgcaaagatggaggtgaaattgaagatctggaggtgattagggatggtgaccatcttgtttttcttggtgcaagtggggtgcttgaatccaattgtccagctccagcaccactaaccaatggtgtgcatatatagtatgcatataaggaacgcttactattaattgtaattgttttactttttcctgtctcttctgtgttctcaattgtaaatctttagccttcttctcgtggttacttttattgtaatgcgatataatatattttggccttggtcttatggtg

SEQ ID NO: 62922 - DNA, 214 bp, Glycine max
  Clone ID: PAT_MRT3847_27832C.1
cgactatatcaactactacgctaccgtctctccttaacactgcgacatgcaagaccatgtctagggtcttcggttttctcgcgattctacaattctcgcgctccggcatcgcttcgacgtggcatttccgaccaagatgctgctcgacgagcccaatgacttgtgactgaattcattgaaggacttgtggcgacagatcctggcatacagtatt

SEQ ID NO: 62923 - DNA, 659 bp, Glycine max
  Clone ID: PAT_MRT3847_27833C.1
gagtttgagtggttaattagttgtgaactactaagattcgtttagttggttgagagtgttgttgttagttgtgaattacttcaaagattcgtttggttggttgcgagtgtttgttctttataggcaagtgtaggagtgtcgttgttagttgtgaactagtactaagattcgtttggttggttgcgagtgttgtaagttcgtggagttgatggcatctaaaaggacctttgacgacgaggaagatcatcaaggtaatgatgacagagatcttggacgtctcgctaagaggagacatggcgacccacaagaagccgaggccatgttcattgcttctcttattgcctcgcacttgagacctgcaattcaaaaagagattaaagaggggctccgatctatgttccggggttgcgcatgcctgtgttccccccgatcatccattaaccaacagggtggcgcttctacttctggaggcagagccatgcaattgtgcttcgtgaataatctccctatagaatttttctccacgttcaatatctccgctggacggtggtccagttcaaattgagctgcgttatgctggatcgcaacaacgcgtagtgacggatcaagtttctaacatgaacgttcagatctgtgtactatatggtgatttcggtaag

SEQ ID NO: 62924 - DNA, 317 bp, Glycine max
  Clone ID: PAT_MRT3847_27834C.1
cccacgcgtccgaaattataacaccaattttctcaactcaaaacaaaccctaaacaaacgggcaaaaaagagattcaatctaagatcaaaaaaacataaaaaaatactacaaaataaaaatgggtctgccttttaaaaacatccacctttccttcccccttcttccaaatgaattcctcttatatagcgctccaaaatttcaataatctgccctcctattaataacagggtcacgtaaaaaacctcggttatccccaccttaataacgtgaaaacacatccccctttgacaccttaggttattaccaaaaactccct

SEQ ID NO: 62925 - DNA, 436 bp, Glycine max
  Clone ID: PAT_MRT3847_27835C.1
gtgattgtgttgggagatgtcgtgtttctcagacccgaacaggaaattgaaactatgttgtttcgcacgtttgaggtggttaattagggctataaaggactgcaaaagcccatcagctttcatccatcaccatcattcattcaattttatcattctggggccttcactaatggaaaatttgggatttttttggaaaaaaaaaacaaaaaaagaaaattcaagagtttggttcaattgtaatctgcttgaatgtgtctttgcccctactatccccaaattattttgaaaacaaagactaaaatggtatacaattattagctgccattaagtgaaaaattgggggttagattatgtctggaagtattgaaagttgggggtctagtttcaaatattgtcactagcaatcccggcttggtataaaatttttttttttaat

SEQ ID NO: 62926 - DNA, 249 bp, Glycine max
  Clone ID: PAT_MRT3847_27836C.1
cccaggcgtcagcacacacgtcagcgcagacatcagtacgggtgcaaaatgacaacaaaaagggacttcataactcacactgcttcattgcatatctgcaaatactgtcacccctgctacctacaaattcgccgaaatatggaatcacttcatgcaaatgtaacatcacttgtatacagcagtggcaatcgtgtatctcactcgacatttgcatgctcttccttcgtgtcagcgttcgatgttgtctgg

SEQ ID NO: 62927 - DNA, 308 bp, Glycine max
  Clone ID: PAT_MRT3847_27837C.1
cggttttattccagaatatgaacatatatttacagggtagctgaatagcaaggagcaggcgaagtacaagacctatcctgctaacctaactgtatgaaatcctaatacctatgtgcattacattaccacatcccccttacctatcaatgcgaagctgatcacttttgctgtgggattgtatgttatattacattacctatcctaactccatcagatatgctatctgatgtaatcgccatagaacactatcacgacttgagtatcaagagcttcgaccttgtcaatacatctgctggaattatattgtt

SEQ ID NO: 62928 - DNA, 260 bp, Glycine max
  Clone ID: PAT_MRT3847_27838C.1
ggctcgagcaataacactgccacctgtattaagtcaccttgacatacagtgcacagggggctatctcaggaccatctggggggcaaagggggcatttctcctatccgaggttgaactactccacccggcccgatggacctcagggccccggatcagggccagcccattgaaggaacaactccacttgagactgatacacaggcgacttccacagttgggtataaacccgctaacacgcaggcctttaatatcaaggaggg

SEQ ID NO: 62929 - DNA, 389 bp, Glycine max
  Clone ID: PAT_MRT3847_27839C.1
acttggaagatatccaaaacacactgtgttttatgggaaccgtgagcatccaaattcaaaactgcctaaaaacacgcaataattacccatagacatgcataatgtctatgttattcaaaattacaccataatataggtaaccacgagctctttttaatatatatacagaggctgccgtgaataactttaaatatcaacctatcctgacttgaccccaggagcaaaatgattggcatctgttctggccgagtccggttctttacaattggatcaatgactactgacacagaaacatgcttgaattccagccattcttcttccaaaacttgaaaaagcttagaataccctcttattagttgtccaattcggagtgttcctctgtccaaggt

SEQ ID NO: 62930 - DNA, 6486 bp, Glycine max
  unsure (1)..(6486): unsure at all n locations
  Clone ID: PAT_MRT3847_2783C.1
accaaagaaagagtgaaggtgtcactactgtggcaagtatggtcccctaaagcccttttgctatcatctacatgatgggatcaaacaaggaaaccaaacttaaaataagggataggccagtcaaggtaaaaggtcggcggaagacgaatctagcagagctggtcaaattcatgagttaaatgcacgaggcacccgttggcgcagtgtacgaaaagatataggacgtggcgagtgtcagagccggaaaggaattagtggcgtccgttggagaagagcaaggccagggggaagagtatggcaactcatgacctgaagcaagtgaatgtggaagccatagtgtcgtcaagaagcgcaggcgggcaatttgcgagtgaatgatgctgcctagattcaaaaatgtcctctaaccgaaaatctaatggcttgagaaactatagaggattgacgcttgtttcgcaatatccccttgtcacgagcacacggtcgtgagctatctgccgatctatgaagggctctacattggtcatgacacctttatcgtaagagatattgtgcttcccaacagcagcgagtagtggctaccttcacacctctattttggagtcgtgactccttcatatcactaaaagctgaaacccttaggggaggggcagctgggcataatgtcagatgagggcatcgtcgttgctagcaggtcgccgaggttgccttctctggaagtcgcagagcaaccgtaagtaaatactatccactaatttgaggttgtcggacattccgccgctgactgcgtatgtaggcaaccttgcctgtccgatgcggcggtaatgatggcccgagttatgttggggaacggttatgaacccgggatgggtttaggcaaagacaatggcggcataactagcctgataaaaacccaaggaaatcgtgggaagtatggtttaggctataagcccactcaggcgaacatgaaaagaagcatcgcgggaaggaaaaaaagaagtgagagcgcgggtgggaaacctggcattgtcgtctacacgacatagaacataaatggaaagcttatacacgagacacggcgataggaggagcatgcgttggtaaccgcggaacaggaatttcagaatggttaggaaaacacgatagcaaaccatcccacgttccaaatcaagatagtccggggaaggggaaagcgcagcacaagaatggtgagctgagtgaaggctctctaggagcgcaaggcaacacacctttttttttcgctaagagagtaagttctgatttctgctccccttccaccgctggtgattcgagtgtggaagggggaatacgttgcacacgacaactgggcacaatgtttgcgaaggccggtccacattctctgaatcgaaaactagctcgtcggcgcttaagaacaaaggccaaaggagtggcgggggcctactaagccttcgcatggatcagtcaactgttcagccaatttcagagccatggtgcccataagtaatgtttgctagctaaccgtaaggacgtcaagaacgttggggaggtcacgattaattacaacgcgtttaaaagcaagtattgttggcgtacgggcattcgaacgcacaacgcgagagacgtgagtaacgaactatatcgctataaaggtaagcagtttcacctccaacgtcaccatccaaatccggaatgtccacacccccctacagctgcctgatggggcgcccggggatccactcagtgggagttgtgccttctacactccaccaaaagctgaaattcgtagtggaggggcacttggtcatcgtgtcaggcgaggaagatatcttgccgcagaagaatcgttagaaaccgctttccagtcttttgaggtggtcagcatttcctccgtggactccctctttgggcagccttgtctgtccgatgcagcggtaatgatggcccgagttatgttggggaacggttatgaacccgggatgggtttaggcaaagacaacggtggcataactagcctgataaatacccaaggaaatcgtgggaagtatggtttaggctataaacccactcaggcggacatgaaaagaagcatcgcgggaaggaagaacagtggtcaaagctcgcgttggagacaagaaagtgaaggaagcccgccctgccacataagtagaagctttataagcgcgggtctgggagacaaaagtcaagcgttcgcgatatgcgaggatgatattccgagtactttggatttggtacgaccatgccctcctgatttccagctgggaaattggcgagtggaggaacgctccggcatttacgcgacgagcataatatccgatgacgagtcccccgaaggtactaatacctgggacccgcctatcgacttcgagcaagaaatgaatcaaacggaggatgaaggaaatgaggatgtaggacttcccccagaactagaaagaatggttgcccatgaggaccaagaaacggggcctcatcaagaagaaacagaaatagtagacttaggaattggcagtggaaaaagggaagtaaagataggtacaggtattaccgcacctatccgtgaagaattaataatcctgctataagactaccaagacatatttgcttggtcataccaagatatgcccggtttgagttctgatatcgtacaacacagattacctctaaatcccgagtgttccccggtaaaacaaaaactgaggaggatgaagcccgaaacatccttgaaaataaaagaagaggtaaagaaacaatttgacgttggttttttggctgtcgctcggtatccagaatgggttgccaatatcgtaccagtccctaagaagaatgggaaggtacgaatgtgtgtggattatcaggacctgaatcgggccagtcccaaggacaattttcctttaccacacatcgatatcctcgtggataatacggccaatttcgctttattttccttcatggacggtttctctggttacaatcagataaagatggcgcccgaggatatggaaaagactactttcgtcaccctgtggggaacgttctgttacaaggtgatgtcctttggactcaagaatgccggggcaacttatcaacgggccatggtagctttgttccatgatatgatgcatcaagagatcgaggtctacgtggacgacataattgctaaatctaaatccgaggaagaacaccttgtcaacctgcggaagttgttcgaaaggcttaagaaatatcaattaaggttgaaccccgctaagtgtacctttggggtcaaatcagggaaattgcttggtttcgttgtaagccagaaagggatagaggtagaccccgaaaaagtgaaggctatccttgagatgccagaaccccgtacagagaggcaagtccgaggtttcctggggcgcttgaattatattgccagattcatatcgcagctcaccgccatttgtgagccgttgttcaaactcttgcgcaaaaaccaaactgatcgctggaatgaggattgccaagaggcttttggaaggatcaaaaagtgccttatgaatcctcccgtgcttatgccaccagtacctggaaggcctctcattttgtacatgacaatcttggacgagtcaatggggtgtatgctcgggcaacatgacgaatccgggaagaaagagcgcgctgtttactacctaagtaagaagttcacgacctgtgagatgaattactccttgctcgaaagaacgtgttgtgctttagtatgggcatcccatcgcctaaggcagtacatgctgagccatactacctggttgatatccaaaatggacccggttaagtacatctttgaaaagccagctctcacgggacgaatcgcccggtggcaagtcctgctatccgagtttgatatagtctacgtcacccaaaaggcgataaaaggaagcgccttggcagattatttggctcaacagcctcttaacgactaccagcccatgcatccggagttcccggatgaggacatncatggccttgttcgaggaaaagttggacgaagatcgggacaaatggactgtatggtttgacggagcgtcaaacattctaggacatggcgttggggcagtgttggtctcgccggacagtcaatgtgtacctttcacagccaggctaggattcgactgcaccaacaacatggccgaatatgaagcatgtgccctagccgtccaggcagcaattgactccaatgtcaaactactcaaggtgtacggcgactcagcgttggtaatccatcagctgagaggggaatgggaaactagagatcccaagctgataccctacaaagcctatatcaaggaattggctaagaccttcgatgagatctccttccatcatgttccccgcgaggaaaatcaaatggcggacgcacttgctacgttggcgtctatgttccagctaacaccgcacggggatctaccctacattgaattttggtgtcgtggcaaacccgcgcattgttgccaagtggaagaggaacgggacggaaagccttggtatttcgacatcaagcgatatgtcgtaagcaaagaatacccgccagagattgccgacaacgataaaaggacattgaggaggttggtagccggtttcttcatgagcggaagcacactgtataagagaaatcacgacatgacactcctgcggtgtgtggatgccaaggaggcaaatcacatgatcgaggaagtccatgagggctcgtttggaacgcacgccaacgggcatgctatggccaggaagatcctaagagcaggttattactggcttaccatggaaagtgattgttgtgtccatgtgaggaagtgccacaaatgtcaagcattcgcagataatgtcaatgccccaccacatcctctgaatgtcatgtccgccccttggcctttctccatgtggggaatagatgtcatcggggccatcaagcccaaggcctcgaatggtcatcgcttcatcctcgtagcgatagattatttcaccaagtgggtcgaggcggcttcatataccaatgtcacgaggaatgtggtggtcaggttcattaagaaagagatcatctgccgatatggtttgccaaggaagattatcacggacgacggcaccaacctgaataacaagatgatgggggaaatgtgcgaggagtttaaaatccagcatcacaattccacaccctaccggccaaagatgaatggagccgtggaagcggccaataagaatatcaaaaagattatccaaaagatgaccgtgtcatacaaggattggcacgagatgctccccttcgcgttgcacggttaccggacttcagtgcgaacgtcaactggggcaacgccgttctcgttggtatatgggatggaggctgtgttaccgtttgaggtagaagtcccgtcattaaggatcttggcagaatccggattaaaggaatcagagtgggctcaaacacgctatgatcagctcaacctcattgagggtaagcgcttaatggccatgagtcatgggcgcttataccagcaaagaatgaagagtgcattcgacaagaaagtacgcttacgcaagttccatgagggagaccttgtgctaaagaaaatgtcccatgctgtcaaggaccatcgagggaaatgggccccgaactacgaagggccttttgttgtgaagagggctttttccggaggagccctggtgcttaccaacatggatggcgaagagctaccttcacccgtgaactctgatgtcgtcaaacaatattatgcttagaagctggggcaattaaggatgtcgctgcatgttctctatctttatggttttctagatttccccccagggatttccggtctgctgtatcccttgttacgatctttcaaagaaatggacatggatttgaggcttttagtcctcacgttaatttcacaccttgcgttaatttgtgatcgcctgagcccctccgctcagttcatgggatcccccaagcgcttaattagaattgaacctgaaccaactttccctaaattttctgcgtttgaaaacatccatgcatacgcatacgcatacgcatgtatattgttgtggtaaaacaggggcaggatcaccttgggctaccttctggagtggagacaaaacacgaacggcagaaaccaatcaaggtagggtaatgatgcggtcaagattggccatacctggttgtttattacttgcaggtacttaaggatgaacgcaagcggggatggggtcacgaccgaccgatcgttgcctttctctgtgcgaaacaagcagggaatgtcgctgcaaggcagccccgtatcctttgtattttgcagctttcttttactatttggttgtttcgaaaagggaaagagtaataataaaataagtaatcaacgcctaattctgacctaagtaagttcaagttaggcaaaatgctaatccctgagaagggaggggacatggctaatgttcccctcg

SEQ ID NO: 62931 - DNA, 1242 bp, Glycine max
  Clone ID: PAT_MRT3847_27840C.1
agagagagaactagtctcgggcgtttttcacttctttttttttttcattttgttttgctaccctaatagacacgaggactatttaaaaacccggaccgtcgtatcgttccaccggcgccgtcaacctccaaggctcgaaccaccatccttccactcaaccgcgcacttgcactcgtcggctcaagctaccaccgcagcacgcctcagccgccgccagttaacaagcatttgctcataaagaaggaaggaagatggtgtttgggcaagtagtggttggtcctcctggctctggaaaaacaacttactgcaatggcatgtctcagtttctcagtcttattggaaggaaggttgctgttatcaatttggatcccgctaatgattcgttaccctatgaatgtgctgtgaacatcgaggatctcgtgaaactaagtgatgtaatggtggaacattcgcttggaccaaatggaggtcttgtgtattgtatggattatcttgagaaaaatattgactggttggaagcaaaattggaacctcttctgaaagatcactacctactctttgattttcctggccaagtggaacttttttttctccattcaagtgccaagaatgtcatcctgaagctcataaagaaattgaacctaagctaactgcagtgcatttgattgatgcccatctttgcagtgaccctgggaagtatattagtgcattgattttatccttgtccacaatgctacatctagaactccctcacataaatgtcttgtcaaaaattgatttaattgagagctatggaaagctagcctttaaccttgatttctatacagacgtgcaagacttgtcatatttacaacaccatctggatcaggatcctcgttctgctaagtacagaaagctcacaaaggaattatgtgacattattgaaaacttcagtcttgtgagtttttcaacctgagatattcaggacaaagagagtgtagggaatttagtgaagctgatagacaaaagcaatgggtacatatttgttgggatggaagcaagtgcagttgaatttagcaagattgcggttggtcctgtcaattgggattattatagagttgcagcagtgcaagagaagtacatgaaggatgatgaaaatattgatgataatgaatgatggcaagcgtatgtgttttctctttgttggagatgagctttacttgtgaatgagtaatatcacaaaggaaatgaattacattttgt

SEQ ID NO: 62932 - DNA, 438 bp, Glycine max
  Clone ID: PAT_MRT3847_27841C.1
gttagagtgtttctttccacaactcaagaagccactaatgtaaatccttttttatatataagtatttgttggttaagttagagcgtttcttccatatcttagaaacaaccagaatttaaatcttgtaccacttgtttaggaaacacaagtcgctatcacttttatcgatcgttgttgatcttataaatgcttatataacaaattattcaaacactttaaaatttcataaacatttatcaatgtgtcaactgaaatttaagaaagtatagatgcgataagctacaaattgcacgacataggaacaagggcccgagaaaataatatcaatggatccgagaaacctaaatgaaggcatgtgatatgttacaatgtttacaatcaataaaatgtcacttgcaattttaactgattttttggccacaaggtgtgtttttggtt

SEQ ID NO: 62933 - DNA, 733 bp, Glycine max
  Clone ID: PAT_MRT3847_27842C.1
aggaattatgtgacattattgaaaacttcagtcttgtgagtttttcaaccttagatattcaggacaaagagagtgtagggaatttagtgaagctgatagacaaaagcaatgggtacatatttgttgggatggaagcaagtgcagttgaatttagcaagattgcggttggtcctgtcaattgggattattatagagttgcagcagtgcaagagaagtacatgaaggatgatgaaaatattgatgataatgaatgatggggaaaggtagatgattgaaagagaataaccccttggtgagtaattttactttctttattcattgttatgttgcttttgtttttgtgttgggtgacttgtcatacaatggtgaacagtacttatagcttgtgactcccatagaagatattgcacaggttatttattgtgatagtttggatttctcgaccttatagtaatgaacatcatgaaaacatagcggaaggcagggggagttactactttcaagatattagctaattcagggcttgtccaactgccaaagaacaacttccagatttggctaactttgtataatattataattctgtggcttatagttctgaatgagatttttgtttgttctttgaagtcaattcattttaactatcgcatcaagcgtatgtgttttctctttgttggagatgagctttacttgtgaatgagtaatatcacaaaggaaatgaattacattttgt

SEQ ID NO: 62934 - DNA, 976 bp, Glycine max
  Clone ID: PAT_MRT3847_27843C.1
gacctagtgctagtagtaaagagtagaagaacgtgttttttcatattgttttgctatcctaatagacgcgaggactattttaaaatccggaccgtcgaatcggaccaccatcgttccaccggcgccgtcgacctcaaaggctcgaaccaccttccttctactcaactgcactcgcactcgtcggcgcaagctcccaccgtcgcacgcctcagccgcttccagttaacaagggaaatagcatttggtcataagaaaggaaggaaggaaaatggtgtttgggcaaatagtggttggtcctcctggctctggcaaaacaacttactgcaatggcatgtctcagtttcttagtcttattggaaggaaggttgctgttatcaatttggatcctgctaatgattcgttaccatatgattgttctgataaatcatgaatgtatcaattatgttgcttattttcgtggtcaaagtttcacttgaattctgagcttcccttaattcagcaattacttttctgtagggaatttagtgaagctgatagacaaaagcaatgggtccatatttgttgggatggaaacaagtgcagttgaatttagcaagattgcggttggtcctgttgattgggattattatagagttgcagcagtgcaagagaagtacatgaaggatgatgataatgaatgatggagaaagctaaataattgaaagagaatgacaccttgttattgcacaggtaatttattgtgacagtttggatttctcgccctagtagtaatgaaagatcatgaaaacatagtggaggcaggggagttactactttcaagatattagctaattcagggcttgtccaacggccaaagaactattttaagatttggctaactttgtataatattataattctgtagcttagagttctgaatgagatttttgtttgttttttgaagtcaattcatgatcgcatcaagtgtaacccaccc

SEQ ID NO: 62935 - DNA, 1112 bp, Glycine max
  Clone ID: PAT_MRT3847_27844C.1
ttttttttttttaaaaaaaaaacacttttacccacgcgtccgcccacgcgtccgtggcataataacagatgccagttgcgcctcaagaaaaaaaaaaaaggtttcaaggggctttgggcatttaacagaaggcggttgtatctccaagagtcaaatccatttgcgacagaaccaccaaacgacgatggaggaaagcgttttcgcagcgctaacagacgacatcgtcctctccattctggcgaagctagacgacgatccacgacactgggcgcgcgcggcgtgcgtctccacccgattctccaccctcattcgccacttctgctggaagaccaaatgctcccaaaccttcccctcatctctcatctcctccgattccccctccacctggtcctccctcctcaagctcgccgtttgctgccccggcctccgccacgccggcatccccgccgaccggaacgccgcgaaacggatgaacatctgccggaattcgcatttggccggcggctatcggcatctgaggagagaacagggatgcaaacttctcgcgagacagttccgcgacgataatttgttcctctgcgactggcccggctgcgtgcactcctatcagaggcgcgactacatgctcttccgagggttcttccataacttcaaagcgagcggggtttggagaagcatcagcgacgagaagagaaggaagatcgatgtcgagtgcgccttttgcacgtgccagcacacgtgggacctccaatccgccttttgcctcagacgtggcttcggctaccatctcgatggggaaccagttgttcgagcttatgtttgtgagaacggtcatgtctttggggcttggaccaataaacccttgtacttttagttgctttaacattgtttcttttctttgggcttctgaacgtcaagtatttttttttttttttgtcttagaaaacttgaattggatctttatcagattcaaaatcatgctcgtgctattgggattgacgaaatccttctgtttgctggggattatagcatttaatatttcaatcttatgttctgctaatgctactataaactttggactgaataatcaggtttagaattcttggattttt

SEQ ID NO: 62936 - DNA, 352 bp, Glycine max
  Clone ID: PAT_MRT3847_27845C.1
gttttaacaccattgatttttgattctagcaagcaaagctactggcaattttttattgaccttctgggtgtagtaatttaaatggacaaaactcgccatcgaatcacactcatacaaaattctccaattagtaactacgagtgacctgttgcttgtaagaaaggctgtctaatggttaaaattgtgttgtttgcttatgctccttttatcacgagtagaggttttttactgatcccataaggttttagacacatcatcttttcatagtagattttttcatcataatggtctctgtctttacttcattacttttttttgttctgcgtaatagagtgtatttggatcttataat

SEQ ID NO: 62937 - DNA, 245 bp, Glycine max
  Clone ID: PAT_MRT3847_27846C.1
gggatgaaattaattgattttgcaatatggttatttgaagaaataggaatgtaccagacttattatcaaaatttcaataaaacattggcttcaagggacttaccacaccggggtttccacaaaaccattcttggattacacaattattttcattaagccgttggacccagttggtcattcacccttgtaggggggtccatttttttgggggggattggccacccttccctggggtttgggattaa

SEQ ID NO: 62938 - DNA, 252 bp, Glycine max
  unsure (1)..(252): unsure at all n locations
  Clone ID: PAT_MRT3847_27847C.1
gtgtaaaagcccatttaaggcatacaactgaaacaaaccccgaatggcaggacgacccttcctttcatattttactaatagtgtaaatattatacccgggggctacaacaaccaactggttgcattcccacctagatctaactcaaacccttccgttgattattataangaagaagggtaacaacaaaaacggattgcttcaactgctgtgccttaagagggacttttacccgaatgtatacaaaaatactg

SEQ ID NO: 62939 - DNA, 343 bp, Glycine max
  unsure (1)..(343): unsure at all n locations
  Clone ID: PAT_MRT3847_27848C.1
tcncgcacgcgtacntnagctngnaatncngctcgaggtgagcgaanaatatgnattctanagantcatgtgggngnaaccntnggagnataaacncganggactnggacgcacggaggacgaacggaancnntaaactgacangacgnnnanangggnagtcgctgtcgcntanccttgngatgagnacgnagnanagctaggnctccntanngaccnngnnagcngaagnagcaanangtnacgtcaatntaagacngcatcatncnncagccgcnagatncttnaagngagagcctcggcgcaannctcttcgnccgccgcccncgnnggnntcaannnn

SEQ ID NO: 62940 - DNA, 276 bp, Glycine max
  Clone ID: PAT_MRT3847_27849C.1
ctcgagcaagttagagcatgctgaactaagttggtatccattgaatggcttctggactatattattcaagagccggtattaatggatgaaatgcatgttatctggatgtgcaatttgggctgcagcaacatttgcagtattattatgtatggactgtttagaatgtttcttacatgcgctacgattgcattgggttgaattcaggataaattctattatgcagatggaaaagcatttgaaccattcacatttgtgcaagaagaggactaccagtaa

SEQ ID NO: 62941 - DNA, 1050 bp, Glycine max
  Clone ID: PAT_MRT3847_2784C.1
cttcaccatcaatggcttccatgagctctctgaagatgatttcttccctcaagctctcccatttaagttgttctatctctcctctttcaacccaaaagcaagtaggttcaagtctctttcaatccttcccaaccaaaaccttaaaattctcagctactcctcaagtatctacatctagaagaagtaccaacaagactacaaccactgcattcttcttcaataaccaaaagcagcatcaagattcatcacagccaaccaaagttcaagagctctttgtctacgaaatcaacgaacgcgaccgaggaagtcctgcatacctcaagctaagccagaagccagttaactctctaggagacttagtgccattcagcaacaagatatactcaggagacttgcaaaagaggctagggataactgcaggcttgtgtgtgctcatccagcatgagcctgagaaaaagggtgacagatatgaggccatttacagcttctactttggagactatggccacatatcagtgcaaggagcctatctaacataccaagacacatatttggctgtttctggaggctctggaatctttgaaggtgtgtatggacaagtgaagcttcaccaacttgtgttccctttcaagcttttctacaccttctacttgaagggtgtgcctgatttgcctcctgagctgcttgggaagcctgttgaaccttctccaagtgttgagccttctcctgctgctatggctactgagcctcatgcttgtttaccaaacttcaccaactgatgatgatgaagcaattgagccttttttgtttttcagaaagttttagttttgaacccaaaataaagtcttggtattgcaaattaattatatatttttttatccgtaagaaatcaaataccttaatacaaaaatgatgcaattgagtccttttcttttgcaaaaaattttattttggacccaaaataaaatctgggtgttgcagacttactatattattgaatcttgttttgcttgtgttggactagatgtggtagatgtattaggtaaaaaa

SEQ ID NO: 62942 - DNA, 827 bp, Glycine max
  Clone ID: PAT_MRT3847_27850C.1
cgaccaagcgtccggacttattatccaaaaaggtagagctttcagccaatgaagagggactcaaacaaagggtacaggaagaaagtattcccatggatgacaagtctgaaaaaactgaatctcctaatcctgagaatgtgaatggaaaagtaaatgaagatgcgagcaaaggaaaagatgacttggtagatgccgaatttaaaatgtgggagagctgcaagatagagaagaaggagttctcaccagagagagaaccagagcctgaatcctttgaagaggaagagttgactcaaaaatagagggtggtgagggctttgatcaggtaaatggaacctctttaaaagaaaaggttgatgatattgggaactcgccatcaaagcaacaagtgaagaagaagaagaaggctttgcttggcaagttcggaagcctgcttaagaaaaagggtggtagcaaccacaaatagaacaatggcaggtatattgaacattaaattgcttggcatgtatttgctttatgattttttgcttcttgaatagcttttaaagaatgacgaggcatgtaatattgtttaggagtcttactctagttacttattttgggttgcagttctccatgttggcagtagtaaattgtatgtggtggaattatattgtttttttgccctcctttattctgcttttccaccttgtccttctatatagatctgactaaagaagtggcaagttggattctatttctatctcatcttgattccaatgaaaggctagatagaagttctgatgtttgctacccctttgacatataatgaccactgggtgttttctctc

SEQ ID NO: 62943 - DNA, 816 bp, Glycine max
  Clone ID: PAT_MRT3847_27851C.1
accggtccggattcccgggtcgacccacgcgtccgggaaaaggggatcttactgacagtgaaaaagactacgacatgcttcctaaagtagttgagttctctgaagagaatggacatggaggagaagacttatccaagaaggtagagctttcagccaatgaagagggactcaaacaaagcttacaggaagaaagtattcccttggatgacaagtatgaaaaaactgaatctcccaaacctgagaatgtgaatggaaaagtgaatgaagaagtgagcaaagaaaaagatgactcagtagaagccgaatttaaaatgtgggagagctgcaagatagagaaaaaggagttcttaccagagagagaaccagagcctgaatcctttgaagaggaagttgactcaaaaatagagggtgctgagggctttgatcaggtaaatggaacctctataaaagagaaggttgatgatattgggaactcaccatcaaagcaacaagtgaagaagaagaagaagcctttgcttggcaagttcggaagcctgcttaagaaaaggggtggtagcaaccacaaatagaatgaatggcaggtatattgaaaaaacattaaagaattgtttggcatgtatttgctttatgatttttgcttcttgaatagcttttaaagaatgacaaggcatgtaatcttgtttaggagtcttactctagtcacttattttgggttgcggttctccatgttggcagtaaattgtatgtggtggaattattatatattttttttgcccccctttaaaaaaaaaacccacgcgtccgtctagatcgcga

SEQ ID NO: 62944 - DNA, 748 bp, Glycine max
  Clone ID: PAT_MRT3847_27852C.1
ctccctctcactaaacacaactataaaaagcgtagagagtactgtgtgttcagaaactgccaaaaactcacgcagagaaagtacaagtagaaggagaagaagcacaatgaagctgctctctccaaaattgttcactctcgccattctgctcgcggcggcgctggttttagcttccgccgacgcagtcagtgacaatgagatgcagaaacatgaagccacggaatcaagggacgtggttgaagagaagttgcgagtgcagagcttgaagaattcgtcaatggcagaaaggtcagggggtgctttaaatgaacatgcagttgataatccagaggagattgcttccatggttgatgagagcatacgcaattacacagctcgaaggaacctgaacttcttctcatgcgggaccgggaacccaatcgacgactgctggcggtgcgacaagcggtggtacgcccgccgcaagcgcctagccaactgcggcatcggcttcggccgcaacgccatcggtggccgcgacgggcggtactacgtggtgtcggaccctaacgacgacgacccagtaaaccccaaacccggtaccctccggcacgccgtgatccaggaccgccccctctggatcgtgttcaagcgcgacatggtcataaccctaaagcaagaactcatcatgaacagcttcaagaccatcgacggccgcggcgtgaacgtccacatcgcttatggtgcgtgcatcaccatacagttcgtc

SEQ ID NO: 62945 - DNA, 296 bp, Glycine max
  Clone ID: PAT_MRT3847_27853C.1
atcgcgagtggccgaccttttttttttttttggaacacatggagttattgagattgggaattctaacaaggccaaggcaaatatcttttaaggtagagatgatgttgaaagaagaacaccaaatctttcaaggctacaccgagtggacattgatatacagagcgcccattggcgctatttgaggctgtacgagcatggaacaactgtacaagcaccgtcggatttataactgaaagctattattcgtccgcctttggaagatgctgcttatatgcgtgaagacgagaaagctgcta

SEQ ID NO: 62946 - DNA, 278 bp, Glycine max
  Clone ID: PAT_MRT3847_27854C.1
ctttgttgttgccagactttctggtgcaacaccaccgactgcacatgtgctcagccgaagcatggcgatgccgggcattggtatgctgctagaaggcataattggatctgtagttggtaccactgtatctgttgaaaatgagagaatacttgtgttggctcgtctcaggagccgaaagagattgcatatatcatgcggatatatgagctgtacactattctagggaaatatgagcttttttagaataaaacccctaccgatatttgctgacatctact

SEQ ID NO: 62947 - DNA, 433 bp, Glycine max
  unsure (1)..(433): unsure at all n locations
  Clone ID: PAT_MRT3847_27855C.1
gttggtttaccaggacctccttacaggggatgagcttctctctgactccttctgttacaaggaaattgagaatggaatgctgtgggaagtccaggggaagggggttgcnaaaggagcattttttttttacattggggcaaacccttctgctgagggtggattataagatgagggagtcgatgatgcagctggtaaggttgttgacattggggacacattcggacttcaggaggagaccggattcgataagaagcagtttgctaccttcacgaagaggtttacgcagaatatgacctccaacctcgatgcagagaaacacgagccgtttcagaaggacatccagggagcaactaaaaacccgctctctaagagtaaagactcccaattataagtaagatgagacatgggggatgatggttggttgggatttggc

SEQ ID NO: 62948 - DNA, 129 bp, Glycine max
  Clone ID: PAT_MRT3847_27856C.1
tagtacttgttgtccatttctatgcatcacttgactatgaatctatgatatgatcaattgattctaacgtaaaacaaatggaccgtgcctgtatgttaaatgatatgggtctcaaaccttttttttctt

SEQ ID NO: 62949 - DNA, 449 bp, Glycine max
  Clone ID: PAT_MRT3847_27857C.1
ccggggcacgacccacgcgaagacccacgcaggcgacaccaccaccaaaacaattttcagtacagatggcatgactacgggcgtgctgggctagtagctagcttctagtagcccttatcctcatgcctcacgggcttgctccatactacataccaagtaaagacatcaccagggtgcagcgcctcagtgtacaaaccaccagtgtgcaaaccacgcggcttatatagacataaccacgcgttttaccaagccgaaaccacctggattacacgccaccatataagaggccaccatacactacaccacctcatggaaagtacccttcagtagaggacagcacccatgcctaaagcaagcgatgaggtctattatctacttaataaatatcaagaactgcttcgcgttttctagcattgtgatttacaacttcttagcagtgcatattcttg

SEQ ID NO: 62950 - DNA, 630 bp, Glycine max
  Clone ID: PAT_MRT3847_27858C.1
ccgggtcagcccacgcgtccgcggacgcgttgttgcacgtagagtactctataatcatcgatagataaaccctaatttgttttccgaagccaaattgagaagaaaagacaataggttactcatataactggttagggcttggatccgcgcgcatggaagcaggtttctcccatcgaaggcaaagcagaaagaacggaaagggttcaagtcggagtaccacctttgctggatcattgagacaaacctttgcgtctttcatacgtgtgattcttttagacatgtgaaacaattgttttctggagctgaaatctgaatgttactgcaataattatggattcttctgctgtcgtgggtagcacaatttcagagcctcataatgatatggaatttgaatctcatgaagcggcatatgcattttacaaagaatatgctaagtctgcagggtttggcactgctaagttgagcagtcggcggtctagggcatcaaaagaatttattgatgccaaattttcatgtataagatatggtaataagcagcaatctgatgatgcaattaatccacgcccgtctccaaaaattggttgtaaagcaagcatgcatgtgaagagaaggctagatggtaaatggatg

SEQ ID NO: 62951 - DNA, 374 bp, Glycine max
  Clone ID: PAT_MRT3847_27859C.1
actgagcatcgtctagctatctcgatcgaactgtccaaggtcctgtcacaggataagaagcctatgctattgctaagagcggaagccaccagttaaaggtacgtggaacggccggccactcgtgccgtactagtggatggggccaaattacggttttaatttaacaaaaggtcacatgtgaaagtgtacacaaacgtacccgaagcgggtaaaccccaactgtaaaggattaacgcaaaatgtatgattaccacgtggttgagcgtaaaggggcaaatagtttgcactaaataaagttcgaaggtcacaaattaaaatcgaagggtaccaaaatattagattaacgcgtacagttacactaacaaaagttataa

SEQ ID NO: 62952 - DNA, 362 bp, Glycine max
  Clone ID: PAT_MRT3847_2785C.1
cggcttccttagtcattagtgaccagagcggtgctgagggggccgctgtgttaacgaataactacatagcaagctccattcatccatttgtcgccgatgaaaggaacatcactcatggacactttatcctttgcataggcaaaagattggaaccacacgggatcatttatgggtggaaagactatgctcttgacattgtaactttgctacgcctggtgttaatcctgcaccatgtgtacccatcaagataacattgagaccttgatgcatgtctttaatgtacaagacgattgtgaaggggaagaggtgataagggctcgcctcaatcttcgataatactgcacgggcataagtagttaaac

SEQ ID NO: 62953 - DNA, 469 bp, Glycine max
  Clone ID: PAT_MRT3847_27860C.1
tacggctgcgagaagacgacagaagggggattcccttgtgctgcctgctttttaatgtttctgttcacacttcaaacctttctcttcttctcttttattattctgcttcttcctttgtcagcttctgctaatctcttgtaagatactgctaatcctaactgggtgcttagtcgtgtttgatcacattgtctgaatccgaatatatatgcttcaatttggagatcacaaaccttgtctctatcaaaacgtaccaacactctggactcttttatgacgcgtgcttttaatgcacatgcttctcttactttcagacttcaattacgccctctctgactgttatctggatgagaacaagtccttaattctgaagattgttgaaagccagaattctggcaagctgagcgagtgtgccgagaaccaagcaaggcttcagagaaatctcatgtacttagctgcaatagctgattct

SEQ ID NO: 62954 - DNA, 964 bp, Glycine max
  Clone ID: PAT_MRT3847_27861C.1
tgaaagtggagggggaaaatatagaatgtcaggaagttctccttctcatggtagatatagaagtcgatcaagatcaacccacgcgtctagagacaggtctcgctctcgtagtatcatagatgaatatgctcattccaagagaaggcgctctgactatgaccatgatgaggaaagagtgagggtacgtggaagggagcatggtcatggcagtgtggtagatgatagaagggaatacagtaccagatatcacaatcgagaggccagggatagagataggagtagggatagagatgtggatagagacttgcacagagaaaagaaacaagaggaaactagcaggggtaaagagattgagtgggaacacaaaaggggaaaggaacgtgaaaggagccgtgagaggtatagaagggatgcagaaaaagataggagcagggaaagggaggaggatggggacaggagacaagaaaaggaaagagataggagctgggatacagtgtttgagagggataggagaagggaaaaggaaagagatagaagtagggacagaacaataggtggcaagagagatagagacccggagaatgaaagggatgataagaatcgggaaaggcgagatgatagatatgggcacaaagatagagacactgcaaatggtaaggataggcatctgcgtcatgaggatggtaatgacaacggagatagatatagaaaacattcaaggcatgaagaaaatgaataccattgggaaagaaaaagaaattctgataatcctgtaaaggtttataattcaatgggaagtactgcagaagtggatgaaagcaaactaacaagtgaggttgaaccagatgacttagaggaggatacattgcaattacctgagcaagaagaggaagatctcaacaggattaaagaagagagtagaagaagaagggaagcaataatggagaaatacaagaagcagcat

SEQ ID NO: 62955 - DNA, 170 bp, Glycine max
  Clone ID: PAT_MRT3847_27862C.1
tccctatcccgactttatagtgtggcgaaaccctatcaaagggggaactcaccatctctcagaaaaccccggcccttcttataaacactccccacaaccccactcggaagagggtgtctcatgaggcgcacacagggcatgtatttatttagcacgagaactagatcctt

SEQ ID NO: 62956 - DNA, 549 bp, Glycine max
  Clone ID: PAT_MRT3847_27863C.1
ctgaactgatcataaacaccacctttccgttagtgctgattacccgaaatgatcctcaacagtaggtcagggcactggcattctttaataacagactatctcggactgataaatgctggcggaagatggatgatatatgattcaaacgattgataggtaaggggggcagaacttgagatttcgtattgtgacttattcttttcttgcgttggttgatcctttcctgtagctttatagaaaggcattacaagcacagaaagtcttgaggcggctagatgtaattactctttcatatgacaaacaaatttataggcatagtatgatgcctaattttctggggggagctttagtatgctgccactatttggccagttttcatttttaagttaataacctgcgtagagagaaggaagaaatcaccgactgagaaagggctctgtgcaaactttttttctgctgacactgttaaacattcccaacattcgtggtgttaagcgagttacactggctcgcatggattatcagttgtcaagttctaatgggcggccg

SEQ ID NO: 62957 - DNA, 452 bp, Glycine max
  Clone ID: PAT_MRT3847_27864C.1
tttcggaaattttcctatgatcactgtatgacgtcctccttctttgggggggggggggggggggggggggggggggggggggggggggggggggggggggggggggggggggggggggggggggcaaagaggcaaaacccccataaaaattttgaagggaagggggaaaaaattaaaattaaaacctttttttggagttttaaaaataaatagcctgcgagggtaatttaaaggcgccggtagggtataaaatttaatcccagccgggtttgttggatttcatttttttagggcaataaaaaggggttccaaaggaaaaggtgaaaaactgaaatgggggggtttttaaagggtaaaacgggattttttaaagggtaaaaaacccaaaagggaataagtaagtttggggagaaattttcggggggttgggattttaaggttcaaggggttgg

SEQ ID NO: 62958 - DNA, 324 bp, Glycine max
  Clone ID: PAT_MRT3847_27865C.1
gacaagaggacgaaaaggggaaaaaaactctttaaggaaggattgtatgaaacttgaacttgggagatgcctggggcgatgcttttatcatcaacaacgctctacgttgcttattgacatgaacaatccatttctcaatataactgttgaatggtttcttaataacggagctgttgtatccacgctatcaggtgctgaagatacttatcatattattcgatgcgggaatgttttaacacatgatttatagaaaacgtttaataagatgtgtaaagaacgtgtatattggggaactttagctggtgcttaatcttgaatggaata

SEQ ID NO: 62959 - DNA, 407 bp, Glycine max
  Clone ID: PAT_MRT3847_27866C.1
ctaggtggggctcaattcttgaatgcgggtctgacgtgggaacccctccgcacattgccacgttatattgagtacatcctgactagtgccaaacgcgcgaaggcatagagttggcggttgactgccctcaccatctcagtcaatgttaaagtgctggctcacgttctctcaatcgggccatgattgcgcttattactttgtgctcggatgaaatcaagcccacgtgattttctatgtcgtaaacccggtattgcgaaaagagctctcaggtactcattccggctcttaaccatgagtatcgatcattccacgccggaccttgatgagctcttcggcgaatgcagacatgattagtgcaccactttccctgaaagaacttgagtatgggattctagggagttctacta

SEQ ID NO: 62960 - DNA, 226 bp, Glycine max
  Clone ID: PAT_MRT3847_27867C.1
tcgcccactcgtccgctgactcgtgtattgcattgcatatcgtttgccagggcctttctgtgtacactgtgacttatattgagtctccacaagcaaaaaaaccaacaggaggaatagttgtaatgattctattgctggtggtggtcaaggcgttataagcatttgtttgaccatgatatgactaatgcgtaattccaatcttttatggataattttttgttcatat

SEQ ID NO: 62961 - DNA, 685 bp, Glycine max
  Clone ID: PAT_MRT3847_27868C.1
gtcctgcaaccttcatccaggcagctctacctcagataattgcgcatactcaaaaggttttcttcaagaaaaccattgataatttgaggcaggctgcatatatatgctgtaaagagttaaaggataatccatacattatttgcccttataaaccagaagggtccatggctatgatggtaagactaaacctttcacttctggaggatattagcgatgatattgatttttgtttcaagcttgctaaggaggaatccgttatcattcttccaggaactgcggtagggctgaataattggattcgtattattttcgctactgatccatttgctctgttagagggtttgaagagggtaaaatctttttgtgaaaggcatgcaagaaagtgtttaaagacaactgaataaaattcacaaattaaggcggctactatgttgtattgaggacctaataggttctcaaatatccaattttgcgaattggatcgttttacaaataattgtgattctctgtatttttttcagttttattgttagcaagctagtttatcactagcttttaaggaaggattctccaagaatctaagtgtttatcaattggtatttgtgtttattgttgtattagatattttaaataattctgcgatgttaccaatcacatattcactattagacaaaaaaaaacaaag

SEQ ID NO: 62962 - DNA, 398 bp, Glycine max
  Clone ID: PAT_MRT3847_27869C.1
ttttggaggaagaatgataatggaaggaggatgacaccggattagccctcacaggagaagtcaatgatttatataaccgccaaggctctagctatacttgaagccgatggggcagcaatagaacagtagacactcgtgagtcttgttcttacaggagaaagaaacctacaactgtctgggaattggaagcctgacttgctcgacgaagctaagatggaggcatacacctccttaggatcgttcggcgggacgaaatcagctgacttgaatcgcatggcgccagctgcaccaccaccaccagcattaccattgaaagagacgataccagccgtgccatttcgttctaccttaaccgagaccttcaccgcacccttaacatcagcaccatgcttaagccc

SEQ ID NO: 62963 - DNA, 190 bp, Glycine max
  Clone ID: PAT_MRT3847_2786C.1
atcaacactcttatataacaaacacatttgaaatcccatattgaactttcttaatgttctaaaaaacaaaaacacccctttcacagatgaaaccactgaatattatggccatagttaatgactaatcccccgatttcttcaaaacagaaattaactaaaaattcttctataaatggtctaacaatacccc

SEQ ID NO: 62964 - DNA, 546 bp, Glycine max
  Clone ID: PAT_MRT3847_27870C.1
aagatgagtcattaaatatatgcttcttaccataatacaagaaagcatataccaatttccatatattaacaaatgaagcagtgttttacatcagtgatgggatacataacccgacacaagtaacaacacataactgagcttcaccaaaatattaacaacatctatatatacaatgcttggcccctcagttctgcatatacatattacacatttaatgccaaaatacatgaaccggagataaaaccacatggatttaaaagtactttacacatcttattcttccttagtccttacacttgctttgcgtggcacatcaaccttaatgcttcattggcgaaaccagagtttcaacatagacctctgcatcaaaccagcccttaccactctcaattttaggatacttaaaagagttatttctcggatcatacagaatcaagtcaaactcaaacatcaacaacactttaccattctctgaaatgtaataaggccctgagtacgaaaaatcttcaggattaggcacactaggaatgctaaccaatttaaccc

SEQ ID NO: 62965 - DNA, 370 bp, Glycine max
  Clone ID: PAT_MRT3847_27871C.1
atattgagaaaatttatctatgacttacattagaacaaactaatgaaataaaatatataacaaattacgttgcaggcaagatgtaaatgctttaaactttaaaaaggaataattaaaataaaaaattaaaataatttaaagacggggtactcttatttaataaagaattaatgaatctcacaagaatatttttaatgaattaaaaataaaattaattttataaattataatatttaatgctttaaaaaacatttacttaatatttaattttttaattattgatttttaacaaataccatttatactgaaataacatttatataatagcttttaagatttatttattttaaagctagtgagtttttttaat

SEQ ID NO: 62966 - DNA, 230 bp, Glycine max
  Clone ID: PAT_MRT3847_27872C.1
aaaaaaaaaaaaaaaaaaataaaaaaaaaaaaaaaaaaaaaaaataaaaaaaaaaaataaaagttaattaccaaccggtcttaattttccaaattaacttaaccttacttgctacataatcacaaatactataaagtttctataaattaatttcaatgaactgcgttttacaatctctttactgtgaaaaccttgtttttaaataccttaataaactttcattgcatccc

SEQ ID NO: 62967 - DNA, 658 bp, Glycine max
  Clone ID: PAT_MRT3847_27873C.1
tgataaattgataattaaggatagcccctcctcagccaccctttagataaaccatgattccatttacggctgcgagaagacgacagaaggggaaaccacacttgattttcttgtaggatggtgttgcatttggtggctctggcgaatctccacgggctaaggcccgcggtggtcgggctggcgtgcccgcttgtcctcaagttcttgatgggcttcaggatcttccgagacgacgcccttcaccactcaagactcttccttttccaattgggtcacatagccttcagcacccaagcccatatctcccgcctgcccagaatggaacgtgctcttaggttaatttggacaacactcactccttctccttctccttcttcaaccgccgataactcccaattcacacaacagagcttctacgacctttccatgctttccctttaatcaccaccactcactcactattagagaaaggggtaattctatttatactgatataagtaaagagaataattgtaatttactcggtttttcctctatctctttcttactcatcttctccacttttcttagtaagtttgtacgtgtgattcaagtttctattgtttgatttgtgctaggttaatgttctagatccaacactcactctactttacttccc

SEQ ID NO: 62968 - DNA, 259 bp, Glycine max
  Clone ID: PAT_MRT3847_27874C.1
ctaatttctctctctttgtaacttgtaagcatggagtcctcaaagatctatgcttaacttcttcctttgcatgctcttcctctcctccgcaactcccattctcggttgtggctactggggaaaacccccaaaagggcaaacctcgggtaacaccaaagacacccacagtacccgttgttaagccaccagtcacaatccctcccattgttaatccaccagtcacaatccctcccattgttaatccaccagtgacagttcc

SEQ ID NO: 62969 - DNA, 380 bp, Glycine max
  Clone ID: PAT_MRT3847_27875C.1
agggaaaacccaatattaaaggaaatataactatggggaacccaaacaaaaaaataacaacccaacacaatttaaagctatccaaaacaaaactttcattcattaggggaggggcataaaaggggagccctcataacccccaatcttatttttaaaataaaaacggccacccaaaaactagggaggagtttccgggttcctggggccaagaattttttttaaaaccttgaggggaacccaattgggggaggggcttatctttgaggggagggaaactccccatttgccggggagcgagggggcgtttttggctttgaaaccggaaatttggctgggggcccacttgaggcaattgacccccccctgggggccgggggggg

SEQ ID NO: 62970 - DNA, 160 bp, Glycine max
  unsure (1)..(160): unsure at all n locations
  Clone ID: PAT_MRT3847_27876C.1
gncaaaanaaaagacacttcactccaattccnnacctgttgctganngncccaaaanacttacaacattctatgtttctgttcagaggaagaaggaaaaaccaaaaaagttagtcgtggttttgntgatttgnancngntncanttcaantnattccana

SEQ ID NO: 62971 - DNA, 2108 bp, Glycine max
  Clone ID: PAT_MRT3847_27877C.1
ccctacacctatttagtgtggaccgtggccggtttgggtcctgagaggaaatcccttgtcaccattttctcccttggcttcctacctctcaagcttccgcccacgcgcgatctcaacatcatcattcaatagagagaagagagaaaagagaaagagaagaagaaatccgtgatctccattttcttccttagcacctaacaaagcaaccattctaaattgcaagaaaccctagccctctctctctatctctcttcaatcccactgaacttcttcacaactttgggatttgaattaacgagagaaccagcaaaactggggaaagattttggaactttctgatccgggttttgcatctttccatcatcatcaccatttacttttattttatatgcatcttaaggtagctagtttaatactagcttccatgcccatcatcaccaaaccaggaaaagccaagatcttcaacgacccattaccgagaagagtctcaaaacccagactttagccagacccagttatcaagattgtttctttctcttaaacaagccacactcatattgtatcatatgccccaacaccaaattagagaggactgtagtggctatgggagctgagaggaaatggcttttcactctattgagtgcagcattcctatctctcatgcttcttttgatgtcctctttctctgcctttagcaccccaaaggttttcccttcccttgttcagcatggttctcactaccctccagcttttgcatactttatctctggtggaaaccaggaacaaggaccggatcttgcggttgttgcttggcagtttaccatcctaggaataggtacctcctccatcttgggagggatgccagggatgaggagaggcaggccctggttgctgccgtgagggcggtgccggtgattcgcactttcgggaatgtggatgtggttggcaaggctgattatgtcacctacttgggatcctccaatgttgccatcactctccgggctgccgccattatgctcaaattggatagtgggtggaattggttcatcaccttgagtgcacgggattatcctctcataactcaggatgatctgtcccatgttttctcttctgttagtagagacctcaatttcattgatcacactggtgaccttggatggaaagagagtgataggttccagccaattgtagttgacccgggactatatttagcaaggaaaagtcaaatttttcaagctacagaaaagaggccaacgcctgacgcgttcaaactctttacaggttcaccatggctcatcttgagccggccctttctggagttctgcatttttggttgggacaatttacctcggaccctactgatgtattttacaaatgtgaaattatctcaagaaggctattttcactcagtcgtttgcaatgcgccagaatttaagaacacaacagtaaatggtgacttacgatatatgatctgggacaatcctccaaagatggagcctcacttccttaacgcctctgtttacaatcagatggcagaaagtggggctgcttttgcaagacagtttcaacttaataatcctgtgctggacatgattgatgaaaggatcctccaacgcggtcgccatcgagttactccaggggcatggtgcactgggcggaggagctggtgggtggatccatgctcccaatggggtgatgtcaatactgtgaaaccaggtcctcgggctaagaagcttgaagggtctgtgtctaaccttcttgatgactggaactcacagaccaatcagtgcaaatgaatagacacgagaatagaagcattttaggaagctgtgcagtctaagcaccacgattcattgaccagtagaagttgccttttgctgaaatcacattctttggtcaccaaaatgtaatatcaatcttggagtcatagtagtgtttgagtgttgatagccacacatcagagttgtagtggggcagggggatatatacttaagcttttttttcatcatgttgtatgttctgtaatctgtatgtctcctcattaccatagggattctggacgatcagagcagaaagttcattctttttagatatgattgtcatttgtc

SEQ ID NO: 62972 - DNA, 363 bp, Glycine max
  Clone ID: PAT_MRT3847_27878C.1
aatccttgtggcgtcaaccctaacttatcttccctctttggaattggcgtcatccaaaaactctacagcctgtatcaaacgttccgccccgtaaggttcaacattatctggtatcagagcttcggctcttgatgcaggttctatcctatcctattatttttctttgaaatttgtccaggttcatgttttgtccttgttctgttatttgcgtttttgtttacatcttgtttcgttcttgtttgcgtcctgtgttctgttatttgcgtttttgtttacatcttgtttcattcttgtttgcgtcctgtgttctgttatttgcgttcttgtttacatcttatttcgttcttgttcttgttcttgtca

SEQ ID NO: 62973 - DNA, 690 bp, Glycine max
  Clone ID: PAT_MRT3847_27879C.1
aagtggggctgcttttgctagacagtttcaacttaataatcctgtgctggacatgattgatgaaaagatcctccaacgtggtcgccatcgagttactccaggagcgtggtgcaccggacggaggagctggtgggtggatccatgctcccaatggggtgatgtcaacactgtgaaaccaggtcctcaggctaagaagcttgaagggtctgtttctaaccttcttgatgaccagaactcacagaccaatcagtgccagtgaatatacacgagaataaaagcattttaggaagttgtgcaatctaagcaccacgattcatcgaccagtagaagttgccttttgctgaaatcacattctttggtaaccaaaatgtaatatcaatcttggagtcatagcagtgtttgtgagtgttgatagccacacatcagagttgcagtggggaaggggatatatatttaagctttgaaggcttgatatttgtagtggatcctccaataccttcaatcagtgggaggatattccctcctgcttccattttcgtcatgtatgttctgtatgtgtcctcattacctagggattctgaatgatcagagcagaaagttcattctttttagaaatgattgtcattttccattctcccataattgcactttttatcgtaattatatactatattgtatgattgctggatc

SEQ ID NO: 62974 - DNA, 518 bp, Glycine max
  Clone ID: PAT_MRT3847_2787C.1
aaaaaaaaaacaagggttccccccccctttcttgggttggacattcaatttaacgggaacaaaattatattccttatttagggggggggcccaaaaaaaaaattcaaattcatatcgggccaaattggagccccaaaggggggcccgggaaggagctccgggacaaaacaaaaaaaccggtttttcttttttatgaaccccgggggaaaaaaaaaaggggggggggaacccatccgtttggaacgttccctttgatttagggaacaggaaaaaaaggggtttcccccccggcggggggggggttaacttttcccctcctaccccattttataggaaggggtgggtaaggggaccacaggcgtttggaccttggccatttgggttgggcgggggggaaccccttgggacccaaggcccggggcctttttcccctggaggggaaaatggttgggcccacgaggcggggggggttttattgaaacggggccccggttccctggggtcccgggaaattttgg

SEQ ID NO: 62975 - DNA, 680 bp, Glycine max
  Clone ID: PAT_MRT3847_27880C.1
cttgaatcttaacatcatcgtggacgcgtgggcggacgcaaagggaagaaatccgtgatctccattttcttccttagcacctaacaaaacaaccaatctaacttgcaagaaaccctagccctctctctctctctctttttaatcccactgaacttcttcacaactttgggatttgaattaacgagagccaacaaaactggagaaaggttttggaactttctgatccgggttttgcatctttccatcatcgccaccatttacttccattatatgttactttcactttattttattttatatgcatcttagggtagttagttttaatactagcttccatgccaatcatcaccaaaccaggtaaagccaagatcttcaacgacccattgccgagaagagtctcaaaacccagactctagccagacccagttatcagaatcgcttctttctcttaaacaagacacgcccatattgtatcatatgccccaacaccaaattagagagaacagtagtgggtatgggagctgagaggaaatggcttttcactctattcagtgcagtattcctatctctcatgcttcttttgatgtcctctttctctgcctttagtaccccaaaggttttcccttcacttgttcatcacggttctcactaccctccagcttttgcatactttatctctg

SEQ ID NO: 62976 - DNA, 336 bp, Glycine max
  Clone ID: PAT_MRT3847_27881C.1
ccctgtccttctcattttttctgctctgtctgctcatcacacacgctatctcttaattttcctcttctctctcctttcacacgttgtcttttttcttttttttttttttctccctctcacatgttttttctttttttcttcttcttctgccgcggcccacctcctttccctccgctgcaacccactcccttcctcaaatcttggcaaacatttttagtgagaaatataatgaaaatctgattttgaactcaaaattcttattcaaaatcaaacactaacgaagctcttattagcttgagggaaggaaaaattagcaaaaaaagtacttactgttgc

SEQ ID NO: 62977 - DNA, 1237 bp, Glycine max
  unsure (1)..(1237): unsure at all n locations
  Clone ID: PAT_MRT3847_27882C.1
cggctcgaaaaggccgtggtttccgacgagaaatgctaaatcctcctacaggtgaagaccttacagcgttcacagtacacacaccttacagatgcctgtggcggtaacaatacccagttatcagcaccgcatctacgcttcactcatctacatcgccaaggctaagaaaaccaccatggccagcaccagcagcagcaatcctggtggggccttcaccaccctccaagagagggtcactttcgagaaggagataaaaaagagcaagttcatcgccattgctggccccatccccgatgaaaaatccgccatgtctttcctttcccaggtacgggatccacgtgccacccacaattgctgggcttataaggtgggggatcaatatcggtccaatgatgatggtgagccttcaggaacagctgggaaaccaatacaaactgctattgattcttcaggaatagatagagtaatggtggttgtgatcaggtattttgggggtatcaaattaggcactggaggattggtcagggcttatggaggagttgcatcagaatgcttgagaaatgccccaacttgccttgtaaaaactaagggtgccaatgggtgtagaggttccctttgagctagttggnagttctcaaccatcagctgcagtcttttcacgtgggagacatcaagcaggattatgatactggtaaagatggcataaaaatggttacttttagaagtatggaagagctaaagctttccttcaagagcaagaacatgcctttaaatcaggccaattaggaaaagggaggaaaaggaggagataaaaacttgtgtatttttacccttgcattgtgatgaaacacatagggctttaccttcatattaatcagctcaaggagtcatttttgcgcagcctagcctaaagagtggataaatcaagaacatgcttggaatatttatggtggttcactataagctaggccttcctttccccactcactattaaaagttgaagcaaatggtggtgtgatatgtataaagatatctattttggcaatgtccttgccttcccaacttaatcttctgggaaggaaaggaatgcgttgctcttgtattcacgtatgaggattgggagaattgtaagggtatgcaacttcatctaagttctctctctgtaaacattcatagcccccttggttgaaccaagataaaatttttgcaaatgaattttcaatttaatttgtacccc

SEQ ID NO: 62978 - DNA, 697 bp, Glycine max
  unsure (1)..(697): unsure at all n locations
  Clone ID: PAT_MRT3847_27883C.1
tgtggcggtaacaatacccagttatcagcaccgcatctacgcttcactcatctacatcgccaaggctaagaaaaccaccatggccagcaccagcagcagcaatcctggtggggccttcaccaccctccaagagagggtcactttcgagaaggagataaaaaagagcaagttcatcgccattgctggccccatccccgatgaaaaatccgccatgtctttcctttcccaggttcacttcctctcccttctcttgcgcttattttatttatttatttattttaacattgggtgttttggcttcgtttgttgttattaggtacgggatccacgtgccacccacaattgctgggcttataaggtgggggatcaatatcggtccaatgatgatggtgagccttcaggaacagctgggaaaccaatacaaactgctattgattcttcaggaatagatagagtaatggtggttgtgatcaggtattttgggggtatcaaattaggcactggaggattggtcagggcttatggaggagttgcatcagaatgcttgagaaatgccccaacttgccttgtgaaaactaaggtgccaatgggtgtagaggttccctttgagctagttggagttctcaaccatcagctgcagtcttttcacgtggaagacatcaagcangaatatgatactggtaaagatggcatatct

SEQ ID NO: 62979 - DNA, 534 bp, Glycine max
  Clone ID: PAT_MRT3847_27884C.1
tttttgtcgaatatcccttttcgtagctccgagccaaggcaatccggataccattacggacagcccaagcccagagttcagcaaccaagtttgtagcaactccaattctagctgcataacctcgaagccagacgccctatcttcctcgatcccactcatgttcggattcactaaccattccctttctatttttgcatgtatgacttcttggtgggtcgcttcctttcgctttaatgcggaaggccccctaccggccagaaagaattgttttagatagtatagagcgtagcgtgggctatggtgccatttgcgaagaaatgagatcactttctttactactacactctttttcccgtctcggacgtgattcagataggatgctcttatcggattgataggatgcttgattgcttagcagagctactgattttagatgcggaaccagagcagagctagagagtctcagccttggtgaatgagccatggatcctgacttctattcgctatagcttccatgccaagctagcatagcgc

SEQ ID NO: 62980 - DNA, 319 bp, Glycine max
  Clone ID: PAT_MRT3847_27886C.1
taagccggaaggaaaaaaacccgtttcaaaacttggacgaacaaaccccttccgtccaaaccaaaaacgaagccccccttaaacccttttccgtttccgggaaccaaaaccaagaaaccaaggaaaaccaaaccgcaagccaattgcacttctcctcctcctcctcctcctcctccttgggaaacccaaaaccccttaaacaatgacaaaggataccaccgtaagggttccttcttcaaacgaaacctccgcggccaacaaggcttccaaaacccggcagaaaaggaagaaaaagtgggatcaaccggcggagtcattg

SEQ ID NO: 62981 - DNA, 1162 bp, Glycine max
  unsure (1)..(1162): unsure at all n locations
  Clone ID: PAT_MRT3847_27887C.1
annaantanncatgcacgcgtacgtaagctcggaattcggctcgagcaaggagctctgatgaccagaaagatgatatcccagtggagaactatgtggctcagcgttatgtggaaaacccctacttgataggaggccgcaagtttgacctgcgtgtctacgtgctagtgatgtcgtacatccctctgcgggcgtggctgtaccgtgatggcttcgcccgcttctccaacaccagattcacattgaatagcatcgacgaccactatgttcacctcaccaatgttgctgtgcagaagacatcacctgactaccacccaaaaaagggctgcaagtggactcttcagcgattcaggcagtacctggcctccaagcatggtcccaaggcggtggagacactcttcagtgacatggacaacatcttcatcaagagcctgcagagtgtgcagaaggtgatcatcagtgataagcactgctttgagctgtacggctatgacatcctcattgaccaggacctcaagccgtggctcctagaagtcaatgcatctccttcactgacagccagcagccaggaagactatgaactcaagacctgtctgctggaagatccctgcatgtggtggacatggaggccaggctcacaggaaaggaaaagagagtcgggggctttgacctcatgtggaatgatggccctgtcagcagagaggaggggccttgtgacctatcggggatgggaaactttgtaaccaacactcacttaggctgcatcaacgatcggaaggagcagttgaggcagctgttccgatcccttcaagtgcagaagaaagcctctagctgacccccagccggaagaaatgaggccctggcaggtgccgccctggcctctagcagcgggatcccagcacagtgcaccagtcttcaccttcctccagcatggcagctgttttactggagaggcagcctcagcttgctaattggaccaaacggaccctggacacccctcacccccctccagccctgtgcatctttgaaccaggaacagccaatctttcgaactggatgggctcatccttggcccaaagaagccaagcagcaagttccaccattcagagagcatgtctaataaagaacaggcttagagccacttagcgctgggccaggctcggg

SEQ ID NO: 62982 - DNA, 893 bp, Glycine max
  unsure (1)..(893): unsure at all n locations
  Clone ID: PAT_MRT3847_27888C.1
aattcggctcgagataatgtcgtcacattttgcatgaactttcagggagttggttatccacttgatattgttgtttgtagtgctttgggtgctgatatgtatgactgtgtttatcctactcgcacagcacgctttggcactgctctcgttcctgagggagtattgaaactaaaacataaagcaatggccgatgacacccgtccaattgatcccacttgcccttgtatggtttgcaagaactacagcagggcttacatccattgccttgtgacaaaagatgcaatggggtctcaacttttgtcatatcataatttatactacatgttgcagctcagtaggaatctacactcttcaatagttgaaggaaggttcccagagtttgtatgcgactttctacacaaaatgttcccgaaaggtgatgttcctgaatgggtctgcgatgctatggaggtggctggaatcgacatttattcctgctgtgctccgtttccatcatgccaaaaagatgattccaaaaacatgcccgaagaagttagtttggtgaggtaaaaatgatacacacggcccaacagaaacattgaagagataccctatagttttactatgattttttgcggcataaattttgtatactgcttatgccgtatcagtaagaattttgaaaggttaggattatactaggttcctttaggactaggttcttatttaccccgcatctgaagattcgtcttgtgttctagagaatttaaaagtaaaacgatggatagagtaaagcgaagcttaaatgtaactcttttacttccacaacagtgcatgtatatctcgtctaagttcacgtgtttaactcactaccggncaaatatgctgctaaatgtttatattgtcatttcccc

SEQ ID NO: 62983 - DNA, 674 bp, Glycine max
  Clone ID: PAT_MRT3847_27889C.1
aagtgcagatccattaagttttgctgtggattggggcaataatcacaagcaaagggcacatcaaattggcaaggtggcgagtgatttcatccaagaagaggtaaagatggactacgtgtacgactacatgtttcatctcctgaattcatatgctaaactcttcagatacaaaccctccataagtgccaatgctacagaactatgtgtggagtcaatggtttgtgaagctgaaggatcagtaaagaaattcatgatggaatcattggtcaaggttcctgcaaatactgacccttgcaccatgcctgtcccttttgatcctccaactttgaatgctccattacagagaaaggaaagttcaattcaacaagttgaatcatgggaaaaaagttattgggataaccaaaccataacatcttaatgaatactgtgtggattttccattttgtggagcagaaggaccagtaagaaatttatgggaatcactgccgccatgcaagccccgaatgcactcagaaagcttttggtgggatatatttttttccatattcaacttaactcattcattcttagaatatcttgggaggatacaagtagaatctagattatcttgtacttggctaaagaaaccatatcatgcttgacgaattatgagttttagactttacgaggaaaaa

SEQ ID NO: 62984 - DNA, 349 bp, Glycine max
  unsure (1)..(349): unsure at all n locations
  Clone ID: PAT_MRT3847_2788C.1
tcgcccacgcgtncgtacggctgcgagaagacgacagaaggggtaagtataaacttctatttgtttctactgatagagttctaattaataattaatctgcttagtctgatacatgttttgacacccaaactctgtttagatcatatacattaggagaataaattagtgtcgtctacagagaaaaaataattttggaatcaactcccattatgagagtggagagccccatttccagatattacttacattgtgtggtctttcaaagcattacaaagttgttgcaccacacttttctcctaaggtgagcagtgattattatagtcataaaagaccagatttttttattttt

SEQ ID NO: 62985 - DNA, 140 bp, Glycine max
  Clone ID: PAT_MRT3847_27890C.1
cggcactagaaactgggagtgtcgaactgtgacaggtggtttacgatgtctaccgtgtcctagtatctggtcgtgtcgcacgctacccgtgtgagctgccagctcaggtatcacctttaacgtcgatgccgattagtgag

SEQ ID NO: 62986 - DNA, 333 bp, Glycine max
  Clone ID: PAT_MRT3847_27891C.1
ggaaccctccaaatagaaagggggcatttaataaaccaaagcaacccaacgcagcaaagtcctgaaactcggtgggcttaacaaaaatgtaatcgggggttccggccaacccaacacatttaaacccagattaataaaagcaattttgccaccgtcgatcaaaaacccagttttgggaacaaccattgcgagaagatgggggagacttaaaactttgtccgaaaaacaagcttccttgaaaagaagacacctggggttccgaaaagaaaccaaccttttttgggaccaacatcccctggagaacccgccccgcccgaatacttttttttttgg

SEQ ID NO: 62987 - DNA, 728 bp, Glycine max
  Clone ID: PAT_MRT3847_27892C.1
cggctcgagcggctcgagtacggctgcgagaagacgacagaaggggactgtatgagtgtaactctccccccaaacgatatgtgcctcagcttccacttcgctagttttctctcacacttttgaaggataggatcccacaactgacatcttctcggattgtccccaatggggatccccaagtaaacaaaagggatggacagcaggctacaattcaagaaatcagctgcacttcgcttccacggttccggcataccaattgatccaaaactactttttgcaaagttaattttaaggcctgatgcaagttcaaaggtcctcaagattgatttgattgccttagtgttttccattgtcgcctccccaaaaaatattgtatcatccgcatattgtaataggctaatgatcacttcttggatccatgattgcaactctgtccgctattgcaatcactatcatcgttgtggttttggcatgcgtcctgcatcctcttgtcatgtctagcgagtctcgagccaattgaactttatattattatgccaatttttaagtattttatttttatttgcatacaacttaattttttatacataaataattgatgtatatcatatatttcaaccgatatgtacttctgctatatgatatagcgaattaatggctttctgcgaataagactgatgagaactccaaatacctatactcctctggacctcttctcaggcatcaag

SEQ ID NO: 62988 - DNA, 481 bp, Glycine max
  unsure (1)..(481): unsure at all n locations
  Clone ID: PAT_MRT3847_27893C.1
ctcctcccgtgccggaccggacctgccgggccgacccacgccaccggtacttttactcaaccgggatcacaggctggcgtaccttgaagccggaaacagatgcaatcgttacttgattttgagaatagctcaagtgtgttgctacttctttgtgtacgatttattaagggatagaaaatcactctgtgtgctggacacagactcagtgagtcattggcttgaccactcttagtgactttgctgaacactctcctatttgatataggactttgggtcagattgaaacttattctgaccctatctcagttgtctgcctaatgtgaagctgaagctggtgacatttcaaatgagggctaccactctcctannncgtgtaggacttcctgggtagactttactatcaaactcctttgggtcacaatattgttctcactgatccgcattgccgaacagagtggtcctatttgacaaacacttgggc

SEQ ID NO: 62989 - DNA, 364 bp, Glycine max
  Clone ID: PAT_MRT3847_27894C.1
ataacacaaagcacacagcaaatcttatgcttgagataaaaaatggcagcagctctcttgcatggctctctcatccccatccttggctggcaaagtcgtgaagctgggcccatcatccccatacactggacgggtgagcctgaggaataccgataaccaacacgtgttctgaggaaccccatggtacagaccataccagctcaagcacttggacccattctatggctagcccccggcctacctaaccggagaattgcccagcgactacgggtgggacactgttgatcttttcgcagacccagagaccttcgcccagaaccgcgacactgaagatgtccactctctgtgggccattctcgcagcc

SEQ ID NO: 62990 - DNA, 495 bp, Glycine max
  Clone ID: PAT_MRT3847_27895C.1
ggagtaggggatcaaattctgttttaatccatgttatactgatatctttatgaccccaacacaagccattaaaaagtctcgattgcctagtgtatttacatattaactctttgtctcccgcccacacactgaaactgaacctttcttttatttactctgccctggggggctcgttgagaatacgcttgaaggtgaagggttcaaaaggatacccgcttcccatgaagaacttgctcataaactccacccagtgcagacgcagggtgtggaggaaagcggacagtccctccatgagcacaagcacggccacggtgaagcagacccacagggcgaagacggcgtaaatgatgaaacctccggcaaagttgccgccggtgaacgccaaccctttcccacccatgaggccggcgatcttgatggccctacggaacaccatgttccacaagacgtcggagagctgtgcgtgtgccagcgacagggcccacaaccggaggt

SEQ ID NO: 62991 - DNA, 345 bp, Glycine max
  Clone ID: PAT_MRT3847_27896C.1
cggagcctatatttgctccacacatcaatctttcagagcatgtattaaactcttggatctgtaacacatactcaatgcacaaggctacaagaggtgaagacaagctgaagagcggtgttactgattttcaacgggctgaggaagcacatctacagagcgatctcgacaggtacatgctggcacaggccgaagacgagggtgtggcacaaaggcgatggagataggtctgcagcgccctaaaacgggtcatggctaggacacgagggaacccattacaggtctggatgggtagaacatgaaggtccagacactattgaacaacgtgctcatgtatgccgtgaaaaa

SEQ ID NO: 62992 - DNA, 119 bp, Glycine max
  Clone ID: PAT_MRT3847_27897C.1
ctttaccgctggtgtgctccgtagttgtgcgaatacccagatgcagtagaaccttgggtatcatgcccatgccatggcgcatgctgtcagatgttgccaccccgactcaaaacatgctc

SEQ ID NO: 62993 - DNA, 495 bp, Glycine max
  Clone ID: PAT_MRT3847_27898C.1
ctttcttttttttttttttttttttttttttttttttcgggaagaaccttcattgaatcattggaccctccgggaaaaatattttggggatggataacaaatcacactgggacaccagacacagtgcaagaactcttatgggacacactaatttccagacaacaaatcctaagtctgaccttgctcccttttccaaaaacccattaacatttacattagcccccccccaaacttttatacaagcctataacttttctcacactatgaatttacaccctattattattgcaaaatttttggcctaaaaaaaaaacttggtgatttgaccaattggggggatatgtacatgtgtcagtatgaagttctcctatttttaaattcaccatcttttatctcctatccagctatttttctcttttggacctgtaggaccttcctcaccatacagatttaccggaagctttttaatcaaattaccaaaagcatttccaagcc

SEQ ID NO: 62994 - DNA, 621 bp, Glycine max
  unsure (1)..(621): unsure at all n locations
  Clone ID: PAT_MRT3847_27899C.1
caagatcaatatataatataatgataaataaaattctcatatttaatctcataattgaaatatgatattatgcctttgatttcatatatatatatatatatataatataatatataatataaatattatatatatatatatatgaatttactttctaattgttactaccagtactgccactactgccactactttgagcttgtcggcaattaccatgccaaatggtactaatccagttaccagttcttttgccactaacatatttctgaacttttcggcagaaggcggaggctccatttccttgccaattgatttatcacacgctagatagacacgctgtcttcttgacaactaatccatgatcaaaaagcacaaaaatcttcaccttgtctccaggaccaaaatgtgatactatgccctgccaatcttcataattaaaggaaattactgtgtctcgcttgaatatctggatggtgcactttgtgtaattaaccattacgacactaataagacantttggttgccatgattttagggggnttgatgaaataaccaacacacaaagccattcccttcaagggacaatcctcaggcacagtaaagcacactggaatgtccctc

SEQ ID NO: 62995 - DNA, 419 bp, Glycine max
  Clone ID: PAT_MRT3847_2789C.1
ctcggaattcggctcgagcttgaatatagattaaagcactctacatatatgatggctagctagccaataaatcgacctttgcctgcggtctacaagccggagtacgatttttggacatagagttcatcagagtcgcgatgcacaattgatgcctgagtgtaaaatggactggctacagaatattgcaatgcaccatcacttagaagatggtacatcccatgctggctgcttactacgtaatgtgagtcacattaaaactgaagatgggcgaattgagaaatgggcacatgtgagggccacacgtgatgaagaacatccttatctgccaagggtactatgtgactcgaagcattgctgaactgtgcaaaattcatgtgttaaactaacatgttagacttcaattactatgcatcacattt

SEQ ID NO: 62996 - DNA, 763 bp, Glycine max
  Clone ID: PAT_MRT3847_278C.1
aaagattccggaagacggagggcggaatccacagggactttgttaatcctaaaatggaggcaaaccaaaataatgaccaggagataagacatttaaaatagaaaatatagacagatcaaagataagataaaaatttaaattaaaagatgatgaagataaaaaaaaaggagaagataaaacatataagaaatttcaaaatagacgagaagaaaaataaaggataaggatgatcatagatagagaaaaacccttagttgcatcaagtcactcagtagaaaggcccaatgttttaatcatctatttattctcgcatttacttagttaattttgtagttatctttagaattaaaagtatatcctgattttatttctatttcataatgttacacaaatgtctacttattgaatgaacgcttttctgaatgaaacaaactcgctgtggatacgatactcggtcttactgttttatactacttgtgtgacttcgtacatgtcataccctaatttcgtccagggattattacttgataacatgcaacctttggttagccgctttgagatacttggcgtcctttgttgcacaataaatgaagtcccgagacgtctcagaaatcaaaaggaagcagacttgcgcgatccgtgaaattccgtaatgtggcggaagtcgaaaagaggtgtttttgcgcaatccgtaagtttccgtaacttcttcgaaagctaaaaaagagtaaatacataatccgtaaggatttgtaaccttgcg

SEQ ID NO: 62997 - DNA, 389 bp, Glycine max
  Clone ID: PAT_MRT3847_27900C.1
attcatttacatcgtttcatcattttcataattgaatagtgtgcttaatatgatttgatgacctgaccattccgtctcttaaaattgtatgaatagtgattccttggctgcgattggaggcatggatcaaagactggtcatctgggatatacaacatttcttatctcgagccacctgtgaccatgagggtggagtgacatgtttgacatgggttggttcatcgtgtgtggctactggatgcgtggatggaattgtgagattatgggatattcggtctggtgaatgtgtagaaaaattcagggggcactcagatgcccttcaatctctttgtgagtctgctaatggggattatattgtcttgggcttcttggatcatacagcttggggtt

SEQ ID NO: 62998 - DNA, 442 bp, Glycine max
  Clone ID: PAT_MRT3847_27901C.1
agagtataagaaagcagaaatgagatataaagaacccttaaaaatcagacctaacttctatgaaggatatcttactcttgaacatcaacagttgaagcaaccaaagctgtgctaatattatgcaatgacatacaaaaaagacttagaagctaactgttctaataaggttcttaaactttataacaaggcatgaaacagcataggagaaaacatctggatatagaataatattgagaatcagcattggaataaaatatccaaatcagataaatatagagaacatgtagataaaataaacttggatattcttctccaatatatttctaataatgaatcttcggagcgagctacaaacatgatatctcgcatacatcttgtgataaaaaccttggtatataaacattggtttgtgggatataagcttatcctgcccacatatgac

SEQ ID NO: 62999 - DNA, 1819 bp, Glycine max
  Clone ID: PAT_MRT3847_27902C.1
ggttgcggcaggagaaaaacaaaagagtagtggcctttaggtggtgaagaacaagagctcaaatcaaatcgaatcgaaaaaagaaagaaagatcatattcatggcgatggcaagcctggctcgacggaagggttacgccgtcgttttgtcgtcgaggtcgtcgttttgtctgacaagctggaggggattcgcgtccggatctgacgaaaacgacgtcgtcgtcatcggcggcggtcccggcggctacgtggccgccatcaaagccgcgcagctcggtctgaaaaccacttgcatcgaaaagcgtggcactctcggcggtacctgcctcaacgtcggatgcatcccttccaaggcacttctgcattcttcccacatgtatcatgaggctaaacatgcatttgccaaccatggggtcaagttttcatctgttgaggttgatttgccagccatgatggcccaaaaagataaagcagtttctaatcttaccaagggtattgaaggtctattcaagaaaaacaaggtaaactatgtcaaaggttatggcaaatttgtttcaccatctgaagtctctgtggacaccactgaaggtgaaaatactgtggtgaaaggcaagcatattattattgccactggctcggatgtgaaatctctgcccggtgtcactattgatgaaaagaaaattgtttcatcaactggggctcttgctttgtctgaaatccccaagaagctcgtagtcattggggcaggctacattgggctggaaatgggctcagtatggggccgaattggctccgaggtaacagttgttgagtttgcatcggagattgttccaaccatggatgcagacatccggaagcagtttcagcgttctcttgagaagcaaggcatgaaattcaagctgaagaccaaggtggttggagttgatacttctggggatggtgtgaagctaactgttgaaccatccgctggcggtgaacagaccataattgaagcagatgttgtccttgtttcggctggtagaactccattcacttctggacttaatttggataagataggagttgagactgacaagttaggacggattttggtaaatgaaagattttcaacaaatgtctctggtgtctatgcaatcggagatgtgattccaggtccaatgttggcacacaaggcagaagaagatggtgttgcttgtgttgagtacttaactggtaaggttggccatgtggattatgacaaagtccctggcgttgtctatacaaaccctgaagttgcatctgttgggaagacagaggagcaggtgaaggaaactggagttgaataccgtgttggcaagttcccattcctggctaatagcagagctaaggcaattgacaatgctgaaggactggtgaagataattgctgaaaaggagacagacaagatattgggagtgcacattatggcgcctaatgcaggagaactcattcatgaagctgccatagcactacagtatgatgcatcaagtgaggacattgcacgtgtgtgccatgcacatccaacaatgagcgaggctgtgaaagaagccgcaatggccacttatgacaagccgcattcacatctaaagagctggttgctactttcttctcttgttttcatttttgtccaagaatttacaatgacttggagatgataccacctctgttaaatttagattcaaatttttaaatgcaaattagccccttgtttacttgtttgcataataagaggaatggttgtgttgttcttatccttgttgaataaattatatatctccccttctctctgggacaatattgta

SEQ ID NO: 63000 - DNA, 1900 bp, Glycine max
  Clone ID: PAT_MRT3847_27903C.1
ttcgtcacgcgtccggttttgtgttgacgcgtgagaaaaacaaaagagtagtggcctttaggtggttgaagaacaagatcgaaaaaagaaagatcatggcgatggcaaacttggctcgacggaagggttacgccgtcgttttgtcgtcgaggtcgtcgctttgtctgacaaggtggagggggttcgcgtccggatctgacgaaaacgacgtcgtggtcatcggcggcggtcccggcggctacgtggcggccattaaagcggcgcagctgggtctgaaaaccacttgcatcgaaaaacgtggcactctcggcggtacctgcctcaacgtcggatgcatcccttccaaggcacttttgcattcttcccacatgtatcatgaggctaaacatgcatttgccaaccatggggtcaagttttcatctgtcgaggttgatttgccagccatgatggcccaaaaagataaagcagtttctaatcttaccaagggtattgaaggtctattcaagaaaaagaaggtaaactatgtaaacaattaaggcaaagtagattcaccatatgaggtatctgtagacaccattgaaggtgtaaatgtttgttgtgaacaccaatgatatttgaatatccactggctagcgaggctgaatatcatccctgcctgtgcactattgatgaaaacaattgcctttcagtcacgatggctgttactttgactgatatccctaagaggctgatagttattgtggcatgcaacattgagctggaaagtggctctttgtgggggctacttggctccgaaataacagctgtttagtttgcatcggagattgttccaaccatggatgcggaggtccggaagcagtttcagcgttctcttgagaagcaaggcatgaaattcaagctgaagactaaggtggttggagttgatacttctggggatggtgtgaagctaactcttgaaccagcagctggtggtgatcagactacacttgaagcagatgttgtcctggtatctgctggtaggaccccattcactgccgaacttgggttggacaagataggagttgaaactgacaagattggacggattttggtaaatgaaagatttgccacaaatgtctctggtgtttatgcaattggagatgtaattccaggcccaatgttggcacacaaggcagaagaagatggtgttgcttgtgttgagtacatagctggtaaggtgggtcatgtggattatgacaaagtccccggtgttgtctatacaatgcccgaggttgcatctgttgggaagacagaggagcaggtgaaggaacttggagttgaataccgtgttggcaagttcccgttcatggctaatagcagagctaaggcaattgacaatgctgaaggactggtgaagatattggctgaaaaggagacagacaagatattgggagtgcacattatggcacccaatgcaggagagcttattcatgaagcagcaatagcactacagtatgatgcatctagtgaggacattgcacgtgtgtgccatgcacatccaacaatgagcgaggctgtgaaagaagccgcaatggccacttatgacaagcccattcacatttaaaaggagccggttgctacttcttgttttcatttttgtccaagaattttacaatgacttggagatgatacatcctgtgttaaatttagattcaggtttttaaatgcaaattagccccttgtttacttgtttgcataataagaggaatgattgtgttgttcttatccttgttgaataatatatatatctccccttctctctgggacaatattgtaattctgacagggtgaagacaacttaatggaagtgtgggacggttttgattaaacaaaaaaataaaaaaaaaaaaaaaaaaaaaaa

SEQ ID NO: 63001 - DNA, 288 bp, Glycine max
  unsure (1)..(288): unsure at all n locations
  Clone ID: PAT_MRT3847_27904C.1
anaaacnttcccttctcttctcancnccacanncccatctnacncacccctcgcatncaacaatgtcctctgaccatnaccctccaaccttctccaancccgcngccctcngcnccaaantaagcncaaagctaaggtccgncgccacaaccaccatcgtctgnnnnnnnnnnnnnnnnnnnnnnnnnnnnnnngtgtcctccgacctgaaggcgttctccgccgcgctggnnctctcntccatcctcctctccgnccctctncncgnnggcgccganatctcggggc

SEQ ID NO: 63002 - DNA, 386 bp, Glycine max
  Clone ID: PAT_MRT3847_27905C.1
ttccaccacatataatggtcaatattcctcgggtgaagcttggaagccaaggcctggaggttcccataataggatttggttgtctggacctaactcgagtgtacaacaatcactgatccgaagagggtggcgtctacttgataacagacgcatgaaccaaagggaagactttccaagagaatcacgaccactacagaggccaaaccctagaaaccaaatcggttcgggacttgcaagctactaaccatacgacgccgtcgaaggtcagactctccgacagttcgctacttgcttatggcctttccatgacggaccttctggatcccaaaattgagtcttcctttgatgtcgggggactttgtccaaactctcgccctgattcaccg

SEQ ID NO: 63003 - DNA, 930 bp, Glycine max
  Clone ID: PAT_MRT3847_27906C.1
ggacatcggctcgaagtgctctcggaaattttcttcgacgtgccaccgccgccgaggtcgccgttgccggaatcttacttatacagtccagaatccgacaacaccaccacgacggagacggagttttcagtgcagatggcgcggcttattctgattcttctctgcaagatcgacgggaaatcaaggtattacaaggaagtttcgttgtcatacctgtttctcgcgaacaatctccggcacatactggccaaggtccgtgcgtcgaacttgcattacgttctcggcgacgattgggttttgaatcatgatgcgaaggtgaagaggttgacggcgaactatgagagagtggcgtggggcaaagtgctttcgtctttgccggaaaatccaacggcggaaatgtcggcggcggaggcgagggttatgttcgggaatttcaattttgaattcgagaaagcttatcggagagagaacacgttcaccgtgccggaacaggaatttcgagaagaaatcaaagcgtctcttgtgagaaaaataaccccaatttaccgcgaggcgtatgaaacgcaccgtattgtaatgggaacggtgagggaaataagagagtatgtcacatttgcccctgaagatgttgagaattacatgatgaatcttttctctgagggaagagcgagctccggtagcggaggaaacaagtcatgttttgtaaagtgtaaaaaatgcaaatgaaaagatatttcacaacaagggtgcaaaaattatttttttctggatcctcttatctaatcattttcactgaagagggttacaacttacaattacaacagacacatattattatatgattctttccttaattgaaaaaaaaaggacataaagattacaacagtgatggtgtgattgatatatatagaaatttcaagttatatacgt

SEQ ID NO: 63004 - DNA, 479 bp, Glycine max
  Clone ID: PAT_MRT3847_27907C.1
atgagatttgggatctaggtaacaaagaacagtttatgctgcttccatatctgatatagaatccttgaaaatgacatttgtatttaaagattggggttgaagagctctgtcatggggaaaagaatccatacttggttgaaggaggcttttattcttggatgaaacaaggtctccgtatcaaggaactcaaacctgagacagcactttccatcctcaatgaggaagctgaagcaattctggaggatgttagtccttctccttggcaacttttaggttatggtacagtacttattgcagggctgtatgcattattagagttggagaagacattacagttaattggtgcatttggcctcggtttgaccatctatttgcgggtttcttcatatgaaaactcagaagatctaaaacaagatgtgaggttgttgctttctcctgttagacttggagcacaagcattttcatgggcctgtggaaaa

SEQ ID NO: 63005 - DNA, 2565 bp, Glycine max
  Clone ID: PAT_MRT3847_27908C.1
aaataaagcacctgccgtggctatgctcgcgcggaatgggctcgggggataatctaccaaaatattccacagatattttttaaataaaccttaagctcaatcaaatttcaaacaacaaattaacaataagaacacgcaaacgcaaaggagctaagaggaagaggatgattgcgggttatgtttgattgatgtgttcagtgatcatcaatatgagaatgttgcctgtttgctcagccaccccacgttattccacaacttcccagaatcccttgtttgggggattgcaccccattcgaaacgatcttgagagtagatgtgtggctgaagaagatgtgcatttggcttcacaatatggaactcaatccctgagaaattaatttgccgtgcgagctacaaagaccgtattgggtagtttttcttctacaagtgaactgggataccttacaagcacgtgggattatttaccagtgacaacagatgggcatcattctctgagtgatagggaagtcctgcacaaggaatattaaaatctatctactgtgcctgatgaatttgcagattttgcagtacaggtagcgtaatgcatcttacacattaatgacaccagcacaactatgatagtgatggtaaccaagatccagttcctgaaccgacagttcctctcaatcagaatgtatgagatcattctagattgtcatgtgctaacatgaaaattagaagagagattaatatggtcacaacaaatttaacttccacgattgaaaaattgcaagttgaaattatccaaactctgtgctgccacggactctgccctgcctgtaggcgttttgacaatatagaaagaaaaaaaaacatttcatgaggatgattatgtttgattttgttgcatgcatgccacgccaaaagggctgggtacaatttccactgtcaaaataataagaatgtatttgcgtgatgcaatttgtaccaaattgatgtgttgcgccgcacaattgtagttgtagagagttctctaacaagtggggcttcatatgttgtctacctatatggctcagcaaaggagctccttccagcaggaattagggatacagtcaatgtatatgaagataaagcaacagaaatcttgaggccagttgggtctgcaactcaaaggttatacatggctgtctattcattggagaagagtcttggcttggatccaaatgacccaatcattccatttgttgttcttttaggctcttcagccacattatgggccttttattggttgtggacatatggaggttactcaggagatttgtcccctaaatcagcttttgagcttttggccgaggatgcaaatgctgcacttattgatgtccgttctgaggaaatgcgagaaaaatatggcattcctgatctccgacgggctgctaggtttcgttatgcaagtataactcctcttgaggttgatggctccatacgcaagttgttgaagagtggtagagaacttgatgattccttgattgctgctattattcgaaatttgaagatggttaaggacagttccagggttatagtgttggatgctgatggtactcgttctaaaggcattgcaagatccttgaggaaaattgggctcaagaatccatacttggttcaaggtggctttcagtcttggatgcaacaaggtctccgcatcaaggaactcaaacctgagacagcactttccatactcaatgaggaagctgaagcaattctggagctcgagccgattcggctcgagcaacttttaggttatggtacagtacttattgcagggctttatgcattactagaattggagaagacattacagttgattggtgcttttggcctcggtttgaccatctatttgcgggtttcttcatatgaaaagtcagaagatctaaaacaagatgtgaggttgttgctttctcctgttagacttggagctcaagcattttcatgggctgctggaaaattagaatcaaatggcttaggattacctacatcaccatcatcatcagatgttcagaaccgggtgttgcaggctgctgccaaacatgaatcccaaccatccgatagtgaaggtaaccaagatccagtacctgaaccgacagttcctctcaatcagaatgtatgagtcattccagattgtcatgtgctaacatgaaaattagaagagagattaatatggtcacagcaaatttaacttccatgattgaaagtttggaagttgacattatccaaacactgctgccacggactctgccctgcctgtaggcgttttgaatatatagaaaaagaagaagaaatatttcatgaggatgattatgtttgattttgttgcatgcatgccacgccaaaagtgctcggtacaatttccactgtcaaaataataagaatgtatttgcgtgatgcaatttgtaccaaaaatttgtggtggttcaacttatagtattgcaaactaatccttcaataaactcattgatggtttggtcttctatgatatagtatgatccgtttgccaccggagcaccgcagtggacaaacaaaaacaaaatg

SEQ ID NO: 63006 - DNA, 672 bp, Glycine max
  Clone ID: PAT_MRT3847_27909C.1
tggtacgccctgcaggctaccgggtcccggaatctcccgggagagccccacgcgtcgagagagatacacagtcacacacacaacacaaaacacaaagggtctgtgtttgttcttctgaaaagtccagctttctccaccacctctctagggttcctttgctttcaatttttgcttaaaaatattatttttatagtttttctgaaaaaagcaacagaccccttttccttaccgatcttgtcctctctctgtatttcttgccgtatgcagctgaatttgcagaactgaactaaagcttccttcatcatattgtccaacagcttattcaggagcaaaagtagaggcagtttaaagatgggttacttatgtgatttttgtggagaccagaggtccctggtgtactgccgctctgatgctgcgtgcttatgtttgtcgtgtgatcgaaatgttcattctgctaatgccctttctaggcgtcattcgagaacccttgtatgcgagagatgcaattcgcaacctgcatttgtgagagtgtgttgatgagaaagatttcactttgtcagaactgtgattgggttgggtcaatgggacctcaccatctttcttcgacacacaagaaggcatcaatcaattgctactctggctgcccttcagctgcagaattttcttcaatat

SEQ ID NO: 63007 - DNA, 242 bp, Glycine max
  unsure (1)..(242): unsure at all n locations
  Clone ID: PAT_MRT3847_2790C.1
tcgagtggtatcagtaatcgagatgataaggggatgcatacgtcagtgtggggagggatcgctgtttgaggctctaggaaagacttacacgcaagatgtaatatgtcacttgtgnttcagtttcgggatcgagntttacgacgtcacgagggagaaggcaattgtgagaaaagagaagcatttggaggaagagaagttgatgaggacgaagaagttatctacaaaatcgaagttcctgccaa

SEQ ID NO: 63008 - DNA, 284 bp, Glycine max
  Clone ID: PAT_MRT3847_27910C.1
gtttatttaaataaagtttattgcttcttttttgggtgataattctacataggatggacaaccgccaatttttttcttttacccacaaaacttgccaagagatatattcctcccggccaggagcacttatgtttaaatccgagacagccttttatttttcacttacacctgaacaccataaacccttccttcaccaaactgggggatgggaaacttcaaaacatataaaagggagccccttttggtattgcaaacaacctatgacattaaccaaattttattaa

SEQ ID NO: 63009 - DNA, 255 bp, Glycine max
  Clone ID: PAT_MRT3847_27911C.1
ttcgaggtcgatctagaccgtggaggtggaaaaagctgcataaactactccgtcagttaaaataattaattcaatactccctccctcttcgtcattggtggaacactttgataagttaatcaataataacgatatcaatattaacatcaaatcaaacataacatttcattaccataaaatatgaaatgaaatttaatctgttctggatcttgccatggctctttccatttttcaatttcttctgttctcaatcag

SEQ ID NO: 63010 - DNA, 385 bp, Glycine max
  Clone ID: PAT_MRT3847_27912C.1
ggatcgaggtgaagttggacaacattgagcaagtttattgctttaatagtacaggaaacacccacgttaatgtaggcgtacatgggcacggccgatctagggaaccaccctccgatggacacattacactaaaaacacagtgcacttctctggtcagaccacagagggagcactagattgggcgtcagcgtggagatcaccaagaacaccggttatgcctctgaggtcctataagtaaataccggagggtgctggacagatcaagaggttcattcatgtgagaaactgatgaagcctacggagagacagaagaaaatactgttgattgaaacaatgaggcttcttaaaaaacatgcacgcatgcatactctggaacagaagctgg

SEQ ID NO: 63011 - DNA, 195 bp, Glycine max
  Clone ID: PAT_MRT3847_27913C.1
gctactttctttgattcattaggtttacttccttatcacacttgccccaattcccaaaccaaactctgacttttgttttgtgtacggcactctctcttacggcgaggtggggggggcatcgacggcgattccccactctgattctctgttgaccctttatttcaaccctttagtctttgcttcactgataccctc

SEQ ID NO: 63012 - DNA, 554 bp, Glycine max
  Clone ID: PAT_MRT3847_27914C.1
ctgcagccgagagggtaggctgccaacaattcgaacgtgcaaatgggttacttctccattgtgaatggagttcaaatgccagtgcaaaccctgttcaaagagttatctttcatttcgctcgagcacttcgagagagaatatacaaagaaacaggaaggatgacagttaagggatcagggaaaaatgaagaaagggagttacttcagaagatggacaccaacattgcccttaaatgccatctaaaagttcctttcaatcaagtaatgcaattcactgggatacaagctatagtggagcatgttgcatgtgagaccaaaatccatcttatagatcttgaaataagaagtggtgtacaatacacagctttgatgcaagcactggcagagcgccgggatcgcatagtgcaacttttgaagataactgccattggacttagttcattgaaaaccatgatagaagagactggcaaaaggttagctagttttgctgaatccttgaacttacccttttcatataagacagtttttgtgaccgacattgcggaaataagggaa

SEQ ID NO: 63013 - DNA, 497 bp, Glycine max
  Clone ID: PAT_MRT3847_27915C.1
cgagaagagctacccttctgcagtagatcacaatgaatgaaacggccgtggaatattatgcagccaaaattgttgagtactattacattgctgaaagccccaacacaatttattgatttgtgcacccctgtgattactaaagctttatattgagaaatgacaactatatgtgccacataacatgatccggtaactatatataccaaatttggtctctgttgcaagaagtcaagaactagagaaagcaacattgatatctatctgcttgggaccatattatgcaaaattttcgaacttgctcaaatcaaccacgtggagttatttgctcaaggctttcaagtttcaacatagaatgaaacaagatttgaatttgcaagtatcggaatttgtcttttgtggaacgagaattttgacttctctgatttcttattgacaatggttaaaagaaattaatgaagaaagaaaagaatccccactctagctccacttacacagac

SEQ ID NO: 63014 - DNA, 252 bp, Glycine max
  Clone ID: PAT_MRT3847_27916C.1
aactttaaatccaaaatcctttttaagcaaactaagggttgctaggcaccagaagatcctcttgcattcaaaggtgtattaggaacacttgaagcatcatttgaatgtgtttgatcaggagtgaaataactagctaattcttcagggatccttcctttcttcattatcatgtaggccttaaaagctgattctaaattgttgtatttctcttgccattggtttgaagattgaaatgcaacaccagatgaagaa

SEQ ID NO: 63015 - DNA, 340 bp, Glycine max
  Clone ID: PAT_MRT3847_27917C.1
ggctcgagctcgagcctctcgatccgcttttgatgctgaatctaacgccactaagctgaaccctgtactcaataacaaactcgaaagggaacacgcattataggctgccgtggagatactcaaagagtagctgatgagatgcttaattggtaaaagctgaaataacattgtagtactaatagctctctgctatctgccgatcacaaaggcttgaattgcaggatatcaagcacgcactcgcagctttgtctttcttcaccgagatgtgagggtttgaaaatctcttcctgagttacatcatccgcatatgcttctgcatcctcagtaataatctatttgt

SEQ ID NO: 63016 - DNA, 404 bp, Glycine max
  unsure (1)..(404): unsure at all n locations
  Clone ID: PAT_MRT3847_27918C.1
taatatatattataantcgccggtggggagtccatgcaccgtcaaagctcggaaatctgctcgagaggaaacacttaaactacactactacaataccaccaaagagtattgcaatatttatctaggcgggatctatagtcgttcatgatgattattataccgacgaagatgatcataaatactaatagctagaggatcaagaatctggttacgtagaatctatggaaataccgtgcttaatcacatcacaggattctccctgtttggagacggagactatacattttctatttgtatgaacagagccattggttttgctcacaacctagtggctatttctatggatcaataggatagcataggatataaagtcagtattggcatgaacaacttgatggtactta

SEQ ID NO: 63017 - DNA, 417 bp, Glycine max
  Clone ID: PAT_MRT3847_27919C.1
cgagggccaacccaaggtattatatttgaccctcctatccggagggaatcttgcgctgagccttcatgtggacccagggatccatactttaacatcacttcaatatgctactactatcttattcataaaagagatagctagataatacatgaccacttcttttacaaatagtcagacaaatcctgcaacgattgataatatatttgcgatctcataaatcctatcaataatcttatctggagtgtgctgatagataatgcttgatccaatgacactatttcatatcaatgaactgagatcacggagggtccgcagagcaataaatatcgtcatacagggatatcttatctaagaaagaatactacatgcatgacatgattctcaaacactgaagcatagtctgctttatcacatgct

SEQ ID NO: 63018 - DNA, 490 bp, Glycine max
  Clone ID: PAT_MRT3847_2791C.1
aaggcaataaaatccaatgtttcttcaataatcgcattcaacaccgtactactccttccattcttttcttttcttcattccatagtatattcaatcgtgttttagcgtcgtagactatcatcttcaaaagctttcaccaatgtaatgttttcttcattaacctcatgttcggtgtttatattatattaggtcaaataaaaaatttagtttctttacaagatgaaattacttctcgctttcttattgaatgaaaacattgagagattagtttctaccatttgttttagttataaaataccgtcattgtcctggtttttattggcggttacggtcttgccgcaattcttgataattgccagaaattgtgggaaaatgctgctgatgcgactacgattgcagtcggggtgagtaaaaaaaaaaccttaaggttgggggctgcggctgcaattgcggttgtggacggcaatttaaaaccatgaatatttttaga

SEQ ID NO: 63019 - DNA, 392 bp, Glycine max
  Clone ID: PAT_MRT3847_27920C.1
gtagggctaaatttaataaacaatgcctttgattgtttccccattaacataaacaactgttttttttaaaaaggggcactaattaattaaggggacaaaaatttcaaaacccaatggtgggtcccctcctatatacattattattctgaacttaaaggaaatgaatttgatgttggggggggggggaccctccttctgggaaggggcggataatctcacctatgacaaggtttggcctggacaccccttagtggaccaactttttctttgccactttttggattcccagaaaaaaatacaatggccttccctggttctgctgggaattatatggccaaaaaggttgctggtatctttttgtggggggcacccctggggggagcttgggaaaa

SEQ ID NO: 63020 - DNA, 356 bp, Glycine max
  Clone ID: PAT_MRT3847_27921C.1
gggcgaacaacgtcagactataatacatagtggttgccactcaaattgtgtgtacataattgattgtaaacctctgctgaacttggaaacggcctcagtgcgcgaaaacccagcctaaagcacgaccaaccactgcaagagaggcgcgatccgcctttcttgaaataatcccatttgggagcatgggtcaccttcttaaggcttgcataaatatacagaccattgttaatcctgcatattgggtgctgaattcaacgtaccacaaactgcataccgtgttctttttaaagaaagtctagtaataataatgtaaaaactggccatctgtgcctacaactacaaggaccacggtccag

SEQ ID NO: 63021 - DNA, 468 bp, Glycine max
  Clone ID: PAT_MRT3847_27922C.1
gtaagcccggattcggctcgagcaggaagccctgtttgtttacacccaggtgttctgccatgctgcacatcatggccatgctccacccggaggtctgtgagccactctacgttttagccttggaaaccctcacctgctatgagactttgagcaagaccaacccttctgtcagctccttgctccagagggcacacgagcagcgcttcttaaagtccattgctgagggcattggccctgaagaacggcgccaaaccctgttgcagaagatgagcagcttctgacttggcgtggggagctgggccccaacatggcgggtctgcagaagatcagcagcttcttacctgtgcgggagcgaaaaagctgggcttcaacatggcaggtctgtaggggtcagacccaagcagcctggactttacagttatgtgaaactgtccacaaaaagtcatggcaataatggtgtaaagaaaa

SEQ ID NO: 63022 - DNA, 276 bp, Glycine max
  Clone ID: PAT_MRT3847_27923C.1
accgagggacacccagacccagacatgggccgagcgcaatgccacaaaaaaaaaaccacagcaggcgagaagaaccccgagaagcacaacggagaggccaaggggagccaaccggacgcaaccaggaaaggcaggccccatcagcgacaggggcccatgcagacattccaaagcaccaccggagaagagaacccccacgagcaagcagaagcccaacaccccgaatcagggaaatacctacgaacccccaaacctaaaaaacgcatgaggccagac

SEQ ID NO: 63023 - DNA, 242 bp, Glycine max
  unsure (1)..(242): unsure at all n locations
  Clone ID: PAT_MRT3847_27924C.1
ccgtccggtctgatctccccttgacaagcatacctnnnagttgtacaacgtangtactatggaaaccatgtaagaactccgagtactacgactcccgactctccacangggnnactgtcnnngttgtaccttcangaaacttactactactactactactactactactactactactactactactactactactactactactactactactactactactactactactactactacta

SEQ ID NO: 63024 - DNA, 327 bp, Glycine max
  Clone ID: PAT_MRT3847_27925C.1
tccccttgggctccacggaacaacagacaccgacgtgctcgtgacagtggaggcggtgatggtgatgatggtggtgctgcttacacttgagctgcttactgatgtataaagcatactccctgttcgcataatacttgatctccacatacatgaatcttgtaccctagaggctgcgcgtacaaattgaaggacgtgcggttgctcttgcgcacgtgcatggacacatactctgtacctaacacctgcatctgtgagagaatccaaacatagaggtaattaagtggcatctatagggaaagagagtgagctatgacatgcctgtgccat

SEQ ID NO: 63025 - DNA, 1000 bp, Glycine max
  Clone ID: PAT_MRT3847_27926C.1
aaaagcagaagaatcaaaggacatttcacatttgacaaacaggaacagttgctcctcctaagtcctaacctaaacttctttccacacaacaaacatcttcacattctcaccctcccattcacacatcactcacaaatcccattgacattatccctttcctcaatcacaaaaaagcctctcttatatctcattattctccgcttgcaatcaccaaaggcaaaaaaaataaaggggtacgttaacgatgaagcgcgctttctccgtcgacaccgcggaggataacaaaaacaacaggaacacgaaaaagacaaagcttgattcggaagaggaagaggaacacgggacacgtggcggcagcgtgtacttagacgacaacgttttgttcgaggtgctgaagcacgtggacgcgcggtcgttggcgatggcggggtgcgtgagcaagcagtggcagaaggcggcgcgtgacgagaggctatgggaactgatctgcaccaagcagtgggcaaacacagggtgcggtgagcaacagctacgatccgtggtcctcgccctcggaggcttccgtcgcctccacgcgctctacctctggcctctctccaagccccacgcgccttcttcttcttcttcttcttcgtggcctgccatcccgcacgtgcttcggtccaaacctcgttggggcaaggacgaggttcacctctccctctccctactctccattcgttactacgagaagatgaatttccttaacaccaagaaaaacacatgagaccaataaggattgacacaatttcgtacctataggatggtaaaaagaaaagaaaaaaatcacatgactttctcggcttttatgttgttgttcttattcgcatggtttcgtgtttggtctttttttgcaatattttatttttggttgccagatctgcaattgtgctaaactggtagcctggttgtgtaaattgagaaattaatgaattgtctgatatggatgtattatagtttg

SEQ ID NO: 63026 - DNA, 1003 bp, Glycine max
  Clone ID: PAT_MRT3847_27927C.1
ccacgcgtccggcctccctccgtagccagttagttctcatttctaatattgcttccaaaatctctctctctctctctctctggggggtatgtgtgttgttcagtacaactagttttggtatagctagctgctcttcatttgattttgctcgcagtcgcagctccaatccaaatatggaggcgatcactgcttccttagagaggtctcttcaaaactgttccttaaacaataccaacaacaaccatcagcagagcaggaggccggaagaagatgatgggtcagctacagatggaggcataggaatctcatcctgctcagacgatgtcccggacccggataatagtcatatctccgacaccactttagagctcaactcccacatctcactcccttatcattgggagcaatgcctagatttaaagacgggggaaatatattacattaactggaggaacgggatgaaagcaaaggaggatccaagaagcaggagggcagattatagtgtaagtagggattgtgagtccgaagaagaagaagaagaagagagctggtacgacagcgaagagtcttcatcggagtcatgcccttcttcatccaaagagcactatgatgagggacaggtagagaaacagaataacaatgttctggtggtggctgggtgcaagggctgtctcatgtatttcatggtgcccaaacaggttgaagactgcccaaaatgtactggtcaactcctccacttcgatcgatccgaaaatggctctccatgattaattcccactcctcttttctccttgtgtttccttcttcgcttctcttttctttttgctgtgactgtcaaattaaactatagttctctctttttttgtttattattttttccatgaaattttcaactaagagacccttcctcgcatttcgattttcagactagcttttcattaaattactgttattaattttacattttgcggtcctcaataaataaaatgacatatattcggtc

SEQ ID NO: 63027 - DNA, 747 bp, Glycine max
  unsure (1)..(747): unsure at all n locations
  Clone ID: PAT_MRT3847_27928C.1
agattacgctgctgcagggcaagatggaggaggtcgagctgcccttccccaaggtcgacatcatcatctccgagtggatgggctacttcctgctgtacgagagcatgcttgacaccgtgctctacgccagggacaggtacctggctcctggcggtctcattttccctgacaaggctaccatctttctggccggtattgaggacggcgagtacaaggaagagaagattggcttctgggacaacgtctggggcttcgactacacgccgctcaagaagactgccatgaccgagcctcttgttgacactgtcgatatgaaggccgtcgtcacggacccttctgccgtgttcaatatcgacctctacactgtcaaggcagaagaccttgcgttcaaggttcccttcagcctcaacgtccgacgcagcgacttcgtccacgctattattgcttggttcgatatcgagttcagcgcttgccacaagccgatccgtttctcgaccggcccgcataccaagtacacgcactggaagcagactgtcttctacatcgacgatgtcctcactgtacaggcgggagaaaagatcgttggcacgctgagcaacaagccgaatgagaagaacaagcgtgacctggacattgaaattacttacaaactcgagactgangatatgcacagacagtcggagggaattggtagctacaagatgtgctgattgagtttcttcngactctgtggttgacggtaaactc

SEQ ID NO: 63028 - DNA, 426 bp, Glycine max
  Clone ID: PAT_MRT3847_27929C.1
gaattgtatacaaacgaatatgttaacattcttgccttcaaaaattatgtaacggtaggcttatcgtgaaaataaaaaaaaaaaagaatacaaaaaaaaaaatataaaaataaaaaaaaaaaaaaaaaaagagaaaatagaaaaaaaaaaaaaacaaggtttacgcttgttgaggaaacacacaacatgcgagcctttaaaaccattcatgaatagtgctttgaaccaaaaaaggactacattaatggacgaataatatagatcagactgtaaaacagttaacctacaatcatttcttttatgctagagaacacgaagccaatcacaacgacatatttatattagagatagataacaccggactctctaatatccaatactacgaaaaacatgaatatggcgcgcaggaatttaatgaaacactat

SEQ ID NO: 63029 - DNA, 241 bp, Glycine max
  Clone ID: PAT_MRT3847_2792C.1
cccacgcgtccgcccacgcttatgaggaaatattttatgtgcaaagataaacaatatactgatgtgggatcactaggtgaagacttaattcacccgcttactgctgctcaagaggttgagccagtcacatatagcatgatggctgagctaattaaaaatatcacattttatgataaataggatgggtacccagctgaaacagatgaaaactggggtgaagaagtttgtatgcacgagcaac

SEQ ID NO: 63030 - DNA, 229 bp, Glycine max
  Clone ID: PAT_MRT3847_27930C.1
cggccgccctttacttgtttttttggtggtatctggcaaaaaatcctaacgttccaaagttttacatgggctggtaccatgtattttaccaacccagagggggaatacatacgggaggcgccaacaaaacagggggtccacactaaatgcagaaaactggaagggttggctttactcaccaattggctcggggaacaaataaatggtttgacgccccccgtgaatggag

SEQ ID NO: 63031 - DNA, 386 bp, Glycine max
  Clone ID: PAT_MRT3847_27931C.1
aaaatgcgggagaaaatattggaacatatatagaaaccttcttaaacaaaccaattagcaaacacatgggtaaccacaagggtatcgctaaatcatatgcagtaccatatccagtgaaggcccatgtgaaatcgcttatggaactgaccgaggatgtatgcaaaaatagatgtataaacacatagctgaaccccaaaagaacacacaacggtggtgctgaacctgacgctgttctagacaaacgtatcgaatgagggacactgtcagatagactggcacatggatatgatcctggtgaccatgaaaaagaccatgtgaatattcaaaggaacatgcaaagcttgatgccatagctgattgcaaagatcatagattatgatgctgct

SEQ ID NO: 63032 - DNA, 160 bp, Glycine max
  unsure (1)..(160): unsure at all n locations
  Clone ID: PAT_MRT3847_27932C.1
cccactcgtccggccttcttaccgaactatgacttgagcattcctgngcagaagaacacgcccgcaaagcgccagttttatacgctatccttcagttcctttataccaacaggctctacccttccatttacactgctatagattccaccccacgatacat

SEQ ID NO: 63033 - DNA, 591 bp, Glycine max
  Clone ID: PAT_MRT3847_27933C.1
ccacgcgtccgtacggctaagaggaatccccctcctgggaagagccatttcttttctttctcaatggctttacactttgatttgatacactgtctgttgagctgattccaaagcattattattacgttattaacttccccaaacgagaatccccctccttacacatcacaacaccacaaacccaacaccatcatcatcgttcacgccaagtaaacgatcctctcttctccacctcaccctttctctctcttctctctcttttttctctctgttacttcacaataccaacagcacaacctggttccgggtcgcactacttgccccggatcaggacccttctcatgcaaccaccgattcaagtgtttttcgcctttcctaaacaacaactataggcaactaaagtcgaccctttggctagataatcacaccaacatcaaaaaaatcgttttttgctttgtgggtattggtgttttatttttagttgtgacaaaaaaaaaaaaaaaaaaaaaaaaaaatgcggccgctctagaggatccaaagaagtgcaccgcgaaaaacgcaaagcgctgtgtaagagaggaaagagacccc

SEQ ID NO: 63034 - DNA, 270 bp, Glycine max
  Clone ID: PAT_MRT3847_27934C.1
ccgccagggatttatttcaatgtagttactattcattaggggagtgttttttatcatgccaggtccatctcagagcaggtacacctctcatgccacggtcatactcttcaaaactactcttacaagacaccaatgtgtttatatatagctggagaccccacactctagacctgataacggtgagactcgcacttgagaaatggcataagatgctccacaccgtatactcgtatgagacgtcctgatattcacagaaaaaaataacgggtc

SEQ ID NO: 63035 - DNA, 1166 bp, Glycine max
  Clone ID: PAT_MRT3847_27935C.1
ccaagcgtccgatcacgacaccacaaacccaacaccattatcatccttcacgtcaagcaaacgatcctctcttctccacctcaccctttctctctcttctctctctctctctctctctttttccctctgttccttccccataccaacaaacccaacaccatcatcatcgttcacgccaagtaaacgatcctctcttctccacctcaccctttctctctcttctctcgctttttctctctgttgcttcacaataccaacaacaccacctggttccgggtcacactacttgcccaggatcaggacccttctcatgcaacaaccgattcaagtgtttttcgcctttcccaaacaacaactatagggaactaaaatcgaccctttggctagataatcacaccaacatcaaaaaaatcgtttttttgctttgtgggtattgttttttttttttttgagttgggacaaaagaaaaacatggtgggtatattttcgagattctctgtcggaagaaatgtccaccgacgaacgcaaagtgccctggatgagagggaagtgatgcccccaaacccagaggctgttgctgcagtggcaagtgctgcaactgccacttctcatggaattgaagtggctgtggagtttaagccagttgaacatccgattgaaccacttgacaatgataggccaattcagtgcccgttgccagaaccatctattcttaacgatggaagaatatggaaagaacgagtatctgctactgtgcgtagaagaggggatctgccagtgatgaaggaagggggaacgcttgaatctgaagatgctggagcaaggccacggacgtcccggtctaatcgaatgatcttaccatctgttagtgctccggagcataatattttaaaacttcttgaagagtgtaatgcttcaggcatctaaactggtattgttttgaatgtggtattttgttgtcaacttatatgtgatacccttcatctctttttgctgtcctttgctatttccatatattatgccgcttaaatatgcgtatgtatattcaaatgtataatcataaaagtcaaatgtggcacattttcactagcttctttatgaagactctagtaatatgcttcaaatttctactttggatccattgttattgagcttgtttctgcttt

SEQ ID NO: 63036 - DNA, 271 bp, Glycine max
  Clone ID: PAT_MRT3847_27936C.1
caattttccacaaaagcccatattatgtctcatgtttaaatcattaagcaaattgaattttacacaaccaattgcatgtggatatcatatgaaaaacctcaactttagttaatgggtttcgtttaaatggttcatttttggggagtgctttgctggagcatgataattgtgctcttgcatattgaattgaattgaattatcttgtggctgatttatttatgaatttattgtctattttgtgttgctgtatgattcaactgtctgaggagaa

SEQ ID NO: 63037 - DNA, 1003 bp, Glycine max
  Clone ID: PAT_MRT3847_27937C.1
ccttctcaatacaatttccaacacatctaataatattacactagtcaaggaacatctcataatattacacaagtcaagggcaactttgggttgccaatagatatattctccatggatatacattaatacataaaaaatattccagaaacttgtataaatcccgcaatgcatttataactaactgaaaagctctccgacttccttcttcattattcctttaacctgctttgctgaaagcccaatatccttcaaatcatccagactcttgaaaggttctggagattcttctcggagttcaagtatgaaggtagctctcttctccccgattcccttcaatttttttaattcctccttgttagctgtatttaaaaacctgaggtattcttgaacaagagaactcttcattccagaacctcgcatgctgaatgtctcccagggacttttggcattcattgcatccaatctgttaatgctcatgttttgttcaattgtaggagtttttggttcaacaatatcaagtggaatgggctccttttctggtatctgcatgcatgatggggttgaagaatatagcattttaagactattagaaagatcccgcaactgagaactgataggtggtgaactaatagtagccgatgaatcatctccgattgcccttgaattgttgttctccttgttcatgctatggtcttcctgaactatttttgccaatgcttcagagtaattccgggcataaggagtatgctccttttgatgatcctcctcatccaccgaaataccctgatctgctaggggattaagttccacttcaatgttagcattaaaagatgaatcatcattttgcaccatcagatcaagtttcacgttctctctagcttttgaaaatgagtcatccttttccactccagagttgagtacaacatgatttctggtcttcttttccattccagagttgagtacaacatgatttctggtcttcttttccattccagagttgagc

SEQ ID NO: 63038 - DNA, 740 bp, Glycine max
  Clone ID: PAT_MRT3847_27938C.1
cggctcgaggcctaatttccagaggccactattgagaaagaatgtagctggacgtgtgtctgctcgaagcaggaggagttttgatgatagccaattatctcttggagagatgtcaaattatgcagatggcccagcatctcttcatgaagctctgagtgaaggacttagctcaggttctgactggtccgctagggttgctgcctttaattatcttcactctttgtttgagctcggtcaaaagggaattcaagaagtagtccagaattttgaaaaggtaatgaagttgttttttcagcacttggatgatccccatcataaagttgcacaggctgctctctccacacttgcagatattattctggcatgccgaaagccctttgaaggttacatggaacgaatgttaccccatgtgttttctcggttaattgaccccaaagagctagttagacaagcatgctcaatgaatttggaagttgttagcaaaacatacagcatagattctctcctacctgcattgctacgatctctagatgaacaaaggtcaccaaaggcaaaattggctgttattgagtttcgcaataagttcgtttgataagcatgccatggatcctgaaggtgctgctaatattggcatcctaaaattatggcttgccaagctagtcccattggttcatgataaaaatacaaaacttaaagaagcagctattacatgcattatatcggtgtactctcactttgat

SEQ ID NO: 63039 - DNA, 248 bp, Glycine max
  unsure (1)..(248): unsure at all n locations
  Clone ID: PAT_MRT3847_27939C.1
ctttgnttaatttncctntccnttngaatattgtttnncgcagtnttaaaacgataatntgatcngtactgangnaatngctagctagctaatcatggaaatctttcaagccanagnaggaaagatggagattaatcccaagagatttagaagantattnnntgttgtacttntnanatcatttcctgttgcggccatagtttnttcaatntatcgaaactcaagtttcgntatttntnatgaggggt

SEQ ID NO: 63040 - DNA, 701 bp, Glycine max
  Clone ID: PAT_MRT3847_2793C.1
ccacgcgtccgatagccttatatgtactaccgctgcgagtgagacgagcgagcccttattacccagtgcctactcgcaccttcgactctctaactcttactgttgtgcatggctgtatctgcgaggcatggaggccgagaacgccagcaaggagatcgaccgtgtgaacgagatagcctggatctccgagtacaggctctactatgaagaagcggtacttggaaccagaacagcgaagggtgatgcttctgatacccacgcttgaggagattagagacatgaacaaagcacgcgcttcccgaggacacttgcaacgccgactctctccttagaagaagcgctactatccgcatagagaacttctcctattacgaagcgaaggcaacaagctacacttgaggctcgtacgagacgattatatgactaaaatctacgaggtgacagatgagatggaacagacaatgataggggatcaccaagagctgctcgatatatgagacgagctcaaagagcatgtacagagtggtataaggacgcctcatgaagagctgaggggcagtatgacaagctcttaggttagacagccccactacacggtcaatgagaacaccaagcactccttatccccggcagacccatgttgtcgccccaacattacatagcgaagcaaagcgtggaaagtctctgatcttacttgcata

SEQ ID NO: 63041 - DNA, 198 bp, Glycine max
  Clone ID: PAT_MRT3847_27940C.1
atcagacaaattggccactttacacaactttataaagcttgcatgaaatttaacaaatatttaaagttgttgttctgcatgcggtgcgacatacacaattaattaacattacctactacttattcagtcatcggtgttgctgagactttgaagtcaactttgttgtggcttaccaacaaagcacaaattgattggatt

SEQ ID NO: 63042 - DNA, 775 bp, Glycine max
  Clone ID: PAT_MRT3847_27941C.1
tgaagcgctccaagcgcaacaagaaggcgaacggaaacggaaaggacgccgcaaagaagaatcatcatcatcctcggccggagaatgtcatgctcctccgccgcgccgccgcctccgctgtcagagatccgccgcttgtgccgccgattctgaatcccgcgcagtacgagagaaggctgatgactttgcagatcgagagacagtcttatctgatgaacatgaaagtcggagtcaacggcggcgccgctgaaagagaattttcaaacacctccaccgccgccgtcaccgccgcgtgcgacggatgttcaaaggcaaaaatcaccggaattaacggcggctttcacctctgcgtgcacgacgcagtaacggtagggttccggtcaccggcgggaccgattacacggccggcgaagaccgccggcgaagccggcccttgaattctggaggcagttgtgttttgtttcgtttctctcttcaagaaagagaaagaattgtgcataagaaaaaaaaaaacaaggaggaagggttagtgatcacgtgcggaggggtatacgataagcgaaagagagcttattttcacactttggggcgtgaagcggtgaatgaaattttatctattggaagcgtgtgaagcagtaatgttcaagtgatgtttttgaagggtcgccctctctttccgcactttatgggggagattgatcattttaacttttcaagtctcaactttagacgttgatttcattataaattaaattgaaaattttaattactgtca

SEQ ID NO: 63043 - DNA, 367 bp, Glycine max
  Clone ID: PAT_MRT3847_27942C.1
acgaggaaaactgttaaaatgagatatgatggaatagcttcaggtggaaagacactcaacttcacacaaacacacaccatgatgcaatttacaacgctaatgataaatggatgctatttcctagacatcaattcctatgaaacgtttaatgcatctagcatatgttacatgaaacatgtccttattttaatgcttcccctcaagttagaggttactaagctttaagcttgtaagaaataaacctttaaaagagaaacaaattatggtctccactagacatggttgtaatagcaagatattagaccaaaagagaaccatagaacactgctaaagtctggcagaaaaagtaccacaagaaaagggatct

SEQ ID NO: 63044 - DNA, 268 bp, Glycine max
  Clone ID: PAT_MRT3847_27943C.1
ctcgagccgctcgagccggtcaaacttcaaatgcaagttcgaagaaaaggtttccttcagtagctgctacaatcttttcaattgagtttctatgatcttgacatctacttgatcacatcaagtaatgagaatggtagaatcacttcctatgatgtgcagaatgagaaatttcctgtaagcggctcctttccaattttccaaagaggtggatgttctctggtgttcgtgttggttggccaggggggccaattgactggtccttggattg

SEQ ID NO: 63045 - DNA, 263 bp, Glycine max
  Clone ID: PAT_MRT3847_27944C.1
ggttgaccgacgcgtccgcacacttcccattcacatttactatggccaagactgcttctgcaaaggctactaaggccaggacaaaggtatgaaagacctcaaaggcttccaagaaggccgaacccgtcaagcagaaggttgaggattcctcctcttcttcttcttccgagtctgactccagcagcagcgactccgagtctgaggaagagaccaagaaggttaccaagaaggtcaccaagaaggtcaccaagaaggccgccaag

SEQ ID NO: 63046 - DNA, 318 bp, Glycine max
  Clone ID: PAT_MRT3847_27945C.1
aatattactgcgccaggcaaaagctccaagtatgtttttacagctctacaaaaagataggctctttgtgtgtgtatggtgatgataactgaattagggtacatgaatatgtcaggtcttactgtagtggctataaattgaaaagctgtgtggctgtggataatatcaccattactgagggtatggacaaaacaagtgctactttgcagtttataaagtgagcagatttgtatcttgtcatgataaactctttgcagatggctaaggcaaagcgggtggatcctggtgacacagcgagtttatggatacagctttttta

SEQ ID NO: 63047 - DNA, 630 bp, Glycine max
  Clone ID: PAT_MRT3847_27946C.1
acggcggcacgaggcgagaacgacccaaagagaaataaaccacttatatatatatatatataaaaataaaaaaattagcatcatacaccatatctagttaccttcaacataaaatggaagaatccaagggttttgttagtggtgagactcaaaaacctcacccaaaaatgccttctagttccttcccaattcctttgccagggaggaatcgccatggccagcagtgtccatcaagatatgccccacaatggaggcaaagggcaatactagggcacaccgtgggaaaccctagcggggcaagtgagaatacaactttgaaggtgtaagtcactcgaggagtaataatacttagtatgaagatcttaaacgtttgaataaccgttgtcgttgttatgttgtcttttctatatcgtatattaccgagcataggtgtgcatgctttgagaataagagccttgctaggctagaatatgaatatcttcagcaattttattatagatgacttgtgtattgtaagtgttacgactttgtacttttgtgataccacatgtttatgttctccgttcatggatggatcgtatccaaaagatgataagcttttaattaagaatactgatttttagaccaaaa

SEQ ID NO: 63048 - DNA, 1957 bp, Glycine max
  Clone ID: PAT_MRT3847_27947C.1
ccacgcgtccgcatttttcgattttgctgctctctcttcccattttctctgctacacttgtgcaccttgaccctctctccagcaaccatgaacgcctccatcattgatccgttgcagggcgatttccctgaagtgatagaggagtatttggaatatggttgtatgaaatgcattgccttcaatcgccgtggcacccttcttgctgctggatgcaacaatggaagttgtgttatttgggattttgaaaccagaggcattgctaagattctgcgtgatgatgaatgttcttctcccataactagcatttgctggtcaaagtatggtcatcaaattcttgtatctgctgctgataaatcattgatattgtgggatgttatgagtagtaagaagataacacggatagttctgcaacaaacccctctacaagctcgtcttcatccaggatcctcgaccccatctctctgcttagcatgtcctctttcatgtgctccaatgattgttgatctgaatacaggagacacaactttacttaaagtttctgtcttagagacatgcaatggaccaacaccaacccctccttcacgtaataaatgttctgatggaattacctccttcacaccaactgctgcttgttttaataagtatgggactctggtttatgtgggaaactcaaaaggggaaattcttgccattgattacaaaaatggtgacgtgcgtgctgtagttccaatctctggtggttctgttgtaaagaacattgtgttcagcaggaatgggcagtatctgctcacaaattcaaatgatcgaataattcgaatctatgaaaaccgtctacccctgaaagatgaagtcagagcccttgatgacctgagtgagaaccacaatgttctaaataatatcgagaatttgaaggctgttggatcaaaatgtttaactttattccgggaatttcaagattccatcacaaaggtacactggaaagcaccttgtttcagtggtgatggtgagtgggtagttggtggttctgctagcaaaggtgagcacaagatttacatatgggatagagctggacatcttgtgaaaatccttgaaggacctaaggaagctctgatagatttagcatggcatcctgtgcatcctattgttgtatctgtttcgctgaatggtttggtttatatatgggcaaaagattatactgagaactggagtgcatttgctcctgatttcaaggagcttgaggaaaatgaggaatatgtagagcgtgaagatgaatttgatctgattcctgagactgagaaggtgaaaggacctgatgttaatgaagatgaggaagttgacattataacagtggagaaagatgctgctttcagtgattctgatatgtctcaagaagagttatgttacttgccatcaacccctagtcgtgatgttcctgagcagcaagagaagtgtgtagaaagttcttctaagttgttggacagcaataacactggatcccctctttcagaagaagctggaccaaatggacatatgatgaatcatgcatcaagtcctcttgaagatgatgctgggcgcatgaaaagaaagcggaaaccttcagagaaggtgttggaattacaagcagaaaaagttaagaaaccctcaaaatctagcaaatcggaaaaacccaagagcaaatctttggccgatcaagataatggtaatagttttcatggtggtgggctttatgatgaataattgtagattatgaaattcttgtttacaaaagtactattttttctttattttttgtctttatttgttcttcttttctaaaaaacttacctttgcatagctttatttaaacttgcctcctttctctctatccttggacttatgtttctaagttggtggtggctagtgaaggctgatgtgtcctttaacttatgcgttctcatggaaagtttacttaaaaatg

SEQ ID NO: 63049 - DNA, 121 bp, Glycine max
  Clone ID: PAT_MRT3847_27948C.1
gccaaattaaccaagcacaaggctgtatctcgcgggcatactctacgtggtggggattgattcgtggatccttccagcttaaattacatggtggtgccttgtaattgaggatggtagatat

SEQ ID NO: 63050 - DNA, 400 bp, Glycine max
  Clone ID: PAT_MRT3847_27949C.1
gattttatttaaattagggattcaagggtctcgcactaatactgattaagaaccggacttgtgaagcatccatatatataggactataaatataacagcaaccaaacccaaaacataagaggcgcgctcaataaggatcaacatagggaagaagctagctcgcacaggtgaatgaaacaagaaactacaaaaccaacaaataattatgagagcgaaagcgaactcattaggggcttggacaaaaccaattgtttgtgcggagcaaagggacatgtacaccaccttgtattcaaagccgatattgcaactgcaatccaaagaacttacactgttggaaagcaacaacatgaacttggggaatatcatgtgtgcaacggacatagacagataccaaaggaga

SEQ ID NO: 63051 - DNA, 765 bp, Glycine max
  Clone ID: PAT_MRT3847_2794C.1
aggctcctccactacaaaaaggcatcaaagatgatatcacaaagtttgttcacaaactaacagcctctgtgcaccctacacaacacatggatgacaaacagtttagtgtcataactttggctggtgacaatagaggagccacaatgcacttaggttctgagtcagctaagaaagagggttcagttcacatacaccgagcctacaagagtgatcctgaagataccaatgaggtgaccactgatggagaagaaaacactaatgaagaagatgaagaggtgggaatggcatatgtcaacagcaacatacaaagtattaataactcactcatgtttcatggttcaatcactgaaagagaccctggtgttcaagtgactcttcctcaaaagcctgctgaacccatcaagcccgatgataagcccaatcccggcttggaaactcagaggactcagttcaacatcaaccgggctgagaagtcaacataccagcccacggttggaagaagcatcagaggccctttccttgaaccaaatgacaaacctcgccgtcacggttgcaacttcagctgtgacaaggatatagaggacattgagattctgtgaaggaacaagcacacaccgcttcccttctaaaattcaaaagctgtgcagtggaatattgtaacacacagagaaacaaaataagtgttaatgacatccacattgtgtaatttgttatgtctcaaaaaaaaaaaaaaaaaaaaaaaaaaaaaaaaaaaaaaaaaaaaaa

SEQ ID NO: 63052 - DNA, 383 bp, Glycine max
  Clone ID: PAT_MRT3847_27950C.1
caagctagcaagaacgatcatttatgtcaaaattaatagcgcctattttttaagcctgtgaatctataattaattacatggtccctacccaactgtatcaaaaaggaaaaagaaaaagaaaaagaaaagaaaaggctcacagctaagcacaagcatacaccgacagacaggaaaaccaattcggaggcagagataacccacagaggaagctgaatatcttttttccgttgtctccatagaaaatttgcaacttaaagttttcactctaaccctaaactttggaaacccactaggccactacgattccgtaaaacctttcatgcaaacagtatttaccattttgttacgtgtacaaattggatagagctgaacatcgcaccatg

SEQ ID NO: 63053 - DNA, 294 bp, Glycine max
  Clone ID: PAT_MRT3847_27951C.1
gtgggggattttgttattctttttattttatattttttttttttttttggtggggccccaaaaaagggaaacattgagaaaaattttggtcccacaaaaaataaaatatttttctacgggttactaggagggggatgggtctttataaaaaccctccggggggggggttttttggtggcaccggatattcttttttaaaaaaaatgagctttttttccaaaatgcaaaattttgtggaaaaaatcttcataatgtggggatcccatttatttgttttgggaaagggtgggattt

SEQ ID NO: 63054 - DNA, 296 bp, Glycine max
  Clone ID: PAT_MRT3847_27952C.1
ggtgaaaactggcatccttaaattctcaaacaaaaaccatgaatcccttgcgccttatttgaaatctaattcctttccaaaaaactgtgtaatttcgcttccttctgaaaccacaattcccaaatctgaactggaaaacttttatgatgtctctggaaagaaagatggcaattgggaatccgaaactttcaaaagtactgtgacttctttgcctgattcctttagcccttcctcattaatcaactcaactcaaaactccaaaatgggaatcaatgaattaggtgtagaaaatacat

SEQ ID NO: 63055 - DNA, 314 bp, Glycine max
  Clone ID: PAT_MRT3847_27953C.1
caacgctcaatccagatcgagttatcattacaccactctctttatctattcatggaggtaaaataatgactacaaggcttcctctctcggggatattactagaacactgcaataatatccaacaatactaacgaaaccaatactaacatgaaatctaccataagattgtatcaccataacatatgaaatgaaatctagtaccatctggatctatcaccaactctctgcatacttcaacatcaattgttgtcaataagactctgatttcttacttattattaacactatctctttattctatacacatatgctcg

SEQ ID NO: 63056 - DNA, 328 bp, Glycine max
  Clone ID: PAT_MRT3847_27954C.1
atcgatcgttctgaagttcgattctatgcatttgaagctcgaaatttttgtcagcgtggcggttattatagattattgctgagacatggctgattttatctggtctggaaaatgaaacttggctttatgtctaaagaaggcttctagcgctgtggaactatatttatgaagttattgactggcgtactttaaatccccgtccggaagaattggcctgtatttgaagaaaggaaggtacgcccagtggggcactacccgtgctaccgtttacttgaccgaaattgtggggtgcctatatagtgaccaagctttcgttccctggcaatgc

SEQ ID NO: 63057 - DNA, 984 bp, Glycine max
  Clone ID: PAT_MRT3847_27955C.1
cgagccgaccccatcttcaaccctgccctctccgcttccttcgccgccgtcccctgctcctccgccgtctgcgaccagctcgacgactccggctgccaccagggccgctgccgctaccaggtctcctacggcgacggctcctacaccagaggcacgctcgctctcgaaacaatcacgctgggaaaaacagtgattcggaacaccgccatcggctgcgggaacttgaaccagggcatgttcgtcggcgcggctgggcttttgggactcggagcagggcccatgtccttcgtgggccagctcggtggccagaccggcggcgcctttgcttactgcttactctctcgcggcaccgcatcctcctcgtcgggctcgctccaattcggacgccaggcgatgcctctgggagctgcgtgggtcccactcgtccccaaccccttctaccccagcttctacctacgttggcctttcgggtctcggggtcggaggcacgaggcttaacatatcggaagatcttttccgtgtgacagatttaggcgacggaggggccgtgatggacaccggaaccgccgtcacgaggcttccgacggtggcttacggtgccttccgggacgcctttgtggcgcagaccacgaacctgccccgggcagcaggagtgtccattttcgacacgtgctatgatttgaacgggtttgtgacggttcgggtgcccacggtgtcgttttatttctggggcgggcagatcttgaccctcccggctcgaaatttcttaattccggcggatgatgtgggaactttctgttttgcattcgctgcttctccttctgccctttccataattgggaatattcagcaggaaggcatccagatttcggttgatggagccaatggttttctcggttttggacccaatgtctgttagtcatctctattttcataattacatttacatttactcctatccctaattactcatctaattatcct

SEQ ID NO: 63058 - DNA, 237 bp, Glycine max
  Clone ID: PAT_MRT3847_27956C.1
tttatctagtttctatcaattaataattctatactccataaacttttgtcattcatcctttggatcttaataactttttttattattattttttattttatttttattaaggtttcaagattaccatctttgttatcagcatatcattttattcatatacttatattacattccatagttcatcttatctagtcaaatgtgtcacagattttaaatctgctcttcatacaatttttt

SEQ ID NO: 63059 - DNA, 386 bp, Glycine max
  Clone ID: PAT_MRT3847_27957C.1
acgaccgaccaaaaaagacccataggctttcatatttacccgagcaagcctaggaaaatttcactttccggttttttttctcatgggactagccctttattaaaagaaagaggccatatcattttcatttccccatctggggaccatcatcaatcacgaaagaggggacccgggttattcattggggggaccatttgctggaaggggggggggggcaacctatccttttggacttacaagggggcaaatattgaaattcaaaggccccaagcttctttaggggaggggggcagggggggaaccatttgaagggggccatgcctatatgagtaatcctatgaggagaaggagggcccctgcaacaaagcctgggggaagagaaaagg

SEQ ID NO: 63060 - DNA, 1793 bp, Glycine max
  Clone ID: PAT_MRT3847_27958C.1
cggtccggattccccgtcgacccacgcgtccgcttgttttcttccttcttcttcttgtgctccttcttcgtcatatccacgctgctttctttctttctttctactactttccttcgcgttcgttcctctccctgctcaggggaccttttgttttatgtttctctgccctgtgcctgtgggtcttactgtgccacttttagtagtactactaccactccagtcatagtcccctcttctctttattctttgacactttctgctaactgcctgcctggtgcggtgttcgcgcaaatgctctctttgctttttggaaattgcgtgacatgtgttgttctctttagacgcgtccgctttttggagagagaaaaggacacgcagttctagagagtgaccccattgcagagaagaaagagccaaatcaaaccaggttgcctcaacctcaactccaaagcaaagcaaagcaaacaagcaccaccattctcttctctctccctgtgtttgtccaataaataataatatctttctcggtgtaatagcatcactgtaagacaaggtaaaagcgggaccagagagaaaacagggggatttgtttctctctgcagttgcactcttgcaggcaggtgcagctgtttcccgttctgctcctctcccaacccctctgtttctttggagtgagaaagttttatactttagaaccagctagcgagcaagtgagccagtgtcatacatatatataaatagcgtgcgagaaatgcagcagcacctgatgcagatgcagcctatcatggcagcctactaccccaacaacgtcaccactgatcacattcaacagtacctggatgagaacaagtccttgatcctgaagattgttgaaagccagaattctggcaagctgagcgagtgtgcagagaaccaatcaaggctgcagagaaatctcatgtacctagctgcaatagctgattctcaaccccaaccatctccaatgcctggtcagtatccttctagtggacttatgcagcagggagcacactacatgcaagctcagcaggctcagcagatgtcacaacaacagctaatggcttcgcgctcctcactcttgtactcccaacagcctttctcagtgcttcaacagcagcaaggcatgcacagccaacttggcatgagctccagtggaagtcaaggcctccacatgctgcaaagtgaagccactaatgttggaggcaatgcaaccataggaaccggaggagggtttccggactttgtacgcattggtagtggcaagcaagatattggaatctctggtgaaggcagaggaggaaactctagtggccactctggtgatggtggtgagacacttaattacctgaaagctgctggtgatggaaactgaactagccagggagaatggtaaaagtttccttggcctttagccgtttattgagtgaattatgagaattaggcaatggagattaagtagggaagggaaggaggaaagggaaaagttgctgcttagatatcttgtttgttaatcttgtgctaaaggcaaactgccttaacgtttctgtagtactagtaactagtaagtaacatgatgcatgctttatttttcttgtgtaaagttctagtcataaatgtcagggtcacaagttccttccctttctgttctgtttctgtatgcacacttgttggccaagagggttatttggtgaacgatgacagatgtaattttgacgatgttcctgctttaaggagtttgatgcatcaaagttcaattacaagctaaacccattatg

SEQ ID NO: 63061 - DNA, 1762 bp, Glycine max
  Clone ID: PAT_MRT3847_27959C.1
cacgccttctaaatcttgtttccgtgtggtagcatcattgcaatagcccggagatagaagggaaaagtgggaacacacagaaagccagagaaccagagagagagagagagagagagagagtgtgcttctctctgcacttgcactagtgcaggcctcagctttgtttggttttggattgagaaagttgatatagttagagaaagagaaagtgtacatctttcgatcatatagtgtatattccgtccgcccacgtcgtccgtacggctgcgagaaaacgatcacgctttctaatatcttgtatccgtgcggtggcgtcattgcattagccaagcgattgaacggtaaagggggaagcgggaaaagagaaaaaacagagggttttgtttctcttttgcagttgcactttctcgcgcaagcagcaccatcgctgtcctgatcttcgcctggctgtaagataagggaaaagcgggaagttagagaaaaaaagagggttttgtttctcttttgcagttgcactcttgcgttgcaggcaggggcatctgtttcccgttctgctccgatcaacaagtacagcgatcaagtgagtgagtgagtgagtgtcatatatatatacatagtgcgttcgagaaatgcagcagcacctgatgcagatgcagcctatcatggcagcctactaccccaacaacgtcaccactgatcacattcaacagtacctggatgagaacaagtccttgatcctgaagattgttgaaagccagaattctggcaagctgagcgagtgtgcagagaaccaatcaaggctgcagagaaatctcatgtacctagctgcaatagctgattctcaaccccaaccatctccaatgcctggtcagtatccttctagtggacttatgcagcagggagcacactacatgcaggctcagcaggctcagcagatgtcacaacaacagctaatggcttcgcgctcctcactcttgtactcccaacagcctttctcagtgcttcaacagcagcaaggcatgcacagccaacttggcatgagctccaatggaagtcaaggcctccacatgttgcaaactgaagccactaatgttggaggcaatgcaaccataggaaccggaggaagggatttcccgactttgtacgcattgctagtggcaagcaagatattggaagttctggtgaaggccgaggaggaagctctagtggccattctggtgatggtggtgaaacccttaattacctgaaagctgctggtgatggaaactgaactagccagggagaatggtaaaagtttccttggcctttttagccgtttattgagttaggagaattaagtaggggaagggaaggaggaaagggaaaagttgctgcttagatatcttgtttgttaatcttgtgctgaaggcaaactgccttaacgtttctgtagtagtactagtaagtaacatgatgcatgctttaatttttcttgtgtaaagttctagtcataaatgtcaaggtcacaagttcctcccctttctacattactattagtaacataaattagcaaatcttctagttccttgcgtagatttgtgcttgtttctgtttctgtatgcccacttgttgtccaagagggttatttggtgaacgatggtagatgcaattttgacgatgttcctgctttaaggagtttgatgcatcaaagttcattttacacctaaacccatcatgccacgggaaataactaataattgattttgcaacttggtggtggatc

SEQ ID NO: 63062 - DNA, 434 bp, Glycine max
  Clone ID: PAT_MRT3847_2795C.1
catggtctagctatctcgatcgaactgtccaaggtcctgtcacccaaaagcctgtgcggaagcgtgtacaaaggtatgtgactggagctgctatgtcgtccacgcccgccgcgaagcccggaggggtaacacgcctactaataacgtatggggcctgccccgggcgtgctagtatgctgcgaggagcgggagatgcactgattgccaactttgcggggtctagtagtgcggccttggcctagagtgctgctatggtgccccgcagcccggtgtcgggtaacaaagtaccaaaccgtgggttagtacgcggcgcgtatggcgcgtttgtagaagcatccgccggatggctagccaaggagctcgcgctctatgaacgaatcaacacccaggcgagcagactagttgcgaatggtctgcaacgtaagtgttgttga

SEQ ID NO: 63063 - DNA, 415 bp, Glycine max
  Clone ID: PAT_MRT3847_27960C.1
gatgctcatcggtgatgttggcggggattccatcgagtccgacaccgcgccattaacgcgagcttcgccggacctatcacgttaaccgcaatgtgttctacaccgcatactgtaagggaaacagtcttcatatgcctatccaatctcttcggccgcgactcgctgactctctacggtgcagacctttagtaccatgctacaaacctctagggtagcaccttgtcaactttgctctcgtgtgtggactgcaccgactacgtgcgactgcacatcggtgcgcaagcgctgtgctcatgtactgagtgtcctatctgagactcacggtgcatgctcgcgccacgcctgccaaagattctgagacaggccccgctattgctcccatatgcgagactcgtctgaacgatctgcgtgcgac

SEQ ID NO: 63064 - DNA, 203 bp, Glycine max
  Clone ID: PAT_MRT3847_27961C.1
ggctatttcaattgagcagatccctaattccgagggacgacgcttcgctttctttgttcagctctcgcggtttctctttttctatcagcaattgtccagtggtgagaagcaaattacaattctgagagcatttggctgaaacaggagtctgtgaatttgttaaaagattggtggtcgagtgaatctcggcgattaaaaaagag

SEQ ID NO: 63065 - DNA, 464 bp, Glycine max
  Clone ID: PAT_MRT3847_27962C.1
ccatcccaacccattttatttaaaaaaaaaaattaaatccaaaggaaaaaaaaaaatattaaaaaaccccaattaaaaaaattggaaagtgttttataaaggtaaaaaaggaaaaaccaattttttccccccgggccccggaaaaaaaaaagcccccccgggtcttgaaaaacccccttaaaaaggacctctgcccccccagggaagggctgggaaaaaaaaaaaaattctttaaaaggggggtaaatcggggtaaaaaaacccccgaccccaacaaaaaattcccctacccgcccaatttcaaaagaaacaaaaaacccctcccccccaaaaaaaaaaggaaaaaccgggccccccaccgaaaaaggacccgattgggaatgttaaaacaacccccccaaacggggacccctggcaaaaggaattggaggagctttaacgaaaccaaaaacgaatggggcaaa

SEQ ID NO: 63066 - DNA, 783 bp, Glycine max
  unsure (1)..(783): unsure at all n locations
  Clone ID: PAT_MRT3847_27963C.1
ccacgcgtccgttcctttatgcctgtcaaacaatcatgaatgctacaacatatataaatacataaaaatacaagagcatataattcaatcatatggccttagtatttagtaagaaacaataaagttttattatgataatttatgcatgaatgtggtcttggtgttatttaatgcaataatttatgagaatataattcaatcatgtggccttagtatttggtaagaagcaatgaagttaattttgagaatttatgcatgaattttgtcttggtgttacttaatcagagttacatttgattatatataaggtaaaaattgaaatattattttgttgcagcttcttcgcacaaagtatagttgcgccaaattatccaattgtactagtagaactgaaaggattcttaaagaaagtggaagtcaaggaattttattgtacgactttgtgattgtgagccattatggaatagacaactacacttccattggagatgctattgctgctgcacccaataatacaaagcctgaagatggatttccttgtgtatgttagggagggactctatgaggaatatgtagttattcccaaagaaaagaagaatatattgctagttggagatggtattaacaagactatcatcacagggaaccatagtgtcatagatggttggactactttcaattcttccacctttggtaagtactttgntctttctaactgttctcatttgtgaaggcaagttttactaagaaaaaccattcttgagatttcacttaacaccaaaa

SEQ ID NO: 63067 - DNA, 749 bp, Glycine max
  unsure (1)..(749): unsure at all n locations
  Clone ID: PAT_MRT3847_27964C.1
attnnnnnntnnnatttgatccatagttcttacaagccaacaaaggttgttgtcaattgttccctacacagaaaggacatgtaatatctattgcttcctgattgctaacctgatcatacaaaattcaaaatagaagcttaattagttaatagctgaataataatatcatgcatgatacaagaattacccgagtctcaattttgtccctttcatcttccctagaaggcttgtgatcagatgttaggacttcagccataccctctttgctaatcacagcatgacaatcaccagcattggacacaacaaaggttaccattccatatcaaccctcccacagtaagaaccaccattatgatcctccttcttcaagaattcaaaatctgtgttgaggtacatactttgctgcctcctcaatgtcacattcatcacttctaaccactttgtccaaaacattcttttcttatggtataaaaaacatcatgttgaagcaatcgtatatattttacaatgctcaatgtgaaactcaaatctattgagggcaaaatctattgattggttatagtgaaagtaactaaatttgttcacataagtaacatcatactgctaaatatttttaggggaataataatggnnnagcctccataattgattcaaaagtcttattaaaaaaaaaaagaattgattcaanagtaaacaagcnnatagaacttaatctatgtcctaattaaatcaannnctatgtttacctg

SEQ ID NO: 63068 - DNA, 723 bp, Glycine max
  unsure (1)..(723): unsure at all n locations
  Clone ID: PAT_MRT3847_27965C.1
ggaattcgncacgagtcgagatcagacgacttgcagtgcctttctagtctcatcacggtcactctttgtgattatttcctcactctagtcctcttgcccctttatattagaaatggcatctgctgttgcacagtccgccttagcatcagctaagcgattggttcccctttttgatagagtgctcatccagagagctgaggctgtcacaaagaccaagggaggtattgtaattcctgagaaggcacaaggcaaagtgctcactggtactgtggttgctgttggccctggcagtaggaatagtgatgggcaacatgtcccagtttcggtgaaagttggtgatcaagttcttcttccggagtatggtggcaccaaagtcgaattatctgaaagcaaggagttccatcttttcagagaatcagacatccttgccaaaattgaatcgtgatctaattatccatttgtgtaccatttccatgccatgagttcacctcattgtagttttaaaattcagtgagtggccagtgagtttctatagacattattgaagattggaaactggatatctggttgagaagttgcatttctgttgtgatgtgatgtgaatacgaattatatagtttgttgctatagttcagaagattgtagtccccaagaatttgagcatcctatgtgatggctgttgaacttttagagtgaatgttctgatgtatgttattcaaatat

SEQ ID NO: 63069 - DNA, 376 bp, Glycine max
  Clone ID: PAT_MRT3847_27966C.1
gggcccaaaccaaaaaatttttttaaaactttaatttttaacgggggttggtgaccttcaattatccctttaaaccaccctcccttgtttttaaggcattgggaaaattttaaaccatttaaacttaacctttttttttaaaaaacctgggttattttaagaaatttcaccctttttttacccattgggccttattggaaaaacctcaaaaccccggttagggtttttattggccgaaaatttccaaaccaaccttaaattaaccaattacccctttattggggggggttttgggagggttgttttggggggaccaaaaaaaaacccctccccccagggggaaaaccgcccggttttgatttaacccctttaggac

SEQ ID NO: 63070 - DNA, 170 bp, Glycine max
  Clone ID: PAT_MRT3847_27967C.1
aaaatggctggaaaagaaaaagacattaagggtcaaaactttggtcattcctcttctcccccactctgtatctctcactcagccacattaaacactaaagtcgcttgctgtgtactcactttaatttataccttcttaataagtcgcgatccagagcttagcatttaaat

SEQ ID NO: 63071 - DNA, 474 bp, Glycine max
  Clone ID: PAT_MRT3847_27968C.1
gagctcgagccgaatcggctcgagccattcgtcatttgagcttttgatgggtaaatgggatcatcctccgtcgcgaaggttcttccgccgtcgaagatctccggtgcgtcccccgaccttctacgacatcaatacccctcttcctgagtattggcaggacggaatacccttatgggagaagaaatactgcactatagttggattggtaccgtggcagaaaattgttgattcaaagatgtttgtatactgccacagtaatgtgtttgattggaatgattcagccgctgaagaagctttacaaaatgccaaaaatcattactgggcaaagatcaacagccttccctgtgatatttctctgcctgatccagatacttataatgatcaaatagattggaatccttatattgatccggatatgattaaggaaatagataaagcattctttactgtgccagatgaggaacaagaaactgc

SEQ ID NO: 63072 - DNA, 333 bp, Glycine max
  Clone ID: PAT_MRT3847_27969C.1
ccacgctttcggtctctaccgccactgagcctggagaggactcggagaaaggcgctgcatgcatcatagaggaatatctccctgagggggatgtgaaacttggcccctactgatcgcacagaacttgaatcaaagaaatcctatccatacgttattgagcggccttggcttcactggccatggagaggcctgatagagagaaagagatgggttcagctctgctatcaggatagcatgctgatgtcatcagacctgctcagactggagaagggttttgtatgctgtaggcacttggtgatgatcttgcagaggacatactggatgcagatgaca

SEQ ID NO: 63073 - DNA, 310 bp, Glycine max
  Clone ID: PAT_MRT3847_2796C.1
cttctccaaggaactagatgcgccaattatgctcggggatgattctcatgcacctaccttatggactaaactccttctactgaacaagatgacaaatagcaaccatctgaataaaatgatgctagaccaacatgaggatgatgaggataagctcaccagtaggccatggaggaagctcttgaaaaccgtatttgacaaggcgaatgctaatatagataacaaagacgctgctggatcccctgcctcttacaacctctacgatgacaaaaaagccgatttcataaacgcttatggttggaccaatgcactg

SEQ ID NO: 63074 - DNA, 438 bp, Glycine max
  Clone ID: PAT_MRT3847_27970C.1
cgtcgagccgaatcggctcgagcaaccatttgcattcctttccaaaaggatcacagccttcaggcacacaaactaaaaccatgttgaagaagcaatctctcttgtccttctcactagcactgctagtttcctttatgtattgcaccaccactttagcccaattatcaccagcttctgcccctctcaaaccaacccaacctacacctaccccaccggctgcagctcctcaacaaccattggttccttcattgccacagtcaccaagtgattccactcctgacagtactccagctgttgacattgttggaatcctgaggaaggcaaagtcattcaacatcctaatccgcctcatgaaaactacccaattgatcaaccaactcaatgcacagctcctcactactaaatccggaggcatcaccattcttgccccagatgaca

SEQ ID NO: 63075 - DNA, 239 bp, Glycine max
  Clone ID: PAT_MRT3847_27971C.1
gatactcaattcattttcttcttctgcttcaccggtctcttctcttctctcatagggttagggtttttttctcttcattgctctctctgtcggtttatttccatggctcaacaagatgctcaaaatggtgggtcggagaatgcccctgctgccgtgtcctttgtcgctttgaagccgcaactccttatcgaagctcccaaagcgaaccacgccgttctgttctacaaggccccgtttgc

SEQ ID NO: 63076 - DNA, 1212 bp, Glycine max
  Clone ID: PAT_MRT3847_27972C.1
aattcctcatattgcattacattcctattttctgaatcctttccaatatcatctaaaccttcatttaattaacaaaaccaaaatgatgaataggcaatctgtcttgcccttctcactagtactgctagtttcatttctgtattgcacctccaccttagcccaattatcaccagcttctgcccctctcaaaccaccccaacctacccctaccccaccagctgcggctcctcaacaaccattggttccttcattgccacaatcaccaagtgattccacccctgatagtactccaactgttgacattgttggaatcctgagaaaggcaaagtcattcaacatcctaatccgcctcatgaaaaccacccaattgatcaaccaactcaatgcacagctcctcactactaaatcaggcggcattaccattcttgcacccgatgacagtgccttctcagagctcaaagcaggcttcctcaactctctttctgatggccaaaagctcgagctcttacagttccacgttatttcagactacgtgtctagctccaactttgatacactgaccaaccccgtgagaacactggcaggggctaaaccaggaaaggtggaactgaatgtgataagttatggcgggagtgtgaacatctcgacgggtgaagttaacaccaccatcactggcattatatataccgataagcatcttgctatatataaggtgggtaaggtgcttcttcctatggacttctttgttgttgctaaggcacctgcaaaggcaccctcgttggcaccagaaccttcaagtggcgtggcaaaggggcctaaagctgataaggatgagtcatcatcttcagattcgtcacaggttaattccactgatcagaactctggcactgccaagatgatcagtgcgtatggaatgtgggtgtcacttgttcttggagtacttctcatgagtgtgatgacaacgtaaaccagaaccagaataagatcatatatatctgaattttccaacgttgtagctagttgctacaccatatgctatctattgataccaagagtgctacgatgagttatgtaattgtgagaaagaagtgaaaagtgaaaacttgtgatgaatttattgaatactggatcaggggatctattattgttgtatctatgattttattctaaaacgtacaagagtattataccttggtcgcttctatatatctc

SEQ ID NO: 63077 - DNA, 489 bp, Glycine max
  Clone ID: PAT_MRT3847_27973C.1
aatgaggaaaatgtataggtttaacggagaaaaaaagaaagaatttagagacagcaacacagttgatcattccttgtgcacatagagtaatacaagaataacagtttactgaagagggatcaaaagccataggagacgaactaggcggggggggatgcacacaaactcaaagggacactgggacagaccatttcacgcacagaagcaatgagacgcatggcacacagttacaggactacagaacctaatccaaatacagcagtggctgaaatggtacaaaaatacccatagatgcccacaatacgcccctatataaaagggagcaaacactggttatgctcaagaggcaaagaccgggggcgaaaaacccatacaagagcggctgaaggaaaccaattctggagcagagactgcacagagggcgacctttatgaagacagccactttggcggagcaagacgaaggataaggtgcctcgcagcgaagcct

SEQ ID NO: 63078 - DNA, 568 bp, Glycine max
  Clone ID: PAT_MRT3847_27974C.1
gaaagaaaaagctgactattacgtaaaggtaggaaaagcacctccactaacaccgtttatcagccttcgataggcaccactatctaatgaacggatctgtgcctgcgcttgtcactgggtgctaccacaactactatgcgcctaccgactcactacgccgttgaaagcaacccgtaggagacagaactgagcttaggccttcgcgattcgcataacctgctgccacaatacgtggctcttactgatacccttactgctttgcaatagaaaatcttgcgcccgaccttcgaatgcctagcaccctgcagggaacaacagcggggattggccgtctgagaaggaaagcacgaagattgctatgaagaggactcacactatgatgacagaggatgcggatggagcttcttatatattacaattgcatctccacctgtacgatattgactagcattcgatgatggaacaagagacaatgcttagtggataaggcatacgtcataattcgaagaatgagacgaagctgatgaaacctggcactgatagagacaacgtgcccacctagtatgac

SEQ ID NO: 63079 - DNA, 361 bp, Glycine max
  Clone ID: PAT_MRT3847_27975C.1
aaaaaaccacaaacatggggtgcgaaaaaaactcatgaacattcacgtttatctgaagatttatcgacggtctaaaagaatgggatggaaccacccctctcccacatagggggacataagactactattcactacgaatcccagaaactaaaagagcttttttttgttggagcgcaataattcaactgtgggacgtagtatactacgtcaagctagtacgctgcaaattcacctttaaaccgacctgggtatttcgtacctggattgcctagaaagtggggaaattccttatagcaacagtccgcaggttatgatgtgataacataacccttacatggaagtttcagaactagaaactccc

SEQ ID NO: 63080 - DNA, 337 bp, Glycine max
  Clone ID: PAT_MRT3847_27976C.1
gtgggagtgggacaaacaacacatccagtcgtggcggtggtagggctggcacagatcgtaatggtggacgtggtggtgccaaccaattcggcagcagtgattatggtctgcaggggaagcctgtatacaagaaggaaaatggggcacccacttatggagggtctacatcctctgcacctagtgtgctgggaaacaatgcgaacatgagaccggcatcctacagtgattctgtggttactgaaaaaaacatacgcattcagcatcggtgatggaccatcttcatcatcacaacgtgctggagtgcaatctgcatgggcagggaatacgggtcaagtat

SEQ ID NO: 63081 - DNA, 310 bp, Glycine max
  Clone ID: PAT_MRT3847_27977C.1
ggcttagccttgtttataattatagtaaacaatagtttgttttatgattctgatcagggatggatctgcattatagtgtctgcacccacaagatttttatttcttattattatatatatatatatatatatatatatatatatatatatatatatatatataaattgtgtccataatttaaaatatagtttaaaaaattaaactataatacaagtattccccacaacttaaaatttatggatcctgtcactgattctgatagctctttaagttatgattgcaatttaatttgttaattgttcaagtgatt

SEQ ID NO: 63082 - DNA, 206 bp, Glycine max
  Clone ID: PAT_MRT3847_27978C.1
aagccaaaccaatcaaaatttttttacaaactttttttttggaaatccatgtcctttttttggggggggacaaaatcatcccatatcttttttttaacttaaacttgtgttaggaattaattgaagtaaaactgtttaaaaccccaatttcaaggttttaattttgttcttattgggccccttaatatccccaccatgtggggaat

SEQ ID NO: 63083 - DNA, 103 bp, Glycine max
  Clone ID: PAT_MRT3847_27979C.1
ggctcgagctctctaaaagcatgtgctacagccggacttactcctaacttggcagttgcgagatgccccgtgaatcacgatcccactctaccggcgaactgcc

SEQ ID NO: 63084 - DNA, 612 bp, Glycine max
  Clone ID: PAT_MRT3847_2797C.1
ggctcgagctgcattgcaccacaataataacaatattaatagtgctgtagtcatggcaaccaaagctaaaggcaaggagctgccaaatagcaccggtaagatggtgcagattataggcgagattgttaatatgctcatcaccgcccacaaagagggcaagtcgatcaatctgtctaaaattaaaatcgatgctgcgcgtgagaatggcttaccacgccaaccaaaaacgatcgatattattgcagctattccagaacaatataaaagcgctatattgccaaaaatcaaagctaaacctgtgcgaaccgcatccggtatcgcagtggttgcagtcatgtccaagccacatcgctgtcctcacattgcactcactggcaatgtgtgcatttattgcccaggaggtcccgacagtgatttcgaatacagcacgcagtcctacactggctacgagcccacatccatgcgcgccattcgagcgcgttacaatccctatttgcagacacgcaatcgtgtggatcaactgaagcgattgggtcactctacagacaaggtggagttcatcgtgatgggtggcacattcatgtccctcgcagcagactaccgagactactt

SEQ ID NO: 63085 - DNA, 290 bp, Glycine max
  Clone ID: PAT_MRT3847_27980C.1
cctaagggaaaaaaacaaactgcccattgatcccattaatgatgttaactctttttcacatacataatcaagggtttttatttttatttaaattgaaaaacttgattttctatcacgtaaattttaggttgcctgaccatccacatggaggggtacggaaagatcatgttcagtacacggacacatcaatctggtttaaaaagtttttcaattgagcccagaagagtggaattaatataatcctggggaccatgcgccggttagccaggaatcaaaaaaccaaacaacct

SEQ ID NO: 63086 - DNA, 120 bp, Glycine max
  Clone ID: PAT_MRT3847_27981C.1
atcatcttagcgctcatatgatacccgacatgcacaatgaggccgttgatatcgccgttcacccgtttgagaagtacaatgtgcagaaagacgtttcggagcagataaagaagctcccct

SEQ ID NO: 63087 - DNA, 275 bp, Glycine max
  Clone ID: PAT_MRT3847_27982C.1
atgactggaggcttgttgaaattgacagctgggacctgagaaaagtggaccatctgattgatggctcgaatgtgtcttataattccttgttatatcgtcattgaagtattaagtttatttatacaagcaaactattacatattctaacatgcccaaacctaggcaagtataaatgggttgattgaatgcatatgcatgggtttgacactcacggaaaattatgtgcctatctaacattattcttttccttattaaagtattaactctctttttta

SEQ ID NO: 63088 - DNA, 664 bp, Glycine max
  unsure (1)..(664): unsure at all n locations
  Clone ID: PAT_MRT3847_27983C.1
ctatgaaacgtcgcatggcaccgccgtaccgtagagnccttggnatncctnctagaagnncggccccgccctttggtggttttttnnttttttnnttttttttttntnnttttttttgttttgtttttttttnttttttttttttntttttttttttttttttttttttttttttttttttttttttttttaaaccatggaaaggggccaaaaaaaaggaaggggggcccaaatgggggggtttttaggaaaaaaaagacaaattggtggttttctaaaaaaaagttttttttaaaaaaatttgacaaaaaaaggcgaagggcccccgggggggggctaacccggtctaaccaaaattccctcaaaaaaacggaaaaaaaaccccccgaggggggggaaatccctttcggaaattaccggccccctttaaggaaggggggggacccccccaaggtgggggggaaaggaccaaaaaggggaccaaaaaaattttggacaggacctttgcccggaaggggggcccgcccgaaaaagcctaaccaggcaaccatggccaaggggccattttttatttttttaaccctcagctcttaaaaagcttcaggaccgggggacaaattcaagggaacaaaccaagcccccccgggaaaatttatatcccccg

SEQ ID NO: 63089 - DNA, 464 bp, Glycine max
  Clone ID: PAT_MRT3847_27984C.1
atgcacgcgtgcgtcgggtacggctgcgagtaagactacggctgcgagaagacgacagaagggtcagttgataattatttgctttaatattcttccttttcctttatttttatttttattttaggtcattttctatacacatgtcaagatggtagaagatcagcttattgcgtttttagccaaccaactttacaggggaaaataaggcagcgcatgaatattcttttggatttgcaaattttgtacttcactttcgagagatatgtttggtttctttataatgcattattgcaccagtaggtttcttcattagaataacaatgtaacagatcaaagcttcgtaattttgttttacattttcaaatataccatttttccaaatatatattataattcattgtccatcacctatggatttttttaatgtacttcggcaaacttaatttagaaaacgtaattttaaa

SEQ ID NO: 63090 - DNA, 466 bp, Glycine max
  Clone ID: PAT_MRT3847_27985C.1
aaagtagaaaaccgttcatggaaaacgatgccaacatctaacttcatcatcaagagtggcttacatactttgttacgactaacgaccgaacggggtcatcttgaatattacaactgactaaaggaccacttgattcacttaggacgggatacttaagttacttcatgacctccaaaatgtaaaactccagcatgttgctcacagactgaacgatctagggcttcattttgtccaacttgaacatgtaaacccacccaacacacacttgataaggtgaactggaaacaatttttcgattgaaaaataatactccctttggacctttaaccacttttaacccagatagcttatgaagcgatgtttatgcttaacatcccccataaacgcaggcattttgttttttacatggccaactatcacttcttgaaagttaacaggtatccactctaaacaaactcgcagaccc

SEQ ID NO: 63091 - DNA, 322 bp, Glycine max
  Clone ID: PAT_MRT3847_27986C.1
gggttttcttgtggattttctttcacatgctgccttagttggatttatggcaggcgctgccatcattattggtcttcagcagctcaaagggttgctggggcttagtcactttacctccaaaacagatgtagtatcagtgttggcatctgtttataagtcactacataatcaaattgcccctggacaaaaatggaaccctctgaattttgtcctgggatgttcattcttgattttcattctaattacccgatttattggcagaagaaatagaaagcttttctggttgcctgctatttctcctcttctctcagttatactatca

SEQ ID NO: 63092 - DNA, 980 bp, Glycine max
  unsure (1)..(980): unsure at all n locations
  Clone ID: PAT_MRT3847_27987C.1
agagggaaaaaatggagaacttaataaaagagattttaaaaaagcacttcccaaaccaaaccccgtcccgatcaactaaacgacaccgtagttcagcagctgttctcgcttaaataaccagaaaacgacacgtcgtttctgtcttcaccttcaccttcactcgcctcaattgcacattgataaaaccgtctgttcctcccattcccacttccaagccaaacgaactaaactcaccggcgatgttgccggagattccaccggctccaccatcgcaacagtaaccgatcctccgccggaaccatcacattaaccacaatgtcgtcttcaccgcagaacataaaacagagagtcttcacatgcctgacaaaactctctgaccgcgacacgcagtccctcgccgccgcggaactcgagtccatcgctcgtaacctcgacgcaaccaccttgccggcgttcctctcgtgcatgtactccaccgatgcctccgacaaaccaccggtgcgcaagcagtgcgtacacctgctagggttcctcgcgcagacgcacggcaacatgctcgcgccgtacctgtcgaagatcctcggcagcgtcgtgcggcggctccgtgacgtggactcgtcggtgcgatccgcgtgcgtgaattccattgcggcattgtcgggccacgtcagcaagcaaccgctgaattcgtttctgaagccgttggcggaggcgctgttcacggagcaggaccagaacgcgcaggccagcgcggcgctgtgtctcgcctctgcgatcgacggagctccggatcctgacccggccaggctggcgaagctcctgccgaggttcgagaagctgctgaagcgcgacggtttcaaggcgaagccagcgctgttgacgctcgtcgaaagcgtcgtcgccgccggcggcgcgtccggccacgctcagttaaagagttnggttccctgcttgggtggaggcgttgagcaacgacgatt

SEQ ID NO: 63093 - DNA, 255 bp, Glycine max
  Clone ID: PAT_MRT3847_27988C.1
aacagcaacggttctgaactttttgctgcatgttagcgcacaaagtaagcaccacattcctgggaattgctcttttcaatataggtttgtgaaccttataaaggtcttgtaatgtgatgtgcttattgaccaaatgaaacattctggccttcgagaattcttattgacaaacccatacagtctaacaaattttgatattctcttgggagtctctaatgaatttgaaactcattgtaatactcttattcaatcttt

SEQ ID NO: 63094 - DNA, 131 bp, Glycine max
  Clone ID: PAT_MRT3847_27989C.1
gatactcctctcatgcatctacagtattcacatctccatttccagattcatctgacatcattacaatacttgattcctctggaacggtcggggtctcttgtgacttctgagtcttgcattgtcatcttctt

SEQ ID NO: 63095 - DNA, 327 bp, Glycine max
  Clone ID: PAT_MRT3847_2798C.1
gttaacacaaacatatgttgttgaggatatttaaacaaacgttcggtttgccccgaccaaggacccatgaatcatttgtccaaccaaagtgtgtgcttattttgtgtacaaccgcacctttcaagcgcagttatacacgaaactatattgtatgatatgatccaacgcattaaacctggcagggttcatccctgcctcctggctcccgttacatatgctaatcctgggacttgggggtggtctagtgtgtcattgttgtcacgcgtagatacatatcgcgcactacctgtgtgactgggatgaaccaggtgtgaaacttatggacgc

SEQ ID NO: 63096 - DNA, 359 bp, Glycine max
  Clone ID: PAT_MRT3847_27990C.1
aaaaatccgaaaaacggccgcaaatttaaagggtttgtgaaatccaaaacggcggattatagttttggaaactgaactggttttgctggtttctgaagaatgcttttgttgggggcttactaatcaatcatgatcactaatcagtccttaagaaaaacataaacttgatgctggtttctgatgaatggtatgaattgtggtttttcttgatctttctggcttcctgtttgatgtgttccctctaatttggtctatgatggatgaaatggaattgtttcaaagaaaaattgtaaaatgggatggcacaccatccttttgaatataaaaatgtgagaaccttttgataaccagccttaaca

SEQ ID NO: 63097 - DNA, 1488 bp, Glycine max
  Clone ID: PAT_MRT3847_27991C.1
tcattcaaacctttctctatacacacacacacacacactaagaataatggcttctatcctccactactttttagccctctctctttctttctctttccttttcttcttatccgactccgtccccattccccaacaccacactaaccctacaaaacctataaaccttctggttctacccgttcaaaatgatgcttccacagggctccattgggccaacctccaaaaaaggacccctctaatgcaagtaccagtcctggtggacctcaatggaaaccacttgtgggttaactgtgagcaacactactcatccaaaacataccaagcacccttctgccactccacccaatgctccagagccaacactcaccaatgcctcagttgcccagcggcatcaaggccagggtgccacaaaaacacgtgtggcctcatgtccaccaaccccatcacccaacaaaccggtttgggtgaactaggccaagatgtgcttgcaatccacgccactcaaggctccacccaacaacttggtccattggtcacagtccctcagttcctcttttcttgtgcaccttccttccttcttcaaaagggtctccctagaaacattcaaggagtggctgggttaggccatgcaccaatttctcttccaaaccaacttgcctcccactttggcctacaacaccaattcaccacttgcctctctcgctaccctacctcaaagggtgctctaatcttcggggatgcaccaaacaacatgcaacaatttcacaaccaagatattttccacgatttggctttcaccccattaaccgtcacaccacaaggagaatacaacgtgagagtcagctccataagaatcaaccagcacagtgtgttcccaccgaacaagatatcatcaaccatcgtagggtcttctggaggaacaatgattagcacctcaactcctcacatggttctccagcaatctttgtatcaggctttcactcaggtgtttgctcagcagctggaaaagcaagcacaggtgaaatctgtggcaccgtttgggctatgcttcaactccaacaagatcaatgcatatcctagcgtggaccttgtgatggacaagcctaatggtcctgtttggagaatctctggtgaggacttgatggtgcaggcacaacctggggtcacgtgtttgggtgttatgaatggaggaatgcaacctagagctgaagttaccttagggacacgccagttggaagagaagctgatggtattcgatcttgcaaggtcaagggtcgggtttagcacgtcatcactgcactcgcatggagtcaaatgtggtgacctcttcaactttgccaatgcatgagccatgatcgagagagtttttatatatttgcttatttataattaagcaagcatctactacttgttatggtaaagtaatgtaagaataaagactttgaacaatataataatatgaaggcttctctggcgttgttcaatgag

SEQ ID NO: 63098 - DNA, 561 bp, Glycine max
  Clone ID: PAT_MRT3847_27992C.1
cccacgcgttcgcctatgtcgtccgaaaaaaaaaaaaaaaaaaaaaaaaaaaaaaaaaaaaaaaaaaaaaaaaaaaaaaaaaaaaaaaaaaaaaaaaaaaaaaaaaaaaaaaaaaaaaaaaaaaaaaaaaaaaaaaaaaaaaaaaaaaaaaggggggggccgtttaaaagaaccaaagttaacgaaccggggcttgcaaggaaaaagttttttaaaagggcaacaaaaataaaattaaggggccggggttaaaaaaggtgggaacgggaaaaacccggggttaaccaaataaaaccgcttggaagaaaatccccttttgcccagtgggggaaaaaaaaaaaaggccagaacggatggcctttccaaaaagtggccaacccgaaaggggaaagggaaccccccttgaaggggcaaaaaaacgggggggggggggggggtacccccaagggggacctaaaaatttgcaagggcccaagcgcccggtttttgggttaaatcccttacttttttgaacaggtacgagggttttcccggaaaagcttataaatggggggccccttt

SEQ ID NO: 63099 - DNA, 148 bp, Glycine max
  Clone ID: PAT_MRT3847_27993C.1
tcgctcctcaacccacgcgtcgcgctcacacatccggagaaaagttagggttcacatcgatttctcttccttcttcttgcggagtttcatcaatgcatcaatcatccattcattattcatcatgtcgatcacgacacaaaatcacttc

SEQ ID NO: 63100 - DNA, 409 bp, Glycine max
  Clone ID: PAT_MRT3847_27994C.1
tcctctatagcggtcgccctttttttttttttttttgaagcaatccaaaatctgggttgatttaattgcgggggctaatggaaaatagaacttgaacagcagttcaactcgataccccatccagctccaggactgtaccatcgctggagccaaagacaggtctttctccatcaacgacctcgttttcacacatagactgctttcacagggcatcagcacgtacctgtcacccaagaacttagttcaagccctgtggatccttctacacttttggccaatactgtcacctttcgcagtcaaggactttaggtctgctacgcgattggcagaggaaagctccctctccacttcaagaaatgtggctacagaagtatggaattggggagcatgattctagggacttcaacta

SEQ ID NO: 63101 - DNA, 844 bp, Glycine max
  Clone ID: PAT_MRT3847_27995C.1
tacggctgcgagaagacgacagaaggggcccccaagattcaaaatctgaaaacacacacataattcccgacaccatcttcaactctcacaaaaaaaacatcattaggccttttgagttttgtcacaaaagccgcattcgttgtcgagaaacaccttcttcatctaacttgaacactcgagaatggtgtactcctactacacccccacgtactactcaaccctccatgactcactcacctctctgtgcaagaccattcttcctttcagcttcaagaaacgaccgttacctgcggcggaacacaaattgtcgaaactgcaatccgacaaccttaaatggcagcaagactctttccaccaggtgctgaacttgatgggtctccacaaagaaggcatcgtcgctgaatctgaagtttcggccttcagaacccacttgctagacaccctcattgcttctcctccagaacaagaacaccccgttatattaagagataagcttctgtttctccaggaacttctctatgccaagtgcatttctgaagaagagtaccattcttctaagaggccattgctccggagactggcagcacaaggggctcagattgaagctagggatgtgatcgtggcagggcctaaggactcaaaagagaattcagaggaagagtggtcagtgattgatttgaaggatgagaagtgctcggtgaacaaagagaatttgggtagtaagagcaagtccaatcagggatcagccatgaagcagattaaaggagcagccttggtatttggctttggcaaaggtgggaaaaatggggaagaaaagagcatgtttgactcaccttctttgtct

SEQ ID NO: 63102 - DNA, 627 bp, Glycine max
  Clone ID: PAT_MRT3847_27996C.1
gtataggataacatgttatcgatataaaatatgacataataaatgttttgtctcataatttagcaccaaaacaatacgataacatgtggaggaattcctgtatggttgaagtacattcctgcataagcttcagaatggataatgggtctttcaagggtggacttacaattccattgacatggtctcttctattgactcaagtctggaataatctgacattggcggttttcattcttaggcggcgatgcaaggtttcacgcataaaattttccagatgatgaagaacgagaagttgtttcaatctcatggtggtccaatcaatctctcttaggtatgcaattcctttcattgtatggcataattgaagaaatactaaaaaaaaggaacaagaagatgatctggaattcacgggctttcataccaatggaatcactactagaagagaaagtctcgatctttatttgtttttcctctacctctcgtgttttatagattgagaatgagtacggaccatatagtataggagctgctggccgtgcatatcgtaactgggcttcaactgcaagtatggctgtttggttggggttcaggaatgccatgggtgatgtgcaaggaaaatgatgcccc

SEQ ID NO: 63103 - DNA, 589 bp, Glycine max
  unsure (1)..(589): unsure at all n locations
  Clone ID: PAT_MRT3847_27997C.1
agggcagcaaaaataatatatattgatatatagaaaaagtaccagaggtactatagatacaagagtatgtaagtaaagctagtaaatcctcatatcaggctgagtacagactgataggagattactagcctactataaagctacaacgattacagaaccacagctggtgtcatcctagtttactgaaaaccagctggaagattgcttttaatgaatctaatacaactttttgttccagttgcatgcatttgttgaatatgaatctgttgagctggctgaaagagctgtaagtaccaatactttgctgagttggcatggtattatttaaggttgctttttaactagatgacatatgcggctgtgtagtgatgagattgaaaaccattgacaggttgctgagctgaatgaagagggaaactggcggagtggcctccgggttcgcctgatgcttanacgcatggtatacattaaaactttctttcctccattacatgtatgcaagtgtcccgaataatgttttgtttgtccaatcaaatgaaaatttcaagggtattttttgggcattttcaattattgctggtttggcttt

SEQ ID NO: 63104 - DNA, 314 bp, Glycine max
  Clone ID: PAT_MRT3847_27998C.1
gacaatagtctctttgatgtcacccttcatatggatcgccctcctgaatgagctactgacttatggataacaccgtggagcgagacctttgccggcccaggggctgcattacagagcccgcaattgctcaactatcttcctctgcaggatgaggcgcattgacgtcagctcctcagatagctacgcagctacagctcacagaaggcgagaggagccacactccggcctaagctatgcgcatatccttgcctactaacacaaccgctaggatgctgcttggggataggaaatcctttgccgaatctggaatggat

SEQ ID NO: 63105 - DNA, 382 bp, Glycine max
  Clone ID: PAT_MRT3847_27999C.1
ggggggttgttttttaaatatttgcgctgcagctccccccatgcggacttctgtataaaaaatttgatttttcgcgcgaaaattaaggcgaaacaagaaacaaagaagggggggggaaatacaacccaaggggggtaacaaaaaatgaaaagaggggttggggggggaacgacccacacgggggggggaataccaatggtgccgggtgtgccccttaaataccagctccgccggggggggttttttgggccttaagaaaagaagaaaaggcccccccaccttcgggggggggggcgcacagggggacctttttttggtgggggacccaccaaaacgaccaaattgtgccccctccccccccccaaaaaaaaaaattggaagg

SEQ ID NO: 63106 - DNA, 368 bp, Glycine max
  Clone ID: PAT_MRT3847_2799C.1
atgggattgttgcttatggcttgtaatcactcaaccttgctttcaatgacttctccaactctcaattctcatttatctttgctgagtttgtgagcctcacacacctcaacttgtcctcttctcactttaaaggtgaaattagaatcacttgatctctcttttaattacaccagttaaagtggaaagaaagcagttggatgagttttaaggcagcttgtcttggatgaaacagatatgtcttcaatttcaatagggatcaggccacttaaattggcttcctctttgggtacctctaagtttggcaggacctggccttaaggggaagcttgacagatgacatcctctgtttaccaaatcttcaacaccta

SEQ ID NO: 63107 - DNA, 623 bp, Glycine max
  Clone ID: PAT_MRT3847_279C.1
ccacgcgtccggagcacccggtttgcatttggctacaaaaaccataactaacaaaacaaactccctcattccagaaatccaagttacaagtcgaacaaattcaaattcaaattcaccaatcggagccagatctcggagcaccaccccttctctcttgggtttcggagaggggaaaggggaagaaatcagatataaaaactcttggattcgccatcgccagaagaaatgtctcgaatcttcgagtacttcgtggtgtgcgggatcggacccgagattcgaaccatggacggaaacaaagggtaccatggcactggttgcttgtaccttccttctcttctcgaccagtatcctccccccaatcacactctctacccttctccgccgcctcagctttccacatgtgttctacccgccggcgttgaattttattcctcaggatttgattccaatgatcctgcctcgtttccgcggagctatccgattgctttgaccgagggtgatggatcataaatttatgtcagctgcatttctttccgggatccagtttgtgaggatattgcagaagcctaccggatttaggcaaattcatatgcctacaaaggcatctgtctggtttcacgctt

SEQ ID NO: 63108 - DNA, 323 bp, Glycine max
  Clone ID: PAT_MRT3847_27C.1
tttatattggagtaagttcccttgtaggtgctgtaccggttatgagagcaaaggctctaggaattgtcataaagttaacactggctgggagaataagtaatttaccctcagacttgggcattctctctatttggactcgtttgtgtccgtgcccggatgaattatttatataacgcactggatacttgtaatacggcagaggggtcggctatatattatgttatgaccacaacatttaccattgtggctcccgttatcttgtgcaaggactgggatgcacaatgtccagcacaagatatcacagagatatgtgggggtgtgac

SEQ ID NO: 63109 - DNA, 130 bp, Glycine max
  Clone ID: PAT_MRT3847_28000C.1
gcatgcttaccctctactttcatgggaatacttgcgtaagcacggtcctgacctatttgcatgttctttcacatggttccttgtggacattgcggtctatagccaagtattggtccatagtgagctatac

SEQ ID NO: 63110 - DNA, 458 bp, Glycine max
  Clone ID: PAT_MRT3847_28001C.1
gggggacaatttcaccccctttaattacattgaatggaaagtctccaacgctccattaactcaaccaaacccctacaaccaacttaaaaaccttcccccccatcggaattaaaactaaaatctaacccctaatatatataacccatttttactaataaattcaccttaattactaaaaataaccttggacaacatttatgggtgaagggtagtttttcccaccaattaaattaccgccccaaatagaggcgagttttacctgaaataaaaagaaatgggatggaaaaaaaaaaaaaaaaccgggtttttttttaaaaatggagggggaaaggaaccccgggaaggcttgaaattatgagggagccttaacaagcgtaaaaacccaccagttccttgaatgaccccggttgggggtccgcgttatcaagcatccaaagcaagggttccaaaaggacaac

SEQ ID NO: 63111 - DNA, 272 bp, Glycine max
  Clone ID: PAT_MRT3847_28002C.1
ttcctttttttatacttttccttttccacttttcaattatctttgtgtgattgttcagtccttcaacctctatcctccccctccaagtggggaatctactgctaatagcaagaatgagtctccttcttttccgtcgggggcatcacctttgttcttggttttaccccattcctatttcactcttttatattattattttgctttccatttcatccaccttttcttatgcgctcaacaagctcatggagcacaccaaagaggcttttaagggg

SEQ ID NO: 63112 - DNA, 424 bp, Glycine max
  Clone ID: PAT_MRT3847_28003C.1
attgattaaccatttaaaattttaatcattccttccaatggctccaacatataacccaatttcacctacctaaaaagaaagggggaaacctatccatgattcatcttgatcacctatccactgcaaaaattatgcaatgtttttttgctcgaacttattatcaacaattttggctgttttcaactgtttgttagtcccctagtaaacattgaatcttggagaatatggaaaactctaaataaacgtatataggatggacctttgttccagtaggagctgctgcaaatctttagttttatgttgtagcctttcaatggttcctcttcaaactggtgtagtttttactggaaccatgagcatggaactatctctgtttttttcttcagtacctctggtacttttataaatatattatttttgctga

SEQ ID NO: 63113 - DNA, 908 bp, Glycine max
  Clone ID: PAT_MRT3847_28004C.1
tttttgtttagataaaaaaaaaaaatcaattttatatctttaatcgatgcacttaacaactgacttttgaaactttttctaaataccagtggctatctgttctttacacaggtgattgatgtacccaagacgtaaggaacttagtaacagactcaaaaaaaaaaaaaaggaataaacagagaacacttttcccctaccaatcacttactgagccacaaaggagcacatataagtaactagcaataaacagacatgcatggtcaacgaaaggccaagaaattaaggaacaagatcatgaagctaagtcattgacaaggccatgtatctttatgtccaatacttcggaacaaatctgccccatggtgtgataaaaagacaagagatcagacaactgttccaccgtcattttccccatcagatttctagccattttttctctttcctcatttagcttcagtctctctatgtaggaccctgcattcctaaccgttgcacccatttgttttaatctattctcttgttgcacactcaaagctgtgttggactcaagaaattctgctccagcttcgagttcagtctgtttggaggaattagttccacggccagtgttgtagaggtttttggcaagtgaaaaactacgcacaataatcttccttttgatttccatttccttattaagcttaatgggcttttggacggatgctaaattgttcaacttcttctggtaagcaacaactgcttttacaaattccttataagcaaaggggcatccagggtaatcaaactcatccgaatcaggcttcctcatacgctcagggtgaaactgtaatcccataatgaacttaccctcttctggattataagcatccggctcgtggaacccttcaatcaaaccatcaggtgcaaac

SEQ ID NO: 63114 - DNA, 323 bp, Glycine max
  Clone ID: PAT_MRT3847_28005C.1
ctgatctggctacataagctcgagccgcatctattcgactggcctagaaccagctgcacataacaacatacttgtcctgtataatgcataacgcacacacagcggagactgctgctggccatatacacaaaataacactctatagcaaatacacagcccaaacctctcacattgctacagcctcatgaggtagaaaatcctacgtccctgcgattacaataaatataaatacaaatacttgcaccttgtctggaccatgcaaggaacacatccactacttaacgatcatctacagatacgacaattaccaataagatgaatga

SEQ ID NO: 63115 - DNA, 375 bp, Glycine max
  Clone ID: PAT_MRT3847_28006C.1
agctcgagctcctcgaggttttagatctctatttctaatcactagcgaaaacaagtagagagaggggtgtatgtttctacccaccgcttgcgcgacacactggatcaattccttcaacattttcagctaaacctactgccctttctctgtgtatgtcatgaacttattctctatcctcggagccgattgcagtgtcatcggacataacactaaatcatgggcaaactaacaccatgacgtattcttggtgctgaccgtcacgagactcactcgtcatatcctgatagggtgataaaacctcactttgttgctacaagaaatgagtacttcctcctattggatgacaccaaacgctgattgcaacttctctcactg

SEQ ID NO: 63116 - DNA, 270 bp, Glycine max
  Clone ID: PAT_MRT3847_28007C.1
gttggtcttgagtgaaagccaatgctctccaagcttggaaaacgggatagaagtattgtacaagctaatatttgatggggtatctttctgagcgtgttcagtccaatccaagtggaactgggggggcgatttttctttccggcgatacttaaaaatgggtgcagccctttacaaataaatgaaacctttaccacatcccaaagtcctgtgtccctgccttcctgtgttaagattcatgctgcctccaaatactttgcgggtttgcgacat

SEQ ID NO: 63117 - DNA, 503 bp, Glycine max
  Clone ID: PAT_MRT3847_28008C.1
gccgctaatttgactcactataggggatgatattgctttgattgctgcaattacacatgttgcagatctctggatagtttatacccaaatgcgattttcacgtcgttatactcttgaacaaatagaagaacgttggtatgaacttttatatgatgaagaagccagtttaattgcaagaaaaagaatggaacaaatggacaaacaaaaaattatttctattcaagaaagaattccattctctttaagcgaagaaaatttattaagacaaataccttcgactgatcctcaacctatttctgcaattctggcaaaaattttggaacaaaatagagacactacttttcattatgctagaacagttaaaatattggaagaacattggagagaattaagactttatggacttttaaatgatcaacgaacaccacaacaattaaatgctttacaagatgaagataattttacttttgatctctactcattagcttcttcaactgatgtta

SEQ ID NO: 63118 - DNA, 583 bp, Glycine max
  Clone ID: PAT_MRT3847_28009C.1
caaaaattcccaatcctctggctctgtcaatgagtcaattcaggtggaaaaggatatggaggaagtgcagataaaaccaaatataggaatccgccttagtgatctgaagcttgtgcttggaccagagttgaagatagtttattctttcatccttaatttttctgttagtggagagcttgagttgaatggtcttgcccatcccaaatgcataaaacctaggggcacactggcatttgagaatggagaagttgatctagtcgcaacgcaggtgaggttaaaacgggagcatctcaatgttgcaaggtttgaacctgataatggactagatcctatgctagatttaaccttggttggatctgagaggcaatatagaattcatcatcgagctagcaattggcaggagtttgtagaacaggatacactgtcaccaattgaggttgccagaagacttgatagtcagttagcagaatccattttggaaaacaatggtcatgttgcatttgaaaaggttgtaactgctactcttgaaaaactaatgccacgaatagaagggaaaggagagtttggcctggctaagtggaag

SEQ ID NO: 63119 - DNA, 166 bp, Glycine max
  Clone ID: PAT_MRT3847_2800C.1
tccacgcgtgagtaacacgatgagaaaggactgcgtgaacgttgtactcataatgcgtaacttacagtagactatagtattgttgttgagagaaactgtttctttgaaagtttcaattgtcaaggttcaatccattcccctatctactttctttctcttagccttt

SEQ ID NO: 63120 - DNA, 539 bp, Glycine max
  Clone ID: PAT_MRT3847_28010C.1
cctcgtgccgggatgttgagcataagaggggacgatatgaacactataatatccttccattatatgctgttggtgttaaaccagcaatcatggaacttcccgagatcaaagcagcaattgctgctttatgtaacgtggataatcttccaatgcccataattcatgcaagacctgacgattctacagtgcctatggagaggcttaaagaagtgaatgatatacttgattggattgcctttgtttttgggtttcagaaaggaaatgtggcaaatcaaagggagcaccttatactattacttgccaacatgaatataggggacagggctgaatcatctcatcagctccactcagaaactgtagaaaagttgaaggctacaattttaaaaaattatgagtcatggtgtcattatgtgcattgtgaagacaatcttaggtttctagaagattacgacatgcaacagatagagctgatttatattgcactttatcttctaatatggggagaagcttcaaatattcgctttatgcctgaatgtcta

SEQ ID NO: 63121 - DNA, 421 bp, Glycine max
  Clone ID: PAT_MRT3847_28011C.1
cggctcgagtacggctgcgagaagacgacagaagggacctcatcgatgatgtatcacaggatgctctatcagcttgtggttctcttcttgaagtttctatccaaaaggcagctatatgtcgcacagccatgcaccgcggtgcagcgcttgctgcaatgtcatatttatcttgtaagaaaaaattatattgcttttggtgttgtcgtcttatttgttttaaatgcaaaactcttttcttccgtggagggggaaggatacgaaaattaaactattaaagtataaaaatataagaaactgaagaatatctcatctatgaaaatcatgtagccaaacaaacttctgctataaattgctgctaaattctagaatagtgatgttaatatttatttgactttgtagttgccttctatttagatgtaca

SEQ ID NO: 63122 - DNA, 387 bp, Glycine max
  Clone ID: PAT_MRT3847_28012C.1
tcggtctcgcgggcgcccacgcgatcggctaactgtctctctgtgtctcgggagagcgagcgacaaacagagaagtagaggctatgaccgatgccggcaccgctgaccctgaggagcgcctgacccgcacttcgatggcgactgcaggagaccatgaggaccggaggcagcacggagtgctgtcccagccggtggacgagccccggcacacaaggagaggccatgggggcaccacttcaataaggcccttccgagcgccgggccagtccatggagggggaggactgtgagctcgactaggacgacgaccagcttacgcgatataattatacgtggagcaaggcaagacgccgagacggatctcaccatcgaaacgatgtgcccacca

SEQ ID NO: 63123 - DNA, 747 bp, Glycine max
  Clone ID: PAT_MRT3847_28013C.1
cccacgcgccatccaacattcattctcgaaccctctccaaactgcaccccttctcgaataatagccctcgctgcctctgtggcagtggaggtggtggagatgcatatggtgcatttttgtcggtgtttccttttggttcaatcatggtggagcatgaatattatgtaataagttgaaagattgctgggaatgaaccgttctttttcttaagggcgaattctcttcaaaagggcaacttccatcctttggcattttccaattcctcgaactcacttcactttgtgtgtgaatcaagttctcaggggaactttggcaatatatatgtaatatccctatactatgtactattaattgtactctttgttatcttgtactttgtgtttaaattagaattgcattatatatatatatatatatatatatatatatatatatatatatgtacactatcaagtatcaatatgtatgatatgatgctgcctaatatatagtataataggcagccaataaatgttggtttttagaggacgggtggcgcgggggagggggaggcgggcgggggggacggggggggggagggggggatggtagtagggggagagggcgcgcgttgtaaaaaggcagggtggtggcggcgggctgcagagaggtgggggtgtgttgggccggaaggagaagggatgcgcgccgggttggaaggcggaggtgagggagctcgcgtggccaagtgtgtcggcttggacgaga

SEQ ID NO: 63124 - DNA, 491 bp, Glycine max
  Clone ID: PAT_MRT3847_28014C.1
tacggctgcgagagacgacagaagggggctcaagtccaagacataagcataacccggaccttgaaaccggcaacttgagttgaatcacagcgcagtatcacgtctccaccgatcatcatcttcttcgttcttctttcgaggagcgaccggttctgatcaaggagtttcaggttatcgtcgaaaatgttgtttcagattcctcgcctcaccaactctctcagagatcccttcgacgtggaccagtactatcttcatcgcaaaaccattctccacaaccaaaaacctagcaattccgcaagttcactcgatgaatcggaactggcgcggaagattgtgcacgggtgggaaaaagcttcgtcggacgtgcggcaggcctacaagcagtttataggagcgggggtggacttggttgacggagaaacgcgctccgaggagttccacgaggtggcgctgactatgtaccggctatttggcaggccaatggaggagga

SEQ ID NO: 63125 - DNA, 256 bp, Glycine max
  Clone ID: PAT_MRT3847_28015C.1
gagagagcgagagagagagagagagagagagagagagagagagaatatggccagtgcacacggtcttgctccaattttcatattgggttgtgtgttttccgctgtctcactatcataaatgaagaggcaccctttgatgtttcgtgtatcacactgtggattttccctcatattctatggtgagctatctgccagctcctgtaagttcataaacccttcctgtgtcagtgcaaaacacggttcattaaggtgtttt

SEQ ID NO: 63126 - DNA, 682 bp, Glycine max
  unsure (1)..(682): unsure at all n locations
  Clone ID: PAT_MRT3847_28016C.1
gcatggcaccgccgtaccgtaagcctcggnaattcggcttcgagaagaaaacgacagaaggggaagtcacactattacaaaatgaaccaccttcattccttagcttacactaccaccactaacctctgtggctcttccctaggttgggattatcacaaccttggagttctcaacgcggacaaaatgtctttaatgccagctatggagggaagtactacaccaccatcactatcatcacctcaacactctgatttctcaactgggtatctcgaagatgctttgattgaatcatgtgagcgttccaaacgtagacgtgtgttaccatgtgctgctgatgaacatagcaagagtttcattgatgaccttgagcagagtttctggaatttcaaccccttatggaaccaaccagtagagaacttcaacttctactgcatgaaccagatagaaaggttttgtggattttcagatgagcatataagcacatcaaggagcgaggaagcaaacattcttctagcagacactaaaacaccggaagagacaatatcagcctctgaatctttaaattcatcctcatcttcatacaaacaaccggtgacatgcaaaaccacagaccccactgttgccccaacaggtactttattctgtctctctctttctaatatgataatatatagtgaaaaac

SEQ ID NO: 63127 - DNA, 417 bp, Glycine max
  Clone ID: PAT_MRT3847_28017C.1
atgacatcactcattgcaaataatacctatgtctcatcttacaagtcccaacatgaacaccattggaactgtgaaagaaccaccgtctgccaaagaattatacttctcgtggaccaatggactaacttacacaggagagaatatggatgcacatgactcctatatgagttagcctttttacacttagaagacactgcctaaagcgaaccctagaaagctgcccaaggctagaataggacgaaacctgcgttggcttaatgctaccgcacatgtaacctctgacaattttctaagctaactaacactttacccctgctagctgaagtgaaacacccaccatactatgctctacgctttgctgcgacctccttaaacctatgagcgagaggatctttgcagacctccgggcctggcagt

SEQ ID NO: 63128 - DNA, 256 bp, Glycine max
  Clone ID: PAT_MRT3847_28018C.1
gagtactctgaagtaactttgcaatttgctctagttctttgcttttgaggggatatttggattgtttatgattgaatttttcttcttaggagtttccttaagtaccacaagcagacaaaggacgtcgttactgtagaaaagtgaagtagaaattaatgcagaggaaaaaaaagaaagagccttactgtgcatagcttctgtgtgtctttggggctgtggctaagtagtaatttttactttcatgggtgaatttctt

SEQ ID NO: 63129 - DNA, 1861 bp, Glycine max
  Clone ID: PAT_MRT3847_28019C.1
cccacgcgtccgtacgagaagacgacagaagggtagcctctgtggttcttccctaggttgggattatcacaaccttggagttctcaacgtggacaaaatgtctttaagtactatactatacttttgtttctctttatatttctacctataatgcatttgttacctccttggataagatattaatgcttataactagctaaagtgttgcaatgcaatgattggtggtgatattcaatatgcagtgccagctatggagggaagtactacaccatcactctcatcacctcaacactctgatttctcaactgggtatctcgaagatgctttgattgaatcatgtgagcgttcaaaacgtagacgtgtgttgccatgtgctactgatgaacatagcaagagtttcattgatgaccttgagcaggtacaattaactatactatatatactctttgtttgaatatttattttctctttacttcaatttggtgtatatcttctcttcttgttcttggagtgagactgaatgtcatgtcttcactcttcagagtttctggaatttcaaccccttatggaaccaaccagtagagaacttcaacttctactgcatgaaccagatagaaaggttttgtggaatttcaggtatatatatattatatattactaatatatgtacttcttgttacatatgaattcatttacatgatatggtcaatttggttcaaaatgctattattgcaaacaaaacactgatacctttgtaattaatttattgagaaaaggggtcccaaagaaaaataaaagaataatgaaggaaaactagattgataactggtgatgattgtgctgttacttgtaccttctctttttttttaaattgtcatacatgatatatattttagatgagcatataagcacatcaaggagcgaggaagcaaacattcttctagcagacactaaaacaccggaagagacaatatcagcctctgaatctttaaattcatcctcatcttcatacaaacaaccggcgacatgcaaaaccacagaccccacagttgccccaacaggtactatattctttctctctcttctaaatatgataatatattgggaaaaacttccataggtgtttttggtatttttttcactccagtaatccgtgtaaaaaaggtttgtattaaaggtcaacacagattattgaggtgaaactccaattttctgatcagagaacaacatagaaaacatcaatcaaaactgtatctaagttttatcctgatatatatttgtttgtatgaatacattattaattaatgcttcttgtattgtatggtgttacaattaatgaacagaaaatgatgataccaggaacaagaaggtggtaacaagagtggtgtatccatttgcaatggtgaagccaggaggaagagaaggtgatgtaacattgaatgacataaatgagaggatcctaatgcctcccacaaggccagtgaggcatcctgtaggagactttgcatgtcggccatgcgtgtccgcagagggtccaggcctttcagggaaagcagtggtggcccttactagaattcacacacagggaggaagaggcaccatcactattatcagaaccaaaggctaagcaatgttaacattgagacagtgttatgtgttatgccccttattgctgtggcttggctagcacctaactagcttttacttgaagcagctttttgggcctgatttgctttgttttcatcagtccttcttccaattgtaaagatggaaagcgatatctatgtatgtgcatacaccttatataatacttgaaccttatgttaaaaaaaaaataaaagggcgtccaccgattagttgc

SEQ ID NO: 63130 - DNA, 223 bp, Glycine max
  Clone ID: PAT_MRT3847_2801C.1
attgttattgagggggggacttttagacagaacacgggggcaacaccgtggctaacaacatgaattaaggacagctacaggaaaggatgcgaaaaaggactatagagaccccattaagagcttcgttaaaatcttggaaaaacatttacatgtgtgaaacttgtaagaaaaagatttccacaaacataccaaaaagagtctttaattgaaaaaactggggcac

SEQ ID NO: 63131 - DNA, 498 bp, Glycine max
  Clone ID: PAT_MRT3847_28020C.1
ggcggatctatgtagatggcttacttgcaagcactgacatggcagctaagccaggacctgcgctaatggatctggcccagagctcagtttgattccgatctgtgacatcatctactgtttacgaagcgcctacagggagatagctgcagagacagtagcagacccaggaccattgactgctgaggcacggacaaagggggatggggctgattgataaggacccatagagcttcttgatgaactaggcgtatgacatcgactatcaggatggatctcgatctgatgatcgacgcggctgaccttgacgagctgaacattactgtctctcacaggggagaggacatactacctaccatctatgacaagttcgactagttgtatactcacagcttatggttagaatccgatatatgcattgcacactccatgatgtgcgccactgttataggaagaccggccttcgtagaagtactatgtgatgggagaatgctctagaac

SEQ ID NO: 63132 - DNA, 155 bp, Glycine max
  Clone ID: PAT_MRT3847_28021C.1
ctcgagccgctcttggccagctatagagaattcaggtggctgagtcacatagacctcttacatcaaggggaccatttaagaaagcacacttcacatcttgttggtgcattgtccaattctttaggctagaaattaccactactgttctaatagtc

SEQ ID NO: 63133 - DNA, 605 bp, Glycine max
  Clone ID: PAT_MRT3847_28022C.1
cttttcttttttttttttttttttttttttttttttttttttttttttttttttttttttttttttttttttttttttttttttttttttttttgtgtgtttttattatttaaatttaagggttttttttttaaaaccacaaaacaaagggggaggggggggaaaaaacacaggagagaggggaaagaaaaaattgacacagggggggggggcctctttattttttgggcgaaaaataccttataaatgtattttttataacaccaaaaaaggggggggaaaaaaaccccccggcagaggggggaaaacacagaaaaggtgggggaggcaggaaggaaaaaaaattatgagggaaaaccttttgagagcgcataagacaaaaaaaaaatagcgcgcacccaagaaaaaaaaaaaataatttttgagcggggaccgcaccacgaaaaacccataccgataccggggaggcggaagagatccccctaaagagagggaaaaaagagcccggggagaaaaagggaaaaacggacacctgtgcacaaaagatacggccgcaccgttacaaacaaaaaacggggcgggcccaaagagggaaaacacggggg

SEQ ID NO: 63134 - DNA, 310 bp, Glycine max
  Clone ID: PAT_MRT3847_28023C.1
gtccggaattcccgccttgagccagcgtccggctcttctaacttctgggttcagccttgatgatcccaacactttcggtaacaggattcacaggatgctgaagcttggactgagcattgatgaagatgctggtgaagcagatgctgacatgcctcctcttgaggacaccgatgcagacgctgagggtagcaagatggaagaagttgattaaatctgacttaattgcctgctacggtcctagaaacaatgatcggagaaacagcctttctactatgccttatgcccctttgaatgttcaaaattctggaac

SEQ ID NO: 63135 - DNA, 298 bp, Glycine max
  Clone ID: PAT_MRT3847_28024C.1
aatattatatattttttttattgaggcttgcttgcttcctcaccgagagtggggcttaccgtcaccgacgccgttggatgcttaagtgacggacgcgagctaatggaggttgagcttgacaactgtgtcggccgaacatacgcgggccctattcagcgatacccccaccgacgctgacaacgtaaaattcgaggacgactgtgtagatcttgccgtcgaggaaagcgtaggcgaagtctaacgagtggacagtggtgacacatcgccctttactgaggcggtgaatcgcccagacaca

SEQ ID NO: 63136 - DNA, 429 bp, Glycine max
  Clone ID: PAT_MRT3847_28025C.1
ttcatcactgctgcagccttaatcttagctggtttagttgcagagggaactacgcaagtgactgagttaaagcatctagatagaggatacgtcaatttacatggaaaactaaaaagtctaggtgcaaacatagaacgtggacatttccctaattacgctgtgatgcctggtgttcttattacagaagctttagcgcaaactggtgcagtagctatgttaaatagtgaagaaaataaagggaaaatagcattgtttgcaggcattgataagtgtcgcttcaaaaaacaagtcgtacctggagatacattaatgttggaagttgaaataactaaaataaaaggtcctattggtaagggttcggctaaagcgactgttgatggccaacttgcttgtagctgtgaacttacttttgctattcaagatgcttaa

SEQ ID NO: 63137 - DNA, 414 bp, Glycine max
  Clone ID: PAT_MRT3847_28026C.1
tttattttttttttttttttttttttttgtttttattttattatttatctttttttttgtaaactaaaaaagggggccccgcccctgaattttttttttttcaaaaacttttaaaaaatgttgtttttgatgctgcgggaagaatgagctgaagtggaacttgtgtacattgcgaggaatatggaagcttttcttaaccacttgggtgcttttgtggcatgacaatatgtatgttttcacctggggccgagttggccgtggtctaggggtaaggaaaacatgtctttctcttatcgggggtggaatgccgctcgttcttgagatcttggttaattataaattttattgcatggacaaacggcgtttttttttaagagagatgcacacaaaattgcctgagtaatatcgggtaaa

SEQ ID NO: 63138 - DNA, 275 bp, Glycine max
  Clone ID: PAT_MRT3847_28027C.1
ctcgagccgatctttcttcatagcatgtgaaaattaatctaaggatactatatagaatggagtggttccgcacatacttggtccaattggggagattaaagacaaagtgggattgatatttgtataggaggaattacttacaaatcggttaacgcaaatgcgacctgcaacaacaacattggttgatgggcgtacatattaggaggccatggtgcagtcatagctagtgtttacaataccaagtgagtttgtcattcgtgataaagatgcaacca

SEQ ID NO: 63139 - DNA, 1357 bp, Glycine max
  Clone ID: PAT_MRT3847_28028C.1
ttatgtatgagttactgaagtaataattggtgattgagttatctttctggcactctcctacttatgtttcaagatgatataattataagattgcttttcatgtactagtcaaggcattgattagtttggatccattcggcgaaatggaacttctaaagaaacattttcaggaatttatctcaggcctcatgtctctaccaataaaactaccaggaactaaactctatcaatctttgcaggcaaaaaagaaaatggtgaaattagtgaagagaattatcctagctaagagaagtagtggcttctgcaaagttccaaaagatgtggtggatgtccttcttagtgatgctaatgaaaaattaacggatgatttaatagcagataatattattgatatgatgattccaggggaggactcagtgccacttcttatgactctggctacaaaatatctatcggaatgtcctgctgctttgcaacaattgacggaggaaaatatgaagcttaagaaaattcaagatcaggttggagaatccctgagttggagcgattacttatcactgccatttactcaaacagtcatcactgaaactttgaggatgggaaatattataattggagtcatgagaaaggccttaaaagatgttgaaataaaagggcacttaataccaaaagggtggtgtgtgtttgtaaattttagatcagttcatctagatgacaaaaactatgaatgtccatatcaattcaatccttggaggtggcaagacaaagatacgagcagttgcaatttcactccttttggagggggacaaaggctgtgccctggccttgacttggccaggctggaagcttccatcttcctacaccactttgtcactcaattcagatggcatgctgaaaaagatgcaatagtgaacttccctacagtaagaatgaaaaagaggatgcctgtgatggtaaggagagtggaatcttaagcttctttggccaaaaagtgtgcagccacttctacctaagggtacagaacaacaattctatgaaaaatacaaaatgtgaaagaagaagagaacaaggtgggtgtgggggaccagaaaggtttggctaatgtggacacacgtgtggtgaacttcataagccttttgtatgcccccttgcattagtctttccacataaagacaatggaaagtttaatctcgagggacccttaaattaggtagtatttacttttcaccaattcttctttccattttacttagtgtggtaggaaaataaaggttgattgtaagggagagcacttttatcttgtttttttaatcagagttctttttgtttgaaaaaaaaaaaaaaaaaaaaaaaaata

SEQ ID NO: 63140 - DNA, 1069 bp, Glycine max
  Clone ID: PAT_MRT3847_28029C.1
gttggagctaaggcaaaacaaggtttccattcttaattatgtccaagaattcttggtcaacatagacgctctcagataatcttcgcgttccttacttctctcgctcactctcattactcaaagccacacatgcctctctttcctattttcttagctttaattccttctctctttcttgctaaaacacccaactatagagagtagagatacccatatatactcttcattaatttcttaatggatcattcacataaacttccttcctttagttgtgaacttagaattatacaagcccaaaacgttgagtccataaagaccacaaaaaacctatttaccaggttatatcttccagcaggaaacaacaaaagaattcaactcaacaccaaaaaagtttcctccaatacccaatgtgttcccttttggaacgagtccttcaacttagattgttcatgtccccaagaattcttggaaagccttaagaaggaaagccttgtgttggagctaaggcaaaacaagatttttaggtcacatttggtgggaaagggtgagattccttggaaggcaattcttgaatcaccaaagatggaattcaaggaatgggtgaagatggatttggtgagtggaattagtgattgtgaagatattatgttcaaggcaccacaagtgcaagtggagattaaaatacaagtggagaaggagaataataataataataggagaaagaggttgaacaataagtgggacgagtgtggatgcaaacatggtcatggtcaacatgcatggtgcagtgctgatgattatgatatatatgctttgggggcagttttggaggctttttgatttacacgagagcaagcaattgatgcactaacattagctcgtcaattaattcattaattatatgttaattttgattatatgatttgagttgcttaatttggtctgttttcattaaaaatatattagtttgcgagtcatgagcatatattgattttttatttattttttgatgttgtaattgtatatgtggtcttgatgatttcgtttaataatagtagaactttgtccc

SEQ ID NO: 63141 - DNA, 493 bp, Glycine max
  unsure (1)..(493): unsure at all n locations
  Clone ID: PAT_MRT3847_2802C.1
gggagaagtttgttccccaaaattgataattctaacataaatagagcagaatctcaacaagacaacaatattgatggcttgaaggctgaatgggtagaacaatacnagctcggtgtttacatcacatttacaactttgccatgcgggaaaaaaggccttaagcgagtgagatttagtcgaaagcgattctcagagaaggaagctgaaaaatggtgggaagagaatcaagtgacggtgtatcacaagtatgggattgaaggatatataaataataacactagccaaagtcaggtgaaaggctaattttttttttttcttcatgccattcatctttagcaattttcacctatagttcttagtgggaaggagataatgatgttgttggctagagctttaggccagaaagaaataaagatcaagtgtacagtcacaaataatagcgtgtcttttttgttcatgagtttcttgggggtattcattccggtgtacagtc

SEQ ID NO: 63142 - DNA, 448 bp, Glycine max
  Clone ID: PAT_MRT3847_28030C.1
atgagacattactgagcatcgtctagctatctcgatcgaactgtccaaggtcctgtcaccgtgatgagcgggttcccaaggctgcagtctagcactaaccaaaggacgctgtggctatttacgactagcaaaagtaaccgccaggctattgttgcacacaaacgatacgcagtgccaggccgccaggtgagtggcctagtatggactattggttaatacaagcgccagtgttaacccgcaagagcagcaagtgcccttacttagtcggtagtccaacgctggtgaaacgagcccgtaacgtcactgccagccgcagtaacggtggtacctatttacgttgcgcttagagggtacgaaacgggcccagcatggaagcccgagggcaactgggccccgggggaagacaaggagtgacgggaaacaagccaaggccaacggcaacgagcgg

SEQ ID NO: 63143 - DNA, 372 bp, Glycine max
  Clone ID: PAT_MRT3847_28031C.1
tcgtttcgtacgaatgtctatggggttaaatccaaactcttgttctcacgcttggcgtttgtaactgttgatgcctgccggattgtattgcgaaatcaatggctactctggttggacccgaaccctaatgcaacgagttcaggttgcaattgatggcgctatctcctcttaacaatgtgttccccggtcctattgggttggcagcccacacaattctttggggtcaaacttgtggttggggaaactttctttcccacaaaggacttccccgaaggttataagaatgtctatttcaataaaaggttgagctggagcaaagaatgtttaatctttcaatttgccaaatgggtgtccttcaatgtggagatactt

SEQ ID NO: 63144 - DNA, 436 bp, Glycine max
  Clone ID: PAT_MRT3847_28032C.1
ggttgcacaaaaaaaagacaaaaggcgggatttgcataatatttagacatgttcagatcatataatgaactttaagtgtccatattgttactggcaagaaacatgctgaaaaagatttgacaaaaacaaactggttgcccgatatgaagctctccttctttcacatacaaattatcccggccgaagatccacatgttattcttaaagcccaaaaacacatattgctggggacaaatcgtgaaaaaacgagtgcgtgctggctagaaacatcgtccgcccttgaggagaattcaaaccaggttcaaactaatatttgagaaaatgaccgtgagcatgatacaaccactattaggagcagggttcagtcggcattagacactagagcctaaactgaaactcaacagcaaggatcatgtttatgatgaaatagaggcag

SEQ ID NO: 63145 - DNA, 339 bp, Glycine max
  Clone ID: PAT_MRT3847_28033C.1
cccacgcgtccgcccacacgtgcgctctgacttacttatagctgcacatgtccgatacacgagtctggcatatcacgatggaatccccaattactgtcgcaacacaagaatcattaccccaaaacccagaattcaacaactaaaccccaatgatacagactgatttatttcaacattcttaatacaaacaaacttcttatacgaaaaatgactttcatacatttcataaacactatagctgctagctatcatcctttttctcacacatctctttttcctcaattccatactcctcttctttcataagattaccccaaacgaattcgctattctaactcc

SEQ ID NO: 63146 - DNA, 470 bp, Glycine max
  Clone ID: PAT_MRT3847_28034C.1
cttatattcaatgggggcgtttttttattctcactcccatatccccactaaagacacaaaaactccaccgtattaatcagcatctcatctctttcaccccaccgaaatccaaaaaaaaaaaacctaaaaaatataccattccttttcacaaccggggggtttttaaaaaaggagagggaaatttttcctgggccgaaatcaggcctcaaaccccggggccgggccaaacaaagctttctaaagggggccccaaaaaaaaatcaagggggcgcggttaaaaaaccggggggaggggaaaaacccggggtacaccaaaaaaaaaacgctgggaaaaaaacccccttttgcaggggggggaaaaaacgaaaggggccccacggaacgcccttccaaaaaagggccaaccccgaagggacaaggggcccccccctggaggggaacaaaaaacggggggggggggggggtaaccc

SEQ ID NO: 63147 - DNA, 314 bp, Glycine max
  Clone ID: PAT_MRT3847_28035C.1
atgctactatgagcaccttacgcgactatcaacctttggggcggtgccggtgtaatctgcagtggcaccatgcagagcctaatgccgatctcttcaatgcctattgtagccgcgcagatccggatcgagaccgccgtatcatcggtgccgaagccgtttccttcttccatggctccggattgccctaacatagttcttgcgcacatttgtgcatttgcaaaccatacccagagtggttccatcggtcggtctaagttgtacaatgccatcatgcctgttactggtgcacagagtaagcgtgaactaactcccga

SEQ ID NO: 63148 - DNA, 313 bp, Glycine max
  Clone ID: PAT_MRT3847_28036C.1
gtatgacatgattaaggggattgatctggctccagaccatacattatctttataagataattaatacgcactatcatatgaaggttgatggggtcgccgaacattgcttttgaaaaatcctgcccctgatacatgaactaccaaccttaagtgttaaaacaaaagcgccacaataacacgcttttacttcagttgcaattgaatatctggcataatatgggttacagactaaatctgaactcgatggactataatagtctcctgctagagttatacgacgccctttcctcatgatcgaaatggggcacgcatt

SEQ ID NO: 63149 - DNA, 801 bp, Glycine max
  Clone ID: PAT_MRT3847_28037C.1
ctttcagagaaagaaagcttcactcatcaattggatccttcacttccttcagattgtggtaaagaggaatgccaccaagctggtgtttgtaaatgtgatgaaattcaacaaacaatgaagccggtagaagggaagtctgatgatcaggctgtaactggcactgttcgtcacagcctaggcgaggcaagtttctctgccattggccctatgtcaggtcgaataagctactcagggccggtgccttattctggcagcatctctcttcgatcagacagcagcactaccagcacgcgatcctttgcattccccataattcaatctgaatggaatagcagcccggtcaggatggcaaaagccgacaggagtcactaccggaagcaacggtggtggaaggatagctttctttgctgtaaattctgagagattagtttcctttttaataggttaaagatttcatatatatcatttaaattctaccttgagtatcatgcttcttatacatcatctccctagctgttgagtagtgtgcagtaggtttagaatggccagtcaatgctcctaaatgtttgcaggcaaaggtagtcgttttagcatagcttgcatctgcttctctcccttttctctcattgcctatacatggtttcattgatttttttattttatttcaattacaaacaatttagtagtacatattaaattttatgtataactgcaagcttttaaattagaaggtagttagttggtagtcgttttagcatagctttcatctgattctctccttttctctttgtgcgctataca

SEQ ID NO: 63150 - DNA, 645 bp, Glycine max
  Clone ID: PAT_MRT3847_28038C.1
cggaatcgacccgaccggcccgcggacgcgtggggttctttgggtctttcttgggttttggagctcggagggaaggcaccatgttgtcaaatgtcaaagcagcactgattccgtggcatcttatggaagagctttggcacacatttggtgtgacaatccttgcattgttgacaaacaaacctgttctcccaccgttggtgatgctgatcaccctgcttggaacgctagagggaaccacagagccatttggaaaatgtaatagatggctgagcactaatggtgttggaatagaatggctgagtatgaaatcatgaagctggtctagagctattgagaattgagatagttcatcatcatttggcattaggaatgtcaaatcattgttttgcagtgagttgggctggctgtttagtattttgaggaggatgacaaatccatagtaggaccagcttctcatgtcagtcatggctgcctgcaggtcggtttggttgaatgacattgtggactgagattccccactggcaaagaatgtaagaaggatcccaaaccagagagccattagggaaaggatgagattttgcttgaatgtttactgtttgtgattgtgtgtgatgaaagcaatgacatctccctttgcttggtttt

SEQ ID NO: 63151 - DNA, 2196 bp, Glycine max
  Clone ID: PAT_MRT3847_28039C.1
cacaacacagttttgttcttttaagaattactcagcacaaccacaacagatctccttcacaaggttcgccttttgacgacaaatgttccctctttatatgcgtgggacagtgtctgtgttacaatctcgagccgttttcattttggtcaggtctgtttccagagacaaatattcgtggagctttgaagagctgcggtgtagatatatacaacaactctggccaactctctagtcatatcttccccaactgtagcaggtgttcgtccttgctgttgtggttcgcagttttgtcaggacaggctcccatctcttgttctgtgccttcccaccgattatggctaacttctcagtcactcttgctatgatataattgagtcagtcaagatgtgaaagggaataggatttgtatatagaccagtacaaagtttgaaagcgcaaaggagattgactaaaaaggactcgactcagcacaagctttatcttctgccatggtcttgtgtaggtgtctctcttttttgactggaaagagagagaaaaacaagggtactgaacagtcttccacaggggaccttaatacccaacttggtgaagtactacacccaaagatttcatcagagagtcgtgatttgaagccggccaccgttgatgttacagtacccagtggtgtgcagaagaattcaaggggcaatgtgagggttatgagtctcgagagtcctgtgaagactgaagtggaggaagcttatgaaggggaagatgagcatgaggagtctccttccatcaagagggagctctctgattttgatctccaagtccacgaagctgctgtgatccaaggaagatatcatccatcaagtgaagagataaaatgccccagtttatatgaacaccaagctaacattcaattagaagacagagaccataaatacagcaaaaagagtgatgatataatccaaagtggacatgttagtgatcctgggattggcaaggctgacttttgcgcttctcctaagctcaagcgttcctgctctgacctggaaagaagggatgtactaaggaagacttctcatctctttccgtcttcaaagtcacagtcttttgagaatttgcaggggttatcagcatatcagatggttaatctagaaagccccaggtcagtgatgactcacggcagtgctgatagagtgatgttgaaaaagcattcctcaagtcaagttctcccttctagaagtaaaagattgtggtggaagttgttcctctggagccacaggaatatacatagaatgcagttaggcaaactgaaaacaatacatcctgcaagtgctgctttaaagagtcaatgtgggtactcttcagacactcttgaagcaaaacatggcaaggcattgagacatgtggaattgccctcacccagctcatcttatggggaatactttcacaacagctgcgatgatggaaatattgataagcaaaggtggagcagatttcaaaaagagaattttggtttttggccacaaaaccaatgggtggctttctcaacagaatcatcctcctttagcagagtggatgagtgggtgaaagatctcgaaattcagcagccacctcctgaggatgattttgatgatgacaatattggaaccattgccttcccaccttctcctgatgctatcccacaattcatagcatcctcaagcacagctcagtctgttcgacatccagatgccaatctttcaaaagagatattgaatgccaatagtgtggttcagaaatttggactttggttgggggaatgcgctgtatggtggaatggcagttgctggtgctggtgctttccctgcggtgaactttcatgtgccgagtcagaatgccaagggtgaagaaggaattctggttttgatttgcttgcctagccaagtcatgaaagcctttgctaaagagttggatcataacatgcatgcttcagaagcaacttcattaattaattaattaattaattatgacatgagatctttggttggactcatccagtgctgtttacgtattatcaacttagttgaaccttggagtattgtcactgtgtgccaaataaaaattgtgtgttaacaataactcttctatcataattaattacgtttcttaattatttactactgttaacatattcatctaaattagcgatcgacatctttgtttaagttt

SEQ ID NO: 63152 - DNA, 225 bp, Glycine max
  unsure (1)..(225): unsure at all n locations
  Clone ID: PAT_MRT3847_2803C.1
cttcnatatatatanatanatataccangtatagcnccatnagnagaaaaaaaccaccantggagtctcacgtagacaccagtctcncgcaattttagtctaatnccnnggcgcgnnaacccatttcagcatcacggnaaatgcaacaagaccnncccaaagaaaanagccgcaattgccagtagnaaanncnacaggggngggaanactcaacncggncgtctg

SEQ ID NO: 63153 - DNA, 620 bp, Glycine max
  Clone ID: PAT_MRT3847_28040C.1
ggcactttcttctaattccatatcgaacactaggacatgtgaacccccttatgcagttgtctcaggttcttgccagacatggctgcaagatcacttttctgaacacagaattcaaccacaaaggagcaaatacagcagcaggtgttgggatagacaacgcccatataaagtttgtgacactcccagatggtttggtccctgaagatgacagaagtgaccacaaaaaagttattttctcaatcaaaagccacatgcctcctatgcttcccaaactcattcaagatatcgatgctttggatgctaacaataacatcacttgcattgttgtcacagtgaatatgggttgggccttggaagttggccacaaattgggaattaaaggagctcttctgtggcctgcatctgcaacttcgttggccacgtgtgattgtatcccatggttgattcatgatggaattatagattcagatggaaaccccatcaaaaaacaagaaattcaactctccacaaatctgccaatgatggacacagaaaacttgccatggtgtagcctaggtaagatgctctttcatcatattgcacaaagagatgcaaactattaagtacgagactggtggctt

SEQ ID NO: 63154 - DNA, 790 bp, Glycine max
  Clone ID: PAT_MRT3847_28041C.1
tacggctgcaacacgagcagaataggcgagagctgcaagggatcaactgaggagagtgagagaaaagagaagagaagatgacaacacgcttcaagaagaacaggaagaagaggggccacgtcagcgctggccacggtcgaatcggaaagcacaggaagcaccctggaggacgcggtaacgccggaggcatgcaccaccacaggatcctcttcgacaaataccaccctgggttcttcggcaaggtaggaatgcgctattttcacaagcttcgcaacaaattctactctccgatcctcaacatcgacaagctgtggtccctggtcccgcaagaagtgaaggacaaggcctccaaggagaacaaggcgccgctcatcgacgtcacgcagttcgggtactttaaggttctcggaaagggcgttttgccgcagaaccagcccgttgtggtcaaggccaagcttatttccaagatcgctgagaagaagatcaaagaggctggcggcgccgttgttctcaccgcttgaatttgacggtatcacttttttgaacgatttaggttttgttctgatacgttttgttttggattatgttgttgtttagtctctgctatatttcaggattaaattgaaggttttattattttaatttgcgcgattaactatgccagcctgatgacattagaatctatcgaaattgttaaaattgagcatgttagctttcgtattattggacctatgacatttgaaattaggttttttgctatggattgaacttcaccctaggggttttgtcg

SEQ ID NO: 63155 - DNA, 308 bp, Glycine max
  Clone ID: PAT_MRT3847_28042C.1
cccttccttagcctggatacccttaaaaccgcgccgccctttttttttttttttttttttttttaagaaggaaagggccttacaccctttattcagcctggatctatggaccattagggatcccttgaaggccaccaaaccccccaattttggtttggccaagcttggtttttgcgatttttaaaggcctctttttgattgagatttcaaagggggtaaattgagtccacccataggttacttactctcaaggcactggagaggtccaggtccctttaaaaaaagggatggatggaagccccaagggt

SEQ ID NO: 63156 - DNA, 317 bp, Glycine max
  Clone ID: PAT_MRT3847_28043C.1
tcggataggtatatcctctgtggcagtggattgagaaacaagacgggattccatctctgcagaaagatagtcaagatccatgccgagacttctataacatctacctcgataggccacagggagactctgatgggtacgacctagttcttgatgatgccatgcgcatggctaacacatgccagtccaatatgtcattctcgccgacctaatagagaagccactgataccgctgttgccggtgaatatcaaagagctatttctagactccgtgacacacatcatggtgaggagatcacttattgctataattctgttac

SEQ ID NO: 63157 - DNA, 713 bp, Glycine max
  Clone ID: PAT_MRT3847_28044C.1
gtccggaatgggcggctgcagcaagggctcaacgcacgcaggaggaggagattgatcgagagaagagaagatgactacacgcttcaagaagaacaggaagaagagaggccacgtgagtgccggccatggccgcatcgggaagcaccggaagcaccctggaggacgcggtaatgccggaggcatgcaccaccaccggatcctctttgacaagtaccaccctgggttcttcggcaaggtcggaatgcgctattttcacaagctccgcaacaaattctactctccgatcctcaacatcgacaagctctggtccctggttccgcaagaagtgaaggacaaggcctccaaggagaacaaggcgccgctgatcgacgtcacgcagttcgggtactttaaggttctcggaaagggtgttttgccgcagaaccagcccgttgttgtcaaagctaagcttatttccaagatcgctgagaagaagatcaaggaggctggcggtgctgttgttctcaccgcctgattttattgacggtatcgctttttcaacgatttagggttttttttttgttttgttctgatacgtttcgttttggatgacgttgttgtttagtctatgctacatttcaggatttaatttaaggttttatttttttaatttgcgcgttttagacttcggcttacctctcaattgaatattatcgcgtttaacggtgtttcgg

SEQ ID NO: 63158 - DNA, 556 bp, Glycine max
  unsure (1)..(556): unsure at all n locations
  Clone ID: PAT_MRT3847_28045C.1
ggctcgaggttcggggcatttcaggagtgtcctagctgctatcaatgccgcggcaaggagaagggtgaagagcaggttcattatacatgttaagagaggagtttatagagagaatattgaggttgacaagaccaacgataatgttatgttggtcggtgatggcatgagaaataccataataacaagtgccaggagcgttcaagctggttataccacctatagttccgcaacagcaggtcactactcacaactattaattccttttcttttctctcttattttattgattcagtttattggttgaattcgtcttacccgctcttcattaattaagtctgaattttaagctttgccttttggaatatttaaggattcttcttctaatctaggaaaatcgtattttatattgcagtatactttgtactttatttaattttttatttatttataaaatgacaaaagttgaatctaaatcacttggtttagtcctgatactancgtatgaataaattatttacaaaaatttaaaatatcaaaaagaaggtaaacgaatact

SEQ ID NO: 63159 - DNA, 458 bp, Glycine max
  unsure (1)..(458): unsure at all n locations
  Clone ID: PAT_MRT3847_28046C.1
cccgggtgcgaacccacgccctccgcgggcgcctggggggaattttctagggtggcgcggggngaccactccccacgtacgtacgggggggtctcctcttcctccgccatgaactcacgggaagcctctccgtcgccctgcgacatctgcggggccacccaaaccctatctttgaccatccacaacatccgctaccgggcgcaggcggggggctactgagccaactgcgtcctcaagcagcaccctgggctcttctgccctctctgcttcgaactccacgacgactctcccctccctccccaccaccggcttatgggcgtgcgctgccccgccgtcgcacaccggtcctgtgcgtgcccctccaccaacgtgtccggtgcacctgcgccagcaccaccggttttctggccttcttgtgtcgagtccaacttcacctacttcaaactccctgatcgcaa

SEQ ID NO: 63160 - DNA, 117 bp, Glycine max
  Clone ID: PAT_MRT3847_28047C.1
cttccaccgctggtagaaaaccaccgaaagggaacacctaaggcaaggggggctacccgctgggattaaacagtttaattaacgggcggtaaaaacttgctcctaagaaaccaaaaa

SEQ ID NO: 63161 - DNA, 354 bp, Glycine max
  Clone ID: PAT_MRT3847_28048C.1
gcttttcctacgcggacgctttttgttggcgcaaccgttcgattttcatccggcggcgctacacaaggatccgctcgtactgaactcacattgtatatgccctcagtgattagactctgattcacatctacattggggacatcaacagtgacaactctgtcatgatacgcaaccaagatcgtttgagctacagcccgtaccatattggctcaagcgctcgaacgaccgtcaggtcaaactggctggacagaggaacccaacctgactcacagataacctggtgatctacaagagcactaggccgtcgctagagtacaagccaccttctgagaagctaaaatgactaccgatatc

SEQ ID NO: 63162 - DNA, 1120 bp, Glycine max
  unsure (1)..(1120): unsure at all n locations
  Clone ID: PAT_MRT3847_28049C.1
gcaggaacaaagtaatggttttggaagcagaagaagaagttggcggtggtgagtttgagcatctccctgaaggttgcatagcgaatatagtttcgttcaccactcctccagatgcctgcgttctctctttggtctcttcctccttcagatctgcctcagtaaccgacttcgtatgggaaaggttcctcccctccgattatcaggctatcatttcccaatcttccaagccctccactctcaccaattactcttccaagaaggacctctacctccacctatgccataaccccctcctcatagacgctggtaaaaagagctttgcactcgataaactgaacggcaaaatatgctacatgctctcagcccgaagtctctcaattgtttggggagacactcccaggtattggagatggacttctgttccagcggccaggttttcggaggtggcggaacttgttagtgtgtgttggttggaaataaaaggtggaatcaaaagtggcacgttgtctgaaaaaacattgtacggggcatacctagtgtttaagcaaaggagcgggggtgcgtacgggttctataaccagccggttgaggtgtcggttgagggtcggaggagaacggtgtacttggaagaagcggagacaccgcggaggccacgtgagcagatagttcctgggatattcagccgcgttcgttctcgttttctggatagtttcgatgcagcaccggcgcctccaccgcctaatgctaaggggggaggtgaatatccgaaggagagaagcgatgggtggatggaggtggaattgggtgacttcttcaacgtcggcggagagaaggagaaggagaaggaggtggagattggagtctacgaggtcaagagtggtgggtggaaagcgggcattctcgttcaaggaatcgaaataaggcccaaacacaaaaattaaaaagcatgcacaatttacaatgttgtttcttctcttttttttttttttttgcttgttctaccaattaaattttttatataaccacgctcactcgcctgctctagaatgattcgtactttagtcnttcatttttttattgttagtcttaaattgattttataaaatgctagtagttattc

SEQ ID NO: 63163 - DNA, 1343 bp, Glycine max
  Clone ID: PAT_MRT3847_2804C.1
ggtcagcaacttacggctgcgagaagacgacagaaggggggcaccgatacacacatacatcaccaactgatatataatactagatttcttgcagtctattattagagagaagaattgagttggaagaacccagaaaaagaaacaaaaaataaataaaacgatgtggtggccattcagcagaataggatcttctgggttttcatcatattctactgccgaggaagttactcatggaatcgatggaagtggtctcactgctattgttacaggagcatctagtggtcttggtgctgagactgctcgtgtccttgctttgcgtggtgtccatgtgattatgggggtgatagatatgattggtgcaaaaactatcaaggaagcaatacttaaggagattcccatagctaaagttgatgtcatggagttagatcttagctctatgacatctattcggaattttgcatcaaatttcaattcatctggtctttcattgaatattttgataaacaatgcagggatttgtgcagctccttttgcactatccaaggataacattgaacttcaatttgccataaattacttaggccactttcttttaacaaatatgttgttggatactatgaagaaagcaacaagtgaaagtaagaaacaaggaagaattattaatgtctcctcaattggttatcgattcacgtatcgtgaaggaatcatttttgacaaaattaacgaccaatcaagttacaacaattggtgtgcatatggccaatcaaagcttgctaacattttacatgccaatgaactcgcaagacgtctcaaggaagatggaatagatattactgctaattctgttcatccaggagccactgtttccaccaatattcacattcatagtggtttattaaatggtttacacaaaatagcatggctatttggactcgagaagatattgggatatatggcaaaaaatgtgcagcaaggagcatcaacaacatgttatgtagccttgcacccacaagtgagtggaatcagcggcaagtattttgaagataataatcttgcagaagtatactcacatggaagggacatgaatttggccaagaagttgtgggattttagcataaatttgactaagtaaaatgcataatgataattgtcaatgtaaatggaatactgtattagagaataaaaatgccaatgatcatattgtgactgttattaagttaatctatatgatgttactatttttaagagagttgtgttgttcaagctagtctacaatttagtggctctagtacaagcacggaatttcctttatgtgaaatacttggaacatatactttcaaaca

SEQ ID NO: 63164 - DNA, 330 bp, Glycine max
  unsure (1)..(330): unsure at all n locations
  Clone ID: PAT_MRT3847_28050C.1
ccacccactcgtccggccaaagatgcnnagacgcctctcttctttattctctcattttcctgatataccactctttcagcctatctgaatatatatctcaatccagatcactaacactactctcgtaacactgttgtctccaacattgaacgtaactactatcccacatgcatctacctttcactcaaaaaatacccagatatttctaatacactcatttatctcacaatgttcaaaaaccctgtctttcattaccacgacccataatttgattactcttacaaatcattcacaaaaaatactcctgcttattatgctatacaattcatt

SEQ ID NO: 63165 - DNA, 170 bp, Glycine max
  Clone ID: PAT_MRT3847_28051C.1
cacaaacttgctgataatttttttcacagatttgtaaacctctaccacaaagggggcttcgggggatgttacaactcgatccagatacactgtatgcattgcttcttcatttactagactaaaatacaactctaacttctccaccataaagaccaacgactacatctacc

SEQ ID NO: 63166 - DNA, 323 bp, Glycine max
  Clone ID: PAT_MRT3847_28052C.1
gtcggagtccaagacgcaactgttgagaaaagctttcgacatgtgtacgaacctcgaaaacttggaatggttgataacagcagaaatctggttgaatacaacatacaacttttgacgacatccgacattattattgcgacctgtgatgcatgcacagatagaaaacctcgccctataattcatctgctgaagtgcttggctgttacacagacactggtgctggacaatattatacaaaaggggctcctatagattgtggagtccgtcggtatccaatccacataactgacggggacaatgtcttgaaacaagatgtttgtatg

SEQ ID NO: 63167 - DNA, 538 bp, Glycine max
  Clone ID: PAT_MRT3847_28053C.1
aaataatagcataaaatattataaaaaaacttatatattataaagataaatttctcatcaataaaaaacttttatcaattaggtaaaatacaaggaatatttcagctttaacataaggggtattcaaggttggtttaagttggatttaactaaatcttttattcaattcgttcaaaattatattggttgagttgaatttatgtgattttgttgttaaatttaaactgaatcaatctagtcacaaataaattgacttgggttgagtaagtcaggtctaagcttttatagttattttaagtgtcctaaagaataattttttttcttaccaatttttacatattctatagttaattattgtatatttaattaaaaataaatgcacattctaaagatattgaattttatcaacgttgcatacttgtactaaacaataaattaatatttgtaatttaaaatatatgtatatataaataataaattaaaaaaaaatgtcagcacaacatattgagttcacgagttcaaaaataaaaattattac

SEQ ID NO: 63168 - DNA, 144 bp, Glycine max
  Clone ID: PAT_MRT3847_28054C.1
aaccgacacggggacacacactcaaaaatatttgataaccccattaacggacttcttctagacctacgacgataagcatctcaacagaaattgaagtcaaaattcgcgctttggatgcggctaattgcgggactggatcaaact

SEQ ID NO: 63169 - DNA, 257 bp, Glycine max
  Clone ID: PAT_MRT3847_28055C.1
agtgctgctggtcgtgagaagatgatagaaggggcccctactaatatactgccaattaaaaaaagacgagttggacaaaaaaagtggatgtgctcagaggactgtggttcactcatatgacttaagtccatgcatgtgcgtacgtgatgctacactcacctcacagagcgattcaaacctaacatatcggttgacgccacataatgctgtgatcgggaaaatatcggtgccatttaatccaactgctccgtagtata

SEQ ID NO: 63170 - DNA, 220 bp, Glycine max
  Clone ID: PAT_MRT3847_28056C.1
gcgaataaagctaaggagaacttttgagaagcatgtttaagcaagttatggcgacgaaccaccttccgctgatcgtcatatctgtagctgacatctttgtgaagacttagaaccttttaagactattggagatctctcatgttttgatacaaaaatccacttatagccgcactcaggaatcacctacagttgttgaagacatatctcgtaagcatttatc

SEQ ID NO: 63171 - DNA, 361 bp, Glycine max
  Clone ID: PAT_MRT3847_28057C.1
gcgtcagtacagctgcaaaaagaggggaaaagggggcacttgcagttgcaatcaaattagatcaatcgcgttgcgcagttccgtacctctcctctcaggatgcagatcttcggcaagaccctcaccgcgaaagaccatcacccgtgaggtggcaagctctgacacgatcgacgacgtcagtgccaagatgcaggacaaggaaggaattccgccggatgagcaacgtcacatcatcgccggaacgcagctcaaggacggccgtagcctcgccgactacaacgtccagaacgagtcagcccttcaccttgtccatcgtctccgtggtggcatgcagatcttcgtcaagactctcaatggcaaa

SEQ ID NO: 63172 - DNA, 999 bp, Glycine max
  Clone ID: PAT_MRT3847_28058C.1
ggctcgagatggactcctaatattggattgcatcatgtaatggtttggttgttattgttgtttgacctgagtaggtcattactagtggaaaactgagagctctgagagccaagtccatgaaattcaaggatggatacatgatttcttttggacaaccagtcaaggattatattgactcagtagtgagacacgtgctactaagatagggtgctcttggtatcaaggttaagatcatgcttgattgggatcctaaagggaatcagagtcctaaaactccctttcctgatcttgtcacgatccacactccaaaggaggaagaatacaagtagcctccagctgtattggcaaatgatattgagtgaaagcttgtgcaaagattaaagagtaaagtctgtggatctacatccaacaaaaccatgctgcttgacagttcatgttcaagaaagagagcttgcatcagggaatagtcttcgtggttatatccacttagttgacttggcaggaagctataaaggtaacaggtaaaggatgtgtaaaggtcatctttttactacaccagaacagtgggaacaactttgtcttgaagttagaagtgttgatgttttcagaattcagcttctttccttggtgttttttttttggttttatctactcttagttctcagtcacggcttagttattctgaagaataatgaagttgtcatttggcaatccttaattatgaaaatgaggaagcatttgtgtctccttcctaaaccattcttttcattacctattaatttggttagcatttgtcggtttgtttttatttgagtctttttcttataggaagctgtcccttagagtgcttcagcattctcctaattaggttgtcggtaaaaagatcttcagaatgaaattgcagcttattttcctactaattaagctacattttgtaatatgtattactcagcttcatgaatatgctggtatgagcttaatttatgattttcactactt

SEQ ID NO: 63173 - DNA, 435 bp, Glycine max
  Clone ID: PAT_MRT3847_28059C.1
gacattaaatcttgaattttattattgataattactttataccttttttgtacctaaacaaaaaaagttaattaaaacaacacgaaaccaaggggggtaaaaaggcacaaaaaggaaaaaccgacccggaaccccaacaactaaagtatttattgtgggagagcaaaaaagaggaaccgaaaccaaaagccaaaaacgcgaaaacaggaggaaaatgcttcctcaacggaaaaacttcaggaacctcgcacgtgcgccaaacccaccaagccgggtgggctcaaagcgcctgcaaaccaaaacgaggggggtgcgaccccacctcacgagaaaaaaacgcaagggccgaccccataaaaaaaaaacgaaacccgcaggcggacgggggggggcctatagggccccgaggacagctttttttttcatggaaaaagg

SEQ ID NO: 63174 - DNA, 425 bp, Glycine max
  Clone ID: PAT_MRT3847_2805C.1
aaatcagcaataaagaaaaaaaagctaataacaagagtagtatttaaacccatttttttggtgaatttaaacccatcttaattatacgcctaatatatataatgggtgtgcaaaattcatttttctatagtaaatggttcacgtgttaagggttaatgtgttccagcaggtgaggctgttcaagagacaaatgaagtggctgatgccaaattagttgctggtggtgttttctttctctttctctcctccctcaaaaatcatatacacctaattaatgggtgtgcaaaattaatttttcgatatatagtaaatgtttgacgtgttaatatttaattaatgtgttccagcaggtgaggctgttcaagagacaaatgaagtggctgataccaaattagttgatggtgtgttttctttctcttcctctc

SEQ ID NO: 63175 - DNA, 610 bp, Glycine max
  unsure (1)..(610): unsure at all n locations
  Clone ID: PAT_MRT3847_28060C.1
aagacgacaggacggtactcacagaaagagaaagtgagagacagagagatgatggagttgaagaaggtggcattggtgaaggtagctttgttgcttttcctgttagggttcagtgcaaccactgcagatgctactcgcttcgacccacgttccttcattactcaggtgctccccaacaattactatgtaaaaatcaaatccacagccactgcatgttgtgatctttgtctttgcacaaaatcaaaccctccccagtgccaatgtgtagatgggagcgagacaggctgccactcatgttgcaaaaattgcatttgcaataagaaatttcctcggacgtgtttttgtggagatataaccaacttctgctatgacaaatgtaactcaactgaagccaattaaagctcactagctaggaatatgaatgagcatgtttccataaataagttgtgaggcaaagcccctttaggctttgtctacttgtcttcgtgcatgtatgcatgcaaataaattactatttcaataaataaataaataaaaactactttggctaagaatttactttttccggcanaaaaaaaaaaaaaaaaaaagaaaaaaaaaaaaaanaaaa

SEQ ID NO: 63176 - DNA, 226 bp, Glycine max
  Clone ID: PAT_MRT3847_28061C.1
tagagagtgaggtcagtgagggatcggtgttcacttgatctcatcataatcggcagcgtcaattgaagaagatgccgatcagaaacatcgccgtcggaaggccttaagaggcgtctcagccgaagacgtttaaggcggctttatctgagtacatctcgagcttcatcgtcgtgttctccggctcaagcttcggcatcgccgacaacgagctcaactgcaacggcgc

SEQ ID NO: 63177 - DNA, 503 bp, Glycine max
  Clone ID: PAT_MRT3847_28062C.1
gcacgagattcaaatggcctccatccgtgtgctgctcttatctttctttttcattgctttgtcacttttttcctttggcaatgtcgaagccagtagaaaacttctggcaccaacattacccgatttggggaattctcttcctcgcctgatatttcctccatttccaccagtaacggactggccagagtataggttgcctcccccattgattcgcacgcttccacccttctcacctccttcagccacaactaccaatccttgagttgaatagtatatatgatcagcagatcatacatgtactgtatatcgatgatgttgcataacttgcattgcatgtagtgatgtagtgcagtaaaataaaggttcacgtcacgctcaagctttcctaatatcttacgtgtttatttattgacttcatcgttgtttgctatcctttgattgggtgagatatatatgctttgtagtagcaccttgtaatggagcatcttataatttttttcttg

SEQ ID NO: 63178 - DNA, 319 bp, Glycine max
  Clone ID: PAT_MRT3847_28063C.1
tttttagtgcctgaactcagtcccttctcacagacttaagtccatccatgggctcctgaaaaggatccgtcacaggctattcaaacctaactacgttgctgcccctatgctcgacggaaaatttcgtgcctttaatccaatcccctatatactttcccattatcgtgcaacactgaaaggttttatgattttccttaataccgttattcgaacgtcaagggaatctttcgcatccttacaacttcctagcccgaacctatctactccattgtctatccttatctttcatattttactcccttcctcctttcctccctct

SEQ ID NO: 63179 - DNA, 395 bp, Glycine max
  Clone ID: PAT_MRT3847_28064C.1
ggtacggctgcgagaagacgacagaagggatattcactctgtgtggcaaccaaagagagctctcccagcacattggaaccccagtacaacctacaaaaaagaggtctgatgaaacttttgagttttctcctgccaagacaagtgacaaggattccgttttcaaaatttccaacaaggagaactttgaaccacataatgttctaggaaattagctctagttgtttgtttgtattgaaaaaatgaaaagacgtgtactacttgtcatgtttccttctggaaatactgtgttttttgggtgttcttttgagtatgtgtacatagttttcatcggatttgtagttgtgtactactttgtgttctataaatatatttatgtctgcccttctttgttcaaa

SEQ ID NO: 63180 - DNA, 1127 bp, Glycine max
  Clone ID: PAT_MRT3847_28065C.1
gagttaattactaatgatattatggaacttaaggttaagcatgatgagaaaagtattcattacacttgcttccaaggaaaagaaggaagaggaaataaagagtatgacaacaatacatatagacaacgaggtgcttccaagttccaattctcctatatgtatttatatttttatgagatcatagattatttcctgtaacctttggtaaatcacaagttagtgaccccttgtcccataaaacaagcaagccatttttacctatgtgaagtaggggggactattctgtatgttggaattgtttgatggcacctaatctccttgcaaacatggacaccattggccctgaatctctcaatcctgggaaaggtgtaaaggaattgaacttatgcagctttgctgtgtgatattgatttcccttatcatccttaaggacagtggaatcctctttattgacacaacaattatgtaaattttgagcctcaccgagcagttggtcatcagtagattgttctctggcctcttcaatcttgcagcttttcagagaaatgtgtttattggaatttggaagcattgcgcaagacgcagaatgaacttcagaaccacccctctcattaaggtgatcaaaaactaccaggggccttcctcactttcgcttctatcgctgtttcccgtgccctcccacagtgcctctgcctcgacagtctccctttctctcgtgctttgcccaggtctcggcgttcgcattgtcagttctgtcttgccttcttgctcctgagtgtgctcctagttgtgccattcctccttcccccttgggttgctcctcctgggttcatgtctcttgcgccattgtgttggtcttcccggcgtctggacgggtgggcgggcttctaggccccctccgcggctgtctggggggacaggcatcaaatctcccttcggatatttcaagcttatttgattgcaaatactgtctgtaaaggctattgttctctgcatagaaggttattggagtggcatcaattccatgtaccttggtacctggctcaaaatctttagaagcctctccgacttgagacattcttgttcccacattcttaaattttgcaccaaccatagactgaaaattt

SEQ ID NO: 63181 - DNA, 494 bp, Glycine max
  Clone ID: PAT_MRT3847_28066C.1
ttttttttttttttttttttttttttttttttttttttgttttttttttttaaaaaaaaaaaaaaggaggagctgggcattccctgtttacctaatggcccccctttttttaatttttaataaaaacaaaacaacccaatcggggggaaaaaaaactttttccccaattggcggggggaaagaaacattttaactggcaaaaaaccccttctttgacccataataagaactatcataaaagttggggttcatcaatcaaatcaaaacagggggttccttttcacaaactaagaaaaaccgtgatctttaacacgcctccctcacttttccggggggtttgggccacccttttttccgaaacccaccacgggggggacaaaacgggggtggtattgcattctcttgggagccgcgccggggggctttttcttcttggcttgctccaccactttggaagtttggcctctcactttacccccccgtgcgagagatcc

SEQ ID NO: 63182 - DNA, 532 bp, Glycine max
  Clone ID: PAT_MRT3847_28067C.1
ccgggactctttcttttctttctaactagctccggctccactactgtgtatgacatcgggcttgcgactaggatccgtgactcgtttggtgtactcgacaagtccaggggctttctgtggcttcttcagcggcgaggccctggttctcagcgcaggatgaacaggcctgagaaaacgtgtacatccaaaaatgggacagggagatgtcgtataaacagatgcaccaggctgctaagaccaaggccgacaagggctgagatgctgctgctgagaagacctctggaggctctcacaagggctgagtgtatccttcacacaacccggctaggtctctttgcgttaaaaaggcatgatggataataagacccattgacccttattgaactttgggctttgtatagattgcgtctcatgttcagtcgaagtttcttgacggatgggaccctatcattgcatccgcctaacttgctacctttattatcgaacttgccgtgtactcccttccagtaattgatcaccgacgacctcaagg

SEQ ID NO: 63183 - DNA, 742 bp, Glycine max
  unsure (1)..(742): unsure at all n locations
  Clone ID: PAT_MRT3847_28068C.1
cagactattacccttgaatgagtggagccaccttttggcctcttctgccaatgagaatgagaataggctgagtctaatagcttcatctggcacaccgataatcttattagtgttgcatatttcaatgaacattgccaagtgtgcataggggtcttcattaggtaatcctagaaataagttcccctgtattaaatgaattaaggaatatgggtagttgatgttgttagcttgcacttcaggacgtgcaatgctggtgaaaaattttggtactgaactatttgagtaatcctcaagggtaatcctctggtcatgctcttctgccatggtaatgaattcaggtagttgagtggcggattcccttgatgatggtgaatctggtgataataagtcagagaaatgagtctcttgctcaagaatggatgcaactgtcctatcttgcagaagtttccttctcctctcggccctgttccttcgcaatgtagcttcaatttctaagtccagaggaactaaattgcgtgtgggagatctatgcatatacaatactaatagaacaatgattatccagttcaataagagaagacaaataggaattaagaacaaatattcacaaaaaggatcaaagaataacaaataaagaatatacacctaaaaatgaactaacttcccaaataaaaagaagttcctcgacaatggcgccaaaaacttgttcgcttncagaaagtgcaccggatcgcacaagtag

SEQ ID NO: 63184 - DNA, 240 bp, Glycine max
  Clone ID: PAT_MRT3847_28069C.1
tttatggggtttttttaattttttccgggttttttcccttaagcacaagaacaaatttttacattgaaacttttcataacaaggctcttcacaagtctgtggttctggtcacctcatcaaagcgacccgtacttagagaaaaaaaaaaaaataccaaaaccaacaccaaattaaaatccgggtgccacacccaacgaggggggactcaccacaaaaaaaaaggaaccactctaccctagc

SEQ ID NO: 63185 - DNA, 137 bp, Glycine max
  Clone ID: PAT_MRT3847_2806C.1
ttagaacatcgagtctcatgacttccttaagctccgtagtgctggtccttgtagctctaattctattacctcatgttcttgctgactatgagaacgtcccggtgtaccagattcccattgagaatctagcactttac

SEQ ID NO: 63186 - DNA, 535 bp, Glycine max
  unsure (1)..(535): unsure at all n locations
  Clone ID: PAT_MRT3847_28070C.1
attgactacaattccacgagagtatgtcattggggtaaagttgggagccataaacaatatgtgtgcatatgggctcaatcctggtatttcaggtactacgcttttgggcaccattactcagaccatttcacagcaaactgtgtggaatcaaatggcaacagtgagaacaccattgaattttgatcctagcaagcagagcttttgtcaatattctattgatcttctcggtggaggaatattagtggacaaaactggagattggatcacacttatacaaaattctgcaattagtaacttgttgaaagttggtggttggaagaaaagctagtgaatgggtaagataggagatgcttgggatgcagcagtgcaaaggagtgattgagcctgattggtacaagtggttttaacaaacaaggacactncacagcattgttgtgcatgtaaggtgacagaatgggaaccacattacttggaattgagacttgcaatagaggagtgtggcgactacaatggtgttgaaatgagaagtatggag

SEQ ID NO: 63187 - DNA, 224 bp, Glycine max
  unsure (1)..(224): unsure at all n locations
  Clone ID: PAT_MRT3847_28071C.1
tattacttnttttaaacagtatggagatgcattcatttcacaaccgtacctttggacccatggctttaaaaccctacttattcacttgtcttctttcggtctatgtgggactgggaatttaccgtctctctttagtttttctaataattaatacatacacctttttttttttttacctaatttatctcaacataacaagaggctggttttttttttctttttat

SEQ ID NO: 63188 - DNA, 121 bp, Glycine max
  Clone ID: PAT_MRT3847_28072C.1
gcgagaccggctactcattccacagaccctggagcaatatatcaagttgacaaggtgcgactccctaaggccattttcggcactgatatatttcctggaccagctcctgcaccaactccag

SEQ ID NO: 63189 - DNA, 467 bp, Glycine max
  unsure (1)..(467): unsure at all n locations
  Clone ID: PAT_MRT3847_28073C.1
ctaggtttcgttttatttgtctttgattttcttctgcaaccttatggtactgcttttctttgatgactnagtctaacttacccttccacatttttccttgtttacctgagctctgtttttaactgttctttgatcaaggattgccataaattcaaataatttttttaattgaaacagataccaattatttattttattataataaatttttcattttttttttttgatctttgcaaaaactttcaaaaattatttttttccccctgacttttcttattatatctgccttttaaaccccttccaaaccaatttttaaaaaaattttttattaataacacttttttttatataaattttgttcctaaacctcaatttttaatttggaattggtggggggaaaaagccattattttgatttccttaatccacaaccccctttttttttggttttttttcccttttttttt

SEQ ID NO: 63190 - DNA, 3441 bp, Glycine max
  Clone ID: PAT_MRT3847_28074C.1
catgcaacggtgagcagagtctgattaaaggatgtgaacaaaagaataattgatgatgaatggaacaagaaacataatggcatggttttcccacatgtcaccgttttaaagccttaaaatgtacatagttagccacgtctcaagagctagcaaacgtggcatgttgttgtgacgacaagaagatttggttgtcttatgagaactgagaactcaatgtacgtggcagttcggggctgttgttgtctcagttgttcagggatcaatcaaaagcttatttagtgcacatcatgtgcaagtccttcagactctgaactacatgcttggcttttgttcccaggctcccgctgcggatagtagtagtggagaggtctttcattattcagttggatttagcaccaccaagatgaaggttcaagaaacgaggtcgcatgttcatgcacttggggaagaagagaaggtgatgacaaggaagcagaaggctgagtccaaggcacatgaagtggaacattctccaaagaaggccaaggtggaaaaagaagatggccacatcaacgggaaatctgaaactggcgttgcagaagaatatgatgagttctgcaaagccacaaccgagcaccttcctttggaacaaatgagagacattctggaggccaatggccttgattcttctggctctgatcttgaaattacaagaagatgccaagacttgctgttttatggtgcattggacaaatgctcggtttgcaatgggagtttggagtttgatggcagacgttatgtttgcagagggttctacagtgagtgggctggttgcactttcagcaccagaaaccctccaaggaaacaggaacccattaagttacctgattctgttcagaactctctggcttcagacttgctaaagaaatatcaggaccccgagtcacaggcctcacagggatctaggcttagcagaaaaaccctttactggaatgatgatctctctgattgtgttttgttactcgtatacaacattattgtataaacacctattgcaaaacagggagggaaggtgtcacactctaatgtatggacagtttgattggcagagttagggtaagtgcatgttcttggtggcacatccaaacttgcagaagccatggagaggagtataccagtggttagggaggcttggttgattgacagcattgaaaagcaagaaccacaacctttggaagcttatgatcttgtctctgatctttctgtggatggcaagggtatcccctgggacaaacaagatcctggggaagaggctatcgaatcactctcagcagaactcaagctttatgggaagagaggagtctataaagataccaagttgcaggaacaaggtggaaagatatttgaaagagatgggatactatacaactgtgccttctctgtttgtgaccaagggcgaggactgaatgactactgtgtcatgcaactgattgttgtcccagagaatcgtttgcatctgtactttaagaaagggagagttggggatgatccaaatgcagaggagcgattagaagagtgggacaatgtagatggtgctctgaaagagtttgtgaggctctttgaggaaataacaggaaatgagtttgaaccttgggaaagagagaagaagttccaaaagaaacctttgaagttttaccccattgacatggatgatggaattgaagttagacatggggcactaggtcttcggcagctggggatagcagcaacacactgcaaacttgagcctttggttgcaaattttatgaaggtcttgtgcagccaggagatatataagtatgcattgatggagatgggttacgactgtccggaccttccaataggaatggttacaaatcttcatctgaaaaaatgtgaggacgttctcttagaattcatagacaaggtgaaatcattgaaagagactgggcccaaggctgaggctgtgtggactgattttagccaaagatggttcactctgatgcactccacaaggcctttcaattttagagattaccaagagattgcagatcacgctgctgctgcgttagagggggtgagagacataacccaggcttctcacctcataggagatatgactggctcaaccattgatgacccgttatcagagacatacaagaaattgggttgctcaatttctgccttggacaaaagttcagatgattacgagatgattgtgaaataccttgaaaaaacttatgagccggtcaaagttggtgacattgaatatggggtgtcagtggaaaacatttttgcggttcaaacaggtggttgcccttcctatgaagacattataaaactaccaaataaggttcttctatggtgtggatcacgaagctcaaacctcttgaggcacttgcaaaagggattcttgccagcaatatgctcattacctattccgggttatatgtttggcaaagctattgtctgttctgatgctgcagcagaggctgcaagatatggttttactgctgtggacaggccagaaggattcttggttttggccattgcttctctaggaaatgagattaccgagttgaaaaccccacctgaggatgcatcatctttggaggaaaagaaggttggagtgaagggaccggggaagaagaaaacagatgaatcggagcattttgtttggaaagatgatataaaagttccttgcggtaaactagttgcctcagaccatcaagatagccccctggaatacaacgagtatgctgtctacgataaaaagcgggcacgcataagctacttggtgggagtgaagtatgaagagaaggaagagaagggtgcggtgattgacacagctgaatgatgggaccaaaaaggatgtaagggaagcttttcttttttgtgatgcgggaattgaaagctatgaccatctatgtactagtggtttctctagttagtggaagatttatgtcattttgatgtatatttacatgtgataaaataggctgtatgtggtgtcacattttgatgtatgtataggtaaatggcccgttagttagggtaagtaaatattttgtcctacacatgacggcatgagaatggaactacatctaacactatgttgtttcagtcctagttgactactctgtctgtatgaatgagatgatatagtagaaatggtataatgatgtccttttgtttaataaaaaaaaaaaaaaaaaaaaaaaaaaataattacaaaaaataaaaaaaaaaaaaaataccaacataaatactatataaaaaaaaaaatccttcagttttaaaaaggggaccaaagggtttcgttttctgtgtttaatgcctagggggttattttttgaacctttttgaggtgtcccccatctaaatccaaaatttttgaaaaaaaattggcaaaaatgccccaaatggggtattttatataaaaag

SEQ ID NO: 63191 - DNA, 260 bp, Glycine max
  Clone ID: PAT_MRT3847_28075C.1
ctttccttcaccgtataatcgccacacaatcattcttccaacgctacagaaaaccacacgcacctgtgggccaatctattcatgggcggcagcacaatatgtgcattatttgtccacaaggctgttgtaggtgtaaacaacacaattggtcgtgaacttagaggtggacgcagggagtttctttatgcaccttaacccgaacgacgtaaagttgtcaataaattccatgcactcaacaagcatcactgtgccgtgagact

SEQ ID NO: 63192 - DNA, 343 bp, Glycine max
  Clone ID: PAT_MRT3847_28076C.1
aatgtaaatgatatgatgcgctgcatctagatttagtgggtatagaccttatacaactatgactgtacatgtatcatattatacatgcttatcataagtatggagactcagatggatagtcatcatgggcaaaatgaattctagaactgaattgagcaattggatcggattatcaagttaattaggtcaatcatccaatgaatattcctactacatattgctcatattgctaatccctgccagttgctctgttctgtctctaaataaagtaatgcatacaaagaatactctgcaccttcatactaggagttagagtttttaagctaggtttgacacaccaaac

SEQ ID NO: 63193 - DNA, 267 bp, Glycine max
  unsure (1)..(267): unsure at all n locations
  Clone ID: PAT_MRT3847_28077C.1
ttttgtcagnngangacatcattgctttgattggtgatngagtgcgatggagttattggacagttcgnntgaagcactgggganaanagttgttctctggtttnagcaaagcggcgangcaaagctttcagtaacatngctgtnngttataacaacgtggattttgatgctgcaaacaagtatggtgttgctgttgganatactcctggagtgctcactnnagncaacagcaganttggnagcttcactaactttgggcagctgcnc

SEQ ID NO: 63194 - DNA, 626 bp, Glycine max
  Clone ID: PAT_MRT3847_28078C.1
tacgtcgacatctccgttgccgtcgccactgagaagggactcgtcacccccgttgtcaggaacgccgagagcatggacatggtcggcatcgagaaggccatcgccgaccttggcaagaaggcgcgcgacaacaagctcaccattgaggacatggctggtggtaccttcaccatctccaacggcggtgtctttggcagtctgatgggcactcccatcatcaaccttccccagaccgctgtgcttggtctgcacgccatcaaggagaagcctgtcgctatcaacggaaaggtcgagattaggccgatgatgtaccttgcgctcacatacgaccaccgactgcttgacggaagggaagctgtcactttcctggtcaaggtcaaggagtacattgaggaccccaggaagatgctcttgtaggcttcggtactgcagtcttctatttttgcatattttggtggatgggttatcgggcgaaagcgcgggaactagtagtagggtaggggagatgtggtcggatggatcaatgagacatttgtacacgcattgattgattcataacgtgtacatgtgtcgcatggaaaaccgggtatatatgagtaggtggttaattgcatgctgagcgtttc

SEQ ID NO: 63195 - DNA, 565 bp, Glycine max
  Clone ID: PAT_MRT3847_28079C.1
tttgccgtggtacatgtgtgcagtgccaccgtgcttggggggggggggggggggggtgaggggtaggtcaaggtaggggagggagagaggaagaggagaggtaaagcaaagaaaaacagaggaaaacagatgaaggagaacaagggcaaacgcaaaggagaaacggaggaaagcaggaagtaagggggggtgattgcggttgcgacgaaaaacacggttagtgcggtggcaagactggttggtaaaaccatggtgctggttttacgcaagcgtggccgacaacagagcagtgtgggcaaggcaccgggaggtcgcgggaacgaactatcgaatgtaatagcaaagggttggattgcgttaagggtgaagcaagtaccagaattaggtcgtttacgagaaagacgaagaagtgcgttggttatccgaacaccatggcaagcccaggcgggaactaatgtctctaagtcggcattgtggctgaaggcaggggcacgactgggagtcccagtacaactcaaggccctaaaactggtgaaggtgctcagggcgctgaaggttaagggga

SEQ ID NO: 63196 - DNA, 137 bp, Glycine max
  Clone ID: PAT_MRT3847_2807C.1
caatgatggaagtgatgcgtgaccctcgcgttgctgctgctctgcctatttagcgatctcctcacctctattaacattcggctcgatatagcactgagtgatctattttctgctgatgacaagttgtattcgtctga

SEQ ID NO: 63197 - DNA, 174 bp, Glycine max
  Clone ID: PAT_MRT3847_28080C.1
ggctcttgttgagatgcataattggaaggttctgttggagaatgaccagctacatatagagcggagacaaggtcgggtctttgaaggatggaatgaagggaaaatatatttccctcccacatacaagtattcaaacaattcagatagatatgcaggtgatgagagacagtcaaa

SEQ ID NO: 63198 - DNA, 529 bp, Glycine max
  Clone ID: PAT_MRT3847_28081C.1
gcacgaggagaagtttttagtttgatgagaaccatagattggaaatcttcgtttcctatgttcggtatctattttaaaaaaagacattcctggtaaagaagttttcccgggaatgatttttaattaagtttctcacaaaaactttcccatgaaactttcccatgggagaggtgggaaacttttgagttaatttttttttcttatatagtaaaaattattatgttactcttattagattatttaatgtagttaataattaaagtaattgacaaaaatatcacataactctttgattctcattaaacttaccatcttataaagaataacatatgttagataacataggagtttctcagagaccatttgtgcagatgcaaaaagaatcgatgtcatttgattcattgctaccacatctggaaaggggtggagagtggctttcattccctcaacctctggattattcaaatttggtactatgatgagaagcaccgctggtgtccaaggcaagtctgcttgtcgcttttttttg

SEQ ID NO: 63199 - DNA, 984 bp, Glycine max
  Clone ID: PAT_MRT3847_28082C.1
acggctgcgagaagacgacagacggtgtgctctgaaaaagtccatgagatattcagagtttcatacccaccttcctcccctttcttataacaagaacaataattaacaccgctagaaaaatcatcatctctttcaccattaaagcaattaggaaagaggtttttgattgaagctggcgatatgaggaaggggaacaagaagaagaacaagctggtgtggatgatagcgacgccgtttagggtgttggggaaagcgagggacatgtacgtgagcagcataacgaagtgcggtcacaacatgaattacagcaaccccgtggatgctgctggcagattccaggctttgcccaggagttacagtgctgccacgtcacgctccgacaacaacgaggatttcgccgaacttttgagagcggcttccgccaggactttgggcaacataatcgatgtagatttggttgtaaaacagcaggcccaaacccagacccggcccgtttcctcaaatgggttgcccaagtcgacgagcgttggcatgggccggatcgacgaggacacgccttatgatttgggggaaggggaagttcccgttgtgcccaaagcctatccaagaagtagaagctatgctgttggaaagacaagtgctgttttgtaaattgtcaagtactcaagttgtgaacctagctagttgctcgcttcaatggttcaatctatgaatgcattctgagatagattctggtaattttattgagattaattatatttgatcggaatatcatgtgattttgtttggttttccattgtgggtgggggtggtggatagtgcattgaaagcaacggttgtgtaaagtgaattttttctttggtattgtatcttcaaatatctttttagtaattgctagatttttaatttttaatttttataaactattaaaatagtttcatactctcatcataatatattttttaaaacaattagtggaacaat

SEQ ID NO: 63200 - DNA, 374 bp, Glycine max
  Clone ID: PAT_MRT3847_28083C.1
ttcttaatttggctcgaggtattacaccgccataatcaataagacaccttgtcatacattgctttgggtgctttcacaggtccttctgtggggcaaagggggcatttctcatatcctcagtcgagctagtttaccaggaccgatgggcctcagggacttggatcaaggcaagaccactagagggccacctcacactgagactgtaacacaggcgatttccacagttgggtattaacccactaatacacaggccaattacatttatgtgggctctgtatgtgaaggctattaaacctaggcactgacttacagtcaggtgggccacacaccgcgtaactactacgtatgatgggtaagcacatgggtgacctgtg

SEQ ID NO: 63201 - DNA, 385 bp, Glycine max
  Clone ID: PAT_MRT3847_28084C.1
tacttctacatttgctgtgccgtcgccaccgataagggactggtgtccctctgggctctgtacgccttttgcatgttcttgtgtttcgtgcaccatgccttatcccatctcacagtgaactgtcgcgtctccaatggcaccagtgtgaacacgactggatgttgattctagcacgcctaccttttgtcagttgtctattgaccttctcggtggaggaatcttatgggacaaaactggatgattggatcacacttatacaaaattctgcaattagtaacttattgagagttgctgcttggaatatatgctgttgaatggctaagattgtgatatctggtaatgcagcacacaaaaggagtgattgtgcctcattggtacaagtgtt

SEQ ID NO: 63202 - DNA, 270 bp, Glycine max
  Clone ID: PAT_MRT3847_28085C.1
acggctgcgagaagacgacagaatggctggacagagagctgtatacactactggtaaaggggcttcttccgtgggtcttacatctgcccttcatagagattccatcaccaaggaattgaccttttaaaggggaacccctttttttacctaccaaagaaattttcctaattaataattttaccaaattaaatatccagattaggtgaattttccataaacccattgagcaccaaattttaaccttttcaaaacctgaattttttccatttt

SEQ ID NO: 63203 - DNA, 687 bp, Glycine max
  Clone ID: PAT_MRT3847_28086C.1
tcaaatgcctaggacagggggagaacattgatatctgttattctataaaagggaactacacgatgctctttcggctcttcttggggactttggtgttctaatgatccccacagttccaggtcctcccccaaaactacaaacaaatacatccgacttagaaatttttcgtgcaagggcttttagcctgctgtccattgctggagtatcaggattttgtcaggtaagcataccgctagggatgtataataaccttcccctatcaatttctctggtggccagacatggtgcagataaatttttgcttcaccttgttgagagtctttatgacagcattgaagatagaaagcagcatatcatagagcacaaactttaatctgactgcaaggatgtagatatgctttgagtatgcctactatgccaaaagctgggagagaagcgaattatggacataaatcaaagaagggatattgtataaaggaaatttttgctgatctatatcctgtttctttcagatattatgagttcaattattcattaaatcatatcattttgattgtgctagcttgggtacgaaagcaaaaaagccacattggaatttatagtacttcaatattaccatatcatgttcacaaatgatcagtttttgacgcatttgatatccagctttgtcagttaagtattatggcc

SEQ ID NO: 63204 - DNA, 2346 bp, Glycine max
  Clone ID: PAT_MRT3847_28087C.1
gtaggtgaggaatacccaaacagcatctcattctactgtttattggccagatggcttctgcgctatttcgggttcgttctgctttgggggattagtcccatgtgtgttgcgtttcatcgtgatagtatctcttgctactgttttctgggcaaattgcttatgcgactccttgctctactcggcatggcttcgtttaccttcaggtgttgattccaaaaccagaaagatgttcattgaggaagtcatggaactggtggagctgaacccattaaggaactcactggttggattgcccggtgtgagtggtctctcaactgaacaacgaaagagactgactattgcagttgaattagtggctaacccgtccataattttcatggatgagcctacttctgggttagatgcaagagctgctgcaattgttatgagaacagtcaggaatactgtggacactggaagaaccgttgtttgcaccatccatcagcctagcattgacatatttgaagcattcgatgagctattcctaatgaagcgtggaggacaagaaatatatgttgggccattgggtcgccactctactcatttgatcaagtattttgagagcattggaggggtgagcaaaatcaaagacggatataacccggctacttggatgttggaagttacaacttcagcacaagaacttagtttgggtgttgattttactgacttgtacaagaattctgatctatataggagaaacaagcagcttatacaagaactgggtcaacctgctcccggttcaaaggatctttatttccctactcaatactctcagtcattcttggtccaatgccaagcttgcttatggaaacaacgttggtcatattggcgtaatccaccatacactgctgtgaggtttttcttcactactttcatagccctgatgttcggaacaatgttctgggacctcggaagtagacgtacaacaagaggagacctgttgaatgctctaggttcaatgtattctgctgttctcttccttggaatacaaaatgcttcctctgtacagccagtggtagcagttgaaagaactgtcttttatagagaaaaagctgccggaatgtattctgccttaccctatgcatttgcacaggttctggtagagataccatatatcttcgctcaagctgtgacatacggtttaattgtttatgccatgatcggatttgactggactgcagagaaattcttttggtatctatttttcagtttcttctcattgttgtactttactttctacggcatgatggctgtgggagtgacgccaaaccaccatgttgctgccattgtggctgctgcattttatgcaatttggaatctcttctcaggatttatcgtcgtaagacctaaaatgcccgtgtggtggagatggtactattgggcatgtcctgtggcttggaccttgtatggattgattgcatctcagtttggagatataactgaaagaatgccgggtgaagataacaagatggtgaaagaattcatagaagactattttggtttcaaacatgacttcgttggaatttgtgctgttgtggttgctggcatcgccgttgcctttgcattaatctttggtgctgcaatcaagacctttaacttccaaaagagatagatggatagattgaactctttctccaacgtcaaagattctttatattttctccctttttctttttttcttcttgtttttgttttccctttaagcttataatatttgtatctatcatttaatcatttgtgcaaaaccagcccgtttgaaggctgtcctttataaatgtatgatgaatttcaaaagaaagatttttgatacttaccacataagcataatgatgtacatcccataaataaatcaaaaacgtattctattacgagttgataagattaaaacaagatggtgaaagatttcgtagaagactactttggtttcaaacatgacttcgttggagtgtgtgctgttgtggttgctggcatcgcagttgcctttgcattaatcttcggtgttgcaatcaagacctttaacttccaaaagagatagatggatagactgaactctttctccaacgtcaaagattctttatattttctctctctctctctttgcttgtttttgttgtctctataaacttataatatttgtatctatcatttaatcatttgttcaaaaccagccagtttgaaggttgtcctttataaatgtatgatgaatgtcaaaagaaagatttttgatacttaccacataagcataatgatgtacatccgtgaattaataaaaaaaacatacgagttgataagatttattaatca

SEQ ID NO: 63205 - DNA, 1590 bp, Glycine max
  Clone ID: PAT_MRT3847_28088C.1
aattcggctcgagcaagcaggagccttacaaccttcctaactcttatgagtggacaacacgagctcatgatccttaacacagttattggtgcgcaggacattatgttgcgcacagatcttctcagacagcattacggcctaaacggctaaacccctccatgttgctttctacactcattgcaacgaattgctaacgtcccacacgctacagagaagatacgacagagtgagagagaaagaagcacaacaaggatgtcttcgtcgtcatcgtcgtcgtcgtcgtcggaagatgaatctatgtcggaacagagcaatgaattaggacttgatttcatcttgagcttggacaatgttccatcaaagctccctccacacctcgaactctttaaaacacgtgttctttgcaacaacgatgctcctgtgcacactgatactgtacaatattctggtgcctatgctattttaggagttgataatagtgtgcggttggatagcttctgtgaaaactttaaggttgaagtgaagcggcttacggatagcgatattgaatttgatatgattggaatcgatccggcaattgccaatgcatttcgaagaatccttatagcagaggttccaacaatggctattgaaagagtatatatcgcaaacaatacatcggttgtacaagatgaagttctttcccatagattgggtctcattccaattcgtgctgatcccaggctatttgaatatccagaaaatgcaggagatgacaagaatgaaaagaacaccattgtcttcaagctacatgttcgttgtcaagtgggtcaacctcgtattactgtaaaatcagataaactgaagtggttacctaatgggagtgagcttccctgtgaagatgtcaaaccaaatgcaggttcaaaaccaaaaacatttacatctttcacttgcagccaagattcacttcctgaattttccaacaattcaattggtcttacatattcggatattatattggctaaacttggacctggtcaggaaattgaacttgaagcacatgcagttaaaggcattggtaagacacatgcaaaatggtccccagttgccactgcttggtaccggatgcttccggaggttgtactcttggaagctgttgaggatgagctggctgaagaattaaaaaataagtgtccagttaatgtgtttgatattgaagacattggaaaaggtaaaagaagggcaaaagtagccagaccacgggattgcactttgtgtagggaatgcatcagagggggcaaagaatgggaagatcgtgtatcattacgccgtgttaaaaatcatttcatttttactattgaatcaactggagcattaccccctgaagtgctatttactgaagctgtgaagattttggaagataaatgtgaacgtgtgattactgagctttcttgattcttattttttgccatgtcttaaaatcaatgaaatggataaatgtgatccttgattcagttctgttatgattccatttttttttatactttgaaagttcttttctaagttctttccttactcataaaaaaaaaaaaaaaaaaaaaaaaaaaaaaa

SEQ ID NO: 63206 - DNA, 272 bp, Glycine max
  unsure (1)..(272): unsure at all n locations
  Clone ID: PAT_MRT3847_28089C.1
cagagcgannagncagtagagnncannagggcgcntggaaactggtggtccgagtangtaatgaangaaagnnacntacgcaaggcgggtgtgagtgtgtcacagtcggaaaaaganatanatgttctnctcanaatatattaaataantatcanatctccgtcttctatatattatcagtcgctgagtcccgntaaanagcaccaccancancancancacaacactattcnncttcgcagnaatggcgcnagtggatctgnacgggaacc

SEQ ID NO: 63207 - DNA, 415 bp, Glycine max
  Clone ID: PAT_MRT3847_2808C.1
gtgaaaaatttccttaaaattagatcagctgacatttcaatgcaactgtccataattcaatgtgaaacaaaacacacatgctaatacacaccaattcaattttcaagttgccaaaccaatacatatgtatagaaagcaatattctcacagggctatcataatcataatatatataatactaattaaaaattatgcaagctagaacttttagaacatgaaacttgattgatgcatagcaatgtagcatacctgagttgtgatggtaatgcagagagcagaatttccaaatggcaagacactgcttccggtaacactgagatgaagattttcaaggtggtccaatatttttagctcaacaccattttctttctcacagtggatctcaatgagcacctccttccccatcacccttgct

SEQ ID NO: 63208 - DNA, 1012 bp, Glycine max
  Clone ID: PAT_MRT3847_28090C.1
gaaaataacagcaaaaagtagcagctgctgcagctcccccgaagcttatctcagcagcagatactcaaccctgtttgagtagccgagaataacacccatgggttgaatgataataaacataacctggtgttggttttgaagcagatattgaatgcggaggaggagttgaagagacgaaatagtatgcaagtagttgcgatgcgtggtccctcggttccacttcaaggggatggaacaaatgatactggttcaatgattaggcatatgcccccaaggttgggatccgagggaaatcttgttgctgctgatgtggatggtggtggtgaaggggatgattttgctaaccatacaatgcattctcgccatgtgcttcggacaagtagcatgtctccttcttcagagtccactcttcggagaacccctagcattagcattcaacagaatgtgatttcacatccttctcgagcaaatatgggggctgctggtagtccatcacgctttgctctctcaggtcatcagggaaatcccatgaacctaccttcagtgtctgtgtcaggaactagttacattgcatcatccccttcccccagcagcatctggtggcacttctgttttcagagacgcccggcagtcaagcccatggaagtagaagctgtattctcgcttttgacaatatcggtgttctgaatctgttatcattctcaatttctaaactctggtttgatgtacataattttatcaatgagaaatgctaggaagacctctacctctgtactaagaattctatctattctgtatttgttttttgtttcttccacttgaggtgaaaaaagctcgaaggactgcctagcatgagctatagtgccaaattctttgtcttgctgttttctttagcaggatttccaattacaatacacgtatcctttaaaaacattgaaacatgaatgtaccttttaattttatatacttcttaattcagaaattgttcttacaacacaagaagagcctaacg

SEQ ID NO: 63209 - DNA, 325 bp, Glycine max
  Clone ID: PAT_MRT3847_28091C.1
ggtttttattttttttttagcaaatggtacttagcacttccctttgggatgccgacaacaaaacactagtgcaaaaactggcatgaggacttggctcaagatatggcacagggatttatgaacaatgacgattcccctgaaatgtatcatgcgtatttctgcagacgacttgggaggattcctctgagcatagaagaggctgtctccaacttgtggaacacctaatttggagtaatgcactggttcacacttcaaatgcatgttcaggcttaaaggcctttagccgaaggttcttgtagggtgtggcggggaactggaacagact

SEQ ID NO: 63210 - DNA, 319 bp, Glycine max
  Clone ID: PAT_MRT3847_28092C.1
ggccctaaaaaagggggaaccaggggaaccccatttgggggttccaaaaaaccttgggaagaaacatagcccaaaaattaagggagggcccgggtaaataaaaaacttcacaaccccctcccacaaattcaaatggcccccccccaacgagagaaaaaacggggcccccccgggaagcccaaaaaaacaaaatttccccggtttttgaacacccccaagttggcttttatgatacccccccacaaggcccctaaatggggggggaccaacagaattccccctataaccgccttgactccgggggggggggggtccccgg

SEQ ID NO: 63211 - DNA, 458 bp, Glycine max
  Clone ID: PAT_MRT3847_28093C.1
ccacgcgtccgtgattccttcggtggagttcagtcctctttctctaccgagaatactacctccgatgagccccacgagataaagcgtggggcacaattaacatggaggtggtggtggagctgtagcagccgcacctgcaggtggagctgccgcacctgatgctgacccaactgctgacaaaaaggactattccgtggaggatgagtccgatgatgataatgggattagggacatgcgtgaccaaacccatattctgctttggatcgagctccgacggaaaagcgtttttagcgacaaatgctataaattgattggttattgatccgccccagggagcggttcattgaactcccccaccatctagaaatgatctgggacccccatggatcttctgtatcgcattgtaggaatgatacctctttttaaaaagaggactgaactccaccggaggaatcacc

SEQ ID NO: 63212 - DNA, 203 bp, Glycine max
  Clone ID: PAT_MRT3847_28094C.1
agctccaacaaacggtccaacccagtaaattcattgttcgtcccaggctttgtcgatgttgaagatcacagctggtccgaaacttcttgcagggttaatgccggttccagtgacagggattgttctcaagtgaaccatgaagacggcaaacccaatgggaagtggtgctaacagaggaacgctagggactctcatctcgagcc

SEQ ID NO: 63213 - DNA, 308 bp, Glycine max
  unsure (1)..(308): unsure at all n locations
  Clone ID: PAT_MRT3847_28095C.1
ggggtgttgggnnttaaaaagacttacgccccaaaatatgttgagacatacatgatccatccccgaaaaggaaaaagatttatttaaatttccttagggggcgagctaaaaggaagcctagtgctttccggggggtgggtggncggggggcccctttgccccataaaccatagggttttttccacacancccatgccagagggggaaacttggaaaaaccctatttcccccatttctccccccacaaattcttgatnacccaatttggtttgnggccccgcctaggaaaggaaaaaccttttgcccca

SEQ ID NO: 63214 - DNA, 1218 bp, Glycine max
  Clone ID: PAT_MRT3847_28096C.1
gggatcagagttattctcgaggtgattgaagaagagaatgatggggaattgagttggaggtggagatgttggcagattggagtaacccaataatggcattgagactgagactcaaagtggcttcaattgggtcaccttttctgcagttaggttcttctgcaactgctgccttctaattctcccaaccatgctctctttccaaacttgcttttcattcaccacgcttgcagctcaacaaaaattcacacccaataaggttccttggtcggactggtagatttgagtccccacatgttaccttgggcttcagggccccacaatttcagcttccagagcctcttactgggaaggtttggacattggaagattttgaagcatatcctgctctattggttatgtttatatgtaaccactgtccattcgttaagcacctgaaaaaagacattgtaaagcttacaaaattctatgtggagaaaggacgttgccgtgcattcccatgatcttcaagttccgtaggccacacacctaaactgtgtggttatcctttccccatacgtatatgatgagtcacaggatgttttacaacattttggagcagtgtgtacgaccagagttctaccttttcaaaaaggatggtcgaaagccgtttgagctttcaaaaaggatggaagaaggccattcgagctggtttatcatggtcaatttgatgattcacgtccaagtaataatgtacccctcactggaagagacttgagcttggcaatagatcgtgttcttagtggccaacctgtaccatcagagcaaaaacctagtgttggatgcagcataaagtggcacccaaggaagaagttttgattgataaactgtaattatctttttcatcaaaagacattaatcagtgagttaaagtttctttttcaggttgctatgctttatgtaatgtcactaaccatattaggatgttacaccttattttctattcattcagtgttcctgttcacctacaatttccgtaagtgtgacttgcaaggaaatgatgtcatttgtggttcttatagttactgtgtatttcacataagtaataagttgcatactatagtacgcgctgatgaatagtatattgtaagtgtaataacaagggagtttgttttgcaatcctcctagaaatacaaccatgtttattatattttattatttgaaaaactatttatgttttgc

SEQ ID NO: 63215 - DNA, 424 bp, Glycine max
  Clone ID: PAT_MRT3847_28097C.1
cccacgcgtccgagagacttgagcttgttaatagatcgtgttcttagtggccaaccgtggccatcagagcaaaaacctaggtactttatattcttctccttttaattgtttgataatcttttaagtttaggactctattactttcacgtgcttaaggtcattgtttttctatgcatgaagtgttggatgcagcataaagtggcacccaaggaagaagttttgattgataaactgtaattatctttttcatcaaaagacattaatcagtgagttaaagtttctttttcaggttgctatgctttatgtaatgtcactaaccatattaggatgttacaccttattttctattcattcagtgttcctgttcacctacaatttccgtaagtgtgacttgcaaggaaatgatgtcatttgtggttcttat

SEQ ID NO: 63216 - DNA, 242 bp, Glycine max
  Clone ID: PAT_MRT3847_28098C.1
cgtcactccttgctcttagccctcctcctcttcgccgccgtgtccaccgccgcgatggcggtggccgcgtccgacgccgacgacatcctgatccgtcaggtggtgccagatgttgagcgaagcgacacaggaggacaacctgctgagcgcagctcaccacttcacctgcttcaaggccaagttcgccaagacctacgccaccaaggacgagcacgatgcctctcttcggcgtcttcaagtcc

SEQ ID NO: 63217 - DNA, 720 bp, Glycine max
  Clone ID: PAT_MRT3847_28099C.1
gtccggacctcccgggtcgaccacgcgtccgctcgtttgtatcgtaccaagacttgtaaaagacttcatttctttctttctttctttctctctctctcttttaaattctcgcgttacttatttttatcacttctcttgctcttccgccaagggttttcggtgtttcagcgaacgacgatgaccatccaacccttggatttgctccgctccaatctctcccgggttcggatccccgaacccaccaatcgcatctacaagcacgaatgctgcgtttcgttcgactctccgaggtcggaaggtggtttgttcgtcgacatgtgtacttttcttgctttcgggaaggattttgttggttggaattatgagaagactggaaatcctgtctatttgcatataaagcagacaaataaattagttccagaagaccggccttcaaagaaacctactctcttggctataggtgttgatgggggatttgataacaatgagccagaatatgaggaaactcatagtgtagttatattacctgagtatgtttctcttccattcccttctgtggaattgccagagaaggtaaggttggcagttgatgcaatcttactagctgagggtgctgaacgaaaggagcaacttgcagcatggactgctgataagaagaaagttagttcctatgcaacaaatttacaacaaattgacaatgggttttgttattccaccatc

SEQ ID NO: 63218 - DNA, 638 bp, Glycine max
  Clone ID: PAT_MRT3847_2809C.1
gatccaagacagcccaacatggtcattttccagatccaagtccctctcatccatgggtgactatgtaaggacatgctgggcctggatcctctccaggaagctcatctttgccacagatctcgaaatgaacgaccagaaaactaagctccttggctcccccaacaggggcacttggagccatgttttttataagctgcgctctgagatcagaaggttcatctctacttctgatcacgccactcttcccaaaacctaccacaggtcctcacctcaagtcttctcataattccctccacatttctcaatgcttccttcaaataatttacctctttatttcagatcccccgtggaaatcattacgtaagccaattttatgtacaattcattcttcatgttaattttgttgcccgtacgcagttaattacgtgcatattatattaattgtggattgttataattaaatttgttgcctaatggaacaaattaaacatcttatttttagggtgcttgttgcaaactgttattatcttgtagttgtattgtatggtggatgtagaacctgccaattttctgtttttgaatcccctgcccaagtaattcgtaaataatgatagctgaattttaaacttgttgccgtg

SEQ ID NO: 63219 - DNA, 203 bp, Glycine max
  Clone ID: PAT_MRT3847_280C.1
aaagggatgggcaagcgctttttaatataacaccaccacaactatcaattcaaagcatcttgtaatcatgaaaggaccatttaaatttagccggattgagccggggacataaaacaaaatttcaaactttttcacacaacccttcccttcagaagtgaaatcttttttttaccacatattccaaacccactgaacaacccatg

SEQ ID NO: 63220 - DNA, 310 bp, Glycine max
  Clone ID: PAT_MRT3847_28100C.1
ggttgtgtgagtgacacaacacagggagtaccggcattacaaatgcagatcatcgagaaaactctgacacggaagactactatcttcgaagtcgagagcagggacactatcgagaatgtcaacggcaagattcaatacaatgaatgcaatcctccggatcagcagcgtttgaatttcaccagaaagcatcttgaccatagcaggaccctgatcgattacaacatccagaacgaatcaagccttcatctcgtcctcaagcatcgtggcagcatcaatgaaccttccctcatagctttggctcgcaaataca

SEQ ID NO: 63221 - DNA, 393 bp, Glycine max
  Clone ID: PAT_MRT3847_28101C.1
tattttttttttttttttgcactgtcaaactcggtaagaggggatataagagttagttaactagcccacataaattgtattaaattctctaatattctaattggatttctaaagttaataaaaaaaaaaagaggtgttagtcccttgaaatcctattcctgcggcggaaagagcctgctaacttcctgtttgcggcagcactattcaacgcctcctttcaactcgtggcgcattctatatattctttcaaaagtggaaactgtgctttttccccttctttaaaaacctgccctccaattatctttaacccccacaatcgttcggctttctgacaaacatttttaatatactttccaaacatatcttctgaaactcttgcaagttcatctattt

SEQ ID NO: 63222 - DNA, 585 bp, Glycine max
  Clone ID: PAT_MRT3847_28102C.1
ttttgttgtttggctgacgagggaatttggagttgaaaggtcttggactcgattactgaatgtaagttatgaacattttcgtaatcatggctgtccaccttattatagatttgtgacacctttgtgtatgtctgaaaacgaagacgttctgttgctggcaaacgatgaaggttctgagtttgttttttataatctgagagataatagaatagaccgaattcaagattttgattcctacaagttttcatttctctctcatgattatgttccaagcttggttttgccatataaaaattaaggggatcattgctggcctgggatttggggttccaagaggtggtctgcatttctgtttccgactccagcaatgacatctccctcatcacacaaccttttgtgtgttttcaccgttatgctgctattatcgcttgtgttaagtaactagcaagtaggccttggaacctgcaggttggtcgttttctctgggagggaaatcagtgcgtggacaagatggctaaacttgggctgaactctggggtgggttttcagctggttgagtctccccacaggatttgaagcctctct

SEQ ID NO: 63223 - DNA, 1676 bp, Glycine max
  Clone ID: PAT_MRT3847_28103C.1
ctgaacttccttctttgaacaatttccctgacactccccaaagtgatgatcatgagaagagggaaaacaccgctgatgttgctgttggggtagtagatggtgagaatggcaatggccagaacttgagtttggctaaatctgcttgtagtagcaattctgagactagcaaaggttctggcttgtccctctcaaggtctgatattcgtgtgaaggctagagagagggcaagggagagaacaacaaaggaaaaggagaaagagaaagagaaaaatgatgagtctcatcgtcatcatcacaatgttgttgttgttcctcatcacaaccacaatgtgaacctcgtttcacaaacagcttctttcacggagctactcactggcagtgatcccaacaaagggtgtgatgaggctaataacaacatgatgttcaacaaagcagcaggtagactgcaatggtgttcatcaacaacacctatggactactttctggggctttcctcttctagaacaacgacacacaatcacaatcaccttcatcatcatcaatattcttcttcttcttctagtgggttctcattggcacaaatccaactaggacattctcttcctgaggcaatgaatcatgtttcagcattcaacaacaatgtgagtggtgataaccacaaccactcatcatcagatcctcatctgcagcagcaacacttgtcattgataccggatcatcttatgtcagctgtggttacttcttctgctgcttcttctcatcatcatcatcatcatcagcccagcgggaacgattacaatctgaactccaccatgtcttcgggcctcgctggttacaatagggggacccttcagtccaattctccgtctctgctgcctcactcgcagaggttttcgcctatagacggatccactgtacctttcttcattggagctgcttcttctgctgctgcagttgctgctcctgccatggagaacaacaacaacaacaaccatcaccagcatcagttctcttctgtttttgatggcagccgcttgcaactttactatggccattctgaccagaaggggaaagccaagaactgacttttggattgctccattttcctcctggacttaaagcttgcttttgccaaaagggatgagatggcgttgtcatcaagtgttggtatttcttgttggaatattttaagtcattcaattacattcagtatttggataaatattatattgatctatgcttgcgagatcattgtgtgtttatggagaaatgtaaaagctacttgattcaagatattcttttactttctgcaattattttggtattattgtctatactataaatagagaaaagagctgtccatcagcacactaaatttgcacatccgcctgcaacttattttatgtccagcaccttccacaacagaatctgaagggatttctgtcgcctgtaacttgagccttgacaccatttcagtagaaataaagttgtaaattgccctgcaattgcacagcctatccatgcatgaagtttgctgggagaatcttgcttccaatcttgcatccagtcccttttggaactgactccagcacatcgccaccctctccaaagcctccactcaggataccatccttacacttcccattaaatgtgccactccccacccacaagtcctg

SEQ ID NO: 63224 - DNA, 234 bp, Glycine max
  unsure (1)..(234): unsure at all n locations
  Clone ID: PAT_MRT3847_28104C.1
nagtcgcangcacgcgtacgtaagctcggaattcggctcgagcgtagcagatngtnncnganngagntanaatgnntaagncagngngtanngngttatnagccatgggntcaatcgngtgcgctgacnacgnanccntgttcnnatanncnctnggcgnanagnngcccacgattntgtgctgntngacgtacgtntaagntntcnatnacacntcntggaacngaagttgtt

SEQ ID NO: 63225 - DNA, 111 bp, Glycine max
  Clone ID: PAT_MRT3847_28105C.1
aggcaccctgctttttgcttgttacaactggcgtaaaaacaccattgttcatatgctgtactgcccttgtaggacttggggaccagctagtggcaagaaccagttgcctac

SEQ ID NO: 63226 - DNA, 559 bp, Glycine max
  Clone ID: PAT_MRT3847_28106C.1
gccccggttctcacactgtttttattttatttgttcaagcaagcattgcatcaccacccttgctctactggtaaccgaaatagaaaacttacagcaaaggacatcctttattcgacccatggccctatatctgtcatccattcacccctaaacaatccatagactgatcccccctacgccttcaagccctaacgtccggctgcacgcgccaacaacaaccgcaaaattatgaccaatcgccttaccaacacggaccctgcgcccacgagaaacgcttggcccctccctgatcttcctcacaagaagcctcaccgaactctaacctccttacaaaaaaaaaccggccacctgaccaaggcgcgcgggaacccaaaccgatgaaggtccgccacaagtaatgttatttttttgctcaggataagaccgagaagcttaacacgcaagctccgcatttgaagaagaaacccttggacgtggaacccggttctataaccgcatgcaagaaagccccccccttgccgtatgaagccctctgctgagccttggacaggctgactca

SEQ ID NO: 63227 - DNA, 391 bp, Glycine max
  Clone ID: PAT_MRT3847_28107C.1
ggctcgagatataatcttacaatctttcacacttttttattatatacttcataccaaaccgccgggttctttaccaagcggccacatatttatatctttcacataacttacatcacatatttagcacaaccctttaaacatatcactacatcacatattgcaccaaatttactcatcccaactgcacaaccacacaatgcatgatgtacactcttttttcattcttcttgacaacacccttaagcgtccaacttttattgtttacaatgtctattaatctttccaaagacaagcgtctgatcactatattatacaagattccccaagccaacttcaaatctccactctattcccagaagcaaacctaatccccgatgctatacaagcctcc

SEQ ID NO: 63228 - DNA, 251 bp, Glycine max
  Clone ID: PAT_MRT3847_28108C.1
cttttgactagcaaaactcaagttgttgccactcaatcagctcgaatgttaagtgctctgtctcgtccaacaaagaacaaggctgcaaataaaatgtcttatattgtagagggtgatgtcaagccactaatcaagttagctaaaacatcctctgttgatgctgctgaaactgctgttgctgcattggccaatcttctctttgatccttttattgctgctgaggctctagcggaagatgttgtttcagcttt

SEQ ID NO: 63229 - DNA, 272 bp, Glycine max
  unsure (1)..(272): unsure at all n locations
  Clone ID: PAT_MRT3847_28109C.1
aaacatcataattgtaaacatcattctaaacatgcaccagtttcagggctatttcaatcataatgtttcacatatacatttatngtatcacgtagatgtagtgattcaagccatggcacggtcttcatctacgngataccataaatgtatatgtgaaacatccataattgtaaacatcattctaaacatgcancagtttcagggctatnncaatcatantngtatggaancncatngataagngggatcattttttgggctncaaggngttt

SEQ ID NO: 63230 - DNA, 587 bp, Glycine max
  Clone ID: PAT_MRT3847_2810C.1
ggttttccccccagggcaacctcctttcagaaactctcattagttagttccacttcttccattctacatcgaagtatggatcatattaaatcccacaaaatagaagctttgattcaaagcacaaaatcccacaactacctaattaagcttatccaattgttggtcccattatctgtgttttctttcttcgtttctccatcttccttgcttgttttcctctaccacttcaacctctacttctctacattttctttgcagctatttactcacaccatagacaagaattgcatgtttctcctatgcaatggtctccttgtatttgttggcataacaagatctttatctgggtctagtggtgttgctgaaagtgaatcttcttctaagtatgttgaagatggatcacaatctccatactcagatgttgaggctacggaggcaataatcttggtggagaaggaagccatggagaaaattcatgagcctcatggacagaatacaggagcagaacatgcaatagaaatcaagtactctggtgaagaagaagaagaagaaggagaagaaagtataggagacataattttggaagg

SEQ ID NO: 63231 - DNA, 173 bp, Glycine max
  Clone ID: PAT_MRT3847_28110C.1
taacagttatattgagtgactaagactacgattgtgtgtacactgcagacgttagaataggtcaggtgtgaagggcggcaacggtgtaagatcggggtgaagctgcacgacaagtacggctactgcatatatattaaaagactcgaatcatggggtggattgatgggtaaggg

SEQ ID NO: 63232 - DNA, 409 bp, Glycine max
  Clone ID: PAT_MRT3847_28111C.1
ggctcgaggatgaatataaaatggactaaaaagcggccgtcctgagaactctctaggaaaaaacgaccctgtgaggcaaccattgaagcaattccgcggaatcatggcggttacacacagagttacaaccgactacaaatggaataacttgagcgcctgggtggcgccggaccttctcttacccgatatcaacttgaactctgcatgagcatctatcgaacagatactatgatcaacacggacgggaaagactctcgtcaaagcactagaactggtatagcagcttatgatgacgagggacatgccacagggaccgggaatatgcagagtgcagtagcccatatgatgactgccggtagcggctcaggtggacattctatcgcatggagcactttccaattaggatgga

SEQ ID NO: 63233 - DNA, 564 bp, Glycine max
  Clone ID: PAT_MRT3847_28112C.1
ggcttggaacctttgggctgatttatgtgcttgcatggtcgtgagaagatgatagcagggcatggtcgtggaagatgataggcgggcatggtttgggcaagatgatgtgcttgcatggtcgtgagaagatgatagaaggggacattaaaaataaaatataagttaagcgaaagcgagaaaaaacaaaaactaaagagtacaacgctagggactacctataagactggggagatttcctacgcgggagggtataagaaggaggaggagtacaagggcgagtattacgtcggagaacataaaggggagtattacggcgaatatagcagcgagcataaaggagagtactacggcgaatataaagtcggagagcattacggcgagtataagttagagtataaagaggggccttcagataaagctaaggataagacttacggcgagggtggtgttgctgaaggtgagaagaagaagaaggagaagaagaagaaggagtacggttacgagtacggttacgatagtagtagtagtagcgatagcgaccaaatcgtcgtaccaatcacacac

SEQ ID NO: 63234 - DNA, 295 bp, Glycine max
  Clone ID: PAT_MRT3847_28113C.1
ctccgacaagacgacacacggggataacacatcataaataatccttattgacatactgattgggaacagtcacattcacataatctttgtcctgcattcatataactttgttccattccatctatctatgatcatctccaccaccacttgttgattcattcattaagaaaccacacacttttgaattgacaacgggatacctctacctatcttgctgatctgaatccaatgtattaatctccaattcctgttcctcttccatagactatgataaaatcatcatcatcaatatcca

SEQ ID NO: 63235 - DNA, 553 bp, Glycine max
  unsure (1)..(553): unsure at all n locations
  Clone ID: PAT_MRT3847_28114C.1
ctttagggtttctctatactgttcaagctcatatgcacaaccattctatcattgcacactgaactctgtttgcaaaattcattgtcatgtccaaaattcgcgcacctaaatttgtgtcggaggtgattcataggcgagcagatggctattggattgacaagttctattatcataaagacgacaaagcccctggattaattgtgtatgcccgtaactccaatcccttgccccttgatatgttgcaagtcagttctaacaatcgatattggtgttcaggtccggcctggaagggaaaatcgaatatcttgaaaatcctaaaaggacttgtccgtgttccagtggagctgaatctcattggatcgacctggacgaagagtcagagtgtgaaaatgagttttcatcctcagaggctgaggcaggggggaagtgcgagctgtttggacttacccatagcgaaactggtccatccatggaatggacctcccacgaaatctgccaactcaacacacctgtccncacggnctctctggacatttactgcaatggcttcatg

SEQ ID NO: 63236 - DNA, 434 bp, Glycine max
  Clone ID: PAT_MRT3847_28115C.1
ggctcgagatggtcttgacgtggatggcagaaaactttactgggaatatagtagtaagccaacaggaggtcctggttcagatggagctatgaactctggtcataataattagagcatgacggttccatactgctggatgcgcacctattgtggctacataaatcctgtacgcttggctttcctgcattcagctgaatgagccacgaactgatgatgcgattgcatgctatcttacatagtgtaatggaacagctgtaggaaagacaggtgctataagcagcgttcaagctcatagtgattggcttgatcccgcagtgattgtgatgaaaattgtcggatagactgaatatcgctccgtctttgagtcttatcaaacatgctgcgattaaggatctgtgcatgcgagagacaagtatactcatgtctcaagggga

SEQ ID NO: 63237 - DNA, 761 bp, Glycine max
  unsure (1)..(761): unsure at all n locations
  Clone ID: PAT_MRT3847_28116C.1
attattagctacttgatgactctatctgatganaatgtcacatggttgaatgaatgatcattgtcatggtcaagaaagaaagcatgtcaaagtcaaaagtagttgctgcctttgttctcttaacacatcatgcacatatcattttctaggctaaccaatgcaattgatggatcattagagtagtgaagcgcagcaatgaacactgagggaaaagttgggtgggaggaaatcgtggattctcgccttcaaggaaactttgatgtcaaggaactcaatgaaatggcagcacttgcctacaaatgcataaaccgtgccccaagtaaacgcccttcaatgagggacatagtgcaagtgttgacgaggatacttaaatcaaggaaccatgggagtcatcatcacaaaaattccctgtcagccacagctgatgaagttttcattgatgctgatcagctagagaacaagatttctgttactgaccacaggagagaagagtctttggatagtgtagcagaggtgtatgaagtgtagaatatggttttaacttaacctttttttttgttacatttcattttttgatattggctttggatgtacatggttgtagatttggtttgtatactgttttgtaaaatgttctgtccatttttttgatattcccttagttatattgtcttgctgaaatgatatttcaaaatttgtatattaatacttccaagaaccaatttgaagttacaaatagaaagttacctttcttgcccgta

SEQ ID NO: 63238 - DNA, 1782 bp, Glycine max
  unsure (1)..(1782): unsure at all n locations
  Clone ID: PAT_MRT3847_28117C.1
aaattcggctcgcctaaattactgtgtctttcctccctatccgtagtagagagaaagatgggtagtagtgaatatcagactctgcacattttcttctttcccttcttggctcatggccacatgataccaaccgtggacatggccaaattatttgccgaaaagggtgtgaaggccactataatcaccacacccctcaacgaacctttcatctacaacgccattggaaaatccaaaactaatggcaacaaaatccacatccaaaccatagagtttccttctgcagaggctggtttacttgatggctgtgaaaataccgagtcagtcccttccccagaattgttgaatccgttttttatggccacccatttcctccaagagccacttgagcagctactgcaaaagcaacttccagattgcattgttgctgatatgttcttcccatgggcaactgattccgccgccaaatttggaattcctaggctcgtcttccatgggactagtttcttctccttgtgtgttaccacgtgtatgccattctatgagcctcatgacaaatatgcttcttctgattctgattcgtttctcattcctaacttcccgggcgagattagaatcgaaaagacaaagattccaccttatagcaagagtaaggagaaagcaggcctggccaaattgttggaggaggcaaaggaatcagagttaaggagctatggggttgttgttaatagcttctacgaacttgagaaggtttatgcagatcattttaggaacgtacttggaagaaaagcgtggcatattggtcccttatctctatgcaataaagacgcagaagagaaagcacgtagaggaaaggaggcatctattgatgagcatgagtgcctgaagtggctaaacacaaagaaacccaattcagttatttatatatgctttggaagtacagtaaagtttcctgattctcaacttagagaaattgctaagggtcttgagggcttcagggcaacaattcatttgggtcgttaggaaaagcggagaagaaaagggagagaaatggttacatgatggatttgagaaaagaatggaaggcaagggactaatcataagagggtgggcgcctcaagtgttgattcttgaacaccaagcgattggcacgtttgtgacacattgtggatggaattcaacgttggaagcagtgactgcaggggttcccatggtcacttggcctattttcgccgaccaatttttcaatgagaagttggtgattgaggtccttaaaattggggtacctgttggtgctaaaacatggcttggaatgcagggagatagtatttcatgtgatgcagtggagaaggcagtgaagaggataatgacaggggaagaagccattgaaatgaggaacaaagcaaaggtgctttcacatcaagctaggcgggccatggaagaaggtggatcatccaactctgattttaaagctttaattgagggattaagttcgttgagccactaatataccaccatcaacactatgcatgcatttactctcaagattatttgttatctaaattttaatgatttaagctaaaatagtttaaaatcctgtcgacctaatttttttttatctagtgaaaatcaaatactatttataataactcaatcaacttaagtttaaatatatttagttcctcataatcatattatattataacattattcgtgtatttattgaatttttttcccctgtaatcccttaaatggtttccgagtcatggtagccagaanttntca

SEQ ID NO: 63239 - DNA, 1177 bp, Glycine max
  Clone ID: PAT_MRT3847_28118C.1
gaattcggctcgcggtggaaaggtcctcccaagttcaaaccacaatataccaaagatgaagccatacagcatgtgcgtgacctttaccgggagtccctcaagaaatatggagcagaaggatccaggggtaaatcagcagaagatggtgaacaaaatatagatgagctttctttcacagaattaagagataagctaattgccctagatcctctcaataaaaagcacatcatcagcattaataaagctgaggccgagttctggcgaaagtcagaaggatatagggttggatggagtgatgaaatattgggctttgattgcggaggccaacagtgggtatcagaggcatgtttccctgctggaaaactagctaatccaagcatgaaagaccttgaatacattgaagagctgaagctacttatagagaaagaagacatacctgcacctgctccaattgagcagcgctggacagctagcagtaggagttccttgagtcctgcttcaagtccgtctggggatgatatattttcttgggtaggtataatcatgtacctccctaccatggatggtcggcaaaggaaagatataacagaagagttctttcattataggcatttgactcaggcaaagttatgggatcgttactccgcatatgaacactgggctaagattgaggttccaaaggacaaggaggagcttgcagccctccaagcaaggctaagaaagcggtttcctgtggatgcatacaataaagcaagaaaggaattggaccccaataggatcctttcgaacaacatgttggaaaagctcttcccacaatcagacaccatataattttgtgttggttgtgtctatattgtccatattttttatgtttactatatattcaaccctaagtgctgataaaaaaaatatattcaaccctaagttgttgactttggaacattgggttggaaaatatctggtgcacaatctggattattatgcataaatgcatattttcagtttatttcttgcatgacagatgcattgaactcagaagattaaagaattgcaacgtatgtacaggggtgtgcaaaaatcagtactgaactggttccaaattggtttaaacggttcagtttgtaaaccaaatttgagagttggtttgacgaatcggtttaaacatttcatttaagtt

SEQ ID NO: 63240 - DNA, 853 bp, Glycine max
  Clone ID: PAT_MRT3847_28119C.1
tgtgggaaactagctaatccaagcatgaaagactttgaatacattgaagagctgaagcaacttatagagaaagaagagatacctgcccctgctccaattgagcagcgctggacagctagcagtaggagttccttgagtcctgcttcaagtccgtctgaggatgatatattttcttgggtaggtataatcatgtaccttcctaccatggatgctcggcagaggaaagatataacagaagaattctttcattataggcatttgactcaggcaaaattatgggattgttactccgcatatgaacactgggctaagattgaggttccaaaggacaagaaggagcttgcagctctccaagaaaggctaagaaagcggtttcctgtggatgcatacaataaagcaagaaaggaattggaccccaataggatcctttcgaataacatgttggaaaagctcttcccacaatcagacaccatataaattctgtgttggttatttgtctatattgtccatattttttatgtttactgtatattcaaccctaagttgttgactttggaacttgggtttgcaaaatatctggtgcacaatctggattattatgcataaatgcattctttcagcttattgcttgcatggcagatggattgaacacagaagcttagagaattgtgatgtatgcatatagaggagctggattgagtggggcgactgcattggcgagcttgactaaaaactgaggagccaaaaataatgaagcttacaatatattagttaaatgtaacattttttatatcatcatattttatgagtaattttaaacatttaattatattagaaaatattttttcacttt

SEQ ID NO: 63241 - DNA, 3690 bp, Glycine max
  Clone ID: PAT_MRT3847_2811C.1
cacgcgtccgcttcagttgcacgccgtgtggatgatgccatttcaagttggtattggtttgttcttgctgtacaactgtctaggagcctcagtgattacggctttacttggacttcttgctgttattgtatttgctgtggtgtctacaagaaagaacaagcgttaccagtttaatgccatgatgagccgtgattcaaggatgaaggcagtgaatgagatgctcaattacatgcgtgtcatcaagttccaagcatgggaggagcatttcaatgggaggattttgggtttccgaaagtccgagttccagtggctttccaagttcatgtactcaatctgtggcgttattattgtgttgtggagcacgccattgttgatatcaactctcacgtttggtactgcgcttttgcttggagttcgactcgatgcagggacggttttcaccaccacaactgtgtttaagatcctgcaggaacctattaggaccttccctcagagtatgatatctctttcacaagcgctggtgtcacttgggaggttggataggtacatgtctagcagggaattgatggatgattcggttgagagagaagaagggtgtggtggacacactgctgtggaggtcaaggatggaaccttcagctgggatgatgatggccaacttaaagacttgaaaaatattaacttgaagattaataagggggagcttacagcaattgttgggactgtaggctcagggaagtcttctctccttgcttcaattcttggcgagatgcacaaaatttctgggaaggttcaagtttgtgggagtactgcttatgttgcacaaacatcttggattcaaaatgggaccatcgaagagaacattatctttggtttaccaatgaacagacagaagtacaatgaagttgttagagtttgtagcttggagaaggacttggaaatgatggaacatggggaccagacagagattggagagcgcggaatcaacctaagtgggggtcagaagcagcgcatacagcttgccagggctgtgtatcaagactctgatatatatcttcttgatgatgtttttagtgctgttgatgcacacactggcactgaaatattcaaggaatgcgtgaggggggctctgaaaggcaagaccgttattcttgttacacaccaagtagacttcctacataatgtggatcttatagtggtgatgagggacggaatgatagtccaatcggggaagtacgatgatctacttgcgtctggaatggattttagtgctcttgttgcagcacatgacacctctatggaactagtggagcaaggtgcagtcatgactggggaaaatttgaacaagccattgaaatcaccaaaggcagcttcgaataacagagaagccaatggtgaaagcaactctcttgaccagcccaagtctggcaaggaaggttctaaactcatcaaagaggaggagagagagactggaaaagttagcttacatatctataaactctactgcactgaggcttttgggtggtggggcattatagcagtaatctctctttctgtgttgtggcaagcatcaatgatggcaagtgattattggctggcatatgaaacatcagaagagcgtgctcagttgttcaatccttccatgtttatttccatctacgcgattattgcggtagtttcagttgttttaattgtgctaagatcctactctgtcacagtcctggggttaaagacagcacagattttcttctctcaaattctccacagcatcttgcatgcccccatgtctttctttgacaccacgccatctgggagaattctaagcagggcatccactgatcaaaccaatgttgatgtctttatccccttgttcatcaattttgtggtggctatgtacattacagtgatcagcatcttcataatcacgtgtcaaaattcttggccaacagctttcttgttaattcctcttgcttggttaaacatttggtaccggggttattttcttgcttcatctcgcgagttaactcgtctggattcaattacaaaagcaccagtgattcaccatttctctgaaagcatttccggggtcatgacaattcgcgcattcagaaagcagaaggaattttgcggagaaaacattaaacgggtgaatgctaatttgagaatggatttccacaacttcagttccaatgcgtggttgggtttccgcttagaattgcttggaagcttagttttttgcctttctgcaatgttcatgatcatgttacccagcagtatcataaagccagaaaatgttggtttgtctctctcatatggcttgtcattaaatgccgtgatgttctgggctatatacatgagctgtttcattgaaaacaaaatggtatctgttgagaggatcaaacagttcacaaatattccatcggaagcttcatggaacattaaggatcgcctgcctcctgcaaattggcccggggaaggccatgttgatatcaaagacttgcaggtcagatatcgtccaaacactcctttggttcttaaaggcatcaccctaagcatcaacggaggggaaaagattggagttgttggtcgaacaggaagtggaaaatcaactttaattcaagttttcttcaggctggtggaacctacaggaggaaaaataatcattgacggcattgacatatccgccttggggcttcatgatcttaggtcacggtttggtatcatccctcaggagcctgtcctttttgaaggaaccgtcagaagtaacattgatccaactggacagtacacagatgaagagatatggaagagtttggaacgttgtcaactaaaagatgcagtggcttctaagcctgagaaacttgacacttcagtggttgataatggagataactggagtgtggggcagaggcagttgctttgtttagggagggttatgcttaagcaaagcaggctgttgtttatggatgaggcaacagcttctgttgattcccaaaccgatgctgttattcagaagatcatcagagaggactttgcagctcgtaccatcatcagcattgctcatagaataccaacagtaatggactgtgatagagttctagttgtagatgcagggcgggccaaagaatttgattcaccagccaacttgctccaaaggccatctctctttggggcattagttcaagagtatgccaaccgttccagtggcctataagaaagttccatgcatgtgtctctctcagccattcagacaataacagaaaaccaaacttaggctaagccttttaagttttgattgatcttccaagtgccacgagaaaggagaaaggcattttactttagagaggtgcaattaccatcctgcataattgctgtttggacaagtgaagaatgagcaaaccttgtgaatggtttttctaattacctctggcttaagtagctctagtatacaaacaaaatatagccttttttaggtcctaatttatataacacagtgcccagtgtacaattacacagttgctccactgcctttatattgaattatgcatcatcagtaatatactttggacttctcgttgagcattagcttacagcattaaatattgttgaccttgttcatgtcgcgaaaagagttctaaatggaagatgcattttagattatcttataatttatgggattttattaatggt

SEQ ID NO: 63242 - DNA, 380 bp, Glycine max
  Clone ID: PAT_MRT3847_28120C.1
cttctactatttctctgctttgtatcactctatgctgctcactgatccgcattgccgatcaaagtggtcttatttgaaaaacacttgggcgttggcgcaaatggttgcttcgttaatgtttcttctggagacaacaggttcactgagacaacaatttttaattgcagacatgcggacatcttgggtggttattatacaataccacctgaattgagaagatttgtaccacattacattaggtggggtcagcataccttggtgatctacattctcccatcttttttcactgctgaaaaaaaaataagcggcatgagagcaatattcaaatctccggcttatgttacgacggcagatacaagctctggactaaacaccagaaa

SEQ ID NO: 63243 - DNA, 746 bp, Glycine max
  unsure (1)..(746): unsure at all n locations
  Clone ID: PAT_MRT3847_28121C.1
cagatactcaccttgttttgttgaggctctaagagacagacagtggttgtaggttgccatttgggttcacaaggaagaagcacaactgctataattgtggtcttttgttctgtcgtgcttgtagtagtaaaaaaattacaaacgcacctctagcccctagtaagagcaaggcttttcgagtttgtgatcagtgtttcgataaacgacaggggggtgcccattcagtaatggcatcaaagtccagaaattacaacactcagcaggtgttgaagcatcaacacaaaatttctgatgtgactgaagataggggagagacaactgtgacacaaggtcctatgttatcacttggtcagtcatgttacaggaaaagcatgccaagtggacgaaaggattggaaaaaccatcaagaaattcagcaggatgtagaagacagttcttctatgctaggtggaatgccacagtgggggcaagttccatgccctgccatgtttcaaataaattgtacagaaaatccagttgttcatgtttcttcatccaaaaataaattagccacagtttctccctttaatgtggaatctacagcatataacttctcctccaatgtggagactgatacaacaaagtctgacaaggtgctccttgaagaagttcataggcttagagctgaggctaagagacttgaagagcagtgtgagctcannaaccgtanaatacaagagtgtncgacaaaaattgaggagagttgg

SEQ ID NO: 63244 - DNA, 480 bp, Glycine max
  Clone ID: PAT_MRT3847_28122C.1
ctaattttaatagctttcctttgccaatatgtaagttgtaactcaagtcattgtaggtttttatattttgtattttttatggaaatgtcaaagataactcataaattttggttgacagccacaacatacatatcaactttcttgagttggcctggattaatcctttgcaattttaagattttgttgtattcactcacatgcattttagaattgctatattttgaaacgtacaatacagttttaataatagttttatgacatctcatatgttgatctgtatcaccaggaggaacttttggagctgcaggatcctgatcttgcttccactattagaaaacagcaacaacgatccttagaattctgggagaataactggcacagtgatgtaccccttaaaataaagcgtcttgcgcgtgatcctcaaaggtttgcttgggcagtaggtattgcacagtcacgatgtattaacatgcaaacgag

SEQ ID NO: 63245 - DNA, 400 bp, Glycine max
  Clone ID: PAT_MRT3847_28123C.1
gttactgcacactttcctattccttagattatggttcgagttggaacatctacttatcacttctcatatacaaagacagctttcctatccctgattagttctttgcaaggggtggcagtcttagcggataaattaatgcttatcatcaattattactctataattctttagtcagttgtttatgatgtttgtgccttcaaattatacgtctcgctggttcactctgcgtgcttgccgacgtcagctccggtccaacgcgagctccgtcgcacccagcttggcttttacaatcgactactccactcccgcagccgtgtaatgtggtctctacgccgacaattcttgccacagctacccggccttcacctttcgaaccggaaaaaaccgggccggagtgcgc

SEQ ID NO: 63246 - DNA, 400 bp, Glycine max
  Clone ID: PAT_MRT3847_28124C.1
acgcaagctataacgctattaaatggcccacgaagaagtaaaggtcagcatgccctaaggacacaataatacctgtaaggggaaaattactgttcactggaaagtcaaagaacgtgataaccaggacatgtgcatgaatggcatgaggatcaagataccatgacttgcaaaattgaaagccatcttatgctgcgatggaacatcctgctggatggtaaacccaggaacacatgacttatgcgcgatcagtgtcatcatgtgaatgcaggcgcccaacggatctttgaatgcccctgggcgaacagtgattggccaacagcagaatgagttagtgaattgcaggatttgcctaaagcttggactgggaaccacgttgagcagcctttggtgactccatgcc

SEQ ID NO: 63247 - DNA, 269 bp, Glycine max
  Clone ID: PAT_MRT3847_28125C.1
tttacgctttcgggaactataatctggcttgcgatgatggttggtctgacaagccggttaccagccaagtggtgagcatgatggcccaattttttaacagtggtggtagatggaatcacaaaaggacgcaccaacggacacacctgcggtcaaggaggggtacaaggatgacagttggttgaagagatgaatgcggagttccttgtggattgccttttggatttatgctcactgccattggtaataagatgctcattgagttgcgcttt

SEQ ID NO: 63248 - DNA, 557 bp, Glycine max
  unsure (1)..(557): unsure at all n locations
  Clone ID: PAT_MRT3847_28126C.1
gctggaacccctgtggtaccggtccgnattcccggtcgaccccgcgtccgctcacccaaccctaacctctccccctcaatcctcacccaaccccccgcactctctataaactcagcacgatctcagcaaaccctaaaccttttggcaaactccaaaatctctctgaaaaactacagagagactcttccttctccttcggattcgacgatggaagaacctcccgtcgtgagatccaggggccgcccgcgcaaacggaggagagaagacgacgcaaccgtcaccggcgacgcgaaaactcttcccgaggcgaagaagatgatgccaattgcattggttggacgatacgtgctgaaagagttccgcagaaacacggttcttctcggcaaagtcgcgcgttacgcgagtggattgtacagagtcgtgtacgagagtggcggtttcgaggatttagatagcagcgagattcgtaggatacttctccttgatagttatttcgacgacgatttgattcggaggaaggttgaattggaggaatcggtgttgccgaagatcgctgc

SEQ ID NO: 63249 - DNA, 479 bp, Glycine max
  Clone ID: PAT_MRT3847_28127C.1
cgcgcacatgaccttacatttgtcatagacacattggcttgcctcatttggggtgaaacttgctattgagcgtgtgccaagaaaggcacaatgcagctgatccttagctcaagagagtgtgcaatagctaccactgtctgcggcatgggtgaaaacacagagagggacatgtaacactccattggtacaacacatgtgatgcttccagcggctgcgtagctccgcgcttgcacttagaaggtgaacacgatgccatcgttgatgcgtgccttttggtcctgtgcaacacactcgctgatccacatgacgttggggatctcctgctctctcaacttcacgtacgcgtagaacacgccatagtggaactgctgctcaaatgtcattacacaccgctttacctcctccttatacagcagcttgtccagcatctggctctcaccaaagccaagcttgttgaaaatggaggcataggcaggcac

SEQ ID NO: 63250 - DNA, 1007 bp, Glycine max
  Clone ID: PAT_MRT3847_28128C.1
ccacgcgtccggataaagcaaaggaaagagagagggagaagtacagagatagagagaaggagagagaaagctatagagatggggacaaggataaggggaaagataaaattagagagaaggagagggagacggatcgagataaagaaaggacgagagatagagtgagcagaaagactcatgaggaagattatgaactggataatgttgatgataaagtagactaccaagacaagagagatgaggagattggcaagcaggaaaaggattcaaagcttgacaatgataatcaagatggtcaaacatcagcacatctgtcatcaacagaacttgaagaccgcatcttgaagatgaaagaatcaaggacaaagaagcagcctgaagctgattctgagatctcagcatgggttaataaaagccgcaagatagaaaagaaaagagcatttcagctctcaaagatttttgaggagcaggacaacattgcagtagagggaagtgatgatgaggatacagcccaacacactgataatttggcgggggtgaaagttcttcatggcctcgataaagttatggaaggcggaacagtagttctaactattaaagatcagcccatacttgctgatggtgatgttaatgaagatgttgacatgcttgagaacattgaaattggagaacagaaacgacgagatgaggcttataaagctgcaaaaaagcaaactggcgtatatgatgataagttcactgatgacccctccactgagaagaaaatgcttcaacagtatgatgatccagctgcagaagagggtttaactttggatgaaaagggacgattctcaggtgaagctgagaagaaacttgaagagctgcgaagaaggttaacaggtgtttccacgaatacctttgaagatctaacttcatctggaaaggtatcatcagattactatactcatgaagaaatgctaaagtttaagaagcccaagaagaaaaaatctttgcggaagaaagatagg

SEQ ID NO: 63251 - DNA, 1405 bp, Glycine max
  unsure (1)..(1405): unsure at all n locations
  Clone ID: PAT_MRT3847_28129C.1
ccctctttcaccgcagtgttagggtttctgtagcctccaactctcgtgcctctcttccaccgcacaccctctgctcctaggcccttttctcgcccacctctcaccctctgctccgcctacaccccagtcgaagggtttcaccacccacagagaaatggctcccaaaccgcctagtacgggtctgtttgttggactgaacaagggtcacgtcgtcaccaagaaggaattgcctccacgcccctcagatcgtaaggggaaaacaagcaagagggtgcactttgtgaggaacctcataagagaggtagccggttttgcaccctatgaaaagcgtataactgagttgctgaaggttgggaaggataagagggcactgaaggttgcaaagagaaagctcggaacacacaaacgcgcaaagaagaagcgtgaggaaatgtccagtgttctcaggaagatgagggctggtggtgctggagacaagaagaaataagtcttatttactgttttccagattcactagatggacctgtgtattgatggacgagctttcatatttttgctttggttcaattagtttacttcaagattttgtttgagaaatatgttttgcttaactgagacatgatttatggaagaagctagattggattattttctgttttactagaaatgagagttataatcctttttcaagggcttattttgatttatttgtatcttgatagtaataatagtttgaatccctttttaagtcatgttggaatctgtgatgttgttccatgggaaaattgcaaacaagaaagttttttcaattgtaatgagtcagtttttttctatttgcacttcttttttatattgtaagttgctatttgtgttttataattttccgttccttctattgtatgtattaggtttctgattaagtatagtagttttcttatacaagtgtaactcatgtttttttatgacaattactttgcctattcattagaagaattgcaatatagaagctttcagttcttactacaggtgttctttgtggggagcactaagattttgaactcgtatttgcgccaatttttatttccaaactgatctcaatctttggagacctattttcccttccttttatcaatgcattcactctgaataaaatgtgttcttggttgtgaaaattggactatttatcatgttagaagtgtattgatggatcattcttaaattgttttaaattatgatgctgtattggataaaaataattaagacatacangagattttgtttttatatcttatatngtggtcctaaaattatattgattcaaaacagaaaacaagcaagagggtgcactttgtgaggaacctcataagaaaggtggcttggttttgcaccttataaaaacgtataa

SEQ ID NO: 63252 - DNA, 249 bp, Glycine max
  Clone ID: PAT_MRT3847_2812C.1
aaaataaattataatgttttaaaacactatataataatttaaataatttcaatcttgaaatgacaaattaataaacgttagataataatatcataagaataacagaattcatgctcattcctttaactggtacaaaatcttgttaagaaataagtaagacaatgagagcaaaacatgacacttgcatgatagttcactagttcagtttctattttcttcagcgaactttcataagtgctgcagttgaaa

SEQ ID NO: 63253 - DNA, 259 bp, Glycine max
  Clone ID: PAT_MRT3847_28130C.1
acgaaacagccttgtcgaacacaccaaaattaatttcatttaccagcataatagcacacatagagggtctgttgggaatatataacattttgaattaatatttactcactacgattaaaggctgtcatacctagagactgatgctttgtatactaataccttccctgtgcgtaacagcaactatcaaacttttcacacttaatttatgtttaccacaccatttcaatattccctacactattttcaattaaaatacctt

SEQ ID NO: 63254 - DNA, 313 bp, Glycine max
  Clone ID: PAT_MRT3847_28131C.1
catacatatacatggacaccgtcttttctttattcgttgctattccctcactcacgggcctgaaatcaagcgcaggcgaaatgaataccccacctaaagtctcagctccccaagccacattgttgggcatcaacgcttccctcaaagacattgtaatcgctgttgttgccactgtcgctagtgcaatgctttctaacaacgccatagccatttaaatgtttctgcgaggtgatgacagtttctattctttcgttcccaacaatatatacaatatctttgtgcagaagatcttttttacaaacaaaacatgttt

SEQ ID NO: 63255 - DNA, 693 bp, Glycine max
  Clone ID: PAT_MRT3847_28132C.1
gggaaatggctcccaaaccgcctagtacgggtctgtttgttggactgaacaagggtcacgtcgtcaccaagaaggaattgcccccacgcccctcagatcgtaaggggttcttacttcaggtgttgtttgccaaaaacaagcaagagggtgcactttgtgaggaacctcataagagaggttgctggttttgcaccctatgaaaagcgtataactgagttgctgaaggttgggaaggataagagggcactgaaggttgcaaagagaaagcttggaacccacaaacgtgcaaagaagaagcgtgaggaaatgtccagtgttctcaggaagatgagggctggtggtgctggagacaagaagaaataagtcttatttatttactcttttccagattcactagatggacctgtgtattgatggacgagctttcatatttttgctttggttcaattagtttatttcaagattttgtttgagaaatatgttttgcttaattgagacatgatttatggaagaagctagattggattattttctgttttgctagaaatgagagttataatcctttttcaagtgaacatcgcattttattagttgcctgagggttatattgcaagctgtgatgctttgcatgccttttattggttaaaaccaaatgactctatttgtgataagtaatattattctttttgtgac

SEQ ID NO: 63256 - DNA, 822 bp, Glycine max
  Clone ID: PAT_MRT3847_28133C.1
cccacgcgtccgcccacgcgtccgcccacgcgtccgcccacgcgtccgcttcgagtgaggtatttgctgcttctgatccttgctcagtttaattctaaattaccaatttcctctgctccttgtgtttctccttcgagtaagcgaaacgattctgaagcgcgtttgtttatgggacagggaaatggctcccaaaccgcctagtacgggtctgtttgttggactgaacaagggtcacgtcgtcaccaagaaggaattgcccccacgcccctcagatcgtaaggggaaaacaagcaagagggtgcactttgtgaggaacctcataagagaggttgctggttttgcaccctatgaaaagcgtataactgagttgctgaaggttgggaaggataagagggcactgaaggttgcaaagagaaagcttggaacccacaaacgtgcaaagaagaagcgtgaggaaatgtccagtgttctcaggaagatgagggctggtggtgctggagacaagaagaaataagtcttatttatttactcttttccagattcactagatggacctgtgtattgatggacgagctttcatatttttgctttggttcaattagtttatttcaagattttgtttgagaaatatgttttgcttaattgagacatgatttatggaagaagctagattggattattttctgttttgctagaaatgagagttataatcctttttcaagggaactttgcatcttattagtatcctgagggtaatatttcattgaatcccaagggttagttatattgcaagctgtgatgcttttgcatgccttattggtc

SEQ ID NO: 63257 - DNA, 489 bp, Glycine max
  Clone ID: PAT_MRT3847_28134C.1
cctggcgttggggacacaaaacaaagcttgcataagcgatggattatttctcattacttaacaacgcgctccaacaatggcacaaaacctccgaatacattatccttggaggaggagcttgcgctggctatgcggcgagggcagtttgccaaactgggtcgttaggccaggggagatggctatcattcccaaagaagcgctatctctcttatgcaaccccctgctctgagcaaggcttacctttttacacactcctctgctacacttcctgggttccgtgtctttgtcggaagtggatgggaaaggttgcttactgatggccctcacagatagggcatatagcctgtacttatcacagagatacaccttgcggacctagccgcacaatctttgatcattgcgggaggagagaccttcacttatgctattacgatcgctgcatctggctcaacagatataacggtgacacattctgtggtacaatgagct

SEQ ID NO: 63258 - DNA, 379 bp, Glycine max
  Clone ID: PAT_MRT3847_28135C.1
catgcatgtgtgtggtggacactgtaaccgtgccgtcacttatgccgctctgcttggtggaaggatctgcgaacttagagcatatgactctcgggtatattaacttactatgttctatagtgcctgctctatagttgaggcttgtcactaacaacatgagaccacctgtgatgacatagtcaataaggcttggagcgattcactggcttgaacttaaaattgctttcacatttgggctcatatacacagcttatgctacttgtattgatcatcacacgggtagcgtcggctcaattatagcctgatctatcgcattctcggtcactgactacatgctctctggcggtccgcttgatcgagcatgcttaaatcactctaa

SEQ ID NO: 63259 - DNA, 169 bp, Glycine max
  Clone ID: PAT_MRT3847_28136C.1
agctaagtctacaagcactctgttctaaactaaagttgccttccaatgggtccagtctttccttacttctttccttatgccatctgggggggggacttatgatatatcgtggtctaactaaatcagtattacttcttaataaagatgagcaatcattacaacttttgat

SEQ ID NO: 63260 - DNA, 297 bp, Glycine max
  Clone ID: PAT_MRT3847_28137C.1
tttggttttttttttttttcctatttttgggggaagagaaaattatcaacaaattctttagaaattaatttctctaagcattttatggggtccaaggtacctgtataataaagtttttttttaaaaaaaagaattcataaagcttactttgtaaagtatttgcatagacggtggacttttactcatcggtggtaaaacaggatttgtaaaggaatttcacccccaccattggtaacctgttcaagaacctctggggggcttggggtgcccttggttctaaaagtccttgggaacctt

SEQ ID NO: 63261 - DNA, 570 bp, Glycine max
  Clone ID: PAT_MRT3847_28138C.1
gacaaccataaactgtatgcgtacatatgggctcagtcctggtgtttaaagttctcctcttttgggctccttccctcagcctattctacagcaagctgcttgtaatcaaatgacaacagtgagaacaccattgaattacgattttacctggctttagcttttctcaattttccatactaccttgtaggtgctagaatctgatcggactactctggatattggaacacacttatacatgaattctccacctactaactacctgaccaatcttgttgggaagaaaggctgtgcatatggttacgactgtgatgtctgatgcctgcagccttcaactggactcattgggcctgattgatacacccgtgactaacagactgaccggttcacctcattttgatgcttgtctgcggaccctatcggacccactttcctgtgaatagatcttcccaatacaggtatcaggtcctcataatccaccagacatgcgtactcttgattgtgcacctgatacttccttgccttagaatacgcttattgatgatcccatacggactacagctacatgatatt

SEQ ID NO: 63262 - DNA, 409 bp, Glycine max
  Clone ID: PAT_MRT3847_28139C.1
ctatttcttttactctatttttcacattttatatctgatatttaagcctgggggtatgagtcaaattttgtatggctatgacaggttcaatataaacctgaacatgttcaaccatcatcgcaacgggctaagaactcgacaagtacaattaccatgaaaagcgtctgcgaccattctaacttattaaaacctgaactaatgaacattgcaatttgggaaatatgcacaatgagtgttccctataacctttgacctctcattatacccgagtatatacactcatgtacaagtacatttattcacaaaacttggttcacacacagttgatgcagaaaagattttggtacccggttaattttgcccaagggcatccactgccttaaagattgtaaagaaagttgaaccccct

SEQ ID NO: 63263 - DNA, 350 bp, Glycine max
  Clone ID: PAT_MRT3847_2813C.1
gtcgcatgtgagtctgatgatcgagatatccagaaggggtgttatcaaatttaaggtccttgttttcttaagtgctacaattttgattgcatggctatgccgtgcgtacgatatgttccctcttcgaatgaacactgtctatggtgcccgtactgcggaagttaaatgctcaagttggaggctagctgtggaagcacacatcatctttgactgttagaccattcctgaatagtgcgttgaatcaacatatgtataccttcatggcgatcaatatatatcagacttcaaaacaggtaaccaacaagcttacttttatgccagagacctttaaatccattccaaggacacat

SEQ ID NO: 63264 - DNA, 144 bp, Glycine max
  Clone ID: PAT_MRT3847_28140C.1
gcgctccatttgacacaggcctagtggagtactacttattatggcgcacaccagcatgcatgactaatgtgactgcggagtcccttcaattccccacactgtttacacctggttgctctaccagctcatattcccatggcggcc

SEQ ID NO: 63265 - DNA, 278 bp, Glycine max
  Clone ID: PAT_MRT3847_28141C.1
gtgcccatttactctggactccgggtaagtgggctcagcctgcctggggctctgggggcctcacccaggctggggcctgggatcggagaggaggtggtgctttgcagggccaggggccttgggaggcctaaggtcctgcttgggtcttgctttctgcatctggacagacctgtcacgctagaagagccgtctgctgactgcacgtgtgtgtgcacactcgtgtgcatggctgtgaactggaatgtgtgactgtgaccttgtgagtgactggggtccct

SEQ ID NO: 63266 - DNA, 321 bp, Glycine max
  Clone ID: PAT_MRT3847_28142C.1
ggctcgagggaggttgaagctctctcggatttgagatcttttcaaaggaagggccacctagtgacaaacccatatttttaccattcctgtatgaaacctcatacattgatgaaaaccatctctaccctttagatgaccctactagcgatggctacatcttcatgtttaccaacagctgtttcctgatactgaaccctagcaccaacagagtggtacggacctacggcgtgctctacggtgatttccggaactaccaggctttcgtaatggcttccatactgcctattaaactgggtgggactgagctaagttgagccttca

SEQ ID NO: 63267 - DNA, 403 bp, Glycine max
  Clone ID: PAT_MRT3847_28143C.1
ggaaaagagatggcgcgtttttgttgattttagtgggttttggcgggtgaagtggaaatggagcggggagggaaggaaattagggtaattgcagtaatgttgagttagggttttggcgtcccatttataaaggtctgttgttggttgtgcgcgcgtgtgtctgcgttgcgagtgtcgtcgttttgattccccccttctctctctctctctctctataaacttctctctcttcccctctttccttctcactctctctctctcaccccactcactcactctcttactctctgcatgcttctgcttcttctctcgctctgattccgcggaatccattcacatcagcttctcggaatcgaatctcagatctcggagatcagaatggtggatccacctggaaaaggat

SEQ ID NO: 63268 - DNA, 211 bp, Glycine max
  Clone ID: PAT_MRT3847_28144C.1
tgtgcgggtagagcatgttatgccttcaacgtgcactgaggaagttcgcctcacgaaaaataaaagtgatcagctaaaggcccaggccaacggccgagggtaaaagatcacccccatgagacagccgtcagggtccaaacctcgcttcatggtggttcgggcgacccttgaaacaatattccccataccatttgatgtttctatggacctc

SEQ ID NO: 63269 - DNA, 1164 bp, Glycine max
  Clone ID: PAT_MRT3847_28145C.1
ctgggcctcctccgcctcctggtcccccgcctgatgatccaccttccaaggagcctggccaggtgcagcttcctccacctcctccacctagtcaggtgccacccaaggctggtgctatccagtctgatggtgctgtgctttctactgagaataagaattcactgtcaagccaggagatcccaaaaatggttgccgggcatcctcctccaaggcaacaaccccctgttccaggacccaccttaatcccaagtttacagcctgatgtattactccctggaatatctcgtttccctccacccccgccaccacccgatatgagaccttctttgtccgtcacagggctacatgctcaggcaccacctcctggaatgatggtccccctaatgccaaggccaccatatggtcctccacctggtcctcctccaatgatgagacctccacttgttgctggtcctcctccaaacttccaggaagaggatcatatagcaactaggccacctcctcctcctccgaaaccatcatatgttaaatctgctgcttctactgttgttaaaaggccattagctcaacacactccagaactaacagccatggttcctgcatctgtgcgagtgagaagagaagcggcaatgtctaaaacaaagccaaaaccggcagtgtcaacctctagggcagtctctggtacatctggaccaactattgtgaaatcagagtcggtgagcttgtcatcagctccaaaaacacagagcattgatgactcatatacggctttcttagaagacatgaaagcccttggtgcacttgatggttgagatcgttgtgagtgccggtgctggatgatggtgagggcgtgcacaatgaaatttgcttagttcaaatatcctctctcgtgacctcactcaattttttattcttggtgatcaagtctaatcatcaagaccatgtatactctcttttgtgactcctcattcatctcctttatctctctagtttaaattagtgcacttttagttgataataatatatgcattgttaaccttgataatcaagtctagtcaagaccatgtatactctcttttgtgactcctcattcatctcctttatcactctagtttaaagtagtgaacttttagttaataataatatacattattaaccaaaaaa

SEQ ID NO: 63270 - DNA, 364 bp, Glycine max
  Clone ID: PAT_MRT3847_28146C.1
gcttgggggggggggggtttcgggggaaagcaaatgctatgatatgggagaataaaggcgtaacagggagatacatggctcggtggatatgagccttctacctaatgttatggcttaacctggaagaaccgttagatggcggtagattgaaacattgattatatgcgggagaaagcattagcatagcccgcatgttgccaagtcgtaggtgcattagagctatgagttataatttcatccaggccaggaactggtgttaataggcctggcaaatatccaatgggatacgcctattaaggcccggatgtgcatgagctgcgggtgctcactatggagtgcctagctagccatttaggaagaattc

SEQ ID NO: 63271 - DNA, 386 bp, Glycine max
  Clone ID: PAT_MRT3847_28147C.1
atccatacatacatcctagtacaatgttcataacacttgcaaagattatctctatcgaggggtctcatatcacactcagacgcataaagtacatcattagctaaacgcaataaatcaggaaatgataaacatgctttacagtaaacacgtgcctacaactgtatcttacccaaaaaatcaacttgcgtcataaaccttcaaatcaaccaccccaatttacctgcgcacttcaaggaacagttgcagagccaaaatctacatgtgctgatgaaccgcttttgctacatgcatttcgcgagaaaaatgtcgaaagactcaaggatcggctcatgaggcaagcatggaggtacatgaagagttaccaaaccatatgtgataaatatcct

SEQ ID NO: 63272 - DNA, 381 bp, Glycine max
  Clone ID: PAT_MRT3847_28148C.1
ggcacaaccaattactgatcccatgctgtgaaagaacatttacgttctgttatgaacctttgttaattatctagatcaatacactgtggatggagtgcataatcttgccgacaaatccccgatgtgtaatctgctaaatttcagaactgcagtgtcatactgacatgaagtccgtgaaacagcatcttacatggatacattggaagagcatggcgatcgaaccaatactcatgcacgttgcatatatggcactcaaatacttactgaatgaatcatcaaatgctctattaacttattggtgttgatcctggaactaaccctgttagacatttacttggtagccagggcctatgatcgattctcaagttatatgttgacact

SEQ ID NO: 63273 - DNA, 401 bp, Glycine max
  Clone ID: PAT_MRT3847_28149C.1
gggccgtcgacccacgcgtccggcccactgtgcactccattatcagcaaaatggtcattaatgaggagctgatggcctccctggaccagccaacacatacagtggtgatgcaccgcactgagcccactgcccagcagaacctggctctgcagctggccgagaagctgggcagcctggtggagaacaacgaacgggtgtttgaccacaagcagggcgacctacaggggctactgacgagaccagaaggacggctaccgcaaaaacgagggctacatgcgccgaggtggctaccgccagcagcagtgtcagacggcctactgagctctccactctgtttaccgcctgagccatccaaccttgaagttctaaaccacacctcagtcactaaaggtctgtctaaa

SEQ ID NO: 63274 - DNA, 521 bp, Glycine max
  unsure (1)..(521): unsure at all n locations
  Clone ID: PAT_MRT3847_2814C.1
ttcggagggtgggagaagccctcccctcttcctctccacgatataaaacccaaaactcacaccggccgacccatcacacaggacacaagcgcgctctggtgttccgattacgactgcttctgttttctttctctttcatatctggaaaaatgcagatcttttttgngagtttttgtccctcgctccgtctccgcaacccttaaaaaaactattggaggagaccttctctctccctccgtctctcggtcaaacacggtaacagcaacagtgatgacgtgaagtacaatggcgtttgttcaacttactttactggccgatcttggactattcctccttcctctaacttcaagatcaggcctctacctacccgcgccggcgaaggcgccgcttccgacagtgcgcgcgtagaaaacccgctgttcaaaactctagaactcggtgcatggcgaggcgtctggtacctctgcaacatctacttcaacatctacaagcaacaggtgttgaatgcgttacattacccg

SEQ ID NO: 63275 - DNA, 438 bp, Glycine max
  Clone ID: PAT_MRT3847_28150C.1
ccacgcgtccgatcacgaaaaagatagagagaaatgttggtataataggtgataataaaaaaaaaagataaaaataaaaaaaaaaaaaaaaaaaaaaaaaaaaaaaaaaaaaaaaaaaaaaaaattaaaaaaaaaaaaaaaaaaaaaaaaaaaaaaaaaaaaaaaaaaagggcggccgctttaaagaaccaaacctttactaaccccgggacatgcaaccgtaaaatcttttttaatagggacaccaaaattaaattcatgggccgccgtttaacaacgtcggaacgggaaaaaccctggttttaccaaactaaatcgccttgaaaaaaatccccttttcgccacttggggaaaaaccaaaaaggcccccaccgaccccccttccaaacagttgcccaccctaaagggaaaagggaaccccccctgaaccgaccaata

SEQ ID NO: 63276 - DNA, 678 bp, Glycine max
  Clone ID: PAT_MRT3847_28151C.1
cccgcgtccgctgggctcaaactttgcctgacttagattttaccccgaatagagttagaagagagagggggatagaatgagccgtgtattagtttggagttggactacaaaactttcgcatatgaagcttcattcatggaacgtctgttttctgggtgtcagtgggagggggaatgatgacttgaagcggaaggattcttatgctggtgtcattttttttctctctttctgtttagtgcaattttttatcttgtcaactgcaatcatgttatacctcttggaatagacccagggattagttgctgatggcgggcattcaagttttgggaatttagggctttgaaattctctcagttttagcacaatgttcgttatgatgttgtagctaaatggtgaactgaactccccttgacattccttattgaaccttagagttatcaataatgttggctgtgaagatagaaacaggatgaggtcacatgtttagaaggaagaatgtgaaaggctaagagggagaatggtgatagggaatatgttttttatgaaactattgaaggatatatatctgcatgaaattgagtggtgaaagagcatactttagatgtctgaagggattatgatttagtgagcccaattgtcacatcttctctcactcttcttttttactcatgctcatgc

SEQ ID NO: 63277 - DNA, 596 bp, Glycine max
  Clone ID: PAT_MRT3847_28152C.1
gacttagtggacgaaactggtgattggatcacacttatacaacactcttcaattagtaacttattgaaagtggctgcttgacactaaaagctgtttattggtcaaaattgtgatgtctgccaaatgcattagtcaaaaagactgattgggcctcattggtacaagtgcttttaacaaacagcgtcagtgcatatctttttaatgcatgtaagtggacaaaagaagaacctcattcctgggaattgatcttaccaatagacgtatgtggtcctaataatggctgtgaaatgcgaagaatctgagtggccaaatcaaacttgatgccattagagtttacttattgacaatcccaaacagtctacaccttatgatattctcttgagaatctttcaagattacaaaattgctgttaatactcttataccaactttgtctgttccacatgctactgtcacatcttctgataatgctgaatcctctgacatgatctggaatctgagtgatctttagcttgctcgtgtgtttaatgcacagatgatatcacgcatgaccctcttgttgagtgtgctctgcctatatgcaaatttccacacctc

SEQ ID NO: 63278 - DNA, 525 bp, Glycine max
  Clone ID: PAT_MRT3847_28153C.1
ggagattttgtccccacatctgaaattacctcatttccaatctggatgatatcaacttcaggggcattctctgtcagttgttgcatttaagttgcagaaatagcattactggctagaactagaagttcttacgtttatatgaaagaatgagacataattaaaacataacaaacatcttcaagcttgatgctttagttcaaccatattaacaagtttcctgaatatctttttttcttagagatttaaaaaaaaacttgatgaggtaaagctttgcgtgctttgctattttgtagtattgctttgtttggttacgattttcagagtgtccttaaataagatgatggacttcaaggaaatggtagtcttttccattagcatgtaatcatgtatagtttgcttacttcatttgctagaactgcatgccgtgccttcatatatttaccttgcttctcagaaaaaaaattaatcccaatataaatatcaaattagttttctatttgaattgatttaatgctctatttattg

SEQ ID NO: 63279 - DNA, 495 bp, Glycine max
  Clone ID: PAT_MRT3847_28154C.1
aaagtaattatcaacaaaattcttcattgtccattatttaaatattattttgttatgcctttgttttctttcataaatgaatattttttttattaaatatgttaacgaaaataaggttaaaaacgagtgtaataaaaacaacaaatgggctggtgttgattgtaattaagtgtcatatagttttagtatgtggagaacaagaagcgtagcagcaaaagcaatggagctgtcttgctgcagtgcatttgtggtgatattgttggcactcacagtcacagtcacagcagcagttctcttcattttctgatatgcttactaacacttttctttctcactcacggattaatttacagtatgaaggagcttagaagagtgacggcaaagggctgttcatattaattaagaactacttgcaatttctttttttagctcttcttttattcaataaaatggattctttcttaatcaatgactatttgcaggtacaagtgtgat

SEQ ID NO: 63280 - DNA, 476 bp, Glycine max
  Clone ID: PAT_MRT3847_28155C.1
ccacgcgtccggagaaatctattttgcaaccaaaaaaaataaaaaaaaaaaaaaaaaaaaaaaaaaaaaaaaaaaaaaaaaaaaataaaaaaaaaaaaaaaaaaaaaggcagacaaaatgaaaaaaagccatcttttcttaacgcatgccaagcgaagttttccgtttttttgtactgctacattcatttcagtggactggcgtgacgctactcaacgtactgggctggtaatgccagtgtccctacctaactaagattgccttgaaggacagttccgtttggcgggtggttctcttaaagggcaggcccgaccggctttccgttcccagccctggcgcgtcttgtttggcgaatgggccgtgcccggtagcggcactttcaccgctcgtgttgggtaggccttgcgctccgggaccttttcttttggccgtaccctaccgctcgttcgtttcgtttctttcctttcttttctcgc

SEQ ID NO: 63281 - DNA, 434 bp, Glycine max
  Clone ID: PAT_MRT3847_28156C.1
gaacatgtaacttcatgtttatgattagctcaatacaaattacaagtgcatgataaaaattattcaaggacacaatcatagtttgaattgaatcatcattcagaacccaacaaggtgcttgatatccattgggtaagtgagggctggattagaaccattatatgaatttattgcaatgattcggttgacagcttcggtgggatggaattgatcccaaaacacataagtggttcgattctggcatggcgtttgattaggaatacataacccatttgtccccaatgatgggcagcaagaagcatttgcaacagtgaaaccaagagaactatcaaggcctccggatgtgctgtttataaagatgaatttggaatcagcagagaacttgttgttgaattggtccactttagatttaagctttgcattgaacatgaacg

SEQ ID NO: 63282 - DNA, 604 bp, Glycine max
  Clone ID: PAT_MRT3847_28157C.1
gccattggaatttgacaaatagaccttgggtcacttgcaacatcccatatactaagcgaaatcctagctccttgaacaaataaagttttgtccatcaaattaagtcccttcatctgcaagctcgtcttttcttgctcatcccctacatacttgatcacaaactagtctttccaatatggcaatcaccaagcaagctgatcttgaggttgaccaaatcagagtcagagtcacaagggatggtggtggtagtggtggtgaaggggtgtccatgcaaggagccgcctccaccgttgacggtggccggcggtggagggtcacggaggggcagcctgaggtaagaaggccttccaagagagcagagaaggatcctgtcccaaataaaacgaccaagaaaggacatgctatggaacaggttgcagcggacattgacatgatgatgaaccattctgttgcatagttgttgagtagtagtcgttgttattcttcttcttctgctcctgccaatgattttggccatgaaaaaagtgtggttttcttctgcttctctgtttctgcctctgccttttttctcaatgttcattcataacggctcgagcggctcgag

SEQ ID NO: 63283 - DNA, 1370 bp, Glycine max
  Clone ID: PAT_MRT3847_28158C.1
cccacgccacgccaacgacttctggaatcataattaataatccaacttattttgtctcattactatagtttctctagatggaagctaaaactaagtcatgcgtagttctaccttttcttctattggttgcaattttcatgcaacaatgtgtccatggagaatcgcaagtgccctgcctttttgtctttggggactctctgtctgataacggaaataataacaaccttccaagcactacaaagtccaattacaaaccatatggcatcgacttcccaaccggcccaacaggacgatttacgaatggacaaacatctattgacctaattgctcaactactgggatttgagaatttcatcccaccctttgcaaacactagtggctcagacacacttaagggtgtgaactatgcatccggagcagctgggattctaccagagagtggtacacatatgggtgccaacatcaatttgagggtacaaatgttaaatcacctattcatgtactccacaattgctatcaaacttggaggttttgtcaaagctaaacagtacctcaacaagtgtttgtactacgttaatataggaagcaatgattacataaacaattacttccttccccagttttacctaacaagccgcatctatacccctgatcaatatgccaacattcttattgcccagctatctcagtatatgcagacactgcatgacgaagttggggccagaaaattcgtgctagttgggatgggtcttataggttgcactccaaatgccatctctacccataatacaaatggatcttgcgttgaggagatgaataatgctacgttcatgttcaatgcaaagcttaaatctaaagtggaccaattcaacaacaagttctctgctgattccaaattcatctttataaacagcacatccggaggccttgatagttctcttggtatatatactagtattttctatagactaaaataattgaatgtcttacaatttgatttggatgcaagaatattatataattaaccatggtttcatgtgttttaggtttcactgttgcaaatgcttcttgctgcccatcattggggacaaatgggttatgtattcctaatcaaacgccatgccagaatcgaaccacttatgtgttttgggatcaattccatcccaccgaagctgtcaaccgaatcattgcaataaattcatataatggttctaatccagccctcacttacccaatggatatcaagcaccttgttgggttctgaatgatgattcaattcaaactatgattgtgtccttgaataatttttatcatgcaattgtaatttgtattgagctaatcataaacatgaagttacatgttctaagtct

SEQ ID NO: 63284 - DNA, 268 bp, Glycine max
  Clone ID: PAT_MRT3847_28159C.1
gggaagtaatggatgcgctaaaattattgtgaagacaacaacacggggttttctatcaattcaaaagagggttaaattctcaactttgaaacatgaaacttaattgggttataaaaggaaggtgatgttaaagcatgtgcaagtcctatgctaattttataggagttacctttttttttagggactttaaacttggtggatgttccaggaagaattgccaattcttctggatttcacattaatcttgatatgaaagaattccggagcc

SEQ ID NO: 63285 - DNA, 219 bp, Glycine max
  unsure (1)..(219): unsure at all n locations
  Clone ID: PAT_MRT3847_2815C.1
ttnatnnattagtncnnancnattaattncnattgaagtccgaaaacagaanccaaaaatacgggntgatgaaatcncatangncaaaaanaaatgggnatgtagtttaggtacaacaaacaaagtggggnggctanagatgctttgcaaattttnnaatgncttggaaccctgggggcttntaggcgatgaacctgttncactgnattggngaacgtt

SEQ ID NO: 63286 - DNA, 383 bp, Glycine max
  Clone ID: PAT_MRT3847_28160C.1
gtacattgtctattccaaccatgttattcccatgtttagcttatctactggtttaactccaaataggaattaatcattatatgttctaaagttgatatatcattagtagggttgatgattcatatactctagtacgctattgatacagtagatctttgtatcattcttcacagtatttttgataacttgagaagcatgttattttttcaggctttgactccctacatgcagtctccagttgggaactcttcaaataaatccattgggaagctgatgggacctgctcttggtgatcacaatcaaggaaacttttccatcaatctctggagaaatgctttccaagatgcttttcaacgactctgtcctgttcgagcaagaaggca

SEQ ID NO: 63287 - DNA, 249 bp, Glycine max
  Clone ID: PAT_MRT3847_28161C.1
agcgcgatcgttttcgatcgagagcaaaggcagggcggacctactaccaccacaaacgcaatcagtcctacatgacaagaagaaacaatcacttctgactactcagtgtgcgactaccgaagaggaagaaagagaggcggtggggtgctcacagactacttgaagcatcatcttggtcaccactagttgattagctgcacaccactctactagttgtaggacgacgtgtcagaagaaaacaacttttgc

SEQ ID NO: 63288 - DNA, 409 bp, Glycine max
  Clone ID: PAT_MRT3847_28162C.1
gataccactttgcttagaggagggattaccattgaatgacgaaaccattgatttttacccataaacaaaatccttttcttttatctcggaggggaacaaaataacccggaagggcccgtgataaaaaatattggcattagaaaccttcaatctattatttttgcaaccagagaaactggacctgtttgaaggtcatgttaaccttaacagttaaacatttggacgattacagtttgtttaactctaaaataaaggttttaaggcctttaaacataaccagtcacatgcaagtattcataatataatacagaataggcacatccaagtggtcacctgtttcaaaaccaaggttggctaaagaccttgaatcatttaatcttgcatgtcaaaagaaaatgtcttgcccacc

SEQ ID NO: 63289 - DNA, 151 bp, Glycine max
  Clone ID: PAT_MRT3847_28163C.1
ctcaacaaagcatggctggagaaaatgggaagaaggtatttagatgggggcaagggataaaatgtagaatgtagcaggtccatcatgacatcatattgtacattataccttgtgtgagtcaggcggcgaatagatgtgcgactgaacgtgg

SEQ ID NO: 63290 - DNA, 518 bp, Glycine max
  Clone ID: PAT_MRT3847_28164C.1
gcaaattacacaatcacagcctttcattacacgggagcgagacctgagccccccaaaaataaaccaaaccattggcccttgccgcccaattgctcaaccaaccccccattttggtacataacaacaaacttgggacttgacttttatccatattaagacaacattgaaccattcagaacacctttgagaattgagacccaacccccaaatcgtggaaaaccctattaagtttagccaataacccccctccccactttatgaacaaatttggccctctaaattggaacagacgctaccatgaccccatgcaataggaaaaaatgatcctccccaagaaaaggcccttctccataaagggccgtgtcttcctaaccaatgacctcccagaagatgccatcaaaaaaaaagagttttagccggttcataacagtgccagcccatggaacaggtggggtaccaaccagggacaacgccaaccagatgggggagggccccccaaacccaacgataaaaacccc

SEQ ID NO: 63291 - DNA, 640 bp, Glycine max
  Clone ID: PAT_MRT3847_28165C.1
tgttaatgtcaacaagctttcgtacataatataagacaatacatagcaacaatatgtcggtattggacaagtttaaaagcaacatctaaacagaataacttctaatttcaaaaatagctatttctaacttttcaggtgttaagtgaatcgaataaactcattcaaaaacctgaagttatctccactttcataaatacatatgtcatcaagtagcaggtaatccctacaaaagccaaatatttggtagtaggcttcaaaaaaagtgttgaatcccggcccatgttaagcttcatacaagagaactgaaagtctttgttgataattatttggtagcagtgatggttttcaattcttttctctgactttgacaagctgctctcatttgaccggacgcgtgggacgttgaacaatttgaactatctgtctctctgaagatgtgaaccaggaaggttagtttagttccatgaacgagttcaaagatgcaaacatcaccaactttcaagttattgtccttgacaaatgcgttccatgagagtttaaatcttatagcagtcttttgtttatggatctgatactttgcaggccaaattctcccacttaacacctgaaggctgataagtctccgcttcttgtgcaaatc

SEQ ID NO: 63292 - DNA, 388 bp, Glycine max
  unsure (1)..(388): unsure at all n locations
  Clone ID: PAT_MRT3847_28166C.1
gaacagaacaaaggcaaaaccttcacttgatattattttcctctacttccaggtttcttcttccccccattcaatcatcaaaacattctcctttagcaacaatggcaggtgcaatccaaaaactaccccttgaacaaatccaagaggacccaaataagttctattaccatttcctctacaaagccacactagtcctcatcttcttcgttatcatcccattgtttccctcacaggctcctgaattcatcaaccaatcgctcctcaccagaaactgggaactcctccaccttcttctcgtcggtgtcgccatctcctacggcctcttcagtcgccgaaacgaagaaacagacaaagagcataacaactcanagtttgacactgcacaaac

SEQ ID NO: 63293 - DNA, 164 bp, Glycine max
  unsure (1)..(164): unsure at all n locations
  Clone ID: PAT_MRT3847_28167C.1
atgggtatttaaatgagaaaaaggacggacaaatatctactataacaatcaataacaagaacagtagcaagaattcaagccaagaacataaggngaggatgtagaaatccagaaggctcagtaccagctccgcaagagaaaacatcgaaggtccaaaaagagag

SEQ ID NO: 63294 - DNA, 175 bp, Glycine max
  unsure (1)..(175): unsure at all n locations
  Clone ID: PAT_MRT3847_28168C.1
tnganctcnctatnnantnacacttgtgagtattagtanctcagtgtcaaaagtgtgactcatagagagatcaatggcagntattanngactanacccanttccagtatatctctttctaagngaatgtataggngnngtttgtggccaanggngnaggnagtaattcgattgga

SEQ ID NO: 63295 - DNA, 372 bp, Glycine max
  Clone ID: PAT_MRT3847_28169C.1
gaaatattaattaaaatttgattcttagttgacaaaaatggtacactgcccaaaagatggatccaaatccaaattaaataaatcgatgaatacagggggccatcaaattcaacagccacaagtaaaaatggtacatagtatacttcctggctgatttgagattctcaaaaaattgttgatgctttgccatagccgtctattattttggggattcagcttattacgtttttcttttcttaaactttgatttggttttcttggaggaagggttcttctcagtatgggcatcatcttccattaaatgctcaaactcttcataacttgcgaatggggacacaccagtcttaccaccccttttatggttaccggttt

SEQ ID NO: 63296 - DNA, 468 bp, Glycine max
  Clone ID: PAT_MRT3847_2816C.1
tgtacactttcttttcctttttctctctcactactgtctttggggtgaagatatgggtgacccttatgggctaccggaggatctccggcggcttataccagccagaagtacccatttgaacccttcaaacacacacctacttgagccactttgtcttcaccatggtctcagtagtgctgtttcttctgctactactccacacactagttttgaccccaacatggttggggacgttttcttccctcgtggtttcactcaccactttgctcatcatcatgattattcttcttcctctggtgtaaaccctgttgttacttgctactgctgctgctactactactgtctcggatcatgcattctgcagcatggaaagtgcaaagaaagggtggtttgggtttgactccgggaacaacaggtggcctagacaggagaccctttcgcttctagagatcagatctcgtcttgatt

SEQ ID NO: 63297 - DNA, 243 bp, Glycine max
  Clone ID: PAT_MRT3847_28170C.1
atatctatcaaaacacccttattaactcaactttaacaaaatcacccctcgtatggcataaacaactcttgcccctatcccaaccttctatatactacaaatttagaacctcctataaaataaattaacaagccatcctacatcttcaactagcctactccaaactataaaaaaacccttattgtatataactaattccacaaaatcatcaatcctttcttcataacctttttatccacaaaa

SEQ ID NO: 63298 - DNA, 168 bp, Glycine max
  Clone ID: PAT_MRT3847_28171C.1
gagcaagttgggttgtgaaattgagtcccatgtgaccacgtcccaccatcaatagaaaaaaaggatactagtattttcactaccaatttctttatttagactactaacattattgaaaagacataattgtcactatttgttgtacacttatataataggattataaaa

SEQ ID NO: 63299 - DNA, 392 bp, Glycine max
  Clone ID: PAT_MRT3847_28172C.1
gggcccaaaaaaaacattggggttattgggtttttagggccgaaaaacctaaaaaaaaggtggggggggtaaaaaaaattggggaactcccctttgaccccaaaacagggggccctggggcataaagggggccgtttgcaaccccaacccagggggccttttaaaaatccgggggggtggttaggttttaaaagggaaaacattattccccacccccctaaaccggggtttttttaaactaaaccggggaactaaggggcggggttttttttgcctttaggggccagagggacaaaacccggaagggggttttaaggaccataaacgggcttgtaaggggcgatctaaacgccaacagccttggggtttttgaaaccctccggggggggggg

SEQ ID NO: 63300 - DNA, 682 bp, Glycine max
  unsure (1)..(682): unsure at all n locations
  Clone ID: PAT_MRT3847_28173C.1
gtagctgctgctgttgatgctgctttacaggctatttccaatgtttctgtttcctctgaattgcaagattctttattaaaggctggtgttttatggtaccttttgccgctgctgcttcagtatgattctactgctgaagagtcggctcgagcagaatcgcatggtgttggtgctagtgttcaaattgccaaaaacatgcatgccataaaagcatccttggctttgtcaaggctcagtggcttgtgcagtgatgagagtgcaacaccttacaatcaggcagccgctgatgccctcaaagttttgctaactcccaagttctctagcatgttaaaagatcaaatgtccaaagatttactgtccaaattaaatgcaaacctggagtcaccagagattatctggaactcttcaacacgagcagagttgctgaaatttgtggatcagcaacgtgcagctcaaggtcctgatggtttatatgatattaaggattcacatgactttgtctataaagcactatccagagaattattcattggaaatgtttacttgagagtctacaatgatcagccagactntgaaattagtgaaccagaaactntntgccttgctctgattgatttcatatcttatcttgtgcacaatcaatgtgttgaagatgccgatctttagaatgaagatgctgatc

SEQ ID NO: 63301 - DNA, 323 bp, Glycine max
  Clone ID: PAT_MRT3847_28174C.1
gggtgaaagagttgaattgattcattttcatattccacaaccatggcggtcccatcctcttctctcacaaacaacaacattcattcttatatataaacacaacgaacgatacgagggaaaatctcatcgcatctctcattgtatttgcctttgcacatcatcaaccacactcaatctcttgcttcattcccaaacctcttattcccctcaagtatctacaaagctaaccttttttccttttttatcatcacttccaagagttgaaagataaaagccttgactttcttagcttcaaccaaatgcgatccccttcttgaaggata

SEQ ID NO: 63302 - DNA, 369 bp, Glycine max
  Clone ID: PAT_MRT3847_28175C.1
gggcacaactaaaacatcattagtaagttaaacaacttttatggggccatcaaggaaatttcatgacaaacccatttgggtaacctttttcctacttatgggatgatggctggccaaatttagtggtgaaccagcaacacaacgggactccaagcccagaagttttttgtataaacacattttttcatcaggaatgttttgttttatatatgggaaaaattccttatgccccagcctgttggggataaaatagaaacaggcccaaagatgggggccacttgctaaaactcttttggagggccttcctaaacagaaaatcgagctgcctggaattaaattgggtaccgtctttgcagtttttttagcctt

SEQ ID NO: 63303 - DNA, 524 bp, Glycine max
  Clone ID: PAT_MRT3847_28176C.1
gtttattttgatttgaatgtgatacttacctcatgtaacagattccttgattaagactttaaaacattgaagtctatgctatttttcaaatacaaattaagaacttctagaaatcaatcattttagtatacatttccaaaatagcacaaacagcttcagatagcatatatgtttcaaccaacatggaatgcagaggagctattatccaaaatttctaaacaacaagctaaactagttcatttaggttgggagttgggatacaagaggactagtatataataattataaaagaaacaatcattaaccaatcaatagttcacttcactataggggcaaaagggttattttacttgccactttgtgcgagtgtgtgtatgtataaacctctttgcatcgaaacacacttacaatcatgagcaacacctaagctttcttgatcacatcaatcaacatgaacaggtacattagctgaaaacaagattgtcttctctaacaggtttattaagattcctatgagcttggac

SEQ ID NO: 63304 - DNA, 178 bp, Glycine max
  unsure (1)..(178): unsure at all n locations
  Clone ID: PAT_MRT3847_28177C.1
nnaaatctcaagcacgcgnacgnnagncggaatgcggctcgagnaaacaccacaacaattggaggngtgncactaanctgccnccntnggtttgcnttggtanngtcnacntanggaaaggtgcncggtagcagcaaagnggcncgcagggggnngnggtgcatggccaanatgtggc

SEQ ID NO: 63305 - DNA, 448 bp, Glycine max
  Clone ID: PAT_MRT3847_28178C.1
tgccagagtgctgtacactactgtgagtgtgacaggcacggttgggtatgtaagggtggtaaaccacactgtaaagtgtatgccagaacagtaacaacacgagcatttgccgactaacggggtgcacaaagtaacatcagtatgaaatagctaaggagcactataagaatatgacaaaccattaatacggaaattatggtgagcattatgatataaatgtgaagcagtgaaaaagccgcagacaagaaatgtgaggcccatggaataaggggtgtcgagtggtgggggaagctgagaaacagaaccttgataagatacaaggagagaatcagataccaaaggaatccctggagtatagcgcgcactatagggataggaagcgcacatagcaaacacagcactgtcacaatgagagccgtgtaaatgaataatgtagccagcagcagct

SEQ ID NO: 63306 - DNA, 377 bp, Glycine max
  Clone ID: PAT_MRT3847_28179C.1
attatctgtgttaaatccgaacagagaatgcaacgatcttacagggggctatttaaactacaacttattcactagctgatcattaacacaaaagaaaagcaacgcctctacaaattttgagcccatcccatactgctgtaagagcttgttcaacacgagaatgcttagagagaggaacgttaaattcaaatgccacgttcctccctgaactagcgcgtggaggaactgtgtattatagccagcaaacacgtacacccaacattgggtggacttacacactcaatcccacaatgttgaccagctatatacgcctataatggtaactcacatagttctcttgggcaccttcattgaaagctaagacaaaagatccttca

SEQ ID NO: 63307 - DNA, 119 bp, Glycine max
  Clone ID: PAT_MRT3847_2817C.1
atctggagaaagtgaagacaggtccatgaatgtacgcaactacgcatttgctcaatcaactgaactagacccccttggtgggagcaagaaatcttttatgagattcttaatctttttct

SEQ ID NO: 63308 - DNA, 228 bp, Glycine max
  unsure (1)..(228): unsure at all n locations
  Clone ID: PAT_MRT3847_28180C.1
cgtccgacgtaccangcagctccccancatctagcttagcttttcaactttcaaggtaccttatcctcctcttctgttttcgattaagatttcggttgttagggttttctgctatttttttgttatcgatcatcggatctgtcgagctatttgaattttgatcgggattttttttccgggtctttgatttacccgttcatatatttaggcaacttgggacccgttttg

SEQ ID NO: 63309 - DNA, 487 bp, Glycine max
  Clone ID: PAT_MRT3847_28181C.1
gttttttttttttttttttccctttctctttctctctctctctctctaatccaacgatcctagcctctcttccttctctttctctacccttcgtcctctttgtttctactccgaagccttattgcccttgtccctcctcctctcacctccatgacaacctcgatgacaagtggttcgccttcccctctttctctctccctccaaatctaggactccgacgatgacttcctcctcatcaagtcggcccttccacctcctctgttggctcaaccctgacactgtgcaccactacctcttcctccgatggatgcctctacatcgacaactagatctgtgagggtgtagggtggaggctttgcgggggtggacttgcaatttgtgagcctgaaatttgtccctattggaagcttcttgatgatgcgttggatgactatgatggtgttgtcagtgattacattgaactttgccagcaacaccgttgttctag

SEQ ID NO: 63310 - DNA, 344 bp, Glycine max
  Clone ID: PAT_MRT3847_28182C.1
gaaatacaacttgacggtgaacgatttggttaagaccttaaagcagatcttttgaagttgtaatataatgtatgagatgtaacttcatgtgtaatcgacttctcaaatatttgtttattgagttgggagttcttaattattgaggaggtagctgcgtgcgttttgatttttttcttcttctttgaaatactacaatatggcatgtaacaacactgatgtcgggagaaaggaacgaaaggaaaggaaagcagccaaggccaaactaaactcaaagctaggtttgctggaacatatatatagaagtccaatccttctatttgcatgatagaggattattcgcgttt

SEQ ID NO: 63311 - DNA, 1810 bp, Glycine max
  unsure (1)..(1810): unsure at all n locations
  Clone ID: PAT_MRT3847_28183C.1
acgccgcaatgtaccggctaggaattccctactcgacccacgcgtcagacgacagaagggggagaatatggagctattactagtgctgtagtgatgagagatgtagatggtaaatcaaaaggttttggttttgtcaattttgcgaatgtagaagatgctgctaaagctgtggaggctctaaatggaaagaattttgatggtaaggagtggtatgttggaaaagcccagaaaaagtctgaaagggagcttgaactgaaagagcgaaatgagcagagtacgaaggagactgttgataaatatcatggtacaaacttgtatatcaagaacttggatgatagtgttggtgatgaagaactcatggaactgttctctgagtttggtacgataacctcatgcaaggttatgcgagatccaaatggaattagtagaggatctggatttgtttcattttcaattgctgagggagcaactcgggctcttggtgagatgaatggtaaaatggttgctggcaaacctctctatgttgcccttgcacagagaaaagaagatagaagagcaaggttacaggcacaattttcacaatcgaggcctgctgcaataacccctaatgtttcacctcgaatgcctctataccctctaggggctcctgcgataggacaacaatttttgtatgggcaagcagctccagccacgatacctcaagctgcatttggttaccagcagcattttgttcctggaatgaggccaggtggtgctccaaacttctatgttccactggttcagcagggtcaacagggacagcgcccaggaggacaccgaggatcaggtcctatgcaacagctccagcagccattgccattgatgcaccaacagatgcttccaaggggacatgtctatcgatatccttctggctccaatatgcaaaatattcaactggcaggagtacctggaggaatggtcacttatggcattggtcaacaaatgcccacgcaggccctggcctcggcccttgccaatgctactcctgaacagcagaggactatgcttggtgaagctttatacccgttagtagataagctggagcatgaagcagcagcaaaggttactggtatgctcttagagatggatcagcctgaggtattacatctgattgagtcaccggatgctctcaaggctaaagttgttgaggccatggatgtgttgaagaaagttacacagcagcaatcaaacagcccagccgatcaactggcttcactctctctgaatgataatgtcgagtcttaagattatgtatgccagtttacaggaatacacatgttcttaaaacagtcacagttgtgtgtttctggcttttttgtaggattagcaaacactccttggagtagcttattgatttgcattttgctttggtttctcttcacatctgattgagtcaccagatgcttttaaggcaaaagttggtgaggccatgaatgtgttgagaaaagttacacagcagcaatcaaacagcccagccgatcaactggcttcactctctctgaatgataatgtcgagtcttagattctgtacgtcagtttacaggaatacacatgttctttaaacagtcacagttgtgtgtttctggcttttttgtaggattagcaaacactccttggagtagcttattgatttgcattttgctttggtttctcttcagtactacttagtttgacttggccgtcctattttggcccaacttttcttttaaaaaaaaatagctttcagcttttttctgtttttaaaaaancanccnacaaanaaagggggggc

SEQ ID NO: 63312 - DNA, 136 bp, Glycine max
  Clone ID: PAT_MRT3847_28184C.1
gaagaaataatcacttattctagcatatctatgattgtttgaaatgtatctttaacaaataaagattaggaaaagtgccctatattcatatgtgcaataataccttgtctaaatttttctcgtttatctcaacatt

SEQ ID NO: 63313 - DNA, 467 bp, Glycine max
  Clone ID: PAT_MRT3847_28185C.1
aaaccaaaacgggggaaactttaaaaaaataaaagagttttaccccttgctacgggcccaaacagttaaggttttaacggtggaccaaatcccattttcacagggaaggacttatcagcacccccttggtcacaaacaataagcagttaacccttgagtcatgatatgaccgacccatccgttttatgtttaaaaaggctttataggggaggctcaacaggggaggttacaaaaaccagggggttacaaaaaataaaatagccattgggagagggagggaccccatgttctcctattacattaaaatggaaaatccaggccaactttgaaaaactacggagttggattatttttgagcaaagtataaaaactccgaaactttatcacagtcctgaggcaatacatttaaggcttttaataaaccttggaggggtatacacctaagttttgcctccttttaaacgctg

SEQ ID NO: 63314 - DNA, 607 bp, Glycine max
  Clone ID: PAT_MRT3847_28186C.1
ggctcgagtcgttttcatactttattcctttaaaaaatgtttaaaaggagcaaacatgagtgaaaatccttttcgactagactgttattaacgtgtaagccaccggcagattttaaaattctctttaataaaattaaagtatctctatttatatgaaaacgattataaaaaaattaacataatggacaaaatagtttaagcagaaattaattcatatctactcacaatgatcctatcaaatttaagaaggattaattttagtgaaagatacttatatataccaaaaacaaaagttcgttcataaaatagaagtaaaatattttaaaattaagtgatgataagtactatcacattataaagaataggttctaccaaaaaaatgaagtataggtccgttcttgcgtcaagtcaactatcctcaatttcatgaaaaaaatatatactaattgagtgtctctaaaatagatatgtgagttatacttattttttaatgtaatttaatgtacatcttgattacagatttttattttctggtatctacaaaattcttttgtcatcataacaatgtataataatcactggtttcgttaataattaacttttatta

SEQ ID NO: 63315 - DNA, 152 bp, Glycine max
  Clone ID: PAT_MRT3847_28187C.1
aagcaagaaccgacccagccgagaaccggaggcccgaccgccaaacaaccaccgggaagcgaggcggcggacacaaagcaaaacgctgaaggtatacaacaaaaggggaagggccgaacggtccaaacagggcagcgggcacgaaccccccg

SEQ ID NO: 63316 - DNA, 356 bp, Glycine max
  Clone ID: PAT_MRT3847_28188C.1
ggcctctggatggccctacttcgcttagacttcggggctggtataaatgtgttctctaatttcgataatctcgatgttgcttactataagacactgttcatggtctattgaacataattgccttaattacgaatgcaccgcaaaattattgtaaatgattcaatttgatttataaatttttcaatttgatagattacacttagatcttcaataggttaacgttcaatcactttagtttttacgactataaatcatgtccttatatcttataaatcaatcaacttaatacttaaaaatttcaacttgaatcttattgaattcttaatatttgcgaatcaactcaatttattcttaag

SEQ ID NO: 63317 - DNA, 2953 bp, Glycine max
  Clone ID: PAT_MRT3847_28189C.1
ccctttaattcggctcgagaaaacataaaacgagagagaaagatgataaagcctcaagtgtatcaatcacagaacaccaatcaaaccctcttgtttctgcagaggctatccgttcacagcagtactgcatctcttccactatggttggggagtaaagtgcagaggcaaaaaaagcttaaccacctcgttctggtttcacgcaacgttgaaactaattccactacaacagatactcatacagataagagtacagtgattaaggttaaggccatagttaaggtgaaagtaaccgtgggtggtttcttctcaagtctgaggttagaccgaggaatcgatgatataacagatttgcttggtaaatctctcctcttagagcttgttagctctgagcttgatcctggtaagtatacatatgcttatttactacactttatatggctgggtagttaaattaattaattaatagtgattgcaaagtttgctaatttttattttttggagagtgcggtgctgttcttgttgagaatgagcatcacaaggagatgttccttgaaaccatccacctcgatggcttccctgagggtcctattcattttcattgtgcctcttgggttcactccaagttcgataatcccaccaatagggtcttcttctccaacaagtgttacttaccgcaagagacaccgggtggtttaagaagactaagagcaaaagaattgagtaatctgcgaggcaatggagaaggagaacgcaagagctttgaaagaatatacgattacgacatatacaatgacattgggctgcagagatcctgataaaagccttgaacttcaaagacctcctttaggaggtaacgagagaccttatcctagacgttgtcgaactggtcgtccacatagtgaagcagatccattgtcagagaaaagaagtagaaagttttacgttccaaaggtacgagtgcttctcaagaggtgaagcagctgacgttctcaaccaagacattacactcggtgttacttatattgcttccacctctggggaaaattatcaaagaaaaggatcttgcattttcctacttccacgacatagattcactcttcagccatggacattgacttgcctcccgaagaaaccgagaagggtttcctaggaaaaatcatgcccaggctcgtcaaatccatctctggtgacaggacacacgtgcttcgcttcgagaccccagagactatgagcagggacaggatttttcctggtttgagggatgactagtttgctagacagactgttgctggtctcaacccgtatagtatacgattggtcacagaatgtccattgaggagtaaacttgacccagtaatatatggtccaccagaatcagcaatcacctcagaaattatcaacaaagagattggaggcataatgtctgtagaaaaggcgattgaaaaaaagaagctgttcatgttagactaccatgacatacttttaccctacgtcaacaaagtacgcaaactcaaggggaaaacactgtatggttcacgaactttgttctttctaaactcagaggggacactgaggcctctagccattgagttgactcgaccgccatcatcttcaaataaaaccggccaatggaagcaagtattcacaccttcttggcactcaaccagtgtttggctctggaggttagccaaggctcatgttcttgcacatgactctggctatcaccaacttgttagtcattggttaagaactcactgtgtgacagagccgtatgttattgcaaccaacaggcaacttagtgagttgcaccccatatacaaattgctacaccctcatttccgttatacaatggagattaacgctatcgcacgagaagcacttatcaacgctgatggcaccattgagagctcatttgcaccaggaaagtactccatagagactagctctgctgcttatgcttagagtcatggctgtcttggacatactctcaactcattcaccagatgaggaatacataggagaaaagatggaaccatcatggggtgaagatcctgtcataaaggcttcctttgaaagatttagagagagactgaagaaactagaaacactgattgatgataaggaatggaaacacaaagttgaagaacagaaatggagctggcattgtaccggagttgcttttgaagcctacagagaagccagcactgactggaacgggggaaaaatgtagaatatcgatttaaacgtcttaaaaccccaaaagacctcattggaatcctcaacacaatcatatgggtaacttctggtcaccatgcagctgtgaactttgggcaatatgtttatgggggatatttcccaaataggcctacaattgtcaggaccaaaatgccctcagaggaccctacagaagaagagtggaaaaagttcattgaaaagcctgaaagagcactcctgaagtgctttccttcacaacttcaagcaactagagtcatggctgtcttggacatactctcaactcattcaccagatgaggaatacataggagaaaagatggaaccatcatggggtgaagatcctgtcataaaggcttcctttgaaagatttagagagagactgaagaaactagaaacactgattgatgagaggaatggaaacacaaagttgaagaacagaaatggagctggcattgtaccgtacgagcttttgaaacctttctcaaagccaggtgtgactggaatgggggttccctgtagtatatctatttaagttgacaaagtcaaactgatattatgtgtgaagtatgatcctaaaccggtatgggtttttaatttaaacataagatagacacatagtcacataaactggtgcctaaaccaccagaatttccataaacacatattactagtgtttctttaggatgttcttgaaccaatgagataatttcttttagctt

SEQ ID NO: 63318 - DNA, 437 bp, Glycine max
  Clone ID: PAT_MRT3847_2818C.1
ctcgagtacggctgcgagaagacgacagaagggcatttcacacattcatattaatcacgtgttcaaaataacacatgtcaagtacaacacaacatatcaccctcacacaattcattacagatcatcacgtaataagtcacgatgaccattacataagcgttatgcaacagatacattaagatttaatcttatatgtaatgtgatatcatattagtgaaaatatttgtgctaaagaattaaaaaaaataaaaaaagaaagaaatacctgcaaaaaatctccaatgttaacaactagagccccacgcacgggggtaaatcaatccacgtacatgtcctaatgaagaacttggagaccaccaatatgatctcatagaagtactgtaatgaaatcaacatcggcatgctttggggttcccatagttatcgttcaagacatg

SEQ ID NO: 63319 - DNA, 243 bp, Glycine max
  unsure (1)..(243): unsure at all n locations
  Clone ID: PAT_MRT3847_28190C.1
gagaaacttgggcggggtggtatatgatggatacttgaatggccagttatctgtttcccgtgccttaggagactggcacatgaagggtcacaagggttctgcctaccccttgagtgctgagccagngctgcaggaaatcaacctgactgaggatgatgagttcttgattatgggctgcgacggcctatgggatgtnatgagtaaccaatgtgctgtaaaccatgggcaagganaagaattgat

SEQ ID NO: 63320 - DNA, 770 bp, Glycine max
  unsure (1)..(770): unsure at all n locations
  Clone ID: PAT_MRT3847_28191C.1
aaaacataaaacgagagagaaagatgataaagcctcaagtgtatcaatcacagaacaccaatcaaaccctcttgtttctgcagaggctatccgttcacagcagtactgcatctcttccactatggttggggagtaaagtgcagaggcaaaaaaagcttaaccacctcgttctggtttcacgcaacgttgaaactaattccactacaacagatactcatacagataagagtacagtgattaaggttaaggccatagttaaggtgaaagtaaccgtgggtggtttcttctcaagtctgaggttagaccgaggaatcgatgatataacagatttgcttggtaaatctctcctcttagagcttgttagctctgagcttgatcctggtaagtatacatatgcttatttacttgtttacactttatatgtgggtagttaaattaattaattaatagtgattgcatagtttgctaatttttatttttttgtgtatgcgtacgtgcatcaacaatctgtgtgtaatgatttttattttacgagaaaataaaagaaaaaacaatttattttttaaccaaacaaaaataataacagaaagaaaatatggataataattattcatttctttntctcttttctaaaacatcactagccttccttttggttggcagaaagaaagaatagagagagagaaaattgaaattgagaaaaagagaaaaaaatgttntattttatttttatttttaaaagttattttttacaaacaaaatattattct

SEQ ID NO: 63321 - DNA, 447 bp, Glycine max
  Clone ID: PAT_MRT3847_28192C.1
aattcggctcgagaattagaaacactgatttcttcagtctttctctaaatctttcaaaggcatcctttatgacaggatcttcaccccatgatggatgcctttgaaagatttagagaaagactgaagaaattagaaacactgattgatgagaggaatgaaaacacaaagttgaagaacagaaatggagctggcattgttccgtacgagcttttgaaacctttctcaaagcctggtgtgactggaatgggggttccctgtagtatatctatttaagttgacaaagtcaaactgatattatgtgtgaagtgtgatcctaaactcatatgggttttcaattaaacatatgatagacacatagtcacataaactggtgcctcaaccagaatttccataaacacatgactagtgtttctttaggatgttcttgaaccaatgagattatttctt

SEQ ID NO: 63322 - DNA, 747 bp, Glycine max
  Clone ID: PAT_MRT3847_28193C.1
ataaacaaattgctacaccctcatttccgttacacaatggagattaacgctcttgcacgggaagcacttattaatgctgatggcacaattgagagctcatttgcaccaggaaagtatgccttagagattagctccgctgcttatgctctcgaatggcggtttgacaagcaggcactaccagcagatctaattagaaggggaattgctgttgaagatccattttctccacatggcttaaagcttaccattcaagactatccttttgccaatgatggactccttctgtgggatgctataaagctatgggtcactgactatgtcaaccactactaccctgaaccaagtcttgtagagtcagatgaagagctgcaggcatggtggacagagattagaacccttggtcatgctgacaaaaaagatgagccatggtggccacatcttaaaaccccaaaaaacctcattggaatcctcaacacaatcatatgggtaacttctggtcaccatgcagctgtgaactttgggcaatatgtttatgggggatatttcccaaataggcctacaattgccaggactaaaatgccctcagaggaccctacagaagaagagtggaaaaagttcattgaaaagcctgaaagagcacttctgaagtgctttccttcacaacttcaagcacctagagtcatgggctgtcttggacatactctcaactcattcaccagatgagggatacataggagaaaagaagga

SEQ ID NO: 63323 - DNA, 421 bp, Glycine max
  Clone ID: PAT_MRT3847_28194C.1
ggaaatcatgatttcaacaaaaaggaggttcagccgagagttcccattttccatgcaatcatcgaaaaaagcaagtgtaattggagatatacatactgttttgcataattccggcatatttgaagatggacataatactgtgtaacatcttttctggccatcgaaaacatccataaagacttcggttctactaaaaccccagtgatcattggaactgtagaaaaaagttgcagtgccaccctgaacattatctaccacataaaggtgttctcctgtatcattttttacatttacatccttccctccacagtttacatgtaaacaactttaataccgtggacagaataaattcttggaccaaggaacaaactccttctaacctaatatttcttaaataaaagctttttaaacaacattcaaa

SEQ ID NO: 63324 - DNA, 809 bp, Glycine max
  unsure (1)..(809): unsure at all n locations
  Clone ID: PAT_MRT3847_28195C.1
cccaaaaataggtgcgccagtgctgcattgctggtgtcctgataagtgcggaagcgaaattggtgtaagcgagtaggctacatgcgggaagctgagttgtgtgagtattcctcattgggggtgggtgtgggggcaggtagcatggcccgcccgaacttgaaggcgcggccccctccgtgacaacctcattccgcacgaacctacccactccccacttgttttgttcccgtgccccctccctataccagcctggttgtcgctctcgctgtcgcttcccttttgctccttctcttgcgtgttttttcgctccttggggctgtcttcttcttccacttatttcttcctgcccgggtcagatgcttcagtcaatctcttcctgcccaccggggaaggactctgcaatcatccgtgtgggagtgcgatcgaaggcggccattgtccgtatgtgagttcgttctggtgcggtggtttcttgcttgtacactggtaggcaagggcttatttcctggctgtgattcaattggtctttcgggggtggctcttcccggcctctttttgaggtagaggcggtattcatctgcacaacctctatatacacaacccaagtgaacttgtggtacacccgtttcacatgtaatgcttataaaactgagcccagtcaagagggataaaatttcttttgctttgtttcttaattagcatgtagattttcaatattcaaggaattcggcatctgcagtgcttttttatacattgtctgcagctttgactgtgtagagttgtataacttgcaaatgtaannnnttata

SEQ ID NO: 63325 - DNA, 347 bp, Glycine max
  Clone ID: PAT_MRT3847_28196C.1
ggcgaaacttgaagttatggagagatgaggatgagactaaggcgggaccatatgtcttccatcctagaggcctctatccggctcctgtaagcgcagacgagccagccgtcgggtcatcaggatccaaattgggttggttcaaaactataggccttttcgccggtcgagccctcctcgactcccgaatcatcgatatcaacctgaacaaggtcttcctccgacatgtattgggacaaccagtcaagaagaatatagcctcgctcaagctggtcgaccctacccttgcccgatccatggaaagattacaggcgtatgcagaggcaaggaaagagatcgaggcgatgaca

SEQ ID NO: 63326 - DNA, 206 bp, Glycine max
  Clone ID: PAT_MRT3847_28197C.1
gccttcatcaaaactcaaatccttctccttcaaagtgcgggggggggtatcgatgggggggccgttgtccgtaaaaacaaagatgcctgtcattaactattgatcgtctcacccgagacgtaagcatctctctatgattgggcatttactaacaaatgcttgtgttcgaaatttctacgtcctacgtgaggatcctgagacgagag

SEQ ID NO: 63327 - DNA, 378 bp, Glycine max
  Clone ID: PAT_MRT3847_28198C.1
gattatcattgcagggaacctcaacccatattttagtctttttaattttaattatgattattattatttctgccacaactttaggggtgcattgcaaatggcttccgttgttgcaagcttgccgccaccattgctgctccctgctagaaaatcacatatgggcaacttcccaagttcccctgtttctcttctttcagagattattggggctgtttcgctctcaggaaacttatccaagggggttatgaaaaactcaatttcagatttctctatgctcagggcctttcatatctctggccatctcttcaaggctccccgtatcctccaaatctcttggcatcctcccttggcaggctggtgtaaatgttataccgaccg

SEQ ID NO: 63328 - DNA, 192 bp, Glycine max
  Clone ID: PAT_MRT3847_28199C.1
cgcacctggctctattctacacagtgcacacactagaagactgatgggttgcatcctccactacttcatatcccgcgatctttattgctctatggtggtgttcctatacgactcagtcacccctactaaaccaataaaccatgttgatctacccgctcaaaatgataggtccacagggctcgattgtgccaa

SEQ ID NO: 63329 - DNA, 119 bp, Glycine max
  Clone ID: PAT_MRT3847_2819C.1
gctagaaatgctatctggcagcattgaatctaaagaactgtcactgtcatccctggttaaactagcaaaattgcagtccaataatgtgattattgcaacatctggaggtgtgcctcttg

SEQ ID NO: 63330 - DNA, 556 bp, Glycine max
  Clone ID: PAT_MRT3847_281C.1
ggctcgagcgtcaatcaatcgtgagtctgagactgagttctcatctctcaatttaaaaccctactcgccgttgccgcccaaccaccttctgtccaccgtcgccgtcgtcgcctttgcagtcggaaggttgcaccacgtcaccagcacatcaagcccgtcgcgttggaaggtctcaagttaataagtgacccattggttcgactattgatccaatgccttgactgggtcaatcaccatttggcttttaaaactatgcttcgtagttcctaggccaatgtttgcatttgcttccttatacactctctggaactgtcacaggattttgagacagctgacaagagacaacaagatatggcagagaggagcaaagagcttctcaagtttgagcataatggcacacccctttcttccttagaatccactcttcttgtttgtgataataaaaaagaatcagacagtcaaactaggagactcccccctgatggcatgctcctcactgccccactttccccaagccaacttttagggaaggttaaagacttcctaggagtgatgt

SEQ ID NO: 63331 - DNA, 448 bp, Glycine max
  Clone ID: PAT_MRT3847_28200C.1
agcaagaaaaaatatattagaagtctttcccaacctttcttttgcccttaggaggaagagaggagagaatgatccctaaaaattctaaatatagggagggggactcgggataagggatggggttagttgcagagagaaagaagaatgaaaagaattaagatttaagatggcttaaatctcaagttttagctttgctttagatatttagatgaaaacttggagaggaataaatgtagatttttgccctttatagtctgactaaaggtagctttgaatttaattaaaaattaaaacgaaaccagttttaacatggaaaggaacatttaatataaggatagaaaaccttgtagagggggattggggcaacctaatgtaagcacagagccacaaacttaggtccaatgtcaccctggagtacaaattaaggttaaaattttgttaccagaaa

SEQ ID NO: 63332 - DNA, 327 bp, Glycine max
  Clone ID: PAT_MRT3847_28201C.1
tcagcatcaaataaaaatacaacaaaaactattaaattaaataaacgacaaactaataagggctagtgattaattacaactcatgccatataaacacattactattaccacagaattccattatcaaatgcaagtgatgctacttcttcacctcacgtaagattcatttgaatcataactaacttatgcgtaacctagcacttatggcgtaactaccttaagaactcaataactcataacatacttagacagttataattccatttctcatccaaaatgactatccaaatctatacctatatatatatatatatgtatactatctta

SEQ ID NO: 63333 - DNA, 221 bp, Glycine max
  Clone ID: PAT_MRT3847_28202C.1
gtctcgatgtgccccttcgtttcgtcggcatgatcgcagccagcgctcttttcggcgctgtccttgtcttctaagcgtaacgtgtgagcatgcgtatcgaaaagatgtagagcacttgttttctggtttctggagtttttttgactgccgtcgtcggcattacatatatacctgattcgtcattgcaggcgcagggccttttgtatagtaatacatatacg

SEQ ID NO: 63334 - DNA, 195 bp, Glycine max
  unsure (1)..(195): unsure at all n locations
  Clone ID: PAT_MRT3847_28203C.1
ccttctgtntgtattattgannntcaagtncctaactacaagatcctcnctctctttttttaagtntggtgtaaacaaaaaagaaaaaaagatganttgctttcaagtntggattggntttctcttggctttgtcactcttnaattcatgtgctcttgtctactcctaccccaccccaaattctccttcacaccc

SEQ ID NO: 63335 - DNA, 431 bp, Glycine max
  Clone ID: PAT_MRT3847_28204C.1
ccacgcgtccgaggacccgtgggcggacactaggaaggagactcgacgtgctggcttagtgaccgcttccccacctgtgaccactggccaccgtgccgatgccgatgaggcatgacctttcactggcctcaaagccgtgtctgtcgttgccacacgagagaccaacattgacatgaccttgcttgctatcttcggtggctgcaaccatcgcttgcgagtgtggaacacagtgggcgcgaaaaacaatcgtacactctgatggtacccgcccaacacttgatgatgcacaagtggccaaagaagtagaacagctttttaggtaggcatgtgttgcaccgatacacattataggggcatcacggaccacagatccgcgaactcctcatgacaccgctatactacgcatggactcttcggctccatgcagaagc

SEQ ID NO: 63336 - DNA, 179 bp, Glycine max
  Clone ID: PAT_MRT3847_28205C.1
cccacgcgtccggcatgagccaggtgctgagagtaaggtttaagtgatcatgtcgattatcatgatgatctaaatgatagatccacctagatttttttttacttctatagttcatttacactattatgattatatacataatgacaattatttattaattgtgattcacttgcactttc

SEQ ID NO: 63337 - DNA, 208 bp, Glycine max
  Clone ID: PAT_MRT3847_28206C.1
acaccaccaccgaacaaaccagcagctcacaatgcaccagtgggatccaccggatcggcgcgttccagcggcttccacggcggacgagatgaagtcgacctggagacaagttgaagcgtttctagggttggacaacatggggtggtcgagtgcggacaacatgggatgcgcgctgtggatggctgcgacgacgtgcgtgtggtgccca

SEQ ID NO: 63338 - DNA, 468 bp, Glycine max
  Clone ID: PAT_MRT3847_28207C.1
tagtaaaaacagtgttctttatatcttttactatttcatacaaatatttaaagagtaaaataaaaacaaagtgaaatttttatggtcataatactaaataaaaagagctttgcaagattctcagaatgtgagaaccattgttgctgcggcaggattgcgtgttgaatctcgaggcagcagctgtgcctgtgccataatcaacgacttgtacatatgtatgaacatcttcttggcgtactccttgggcggcggggccctctccaatccaccattgacggagaacgccgcgtctccggcgtagccgagggcggaggcacccatggatgtagccatacccagtttgatcctgacgtaggcgtctttgacctacagcaccaatttttgtggacaaaaccatttggggattcagatcttacgagctaactttatgcgccatctcctcttctctggctgactacaagctgaacc

SEQ ID NO: 63339 - DNA, 649 bp, Glycine max
  Clone ID: PAT_MRT3847_28208C.1
tacaaaatttaccaactatctaaggagtatcatagaatgaaagatgtaaacgccaatcactttccttatttcaaatagaaatatctattttaaacgcttaaataaaaaatatgaaatatctattttaaattaatttatacatatcatagcttggttcctttcttccagtaaaaaaagcttggttcctttctttctttcttcattggatagaaatatagttagtccctgaagatgacgccgttagcaattctcatcaacggttgcaacgcatctggggcgaacttcctcgcaaacaaaaacggatcactccgtccgtcactgttaccgtcaccgtaccttggtctatcttccctcatcctccgaatcagttcgggccccacttcccacgcttcgtacgtgcggggatgcccgtccacgcgccccgtccaattaacatgcgtgagcgtggctggcacgcacccctgcgggtcccacatgctcaaaagggtaggaaagtaattctcctcgggatagcacgaatcaaaccgcacgcacggggcgtcgaactttgaccacagcacgcggtcactcacaacaagccgtgcgtgccgacgccgtcagtgcccaaaacttgtgaccccacgcggaactcctcaagcctcacctccgg

SEQ ID NO: 63340 - DNA, 348 bp, Glycine max
  Clone ID: PAT_MRT3847_28209C.1
gggggaaggaaaaacaaaatggcaaattggggggaaattaaccgccccccggaaaaaaaaaagcaaattacttcggaacagcaaccgggttaggaagggaaaaaaataaaaaaaaaggggggcttttttcaaaaggggggcccccccccccccccatattatttatcatggaacccaaccccccaggggggggggcccaggggactaaaaattttatggggggccctaaaaaggggcggttttttcaggcctggcccacccaaaaggaccccaatttagggccaacaaagaaagcggcccttttttttaccccccgaaaattcattaacagggggcacattaaaacct

SEQ ID NO: 63341 - DNA, 1241 bp, Glycine max
  Clone ID: PAT_MRT3847_2820C.1
cttgactttaaataattcctgatcgaaagctttgcgtaacgtctgtatttcagatcattaaattgaccttgaattattcctcgtcccgtaacttatatgcatatatatatatatatgccactgccggaacctggtcatcaataatccactccgaaaattattttgaacacccttcatcgatctaaatgggtttggcaggatttctcagaaaactccaagatatctattctaaacataagctcatatccactgttttcttctgtctcttggtctcacctccgtccttcttctataccttctatgccataagtcatttatccagtgtttttctcaccagtgaaggtgccgacaactctgtaggcgcaacctttcactatatcatagttattgcacaagttgaatgttttgccgttcttggcatatccatgttttccttgctaaagccactgctccatatcttagcctcagagcagaagatagacccagaagcggagttgagcatcaaaaacctcattttatcattgaccaaacccgcgagaagcttactttttacctggttcttcgtaaggctattcaaattgggttatatattcttaggaatattgttcgtgttccatcagcgcgtgatgtttgttgttaattcaagttgtgaccagcaagctgaacaaagttccttagccagcagcatcgacacgataatattcgttgcagcaggtgtcttagtcttcgcgtatttggccacttatgggaatttggcaattgagatctcgattcgtgaagagattagtggaaccgaggcattgaagaaggcttcagagcttttagagggaaagaggaagctagttgcaggatttgtggtgaatgtagtgctcggggttatatctgtagggttgtttgtgagttgcgtgtacttgaacacatgttccaaactctcgatggactctaagaaaagcatcatgagccagatagggaattttggtatatttcaggttgagttttacacatggggatgcttctcaatcttgtattcaatatgcaagaagtctcgcggtgaaacaacaacatttcatttccaaccctatgggagcttgcaacgcatgctgcaaaaggaggaggagcccttgcttcccttataaaattaagagtatcgattgtaaactttcatttaatttgtaatttaggaatatataagtgaaagtaagtatttcgtttttcacaatactgtatgttttatttgtttt

SEQ ID NO: 63342 - DNA, 238 bp, Glycine max
  Clone ID: PAT_MRT3847_28210C.1
atacgggcggcgggaaaaaaactaatcttaagttttcgtttaccataaaaatagtccctttcgggaccactattttaaaaggagatttgcgatcatctgctttactggggtaaactacttgaaacaaaaagggcaccggtcttttattttttggagtggtgaacctcacccccccactcaaggaaatataaatactgagagactaccaataaccccttaaattattgaaacttattta

SEQ ID NO: 63343 - DNA, 369 bp, Glycine max
  Clone ID: PAT_MRT3847_28211C.1
tactaaagcccgaagaccacagaaggggaagggggcaacggggagcagaacggcccgggcaacacacgagccagaacacacaagggaggccaaacccaacacgcgaaacagaagaagccaacaaaccggcgagcggcgaaaccaaaaaaaaaaaaagggagcacgacgagaagaagagccagatccacaggcgaggcccgacaagacgaaaccaccacgcgcacgaacaacagcccccaaaggaagcacacaaaaacccagccgcgcaaggtcaagccccggcaccgaacccagaaccaacaggccaagcaagccaagcgccaaggagaggagagcagccaagccccccgcccaagccagaagaaccaa

SEQ ID NO: 63344 - DNA, 1312 bp, Glycine max
  Clone ID: PAT_MRT3847_28212C.1
tggaaactgattgtttcaaatttgaatgcgatcgatgaacgagctagctacagttgcgggacccagcaaacgagcagctacaattccagtggcagcacccgccatacatttgacaacataagaaaattattggtctctgttctctacctcaccccccaccgcactcgtcttgtctcaaacaaatgcaacaaccacttattcttatagttactatggactaggaacaagatttgattctcattctgatatcagattcagatttttttaaaagagactcacgctggcggtgaagaacgtttctgcggcggcggcggaggaggaggaacaggttaacatgactctgatttccaattccgacgtcgaaagccacgccgacgtccaaatccccgacaccgcgcatcaaattagcaccgattcatggtttcaagtggggttcgtgctgacgacgggcatcaacagcgcctatgtgcttggatattcagggaccatcatggttcccctgggttgggcagggggtgtggttggtttgattctcgccaccgcaatatcactctacgcgaatgctcttattgctaggctccatgaatatggaggaacaaggcatattcgatatagagatcttgctggatttatttatggtagaaaggcttattccctcacatgggctctacagtatgtcaaccttttcatgataaatgccggctacatcattttggctggtccggctttaaaggccacctatgttctattcagggaagacgatgggatgaagcttccgtatgctgtgggcagacctcgatttgtgtgtgcaatgtttgccatttgcattccccatctttcagctctcggaatttggctgggattttcgacagtcttcagcctagtatacattgttatagcatttgtactgtcaattaaagatggtataaaatcaccacctcgtgattatagcattccggggacatcaaccagtaaaatatccacaacaattggggcgtctgctaatcttgtgttcgcatataatacaggaatgcttcctgagatacaggcgacaatcaggcagccagtagtcaagaacatgatgaaagccctgtattttcagtttacagttggagttctgccattatatctggtaacctttgcaggatactgggcttatggatcttcaacagctacctatttgatgagtgatgtcaatggtccagtttgggctaaggctatggccaatattgcagcctttcttcatcagtcattgcattgcatatatttgcaagtccaatgtatgagtatttgggataccaaatatggggat

SEQ ID NO: 63345 - DNA, 886 bp, Glycine max
  Clone ID: PAT_MRT3847_28213C.1
ccacgcgtccgtgaagctgcctccaaacgagtaaccgtccactggtgacctcaaactccaactccgatgaccaccatccatcagcaacttccattctgacagcttccgtccactggtaattgaatttgtccagttcaaagataggttgcagcactctagtcagtatttagtggctcgagttgaaacatccattttacaactaaagcagaatgcagataacattgaagaagaggagggtgtccttcaaagcttgaaatgtggtattcacttccttgagctgtctaaggaggtagggtcaaagtctttgaccttcaatgaagatttgcagtcacggccctggtggacaccaacttcagagaaaaattaccttttagggccatttgaagggatttcttattatcctagagaaatattgaccaaagatagggaaacaagtctaaagagagtcattgaaaagaaatccctacttccacggatgatctatctttcgattaaaagtgcttcagcatcaatcaaggagcatgttgaggtcaatggttctgttaccccagacatcacttcagagctgaaattgttgctggagtgctatgcacaatttttgggcttttctctcactgaagcaatagaagtggtcatgggtttttctaatggtgaaagttcttgtgtggtttctgactccaacttgattgactggttgaatttcactgtatttttaaatgccatggagcttgagcttcccatgaacttgtgcagccagacggaaatggatgtaggcctcgaatttggaatatcttagattctatgctggagaagtatatcttagaggaggttaggttccaatagcctcagctctgctctccttggagtggcatggaacttctgatgc

SEQ ID NO: 63346 - DNA, 2964 bp, Glycine max
  Clone ID: PAT_MRT3847_28214C.1
ggctcgaggagcgcgtaagagtaggagtaggagcacgtaagacagagcagagaagattgtttcaaatttcaatgcaaagggcgttgcaatcgatcaacgatctacagttgcgggacccaccaaactaccaactacagctccagtggcagcgccgcactcgtcttgtctcaaacaaatgcaacaagcggttattcttatagttattgaggaggagtagtacttataagaggaagcagatttgattctgattctaatttatttgattctttattatttataaattgaaaagaaagtcacgctggcggtgaagaacgtttctgcggcggccgaggaggaggaacacatgacgctgatttccgatgttgagaaccttgcggatgccgaaatccccgacaccgcacatcaaattagcaccgattcatggtttcaagtggggttcgtgctgacgacgggaatcaacagcgcgtatgtgcttggatattctgggaccatcatggttcccctgggttgggcagggggtgtggttggtttgattctcgccactgcaatatcgctctacgcgaatgctcttattgctaggctccatgaatatggaggaacaaggcatattcgatacagagatcttgctggatttatctatggtagaaaagcttattccctcacatgggctctgcagtatgtcaatcttttcatgataaatgccggctacatcattttggctggttcggctttaaaggctgcttatgttctatttagggaagacgatgggatgaagcttccgtattttattgccatagctggatttgtgtgtgcaatgtttgccatatgtattccccatctatcggctctcggaatttggctgggattttcaacagtcttcagcctagtatatattgttatagcatttgtactgtcaattaacgatggtaatcgctcattctgtgatgtgtctgttacttctcaaatctcaattcaatatgcttcttcaatcaattggccttgttgatccactttttctcctgtaaagttaaaatttccatctacatgtcatctgacatgtaaacattgtcatttgaaattcatcctatgaatatattcttgtgttagaagaaagtaatgtgcaagactgatgctaggttttctgtttcccagtgcccctgtaaaaaagagtttcttttgttcccgttcatgttattagcaattacaattaactggttatctgaaatagagataaataatagtgttcttgcatacatcttaaattcctgtttaaatctcttgatttagttcgtgagtttcttcattctgtcatccctaatctcattatctttgcttttttcttctttgcactccctttttgtgcttatcagtgattataacgttcctcatttgtgattttgttctgctgctggtatactgtgggcagccaattgttttattgctaaaggatataaactagaccttaaagtgcccttcttttatttagtatttcagctgatgcctagtattatgatttagttggtgagatttttttttaggaaattgcatccctcattgttgatttatctttttatattcaccacttgctgtgtctcaatgcaagtcagaaggtattatttttctgtctagattacaggtacctccacatacttggtattcatgctcgagctggaaacatctacagcatggtggggttaactctctttagtagggattttttttttcctacccaagattcaaacccactaccttcattaaggggaaacaagtatataccttttgaaccaaccaattggtgtaaaaaagaattctctttgagaactagcaaaaggatataatttattcttaaacaatatacagacttgctctttcatttatatactagagtatagttcgaacatcaaatcatattacagaacattcactataaatgatgattcgcatcttttttcccccatttctcttctaacttgttttcaagctttcagttaggctaaagcattctcctgacttttcttcatgggtgactatactataattgagaatcacaatgttttacttcagaacaattgcttttctctatgcttagtttgttcagtttttatatttttattaggtttaacttgatgaactcggagtgaatttgcttaataacctccccccttgcatcaataggtataaaatcaccacctggtgattatagtattccggggacatcaacaagtaaaatatccacaacaattggggcgtctgctaatcttgtgttcgcatataatacaggaatgcttcctgagatacaggcgacaatcaggcaaccagtagtcaagaacatgatgaaagccctgtattttcagtttactgttggagttctgccattatatctggtaacctttgcaggatactgggcttatggatcttcaacagcaacctatttgatgagtgatgtgaatggtccagtttgggctaaggccatggccaatattgcagcctttcttcaatcagtcattgcattgcatatatttgcaagtccaatgtatgagtatttggataccaaatatgggatcaaagggagtgccctggctttcaagaacttgtcatttcgagtcttggtaagaggtggctacctgactttaaacacatttgtatcagctctattgccctttcttggagatttcatgagcctcactggagctatcagcacatttcccctcacatttattcttgcaaaccatatgtaccttgtggcaaatgagaacaaactaacatccatccaaaagctctggcattggatcaatatttgtttctttgccttcatgtctgctgcggcaactattgcagccctgcgacttattgatttagactccaaaacgtaccatgtttttgcggatatatgattaaatgcattatattctttcagtaattctaatgttaaaaaaaaaaaaaaaactcgagactagttctctc

SEQ ID NO: 63347 - DNA, 246 bp, Glycine max
  Clone ID: PAT_MRT3847_28215C.1
tacggctgcgagaagacgacagaaggggggtgtcttattttgatcactgatttttggagttggtcaatcaatcactgaagtttcagtgtctatccattttcactgtaaattacattttgttagttaaatgacagaatttgctaatatgtaagcaataggcatttgcacacttcaatctgtaattaagagctatatagcctgctatatgcatttgtgggagcagggagttcatgcaattaatttatc

SEQ ID NO: 63348 - DNA, 322 bp, Glycine max
  Clone ID: PAT_MRT3847_28216C.1
aaaaaaaaaaaaattggctttaactttaaaaaaaatcatttccaaaatattgaaaaaaattggccccccctaactaaaaaaattggccaacaaccataaattttttttgggtcgggggcaacaaaaaaaaaaaaaatttcccaaaaaaaaatcccagggggttttttccctcaaaataaacccaaagccccccaaggggcccccccccccaaaacctttggggccccaaaattggaatttgaaccccatatatccccaacccaaccttgggaatttttcgggaaaaaaactcccggcgcaaattccgggaagggacttgggg

SEQ ID NO: 63349 - DNA, 278 bp, Glycine max
  Clone ID: PAT_MRT3847_28217C.1
gttaaggttccagggatcaaaagattggcttgaaccaaaataagcacggctcttttcaacgttagggaaggtgatgatcttagatacggactcatagggttcggtttctaaggtaaaatgatacctaagttttgggggtggaggctatgtaaatagtggctcaatgcggttgcggatgaggtcagatgaaaatgtacttcttggaaaatacgtggcttgtgtatattatatgaaactagaatatcaagatgtattgattattaccatcaacgattata

SEQ ID NO: 63350 - DNA, 405 bp, Glycine max
  Clone ID: PAT_MRT3847_28218C.1
cccacgcgtccgaaaaagcgtaccatatgcctggtgtacgacgccaaagagaaaccaacggaagttttctgaaaaccgagatgcatagcttgcaagagttgacaaatgaaaagagattggggctgcccgaaagcacgggacgaaggtgacgaacgcggagctgaaaacaagtaacagtctacactcgtcgcttaagaagcttgaacgggccatcgtttcacaccgatcatgctgataaaaccatctcgcatccaactttatctacctgggctcactctaccattaagcctgatgtccaaatagccaggaggccttacccgatcatcttgcccaactcttggacatcctgaatgcatagtgctctctccctggctaagccacattatccatggatagtgtcatgga

SEQ ID NO: 63351 - DNA, 314 bp, Glycine max
  Clone ID: PAT_MRT3847_28219C.1
cttgaaactatattaattactgatatactcaaggtttagattttttctacacacgaactatttcaaaaactaacagagcaaacttgatggtacattcgcctgcactgatatgaactgtcgcgtaacactgatacaacgcatgtatggaacgggccgaatattgaaagttctaatgaaacttggttgaacgttttcaagctctaatgttagagtcactagcgctgaataatatctcatcacatgtcacgaccacgattgtgatccatgtaccacagaagacggaccaccttttgatgaaattacaagtgatagac

SEQ ID NO: 63352 - DNA, 358 bp, Glycine max
  Clone ID: PAT_MRT3847_2821C.1
gggcgaagaccagcctggacttacttaattttccttggaaaaaaatggggcccattacttgtctgataaccaaagaatatttaaaccttatggaatggccctgcccgaacccttggtggcaaattcctaattggcccacggtggtggatcccagtttcctatttttttggggcccccgcccaaaatgaacccaaaaatcctggttttcctatttgcctaaattaacccaaaaggtccttttaagtgaatggtccattcctttaaaaaaaaattggttcttttttccaactttttttgaatgaccttgggctggattttccaccccttttggccaccatgggaactttaaatcattttt

SEQ ID NO: 63353 - DNA, 468 bp, Glycine max
  Clone ID: PAT_MRT3847_28220C.1
cttccgatcctgtttttgcttcctctactatgacttttaccaacgttttgctgagcccgtggaaaaaattaaccaggacagctaactacaatgcatgggccgctgctgttcagctttggttccaaggccaaggccatgctgatcacttgacatgcttcattgtgtagtgtcctttggttctcttgctcctaaccttcaaccacaatttcaagcttttcccacttgttatgaggtatggaataaggctaagaaggtctattccaatgatgtccatcgtctttacaatgtcataacctccttgaagaccatggaattggagaacatggatatgcaaactaccttggtaagcttgaacgtttaattgatgattataacactctcatgccttttacaaatgatgcagatacgttttatgaggaacgcagccagttctttatggtccttgcccttgttggccttgcacctaaa

SEQ ID NO: 63354 - DNA, 1521 bp, Glycine max
  unsure (1)..(1521): unsure at all n locations
  Clone ID: PAT_MRT3847_28221C.1
gcaggtgttggtccatccacgattaacaataatagcaatggtaggcaacaaatgatttcngcttcttcctcacagcctagcatctcagggtatggcaatagccaacgagttcatccacacatgtccttcgtcccacggccttcagtgtttgggttggggcaaaggttgccactttctatgatacaacaaccacaatcaacttcttcaaatccgatggtcaatggccccagtaatttgcagccttctcccaatcattcgatgtcgaggccggtgtcaaggactaactctgatttagatcgtttgtgtcacgggcacagggtgcaaactgttcgtggattcttgtccctgtcgaatgtttgtctgcaaagttcaagacaaacgcttatcgttctttatttatcatttatcgtacaaaacgacttcacgtgcggggggagtacaaaaatatagtggaagataatcattgatcacgtacagaaaattatagcgatgcagcgtgtattggatgtacgatcttcacttcagtttttacttaaatttaagcaaaaatatttaaaatttgttttctttatccatgttatgtacctttcacagaaaaatatgcatgtaatgtactttctccgaaaaaggtgagaaaacaagggtatgttcggtttgtatttttctgacaacctggaacgcactactcacttaaagtcaatgactggaatctaaagtcttggtcttgtcctcgcttttctccatgttgtctgggaactgtttgtttacagtttagattttttcaattacaatggtggggcatggaaatttgtacgcatgatttcctgccaactctgtaaatccctcattagtagccctcctagtagttgattgtttgcagttcagtttaattgattgatgaaaccctcttccccctgcaaattcctagttgattatttgtttactctatttttttttttctttctttcgctaaaagcatttttggccaagggtgtgagtaaaaggcttggtgatgttataaaattataaatgatccttgtactgtagtcttgcgttttaaacttaggctgatgtttaaatgaaattttttatggggtttcaacttcttcaaatccgatggtcaatggccccagtaatttgcagccttctcccaatcattcgatgtcgaggccggtgtcaaggactaactctgatttaggttaattaggaactcaatggtagttttgaaatatctacattacaattttagttggtcattgttttcagcagtcaagagtagtgtcaagaaatttgtttgtttaggttttagggcctgtgattggtttcagtagactatgaaaatgttgcttaaaaggaaataagtagcatttgattttccaaaagttatcgtgtctttcctattgctttgcgctttagggaacatgggaagtttattgtcatcaaagcaaacaaatttcaagttagttttacacaaacaattaacatcgaaaaatcatgatctggtctcagttactttttgtc

SEQ ID NO: 63355 - DNA, 124 bp, Glycine max
  unsure (1)..(124): unsure at all n locations
  Clone ID: PAT_MRT3847_28222C.1
tccataggctgatcncattcaccgccgatnactacacaagcccganagctntataanaatncnatcacttcgaataggnaaaggcaatctccanttggtagcgccantntgtcncttgaggttg

SEQ ID NO: 63356 - DNA, 1094 bp, Glycine max
  Clone ID: PAT_MRT3847_28223C.1
tgtatttgtcatccatatcatacccttcactttcctgaaaaaaagaattttgaacctgcctctgttaaagtttgcattttttttgggtgggttgatagtactgtgcaagctttggaacttcttcacaagctgctacttcaatggccactgaagaggttaacaaacctcaatcgcttcctccataccctgagatgatagtgaaagcacttgaagccttgaatgaggctgatggatcgaataaatcagcgatatcaaagtacatagaaaccacctacggtgagttgccagatgaaactgttttggggagtcacctgaacaagatgaaagagagtggagagcttgccttcaaacagaacaattacatgaaagctgatccaaatgccccaccaaagaggggacgtggaaggccaccaaagccaaaggttccattgccaccaggcactgttgtgtcccctccaaggccaaggggtcgtcccccaaaagaccctaatgcccctcctaagtcccctaaggctaaggccacccctgccactggcaggccaagaggaaggcctaagaaggttgctcgctcaccggccgtgccgtctcccaccgccgtctccactggaaggcctagaggcaggcctcccaaagtgaagcctcagttgacagaagttagtgttgagtcatagaatggtttcttagttataatgccaaatttagtgatatgctctgtagtggtggtgggtgtggtcttagattttgtgttgatgtaatctctttgtaaaattatgtagtggtagctaacctattgtgaggctttgtgttggtttttctttctaattattatccaatagaacaatgacttaaactaaaaaaaaaaaaaaaaaactcgaggtttcaaggccttcgagccaatcctcctcctcggctcgcaccgcttcgccggcgtggacatgcgcatcagagtcaagggcggcggtcacacctcccagatctacgccatcaggcagagcatagccaaagccctcggtgcttactaccagaagtacgtatacgaagcagccaaggaagatatcaaagacatcctagacaagtacgaccgacaccttctt

SEQ ID NO: 63357 - DNA, 929 bp, Glycine max
  Clone ID: PAT_MRT3847_28224C.1
tacggctgcgagaagacgacagaagggtaccgctgtgagaagacgacagaaggggatccataccatacctttcactttcctaaagaaaattggaacctgcctctgttgttaaagtttgtatttttttttgagtgggtggattgagagaactgtgcaagctttggaacttcttcaaagtctggtacttcaatggctactgaagaggttaataaacttcaatcacttcctccttaccctgagatgatagtgaaagcacttgaagccctgaatgaggctgatggatcgagtaaatcagcgatatcaaagtacatagaaaccacctacggtgagttgccagatgaaactgttttggggagtcacctgaacaagatgaaagagagtggagagcttgcgttcaaacagaacaattacatgaaagctgatccaaatgccccaccaaagaggggacgtggaaggccaccaaagccaaaggttccattgccaccaggcactgttgtgtcccctccaaggccaaggggtcgtcccccaaaagaccctaatgcccctcctaagtcccctaaggctaaggccacccctgccactggcaggccaagaggaaggcctaagaaggttgctcgctcaccggccgtgccgtctcccaccgccgtctccactggaaggcctagaggcaggcctcccaaagtgaagcctcagttgacagaagtcagtgttgagtcatagaatggtttctttctttctttctaattgatgtcaaatgtagtgatctactcttgtcgaagtgatggtgggtgtggtcttagatattgggtcaatttaatttctttgtaaaattaagtagtggtagcttgcttattatgaggctttgtcttggttattcttgctaattactaccaaagagaacagtgacttgagctaatggtgatttggtg

SEQ ID NO: 63358 - DNA, 274 bp, Glycine max
  Clone ID: PAT_MRT3847_28225C.1
acgaaaaattgttgaatgataattaataaattccttcatatgtatagagataggagggaaaatgtacatggatatagctagtcatgctcgggctgctttaatggaagttctttcattgtctctttccctctcagtatggggaagaagtggcctatacaggattctcaaaagtgagttaatcggatctaagtacccatatttgtttatacttggctttttcaatttctataactttaactattgatttaaagtatttcatttatactaattaatt

SEQ ID NO: 63359 - DNA, 515 bp, Glycine max
  unsure (1)..(515): unsure at all n locations
  Clone ID: PAT_MRT3847_28226C.1
gatggaaatgcacaattttattatcataaattagttttttataattttgcttgattatactagaacgtaaaacatgatcccgctgaagggacaaaaaatgaggagacgctatgtagaataaattataaagatatacatgcgcaaagaatgacgatattgattaaccaactacttagtcggacaaactgtatgcttttgttcacacaatgggttacttttttaccaaatccaaaaagagatttaatggcattgatggcattctcattgatgaaagattaatcaaattttttaaataaaggatcaaatttctgtgatgcccttgagttagacagggcaggatcaatgcttattctattgaagagtttaaaaccagtattgagagtttcttttatggaagaaagagcatgttgaatgtggtttagcttagaataacaacaaggaacattgtaaattgtaactgctgatttgtgaggttctgcttttgatcctaaaatagattcanatttgtatagtgc

SEQ ID NO: 63360 - DNA, 160 bp, Glycine max
  Clone ID: PAT_MRT3847_28227C.1
cccacccgtccacaccgatactataagacttcaaattgcttcaccccttacaggcaatcgaattcttatcaatgcgcgccactactaatctcttaaacttacttactaaaacccccacagcaaccctttttcttttttaacccctaattgcaatacaact

SEQ ID NO: 63361 - DNA, 314 bp, Glycine max
  Clone ID: PAT_MRT3847_28228C.1
gattgtatatcatgtacaatttcaaactctctctgggtgtctctctctctctagacttagattttgtgaatggctgaagtgtaacacggacaagtcatttgcgtccacaccgactatgagtggaagctccacctccagaacgcaaaacacttcaaaaaactgattgaggtgcattttactgctctctgccgtggtccatgccaccttatcgccccacatcttgcagacactgcaaaaaaatctcctcaatagatcttcctcaaagtggatctctatgaactgaggcctgatgctgaggaatatctcattgaggc

SEQ ID NO: 63362 - DNA, 324 bp, Glycine max
  Clone ID: PAT_MRT3847_28229C.1
actcactctcttcacatcgttgctttccgtggctttcatcttctcttgtggcaggttgtatcacaagagggccagtgttcattgggattatgatgctgagccgtgtggttctgaggtatcagttggacacgcattcgttgatctacaaaataccaacattgagctgcaaagtgatctgaaagatttatacataaagatagagggtgaaattgatgtttctggcaaccgaaaggcttgcggtatccatattctctacatactaaggaaaggattccggaagattcatgtcaggcttgcgagaggacttgagatatagtatagtgg

SEQ ID NO: 63363 - DNA, 218 bp, Glycine max
  unsure (1)..(218): unsure at all n locations
  Clone ID: PAT_MRT3847_2822C.1
ccctncgtagccggataggccttgaggccccaacccaccctccggtatgcaggaaagaccccaacttgccttacacttcattccactaatatgcagatactcactctagcaggagcaccgctacattatcattctagacggctggtttttttaattcctttgtttaactgggcccaaatgatttgaaagtacctgtactgcaattctgaaactggtta

SEQ ID NO: 63364 - DNA, 154 bp, Glycine max
  Clone ID: PAT_MRT3847_28230C.1
ggaggcttgagataccctacttgcagtctatcgtgcgatgcctaaattaggtggctggcataaaaaatgcaaagtgcgctgagacccttcacatccaggtgcagccaatgcaggaacccagaccggcgccatgcactaataggaggggtgaccg

SEQ ID NO: 63365 - DNA, 2677 bp, Glycine max
  Clone ID: PAT_MRT3847_28231C.1
taaattttcatttcactttcctctctcaaccagatcactgaatctcgctgtgctcgaaaatcgtgaacatcatcaggtaattaggaatcggatactatgtggatggatggagcttagatttgaggaatggggtgtgtgattagcagggaagtgtcgaagggggtaatctctgatgtgaaggaggagagggatttgagtggtgagagtaagaggaaggttgatggagtgtcagggagcaaagatgaggtggtagaggttcagccaggcgtccgggagaaggagaaaggtggtgaaggggtgcagcgtggcaaaaggagaagatcgaaggcgaatccgaggctgagcaatccgccaaagcatttgaggtgggagcaggttgcagctgggtggccaccgtggctcactgcagtgtgtggggaagcactcggtggctggattccgcgaaaggccgacacctttgagaaaattgataagattgggcaaggaacttatagtaatgtgtacaaagctaaagacatgatgacaggtaaaattgttgccctaaagaaggttcgatttgataattgggaacctgagagtgtaaaattcatggcgagagagattcttattttgcgaaggttggatcatcccaatgttgtaaagttgcaaggtttagttacgtcaaggatgtcctgtagtttgtatttggtgttcgattatatggagcatgatttggctggacttgctgcaagcccaggaatcaggttcacagagcctcaggtaaaatcctaggtatcgatctcctgtcttgattccgactgaccaggagtattgtgatggcgtagagcattgtaggcctgctacggtattttgagggttggagatgcatcaactgctatcaggacttgagcactgtcataatcgaaatgtacttcaccgtgatattaaaggatcaaaccttcttattgacaatgaagggaatacttaaaattgctgactttggactggcatctgtctttgatccaaaccacaagcatcccatgactaatcgagtggttaccctttggtaccgaccttaagttgtgctcattggtagcctcagaatataatgcggccatcgacctttggagtgttggatgcattctatgagatttattggctgggaaaactattatgcctggtcgtacagaggtggaacaactgcataagatatacaaactttgaggttcgccatatgatgtggatcggaagacgtcgatgatgcatagtgccatcgtatttaatgatcgcgctctaaacgctgctcctgctcgtgagggcaatgctgggcttcaatcctacattgatagaacgcgttgaatctctcattcaaaagttaagagcgagagagaaaagtttgccacagatgctctaagaagtcagttctgtaccactgaaccttatgcttgtgatcctgctagtcttccagattatcctcctgccaaggtaatggatgctaatcgacgcgatgctgaagcaaggagcgaagcttgggctggcaccgctgctgatactgctagcattaatgttacaaggcgcaactgctatcaggaatcggctgctgtcatttcagccaagccctacaccggggccctcaaggatcaaatcttcttattgacaatggaggatcacttaagattgcgtgaaaagttccctccaccacatgaagatggacagcttggctttcctttgggatcttctaatcatattgatccagatattgttccttctgatgtttctttcggttcaacctcatacaccttttcaaaggaaccattccaagcttggtcaggtcccattggtaatactgctagcattagtgtcacaaagcggaagaaacacactgcaggtgatgcactggatttatcaaaaccatataaaggtgccctcaaggataaggttaaaggaaagaaaatcatagcttagatatttagtacattcttgtagagtcaaatgaagaaagaacctgtccctgctgcctcattttttggtgttggagtccaactgcttaaaaatatgtcatgctacatgcttgcttcttaaagttaactcctttcttatcaaggggtagaaccatttccccccattttaaaaccttcatttttgtttcatagttttgatctatttattggatttcatatagatagaggtttctctaggggggggcttgttaagtctgttgctattatagagaattactgtggtgtacatcatgattttttgttttcatactcgtgtcaatatctgaattctttttaatatgttgagaattgcaataaaatttgagttgttttttagtcctcaagatggacaagttgctgttttcctttgggatcttcacatcacattgatccagataccgttcctactgatgtctcttttacttcaacctcctatacttattcaaaggaaccattccaagcttggtctggtcccattggtaatgcggctgacattggagtgccaaagcggaagaaacacactgcagctgatgcattggacttatctaaaccacagaaagatgccctcaaggataaggttaaaggaaagaaaagtatagcttagatcatattagtacattcttatagcgtcaattaagaatctgcctctgctgcctcatttttgggtgctgaccaactgctctgcgcaatgatgcact

SEQ ID NO: 63366 - DNA, 626 bp, Glycine max
  Clone ID: PAT_MRT3847_28232C.1
ccacgcgtccgccaaattccatttcattttcatctctctctgtatctgatgctcagaacaaatttcgattccgaaaatggcactagcaagtaccaacactgatcaatccacaatcaccactccttcaaagaaaccctcaaaaaactccgagaatctgaaccctaacgtgcctcatcatcgaagcccttcttcaaagtcccctgctttgcgatcctccaagccaaacaacagcaacccaattgcgcaatcgccgcagaacaggatccggcagaggaagttcgtggtggcaaagaagaaaaatcagaagggtacccaaaacgacgccgtttcgtgcaagtgcaaacacaatggtggcgccaagtgtgtttgtgtagctttccagactctgagggcttctcaggaagagtttttcctcaaagaaaagaaggattgtgattatgattttgaagaagaaagagaagaagaagcaaaagctgtgaatgctattgaaatctatggaacaaaaagtgaaacagtgcaaggagaagaagaaaaagaagaaggaggttccacagtgaaacgaaggagggagagagataggttgttggaagagggcaggaataaggttcctgaaaatgggtttggga

SEQ ID NO: 63367 - DNA, 160 bp, Glycine max
  Clone ID: PAT_MRT3847_28233C.1
gacattcatagaaatagctatactaaaatttaagggagaatcatcactagaggatgtagcagggagccaaattgaattggctgaatattattacaacctctgtcatatcttaacatacatcactctatttgcaaaaaaaaaaagctgttatatttggaaa

SEQ ID NO: 63368 - DNA, 2276 bp, Glycine max
  Clone ID: PAT_MRT3847_28234C.1
atgcctgcaggcttcgccattcaaatccccacaacaaccttctatgtaacgatgaacactagtcgttcctccttcctttcatccatactcacacttgctttcttcttcttaacaactttgccacaatcctactctcaaaaaaatgacacgcactctatttgcagccaattatcattcagttgtggaactctcagaaacatatcgtatccattctggggagggaaccgacctcagttttgtggccgcaatgggttcaagctcacgtgcatgcatgaccaaaacacctcggttcaagttggttcccaaagattcaacgtactaaacattaaccaaactgcttccaccttgagaatggcgagaacagaccttgtctatgatcgctgctcttccaatttcaccaacacttctctgagtgtcagtcccttcagttttccctccaccgttcagaatgtcactatattctacgaatgcccttctgggattaattcagttgtgggaaacaattttacgtgccagaatgatagtaataataaacatgctttctatgtggtcaatggaactcagctgaagcagttcccaggccttcagaagtgtggcgttagtgttcagatgcaagtttcagagggtgttgtttgggactctgagggtggaattggggcgttggagaaagcgctggagaaagggtttgatgtgcggtacgatgcagagttgagttctcagtgcacagcatgcagggattctggaggagcatgtgggacgaatgagaatgatttggctcagttctcttgttattgctccggtggaactcatggttcactgtgctctactcacaaaagtcaaaggaagaacagagtgttgaagctggttttaggtttcgttgctactggatttgggctgcctctcattgctgtcatcatatgccgtaacaaagctaggatttggaaatttatattagtacaagttggtaagataaaaaagaatgatcaagttatagaagccttccttgaaagccaaggttctctaggtctaaaaagatacagtttctccgatatcaagaaaataaccaactccttcaaaattaaactgggagaaggtggttatggttctgtctacaaaggaaaattactcaatggttgctcggtggcagtgaagatactgaacgagtcaaaagagaatggcgaagagtttatcaatgaggttgctagcataagcaaaacatcccatgttaacattgtctctctccttggattttgtctagatggaagcagaaaagctctaatatatgagttcatgtccaatggttcacttgaaaaatacattcacgagaagacagctgaaacaaaaactactaccccatccttgagttgggagagattgcaccagattgcaataggcatagctcgaggactagagtacctgcacaaaggatgcaacactcggattctgcatttcgacattaagccacataacatccttttggatgaagcttatcgcccgaagatatcagattttgggcttgctaagcttagcacaagagatgaaagcatcatttcaatgtcaaatgctagagggacagtagggtatgtggctcccgaggtgttcagcaaaagttttggaggtgtttcacacaagtctgatgtttacagctatggaatgatgctgctagaaatggttggagggcagaagaacatggacgttgaagctagtcgctcaagcgagatatatttcccgcagttggttatttataagaagcttgagcagggcaatgatttgggacttgatgggatattgtccggtgaggaaaatgagatagcaaagagaatgactatggtgggtttgtggtgcattcagacaattccttcacatagacctaccataagtagagtcattgacatgttggaaggtagtgtggattccttggaaatgccaccaaaacctttcctgtcttctcctccaagatcatcaacagatttttccactgcaatatccaaatcacttgccagtgtctgatgctgctgctggagttgcatgtgttctttcaaacatagtataccttacaactttcgctattgatcatcaaagttaatatcggtccttctatatatatatattttgtaagtgtctcttttttatttggagcgggatgggggtgatggggcctcatgcatgggatatgcaaattaaataactgcaacagtgtgcaatagtttctcctattcatatttagagaaatctatgtttattaacattaatttatgagtttaattttacacttg

SEQ ID NO: 63369 - DNA, 172 bp, Glycine max
  Clone ID: PAT_MRT3847_28235C.1
gtgtggcaccagctggactgacacgtgcagtcaagtctgtggatatgcagcatgaatctgttacagaggcacatcctcagtgacaatgacgcattccgtgtcaagaatgatgctgttaacgattgaaagcggggttatgttggctcacactcaaaaggtgacacctgcaaag

SEQ ID NO: 63370 - DNA, 287 bp, Glycine max
  unsure (1)..(287): unsure at all n locations
  Clone ID: PAT_MRT3847_28236C.1
gnctgatgaagtntctttccttgatactncantttgtatcacaaaggcagnggcaaatccagangtagtgnttngaaatngcgaatngactacnttcgcactnttccgtggcncgaattctgtnacancagcangttgttacctntgcccgatcctggttctagagggtccaaantcnnngtctgctgtggnatctaatggttgnnctgttccncatnaagattgnaccactttgagncacaatctcaaggncaacntgggtgtngtgttgccaangagttagaaaa

SEQ ID NO: 63371 - DNA, 259 bp, Glycine max
  Clone ID: PAT_MRT3847_28237C.1
ataataaaacacactgattggccatagccaagggcttttttttagggaatgaaaattttgcctcttcggtacaaatggcaaagggcactctttaacctgatatttgcgacttttacagttttcaagaagacgggtaactatacaggttaggggcgttcgaactcctaatttattttttaagccccaaaaggaccacctgccaagcttctgggaaaggggcaactttacataaaaaaaaaattttgtttccttttccaag

SEQ ID NO: 63372 - DNA, 782 bp, Glycine max
  Clone ID: PAT_MRT3847_28238C.1
ggttatccctcatgtgaagcgacatgtctctttcttttgcaattcgtgttttgatggagagtcggagtagtttagttagtctgcctccagtcaagcaaagattgtgtttttgattctgtgaagtatttattttggtcatggtccttaggtcttgtattgcaaggttattgaggatatgatatgatggtatgtgtggagtagagccggtgtttgtgtagaagatgagaagggaacagcaagagggatgccgagctaatgaccaatcatacctattcgagctgcgagctatacagaggagagcacaattgattctttttatgtttctgactttggagcatttgatcagtcatatggaataggggatgctgttgacctcagtggaaacccagtttacaattcactaaaagtaaacagccaaacaatttctccaggttctgttcacattagtagtcttggtcaggtgagtttttctagttcttttcatccaatgaactccctgctttggtgaataaggcgaagatctagctggtatacaggatgccatatttcctagttttctctatttcctctttaatataggggccaacttcacttgaaaaaagcccattgacgaatcaaatagagccgcataggttacgattacagaaggttcaatcatcaaatcctggcacaatattagttggtaatacagattaccaggaggagtctgccatggctgatgccagccctaggactgtatttttacagatggtgacactgatgacaagaatcagccctatgat

SEQ ID NO: 63373 - DNA, 353 bp, Glycine max
  Clone ID: PAT_MRT3847_28239C.1
ggcggtttttgatgacatcaagcttgacgttcatctccaatgtcttggtggtcatggtggataggttctgggtaaagtagtatacagcctcttcaaagaggtccatcatggtttggtggctggaaagagcgaacatggttgatgacaggggtagaggtagaagttccggcagaggtagttgctgatggatggtaatatggaggggatgtcatggtaagagatggtttgcgctggcatggcagccatggaaggcagtcattgtctctcaatgaaagcaccaaatttgttagactctctggtttagaggaccagaaaccttccaagaagaagaagagaaataggaaaactcaaca

SEQ ID NO: 63374 - DNA, 706 bp, Glycine max
  Clone ID: PAT_MRT3847_2823C.1
aagtaattggtgggaaggggctgcataccaagctcttaatgcaattggagccccaaggtacaggtgggttcgtctcaaccatatcatttatgattactgccaagataagtcaaggttctcagtgaccccaccagagtgccttgccggcatttaaacccttaatttcaagtcacttcaattattcaagtacaggcatatcatacccctatatataatttacattctccactgttcaaatacatcatactatatatactacaactgagttaatttcagtttatcccatggggtacgcctcttcaattatttcatgtctttcatataaacacgtgaaataaaatgcacatcaataacttaagactaggggtaaattattgtgtccccataccataccacatggatcaattgaaattaacattttttttgtttggttttggggaagagggcaaatgattatagtgtatgtagggcgtgggctatgttcgaccagaagaggataagtcaaaagctatttctgggtctactatgcctttgtattaaagtgcgcattgtttgtggtgcaataaagcttgcgcattattgtgaatttgtgatgattcatgaaggatatttttgggcttgtgatgtagcaaatctcattgtttgtgcaatgactacctctgtttctgtataagctaaggacaacatatgattggtcaagaacatt

SEQ ID NO: 63375 - DNA, 486 bp, Glycine max
  Clone ID: PAT_MRT3847_28240C.1
ccacgcgtccgcccacgcgtccggcagcagcagcggcgacgaagccgtccatagattcttcttcctccccgtcactcctcaccaacaaccatcccccaccctccaagatggacgccgccgtcgaccgcctcaaggatgggttcgccaagttcaagaccgagttctatgacaagaagccggagctcttcgagccgctcaaggccggccaggcacccaagtacatggtgttctcgtgcgccgactctcgcgtgtgcccgtcggtgaccatgggcctggagcccggcgaggccttcaccgtccgcaacatcgccaacatggtcccagcttactgcaagatcaagcacgctggcgtcgggtcggccatcgagtacgccgtctgcgccctcaaggtcgaactcatcgtggtgattggccacagccgctgcggtggaatcaaggccctcctctcactcaaggatggagcaccagactccttccacttcctcc

SEQ ID NO: 63376 - DNA, 511 bp, Glycine max
  Clone ID: PAT_MRT3847_28241C.1
ccccgactactttaagcgcgtgatgatttccgaactggcgctcttcaaaaaggttatgcacacgcgctgcggcggtgccatcgaggtcatgggcctcatgcaaggcaaaaccgacgaccacgccatcatggttatggacgctttcgtgctccgcgtcaaaagcactgagactatcctcaatgcacgtgccgatgcgtactagtacatggtcgaatattcacatacaaacaaccaggcagggcggtaggataatgcactgggatggcatcactttcacgctggttatggtggctggctcgctgagatcgatggttctacgacatatgctgaatcatgcaattgaggagccgatgctgctggtgtgatcgacccgacgaggaccgctatggcgtggagagtggagagtgaggctttacagactcaccctgagaggcatgagccttgcgatgaacctgttaatgagtacccgagcattcatattattgagattgaggacataggaggcaactgt

SEQ ID NO: 63377 - DNA, 1027 bp, Glycine max
  Clone ID: PAT_MRT3847_28242C.1
gctaggggaagaattgtacttcactgttggctcacaacacattccttttggtgcatctccacaggatgtgtggactgagcttggacgtccctgtggcattcatcaaaagcaggtagatcaaatggttattcattctgcttcagatcttcggccacggacaactctctgtggagactacttttataattattttactcgtggtctggacatattatttgatggacagactcacaaaatcaagaagtttgtgttacacaccaacttccctggtcatgctgatttcaattcttacattaagggccactttggtggctatgggttaaaattaagggggacctttccaggaggtaattaccagcaaacaaagggtttttacacctagcccacgcgtccgatcgatgttttaaatacttggagatacacatcgagagtggagatatacaagaggctatcgaacccttcttttgggttgactatgaccttcaatcgatgtggaaaatagcagaggaagcattgatgtgtgttcagccccacggacatatgcgaccatcaatttcagaagctctaaaggagatccaagatgcaatatctattgagagacaggcagaagcattaagagaaggcaactcagatgatatgtcaaaaaattcttttcattcttccatgaacatggggtcaatggatctaggtggagctgagagttacctgtcaattgatgaatcaattgcacagcctacagcaagatagatatctttttgtaaacaaaagcaaaattttctctcttttttttcttcctctgattttatttttttctctcattacttcttttgtatgtggaggaggccttgttcatatgtggtttaatgattggttcccctcccaaacaaatgaacagtatatatgtatgtatttggagttaatgcgttctgcctttgcaagcactgatacattgtatacattgaattgccatggcaggatgtcaattttgaataattattgattttttgtttcatagcatgatactaaa

SEQ ID NO: 63378 - DNA, 220 bp, Glycine max
  Clone ID: PAT_MRT3847_28243C.1
gggctcgaggaagagagaacgtgaggctgtgcgtgggttaaggatagaaaactagaggaagggagctaacacagcacagaggcttgaagcgacgactgtgctggcacgattcgagcatacacatgcgttacaccgtagggtgccgctccgatcgcgatgtttcgtatgctgaggcgttcttcgacaacgtccgtcgacggaactttcgatggtccggagg

SEQ ID NO: 63379 - DNA, 1534 bp, Glycine max
  Clone ID: PAT_MRT3847_28244C.1
tacggctgcgagaagacgacagaaggggactccgaagtcaccctacaacaacaacacacacactcctcacacaataatggaagaagggcaaagaaaaacaacaacactacttctatgctcccacattgtggttcttcttttactctccctagtggccgagactagtgccaaggtttcagcagtgatcgtcttcggcgactcctccgtcgacgccggcaacaacaacttcatccccaccattgcacggagcaattttcagccatatgggcgtgactttgaaggtggaaaagccactgggaggttttgcaatgggagaataccgacggattttatatctgagtcttttgggctgaaaccttatgtgccagcatacttggatcctaagtataatatttcagattttgcaagtggggtcacttttgcttctgcagcaactggttatgataatgcaacctcggatgtgctgtctgtgataccactatggaagcaattagagtactacaagggataccaaaagaatttgagtgcatatcttggtgaaagcaaagcaaaggagaccgtagctgaagcattacacctcatgagtcttggaacaaatgacttcctagagaactactacaccatgcctggtagagcatctcaatacacaccccaacagtaccaaatttttctggctggcatagctgagaacttcataaggagcctctatggtcttggtgctaggaagatttccctaggagggttacctcccatgggatgcttgccacttgaaagaaccacaaatattgttggtgggaatgactgtgttgccagatacaataacatagcattggagttcaatgataagctcaagaatttgaccattaagctaaaccaagagctccctggactcaaattggtgttttctaatccttattacattatgttgaacatcataaaaagacctcaactttatggatttgaatcgacctcagtggcatgttgtgctactggaatgtttgagatgggttatgcatgcagcaggggccaaatgttcagttgcactgatgcttccaaatatgtgttttgggactcttttcatccaactgagatgacaaatagtatcgttgcaaagtacgtggtgctgcgtgttttatatcaattcttacaataaacaaatagctactagtgaaattttatttatgtacggctatctcttcatgtctgcacattcgccataaagtgccatttgggctttctatgaatgactgcatgtcgatgtgtacatatataaaaatgtcaatacagcacattcaccatataatgtgctgataattagaaataagtcgttttgtttagaacaatatatatatagtatttatactttttaggcactttactagattcggtgtcctccatatgtatgtcctattatgttgggtctatagtttgtaatatctatccatggtttggaaatgtcaaattccaagagagaattttctggtttaaaaaaaaaaaaaaaaaaaaaaaaaaaaaaaaaaagggcgctcgagcc

SEQ ID NO: 63380 - DNA, 400 bp, Glycine max
  Clone ID: PAT_MRT3847_28245C.1
actacaccatgcctggtagagcatctcaattcacaccccaacagtaccaaaattttcttgctggcatagctgagaacttcataaggagcctctatggtcttggtgctagaaaggtttccctaggagggttacctcccatgggatgtttgcctctagaaaggaccacaagtattgctggtgggaatgattgtgttgcaagatacaataacatagcattggagttcaataataggctcaagaatttgaccattaagctcaaccaagagctccctggactcaaattggtgttttctaatccatattacattatgttgagtatcataaaaagacctcaactttatggtatgttgttatcctaaaccatgcatgcatgtttaagataatattgtctctttctctc

SEQ ID NO: 63381 - DNA, 395 bp, Glycine max
  Clone ID: PAT_MRT3847_28246C.1
aagttaactctgcaagaatgaatatatctttttcggacaaataaatattaatagaatacaaaccgcccccactcatgtcattgttgccatttactcgacacccaaatgacgtgatgccagcaaaaagaaagtacaaccataaatgaaaaatattaatacaaacaaaattttgatcatgaaccacccattataacatatgctgttcagatacttcaacaaagccccctgggctccctctacattagccattgtatcatacatgttgaacacaaacctgatggcaatctttccttggagggaaacaagagggcctacctgattgaaactggagctacgctcatgaatagaggactcaacattttgaagagcttgagaaatggattgcatgtaactat

SEQ ID NO: 63382 - DNA, 307 bp, Glycine max
  Clone ID: PAT_MRT3847_28247C.1
gaaaaccgtacgtcctattgacttgaggtatacactacgacatgatttttcggaaggtgggagagcagatctgtttgccaatgatcaaaacataagatggaaaccatcaagcttggaggaagttgatccaagagaattgtaagccgtctttaaacctttaagaccagatgttggtgagttgagattgttattctggaaggaaaatgtactattatcattactttaaatgcattatacaattgcttacactgcatataataaatagatagagttgtcattgactatgacttccagatcaagatcatcg

SEQ ID NO: 63383 - DNA, 1280 bp, Glycine max
  unsure (1)..(1280): unsure at all n locations
  Clone ID: PAT_MRT3847_28248C.1
cacgcgtccgcccatcccaccccacgctccctcaaaacaaaaagaagggtttcaaatttcaattcataactcaccaatcccatagcgtcgccgtttctacaccgtccgatttccattccccatttccaatttcaattcccctctctatgccgccgcttcctacgccgtaatttcgtaacggcgacgcatcctcccaaaccctaaccctaaccctaacctccccatctctccgaaaccgatatttatttatgttttcacaaaacatgattctccctcccgaaaaccctagacccgcggggttcgcttccaaacccatgggcaatgagatcgcgaagcctccgccgtcgattctcgttggccgcttcaaggctctcctcaagcagcgcgacgatgaactccgagccacatccgtccccgtcccgccgccgtccaccgacgaaatcgtccagatttacgaactcctgctgtcggaactcacgtgcaatttgaaacccatcatcaccgatctcacaattatcgccgaacagcagagggagcacgccaaaggtatcgctgacgcaatctgcgctcggattctcgaggttccagtagatcaaaagcttccttcactctatctgttggacagtattgtgaagaattttgggcaggaatacattagatacttctctttacgtcttcctgaagttttctgtgaggcatacaggcaggttcagcctagtttgcattctgcaatgcgccatctttttggtacttggtcaaaagtctttccaccttcagtcctgcacaagattgaagctgagttgcaattttctcaagcagttaatactcaatcatccaccccgaatcctgtcagggcttctgaatcatctcgaccaagtcatggcatacatgttaatccgaaatacttgcggcagttggagcgctctactgtggatagtgctagtaagacacatcaatttttatcaagcagtagcaggcttggaatatcctcgtcgtcccctttaagaattggagttgataggcctttgtctgcatctatagatgaatatgcagtggacaatcctggtgttgattatggagtagccaaagcattaggtagagatgtggatttgactgaatggcagcgaaagctgtattctggtgatggtcgtaatcgatttccaacttcttttacgtacagccttagtaatggacatcagcgtcaaagttcaagagctttaattgatgcatatggcagtgacaaaagtcaagaaacttncaagcagtaagtctttgttagt

SEQ ID NO: 63384 - DNA, 554 bp, Glycine max
  Clone ID: PAT_MRT3847_28249C.1
agataactaacactaattccatgaagaattgaaggatatgaggcccaacagtttaaaatctatgtaagaaaataaccgagcagcagagtggcaacacgcgggcaactagtgtcaccccaacaccgcagtctaaagtgattcatgtttttaccaggaaactcaacttagacaagcttgattcaaattgatacttccacgttcgcatattctccctaaaatctgctgagagcctttgtatttttttatcatccgaacgcaggggtcgtacctgtgatgctccaccgcttcctagctgcgtaccccttttacatattgcgaatcggataagagcttgacactctcacgtggatccatggagactgagctaaattgttatgcggtgacagcaacacacacttttccagctcgtggtattatttgtggagcctcccttgcttaatgagggagctgccttacattgattgacctgcactgactgtcttctttcaaaggccgaaaccggggaggccaacttcgttaatgaataggacaggaagcacggagaggaggactat

SEQ ID NO: 63385 - DNA, 362 bp, Glycine max
  Clone ID: PAT_MRT3847_2824C.1
tcttgattcacataacaaatgagcccttgaattattttgttttgttttcttttagtagtggttcctatttaatgattgtagaatgcttcatctatacttgaatgtgtgtatttttaattctgatatatggaggatgctaaagttagctgattttttggtggttattttcctgtttgaacagaagtagcagttactgtgcctttggttcttctggtgaacagaagtgccttgattttcatgaatgcgaaaatgggatccttgtttggcaaaacttttggtctttagtgtttggtgaagcagaaatataaaaacggcagcttaagaggtgtagaaattaaatggaaactacaaggcggtggttt

SEQ ID NO: 63386 - DNA, 352 bp, Glycine max
  Clone ID: PAT_MRT3847_28250C.1
ggtgcacaaggttactgcgtggagaaggcaagcctccacattacgtgaaagtagattgggagtaaatgggtggatgaggatgaagatgatggtaataatcgtgaaagtggacattctaacacatgcctactataatattaataatgataacaacaacaacatcggtgttggtggtcttagaagaatcccaccaacgcaaactttaattgacagtaactgcacagtcatatcccaccttagatctacccagctcgagtcccatgcgccgaacgaatctcgacggcaaagacttatacatgttcacaggagagcaagcatgttgtctcaacgagtgccgttcagggctaacatt

SEQ ID NO: 63387 - DNA, 392 bp, Glycine max
  Clone ID: PAT_MRT3847_28251C.1
aaacccgtcgtctccaaagtgccgacaactacttattcggctatggggttgcaacacagccttgaaagaagctgaagcactacccaaatctgtgcaggtaattacagatccagcagcttttaagatgcaatccaagttttatccaagtttttgttaactttgaagatgtagtttgttcaaatgttgaaattaaggcaactagaaccagagatggtcctcatttgagtcatttctcatttattggttgtagtcttgtcatgactgctggggtaccatccatatacttataatgaactaaagtttaaggaggggaatacagaatttgttacctggaaccacagattttgttgatgtaaattacatttatttgggaaatattctttttatccccc

SEQ ID NO: 63388 - DNA, 3634 bp, Glycine max
  Clone ID: PAT_MRT3847_28252C.1
ggttaactgtaacctttttatgattagtgtagttttgcctttaatttgtagttgtgacattgttggagattgagtctttatatctaaactttatcccgtccccgtccctgtccccacaacgtgtagttcggccattccccggggtgtgctgctcatctccaagcgctccagggctgccgaaccgcgctctcccttctcaatccctcatcacgactctcccctgaagaagcagaagtgtcttataataatgggaatgaagggtccccccctctggctctccgtcgaccacaacgtcgttctcacgtccccaaacgaccgtcgtttgtttcacctcttcaagcgccccaacggccgtcgcccctggctcggtctcgctcctccgtttgtccctgagggccctcccttgctcgctcaataccttaagttgttgagccaagattctccacaagaatggatatttaaggaacttccgatcattggaaacatggagtgccgcttggcggtggtgctgcctcctgcccgcgaggctgctgccctggctgtgggtttgctctttgcgccccctcatctgggtacttcccgggtctccggcttcgtggcatgggatactccattgttaaaacaagttcttggtttcttcattcctgaaaacatgccggtgggtgttgctcaagggcgttcctggcgtcgctgctggtgcaagacccccctcgctcggttcacggcacgtggtgggggaccagcctgctaccattttgaagtgaagcgagagtttctgaagggtgccttgaaaagattttctcagttctttatttcacctcttgtaaagatggaggcaatggagcgagaagtacttgcagtagattcagaatttaaccaggttttacaaagtgatgcttgccgccttcaacaacttcagtgccatacttcagctcataatcatcctttaaatagattcttttgggggaataaaaagagcttggttgatgcaatggagaagggtattaatttgcgcgagcatatattgaaattatacaaggaatctagaaccagaggattgcttcatttctcatttattggttgtagtcttgtcagactgcaggggtaccatccatatacttataatgaaactaaagtttttgaggggactacagaatttgttacctggagtttttaaggaggggaatacagaatttgttacctggaaccagctgtcaaagatgttcatatccttgatatttcatggacattgccctgtctacaccaagagtatttaaagaagccagaggattatttagctcatctccttgggcatgagggcagaggaagcttgctctcctttctcaagtccagaggatgggctacatctctatctgcaggagttggggaagaaggaatttatcggtcatctatagcttatgtctttgtcatgtccatacacctcacagactctggtatagaaaagatctttgatatcattggctttgtctatcaataccttaagttgttgcgtgaagatactccaccagaatggatatttaaggaacttcaaaatattggaaacatggatttcagatttgcggaagagcagcctccagatgattatgctgctgagcttgcagaaaatttgcacttttatccaccggagcatgtaatttatggtgactacgtgttcaagacatgggatgaacaattgttaaaacaagttcttggtttcttcgttccggaaaacatgagggtagatgttgtttcaaagtcattccttaagtcagaagatttccaatatgaaccttggtttggttctcgttacgttgaagaagatattgctcaaagtttcagggagttatggagaaatcctccagaaattgatgcctcactgcatcttccttcccaaaatgagtttattcctagtgacttttctatacgtgctagtgacacctgtgttgatgattttgcaaattcaacttctcctagatgtttaattgatgaggcattgataaaattctggtacaaaccggatagcactttcaaagttcctcgtgcaaatacatattttcgaattaccatgaagggtggctatgctgatgtaaagagttgtgtattatccgaattgtttattcaccttcttaaagatgagttgaatgaaatcacatatcaggctagtattgccaagttagaaacttctgtcacttatgttggtgacatgcttgagctgaaggtctatggtttcaatgaaaagcttcctgttctgttatctaaattcttttcagtatctaaatcattcatgccaactgatgatcggtttaaggtaataaaagaagacatgaagagagctttaaagaatgccaacatgaagcctctaagccattcaacatatttgagattacaagttttgtgtgagagtttctatgacgctgatgagaagctgcattatctaaatgatttgtttcttgatgatctgaaggcatttatccctgggcttctctcccagatatacatggagggtctttgccatggaaatctgtcaaaagaagaagcaattggcatagcaaaaatatttaagatgaattttccagttaatccactccctattgaattgaggcatgctgagcgtgttatttgcctcccatccagtgccaatttagttagagatgtcaatgtgaagaataagtcggaaaaaaactcggtggttgagctttattttcaaattgagcaagattttggtctggggtcaatcaaattgaaagctttaattgatctttttgatgaaattgtggaggagccatttttcaatcaactgaggacaaaagagcagcttggttatgttgttgaatgcagcccacgagtaacatatcgtatctctgggttttgtttctgcgttcagtcatctgagtaccacccagtttacttgcaaagtagaattgaaaacttcttaaatggcctggaagaattgttggatgggcttgatggtgattcctttgagaattacaaaagtgggttaatggcaaagctgctggagaaagacccttcactcacatatgaaagcaatagattgtggaaccaaattgttgaaaaaaggtatatctttgacttgtcaaagaaagaagcagaagaattgaagaacataagtaagcatgatattgttgaatggtacaagacttacttgaaaccgtcgtctccaaagtgtcggcaactacttattcggctatggggttgcaacacagacttgaaagaagctgaagcactacccaaatctgtgctggccattacagatccagcagcttttaagatgcaatccaagttttatccaagtttttgttaacttcgaagatgtagtttgttcaactgttgaaatgacaactagaaccagagatagtcttcatttctcatttattggttgtagtcttgtcagactgcaggggtaccatccatatacttataatgaaactaaagtttttgaggggaatacagaatttgttatctggagtttttaaggaggggaatacagaatttgttacctggaaccacagattttgttgatgtaaattacatttatttgggaaatattctttttatccacaagttattataggtcattgactgaaagagttatacatttggtccaaaatatatt

SEQ ID NO: 63389 - DNA, 535 bp, Glycine max
  Clone ID: PAT_MRT3847_28253C.1
gtgaaaaaactagccagttttataaatttaacttggaccaaatttagggtttataactaactttatacaaatttaaccttgtattaaaaaatatttttttgtaaagaaataataaaagagcatttttttcctactaaaaatcattcaccagttttaataagactacaaatacatatcaaattaaaaactcacttttgtatataaaaaatgcacctattattttttttaacttatttttcccttccctttttattcccattattccgttttttttctttcctcttctactttttcattcttttttttttatgggaaaatataagcttctcctcaattttttttatacaaatctggaattagattttaaaaaaatcccaggtaggtaggaaagtgaaaagaggggggatatgagtgacgacccaaccaacctggtgattcaccaataggggtttatatgcaaatgtgattagaaaactaggccaacccagaaaaattccccctttaaaaattataactctttttattcaagattggg

SEQ ID NO: 63390 - DNA, 565 bp, Glycine max
  Clone ID: PAT_MRT3847_28254C.1
catcatcatcacgtgcgtgcgattaatcgaaacgaaagtacaaaattgcaaactccctgttcaagtttgaggtcttactcagcttccaattcttacactgttatggattcttcttcttcttctacccagtttgaaaattttgtagcttccttggttgctcatgtaagtcacatataggagcaatttgtaactgaggttaccgagaattatgagacaacatgctggggttgtggactgcgtgttttgcttccatcatgtgcatctgctttcaaatgtggctggtgtggggccattacagatcataacaaaatgaaacgggaccagaagtgcatcaggtggagagtagtccgtgatcgatgctttgtttctgttgtcctcgtatttatgttttttgtaatatttggtggggtgtggacagtttattctgttgtcttttctatcagtattctttgtggagtttttcactcaatcgttacagcaatcttgtccatagccaccatttcctttttcagctttgcagcatttagatgtgctggcactccaccaatatattatggggaagcta

SEQ ID NO: 63391 - DNA, 528 bp, Glycine max
  Clone ID: PAT_MRT3847_28255C.1
gctcagcaaaaatatatatattaaatattaagaagtaccagaggtactgtagatacaaaaaatgtttaaaacaaagctggtacagagaaataaaccccagctaaaccccaactcaaaaaacatacatgcttcacctcttggaagaggtggcagacaaaaccctccctttctaattaaacaaatacatctgacaaattggacgaccactggttgaagtgagtatcgaagtctttttccataaccttgagccaggaccaaagtaaaaagagcgcgtcttccatcagcttacttgcgttaaaagcttggttatcaaaaactagcttgtttctatgatgccatatggtcctagtgagggctatccaccaacaactccatctcatatcctttgttcgagaagcattcaacctgcaatgatgcaagaagtgatctttcggatctttagggaaagcacccactgatttgacccatgcgagtgtctcccaccacaagggaagaaccttgctgcagttgaaaaaaaggtgcgctaca

SEQ ID NO: 63392 - DNA, 206 bp, Glycine max
  Clone ID: PAT_MRT3847_28256C.1
attggacaacacaaacactacaccattgggaactaccaaaggtagtggggcattatatttagcagaattaggagcactattatacacaaatacagcacagaacctcgtcttgccgagagctatctttatggatatatacacttaattcaacattggcaacatcaccatcagtgcaggcatccctactgtcaaatatcacatccaat

SEQ ID NO: 63393 - DNA, 382 bp, Glycine max
  Clone ID: PAT_MRT3847_28257C.1
gtggaattcgggtcgagttaaggccctcatcgcaatcccgaagattaaaccttatacgggggttaatttaaggcagaagggtgtgaagaaagaacgggacttgttcttcaacacgcttttctggggactgaatttctgggacaacccgagtactctaaaacgggaagtggacgaacctcggaacacttttcctttggagctctatgactatgtgattttcacacgcgcgtgttacatgataccattatttgctgtcactggagcgggctctggtgatcaaaccgaatgggaaacccggtttcacacgcacgctgcggagatcatatcggggaaaaggtggaaaatatggatagaattttgcgcgcgtttgttcgcaatttga

SEQ ID NO: 63394 - DNA, 977 bp, Glycine max
  Clone ID: PAT_MRT3847_28258C.1
aatttaaaatggcgacctcgtgcacaaaattctgaataatataacatacaccttcagcagaactctttccgagaccaaactagatgactaaacaacttaatttacaattacatagcaggttaaaataaacggcgctagaatagcaataacggtaagcaccatttgtctttgatttgtaaaacaaaaaatgcttgaggataaaatttagttgacataacaatagacagagacttgatgataccaaatcaagcaagttgttaaaccaatccgaacaccaaaatttaccatctttaagggaagagacaggaacaaagatgttctccatttcacatatgcaatcgaaagattataactcataaccacttgaatcaatttttatttttctgtcgacataataatcctatgcaagtttctcaaaacttgtataccgaagaaacaattgcaattgttattcaatctggatctcttgtggagcttcctcagttgttgactcttctgtattggcttcttcttcactaatacctgcagcttccacagtcctagtaacccattccttgaggggctcctcattcaaatcaagtctcaaaatacccgcaaacattccacccaagaatgccactggttccttgagagcttctttgacgatggggtcttgttcaggattaaagaaaaaggctttaacctcattcctatttccattccttttcccagtgccaaagatgcttctgctcattcctcctcctattatggttggcccatgtgaaaataacctagattcttgcttcgatttcagccaccgagtagattgcagtggcagcagaggagaattaacaacgagagtcatagctatgcttgcttggtagcaacagggggcaattctctccacaattaggggaaaataatctgaaccaatgccaatgttctactagattttattttaaaacaagagataggaactgagtccgagataaagctgt

SEQ ID NO: 63395 - DNA, 369 bp, Glycine max
  Clone ID: PAT_MRT3847_28259C.1
aagaaacaaattttaccttttaattttgttcagggatttccaggcaaaaactaacgatcccatctaattaatttttttgattaaggacaactcaaattgactttgactttatagtcctcgaatgtcgggtcgggccccccggattcccacccgtctcaaccgtagtctttggtcttggacatattaactgatttcttctttaccactccattctttaaaataaggggacaattatttataaacacaattggacacactgtaagctcctccaggtagacaaagaaatcattttctcactttataccgtttcatacgattcaggaccagggtcaatactgagtgagctaagcattctcacagccaaaatgt

SEQ ID NO: 63396 - DNA, 779 bp, Glycine max
  unsure (1)..(779): unsure at all n locations
  Clone ID: PAT_MRT3847_2825C.1
ccacgcgtccgcttttaatccatctttctttgtttctctgcacagcataggccaagttttcttctttagaaaaagcatggataaacgagacaaagcatttaagctcctctaacggtccctccctagtacatggcacttgttcacgccacacctttcaaccaaaccaaaccaaaacaaaacctacgagtggtgtctctatgtttgtgagacccaaacgcggtcttacttcttcttcttcttcttcacttgtcctctgttttgaattgctctgctctgcatgaaacagagtcccctgttggattgttcattgcaatgaggtatattcggagcaacagcttcaagaggttcttctcattcagaagacgcagttcaagggaacagattctgagtcccaacagtaagggtgaaggaaacaatgagattcttccgcatgaagaagaaccttctcgaagaccctcttggaagtgcttctcttatgaagagttgtttgatgccaccaatggcttcagctcagaaaatttggtgggaaaaggagggtatgcagaggtttacaagggaacaatgaatggtggtgaggaaattgctgtgaagagactcacaagaactttcagggatgagagaaaggagaaagagtttttgacagagattggtacaattggtcatgtgaaccattccaacgttttacctcttttggggtgttgtattgataatgggctttaccttgtttttgagctatcttccagaggttctgntgcatctcttattcatgatgaaaaatt

SEQ ID NO: 63397 - DNA, 767 bp, Glycine max
  unsure (1)..(767): unsure at all n locations
  Clone ID: PAT_MRT3847_28260C.1
gatgaaatctaatcctatgttttttttgattgagttcaaatcctttttcattgcttttctcataattataggcttgcaacttttacattatttacttttattgtaacaaaccaataaattttcgatcaaacatgtatataactattaaactatttaatattaccaaggaactgagtaacccaagttcccgagaagacgatcttaactacaaattttgtaaactgtgacaacaattggtacacttgtcaatagtataacaactgcactatgggatcatgttgtgtgggcaccatgggtccttgaagcccatattccaaagacaagaaaccagaaaacgaacaagattgcccaataacgtgcaggtccatacttgattctggtaagcacaaaaaagcggaagaaaaccaccacggctaaagcacaaactcctccaagtaagatatgaagaccacttctagcagttttctttccaacacgaggagctataagccatgcaagggtgatggtaagcagccccgtagcaagcaggatccctgtaccctccacggcccacttggttgcaggattctgtgtgggggcagcatcttcagtaacaatacttaaaggctgctcagaaacaatctgtgaaactgtgtccacactgctgatgttgntattgngactgttattataaggacaaaaccatagtgcaatctacttagccgttgccttccgatagcagcccagcatcaggatccaaacagcttttgcatgacatgtgcggcacc

SEQ ID NO: 63398 - DNA, 240 bp, Glycine max
  Clone ID: PAT_MRT3847_28261C.1
tttttattttttttttatttttctttttcttttttttcttgttctatcttgttgctgagtatgggtggttccataaaaccaccgctgacaaggacgatccccaggaggaggaataagaaaaagatattgctgcttatgcgccctctctcctagtcagaaactcgtcctaatatcgataaggcgggccttgaaccagcggtgacagtacaaatggtgccgcccacaaaggaaaaagactcg

SEQ ID NO: 63399 - DNA, 268 bp, Glycine max
  Clone ID: PAT_MRT3847_28262C.1
ctatgggtgtgagatgcatgtttcgtacttggatattaagccccacaacactctactatatgaaaactttaccgctaaggtctctgtctctggattggctaaatgatatccagtaaatcactccattgtcccaatgacagcggcatgaggatacaatgggatatatggctccagatttagttatattgataatattggaggaatatcccataaggctgacagttatagctatggaatgcttgtgatggagattggtcgcaagaggaca

SEQ ID NO: 63400 - DNA, 279 bp, Glycine max
  unsure (1)..(279): unsure at all n locations
  Clone ID: PAT_MRT3847_28263C.1
agaatcggaatgcgggtcgagagggcactggaagttattccccaaagctcgatcagcagcaagcacttgcaaagtttgtgctaagtgttcagttcagagcgactgagcttcacaaaataaaaaaaagggtaggacttggaaatattctaccntccccggggatttaattcggggtgggaacctgtcaggtgtacgattttcccaaaatgagtgggttttaagcttgtggtaaattagggtatagggtattttcgggtgagaattttttgcgtgtccaat

SEQ ID NO: 63401 - DNA, 144 bp, Glycine max
  Clone ID: PAT_MRT3847_28264C.1
aatttgccaactgtatcagtatatttcaaagtgttagcactatttctgtatgtttttaaaactcataaagacaatctgaaactgtcaaaagtcatcaatatatagctagagtgatctgcttgttacaattaaaaaaaaaaaata

SEQ ID NO: 63402 - DNA, 267 bp, Glycine max
  Clone ID: PAT_MRT3847_28265C.1
aaagaccagttggaaccttttatctatctttctatcagccaatcaagagggggggggggcaccggttttttccaccaaaaaatctaatgaggtctcaagaaagaaggatgaaaaactccatgttacaacggggggctatgataaagatgttactcggacagagttatcagctgatccagccaaaaaaatgggcagggttggatgccaatccacagcagtaataggagccccatgcggaagggttctccatccactcaaatgaccatg

SEQ ID NO: 63403 - DNA, 316 bp, Glycine max
  Clone ID: PAT_MRT3847_28266C.1
attgtaaatccaggcatttaggacattcatttcacgttacatgatttatgttcattgagaacgcacgatacgtgatgatgaatatgtcacataggggtctgaaaacatgagccagcgctctattgagggatcaagacacaccgagattgcaatgggtgcctaccaacctcatcatacgtggccatgaacgcagtattatcctcgtggtcagagtgcttcgtacaaccacatagccttgaatgcctgtgttgcgttacaagcgtaacgtgaagtattacatcgagtagaagcggaaagtgtgtacaccatataagtg

SEQ ID NO: 63404 - DNA, 846 bp, Glycine max
  Clone ID: PAT_MRT3847_28267C.1
tcgcccacgcgtccgcccacgcgtccgcacgatcctttgcaacaacccaccaccaatcagttcaatgggggcaacaagttacctggtgaccattgtggtgattctggttttgaccaaagggtcctaactgctcccataaaatctgctgttgacaagttccagcttattcctgagttcctcaaggttaggggattggtgaagcaacatttggattcctttaactattttgtgaggacagatataaagaaaatcgttcgtgctaacaatcttatcatggcgagtaggtacccacacatatatctaaggtttttaaatgtcggaattggtaaaccatccatgatgattgatgaggttactgagggccttactccacaaacgtgccgcttaagtgacctgacgtatgcggctccaatatgtgctgatgttgagtacacgctacgaagtcacgataaaccagacaacaagagaacgctcagagttgaaattggaagaatgcctattatgctgcggagttgttgttgtgtcttgcatgggaaagatgaagctgaacttgctaaacttggtgagtgcccccttgatcccggaggatattttgtaatcaaagggactgagaaggtgattttgatacaagaacaactgtcaaagaatagaataattatagacactgacaagaaaggaaacattactgcatctgttacaagcagcacggagaaaataaaaacaaaaactgttgttgtgatggaaaaagagaagctctggttgcaattgaataaattttccaagaaggttcctcttatggtagttatgaaagctatcgcgatggtgagtgatcaggatgacagagtg

SEQ ID NO: 63405 - DNA, 274 bp, Glycine max
  unsure (1)..(274): unsure at all n locations
  Clone ID: PAT_MRT3847_28268C.1
agccggttcacccccgaccgagcccnacgcngcagggggaagcagcaagcaaagacccgcgcgcgcccgccaganaaagtattagggtaccgggagagagagagagagccgaacctgaaccgagctgagcagatacggcgagaaaacaaggctggcaacaacctgctcacactgttcaggcggatgcgatcacggtgaccggctaacaggagatgcgcgcaagcacaccctgccccccccatcggaggaggccacacatgggaacacaccccca

SEQ ID NO: 63406 - DNA, 347 bp, Glycine max
  Clone ID: PAT_MRT3847_28269C.1
caagccaatctgagctatcactacactcatgttcagcaactacatgctcacgtgatcgatcgtatcaatgcttaagaatctgagagaccacccaactgccacaccgaaccaaatgttctaacacgatcaaggtcttgacaccttcaggcatgtgattttgactactgaagaatcgatcgtggaccaaatcactgtgaaagtacatcatccctagatccaactctatatgcaatctgcacacagcatctagctgattctggccatgctaaaagtgctaggaggcggactattaatctactgtgacactaataacatatgatttgaacatgctgaaaaagatgagacga

SEQ ID NO: 63407 - DNA, 675 bp, Glycine max
  Clone ID: PAT_MRT3847_2826C.1
cggacgcgtgggttgcggctttccctctctttctctgtctctcccaacataaccattgggagagagaatcagagaaaccatcatggatccatcccatgatgaaagaggacccccaaatgaatcattaacccaccagtcctcttcccgtaggcatggggatgcaccaccaccgacggtggcaccaccgcaaatgatgtattattacccgcaagggtatgccccacaacccatgcctcaccaaggttacccaccaggttatgccccataccctaatgagtaccatcaacaaccataccattaccccgcaggtccctactttagcactccaccgacctatcacaatggtggcggaagcaaagccttcattcgtggcttcataatgtgttcatgtttaatattcacatgcctctttgttgccacccttattatggcgctagtgttgcacccccaattacccgtttatacgattaattccttgtctgtggcaaatttcaacaccactcaattgttaaccgcaaattggaacactagcatcatgatccataacatcaacaataggctaattggtttattttctgattttaaggtggatttgttgcacaaaaattacatagtagcagtgagtaatttgcctaatttcgagttgaacaagaacgaagttaagcgaattgatgc

SEQ ID NO: 63408 - DNA, 191 bp, Glycine max
  Clone ID: PAT_MRT3847_28270C.1
gttaccggtttggatcaaaagacccttctcttgggcgacgggccagtcactgattttggacacactaaccttgaacagatcccatggaagtctactgaagcttacatcattctttaatccaccagaattttcaccgataaagattatgctgccgcacatttgaaggatggtgcatagaaagctattatttc

SEQ ID NO: 63409 - DNA, 403 bp, Glycine max
  Clone ID: PAT_MRT3847_28271C.1
gtctcgagtttttttttgatagaatacccctgacaaaacactatctttatatacgctctactgagaaaaatggggtatagcgcaaatgggggcaccacatgggacagtgtttgaggcgcgcacctctgtgcactagtgagccccagtgtgctctgcacgagatgtgcatatcatgtgcacatgtgtgctcttgagctctgacactgtggagactctagcacgcgcgtctctctctcatgcgcggttgcgcgcgactctaggggttctctatagtgtgagacacatcacttgtgtatatagcacgctcttctacacagatacacactctatacacctactctcacatcacacttagagtctctcagaagagcacaagataagctatgctctgcgcatactctga

SEQ ID NO: 63410 - DNA, 264 bp, Glycine max
  unsure (1)..(264): unsure at all n locations
  Clone ID: PAT_MRT3847_28272C.1
ctttctcaactaattttaatactactgtaatcttgagttgtgtttcaatttcanacttcaanattttgntggcatcanaagattacactaaaccttttgaganttgttaatattttaatattnatctcaagannnnnnnnnnnnnnnnnnnnnnnntatttgatatatagtattagtccatatttttntcaataacaaaaaaagtaaatntntttataattgatatataagtntattganatttaaaatttaggatttagggta

SEQ ID NO: 63411 - DNA, 147 bp, Glycine max
  unsure (1)..(147): unsure at all n locations
  Clone ID: PAT_MRT3847_28273C.1
cggaatncccgggccgacccacgcgtccgttgactcacagatggtttctttaataaataaacctttttcctaaccatatattataaaatgggggggtttcaatttattgtgtggtgaaaccaaattctttttaaatgttaacaactt

SEQ ID NO: 63412 - DNA, 377 bp, Glycine max
  unsure (1)..(377): unsure at all n locations
  Clone ID: PAT_MRT3847_28274C.1
cccacgcgtccgcccacgcgtccgagaaagttctattttatctattcaactaggcgtgagtaagccgtcacaagagccagcaagtaaatagtttatgatcggagaaacaaggatggttcctaatgtatcttgtgaatggtgcattgtctttgagcctttgtagttacaaattgtaaaagcaattttgataatcttaccttgctagagtattttggtatgtatgtattgctttggtttgctcaattgtgaaactttagttgtcatagatgattgtttgatttctgaagtaactgagaaagctctattttatctattcaacaaaggtgattgtttcaaanaaaaaaatcaatgtgggactataaaggacactttataat

SEQ ID NO: 63413 - DNA, 405 bp, Glycine max
  Clone ID: PAT_MRT3847_28275C.1
caaaaaaccccatggttttgttcaaaagggaaactgaaaaaaaattttttggggagattaacttaagcaaatcccgggcttttttttttgcccgaaagcaaaattttaaaacaaggggaccccttttaaaaaaccttttttttacagggttaatttttttctccttaaaccaccagggattctaaacttcaacttttgtttttcccccccaaaaaaaaaaggggctgggtccctttgaattaaaagccccttttgactatttcaaacttttttataactgccccaaaggccccttggaatcccttgccataaaagtgggcccccttttgccccaccccccaagggggagctgaatttttttgcttctttgtccccccccctgaaccggaaaaaacccatatccct

SEQ ID NO: 63414 - DNA, 362 bp, Glycine max
  Clone ID: PAT_MRT3847_28276C.1
ggctcgagcgctacaagcagatcaatctatctttctttcttaaccatcatggttatggtatggtaggaggattttgctcactttgcccttaaatcggacactacgactgcgcctcaatcagaccacgacttgctcatcctttatggatggaacaaactggccaccgcagggcctggcatcaccacccgttctgtaatggtgcacgtgtgcgacagagctaaacgcgatgcatcgactgctgatggatgcaaattcagcgtccaaacgatgcgtgattgcatcagtaaaggcaaacagatggtgacagcgaatcgctcgcctgctagacaacatggacatgccgtgcattgtgagactgggct

SEQ ID NO: 63415 - DNA, 764 bp, Glycine max
  Clone ID: PAT_MRT3847_28277C.1
aacaattacagaccaccttgcttctagttctagcattcaaaaatatcttaaagccatgttctacttcctcaaaagattgtgccttttatgtttcctcttgctatcctttgatgtttcactgtgttcatgtgcttcactcagagacttggcttcttgcttggataatcacgatatcaaaaactttaccacgctcccttacaaagaacatgatcattcctctgcctataattactacaaaattctcaatttttccatccaaaaccttcggttcgcagaacccgtgattcctaagccgatagccattgtactgccagagagtttggagcagctgcagaaaagtgtagcatgctgtagagaaggcttcatgcgcggacgcgtgggatgtggtggacacagctatgaagggacttcatatgttgctgatgatggcactccttttgtcatcattgatatgatgaatttgaaccatgtttgggtggacatggagacagaaacagcatgggttgaaggtggtgcaacattgggagagacttactatgcaatctctcaggaaagcaatgaacatggattctcaggtgggtcatgtccaactgttggagttggagggcacattggtggtggcggatttggtttgttgactagaaagtatggtcttgcggcagataacgtggcggatgcccttcttgtcgattgctaacggaaaattgttcgaccgcgaaaccatgggagaagatgtgttttgggcctttagaggaggaggaggt

SEQ ID NO: 63416 - DNA, 505 bp, Glycine max
  Clone ID: PAT_MRT3847_28278C.1
gttctccaaattcaaaacagagaacatgtgactattgcgggagcttcacggctcttctgtactgcagagccgattctgcgaagctttgtttcttctgtgaccgtaaagttcacttcccaaaccagcttttctcgaagcacaagcgcgcgcagctctgtgatgcgtgtggagattcccctgcctcggtgctctgttctgcagaaaactctgttctgtgccaaaactgtgattgcggaaagcaaaaacatttggcgtctgaggcgcaccaacggaggccactcgaggggttctcggggtgcccttctgtgactgagttgttaacaattctgggtctcagtgaaaaatctctgctttcaaatgagggaacttcccagattgatgatgacctttcggatttgcacgtgtggagtgctccttctattaatggtcttgaagatttgatcactaccacagcttcttctcaaaaggaacgtgtgggtgcgtgcgggagacacaaagaagagat

SEQ ID NO: 63417 - DNA, 417 bp, Glycine max
  unsure (1)..(417): unsure at all n locations
  Clone ID: PAT_MRT3847_28279C.1
attcaacactnnnnnagaacnnaannangnngcnacagantaannnanaacnnnnaaaaannnngnanaancannaactnntcagannangtgntnntaacatannanntngacacgtacatnnnngnngannntntanaantgngngnannnagngagatataannncantnnaanngangtacnannngnnnnnncannacaannnannannnnnngatnngacatatgnagtaaganctaacnnntnngntngnagannntngntgnanntnanatgntgganccnnntngnganncagnncncgactgaagagnantgnnnnagnnttnnantnnnctcnacagctncacagnnnagattncancannnntnncaattannnnngagagcncgtanngnnccatntngattnt

SEQ ID NO: 63418 - DNA, 631 bp, Glycine max
  Clone ID: PAT_MRT3847_2827C.1
ataggggtcaaaacttcgctcttacgttattaaattaaccaagccttagtgttcaaaacttcgcacttacattattgaattaaccaacataagcattggaaagcaagacaaaattctaaaattaaattttcttcaattacacaaacatattattaagcatacttttcacctaaactcaattgaatttgcttctggtttttggataacctacaaacatgatacccaaagggggcaatcagagaaattgatcaatgaaatgtcgtctaataattgtatgggctttagacactgccagcatctgtctccatgattcacccaattatgaacctagccaaggaaaaacattgggtgatgtctgcaaccgccctgttaaaacttcaacaccagtctgtggcaccatagcttacacctttagatcactatgtaataaaagtagtgagagatttggaaagcatgcctgagattataggtttaaaccaaaagagtgtgctcaaattgagcacttggtttaccatccgctgtaacagcagtccatccatcaggccacattcgatcacgccagacaccggcattgatcattggttcaattgtaaaggtctgtccagcctttattacaccaactgctttattt

SEQ ID NO: 63419 - DNA, 246 bp, Glycine max
  Clone ID: PAT_MRT3847_28280C.1
ccgcgtatagtgggcagcgtagctctgaattgggaacgactgttagacaagatagtcacatgaacaaagccaagctaatcaacatgcttgatgaggtggaccaaaggtacatgcagcaccacagccagattcaaattgtgatattctctatcgagcaatctgctgggataggctcaactaggacgtacactgatctagcactgcatacagtttcaaatcaattacagcgcctgaaggatgcaataa

SEQ ID NO: 63420 - DNA, 871 bp, Glycine max
  Clone ID: PAT_MRT3847_28281C.1
aaagggtgagagagaaagaagaaggaaaggaaagatggatggttctgggcagcagcagttccagctcacccgcttaggtcggatctattttctgccactcttcactttcctccttcggtttcgtcagaagccacttggaactccaacacctttccatcatcccaagtaacacacaacacaacacaacacaacacagcaacaccaacttcctctttctttcttttctcaaacacataaaaccataactagttctaatttaaaacacacaacacaacacaacttttcctttttatcttttattattattttcatagtaataataattgaagaagagagaagaagcggccagaaaacaaaatcccaagagactcttcctccctccatcgttttgtttaagtgttaaattaattaaatgggcaatgtgacgggaacagtggcggcgaaattcgcgtttttcccgccagagcctccgacgtacgacgtcagcagagaggaggatgggagggtggtggtgtcgggtgtcaccgccgacaaaaacgtcgacgttcacattctccacaccaaaggtggcaacgagatcgtcgccaccttctggaaacacccttttgccagggtcactgtcctctactctcacggtaatgccgctgacttgggtcagatgcacgacctcttcatcgagctcagagctcacctccgtgtcaatatcatgagctatgactattcaggatatggagcatctacaggtaagccatctgagttcaacacctattgcgacatagaggctgtatataattgtttgaagaacgagtatggaattaagcaagaacaattgattttgcacgggcaatcgggtggaaggggacccgcgctg

SEQ ID NO: 63421 - DNA, 974 bp, Glycine max
  Clone ID: PAT_MRT3847_28282C.1
tacggctgcgagaagacgacagaagggggacactgaggtttggatctttgcctgtttgggtttgtggactgccaaataagcgtttgtatatattattctcacggagtttgtgtgtgaggcagcagcacacggcacacacaaagaacaaaagacaaagacagagagaaacaatgtcttccccaagcaaacgccgagacatggacttggtgaagctgtcatcaggatgatgagtgattacaaggtggagacggtcaacgatggcatgcaagagttctttgtggaattccacggacccaaagacagtccttatcaaggtggtgtgtggaaagtaagggtggatctacctgatgcctatccttataagtctccatctattggctttgtcaacaaaattttccatcctaatgtggattgagatgtctggttctgtttgcttagatgttattagccagacttggagtccaatgtttgaccttgttaatgtgtttgaggggggttcttcctcaacttcttctgtaccccaatgcatcagatccattaaatggggatgctgctgccttgatgattcgagatcatgctacatatgaacaaagagtcaaagaatattgtgaaaaatatgccaagcctgaagatgttggagctgtacaggaggaaagttccagtgatgatgagccgagtgaagatgattatgcctctagtgatgatgccattgttggccaacctgatccttagatttttacatacaatgcctgccttatttgcagtcttgcttgtacatgatatcatttaatttgatattgagtccaggaatttgaagtgagacaagttcttaaggttgaaggaaaaattcacacctttctatctattacatggtggttgtgtaaataggtttatgatttaaatgcttctgtgactagaccattcaatttcagaaggttccgaaaaaaaaaagaaaaaaaaaataagaaaagcga

SEQ ID NO: 63422 - DNA, 1390 bp, Glycine max
  Clone ID: PAT_MRT3847_28283C.1
ttcccgggtcgtctcacgcaaacagcatacctagtaaaacagcatacttccttaaagcagaaaaattatggaagcccaaagagatgagcgtgtctcaaaactacttggagctcaaacccatgtttggaatcacattttcagcttcataaattccatgtccctcaaatgtgcaattgagttggacatacctgatatcatacacaagtatggtcaacccatgccactctcaaaactcactacttcactatcaatccacccttccaaagccaattgcatatatcgcttgatgcgaattttgacccattctggcttcttctctcaacacaaggtcaacgagaatgagctagaaatgggttacgtgttgaccgatgcatctactctactacttaaggacaaccccttaagtatggtacctttcttgcatgcaatgcttgatccaactttgacacagccatggcttcaattgccaacatggttcaaaaatgatgatccctcgccatttcaaacagcacatgggatgaaaatttgggattatgctgaccgcgagccaaggcttaatgacctttttaatgatgctatggcaagtgacactcaattggttgccaatgtggtgattgagaggtgcaaaggagtgttcaatggattggagtcacttgttgatgttgggggtggcacaggtactatggcaatggctattgccaaatcattcccacaactagagtgtacggtgtttgatcttccacatgttgttgccactttacaaggaagtgagaacttgaaatatgttggaggggacatgtttgagtcaattccttctgctgatgccattctcttgaagtggatattgcatgactggaatgatgagcagtgtgtgaaaatactgaagaaatgcaaagaggcaataaagagcaaggtgattatcatagacatggtggtggagaatgaaaagggagatgatgaatcaattgaaacacagctcttcattgatatggttgtgatggtgctgtatcctggaaaagagagaactgagaaagaatgggccaaactgattttctctactggtttcagtgactacaagataactccagtgttgggtttaaggtctctcattgagatttacccataacaacttcttatgaaatgtggtatataggagaaggaccagcactatcatcaataaaggctcattctccccttcacaaaccaaaaaataatatatagttgtaataatgttccaaatgtcccagcactctgtcataagtaaaggtcctcggattattttgtattttaatttgtcttgcagtgtaatctataatatatagttgcaataatgtctccctcttagcccagttgggtttgcagaaaaaattacacataatttctagttgct

SEQ ID NO: 63423 - DNA, 1959 bp, Glycine max
  Clone ID: PAT_MRT3847_28284C.1
tttttttttttgtacaagaaagcaatttaccttgaataattgataaatactttacaaacagaataattaatgagtaattacataaagaatatatattgtcatcaaactagtatcacccccaaaaccaatcttgttataacatcacaaatagcactactataaccagttaagaagtaaaagaagaagttgcctacattgattatgaagacaactgtaggaataaaatgattacttgatcagccaaattttattccatttcctcccccatggcaccaacagtatggcttgtgaagaaaagttgatagagacaactataaaaagatgataccatcttttatttgattcatcttcattcatatttctattctaagtacaccaatggcacgcatgagcatgatgcatccctacctgctccctccatttctcattctcactttctcctcagggatggtagcattagcaacactcttgttggaagccacatttcccggtctagttgaaacagcataccttcttgtaccggctggagaagcagggaaagaaagcctcttctttatgagagcagaagctgctttttcaggtgttccattactatgttcgccaaccaatgcacttctcactttggatgatgatgactttgcctttgttgcaacctttgtggacggtgatgagcttgaattgctctcatcatctctcacttgagacactccaatgctgtgcctgcggctgttttctgaggttttgctgaacatgttttttgagtcaccatcactaccccatgaaccaccccttggacttgatagtacctttgcctttgctccattggctaatggcacctttgaggctgttgttgaaggagaattgtggctgggagggcaggttggtttttggcttgctggggaaattttgatatcattattctgatcacggagagaatacaattttgtgatttcaccaactgacatggtttggcttgcaacacttttggcagatgcatggccaatgtggtatgtagtgttttgaccctcccatggccttgcagccatccatcgctctagccaattccagccccagtggggattgtttggatccataaatgctgcatttgtagcagattttgaagagttcctccacgtttgctgatgtgttgatgcatagaccaaagccttttctcttctcatagctgctacttgtctgttcaacaatttggcttcaacttgctcctttgatttcaagctatcatcccacttctctccaatctgattagcttgcgacttgtcaaattccttttcacgtttctgctgcagttgcctatgaagagcctgattctcctcagacattctgaccttcctggcacgaacctgagactgcaaccgtgaaagagtttgcatgcattgcaaggtagtagctgcttgccgttgaacagattgcccttgcaccaatgttttcaacctcgacaaacctctcaagccacgcaaggatcttcttgccaaatatccacggtaagctgtttgaatcttgatagctgccatttcttgattcgcttttccattggaacgaggcgtgtttgtgagacaagcaacctctgcagcaacagcagccccggcggccacagcagtagccaaaaccaaagaaaaggcttgcctgctctgttcattattctctgcctcacttattggtttgggatcttttcttggtggaagtgaaggaacaacggcaattggtgctccttctagatcctcatagtgatgagtcccaaaacatcctaactttgacttatgatgatgatgatgatgatggtgtttctgttcctttttggaatcagaaacaaaaactctcttcactgcagaaaaccaaccccctttcctccccatttggagttcctttaatcctgtgaagaggaagctcgagccaaaaaggaggcacggagaaaaccggacgcgtgggcggacgaaaaag

SEQ ID NO: 63424 - DNA, 361 bp, Glycine max
  Clone ID: PAT_MRT3847_28285C.1
gtgaagtagcaaataccaagttgtttcaagttaagccttattacagttagtaccaaatatgggacacacatggttgggttcattagtgatttttatgacaatttcggccgtacaagcccaactcaaaactgggttttactcctcttcgtgcccaaacgcagaagccacagttcgatccactgttgaatcctacttcaataaagatcctacaattgctcctggcctgctccgacttcatttccatgattgctttgtcgagggctgcgatggttcagttttgatttcaggctcttttgcggagaggaatgcgttggcaaacactggtctaagaggttttgaagtgattgaggatgcataatca

SEQ ID NO: 63425 - DNA, 219 bp, Glycine max
  Clone ID: PAT_MRT3847_28286C.1
aaaagaccaccgaaagggaaattccagaaaggaaaaaggaaccctaactggataagtcaaacatcaacatgtccgacgaagagcaccaattccaatccaaaggaaacgcccgttcctccaaaacctaacctcaacaagccggtaacaatcccaagaacggctacatcgtcatcaaaggacgcccctgcaaagttgttgaagtttccactttcaaaactg

SEQ ID NO: 63426 - DNA, 468 bp, Glycine max
  Clone ID: PAT_MRT3847_28287C.1
actcttttgttttttatgttcttgtattgtaactattatgattattattgtttttattatgtatttatttatatgagttggaataagagtttttaagataaagattgattctgaggttttatgagtggtgggttttgctctttttgggatttgttggactgaatcaaaatagagatctttgttgagtgtgtcggtgtgaatgcttcgttctgctgattggaactgttatcttttgtcaatatctgtgcatgctttgcgaatgagaaatgactcctctggggtgtgatttccatgcagaggtacaaaatcatgatgatgctgcctctctgtcatcactgctgacgctagttagcatttgtatggggttctatgctgcagttgatgcatcttgatatctttttatttgggatcaagcaaggtcttaaattaccattgccgtcacagcttcatcgtgctccttggtattgc

SEQ ID NO: 63427 - DNA, 417 bp, Glycine max
  Clone ID: PAT_MRT3847_28288C.1
aatttcgagtcgaggacaccacttctataagttcagagtgtaataagcaacacagtgcgactgtcacggaaatgcatgctagcacaacacattcaatcaaataaaaacattaagctgagtttgggatgctcatgtggtgatgtttgagatggaaattgaacatattataggggggcatttatggccatcacttacaaaaattaataaatttggcagagcatatgtttttcttactcacagatattctctgtagttaaaattttgtgactcttttttccatacagagtaagtcaatgagaagattgatatattcaaccttgcagttatactattggagctgacaattggtaaagaattgatgggctctcatctcttgcagagtgggcatgttgtaaatatagacctttgattcatttt

SEQ ID NO: 63428 - DNA, 805 bp, Glycine max
  Clone ID: PAT_MRT3847_28289C.1
gatgagcgcagcggatgatgacgagccagaaggagagaagtgcgccaatttcgaggcatttaccatttcctcgcgcccattcgccacgaggttcgcgtgcgggggggcgcccagggcctgccgccatctctgattgggatggttggtacacaggagccctgattttggaggatttaagggcatgaaagagatcatgtctgaagaatcaaaacccgagttggcattgtggaagcgttgggtggtagctcaggcagtcacaacctctgctggcttgatatcttatccgttagacacggtccgtaggaggatgatgatgcagtctggcattgaacagccagtgtacaatagcaccctggactgctggaggaagatctatagaacagaagggttggcttcattttaccgtggtgcagtttctaatgtgtttaggagcacaggagcagcagctatcttagtcttgtatgatgaggttaagaaatttatgaactgggggagaatttaacagcaccaacgttcattgatttcattttgacacccggaaatcaacttcaatacgtcaacatgttacaaatcttgaggcttaggataattttgtaaaagcacaaatgagctccattacagttcattagtaaatgtgtctttattggcattccaacgctaaggccacttactgattttgtggctttgctattactaatttttctttgtattttttaaggcaatggaagatcagaaattcgatatgatgaaaggggattttgattggtaacaaaagaaaattgatcttttgttgtctaattttttc

SEQ ID NO: 63429 - DNA, 1709 bp, Glycine max
  Clone ID: PAT_MRT3847_2828C.1
aattcggctcgagatagaaagggaaagacaaagagagctgcagggcttgttggagcaccgagctgtttctgattttgctcatcgcaaccgtattcagtcactgctcagaggtagattcctccgaaatgaaagaactgttgaagatgagaggccaccgtctatggctgcaagtgaattagttcagctaagacaacggcacacggtctctggtttaagggaggggtttcgttcaagattagaaaatattgttcttggtcaagcaggcaccagtcctgattccacatcaaatagtaacgcgagtgaaacaagaggtgatgggagccaagcaaacagtctggtagatggccaacaagaaaactatgaacagcagattaggagcctggaaactgatgtgcgtcagttgcctaatcgaacaggaactttggagagtagcacaagtgagagtattagttggcaagaagctagtaatcaaggggggaattggcaggaacaaattgctgaagaagggggaggaaactggcaacggagtccatttgatcagacgagagatggaagggcagtcagtgattggccacaggaacctcccagaaacttaactggggaagatcctcatccccaggaagctcaaagaatttggcatgatgataacacaagggaaactgttggtaattggtccgaaggaccttctggagcttcgaggaatcgccgtggggttcccataagaagattcaatagatttcatccacctgatgatgataatgtatacagtatggagcttagagaacttctgagcaggagaagtgtttctaaccttcttcgtagtggtttccgtgaaagtctggaccaattaatacagtcatatgtggaaaggcaaggtcgtgcaccaattgactgggatttgcatcggaacttgccaacaccaactcctgcctctcctgaacgggacccagaccagcagggtgaggaacgtgatgagggtcaacatgaaaccattaacaggccttcactggtgttgccttctccaccagtacctccgccacaacctctggggcaccaggatttgcatcaaactggatggtctcgccaaagcatgcatcgttctgaaattgagtgggagataatgaatgatttaagatcagacatggcaagacttcagcaaggcatgaatcacatgcagaggatgttggaggcctgcatggatatgcaactggagttgcagcgctctgtcagacaggaagtatctgctgctctaaaccgctcaggtggtgagaatggatcgagtgctgagacatctgatgatgggtctaaatgggggcatgtgaagaaaggaacttgctgtgtttgttgtgataaccatatcgattctcttttgtatagatgtgggcacatgtgcacttgttcaaaatgtgccaatgagttaattcgtggtggtggtaaatgtcctttatgccgagcaccaattcttgaggtggtccgagcatattccatactgtaaaaaggaaattaagaggacatagagaagaaaaaaaagtctcaggaagttgatctcaattctaaaggtgtcgaggttcttatttataagtgtttagtagatgcctttgtttttctgattatatggaactccacgaattgtataattggattagcaaatggcgctgttgattcatcattcttacgtaaataaatagttgccctgattattctttgaa

SEQ ID NO: 63430 - DNA, 407 bp, Glycine max
  Clone ID: PAT_MRT3847_28290C.1
acgcgttcggatgcacgctgggtcgggatttcgactagccgagttgactcggttccgttgttcattctcgcggatctaatatgaaggtatagcgtacgggcacattacaatgaaggccttgattctggtgggcggattgggaacataggctgatgccactggcactcaggttccctaaacctgttgaggatttggctaacaggcctatgatatggcatcagatggaagcccttatggccataggagtcactgagctaatgctagtcataaatcaccaaccacaggggaggtggaaaatctagtgggattggtttgatttatgacgccttgcgatctcatgaacagagtgaactgaaccactgtaaacagccggaccgatgtctcatgctcggtgtaagctgatagac

SEQ ID NO: 63431 - DNA, 439 bp, Glycine max
  Clone ID: PAT_MRT3847_28291C.1
gaattatgaatcagtgcattatgaaagtgtagcaataaattcataacattttcactaaaggcttcccaatttttacaccagtggaataccttacctttcaagaaggtaaccaaccacatatattccttgagaaaattaaaagtatttttcactaaaataagaattatttatcttagaaactcgcaatcacataaatataaaaaagcattcccaaaataaaagtggctatgcactaataacaattgctagcagaaaccacgggtaccaaaagttcagggtagaacaggaagttccaccttgtcaaaggaaaagaagctgacccttccctctgtggccaagcaaattttcaaaggaatgccaccacattgtctctcaagggcttcaatttttgctctagatggatgacccctagataagtacagttgaaaactcggatcac

SEQ ID NO: 63432 - DNA, 331 bp, Glycine max
  Clone ID: PAT_MRT3847_28292C.1
ggggcataaaacgaaaatgatttttatgagcggaccagttaaacaactcccctggcaagaaacataagtaaatggaaactaatgtaatacaaaaacattggccccctatggggaccccttcggagaaactgggcccctagcttaccggaaaaaaaaatccggagctttaggggtgggctttcccccaaaacaatctcaaaaaaacaaaaataaaattttccaggtggggaaaaataccggaaacgggaattttcactttataacatacttaaatacaaaagggttttactttaaaagggatgatgaaaatttggaaatttaaagcaccaaa

SEQ ID NO: 63433 - DNA, 793 bp, Glycine max
  Clone ID: PAT_MRT3847_28293C.1
acggctgcgagaagacgacagaaggggagagggatgtgaaaaatgagtttgtaagaaagaaaagaaggaacgtaagaagggaaattcaattcccttcttgttgttcccctagcacggccaattgatcttgcggtgaggggcaataattaaaacacatgaagcaaaaatcttaactcaatacaacgcaacacatgcatgtgagtttttgccaacaaacgtgatcattgccgcaacaacgaagactcaatattatcataggccattatgttcaccaacaactcatacctccaaaataacaacaacttggcctctccctacccttctagggccgtctcagtggaatcttccaatgtcaaaaaaaggctttaccaagcttggaaaggaaacaataaatttctatgtggtggaagattagtttttggtcaggatgcatcatccctttttctaacgtcattcctgattggaggtcctgcaacaacattttgcataagaatgctagcatcactaaaggaagaagaccctcactttagcaaccctgtactaattggaggagtgattctcacagttttggattttatttttctcttcatgacatctggtagagatccaggaattatccccagaaatgctcacccacctgaattagatgaaccattagacataaacacaccatccatggaatgggtaaataatagggcccctaatcttaagctgcccagagtgaaagatgttctagtcaatggccacacagtgaaggtgaaattttgtgatacttgcttgttgtatcgtccac

SEQ ID NO: 63434 - DNA, 125 bp, Glycine max
  Clone ID: PAT_MRT3847_28294C.1
actcaacgcaaacctactctggagttccctcgaatgtcccagggaatcgctctagtacaaatgcttcaagcactcgctttgactcaaatggttgccgatggcactgctactactcttctaccaag

SEQ ID NO: 63435 - DNA, 413 bp, Glycine max
  Clone ID: PAT_MRT3847_28295C.1
aagcagataacattgctcctcatcacttattttaccaacatggggttaaatggtggctaaccgttggatggaccattaaaaccactcccccggtgttgttcttccttagccccaaagggtgcactcacgggcggcaggtgcgcacccatcttgagtgtgctattccaaaatcctctccttttattactccccaccaaaatcgttgggcccaatgcccctgggggtaattacatctgccttatatgatcgcgtgacgaatgccctattgtgctaggcttgtatgattcctccttaaaaaagagtcacgctagggaacttgcaggatccatagcttggatcctctgcggtttgagctgcaagcccaatgaagtaacaaagttccgcctacctttctaaactgcgcccattatgca

SEQ ID NO: 63436 - DNA, 763 bp, Glycine max
  Clone ID: PAT_MRT3847_28296C.1
tattaacaacagtcatatataacagggaaattaaatcgtcttttaatggctctttcaccactcggcatgcttctggtcattgccaccatcttactcccattcaatattgttgtggccaaggaatttgttgttggcgatgatcatggatggacaataggctttgattacgcagcttgggctgcagataagaccttccaggttggggacctacttgtgttcaagtatgctgttggaaaacacaacgtgttcaaagtgaatggaacagcatttcagagctgcacgattcctccagcaagtgaggcattgaccactggaagtgatcgtattgtgttggcaattcctggcagaaaatggtacatatgtggtgttgttggtcactgcaatgctggccaaaagcttgttatcacagttcaaccccaaacactgcctccaactcctgcccctgcaccttcaccttttcaacatcgccctcattttggtcgatggattcctaagaagctatttacaatattccattaaactttattgttgctttaacctatgtttgttttgagagtgtgggagtactagtgcattaattggttggtcctcgggataaattattgtttctatttcaaaattcatcaggatttttgttgttgtattttaaaattcaaattgggagtttgtgatgtgcttataatatgataatataagcacaatccacctatatataccatttaaataagatattggaaatttacattctagctggttttcacta

SEQ ID NO: 63437 - DNA, 1452 bp, Glycine max
  Clone ID: PAT_MRT3847_28297C.1
catttcacataagagaggaatgaaacttagacttatgaatggaatagcatacaatgagacgtggtttggcagttggggttacaaatttggtcgaggatgctttggtgtaactcaatccatgtaccacaaggccatacaagcaataagaagcatgtcattatacttgatcatacaccacattgccaattctagccatggcattccactaatcttctcaaggaaccagacactttcagatcaatccctagtgacccttggtgacctattttgttacatgttagaccttaaatcatgtcttcctcgtgaaacctgaattagttcctataaaacaaatgccttagttgagaccaattgtcgttggtcccctaaaaggattgagatggcaacaagggttattgttgaggccttgaaaagaacagagtttaaatgggtttcaagacaagaagttagagatgctgctcgtgcatacattagtgacacaagtttggtagattttgtgttgaggtcactaggaaaccatgttgaaggaaactacttggttcgctgaagcttgaaccttgtgaccaaagtcttggaatattgtttagaggacatttctgatgtgtacccttataatgaaggcttggttatgagtaacaaagtgaaggacaagtataagaagggctcaactaatgaaggacatgctttatttgtataagtacattcttatagattaaaaccaattatgaggtcagaatttctttcagctataccattggcagctaggataattcttggcactaagtattttattaaagattactttggagatattcctcaccaagttgaattaggctccgatgataaactcaacatttattgtacaatttggttgagaaacaatgttggcagtggttagtacttaaacaaggccattatgccaccccatgaatgtatcacattgaaaagaaatgctactatcaatgacttgaagctagaagttgaaagggattttagagaaatttgttgagagttaaggagttttatggtggaatcatttgggaatttgagtgtcaacaatgagacaatggcttttggtctaattgaagtgggtggaaaagttgtccttgagggttggcatggtgacatatgaataaacatgattgagcaaatatgtgaaagtgatatgaacaatggtataatggattgcacttgtggaactatagaagatgatggtgagaggatggtctcgtgtgatatttgtgaaatttggcaacatactaggtgtgtttgaattcccaatgatgaagaaattcctcatatttttttaatgcaaaaagtgtgagcaagaaattgtcttgtttccttcattgccatagttatacaattataatttttttgatgatgcttaatcattcactttttgtttaaaggacgcctttgagattgaacaattaaaattgcttcttagct

SEQ ID NO: 63438 - DNA, 199 bp, Glycine max
  Clone ID: PAT_MRT3847_28298C.1
gggaagagtagcattgctttctaccctaaattgaacttgtgaataaaggaagttattatggatatgtgaatagcaaacataagttctatcttggaaaaattatcttagggtgatctcccaagaattttcaaaaaaaataaaggttgaggtatcggcattatgaatgccaatggatactccagtgaagcatcttgaacta

SEQ ID NO: 63439 - DNA, 176 bp, Glycine max
  Clone ID: PAT_MRT3847_28299C.1
cggtcgagctgactgtcgtgtcttcttggctttcttgctcaggaacaacatggatattgtatcacgagcgttggcatatatcgtggctatacgtgggcccaaatttaacacaccttggtcaagtgctttttggaaaaggcggaccaatgtggaaaccgctctttgtctgtaccccc

SEQ ID NO: 63440 - DNA, 326 bp, Glycine max
  Clone ID: PAT_MRT3847_2829C.1
aaaccaccaaatttaatcttattggtgagcactttacattttgaataatgtgataactctttcacacagttaggtgcacttttctaaaaagaaccaccactaacggtggaagacaatgtaaaaaaaaaaatcccctttcaactcgcaaacaaattctttgattacaaaaaaaaaaaacaggttgcaaaacatccaatccttgatcatcatattccggtatttaaaaaacaacctcctcataaaccttctaaagagccgccagatcctcacgagccaaaaaaaactcccaatgttccctaccctaaccaagcgccccaaagaacaaa

SEQ ID NO: 63441 - DNA, 384 bp, Glycine max
  Clone ID: PAT_MRT3847_282C.1
cgtacgcgtgtgtggacggctgctgggcttggctgaaaccttccttatgtgctgcgagaaggatgaagggggcaaagaggggagcttctctacctgagggtggtgagcgaggaactgaacgagtgactgagcttgcagtgtgcttatgcagagatctgaatgaatggagcctcctacggaggatgacgcttcactgcagagaatgatccggcttcttccttatatcattgggctactgcttctaggcaccaccaaaggtatccgcttctgccctcagatatgctcaataattgcgagctgggaacactggtatcatactaggactcagaatagggcatgctgacaggacatactactgcggtgcgagagctaaacactctgggc

SEQ ID NO: 63442 - DNA, 375 bp, Glycine max
  Clone ID: PAT_MRT3847_28300C.1
ctcgagccgattcggctcgagaagcccactagaactattgatgctaaggttgttgtagattttgtcagatctaatctgttttgcaggtttggagtacctaaagcaatcgttagtgatcaaggaacccatttttgcaacaaatcaatgcatgccatgcttaaaaagtacggggttgtacacagggtatccacaccataccacctccaaaccaatggacagacagaaatttctaacaggtagatcaagagaattttaaagaagattgtgcagtcaagcaggaaagattggagtaccaagcttgatgatgctctttgggcacataggactgtctacaaagcacccataggaatgtgtccttatcaggttgtctttgga

SEQ ID NO: 63443 - DNA, 133 bp, Glycine max
  Clone ID: PAT_MRT3847_28301C.1
caaggtcgacgactccggtatgctccacaggctcctcaaggagtgccccaatgccgaatgtggagaccggtaccttcatgccaaccacctcgaccgacactaccttggcaagtgcggattgacctatgcttac

SEQ ID NO: 63444 - DNA, 302 bp, Glycine max
  Clone ID: PAT_MRT3847_28302C.1
ttttatttttttttttttttttttttttttttttttttttttttttttttttttttggttttttttggattattctttttgtctatttcttttttacaaacccaaacccattgggttatattctttaaaagaaaaggtttcactcaacccccagcgaacgcccataaacgattttctacacaaaaacggaagaaattttggccattcgacccccccaaaaagggggctcttccccaaaattttattcttatctgtggcacggaaaaataactctaaacgcgaacccaaaaaaccagggggcc

SEQ ID NO: 63445 - DNA, 938 bp, Glycine max
  Clone ID: PAT_MRT3847_28303C.1
tacggctgcgagaagacgacagaagggtacggctgcgagaagacgacagaagggcatggaaacggtgatgaagaagaagaggaagaggaggagggtggttttgatttggagtgcagctatgcgattgtacagagagccaagcagcagttattgtataagcttcgtagatttgagaaactggcggagttggatccagtggaacttgagaaaagaatgcaggatcaagaagaggacgaggatgacacatttatggaagaggaagatggtcatgatgagaaaaaccaagcatcatgcaaagaaaatgactttagaaaactaattttccaagctctgtgccaatcaagggtccatgacagacagcaaatcccagaggactttaagaagctggtatctgatctcattttggaagaagagagagcacttgattccttagaagataaggacatggtgataagaaggatatgcaagaggctggaattatggaaagaagtggagtctaatacaattgacatgatgatagaagatgacttctctagagaggatggtgtgtggaggaaaaatatagagcagataagaaatatggctggggagcttgagcttgctatctttggctttctggtagaggaattttcagaggaactagtatgttaattaattgggggtaaattttgaagcagctcaagaacttagtatgaatgattatctatattctttttcttagattaagagtacagtctgacttgcaatggataataggctagtaattgaaaaaaaaaaagtaacccaaaaatataatcagggtatatatgtacatgactcatgcttgtagctggctgtggggatgttgtaagttatgtaataatataatttacacttcttgatcccaaaaaaaaaaaaaaaaaaaaaaaaaaaaaagggcggccgctctgaggatcaag

SEQ ID NO: 63446 - DNA, 256 bp, Glycine max
  unsure (1)..(256): unsure at all n locations
  Clone ID: PAT_MRT3847_28304C.1
gtcgcangcacgcgtacgtaagcncggaattnggntcgagantcantnatcnncnntgaganatgtngaagcngnngnttgtannnagtcntnnnntnacnaggtngatncagcgttggananaanatanganttangngnnnnnnngnaanganngtgnaagagntnagtnggnananatnanannnnangntnttngnnanaatnnnnnananattntatnntgggggagggggggggggnngaagnatatata

SEQ ID NO: 63447 - DNA, 539 bp, Glycine max
  Clone ID: PAT_MRT3847_28305C.1
caagtaataacaattgaaccttacttaatatacatagtatttttttggaactcccaatgaattgtgggctccatatgactatacttatgattacatattcggaccatcgtactttaaaccttgggaattggacttgggcactattggtttgggagctgcaagagtttgttgaaagaataaccatgatctttaaggactgcacccacctgagggattgcccataccgatgcattaggaacttcttggaactgttgacggccgccagcttaacaccacaccttaaatccttgcactgcctccaattggggaaagaagaaaccatgttatgcctgggctctccgatgcagaactgctcgggaggcatataaaagcgaggctctgtggataaatccccttcacacacaggaaaatcgctgctatggataccgactagcctgtaaacaaaccctggctggaaaacccccaatccttgaccaaccgatcccaatgtcgggagagaggtaggcaccaactcgtttgataaacttaacagatacata

SEQ ID NO: 63448 - DNA, 561 bp, Glycine max
  unsure (1)..(561): unsure at all n locations
  Clone ID: PAT_MRT3847_28306C.1
taccagagtcctgtcactaacaagagggggttacacctgactcaacggcatgggcttacataagtacgggggacgccagcggtggggaacggccatgagggcataaacttggtaggggggcaacaggggcctgggcggcacaaaagaaaaagcgtacatacccgcaacattccacagcaatggggtggccggcctgatttagaggggaagcgtaagcaaagctgtcggcgccaacaatgggagaaacacctccgtggcaatatgcaatccaaatgcaggagaggtaagccacaatgtcagtctagaacagtgccagaggagttagtaggtggtgatttaaactggctgctatggatcaacgttggttgattgagcagccaaatgcgcgaggataggtagaagggtaacccttctaagccaccaatatgggggaccgtgctgactgaaaggaatgtttaggccgtgaaggagcggccaaccgtagctggacgaggctacgactggacacaaggccgtgaagtagggcagctgaagaaaagtagccnnacagctagtggggga

SEQ ID NO: 63449 - DNA, 1185 bp, Glycine max
  Clone ID: PAT_MRT3847_28307C.1
tgcgagaagacgacagaagggggccgacaccattaacaaacgggaagtgcggtttaggacctccatgatcaacaagaacatgctagagctactcagctagttactatttttttttatctgtaagaattgaagacaaattatctcttacatgctcaatagactaagctagctagtataagaaaaggccctccctgccctactcctttttcactacactttctcacccactacactacactatgtttccccagccatggatcttcttgatagccaccatcattgcaatttcactgttcatgtcctcactggttgagtcatttccagtagctgataaggtcaaatccttgcctgaacagtcacctgtttccttccaacaattcgctggctttgtacccgttgatgacaagaaccagagagctcttttttactactttgttgaagcagaaaccaaccctgcttcaaagcctctagttctctggctcaatggagggcctggttgtacatctgttggagttggagccttcacagaacatggtccttttgttacaaatcaaggagaagctattgagaaaaatcagtatagttggaacaaagaggcaaacattttgtacctagagtcaccagcaggcgttggattctcttactctctcaatttgtcattttataaaacactgaacgatgaaatcacagcccgagacagtctggttttcctgcggcgctggtttgccaagttcccagaatacaagaatagagatttttatataacgggagagagttatggaggtcactatgtacctcaacttgctgaactcataattaagagtaaagtgaatttcaacctaaagggcatagcaataggaaaccctcttctggatttcgacactgatatgaatgcagtcgatgaatattactggtctcatggaataataagtgattatgcatacaaaatcaggacctctctatgtaactcgtctagagtattaagagaatacttcagtggccaaatttccaaagattgtcttgttgcagctcaaaaagtctcagaagtatattcttttacaaatttcatcgacccatattacgttgttggggagaaatgtctttcttacaatgtatctcaggcaggttttcttagggagatgctaaattcaggaatgtttcagtttaggaactctcattatgtgc

SEQ ID NO: 63450 - DNA, 671 bp, Glycine max
  Clone ID: PAT_MRT3847_28308C.1
ctcattcgattccttagcttcacatctccatggcgctgcaccggttactgaagaggaaaggaggcgtcgatgaacttaacgacgatttccctctcgcttctccggcaaccaagattcgccgtctcgttagtacttcctctctctattcttcgccatcaacaaccaaccaaacttgtttgtcattatttactaatcgattccgtttgttaccgtttcaggacgctgagttgccgccaattttggaagaggacgaaccgttacctaacgaggagagagctctcgttctcttcaagcctctcgtccattccccttcctctttctctctcactctcgattctgaccttatgaaaggaattaggaacagtaagtcttttattccatcaaatcaaatgtgttttacgtttctaaattttcacttaaaatttatcttaattcctattgtagttaggtccactctttataatagattaatttgatacttagcatactagactgagggatgaaattgataggtgaaagaatctactctacttttactcctatcattctatgactataaagagataaaaaaaatatttctgtttcttcattactcaatggaattacagggatatataagcagagcaccagcaattgctaacagaattctaaaaatatattctagaatctac

SEQ ID NO: 63451 - DNA, 523 bp, Glycine max
  unsure (1)..(523): unsure at all n locations
  Clone ID: PAT_MRT3847_28309C.1
ctgcaggnntaccggtnccggnnaattccnncggtcgacccacgcgtccggtatatggaaggcccttaaactttctttctctctctctctctgcttcactttctcacttttgcattttcttgtgaaaaaaaaatcctcagaaccaaaatcggttttcttctgtctctgatctctcaaagcttcaaattctccttgtttggtttgtttgtgtgtttggagtatgatgtcgccgccggcggtggtaacggaggaggaggggcggagcaacgtgtcgtcgaccgtggcgtccggttcttcgcaatccttggaccgtttctctcagaatggggctggattgaaagaacgaaattacttagggttatctgattgctcatcagttgatagctgtgcctctactgtgccaagcttgtgtgatgagaaaaaggaaaacatggaatctgaaggctacagagttgaggctgggtcttcccggatcccaatcgcctgaaagggagccggatcttttgtctttagccctggagag

SEQ ID NO: 63452 - DNA, 1073 bp, Glycine max
  Clone ID: PAT_MRT3847_2830C.1
gaagctcggaattcggctcgagctcgagccgctcgagccgattcggctcgagcaaattaatcctgaaaaatgaaaaattcaaatttagtctctaatgtacaaaaagtgtgacagattggtcttgtcgttaaatttgtgaaatcattttgcactgtgcaaaaataccaatttgtcactgcctcatgctttgtgggatcaacgtatttacccttcttttcgtaattgagggtttgacgtatgaggaaacaaaagaaatgagaaaaagtgggttgaattcagatcctctcctgaaactcactagaaatggtgtttatgtgaatgtggtggagagggtgagggaggcttttaagactgtgaaactggactgtatccatgtgggaactagcgactgcaaaaagattggagtgaagctaagggatttagtgccatgtgtccctatcttgtttaaggatgagcagataatcctctggagaggaaatttcaaggaagagcaaccttcagattcacaatgttagcaagcgagaaatgcattgattcatggctgaaactcctcaatctgcttgtttgtagcgtgtttaaaagcctgttgagaagtaaaagatcatgtttatgatgtggaagtataactattaccttctcagcaaacgtgaaaagccacatctgagataaggaaccaaacacaccattgctagttgctaccacccaagcagactgtcttgatggtctttatatgaaagctgattattcaatatttctcagctactctgtggatacaatgtgctgtgttcttaggatcctcatgcatcatggcaatacgggcaagcagcaataaataagaagatatctcagtattatgatgaataagaaaaatagatgttggaatcttgtgaagagtttgtaagcatgctgtcatgtagggctctttcacaaaatttgctactagcactatacctctcgcttctgttgcttactagtcatctgcatgtaactccttacaaggctacgctaaaataaataatagatacttatttattagttatgaaaaaaaaaaaaaaaagggcgacagcccgcca

SEQ ID NO: 63453 - DNA, 687 bp, Glycine max
  Clone ID: PAT_MRT3847_28310C.1
cccactcgtcctcttaaggtttcattcattaagctttctcttctcatttctatttctctctccccaaaagcttttgtttctttctgtatatggaaggcccttaaactttctttctctctctctctgcttcactttctcacttttgcattttcttgtgaaaaaaaaaatcctcagaaccaaaatcggttttcttctgtctctgatctctcaaagcttcaaattctccttgaaactgaggttatgaagaaagctgaactagaaacaggaaaagagagcggcgtgtgctattgtcataagttttcagttaattactaactcaaaagtttggtttgtttgtgtgtttggagtatgatgtcgccgccggcggtggtaacggaggaggaggggcggagcaacgtgtcgtcgaccgtggcgtccggttcttcgcaatccttggaccgtttctctcagaatggggctggattgaaagaacgaaattacttagggttatctgattgctcatcagttgatagcagtgcctctactgtgccaagcttgtgtgatgagaaaaaggagaacatgaatttgaaggctacagagttgaggctgggtcttcccggatcccaatcgcctgaaagggagccggatcttttctctttaagcccagcaaagcttgatgagaagccactgttccctttgcttcctact

SEQ ID NO: 63454 - DNA, 468 bp, Glycine max
  unsure (1)..(468): unsure at all n locations
  Clone ID: PAT_MRT3847_28311C.1
ggctcgagctcgagccgaatcggctcgaggcttttgtttctttctgtatatggaaggcccttaaactttctttctctctctctctgcttcactttctcacttttgcattttcttgtgaaaaaaaaatcctcagaacccaaaatcggttttcttctgtctctgatctctcaaagcttcaaattctccttggtgcgtacttcaaattcatcttctcctactcctaactgctcttcttttttcaaattctctgcgcgtttctgtttctcagcactttctggtagaacaatgcacgacattttgttttttcttttaaaaaaactcggtaaggattttgtgtgaatgtggatctattaagcttttttatttttttatttgcggaagaaactgaagttatgaagaaagctgaactagaaacagaaaagagagcgncgtgtgctattgtcataagttttcagttaattactaact

SEQ ID NO: 63455 - DNA, 483 bp, Glycine max
  Clone ID: PAT_MRT3847_28312C.1
ggtttggattcgaatccatggtctggccaccaaggcacaactttactgttgtgccagggctcgccctcaattggttatataggttacttctgtcaagttatttgtcaatcactaacaattttaaagttgaattttagccttttatgagctttcaagtggatcatttgtcatcaggctgatatcctacttaaaaccacttttgatcttggaagaaactcaaaataacagttttcaatccctaaaagcatttttgggccacatatagcttgtccagatgagtaatattcagagccaagcttcagtaaaaatcttcgtgctttgccatcatgacatgtcttagattgactcctacttttagccatagacttaggtttggaaaatctatttagttgcttccctgttgaggctaagcagttcatctgagtgagtctgttctagaaagcgccttacattttggtaagctgggttgttgccaattctcta

SEQ ID NO: 63456 - DNA, 154 bp, Glycine max
  Clone ID: PAT_MRT3847_28313C.1
tcagcagaatatgtatgcccagttgctaccgcttgctttgccagcacctcctatgcaaggaatggggggaggctatgccccttccccaccactacctatgggtggaatggggatgccaccaaagcctacctttgttatgcctccaaaggatggg

SEQ ID NO: 63457 - DNA, 205 bp, Glycine max
  Clone ID: PAT_MRT3847_28314C.1
tgttcctaggaacttcagattgctggaggagcttgaacgtggtgaaaaaggaattggagatggcacagttagctgtggaatggatgatggtgatgacattaacatgcgctgttggacgtggacgattgttggcccccatgatactggacgtgaaggaagaatgtatgggctgaagctgttgtgagatgaggacgacccggagaag

SEQ ID NO: 63458 - DNA, 496 bp, Glycine max
  Clone ID: PAT_MRT3847_28315C.1
gcacgagagtgcatctaccattttcacttcacatttcacaaccttttaggccctttaccaaaacttttggcagctcaaacagataagcagatatatatcaagctatctctatctattaataaatggattcttttaaacaaatctggggtagtgcagaaggatgtagcagtagtgaatctggttggactatgtatattgcctctcccatgcaggaagatgctgctggatgcagcaatgaaaatgatggatctcatgacaacaacatctatgctgagaacaggagatagaagcaaggggcccaagtggatgaagaagaaagcgatgattcgatggcttcggacgcttcctccggtccggttcattaccaccatgcctatgctcacagccaaggtagtcacggcaccgcagcctctaagaaagataaacaagatcatggaagcaagtgttcttctaagaagaatgcaaacaaacaggagaagaaacgtgttgacagcag

SEQ ID NO: 63459 - DNA, 185 bp, Glycine max
  Clone ID: PAT_MRT3847_28316C.1
ggaaaaaaacattattacaattgggcacccttttactatttttaacattttaagttttaaacaaaggagggccagcaacatacttctagtttacagtccaaaggactaaatgaaaggcctgatttgatttcagggcccatttttatatacataaattttatgggcatgggaatctaaaagggccc

SEQ ID NO: 63460 - DNA, 262 bp, Glycine max
  Clone ID: PAT_MRT3847_28317C.1
attcaatatgagtggcttaccttcactcagtgagaagttagaaaaattccttactctactgagatctgaagatggcaaactagaatcccagatagtcaatgtcctgcaagatattgtagaaattatcatacaggatgttatgtttgatggccatttgttgctgcaaacacctcagcaaacacctcacgaatatcatgtagagagagggcagaagtttgtcaacattgacacttcttttacacataatacatcggtgatggaa

SEQ ID NO: 63461 - DNA, 1444 bp, Glycine max
  Clone ID: PAT_MRT3847_28318C.1
agcgagaggaggaagaagtgtgaaaaaatggcggcggctgcgaactctgagggcaatgctcagaaaccgagttcggaaacgtttcagttattctcttcctccgcttccgccttcggaatcttcgacgatgctgcgcaacaagttcctcctatacctcctcctccctgcgttgaagtcctcgcttctgaggttccttcatccctcaaacacaacgtggactctgtaaatttagatggagttattttgttaaaggggcgggtgaatacccagcaagtttttggtttgtccaactccgatttagttcccgggaaatatgaaggaggacttaagctgtgggaaggttcacttgatctaattaaagcccttcgttcagatataaaaaatgggcttatctcatttgctgggaagcgagtattagaggtaggatgtggtcatggactgcccggaatctttgcatttcttgagggggcagctgctgtacattttcaagacttcaatgctgaggtcctacgtttcctcacaattcctaatttaaaagcaaatctttctagagaaactcaactatcatcattcaactcgacaatttgtgacgaggcagaagtttgcttttttgctggtgactggagtggaattgataaactgctccctcatgttactacagatgcaaaacataatcaaggtgatggttatgactttattcttatggcagagacagtttactcaatcaacagtctccaaaatctctataatcttatcaagaagtgcttgcaacatcctgatggagtagtgtatatggcagcaaagaagtattattttggagtaggtggtggaactcggcggtttctgtctgtggtagagaaggatggtgtcatgactagtagcctggttgctgaaatcacagatggttcatctaatgttcgtgaagtatggaagcttgcatacaagtagtattagtattttcttccttcaccagtcaaactatcctcggtttatttgctcgtgattgcccatgcatgaaaagggggctgttggaagggtggcgatgggttgatcattcatgtcggatgagttttggtaatggttgtagaaaccgtatggtcaggagagaatcttgcccctcatttcaagctatacttctctctctgcttatagtgggcttggttttcttggtcaaatgtattttctagttggtaatgcaaatatatataattttctcatttgtatttattttgatttgattcccagtaggataatgttttgttgttgttgttgttgtggtacctattttgattggatgtaatgcattgctagagctaaaccccgtagcagatattaaggaatcaaagaatgatcatgaaatgagagaagtaacaggaaatttgtcctataaaaaaaaaaaaaaaaaaaaaaaaaaccgcccgctttagagattccaggctacgta

SEQ ID NO: 63462 - DNA, 346 bp, Glycine max
  unsure (1)..(346): unsure at all n locations
  Clone ID: PAT_MRT3847_28319C.1
gtgtgtgggtcggngtggatcgtcgtgctaccggtgaagcggcagggtgacctatccgtggaggttgcacgagtgagaatgcaggcatgagtagcgaatgaagggtgagaaacccttccgccggatgaccaagggttccagggccaggctaatccgccctgggtgagtcggggcctaaggcgaggccgagaggcgtagtcgatggataacgggttgatattcccgtacccgcaaaggagcgcccaagacgaaccccgttgtgctaaccacgtgaagcgccggcgaccttcgggtttatggtgtggagcctgggaacctggtgggtagtagtttagcgatggggtga

SEQ ID NO: 63463 - DNA, 3420 bp, Glycine max
  Clone ID: PAT_MRT3847_2831C.1
ctggaccggaattaaccaaaacgtcacacctccttcaacaaccctgccgaatgcagagccgtatcctctgcttctcaacgcgtcgtttaccactccatcagcgtcgttttctcagccacttcattcccgaccaccaatacgacccgccgttctccccttccccaaaaccctactacaaatcaaagaagaaccacgcggagaagaagaaaaagaacaattccgaaaacggtgatccgaacaaaaacggagccccgaaactccctttcaagtcgaaccttccgttcgacttcagatactcttattcggagtccgacccttccgttgggcccatcagcttccgcgaatcgcccaagttctccccctttgggccgggccggatcgaccggaaatggaccggtgtttccgctccggttcagggtgaaccggaccgggagagggtcgaggaggagcggaaccggattctcggagaaccgcttagtgaggtggaggtggcagagctcatcgaacgctaccggcacagtgactgtgccaggcaaatcaatttaggtaaggggggagtcacacacaacattttgtgttacatctataactatcgctaaagggaagaacaagtgagggttattttttttttaaatattaattgatttcgttttattttattatcttgaatttttagatggttattcctgttatgcatatatctgggttaatatactatcggagatgcttctgtaaaatgcttgaattgatgaacgaatatgtgaacccagtaagtaattgtttttaaaataattattaaaaaagtcaatatttttattatactatgcataagtattcatgattagatgatagtttaaaaaatctgaacgctagcagcatcattttctaatgcactccttttaatatactctgccattggttaaaatttgttgacaactacaaaatcacaggtgagacttttttgctaacaatataaggcgtgcttaaaagaagggtaaatactttgatccctcaaagtatgaggcagtgacaaattggtatttttgcacattacaaaatgatttcacaaatttaacgacaagaccaatctgtcgcactttttgtacattagggactaaatttgaattcttcatttttcaggatcaatttgtcaccgcttcacactttcaaggatcaaaatgagtatttaccctaaaaagaatgtctcacaaagtgtttttctagcatttctcaaaaaatctctttaagtcttaatgcactgtattctaagtaaattcttgtaaaattcctgctggttgcttatctgaatgacttatttttggtttatttgttgttacttgtatcaatgtttctttcttcttttttttttctacccaatttgggaatttatttgcttatttcttattgaggttattgatgatacttgatttgatttagtgatggctgcactttttgataaagaagtgtagaattatacgtgttgattattaatggctaaagttgtaataaactttatatacatatttaaatttgtaacaaattacagagctgtaaacttaaaattcagagataaacttaacattcgatttctgtggtagttttaaataataggtataccagatttggggtttcacctacattaatgccattggtagttagggttattgggtttgagtgataatggagtggtgtagaagaaagaagaggaagaagaagacagaaaaggaagaactttataaaaatcttttagctttaaattagctattaagttaaaaaatatattgaaaattatcaaacgacttacttctaaagttcatagtttaacttcaactttaaaacagtttttaaactcaaaagttaggccatacaatacctaagagttataactcttcacttttctatctaaagggcatttggagaagacaaatttattttatatggatgagttgttatgcaattagctaatgatgtttgtgttgtactagggaaggggggagtcacacacaacatgttgggtgacatccataaccattggaaaaaggctgaagctgtgaggattaaatgcttgggtgtgccaactcttgacatggacaatgtttgcttccacctcgaggtcaacattgctgttttgcacttttaaaggattgatcattctgatttaaactctcaatttacatttcttttccctgatgtgtattgctgtgttcacaggacaagtctggtgggaaagttatctaccgcaacattaatatactgcttctgtacagaggacgaaattatgataccaagaactgtccagttatccctctcatgctgtggaagccttatgcacccatatatcctaggcttgtgaagaatgtaattgagggtttgacgtatgaggaaacaaaagaaatgagaaaaagtgggttgaattcagatcctctcctgaaactcagtaagtgaattattggggagtaggggctcacaaaatgttaccttttggtcctaatctagtttaaaagtagtattggattggtacatatgctaaattgtgctttcaatgttcagctagaaatggtgtttatgtgaatgtggtggagagggtgagggaggcttttaagactcaggaggttgtgaaactggactgtatccatgtgggaactagcgactgcaaaaagattggagtgaagctaagggtatgtctacttgacattcgattcatgataaatttcactgtttccctgattctgtctttgtgttgaatacatctgccatgtggtgcataagcatttaatggtaatcctgttattgcaggatttagtgccatgtgtccctatcttgtttaaggatgagcagataatcctctggagaggaaatttcaaggaagagcaaccttcagattcacaatgttagcaagtaatgcaaacttttgttattcgaaattactgtatggtaccatttccttgactaatggatctggttttgaatgggtttcttgatcacatttgtattcatcaaactataattgaatgctaaattccatgtctgcaggcgagaaatgcattgattcatggctgaaactcctcaatctgcttgtttgtagcgtgtttaaaagcctgttgagaagtaaaagatcatgtttgtgatgtggaagtataactattaccttctcagcaaacgtgaaaagccacatctgagataaggaaccaaacacaccattgctagttgctaccacccaagcagactgtcttgatggtctttatatgagagctgattattcaatatttctcagctactctgtggatacaatgtgctgtgttcttaggatcctcatgcatcatggcaatacgggtaagattgttgatgagaaatgcaacatgttacaaaaataattgtttgtggaaacaacctgcttgttttattggctgaaaattgaat

SEQ ID NO: 63464 - DNA, 392 bp, Glycine max
  Clone ID: PAT_MRT3847_28320C.1
tgcaacctaatgtcagaacaactctattgggacctaatatggaacactcctgcgcgtgcgtcgatgatgtttgacgttggtacagaattctacagcttgccatggatatatgtgattctggatacggtaaggggacgataatagatattgttacaaccttggcttatattgctactctgagattatgacgaactgataccgaaggttatggcgcgcgccagatctctcactgcaaaatatatgcttgccgaccgacagttaagctgtttgcagcatactgaaaacgccgatctaaaatttgccatagccaagcatgaggcacaatattgtctacgactgacaggtgatactcatgactacctggacacagctaaacacttgaaatggagtat

SEQ ID NO: 63465 - DNA, 365 bp, Glycine max
  Clone ID: PAT_MRT3847_28321C.1
ggcgaaacaaacgagacaacaactaatgtccttgagggtgattctaatgacaaacgagaaacactttaaaatattcaaaatacaaatacacccgtaaccattaaattaatactaatcccacttagatttaaaagactcaaagactaaaaaacaaaaatttcttaactaaacacattctaactttccctaatcaattgtacaactaatactgataatccaaacaattagactcagaacaacttcaaatgccattaagcctccacgtcaacacacttcttccctgcagtgcataatagccaaactaagccctacgggtacttaaccttccccacgcgccctacgaaacacgcaacttcacctttcgc

SEQ ID NO: 63466 - DNA, 284 bp, Glycine max
  Clone ID: PAT_MRT3847_28322C.1
tattaaaaaaaagtaaggaaaattaatactgtaaattataaacacatgccatataaaattgtgtaaaaaaaaataaacgcatgccatataaaaacacatgtcataaacaacgttttaaattgtggtctctggtcagcagccacaattaaaattcggcgacccaatttttaactacgacaacttcaagtcttccactacttaccacacaatttaaaaaataaataataaaaaaaaacataaaagcgtgtaaacgccactacactgaaattcagcaaaaaaaaaaa

SEQ ID NO: 63467 - DNA, 764 bp, Glycine max
  Clone ID: PAT_MRT3847_28323C.1
ggctcgagccctactcagcatatcactactactgtgctcctgggaatgctcaacacttggagcaaccagtgagcacttgtgatccttacagcaatcctcatgctcaagagatagttcagttgcttcctcaccctacttggggtgagtatggctatcccaccaaaaaaggtgatggttgggtgggggatgcaaggacttgggagcttgatgttggagggctatcaagtagactctacttttatcaggacccaggcacttctcctgccaagagaatatggacatctattgattctggtactgagatatttgttagtgacaaagatgaagtagcagagtggactcttagtgactttgacgtcattctaacacaatcagggaccaacttgatgaacaaggctgagagaaagaagtaaggaatattgacgatggactaaacttttgggatttttgatagtccacgaagtaaaggcttctaaatcctaggggtggtagaggttaccgacatttacatgaaaataaacttcattggtcaaaccctgatcataggattttgtgcatttttggattgtaattttcacattccaaatctttgtttggagattgtgaatgttacacccacaaaaataacgtcaaaatcatggagtaaatatggaaaagagttattttattttcagttgggtcaaataattgtttgtaaactataatttgaacatatccgtaaagtaaaatgatttcaataactttctctaaatctaactcaaaaa

SEQ ID NO: 63468 - DNA, 160 bp, Glycine max
  Clone ID: PAT_MRT3847_28324C.1
acgcgtccggtttgggatgggtacaacttcttaatgagtcattataatttcataaaatacagttgaaaaaagtctcataaaacatattctagcatgttgggcttgcgttcgaaaactctatatgtactaacctgccatcaatctttttgagttttgactg

SEQ ID NO: 63469 - DNA, 441 bp, Glycine max
  Clone ID: PAT_MRT3847_28325C.1
ttttcacccaagctactccactctcttggttatcggaggataccaggtatatttgtgtactatgctgtatgtttttccttttcgctctttttattgttttatttgcttatatatatatatatatttgttttctttacaacaatctttgtgtgtttactatagtagggcaacagtgtaaatataatagtaccacttgtacttattttattattataatacatgttactttgctgataaaaaaaaatgtaggatacaggggtaattttttttggggttatcaagctgtgagaactaaactgaagggaattaaactttgttaagtttgtgaaaggagaagatatatgaaagaaacttgactacatcactaaataaaacttgttggagataaaacagtataggttaaacttttcacttgatcccgactgttgtctctattttgta

SEQ ID NO: 63470 - DNA, 299 bp, Glycine max
  Clone ID: PAT_MRT3847_28326C.1
actcgttctagatctggcgcggtcgcccaatgcgttattaaagtgtgcgaggtacattatatatacaatgcacaagcttaacgcaccagatggaacgaaccaatactccactgaatggaccactctgaccaacacagtaccgatattaggcacacacattctgtgctgagatcatgccaaaccagaatgctagatcacgcaccaagctataaagcatatgtcgacaagcctataccatctaggtgcaagtgacctatgacagatgccgagacagactcacctgctgctgtcatgattgc

SEQ ID NO: 63471 - DNA, 344 bp, Glycine max
  Clone ID: PAT_MRT3847_28327C.1
gggttatcaaactatttcactttctttcatgtatcaaaaattttgttttttcttgtatccttaaaaaggagcgaggcccacgcgcaataatagctgattaataaaactaaaaatgggcacgaatcacgggaaaaccacgggccgattcttatccataaataaaaattccagtcaaagaaccaacgcccacacgtaattctccaggtgaccagtcccggaaccttaccaacacttgacgtcgaagttgggggcgaactggagcagaaagtcctagcctaaagtggacgtgctaggcctaatagcgaaaggccctgaatgaaacatcagagcccagcgcctaaaaa

SEQ ID NO: 63472 - DNA, 190 bp, Glycine max
  Clone ID: PAT_MRT3847_28328C.1
aacacattcaaaagcaactgggctagaacttcaggagttggcaaaagcggtgtttacaccctctcatataaacaaaaaagctgttttcccttgggacattcacgtgtgcctgatactgcccttacaatggcaattttgttacataaaagatatattaacataggctcccaactttactagggttgaggat

SEQ ID NO: 63473 - DNA, 1063 bp, Glycine max
  unsure (1)..(1063): unsure at all n locations
  Clone ID: PAT_MRT3847_28329C.1
tggaaggctgcataaataaaagttgtggtcttcatgggctaggtgcttctattggaagggctttggatggtcgatttctagtgatatgtcttgaatatctgaggcctatgctggtaattacgtggttaatgatgcacaacggaagttggattttttaatcccaagattgcccaatggggagcttccatctggatttcttggttttgcagtgaatatgattaatttagatagctcaaacctattttgtgtaactcccagcggttatggcctcagagaaactctgttttataatctcttttctcgtctacaagtatataagacaagggctgaaatgatacaagcacttccttgcataagtgaaggagctctttctttagatggaggaatggttaggagttgtggtgtattttctttgggcaatagggaagatgttgatgtgagattccccagaccagaaagatcaatgagacttgataaccaccacattgaaattgagagacaattgaaggatgtcaaatggaagaaagaaaagattatggaggaattaaaaagggaacaaatattgttggacacgacgaggttcaattacaataaaaagaaggctgattatcttaagtttttggcacaaagttcatcagatgcaactcaggctcagactgctcctgacagatttgcttgtagatgattgaatcatggctgacagcatacaatgaagaagagagcctgtggctggcaactttgtttttgttcttgagcttgtagttatccattttgtaatctggctctggaatgagaattttctcattttgatttcttaaattggaagataaattttggatagtaaaacaagcacattgatttttgaagctggagacctctccagtttaagactttgtttttcttccaagttttgctgtaaagcaaaatcagattagccttcatgacaccggtataagatttacctttcagtttgcttggtttctagaccagacatacaggctaggacaacctttttcttggttccttgtgtatctgttagctcttcgtactcatgtantgagtg

SEQ ID NO: 63474 - DNA, 251 bp, Glycine max
  Clone ID: PAT_MRT3847_2832C.1
ggaaccctagccatccattcatccacgagtcagtatttgcatcttggacccagatacctcgatattgcgcgttggcccctacctgctcgtctgtccgttggtcgactggctgacaagctcccacgtgccagcttggctgcacggctgtctgtacctctgcatgatggtctggtgatgtcacaacgccacagccctataactgtggcactgcgtcacatcatgagattccggaatagcactgaactcctgat

SEQ ID NO: 63475 - DNA, 678 bp, Glycine max
  Clone ID: PAT_MRT3847_28330C.1
cggccgctcgagccggcgggcgcgaacttttcgcacctcttcatctcttgcagatacgtttgaacgagcttattctagtttaaagaggatgagcagaggctaggctcgacatcggtcattgcgatcattgtagatgaggattccgctgaatccactaccactgtacacctcaataacgaggaaggaggccgtgacaagcgagttgttcacaggtttatctacggaggtgctgacatgaacgacaggcctctccagtctggctgaaagatgcacaagagattgggccgagcgtcaaatgaggaatcttcattgatatggatcttgagcagactgaagacacccaagtgatcatatgcatagccatagatgcgccatcgtgatctagcaatttcagtaggaatatgattactggcacatcccaagctgagtgcgctgttcataccaatgattcgatcactggcggattgcaagctgagaatctccatgaacgctcggcactctacgtatcttgcatctgcatttcattcacctcatctgttgcgctacagatgatttgctgcagtaagatactcgatgatacgacacccaactagtccacggaccctaatggtgagattgtgtacgaagtctcttcctacttggttaagtacgatacaccctgacatccctcctttcgct

SEQ ID NO: 63476 - DNA, 362 bp, Glycine max
  Clone ID: PAT_MRT3847_28331C.1
attgaacgtcccatggatgggacactggctgggagcctaacttttgacaaacctaagacccgccgtttgactatccgccctacggagctcaatatggaggtccgtctgaaggtccgaaatttggtgaggatcattgtgaggaaaagggacaagcttaggggccaggttggaatcaacccatacttcatggcatggactgtgttgtgcactggattactgagtaagggcctcaatatggtgagctgcgatcatgcttgctatgatggttggattaccaagctagttaccagccagatggcgaacatgatggacagtctttgtggcggtgattaaaaattgatgcgtgaaaggacacacctgct

SEQ ID NO: 63477 - DNA, 759 bp, Glycine max
  unsure (1)..(759): unsure at all n locations
  Clone ID: PAT_MRT3847_28332C.1
gaaaattataaagtgtcttgttgagaatattgtagtagacatttcatttaaccagcttggagcgtccggcaccctttgttttcttgaggaggttgataatctgattaaccaaaatcatttattcaagcgtagcattatcctgataaaagcttggtgttactatgagagccgtatacttggtgcccaccatggacttatctcaacttatgccttagaaaccttggttctttacatttttcatgttttcaacaattcttttgccggaccgctagaggtattgtatcgatttttggagttttttagtaagtttgactgggaaaatttctgtgtaagtctttggggtccagtacctattagttcactcccagatgtgacagctgaacctcctagaaaagatggtggagatttactgctcagcaagttatttctcgatgcctgtagctcagtttatgccgttttccccggtggccaagaaaatcaggggcaaccctttgtttccaagcatttcaatgttattgatcctttgcgtgtcaacaataaccttggccgtagtgtcagcaaaggtaatttctttaggatacgcagtgcctttgcgtttggggcaaaaaggctggctagattacttgattgctcagaggatgaattgttttctgaggtcaatcagttcttttttacacttgngagaacacggaagtggggaaaggcctgatgttccaagcatcgacctacggcatttgagtttatccagtcatgaccaat

SEQ ID NO: 63478 - DNA, 315 bp, Glycine max
  Clone ID: PAT_MRT3847_28333C.1
ggggcaaaaacccagtcaatgttttacaaaacaaaattatgtgggcttatggggaaccataatcctcacaccctgtaaaagcacaaagtttaaccatgcttccataatggggggaagggtttccaagacttacattcaattttacacattatgttttgtaagaagaataaaggggcaaattttttttcccacaaaaacttttttttttggaggtggggcccctcaaaaaaaaattaaaaataataatcccctccttttttttttttaataatttcccaaacccaaaaaacctaaaattattttttatcccttcct

SEQ ID NO: 63479 - DNA, 467 bp, Glycine max
  Clone ID: PAT_MRT3847_28334C.1
tttttggttatatttttttttttttatcttttttaattgtttcttttttttttttagaaaaaaggaactttgcccccgttcataaaaaacccaattttgggaacaaaattttcaaaaaaatggggggaactttaaaattttttctaaaaacaagttttctaaaaaagaaaacccaaggggataaaaccaacttttttttggtcccaaaaaaaccaacccccctggtaaacccaacccgacgatttttttttttttttgggccaccctgggggactttgtttccataggaaccttttttttcccgttttttttaactccccaaggaacaggttggaatcttttcctttcaacaaaaaggataatggggggggtcctaaaaaaattattaccaccccggggttggggggattatctttaaataaccgctctccccttcttcaaaaacgtgggtttttttttaatttttt

SEQ ID NO: 63480 - DNA, 664 bp, Glycine max
  Clone ID: PAT_MRT3847_28335C.1
gctgcactcaattcatccatcaatctaactagacaacaaacattataattaagcttgacaggtcatcaaattttgtacccaatacaaactattacatgttcatggcctaggtgtaccgaacaacagagataaaaaggggcagggaagaaaaaagttacatgttaaactttattcaactcacgttgaccatttacacttacatcggcattgacgaagacaatgatggcaaagatgatgtcgaagatggccatagctgtgcattcttcaccttggacacacttgccagaacccctaatggtgtcacgtgtccaattattgttactttctttgcctccatgtctatactgaatgatgttactccttccatttttgaaatgtgttttgtaacttttcttgcacaggccttgcagtgcaatgagaccctcaaaaccacaacctggttctgcagggtggtcttgtgtgagtttgaagggattttctcggactcagacacccaatcaccgaggagatatctagttgacgatgaatcatataggttgttaacttgaatggagcctgttctgcgaacatcgccgttttgaggcttaggattgataggcaataatctggatgaacaagggacacgaagttggcttttccttggaataccggcgtgccctcgtgc

SEQ ID NO: 63481 - DNA, 426 bp, Glycine max
  Clone ID: PAT_MRT3847_28336C.1
tggtcctttgccaaaactagtgcgactttgcgggggggatttttagcagattgtggttttctcaccacaggctttaagcagatgcctaatgctttgcgggtggctcctgaggacatggcgagtgcacggtcacaacttcattatgacgcgcgcaaatcatctggaaaggcaagatgctcatcttgacaatcttcgtgaatgtcgtctacgagaatctgatctagcacagtccagaggaagctagccaattgagaaggaaagctccctctcgtattgaatggctgcaaaaagctgatgagcctaccatagcacagattgaatagctccattcgatgcagaggatgaggaatgctcctgatacaaatgataatagtgaaacactgttgagcatagacatgcggaggctacaaggagcaggtcaagctt

SEQ ID NO: 63482 - DNA, 917 bp, Glycine max
  Clone ID: PAT_MRT3847_28337C.1
catgacgatcttattaggagaggaaatataaagggaaataaagagagtaagaaagacaatcaacaaaatcataagaaaggcttcactttctccctcacatcataattggaaaaacataagacatcgttacatgataatattagttaggtgactacatatggtcgtgaagcttcaaaagcaaaatctcctccaactctgaatttcaacaagtgcatgcaacaagcagttgctgaggaggtaactacaagcaacaccacttaagcaatttaactcacccccctacccattgactaattaatatacatacaggggataaattgcccaacacattcaatctcataataatgatgaaatacatttgcaagacaagaaaaaaaaatctttggtgagaagcacatggggtacaataccatatgacaatgacattcttggtgtcactatattagcattaattaacctgcacctcttctcagttttgcaggcaaatctaaaccagttacctgctgtacaattttgtgaggctctaaactaggtgcatttgagtcacttgaagatggattgagttggtgttgaacatcaattagaccaccctccattactcctgcaggttcaggtgatccctggaaaattgtcactgaactttttccagatgacatgccttggagtaatacgacaatacagaagacaacagtgaaaaccatagcaaacgtgctgctactggaagatgacgatgccttagcagctttcatcttcttcaaggctttcattcgctctatcctcgcacgctttagcatggcgagttcagtgatctccctgattagcttctggtcagctacatcccacgaaggagctcgaggaggtcttggaggtttgggagccttcttattactgcactttttacgtttccggacgcgtgg

SEQ ID NO: 63483 - DNA, 196 bp, Glycine max
  unsure (1)..(196): unsure at all n locations
  Clone ID: PAT_MRT3847_28338C.1
tcgcangngngcgtncggntcgagcnaacaccaccaccagacaacaacaacaacagcgttgtaattgccggannnggtgctgtcaagnccatantagttcantccggcaaacttctcncccgcncaccangganaacaanatcccgcgtttggaangttccnanacctntcccacgaaccacnagagtangcncgt

SEQ ID NO: 63484 - DNA, 509 bp, Glycine max
  Clone ID: PAT_MRT3847_28339C.1
actcgagccgaatcggctcgagggtgtctaaatctcttagaagtttgtgtttcagagttcagctctcacaacaagggttttgcttgaggaggattcagtaccatcatggcatggtgattaacacccctgttctccatgcttcttcttcttctgaagaagaagaacgagcagggaaagcttctcatgctgcaatggagggtttgagtttggctgagaagagtactgaggctgttgaagaaagtaataaaggaattgaaaatggttcaaagagagaaacttttgctgatttgattgaagaaaagggtcgtgagagcagtttcagctctgagtttctgtcatctgagaccactcatggcgagcatagtaggagtagcactgaggactcatcttcatctccttctgtggggtggcccgttcaggaaattgctgcatctgattgtgctagtcctcatggaagtgaagatggtgagaagaagcacttggttttggagaataaggagtttgagaaa

SEQ ID NO: 63485 - DNA, 135 bp, Glycine max
  Clone ID: PAT_MRT3847_2833C.1
tacggctgcgagaagacgacagaaggggatgtgatgagaagtggaatccctaatttccgtgcagttgcattagctctcacggatttatgatccatagcagttgccattagattgtacttctgctgaccttgtatt

SEQ ID NO: 63486 - DNA, 411 bp, Glycine max
  Clone ID: PAT_MRT3847_28340C.1
ggggggaacttaatctcactaaggcttcgtcccctaagcaaaaaattctgctgttttaaacccctgttttaatggtacaacattgggatctgtcttcttttctgaacaaaaaccctaacaacaaattcatcggagggggggggccacaaaataccaccctgtacaaaggagccttttactaacctaacatttgctaatcacacaacagctgccaactggtgtctgctgatgggttaaccgccaaaaattggtggaccaaacggggggggcttttccccttttccaggccatcgttactacttttccaacctgtttttgaccattatgagccttatctaaatcccttgcaggggggggcatcatataaggttgcttcaaaatgctggcatttgaacgtttgttttccacaaa

SEQ ID NO: 63487 - DNA, 831 bp, Glycine max
  Clone ID: PAT_MRT3847_28341C.1
cggtccggattcccgggtcgacccacgcgtccgctccctaagaagaatcctggcttttcaaaccctctttctccgttccacccaagctcttgccaacgctctgcgtcttgtgaatctactcaaatgtcaggttgaagctcttgaaccgcttcttcagcactaacttgtgcaccttcctgttctcgttcaaacctttagggctaagagaactcagaatcttgctccacgtttcaacctggtagttcttgtgcttcgcttttccttcaagatttgtgtccagaagctccattaccctcattaactgcgccgcaaaagatgttcctctcactgtttctgagacaaagttaaggcattgaaggccgagatgccattttccaggcctacattaaggcattggtggaagatccagacaatacagaattgatgcacgaaagttggaagagtgggctggagttcaaaatccaacttctcttgttgagttttcatccaaagaaggagaagctgagaagatttaaaggacattgcataaagggctggggggaaggggaattcagttatagtcgtttctttgcagttggactctttcgtctagttgagttggaaaatgccacagaaccaataattttggacaaggctaaccaattcatttaagacttattattattatgacttggatttattcaaataatcatttcattactgtattttgttttgcaattggaagttgaagctaccaagtctagttctcacttcccatctacacatgttttagcaaattacaaatcaagaaattccaacatattttgaagtgcttaatagattttgcctgat

SEQ ID NO: 63488 - DNA, 942 bp, Glycine max
  Clone ID: PAT_MRT3847_28342C.1
ggctcgagatgaggcttttcccctaacaaagaaatggtggccctcatgggatattaggaccaagcttaattgtttgcaaacatgtattggcagtgcaaaactaacagaaagaattaggaaagctgtagaaatctatgatgaagatccacctgaaagtgtacagaagtatgttcttcatcagtgtaggaaaatgaaatttgtttcgagtgggaagatataaggttgctccattagagcctgatgaagtagaaacgctgttgggcttcccaaggaaccacaccagaggaggtgggataagtaggactgacagatacaagtcacttggtaattcattccaggttgacactgtggcataccacttgtcagttctgaaggagatgtatcctaatggtatcaatcttctttctctcttttctggaattggtggggcggaggtagctcttcatcggcttggcatccctctcaagaatgttgtgtctgttgaaaaatcggaagttaataggaatattgttagaagttggtgggagcaaacaaaccagaaaggtaatctatatgatatggatgatgtaagggagctagacggtgatcgcttggaacagctgatgagcacatttggtggttttgatctaattgttggtggcagtccatgtaataacctggctggtagcaacagggtcagccgggatggactggagggaaaagaatcttctctcttctttgattattttaggattctagacttagtaaaaaatatgtcagccaaatatcgataaatttttgtccaaagaaacctctttctgcggttttgtatttaatccaaacaattaggatcttcgtatataaacctgaaacattagagacagatacttctcattccatttttgttgccaaagaaaggcaacgttttcaaataaaaaaattatcttaaaatttctgatttca

SEQ ID NO: 63489 - DNA, 162 bp, Glycine max
  Clone ID: PAT_MRT3847_28343C.1
cccactcgtactcccattcgatacatcacccatcccatattccgggatggtacattcatcaatctacattctccaatcttacctactccatcatcccacataatatctttttcaaatcatcaatctaaattcaatttactttcataccttgaacatcatcaa

SEQ ID NO: 63490 - DNA, 367 bp, Glycine max
  Clone ID: PAT_MRT3847_28344C.1
attcccggtcgaaccacgccttccttccggttgcaaaagaccaccagaggggttcgctccttgaaaccaagcccaagtcaaccacaaaaccattctctctgctcttcttctacctttcaagtttttcaagtcttacgatggctgagacatttctatttacctcagagtcagtgaacgagggacaccctgacaagctctgcgaccaaatctgcgatgctgatctcgactcttgcctcgaacaggacccagacagcaatgttggctgcgaaacatgcaccaagaccaacttgttcatggtcttgtgagagatcaccaccaaagccaacgtttacttctagaagaatcgtgcgtgacacctgcacgaaca

SEQ ID NO: 63491 - DNA, 198 bp, Glycine max
  unsure (1)..(198): unsure at all n locations
  Clone ID: PAT_MRT3847_28345C.1
gcagcgggaacccgcactcacggggnnaggctactcttcattcagggccctctcttttaccttttacccaaatatatgcaggtcttataccttttctgtgttaaatatcatagggcgccctttttccattctttgctacctttagtcacaattcattcctcatatctttctcgtcctcttcatttttggccataaatg

SEQ ID NO: 63492 - DNA, 263 bp, Glycine max
  Clone ID: PAT_MRT3847_28346C.1
acgtgccgcagcgtgagatagtgggatcgaccattctagcattgatgagcgccgtataggaatggcgtgcgaatattaccatcagtaggatgtgactgagctaactagagatgaccgtagaaaagaggactctaagaatgatttgctatacccatatggtcatgaggaacttgctgtctgctaagacgttgatcaagatcgagctgttattgataagtattcctattatcactctatatatgctaagctatcatatggataga

SEQ ID NO: 63493 - DNA, 459 bp, Glycine max
  unsure (1)..(459): unsure at all n locations
  Clone ID: PAT_MRT3847_28347C.1
aaaaaaaaaaaaaaaaaaaaaaaaaaaaaaaaaaaaaaaaaaaaaaaaaaaaaaaaaaagaaaaaataaaagtaaaacaaacaaaaataaaaaaaaactgaaatgaaatagcataatatataatgtaatgttaacattaaattcaatggcctggcctttacatgaaactgacttgaaagacaaagccgtgacccaacttaatttaattgcattaaatccgattttctttaactggattgggagagaagagaccaggaccgacccgatttccaatcacaatagtaacctaaatggaaattggaatgggacttgtactggaccattaatttaaggcgcgtgtggtgtggagggtaagcatagagagaccaattgcctggggcttgncncagggcccgttccgttcgtttccttccttttttgccccgtaaggcgggtgggcttttcagggtttaatttaaa

SEQ ID NO: 63494 - DNA, 298 bp, Glycine max
  Clone ID: PAT_MRT3847_28348C.1
aattcccgagtcgacccacgcctcagataggctgaaaaaaaacaacagaaggggacgccgatcagtagtacaaccatagcctcaattgtatatcgcctcattggcttcgatcccaatggtgacatgtaacatttctcatacgcaacaaggtcaaatgtttgatgcacagtatccagctaaagaagccactagaacaacagatcaggcaacgccacttcgattatcaaacaaacacttcagtggaacacccagatgcaactaaaactgtattgccaccaactgggtccactcattgttt

SEQ ID NO: 63495 - DNA, 419 bp, Glycine max
  unsure (1)..(419): unsure at all n locations
  Clone ID: PAT_MRT3847_28349C.1
cgcacaataccnctcgagggaattggtcgtccctggttgaggttgtgagaggtgcttcgtgtccgtgctaataatgtcttcttctctttcaattccnatgccatttccgatcggagtggatgctgcntcntctttnaccgtgacacanatagcgcttttcaaacctctgaagcagaagcatcatttcgtcagaggcagagtcagtgttattagaccacttcatcgccgcctcaactccgtttcgcctccgcggtgctcttcccccggtgacgacgccgtcattactctccatgtttggggaatgatgtgcgagggatgtacaaatagcgtcaaaaaaattctataaaaccgaccgcaagtgttatctgctcatgtaaatttgacatccgagacagcaacccgtttccttttgccttaac

SEQ ID NO: 63496 - DNA, 286 bp, Glycine max
  Clone ID: PAT_MRT3847_2834C.1
tctcgttctttctacccatactccatggattggactggtttgtccatttgatttctagagttatgggcaatctatttttctatagttagcgactatagctatgatttgattggtttgattaccaaacatgttatgagcatgatggcagaaatgataaatagtctttgtggaggtgatgaaaaattgatgcgtgaaaggacacacctgctgttggctagttagtcaaaaatggcaatttgttagaaagatgtttgcagaagtgaatgaggaatcccttctggatttc

SEQ ID NO: 63497 - DNA, 327 bp, Glycine max
  unsure (1)..(327): unsure at all n locations
  Clone ID: PAT_MRT3847_28350C.1
agtgcttctgcaacaggcagtgccaggatgactttggatcagcttattccgcgttatttccgtcatcataggactttccctctgtgcatacatgaggagactgatggcaaccggagcacgatgtcagatccgtgtgtcctatatgacacacgtatctgacatactgctcaagttgccctaccttttgtcatgtatacacattggganngacctttgatgactgagatgatgctgatggagnnnctacaatagcgtactgnnnnnngctgtagcagagcgtaaagtagtactgattctataggatgtatgagacggctgctcgagnnt

SEQ ID NO: 63498 - DNA, 2007 bp, Glycine max
  Clone ID: PAT_MRT3847_28351C.1
atgtcgaccgaatcgcctcgactatatccctgtgataaactggttcctcttggctctttccctggtgcttgtctgcactatatctagcattgacgagattggaaatgcctatggcattgctgagcttggggtgaacgtcaacagccacatttttgtgtatcttgccatcatggacactgggttgttccactctttttaaaatatgactttcctagcagtgttcgaggggccggatctaaattcttgtcatatactggtttctcgtggctgtttctgtggtaactgtatattggggatcacgactttaagaggtcggaactgactttggctttacggtggcggggcttatgatgatgaccactattttagtaactcttattatgcttcttatatggcagatacacatcgtaatagtgctgagttttgcggtagtcttcctgggattggagttgactttcttttcatcagtcctgtggagtgtaacagatggaagttggattatattggtctttgctgtaataatgtttcttataatgtttgtatggaattatggaagcaagctcaagtatgaaactgaagtaaagcaaaagctgtcaatggatttgatgcaagaattaggctgtaatcttgggacaatacgagctcctgggattggtttgctctataatgagttggtcaaaggaattccaggcatttttgggcattttctaaccacacttccagcagtacactctatgatcatatttgtgagtattaagtatgttccagtccctatggtgcctcaaagtgaaaggttcctttttaggcgagtttgccagagaagctatcatatatttcgctgtattgccaggtatggttacaaagatgttcgcaaagaaaatcaccaaacttttgagcaactgctgatggagagcttagagaagtttatacgtcgtgaggctcaggaaaggtcgctcgagagtgaaggggatgatgatactgattctgaggatgagtactctggttctagggttctcatagctcccaatgggagtgtttattcacttggtgttcctcttctggctgattttaatgatacaaccatacccatacccaattttgaagcaagcacatctgaggaagcaaaccctgaatctcctaagcccccagtgcttgatgctgaaaagagtctagcaagagagctatcttttatacgcaaggctaaagaatctggagttgtttatcttcttggtcacggggatataagagcaagaaaagactcatggtttatcaagaagctaattataaactatttttatgcctttctgagaaagaactgccgaagtgggatcacaaatttaagtgtaccccattcacatatgatgcaggttggcatgacctaaatggtttgacaatgaatttccccaattgcttataggccatctggtgcagttttttgttcaggcacaagggaaacggttgctgtctcggatgtcaaatttacatgagcagatatcacttgtggtcggctttctaaaatttttttgacgctatttggacatccctcgcacatcattcctccaacatggagagtaatgacggcgtcgtcaccggcggaagagcaccgcggaggcgaaacggagttgaggcggcagatgaagtggtctaataacactgactctgcctcttacgaaatgatgcttctgcttcagaggtttgaaaagcgctatctgcgtcaccgtcaaagacgacgcagaatccattgcgatcggaaatggaatcggaaatgatttagaaggcattttaattagcacggcctagtagagattacacttcctctttgaagattgtatatgagagaataacctatccattgacattgtaatgcaattttacaatattattaatcataatataccatataaaaaaaaaatgttaacctttggggggggggggagggcttgaaagagaagaagacattattagcacggacacgaagcacctctcacaacctcaaccagggaagac

SEQ ID NO: 63499 - DNA, 2461 bp, Glycine max
  Clone ID: PAT_MRT3847_28352C.1
cgaagctcggaattcggctcgagctttcttccccccttttttctctgcgccagcaaaaatggatgattctggaagtaaaactaaactgttgaatccatggatgctccacttccagaaactcgctctcgaactcaagtgccctctctgtttgagtttgttcaagaggccggtgttacttccatgcaaccacttgttctgcaattcatgtttggctgattgcataacggctgggcctggatgtgctgtttgtaaggcaacgtatgctcaaacagatgttaggcatgtgccttttgtggaaaacgtggtggcaatatatagaagcttggatgccactttttgtgctagtttgtttcagccatgttcttctggtgatgggagggttttggagccgtgccaagcaattcttaattcaacttctagtagtttaaaagctgccaagcttcctcggaatttaactaattcaatgaggttggggttggcaagaatttcaaatccaagagtgtggtgcatgacaaagcagaggagtttgagttgtctcgtgagagagggaagcccaatccaatgcaatcttcccatatgggacttgggggccgagaacagtgtggagttatggaaatggatgtgaatcaagtaacacaatcagcacctgatagcccgcccttttgtgataccaaaggttcagataatgactgcagtgatcaagatagtgagcatccattacctcctggcagattggaaaattcttcactaaacagagcaagcacaggaaatggaaatttgaaagaaagaatgggacagcttaggtctgaaagttcggcctctgaaactgagggtctggcaagggatctcaagagacagaagaatctggactttaaacctggaaaggaccctggtgcaccattgcccacaaatgcttcaattgacttgtgtccaattggaaggatctgctcattttgccaatcctctaaaatctcagaggttactggaccaatgctgcattatgcaaatgggaacttagttaccggagatgcagcaatgaaaccaaatgtcatacctgtgcatagaatttgcattgactgggcaccacaagtgtactttgttggtgaagttgttaagaatttgaaggcagaggtggcaaggggagcaaaacttaaatgcagtaaatgtaatctaaagggagctgctcttggttgctatgtcaaatcctgtagaagaacgtatcatgttccttgtgcaatggacatctcagattgccgttgggatcatgaggattttctcttgctctgtcctgtccattcaaatgtcaaatttccatgtgagaaaatcaggtccaagaaaaaggcaacacagaagcatcccactttttctcatctgccatctcatcactcaaatcgtcttgaagcttcccaggatgctagtaaaaaattggtattttgtggatctgctctatcaaatgaagaaaaggtatttttgatcaattatgcaagcaaggttggtgctactgtgaccaagttctggacctcaaatgtcacccatgtaattgcagcaactgatgcacatggagcatgctccaggacgttgaaagttctgatggcaattctaaatggacgatgggttctaaaaatggattggataaaagcatgcatgcaagagataaatcctgtagaggaagaaccgtatgaaattaatcttgacaatcaagggtgtcaaggtggcccaaaagctggcagacttagggcattggccaatgagcccaagctattcagtggcttaaagttttatttttctggagattacgtgtcaacttataaggaagatcttgaagaattaattgaagtggggggaggtactgttttgagaatcaaggaagaattggaagcacacagacatgaatgcaaaggggattcttcaaagttgctagttgtttacaaccttgatcccccacaaggatgcaagttgggggaggaagtttcaattctttggcaaaggctaaacgacgcagaggatttagctgcgaacactttacaagtcattggtcacacatggattcttgaatcaatcgctgcatgtaaattgcagccttttgtttactaaaatgcattaggtagctgatattttgtcgatcacttgatagggcgttctctgcaaaagttgatcaatcgtgtacaggatttagcttgaatttatttgaagtcttgttcgagtcactggatgttagggtgtaatgcttatgtaacattaagtagttatttacttagttttgtctgctcttgcctcgtcttaatgacttcacgctgaatgtacttatgttttaaaattaaccggatcctcagagttgagattgaccatgatgcctcgtacatgctaaggcaaattctaccacgcaacaagctagatgaggtgcatcggtgtactaaactatttatcattaattaaatgagtaatgctatgttttcgtatt

SEQ ID NO: 63500 - DNA, 1521 bp, Glycine max
  Clone ID: PAT_MRT3847_28353C.1
gtcggcccaccggtccgccttctaacgaaatcccttctattctattctttctccacctcttctctcccctgtcttcttcttaattaccctccctcattgcgtgcaccccccaaaaaataagaagatatacataaaaataaaacacaccctctacgtgtccacactctctgatcacaacacacccgcttaattaaatctctatatataaaccccttcaggcactccactatgacgggcaaagaaatttttcataagatgaaggaaaaagttttgggatcatctgatcccgattcaggtaaaggaaagagcaagatgaagaagcacataactcatggctttcacttggtaaagggaagatcaggtcatgccatggaagactatcttgttgctcaatttaagcaagttgacaacaaagagttgggtttatttgcaatatttgatggccactctggtcacagtgtacctgattacttgaagtctcatttgtttgataatatcttgaaagaggtaatgaggcctaacttctggacagaacctgctgaggctgttaagagagcatatagtataactgattctactattttagacaaatcaggtgaattgggtagagggggttcaactgcggttacagcaatattgatcaactgttacaagctactagtggccaatattggggattcccgggctgtcttatgtaagaatggcgtagccaaacaactatcggtggatcatgaaccaagcatagaaagtgaagatataaaaaacagaggtggttttgtgtcaaacttcccaggggatgtgccacgtgtcgatggtcagttggcagtgtcaagggcatttggtgacaaaagcctgaagatacatttgagctcagaaccatatgtaactgtggagatgatagaagatgatgcagagtttcttatactagccagtgatgggttatggaaggtaatgtcaaatcaagaagcagttagtgctatcagagatgttaaggatgctagatctgcagcaaaggtgcttactgaagaagcaaagaacaggaaaagctcagatgatatctcttgcgttgttgtgaaatttcagtgatcagtaaactcacatagtatatttttatctacgaacttgaaagtgtaacatatactttagtgtaatgttgataccttttaggtgttattatgtcatgccattcagtgtgtgatatttaatcttctttaatttcatacaaatgaaactgctgagaacgtgttgtttgatgtaccaatgttcaaaaggatttagttttggattgtgtagaccaaaataattcgtatgaatgcaaggaagtttggtcagtctctatcatcttgaaaagccttctggaaattcattagccatccatttgtgcctctgaaacacctatgcttgtattttgatacttcacctacttgtattttgagcgaaatatgtgtgaagtattcagtgctagacttataatttatatgttgcttttattaatgttttaaaaagaatatatttaatttg

SEQ ID NO: 63501 - DNA, 339 bp, Glycine max
  Clone ID: PAT_MRT3847_28354C.1
tttttattatcaatcaggtaaaaaattaaaggttcttattcaatggagataaggggaacttctttagaaacaaggttcccagcccatgtaccaccatggctgatcctttattacatgctattaattctctataaggatgatatatgggagcaatttggttaaaccaatggcctttgattggtacaactcatggggggtcgggggcttattaccctaatgtggcatttccttaggttgaaactgatccgatgttgaaaccctattattctgttcttgagaccacatcaaagcccccattatttttgttggagtggactccgtcatcaggaaacgaaccca

SEQ ID NO: 63502 - DNA, 342 bp, Glycine max
  unsure (1)..(342): unsure at all n locations
  Clone ID: PAT_MRT3847_28355C.1
ccctttttttttttttttatacaagaaaatgtaacattttattaagcaaacttttttaaaaagaaaattttttcatgatttaaaatcccctctcttatanttgttaattaattaaccccccaaaacactatcgtgggntcatacataatttggttaacattgactcccataataaaatcatagtataaataatcttccctaaaccaatactactaaactattttcatcattaactctaaagtcattgaccaaaaattccccattctttacattacataacccatcttctcttccaaaaattacaaaaaaagaaaattcattttaaatttttctcatattcat

SEQ ID NO: 63503 - DNA, 457 bp, Glycine max
  Clone ID: PAT_MRT3847_28356C.1
ccgtgttgtggagatcatcagattgagtgaacactaacccgtaatgctattttttccaataggttactgtttaaatagcctgcaacacctgtagttcctatagattgtctatcagatgcatgtattttacactggaaaactctataattactattagcttttgattaaccttaattagaagtgcagatccctgaaccttatttataagcctggcatatctgatggaatttatcacatacagtattggagatgaaaacactttttaacttggcccacaatccaccacgtctcttgaaaggagtctatatctcccgataactatctggattagcacgatatcctacaagggcagttgaggtttcttataaatgcctagaaaaaaatgccacattcagcatttgaggccttgtcacaaacacctcgcgcaattagctcatcttatatgaagaggtcaaga

SEQ ID NO: 63504 - DNA, 464 bp, Glycine max
  Clone ID: PAT_MRT3847_28357C.1
ggctcgagctaggcaccaaagtcaacgaagtactttgttctagtgcatggtcatggtgcaaggtgaccccaatacaaggtctcaactcacaaagtcactatgccctagctagacttagcagcttcaggagtgaaaccctccgaaggcattgaagcttcaatccatttcacagtaacttcaagcctctaacacagtttatggcatctttatcttatgatgaaagagtgatcctcattaattggtcacaaccttggtgggttaattagcaatttctcttgccatggagaaattttcacacaatgttgttgtggctatttttgtcactgcctaacacttaacaacgccaccctctcaatcaagtggcatcccctcctagcaagctcatttttcgtcattttgtgactttttggaaccatttttaattgtttgtctgtttcctcttttagtgcatcattttgatctac

SEQ ID NO: 63505 - DNA, 296 bp, Glycine max
  Clone ID: PAT_MRT3847_28358C.1
atgtgcttgcatggtcgtgagaagatgatagaaggggactgagaatcagcctaacacttcagcatattggcacagacaacccaagacatcgggacgagagtatggcctttaccatcgtcgtcgggatccgccccttcgctcctagccctcgctctacccggtaccgtccatcgggaaaaagcgaattttaaatataataagcgctcctagagccgtaacagtgacagagatctgcataggaattaaatacgttatgtctgccgtaatctctcgcaggcggagaaagaagaacgcga

SEQ ID NO: 63506 - DNA, 158 bp, Glycine max
  unsure (1)..(158): unsure at all n locations
  Clone ID: PAT_MRT3847_28359C.1
aggaaggcgccgtattcactgagagccctaaaagcattggngaatttgcatgncnttggctaggggccacattgtgaactatctaaattccactgggggggacaccatgcatacattgtccaacttcatgcccaggcacgtgcaagccgtgcgcactt

SEQ ID NO: 63507 - DNA, 818 bp, Glycine max
  Clone ID: PAT_MRT3847_2835C.1
aaaagagttttagaaatctatatacaagtcatccacacccccttttttttatttcattaatggaatttcgtttgttgattcgagcaaagttcaccaaaattgcaaaactttgtccaccccatcatttgtcttctcaattctcatcactaacacacaagtgtgcgttgtagatttctcagtttgcaacatatggcttccatcatcatgtcattgtccaccccattatttgtcttctcattctcatcactaacacacaagtgtgtgttgtagatttctcagcttgcaacatggcttccatcatcatgtcatttgctccagcaactggtagagtctttgcagccacagcggcaaagggtgctggtggaagcaaagaagagaagggtcttcttgattggatccttggagggttgcagaaggaagaccagctgctagagactgatccaatcctcaagaaggtggaggagaagaatggaggcaccaccagcaacactggccgcaacaagaactctgtggcagtgccacaaaagaagaaaggtggctttggaggcctctttgcgaagaactgaaggagcagtgatttattaccttatatttgttttacctgttttttttttctcaaatgcatgcgttgttgtcttgtccacttagattccaacctcttgatcttatggaatactttatgtctggctcttctggatcaacgtatttacagaactatatgattcattttggatcagttactggccaggtacaatttgttaattgacaatttgatatatttggagatttttggtaatttactttacttaacaccaagg

SEQ ID NO: 63508 - DNA, 434 bp, Glycine max
  Clone ID: PAT_MRT3847_28360C.1
ctggtacccccgcgggaccgccgcggcataaccgccgggtccttccccgcctgttactatttacctgcgaagagaatgtgtttccaaggggcaacttggactcaagcccggtatacttgccacttaccgctgccacacaacccactgtccccactacatcccctagcaatgaagtgccttgaaagccataccgctcatggttccacacaatggagactatggtggtggtccatcatgcctttggttgcgatctgatgactgtgcaatcatctggagctacaatggcaccatttgagctgggattcaaagtcatactattgtgcaagatgggaagaccattaagcgacaaatcaggtgcactgcccaacttgaacaatgaaggacgatcacgagttgatactattgtaaggaccatgggatcattattgtttatg

SEQ ID NO: 63509 - DNA, 275 bp, Glycine max
  unsure (1)..(275): unsure at all n locations
  Clone ID: PAT_MRT3847_28361C.1
agcggaaaagaanggaaaggatgganaaaattgtgaatgttttgagagtggagtaaatgggagtgtgaaggataaattgttgnaaagtttttatatttnaatnaaagggtnttaaaaaaaatgntatgaangttagttttgttaatttttttntttttgtaagtagggaataaatataananaatggntttgggttgttttaaaaagattgttgttgttaataatattgaatgtagagaaatgaagattttagataattttatgaggaaatatgg

SEQ ID NO: 63510 - DNA, 374 bp, Glycine max
  Clone ID: PAT_MRT3847_28362C.1
atggaagctaagactaagccttggctggacctatctcttcttctattggctgcatattgcatgcaacaatgtgtccatggacaatcgcagcaaacaccttgcatgttcatctttggaggctatttatctgacaatggaaataacaacaaccttcgaacatattcaaaatccaattacagaccatatggcatcgacttcccagcaggcacaactggtagatttaccaatggactaacgcaagctgacataattgctgagcttttgggatttacggaacgcatcccacccaatgcaaacactagtggctcggacatacttaagggtgccaactatgcatctggatcagcagggattcgccctgagaccggcacgca

SEQ ID NO: 63511 - DNA, 193 bp, Glycine max
  Clone ID: PAT_MRT3847_28363C.1
aaaaaaaaaaaaaaaaaaaaaaaaaaaaaaaaaaaaaggggggataccaattatgggagtaattgacacggggaataatttatggagggaaattcagaggggaacaagttttcctgaaaatggtagatatcaagtatgggagaaatttggaaagaatttttgttattttaaaaatgttgagcgggaaaaagta

SEQ ID NO: 63512 - DNA, 351 bp, Glycine max
  Clone ID: PAT_MRT3847_28364C.1
ttttaatctaaaaccataatatcttcacgtttggtactatgggatggtaaacaatggtctctcatgttgagcagcatttgattccatttactgcttggactttaagaggactgctactaatgacatcgcgaattagggtataataaaactaaaccttcaaatatttgtgcctataatatactgaaatcagaacatccatcctgaattggtgtcgatcgttccctcctttgttcctatcgaccaaacagatgatggctttggaaacttgtccttaagatccaaaagactgccgataggtgacacaacggaagaacgcttgttttttaaagcccaactgttaaaccttaataa

SEQ ID NO: 63513 - DNA, 526 bp, Glycine max
  Clone ID: PAT_MRT3847_28365C.1
cggccggcggggctttgtctgtcgcaccgaaacatttaggaacgagacagcttctaattgatagtaaaggcaaacctggctggacgaaacttgccgcctccgaaaacccaaccaatcaaaacatggatggctgggtaagaaatagcgccagggacacccagtacactccgagtaacaacttatacctctcatcaaacccggccctagcaatgacaccgggtggtggataaagcgacacacacgcgccacaaacattgatagggaagacactgtcatttgaccgtaactaccctattcttgctttctgtgcccgagtgcacacgtaaaccccaacacgggttaaagcttggcgagtaaaagagagggaaagttgaacgcggggaatcgaaagaacgctggcgctactactacccaaacatgcatgttgaaaacttgttattggctgaagacgctgaaatgctcgcccgtgaaggtctggccttacttgcaatgagaacgtgccacgatgcaagaggttgaggtgcaa

SEQ ID NO: 63514 - DNA, 440 bp, Glycine max
  Clone ID: PAT_MRT3847_28366C.1
caaaacacaggccaaaatcaaatttcattcttttttccccctaaaattttactggaaaggggggaaaaatgaaacaaaacccacccaaattaatgctcaccttctccaagcataaacaaccaaaaaaatttttttaggaaccaccaacttattttcctccgcactggaccattccataaccgaaaaactccccccaaaagacccaacagaaaaagaccccgcccaagatgaaaaaaaccaacttttcccatttctccactccccaccactcccaaaaatccactgggggtcctcctccttcccaccaccaccttgaacctgggcctcctcgaacttaaacacaaaaactgggggaccctcattaccggtattattggtttgggtattaggactacaaggattattatccttatccttctcgaaaagccaatcgtgcacat

SEQ ID NO: 63515 - DNA, 489 bp, Glycine max
  unsure (1)..(489): unsure at all n locations
  Clone ID: PAT_MRT3847_28367C.1
ctgataatgattgttgccttttatttgacacttttgtttcagagaacttcctgatgggttatcgattggtgtttgatcgggagaatctaaggtttggctggtctagatggaattgtgagtctgtcttctttcacttaacttttaacctataatttttgcaaatcttagttaaaaagatctgctgcttgtttaatttggattcttttttactggtaatttgctttgctatatggagaagagtgggacttgcaaaacaagaatttgaattattgatagacctgataatttttcaaaaattttgttttggggtataaactacataagtaattgatagacatggtaaagtcttcactataatgtgttacttctgaggtctttgttggttgaatttatctataaacacttgggaaaagaaaataagaagagttaaagtgcataagttgattttaactaatgaaagtcaaatngttttttcttttcttttcttat

SEQ ID NO: 63516 - DNA, 187 bp, Glycine max
  Clone ID: PAT_MRT3847_28368C.1
gaaaaccacgagaggcagagagtaccagggcaaggaccgtgcccaggccgaggtcagacggcgagagagcgagctggccgaggccgagatgccgggactcagggcccggcggaccgaggacggccccccacagcctttctaggggggacgaagaaccggcgccctgcacaagatcatacagaccggt

SEQ ID NO: 63517 - DNA, 486 bp, Glycine max
  Clone ID: PAT_MRT3847_28369C.1
gacaaagaatgtaacacatttgtactttcaagcctgagaaggaaataacaagggaaatctctgaataagataaaagttgatgagaaaacaaactatccagaagaatttgatagtggtaactagatgatttgagcttgaggaggttcacatacttgtagagatgaagctttctcccttaatatttctcccgaaggacgtgcaacaggaagttgtgatttgtctacattcttctgatcatcaattgaaatttgttttaactttgattctatgtttgatagcctgcgatttctatgttctttgtctcggaacctgtcatcaacaacttcaatttttataggacttttggtcaggccggcattcctagaatacttttgcgtatatctaggacttctgctttcatcatataaaaatctgagattcttgtcatcactactagcaccagggcatgaatgaggacttatgatttcaaaacgaaaagaactcttt

SEQ ID NO: 63518 - DNA, 409 bp, Glycine max
  Clone ID: PAT_MRT3847_2836C.1
cccacgcgtccgtttcaattttttttaagtgcttagtttttatttatgggacatggtacgtttgttccttgccatacaataatttctccagatgaccatagcatattgctatggaaagacatcgatagttgtactctctttggctctacgtttgtccccttggttccttttttactttttgggaacataaggaaaccatacatgtgagagatgaaacttgattaaattaagaatgcttatcattaactcattgtgttctagcttgctgccaacttagttgcaatcaatagattcagattatgcagtttcctggtagaatgcaaattctcattctccgatccttttcagatctctttctgatttaaaatgaactctagcatgacaattttcttttctttcaaaaagctga

SEQ ID NO: 63519 - DNA, 509 bp, Glycine max
  Clone ID: PAT_MRT3847_28370C.1
ttgggggttttttaattaagcaaaattatatgcatataagaaaatattaatatattttctatgaactaatcaatatacttatcaagtatagtgttcccaccattacatcaaataaataatttatttaattattaatatatatccaagcctaggcagctgcatttcttcccccctttttgctaatagcttgacataaacgacaaggtaaagtgtcaaggctcagtgctctagtttttgcgtagttatccaacacaccacatcttctccatgcatggaattctccataggctactgggtcttttgctatggccttcacatatgaagccaattcctccattgacttgaatttcaccccttctattattgaatgaggagggacaaaatccatgatatttggagcaccaaaatagattggaattgcaccagagtccaaggcataaaataacttttctgtaacataactctcagtccaagtgccttcaattacaaggacaaacttgtaatgagac

SEQ ID NO: 63520 - DNA, 268 bp, Glycine max
  unsure (1)..(268): unsure at all n locations
  Clone ID: PAT_MRT3847_28371C.1
ctttcgaaagantttntccaattgaaattttaaaaatgactgggatacacttaaganttcaattattganattgantaagtanncaatttaattggattggtcgantggtatcacaaaaatggagtactaactcccatttcttatttattattgaattaaccgatcaacttgctttgttatcgaacatttctntttgatttcaaaaattntccggaaaanatttgaatctattttctatatgcgantcaatcctactacttctggnct

SEQ ID NO: 63521 - DNA, 3325 bp, Glycine max
  Clone ID: PAT_MRT3847_28372C.1
taaaaataaggacgcaggcaaatgtatgcatttggcataagtatataagagagagggagtagtactactgcaaagcaaaatcagagagacatgagaagctgtgtgtgctacacgctattattgtttattttcttcatatggctgcgcgtggcaacgtgctcttcgttcactgacatggaatcgcttctgaagctgaaggactccatgaaaggagataaagccaaagacgacgctctccatgactggaagtttttcccctcgctttctgcacactgtttcttttcaggcgtaaaatgcgaccgagaacttcgagtcgttgctatcaacgtctcgtttgttcctctcttcggtcaccttccgccggagatcggacaattggacaaactcgagaacctcaccgtctcgcagaacaacctcaccggcgtacttcccaaggagctcgccgccctcacttccctcaagcacctcaacatctctcacaacgtcttctccggccatttccccggccaaattatccttccgatgacgaaactggaggtcctcgacgtctacgacaacaacttcaccggaccgcttcccgtagagttggtgaaactggagaaattaaaatacctgaagctcgacggaaactatttctccggcagcataccggagagttactcggagtttaagagcttggagtttttaagcttaagcaccaatagcttatcggggaagattcccaagagtttgtcgaagttgaagacgctgaggtacctaaaactcggatacaacaacgcttacgaaggtggaattccaccggagtttggcagcatgaaatctctgagataccttgacctctctagctgcaacctcagcggcgagattccaccgagccttgcaaatctgacaaaccttgacacgttgttcctgcaaattaacaacctcaccggaaccattccgtcggagctctccgctatggtgagcctcatgtcacttgatctctccatcaacgacctcaccggtgagataccgatgagcttctcacagcttagaaacctcactctcatgaacttcttccaaaacaatcttcgcggctcagttccgtccttcgtcggcgagcttccgaatctggaaacgctgcagctctgggataacaacttctccttcgtgctacctccgaaccttgggcaaaacggcaagttaaagttcttcgacgtcatcaagaatcacttcaccgggttgatccctcgagatttgtgtaagagtgggaggttacaaacgatcatgatcacagataacttcttccgcggtccaatccctaacgagattggtaactgcaagtctctcaccaagatccgagcctccaataactaccttaacggcgtggttccgtcagggattttcaaactaccttctgtcacgataatcgagctggccaataaccgttttaacggcgaactgcctcctgagatttccggcgaatccctggggattctcactctttccaacaacttattcagtgggaaaattcccccagcgttgaagaacttgagggcactgcagactctctcacttgacgcaaacgagttcgttggagaaataccgggagaggtttttgacctaccgatgctgactgtggtcaacataagcggcaacaatctaaccggaccaatcccaacgacgttgactcgctgcgtttcactcaccgccgtggacctcagccggaacatgcttgaagggaagattccgaagggaatcaaaaacctcacggacttgagcattttcaatgtgtcgataaaccaaatttcagggccagtccctgaggagattcgcttcatgttgagtctcaccacattggatctatccaacaacaatttcatcggcaaggtcccaaccgggggtcagttcgcggtcttcagcgagaaatcctttgcagggaaccccaacctctgtacctcccactcttgcccgaattcctcgttgtaccctgacgacgccttgaagaagaggcgcggcccttggagtttgaaatccacgagggtgatagtcatcgtgattgcactgggcacagccgcgctgctggtggcggtgacggtgtacatgatgaggaggaggaagatgaaccttgcgaagacgtggaagctgacggcgttccagcggctgaacttcaaagccgaggacgtggtggagtgtctgaaggaggagaacataataggaaaaggaggggcagggatcgtgtaccgcgggtccatgccaaacggaacagacgtggcgataaagcggttggttggggcggggagtggaaggaacgattacgggttcaaagcggagatagagacggtggggaagataaggcacaggaacataatgaggcttttgggttacgtgtcgaacaaggagacgaacttgcttctgtatgagtacatgccgaatgggagcttaggggagtggctgcatggtgccaagggaggtcatttaaagtgggaaatgaggtacaagattgcggtggaagctgcaaagggactatgctatttgcaccatgattgttcccctcttatcattcacagggatgtcaagtctaataatatattgctcgatgctcactttgaggctcatgttgctgattttggccttgccaagttcttgtacgaccttggctcctctcagtccatgtcctccattgctggctcctacggctacattgctccagagtatgcatacactttgaaagtggacgagaaaagtgatgtgtacagctttggcgttgtgctgctggagctgataatagggaggaagccagtgggagagtttggagacggggtggacatcgttggatgggtcaacaaaacgagattggagctcgctcagccgtcggatgcagcgttggtgttggcagtggtggacccaaggttgagtgggtatccattgacaagtgtcatttacatgttcaacatagctatgatgtgtgttaaagaaatggggcccgctaggcctaccatgagggaagtcgttcatatgctctcagagcctcctcactctgctactcacactcacaacctaattaatctctagttaattaagttatttgctcatcgatccagaatcacttcttttcaaaataaattaacacagacgaaaactgtaggaataactttcatctgttgtttgtcggaagtgaaacaacgaatcaaatgtgaactatgtatcaaatgtaagataggttttaattaattttgtaatattggtgtcaactgtcaagtaattcgaaggattttccccattgtgcatgtatcaagaatttttgtagaaaagacttgttgtttataaaatatttgtgactcac

SEQ ID NO: 63522 - DNA, 3244 bp, Glycine max
  Clone ID: PAT_MRT3847_28373C.1
tacattatgtatgcatttggcgtaagtatatgagagagtgagtactactactgcgaagcaaaaccagagagacatgagaagctgtgtgtgttacacgcttttattgtttgttttcttcatatggctacacgtggcaacgtgttcttcgttcagtgacatggatgcgctgctgaagctgaaggagtccatgaagggagacagagccaaagacgacgcgctccatgactggaagttttccacgtcgctttctgcacactgtttcttttcaggtgtatcttgcgaccaagaacttcgagttgttgctatcaacgtctcctttgttcctctcttcggccacgttccgccggagatcggagaattggacaaacttgaaaacctcaccatctcgcagaacaacctcaccggcgaacttcccaaggagctcgccgccctcacttccctcaagcacctcaacatctctcacaacgtcttctccggctattttcccggcaaaataattcttccgatgaccgaactcgaggtcctcgacgtctacgacaacaacttcaccggatcgcttccggaagagttcgtgaaactggagaaattgaaatacctgaagctcgacggaaactatttctccggaagcataccggagagttactcggagtttaagagcttggagtttttaagcttaagcaccaatagcttatcggggaatattccgaagagtttgtctaagttgaagacgctgaggattctcaagctcggatacaacaacgcttacgaaggcggaattccaccggagttcggcaccatggaatctctgaaataccttgacctctcaagctgcaacctcagcggcgagattccaccgagtctagcaaatatgagaaacctcgacacgttgttcttgcaaatgaataacctcaccggaaccattccgtctgagctctccgacatggtgagcctcatgtcactggatctctccttcaacggcctcaccggggagataccgacgcgcttctctcagctgaaaaacctcactctgatgaacttcttccacaacaatctccgaggctcagttccctccttcgtcggcgagcttcctaatctggaaacgctgcagctctgggagaacaatttctcctctgagctcccgcagaacctggggcaaaacgggaagttcaagttcttcgacgtcacgaagaatcacttcagcgggttgatccctcgggatttgtgcaagagtgggaggttacaaacgttcttgatcacagataacttcttccatggtccaatccctaacgagattgctaactgcaagtctctaaccaagatccgagcctccaataactaccttaacggcgcagttccgtcagggattttcaagctaccttccgtcacgataatcgagttggccaataaccgttttaacggagaactgcctcccgaaatttccggcgattcactcgggattctcactctttccaacaacttattcactgggaaaattcccccagcgttgaagaacttaagggcactgcagactctgtcacttgacacgaacgaattccttggagaaatcccgggggaggtttttgacctaccaatgctgactgtggtcaacataagcggcaacaatctcaccggaccaatcccaacgacgtttactcgctgcgtttcactcgccgccgttgatcttagccggaacatgcttgacggggagattcccaaggggatgaaaaacctaacggatttaagcattttcaatgtgtcgataaaccaaatctcagggtcagtcccagacgagattcgcttcatgttgagtctcaccacgctggatctctcctacaacaatttcatcggcaaggtccctaccggtggtcagtttttggtcttcagcgacaaatcctttgcagggaacccgaatctctgtagttcccactcttgccctaattcctcgttgaagaagagacgcggcccttggagtttgaaatcgacgagggtgatcgtcatggtgattgcactggccactgcggcgattctcgtggcggggacggagtacatgaggaggaggaggaagctgaagcttgcgatgacgtggaagctgacggggttccagcggctgaacttgaaagccgaggaggtggtggagtgtctaaaagaagagaacataataggaaaaggaggagcagggatcgtgtaccgcgggtccatgagaaacggaagcgacgtggcaataaagcggttggttggagcggggagtggaaggaacgattacgggttcaaagcggagatagagacggtggggaagataaggcacaggaacataatgaggcttttgggttacgtgtcgaacaaggagacgaacttgcttctgtatgagtacatgccgaatgggagcttaggggagtggctgcatggtgccaagggaggtcatttaaagtgggaaatgaggtacaagattgcggtggaagctgcaaagggactatgctatttgcaccatgattgttcccctcttatcattcacagggatgtcaagtctaataatatattgctcgatgctcactttgaggctcatgttgctgattttggccttgccaagttcttgtacgaccttggctcctctcagtccatgtcctccattgctggctcctacggctacattgctccagagtatgcttacactttgaaagtggacgagaaaagtgatgtgtacagctttggcgtggtgctgttggaactgataatagggaggaagccagttggtgagtttggagacggggtggacatcgttggatgggtcaacaaaacgagattggagctctctcagccgtcggatgcagcagtagtgttggcagtggtggacccaaggcttagtgggtatccattgataagtgtcatttacatgttcaacatagctatgatgtgtgttaaagaagtggggcccactaggcctaccatgagggaagtagttcatatgctctcaaatcctcctcactttaccactcacactcacaacctaattaatctctagatagttaagctctaagctatttgctcatctgttgtttgtcagaagtgaagcaacaaaatcaaatgtgaagtacagaatcaaatgtaaaataggtttgaattcattttgcgttggtgtcaactgtcaagtaattggaaggattttcccgattgtgtgtatgctcaagaatttttgtagaaaagaactattgtttataaaatatttgtgactggtactgtttcttct

SEQ ID NO: 63523 - DNA, 316 bp, Glycine max
  Clone ID: PAT_MRT3847_28374C.1
cacgcgtccgcccaagacgtccgcccacgcgtccgcccacgcgtccgaggataaagatacaaagtgggctgatagctatggctgaaaacttggcttcagaatctgggttcatggaacgcaggcttcctaacggcaaagtggaagtaggcgacgtcacgataccaagaatcaccatttcctctgcggttgaagtcactaaagtactaaagtgaacaattactacaatcaaggcggtggcgtggcatttctactaactttgaaaaatctcattctctcttcaaaccttcgtgggaatataacaacatattcactgtgc

SEQ ID NO: 63524 - DNA, 541 bp, Glycine max
  Clone ID: PAT_MRT3847_28375C.1
taaattttgcggtcagctcgtctatctggctatttgtacatttgaaaaagatgggcagcacttccaggagaacctcctcctataggatgatactaacgtagatgattggcttcctcgatttgttgttcttcagggggcatgtctattcttaaatttgttgtgaacagatctaagtcctcatgactcaacgcttctatctgatattgttgaagtagacaaactaccaagttttaagcgtgaagaagatgatgagacacgatacgccttttatattttaactcgtcatggtttacgatatgaatgttcaagcagttcccagatacaggtggattcatggttatcagctttacactccgactgcaaattggaaactgatacatcaactcccaatggctcaatagaattgtaacacattttacgcctagtttggtgagtttaagatagcttgaaagctaagattgtgtaaatatgacactaataccatttacttgtttttcttgtaaatcccccctaagatagtagtaattgaatagagagtatt

SEQ ID NO: 63525 - DNA, 374 bp, Glycine max
  Clone ID: PAT_MRT3847_28376C.1
ttgacgcgtgggttgaaaggtttattgaatgcattctatactgcagctaccgctatgagtaatgtgatgccagcattcacggttgtaatggttgcatttgcgggatgttagaggagggacatacgcttaacaagcacagcaaagatattagggacaggtggactgcgagttggatgcttaaccatggattggggcaaatgacagaacttgttacacacagggtatctatattctatacatctaactggtagagaacgtgacaattggctgatgggtagtatattgctcttagcatgcagagttttctggcgttgttggatgatcctactatgaccggtcgttgtaagcgtgacagacacatatgtagcgacctt

SEQ ID NO: 63526 - DNA, 399 bp, Glycine max
  Clone ID: PAT_MRT3847_28377C.1
aaagcgcgaagggttctcacccttttggttccctttttgacagacaagtttggcaattgaaaaatagttcctaacgccgtgtttaccggtccctcaaaattttgtttgtggccaattttttaatccatgggaagccaaatcttccaaatttataggggggaagaatggttctgaaccaaaaaaaaaagtgcctggggcaaatcccgccaaattggagaggatttgatgaaaaacctggaaacaacagctcccacagccccctctttttgaaagggggcctcaatgctggaaaactaatatgtttttggctttggagcctttttggggcccctttttgggagggggtttttcatgccaatgaaaaacaatcccacccccccaaaagagccctatttttgg

SEQ ID NO: 63527 - DNA, 328 bp, Glycine max
  unsure (1)..(328): unsure at all n locations
  Clone ID: PAT_MRT3847_28378C.1
aaagattcagtacagcgtatacaaagccacaaaagccaaagttctatactgcaccaacgaagcagcactatactgagaatgcgacaagaaagttcacacagcaaacaagctcaccagcaagcaccagaagatccctctctctctctccgcctctcacatacccaagtataacatatagccaaaaataattaattatttcttctatttagagaatcaagctttactatatagaaattataatatatctatacatacancaaatacctatatctctaatcatcaggaatggttacttactagtatgagagtgaaccttaaagctactgag

SEQ ID NO: 63528 - DNA, 291 bp, Glycine max
  Clone ID: PAT_MRT3847_28379C.1
gcggccagaagacggttttcataaaattttaaacggaccggtgtcttcggccttcgcggagtgttctatgaactctatcccaagggcacccctctggcctaacacccttgccttcagccttacaaatgggtcctcacttgttgttgaccacaacattgtctcatacggcaattatgcgaccatattcggctactaagatgcaggtgactacatactatacgaatccggaatggactggcacatattccggttcagacattacgacgttaacttccgtgcacacagccgtat

SEQ ID NO: 63529 - DNA, 306 bp, Glycine max
  Clone ID: PAT_MRT3847_2837C.1
tcatgttgtttttaacaaagtacattaccacaggccggtgttgtttaaaaagcggggccattatcaactaatgaaaagcacaggcgcatcaagttaatttctatgtgcaccataaatgtcccattccaatatggcctgcatctgtaccgaataaggacgccaccggtggtagcaaagggtggattctaccttgctgcaggccaaacccaacgggacataacaccaaggacatggagttgcagaaacaacccggggcctggctgaaaccacatttcaaattggaattaaacaaaattcagtgatact

SEQ ID NO: 63530 - DNA, 103 bp, Glycine max
  Clone ID: PAT_MRT3847_28380C.1
gcaggactctttgaggggctaaaggcatacacgactgaagagggcctatacttttatttcgaccggatgaaaatgcttaaagcatgaagaaaggtgcaaatag

SEQ ID NO: 63531 - DNA, 490 bp, Glycine max
  Clone ID: PAT_MRT3847_28381C.1
aattcggctcgaggaagaagcgacggtgaagcgtctggaaccgttgttttctcatttggggatagtgaagtacatgggagggagtgggaaggggcaattcgccgagctggcgaatcaggtgacgatagcttcgacgatggtggggctggtggaggggatggtgtacgcgcacaaggcggggctggatgtggggttgtacctggacgcaatttccaccggcgcggccggttccaagtcgtttgatttgtacggaaagagaatcttgaatagggatttggatccggggttcttcgtaaaccactttgttaaggatttggggatttgctctaggaccaaaataagagcctgagtacccaaattaccttccccatgagccctaagcgacacataaagctgttgcgccagagccaagccaggcaaagcaatccccatattctgacactccttcaagcaaagaagttctaagatgacttctccctacattaaatgt

SEQ ID NO: 63532 - DNA, 210 bp, Glycine max
  Clone ID: PAT_MRT3847_28382C.1
attatattgttatttataaaacttaaagaagttattttataatatttaaaattaataaggttatatttgtttatcgagacaaaaatataaatcctgccccaggaagccaataacaagacaatggtggtactaataaagacgaagaagcatacaacaatatcttacatggaaaacacaggtttattattaaatgcagccacataggtagac

SEQ ID NO: 63533 - DNA, 1011 bp, Glycine max
  Clone ID: PAT_MRT3847_28383C.1
cttcaacttccaacacccactagactggcacattctctcaactctctcaataagctttctctcatgctcatggcctctaccactacctttatctctctctcttcctagttcattcattctcctctctcaaaaacataaacatcagcacttctctcttttgaatattcctcaattttatagctacctagctacctagctacctagctaagctatacttggttttctttaatttctctgacaaatattccaacttcttttctatataggctctagtagcttagtagttatctttcagttaccttgaacaaatcaacagcaaaatatatttctgacacactcatcagagaccattttaaatttaattaacaacaaacaatgtctagcagaagatctcgttcgagacaatcgggtgtttccactgagatcactgatgctcagatcactgatctcatctcaaagttacaacaactgatccctgagctacgcgcaagacgttctgacaaggtttcagcttccaaggtgttgcaagagacttgcaactacatcaaaagcttgcacagagaggttgatgatctaagtgaccggttgtcacaacttttggccaccaccgactccaacagtgcccaagcagccattattaggagcttacttatgtaatatataataatattctaataattactattaattatagagctttaattttatgtgtcgtttgcatgtccatgttaattttttttattgtcatgatatcctctattctgggtagggtttggtttttaagaccaaagcaaaaaggccaccgtgggctccatgttctcccttacttagttttatcagacactttatattattgactatcatcaaattgtattactaaaataaaatgaccttgcatcttgatgatcgagtctttagtttgaatgtaaagtcatatatattaatgtgtataaatatatatacatgaatctgtgcccgagtagaacatatatgacatatatttatattttc

SEQ ID NO: 63534 - DNA, 424 bp, Glycine max
  Clone ID: PAT_MRT3847_28384C.1
cgcaaccacaaacattgatctggccgtcaagccttcgcgttaatgcttggtacatcgtggcggattttgtgctctttagtggtggttgggtgtgagttgagcaccacaagatgcactgagatttgaatgtgctcgagtcaaatttgctcgttagtgaggtgtcatggcgatgactgagagcccacgacagcgatgacggctcatgccttctctcaacccattttttttccttcaaatgagaaaatctattgcttactttttcttttttcagtttctattttgatgtttcttgttttttgtttttatccttataatgaagttggaaacttgtttaaatttttcttcgccattagatattcttcatttcttttagtatagatacttttatcattgatgttaaagtaaaataaaagtaatttttgaa

SEQ ID NO: 63535 - DNA, 592 bp, Glycine max
  Clone ID: PAT_MRT3847_28385C.1
gaaaaacaaaaaatcaacgaatggcacttacggggggtaagcaacgaacgccaagagacttgggtggaggagtaatctcgaccactttgtagggaaggatgctacctcgttctctgtctctgtctctcttcctactgcacgaaacctcaaacgacatcgtctgctaaaagagagcgaaaacgagattaactaatgaagaatcatggaaaagatagaaaagtgggtgagtgcggtaccttctggcatgaagcgagacccatgttccacgacgccattacaattagcttctcttctcttcaattctcgtcacgcaaaatggcaacagcaaagccagaaaaaactccggattttttttgtggtgggacacgagtcacagggcgaggcctaagccaaaaaaggagactacacagataatcctgggagtagcagactcccaaactatgagcaagaagcagtagcctaagagaggctggcctctgctaagattctccaccattctgcaggcttgatgagcaagcacatccacacaatgattagcttcgctataaatgtgagagatgcttatattgtcatgttgaataattaaattcct

SEQ ID NO: 63536 - DNA, 265 bp, Glycine max
  Clone ID: PAT_MRT3847_28386C.1
cgcaccaaagagatcaactttgacttttccgtctatggctcacaacggcggaagattaccttgcatgctggtgtggccaccatatcgggtgaagaagtttgagactgattcctacctgccataccttgatgatgcacagctggcacatgaagtgtaatacgttcatacgaagggatggatagcatgcttggaatacgagtatgagcacggtgacgggtaccgtgagcacaacaggtcatcaggatactacgatggactctactgg

SEQ ID NO: 63537 - DNA, 501 bp, Glycine max
  Clone ID: PAT_MRT3847_28387C.1
gtgcggcgctcgaggcggccggttccgagctttttatttgcacgatacgatatcctttctcaatttcatgttaccctctttcattttcgatcttcataatcaaagtaaattatcgcaaccacaaacattgatctggccgtcaagccttcgcgataaagcttggtacatcgtggcggattttgtgctctttagtggtggttgggtgtgagttgagcaccacaagatgcactggtgggtcaaagagcatgcaaccctattcccttaatttcttgagatttgaatgcgctcgagtcaaatttgctcgttagtgaggtgtcatggcgatgactgagagcccacgacagcgatgacggctcatgccttctctcaacccattttttttccttcaaatgagaaaatctattgcttactttttcttttttcagtttctattttgatgtttcttgttttttgtttttatccttataatgaagttggaaacttgtctaaaaaaaaacgaaa

SEQ ID NO: 63538 - DNA, 144 bp, Glycine max
  unsure (1)..(144): unsure at all n locations
  Clone ID: PAT_MRT3847_28388C.1
tcaaatcgcaatgcgtaaaaccataacaacagaaagggtgatacatnacattaaattctgcctccccagaaaaggatgtcgttcgaggtggaggaggaggaggtggcgttcgagcacacgctctatgcggtgcactaggcgctg

SEQ ID NO: 63539 - DNA, 519 bp, Glycine max
  Clone ID: PAT_MRT3847_28389C.1
accctccagccggccgggaatccccactttgcatagataaagataactcaaacaagcgattatgtataagtgaacatgacagctcaaagagtacttactttcaagtactttgtttatttattctaattgcaagatgtttccgaacttctattttcatatattgaatggattaacttggatatgacaatcttccccaaaactgagacaattgaactcaaaaccttactcttatatccttgttaatttacatgcttaactataccgaatggtgtacacagggttggtcctaagatttcataggctcaaggaaaaaaaataagttggacctgtatttaaaatataattaaatattctataaaaaaataaacccgtagttttattaaaaattaatggtttgttatatttaatgaatagtatagttttaataaatctcaaaataatatatcacattttattcaatttactcttaattattggggatcattcaatttgttccggggtggggggctgggggggggg

SEQ ID NO: 63540 - DNA, 510 bp, Glycine max
  Clone ID: PAT_MRT3847_2838C.1
cgagaagaccgccgagccgggcccgcccgtgccattcattcagcaacagcgatatgccgccacagaagggggtggtgaagaaggcatggagcagtggtggatgtggtcgggtaggagcactagagatgggaagctgcccgggacccatagagacacccgctcttctcctatctactcgtaaagggcttcctcactttatctcccctgacctactcacttctctcccttcccccgattcccatctccttcaaatttctccactccactttttggaaggacttgcttcaaccactatatcaaaattaggagggcttcaccaaatgcttggtttgcaccaatatggaatggcggctgtagccagggattccattcaatgccttcctgagtctaagggagctaccaaactcggagcctcttttgaaactccttgtggtcgtctgttgattaaacccaaagattatgttgaaatgatttcatgcatgaggcctaatatatgggccactttggctg

SEQ ID NO: 63541 - DNA, 243 bp, Glycine max
  Clone ID: PAT_MRT3847_28390C.1
tctgatggtatggagaagagatgacactgattccgggaaccattgttgaagaggctcacatcaagctaatagttgaacttgagaaaagtgtccctacattgattggcaatgaatgccctaatgatgagaaacttcttcgttgcataacttttgacagacctaagactctctgcttcactatttatcctatggagtctaatacagtggtactgtaaaaagtctttaaatttcgtgaggttcata

SEQ ID NO: 63542 - DNA, 2542 bp, Glycine max
  Clone ID: PAT_MRT3847_28391C.1
ccacgcgtccgctggattatagttgatggttgtcataaattcatgttgggggttgtgaggcctcatctgttagtcggtttcttttgaaatttgacccccccctcccccctttggatcgttgtttcatgctgtactagttagtggttaccatttggccactcttagaggtactttttgttaaactttgtctgattttgttatcagttagtttggaagagaccatagaaaagaatctgcttgtggggtggtttgatatatcacttgttaaggaggggtggatatgggtgacaaagaaaagtttgagttggatagaaacgaggatcctatgagttattctagtggaatgcactcggattggagatttgggggtgcaaatattgcaagttcttctgtagctatggttggcctggggaattctatgaatgtcagcagaggggatttgattggttcttcttcatgttcctctgcttcaatggtggactcatttggtccaaactactgggaaaaccccaccagctcccaaaacttgggattttgtgacattaataatgtccacaacaatgggggttcttcaagcacagttgcaatcagaaaagatggatttggatttggaagagttggtcaggatcatcatggaacacttgaaatgggttggaatcatgctaattctatgttaccaaatggaccagtgatgtttccccacagtttatctcagtttccaactgattctggattcattgagagagctgcaaggttctcgtgcttcagtggagggaattttggtgacatggtaaactcatatgggattgctcaatccatggggctgtatggagcaagagatgctattgcaggccatgggatgaaatcagtaactggagggcaatctcagggaggtgatatgaatgtagttgaagctacaaaggatgtgtctccatctgttgaacatcttgttgctgctaaaggaagccctctcaagagtgatagaagaagtgaaggccatgttatatcccaagatgaagggaagcaatctcttgttaggcccgctaatgagtctgatagagctgaatctagtgatgatggtggtggtcaggatgactccccaatgttggaaggtactagtggggaaccttctagcaaaggactaaacacaaagaaaaggaaaagaagtggacaggatggtgataatgataaagccaatggagctcaagaactacctagtgaaggtgcagaggacagctataagaaagagtatgtccccaaactcatctgatattcttcaaagaaccatccatccacagttagctcccttgaatggtggattcaaggaaccaaatcagctgcctgatgtatgggaggatgagcttcacaatgttgtacagatgagctttgcaacaacggctcccccaactagccaagatgttgatggtactgggccagcaagtcagatgaaagttgaactttgatgtttagtcttcatacattaatcttcaccacagcacgtattttggctttcattctcgtcaaatggaaataaccaagcttagagttttacacatgacttgtcaaatttgaaggccatggtctcaaatctcaattccctgcaatatattttagatgagatactactgagtaatattctggtgtttaggccttggagggcagtcacatatccttgcagaggactgactctcggttagagaatgtagagcagtattcatgaatgtttccttttttttaaaagcgtgaatatccgtcacagtacctatacatctgcagttagatcccatgaatggtggattaaaggaacctaaatcagctgactgatgtatgggaggatgatcttcacaatgttgtacagatgagctttgcaacaacagctccccttactagccaagattttgatggtactgggccagcaagtcagatgaaagttgaactttgatctttagtcttcatacattaatctttgccacatcgagtattttggctttcattctcgtcagatggaaataaccaagcttagagttttacacatgagttgccaaacttgaaggccatggtctcaattccctgcgaaatatgttttagatgatgtactaccgagtaaggttttggtgtttaggccttggagggcagtcacatatccttgcagaagactaactctaggttagaggatgtagagcagtattcatggatgtttccttccttttcaagcgtgaatatatgtatcatatgtttagaagtggaagtctattttatcaaaataggtttattcactaaatatattattaaagaatgtaaagacaaggatctcactgagtctgatcaaccaggagaaatgctaaagcaaattttttagttggacttagtatagtttacaattacaaagtgctatgagaacctgttcatggttttgatttgatgcttgctaggtgcttgcttgcacatattgtaatgtttttctgcccaacaattagctatgttgcattctttcatggaacaagttgggattttagatgataccaagggagctttttgttca

SEQ ID NO: 63543 - DNA, 453 bp, Glycine max
  Clone ID: PAT_MRT3847_28392C.1
aattcggctcgagcggctgcgagaagacgacagaagggtcccaacgttaaaatgtgttcattaagtgctgatatgacaaatgaatgttcacagtagcacgacacatgacagtcacttgacatggatgccacatggaggtgtgacatgacaccccaagaaagtgtcatgtcttagccttatgggtgtgtcacatgtcactttcatgtggtaccacgtagcacaatgtttttactatcatttttagtcctttcaaaattttgaaattcgaattttagtttcaagtaaaattttcattcctcattttagttctttaaaaaaattaaattctagtttttggtccttaattaatttgttgtctaaatttagtcatttttaggttctcttcttcatcaacattagaatttaaatatttgcccaccaaaactaaaagctcagttgataaaaataagccta

SEQ ID NO: 63544 - DNA, 271 bp, Glycine max
  unsure (1)..(271): unsure at all n locations
  Clone ID: PAT_MRT3847_28393C.1
gtcagagancntaatggnggaagaggnngntctgggaggttngngggtatgttgtggtttacgctgaaacngtgnanaggtattnataggattgangncgtatncgttttcggaggagaagganctcatgtgcatgttggaaggttgataattatttgatttcatggngancggatangcncaggtngtttgagaagatnttggatntaaacttgcaatngcggangacgggttntnnatgaganggatgtgaagttattggctggctgca

SEQ ID NO: 63545 - DNA, 415 bp, Glycine max
  unsure (1)..(415): unsure at all n locations
  Clone ID: PAT_MRT3847_28394C.1
cccccctctctctctttttttccctttttgggagctagtgttacggattacttcactaaactatgtcgtgaaaaatacatgtaaagattcaagcatgataggtcatcgttggataattgaaattctaaatcatcatccaatgcgttgttatcaaatatttagaatgaaaaaaattttgtttttttgaatcaagtgacatattgcaaagcaagtacaacttgaagccaactcaaaaatgtaggaattcatgagcaagtcagcttgttttatgaaatgagctaggcaagagatgacatattttgagcttcatttgagctctttttggatttgggctttgatttcttntcccgctttttgccctcgncatgaaaactatgaccccaacaagacttcagntttctgttgaaatacttca

SEQ ID NO: 63546 - DNA, 4857 bp, Glycine max
  Clone ID: PAT_MRT3847_28395C.1
atgggaacaaatcaaaccggcaagaggttctaccaagtcaaggttaaaagcttagataccaccagcatcaaggaattagggcggttgatggaacctctccaaatgcaagctttccgcaagacttacggaaagatcttagagttgaccttagcagaggtatccatagaagccattgcatcactcacccaatactacgaccagcctttgagatgcttcacattcggagacttccaattagtaccaaccattgaagaatttgaggaacttctaggatgtcctctcgggggaagaaagccatatctttcatccgggtgtctcccctctttgagcagaattgcaactgtggtcaaggattcaacaagaggtttggaccgcataaaacagactcggaacggcatagcgggcctaccacggaggtacctagaagacaaggcgaggggtatggccaatcaaggagattgggtcccgtttatggatgtgttagctttgctaatttttggggtcgtcctctttccaaacgtggatggtttggtggacctagcagcaatcgacgttttccttgcctaccaccatagcaaggaaagtccggtggtagctgtcttggcagatctatttgacacatttgaccgaaggtgcgaaaagagtagcgcacggatcatctgttgcttgcccgccctctgtgtttggttggtttcgcacttgttccaacaagacacaagacatccatgtccgctcctgagccattgctcgtgtactgaaaagaggagaatagattgggaccagcttttggccgggataggaggtagaacaatcagttggttcccccgatggaaggaaggaaaagaaggagtccttttctcatgtggaggatacccaaacattccgctggtaggaacgaggggttgtattaactacaatcccgcgctcgctataacacaactagggtaccccatgaggggagcaccgacggaagaaggcatatctcctttccttgtgagggatttcggcgcacaaaattccaagactatacaaagaatccataaggcatgggaaaccccgttaaggaaagatcaagaacttagaggcattcgtaatggcatcattggtggctaccatgaatggctgaaagttcatatacgaggtttagattggctcgccaagttaaaagtcatcagcgaagagagttttgaagcaccggaagaggacgaagaagtccaagctctcaaaagcgagttaggaaaggcgaaatttgccaaggagaagttcaagttggccgcaacacacattcggaaggagtgtgccgggttacgggaagagaatgcaattaccgtaagagcccttgaacaagagaccaagagggctcgcaaggaagagtatggccggaataaatttcgcggagctctatggggtagcaatagtgaactcaagctgcgaagggaagagagggaccagtcgcgagcacatagcatggttctaaaagaggagttagttgcttgttcaaggtccaaaagaagcttgtctcagtgtttatgcaagacggacaccaacatgctagctatcatcgccaagtaccaagaagagttaggtctagccacggcccacgagcatagaatcgcggacgagtatgctcaagtatacgcggaaaaagaggctagaggaagggtgatcgactctttgcaccaagaggcaaccatgtggatggatcggtttgctcttaccttgaacgggagtcaagaacttccccgcttgttagccaaggccaaggcgatggcagacacctactccgcccccgaagagattcatgggcttctcggctattgccatgttaagtatgaagcagctcatagagaagaacgcgaccaccgctgccgctgtcagttcggctgccgaagcagacccgactctcttggcaactgcgcaccatcctccctcaaacatagtaggacggggaagggacacactggggcacgatggcatccctcacctgggataccaaccgagcggcttacccttatggattgccgcccaactactcaccacccgtcttgcaagaagatgcgggccacattgcttctcccgtccttgaaagagagcctcctcaacagcccgacgaaggatgtcgagttctatcccccgatccccgaagggccggcaccaggcacgttgcctcaacccaacatcgcggcaccaccaatagttttgtccacggaaggaccgcccccagcaactgaagaaaggaggaagctcgatctccttgaggaaagattgagggtcgtggaaggattcggggattatccgttcgcagacatgacggatctttgcttagtacccgatgttgttattcccccgaagttcaaagtgccggacttcgaaaagtataaagggacgacttgtcccaaaaaccatctcaacatgtactgccgtaacatgggcgcccactctaaggatgagaagctattaatacatttctttcaagatagcttggccggagccgcggtagtgtggtacactaatttggaagcttcccgtatccgtacttggaaggatctgattactgccttcctaaggcagtatcagtacaattctgatatggctcccgaccgcactcaactgcagaatatgttcaagaaagagggtgaaacctttaaggaatatgcgcagcggtggagggatttggcggcacaacctaaggcacccacccagagggaagctccccaaattccaactccgaacacgactcgaccggccggtaattccaacacgacaaggaacttccctccgaggccatttccggaattcaccccactcccaatgacgtacgaagatcttttgccatccctcatcgccaatcatttgaccgtggtaactcccggaagggtcctcgaaccccctttcccgaagtggtatgaccctaacgcaacctgcaagtaccatgggggtgtcccggggcattccgttgaaaaaggcttggcccttaaatacaaggtccaacatttaatggatgctggatggctgactttccaagaggatcggcccaatgtgagaaccaacccgctcgccaatcatggagggggagcggttaatgccgttgagtccgataggccgcacaggtctaaacctttaagggatgtggcaacccctaggaggtttatctttgaggccctacaaaaaggaggtgtgattccccatagtgggtgtaaggaggattcctgtttgctacattccggcgagctgcatgacatggagacgtgtttgggagtagaggagttgttacagcggatgatagatcaaggtcgactggaagttggcagtgaaggaaaagaagagcagcatatatgcatgcagtccacggatgggagcagtgttgcgaagcccaaacccttggtgatatacttcaccaaaagcgcagcttcgcaaaagcccggacaccccttagtagccaaacctgttcctttcccataccaaagtagccacgcagtaccatggagatatacacctccgagggagaaggaagaagaagccaccgatgtcagctcgttgtcagctaaaggaaaaggaaaagtggtggaggaacaagatggcgaagcaccccacgcttcgaataaagatatcccggcaaagggcctcccggagaaaaaggatggtaaaaaggaggtgtcgctagaggaagccagcgagttcctccggataattcagcagagcgaattcgaggttatcgaacagctcaacaaaaccccggccagggtctcactgttggagttacttatgagctccgagcctcatcgggctctgctagtaaaagttctgaacgaggcccatgtggcccaagatatctcggtagaaggtttcggagggctggtcaacaatatcactgccaacaactatcttgccttcgccgaagaagaaatccccgccgaggggagagggcataataaggctttacacgtatcagtcaagtgtatggaccatatcgtagccaaggtgctcatcgataatggttccagtttaaacgtgatgcctaaaagcactttggagaagttaccattcaatgcttcccacttaaagccgagttcaatggtggttcgtgccttcgacggcactcgccaagaggttaggggagagatcgatctcccagtacaaataggccctcacacctgtcaagtcaccttccaaataatggatattaaccccccttacagctgtctgttggggcgcccgtggatccactcagtgggagttgtgccctctacactccaccaaaagttgaaattcgtagtggaggggcacttggtcatagtgtcaggcgaggaagacatcttggtaagctgcccatcctctatgccttatgtggaagccgcagaagaatcgttagaaaccgctttccagtcttttgaggtggtcagcatttcctccgtggactccttctctgggcagccttgtctgtccgatgcagcagtaatgatggcccgagttatgttggggaacggttatgaacccggaatgggtttaggcaaagacaacggcggcataactagcctgataaatgcccaaggaaatcgtgggaagtatggtttaggctataagcccactcaggcggacatgaaaagaagcatcgcgggaaggaagagcagtggtcaaagctcgcgttggagacaagaaagtgaaggaagcccgccctgccacataagtagaagctttataagcgcgggtctgggagacaaaggtcaagtggtcgcgatatacgaagatgatgttccgagtacattagatttggtacgaccatgccctcctgatttccagctgggaaattggcaagtggagaaacgccccggaatttacgcaacgagcataatgtaa

SEQ ID NO: 63547 - DNA, 707 bp, Glycine max
  Clone ID: PAT_MRT3847_28396C.1
gccatgtacgttgctatccaggctgtgctatccctgtacgcctctggccgtaccactggcatcgtgatggactccggtgacggggtcacccacactgtgcccatctacgaggggtatgccctcccccatgccatcctgcgtctggacctggctggccgggacctgactgactacctcatgaagatcctcaccgagcgcggctacagcttcaccaccacggccgagcgggaaatcgtgcgtgacattaaggagaagctgtgctacgtcgccctggacttcgagcaagagatggccacggctgcttccagctcctccctggagaagagctacgagctgcctgacggccaggtcatcaccattggcaatgagcggttccgctgccctgaggcactcttccagccttccttcctgggcatggagtcctgtggcatccacgaaactaccttcaactccatcatgaagtgtgacgtggacatccgcaaagacctgtacgccaacacagtgctgtctggcggcaccaccatgtaccctggcattgccgacaggatgcagaaggagatcactgccctggcacccagcacaatgaagatcaagatcattgctcctcctgagcgcaagtactccgtgtggatcggcggctccatcctggcctcgctgtccaccttccagcagaatgtggatcagcaaagcagagtatgacgagtccg

SEQ ID NO: 63548 - DNA, 398 bp, Glycine max
  unsure (1)..(398): unsure at all n locations
  Clone ID: PAT_MRT3847_28397C.1
ggaattcggcacgaggcttacatatgcaaagaggctgtttccggtgaccatctgatccatctcatgataaattttctaagcctgctcctacgagcattctcatgcaccaagagagaattggattgacatcatctggtaagggaaatctgttgagcaatgaagaatgtactagtagaattctggtttgttttttgtttctattttggttgctcgttggtgaattagcgtattggtaatatatagattatagtaattcgttgacaccaccggtagacgttggtcacagatgcattattgttgacagtaataagtaataaccatatcagcctattggttgttttttatgttnaaaaaaaaaaaaaaaaaaaaaaaaaaaaaaaaaaaaaaaaaaaaaaaaa

SEQ ID NO: 63549 - DNA, 261 bp, Glycine max
  Clone ID: PAT_MRT3847_28398C.1
acacctaatgaatttcttattccttgcaagggccttcacaaacacttgcacaatattattaattcattaatattactgtacaagtttcttactcttaaatgatcttataactgtgtattatataagcatcaaatgtaatcatcatattgaacatcctactatctctctaaaatcatatttttcattactttttaacacatccaaatatactaatttttgacattatcatatgccattgttaaaattcttacaattcaacac

SEQ ID NO: 63550 - DNA, 512 bp, Glycine max
  Clone ID: PAT_MRT3847_28399C.1
ggaaaaagccaaaatatcgggcaaacccaaaaaaggcggcattggcacaaagtctacaaaaccggggaaactaacagcaaacaaatttgttccccatttggaattggaatttgaatacaaatcccgggcataaataatataaccctttggccccagccaatatctgactgaaatttgaaacaaaaaagtatcaatttggatcaaaaaaaaagggcccaaaaaaatttatgtgaaggtaaaggggaagggtatcacctggggtttaaaatcttcggctttaattaacttaaaaatgggctccttcctgcacgttcacatttcctttatctgctaaagcactggtgaccttgtttttacccccaaaggtccaagggggtttaaccggagtacccccaaatgccttcactccaaaggggttgttcttgcttttgaaacaagttccaacataagggttgcaaatgggatagtcgttagggcaacaactgtaggggtcatcacagcagggagccccc

SEQ ID NO: 63551 - DNA, 551 bp, Glycine max
  unsure (1)..(551): unsure at all n locations
  Clone ID: PAT_MRT3847_2839C.1
gggcccccggggggttttttttttttttcccacgggggnaattcccccgatttccccattcttcccggggggggggatcccccacaggttgggggcccccccctccccccctttcttttttgggtttccaccttctggggccccggggggctttaccggggatttttttccccttttttcccccggctaactttaggggttggggcccccttggttccccaaacaaggggggggggtttttgggtttcagggggaaaaacggggggggtcccgaagaccctgggtttaattctcccctttcccccccggccaaaggggggggcctttttggggtgcccccccgccccccgaggggtttccccccccgggggtttatgcccggggattttgttttgccgcaggcttttgggggggggtttttgaacccccccgagccccgaaggtggtctttgcggcgntttccccggcgaggggggggggccccccctccccccccccaaaggggggtggcctttaaaagggggttggccctttgggggggggggggcccc

SEQ ID NO: 63552 - DNA, 253 bp, Glycine max
  Clone ID: PAT_MRT3847_283C.1
ggacgcgtacgtaatgcaacgacaacacgacagaaagggacagctacgacagctaaaaaacatgagtttggatgagctgcatagaggtgctaatggtgtatatgatgcttcatttccatgtatgggtttgaggagcagacatcgaagtgaactgcgtcattggtgcttagtcaccatgtgagggttacaactactagcatggaacagaccgtcatcactgcttgtgaatcagcacattagcaccacaatgcat

SEQ ID NO: 63553 - DNA, 564 bp, Glycine max
  Clone ID: PAT_MRT3847_28400C.1
ggccggcctataaaaggaatttagggataaggactgtctctaccggtgccgtatttggcgatcggcgacactaccttattattgaccgttcgaaagaaaccggatctatacatgcccctgaccgtaacgctctagggttcccttaaatgatcgaccaaccgcgaagatgatgacttaggacctatgaacctaccttaggaataactaccgagaacctctatgcttagggcaatagaagcgcagaccttagtgaagacatgggatctgagaagattctagactgacactccgatgatgaatcgcggatactacacggtttggcctaatccccctactctggaccctaacatgatgtttgccacccctatgagaccgcacttctggtgcaactggcaggggaccaacgttactgactaacgcaggggccctattagaatggctctaccctttccctgaggaatctctactcttaaacttcccaacaggggagcctggggcaaccaaaccccaatgctgcgcgaggggcaataagctagtcgcttataagcgcgtacgtgctatcct

SEQ ID NO: 63554 - DNA, 562 bp, Glycine max
  unsure (1)..(562): unsure at all n locations
  Clone ID: PAT_MRT3847_28401C.1
cccacgcgtccgacggctgcgagaagacgacagaaggggacaaccctaagaccctacgtcatggcaagcgatctattgagccttccctactgcttgtctaccacacaaattccacctagatcacatattagacatagaataagtactctttccaatgacaaatttctcaatagatctttgcaacaactcaactgtgccgagagcaaacaagatatccagttaactcaaaatggaaataggtgttcatctaactgagctaagcacgcgcccaatctttggacccatgaaattgtccagtccctggaaaatcatctagcggtaataacttcatatttcatttttcttttagtttagtgtagaacttgtgcagcaaggccaataacctaggcagatatatgatgtgaaaaatgtaatgtgtaagaattagtgtgtttggtaactcaccgcgtttaacttgatccacgtctcatagaaagctacattagtntgttctgcgtattttcttctttttgatgtagnntttaatgttaacacatgcctatangatgtgaaagcaaaacac

SEQ ID NO: 63555 - DNA, 771 bp, Glycine max
  unsure (1)..(771): unsure at all n locations
  Clone ID: PAT_MRT3847_28402C.1
gtgaagacacgtaagaagtccaagaagctctccaccggcgccattgttgcaatcgttgtggggtccgttcttggcttggcgttgttgctgctgctgctgttgctgtgtctccggcggcggcgaagacagcccgcgaagccgccgaaggcggtggtggaggagcatagcgtgccggcggaggcggggacgtcgtcgtcgaaggatgatatcaccgggggttcggcggaggtggagaggaacaagcttgtgttcttcgaagggggaatttacagtttcgatttggaggatttgttgagggcttcggcggaggtgttggggaagggtagcgtggggacttcgtataaggcggtgctggaggaaggaaccaccgtggtggtgaagaggctgaaggatgttgtggtgacgaagaaagagttcgagacgcaaatggaggttctggggaagattaagcacgagaatgtggttcctctcagagccttttacttctccaaggacgagaaattgctcgtttacgattacatgtccgctgggagcctgtctgcgctgctacacgggagcagagggtctgggcgaacaccactggactgggacagccgtatgaaaatagccctaggagccgcaagagggcttacatgcctncacgtggcaggcaaggtggtccacggcaacatcaaatcttcaacattctcctccgagggccggaccacaatgccggcgtttctgacttcggcctcaaccccttgttcggaaacggagccccgtcgaaccgcg

SEQ ID NO: 63556 - DNA, 461 bp, Glycine max
  Clone ID: PAT_MRT3847_28403C.1
atttcgtgaggttagggttttctcaccccctttcttccttcactgattctcgagatacgagagaatccagcttccttaatgatttcgtcttgtcggttgcactcgccactggaccgtacaatgcttctcgggatttgactttgagtatataatcccaacgcttgctgtgctgccttttgcttttcgtattatggcttcttgtgcttgacgcccaaatatcaaataggatcgaaaggcgttagagattgggtcctctctcaactactatccaaatcactggtctcgccttcaccattatctgccagcaatagtctctatgctggagaacatcagaatggagatgttactgagcaaggttcatatcactcatctagcccagcatcatcactcattccttttgactcatcaatctctccataccgtgatcagattaatcaggttacccccctcttgcatctagt

SEQ ID NO: 63557 - DNA, 352 bp, Glycine max
  Clone ID: PAT_MRT3847_28404C.1
cgatcctgtggattctattcttcaagatacacacggctcgtacgaagcgcaccgctcgtaagtgcacaagaggaaaggcttctctgaagcagcttgcaaccaaaggtgaacgtaagtctgtaccaactactgttggcgtgaaaaacccccaccgttatcaaactggtaccgctgctcttagtgagattaagaaataccagaagagtaccgagcttttgatccacaagctgcccttacagaggatgaaccgtgaaattgctcatgactttaagactgatatgcttttccagagccaccccacgcttgcatttcaagaagctgatgaggcataccttattaggctctttgatga

SEQ ID NO: 63558 - DNA, 388 bp, Glycine max
  Clone ID: PAT_MRT3847_28405C.1
accacgcgtgcgagatgctcaagctctattcttaaccattggcaaactgctgatcagtgggcgatagattcttagccacgctgcgcttgcaattcattatgatactgggatcaactgcgcactgtctcaggaccagatattaatccagtccgtgcaaggatgactgaatgttattacatgtgtggacgcgacttctgtgaagatgacagagagttcagacagactgaaccttgatatgcacatctgactcatttctgcatgagaactgctcattgtaatgtcccgtacatggaattagactgatatttaggaaccccatttcgtattaaaactctggtggatgtgccgagactctagctggatgtacattctatggttatgcgaggca

SEQ ID NO: 63559 - DNA, 541 bp, Glycine max
  Clone ID: PAT_MRT3847_28406C.1
gtgtagctgtgcacagctcttttttttttctttttctttttcgaacttgtttctttcgtttgcttctttcttctttttcgtgtcgagttgctgaaaagaatatgctaaaagacaagtcctcttgttaccgcagtttacttttttccctttaacacttaattattaggtggtgaatccgaggacaagaaaaagacactcaaaatgtgattcagttttattttttttctacccttgtctgtgatgtttttctatccctgagttatgatttaaagagtaccgtgcaagtttttctgattgtccttattaatggcttgatttttctgtttccaaaacattggttcctttctcacatgcttggtgtggtcttgtctgggtttcgatttgagtacaactttttgataagcaaaggggatatttgtcctccttggttgacattggcctgtttgcattgagtacttgtagggagtacgtaataagaaggttaattgaattaagtgagaggttaaatgggagaacttctataaaagttgaagtgcataag

SEQ ID NO: 63560 - DNA, 443 bp, Glycine max
  Clone ID: PAT_MRT3847_28407C.1
cgctcttgatgcccttctcatcaacgagtactcgtgtttggtgtcacggtgtttgatatggtaccaagagaatgaacagtgcatggtgactggtggtgacgtgttgcagaagagagggctcaaggagagtgaaaggtggaccaacgtgtacttcttgctcgggttctttctgctgtatcgtgtgctttgcttcttggttttggctagaagggtttcaagatcgaaaacttaatagacaccgagaaattatatatggtgataaaacgctgataactttaagcgttgtagtattttagctttcatatattttttttctatcatcctattgcatgtatgaactcgttttgttttatttgatttctatataaagtatataatgtgaaatacagccacagaaaaagtttgttttatagatattaagtggaccttttcgttctcaaaaa

SEQ ID NO: 63561 - DNA, 323 bp, Glycine max
  unsure (1)..(323): unsure at all n locations
  Clone ID: PAT_MRT3847_28408C.1
ancttgggggtttttttaaaattttccttttttcccaacctcgcaaaaacctcattctgcctctgacttcccaaaacggaatttcttttccacttcatttaactctataatcttacatcgaaaagggccattgggaacgatgtttcacaaagccagaaataaaaggggagatttttaagggtgggactcgactaaccaatgcttacaactttaaggattagataagacttcaataaccccaaaaccacccgcatggatacttcctcccctgcccacaaatgcctcaatcctttacagtaaacaccacaaaaaccttcctcaat

SEQ ID NO: 63562 - DNA, 236 bp, Glycine max
  Clone ID: PAT_MRT3847_28409C.1
cccacgcgtccgcaagctaggatgataatagtttgggcctggagcaagagaggcggggggcggaaaaggggaagagggggcggggaactatcgatgactccctagggggtgcctctcataaggcgtaagtggcagagcgccatgcaaccctgatgctcgaggacgctgggggtggttcagccatcgcggacaacgagcttacaaaagatgcaggcgtggacccaacggggcggggg

SEQ ID NO: 63563 - DNA, 665 bp, Glycine max
  Clone ID: PAT_MRT3847_2840C.1
tcgagctcggtacccccgaggaattccgatctcatttcctttggcttcaggataggcctaatatgaatacaagtaattccaattcatatatgaacatttttgcctccgtatttcttgaaaatgtggaattggaattccccgatgaataccgatctcatttcctttggcttcaggataggtcctaataagaaaacaaataattccaattcatatatgaacatttttgcctccttatttcttgaaaatgtggaattggaattccccgaggaattccgatctcatttcctttggcttcagaatgggcctattagaaaaccaattatttccatttattttttaaccatttttgcctcctaattcttgaaaaagggggattgggaatcccccaggaaattccaacttattttctttgggttcaaggataggcctattagaaaaccaattatttccaattattttttaaccattttggcctcctaattcttggaaaaggggaattggaatttccccaaggggatcctttaaagccaacctgaaggcttccaacctggcttttcctttaaggaagggtaacttgggacttgcccgaggtttacaaccgccagaccgggaaaacccttgcctttcccaacttaattgccttgccacacaatccccttttggca

SEQ ID NO: 63564 - DNA, 1893 bp, Glycine max
  Clone ID: PAT_MRT3847_28410C.1
gcgagcggctcgagtacggctgcgagaagacgacagaaggggtgatgatgcaagaaagaaacaaagagaagggaaatatcaggagctagtgctaggtgcgagtactggagcaaaacgcgggtagtgtgtgactttcgttggagagagatgcagttccattcagaaactccaaacaaacatccctcgcgacaaccttaggaatctcgatcgccgaaaaaacctatgcagccccgaacacacacactctgcattccaacttgtttaaatcatgcctctcgattcacccttctctctcaataaatcttttggcctatgaaatcagattcttcgccaccgccacagtcataataaagttttatttttccaaataaagggaatggcgactcctgttgagcctcctaacgggatcagaactgaagggaagcattattattccatgtggcaaaccctgtttgagtttgattcaaaatacgtgcccatcaagccaattggccgcggagcatatgggattgtgtgctcttctgtgaatagagagacaaatgagaaggtttccgtcaagaaagaacagaatgactttgttgacatcattaagatacagaatgcctttgaaaaccgcgttgatgccctgaggactttgcgcgaaaatcaagcttcttcgccaccttcaccatgagaatgtgattgctttgtaggacatcatgatgcctagttcacaagaatagggacacggatttgcatcagattattaagtcttctcaagctttgtctaatgatcactgccagtatttcctctttcagttgctccgtggcttgaaatatcttcactcagctaacattcttcatcgtgacttgaaacctgggaatcttctaatcaatgcaaattgtgacctaaaaatatgcgattttgggttagcacgtactaactgcagcaagaaccagttcatgaccgagtatgttgtcactcggtggtatagggcaccagagctcctactctgctgtgacaactatgggacatctattgatgtttggtcagttggatgtatctttgcagagcttcttggccgaaaaccgattttccctggttcagagtgtctcaaccagctgaagttgattatcaatatccttggtagtcaaagggaggaggatattgaattcattgataacccaaaggcaaagaagtatatcaaatcacttccttattctcctggaacccccctttcgcaactttatcctaatgcgcatccattggcaattgatcttctggcaaagatgcttgttttcgatccaacaaagaggatcagtgtcactcaagcacttcaacacccttacatggcccctctgtatgatcctaactgtgaccctccagccgtcattccaattgatcttgacattgatgaggatctaggggaagagatgataagggacatgatgtggaaagaaatgcttcattaccatcctgaatctgctatggagagtgcagggttgtgctaatgatatttacttcctttcatagttatgttcccttttgttggtgccaggatagttctaatatcataacttgcttcaaataattaggagggctttgtcatcagtgagctccttatatgttctgttttctatttattgaaagcagagagaaacagcaaaaagatgaccatcttaaaaaaaaatgtgttattgctgatgatgcattgtagtctttaaacgccatgttgagagattgattttgtactgaactttgtattgtagttgccttgttttgttgtacataattatgtttctgtgtctttcataaaccattttgtaaattaagtctaatgtttatcaataatgtgttattgtttgaactttgaagtacatttattttattttttccctgcaagcggaacattc

SEQ ID NO: 63565 - DNA, 1815 bp, Glycine max
  Clone ID: PAT_MRT3847_28412C.1
aattcggctcgttctataataaggttttgagttctgttagacaaaacaaaagtggagtgatagagtgagagatgcaaagaggatggtccttctacaaggattttctgccagttgtggtgattataggcaatgaattcaatgacatgggtacactcacactcttcaaagcagccacactgcaagggatgaacaaccatgtctttctggcctatgcttatgctcttgctaccattatactcattcctatcacttttttcagcagaaggttaagaattctttattgcaaatcataatcaaacatatatatcttgcatgattttatcaattatcatgcatgttttgtttttcatgtctctttgcagatcaagagtggttcctgttcctccacttagtttctccatagtatccaaaatagttcttcttggggtgataggaagttcatctcaggtactgggttatgcaggcattagctacagttctccagcacttgcttcatcaattggcaatctggtacctgctttcaccttcatccttgccgtaatttgcaggatggaaaagttagctgccaaaagtagaagtagtcaagctaaggtgattggaagcataatatcaatagcaggtgcatttgtattgactttctacaaaggaccatcaatcatcaatgctctcacacatcttcccttactacttcaacagccaattaactttcttaaatcagaggatgaaagttgggctattgctggcattctgctgatagctgactactttctggcttcagtatggtacattgtacaggtggatatcttgaaagtgttcccggatgaactaactacagttttcttttacaatgtgactgccaccatattatctactactgttggtttctttgcagttccaaatgctagtgcttggaaaataggactagatatttcactgatatccattgtttgctctggaatatttgggaagttaatgagcaatgtagtttatgcctgggcactgtatttaaaggggcctgtctatgtaacatccttcaagccactccaaattgttattgctgttgcaatgggtgttatgttccttgatgatagtctttacattggaagtgtagttggagccacaatagtatcaattggtctttatgctgtattgtggggcaaggcaaaagaagagatagaggaagatgttggtagccaagaatcaccaactattgagaatgttcctctattgcaaagccacagaactgaaacatcagaaaagaatgtttaaaagacaagtacaaactcttccacattcttatcatcataaaaaaacataaagaatccattttctaggcatacaacagcatagtacacatacatgactgagggtcaaagctttggattcattgtcccccaagatgatcctgtgctgcttatacctaagttgttgacttgttttcctctaaaataaagcgaatggaagattttcagtatatatgacattggatgggattgcattcagttaaagttctttcttgtctcctttcaccaatgagcaaactaagggtggttatacatagcatgctgttacttgtgatatatacgtactgtacacttgccttagaatggaaccgatactgttctttccacaaacggggagcaacctttcttcaagtgttttatggaaaaaatgacatctttctgtctagctagtagcctgtcagactcaatatgacgatgtatggatacgtatataatatgaatgtaggttaattgttgagaataataatgtatcgtctaagatttaattgtcatgtaattggttggagttcaa

SEQ ID NO: 63566 - DNA, 360 bp, Glycine max
  Clone ID: PAT_MRT3847_28413C.1
ttcggcacgagtctgaagggattctgtgtctagggattccctgtcacatgcttttacaacaattaatttggaccaacttgctttgatgacataaaactcttaacggtcaagatgtttttcttttgaaagatacacctcattgttgcctttgttaaattaatgttcgacccactttgtcgaattgtacaaaatttaagactagtccatttaatatactgaatcttgtaccatgtagcccatttaaatggatattatgctggaatgcttgatgtaaaattgatcctctcaactagtaagagtaaatcctggctattgagttgtccgaaattactaaaaaaaaaaaaaaaaaaaaaaaaaaaa

SEQ ID NO: 63567 - DNA, 454 bp, Glycine max
  Clone ID: PAT_MRT3847_28414C.1
tttttttttttttttttttttttttttttttttttttttttttttttttttttttttttttttttttttttttttttttttttttttaaaagggggtaaaaaaaaccaaaaggggccccaaaaaaaaggccccctttgaaaaaacaagaaaaaaatacctgggcccgcacttcaaagaggtgcaacaaccctggaaaaattttcttaaaaaggaccacagattacccagaaaaagacggggtccacatatacgatttccccgaaaagaggtttaatctcgccaaaacaaacaggcaaatcaacaggaaattttcttaccagaacactttccagggaaaaaagatacccaagaggtccgggaaaaataggtattatcgggcctaacacggtgggaggaccccactgggaatggcgaaacctctcgcgcaatcccagaaccaaacgcaatttgcct

SEQ ID NO: 63568 - DNA, 560 bp, Glycine max
  Clone ID: PAT_MRT3847_28415C.1
gttgtgcaattgcacattgagaagaaagtatgcagtgaagttaatgaatggatggtcgagataaggagttctggtaaaaatattggggaaacagcaattggtcatgctgtgacagttcgtcaaagggacaaggaaatgctagaacagcagaggaaggctgaggagcaaagtatttcaggactaggggatctagcttatactttggaagctgaagaacttgaagaagattcagttttacagtttgatcttacaccactttatcgtgcttgtcatattcatgaccttcagggtatccaagagaagtttcgtgaatattactatactactagctttgttacaattgaattcagacctggaaataacttcagcacaaccttttgttgaatcataccagactttttttgctcaaattgctggattctttatagtggaggatagagtccttagaactacagggggcctcttggtagctgatcaggttgaaacaatgtgggagacagctgtagctaaaatgtcatcactgttggaggagcagttctcttgtatggaatctgcccctc

SEQ ID NO: 63569 - DNA, 136 bp, Glycine max
  Clone ID: PAT_MRT3847_28416C.1
ccagaacctcgcgacaagcgtggctggagacataattggagccaggaccgagcttgcggacgcgacctccacgccgttggagccctacagagaggtgcgtgggctccacatgttccgtgagtgcgagctcatccat

SEQ ID NO: 63570 - DNA, 246 bp, Glycine max
  Clone ID: PAT_MRT3847_28417C.1
ccacgcgtccgattatattatattttactgttttctattgtgagtccgaatttgatttcgaattgcgtaagaatttttaggaaaattaatatagaaggaaaaatgaattctacttcttgcataaattgcatgtatcacaatcgagttagcctgggcttatggaaaggttacatgaggagaagtttgatttactttatccaaattgatgctcataattcttttgttatttaataagttgtgttctgt

SEQ ID NO: 63571 - DNA, 162 bp, Glycine max
  Clone ID: PAT_MRT3847_28418C.1
aagacgacagaagggcagtattcaagtctagtatttctatcgggacttaattatggcattgtcgtttaattttattgcaatttatttaatgtgtactttgtctcaatcacgcgacaattacgaaaacctagctcttagtgaaataattacatgagatccctc

SEQ ID NO: 63572 - DNA, 323 bp, Glycine max
  Clone ID: PAT_MRT3847_28419C.1
ggcccgaattcaaattaaattttgttaatcaggggttgaattttatcaaccagctttaaaattgtttacaatgattaggcacggatgaattgctaaagcatacggatttaaggaaagaaaattcattgaagaaatttcttgtgccatgacacatgaaacctactcatctttaaatatcggtatacaacaccttttggacttaattttaacttatcagacgttcataggcaaaccaccttgttttacattcagcagcagcaccttgctcagctgttgcataaccctgttctgtgggagcatcctgttcgggtgatgactgaact

SEQ ID NO: 63573 - DNA, 884 bp, Glycine max
  Clone ID: PAT_MRT3847_2841C.1
aggtcggctcaacaggatcccctaggggaattcccatttccaattttcaaaaaataaggaggcaaaaatgttcatatatgaattggaatcatttgttttctaattaggcctatccagaagccaaggtaaatgagataggaatccctcggggaattccaattccacattttcaagaaataaggaggcaaaaatgttcatatatgaattggaattatttgttttcttattaggcctatcctgaagccaaaggaaatgagatcggaattcctcggggaattccaattccacattttcaagaaataaggaggcaaaaatgttcatatatgaattggaattatttgttttcttattaggcctatcctgaagccaaaggaaatgagatcggaattcctcggggaattccaattccacattttcaagaaataaggaggcaaaaatgttcatatatgaattggaattatttgttttcttattaggcctatcctgaagccaaaggaaatgagatcggaattcctcggggaattccaattccacattttcaagaaataaggaggcaaaaatgttcatatatgaattggaattatttgttttcttattaggcctatcctgaagccaaaggaaatgagatcggaattcctcgggggattccaattccacattttcaagaaataaggaggcaaaaatgttcatatatgaattggaattatttgttttcttattaggcctatcctgaagccaaaggaaaggaattccaattccacattttcaagaaataaggaggcaaaaatgttcatatatgaattggaattatttgttttcttattaggcctatcctgaagccaaaggaaatgagatcggaattcctcgggggtaccgagctcgaa

SEQ ID NO: 63574 - DNA, 282 bp, Glycine max
  Clone ID: PAT_MRT3847_28420C.1
cttcacagcatttatttattatttttttttctgtccttctctttttattttattctgatctatcttttttttttcctgaactttgtttgtttaacattctcttttttttctatttttttctgggcccttttttcccttgatcatctccttctgaaaaccgaagccaacttcaaacaccaccacatcaatgtcaatattgacatgtttaagtcatacggctcttatctttcttggtagggatgctatgacatacatatgtcgattttttattacatcttttgg

SEQ ID NO: 63575 - DNA, 430 bp, Glycine max
  unsure (1)..(430): unsure at all n locations
  Clone ID: PAT_MRT3847_28421C.1
gggnccccaaaaccccccaaaaggaagaaaacnggttcgcccaggggggcgggcgggggggacaggggacccccgggctggaggaagcggcacgaggcggncaggcccgtgagcgtgncccggcgaccaggtgcccagggcggngnggnccgnatgagcgacccgcngntcatcaaggacagcaagcgggccgncaccagggggggggggggcaangcccgnatcggncactncgnngaggcccagancctcgaggccatngggatcgactacggcgncgagagcgaggnnctnaccctngncggcgacgcccaccacagcagccaacacaacngncggntcccctgngggggggggtgncggancctcggngaggccctccgncgnntncgngagggcgccgncngggnccgncccngggcgaggccgg

SEQ ID NO: 63576 - DNA, 239 bp, Glycine max
  unsure (1)..(239): unsure at all n locations
  Clone ID: PAT_MRT3847_28422C.1
cttgaccaaatcaatgagcccaagaggccctcagacaagccactcaggcttccantgcaggatgtcnaaaaattggtggtattggtaccgtgccagtgggacgtgttgagactggtgtcgtgaagccggtatgtggtgatttggtccatggctgcnactgaggtagtctgtgagntnacatgagctctcacagaggtctccagtacatgtggcttatgtgagatgtgcancagnactca

SEQ ID NO: 63577 - DNA, 846 bp, Glycine max
  Clone ID: PAT_MRT3847_28423C.1
gagacttttaacatctgtgattttctagaaagttttcaattttaaaggaaaataaatattgcggagtcacagtacttgagtttagagtgtgtgtaggggtcactatatttgattttgcagaagagaagagaagagaagagagagagaaccataaatggtgtctttgctactctctggattctgagccttttcaaaagcatttctctgtttgatttttggattaggatgacacagctctctgaatgtacgtgaaggtccttgtgttgtagtgagagaaaaagtaagaagataagagttatggattctccctacacaagaatagtctttgagaaaattcagaaatttgagccagagcatgctagaaaaataattggctatctcttctttcaaggtcatggagaacaagaaatggctaaattggcttcatgccccgactattttatctgtgaagtggtagttcaggccaaaaaggaactccaaaggttggctgctaaaccagatatgctcccgatttctcgtactgtcaaccctcaacaaggtttaagtgatttatcagtaatctcccctagaactcctacttcaccaaactttcagatgcctcctccctattgggatccacaatctgctgcaaacatcaatccagactttatggggaatgaattacttggattctattgtagaacttcagaagcagacacagatgctcactttggagaatcaaatagatgctgtaaaaactgggactgggagaatcgccaacgatcactatggcttagatgcttctgctgtcaattttggtggaaaagcttggagaaggatttttgaaatttcaactaagatatgtca

SEQ ID NO: 63578 - DNA, 364 bp, Glycine max
  Clone ID: PAT_MRT3847_28424C.1
gatgaacaaagcttcaaactttattgattgttcagcactaccttgggtagggataccacatgctaaatatatccaccacttcgtagaccgaatgaaaaccattgttcgtatacatagtgattgtgatatattaaattattggaggaggggccctcttcttccttgctgggtgtttcaaaagcgggtttacgactgtctcttggaaaaatagaggggggaattcctgctgtatgttgcgggtgggaaaaccctgactaattgctgatactatgttcgctatttacacttataagattattgctacgggtaccaccacctttgctggttccctttagagattcatcattggctgattttgatatgc

SEQ ID NO: 63579 - DNA, 403 bp, Glycine max
  Clone ID: PAT_MRT3847_28425C.1
ggaggtgctcactatactatctcaactgacatctgatgataagtctaaggagaatcaccatgaggctgttaccaggcacaggctggtcgacaatgacagattcaatgatgagaatgtggcatggcaggcttaggagcgaggtcatgggctacatgcactcaaaggatgacaccttccaggaggcgtgtagcttcacagaccaagtgatgatcttgaaccaccctggtcagattgcaaatggctatgcccatggcctccactgccacacttctcacattgttgtcatggaagctgcactgatgaccaagattgacaggcggtccggcaatgagcttgagaaggagcccaggttattgaagaacggtgatgcctcgtatgttaagaggattccaaccaaacccat

SEQ ID NO: 63580 - DNA, 568 bp, Glycine max
  Clone ID: PAT_MRT3847_28426C.1
aacaaacagatgattcttattctttcaattctcctgtttcagttaacccactggataaaccacatgatataatctagagacttggatttacagaagtccacatctaccagatatacagagaaggaaatgacctccagctaaaaggagaaagaaaaaaagaagacggtgtcctttttccctaatataagacaaattatatctcacacccctgaggtttaataaaacttgttattcctttttctttttacatgactacatctctccatctatataactacataaatcattaacggaaagtatatacaacgttattttgttatataaaggagagatatcaaaggaaattttgttaaacccgaaggggatgtgcgagtgtaactgtcaaattagtgaggagaggctattggtggttttgttgaggttcgagtctaagtgagtctgagtctgagtctgaatgaaagaagaggcaaacgacagagcaatcatcaacctttgtaaggggaagcttggttttccatgcatgaatagccgccttaaccaacattcgagccgctgaagagcgaggagc

SEQ ID NO: 63581 - DNA, 490 bp, Glycine max
  Clone ID: PAT_MRT3847_28427C.1
cggtcctgatactttattgaagagtgctgcgaggcttcaatacgacgctctcttttacttacatgaccgcacaaccaaaccgcgaatcttccaagccttttgcagtcgtgtcttccaaaccattgtctaaatgcttcatggcagatgcaacattggtttcaaaataaggataccacacgtggtcgtacaggaatcgtgccgtaaatgatacgtcatgcttgtacaccttagcaactttggtgccaccccagacacgggtcctctccacgatccatgggaccataacacgttttggtctagtcgcgcggaagatccgcggcatgacgtatcgatggaaagcttcctctgaaaatgcgagctcaatagcaggcaggaatgctacttcctctagtgctagcacattgaaaagcaggtggttgaggcgtcgaatgtcatcctgcagaatggtcaggcgactctgccacgaatcggctgtcggctcagctgataa

SEQ ID NO: 63582 - DNA, 308 bp, Glycine max
  unsure (1)..(308): unsure at all n locations
  Clone ID: PAT_MRT3847_28428C.1
tcggacnaacnnagtcgcncgcgactcgnncnagntantanncnctctagagtnatttcgnaatctgcnagaanttnctaatantggcgaaagacgttnagcaggtcacagagnaaggtgaatactccgcgaaggactaccangaccctcctccggcaccgttgatcgacccagatgagctcacaaagtggnccnttgtanagagccgccatagctgagttcatagcaacactccnttntctntacatcaccgtgttgaccatnattggctacaagagacagagtgacaccaaaatccccggtaacac

SEQ ID NO: 63583 - DNA, 327 bp, Glycine max
  Clone ID: PAT_MRT3847_28429C.1
gcaaccttcttcatctgtgaaaactcttctttttctcatcattcttactataccatcgaccagttcaagccaattcatgctgtcacacccttacttatctcttactttctacaccatcagatgcaccaccactgataataactatcacaatactactaacaacaacacaaccaatgatgatgcaaactcaacttaatttcaatcaccaatggcatcatcaactaatcccgtagaaatactcttacggataagatctatacatcatgccaaacgactgccatagaacaatgccattcaatccacatctaaagtgatgcatttatactc

SEQ ID NO: 63584 - DNA, 733 bp, Glycine max
  Clone ID: PAT_MRT3847_2842C.1
ctttgcgtgggcggacgcgtgggttaggaatcaacaagagaggggtccattttttccgtcccgttccaaaggaatatatgcactctgctgaattgagagacataatgcaatttggaagcagcaatactgcagtattttttaaaatgcgggttgcaggtgttcttcacatattccagtttgaaacaaagcagggagaagaaatttgtgtagctcttcagacacacataaatgacgtaatgttgcgacgctattccaaagctcgatctgctgtgggtgaatctttgaatgaagacacttctaatgattttaagccttctaatttggaactatctgaaaaacgtcttcaagagttatcaaaacttgttgaagaatctcaaacgaatgctgatcaattgctggataacttgcgtgagaagcaaaaacaagaagaggacatgctacaagaattagagggcttacaaagatctttaacagctggcaagcagagtcttgcagaagttacaaatgaccgtgacaagcttaggtcattatgtgatgaaaaagacaaggcacttcaggctgaaattctagagaaaagaagcatggaagcaaagatggccgagttgagtaatctggttacaaagaacactaccaaaaaggactgcactcaaacaaataaccaagtgtcacagaaactcgaagatgacctaaaactatgtaaaggtgagctgcgtgtaactgaagaactatcaaa

SEQ ID NO: 63585 - DNA, 336 bp, Glycine max
  unsure (1)..(336): unsure at all n locations
  Clone ID: PAT_MRT3847_28430C.1
gtaagatagacaaactcccatattgttcacagataantcagggtatatgtctgcgctaccatcagaaagaatatcttgaactggatcaatgacaaatttgttttcacaatattctagagaaggctattacctcttactgcgatataacaggtaaatcaggggaatgcgcatttatctgcaggaatttcttagagcttcaaattgtgtggaactccattagctcatcagccctgaagtttctttccggagaaagaaataattcgaatcacgcgctagtgtgctataagaaggcaacactcatatcaccagaaataatggagctgccttgtcaacatc

SEQ ID NO: 63586 - DNA, 496 bp, Glycine max
  Clone ID: PAT_MRT3847_28431C.1
gccaccatgtcgaggccaaccgtcaccgtcgtctccgccaagggcgaggccaccaaggacaccgtccccgtgcccaatgtcttcaaggcacccatccgccctgacatcgtccacgcggtgcacactggcatgaacaagaaccgccgccagccatacgctgtctccgagaaggctggtcaccaaacttctgctgagtcctggggtactggtcgcgctgtcgcccgtattccccgtgtctctggtggaggtactcaccgtgctggtcaggctgctttcggtaacatgtgccgatccggtcgcatgttcgctcccaccaaggtctggcgcaagtggcaccagaagatcaacctgaaccagaagcgtttcgctaccgcgtctgcgctcgctgcttcaggaagccctgctcttctccttgcccgcggtcacgccatcagcaccgtccctgaggttcccctcgttatctcatcgactgctttcgccgatgccgctatcaaga

SEQ ID NO: 63587 - DNA, 274 bp, Glycine max
  Clone ID: PAT_MRT3847_28432C.1
cgtcatcatcgaaatcgtcataataaacacgatcttccttatttttcttaagacgggaagaaccaccttcgttgctgatgggcaactttattgctccaaagggagcggcaacatgaatatgttattttatggggtaaactgtatcctttcctctaataatgattgagaggggagagtcaaaaaccttgggaacggaagtaattggaatatgaataaagataaattccatttttctaattttatcagaattggggaatactgcaccacaaatgtt

SEQ ID NO: 63588 - DNA, 272 bp, Glycine max
  Clone ID: PAT_MRT3847_28433C.1
acaaacacaaaaatatatttgaagtgagagaaaaatataccaattctttccttagatataaaaatgctccaacagcacgtcttaccattcattccccatttactaattatacataatcaatttacaagaaaaagccaggtattacttgtagctaaaagcctaaaacttaagcacacttcattgtctatagtttttgtcgtgttcctccgagctgcttgtggtgggggagtgcttgggcctgaactttccatgtagaaaattttattaaacta

SEQ ID NO: 63589 - DNA, 242 bp, Glycine max
  unsure (1)..(242): unsure at all n locations
  Clone ID: PAT_MRT3847_28434C.1
gaaatgctagcagggcatgtgtctgttcgtaacatggtccgtacaaggctgaattgataggatgatgagcaccgattacatatacataattaaataaaaatggaagtgaggggaaaaacacgatacacttagaaaatgagtatttatttcacaagttaatgtgaaataattttgggcacaccttgtgctcattttaagcattttttaataatactgttttttagctntccataaaaaaaatc

SEQ ID NO: 63590 - DNA, 433 bp, Glycine max
  Clone ID: PAT_MRT3847_28435C.1
ctagttctagatcgcgagcggccgcccttttttttttttttttttattcttcccaccttgtggtgcgggatcttctttttttttcttatttctactcatttcatttccaaagggggcgcctcgcccttttttttctacattgttacccctcctttagtgcccccagattccttcaaggtttgcactggggaaaagaaccggggggggtgccccctataacctcgtttcctcctttaaaaaaggtgcttgtggtccaattacgctaaccctttcccttagctttaacaacacctaagagcttttccccccaacattgatcagaaaggccttgccctttttaaccccccaataaccccaccattgtctggcttgcgctgggataccctgccgggtattttccctttgagacgacaacattttttttggttgccct

SEQ ID NO: 63591 - DNA, 463 bp, Glycine max
  Clone ID: PAT_MRT3847_28436C.1
cataggccgtcactgttcatgagtctttcccaggttggcctgtgctttcgagtctttgctttagtatgcggtgcagctagcatagacgagtgccaactgatgagacttccagagcctgaacgctgacggaccccaatcagcataaagagttcaagtccgtacgtgcgtgtattgagacctggtactgcaatgagcggttatacctgtgcgcaaccttagccttatccggcttgaccctgaatggccatgtgatgcacagtccttcggaatcttcatgattgatctatgtaaacgaacggaagggatttgtatgttttgctgtgataagacgttgttggacgcgcatataaccacaaccagaatattgtcatagtcgatgacggatcccttagcagctagaccgcagacaattggtgattcgcttcatagaggctggttaggtattactgcttactggtgttgc

SEQ ID NO: 63592 - DNA, 196 bp, Glycine max
  Clone ID: PAT_MRT3847_28437C.1
cccacgcttacggtttaaaaactaattatatacagacataacctcaatctttggtctgaatggcgatgatactaaaggaattcttaaaacgcacagtatgctacatctttaccttatcctcaaagccaatgactttactcctactgaacatacctacgtatatcagcatatcgtcctttccattacatgatctcta

SEQ ID NO: 63593 - DNA, 359 bp, Glycine max
  Clone ID: PAT_MRT3847_28438C.1
ttggttcatggggagcttaggtagcatgtaggatagtagttaaacaccataatgatgaatcacttcccattcgtattcgtaagcaagccatgatagtcagacggcagaaaactagcaaaagctgcatagagcttattcgtgcacctcttggttatctccgcttccgcattctattggccgccgccctagcaacagccatgcgtatactcattgcgtcatgaagacgctgcgcggcaaacccgcgtagattacgcagcggggcactctgtagtagccgtggcaaaagccagttacccgaaagaatggaaccaagctagctggcaagctatggcaggaactagtgcatgtgagcatgcttt

SEQ ID NO: 63594 - DNA, 1594 bp, Glycine max
  Clone ID: PAT_MRT3847_28439C.1
acccggcacaccgaaaaaaaaattctttccgggctccttccttgaatttcactgaagccataaaaccaaactcattcactagactttttatagacacaaatcagaaaaaagcagttccaattccctcttggtgcttcgtgctccatctcttccaattgatggatcaagacgacgacgaagcaggaacaacgaacctcagcaccagcgacgccgacgtggcagagaaagaaaccacaaacaacctcaatggagtccccaaacagaacaacgcgtttgaagaaacaacaggttttcaagtcttgccgctgaaaaaggaggagccaacatattcggaccctgacacggagattgttccggtcaaactgccaaagcgctcctccacgaaggaccgccacaccaaagtggaagggcgcggccgcaggatccgaatacccgccacctgcgccgcgcggatcttccagctcacccgagagctcggccacaagtccgacggcgagaccgtccggtggctcctggagcacgccgagccggccatcatcgaggccaccggcaccggcacagttccggccatcgcggtctccgtcggcggcgcgctcaaaatcccaaccacctcatccaactctaacgaggaagccgccgccgccgccgcctcctccaacaagaagcggaaacgcccctctaacagcgagttcgtggacataaacataaacataaacgacgccgtttcgcagtcgtccggtctggccccggttcatgtggcgcatggcctggtcccggtctgggccgtaagtaacccccagcatggtggtccccgctaacgccttctggatgacacccaacccccccatgggacccgcaaaccagcagcatcagttatgggccttatctccctccgtcttcaacgtcgcggccaggcccatatcgcctctggtcacaacaaatattccagaagcatggcccattatgacggcgtgcagtaacgactccaactccgccgttagcacgagcacggtgggggctaaggtggcaacggagtccagcatggcacccagtgttagttctagtgggaccaagagtgccaggactcggctattaagggatttttcgctccaaatttacgataagcaagagttgcagttcttgggccgctctgggactcacgcgcagagttagctgctagcaacttttttatttattttatgtccagttcaataaatgtgaccatgtgcaaataaacgagaaatgtctgtgctgtttttgcgacttgtggaagatatgaaagatgtcatgtgtgataatatcatttggaaatgggaaatgaaatagtatcagtccggaactgctctggctgaatatttgcagatttattcatctttcgaccaccacgtgtggtgaggggggactgagggagtggggagtggggcccacctacaaatggagatgggtctccccaaaaaaaaccacttcatattttcactctagctactaagaatagaaataattcatttttttgaatttctgaaggctctgtaatagtagcgggtgggtggcctaaaattcaaagccggcagctgctcttgcagtttgcgcacac

SEQ ID NO: 63595 - DNA, 229 bp, Glycine max
  Clone ID: PAT_MRT3847_2843C.1
ctagagccgctactgctgttgtttccatcataacaggttagaaaggtcgtaagtatcaactatcagcacgatgagagagtccgacaatgcacttcaattgggctggatattgaacccaaagactttcccgcaagggaactatgcacaactacgcaacttatataccttgaacatcggatgctgcacccaatttgtggctacaaaaaaataaacaagggcgggcatcgaa

SEQ ID NO: 63596 - DNA, 471 bp, Glycine max
  unsure (1)..(471): unsure at all n locations
  Clone ID: PAT_MRT3847_28440C.1
gaggattatttttaagacatttcattggcntnaaaaacaaaacagacccaggtgctaattaatttaacagactcgggttcaaacaaaaattggagggggggtgctttaaaactcatgatctccataaggccaagggcgcacaccatcaaacaaaaatttcccacatctataatatggattacaacctgttttttcgaggaccttatttattgccctccttctctggttaagcagccttttttaggcggcccccatgggggcgtttgttggtccccccaaaacaaaacttttattattctttgaaggccttttttttgtttgttaccttaacaagggcaaaagggggcttctccctcacaatgggcaaaaaaggcccctggacttgaggggcatttcccaacttttaaaggctaaaatcaccaaccttgaccttgggggcccttgttggaaacacaaccaacttaaccttgg

SEQ ID NO: 63597 - DNA, 1269 bp, Glycine max
  Clone ID: PAT_MRT3847_28441C.1
agcttatcaacttttctctctctctctggcgaatatgctttcttggaaagttctcctcgtctccgccgccgtcttgttcgcggcgttaggcctcagagtctctcttccagtcgccgccaccaacctccctcttctttggagtttcttcctcttgtgtttcaagcctccttacctcttcgttgttctcaacgccatcatcatctccatcgtcgcttcttcacggtttcatcactcatcaaaccctcaatctccggagccaactcctccacgtgttgaatccatgcccgctcccaccgttccagaaccaccgcttttccaagtaaaagccgttctcgaagtggagaagaaagtaatcgaagaagatgttgtggcactaaagagaaaagactcgacggagattccatcgccggaggagaagccactggtgtctgctaggttcactcaccggaaattccttaaatccagttcagaaggtaataattactaattattattattttgatgcgtgaatacgcgctagggttgtcgtttagcgaagtgcatggatgttagaacagtacatgcagatgattaaccgcggtgccgcttaatctgacgagacgttggagagcacgtggaaggccataacggagggtcgatcaatgccattgagcaggcacatgaagaagtccgacatgtggcacaaccgcaacgtgaccccacaaccccaagagacattcaacgatgcactgagtgtgtcgtccgggaggctgcggaaagaaccctcgctgagtcaagacgagttgaatcgtcgcgtcgaagccttcatacaaaagttcaaccaagagatgaggctgcaaagacaacaatccttagaacagtacatgcagatgattaaccgcggtgccgcttaatctcaacctcaacataatcaatattttcattttacagaacaaaaaaacatatatagtgtaagtatttctgcaggtgtagacagtaggggtatttattttattgccatatattagtttatggttgggttaggctcatcatcattatttctttaatttgtttgttttgtgcctttatatgctccacataccaaaaatgtggttcatgttcaatatcaattagctagctagctagaaaacaaacacaccaaaaaaacacttcggggaacttaggattaatgttgttcctctttgtaatttttcggggtcattttttttagtcaaacctctttctctgtaattaataccatgaatgtaagcctgtaacgtttagtttgct

SEQ ID NO: 63598 - DNA, 292 bp, Glycine max
  Clone ID: PAT_MRT3847_28442C.1
cccgcgtccggccgtcgatgatatgcttggatatgaaataccagagttattaaagaaattcagaaatccttatggctgaattaaaagaatgttttaacgtgttgttgattttgtgatgaatggtttttggctgagattttgatgtttagattctttaaaaatggtgaattcacttatgtttggatgtctaaaaaaaaaaaaaaaaaaaaaaaaaaaaaaaaaaaaaaaaaaaaaaaaaaaaaaaaaaaaaaaagggcaaaccactctaaaaaacccaaaataacaatacggg

SEQ ID NO: 63599 - DNA, 349 bp, Glycine max
  Clone ID: PAT_MRT3847_28443C.1
gctttataattgtgcttccttttgaattacaactgttgccatctctaccccgatttccgggcagaagaatggatcaggacgaagttttctttctggattgaaattgatggtgaaaaatgagatatcatcaagtgtactacaatcgatgggcatctaattgtgcgcagttgctgaatcctacacatctctatggtatccaggcagaaccccttctccatggctagatggcactctacctgtagacttaggatttgactatctaggtcttggatcttacctgaatagtctcaaatagactgtatctgctgagctcgtgcactagaaataggcaatgttaggtggtgttgga

SEQ ID NO: 63600 - DNA, 472 bp, Glycine max
  unsure (1)..(472): unsure at all n locations
  Clone ID: PAT_MRT3847_28444C.1
attcggctcgaggtagaatccaaaacactaaactccaacacgtacctttttccatgatccgaaacacaaacaggtcggatcgccgggtactaacctccccggtggttcacccatgcgataacatcgctctctctacccttctcccttccctcatcactctctccaacgccatttccaatttccaacacagttccttcccttgcaacaagcgaaacgcgagaatcgcgattcgcttgacccggcttctccaacccttccttcacgagatccgagaccatcattcgggtcttgcagacccggcaaccctgagcctctcggagcttcatttaaccttccagaagcttcttttccttcttgaagatctcacacgtaaaggtgccaagcttacatgttaatggaatcggatcgagtcgcaactcagtttcgggtcatatccagatccgtggccacagctttggacgtntttcctttc

SEQ ID NO: 63601 - DNA, 396 bp, Glycine max
  Clone ID: PAT_MRT3847_28445C.1
attttctttgcggcggtgatgcaaaattgatgcctgaatggacacacccgctgtgggcttgttgaccaagaatggcaatttgtaagaaagaagtttggagagttaaatgctcactcccttctggattaccgctcacagttatttgcactagcatctataacgagatgctcattagctatcgctgtgaaaaattactgccccccgctaaacctccaagcatgtgtttacaatccttcacaaaatttgtttctttgcgcgtaactggtgatgatcacttaatctgtgttcatgaatatgtcaagccttactctagtggttctaaatagaaaagctttctagctgaccgtaacacaacccatgctggtggtattgacacaactggtgcaactgtgcaat

SEQ ID NO: 63602 - DNA, 351 bp, Glycine max
  Clone ID: PAT_MRT3847_28446C.1
acatattttttttttttgttttttttgttttgttgttttgaagtgggcttttttttaatggtgttcaagaaacaagaggagcgagccgaaccaaaaacatggggggagagcggaagaacggccaaaaatccaaggacgaagaggccgtgctttcggtgtccccccagaaagacacggggggggaagggattgaatgggaaaaaacacagcaacatccggaccatgaggacaaccgaaaaaaaccccatggaaaattgaaggaagggagggcccaaccccctcaaaaaagggagaaacccctgccaggccaagctctggaaaaattagcccacatgcaacccaaggaacggg

SEQ ID NO: 63603 - DNA, 424 bp, Glycine max
  Clone ID: PAT_MRT3847_28447C.1
tcgcccactcgtccgcccacgcgtccgatctctcttttgaaatttatactatttcatggcttttagagcgtgtcaaacaaatcatacttctattattcattatatcctattgttccaactggctcatgtttacgtatgctatcttcatcttcaagtaatgagtaactttttcttaagatgcttaaatataatgaacaacagtgtgatcagggaacagccataaaaaaattgcatcatagaaaagaaaaagaaaatgtttgtcatttgatatgtacttcaactttgtattccacattaacggaaatgtcacaacgtttattctgtgagatgaatgaaacttggtttcatcctaacatcacctttgattttaatatttgtgctgccaaaattttgattattgaacccattttcaccttacttttga

SEQ ID NO: 63604 - DNA, 254 bp, Glycine max
  Clone ID: PAT_MRT3847_28448C.1
ctcgagccgtccaactttgcttacttcaactcttcctttaatagagttgttggtatgtatgtattcattctgagaaatcgtacgtgcttcaacgtgttctcatttcgagtcttcattaaatgcttggggagctctacacgtttttttcttcataagaacaaagagagagagtacaatcgacacatctttaccaaaaagaagctactggttatgacacacaatattactttcctgaacattcctttttctgtact

SEQ ID NO: 63605 - DNA, 143 bp, Glycine max
  Clone ID: PAT_MRT3847_28449C.1
ttttaaaaaaaaaggaacaaaactatgggggtgaaaagtgatggatttcattccacacatacatatgattcctcgttaaaaagctaaaatgaaatacattaatttcacaaattcaaggaatgatgatatgacttactaatgaa

SEQ ID NO: 63606 - DNA, 281 bp, Glycine max
  Clone ID: PAT_MRT3847_2844C.1
cacctctctctctctccccctcctctcgtctctgcaactcccggtggttgagaaaccctaaccaccgttgaaacgccgttgtttcactcccaaacctcgctattcacgcgcgtttcccgccaccgttccgaagagaagtgatttccacacagtataccatctgcgattcttcttcaaccccgaaattgggagattcgtgaatcaattttcgtcagctcgtaataatttatagtcgttgctggttaaaggcctaaggaatgcagtccatggtctgtacattt

SEQ ID NO: 63607 - DNA, 223 bp, Glycine max
  unsure (1)..(223): unsure at all n locations
  Clone ID: PAT_MRT3847_28450C.1
tctcgagtcgattcggctcgagctgtctgcgtanaagacgtcagaatctggagggcatacacactagatgaaaagttgttgatgcatttcttccaggaaagtcttactggcggcagttgtcatctagtacattaatctggaaccttcctgagtccattctcggaaagaactgctaaggcatagctacagaacttgtgcaaaagggagccgaatctttccaaag

SEQ ID NO: 63608 - DNA, 564 bp, Glycine max
  unsure (1)..(564): unsure at all n locations
  Clone ID: PAT_MRT3847_28451C.1
tttttnnttttttnntttttnnttttttnnttttttntnnttttttgggtgttttnntttttnnttttttnntttttttnntttttttttttttttttttntttttttaaaaaaaaagccaaaccccttaaaagtaaaaacaaaggaaaactaaggaagaagaaaaaaaaaaaattccctccttgaaacacccaagaaaaaaaatattttaaaaaaaccgggggggttaaaaaacccccccagaaaaatttaaaaaaagggccatttaaaaaaaggttttcccaaggaaaaaatttttggggaaaagtaaaaatccccggtccgttaagttttaattggaaaactttaaataacccccgggaaaaaaaatgtaaaggttcaaaaaagggggtttttgggggttaaaaccgggatagggccccaaaggaaaccttatggggccgggcccaaatttaaaaaacccttaaacgccccaaaaaaagggcaaaaaaggggaaaaaaaaaaaaaaggggcccaaaccccttgaatccccaggaaaaaaaccttaaaggcaaggtgggggg

SEQ ID NO: 63609 - DNA, 179 bp, Glycine max
  Clone ID: PAT_MRT3847_28452C.1
aggtggtgctggttctctgtggtggtttatacgtctccaatatacctatcgaaacactaatgtattctcaaagtacttgctttgtgactcattttctaatctatttcggtggtcatcggtgtaacatgttcattctgaagtagtttttgaagttttacgttcacatctgttttattgta

SEQ ID NO: 63610 - DNA, 275 bp, Glycine max
  Clone ID: PAT_MRT3847_28453C.1
acgtgccctttttattcttgacgaagttgtttcttctatcaccaatcaatctgcgacttataccctaccaccactcaaaaagtaaaaagagagaaacaaacccttcccgacaaggaaacaggacgaactttatcaattcacagcgtttgccagtgatagaacccgcagtaggaaaaaaaccactggacaaactttttaaacccggtttgcaaaacggccatgagcttgtaccccatctctttccggggccctactagtattctatcgaataaaag

SEQ ID NO: 63611 - DNA, 480 bp, Glycine max
  Clone ID: PAT_MRT3847_28454C.1
ctgcgagaagacgacagaagggatagctagtaattataaatttggaaattaataattaggggtaatacttaaaaaatatagttacaaatatagatatactttttgctgaattaatatatatacttatttcgattgatatcatttattcagtttttttataaagggatttattcagttattcttaccaagacgtctcttactatttaaagaattttgtctttggtaagcgtacgatagtgcttcttcatatcaatgaagttcttttgatgaaatttgaagatttcaacaaaaagcaaactatactttttgcttcgtatgctaattaaattcagatatttctattaggatggtgcttgtctacataatcaggcattagcaagggataagggaaaacaagggttagaatttggtgctttaaattggtttcttgagactttaagaccggttattaattgggcaaattttagagatcaatgctat

SEQ ID NO: 63612 - DNA, 364 bp, Glycine max
  Clone ID: PAT_MRT3847_28455C.1
ggttttaaagagagattttttgtgtgcaagtatttggtttgataaggcacaaagtaaaataaaagagagtgaaggaaaataaaataacactttgcatcatgttctggccttaaccttttgtgtaagtacatgcaatggatattttagctcaacaacactaggaatatggcgatcgatcaggcctcaattcctgctagagctccaactgcacctacagagaagaatattaatttgtgttggaaaatgcatggattaatttagtagctatgtgttagaaagaaattgacttaattgcacacaagctgagttttatgatgatgagcgtggattttttccttaaaaaaaaaaaaaaaaaaaaaaaaaa

SEQ ID NO: 63613 - DNA, 306 bp, Glycine max
  unsure (1)..(306): unsure at all n locations
  Clone ID: PAT_MRT3847_28456C.1
tgccctaggtttctggggtgctgatgatgcaggttctattggacctggaggatattgatgcaggaaggcctctcaggtcaaagactatgattnggtttacagaggccttgggggggggggtttcactggtncctcataaaagctggagatcatggtgtgtgttacgctgggtttgctgagctgggagagtttgggatggctgtggacgttatggtcttagtggatggggggagaattcgacagagggcctgatactggggctgggaagtctctggggcaggttgggggggaggtgctgagtagata

SEQ ID NO: 63614 - DNA, 444 bp, Glycine max
  Clone ID: PAT_MRT3847_28457C.1
ataagcgccaaattgttatttaagtcaaaattatattacaaacaacccggcatcactgggaaatggacaggaaaatgaaaccaaatcatgaaagaaaatgaattcaaatgaattttaggattaactttagttctttaacatgaatggagattggagatgtacaaactataaagttggtgaactgtagaatcacaaagtggaaattgaaatccctttctcccgtatcttccccccatcctgagagcatatcttcggttgcacaactagaaagtccatattcaatcaaaatgaccaagagaagatatacaccaattgcgtattaggaagtggcaatgtcatgaacatcaaggccccaagtgaaatgtgattaaatgttcaccaaattagaagccaatgccaaaacaaatagcagattagaacttatacaaaaatctcaatttcaaa

SEQ ID NO: 63615 - DNA, 357 bp, Glycine max
  Clone ID: PAT_MRT3847_28458C.1
cgcgtccgatcgaatgccaggatcgattgcatgcaccttgcagtactcgatttcagcacttcgacgggggcgagaggcttgccggcgatagtggtggtggccgttgccgcacttgacttgacgggatcctccagctggtggacggatatcaactgcactccgctcagacatgatcgcagcttcgaccacctctcatcctctacagaatcgtcgccgctgtcgctctagttcaattagttcgagtacaatggagagtgtcggagtattgttggatcatgcacgacgtcattcacttactcactttcattgagaatgcagttcggtgttaagttgatgtcctccgtcgggatgtgcaga

SEQ ID NO: 63616 - DNA, 352 bp, Glycine max
  Clone ID: PAT_MRT3847_28459C.1
ggttatcaaggaaaaaaaacgttcccttttttctattttttttttttggggggaaaaaatccccggtttaaaaaaaaaaacaatttaataaccttgaactaccaaggtttgttacactttttaaatcaaactaaaaaagggtttgtttttttacccaaacacccaaaaactgacaaaacgtttggagttttggtttattcccaagaaggtttaaaattgggatcttgggatgatgggatataaagaccaattttgcacccttcaagcatgaaaacgatgtttggcttggttggtcgatcaagagggtcaggtgctttgcaaagcatcccaacttttacacccactaaaaact

SEQ ID NO: 63617 - DNA, 237 bp, Glycine max
  unsure (1)..(237): unsure at all n locations
  Clone ID: PAT_MRT3847_2845C.1
ggttattcaaaannanccncnanatttcctcttaaaccaaaaaatggggaaagttttttgatccaagggccggggcccaaaagttgaccctttccttaattggggacccagttccccccaccccataagggccggccgaaatttttttttttccaggggggtgaaagagggngnnatttaaccaacacttttttttctgccaaaaaccgggcagggggacccaaccaaccggggggg

SEQ ID NO: 63618 - DNA, 303 bp, Glycine max
  Clone ID: PAT_MRT3847_28460C.1
tccaagcgttcgtataagtactattatacttacatttacattaaatagatggtatcatacatgggtattgacacattcgacgaccatgtgacctccgctgcggctcccgctactctatacaaagctgtagttacagatgcccacaacgttattgcaaacgctcttgatgccttaaacagtgatgaaaacggtgaggcaaatggcggccctggaacaaccatcaatatagctttcgatgacgatggagaaacgcactttagtactgccaagattgaagcagacgatgaagctaacttgcgatat

SEQ ID NO: 63619 - DNA, 532 bp, Glycine max
  unsure (1)..(532): unsure at all n locations
  Clone ID: PAT_MRT3847_28461C.1
cgtcatcactgtatgacgtcctccttctttgggggggggggtgggggaatagaaagaggggggctggataaaggaaggatttaggcaacacgataacgtgaataaataagcgaagtactaaaagtcatagctggcgactaaaagtaaaaccggatagtggcaagtgaaaattagcaagattatatttcttgaaaacaaaagttaaaataacgtggccgcgagccgggaaaacaaatcacatgtgacaaaagacaaaacatgtacgccncattgttgagggggcggtggcacaagataaacgtggaaatatgaactgaatggtggtttgggtaacccattgggtnccagtggaggtaacattggggtcgtaaatatagtagatcgtggtgcgaatgtcagcacgcgttggtgtgcttacacccgtgagtggagttgtagatggcgtagacagcataccaattcgaggtaataaaataaacataagcgacaatacccgtaacaaaggctattactgttttataaggcagagaag

SEQ ID NO: 63620 - DNA, 238 bp, Glycine max
  Clone ID: PAT_MRT3847_28462C.1
cgtacgcggacgcgtgggcggacgcgtggggttttttgtcttctaatatttgctgacagttgctgatgtggttatccgtcatgacctgaggatctgtgctaccatagcattgtgggcgggttgatgctgttattaaatgtcataccgggctttataattcgaaaaatcaacttcatgtattgattattcatgtatgatttgaaagatgaatcataggttgccgcttgaaatgaaaaat

SEQ ID NO: 63621 - DNA, 213 bp, Glycine max
  Clone ID: PAT_MRT3847_28463C.1
cggtctcactctcactctcacaaacgagaccgtcggcgtgggcggcggcgggtgcggtagcagcagctctccgagtccgtcgccgtcgccggatcggcactcgtgaggaccgtcgtgccggatgccgatgcggtcacataaggacttggccgtgtagcccgctgctggtggccgaaatcatggtgcggcggatcctgagatactatcttcctg

SEQ ID NO: 63622 - DNA, 323 bp, Glycine max
  Clone ID: PAT_MRT3847_28464C.1
cgcttaaattcccgaagatgaacatatgtctacagagttgctgatgagctaggtgcatgcgaagtacaggagaaaacacgctatgggatctgactccagaccttgtatctatgtacgactgatgacgtatgccaccttgcctctaagaccgtagatcaaaactatggctgctggaaagtatcttagagcgcattagtgatagtaacttttgcattcatgctgtgcgacggaagcgccatggagaactataacgacttgagctctaagaacttcgagctgctcagaccagatgatagtaatgcactgctccagaactttaagac

SEQ ID NO: 63623 - DNA, 325 bp, Glycine max
  Clone ID: PAT_MRT3847_28465C.1
cttgaccccaagctactttactgctcctttagacccatggcctattctttcctagggggcctcctcttgaggctgaaaaacacatctcttgtgggcataggtgaacttaggcttacctggattttgggctcattagagccacatgcatagattcgaatcatcaaccttttgcatgtgtattggctgcggcgcaactcagagcattctcctaatggatttatgctgaggccgtacacctaattcaaatctgagctatttctgtcactgagggtccccatgtttagcctatcctcttgctcttccattaagtcattttaattcagtt

SEQ ID NO: 63624 - DNA, 365 bp, Glycine max
  Clone ID: PAT_MRT3847_28466C.1
tttttgcaagaattataccactattagtgaaacaacagattggtacaaaattccaatccaaatcaccatccaaaattgtgggaaaatgcgtgttcagttcttttagttgcgcgctgactttactactgaaaatggacaccatttttatccattttctctatattcacggaaaacaacaatctaaatgtacaaaagaatatggttccccattctaaaattcactcgaactcgccagttctattattaactccgttatggcaggcacattgtcaccaccgggcgccttgagagctttaacggctttaggtgttgccacccccccttgagtaatcaccaattttatgtccttgggatctacaccagtc

SEQ ID NO: 63625 - DNA, 1240 bp, Glycine max
  Clone ID: PAT_MRT3847_28467C.1
cggaattcccgggtcgagacacgctttaagcgtttctttactaatggcattcggcaactacaaacaaaagcaacaacaagaagaagaagaacaagaacacagaatggaagaagacgaggacgaaagcgaagaagaagaggaacaattttgggacgattgggaaggagaagacgaagaaggagagcagcgagactctgaattcgtgtgtctcttctgtgaatcccggtacagctcgtgcggttccttgttcgaccactgcgcctcccttcaccgctttgatttccacgcgattagaacaactcttagcttggatttctatgcctccttcaagctcattaacttcatccgctctctggtggcagagaacagatgttggagttgtggattaacatgccagtccaaccgtgatcttcagaatcatttgcatgatttagttgactttaatgagataaagactttgtggaatgatgataggtatctgatacctttcatggaagatgattcactgttgtacagttttggtgattgtgacgaagaaggtgaagatgaacaaattactccaattgatgaagatcttataaaggatctaatgaacattgaagagagtatccatgacgatcaagatgttgtgaataaaatggtagttgatgatgacaaacatgagattgcttctgtctctaatgatcatttgaacaaggctagttcttcaaaggaacttattaatgggaaggacttgtgctgtgataaggatccagaaggacatttgatggttaattctcaaaatcacattgcaaagcatattaagaagatcaatgaaagttattttggctcttacagttcatttggtatccatcgagagatgttaagtgacaaggtgagaatggatgcttatggccaagcaattttgaagaatccgtctctactaaatagtgctgtggttatggatgtaggttgtggaactggaattctcagcctattttcagcaaaagctggtgcttcaagggttattgcagtcgaggctagtgccaagatggcagcagtagcatctcagattgcaaaagataatggtcttttgctgagtaaaagccaaaatggagttgatggcttccaaaagggagtcatagaagtggttcatggtatggttgaagagattgataaaacagttgaagttcaacctcacagtgttgatgtactgctaagtgactggatgggatattgcctgctgtatgaatccatgctt

SEQ ID NO: 63626 - DNA, 214 bp, Glycine max
  Clone ID: PAT_MRT3847_28468C.1
attggaaggacaatggactaggaaggtagtttgagacaacgaagaatccaccgtgcgacacacctgagggctaatacacagtggcaaaaaccttccgctaccaagccagagctcgtcggcttttcattcaactgagcatcatccaaaggagcagccatatatgttttacattacaaagtgggcaacagagtcggggttcaagtcttccactaca

SEQ ID NO: 63627 - DNA, 786 bp, Glycine max
  unsure (1)..(786): unsure at all n locations
  Clone ID: PAT_MRT3847_28469C.1
agcgtttctccacgcgtccgattcagcgataagcaaaagcaagaagaagaagaagaaccgcacagaatggaagaagacgacgacgaaagcgaagaagaagaagaagaagaagaagaagaagaagaagaagaagaagaagaagaagtgtgggacgattgggaaggagaagacgaaggagagagagaatctgaattcgtgtgtctattctgtgactcccggtacagttcgtgcggttccttgttcgaccactgcgcctcccttcaccgctttgatttccacacgatcagaacaactctcagcttggatttctatgcctccttcaagctcattaacttcatccgctctcgggtggcagagaacatatgttggagttgtggattaacatgccagtccaactgtgaccttcagaatcatttgcatgatgtagttgactttaatgagataaagactttgtggaatgatgataggtatctgatacctttcatgcaagatgattcactgttgtacagttttggtgattgtgacgaagacggggaagatgaacatattactcgaattgatgaagatcttataaaggatctaatgaacattgaagagagtatccatgacgatcaagatcttgtgaaaaaagtggtagttgatgatgacaaacatgagattgattctgtctctaataatcatttgaacagggctagttcttcaaagaaacttattaatggtaaggactcanaaggacatgttntggtgcagtgattagggatccagaaggacatttgatggtttaat

SEQ ID NO: 63628 - DNA, 338 bp, Glycine max
  Clone ID: PAT_MRT3847_2846C.1
ttgcgtacgcctacgcgtttcggccgcccttatttttcttttttcagtttttattccaaaaattataagcgagctttggattcacagaaacaaacattgttacatcctcgggttgataacaatattctctctatatccatctaaatgatggcatgctactctcaagtctaaaccaaattacatgctacaacaaaaggacttacccaccccatggctactacagcatgccttgtctagttattatgatcaacaaccctttttcttcactacatgatactaatactaggtgagttacaacaaacctgccccctctctctctgcctgactccaacaatatg

SEQ ID NO: 63629 - DNA, 285 bp, Glycine max
  Clone ID: PAT_MRT3847_28470C.1
gtaaatgaatcttctgcataaaccttagggatttcatttcttattgatttttactgtctggtcctaaaccaggaaggtgcagaaagatattcaatactatgggacacggttcagaagcacacaggcccgtacaatgacccaaactcacccgagcaataagattacataatcttactgataacgctcttctttattcaatgccacttgccaaaacaaatactaaattgcattgagactccacgaaaaacaggggtgcctttggagatcacgcccacacgagagatg

SEQ ID NO: 63630 - DNA, 124 bp, Glycine max
  Clone ID: PAT_MRT3847_28471C.1
gaacccactgtaaatgttaatggcactgaagatacattagggaaattgctatctgaccattgctatctcctttcattaccttagatgtaatatttcttaggttagcactgtgccactaacaatt

SEQ ID NO: 63631 - DNA, 265 bp, Glycine max
  unsure (1)..(265): unsure at all n locations
  Clone ID: PAT_MRT3847_28472C.1
ttcgggttccctgccaacancaagggcaagccggggaaaagccggataaggactcccaccccccaaccggggaaggganngggggggagaccnccacaaagcaccccccaccgncaccccccnccgaccaccgaaccgcaaaggccgnccaaaggggcccaaccggaaaaaccccgggccggggggccaaaggcagcccccacaaacccccccggagaccacagggccaccgggaaaacaaaaagcacccgcagagaaccggaca

SEQ ID NO: 63632 - DNA, 1263 bp, Glycine max
  Clone ID: PAT_MRT3847_28473C.1
cagattttagaccgcaagatgaaacaagaaagcaatgtgctactatattagtacaaggcgactgcccaagcaaggtgcaaatggtgggaaacgaatatgcaacttcaggagtcgaaagaacaactaaaggagcttgtaacactgctacaacaaagtcaagtacagagaaaagaacttgtaaaggagcaaaaaataaaagaacaagcaattgccatcacataaaatgcgccagcattggaaaagcttgaggctctaaaccagcgtcagaaaatggttcttcaaaggaagacagaggaagcaacaatggctacgaaaaggctaaaagaattgttggaagcccgcaaatcttctcctcgtgacaactctgtttattcaaatgggcatctacagcccgcgctggtcaatgaaaaatccctccaaaggtggcttgatcaggagatggaggtcatggtacatgtgcatgaagttcatgctgaatatggcaaacaaaatcaagtccaagctgcactggaagaagagttggctctactaaaacaggatcggttttcagatgggcagactattcccaaaggaaagagcaaatatttgaggctgttatccatgtcaccagatgcaaaagttgagagaatagcttctcttgagaacatgctgtgcatgtcctcaattgctttgaaagccatggcttcccaactcactgagacagaagaaaaggaacggacattaaataaccgaggtcgttggaaccagctacgctcaatgggagatgcaaagaatgtgcttcaatatttgttcaatgctactgcagaagcaaggtgcaaattgtgggaaaagaatatggaacttcaggatttgaaagaacaactaaatgagcttgtagcactgctacaacaaagtgaagcacagagagaggaacttgtaagggagcaaaaaataaaggaacaagctgttgccatcagattgaatacaccggcattggaaaactctcgatccttgaaacaccttgcggatgaaatgagtggtccattatctccaatgtcacttcctgcaccaaagcaactcaaattcactcctggagttgttaattggtcaggcagggagtcagctacatttttagatgaagcacgaaagatgatacccattggagagttgtcaacgaagaggctagcagctataggacaagccggaaaactttggaagtggaagagaagtcatcatcaatggctgctacagtttaaatggaagtggcagaagccctggaaactc

SEQ ID NO: 63633 - DNA, 512 bp, Glycine max
  Clone ID: PAT_MRT3847_28474C.1
tcggctttcgaggacataatactatcgcatgtggtcatgcctgagatagattaaggtgcactgagagcctaagaatactaatggagtcttcgtagtttcactcaagaagagattcatgttcgtcagatgccaaacattatcatgcatggtcttatatacagagggctatgcaaacactatgaggatgggaagacaaactatatgatggcacatatctactgaaaggacacatttttaacatttgtgcttggaatcacagatacatggccataacatggtgtgctttcttggtgggccgaaaagctaggagagagactgatgagctctacaccattgaagccattatagtctaccctgagaatgaaagctggctgagatatctacatggactctattgaggcgaaactacttcatgggtgaacgatcctcaagatggtttggcatgctaactgactgtgagaactaatagctactacaagtcagctcttagcactattatagatcatatatgc

SEQ ID NO: 63634 - DNA, 321 bp, Glycine max
  Clone ID: PAT_MRT3847_28475C.1
cgatccttgaaacaccttgcggatgaaatgagtggtccattatctccaatgtcacttcctgcaccaaagcaactcaaattcactcctggagttgttaattggtcaggcagggagtcagctacatttttagatgaagcacgaaaggtatgtctgctagattctatttctctgatgatgataatgtttgttttccaattaagttttaatgggtttataaccagatgatacccattggagagttgtcaacgaagaggctagcagctataggacaagccggaaaactttggaagtggaagaaaagtcatcatcaatggctgctac

SEQ ID NO: 63635 - DNA, 217 bp, Glycine max
  unsure (1)..(217): unsure at all n locations
  Clone ID: PAT_MRT3847_28476C.1
ctaacantcattaattgcaagaatggcacttcgttgcttggtgatgtnctngactgcnttgttcactgctngggtctgcgnnagganagccatgnccgggcacgaannttttaggcangcngttgggccaaacactcccattccangtnnaatngccnanatncttctaaagcctngnctntaagtgttgaaatngatgatcnccctangcaaattg

SEQ ID NO: 63636 - DNA, 571 bp, Glycine max
  Clone ID: PAT_MRT3847_28477C.1
aatggctctctctgctagaagaaagattgttaaagaaaagggacaagttccagatgcatttgaagaccaagttgccacttatttatatgatttagagcaaagctcaagcgacttgaaatctgaattaagacaccttcaaatctcaagtgccaaagaaattgacgttggaaaccgaaaagctgttatcctcgttgttccattccgattattaaacaacttccaccgagttcaaccaagactcgttcacgaattagaaaagaaattaagtggaaaacaagttgttgttgttgcccaacgaagaattttacaaaaagttggcagaaacaaccgagttaaacaacaaaagagacctgttagccgaactttaaccgctgtccatgatgccattttagaagacactgttttcccctgcgaaattgtcggaaaacgactcagattcaaacttgatggctccaaattaatcaaagtttacttagataaaaaagatcaacaaacttatgaggacaaattggaaactttcgctaccgtttataaaaaactcaccggaaagagcgctgtcttcactttccca

SEQ ID NO: 63637 - DNA, 1973 bp, Glycine max
  Clone ID: PAT_MRT3847_28478C.1
atcatctccgtctatgaagcgtaatatttcaccatctgctgtaccccaacttcatggtaatacaagggcattgccaatgagagtagctgccatgtgcaaagtattggtgcccaccatatttgataaacaaggagcacgattacttgctgttgtttttcttgttgtttcaaggacatgggtctcagatcgtattgcatcactgaatggtactactgtgaagcttgttttggagccggataaagcttcctttattcgattaattggtataagtgttattcaaagtgctgcatcttctttcattgcaccttctataagacacttgactgcgaggctagcccttggggggcggattcgtttgacccaacatcttctcaagaactacttaagaaacaatgcattctacaaggtcttccacatggcaagcaaaaatgttgatgctgatcagaggataactcatgacttggagaagttaacaacagacttgtcaggactggtcactggaatggtaaagccatctgtggatattttgtggttcacttggagaatgaagctgttaacaggtcggaggggagttgccatactctatgcttacatgttactcggtttgggatttctaagaactgttactccagattttggtgatttgattagtcaagaacaacaacttgaaggaacatttaggttcatgcatgaaagactttgtactcatgctgaatctgttgctttctttggaggtggtgctcgagaaaaagctatggtcgagtctagattcagggaacttctcctccactccaagtaccttttaaaaaagaagtggctgtttggaatcctggatgattttatcacaaagcaacttccacataatgtgacttggggcttgagcttaatatatgccatggaacacaagggagaccgcgcatcagtaactactcagggtgagctggcacatgcactgaggtttttggcatctgttgtttctcaaagctttttagctttcggtgatattcttgaattgcatagaaagtttgtagaactctctggtggaattaatcggatttttgaacttgaagaacttcttgatgcagcacaatctgagaatttcacgagtgttagtgctatacctccagtgagggatgttcattccagtgatgtcatttccttctcaaaagttgatatcgtaaccccttctcaaaagatgttggcgagggagttaatatttgacattaagcatgggggaagcctacttgttactggtcccacgcgtccgggaaaaagttccattttcagagttcttagaggactatggccaattgccagtggaagactctctagaccatctgaagttgtggatgaagaggatggatctggttgtggcatcttctatgttcctcaacggccatatacatgtttgggaaccctaagggatcaaattatatatcccctttcctgtgaggaagcagaggttaaagtactgaagatgtatggaaaaggtaaatatcttgggtgggagaaataaggcaggccttagaaatgcgtaaaaatgaagtttctgatcataaattaacataagcaagttggtaaatccacttagattctctattgaccaataattttggattattaccatggttaaagtgagtaatttgaagtctagatgcaatgaactactctttctagcactgttaatacaaaaacccctattagattgggggggggaagggggcctcaacaaggctttatcttatagttacttaagggattggaacaaaaccttatttttaactctacagcttactgtttttagtatttgactcaactaaagtttataacaaggctactgtgttacttttcattaatcaccactagctgagaataagttttcttctgagctgttctaaagctggggcaattcaatagaatggtgttcatgctgatattgttgaaaatttctcttttgctaacaatttatttgg

SEQ ID NO: 63638 - DNA, 295 bp, Glycine max
  Clone ID: PAT_MRT3847_28479C.1
actcagaaaagagaaaaaacaaattttaatttatcaaacacagacacaaaccatcaccccgccctattttcttacctaaaccctattcatttatcattttatctcttttatcccactcctaaatactctcccaaacttttcatatccaaataaatcatcctttacttcgttttttccttcccctcacttccatttaacccataatttcattacaatcacaaaattataccttttcattaaatactacatactcatttttttttaatcctgcaactttcacctcttaacaccttaa

SEQ ID NO: 63639 - DNA, 588 bp, Glycine max
  Clone ID: PAT_MRT3847_2847C.1
agagaatgctacagtcaaggaacaaccaaacagcacagtggagtacccaaaatgaatacagtcaatgtaacattgtaactgaaaaaaatgagcaatacaaatgaacatatgtatagcagctctggcctcaggctatacacaaggagtgataaaacaacttacccataagcagtagcagagttagagggggaaaagactgtagagttttgcagaggccatgctttaaaagtgaaaaataaataaaagttctttgtaaactttcatattttgaaagaatattgaggtggctaaatcccttccgttgtttaactatgtgccacccttgcccataagcaaggcaaacggacatggtagtccagtttggaagagtgaacacaaatcctcttctgagtttggctgaattgctgattatttttttttattttatatccaccagattcggtgaattagccagaaattgtaaagggaactgtgttaattcctctatcaccttgtataattcagtaaagattttaatgtaagttatgtcttaataggaaaccaaacagatactagttacattggcatgttgatcaatacatattgcac

SEQ ID NO: 63640 - DNA, 772 bp, Glycine max
  Clone ID: PAT_MRT3847_28480C.1
caaacatgaaggacccagagaggaaccggctatgcaaaaccattgattgtcagaaactgtctcaagaagcatgccagccatgcagcacagaacgaaaggctaccggtgcagatggtggttcaagttctttacttcgagcaaatgaggcttcgcaatgccatgaatggagggcacaaccaactcttctttggtcagttccctcaccgttcagggagtggtgcagggagtggagccatttccccaagagataactatgcatctgttagaagagagaacagagaactgaagcttgaagttgcaagaatgagaatgaggctcactgacttggagaaagaccacgtgtccatgaagcaggagcttgttaagtctcaccctgccaacaagttgttcaaatcattcaccagaaagctgagcaagctaaattctctattcaggataaatagcattaagccacttattggtggcaaagctagttcagaaactcgcttcccttttccaaagcgaagacgtcactccgtttcatgatacttaatatgtcatatatcgtatatgacataacgtatgtacagtatgcataaacatagttgtaatgcatggcgtgatattgtgtttattttccagtcaatagttttttgagttatgttcctgacatgctgtgttcagtactattgttatcatgcttaacaattccaaaattgggaactgaattgtttcgaagacatcaaattttagtatacaaacacttcgtgtattagaattcaaaaaaaaaaaa

SEQ ID NO: 63641 - DNA, 635 bp, Glycine max
  Clone ID: PAT_MRT3847_28481C.1
ttcagtctggagtttatatttgcattagtgcattaacataccctttggctaactactcaagaggttggacccgacaacttaggagattacctgcaaaagtttttggaccgaaatcattttaacatcaaggatttgaccctgtcaccgtttatcgcatgtgttcaattaccaatcgtgctagggtcataatataatttaaacctggttggtgcagtgacttggcgggagcggtgcccttgagcatacacctaggggtcacagataccagcaacctgggcttactgaacacactagatagtgaaggcggagatgagggccgaccccacaccggaaccgtcctgacaggacaggatctagatcgggtcgggtcccttggcgagcgccttgccgtcacggccaccctcccagctgagtatctacttgagtgcctagagcaccacgggccttgaagtgggggcacttggtaaataccgagccatcggtgccgacgagtgcagccttgaacacctttttattgcatatagaccctacaccaaacgcactaagactggatgcgatagacccgatgagttcgaaaagactactgataagctgatgctcaggcctagagggcttgatacccatctggatgacga

SEQ ID NO: 63642 - DNA, 573 bp, Glycine max
  Clone ID: PAT_MRT3847_28482C.1
tctttcttcgcgccaacgcatccgaacatggcgcacttcagtttcaatctcctccacagcctcgaacccaagaggtacgcctttacacgtaacatacaatcatcacaattttcacgccttctccagcgcttcggatccattttggaacgtttcttcgaagcagttaccgtccacgccaactgagaaacaacacaacagttttttttttgtcgactcggtttttattatgccgatcataaattcggaacacgataactgaaaatttctttagtcaataatagttcattttagaatctttgtaattggttggatgttgaaatgttgtggtggtagggttagctctgttggtttggctttcagagcgaaagctatgggctgtagaactgtacctgttcttaaagtatgttgttgtccttactgagtaagcgctcattggaggttgattccaggtagcgtgcgtatatggtataattataaccatgcatgggttatgtgtgtgtattcgccgtcggactgcaaattttttttttatcatcaaatgttagcgttaattattagtttttttttagcggc

SEQ ID NO: 63643 - DNA, 162 bp, Glycine max
  Clone ID: PAT_MRT3847_28483C.1
ctcataacagggcctcccgctccgatcaagctaatagcgatcgcttgttagccgccaggagcagttgcaagagaactgtaaggaagaacctttccgtcgccttaggaaagcgccaacacccccacattctcatgatcatgcgcctcttcacaccgctgggtg

SEQ ID NO: 63644 - DNA, 562 bp, Glycine max
  unsure (1)..(562): unsure at all n locations
  Clone ID: PAT_MRT3847_28484C.1
cggtccggattcccgggtcgacccacgcgtccgctagaataaacatctcacttcattgttttctaaccttctaaaatctacgtgcaccaaatagtatttttgaaagaaagacagtccagcaaggacatatttatctggatgagaacaagtccttaattctgaagattgttgaaagccagaattctggcaagctgagcgagtgtgccgaggtcatttactgttgataatgctacttccacattgataacaaagttcaatttaattaactagaaagccttaccaactagatagggtgctgcaccaccagggaatttttcccaccccatcaacatttatatatatatatatgagaagaatatagctgattttgtgtcatctgccatcctgcgttacattgaaacttaccaagaactatacgctctgcagttatgatcacttttaatatcctggaaccgagcaaggcttcagagnaatctcatgtccttagctgcaatagctgattctcaaccccaaccacccaccatgtctggtcagtacccttcgaagtggatgatgcaacagg

SEQ ID NO: 63645 - DNA, 770 bp, Glycine max
  Clone ID: PAT_MRT3847_28485C.1
caacaaatacttcccccaccccaaactctcctacccttcaatgtggttatcttcaacgcaaagctttacctgagtccaggtaacatagctttcatctatttacggttcaaaatatagaaatgggcaaaaatgaaaatccaaattgctcgtatcaggccaaagcagaagagaaaaatgcaaaatgacacttcttatttacaattgccaatcaatctctttctttaaagttccttgtataactacctttcagctggggtaatcagagagagttatttgcaactgggaattttcaggttcagctgaatactgtttgatgaaagcccttctccaccaaatctcaaatgccttctgaatattaggacagtcatctcctttattaagaaatctatcaaaccaattcagcaacacggattgttgttggagtaaaggaagtgtcaatatagtttggcttagtccatcctcaatcaatttcctgtcaacagctctagaagctctcctcatccatccaaaatcttcatatagagcttctagccatgttgacaacaaggaaaatcgaatttcttttggcaccagtatgtgtccccttccaatgccaatgcacagttgtgctgtgattctactgatctcatggcggtaaactgttgaaatctttgagtgaagtgtagcaagttctttctgctctgcccatattttcacaaattcatcactcatctttttgccaatcaaaatgtcaacaatccactgaatattgtcagcttcacgagttatgt

SEQ ID NO: 63646 - DNA, 480 bp, Glycine max
  Clone ID: PAT_MRT3847_28486C.1
gagctggtgaatttactgaaagatgataatgatacaattcaggaaggtgttctaaatgttttagcaaaggctggtggtactattcgtgaacaacttgcagtcacatcaagttctgtagaccttatattggagagactatgtttagaaggcagtcggaggcaggcaaagtatgctgtccatgcactggctgcaataactaaggatgatggcctcaagtctctctctgtcctatacaagaaacttgtagatatgctggaagataaaacacatctgcctgcagtacttcagtctctggggtgtattgcgcagacagcaatgcctgtctatgaaaccagagagaatgaaattgaagaatttatactaaacaagattctaaaaagtgatagtaaagaagataacatgaaaacattttgggatgataaaagtggtctttgtatggtgaagatatatggcattaaaacatttgtaaagagctacctg

SEQ ID NO: 63647 - DNA, 237 bp, Glycine max
  unsure (1)..(237): unsure at all n locations
  Clone ID: PAT_MRT3847_28487C.1
tttaattnttattgggctcgagcggatcgactctacctcaccttaaatttatattaaggcacattcttttttttagaacaaacacatagagatggttttcttattgtgggagggggggaagctaacactttatgcgttcactcacgcctctcaaaactagaggcttcctctgcactcttcaattcatttgctgttcttctatcatcttcatctgctacaagccataatcgtaacttt

SEQ ID NO: 63648 - DNA, 878 bp, Glycine max
  Clone ID: PAT_MRT3847_28488C.1
atggggaagcaaacaagacctgccatttggttccatccccttctcaacaatgggaccatccactagcggtgtgggtcaaatgatgcactatcaagcaccagagtcacttcaaaacgtcaaacccagcaacaaatgggacgtgtactcttttggcgtggtcttgctggagcttctaactgggagggttttctcggaccgtgagttggaccagtggcacgaaccgggttcggaggaagaggagaaaaaccgggtcttgaggatagctgacgtggcaataaagtctgaaatagaagggagagagaatgtggtattggcgtggttcaagttggggattagctgtgtttcccatgtcccacaaaagagatcgtccataaaagaggctctacaaatcttagacaaaatccccgttgctgctccagtccattaattcttctccatgatgatgtgtttccctttcacaccccgttttttagatcaaggtgtttagccttttgttgacttgaattaggcatcaagagaagaaaagattggagacaaaaatgtttgtttatgcaaggtaacaatgattgtaactttgaccactgaatcgaatccttgtctgatcttatataatcaaggtgcattttgttcacggacatgggcacgcatggccggtcttgctgactattaagcttgcgcaagaagtgattcatgcatgtttagtcgtacatatgaatgatgggggactagtgcttctgatttatactgcacacaattttggacattggggatctcaaagtctttgatataatagtgtgcactctttcattgtcggtgtgtttttttaatcatcgatcatgcgtgcctataaatcaaacatgttaagatattttgctgtc

SEQ ID NO: 63649 - DNA, 1397 bp, Glycine max
  Clone ID: PAT_MRT3847_28489C.1
cacccctttctttctttcttcacttcattccccttatcctctcttcagttacacacattctcagcaaaactttgtgagcattgtctattgctacatgcttatctaatcttgttacagggcttaaaagtgtgtgatgcaagcaatggagaacattcatcagagggaaatattggaagagcaaaggtttgaattgccaccaggattcaggtttcatccaacagatgaagaactcatcactcactacctctcacagaaggttcttgatagctgcttctgtgccagagccattggagaggctgatttgaacaagtgtgaaccatgggatttgccttggatggccaaaatgggtgaaaaggagtggtattttttctgtgtgagggacagaaaatacccaactggtcaaaggactaatagggccactggtgttggctactggaaggcaacaggcaaggacagagagatatataaggcaaaggcactgattggaatgaagaaaactcttgttttctacaaaggaagagctccaagtggtgaaaaaactagctgggtcatgcatgaatacagattagaagatgaacattctgtgcacaatccacccaaaaaggccatgaatgattgggccatctgcaggatttttcagaagagtaatggtgggaagaaaatgccaatttctgggttggtgagattcagcaattttgcaaaggacatgccttcattgatggattcttctccatacaacgacagtgaatcaaaacctgttttgggggagtcatcacagccaacatgcttctctgatccaaaccaaagtgaggaccaaaggacacaagatgaaaacatagcggatagctatgaaactctcatgttggcatcttcatattcttcaaacccctctgatatttcccctgcctcatggactttttctaaatctgcccctaccgtgtcccaccaatcactccaagttgggaattcacacagctcagattacttcatgcttcatcaggaacagtccatgttggggatgttgattgaaaaccatggagcaagtgctggccaaagaactcagaaagctcaggatagtaaaggctctgatgctgacatgtcctctgtgatgtacaacaactatgaaatgttccaaagatcatttgggaaccaggaatattcatcaccttccgtaggacatgtgtattctagtggcctatggggattttaaagaaggttgaaggatacactatatgcagattaaaattagagaaactttagggattaaatgctattatacatgtaaataaattgctcttaagctaatgttatcctacaaagtacaggaaatggatgttacggttttccaaagttgtatggcttgacagttttatattatattagtaaatttttatagt

SEQ ID NO: 63650 - DNA, 383 bp, Glycine max
  Clone ID: PAT_MRT3847_2848C.1
ccacgcgtccgaattcgagcgggcgcttttgttatatgactactgattgtttttttgcctacaaatgcgctcatatcactctaatattctggactccaattccattcttgctctatttgcaactgtgaatggcatcaatcctcttaacatttaaagtattacattaaatctctccttactttttgtgccattattaagcacattatccctcagtgacctttacgcgaaacatatggacttatctgactgcagcttcctaatggatgcatttctcctaactgtgtatggcccagcaaacaagggatccaattcgtgttcaatcaatactttgataaaatcatgtcaggaatagtttctacctcttggcttccatacacatcaat

SEQ ID NO: 63651 - DNA, 298 bp, Glycine max
  Clone ID: PAT_MRT3847_28490C.1
ccaaccgcttgtccgagttacatcgccctaaagttttccatcagaggggtacggataggagggatatccaccgccgtgataccaatcaatgggataccctccagctggatacccaccgccgggatatccgccaaacctaggctatactccgccgacctaccaggtgcagggttttcctccggcctacgctcatcaatacgctcagactccgccccgtcaacaaaattcatctggccctgcttgtttggaaggctgtgtggctgctctctgctgctgttgtctattggatgcatgcttc

SEQ ID NO: 63652 - DNA, 828 bp, Glycine max
  Clone ID: PAT_MRT3847_28491C.1
taaagaacaaatgacaattagaaagaaagcttttgcaataatagaagaagtttttgagaggcatggtgccactgccttagatactcctgtttttgaattgcgagaaactctcatgggaaaatatggagaagattcaaagttgatttatgatcttgctgaccagggtggggagcttctttctttgaggtatgacttgacagttccatttgctaggtttgtggctatgaatggtctggtatctttcaaaaggtaccaaatagccaaggtttacagaagggataacccatccaaaggaagataccgtgaattttatcaatgtgactttgatattgctggtactcctagtctatctgaaattatgggtccggactttgaggttgttaggattttgactgaactacttgatgagctggacattggggaatatgagataaagttgaatcatagaaagttactggatagcatgatgcaaatatgtggtgtacctcctgaaaagtttagaacaatatgttcaagcattgacaagttagacaaacagtcttttcaacagataagaaaagaaatggtggaagaaaaaggattaactgctgagacagctgacagaattgaaacttttgttaaagaaaaaggatctcctttagcattattatctaaatttaaacaagagggtagtgatttctcaaaacacaaaggagcttctgaagcattgaaagagctggaaattttatttatagctctggaaaaatcaaaacgcattgataaagtggtttttgacttgagtcttgccagaggtctggattattacactggaggtatatttgaaagctg

SEQ ID NO: 63653 - DNA, 560 bp, Glycine max
  Clone ID: PAT_MRT3847_28492C.1
ggaaaaaagtgacggattttcaaaggctggttggtaggtgggttccaaatgtgttgtggtgggcattgtgctaaacaatgattcttctctttggttatattctgagcaaagggaacaacattcactcgagactgctttgtccaagttgtatctcagataattgcgcatactgaagaggtttttttcaagaaaaccattcataatttgaggcatgttgcatatatatgcggtaaagagttaaaggatattccatactttatttgtccttataaaccacaagagttcatggctatgatggtgaggaactaaggatatatcacaattgaggttctttgagaagagaataaaatatcttaataaaggaattctaatattatttattcaattaatttctttataggccatttttatttattcttgaatgaaatataggtaagactaaacctttcacttctggaggatattagggatgatattgatttctgtttcaagcttgctaaggaggaatctgttatcattcttccaagtacaatcataaattatgttgcacttgagatccc

SEQ ID NO: 63654 - DNA, 179 bp, Glycine max
  Clone ID: PAT_MRT3847_28493C.1
tcataaatgaaaacatagaaactaggaattaagagcacaaaaatagtagcgtgtttgtttgtttattatttttccatatgtgatccaatatactggccccgagtattatttaacacgtacaatgtaacatttgggcgttcaccattaaccctttccctaaggtttaaaccgaaacactg

SEQ ID NO: 63655 - DNA, 351 bp, Glycine max
  Clone ID: PAT_MRT3847_28494C.1
acgtgatcatagtcgtagacatgatcagaagcgtatagtgatattagatcagatggattgatactgtcagcaaaatgcagaaagattaaacatcacgttgttcccacagtactaatgatgtatcatacacctgtcaaatccatgacatcatattgcatctaggctcatcaccatctctcttcagccctgcctaatacaccaattgtttgaaagccatcactaaatgccattcaactgcccatgatcatagccaaccttaacccacatagcacttagatctttgacgacacttccggccacatacaagctggaaaacatatggcgctttacactgcgcttgcttgctcatac

SEQ ID NO: 63656 - DNA, 364 bp, Glycine max
  Clone ID: PAT_MRT3847_28495C.1
gggttttggttttttttttagaaaaaaaaaactgttttaagaaaggaacgaacctgagccctgtttttcattgtttctaaaaaataaaatccctctttcgttaatcccatgctcccaggccaaccctttaagttttattccggccttttttgggggggggtgtttgtgaaccaaaataccccaaatgccaaaaatctaccccccggcccctatttaattttcccacatactggggagattgaaagatgccccaaccttttccttgaaaaataagcatggctaccccatgcaggctttttattttgtacgtatccccaaaatatcttaaaaaaagggggtgtccctttgcaaccccctacggtcc

SEQ ID NO: 63657 - DNA, 728 bp, Glycine max
  Clone ID: PAT_MRT3847_28496C.1
attggacctgtcctgaatgcaattttttaaattttgccagaaacagacgatgtctaaaatgcaaaacagcggggccgacaaaggaagccaatactaatgaagttgaaaggaaaaaaggagattggacttgcccacaatgtgggttcatgaattatgctaggaacacgaaatgtttgcgttgtcctgagacaaggcctaagaaacatcctggggactggaattgtcccgggtgtgggttcatgaattttgctagtaaaatgaagtgtttgcattgtcaagagccaaacccaagttccaagaaatatagtggggattggagttgccccaaatgcgatttctacaattatgcaagaaatatggcttgcctgaagtgcaatgctgaacgccctaaagaacaaccaaccgttgactatgaggaccatgaatggagacgatcaaactgattaggggaaaaaacgccatcgggctatatcatatagggaggtcacaattgtgctggtgggctgtaacaaatattttgttattgatgcattctctgcccatttttctttctcaatcttccaattaatggtgctaagtgcttcttcacttattggaaatggtacaaaaacgataattagagatactttaaagttatttgattgcatatgaatgtgttttaatataatcatgtacagatctaaaagtaaatttacagagattgaatcttgtgaatgttgttatagctt

SEQ ID NO: 63658 - DNA, 1720 bp, Glycine max
  Clone ID: PAT_MRT3847_28497C.1
ccatggaaggccaaaattccgccatataaacatgccattgcagcctatagtgttgccatagcgggcctcccttcacaaactgtctatggtggttggcaaaaatctgcaatggcgctgccatttaacaacattgacacttagtagggtaaacttgttagtaatttgtataaaggtacgattttcggatctaagccgcaccagctgtcacatttgggatcataattgaatattatcattaactatatcttgttttgatattttggcttaaaaaaaagctatatcttattttattgtataatggtgatcattattttcgggaattcccgggtcgacccacgcgtccgaaatgatgctgccgaagccaccctctcaacagaggcaaagggcaaaaaccatcgatgatgtttctctgagtctgaggattcacgcgttactgttactgttactcaactcttattcccttccttgattccaattctccgcacttcatttcatttgaattctgaaaaattagggttagggttttctttctttcagtgaaaaaagaagaagaagaaaaaagtggttttggagaaatggttgagcaatcggtgctggtgctcgaaaagcaagggccaaatccagtgttatcagaaggaatccacgattgggtgtttgagtgccatgggcttttgcacaatgcggttttgatcatcgcttcttttcttttcgtcttgtacttagcactgcaagctaaaaagagcttcctcagactctcccatggccgctcttatatcattatatcctattacgcttccctctggcttgtcagcatcctgaaagtgctctcctgggaaagcgagggcttggaacgctctctccctctagactacgcctggaattgttatccctctttatgacttctggaatgctgtttctagaaggaagtagtaccactggcttagaggcgttgacacgaacttttggtatatcagggattattgttggttttgatatcttgttgaaggaataggttttgacacgttgaaggcaatatatctgtttgcatttgggattccaattttcatcaacagtggttaccctactcctcacgtgaagtggaacttgtgggttatccacaagctgctgcttacccttgtttatggtttcatactgttcatgtatcattctaggtggagagaaaggttacctgcaaggcctgcttactataagtatgttaccattatgttcatcttgaatgcaattgcgctgtttgcttgtggcattactggaaacggcgctgcttttggtttctggttatatcatttcacggttgtatgttaccatgctgcctatcttcccctgctgtatataaccttcctggctgacttttttcaggaggaagatttgcatttggagaatgtgtactactctgaaatgaaagatgctggtttctttgaagcagattggaactgatgtggtatcgactgctagattaagattaataaggcctcaaaggtactaatggaagggcattcgttcacgaaatttgtaaataaagtaaatattttagtagatcgccttagtagataaatttttaaaaagaaaagctggtagcctcatgttagtgttatattagaatattctatgcgtgattatattgaatttaagttgtctgttagtgcaatgaatcaatttcttaagaaagatgagtactagaacaatcaattacctttaagcc

SEQ ID NO: 63659 - DNA, 732 bp, Glycine max
  Clone ID: PAT_MRT3847_28498C.1
ccacgcgtccgcagaggcaaagggcaaaaaccatcgatgatgtttctctgagtctgaggattcacgcgttactgttactgttactcaactcttattcccttccttgattccaattctccgcacttcatttcatttgaattctgaaaaattagggttagggttttctttctttcagtgaaaaaagaagaagaagaaaaaagtggttttggagaaatggttgagcaatcggtgctggtgctcgaaaagcaagggccaaatccagtgttatcagaaggaatccacgattgggtgtttgagtgccatgggcttttgcacaatgcggttttgatcatcgcttcttttcttttcgtcttgtacttagcactgcaagctaaaaagagcttcctcagactctcccatggccgctcttatatcattatatcctattacgcttccctctggcttgtcagcatccttaatcttctttggtgcttttcccaggtcaacctatttttcccccctatttctttaatccagcaaaaattaaaaattgctgatagtttagttctcatgtctcaatttagtgtgcatgtttggatgattcggaatattcagaaccgggttaaaatattagcttgcgtgattttaattaaatgttcacatgtttgggttcagcctgaagaatggattgattttgagttgaaaaaacttacttttctcttggataacaaaatttatagaagttttgctgct

SEQ ID NO: 63660 - DNA, 1593 bp, Glycine max
  Clone ID: PAT_MRT3847_28499C.1
ccacgcgtccgaaataattacagaagctgcccacacaaaagaggcatcgatgatgtttctctgagtcccaggattcacgcattaaccaactgttgctgttcctcaaaactcaatacgctacacactcttcaactcttattcccttcctcgattccacttctccggattagggttttctttctttcagtagaaaaagaaaagggtggtttgggagaaatggttgagcaatcggtgctggcactggaaaagcagcaagggtcaaatccagtgttatcagaaggaatccacgattgggtgtttgagtgccatgggtttttgcacaatgcgggtttgatcatcgcttcctttctcttcctcttgtacttagcactgcaagctaaaaagagcttcctcaaactctcccatggccgctcttatatcattatttcctattacgcttccctctggcttgtcagcatcctcaatcttctttggtgcttttcccaggcgtgggagtgctctcctgggaaagagtttgcgtggaacttgttgtccctctttactacttctggaatgttgtttctagaagtgagcttgctggcttttttgcttcaaggaaatagtaccactggcttagaggcgttgacacgaacttttggtatatcagggattattgttggttttgatatcttgttgaaggtaattctgtcgttttctctgtgagcttgctgcttgtcgttattataattaaagtgtatgaattgttgcaattgcaccttttccttgttaggcaatatatctgtttgcatttgggattccaattttcatcaacagtgattaccctactcctcacgtgaagtggaacttgtgggttgcccacgagctgctgcttacccttgtttatggtttcatactgttcatgtatcattctaggtggagagaaaggttacctggttagtgtcctggattgttatattattttatctttaattagttttatgatagcatagtttatcttcctctttttgcagcaaggcctgcttactataagtatgttaccattatgttcatcttgaatgcaattgcgctgtttgcttgtggcattactggaaacggcgctgcttttggtttctggttatatcatttcacggttgtatgttaccatgctgcctatcttcccctgctgtatataaccttcctggctgacttttttcaggaggaagatttgcatttggagaatgtgtactactctgaaatgaaagatgctggtttctttgaagcagattggaactgatgtggtatcgactgctagattaagattaataaggcctcaaaggtactaatggaagggcattcgttcacgaaatttgtaaataaagtaaatattttagtagatcgccttagtagataaatttttaaaaagaaaagctggtagcctcatgttagtgttatattagaatgttctatgcgtgattatattgaatttaagttgtctgttggtgcaatgaatcattttcttaagatgagtgctagaacagttgtaaaaaaagatgagtaccagaacaatgaattaccttttaagcatttaacgagtgtagaaaaatgttttaaaaa

SEQ ID NO: 63661 - DNA, 263 bp, Glycine max
  Clone ID: PAT_MRT3847_2849C.1
gcctttgaagaaacccaagtctgataagaaggattacgacgagattgatgtggctaccgttcagaccgacgcctacttccggatccaaagaatctcgctcaggcaatatggaaaagctacgaatcagggttgaccctggtctgataacggggattactacgagattgatgtggctaacgttcactagagaaaggaagaggagaaggagctaaaggagtttaaagccaaggcgcaacagaagggaagctttggacgttctgggc

SEQ ID NO: 63662 - DNA, 181 bp, Glycine max
  Clone ID: PAT_MRT3847_284C.1
gcaaaagatttatccagatgagtggaacaattttcttgaacgagtgaaatctactgaggaggatattaaagggagtgaatttgatgagttagtagaagaacgtcgtctttgggcatcatatagagggcaaacattgaccagaactggttatttctctttcactccaccccccccccccccc

SEQ ID NO: 63663 - DNA, 751 bp, Glycine max
  Clone ID: PAT_MRT3847_28500C.1
agcgcccacgcgtccgcccacgcgtccgtacggctgcgagaagacgacagaagggggccgcaagcagagatgacaacccgatttaagaagaaccgcaagaagcgcggccacgtcagcgccggccacggccgtattggaaagcaccgcaagcaccccggcggccggggaaatgccggcggcatgcaccaccacaggatcctcttcgacaagtaccacccggggttcttcgggaaggtagggatgaggtactttcataagctccgcaacaaattctactcccccatcgtcaacatcgacaagctatggtctctgataccccaagacgcgaaggacaaagccctaaaatcgaaggacactgcccctctaatcgacgtcactcagcacgggtacttcaaggttctcggaaaaggtgtgctgccccaaaaccagcccattgttgtgaaggccaagcttatttcgaagatcgcggagaagaagatcaaggaagccggtggtgctgttcttcttacggcttaggttaatttttttttcccatacattcgaggttgttgtttttgttttgtgtgttttgtttcggatgacttttttatattacatattgcaagtaatacattgtgtttttttattgtttcgttgttgtcggattcaggttaattaaaaggtttatgcgaacaattttgcgctaatgtcctaaaaaccttgttgtgataggaaatttattggaataattgaaacgaaatttgggaggatt

SEQ ID NO: 63664 - DNA, 2314 bp, Glycine max
  Clone ID: PAT_MRT3847_28501C.1
ctagggcgtgtgtgtaaaaattggggtgtggagaaagtaaataagaggaagggaaattaaaagatgaatatgaaggtgaatctgaagagagaataattgagggagttgttgaggaaggactatttttcataaaaggttctagaacttccatgagctcacctctgaatggatctgactcaacttgttcttgtgatgttccgctgtagaaattcatcgaagctgccatataaaaattttccaactacaccacacagatcttagattaaaaaaatcaacctgcgtttcttttaaaaattacaaaaaaaaaataataatttttttttaaaaaaaaaaagggatggaagaggtttaaaatagacaccccctttaatccaagaagaaagaaaaaaagcttaaagggatcaaaaacaaccctcttggctgaatgaaagaaaataataattccttaacaaaaggataaaaaaacaccggatctccattctgaaaacaccacgcgtccgcccagagagagtttctcaccaaacacacacttctcttctcttctcttctcttcattttctgtggttctcactttcttttctctaatcttctaatctcttattttcttcccccctctgttactccccgcttctctgaatccctttctgttaatcatctgtctttcaactcgtgattttttgggtttgcctcaccaaaaagattcaaactttgaaaatttttctcgaaagccaggtgttttcagaatcgagatccagctttttttttgtttgtttttaaaaaattattattttctttcgttcagccgcgagggttgtttttgatccctcaaaagctctctttctttttttctttcttggatttaaggggttgtctattttaaacctctcccatccttttttgttgtaatatttaaaaaccacaggttgatttttttaatctaagatctgtgtgtgtagttggaaaattgaatttttatatggcagctacgatgaatttctacaacgaaacatcacaacaagttcagtcagatccattcagaggagagctcatggaagttctagaaccttttatgaaaacttgtccttcctcaactccctctattctctcctcagattcaccttcaccttcacctcttaatttcccttcctcttctttactttctccacaccccaatttctacacacacactccccccccttcctacttactccaaagccaacaatccttaataggctttgagcaaccaccgagttcccttctcgggctcaaccacctaagcccgtctcagatttctcagatccaggcccagatcgaggcccaacagagccaaaaccagaacccacactctctcaactttctcggcccgaagcccgtcccaatgaagcacgtgggcgggcctccgaagcccacgaagctgtaccggggcgtaaggcagaggcattgggggaagtgggtggcggagatcaggctcccgaagaaccgaaccaggctctggctcggaaccttcgacacggcggaggaagctgctttggcttacgacaaagccgcgtataggctccgaggcgacttcgcgaggctgaacttcccgagcctgaaaggctcgtgccccggggaggagtacaagcctgtgcattccgcggtggacgctaagctcgacgcgatttgcgccaacttggcggaaatgcagaagcaagggaagacggagaaaggtgccaggtcagcgaagaaatcgaagcaaggtccgaaccaggaggccaagcccgaacctcaagcttccgctgaaagtgagggttctgcggattcttctccgctgtctgatcttacctttgatgtaaccgagccgcaatgggaacattttaatttgcagaagtttccttcttatgagatcgattgggattctctctgaacttcgtctttgtttttatgtctagtcttgtggctaataataataataatttaggttagtcttgctaggtggctgctgcaattgagtttttgaagattgcagtgcttcttgtaggatttcgattttttttttttttagcatttggttattggctatttggtcaatatgatgtaaatctctctaccttggtcagctgggtttttttttttttattattattttcttgcttggcctgggagaatgacttctagccttctaggtgttgtctatgctttgatgttcatccaagtatgttattattattattattgttgttgatgtaattcaattttatttgcatctcagaatttatgaatatatttgtatttcagcttaaaaaaaaaaaaaaaactcgagactagttctctc

SEQ ID NO: 63665 - DNA, 387 bp, Glycine max
  Clone ID: PAT_MRT3847_28502C.1
gagactgaaaaggcctttagcaaatcctcttagggtataaagcacaaggaacaactccacaagttcaaaacgctcaatgttgttcattcatcataacagcaaatcagcaattatgctatcaacaaagctatgaaccccatttatgatgtactactaaattgactactgaggcatcccaactcagaaatataaacaaagcataaaactgaaataaattgactcaagatgaaggaaaaactctcgtagtagtaacccgcagtgcaactagaacaatcaccgattacagagcatataggttgattctttaatgatattttgttggtggctatgtaggatttactttctggaatgacataattgattctccaagctgaatcaaaagtcttt

SEQ ID NO: 63666 - DNA, 138 bp, Glycine max
  Clone ID: PAT_MRT3847_28503C.1
atggaagagaaattaaagatagggaaactctcgttttgtgcccaacacgatgcaatcgctcagcggggcaatactcgttttgtacaaagaagtcacatggagaaacctgatatcagtgaaggcgcgcttaacgcatga

SEQ ID NO: 63667 - DNA, 746 bp, Glycine max
  Clone ID: PAT_MRT3847_28505C.1
cggccgctcgaggcggcgggcgggttcctcactcttcctctctacatagtttcattttactatctccttgtcctcgcatcgtatataccttcgtcgcaccccctccccatcccgacggctcctgatgtatctttctccacttcctcttcctcttccatctactcttgctccttactattatttgagaacgacctcttccatctacactctatcttctcctctgatagtatctacaccctcaactacatcgcactatcgtgattgtcctccaccgtctatgaccagctacacagaggacttgcaccatcattgtccatctgctccccgaacatagcgtatgacatgaacacctctgtcgcttgcccaatcttgtgcttgcgactggtcttatcatcagctccgcctcttctgtatatctaggtattccccaactccgcgtagctacgagaaatctttatgtgtaaacagacgattcatgacgaatcgtggaccattttccataggggcatgcaagtcctgtccataccgaaggatgtgatacctatgtcactgtggatgcacctgatcaacctcaacctaagagggcattctctgtacatacccgattatgactcagatgtggtaggatctatttgcatgatgggcgtcctgagcagcctgaccttactgtgcatctcagcgattttaacactgcccaggagacagatgatctatccagctcagcactacaaatgattcactgagag

SEQ ID NO: 63668 - DNA, 289 bp, Glycine max
  Clone ID: PAT_MRT3847_28506C.1
ctgcgagaagacgacagacggggtggaattgttataaatgcataacgtagtgcctgttgtgctgttatttctatcaggatcgctatcaatacccaccgctccaaaaacaaccttgttctcaaggttggacaataaaaacaagcaaaaacaaggatgagtttaggaaacaaaaggtacgtaagtcaagtggctttgtttgtgcgctagtatgggtcctaagaatgataagtcactctcagggtacctcagctgcaatgctccatgaacccttggtcctggaacgcgcaat

SEQ ID NO: 63669 - DNA, 1134 bp, Glycine max
  Clone ID: PAT_MRT3847_28507C.1
agcgaccctgcatttgggttatatcatcttatggaactgaaagctctcaagcctctcctatccatacaccatatagtgaatgagattagtcctctgaatttcttcaaagataatagacatgccagaagactcttctttcttcacttatgttagtttcagggctagtgtattagttgcagtcattgaaactctacaaggatacgttaacgtctatgaaggcttaagttcatttcctgaaatattcctaccaattttgaaattattaaatgaaatagcagaacagaaaaatatgtcaaatgcattatgagataaaattaaagatgtggctgagctcattaagttgaaagtggacaagcatcacactttaaggcgaccacttcaaatgcggaaacaaaagccagtaccaatcaaattactgaatcccaagtttgaggagaactatgtcaagggcagagactatgatcctgaccgtgaacgagctgaactgagaaaattgaagaaacatttgaagcgtgaagctaaaggggctgcacgagaattgcgtaaagacaactacttcttgctggaggtgaaggaaaaagagaggtctttacaggaaaaagatagagcagagaagtatggaagagctaaagctttccttcaagagcaagaacatgccttcaaatctggacaactaggaaaaggtaggaagaggaggagataaaaacttgtgtatttttccccatgaattgtgctgaaacacataaggctttaccttcagtcttaatcagctcaaggagtcatttttgtgcagcctagtctatagagtggataaatcatgaacatgcttggaatgtttatggtggttgactataagctaggtcttcctttccccacttactattaaaaagttgaagcaaatggtggtgataaatggtatattaatcttctgggaaggaatgcgttactcttgtattcaagtttgaggaataagagaattgtaagttgatgcaacttcatctaagttgtctctctggaaacattcatagccagcttggttgaaccaagataaaattttgcaaatgaattttcaatctaatttgtactgaatttcccttctacaattatatcgattcaaattccaatggatgatat

SEQ ID NO: 63670 - DNA, 238 bp, Glycine max
  Clone ID: PAT_MRT3847_28508C.1
aaacagaaaataaaaagcatgcttttactttcaggggaagcaattccttaaaaggggcctgttccatcgaccaaagggtgttcaccttggaaacctggtgcggttatgaataccaccgggcgggggaggccctcggccctccggattttaaagggccgccgggggccccccggacaccacccgacgggggggggttttccagccggtggacccttcctccgggtgggccgtttccagg

SEQ ID NO: 63671 - DNA, 352 bp, Glycine max
  unsure (1)..(352): unsure at all n locations
  Clone ID: PAT_MRT3847_28509C.1
ggggttttcttaaaagtaattcaaaaggggtcncttaaaaatttttgggngaagaaaatattcaaataaccaaataattttcttcaatcccaataaatttaattttcaaagactgaaccaaagggcaaatttcggcaattgaattaatcccaaggaaaacatttgtcgtncattaattttttaagcccgccgcccaaatccaaaattttcttttccaaacaaaatgaactgcagctttgtcataaccagcaagcacaccagcacctgcaacagcacgcaatatgttcgcaccagcacctttgaagaatgacttggcacccttatttgcgacgattgtttggaatgcatgcaa

SEQ ID NO: 63672 - DNA, 887 bp, Glycine max
  unsure (1)..(887): unsure at all n locations
  Clone ID: PAT_MRT3847_2850C.1
cacgcgtccgcgaacatcatagtttcctcactcgaaccttactccaatagatgtaatgcactaattagcattaattagcattaaccaccgaatctccttcctcggattcagcttcatcttatcaatggcaattctcgcgccacgcttttcattctcagtgattcctcggaatcaccacaaactcaaacgccctttttctcacaaaccctttatccaaaggaagcagctttggcaccaacttggattgcaaagcctcgtttcccccttttcccttccccccacttcttcaaaattgtgtgccacgtcacggttgtccattgaggaaacggagcagcaaatcggaaccttgacccgacccgaagacctaaaagggtcattggcgtatctgtttaggactgaaactggtggcggtttggtgaaagttcatgtcacaaggagaaatgataggtattctgtttacattgagatttcttcgttggatataagtggcggtgttggtgaagcgcttttgttgtgttggggtgtgtatagaagtgattcatcgtgttttgtggatctggatacgataggtttgagtgaaaatgcggcaatggggatgaatgttagtcccttggtgcaaaattctgatggaaagtttgcaattgagttggaatttgatgccaagcatgttcctttgtacttgtcgtttttcttgatgtcgtctttggattcagggttgggagatcagaagccataggagaacgaatttntgcatgccggttgggtcgcttcctgggtacccttgtcctttggggtctcttattctcctgatgggtctgtgaatttttctattttctctagacatgctgaagtggtgggttttgtgcttgtatgatgagaatggcgtg

SEQ ID NO: 63673 - DNA, 299 bp, Glycine max
  Clone ID: PAT_MRT3847_28510C.1
atgcaagcagagttcccgcgttatgcttttaataaaaaaaacgactactcattattttctataataggatagggaaccttgtattgtatatcttgcacaacaaccaatgagtgttttaacccaccacaagtcactctgacctctctctgaatgagcatgttcaactacaaggaggctgtgattggaggataccctcgctacctaggcgtgaccgccaaactaatgactatgattaaataaaggacattggtggctctctcaagttcctgagaggcgcgttgtctatgaagagaaagttg

SEQ ID NO: 63674 - DNA, 543 bp, Glycine max
  unsure (1)..(543): unsure at all n locations
  Clone ID: PAT_MRT3847_28511C.1
gtcgcatgcacgcgtacgtnagctcggaattcggctcgaggcgactggcaaagaagaaagctgacctttatgatgaggagcaagaccaggacgttacactcgcacaagacttagaagatatgtgggagcaggaattcctccagttcagacctggagctcgggaaacagaagccgataaaaaaaatgacagaacctcattgcatcgtaagctagacagaaacctcattctcttagtcagagagaaacttggagaccaagatctttggatgcttcctcaagtcgagtggcagcctggggagacccttcgagggacagctgagcgaatcctggccacactctcggaaaacaacatggaagccaagttcttagggaatgcaccctgtggccactacaagttcaagttccctaaggcaattcggacagagagtgaccttggggtcaaagtcttcttcttcaaagctctgctgctcacaggagactttgtgcagactgggaaaaagggtcggcatgtgtgggccagtaaggaagagctaggcgactatc

SEQ ID NO: 63675 - DNA, 417 bp, Glycine max
  Clone ID: PAT_MRT3847_28512C.1
cacaaaaagaccaatttacattacttatcttacccaatcaacttactggttaatagtaaacataatccagcatatatctgaaagttaaaattacaatctactaattaaatcacatacttcttgaaaaccttaacagttacaggtagttaaacacttgaaaccagtatcatcaacgttgactacacttatagctctctgaaaggtgccaaaggataaccacagtgacactcatttccaacaaaagcacttgacggaaactaactctcgacaagctgtccacaaatactgttataggtaacattgaacttcgtaaggccatcaacactgtttggaacactgcgaaacacccagttacgagtctgatacactgactaaaatctctgcccaaaccttatcttacccagataagactttacc

SEQ ID NO: 63676 - DNA, 616 bp, Glycine max
  Clone ID: PAT_MRT3847_28513C.1
ggagcagaaggaccagtaaagaaatttatgatggaatcattggtcaaggttcctgcaaataccgacccttgcaccatgcctgcccctttcgatcctccatctttgaacgctcaattacagagaaaggaaagttcaattcaacaagttgattcatgggagaaaagttactgggagaaccaaaccataacatcttagtaaatatatatatctttttccatattcaagtagacaaattcagtctgtagaatatttatcccttccacacatatatatagggttatctttggagaggatataagtagaatttagattatctttgtacttgtttaaagaaaccatatcatacttacgaattatgagttttagactacacgagagaaaaaaaaaaacaatttagtttgttaatttcgtaatatgagaaacttgttatttttcaaaaaattcaacttaagtcattcattcttagaatatcttgggaggactccagtagaattttgattatcctgtacgtggctaaaggaaccctatcatgcgtggcgaattatcagttttagacttttccaagaaaaaaaaatagtttgtttaatttggaatgttataaaactttttgtttttg

SEQ ID NO: 63677 - DNA, 339 bp, Glycine max
  Clone ID: PAT_MRT3847_28514C.1
agaaaaaacaaaaaaacaaaaacagactgatccaaaaaaaaccaaagcggttaaaaaggcaacaaggtagggtgcggccgaagatgatgaacgaaagtgtcgacgcctgctaagccgtaagcagcccaactccattatgtctccaaatagtcatggctcggcaagcatccattgctgcagcttgggaggctgtcctgttgagttcaaactatgccagatctgtagttcatatcataacgtctaggtgtgggtgtatgtctgtgccttgctgtacattcttgatcaaagttgtgtggtgtaagatggtagataggccactgttctgcagtgtgcgatcaa

SEQ ID NO: 63678 - DNA, 212 bp, Glycine max
  Clone ID: PAT_MRT3847_28515C.1
ctagcctccatgtattcctcaagcaggtttagacgctacagctaagcaagctgctgagaaggcaaagagtaacactggacaggatctggtggatgagaatagagctgcgtgtgtatactccgtgaattctggaggacttacatgatagtcgatgtcgaatggggatacgatgtactatccgatctcgtccatggacacaacgtatattggta

SEQ ID NO: 63679 - DNA, 366 bp, Glycine max
  Clone ID: PAT_MRT3847_28516C.1
agaggaccctagagaaagagattgcttgttaacaattctgcacagagtctatgggaaattcatgattcataggcctttcatacggaaatctgttagcaacatcatctaccggtttgttttcgagaccgagcgacataatggaatcgcggagctgttggagatttttgggagtgtcattagcgggtttgccttgccattgaaggaagagcacaagatatttttgttgagggctttggttcctttgcacaaacctaaatctgttggcatttatcatcagcagttaacatattgtgttgtacagttcatagacaaggaccaaagactggctagctcagtgataaagggactattgaagtactggccagt

SEQ ID NO: 63680 - DNA, 333 bp, Glycine max
  Clone ID: PAT_MRT3847_28517C.1
acccacgcgtccactcactcgtcagactcattctccgatcaccattctctgaagacatcggccctggatgtagcaacaacgatatcgagcatcgcgtcacctcggtgcctcgtcatactcttgggagtacacgaattctgcatgtctacattggagtttgctctgctccaggctctagctgctatgttccgtttcagaaactagttagaggacatcagtcaggcaagttcaccagattcatttcagatggactggctatttttataccggtcaccatgtgatctatcttgtaggcagtctgcagatcatatacagacttttcagttcatattt

SEQ ID NO: 63681 - DNA, 340 bp, Glycine max
  Clone ID: PAT_MRT3847_28518C.1
ggccttatgatctactttgacttgcgtttaaaattatggttccgagcaaacacatcaccaacttcatcaccaacactaataacaggattagcgttatgggtctcttgctttctaggaattggcctagcaaactcatataccctgttctttacatcaataaggtttcaaaggatgatgatcccgcaccaatatggagaacatggtggttgtgggatatgctagactggcgggcgtttgcagcgctatgacaaatgctgtggacatgttgtgggatgcattccttccagatgcaagaacaatgaggcacaggtttaggtattagaggttcttgagatttgtg

SEQ ID NO: 63682 - DNA, 3334 bp, Glycine max
  Clone ID: PAT_MRT3847_28519C.1
gaggcatgaagagaaaatgtaaattggaaaagtgcagggtaacccccacaattctcagacacaaacaacacttcctattatgtcattgcatttcaggagacaacaattcaatgacaaaaatcacactagactatatcataatctgtgcccctaaaccacaaaacatctaactcatcaatgtcaatctctttcaaataggattataaaatacacaagtctatatttaaccaagaacacgaaatcttcaaattaaaattcctcacagctacaaaaatatgagtacaaccctaaagtcaatcactggtagataggaggccttttatcgaatttccaagagtcagctagcttctactctgctgttggtacttcccatgctgtagttactactacaggaaaattagatgagtgaccatgaatccgaattatatactcagtactggcatatactaaataaattgtcacccgcgcattaaatcaatgtcaatatgggaattgcgcatatccaatggtcgcgatgcaggccaaggacttaaagatgaggttggagtaagattttgatttggggaaatactattcactgcaactggattatgaaccgtctgatgatcagtctccatagcaacttctgcaccttctgaaccttcttttttctttatctttgtctttgatgcaccccatgaaaagctcccaagtatcacctgaactggacttgcagcaataagcactccaccaactcctccaccgatgacacgaccatcaggacttggcaagtgaaacacttaatgcaacagttcgatttgcgggtgccaccactatcagcaaccaagtaagagcctgacaggcacactatctcaaaacgcccctcatatgtgacagtgccaccatgatgtgagagccatacacgaaatctgtcacagtagacacgtggtgaccctattcgctgacaaaagtacatatagctctaggcccctgctgagaaaatgacatgatctttgttgcaatgtcttctccaactgcaatggtgatgatatgaggagtgaaacccattccagctgaaccagacatcaattcaccaagagaagccaactgctgtttcttcccagacccaggcgggcgccctctgccccgtttctggccttgtgccaaggctccaggatgactagccggtgtcggagtcaacgccaacgacacagctccatcgggcccatattttctaggccttcctctcttccttttgacagtttccccaggcagagccccagaaggagcactcacattgacacatggagctgaaattcccgaagactctaagggtaatgtggatccaatggtaccaccacccccaatgcttgattgacatggtagattagggttagacaatggtccaatattaggtgaattgtgcagtacaggttggtttccagcaccaggtattcctctctgcatatagtaagatgcagagccaggtaatgtcatttggtcccctcgatccatgcatttacttcttcaagttccttcacaaactttgacacaccccaaaaatattcgataccacctagttatgtgaggagagagaatcaaaactcaaaagggtatgcaatgttgtggaggtggaaaaattggagtgttgttccccttatgaaggcagtgagagttgaaaaaagttcaacggtttcatgtggaattaaaagagcggtggtgggtgacagaagagcaagagcacagaggagagagagtgcattagtagagtagtaagtagtgtgtgaaagtgagaagaacaagaacaaaaacaccaacattaacttcagaatgagaaaaaaaaaaacaaaacatgagtaatgaatagtgatgtttttctctttctctctctgggtgcgtctcagctgcacagggccttatcattgcgtttgcttttccttcgggtctctctcgtgagagtctctctgttcgctctctctctcctgcttgaggcctgatctggttgcctcccaatattcaataccacctagttctgttcccatatatagtccatgatcacaaattttgtgggaaaagaaaaatgcacaaatcagaaaactatgaaatcatttacaagtttgccaacaagtgcttaaattatattagcaacatgttataggcttcccacagatgaaatttctcaacgatgacaccctattgaaatatacatatgaagcaagagatagggacctagactcaatttaaggtacaaaacatgttgaagacaaccaaaaagtagaaagatagatcaatggaaagaatggaaagcctagctagaaggtagttcacacaaacaagggaaacattctccaaccacaatatgacatgtctaacagaagacaaaaaaaaaaaactatgtacagcttaccaaactataagaaacaacaaaaaaaggcttcatgttgaagataaaggactagaagaacatgaaaaaaggtccactctgaccaacacccatcaaaaaccttaaacaccaagcaatacaagtgccgacacccagaaaatcaccaccgcaaaaaagtacaagtgaaacaaaaacaaaatgaaggaattactctaggccaatcccaatgccataaaaagcttcctaacccagttccaaaaaagagcagaaaatgccgcatcacaccaaagggacccccaaaatcacaaagaaaaacaagtaaaacatcagccacaatggcttttccatggaaatttacacaaactttggagaactgggttcataattagaacagattcaactccccaaacacacaaaagagagaatgcaacatgggtttcagagagcacagagaaaagggaaaagggaatcatactaacattttaggaacaggatcaaaaagctgtggtgcacattcacagttccacctgtgaagaaatggaagctagtgattgattcagttgaaaaaaagttgaacagttttttttttttctcttggggaaatgaagagtggtggcggagttacacagagaaagagatgtgagagaaccactgtgtcactgtgtcagtgcaaagaagcaaattactccccaacaatggaaaaaagagggtaaaatgaataaaaaaagaaagcttcaaaattgaaaagagaaaaaaaaaagaaagataatctttcttttctctctcaatataataactctttttgcagtgtctcagctgcaaaagtccttatctggttgcatatttttctagggctaccttctctttctctctctaaaaaaaaggtattttttcactttctctctcctttttttttttagctatgatatgatcaattgacgcggctctctctctgtgagtgtgataataaaa

SEQ ID NO: 63683 - DNA, 399 bp, Glycine max
  Clone ID: PAT_MRT3847_2851C.1
ggcgttggtggtttttattaaaaaatatacaccacttaccctagtaaggtattttgtggggtccctggtgcacatcaaaacacctattttaattaatggaaagctctgcgcgcaaaacaagaataaatctcatactatacagagaattcttgtattgagcaagacgtaaaccataggtatcggggtgccggttctcgcagctctcaaaaaaaaactggctccgacaaaataaaggtgcagcgctacatataacaccccttaaaattgctataaagggtagagtgatcatatttatacaaatcgacattgctacccgcgcattaagcctaaagagaaattcttatggggtgggcccatagggatgttgaagataaccacttttggccaaaaaatagttat

SEQ ID NO: 63684 - DNA, 119 bp, Glycine max
  Clone ID: PAT_MRT3847_28520C.1
gaagggggaaacgaaattaatagtgatttatgaagaatactaagaaagcgtgagtcatgtaggatggatgcctccaccgtcattcgttgaccggcgcgtagccagttcaaaatcgtttg

SEQ ID NO: 63685 - DNA, 431 bp, Glycine max
  Clone ID: PAT_MRT3847_28521C.1
cgacccacgcgtccggacagccgtccgaacggatgcgaggacactgccgaagggggtggcgccgctcacataagggctctgcactctgtcttacggaaactattatattcgcttctctgctcaagcctcttcttctccagcactggcatctcataatgttggttatacacacatgctaccgacgagagaacttaaactagcttcagaatctttttcagatggaaagactagtactcaggaactgcacacggttactgaaaaccgtatgtcagccatatggaatcacatggctgatgctggaataaagtatattcctagctgcaacttctaaatttacgatcaaatactggacacaacaaccatgcacaggtcaattccatctagatataaccgtaacggtggtgacattggatttgatgaatacttctcaa

SEQ ID NO: 63686 - DNA, 405 bp, Glycine max
  Clone ID: PAT_MRT3847_28522C.1
aaagggaaatccttttttaatttaagctttccccccataggcccttgggggacctattacccaaggggacatagttactattcccgtttttctacacttaacaaagggcctccaacccttggcttgttttatccattcttattgactggggccagaacttgctagagcccaaaaggacaaaaggggggtaccacatgcaaaaagggctctttaagccaaagtttttctttgaaactcctgaggtggaaccaggaacctaaaagggttgttgttcttaaactgcctggccgggtggctttttagggtaaaagggggctaaattactttctgtggcaatgcgttaaaaaataatttcgcccctgaaaggtttccaagcgagggtctatcattggtcttgaaagaaac

SEQ ID NO: 63687 - DNA, 476 bp, Glycine max
  unsure (1)..(476): unsure at all n locations
  Clone ID: PAT_MRT3847_28523C.1
tgaggctagagcaagtggacatcaatatattaaataatacacgagtgttatttggtattccaattgaaaagatgcaagcgggtccagtattaatggagatggtttaccattcanacaaaagaactcctgtaaacttcagtactatctgtctcttaatccaatacgataagcccatcatacaggctttgtcgctacaaaggattcgaagattatcaatttctcaccgacctcacctgatatgccaaccgtttattaacacctaaaattaccctaatgcatttaaccaaccccaaccattgacaaatgtttctacttccctagagattacaatctactttttcaacatcaattacacaatcatgcagttgaagataaatatctctagctaagatgctcatatctatgatgctgacacatatacacccataaaccgtgttattcaagcgcgcaaaagatatccctctgatcatggtcat

SEQ ID NO: 63688 - DNA, 456 bp, Glycine max
  Clone ID: PAT_MRT3847_28524C.1
agctgaaatcggtctctatcaattctgagatggtactcgtgggaggaacacaatcctgtcccgctttgctctcaaattccagcagcgttagattctgtagtcaactcaactgtttcggtgagttatttcgaaggaacaacgaagcctcgaataaaatttaattggctgataaagctgtcaccagttcagttggtccagataatcttgcggcagaaacgagttttcatcatattaatggcaccaatggctcaatttctagcttgtgttccagaaatctgagagtacttgatgcctctgatgatgtgtatgaggctgttgtaattgattcagaccggttaccagacaacccttctaccttcgcagctaatatgcgttaatctcttcatcattggaaaaaggggaagaaggggatttggcttatattgccatcaaagcaatctgattttgttccaatag

SEQ ID NO: 63689 - DNA, 690 bp, Glycine max
  Clone ID: PAT_MRT3847_28525C.1
ggagagttacagagaggaaagaaaatacatgtaaatggtttaaggaataactaagatgaggtgcaaaattagaatttaaagaatgagtttaatgtctaatgatggtgtaaaacaattttacatgtcattcataaatcatcatttgaattactttaagataattattttaaaagtcaacaaacttatcatacatgatagattatgattgaatgactattaaaacttttttatattatcagtgtataacttttttctcttaaaaaaataatcaatataagagtagaaaattaggattcatataataatgaagatggatggtgcaaaaataaagattaataatcatgaaattaaagtagataaaaaaatataatttttattacttttatacaaaagaatgtttttgataataaaaaatatataaaagagagaagggtgcacttaaaaaatgtgaaaagtaaatagcagaagcctctaaggatcattttctcgggcccaggtagtttactataattggaccttgggcccatttaaaaaaattagttcttgatacacagattttattttcatttttcacagatcttactgagaattaatattattcattttttctttttttttatatttcactcaaattttctcttctatcacggacatagatttaaaattggtaagccaacacaccgaaatacc

SEQ ID NO: 63690 - DNA, 214 bp, Glycine max
  Clone ID: PAT_MRT3847_28526C.1
ctgcgaggttgtggaagttgggacttccaaaactggaaagcacgggcacgctaaatgtcactttagtggaattgatgttttcactgccaagaaacttatagatattgtgccctcttctggcgactggaatattcctcatgggaatcggacgcattaccatctcattgatattactaaagatagatgggggactctacttacgaaaaataataac

SEQ ID NO: 63691 - DNA, 1099 bp, Glycine max
  Clone ID: PAT_MRT3847_28527C.1
ctctcctcctcaccctgcctcttccctctcgctccctccgcctgatactgcgcagcctcgctctcacgctctctctccaactaagatcatcatcccatgtccaaaccattctttgaaactcaggcttcactactcccttagttcagttgcaatggaagaatggtactacaagaagagccaagtgccagcatttgggagttgggattggaacgataacctacctttcacacaagacatcgtcccatttccaaaccactcgttggctccctggccgcacttctcccttagttcagctacaatggaagaatgccactacaagaagagccaggtgccagcttttgggagttgggattggaacgataacctacatttcacacagtgcttcgagtcagcgaggcaagctggtttgctacgatgtagttactctgagtctgaggaacgtgacctttatgttacaggggatttgtacgagaataatgttgtcacacccgccatgatcgttgttcctcgcagaagggcaaaggtggttgaccagcatgaaaaagaaacaaaattgaagaattggatcagtgatgatgtggatagtgaaccacccagcccaactccactgccaaggccgacttcaaaacccgttgatgaggacttgtacaagatctcaccggggcttctttatgccaaagctaaaaagaagagagggttgtgcttcttttctagttgcttgttaccaacttgcgttgcttgaaattcagagaatgtggtcgatgataatgtacatatacgtgagaaatagaggaatagatacttcaattggatgatgctcatgtaaaagcaacatattttgagtacaagaagactattatgatagtcatgacattggaatggtcttcttgccaatttagagggtggttttttgtttcgcttttttcttttagtctttgtactatgggctgagttgttgttatgactaactgtgtttgaaaaggtgtgtaaagaatgaaaaagaaaaagggtagagaaattttttatcagtccctatcagctaattcttttgcatataccctatatgttgacaaaatgattgctcaatggaatgacttgt

SEQ ID NO: 63692 - DNA, 104 bp, Glycine max
  Clone ID: PAT_MRT3847_28528C.1
cttagatttccattacgggaatgatgcggatgatcacctgaaacgctttggctggtttgctgatgacgattagagaatggactgatgataatcgcctacttgga

SEQ ID NO: 63693 - DNA, 297 bp, Glycine max
  Clone ID: PAT_MRT3847_28529C.1
aggcaatgtagattttcatcagaataggctcacataacaacatacagttacgtatatttaaggaacaaggtgaatacacatgtagggataggcatgcttgacattatggctcttaaaagatggtgctcttaagaactgtatgttgttatgtgaggcaatgtagattttcatcagaataggctaaaacaatgaacagcagatcattctttgattctttagagtttgtataggatatatattactcttgttacttacgtataattctttatattacagtatgaagccttgtactattgt

SEQ ID NO: 63694 - DNA, 506 bp, Glycine max
  Clone ID: PAT_MRT3847_2852C.1
ggctcggtaattcaatttgcttcaaaattatatatataacatatacaaatcttattcacccctcgttgtcgaaattcattaaaccgtgtagttctttgcaccgacaaattgaattgaaccgaatggatgaaattcgatttttgtaattggctccattgtcagattcatatttattgaaaatgaaacgatccgtattattttagaaaaatatatttaaatgatcaattgccactacacttatattttaaatggttttttaaattcaaaccaaaccggaccatttgattttgattggttgagtttttttattttttttcccaaaccaaattgacatgttctgtgcaccctcaacgaagagggtgagtattgttctccccttcacaagacaaactggcttgatcgcgcaaagttaaaacaaacaggttatgtgattgatttgcatgacaaatgatcacagactgacagtctctaatgattcacaactctttttgcacaaaagtctttgt

SEQ ID NO: 63695 - DNA, 427 bp, Glycine max
  Clone ID: PAT_MRT3847_28530C.1
aagtaggatacaaccctgacaagattccttttgttcctatctctggttttgagggagacaacatgatttagaggtccacaaaccttggctggtaggggggtgcaactcttctttatgcactttaccacattattgagcccaataagccctcttacaagcccctcaagcttccccttcaggatgtgtacaaaattggaggtattggaactgtgccaatgggacatgtttagaccggtgtctttaaacctggaatggtggtgactttttcaccaactggactgacaactgaagtcaaatctgtggagatgcaccattaatctcttacatatgcacatccttgtgacaatgtgggattcaatgttaagaatgttgcttttaaagattttaaacgtggttatttttcctcaaactcaaaggatgacccttc

SEQ ID NO: 63696 - DNA, 657 bp, Glycine max
  Clone ID: PAT_MRT3847_28531C.1
tggagactcaatttcttccttctctctctatctttatccgctggtattcttcttcagctgcagctgcaaggtttcaagaaagcttataaaaggagagaacatctgtttttatcaagctctgatggcagggttaaattttgaagccacatatactgacaaccatgatattctgaagatatttgcagctgaaggtgttgaattccttttatcttgtgaaggaaaggtacccgtatcagaatgcaatgggaaaattatatgcctatttttcactgcaaactggtgtagaccttgcagagctttcattccccgtcttgttgaactttatgaaacactgagaaagaggggaataaatctagagatcatcttcatctcctttgaccgtgatgaggatggatttaaagaacacttcaagaacatgccatggctagccgtcccatttgatatggcataaccattgaagaagacttgattggatgcattgaggattatggtgctgatgcatttcctttcacaaggaagaggcatgaggaattgaaagccatagatataaggaagcgtgaggaagccaacttggaagaattattgggacacaaagggtgccactttctcatctcaggagatgatagaaaggtgcccatatttgaactagctggtaaa

SEQ ID NO: 63697 - DNA, 1656 bp, Glycine max
  Clone ID: PAT_MRT3847_28532C.1
acgacatcgaaagcgcatcacagtgacaactggtggagactcaatttcttccttctctctctatctttatccgctggtattcttcttcagctgcagctgcaaggtttcaagaaagcttataaaaggagagaacatctgtttttatcaagctctgatggcagggttaaattttgaagccacatatactgacaaccatgatattctgaagatatttgcagctgaaggtgttgaattccttttatcttgtgaaggaaaggtacccgtatcagaatgcaatgggaaaattatatgcctatttttcactgcaaactggtgtagaccttgcagagctttcattccccgtcttgttgaactttatgaaacactgagaaagaggggaataaatctagagatcatcttcatctcctttgaccgtgatgaggatggatttaaagaacacttcaagaacatgccatggctagccgtcccatttgatgtaagtttgcacagaagactgattgacagataccgaattgatcgaatcccatcattcgttccattatgttcagatggcataaccattgaagaagacttgattggatgcattgaggattatggtgctgatgcatttcctttcacaaggaagaggcatgaggaattgaaagccatagatataaggaagcgtgaggaagcaaacttggaagaattattgggacacaaagggtgccactttctcatctcaggagatgatagaaaggtgcccatatctgaactagctggtaaaaccataggcctttattttggggcctattggtctcctccttgctgcgccttcactgtccaacttaccgatgcatacaacaatctcaaggtggaaaaaggcgactgctttgagattgttttaatctcaacagatagagaccttgaggaattcaatgtcaacaaaagtagtatgccctggcttgctgtcccatacgaggacaggacaaggcatgaccttcgaagaatctttgatgtaaagggcattcctgctttggttctcattggaccagatggcaaagtcattagtgtgaatgggaagttaatggtctcctcatacggtgcagaagctttcccgttcaccgaatcacggataagagacctcgaagcagctcttagaaaggaaggagaggctttgcctcagcaggttgaggatgtgaagcatgaacatgtactgaaattggatatggccaaagcatatgtatgtgattcatgtaaaaagcaaggcaagttttggacattctcttgtgatgtctgtgactatgaccttcacccaagttgtctagaaaaggtcaacaaggactaaagttgatagagaacagaaacacacaagtttgctaccaattacatcaactagctatttttgtggtgatggaaataaagttgtaatacctaagaaactttaaacactatatatatctttctatcctatcagtatgttgttatacttgccgtttgaaattaagagtgatttaaatcaggtgaatgtggtaagggaaagatctgaatagaattactcagtttaagaaagtttaggcacacactatttaaagtatctatggtttttaattggggaggatgtctgtatgataattttgatacgactttatacatacccaagggtaaatttaatggtgg

SEQ ID NO: 63698 - DNA, 1251 bp, Glycine max
  Clone ID: PAT_MRT3847_28533C.1
ggctcgagtcgtagagattcttccacttcctacctctacctctgaacttgccaaaccctctttttaacaaagacaaaggagtcagagaagggagagaaaacttgatcgtttttgttttgtagaaacaacttggtatagttaataataatatttgaggagatcgagagagcaaagacaaagtttgtagtttgtaagtacagagaaagatcacatgattgcgaagacaaacacgattatgcctatcattggcaaactgtactgttcatcgtctgagacggtgcttgtggtgaggaggaggccacacgtggtgaatggtgggggttttgtagtcatggattgtagtgcccagagggttgtgttcagggtcgatggttgtggtgttcgtggcaaacgtcccacgcgtccgcccacgcgtccggacgacagaagggggatttgaggttgagagattgagtttcatattaacatagggaaaggttgcagtttggttaatttaacattttcaagtgtgcagggaggcatggttgaggccttaagcatttacaagaagtggaaatgctacagcttggactacgaaggatctcggaagctggttttcagcttgagagaacccaattcttgtttggttaagaacaatgcaatcagaatcttcactaggaacagaggccgtgactttaagatcagtggctgtttcccggataagtgttgtagcattgttgactctaaaggcaacgaggtagcacaggtggggatgatgaaggaagtggaggaattgattgaaagcaaggatttgtaccatgtggtggtgaatcctgggatggatcaagcttttgttttcggagtcatcgctgtccttgattacatttatggcgaatctacccaccgctaaatccaaaactctactgagaatgtgctctgagttttgtgtttttcttttttggtgtgtaggatcactctttctcctatcacacaggcatataaatggggattgaagattttctaaagaagaaagggatcatcaacttgtctagaatcaattttctaaagttgtatattacgaagaaatgtggctattaaggcattttcccttataataaagggatttgtcttgtataaatgtataataatgatcagtgtgatttgttacctataaaaaaagtgctttcacccgatgtgaaaaataaatatataaaattaataactcgagttggggcccgtgcccaaatggcgcctatttaaatgtgtttaccg

SEQ ID NO: 63699 - DNA, 999 bp, Glycine max
  Clone ID: PAT_MRT3847_28534C.1
cgacgaagtggtggaggatgttgcgaagggataacatcactcactcccacccaaaagaatcaagaagagaagaaaagcaaagaggaagaagacacagaaggagaggttcaacatcttcttcatctatggcgacgccggattctgacgctaccactcagcctcaagattccgacactgctcccaattccagtcctcccaacgccctcgtccccgccgctcccgccgtttgcctccttcgcttcgccaccgactccgccggcggcgctctcatgggctccgtctttggatacggtgctggattgtttaagaagaaaggttttaaaggatcctttgtagaagcagggtcttatgcaaagacatttgcagttttgtctggagttcatagtttggttgtttgcatcttgaaaaggcttagaggaaaagatgatgtcattaatgcgggtgttgctggatgttgcactggtcttgctctaagttttccaggtgcaccacaagctcttctgcagagctgtctcacttttggggcattttcttttatcatggaagggctaaacaagcagcaaccagcacttgcagttcccatgtcctggaaaaaaactgtgcaacacaatgcatgtcctcccttggtactcccccttcaactctctcttccagacgaactaaaagatgccttctcctttttctccgagtctttgaagaagcgcagcaagggaccttatcctacatcttgataagaaattaggatatcacgattttctagcatctgtagataagatgtgcaccctttgccattttaacttttaggctccttgtatcgtttgtcaacatttctttttgatgaacttaattaagggtgacatcaaattgtccaaggacatgggttgtttacttgcttctgagttccaatatggcatcttaattctaccatgttctttcttggtggtttgttgaacttggacggcctattgaatgatgattgatttagcttgacccgtgccc

SEQ ID NO: 63700 - DNA, 282 bp, Glycine max
  Clone ID: PAT_MRT3847_28535C.1
tttcctattattcaaggttaataatcatcaaatttcaaccccttatccagtggtaacatattaacaaatgtctacctatttacattttattcttataacctcctcaacccactttatatcattatctttaaattttcatttaattatacaacaaattctttaaaaataaatcattttctcttcttaacttctacttatttatctattaatccatctacaattattttctaatatttcaataaaatctcttctactatattatctctttcacttaattccaaa

SEQ ID NO: 63701 - DNA, 249 bp, Glycine max
  Clone ID: PAT_MRT3847_28536C.1
ctctaagacaaaagactactaatgaattttattggcataacttaattttagggaaaatggtgattaccaaaaaggggccttccataataattaaagaatggtgattggtgaatactcattgcaattacaagggttaaaggggaatggggggacaacaaattttggtcacttaaaggtaaacaccccattttggccgctggtgtcacatgggtaagcacagtcaatagctttgacaacttgtggaacaaa

SEQ ID NO: 63702 - DNA, 272 bp, Glycine max
  Clone ID: PAT_MRT3847_28537C.1
cttgatatattttttttttctttattattcattttgcaaaaaaaaacaccccagaacccggtgatcacgtggacgccttctaaaaaaaatctggtgcaagcaggggaagccccaagggggggctttcccttttaacccacaagacaaaaaaggggcctaaacccaccctgttccacacgggggtgggataaggcggacccaccttccgaaaaaaagccctgaaactacgccaattgaacctagggggggcaaatgggagcccccctgaacgg

SEQ ID NO: 63703 - DNA, 1459 bp, Glycine max
  Clone ID: PAT_MRT3847_28538C.1
gaagaaggaacggatgggatgcaagattccccaccacacgaattaacgatggcgtcttcaatcgaaaagctcctagaaagtggtcgtcccttccttcgcggtgatctggagtccatcgacaagaacttacctcggctggttggcgtcctgcagagtgtgggtgccggggagtgctggcacaaacacggcagcttccttcaccacctcgtcgacatatttcgcattctcaagctctggaaagcccctcactctgtctgcctctgtggcctcttccactcagcctactccaattcttacgttaacctcgccatcttcgacccttcaaccggtcgagaagtggttcgtgcactcgttggcgaggaagctgagagtctgattcacttgttctgcatagttcccaggcagcctctcatccacgacgatctgctcttccactactctgatgaggagcttgtccaacaccttgctcagtccgagatatctctcaggaacgcaaagaagatggagaagggcctctttgatgacgatggggaattagaaggatggagaaagaaactgcagggtcttgttcctgccgagggggtacaagttaagcacattcgcacgggtgaaggagtgcacgtttctaggaggatagtggcagttttcatcatgatgaccatggcagatttctgcgaccagttatttggttttcaagatttgctatttgataatgctaatggccgccttgagttttccgggaacaattttggggctctttggccgggagatggtaagccgggtctgtggttgaattcaatttccaggatgggagcagtgtacactttgattgcgagagaggaagagattttcattcaagagagaaaaaggaaggtgggagtagcagttgtgcctgatctcgagagaaatgaagatattgagttggtattgccaccggtgttcgattactgtagaaaggttttggaggcgggagatcaaatagttgcgagggatttgtactgggaagctgtttgtgagggtggtagcaaggcggaagagttgttgctggagtctatagagaaaaacccgtttgttggagagccatatgtggtgctgagtcaggtttatttgacagaggggagatttgaggaggctgagaagcacgcagagagaggactgaagcttctgctggaatggggatgtccgtgggacaagaggacttcttgggaaggctgggtggcctggactagggtcttgctcatgagggcaaaggacaaatcttggcctcagacttcatggggcatcctcaatttgggtcttgtaaactaataatgccttatcatctacttaatgccatccatcccccgatcatataatattctactaaataagccataagtacaaggttagtgcatcagaaaaaggctttcaacggtgttatatctttctagctagtactatattttttctctttttaata

SEQ ID NO: 63704 - DNA, 371 bp, Glycine max
  Clone ID: PAT_MRT3847_28539C.1
ccaaggaatttctcaccttacccaaacaaatcttggccgaaaaaatgttgaagtcttccaaaacccgtttaactgccagatttcaagggaggttttttgatggccccggcaaaaagggaaaaggggccccagaggcttccgttccgggaggccccccttcagtccgttggggcccccgggccttgattttttgttcgccgttttcttcttccacctctgaaaactccgtagaggatgcatttttcacaaaaccctttgctttgtcttctaaaaattgttcgtttccaaacccccggggaatcaaatgcccctcctttaccccggggaggtaaagaagactggcttggaacattccccttgccctttttttg

SEQ ID NO: 63705 - DNA, 309 bp, Glycine max
  Clone ID: PAT_MRT3847_2853C.1
gcattttatacccggtctcgttagcataaggatgactgcactgctaacaggtggataggtgctgcaaaagccatgcataccaatcaagagggctacagacttgttagggcacacacgcttagagccgtacgatatacaattgctggatgctgccatacagagactctaatcgactatagaggaagagtagctatccaattgaaaggatgcatgttcacgactgcctcagtgtatgatattgccattccttatgatcactggactaatcacgatctccggatgagagcttctgctaattattccttgacc

SEQ ID NO: 63706 - DNA, 164 bp, Glycine max
  Clone ID: PAT_MRT3847_28540C.1
aacctcagaaactattatttcttctttcctggaacgcaaaaatatagactctcaacgttcaaattcactcgggaaaaaaacatcgcattgtgcgacaaataaccatactaccaacacgagctatatcggggcacccacaaaaccggactaccacacggcccaac

SEQ ID NO: 63707 - DNA, 305 bp, Glycine max
  Clone ID: PAT_MRT3847_28541C.1
cccacgcgtccgcactgtttaagtttacaaggaggagggtatatcttctttggaaatgcatatgattcagctcgagtgacttggactccaatttcatctgtagattccaaacattactcagcagggccagctgaacttgtttttggaggaaggaagactggggttggaagtctgactgctgtttttgacactgggagttcttacacttacttcaactctcatgcttaccaagcactactttcttggctgaataaggaattaagtggaaagcccttaaaagtagcacctgatgatcagactttatc

SEQ ID NO: 63708 - DNA, 513 bp, Glycine max
  Clone ID: PAT_MRT3847_28542C.1
gcttctttttaatgcattaggtaggcaatctttttttatgcgggtgatatacaacatacatagttctgttaatacaggtgattataatcttgcttttaaatcattactttctatagataatacttcccatcttcttatattcaatttaattatttattatgaataaactgctaaccagtgacgtaattaataaacagtcacatcatcctatatagatcattttataattcttgactagacaattatgtcatttttacaatagatgtcattttttaaatcatttttgaccgatactaaactaaaacacatatatagatcaggtacacaaattcacggaagaagacaatatcatggggcaattacaatggctggagtctttttgaaactctaaattttagagtcattaataagaaaaagtgcgatgttgagtgctaataatatttagaataattttggatgaatgatactaactgttaagtttaatattattaactaaattaaatatctttatta

SEQ ID NO: 63709 - DNA, 155 bp, Glycine max
  Clone ID: PAT_MRT3847_28543C.1
ggtcaatcttaatcaattcatactcaaaataccagattggatcggatggaaaatttgcaaaactgaggcgtttgcattgcattacgaactttactctaaataccctatacaatcctatccatcaaacaccttaaccttttattcaaattgcctct

SEQ ID NO: 63710 - DNA, 104 bp, Glycine max
  Clone ID: PAT_MRT3847_28544C.1
acgagcggcggtggcgggtgccgactctgctacccgggatcttaggcgtgttctgcggctagaatgagccgaatcagggccgactccggatttcggttggtgta

SEQ ID NO: 63711 - DNA, 310 bp, Glycine max
  Clone ID: PAT_MRT3847_28545C.1
accacggatcgtgaagctttattattttttgggaccattcctgagagagccacgttttattttacctggtcaagagacaaagactcgaacaatagatctatgaccattgactaagcaagatatagttggaaaacaagaccccaaactttgtttgggtacttttcaatttgggataagccatttcattttacaatttactccatcaacacatgacaaataggcctattcaaaatcatatggacccaaacccaaagaaactgttcatgcatgcatgcacatttcatgggtctttaaaaaattaacgaccccc

SEQ ID NO: 63712 - DNA, 426 bp, Glycine max
  Clone ID: PAT_MRT3847_28546C.1
cctacgcgtgcggagagattcaggataaaggagcattgaaattataacaagaggaatttattacagctcggtcaactgaggagcgtgctgcaacaactctgtcggctgatgggtgtccatatttgtatgctggggtgcatgattgtagaatgcatactataccacgcgatcttgccattggtgttaagttgtcaaccataaacaatatgtgagcatatgggctcaattctgcaatttcaggctctggaattttgtgcaccattcctcagtatatttcacagaagacatgctggaatcaaatggcggcagagagaacacaattgaattctgattctagcatgcagagcttgtgccaattgtatattgaccttctcggtggatgaattgtagcagacaaaactggagattggatcacacttatacaaa

SEQ ID NO: 63713 - DNA, 289 bp, Glycine max
  unsure (1)..(289): unsure at all n locations
  Clone ID: PAT_MRT3847_28547C.1
aataaagattaactttatatatttgntngagtgnnnnaaggtatatatatagagaaaaaagtatcaaagccgggaaatggcggaccctatgtttgacactatttcttaccacaccttctgcttttaccctagataattatatagctaatttaagatttcacctgctttaaagacctgtgtcattactgatacgcttacagagtttttaagtgataacaggcctgagtcagtcatgctgcaatacaggtgactgtcagtgtgtgtcaaaactaagtctctgtgacaccaa

SEQ ID NO: 63714 - DNA, 353 bp, Glycine max
  Clone ID: PAT_MRT3847_28548C.1
ttttgggggtgttttttttttttttttttttttttttggtaaaattgaagttggttgaatacaacctttgttttttgcaatttgggtttaagaaaccaattacaacatacgggacggaccaagacaaaagatagaagggaatttagccttgcctttccttttccaacagtacaaaaaaaagcccacagcatgttggggcgattggaaaaggatgggaagctttctacattgggcaataaggggtttacatgtatgaagtggttagggacgggggacattttgagatggtacttttttttgcaccttggagaagtgtgtatgggaaacattgctttcaccggcatttttccatg

SEQ ID NO: 63715 - DNA, 994 bp, Glycine max
  Clone ID: PAT_MRT3847_28549C.1
ccacgcgtccgcgaataggaacatgaagagaaggccaaagaatcgaaacgcattcatttctctctttgtcgtcttcgaaaaccatcaaaagcaggtgcaccaccctaaccttaacctttacttcacctgccccattacccatcatccatccttgctttcccactaaccctcccatttccgttaccgttatcctctcctctttctctctctctcaacctcttatttatttattaaccctttatctcaagccgctcgtcccgattcggctcggccctaactttctgccaccgccagacccaaacggcaaaagggtgctttgattcgcattctgtgatctcaacgtcgcattcttttatctcaacgatgaagcgtccactgtcaccatcagcgagcggcgtgaacgttgaggacaggaagatgaagaagaaggcgaaggcggtggaaaatgaggacgataacgtggagcgcgtggaggggctggcgcatttcgacgacaaccttctgttcgaggtcttgaagcacgtggacgcgcggaccctggcgatgtcggggtgcgtgaacaagcagtggcacaagacggcgcaggacgagagactctgggaactgatctgcacaaagcagtgggcaaacactggctgcggggagcaacagctaagatccgtggtcctcgcgctcggtggcttccgtcgcctccacgcgctttacctcttccctctctcaaagcctcaacaaacaccatcttcttcatcttcatcgacctcgtcctcttcctcctcggcctggggccccaccataccccaggtgattcgatcgaagccgctacgtttggggaaagacgaggttcacctctctctttcgctcctctccattcgctactacgagaagatgaatttcaataacagaaccaccagatgattgattgctctgctcattcttccataatccatccacaatccgcgtgttgcttctttttttattactattaattaaacct

SEQ ID NO: 63716 - DNA, 410 bp, Glycine max
  unsure (1)..(410): unsure at all n locations
  Clone ID: PAT_MRT3847_2854C.1
ngttactgaaagagagtggagatacctttgcatccaaaatagtctgaattggacttggaatctaatccatgcatgaagcaggatgtggcaactaatcaatgcatgaagggaagatgtgagtaactctccctcaatctgcaactaaaaggaatcaaatgaaatactttcacacgtttcacaatggccacaatcaccatgccccacacagcctcaatcaactctcgagcacacacaatcataccctacaagactgatgagtgcagtaactccatgtctcagatctatcttagcgtctgattagagattaccaagctgccaacactgaacactttttcttgcgaaaatgaattcacctttgcgttcgtattctttccaacctacatgttctgctagtgattccatgcaataca

SEQ ID NO: 63717 - DNA, 370 bp, Glycine max
  Clone ID: PAT_MRT3847_28550C.1
attcaactctgctaagccggtatgaaagttgaatttccctttaagaatgttgaatacgtggaggacttcattggccctataagagatgtcgagtctctctcatttcttagcattacttttcactattttcgaaaatacaactatattggcataagagaaaacacaattgatagtccaaaaaaaaaaaaaaaaaaaaaaaaaaaaaaaaaaaaaaaaaaaaaaaaaaaaaaaaaaaaaaaaaaaaaaaaaaaaaaaaaaaaaaaaataaaaaaaaaaaaaaaaaaaaaaaagggggggcccccccctttgtggccctttccccccggtatttaattcgggcccggtccctggggggtacccaattttcctt

SEQ ID NO: 63718 - DNA, 748 bp, Glycine max
  unsure (1)..(748): unsure at all n locations
  Clone ID: PAT_MRT3847_28551C.1
tacggctgcgagaagacgacagaagggggtgcaaaactgaattataaacttgaaatacatcaaagcagttttgttcctctcttcttcttcatatacgtttatgttttatgatttatacttcactacttttatgcttccacttagtttgattgcatagtctgatcagatctttgctcagtttgatagctatttctgctttagtctggtagtgtcatagtctgatagcatcagtttgaaagttgttttcttcagtctgatatatcatgtgttctgtttttacaacatagcttgttacccttttatgcttcagtctttttccctctgccatattcaaacagtctcaatatatggagtgacaaatggttcccaaactctcttgataatgttattcactgggatcagaatccagatattgatgtatcccaaacagtttctgacataatcattccagattcaaaccagtggggtgttgagaaaatgaaaggtatgttctttgaatccacttgcctgaaagtctgttctattcccttgagaagaaccaggatgtgtggaaatttgctgatgatggaatttacccagtaaaatcatacatcctttttgtcctctagttccttcccgggtgacatttggggtaatactcggaaaataaaagctgtcccaaagtgtttaaatctggtttgaagagcatgttttattaataaaatccatcgcgctcgtgtttagtgaaanaaaaaaaaanannaaaann

SEQ ID NO: 63719 - DNA, 807 bp, Glycine max
  Clone ID: PAT_MRT3847_28552C.1
cccacgcgttcgcccacgcgtccgcttattaatgtaacattttttttgcttttagttttgaattcctctgcttcctgctttggttctgtacacttatcaagcaaccttaacatagctaataaggcccgaatcttctatggtacaagtaaagtgttttttctatgaagcattaatattctcactgcatgcggaagtagcttagttatggctgcaaagggacagaaatttgtgaggtttaaggattggaagtcactttcttcttcaagtattgaacacaatgattcttctaatggtggatttctcaaaagaaaagttcaaccaagcctaagttctgtcagtgatggatcaataacaaatttgtcttgtcggaaccatgttcttgatccacagggggcaacacttcagaagtggaacaaaatttttgtaatcacaagtgtgatggcaatctctgtggaccctcttttcttttacatcccaatgattgatgacaagaaacaatgccttgctttagatggaacactgaagattactgccagtgttctccgcacattctttgatcttttctacattcttcacatcatctttcagtttcgaaccgggtttattgcaccttcctctcgtgtgtttggaaggggtgagctagttaatgatccttgggccatcgtaatgagatacttaagctcttacttcatcattgacattctatcaattattccacttcctcagttggtcattttagctatgatcccattcccaaaatgctcagttccttatgtgggaaaggatttgttgaagttaccataatag

SEQ ID NO: 63720 - DNA, 306 bp, Glycine max
  Clone ID: PAT_MRT3847_28553C.1
ccaccatggccagagttacattcctgtcctttcttcctctctttctgctcacccttgacgcgcgcggatctcccaacccttttccacccaaacctactccgaacctaaaaccgttgttcacgacgcaccatcgtcccgtccgtgacgctcctcgttccgtcgatcaaccgcacttcgcccggccgtcgttgcgctgtcctccgaccggccaccgcgtgcgtcaccgcggagatcccctacggcacgacgcaatcctggcggcgacgccggtgcgcagcggatccatcggctgggtggcttactccg

SEQ ID NO: 63721 - DNA, 280 bp, Glycine max
  unsure (1)..(280): unsure at all n locations
  Clone ID: PAT_MRT3847_28554C.1
taacactttccttagtgcaatatggggaagcccttcttcactctctctgctttcttgcccttgtgctatgctcactgcttcgtggcgagtggcatcgctattggctgattgactctaccatgcaangttgcatgcggagatcgccaactcgcagcaactctcatacgcgttgtgaacccgatccacgcgcgttggagtccgaagggggtcttattgaaacatggaactctcaacaccctgagctgcaatgcgccggtgtcactgtttccaaacgcaccct

SEQ ID NO: 63722 - DNA, 317 bp, Glycine max
  Clone ID: PAT_MRT3847_28555C.1
cattcaaggaaaaaagtggtgaattaattaatcaaacccaccctttatttgacaaaagggggaggtacatgaacatgatcgaatccgacttgttggtctacgaaaggtaaacgggaactataacaagacccgggggaatctgatcgttcaatcactgatgtatgctgtttacgggaatccctccaaaactttgcgcacgttgcatatattacagatatccgcttatgtgaccgcctgacagaggtaaacaatttgtttgttggaggtactatagtaacaaccttcatcgaacaaaaagactggctgtaatatttctc

SEQ ID NO: 63723 - DNA, 411 bp, Glycine max
  Clone ID: PAT_MRT3847_28556C.1
atcggcaccgctacgcctgtagactctgcttatggcgctggcggagcttttgtcgtcagcttccctggcgcatcttcggcaccagaatgccccggaccgaattacattgtacaagattacgctgtcgactgggcgattgtgcagacgcagaattggagcacgctttacatcctgagcagggagcgacagccagcacctgcaagcattgatgcctggattgatcgcgctgtggcctttggatccgacgcgacgtcgatttcgaagttcaaccaaacaggctgcgaatagacgtaagcggacaagaaaaagatggctatgtagagactcgatctgtgggaagcagcctgtttttccatcgagaaagtacctaatagaagagtgatcaaataatacgagcattgtctacgcgtc

SEQ ID NO: 63724 - DNA, 1415 bp, Glycine max
  Clone ID: PAT_MRT3847_28557C.1
cggctcgagcatctctgatctcactcaccattcaccaacctgcttctctgttctcttctttcccttcccaagaagaagaagaagaagatgccttcttcagaatcatcaacaggcttctccgaaaccatttgtgtgaccggcgctggtggcttcatcgcctcttggatggtcaaactcctcttggagaaaggctacactgtccgaggaaccctcagaaacccagatgatcccaagaacgggcacttaaaagagtttgaaggagcttcccagagactaactctgcataaggttgacctccttcatcttgactccgttagatctgttattaacggctgtcatggtgtctttcacactgcttctcccgtcaccgataaccccgaagaaatggtggagcctgcggtgaatggagctaagaatgtgatcatagcagctgcagaggctaaagttagacgcgtggtgttcacctcatccattggtgccgtttacatggaccccaaaaggagcatcgatttggtggttgacgagtcctgttggagtgatttagaattttgcaagaacaccaagaattggtattgctatgggaaggctgtggctgaagaagcggcatgggacacagcaaaagagaaaggggtggacatggttgtagtgaacccagttttggtacttggaccattactgcaacccagcataaatgctagtacaattcacattctcaagtacctcactggctctgctaagacctatgcaaatgccacacaggcttatgttcatgttagggacgtggcattggcccacatacttgtttatgagaagccttctgcctctggtagatacatatgtgccgaaagctctctccaccgtggagaattagttgaaattctcgccaagtatttccccgactacccagttcccaccaagtgttcagatgaaaagaatccgagagcaaaaccctacactttttcaaatcaaaaactgaaagatttgggattggaattcaccccagtgagtcagtgtttatatgaagccgtcaagaacctgcaggagaaagggcaccttcctgttcctgcaaggcagcaggaagattcaactactgtgaaaccttaaacgagctatccctttttatctaatttgtcaacaaacaagaagctgcagcttttggcaatctgggctcatcttatattattatagagaatcctacattagaagatttctgtatttggatttcgtaaaaaaaaaaaagacatcgaccaaattgttgccatgtatgaacttgataatattagtggaatttattcctcttgttgagttgaattattctgctcctcaagctcttttatctatcttaaaagaaattgtattctttaatatttttttaaataatattatgccatgcaatcccaagatgggagagaaaa

SEQ ID NO: 63725 - DNA, 169 bp, Glycine max
  Clone ID: PAT_MRT3847_28558C.1
tttataagcttttgccaatcataaggggaagcaaagattaaatggtactaatgacattaaatcctaatacagttttccaatcaaaattagagctttatcttgttaatctacatattataagcttgcatctgtatgttcacatatcttaattggggaatatcaccaaaag

SEQ ID NO: 63726 - DNA, 568 bp, Glycine max
  Clone ID: PAT_MRT3847_28559C.1
ggctcgagcggctcccgctctgatctcactcaccattcaccaacctgcttctctgttctcttctttcccttcccaagaagaagaagaagaagatgccttcttcagaatcatcaacaggcttctccgaaaccatttgtgtgaccggcgctggtggcttcatcgcctcttggatggtcaaactcctcttggagaaaggctacactgtccgaggaaccctcagaaacccaggcatgcctatctatttaagttatatgacgtgtagcggggacatgcatgcatgaattttattattttggtttggttttcagatgatcccaagaacgggcacttaaaagagtttgaaggagcttcccagagactaactctgcataaggttgacctccttcatcttgactccgttagatctgttattaacggctgggcatggtgtctttcacactggctttcccgtcaccgataaccccgaagaaatggtggagcctgcggtgaatggagcttagatgtgatcatagcagctgcagagggctaaagttagacgcgtggtgttcacctcatccattggtgccgt

SEQ ID NO: 63727 - DNA, 353 bp, Glycine max
  Clone ID: PAT_MRT3847_2855C.1
gtaatgctgggaattgcgttcgagaaactatacaacgttgctttggttatgatctgatcagactctctctaatcattccaatggccccagaagagacccaaatgggactgtctgatcaaatggagcattaataatgccgatgggacttgtcccgctcacggtttaaaatcagaggctcccagatggtgtatggattcgatgcagtcgcatgccactgatgctgcataacgattgatagagagcacactggggaggcgcactccataaccagatttgagagaccatggattcttctgtgcacacattgacaatctgtatgctgaggcccaggatcatgctgagacaatggacat

SEQ ID NO: 63728 - DNA, 221 bp, Glycine max
  Clone ID: PAT_MRT3847_28560C.1
acggtcgggctcaacccgttggcttggacaaaaacactttcatatactttggggtggggtggccaacttaaaaaagtgggagagagaaaaagagaaagagagagaggacaacatcccaacatttgggggtggcctttattttaagccctaaccttaattatgccattaagggctaaaaaaaaggaagctggtcataaaaagaaaggaaaaggaactggaaa

SEQ ID NO: 63729 - DNA, 233 bp, Glycine max
  Clone ID: PAT_MRT3847_28561C.1
ccatgaacatctcataatattacacaagtccaggaacatctcataatattacacatatcaagggcaactttgggttgccaatacagattctccttggaaacttgtataaatccagcaatacatttataactaactgaaaagctctccgacttccttcttcattattcctttaatctgctttgctgaaagcccaatatccttcaaatcatccagactcttgaaaggttctggag

SEQ ID NO: 63730 - DNA, 258 bp, Glycine max
  Clone ID: PAT_MRT3847_28562C.1
attttgcaaaccaatatgcaacctatctcagcacctcatgtcagaacttcaatcaaaattgttagcacattaaacgaaagctaccacaccaatcaaccacccttggcaggcaaaataaaacgccttgttctcacccaggaaggtagaacaaagctcaacatttacccagatagagagttctatgcatttcaaggcttttaaaacaggtagatgatggtttggtttctaaacctgacaatctttacagagagaggttga

SEQ ID NO: 63731 - DNA, 348 bp, Glycine max
  Clone ID: PAT_MRT3847_28563C.1
tcgactatgcgttcgataaatagaaaagcttcatagctggtcataaaatcaccattactgatggtattgacaaaactagtgcgactttgcaattaataaagctatgcagattgtgatttttctaatgagaaactttaagccatatgactaaagttttgtgggaggcttctgaggacaaggcgatgtttatggtcacagtttcaatatgattcgtgtaataatttggaaatgcaagaagcttattttgttaaactcgaaaatgtgttacaagaattgtttttgcacagaaaaaaggaagctgacaattgacaaggaaagcttttttttcttattgaatggctgtaaaag

SEQ ID NO: 63732 - DNA, 408 bp, Glycine max
  Clone ID: PAT_MRT3847_28564C.1
agggttcaaggactaaattaatcagtaactgtcacacaataaataaagccagccaggtgtggatccagaaggcatctacacagaaagttacatggcctaggcatagaaacgtgagcttaaaactttagccttaagaaacaagaaaagaggaggcaaatccgaatactattcctgattaatagacatgatacaatcttattcgatcaatacagagcaatgaattacaacaatttgtacaagcttcacctttaaaaacagaagctgacgaaattattagctctttaaaacttgagctaataacaagagtacaaaaaaaaaaaaaaaaactaggcacatttatacaacagtttctacaaattcaaacaaatgaaagaatacccaggtgaacaaaaaaatactgggttaccg

SEQ ID NO: 63733 - DNA, 226 bp, Glycine max
  Clone ID: PAT_MRT3847_28565C.1
aaaaaaatacatgtttcattaataaaataattattccgtaccaattcctacacttaataatacatgaccctccactggaacctggatgggttggtgacccatttctgagaattactatcacagaacccccctattaattatttttagtgagagggatccagcctattttttttagagaattttaagattaccgaaaattaaagaaaaaagggttaatggtccaaaa

SEQ ID NO: 63734 - DNA, 1104 bp, Glycine max
  Clone ID: PAT_MRT3847_28566C.1
gtgagtctctgtctcatgtttgtttgtcaggggtttatgtctggtctggtattgtgacgcatgttgttgcagttgcacaacacaaacaaagatacatagattcattcatattagtattagatctctctctctctttctctgaatttcactcaagttatcaatagttttcgttcatagaaactagaaagatgtgtgaaagtagtagtagcagagtcacatgggaaggttgcagcgtcttgctcgacatcaacgacggtgaccgtctcgttttcgctcgtctctcccccgctgcaaaattgaagattgggaataagaactgctctctgcaaccgttaattggctgtcccttcggtactgtttttcaagtcgatggacctttcctctctcccgcacaagttaatggtaataatgctgaagaagtaagagatggtcaagtaagtgtcgagtccagggacaaagttaataatgataataatcctgaagaagtgagagatggtcgagcaaatgttgattcgagggacaatcgtgccttggttgacaataacacggcacagagcctgactggtgaggatatagaagccatgcgaagacagggtgcgggaggtaatgaaataattgaagctctcatcggctcgagcggctcgatcgagaagaaaacatcattctcacaggagaaatatagacttaagaagcagaagaaatatgcaccaaaagtacttatgaggcgtcctgttgctcgaagtatatgtgaggcctattttaagaagtatccatctaaaattggattcttgcgggtggacacattgtcccttctactttccatgggtaatgtttcttcaaattctgacattcttgtagttgatatggttggtggccttcttactggtgctgtggcagaacgtttaggaggtactggttttgtatgcaactcatatattgggcaggcaccatattccatggatattgcaaggatatttaacttaagtgatgaaatctgcaagagaattgtacggactcccatttctgacttgttatcacaaaaagaatcacctgaacaaactctgctacctgatgatgcgtgcaattgtgaaacccattcaaatg

SEQ ID NO: 63735 - DNA, 281 bp, Glycine max
  unsure (1)..(281): unsure at all n locations
  Clone ID: PAT_MRT3847_28567C.1
gggtcacgtagcattacggctctctattattatntaaccgtgtgaactaacgaatcatattaccacnaattcanaacatnctcttnantcttnantttggtanttcanaagtatngctgggctttttttgtttgcnttaccatacanatttncaaactcttcanacanattcntccaagcgtcactggtnctaattccattntttgtaggccgnggatcttgaccaatntttgcnnggctntnnannatcaatctctgncctggtncatggccannggaca

SEQ ID NO: 63736 - DNA, 870 bp, Glycine max
  Clone ID: PAT_MRT3847_28568C.1
aatttacatgtagttactgtatttccccatcatttcccctttatactttatccttcccataagacctgtgggtttatggaaggataaataataaggggagatgatgggaaatacagtaactacatgtccttctacctactttgcccattttcattcagcctattattcgtctttctcctagaaaaaactagcaatattgagctctcttctaaatatacttcaggataggcatttttgttttaggccccctactatgtgtctgctcataactggctgtttcaatggtcatagaaggataatagggcagccaagctgtactcgaggttcctctgtatctttagttctgggaacttttttaatttgaaatgttcagggcaccttatcctcaccccaggtacagtggagtacttttcctttcacaatactttgctataaaatagtgtgaaagacttcacattagtctttttctataatccgtctttaaagcatatctgaattcaaatatcaatcaaatattgtcctcattgactaattagtccatcctattggatagtccatgcatttttaagatatgcaacggtttttaatctaatatgtaattagtccatcctattggatagtccatgcattttaagacatgcaatggtttatactaatcaacacatcatgccatcatacagcattttgtaagtacaatttaggaactaaatcataagcaatgagcaaatatgattatgggttagaagatactggagagacaaacgctgaggtcatgttacaccacatgccaggcatctttaactcaaatatggatgcaactatacaacttttttttgggggggttggggggggacggaaatgccacttggc

SEQ ID NO: 63737 - DNA, 586 bp, Glycine max
  unsure (1)..(586): unsure at all n locations
  Clone ID: PAT_MRT3847_28569C.1
acggcgagaagacgacagaaggggagagcatcataggccattcaaaccttcaacataaaatggaagaatccaagggttttgttggtggtgagtctcaaaaaccacatccagaaatgccctctatttcttttcaaattcctatgccagggaggaatcgatctggtggtctctacccttggggatggaggcaaagagcaataataccacagcacaccgtgcgaaactctaacggggcaagtgagaacacaaatttgaaggtgtaagtcactcatggagtaataatactatgtatgaaaatgtgaaacgtttgaacagttgttgcggttgttatgttgtcttcttcattatcgtatattatcgtgcatgggtgtacgtagctcagtacctgctttgaggataaaagctttactaggcttgaatatgaatatcttcagcagtttgtattgataaatgactcatatatgtattgtaagtgctacaactttgtacttttgtgataccacatgtttatgttcttcgttcatggatggatcgaatccaaaagatgataagcttttactaaagaataatactgnttttttagatc

SEQ ID NO: 63738 - DNA, 454 bp, Glycine max
  unsure (1)..(454): unsure at all n locations
  Clone ID: PAT_MRT3847_2856C.1
acactgtaaatcttgaattcctctgattaataggttagaagataatgctgtactgctccaaaaaaaaaatggaactaattggtactagttcagatgccgttccccatcagaatcactcttncaaggggctcaagcaatgctggcaacaagaatttaactgagaaagaagtctatgtaaaccatgctgagttagcctggcatcaaatgaggacagaatgggttggtgatcaatcaaaaaaattacggaggtcacctaaaggttcaacattaagcgtcacaaggacttatgaagaggtgcttgcatctagagaaccttttaaacgaccaatactattatctgagatggtaagttttttggttgaaatttggctcgaggatgatctctatgattagattacagacaggtaattctactgtaagtttaagtgagaactcggcagagttttatttgtgc

SEQ ID NO: 63739 - DNA, 476 bp, Glycine max
  Clone ID: PAT_MRT3847_28570C.1
aattcggctcgagcggctcgagcggctcgagacggctgcgagaagacgacagaaggggatcatcggcagcagcaaaatattatttattttattttatttctcgtcattccctccttctttccctcatttttcgattttgctgctctctcttccctttttttctctgctacacttgtgttgtgcaccttaaccctctctccagcaacaacaaaccatgaacgcctccataattgggcgatttcccagaagtgatagaggagtatttggaacatggctgtatgaaatgcattgccttcaatcgccgtggcacccttcttgctgttggatgcaatgatggaagttgtgttatttgggattttgaaacccgaggcattgctaaaattctgcgtgatgatgaatgttcttctcccataaccagcatttgctggtcaaagtatggtcatcgaattcttgtatctgctggctgataatcattg

SEQ ID NO: 63740 - DNA, 244 bp, Glycine max
  Clone ID: PAT_MRT3847_28571C.1
cttggtgtttggggttttttttttaatacgcctaaactaaatggctatttttatgtgtttagaaaaatcgaatggttgtgttcctcagaaattcacttgccgttttgtgggtcagttgtaatacaaacattgttttgcgcttggcaacaaacatactacccggtggggggaaacaactgctgcttgggcgtgtgtcttgtggtcgaaagctgtgggagggctggctcggtggtttcctgtgcgt

SEQ ID NO: 63741 - DNA, 432 bp, Glycine max
  Clone ID: PAT_MRT3847_28572C.1
cccacgcgtccgcatgggtggtggagaagttaagggaggcaaaggaggttgcagaagcgatggctggtacaaagaggaagactatcattagaaagataaggggggatgggaagaaggtgaaccaacataagaacaggtttcagtatgatgaacacaactatgctctcaactccaactccggagctcaaagcgtacatgaaggcatgcctcacaggttctcatctacgtttgctgctcctggtcgacgccagaacgaatcatgatacatattcttcactagagacaatgccagttggatagaacctataaacatgtatattggtgcccaaaattgtttacatgattgtaatacttatattgaaagtatcatacattgagagaagagtgaataccattgttctttaataaattaaattccacgttttatcaaaa

SEQ ID NO: 63742 - DNA, 360 bp, Glycine max
  Clone ID: PAT_MRT3847_28573C.1
aggcgtgagatgacagcagacggcggactggtgcgccaagttgcggattcgatacccttatcagtccaacgaggtagacgtatcacagttaacatgcgctttgatgcaaccggatcacaggaggctcagatcatgaagaatactattactgaccgtgaagagacagcaatcagactggaagaaccgtgccgtgacacaactatagcatccaggggcgaattcagctcttgcaagctggcatattatggaaaaggcgtgtacagagaggtgtacaaagcaactggacagcctaaatggccaatggcacccgccgtgaagaagttctatataggcacaacgctgttgtgtgccacacgcaga

SEQ ID NO: 63743 - DNA, 384 bp, Glycine max
  Clone ID: PAT_MRT3847_28574C.1
cccacgcgtccggacagacttcgtgaatcattctcatttccactgttagacaatttgctgaacactctactatttgatataggacttagagtcagactgaaacttcttcagtctcttgctcagttctatgtttaagctgaagatcaagctggtgaaaacttggactagtacttccactctactatctggtataggaactcgtggatagactttcctatttctaccctttctttcactctgatcctcacagtgatccagagtggcgttcaaagaggtcctattggacaaacactcgagcgttggcgcaaatgattgcttcggtaaacaactctggagacgacaggctcactgtgaaaacaattgatactggcagagagggggaca

SEQ ID NO: 63744 - DNA, 344 bp, Glycine max
  Clone ID: PAT_MRT3847_28575C.1
ggagatggagtctcgcttttgttgcccaggctggagcgaagtctcttagtttcctccccacggtttcgtgcactaaaccccgaagcaggcaagctgagcatttttatccccatttttcaaaggaatgactaaaagtcagggtttgcccaagggcaaacaactagctggttgcaaagtaagaattggaagccacccatgttattccttccgctacacctccctccaaaaacagggctggccagcatcgcacggaacaggaaattgaaatggctcccgggaagggagggagcctgccaaccaccgagagaagctgacaagtgacccaaacccccccaaaatttaaa

SEQ ID NO: 63745 - DNA, 423 bp, Glycine max
  Clone ID: PAT_MRT3847_28576C.1
gactcacgttacacaacgcatacacatacattgcggaagcactttcgtctcggaaggcgttctttcgagttatcgcacgcttaaaggacgcacgtgtgctgctgatgcgcatgcctgacatgagtgcaccaatgatacagctagccgggtcatgcaatgacggttatgagaacctagcacactgcctatattacctgatgcacggtggacatgatccagaatcgcgctgtagcactgtgaggaacattccgggctgtgccatgaccacctttggcaaacagaccgtgagcgaatgtccacagcaagctgctaacaactatggcatcaacgacgaatacgctcaagcacttgccggccgctgcaatgtactcgtccgttacaagatcatgcgatccagcaactgcgactccatcaagttctaaa

SEQ ID NO: 63746 - DNA, 132 bp, Glycine max
  Clone ID: PAT_MRT3847_28577C.1
attacatgccgccctgccgacaaattaactcttttactcaggggcctaaagggaaaaattatacttttacacccctaagaaaacaagtccacccaccccctctttacacgaatagtcagaactggacaagac

SEQ ID NO: 63747 - DNA, 554 bp, Glycine max
  Clone ID: PAT_MRT3847_28578C.1
ctcatgaataaattatttaaaactctacaacatatttttttgtcactaaatggaaaaaggacctagtaaaaggcttaaaattttatgattttcataataaacccaacctatgattagaaaggctatataatgaatggtaaaactagaatgttccccaggaaatttttactacaaggatttcactgaggtgttataactagacaagcctaataagaagaacaaataagccgttggatgcaaatgcatcaaatagctactattcctgagagacaagaagtctgttgtcaactcacattaaactaaaggaagcatcccttgatgcctcatatctacaaacctgtccttacaggtacagatgtcagaatgaagccgatgatgttcggcgaatctggtatctaggttcaggaggtggattgcttgacaacattttctctagctcctgctgtctcctcagcttttcgttttcctcttccaaacgagagactttgtgctccaattcagttgtgtaagcctgtttccttgctctagaacgggcagcagattcccgattcttg

SEQ ID NO: 63748 - DNA, 359 bp, Glycine max
  Clone ID: PAT_MRT3847_28579C.1
accggttgcaaaaaaacaacagaatctgaaaaatctacaaaatgaacaatttttgtgcccacattcttctctttgctgcccatagatggccactgggaaagcctattcttgtcagtgaatctaagatgttaatgatcataatgcatgcaataagtcctggattgatgttcatctgcgatcacgtgattatgactctcatgatattgagcgttacactcctgccaatattattgtactacactaccacataacctgccttattttcccattttcctactggagtaatgattggccttgatttggcatataacttgcattcttcgattggcaactgctttccagggtcaaaaccactactt

SEQ ID NO: 63749 - DNA, 759 bp, Glycine max
  unsure (1)..(759): unsure at all n locations
  Clone ID: PAT_MRT3847_2857C.1
ccgcggacgccgtgggtcaatgtgcagcttctcttctcaactttcccgctacttcttgcctctctttcttttctctgttttcctctttcttttctcctctttttgtctctttttttttcggctctcttttctcgcagcttcgttcgttccgttcatacacctttttttccttctctattatcatgccatgctttgtaattctgtaacaaaacacgcgttttcgtttttccttcgtttatattcgcatattggaattgtttctatttttggtaaaaaagaaaaaaaaaactcgctttgatttcacttctcgtcaatgcggacggtgcaatgcgtgtgggagaatctgttaaatcgcgatgtacgaggccttatcgaacactcttcacttctaactttgtctttcgtatctgtgtacaataatacgtatttaaaaataaatattttggtcgtaacaattgggtgtttgagatatatttggngtaggnttnctgtgttatttgattttggntttattttattcttttgcatgaggcattgtggattgtgattacacggggaagaaaaaaatggatgtagtggcgtgtgattttaattttttttcctttatattctgtgtttattttgtagttggaataatttgattttgattttcctatcctgcactgtagttccatttattgctggtctattatgttctgttcgtgagccataagtattttgagtatataaatctacatcgtccatgtgaaaatgtatggc

SEQ ID NO: 63750 - DNA, 420 bp, Glycine max
  Clone ID: PAT_MRT3847_28580C.1
cttgagttttttttttttttcaatgatatttgttgcgagagaattacagagagaaggctcggcggttgatttttgccgatttctctcggactcttttgacgggactgacgatgacagaccctaactccatacgcttgcttcacttaactcaagagcgtacaattcaggcactggccttgaagtcggattgtgtgcctaggactactccggagtggcgacggtcttgactgaaaacacggccgaagccggcgtttatcttgacgcgagtgctgctgacgcatgctggctgtcaagtattttgggccaagacggtgcagttgccggtcacaaatgccactggatatgtcaaaatgaacatgtttgcgctaacattgatcgatgggcgcaaagtgagctgactcacatgcgggatgaaaactg

SEQ ID NO: 63751 - DNA, 377 bp, Glycine max
  Clone ID: PAT_MRT3847_28581C.1
cacatacatacccatcctactaatccatattccatgtttttttctaaccaaatgcaccgtcgcaagctgggtggttctctctttggtgcctgggggaataatgataaccatgtctgttgaagagacacaaatgaatgtgtttggcgcgtaaacggcgctttactagatgaaagatctgaaggacaacttcagtaaaggaaccacactaacttacgaatggagagtgtctcaagagaaagctctaatgtaaggcattctttgaaaacaacgaccatatcgtcggtgctcctcgttccgaactagccaagcctgctctctaaacctgcaaatacaagattggcatgacataaaactcatgtgaagtcatactgaatgaa

SEQ ID NO: 63752 - DNA, 2837 bp, Glycine max
  Clone ID: PAT_MRT3847_28582C.1
gatttttcacgaacgtcagaaaaaaaatcattgaaaagagattcagaaccttctcaaaaaatgagacggtcatctctagtgagtgcccttcttatagcaaacattctcatggcaacacgccttaccctcactcttcctttctctcgctccatctctccactcttatctcgttccctttcacaactcaaacaattcccaaaatcccacccttgtcccctctggtcctcctccttctccttctgcctccacacactccgcaagtccacttcccctattcgcgcctcttcttctttttctccctccatggctgcttcttctccgctaaacgacgccgtcgaaggcaatcctcttctgcagaacttcgacttcccacccttcgatgtcgtcgagcccaaacacgtgcgacccggcattcgcgccctcctcggcaagctggaaagtgaattggaggagctcgaacggaacgtggaaccgtcgtggccaaagttggtggaaccgttggagaagatcgttgaccggttatctgtagtttggggcatgatcaatcatctaaagtctgttaaggatagttcggagctacgttctgctattgaagatgtacaggcagaaaaagttaagtttcagcttagactgggtcaaagcaaacctatttataatgcattcaaagccattcaggagtctcctgattggcagacactcagtgatgctcgaaaacgtattgttgaaagccaaataaaggaggcggttcttaatggagtttctcttgaagatgataaaagagaaagttttaacaaaattgaacaggagctggaaaaagttatcacaaaagtttggggagattctcctggatgcatcttatggcgtgatggaagctcagcaagattgcctgatgctcacatggtgtgcaatcaaactcctccagtaggaaacaagccaagtctaatgacattccgtgaggttgagactgtttgccatgaatttggtcatgctcttcaacatatgcttactaagcaagatgagggtctggttgctggtattagagggatagagtgggatgctgttgagttaccttctcagttcatggaaaactggtgttaccatagagaaactttaatgggcattgcaaagcattttgaagttggaaaaggtctcgcttctaaactacaatagaagcttgttgctgagaggacatttcaaaatggcaactgttgataaagcagaagaacttcctgaaaagcttcgcagggcttcctgggatcctgcagtgcaaggggatgaggaccgaacgaaattctccaaaagtcagggagcattggaagctggtgatttgactcattgggacattaccttttggagtgagagctttagtgatatatttgcaggtgtatatgcggctggatactatatttacaagtgggctgacgtgctgtcagctgatgctttctctgcatttgaaaatgctggtttggatatgaaattgagccgtctgatggtctagccccagtttccgggagacctttcttgttcttctgtgtggcagattcttcttagatgttattgggcaatttcttgggagagaaccaacaccagatgccttgcttaggcacagtggcctagatggatgaagtctttgctcgtagtcgtgtgttatcgcgcgatggtacctcagcaagattgcctgttgctcacatggtgtgcaatcaaactcctccagtaggaaacaagccaagtctaatgacattccgtgaggttgagactgttttccatgaatttggtcatgcacttcaacatatgcttactaagcaagatgagggtctggttgctggtattagagggatagagtgggatgctgttgagttaccttctcagttcatggaaaactggtgttaccatagagaaactttaatgggtattgcaaagcattttgaaactggggagagtcttcctgaagaagtatatttgaagcttgttgctgctaggacatttcgagctggctctctaagtcttcgacagttaaaattcgcaagtgtagatctggaacttcatacaaaatatgttccagggggacctgagtcaatctatgatgttgaccgcagagtttctgagaaaacccaagtgattcctccattaccagaggataggttcctttgcagctttagccatatatttgcaggtggatatgcagctggatactatagttacaagtgggctgaggtgctgtctgcagatgctttctctgcatttgaggatgctggattggataatgacaaggctgttaaagaaactgggcgaaagttccgggagaccattcttgctcttggaggtggcaagccaccactagatgtttttgtgcaattccgtgggagagaaccaacaccagatgcattgcttaggcacaatggcctattacaagttgcagcttcgtgatagatcgatagagttggccacttttatagtcaataaatgggactcgtacttacctaagaatatggggcctcatacttttttttcatatgtagttttttgtcatgttttttaacttaatttttccatatttaaaggaatctaaattttgaaattcgttattccgtgattaactttttaacatttattcttttatcatttaaaccaacactttatctacccatttttttttattttatatatattagaacataattacttaaataccaaattgaacacaaaggggacatgcgtcaaactgttgctgtgggagttatcaagaacgttgagaagaaggatcctaccggagccaaggtcaccaaggctgcccagaagaagaagtgaatcgtgcgggctggttcatcagggatgtt

SEQ ID NO: 63753 - DNA, 1223 bp, Glycine max
  unsure (1)..(1223): unsure at all n locations
  Clone ID: PAT_MRT3847_28583C.1
aattcggctcgagacaaaattgaacaggagctggaaaagttatcacaaaagtttggggaaaatgttctggatgcaacaaagaagtttgaaaagctaatcactgataagacggaaattgaaggattacctgctactgctcttgggttggctgcacagagtgcagtatccaaggggcatgaaaatgccaccgctgagaatgggccatggataattacattagatgctcctagttttattgctgttatgcaacatgctcgcaaccgttctttgcgtgaagaaatctaccgtgcatatgtatcacgtgcatctagtggagatttggataatacaggaataattgatcaaattttaaagctaaggttggaaaaggccaagcttctaaactacaataactatgccgaggttagcatggcaaccaaaatggcaactgttgataaagcaaatcaacttcttgaaaagcttcgcaggtcttcctgggatgctgcagtgcaagatattgaagaccttaaggaattctccaaaagtcagggagcattggaagctggtgatttgactcattgggacattacctattggagtgagaggctacgtgagtcaaaatatgatattaatgaggaagaactgcgtccctttttctctctgccaaaggttatggatggactctttaaccttgcaaaatcactttttggcattgaaattgagccagctgatggtctagctcgagccgaatcggctcgagcggctttcttctgtgttaaggattcttctggtagtccaattgcgtatttttattttgatccttatagtcgtcctgctgaaaaaaggcaaggtgcatggatgaatgaagtctttgctcgtagtcgtgtattatcgcgtgatggcacctcagcaagattgcctgttgctcacatggtgtgcaatcaaactcctccagtaggaaacaagccaagtctaatgacattccgtgaggttgagactgttttccatgaatttggtcatgctcttcaacatatgcttactaagcaagatgagggtctggttgctggtattagagggatagagtgggatgctgttgagttaccttctcagttcatggaaaactggtgttaccatagagaaactttaatgggcattgcaaagcattttgaaactggggagagtctccctgaagaagtatatntgaagcttgttgctgctaggacatttccagctggctctcttag

SEQ ID NO: 63754 - DNA, 513 bp, Glycine max
  Clone ID: PAT_MRT3847_28584C.1
tttggtgaaaaaaggacagtctcctgagtaccagaatttgctgaggatgggtcttgccgagtcaatagacgggctacaatatacgaggatgtctcttgtgcctgagacagattactccccgttccctagtaattggaggcctgaccatgaaaagttgttgctagaatacataaaactggaagatccaaaaactttggaggaacaacgggattgcatcagagaacaaggtcttgtttcacctcaagactatatttcaaggcttgtgtggaattacaaaaggaattctcttcctatggaccagctgtccttagtaaggagcaacgaaagtgttgtaggaaatcagcatttgctagttggctcaaaccaggatgaccaggaccacacaaacaaagaggaagaaaatgatggaaggatgaatgcagcaacaaatgtaacacaaaggatgtgtaattttggaattctaagcaatactattgttacacgcggtcttttcgtaggatctttcaagaggct

SEQ ID NO: 63755 - DNA, 288 bp, Glycine max
  Clone ID: PAT_MRT3847_28585C.1
ctagtggaatttcacgaggggtcctttggaacacatgccaatggacatgccatggcctggaagattatgagggcagggtattactggctcaccatggaaaacaattgttgtatccatgtgagaaagtgccataagtgccaggcattcaccgacaatgtcaatgctctgcccgtgcctttgaacattttggcagcaccttgtccattctctatgtggggaatagatgtgattggggttattgagcccaaagcttcgaatgggcattgctttattttggtcggcattgac

SEQ ID NO: 63756 - DNA, 405 bp, Glycine max
  Clone ID: PAT_MRT3847_28586C.1
actaggatctattcttacatagcattcccttgtaaagcattgggtaacgtaccacattattgctcaattggtacatgagtgtttcaaaataatctggattcactgctaaaagaatacttgtttaatactttgtgctcatgaataaaatgtacgtgcgttaaataatgagatgctagctaaaaatgactatcatgcacttatctacgaattggaactaggcgagactataacaaaggatgcctggacacagcctgggagagtgcttaaagctgccacctggcgaaatgaaagccaagcaatactatcatcattagtcaagccatgaacaaggacgttagcacaattcttccgacaaccgtcgtgatatggctcactgaaccgcccatcagggaccactaacgtaat

SEQ ID NO: 63757 - DNA, 538 bp, Glycine max
  Clone ID: PAT_MRT3847_28587C.1
ggagcttctggctcttttaattcagtatctgtgaaagcaattccaaatcatgctccaagaggtgcctttggtcccgcgaatggtattttcacgtatgatgaattattagtggccactaaatgtttctctgagtccaaccttcttggagaaggtggttttgggtatgtgtacaaaggagttctcccatgtggaaaggaaattgcagttaagcagttaaaatcaggaagccaacaaggagagagagagtttcaagctgaggttgagaccattagccgagtgcatcataaacatcttgttgaatttgttggatactgcgttacaagggcagagagattgctcgtttacgaatttgttccaaataacacattggaattccacttacatggggagggggaataccttcttacaatggtcgatgaggattaaaattgccttgggatctgcacaagggctggcatatctacacgaggattgtaatccggctatgattcaccgagatattaaagcatctaatatccttcttgatttaagtttgaac

SEQ ID NO: 63758 - DNA, 340 bp, Glycine max
  Clone ID: PAT_MRT3847_28588C.1
gaaggttgaaaatctagttaactacacagattatgacttctgaaaaaaccagagccaccgttgtgccttaatcaaggcagaccgcaccttgaggtccaaattattgatagaatatggaacaaaacacatgtcctaactacttgaaagaggcatgccgacttcatagattagggaggcgcaccccagggaatacattctagaatctacgtattttccctgaggctatgagaaaaacgtcctttcatatccacaccagaaaaaaatggggccaaactttctttgacccatgaacccattacgggtatgactagctttacggagacttttaacaacacctcct

SEQ ID NO: 63759 - DNA, 419 bp, Glycine max
  Clone ID: PAT_MRT3847_28589C.1
aaaagaaattcaacaaaactttattatcagaaagtgacaataccagatttgttgctccaagagagagatctaaactctaaacttcaaaggtttagaacaattggcatatgctaatagaacatagatggtcaaattgtttacaatactacgcatactcttcaacatatgtatggttgttactgcatagcaaataactcgttgtcaatcattttggttgcttgtaacaaaaaaaaataaatcattttggttgctggatttttcggccaaccaaaaggatgagaaaataactatttcactttttttaaagcaatgatattattaaactagaataagcacaagatgtgcctataacagtacaacacaaatagaattagtacgagttttgataagagatgtgcccaaactccaatcaccaacta

SEQ ID NO: 63760 - DNA, 350 bp, Glycine max
  Clone ID: PAT_MRT3847_2858C.1
gtttgatatataactaatactatagcacgtatagagcactttcgcactacacaactaagatttataatatagtatataaagtaaactataattaaaattcgctatgaataaatattttttaacacgcttcatcattaagcgacgatcgaagttagttattacgagctattagaagttacgtgaataattactctagttatgttactagaagttattgaagttagttattaggaattactagaaattggttattctctatatttgtataaataaatcacctttctaatactttgatgaatgaattcgaaaactatcggttcatttctttcattctcgatatgggatcaaaa

SEQ ID NO: 63761 - DNA, 267 bp, Glycine max
  Clone ID: PAT_MRT3847_28590C.1
tggaacaaagttattcattacgggggggggctctgctatggacattctacattcttataagcttgcgtatccttaaaaacatgttgcctttcttccattatgctatatccccacagattaaaatacatgccattaataaccaaggtagaccctgcaacactttccaagaaatttttcttttttagtacaaaaaaattaagcatggccacaaatatttgtttaaagggggtaaaagatacagtacaaagtggaccccttttgttttga

SEQ ID NO: 63762 - DNA, 505 bp, Glycine max
  Clone ID: PAT_MRT3847_28591C.1
aaaaaagggatccacgaaatggaaaattggcttactttttcgggcttattcccattattttgccctaataaggcagaggggatcatacagaaaatattaaaaggattgtttttcagggcctttctcttgcataaataaagatcctaaccccccacccaaacccttacaggcgacgtaaaaaatatcaaccttttggcatgtggtattaatctacattaaccccccacctccaaaattgggagcaaggtgaacccttaaaaattcttcaacagggggaataaccccatccgctaatgtttctttccacatacagcttcataaaaaaaaaatgtccaaatgccccataacaagggcttagcggaagttgcaaaataatttgttaagggccaaggaggggcttttttttaacatacaacaccgcaaaaatacatctcaagttttactttgatgacaaaacctcccactccgaatttaagccttaggcaaaattaaaatcaacttaaaa

SEQ ID NO: 63763 - DNA, 334 bp, Glycine max
  unsure (1)..(334): unsure at all n locations
  Clone ID: PAT_MRT3847_28592C.1
ggctcgagcagcagcagaagctgaatcatgaaaggcagaagcgagggagaccggccagagacgcacacaaggcgaagcagcacacagcacgggcagggaaccagaaaaaggaggcaccacgacaacgagaagcngagggaaagccaagccccaaaaaggaaacaacagaccatnnacagggcgcaccgacaagagaggagagaaggggaaaggnggaagacgccggccccaaggacgaacagggacccaggaaaaaggcgaagcagganaacaggcacaggaccagaccaggagaaccggaagggagagaaagcaaagagcgaagaagccaaga

SEQ ID NO: 63764 - DNA, 527 bp, Glycine max
  Clone ID: PAT_MRT3847_28593C.1
gaacaacatatattttcttcaatcaaattctgaaaagtgataacaaaaccccatgattcttactagtattttttttatttaatagtaaatagtaatgcgcacggacgaggatgcttaatgtgagcgtgtgttcaaccgtagctaggaatcaaatcttaagtgaatgcactagcaaaaatgacatctttctaaggtcgaataattaaatgctgtgagtgatttttttttccaaaaaaaatatacggtattaaaatatttcgtcaagaaaaaaaatactatatttgacgttttgaacgagtgaagcataatttaataatcgaaaataagcagtaaaaatattatttagagatattaacctgctattctattataatttgtaaataacttatatttttaaaagtgaatatggctaatactatgataataaagacatctcagagtgtaaaaactccattaatggtactagggctgctttaggccatcattgatggctctaaactctaaagacaagacagatgaacccgtga

SEQ ID NO: 63765 - DNA, 301 bp, Glycine max
  Clone ID: PAT_MRT3847_28594C.1
caacggataatgtcgccatgccaacgcctggctaggaagagggttgagactaatagcgctcagccgaaaaatactattaatggagaagattttgtatggcaacctgctttataaggagagcaaaaagaggcatgaaatacttctattgccatatggacctgtgaagaagggtatcaccggcggaattatcgacaaaaacatgtaaacggtggtgagtatgccacattctataataaactcacacagactatgtgtgtgggacatacaccagtagcacgatggtgttagggtctggtgacag

SEQ ID NO: 63766 - DNA, 481 bp, Glycine max
  unsure (1)..(481): unsure at all n locations
  Clone ID: PAT_MRT3847_28595C.1
ctgcgagaagacgacagaagggtgaccacagacttctcaataatttataaactttatgaaacttaagtatcacttaatccctatcactaatttcccctgttcattattcttaatagaaatttatagatggtcaggtttatcagcagagaacctttagtttccattgctgatcttacccttttcgttcattcataacggttcttcagttgatttatcttaatgtttggctttaatacacttgtttgggctcagctgttgatgaactaatccaaaattgtggtgagatagcattctatctgagaggctcttaccttttgtttagtttatttggaaagatagttgtagtttaagtcagtagaacatgcagatgggtaaggagaagtggttgttaggatgtgtcttttaattttgttggttgaaagaaaactaanaaattgcatcatgtgtggcttggataagagctagcataagcaatgcactg

SEQ ID NO: 63767 - DNA, 230 bp, Glycine max
  Clone ID: PAT_MRT3847_28596C.1
tactacaaaaaaaacgacagagatctttttcacaacctatccatacatttactaggctgctttttctccattatacaaccaacatctccaacttaacttctcaacatagacatatctcacatacccattttaacattactcaacattccactgggggaacacccattcttctttacacacttaaatttactgtaagcacttgctttctactactccgataccaaaagcca

SEQ ID NO: 63768 - DNA, 445 bp, Glycine max
  Clone ID: PAT_MRT3847_28597C.1
ctcgtcggcggccgcccgtgttatttctgctgcacctgttacagaagcttgctttacctatactactttttgaatttctctagcatgaccaattatctagtacgaacaacgggctctttctgcaactatctctttgagcgcaacttcctgccaccaccggaacctgtactccaagcccgatagatggcctcctagtcatgctgaatgagccacatttctcgctgaagcttcacgctctctgcaacctcacggacgggctgattgcgtaacgacctgggattgcacctactccacctaaaatggaatgcttgcatgaacctgaggagtcagttcaccatcaaagggcacttgctggacttcttgtatcaaaggacttttattacctgtgtgaacctagtgactcggtgactcatgcccttggagcttgtcctgtgtaagatgcttt

SEQ ID NO: 63769 - DNA, 361 bp, Glycine max
  Clone ID: PAT_MRT3847_28598C.1
aattcggcaccaggcaatagaaaaataatttattagaagttcatcttgaattttcatagttggagaataagttggatgtttgttattgatatgggcaaaaatttggtcgggaaatatatggtagagaaacctatctttgaaatttaatatttttcttactctgctatgaaaatgcagtaagttatggatttcatgcatttgaagttgattagtcattagtggatgctttgttagattttgtacttgtatgcaagagatttgagggttgttaataatggtggggaatggagattgaagctgaactgagcaagttgtaggactgcaggagaagtatcgcaaaacttaagagtgaaggaaaaag

SEQ ID NO: 63770 - DNA, 255 bp, Glycine max
  unsure (1)..(255): unsure at all n locations
  Clone ID: PAT_MRT3847_28599C.1
tcccggttttgagagctnaaaaatcaacatttgggctgtacaagttgatttccatgatatccaccaacggcgaaggggattaagctggattgcgtgtatagacaaatctgcgattagacatccgtgaaatgcatggagtcggtgtgtatgtagggaactacaagttcattcgaaaaaaaaaagaaccaacactcacagatagaagcaataacattactagtgagatgctaaaaaaaaataggggggggccgttac

SEQ ID NO: 63771 - DNA, 339 bp, Glycine max
  Clone ID: PAT_MRT3847_2859C.1
tggtcggaacctttgggctgatgtatgtgcttgtttatgtgcttgagaagatgatccacgggcctggtcgtgagaagatgatagaagggcatggtcgtcagaagatgaggcgagggcatggtcgcgagaagatgatagaagggcatggtcgtgagaagatgatagaagggcatggtcgtgagaagatgatagaagggcatcgtcgtcagaagatgatagaagggcatcgtcgtgagaagatgatagaagggcatggtcgtgagaagatgatagaacggcatggtcgtaagaagatcatacaaggacatcgtcgtgacaagatcatacaacgccatcgcc

SEQ ID NO: 63772 - DNA, 147 bp, Glycine max
  Clone ID: PAT_MRT3847_285C.1
cagagacaccggaggagcccgaccaaccaccttcgcttaagagacgcaagagggcacccacccgggaaggcggagagcacaaaaccgaccgcccgccacgagacaaagcagggccaccaggaaaaaacccagggggaaagcccccga

SEQ ID NO: 63773 - DNA, 381 bp, Glycine max
  Clone ID: PAT_MRT3847_28600C.1
gttacttttgaagttgggaggggagcaaatatatgctggtccattaggccgccactgttcccatctgattcagtactttgaggctattcaaggagttcctaagatcaaagaaggttataatcctgcaacctggatgttggaagttacatcagcaggcacagaagcatctattaaggtcaacttcaccaatgtgtacagaaactcagaactatacgggagaaacaaacaattgatccaagagcttagtatacctcctcaaggctcaagggatctacactttgatagtcagtattcacagactttggtgacacaatgtaaagcttgtctatggaaacagcatttatcatactggaggaacacatcatatacagcagttagact

SEQ ID NO: 63774 - DNA, 593 bp, Glycine max
  unsure (1)..(593): unsure at all n locations
  Clone ID: PAT_MRT3847_28601C.1
gtaccggggtgccggaannttcccgggngtcgggacccacgcggtccgaaatcaccaaacatttcccatttttttcacctccatcggttcacccactgaatccagcgttcttttgcttttctttctaacaaaaatcgcttctgcacacacaaggattcaggtacattttgtctttctttgtatttttcttaattaataaagaagataatatatattttccaggttttgatggtgctgcgctaattgctgaagtggatttgataggctcttttttttatatatatatcagtatggtgaatctgagttgatagatatttgaggggcttattattattattgcttttacttagaggaattatagtcttattggtacatcgaaatacctgttgacgcttacattacctgtttggccttgagagaaatccaatgcgacagatgcccattctcactattattactattttactgctttgtcttttctttttttaaatttgattttgctctgtgtgggaggatggtggtggggatgtatgcggggctgtggttggggttgggggggggggggggggggtggttggggggggggggggggg

SEQ ID NO: 63775 - DNA, 234 bp, Glycine max
  Clone ID: PAT_MRT3847_28602C.1
tttttgaaggattgaggtttcataatattgggcacaagaaaattatttatgaacgcattcgtgcaatggtgaaaatgctctgagcaaagtttgaaacaaacatattgtggtgcctcttttattgagatgggtccgaagcttcataaaaaggcaggagaggcggtgagtttgcttctctattggtaccttaaaaaagggacaaaatgcggaatttggtttgggtctgtgccacac

SEQ ID NO: 63776 - DNA, 1467 bp, Glycine max
  unsure (1)..(1467): unsure at all n locations
  Clone ID: PAT_MRT3847_28603C.1
nttccttttcctccttctcttaactatgcttgatgaggtttacaggaggtacaggcaatactatcagcagatgcaagcggtagtaacttcatttgagtatgtttctggcctgagcaatgcagctccctatgcaagtttggctataaaagctatgtccaaacattttagatgcttgaagaatgcaattactgatcagattcagtttgccaataaagctcattttcatatcagcaacaggaaagatgaatctccaaggtttggcaacagtgatagaggcccatatggccaaaggcctgggtttcttgagcaccaacctgtttggcggcctcaaagaggactccccgagcgcgctgtgactgtcctcagagcatggttgtttgagcactttctgcacccttatcccactgatactgacaagctaatgttggctaaacaaactggtctatctcgtagccaggtgtctaattggttcattaatgccagagtaaggctctggaagccaatggtggaagaaatacatatgctagaaacacggcaagctccaaagaatctgcagaaggaagaacattgcacgaacaagccaagtgatcatttgccttctgataactccattgtttctgagaatccatctacttccacagataaatttcaggaagctccttacaagcgtgccataaacgagcttcctaacataccagtcaggactcaggaacagctgaatcttccctgcacaagcaatcagccagggggtgttggagtgagcatgggtggcagtgcaagcaatagtgtgtcactcacactaggcctctatcaaaaccatggtattggtttggctgaacctttccccttgaatgcagcgcagcgatttggtgttgctcttgaaaccaacaatgaaggctacgttatgagtgattatgagtcacaaaataggcattttggaagagatgtcattggaggacaactgttgcatgactttgtaggctgaaggtcttcaatgtcaaataacaacaactttgcctggagttttaatttgattggggtgatataatactaaccatgtttctgttgtgcttccatgaattatctaaaagttagaagagggattggaatgttgcactttgtggtggtgatgctggcaatgatgaatgaaccttccagttatgggggattaactggtgtttttttattgagctcacttgtatggaggttgtaaaggggtgggattaatactgtgtcataatagatgtgtgatccaattcacccttgtgttgttgttgacctcaattgcttggagtaaatccaaatgttctggctatttaagctgtttgtaagttttttacattttataaaatattattgtcatccaaaccaggtaaatggatttcaatttgtaatacttgaaatcttgttcgacatgattgtactagtcatcatcatattagtaatatcttcgtgtctttatgctgc

SEQ ID NO: 63777 - DNA, 203 bp, Glycine max
  Clone ID: PAT_MRT3847_28604C.1
ttgaactctttcaactaatgtgtcgatttagccaatttcaacgtttgaatttttcaggcattcattcattagtttcataatctcggacattcaacaagggtttgattcgtagtgtgagtatggtgggttttgctggaagatttgtatcacagtatatctgtacatgcaaataattctgcggtgtacctctactatcagtcact

SEQ ID NO: 63778 - DNA, 532 bp, Glycine max
  Clone ID: PAT_MRT3847_28605C.1
ggacatcacaacattcccattccatggattagcaacaggaaatcgttattaaaaaaaataactaagggattattaagggggggaaaggcttcattattcccttaagaggggtaaatggggggggggtaaactggttttcatccaatcattggcttaaaaataatggggccccggggggggcaacgagatcatcatagtatggggggacccaccctttaaaaaccaagaactcttttttccatgggtcgaccaaccattcgggatcgctatgattggcattggcccccaaaagggccaggcaaggaaacccatttacgggagggagggcaacaaaactgtctgatatgtttttcaaaaccccgccgctactaaaaggggctcttagcccattaaaaaaaaggagggggctaccaaactttggaaggaccaattttatactatggcctccatagaaaggagggacccaaggggggcgaggggagacaccaaattgtttcttgcagcccttggcatagctttttaagctaaaagg

SEQ ID NO: 63779 - DNA, 310 bp, Glycine max
  Clone ID: PAT_MRT3847_28606C.1
gtttgggaaaacatttgccttggttccaaccactttatctgttatttgtgaatcgactgtcgtcactcttgcacttgcttactcatggctgaagatgtaccgagaagctatttcttcttatgaccacgctcttgcattctctccctgtcgtgtgtgcacttctcccgctcttgcatatactttccacctaccggatgatttcaccaccgcctttgcttcttctcacaaagccttgtggctgaaacctgatgatcagttctgcactcgtctgtttacttcggctctaatatatgaaagtcttactggcgtt

SEQ ID NO: 63780 - DNA, 111 bp, Glycine max
  Clone ID: PAT_MRT3847_28607C.1
cgattaattgcatcatgagacgatatgtgtatctacactaggatggagcactgttcgctccgctcaataaaaagttccattctgtcttttgcgataaaactagggatggat

SEQ ID NO: 63781 - DNA, 198 bp, Glycine max
  Clone ID: PAT_MRT3847_28608C.1
tagaatgcgaaacccgacagagctgttcagataccagccctcaaaccctggagactcccatgtaccctcttctagtgccacacttcacgttacacgattccaacatatactcaactaactaattaacgtatcggcattcatacatgtcatccttttgctatttaatgtcggatgatgtgatgatatattttctgttca

SEQ ID NO: 63782 - DNA, 849 bp, Glycine max
  unsure (1)..(849): unsure at all n locations
  Clone ID: PAT_MRT3847_28609C.1
ttgcatgcctgcaggtttgtattcttttttatagaaaaatttattagatgtgaaggagagaatgaattttagaacaaactttcccctgtaagaagaggcttaacagatagggcttgctcaagtacctcaagataatcccccccagcacagcagcccaaagaaactatctataccttagtgccttccaatgaaatttttttttgagcctcttcaattgagttggaatttaaaacttgaattatactgatttattatcattatttatttgcactctgcccttcccatctttgagtactgtgaaaattttgccaatgatgtgcatttttccaaatgtagatactcatccatctttaactatttcaatctgcgatgcacgtggctgattcctttctcagtttctcaaattagggggttgagttttgcagttggattgaacttcacctaccttcttaaatcttaacaaccttgtttgcatttcaaatttaggcttactagtgtatttgcacatgcctttgaacttctttaactatttcaatctgtgatgcacatagccgatttctttctcaaagtagtgggtggagttttgcagctggattgaatttcacctgccttcttaaatgttaacaaccttatatgcttttcaaatttaggtttactggtgtatgcgcccatatctttgaacatatgttgtttctctattgtggcaccaacctatttaaaattggatcagattgaccattgattataataattatcggtcataaatttccattgatttggatacaacccattaaatctgatcatggntaaatcagatataaaattctactatcatgctgatcattgctt

SEQ ID NO: 63783 - DNA, 460 bp, Glycine max
  Clone ID: PAT_MRT3847_2860C.1
acttgtagaagcaaggaaagtatcggctgcgagaagacgacagaagggcatatttaaaaccaatattacctgtacataaattttgaaggacctaatgttgcagttccaacacgagcacctgagacaggtgacaaggatgaggaaggtgctggacctctgacatggtttacctggtgggccttaaaaattaattatgctgacagtgtacgtaagtcaagaaacccctgaactagtatgaattatgctatgagcaagttttacctgttgtcccaacttgctaatggatggatccttggttgtaggccaaaagaagagttcttgaccttttcttttcttggatactggaggcgatgaatagccagaggaaccaatagctccagatatgggtgcatttgccgagtgctgaatatatgccatgttattttgatctccatgaaacgaagcgtgtctctcttcactt

SEQ ID NO: 63784 - DNA, 209 bp, Glycine max
  unsure (1)..(209): unsure at all n locations
  Clone ID: PAT_MRT3847_28610C.1
ggaaaacacacttggcttgacaacgttcctcttccccactggtacaccttctctttttacattcttcttacttcttacttncntcntactngcttactnaacntcaaccnctgnaccctcntgcactntctnattattnccncatntttntgggttaaagaagcnaacccctttgtttgcttctataaaaacaaacaaggattgttgnt

SEQ ID NO: 63785 - DNA, 339 bp, Glycine max
  Clone ID: PAT_MRT3847_28611C.1
ggctcgagctttcgtgtacccatcggactttacttaacttattcttctccaatcaacagtagaggtactgtcctacttattttgcggggtctctcctgaaaaacacaaaacagagagagcgagagagtgagacaatgaaccccataaattagaagggtgagcacctaacagacccataccacccaggctttctcttgttgctctttcgacgagccagaccctctcaaatacttgatcccactctttatctaggccccatactacctaaacgatgagatcccacgagacaaatgctgagacactctacctcttctgtgaggaacaaagacctgctccaac

SEQ ID NO: 63786 - DNA, 216 bp, Glycine max
  Clone ID: PAT_MRT3847_28612C.1
ggttctctgcgcttgcctctatggttatcatttcaccatttccagtttttcgctgctccttgcattctgccactcacaaggatacgggtccaccgacatgtaaatgttccgtctctcaatgacgtcttctttaggtggacaatacagcaatgcattggtacgtgccatttagccgcttcgcttcttctcagtcaaccacctcactttgcgggctgt

SEQ ID NO: 63787 - DNA, 259 bp, Glycine max
  Clone ID: PAT_MRT3847_28613C.1
aagaaacactaattgggggagggtttatattataccatcaacacaaaggcataacttaaaaagtacattaggattcggtaaataacaaaatttctatccacccttaaaattaaacaaatggtttgggaacccctacaaatcatccctctataacaaaatttctaaaaatttcaacaatgttatataatttatcaaccacgacttttaagttttaactaccatgctatttatattacttaatattgaaccaaatttcctg

SEQ ID NO: 63788 - DNA, 2933 bp, Glycine max
  Clone ID: PAT_MRT3847_28614C.1
tttgtttttttttttttttttttttttttgaacaacgaaagagaatcgttcatattattatttagttcaaagtctttattcttacattattacttttattaaccataacatgtagtagatgcttgcttaattataaataagcatattataaaaagtctcgcgatcttggctcatcatgcattggcaaagttgaagaggtcagcacatttgactccatgcgagtgcagtgatgaggtgctaaacccaacccttgaccttgcaagatcgaacaccaccaggttctcttccaactgacgtgcccctaaggtaatttcagctctaggttgcattcctccattcataacacccaaacacgtgaccccaggttgtgcctgcaccatcaagtcctcaccagagattctccaaacaggaccattgggcttgtccatcacaaggtccacgctaggatatgcattgatcttgttggagttgaagcataacccaaatggtgccacagatttcacctgtgcttgctttggtagctgctgagcaaacacctgagtgaaagcctggtacacggattgctggagaaccatgtgaggagttgaggtgctaatcatggttcctccagaggtcgaccctacgatggtggatgatatcttgttcagtgggaacacactgtgctggttgattcttattgagttgactctcacgttgtactctccctgcagggtgatggttaatggggtgaaggccaaatcgtggaaaatatcttggttttgaaactgtcgcatgttgttaggtgcatccccgaatattatagcaccctttgaagtagggtagcgagaaaggcaagtggtgaattggcgttgtaggccaaagtgggaagcgagttggtttggaagagaaattggtgcatggcctaacccagccacaccttgagtgtttctaggaagacccttttgaacaaggaaggaaggtgcacaagaaaagaggaattgtgggactgtgaccattgggccaagttgttgggtcgacccttgtgtggcgtggattgcaagaacgtcttctcctagttcacctaaaccggtttgttgggtgatgggattagtggacatgaggccacacgtgtttttgtggcaccctggccttgatgccgcggggcaactgaggcattggtgggtgttggctctagagcattgggtggagtggcagaagggtgccacaaaaacacgtgtggcctcatgtccactaatcccatcacccaacaaaccggtttaggtgaactaggagaagacgttcttgcaatccacgccacacaagggtcgacccaacaacttggcccattggtcacagtcccacaattcctcttttcttgtgcaccttccttccttgttcaaaagggtcttcctagaaacactcaaggtgtggctgggttaggccatgcaccaatttctcttccaaaccaactcgcttcccactttggcctacaacgccaattcaccacttgcctttctcgctaccctacttcaaagggtgctataatattcggggatgcacctaacaacatgcgacagtttcaaaaccaagatattatagcaccctttgaagtagggtagcgagaaaggcaagtggtgaattggcgttgtaggccaaagtggcaggaaacattgctctttggtcaatccctgtcatgtttgctttcattgtctcgttcacttgccagacgttcctgcaatctcaaagcaagaacatcatcattgcgttcttggcggctttttcgatagtcactcaggtgtttctctcctggcttttgacaatgaagttcaagtttgggattcctggtgctatgatttcagcaggcttggcatactggattcctaatattggtcaactcatatttgtcacatgtggttggtgctctgatacatggaaaggtttcacatttttggcattcaaagacctctggcctgttgtcaagatgtccctttcagctggtgccatgttatgtcttgagctctggtacaacacaatattggttcttttgacgggtaacatgaaaaacgcggaggttgaaattgatgctctatccatatgtctcaacatcaatggatgggaaatgatgatatcccttggtttcatggctgcagcaagtgttcgagtagcaaatgaacttggaagaggaagtgccaaagctgcaaagttctctattattgtgtcagtgctcacatcattggccatcggattccttctgtttatattcttcttattttttagagaaagacttgcatatatatttacctcaaataaagaggtggcctttgctgttggggatttgtcacctttgttgtcggtctctatattactgaacagtgttcaacctgtactctcaggagtggctataggagcagggtggcaaagcattgtagcatatgtgaatatggggtgttattatgccataggtattcctgtaggtattgtacttggtaacgttctggatttgcaagtcaagggaatctggattggaatgttgtttggaacgttgattcaaactatagtgctaattgtaatcacctacaaaactaattgggacgagcaggttaccattgctcagaagcgtattagcaggtggtcgaaggtggacagtcctgatcatgaaaatgaagtagaaagaaaaaacgttagctaattagtttcagtgtcatcatctgtgtactatgttgttatacagcagaaaacgttaatagcaattgtacggttaatcatattttttttttgaagaaatggttattcattagtcataagtcttaaatcaaaaagtagtagacttctttcttacttttgaatttttcaatagagacattacttttgctcgtactcgattgacctactcggttaatggatctttacgtgcaaggcattattaatgttacatgttcttaattctcaacttt

SEQ ID NO: 63789 - DNA, 1285 bp, Glycine max
  unsure (1)..(1285): unsure at all n locations
  Clone ID: PAT_MRT3847_28615C.1
gtttcagaatcgcacccaacccaaccccgttttttctcttcactcacttgtcttgtgttgcattcgttaattaccagagctcaactccttcccccaagctttctggcatctcaatgatgacacaagaatcatcagaggtgttgggaaaacatgcaagctcaggttctcatgtgagggggagtagtgaatatattagactggtcatatccgatgaacaaagggtggttgaagctgaaaccttgctgactcgagcagaatcaagaatcaagtctttctggtggtggatgaaatcctttttatggtgtgttgtctttgtgatacttgtttttattcttgtcaaatggggagtgccacttttttttgtaaaggttctttacccaatcatggaatgggaagctactgcctttggccgtccagttcttgctttagtacttgttgcctctctggctttattcccagtgttcttaatcccttctggcccctccatgtggcctcgaggcgtgatttttggttatggccttggcttcgttataataatggttggaacaaccattgggatggtgctgccatacttaattgggctactgttccgtgaccgaattcatcaatggttaaagagatggccccagaatgctgcactgattaggcttgctggggaagggaactggtctcgtcaatttcaagtggttgcactgtttagggtttctccttttccctatactatattcaattatgccgtggtagtcacaaatatgaggttttggccctacttatgtggatcagtagctggaatggtaccagaagctttcatctatatctacagtggtcggttaataaagacattggcagacgcacagtatgggaagcaccacttgactactgtggaaatcgtatacaacattatttctttcattattgcaatagttaccactattgccttcactgtctatgccaaaaggactctaaatcaactcaaaatggcagagttgaatgatgaagttacctttgtttctgtagagatggagaagcttccccttgaaaggcctaaacagcttagtttgtcaaaattttcgtgacaatgtatactcgtgtatttacaagttgctttaggattacagtaataatactccctccccccccttttttttccctttcggttttcatatgatgatccttgtaactaggatgtcggagtgggatagaaaaaccaaaggccaataacagttacactttttttctccatcaaacttttccattatgctcccnaaaaaaaaaaaaaaaccac

SEQ ID NO: 63790 - DNA, 468 bp, Glycine max
  Clone ID: PAT_MRT3847_28616C.1
tttcacgcgtatgatatcgaaccaacaaccactttcagttttgactgttttgcttccatggtgtctcgccccaatctagataatgcgaatatgaagatgccgtcatattttaattttccagcacttgatgtttctgttgcatttccacaggccactccagcctctactattcctccttgagcttgagattattttcatttcaatgacttgttgaaaccggaggagcaggccgagaggaacagagtgagagagtgtatgggaaaagaaattgctcctataatgactgagtactgggagaaggctgaattcccatttcatgttatcccaaagtttgctgccctgcgtgtagctggtggcacaattaagggttatggttgtcctgtgctttccatagctggaagagctgttgctgcagcagaagttgcttgagttgatgcaagctgctgaactttctgtatggtccattct

SEQ ID NO: 63791 - DNA, 510 bp, Glycine max
  Clone ID: PAT_MRT3847_28617C.1
aaggacaaaagcaattcatttcacaaaggggggggtaaagggcggggaaaaacccaaaaccaaaaggggcaacccccccccccccccccagaaggaaaaaaaccgaaaaaatttggggggggggggggaacaaacccccccccaagggggggggtaaccacaaaaaggctttcaaaagatacccccccccccctgggccccccaggggtaaccgggggcccaaaaacgggccccccaaagggggggccttcccgggccctttgaaaaagggaaagggcccttaaagggtttaaccccccccccggaaagggccccaactggcccacgaagttttgaacccaactcacggcccggtttaaggggggaaccccccccccctgggaacaaaccacacccccagggggggaaaagcccacatcggggggccaaaccccccccccgaggggggccctgggggaaaaacaacccggtaccccaaaaggaacttttatccggggggggagggccctt

SEQ ID NO: 63792 - DNA, 1662 bp, Glycine max
  unsure (1)..(1662): unsure at all n locations
  Clone ID: PAT_MRT3847_28618C.1
ggtaccggtcaggaattcccgggccgacccacgcgtcagagacgacagaaggggatcatcacaaatatggaagaagaagctcctccagtgccacctgcaccgcccatagtggccatgctgccatcccctggcatgggccacctaatcccaatgatcgagttcgccaagcgagcggtgcgctaccataacctggccgtcaccttcgtcatccccactgacggcccaccttctaaagcccaaaaggccgtcttccaggccctcccggactccatttcccacaccttcctccctccggtcaatctctccgactttccaccgggcaccaaaattgaaaccctgatctcccacaccgtcctcctctccctcccttccctccgccaagccttccactccctctcctccacatacaccctcgccgccgtcgtcgtcgacctcttcgccaccgacgccttcgacgtcgccgccgaattcaatgcctccccctacgtcttctacccctccacagccaccgtcctctccatcgccctccacctccccaccctcgacaagcaggtccagtgcgagttccgagacctcccggaaccggtcaccatccccggttgcattcctcttcccgtcaaggactttctagacccggttctggagcgcaccaacgaggcctacaagtgggtcctacaccactccaagcgctaccgagaagccgagggaatcatcgagaacagcttcgccgaactcgaaccgggcgcctggaacgagctgcagagggaacaaccgggacggcctccggtttatgcggtcgggccgcttgtgagaatggaacccggtcccgccgactccgagtgcttgaggtggttggacgagcagccacgtggcagcgtgttgtttgtttccttcggaagcggtgggaccctctccagcgcccagatcaacgaactggctctcgggttggaaaatagccagcaacggttcttgtgggtggtgaagagcccaaacgatgcaatagccaacgcgacttacttcaacgcggagagccacgaggatcccttgcagttcttaccagaagggttcgtggagagaacaaaaggaaggggctttttggttaagtcatgggctccgcagccacaggttctggcccatcaatcaacgggaggattcttgagccattgcggctggaactctatactggagagcgtggtgaacggcgtgcctttaatagcctggcctctgttcgcggagcagaggaccaacgcgtttatgctcatgcatgaagtcaaggtggcgctgaggcccaaagttgccgaggacactggacttgtccagagccaggaaatagccagcgttgtcaagtgcctcatggaaggccatgaagggaagaagcttcgttaccgaatcaaggatctcaaggaggctgcggctaaggctctctctccaaatggttcctccaccgaccatatctccaatttggttctcaagtggaccaacaaaaccaccatctctactagtggctagcttttatttttcttcttcttcttcctgtaattttattatctgcacttataaaatgtcgctttatgtatttattttatctgggatgatgataaaggtttggtttggttccaaaaaaaaaaaaaaaaaaaaaaaaaaaannnagcgcccgccccc

SEQ ID NO: 63793 - DNA, 284 bp, Glycine max
  unsure (1)..(284): unsure at all n locations
  Clone ID: PAT_MRT3847_28619C.1
gnaatatatnagngnttgangnnctgtgattangaagnaananggttaagatggagtaaatgttggttgangaagncggnttngncgagtaanatggaggaaaanaaggaaggtttggaattgagggggaantgnnattgnnaaagctggttagcanagggaaagttgtnattggaatggatgttgnagnctntgaattntanaaggaagataaaagatangatttgaattgaaggaagataagaatgatggntcacagaagatttctggagatgntttgaaag

SEQ ID NO: 63794 - DNA, 277 bp, Glycine max
  Clone ID: PAT_MRT3847_2861C.1
tgggattaatttcccttaaattttataggatgataatgatttgttgatggctaattgttagaaggtagaagctaaggaagtagtgtgggaatatggtagttaaaaaagccaatggtctgatggattcaatttaaaattcattagaccttttggagtactatgaaggaagacatcaagagaattcatgaagaatttcatgctcatggtgtgatccctagaggttgcaactctttttttgcccttatttctaaagtagatgatcctcaaggcttagggg

SEQ ID NO: 63795 - DNA, 472 bp, Glycine max
  Clone ID: PAT_MRT3847_28620C.1
attttcaccatacttggtgagagttaagaggaattataaaccatccttgttgggtgaggtcgagagatattttttttgtattgagagagtcattataatcctactttaatagtgaagatatttacttccgtggttttttacctttcacattgaaaagatttttcatgttaaaaatttttggtgtctttcttctattctctattcttgtttttccattttcgttgagtgcctattttgagtctacaaagaaggaaatagtgctggtattttccaataattttcgttttgttggccatccaatacatatccttttgtttgttatgaaaccttgctacacaagtttttggattactgacttatatagagatattttgcatcagaaaatttttcagatagatttcatatgtctatcatccttgtttgctatccgatctcagatttatttcaaaacttgtctgtaattttgagtttt

SEQ ID NO: 63796 - DNA, 1572 bp, Glycine max
  Clone ID: PAT_MRT3847_28621C.1
gaatgacattcctcctaagaactcccaggacaatatagctgcttctgagttaacatctctggatctgtaaagcctgtgtcttggctccgtaaatgcacaaccaagattttcaatctgtccccaagtaaaagagctgatgctgttggtgctttagacatgcctgggacatcaccactgtcagatgtcaattttagtgtatagaatacatatgaggagctgcctacatctcttcctaatataggagctagagttatttttgacgaacgtcaaccagcaggtgggatggcacatcactcttcagatacaccacacctccaatctgataacattggtaaagaggttggtgatgaatactctctatccgtgggtgatcacagccgcgtggatagttttgtagatggagatccaggtgattcgcagcagtctgttccaaagcttggtcggcgcaaacctgggaggaaaagcaaatctggaattgctagaacacgctcagtgaaggctgttgttgaagaggccaaggagttcctaggaaaagccccaaagaaaatagaaaatgcaagcttgcagtctctcaatactgatcatatcagagaagacagtcgagaagactccagtcacactgagaaagccattggtaacactagaaggaaacggcaacgggcacaaacttctaggattacagaaagtgagcagaatgctggtgatagtgaaggacaatcagatagtattacagctggtgggcgcaggaagaagaggcaaacagttgctccactgacgcaagttactggggagaagcgatacaatctcaggcggcataagattgcaggcaaagattcatcaacacagaacatatcaaatgcaacaaagagtgtggagaaagaagctgctgctggtaaactggagggtgataaaaacacccctgaagttgttgaaacttcattagcagtagatgatgacaatgtacaagacacaaacctggtgcaggtctcgacagtaaagactgtggagttctcagatcatagagctgttaggtttgaactaccaaaagatgttgttgatgacaatgctgctgcaactgagactctgaatcgtgtggaggaaaatggtacaccagaatatcaagatgaagatggaagcacaatccatgaagttgaaaatgatgatgatgatgaggaggaggaggaagaggaggaacatccgggtgaggtgtccattggaaagaagatcttcagattttttacaacgtgatggaagtagttatatcacaaatagatatacatatgtcatcattccttatttaggagattaggcatgtaatattacttcggagtaacttccatgtttgttttggcatttattactggcagatgagaagcattgttctgctgcctgtgttctcaataactgttctcttgcgaaaagatttgctgcttaagaaaggatggtgcttgcttcttcccaaaattgaactaaaggggtgaatccatctgtatcacgtattttgcattaattgataaaattaagcaattacgtcgatgcttcagaacattatttggagcatgtgcagtgagc

SEQ ID NO: 63797 - DNA, 697 bp, Glycine max
  Clone ID: PAT_MRT3847_28622C.1
gtcctaagtaggagtgtggcagtgtgctatatttatttcaagaggatacggggtgcttatcattgtttgccacttttgtgtaactttagtactctctataccctcgttaaaagctatccagttaattggcttgcaagtggaacaatgttacagttccattgcatgcataaactcttgtgatcatagaaaaattataaataaactggatattttggccattctcaagaataatcttgtttcagcgagcttttgctcacattacctagctggatataccagaagttgaattctaatttctagatttctaatatatgtagtcacactagtcagtcagtaagaattcatggtgattatgattgtcaaagttattatatacgataatgatatataaatattaaataacagtgtaaaaactatgaactatttactcataagacataatcaataaatcccatcaaacgagaaacattttacaatttctatcgatatacaattgaggatttttataggactgagagcactcataataacaggaaatgaggccttatatcatcccacctcagctcacaaggaagaaagcacactagagaagaagagctgtgctccgaaaaaggataactcaaaatacgtacattctcataagtaaaaaccaattaaatttaagctgaaatctcattgaaggaatgcaagggagttt

SEQ ID NO: 63798 - DNA, 333 bp, Glycine max
  Clone ID: PAT_MRT3847_28623C.1
gggaggggggggtgtttttttcacattcaacccaaccgaattaatttttttttaccccccaaattttcatttttttcaattcaatgccaactcaacaaatcaaaatgccagttcaccccatgaaaaaaaaaaacttaaacccccttttcaaaaccttccattattataattattattatcccatgtcccccaaagggatttttccccccattttatcccttggaacaagacacttttggacaaaataaaacctgtgatgatttgaggcctttccaaaaagggattttcttaaccaaaaaagctttttcaaaggcaacccctaaaaaaggaacc

SEQ ID NO: 63799 - DNA, 257 bp, Glycine max
  unsure (1)..(257): unsure at all n locations
  Clone ID: PAT_MRT3847_28624C.1
gnctanatggnggagaanttggnancagcngaagagagctctaattacaaagtgcttttacaccatacgggcgacgaanctcgtngtnntngcagncctcaangtncgnngcctcccgangncgnngcngnagaagtggattcttgcnncttgntcncncctccaccaattaccattttgggaaatgatgaaaacagtcaagataaaanttcgttgtctaaagacactgatagcantgaaggtgaaagtaaaaattg

SEQ ID NO: 63800 - DNA, 391 bp, Glycine max
  Clone ID: PAT_MRT3847_28625C.1
ggctcgaggtcgagccgatttggttcatgccgggatctcccactctctctccccaaggtctagacccgacgatgaggacacctgctaagatcgcgctgctgagagactgtatgacgagtagacgccacccctgggcactctgcagtaggagctccacagacagccccctactgtggctgcatgctatgaccttgggacacgataattacccctgagaattcggctctgacctgcaagcccatggcaattgctgtggactatgccgattaagcaccaacctccactctgggagtctccacactgcaacatccggggggttccctgctgaaggaagtactccgagcgggtgggtctgaacaccttcctagctatagtggtgatgtgactgctg

SEQ ID NO: 63801 - DNA, 592 bp, Glycine max
  unsure (1)..(592): unsure at all n locations
  Clone ID: PAT_MRT3847_28626C.1
acgcgttacgtaagcttggnatctctctagnagcgnngccgcccttttttgttttgttttgttgtttagcctnngggaacctgtgtcatatgctangaactattannagaaacgcttnntaatttatgcgntaatcttgaaaggaacctgcnnactcattacanctnngattcnngaatagtggtaanntttccgtgggtcccatgtaccattttttctatttaatctnnatttanngaagaataacagaaagggttgtggaagaaaggggatatataaacattaanntattaataacccaagcaagggggggctgggagnaaacttcacgagggactcagacnntaggagaggggcttccctcacanntctttgttcttattattatgggtggttgccacattttcctttgcctgtggagcaatttcttctccatcacttccaggttcactgccaggaactcccaagcttagcagcacttcctcccactccttagcaggccccttccatgaaagatcttgagccatgcagttcttgataatttctggtaaagctggagttccatagactgcaagggccccttttgacagtc

SEQ ID NO: 63802 - DNA, 344 bp, Glycine max
  Clone ID: PAT_MRT3847_28627C.1
tgcggatgggataagactacctaagggtacggttgaaaaaggactacaaagcggtgcgtctgcaagaagactacatacagcctctgctgtcggatcaaatacataagattcagcctttaagataaatcttatgactaacgcacctaatatagctagagatataacatttaaccttatcgggtataaactctaatatggtgcaattattatctagttgggcatccacattgataaactactctctggatccctttttatatgcataggaaagcttagactataccagaatgaattcctcctatcgcagccaacgcgagagtaaatacacatcgatacatgaatat

SEQ ID NO: 63803 - DNA, 317 bp, Glycine max
  Clone ID: PAT_MRT3847_28628C.1
ttgatcacaaaaaataatctcttaatggagagcttgtattgcaatattgaatacaaataccttttcattttatttttcacaaaaaaagaagggtccaaaaatcatgaatgattcattttttgtggaacaaatttgctcaattaagtgggagggggaaagagaagggtttaaaaaccacccaataaacaaaaaagactgtcactctgtttttgattaatagaccatgtaggatcgctatttgagcgttacatgcttcttgcaaccttcttcgtcagtggagggtttatcacaaaaaaagagttttactttgaaactaa

SEQ ID NO: 63804 - DNA, 479 bp, Glycine max
  unsure (1)..(479): unsure at all n locations
  Clone ID: PAT_MRT3847_28629C.1
tacggctgcgagaagacgacagaagggggagattgaatttgtaaattcaccttagaaccctaatcccctttttctcaatagactaaatcattccatcattcggtgcaagagggactgacaatagaggcacgcggcaccagattatttccaaattgaagcgtccaagagtccaaattcctcatgttagaatctcttttgtgctcttcaaacgccagtttctctttaattttctcaaattctggtgtttctttaattctctgtttcttttttctaaatgggcattcgagttttccttctggtgcagatttttttttcttttttgttttttttcttgatggcttgggtagattcagggattttcctttcttttggttgttgcccatcaccctttttgcatgttcttcacatgtattgtctgcatgaattctgaattaaaagcttcaatgcactntatgtgaatgcggtggataccaattgca

SEQ ID NO: 63805 - DNA, 589 bp, Glycine max
  Clone ID: PAT_MRT3847_2862C.1
tttttgaagttaagatctttttttatatacttacaaaataatacaaactgtttctgtatcagattaaaagatgtatcatcaactttagggatcgatttcttgatcctgggactgaatcatactcagccttctttgcctgcactgcttagtgcttacttatctgcaccatttccctgcaaaatcttgaacagcttttctgtcaatttgttatatatgtttattgagcatgtttggttgatgcatacacatttctccttgtttatatgtcctatgtatcaataggattatccatccttttcccttgattttgaaagtagtagtggtaagacatttatgatgtgcacagtatccacaatgataacataatggggggggatgcattacaaaatcttcagttatactaaagtcaaccaagatacaaagtttcttttatttggaaacggggaattagtaactaaaggaccagaaaggacaggtataagtatatgtcctcttttcttggaacaggcaatccaaattcctcaagtcatgtccaaggtcccaacttttctttcatttggaaagctccaatcaaggggaaacaacaaaa

SEQ ID NO: 63806 - DNA, 593 bp, Glycine max
  unsure (1)..(593): unsure at all n locations
  Clone ID: PAT_MRT3847_28630C.1
ctacagaaataatatttatatatgttatattgaaaagcattattttttatttattaacctatgcccttctaaataagatgtgtatttnggatatttagggaatttttaaaaaaaattggagaggagggaagcgagtttcatttaactttttcaaaatccaattaattttccttttttttaatttttttctcctgtaaagtatttaatgagaaaaaaatatgcacacagattagtttcaatttcaatttcaagccattcccctatatctttatctaccgagattgatcagtgttaacagttaaccataaagtgttgggttgaccaaacttatcttacatgtacaatgagtacagagaaaacatatgggcaggtgggtgcatgtattttcgctggtgattttgtcacgccaatatgctatattttccctgaaacaacagagcacacatttatgagattgtgccacgtgataaaatgaataagatatttcggtggatgaagaattgctagtagccactaggaaatacatattctggtaaatagattgccagcattgatatttgcttaatgctatgttctttactggtggtgctgat

SEQ ID NO: 63807 - DNA, 510 bp, Glycine max
  Clone ID: PAT_MRT3847_28631C.1
ccacgcgtccgctttacaggcgagcagcgaccatggatacccaagcacgtccggttcctccccgcgtcaagctcggcatccagggattcgaggtgtccaagctggggttcgggtgcatggggctgacgggcgcgtacaactccccgctggacgacgaggccggcatcgccgtcatcgcgcacgctttcagccgcggagtcaccttgttcgacacctccgacgtatacgggcccctcaccaacgaaatcctcctcggcaaggcgctgaagcagctgccgcgggagcaggtgcaggtggccaccaagttcgggatacggcatgacgagagcggcacgcggaccgtgtgcggccggccggagtacgttcgcgcctgctgcgaggccagcctgcgccgcctcggcatcgactgcatcgacctctactaccagcaccgcattgacaccacaactcccatcgaggagacgattggcgagctcaagaagctggtggaggagggtaaggtcaagtaca

SEQ ID NO: 63808 - DNA, 482 bp, Glycine max
  Clone ID: PAT_MRT3847_28632C.1
aattcggctcgagtctccctcgacaaaggatgacactcgaggaattgcgtgaagaagtttggtatgctgcaattagccttttgttattagcttttaatgcttttttatttgttgtagttgtgaattgtatgtattcatggctgttcataactttttaacattctgagttgctaattattgtcttaagggcaatggttaaggaatcaaaactgatgattttttattgaaaaatgtaacattatttgttaccaatgcatttccaccatgactgctagtaaagctttctattcattgattccttaaccatcatttacccttggtttggttgccaagagattactattcaagggaaacttttcacaaaatagcgagggtcccacacctccaccaaactactttagttcaaatattattttctcaattctcttccattccacacaaccagactcacccttaagggcaaaggtcagcaaaactgtttt

SEQ ID NO: 63809 - DNA, 739 bp, Glycine max
  Clone ID: PAT_MRT3847_28633C.1
atttgatcgtatgatgattccttaaatgctttttttggttctttaattgggccaactttgtttgcctttagtagcatatgatatctagcgaaaaagaaaatttatagtcatgactgttgatgcaagcaacttctttcttattgtaactgtgttgagaatattatatgctgggtcatagtcctttacacaataatgaaggctagacaaactttgacgctttttggccaacttttgaacctcatcatgtgtccgagcctattcatcagacatgacctgtcctattgtgaaatgggctaaggcatgggatgccattctctcttgttctttttacattgcatctaactaaactagtctcaatgctcaacatggacacaaagtggcttccacgggctatgtaggctttttctcacaaagggagtatacaagaaattaagcttttgcttttggtattactagttcacatatacgtaggaagaaggacaggggatcctccctttcctttgaaacctttgtttttctcgacgtacatgttcttgggcctacatagcattatgtccctaaggcatcgattcaatttagcttattctcaattttatgcacatgaaaatgatataactaaatgacaatttaaatgttgcgttttgagacacagcatgtgagtgtccttcttttggccgtcagcatgtgagctcaatgtgtcaatcaatacaagattataatatattttgtaaattattgg

SEQ ID NO: 63810 - DNA, 566 bp, Glycine max
  Clone ID: PAT_MRT3847_28634C.1
ctttttttttttttttgcttattttctttagcttttatgtttttaatccttcattttcatatctggcccacgaatgaatctagatgtcccccaatatgtatttgtggctccaaaaagcaaatagttcttcaaagttcaaattaccaccatttctaactccaaaagcaatttgttttgaggcaaagttctgacaccatcaattaagacatcttcaacaacatccacactgtttgtactcttaaaaccaaggaaggaaaaatgatcaaaaaaaatagttaactacaccggacaacaacattcatcataaaagtgatagattttttatattctcattttccattttaaagaactcttctttgtataattatgatatgatatacctgcttcaatcctttgtcagacatttaataaaaataaagttaaaaataaaaagttgaaagaacttattgactacacctaacaacgacatttatcataaaagtgacattttttcttgtttccattttaaagaactcttctttgtataactactatgatatgatatgcctacttgaaccttttgtcag

SEQ ID NO: 63811 - DNA, 408 bp, Glycine max
  Clone ID: PAT_MRT3847_28635C.1
ggccacatcccagcacacatatggaagacttcactgtacaatcttaaatgctggaagatggtaatggatccgctggaaatgatgcgatgggggatgtaagtggcacaaagaagctgaaagcgcgttcacatgctgataaggctatacttgggaccggatggaaactacttgctgcaccgtatatagaagatactaaggatatggaccatcattcccttgataatacaacccaactaattcaccattctgctataaccaatgatcattctcaaacgcttgagaactccgctgcttctgagcaggaacaaatggagcccttttaggctgaattacattgctccctatgccgagccactcatcgagcgatggcatactcaacaatacccttgcccgtggaggaaaacatat

SEQ ID NO: 63812 - DNA, 222 bp, Glycine max
  Clone ID: PAT_MRT3847_28636C.1
caactcgagccgaatctcgctcgacgagtccctggagctttggaaatggacagcggcaggttgtacacaagcttctcggaattgacgcacgaagactcgtcgctcgttggcagaaactagcgctgctcatgccactccaactaggcaacgccgtgtcccaagcgagccggtgttgtttgctgaaaccgacgtcgtcttacttgagtaacggcggaaccattc

SEQ ID NO: 63813 - DNA, 175 bp, Glycine max
  Clone ID: PAT_MRT3847_28637C.1
tctcaagttcttgctctatggcagaacaggttggattgggggtttgctgggtaagttgaataaaaaataaaactttacctacgaatctgcaaaactacaactagaggatccatcatcatttatgaattatattcaaaattttaaacctcttcatatttttaataaacaagtagta

SEQ ID NO: 63814 - DNA, 2520 bp, Glycine max
  Clone ID: PAT_MRT3847_28638C.1
atgtcagatgatgaccaatcagagcactttcttgttcagtctttaaagacattaaggaggcatgttttctcatggcataaccaatggcatgccatcaaccctgccttgtatctccagccctttttggatgtgatacgatcagatgaaactggtgcacctattactggtgttgctttgtcatctgtttacaaaatcttaactctagatgtgattgatcaacacactgtcaatgttggggataccatgcacttggtggttgatgctgtcacaagttgcagatttgaagttactgatcctggatcagaagaagtggtattaatgaagattttacaagttcttctagcatgtgtgaaaggtaaagcatctgtaatgctgagtaaccaacacatttgcaccatagtgaatactagtttccgtatagttcatcaagcaggaaccaaaggtgagctgttgcaacgaatagcacggtatacaatgcatgaactgaagatacatagggtgcttgaagctttctctgagagatattatgaacaatcaccacacatccttgctaacaaggatgctgctcttgtgttgtcatactcaattatattgcttaatacagatcatcataatgtgcaggtcaaaaagaagatgacagaagaggattttatcaggaataataggcgtataaatgatggcaacgatcttcctcgagaattcctgtcagagatttaccattcaatttgtaaaaatgaaatccgtaccactcctgaaccaggctttggatttcctgaaatgaccccaagtcgatggatttctctgatgcacaagtcaaagaaaactgctccattcatcgtatctgattctagagcatacttggattatgatatgtttgtgttattgtcaggcccaacaattgctgccatttctgtggttttttatgatgctgaaaatgaagaggtataccaaacatgtatggatggatccttagctgttgcaaagatatcagcctactatcatcttgaaaatgtacttgatgatctggttgtgtgcctctgtaagttcattaccatttgggatccactatcagttgaggaatctgtcctggcctttggagatgacacaaaagcaagaatggcaactgagacagttttcactattgcaaataggtatggcgattacatccgcgcagggtggaggaatattcttgaatgcatcttaatatttcacaagttaggcctccttcctactcggttggccagtgatgcagctgacgagtcaaagcaagctacacaagcaattcataagtgtcacgttgacagcatattcactgagagcaaatttctgcaagctgaatctctattgcatcttgcgaaagcgctcattaatgctggagctcaacatctgaaagggagcagaatatctgaggatgaagacacttcagttttctgtctggagttactggtggcaatcactctcaataacagggatagagttggacatctctggagggatgtttatgagcacatatccaatattgttcagtcaactgtgatgccttgtgcactggtagaaagggctatttttggacttcttagaatttgccatcgcttacttccctacaaagagaacattactgatgaacttttgaggtccctgcaacttgtcttgaagcttgatgctcgggttgcagatgcatactatgagcagattacacgggaagtcagtcgccttggactgaggaaagtatgtctggaccagagagaggaggttagaaatcatgcattgttatctttgcaacagtgcttgacaggagctgttggaactcacatcccacacgagttgtggttaacttgttttgatcaagtgatcttcactgtgctggatgacctgcttgaaattgcacaggcacactctcagaaggactacaggaacatagaaggaacacttgttattgccttgacactcttgtctaaggttttcctccagttactccaagaactatcgcaatttgaaaccttctgcaaactatgggaggatatgctaggctgtatggaaaaatgtgtgaagatgaaaattcagggaaagagaagtgagaagcttcaggagcttgtgcctgagcttctgaagaacattttgcttgttatgaaagctgggggcattctagtgcacagcagtggctcaggagataatagtttgttggaactggcatggcaacatatgaagaatattgctccgtcgttgcagtctgagttaattctatctgcagtgcctaagcaacctgaattggcttttctgtgcccctatgaacacccccacaatcttagtctaaccttgataaattcatttgatcaagtcaagcatgaagtgaagttgcctgttatttggtattctctctttctcataattgcccccagggatttgtattttctgggacatgtatctacttgttatgttaatgatgtaaacaggaaaatttttgagatgataatgatcataaatatgtacacacataataaaacatccaaggatacttga

SEQ ID NO: 63815 - DNA, 412 bp, Glycine max
  unsure (1)..(412): unsure at all n locations
  Clone ID: PAT_MRT3847_28639C.1
tccatgcaaacagtgcgtctgcattgtgctgtggtacgtgctgtcgaccgtccccgtgttcggcaagatcgtgctgccgccgttcttcttctccaacccgttcgacgtgttcagccagatcgtgaagtggtttgcctccggcgtgatctggaagcacctcggcatcacgctcgcggaatcgatccttgccttcgtgatcggatcgctcggcggtgtgctgatcggcttctggttcgcgcgccagccgctggtcgccgcggtggtcgacccttacgtgaaaatgctcaacgccctgccgcacgaggagcgggcacccanaatccagcggagcatataccttgcactcggctgcggatttcggatatccgatctgcaacgacaagactaaaagcacccctcaccctcaatgaga

SEQ ID NO: 63816 - DNA, 587 bp, Glycine max
  Clone ID: PAT_MRT3847_2863C.1
cggctcgagtgcacaaccaccacaatcgctgaaacctttttcttttctctttctttctcctatcaaagcacccccacttttccgatggccgccgtagcatcatcaccgacgccacgtaagtctcgatccaaaaacctcgagaatttcgatcccaacaaacaacaacaaagccctgttttcaaaccctcttgttcctcttcttcttctcctctcgtgaaaccaaagaaccctaataataaagtcaagtacttctcccctcagaacaagatccggcagagaaagttcttggtcgcaaagaagaagaaagagacgaagaaggaagaaaaagagggttcgggtgctgctgactcttgcaagtgcaaagcaactggtgcaaatgccaacaagaaccacaagtgtgtctgtgtggcttataacaacctaaggaagtcccaggaagagttcttcaagaacaaagatgatggtgttgttgaagaagggggttttgagagtgagactgagagtgtggttgttgaagaagaaaaagatggagaatcattattgggggaatggtttgtttgtgataccgtaggagggagaaggtgatg

SEQ ID NO: 63817 - DNA, 4524 bp, Glycine max
  Clone ID: PAT_MRT3847_28640C.1
atgggacatctaaagattcaaatgcaaactggtcttattcccacagaggacgaatatgtacaatgtgatgctggatatccaaacaagactaccatagcatgtatgatcaatgcagaaattagtgctgttttggctgtcatgcgaagaaatgttagatggggagttcattacatgtcagatgatgaccaatcagagcactttcttgttcagtctttaaagacattaaggaggcatgttttctcatggcataaccaatggcatgccatcaaccctgccttgtatctccagccctttttggatgtgatacgatcagatgaaactggtgcacctattactggtgttgctttgtcatctgtttacaaaatcttaactctagatgtgattgatcaacacactgtcaatgttggggataccatgcacttggtggttgatgctgtcacaagttgcagatttgaagttactgatcctggatcagaagaagtggtattaatgaagattttacaagttcttctagcatgtgtgaaaggtaaagcatctgtaatgctgagtaaccaacacatttgcaccatagtgaatactagtttccgtatagttcatcaagcaggaaccaaaggtgagctgttgcaacgaatagcacggtatacaatgcatgaactggttaggtctatattttctcaccttcagaatattgacaacacagagtctgcattcataaaagggacagctaccttaaaacaagagatggagggcagcaaaattaagaaaggactaagactaagtacaggacctagaaatgttctaggtagattatctggaacttaccaggaaaaaaggaaaatgcttaccaatggactaaataatgaccatgctttggccagcagacaattggaaaatgggaggctgaattctgcacaggatgctcaaccattatctacaggcattgcttccagtactgcaacagacttgacagcagctgtaattgatgaaaacaaagctattgcttgcaatggcaatgagattgatccacatgaattacagctcatgactgaaccatatggggttccatgtatggtggaaatatttcacttcttgtgttctttgctgaatgttgctgagcatatgggagtgaatcctagatcaaacacaataacatttgatgaagatgttcctctttttgcgttaaatttgattaatgcagccatagagttgggagggccatcctttcgctgtcacccaagattactgagtttaattcaggatgaattattccgcaatcttatgcaatttggtgtatcaatgagccctcttgtactttcaatggtgtgtagcattgttctcaatttgtatcaccatcttcgtacggaactcaaattacagctagaagcatttttttcttgtgttattttgaggcttgctcaaagcaaatatggggcttcatatcagcaacaggaggttgtgatggaagcacttgttgatttttgcaggcaaaaaacattcatggtggagatgtatgctaactttgactgtgacataagttgcagtaatgtctttgaagatcttgctaatttgttgtccaaaagcgcatttcctgtgaacaatccattatcttccatacatgttcttgcgttggatggtcttattgctgtaatgcagggaatggccgaaaggataggtagtagatctttaagttcagaacaatctcctgtgaattttgaggagtatactccattctggatggaaaagtgtgacagttttggtgacccaaatgattgggttccttttgtccgccaaagaaagtacataaagagaagattaatgattggagctgatcacttcaatcgggatgttaagaaaggtcttgagtttctccaaggaacacatcttttgcctgacaaacttgatccccaaagtgttgcctgctttttgagatacactgctgggttggataagaatctcattggtgattaccttggaaatcatgatgaattctgtgttcaggttcttcatgaatttgctaggacatttgatttccaagatatgaccttagacacagccctgcgtgtatttttggagacttttaggctgcctggagaatctcagaagatacatagggtgcttgaagctttctctgagagatattatgaacaatcaccacacatccttgctaacaaggatgctgctcttgtgttgtcatactcaattatattgcttaatacagatcatcataatgtgcaggtcaaaaagaagatgacagaagaggattttatcaggaataataggcgtataaatgatggcaacgatcttcctcgagaattcctgtcagagatttaccattcaatttgtaaaaatgaaatccgtaccactcctgaaccaggctttggatttcctgaaatgaccccaagtcgatggatttctctgatgcacaagtcaaagaaaactgctccattcatcgtatctgattctagagcatacttggattatgatatgtttgtgttattgtcaggcccaacaattgctgccatttctgtggttttttatgatgctgaaaatgaagaggtataccaaacatgtatggatggatccttagctgttgcaaagatatcagcctactatcatcttgaaaatgtacttgatgatctggttgtgtgcctctgtaagttcattaccatttgggatccactatcagttgaggaatctgtcctggcctttggagatgacacaaaagcaagaatggcaactgagacagttttcactattgcaaataggtatggcgattacatccgcgcagggtggaggaatattcttgaatgcatcttaatatttcacaagttaggcctccttcctactcggttggccagtgatgcagctgacgagtcaaaggtaactatagaaaatggacatgggaggtctaattcaatttctttatcatcaactcatcttcaatatattactccaaagagatcctcgggattaattagcaggtttagtcaactcttgtctcttggtgctgaagaggcacaatcaataccaactgaagaacaactggtcgctcatcagcaagctacacaagcaattcataagtgtcacgttgacagcatattcactgagagcaaatttctgcaagctgaatctctattgcatcttgcgaaagcgctcattaatgctggagctcaacatctgaaagggagcagaatatctgaggatgaagacacttcagttttctgtctggagttactggtggcaatcactctcaataacagggatagagttggacatctctggagggatgtttatgagcacatatccaatattgttcagtcaactgtgatgccttgtgcactggtagaaagggctatttttggacttcttagaatttgccatcgcttacttccctacaaagagaacattactgatgaacttttgaggtccctgcaacttgtcttgaagcttgatgctcgggttgcagatgcatactatgagcagattacacgggaagtcagtcgccttgtgaaggcaaatgcttcacatattagatctcagtctggatggcggacaatttcatcactgctttccatcactgctagacacctggaagcatctgaggctggatttgatgcgctgatattcattatgtctgatggagctcacttgctccctgctaattatgttctatgtgtagatgttgcgagacattttgctgagtctcgtgtaggactggtagatcggtctatagttgcactagatctaatggcaggttctattaattgtttagaaaagtggtctaataatgctaagaaagcagtcaaagaagatgaagtggaaaagatgttgcaagatattggggaaatgtggtttaggctagttcagggactgaggaaagtatgtctggaccagagagaggaggttagaaatcatgcattgttatctttgcaacagtgcttgacaggagctgttggaactcacatcccacacgagttgtggttaacttgttttgatcaagtgatcttcactgtgctggatgacctgcttgaaattgcacaggcacactctcagaaggactacaggaacatagaaggaacacttgttattgccttgacactcttgtctaaggttttcctccagttactccaagaactatcgcaatttgaaaccttctgcaaactatgggaggatatgctaggctgtatggaaaaatgtgtgaagatgaaaattcagggaaagagaagtgagaagcttcaggagcttgtgcctgagcttctgaagaacattttgcttgttatgaaagctgggggcattctagtgcacagcagtggctcaggagataatagtttgttggaactggcatggcaacatatgaagaatattgctccgtcgttgcagtctgaggtgttccctgagcaagattcagaacagttacagattcagcacaaacagattgaaccagttggaagcttgggacctgatgcaaacatttctgttccttcaaatgaaaaagtgggccaagatggtgctgtgatcagttaa

SEQ ID NO: 63818 - DNA, 438 bp, Glycine max
  Clone ID: PAT_MRT3847_28641C.1
aaattcaactagctattctttatttcaacctttaccaaacccaacataattgggtcatattggtaaataataaagttagtttttaataactttccaatttctatatttaactgctgatgtcctttcaaaaaaatttaatacaggcaaatacatacatgttcaaatcgtatcaccaacttagctgtatatttcagctttaagttttacctgtggggtgcaaatatcatcctgactttgaattaatctaatctctaaactggttgactcaggatcatgtccagcacttttgtagtcactgagtgtcctgtgcaaaactgcctgcaagcttgacactgcaagttccgcagcaatctaaggttgtctgggtatttattgctccaaccaagaagagtgcagtctgagatctcccgttccgtaaaatagctgtatttttggaat

SEQ ID NO: 63819 - DNA, 435 bp, Glycine max
  unsure (1)..(435): unsure at all n locations
  Clone ID: PAT_MRT3847_28642C.1
accacgcgtccgatcaggtcaatcttgaatatcttggaagggttgtattcaacaatgagggcctactctatcctgacagtgtggttgggactgattcacataccactatgatagatgggcttggtgttgctggatggggagttggaggtattgaagctgaggcagcaatgcttggtcagcctttgagcatggttttgcccggtgttgttgggttcaagttatctggaaaactacgcaatggtgttacagcaacagacttagttctaactgtgactcaaattctcagaaagcatggtgttgtggggaaatttgttgaattttatggtgatggtatgggtgaattatctttggctgacanggccactattgccaatatgtctcctgaatatggtgccaccatgggcttcctccctgtggatcatgttacactacaag

SEQ ID NO: 63820 - DNA, 296 bp, Glycine max
  Clone ID: PAT_MRT3847_28643C.1
aaccaaaactcgaaaaaacccattattgccccagtcctcctcggcacaaatctaaaaaaatccgccagcctaaaccacgcaaaaaactccaacaacaaaaactctcactccttatcctctacagtaacgtcaaacaccaaccttaaccccacaaaagcgccaccaccaccccacggacctccccgatcccaaacataataagggccaccccccccaccaccatattggcctccaccccatccagcataccaaggcccacccctaacacaaccccccaccacactatcatgtaaccc

SEQ ID NO: 63821 - DNA, 1339 bp, Glycine max
  unsure (1)..(1339): unsure at all n locations
  Clone ID: PAT_MRT3847_28644C.1
atgaaaagtgtcatcgtcatcggaatgaatgtagacgcaggagttggctggctcaacgttgaacactgttccatgctgttaaagcctccgctctcactcaacttcagattttccccacaaacgagcattttccgggcacgaaactcgaggaattcgcgcatggcgcctccaatcctctcgctcgctcttccctcgaacaccggtcgagttctcagcattcaatctcacaccgttcaggggtatgttggtaataaatccgctgtcttccctctgcaactactgggatatgatgtcgatccaattaattccgtgcagttttcgaatcatacaggatatccgacgtttaagggtcaggttttgaatggacagcaactctgggatctaatcgaaggccttgaaggaaatgatttattgttctatactcacttgctaacaggttatattggttcagagtcttttctaaacactgtattgcaagttgtcagcaaacttcggtcaacaaacccaggtctttcgtatgtatgtgatccagtgatgggtgatgaaggaaagctttatgttcctcaagagctagtatcagtctatcgtgagaaggttgttccagtagcttcaatgttgactcccaaccagtttgaagcagaactactgacaggctttaggattcagtctgaaggacatggccgggaggcctgtaggcttctccatgcagctgggccttcaaaggtcataattacaagtataaatatagacgggattcttctcctcattggcagtcatcaaaaagaaaagggagagcctcccagacaatttaagattgttattccaaaaataccagcttattttacgggaacgggagatctcatgactgcacttcttcttggttggagcaataaatacccagacaaccttgagattgctgcggaacttgcagtgtcaagcttgcaggcagttttgcacaggacactcagtgactacaaaagtgctggacatgatcctgagtcaaccagtttagagattagattaattcaaagtcaggatgatatttgcaccccacaggtaaaacttaaagctgaaatatacagctaagttggtgatacgatttgaacatgtatgtatttgcctgtattaaatttttttgaaaggacatcagcagttacaagaaattaagaagaaagttgcttcatttgtttcctatttattgatcaaatatagaaattggaaagttattaaaaactaactttattatttaccaatatgacccaattatgttgggtttggtaaaggttgaaataaagaatagctagttgaatttaaaaaaaaaaaaaaaaaaanaaaaaaa

SEQ ID NO: 63822 - DNA, 278 bp, Glycine max
  Clone ID: PAT_MRT3847_28645C.1
gttgaagcgagaaggaagggtcagcgcgccatggctggcatcaccacctcccccttcaaactctctcaatttccgactctcttctcttcttctgattccaaactcttcggcatgcccctctccaatccctattccctcaaattcgacccttcttctctctcaactacctctctatcctacgtcaaagcccgctactacggcggcggcggcggcactccccgctcccccaacgactcacgattccgcaagtcatccgattccgacgacgacgataaagc

SEQ ID NO: 63823 - DNA, 147 bp, Glycine max
  unsure (1)..(147): unsure at all n locations
  Clone ID: PAT_MRT3847_28646C.1
tnatnatacgatttcntttngcataatctaaggaacaaattcaancaaacaaggtcactacctccattcattcattcctcttntctttttctctgtcaagtgaagtctatcactcgtngttgatttcattcnantcagtcaattnct

SEQ ID NO: 63824 - DNA, 309 bp, Glycine max
  Clone ID: PAT_MRT3847_28647C.1
ctcacgcgttcgctcacacacgctcataggcttaccctaggattatcccatgccttcgttccggtctttgatggaccggatctatctgaaaacgtttcatacgacgcttcataacggtcccgagttaaaagtgttaactgtacataccaccattaacttgtgcagatgctctttatgcttaaatacttgcccaagctgaaatccataactgtcaagtttttgctttgaagcatcctaagttgcctttccgtccaaagtattgtaaatcaatataacttgcattaggactcttagcattgatacatggac

SEQ ID NO: 63825 - DNA, 189 bp, Glycine max
  Clone ID: PAT_MRT3847_28648C.1
gttgttcacgttttgggagaggttattaactggggaaatggtaggataccacaggccgggccccagatacaaaccgttcagacaggggggaaagggcaggcaccccagcctgggggatcagaccccatcatcagcgggggaaccacgttcgtttgagggggcacccccggggacaaaaaaacaaaaatc

SEQ ID NO: 63826 - DNA, 408 bp, Glycine max
  Clone ID: PAT_MRT3847_28649C.1
tattaaaccttctactggtgtaacaagtgtcacatccgactgtggcagcttctgtatgcattttgagatattcctatctcgcttccacagctgtgatacggatcacagcagatatgtagcatttcctgattgtataaatgtaccatttgatgataatgaagatcacttcatcttttctttccagatatttctcttcactatattctaatagataagacaaattatggtcccctttcacctacacttgttattcttgcatgtcagttaaatgcttgcaaaaacttttcctggctggaaatatcattgtcactttccgctgaacttagtatctgttaacaggttcgtaagcaatccgccagtattgctctgcatgtaaatatgcctgggtaagtccagtctgactttccc

SEQ ID NO: 63827 - DNA, 303 bp, Glycine max
  unsure (1)..(303): unsure at all n locations
  Clone ID: PAT_MRT3847_2864C.1
atgggcaaatgatgctacaagaatggaactagaaacctgatcaggacatttgacctgaggaaacctgccctctantcaantctgggggggggggggacattttttacttgtanaancaaanaangcangggtaatataataagannatnnancanannagacccccccgggaccaccacaaggnnacaagaaaccactccnccttcctttcccaggtaggaaaaaatatgggtatgatatcnttctctggtctacagcannnggatttntaatactacttggatgaaagctttattatacctc

SEQ ID NO: 63828 - DNA, 589 bp, Glycine max
  Clone ID: PAT_MRT3847_28650C.1
gagaagggctgccaaggttttaacctttgtggccgtgttaatacgcgttggaccgctgtcactgactccttatgtggcggaggaagggcaaaataatggccatgatgtgaactgctacacggaatcatgccctcaggctgagcacatcatcgcagaacaggtcatgcttctatacaagcgccacaagaacactgctctctactggctcaggaacatcttgcatgactgtgctgttcatagttgtgatgctacactggagctggactccacaagaaggagcttgtctgaaaaagaaacagatcgaagctttggcgttgagaaatttcaggtacatggataccatcaaagacgctgctgaaagagaatgccctggagtagcttcatgtgctgatatcctccatctctctgccagagagggcatagcttacctaggaggaccccatatccctctaaagactggaagaagggatggaagaaggagcagagctgatgtcggtgagcaggaccatccacaccacaaagagtgcatctctgcacatactgacaaggatggtgccatgggaattgacacccctggcgtcgaagcact

SEQ ID NO: 63829 - DNA, 234 bp, Glycine max
  Clone ID: PAT_MRT3847_28651C.1
cttacggaattcggcgggccacacatccgagccatgacgcttacattcacacgtgcaaccaacgtcccttaaaccactgtgacccgactgtttacagtgcaattacaaggctgcatactttgccacacacaataggtcacataaccctacatctgtgcatggcaatggacatgactaacggtctcatgttctgctatatagcactacgcaggcatctgacaacatcacaactca

SEQ ID NO: 63830 - DNA, 263 bp, Glycine max
  Clone ID: PAT_MRT3847_28652C.1
tcgagcgaattggtgcattggttctttacatttttgttgtgacatttgcttgtagaggagtctatgtaacaattcaagcacctttcctaagtcgccagaaaaaagagttgacagaagcttacatggaaggttaattcctgaaccatcccctaccaacattaaaagatttaaaaagggtatgtggaagaagacaatgccgaaaggcctgaaaatgaaaaagcttattgaaagacctgatggaacacttgttcatgatacttctt

SEQ ID NO: 63831 - DNA, 225 bp, Glycine max
  Clone ID: PAT_MRT3847_28653C.1
cacacgcgtgcgatgatagtgaagctccacaaagactggtgcaagaaacaggctaataattcggctacgacagcgactgttgctggccaagaatctggtacaacaagatgatatctgaaacgatgacctctctggacaatgcttctttcgacggaaagcccaaggtgcaccatcacatccttgatcatgaaggaggaggggatcctatgaacagtgtctgcagtt

SEQ ID NO: 63832 - DNA, 494 bp, Glycine max
  Clone ID: PAT_MRT3847_28654C.1
tacggctgcgagaagacgacagaaggggagactgaagatgaggactcttctgctcccaccttcactatcacagtggatgtgaaatctggaacttctacgggtgtatcagctgctgatagagcgaaaactgttcttgctctgtcatctcctgagtccaaatcagaggatttcagaagaccgggtcatgtgtttcctcttaagtacagaaatggtggggttcttagaagagcaggtcacactgaggcctcactggacttagttgcactggctggcttgcccccaatttctgttctttcggctcttgttgatgaaaatgatggctctatgcaatctttgctcaatttaagaaagttagcatcggaatacaccttaccaattgtctcaataactgatttgataaggtatcggagaaagagagaaaaattggttgaaagaacctcagtttctcgcctgcctactaaatggggcctatttcaagcatattgctacagctc

SEQ ID NO: 63833 - DNA, 266 bp, Glycine max
  Clone ID: PAT_MRT3847_28655C.1
gacaccttgaggcaagcatacagaaaaattttcaagaaagagaagattggcaacattgaaacccttttgataggatcagcagctggtgctatttcaagtagtgctacctttccgctcgaactggctcgcaaacacatgcaagtcggagcccttagtggaagacaagtatacaaaaatgcgattcatgcccttgcaagcattcttgaacaagtaggcatccaatgtatgtataaagggttgggcactagctgcatgaagttgggtgc

SEQ ID NO: 63834 - DNA, 193 bp, Glycine max
  Clone ID: PAT_MRT3847_28656C.1
aataattttactggaccatgacatagctaagtaggcacttgattagagagtgattaaggagttctatcataggatccaagcgtgctgtaaatgggtctgctagccttgtgataagaagattttgaggaagatgaaatgaaagaggctgataagttgataaaggaagaggcctctgaatcttttcgagcagaca

SEQ ID NO: 63835 - DNA, 840 bp, Glycine max
  Clone ID: PAT_MRT3847_28657C.1
cacgcgtccgaaacgctcgtctccgcacacacgacacgagcgagaaccaacctcgtgagacgcatctcgcatgcttcactcgctcgcacgctcgcacgccggacactttccggtccgcacttccgtttcctgatctcgatcctgccggattcctccccttcgccatcgatcacgccggatctccgcgccggtcgccgggaattgctgttcctgacggagctctgaagattccgtcgaggagaagagggatctgccggagaattcgtcatttacaacgtgttttcgatctggaagcttgtgaaattcctgaggacatggtgtttttggtttgagatggaggccgttcataaattttgatggcactggcaatcaacaggatcagtagtttttaattgaatttaaggattgagggttcagacttgggattatggcaactgatatgcagaggcttgttggaaccagtgaggatgatgaagaaatgggaatggatgtgaaagatgaggatgatgaggatgatgattatgaggaaaatggaggtgaacaggggaatgcttcagtatcagggatggtagagattgatgatgggaatgggataggaactgccactggtgacaacaggtttcagcagcaccagcagtttcaagagcaagtaggcaccccgggtggaggtactcgaagatctaggccgctagaagagaaagagagaacaaagctaagagaaaggcgccgcagggccatcactgcaaggatcttggcagggcttcgcaggcatggcaactacaatctaagagttagggctgacataaatgatgtcattgctgctctagcagggaagctgat

SEQ ID NO: 63836 - DNA, 235 bp, Glycine max
  unsure (1)..(235): unsure at all n locations
  Clone ID: PAT_MRT3847_28658C.1
gagagagagtccgacagagctccctagaccaatttagggaggggncggcgctggacaggcacctggtgatcacagccaagttatcctatatcctcaagcaatgatcaaagagactgtccatggcggtcacaatactttgagcattagccattcttacacccaacagggctagcatatccctacaaacaagacacacatatctgctgcaattttaagtaccccaaaagtccaagca

SEQ ID NO: 63837 - DNA, 239 bp, Glycine max
  Clone ID: PAT_MRT3847_28659C.1
gctacgcaccagtttcactgcatacacttgtgagaaaactctgcagacatgttggtttatcacgacctccttacaggtgatgagcttctatgggactgcttccgttacaatgaaattgataatgggatgctgtgggaagttgaggggaagtgtggagttaagggagcggttggcgttgacattggtgcaaaccctatctgctgaaggtgtagaagatgatggagtcgatgacgcagctg

SEQ ID NO: 63838 - DNA, 865 bp, Glycine max
  Clone ID: PAT_MRT3847_2865C.1
agctcggaattcggctcgaggggaaatacgcagagaggaagaaaggagacttggtgaggatccactttctaggaaggactctcgttggggagatagagattcagaaggcacctggagaaaaggaccagaagctgactctgagtggagaagaggcccaccagaaaaggagtggagacgagaaactcgggatgatgagaggcctcacaggagagatgaggatcggctgaggcgcttggggggggacgatgaagagagagagtcgtctcttagaccagatgatgatcgcatccccaggcgtggcctggatgatgacagagggcctagacgtggtcccgatgaagatagattttctcgtagaggaacagatgatgaccgtccttcctggcgtaatgcagatgatgaccggcctcccaggcgaattggtgatgatgacaggggaagctggcgtcacacagatgatgacagaccacccagacggggactggatgatgacagaccacccagacggtgactggatgatgagagaggaagctggcgcacagcagaagaggacagaggacctagacgtgggatggatgatgaccgggggccaagacgaggaggtgctgatgatgagcggtcatcctggcggaatgctgatgacgataggggtcccaggagggggatggatgacgataggggtcccaggcgagggttggatgatgatcgaggaccttggaggaatgctgctgaagataggatttccaggagaggtgcagatgatgaccgggggccttggagaaatatggatgacgatcgggttcctagacggggtgatgatgcaagacctggtccctggagaccatttgtcaaaccaggtggatgg

SEQ ID NO: 63839 - DNA, 372 bp, Glycine max
  Clone ID: PAT_MRT3847_28660C.1
aaccctgatttgatacatgcatagcagggtgactctgttgccggtggatctggaagcacacgagcatctgctaacaaatctctcactgctgcatgaatgggtgaggcactgtccagaggaagaagtatggatgaaggggctgcacgagctgctgctgaagacaggagaacggctgcaacaaggggcctgatgatacgtacccataggggaccaatacaagccctgcctacactgacgcaactactgaatattacagatgcaggggcgactccagatgctagggacaatgtaaaggcacctctagtcaagaccgaagctgatgccactactccacgtgatctaattgataccacgaaaggccaaacaactcct

SEQ ID NO: 63840 - DNA, 327 bp, Glycine max
  Clone ID: PAT_MRT3847_28661C.1
atttaatgcatgtgggagctatagaaattattattgatagtttagcaagtactgactgcaacataattggtgcaatgcttttggtagatacttatcataccaatcttgaaaataaaaagcgtatgtatttttgttgtgcctttaagaggcggaaggcccatttgggtggttacatttccgaataccatcttgcggattgaaccaaacatgacattaaggctttagtttttgagaaccactaccaatcgtgattctgttcaaggaaaagatctcgatatggttaaagttaaggaagcatgagctgctgtaggcttgacatcaaggtac

SEQ ID NO: 63841 - DNA, 252 bp, Glycine max
  unsure (1)..(252): unsure at all n locations
  Clone ID: PAT_MRT3847_28662C.1
gggttctcacatagaagaaatggatgtagacagctnttttgtatcattaacaacgagaaaggaagatagcacagccatgccaacttgcatancctcagtaataacctaacatttattgttataactctagagtaagctctgattgtgcaatanccttcncntatnnctttngtntgatttttagaggggattggggatgggatgttcnaccanattgatgccccttcnngggncccctnttnggggaggggg

SEQ ID NO: 63842 - DNA, 3609 bp, Glycine max
  unsure (1)..(3609): unsure at all n locations
  Clone ID: PAT_MRT3847_28663C.1
aaattcgggctcgagcaaaagccctgctttcttcgctgatctgtattataataataatattattattattacttttgtatattcattattcatcctaagcaataataaacccatatttaagtgtagtatacccatttgatttgcctcattagatcgggttggctacgaatttattttcaaaaaccttctcttttctcaattgggtttccatctttgatttgatttcattgccatggctccaaaggatcccaagcaagttgctgatgctgcttcttctggtggtgggggtggcttttttgcttctattgcttccagcttgtccaatttcggtagtgccatgtccaaatccgttaatggtttggtgggctacgaggggctggaggttgttaatccagatggaggaactgaagatgctgaagaggaagcaagaaagggacgatggaaacaagaggagcgagatagttactggaaaatgatgcaaaagtatgttggctctgatatcacatcaatggtgacacttccagttatcatttttgaaccaatgacaatgcttcagaaaatggctgagcttatggagtactcttacctgttagatatggcggacaagactgaggatccatacatgagactagtatatgcttcatcattctttatatctgtctactatgcctatcaacgaacgtggaagccattcaatccaattcttggtgagacttatgaaatggttaaccatggtggcattacatttatatcagagcaggtcagtcatcaccctccaatgagtgctgggcatgctgaaactgaacatttcacttatgatgttacatcaaaattgaaaaccaaatttctcggcaactcagttgatgtatatcctgttggaagaacgcgtgttaccctcaaaagagatggtgtggtccttgatttggtgcctcctcctacaaaagttagcaacttgatttttggacgaacttggattgattcatcaggagagatgatcctgacaaatctgactacaggggacaaagtggtgctgtattttcaaccatgcggctggtttggagctggtagatatgaagtggatgggtacgtgtataattctgctgacgagcctaagatactgatgactggaaaatggaatgaggctatgaattatcaagtttgtgactcagagggagaaccacttccaggcactgagttgaaagagatttggagagttgctgataccccgaagaaggacaagttccagtacacgcattttgcacacaagattaacagctttgacactgctcccaagaagttgttggcatctgactctcgtctacgtcctgatagaatggcccttgagaagggtgacctatccacatctggttatgagaagagcagtttggaggagaggcaaagagctgagaagagaaaccgagaggccaagggccataagttcactcctagatggtttgatttaacagatgaagtaactcctaccccttggggtgacttggaagtttaccaatacaacggtaaatatacccaacattgtgctgccgttgatagttctgagtgcattgaagtgcctgacatcagaccagaattcaacccttggcaatatgataatttggatgctgaatagtgagcatccttgtggaattctttctattttttttaaatatcattttgttattaagtttgtaatgtaatcttgattggaatgcttgaaatttggttttgtttttgggttgttttatcactgtagtatttgattaattaatagtagctatgttagttcatcagttcactttgcatggataaatgctagtagggaaattaaagttatcttcctttctcctggtacggagacgacagaagggaataatgaataaaaaaatcaaataataattaataaaaagaaaaaagtgtaaatcaaatagaaatttataaaatctatgatcctagagtagttccctagacaaaatagaagtaagttcacaaacaagattcaagaataagattctctgatgaaaggagagaaatatgtctgaggatccgctgggtataaggagtgaaagaggggatcatttgtttcttgaacagttcttttaaaaaaattttctatcggatttttgagtcataggagattttatgatttatgacttggaggatttttaagaatagaaaggaataactacattgagttcatcgatttgccctagatatcaatagactcataaattattttttattcgaaaccaattaaaattaaaaaagaagggaaagtgtacgagaaaattatctctctctatatatagatagataaatgataaaagcctcgagggtccgtcccatccctgaaaatgctatgaggtgttgggaaatggttgaagtagttgaataggaggatcgctatgactatagctcttggtaaatttaccaaagatgaaaatgatttatttgatattatggatgactggttgcggagggaccgtttcgtttttgtaggttggtccggtctattactcttcccttgcgcctatttcgccttggggggttggttcacaggtacgtcctttgtaacttcatggtatactcatggattggcaagttcttatttggaaggctgcaacttcttaaccgctgcagtctccactcctgctaatagtttagcacactctttgttgttactgtggggtcctgaagcacagggagattttacccgttggtgtcaattaggtggtctgtggacttttgttgctctccacggcgctttcgcattaataggtttcatgttacgtcaatttgaacttgctcgatctgttcaattgcggccttataatgcaatcgcattctctggtccaattgctgtttttgtttctgtattccttatttatccactgggtcagtctggttggttctttgctcctagttttggtgtagcagctatatttcgattcatcctctttttccaagggtttcataattggacattaaacccatttcatatgaggcttgtagtactaccacagcaaccccagagagaacgggaagaggaacaaagcctagcttcctttcatgtgcacagtacgacatttcactgagggaggtaactgcgaatacaggtacagctaggtatttgacaccaaccaaaataagatcaagaataagttgaatgaagctgtctaaagccttgttatgcgggaatttcttcaccggctcaggagaactgtcccaaagcttttgcactttgtctattaattggtccagcttcattttcccatgatcatctgattgctgtgctgacatattcatagaacagaagatattggcccctctcttctgggatgcacaaaatggtttaacactcaagcagcaactgtgcttctcaaaaaaacatgatgtacccttgaatccgagaaagggaggttgggttgtgaatgtgttgttgagggtcaagagttggaaacgagaaaaagtagtagcagcagatagaaggtgagacatgtttaaagataaaaacttgaaaccaaattggaacacccttttgaaaggggattgcaatttaacaagtgggtttttcccccttctgtcgtnttcagcgcaaaccgtacggacgcgtgg

SEQ ID NO: 63843 - DNA, 500 bp, Glycine max
  Clone ID: PAT_MRT3847_28664C.1
cgatcgaactgtccaaggtcctgtcaccgccaagtaaacccctaactgcacaacgcgcttaacgacaaacaccaccaattacgagtctcccaagttcgttactcgttagcccccaaacgcccgtgctgcaccaggtctccatttaccaaacccccgggtcgcgggccgtggcgcaatggggtacctatgatgcaacaactgcttacaactggatcaactgcaactaaccgaccagttcgcctaacaacgttaaccgcaagggtttgcagcacttggtacgtatggtggttgtaaaatcgtgtaccgtcaagttacacgtgtagttaagcaacaaaaagtcgaatgtgcgcacgttcaaaagaaattacagcggtaaggggccgcataagtggcaccgtgatgatactttgagacagtaccgcgcaatacaaattatgccggaattacgagcggaattgcgttttcgggctgccaaagccacggtaacgtgtattgcggat

SEQ ID NO: 63844 - DNA, 671 bp, Glycine max
  Clone ID: PAT_MRT3847_28665C.1
ctcgagccgtattcggatcgaggttctttgctcctagttttggtgtagcagctatatttcgattcatcctctttttccaagggtttcataaggaatacagaaacaaaaacagcaattggaccagagaatgcgattgcattataaggccgcaattgaacagatcgagcaagttcaaattgacgtaacatgaaacctattaatgcgaaagcgccgtggagagcaacaaaagtccacagaccacctaattgacaccaacgggtaaaatctccctgtgcttcaggaccccacagtaacaacaaagagtgtgctaaactattagcaggagtggagactgcagcggttaagaagttgcagccttccaaataagaacttgccaatccatgagtataccatgaagttacaaaggtcgtacctgtgaaccaaccccccaaggcgaaataggcgcaagggaagagtaatagaccggaccaacctacaaaaacgaaacggtccctccgcaaccagtcatccataatatcaaataaatcattttcatctttggtaaatttaccaagagctatagtcatagcgatcctcctattcaactacttcaaccatttcccaacacctcatagcattttcaggaatgggacggacccctcgaggctttatcatttatctatctatatata

SEQ ID NO: 63845 - DNA, 417 bp, Glycine max
  Clone ID: PAT_MRT3847_28666C.1
aggcatgttaccctcaaaagagatggtgtggtccttgatttggtgcctcctcctacaaaagttagcaacttgatttttggacgaacttggattgattcaccaggagagatgatcctgacaaatctgactacaggggacaaagtggtgctgtattttcaaccatgtggctggtttgggtatggctactttctcttgccatcaaatgttctctagtaacttactacttcttgctcagtacttctgttatatattatcaaacttaaagatttttgcttttgcagagctggtagatatgaagtggatgggtacgtgtataattctgctgacgagcctaagatactgatgactggaaaatggaatgaggctatgaattatcaagtttgtgactcagagggagaaccacttccaggcactgag

SEQ ID NO: 63846 - DNA, 1609 bp, Glycine max
  Clone ID: PAT_MRT3847_28667C.1
ctcaccgccccacccgcacacaaccaacactaccctttctccatcccccctcccccgcccccgcgtccgcaactactgcaaaatttcgcgtgcagcttctgcagagtttcagtttcgcagattaaattcgcttagaaatactagtatttttccctgttctgactcgcaatttaaatttaagctcgtgcttcggagatgaacaagaccgagaggtgatacttgagaattgagagactctaattctgttctggaatcgttatcgtaatgcctttcacaatgaagattcaaccgatcgattcgcccgtgccggaggaggctactcggcttgagccggtgaagtcggcggtgaggtcgcgcctgaagcgcctcttcgagcgccagttctccggcgtcctcaggaactcatcggcggcggagaagatcgcctaccccgccgaggagccgccgcattccgccaaagacggctccgctgatttcgagccgagctcggtgtgtctggcgaaaatggtgcagaatttcatggaagagaatcacgagaagcactctgtttccgtgaagtgcgcgcgcagccgctacaatagcttcgacgacgcctccgacgccgaaacgcactcgcttttcggcgagtccaattattctttctccggcgaaacacaagaaatcctcaaggatttggtgacatgtgcgagtgtcagtgaaaggaatttgctagcggacactacaaagatcattgagaagaataaaacaacgtgcaaacgcaaagacgattgttgcagaaagatcgttactgaagcgttgttagctctcggatacgacgcttccgtatgcaaatctcgctgggaaaaatcaactttctgtccagctggggaatatgaatacattgatgtgataatgggaaaggagcgggtggtggttgacgttgacttcagatcagaattcgagatagctcgacccaccaagacctacaaagcgatcctccaaacgctgccttacgtattcgttggcacgtgcgagcggttgcagagtatcgtggccatcgcttcagaggcggcgaaactgagtctgaagaaaaggggcatgcacgttccgccgtggagaaaagtcgaatacgtcaccgcgaaatggctctccccttacacgtgctcgcgcggggtgaaagaggaaacagaagagaaagagcaccttgcgaaagagttggtggtgttatcaacttcgtgtggaagtttccgtgaagatgatgaaaagtcaaagtcaaaactcgtggttcagaatcagaagccaccggagatgaaacccaaaagttctcagtccggtttggcagctgtgttcctagaaaacccaaaattttgattttttttcgtttgtttctttttttggctttttgttttttttttatataaagtttaaattttctagagtgaggattcaaaaaaggctgtataagtagtttagttctgtaatagctctatccccttctgatttttattgtaagggatgatgggtttttactttttactaatatgaatgaataaagtaaaggtgaaatgtattggtagctatttgtattttgcaaggttgtgatgagaagttgattctttacgtatttgat

SEQ ID NO: 63847 - DNA, 220 bp, Glycine max
  Clone ID: PAT_MRT3847_28668C.1
tactaggagcgtgtgaagaccggaggcaccatcccccaccaccgtttatgaacaaagccttactcactcaccctctcactcacacccaatgtgtagcagaccctgcccacagagtccccaatccttcttcaaaaacctatcggctctccgtctaagcctacatttacaaagggggtggaacccgccccaccaagcccagctccttactcacacccgactg

SEQ ID NO: 63848 - DNA, 123 bp, Glycine max
  Clone ID: PAT_MRT3847_28669C.1
ggctcgaggtttttttcagcttaatgtaatgagtactacagctgccacgaagctgccctgtgaacggggggtcaatgatcaatgataccctagtgaggttgcgtgacaatgttgcgtctgtca

SEQ ID NO: 63849 - DNA, 1657 bp, Glycine max
  Clone ID: PAT_MRT3847_2866C.1
cgggatccttatttctatttaaaaaaaaaaaaaaaattgttgggtccacttcacttcgtttcattctctcaaacaccaaacccaagtaactatgtgttccttcaaaacatggttcaatttgttcatcattttccttgccttggctgcaacacccatcttctcattaacagattcctcaaatcaactctccacaaactttctagaaattgccaagaaacctgaagtatttgattggatggtgaaaatcagaaggaagattcatgagaatccagagttgggttatgaggaatttgagaccagtaaactcattagagaggaattggataaactgggtatcccatataaacacccagttgcagtcactggtgttattggcttcattgggacaggaaagtcaccttttgttgcaataagaactgatatggatgcacttcccatccaggaaatggtggagtgggagcacaagagtaaagtacctggaaagatgcacgcgtgtggtcatgatgctcatgtcgctatgcttcttggggcagcaaagattctcaaacaacatgaaaaacagttgcagggaactgttgttcttgttttccaaccagcagaggaaggaggtgcaggggctaagaaaattttagatgctggagccttagataatgttactgctatctttggattacatgtgatgcctgacattccagtaggtgaagtggcctctaggtctggtccattatcggcaggaagtggtgtatttgaagcaaaaataagtggaaagggaggtcatgcagctattccccaactttctatagaccccatattggcggctactaatgtcattattagccttcagcaccttgtttctcgcgaggctgatcctcttgatttgacatttgcaaagctccaaggaggtggtgcattcattgttatattcccttatgtcacaattggtggcacctttcgagctttttctagagaaaaattggagcaacttaaacagcgcattaagcaggttgtcattggtcaagctgctgtgcagaggtgtaatgcaactgtcaacttccttgatgaaacaagaccttcatatcctccaactgtaaataatggtgacttgcccaagctttttgttgatgtagctggcaatttgcttggccccaataatgttaatattgagaagacccctatcatggccgctgaagactttgcattctatcaagaggtcatacctggctacttcatcatgcttggagtgaagagtgcttcgcctgaaccgcaccagtcattacactcaccctatctcaaaatcagtgaagatgcacttccttatggggctgcacttcatgcatcattggctactagttatcttctgaggtaccagcaggacgtagccaaggtagttgggaaatatcatgatgaattataagtgctaataattattaaaggctaatgtagtcttgcaacaatgaccttatgtggcattgtatttcacttttactttagattcgtaaaagttttccctttaaaatgactagcattgtgtttggttgaggaaagaaagggggtgaataaaagggaatatgtgagaaaagaaaagaaaaaaaaatgaaaatactagttgttttgttgaagagaaataaagtacaataaaagaaaaatatttaaatta

SEQ ID NO: 63850 - DNA, 401 bp, Glycine max
  Clone ID: PAT_MRT3847_28670C.1
cctgatcatggtggcggttaccctgtccgtagtggtggacactgtatgcatggatgttgcggtggccggacatataacggacgttgcaggacgtgctgctataaagctggcaaagctgttgctgcaaaaactcaatataagactcatgattaacacgatgcaatgctacgtaattagtacttttgataatttattttcagtgaaatagaatagcttgtgactggacaagcatggattctcatcaagcaagaatcaatgatatttcacacgactatacatatttcacaattacagattaatagtgttgttgaatgtataataatacacatcatcgtgactgtgatgatcagtttaagagaaaattgacatacattggtgatcaaaaaaaatgtgttcaccgg

SEQ ID NO: 63851 - DNA, 154 bp, Glycine max
  Clone ID: PAT_MRT3847_28671C.1
ctctagacgggcgcccttttttttttttttttggacagaaggggaaggcagaaatgatgtattttgagactagagtcatgagtgctatgatagttacggaagcacataaagaggagcagagggtcttggccatcacaggcggaacaacaactaa

SEQ ID NO: 63852 - DNA, 288 bp, Glycine max
  Clone ID: PAT_MRT3847_28672C.1
taaaatcccaagcatttaaatggggagaaagatgagcgaggggataagctccatgagtttcaagctcaaggagttcttccagcctgggcccaatcatgccgacaagcttgtggaggacactacttccgaagccctggacgagccctaatgggccctcaatcttaatctctgcaacctcatcaacaccgacaagctcaactgcgtcgaactcttccgtggaatcaaaaaacggatcattctcaaaagccctaagtttcattacccttcccttttcctacttcaaaccct

SEQ ID NO: 63853 - DNA, 509 bp, Glycine max
  Clone ID: PAT_MRT3847_28673C.1
gagggtaattctcaataatatttaagattcaatgcatgcatcagttttagggttatacgcttgggaaagggtaacacctaatagaacatctaaagaaaagaatcattgggttagcattgctaggcatagaatgataactcactgcccatgcatctaagcaacatctagaacttaatcttaacgcattttttttattgaatcttcgcaaaggcatttgggagataggtgattaaaataggcttgccaacgtgaggcatcaggggcatgtagtcaacagatgtgggtagaactaacaccatttcattgctaatgaatatcatacttacatgcatcgtaggccaattgggtttgtctggtcttggcatttctatcaattgttttcccttttacttaattgttttagtaatagcactctttactattcctactttcatttctactttactactttccaattgagtacaaaatgagaggtatcgaaatgtgcaataaaattcctgtggacacga

SEQ ID NO: 63854 - DNA, 275 bp, Glycine max
  Clone ID: PAT_MRT3847_28674C.1
gttaattcttgtttatatgcacagagagtaatcatagagggaaggatactatggatctgaacacgcgactactcatgaacacaacgaaggtgaccggacgctgtcttggagatgaggcatacgtacatgtttagaaagctccacctcagaggcctgctctgctgaaaggatcagagccaaaggggtggtgcagaggtgaccacatctattgcactagcatatctattcatatatgtctcttgatgtctacatagacatatgccgctctgagaagc

SEQ ID NO: 63855 - DNA, 1880 bp, Glycine max
  Clone ID: PAT_MRT3847_28675C.1
tatcttgtaaagagaaacacaaataattttgaattttatagtaatgaatcagagtatacaaaagaatcccaaattgaggtaggttacaactgaagacattatgcaaatgagagggaaaactaattgcttctttcatcattcaagtaaaaataaatattggcaaactactaggaagaaagataatatgacacattgcttttcagttatcatactacagttatctcgatctatggggttgagggtgcagtctactactagtagtactgtcatcttcactttgatcagtgatctctccacctatctgccttttatctaattttgagtccttatgctctagttgataatcgcgatgggaacgggaggattctcctccagtccttcgatcatcacggaataagaggtcctcagcctcgagcatgtggatcacatgtcctattttaggcctctttgctgcatcagggtcgacacatcgaagagcaaccaacaaagcccgtttaagagcctttgaagatggcttttcagcaatcttaggatcaactacttcctcagattttcgattcccaaccatacttttcaaccactctattaaattaacctctccttgtggtttactataatccacaggacttcttccagtaattaattccatgatgagtatcccgaaactatacacatcactcttttcagtcagcattccagtgcatgcatactctggtgcaacataaccaaatgtccccatcactcgagtagtgacataactatgatccgctgacaaaagcttagcaagcccaaaatcagaaacctttgggttccactggcgattggatcctctgttgcttgatttcacttttttttttttttttttttttttaagaccttcatgaaaataagccaatccttttgccgtgcccaatataatattcattcggatatcccatgtccatgttctaaaagatcccaaatcacaaactacatgaacgaatttggccatttaggaacgcagataaatggtaggctcatgatatggcaattaagagcataattgtgattgattggatttactaataatgccttcatgacatcaatggaaaatgcctccatttctttatgactctgtgactgcatacatgcatgtatgagatgtatctcttcctctccgaataaacggagaaagcgagcctctattactgtaacttgagtttgatacattgcaataataatacaatacaagacaaaaaaaaaaaaccaacacttaagaaacaagaagaacgaaacgaaagaaggaaaaaaaaaaaaacctttttgctcaattatcttccccttagaagcgccttttcagcagtgtcgacctcctccaagatccttgcccttcgtttggcgggaatgggagcggttggtccgaagctaatgtagtgaccagaaacagcgttgagcgcggaatacatgtccctaaaggaaacgcgtcccagaagcgctttttccctcctgtactttgccacccacgagttcgaggtttctctcaactccgccaccgcggttgccacgttggggtcattcttgtccatcacgattgttgtcctcactttgttgatcacttcctcggtctccttcatgtattcctcgtccgaggaagccagtgccgggctcagagggaccagccatgtggtggcggtgatgatggacaagaattcgcggcggcgagggtgggtggcggcggcggtggaggttgttgtgggtggtgtgagagtggcggcgatggtggtggtgggtttgggcttgatgggtgtgagtgatttcactgatttgggggttattagtgttggggaggccatgatgatgtgagagagagacgtgaggacaagtgggcagacgcgtggggg

SEQ ID NO: 63856 - DNA, 1938 bp, Glycine max
  Clone ID: PAT_MRT3847_28676C.1
ggctcgagctcgagccgattcggctcgagcggctcgagcaacactaataacccccaaatcagtcaaatcactctcacccatcaagcccaaagccaccaccaccaccaccaccatcgccgccactctcacaccatccaccaccacccaccctcgccgccgggaattgttgtccatcatcaccaccacatggttgctccctctgagcccggcactggcatcctcggacgaggaatacgtgaaggagacagaggaagtgatcaacaaagtgaggacgacaatcgtgatggacaagaatgaccccaacgtggcaaccgcggtagcggagttaagagaaacctcgaactcctgggtggcaaagtacaggagggagaaagcgcttcttggacgcgcttcctttagggacatatattccgcgctcaacgctgtgtcgggacactacattagcttcggaccaaccgctcccattcccgccaaacgaagggcaaggatcttggaggaggtcgacactgctgaaaaggcgcttctaaggggaagatgattgagggggaaaaaaggggttttttctttttttctttgtaatgtatcaaactgaggtaactgtcatgagctctcgatctccttgttcctatactactgaattgataatgtttcatttattaggagtttttcactcttatttatatcatttgatttttctgtcacttctcttatttgattatttcatgttgctatctagtgaagttttcccggtcctggtcttgtatttgtcttcctcagaaataaatacctcatgtttaacttattttcaggggacaagctgagaaagaatttaaagtagaggtagaagcaattggtcgagtgcgacacaaaaatcttgttaggttgcttggatactgtgtcgagggagcctacaggatgcttgtgtatgagtatgtagacaatggcaatctagaacaatggctgcatggggatgttggagctgtaagccctttgacatggaacatacggatgaacattatattgggaacagcaagaggattggcctatcttcatgagggtcttgaaccaaaagttgtccaccgagatgtgaaatcaagtaacatactcattgatcgccaatggaactccaaggtttctgattttgggcttgctaagcttttgtgatctgatcatagttatgtcactactcgagtgatggggacatttggttatgttgcaccagagtatgcgtgcactggaatgctgactgaaaagagtgatgtgtatagtttcgggatacttatcatggaattaattactggaagaagtcctgtggattatagtaaaccacaaggagaggttaatttaatagagtggttgaaaagtatggttgggaatcgaaaatctgaggaagtagttgatcctaagattgctgaaaagccatcttcaaaggctcttaaacgggctttgttggttgctcttcgatgtgtcgaccctgatgcagcaaagaggcctaaaataggacatgtgatccacatgctcgaggctgaggacctcttattccgtgatgtgtgttcttttcccttctcaaactttacattttagttgactgaaccaataataagaaatttcaattttgctgtaatctgatgcttgtggcttttgttttgtccttcctgtctgtaggatcgaaggactggaggagaatcctcccgttcccatcgcgattatcaactagagcataaggactcaaaattagataaaaggcagataggtggagagatcactgatcaaagtgaagatgacagtactactagtagtagactgcaccctcaaccccatagatcgagataactgtagtatgataactgaaaagcaatgtgtcatattatctttcttcctagtagtttgccaatatttatttttacttgatgatgaaagaagcaattagttttccct

SEQ ID NO: 63857 - DNA, 527 bp, Glycine max
  Clone ID: PAT_MRT3847_28677C.1
aaaccatatatgtctatttattaagaagctttcacgaaactcagatttattgaatacatgatcactccaagtacatgcataacacgatcataatatcaaattatcaatactagttttgacaagtctctcttatagaggctcaattcatcacgactttagtacagcttaagttgctacagctccagcaccaaatactctgcatctgttttgatccagtgctcattgtttccagttgagctactgcaaattagcccatgctgtggtgggttccaattggtcatacagtgttgggaccactttcttgatttggtatctgaatgaaatcttttgcctttgtctgggtttgtgaacttcccattttcatattcctgaaagtattcatgagggacattttttatcttacctttgtgggattgaatgcaatcttttccgtctacagggctttcaggatagacttttttgtgaaacatacgttgaaccttttggagttttttatttggttgaagcagaatcagcatcatttctgg

SEQ ID NO: 63858 - DNA, 389 bp, Glycine max
  Clone ID: PAT_MRT3847_28678C.1
cagagacttcagggaatttgtttccaccactttatatactcataacacaaagggtccattggagaagatgccgagcagaaacagtcccatcagaaggcctgaagaggcaactcaccccgacacgttgaaggcggctttggctgaattcatctcaaccttcatctacgtgttcaccggatcacgctccggcatcgcctacaacaagctcaccgacaacggcgctgccacccctgccggcctcatcttcgccttcatcgcccatgcattcgccctcttcgtcgccgactacgacagcgccaacatctgcggcggacacgtcaaccccgacgtaaacttaggtgccttcgtcggcggaaacataaccttcctccgcggcatccgctacgtca

SEQ ID NO: 63859 - DNA, 119 bp, Glycine max
  Clone ID: PAT_MRT3847_28679C.1
cttctcgcagagtgagcgagtaagcgaatatcgcaatcgcacaccgctggtatgcccaggcagcgctgattgcctattctgcgcacatccaagaaacatgttctgtcactaaccctgtc

SEQ ID NO: 63860 - DNA, 500 bp, Glycine max
  Clone ID: PAT_MRT3847_2867C.1
tctgctatcgatttgaacgaactgaaaagatatctcctttgtcattgacattgttgcttatgtgtccccccactacatataactcctgcaacatttggaattgttattgcatgctatcagtaaaatatgcatattttaatcatctataggcaaaattttaagtgcagaattaagtgtatccttttggctaattttaccaaaatgactagattagcagcttattgctcttgctggtatactataactcacctaaattcttgagcttatgtttttcactgatacaacctttgctagattagtcaagggtccattagccaatactgtaatcttagaccttggtttaagtctttgcaatacagagttccaaacttccatggctaatggttgtttgagctcacggtgatccgtatctcgatgagccccaaacttcacagagttctctgttgtatacctgaaatggttctctaccccaaacatttttggaaaagtgaaagagagga

SEQ ID NO: 63861 - DNA, 714 bp, Glycine max
  Clone ID: PAT_MRT3847_28680C.1
ttttttagcaaaaatgttaaattaactgtaataataaccgttaaattccgtgcgtatattggtatatactatataacgtataaggaacggctgcatcactcgtgtgtcagtcttctgtctatttttcagtgtaaagtgccaacacggcttccgtcacaaccgctcccatttccaatccaatttcttcaaattcgctcaattcaattctctctctcatcccttttttcaagctccaccatcccttctctctctttctctctcaaacagaaaaaaaaaaaaaaaccgtttaaaacaatctctctctctctctctcttcaatcaatgcctcaccaagtcatggtccgttcgcagccagcgaacggccaccggaggcgcggcgtcggcgaagtggccggcagcgccgcggcagactgcactgccgtgtgctgctgctgcccctgcacggtcgtcaacctcgtcgtcctcgccgtgtacaagctcccgaaggggctcgtggaaaaagctgcgcacaagagacgacgccgtatgccgaagaagaacaacaccggcgacgtaaaaaacggcgtcgttttgttgcaggcgcagcgttcgagcagcgtggaaacgctcgatattgcggtggggcccacgcgcttggaggagtttatgaagaaggagtgggaggaccaggagaagggaaagtgccaaaaaggtacttgaacagggcctttacaa

SEQ ID NO: 63862 - DNA, 259 bp, Glycine max
  Clone ID: PAT_MRT3847_28681C.1
aaacactctctatatccttggtcagaaagagaacgttcttctatagtcagttctcatcaactcactacaagcgcctaaggctacaaaaccatattattgtacagaataaattatccctaccaactcctgactaccatactgtaaaaccttatccgcaaaactaataccggtagatcatggagcatcaaaccacacatccgttatacttacgtttatcagatgccgacttaataacccaaactgtcaccatgggcgtcca

SEQ ID NO: 63863 - DNA, 722 bp, Glycine max
  Clone ID: PAT_MRT3847_28682C.1
ggaaaaaataaatcatagaccactaaattagaagatgaattaacttcacaggaaaatcacaaacaaccattaagacactttttttcaagtaccaatcccctttagttcccatgacacaagactacataggaggagaggtaacaaactgcctaggaacactgaatatgtccttcccagcaaaaggagaggtccactctcgcaatccaccagatgatgaagtttccctagccatttgcaatccactcacgcattgactgcccctcctagcaccataactggttctcaacactgaactcatcccttgcctcagtccacctgacacggaacaagatgtcacattcaaactccaatctatgctgagtccaccaaattccggcatgaagcccccattcaaccaatccatgtgtgaattgtagctgaatgttcgcatgaaacccacagtgttccaatccatgtgtgaatgtgagttgaatgttctggctgcattctgatgaccagaaaatagtccaagggaagttggcaccatgagcgatggtgaagacgcgcccgtgctccatgaaccttgatgccgaggaggaattgtaggtggaggtgatgatgatgcacccattggcttgcaataaccacccactccagcagatgagtagtctactggtccaaggaaatgagaatattccctatacggagcttgacaaaattgctccaaatgatttgggctcacc

SEQ ID NO: 63864 - DNA, 284 bp, Glycine max
  Clone ID: PAT_MRT3847_28683C.1
cttacatcaatgggttctggcagaacctggtccttgaaggcttaaccatttggttgttgcctatgatgattaatcaacttatgccctatggggattttcggttgcagcttgttcaaacacgtggaacctatcacattttgtggaaaaactccgggaaagattgtccctccaagaggccctagtgattttggatgggaccctattttagaccctgagggttatcaccaagcttttccacagatccccaaagaagaaaacaccaaattttaccactgttcaaaatt

SEQ ID NO: 63865 - DNA, 1083 bp, Glycine max
  Clone ID: PAT_MRT3847_28684C.1
ggcgacgtgagcggttcgctgcccgcgacgttgtgagaagtccactgaaccttatcatttagtggaaggagagagaaagagaggaagaggcgaaggagagagaaagagaaagaggaagaggagaggaggaagaaggagaagctgaagaaaaagaagaagaaggagaaggaggagagagggaagaagggagcggtgacgaattcttgggggaagtatggtgttattagagaaactgatatgtggaccaaacgaccagagttcactgcatggttggcagaagtaaagcaggtgaatctggagaatatgtccaattgggaagaaaaacagatgttcaaagaattcatggaggatcacaacacagctacctttccttccaaaaagtactacaatcttgatgcttactacaggcgtgaaatggaaaaggagatgaaaaaaggttttaagaaggtccaggcaacagagcgcactattttcaatgatgaagaacagcgcaggcaagaattgttgcaagctcgtgaaaagcataaggaagagcaagtgatggcgttgaagcactctatgcaaactggaatggcacaggcaatgaaagagcaagctcaacttagggaggagatggcttaccagtacaagcttggaaactttgaggctgctgctgctatccagagaaggttggatcctgatgctgccatatagttggacatacttactgtaaattgaagagttgggtgatagggtaacaatgttcccgtcaccatgaggattaattttatgccaactatgtgtcttttggcttagtattagcatgccgtggatgggttattttctgatggatgaataaattttcacggttactggctcctgttacgtccaccattgctaattgaagagtgttgctttttaacatgatggagattttggcattgtagttgactaagtaaccatttcaaaactaagagtttaagctacatgcatggcttcaaaattgtccatcactcccacactgaaattgactattgcatgttaacagtcttttaagtgaaaaatttgttcgaccgttcatcttttcaaatgattgttcctccc

SEQ ID NO: 63866 - DNA, 490 bp, Glycine max
  unsure (1)..(490): unsure at all n locations
  Clone ID: PAT_MRT3847_28685C.1
tacggctgcgagaagacaacagaagggtttgtgcttcaaatatgcgttcattaaaagaaaaatgtactttgcatagctcaatgtgtagctttaagtggcgttaggagtgaggaatctttcattctcaattaagacttcattcgtgcaagggtcaaaatcaattttgaccaaaagctaagaaaaaaaagtgtatctggttaggagcgagtgaggaatctttcattctcaattaaggcttcattcgtgcaagggtcaaaatcaattttgaccaaaagctaagaagaaaattaattattttttgacgcaacaaataataactttagtagcgaattcataatgatactatattcaacatgattttctaacacaaatccaaacatgcttaagaattattgccatttaatgtctttcgttaattatgacactacaatctggaccgcctagtgcttatttcttctcacaangccatgttgctttgccccaacagctt

SEQ ID NO: 63867 - DNA, 178 bp, Glycine max
  Clone ID: PAT_MRT3847_28686C.1
aagcaattgaggattcacaaatgattatttttcttactgaccaaatctgaataaagggggggtttttttttatatttagctcacacactcactacactctccttaacttcccttcactactccattcattatttcaactatcatatatactataacacaatttatctacttaattctt

SEQ ID NO: 63868 - DNA, 744 bp, Glycine max
  unsure (1)..(744): unsure at all n locations
  Clone ID: PAT_MRT3847_28687C.1
atcaagttggccttcgaggctgcgccaacttctgtccagcgggggcgccattggtccttcagtcaaggtggactccgagccccctcctaagatcaaagccttcattgagaagatcatccagtgtccattacaagatattgccataccactttctggctttcggtgggagtacaataaggggaattttcatcactggagaccgctgttgcttcattttgatacatacttcaagacttatttgtcgtgtagaaatgatctgacgttgttagataatctagaagatgacagccctttaccaaaacatgcaattctgcaaatattgcgagtgatgcaaaaaattttagagaactgtccaaacaagagttcctttgatggcttagagcatttcaagcttttacttgcatcaacagatcctgagattcttgttgctacattggaaactctttctgcacttgtaaaaattaatccctctaagcttcatggaagtccaaagatgatttgctgtggttcggtgaacagctatcttttgtccttagcacaaggctggggaagcaaggaggagggcctaggattgtactcttgtgttatggcaaatgagaaagcccaagatgaagcactgtgcttgtttccttctgaagagattggtcatgaccaatcanattgccgcataggcactaccctttattttgaattgcatggtcccaatgccccaagcagggacatagtgcaaatgcagtttcccct

SEQ ID NO: 63869 - DNA, 824 bp, Glycine max
  Clone ID: PAT_MRT3847_28688C.1
gaaacagttaaaaccgagagtgatgcatcttccacaatttctagtgaatctggatccattggttgcgttaataatgctaatctggcaaagagaaagactactcaaaataatagttctggttcctcgcagtggactttgctagacttgtattctggttgtggagccatgtccacagggctttgtttgggtgcatccttggctggaataaaacttgtcacaatgtgggctgtggacattaatgcacatgcatgcaaaagtttgaagctgaaccaccctgaaactcatgttagaaatgaaccagctgaagacttcttaaacctaataaaagcttgggccaagctttgtgaagagtttgcattattaggatcagaacggtcagattccgatccagacatggatgaagatgagaatgaagctgtgagaaaagaagagtcaggaaatcaatctgattcagaggaatttgaagtagaaaaattacttgctgtgtgctatggtgatccaaacgacgtcaaaaaaccaggactatattttaaagttcgttggctgggttatgcttccagctatgacacgtgggagccaatagaaggattgagtgattgcaaggaagctatgaaagattttgtgacaaaaggctacaagaaaagattattgcctcttcctggtgatgctaactttatttgcggtggacccccatgccaaggagtaagcggtttcaaccgcttcaggaatgcagcagctccattagaggacacaaagaataagcaattgcttgtttacatggatattattgattttttgaagccaaaatatgtcctcatggagaa

SEQ ID NO: 63870 - DNA, 276 bp, Glycine max
  Clone ID: PAT_MRT3847_28689C.1
tcgggagaagatgatagaagggcatggtcgtcagaagatcatagaagggtatcgtcgtgagaagatcatagaagggcatcgtcgtgagaacatcatagaagggcatcgtcgtaacaagatgatagaacgccacgacgacactagctaaaaaaaaaacaaccaacacacaactaaacgtcgcagactcataagacctacacccatgcctcctgctacctccacccacatcacacccacagcccaattcaacaccaacctatcgcccccccacccata

SEQ ID NO: 63871 - DNA, 306 bp, Glycine max
  Clone ID: PAT_MRT3847_2868C.1
ataagaaactatacacattgcttttgatttgatttagagtcgatgtgatatgttaccggttctatattctgttgcacagatacctgcgtagaacagctgtgactcacatatatcctttatacgctgaacattttcgccagcgctaattaccatctagttattccctaataaagatacactgtgtttaaccttaggacaatccgcctattattgacttgtcttaacttgctgaacttccgacacatatgtagaagacacgctggctggtggaggcctttggcacattgtaaaccaccctagctcgac

SEQ ID NO: 63872 - DNA, 3452 bp, Glycine max
  Clone ID: PAT_MRT3847_28690C.1
gaaccggcgaaatgtcacccacagataaggaaaggcggtaacatatcaaaccgtaccttacgcaattggatctgcttttcttttctgctcttctgccgcttgatgcaacctcgacctggaaacgctcgttttggcaaaatctgaatctgaagcattggaatttggaagcgattcgattcaattcgatgcgaggccacgattggatcaacacgctgatccccgacgagctactcatcgagatcttccgccgcctggactcgaagtcgagccgcgacgccggctccctcgtctgcacgcggtggctccgcctcgagcgcttcacacgcgccgccatctcctcgccgcgcgtttctccaacgtcaccaccgttcacatcgatgagcgcctctctgtttcaatccccgctcacctcgggagaagacgcgcgagcggcaattcctcggtgaagctgcactacgtgaatgataaacacggctctgcctctgaccagagcgatttggattcactctgtgtatctgattcaggtttgactgctctcgccgaaggctttgtcaagctcgagaagctgaggttaatatggtgttctaacgtcactagcgaggggttgtcactcgctagctaggaaatgcacttctttgaaatccttggacttgcagggttgctatgttggagatcaaggtctggctgctgttggacagtgttgcaaacaacttgaagatctgaatctgcgtttctgtgaaggcttgaatgatattggtttggttgaattagcattgggtgtgggaaatgcattaaaatctcttggagtagcagcttgtgccaaaataactgacgtttcaatggaagttgtgggatcacactgcagatcccttgagaccttgtcattggactctgagttcatccataataaaggggtgctttctgtgattaaaggatgccctcatttgaaagttctaaagctgcaatgtattaatcttacagatgatgttctgaaagttgtaggcgctaggtgtttgtctttggagttattggctctatatagttttcagagatttactgataaggggtttgtgtgctattgggaatggatgtaagaagttaaagaacttgactttaagtgattgttattttctaaagttaaaagggtttggaagaaattcatactggctgcaaggaacttactcatcttgaagtgaatggcaatagcaatattggagctttggggcaagaatcagttggaaaatcttgccaacatctcactgagtggacgttgctttactgccaaagaattggtgatgctggccttctccaggttggacagggatgcaaattatttgcaagcgcttcacttggtagattgctcaaacattggaaatgaagccatgtgtggcatagctattggctgtaggaatctaaagaaactttatatccgtctctgttataaggtattgtttgcatttcatttttggtttgttgtgagagcccgccattctgtatgtgtatgaccatttttggttccatgagtcttgttttcgtttaggacgtcttttggagttgcctttgtagtgttccgatggagtagatcaatgtctttctgcttttgtacagtgttgcaaacaacttgacgaagtgtatctgcgttactgtgatggcactacttgcttgtgtctggagttactggcactatacagttttcagagatttactgataagggtttgtgtggcattgggaatggatgtaagaagttaaagaacttgactttaattgattgctatttcctcagtgacaagggtttggaagcaattgctactggttgcaaggaacttactcatcttgaagtgaatggatgccacaatattggaactttggggctagaatctgttggaaaatcctgccaacatctctctgagttagcattgctttactgccaaagaattggtgatgctggtcttgtccaggttggacagggatgcaaattcttgcaagcacttcaattggtagattgttcaagcattggagatgaagccatgtgtggcatagctagtggctgtaggaatctaaagaaacttcatattcgtcgctgttatgagattgggaacaaggggatcattgctgttggtgagaagtgtaagttgctaacagatcttagcattcgattttgtgatagggttggcgacagagctcttattgctatagctgagggttgttcccttcattatctgaatgttagtggttgccatctaattggagatgctggagtgatagccattgcaagggggtgccctcaactatgttatttggatgtgagtgtattgcagaagttaggtgatatagctatggctgaattgggagaacactgtccattgttgaaagaaatagtactctcacactgtcgacaaataacagatgttgggttagcacatcttgtaaaaggttgctgcacagtgcttgagtcatgccacatggtttattgctctggtgtaacttcagttggagtagcaactgtggtttctagttgtcccaacataaaaaaggttcttgttgaaaagtggaaggttagccaacgtactcagcgtcgagtaggctcagtcatctcctacttgtgcatggacctctagatctccttcggtgtatatgtacacctccaagttttttttttctacatttaaatataaataaagcaacaacaagttaagacaattggcgcaatagtaagatgcatgtactagagaccaccttcattcactggaccacttacaatcccttggtgaatgaggttttttcttgtacatattcaggagtgactcatgattttattttatcgtagaagtgaaaagtataggaatcaataggtttaggtaaataagtgttgcttttagtaacttatcatttgttttcaaagaaaggacttaaatatgtttttgctctctaatatatttattttatagttttggtccttaagtagatataaaaaaagtattaggaccctcatattgatttaacacgttagggagaaatcttattaagcaaaactactttgtttatatcttattgctccaagtaaaaagccacaattgttcgagagatcttgttctttgcttggaacttggattctttgttgaagtagggatttgtgcatggtttctgtaatgtcttccctttctgttgctcctgtcacccctccaattcctgcccccttaccccatccagacactgcagtttatcagatgacttacatgagcaagtcagttttctttctggtataacgagaaggtcaatgcaacctgagccacactgttactcgaatatagtttatcttatcatatagagattgttgcaaattgttctatgcaggtcataaatatttggtgaaaaaaacaatttgtgatgtttatttatttccttctgttctttataattcatttatccgtgtaacccatctcgcttagtg

SEQ ID NO: 63873 - DNA, 645 bp, Glycine max
  Clone ID: PAT_MRT3847_28691C.1
ttcacccacagataaggaccgtatcgtacgcaactggatctgctcttctggcgcttgctgaaacctcgtccgaaacgttcgttttggcaaaatctgaatcattggaattttgaagcgactcgattcgatgcgaggccacgattggatcaacacgctgctccccgacgagttactcattgagatcttccgccgcctggactctaagtccaaccgcgacgccagctccctcgtctgcacgcggtggctccgcctcgagcgcctcacacgcgccgccatccgcatcggcgcctccggctcccccgacctcttgatccacctcctcgccgcgcgattctccaacatcaccaccgttcacatcgatgagcgcctctctgtttcaatccccgctcacctcgggagaagacgctcgagcggcaattcctcggtgaagctgcacgacgtgaatgataagcacggctctgcctctgatcagagcgatttggattcactctgtttatctgattctggtttggccttctctcgccgaaggctttcccaagctcgagaagctgaggttaattttgggggtctaacgtcactagcgagggggtgtcatccctagcaggaaatgcacttctttgaaatcctgggacctgcagggttgct

SEQ ID NO: 63874 - DNA, 1892 bp, Glycine max
  Clone ID: PAT_MRT3847_28692C.1
aattcggctcgagctcgagccggttcgagctgtggaggaggggagaataataataataatgatggaggcaaacaaggagttgaactcagcacagcacagagacaagagcttcagatgaagaagtcaaaacttgtgaccatgctagatgaggtggagcaaaggtaccgacagtatcaccaccaaatgcaagttgtgataacatcatttgagcaagcagcgggtgttggagctgcaaagtcttacacagcccttgcgttaaagacaatctcaaagcaatttcggtgtctcaaagatgcaatctcttcacaaataaagaccacgagcaaaaccttaggtgaagatgattgcttgggagttaaggtagaaggttcgaggcttaggtatgttgatcatcaactgagacaacaacgtgcattacaacagcttggaatgcggacgcgtgggcggacgcgtgggcaaagaggcttgcctgaacgtgctgtttctgttcttcgagcttggctttttgaacatttcttgcacccttatcctaaggactccgataaggttatgcttgcaaaacaaactggacttactcggagccaggtgtctaactggtttataaatgcccgagttcggctatggaagccaatggtagaagaaatgtacttggaagaggtaaaacaagaaccaaacaatagctctcaggataacaccacaaaaagatcaaaagaatcaagcaaggagttatggtcagaagctaatgctactgcacaggaatctggtgcaatgagacttgatcacatcaacattctccaatcaaaagcagaaagcttcaacaacaacaacaacaaccaaaccacttccccaacagagatctctaataattcccataattcactccaatcagctggtttccatcttgctgacatgcaaagcccaaacaagccaattagaagcacttctgaaatgcagaactctccaggtagcattctttcagtggacatggaaatgaagcctcgtcatcatggagagacaaataataatactattattactagagaaggcaacaacaacacaacaaagtttggcattgaaagccatggtggtggtggtggtggttttggagcatttcccaatatggaagacattggaaggttccatcatcatcatcatcatgtcactgatcagcaatcactggctcctaggtttcatggaaatggtgtttctctcactcttggacttccacacagcactgagaataataataacctttccctctcaggaactactcatcaacatggattcctctcacagaacatgcacttgggaatgagatcaacaaccaataatgcgaataatgagttttgtggtgccatcaacactactccaccttctaattctcactcaggcaccagttatgagagcattgacattattcaaaacagaaagagatttgctgcgcagttgttgcgggatttcgtggcctaaaagaattgataattaactagctagcaagggtaattaatcaatgaagataccccatgaaggaattgttttttattttattttttatgttgcaatatatccacaaaacacaatgcagttcagagtgttaacttagcagaaaaatagcaacaggagagaacaaaaaggaaaaagaaaagaaatggacaagaatgtgtgataacttgctccatgtataaagatggaaactggtttaagattatgaacttgcagaaattcagatttacatgttctgaagtagtttaattcgaggattcaagttgagttggggaaggtgtatttttatatatggtattggaaagtacagctagctaggtacatacaaagatttgaatgatttgtttggataggtaatatatatattggatttcaagttatgccttaaa

SEQ ID NO: 63875 - DNA, 315 bp, Glycine max
  Clone ID: PAT_MRT3847_28693C.1
cacacataaaaacgcgaattgagattttgaaaaggggtcacgaacaaactcgagtgtaaaaagagcccatttaacactttttttttttgcgcacaacaaatttttattttatattataaataaaaatctcacctcggggtgcagagaagtgcaccacagataataggcgctgagaagtgacaccccccgcaaagagtaacccccctctaaaacaggtgcactacactacagaggcccccctatgtgaaacccccctataagagagcccccccctcgtgagaggacccctgggtaaaaagagattggaaaaccttt

SEQ ID NO: 63876 - DNA, 329 bp, Glycine max
  Clone ID: PAT_MRT3847_28694C.1
ccaacttgacaactaagcttgccccttttcttcataatgaactggtttggccaatgggttactgagtaagggcaacgatattctgtgttgcgattatgctagttttgatggttcgattaccaagcaagttatgagcaagatggcagaaatgataaacagtctttgtggtggtgatgaaaaactgatgcgtgaaaggacacacctgctgatggcttggtgctcaaggatggcaattcgccagaaagatggctggagagttgaatgtgggatcactactggatgtccgctcacagatgtctgtaatagcatgtttaatgcgatgctcatta

SEQ ID NO: 63877 - DNA, 522 bp, Glycine max
  Clone ID: PAT_MRT3847_28695C.1
cttggggggggggggggggatcgaaggaaaacgcctaggagccaagaagaagagtgaccacaaaacataaatgaatagagcgagaaaatgactaaagctaaccaacggataaaatatgatatttcctgaaaaggctaggaaggtacgtacttgaaaaataacgataaatggtgcaagaataacaaaggaaagcattgaaaaaagctattgatacacgttagatagaggtgccgctagtgggttggggtttacttaagcgatcagataaagatagtggtgtgattggtgctttagtggttacatgataagtggtggctgtcggggtaggcaacagtgttataggtaattggcctagtggtggcctgactaatggctacctgttcatacgtatggtataccatcatagttaaacccagtctaggcgggtagatggtttgatcgttcgtacaacgcttagcgtcttaaaaacctacgtgtggagtgtaactggttgaactggtggctagctaggtaatatagata

SEQ ID NO: 63878 - DNA, 395 bp, Glycine max
  unsure (1)..(395): unsure at all n locations
  Clone ID: PAT_MRT3847_28696C.1
tcaacattcaagnancaacnnacagcnnngtnnaatcnacacnanataanagacacaacacacaacanaccaaacaacncaaccnncancaacacgacncaacaacacancantacaacancncganaacccntacgagcaccaacacancnaagtgaaacaanncagtanggnnatncannnngntaantaanantcaacnaangancgaaggnnagnacntcantgcaggtnagntncgacatgtagtaagacantnnactgccacngcnnntngncgatngtgnttattttatannagtntcgacctcatggtgttacntnctaggagacanatgncntnggnacgnnttggcganggaggtnacaatgtgtcttgnntgggtngntgcttt

SEQ ID NO: 63879 - DNA, 1838 bp, Glycine max
  Clone ID: PAT_MRT3847_28697C.1
tcgagaagacgacagcagggtgtgcattcgcttgttggggagctggaaaatgtgggcatatattcatgatcttgatgagctcttcaattgtcctaatgcgacaagagctgaatcctgacgacagaagaactgcggaatggataatatgaattgaagaggccgaactgtgcagaagcagaatgtgcattcactcggggaactgaaaaatgtgggtatatattcatgatcttgatgagctcttcaattgttttatgcgacaacttaatcctctttaatcagaagctgcttttgaagtctttcgtctcgcgtggttcatccaactttgtgattcagttaagcagcaaaacgaggcgtcttaacgggttcatttcaaaagcggaaaagcatagtggccattcaaggaaaagcagttggtggcagaaattctttttcgaagatgatgggaattggcttggtttgagagacgatgatatggtagaggctgaggctgaggctgagggcgagggtgagagcacacaagagttatctgagggcgacaagtttgaggcatggaagcagagagctgaagcaattgtggagctaagggaagcccaagaagatgggaggaaccaagcctataggaaatgggaagactggcttttggatggggatgggactaatggggaggataacacttcttcttgggagcaggggatgagggactatagggagaatgtgcgagctgattccggtgatgttcccgccgaaaaagggagttcgtagagcccgctaggtatttgattttcggaagggaagatgatgacatgctttatgaagaccgtgttttccagtacgcctcatcaaattcggctaaatttttggccgtgttgattattgtaccttgcgcaatggactttctggttcatgactatatacttatgccatttttagacagatctgtgcgaactgtaccacttgcagcacaaatgcttgatgtgagaagatatcaaaaacttcaaataattgaggaattaagaactgagaggggacgatttgagcttgaggttgagattggtaaatctccacctctttctgatgatgaggtttggtgggaattaaggcataaagcattagagttgagagaagagtggagactggaaaatcgcagagcatttgccaacatatggtcagatacagtttacgggatctctttatttattattttatacttcaataagagtaaagtagctttgctcaaatttacaggttataaaattatcaataacatttcagatactgggaaggcttttctaattatactgatcacagatatattcttagggtatcattctgaatctggttggcaaactttgctagagataattgttgagcactatggacttgaagttgatcagtctgctataactatttttatctgtctgatcccagttgtcatcgatgcatgcgtgaaactttggctgtttaaattcctcccacgtttatccccaagggtgacaaatatatttcgggaaatgaaacgtcactagttgggtaagtcagttttcttcagccatgcgaattttgtcaactgaaataatttttagtttttcaccctagccttgtagtattcttgtatacatttctttaaattgcaattccaacattttgtgtaataatgactgtgcaatgagttcagctactacttcgaggtttaaaaaaaacttcacttttttgtatttcatatgaagcctataaagatacaaaatgacgagggcttatttttccagttatctctacaattgataatgttgtaatcaactataataagctaataatggattattttgatcataaaaaaa

SEQ ID NO: 63880 - DNA, 481 bp, Glycine max
  Clone ID: PAT_MRT3847_28698C.1
gaggtgcggctattttatattaatatctctctttatagcgacgcgtcgctggacgcgcctcggatcacctagtaggggagctcgccgttgatgtaagagacgatctggtgctggccagacacgtacttgggcagggggcctaagtaaaaggcgacctcgccacgctgatagtagtactgctgctgctgacgagagacggcggagcacttgtggcatacggccactttcctgaagtccatgtagggcacggtgaacaagccgcagttgtcgacctggcggacgaaggggaagccgaagggacggttgtgaaccactgtcataaggccgtcgcatgatacgacaatctgggcctggaggaggacgatggtgacgatcaggtagacgacgccgagctgatgcggatccacagaaccggccggggggaccatgacaaacatggtcaggggaaggtcgaccctgaagcccatggcgaagacgacgc

SEQ ID NO: 63881 - DNA, 240 bp, Glycine max
  Clone ID: PAT_MRT3847_28699C.1
acccacgcgtcagtccagatgacgacagaaggggtctcgatcatttcagaattgtgcaattatggtctctaaatcttttttattggcacatttactcgccatatttttacaatctagcgggtttgatctattgtttgccgattgtcaagtttttagaaacaattattgatatgacatcgtcgtactgtcttcatcggaggatgttaacatgacacgtagatcatcagtctgttttgagcc

SEQ ID NO: 63882 - DNA, 755 bp, Glycine max
  Clone ID: PAT_MRT3847_2869C.1
gcctgcttccctcgcgggtgagaaactcatcccgattcttcttcttcttctgtttttttttccctaaaaaacttaaatcttttgtggcttcttagtttgattaacttcttggttagattgcgatggtttaactgttagtatttattagggtccatactgttattgttctacttactgagattacaattttatatgttttggtttgcatgcgagtttgggttgtgccatcggttaactgagtgttgataacctcgcatgatttcgttgatttgcttctgagaaagagaaatgtcttaaaccactgtttagttatttctagaggggaaaaaaacttgtgttggtacttgatgctagaatttacgaatcttgtgtcgtttttttttagtaaaagcatttactactggacccttcaccttgattaccattgaagaatgttgtggggattgatttatctggagtcttcgggttgtgctgttttacttgttattatactcaaaattgaaagccttgtgatttatacacacaaagttgaaccttttattctttaatggttagatttgaggatcagaaatgttactgagaaactgtgctatgtatatgtaacttcctaaaggaattgaagataaccagaacttactaatactgagattcctttgtcccatctttctcatcttgccatatattatttttaagcagcatgtcatgctgcacttttgcagtgatcttatgacttggagtagaatattgtaccattg

SEQ ID NO: 63883 - DNA, 281 bp, Glycine max
  Clone ID: PAT_MRT3847_286C.1
tgctgcgagaagacgacagaagggaatgtattatctacagttggcaattatcagcgagcaggatagcaatatgagaacgctgctgattctgtcgatgaagacggatcgtttgtgcttgatgagcaagagcaagctcagacactgacagtgtcatgctggttgaatagtgcagcttgtagccttagacttgatgactatcctggagctatcatgctatgtacacaggtgcttgatgtcgactttacaatgtgaaagctcatacagacgagcacagcatatat

SEQ ID NO: 63884 - DNA, 336 bp, Glycine max
  Clone ID: PAT_MRT3847_28700C.1
tcgtcctctcggccggcgcgcatagcatctgagcggcttttgtgcgcgccggattgcagacaatgcggagaggaacagggcgccctaagcaataggaccagagctgaaacacagcgcgtctgaagggagcaccaaacgcaacgacactgatagcaaggtacaggaacaagacgcccaggaaggtgaggacactgctaacaatgaagatgaggagatgctcctcactggtgaacatagtgctattgccgtggtgtatgaagctgcacctgctgatgataactgcagactagctagccatgtgtctggactgacaatggcagacagtgagtagcaaac

SEQ ID NO: 63885 - DNA, 371 bp, Glycine max
  Clone ID: PAT_MRT3847_28701C.1
ctacccatcgtcccactcgtgccattggattgtgctactagtgatgatgctataatcctcatcctaacattctcctgcttgatgggtataccagactctgcgctgggactgcctctttcacccgggactaccaacgttcatgtcagcacaccttgctgcacatgagcatctgcgccaatggtgtattccacgtgtatatctgtatatatcaatgccccgtattagcaacaacactgcctatctaatcactgaactgatgaacattgtcttgcaccatagctcttggtctcagaattagtgtactgacttccactcgttcaacctatcaagttctcttgacgtcactggcaacaatttctatccttcaacaa

SEQ ID NO: 63886 - DNA, 398 bp, Glycine max
  Clone ID: PAT_MRT3847_28702C.1
gttggaacctttgggctgatttatgtgcttgatggtcgtgagaagatgatagaaggggatagcgacctatctcaagagtcgagataataagcggttccttcctctcctcctcctcttaaaaataaatgctcccgagacggaagctccaaatttgaccgaaggtaacattcataagtctttagccggacatagacccgacttaagcgacgaaacctccgtcggccatcactctaaggaagaggactacggtttaattacttttcaacgattctacctaagatcgcgacgcccattaaatagcgttccgggagtcgttacgaagcggcagcaagaacccgaaccggtagaggccccctccttacgacccgaggatttgcgcgcctgaaaattctaataaa

SEQ ID NO: 63887 - DNA, 931 bp, Glycine max
  unsure (1)..(931): unsure at all n locations
  Clone ID: PAT_MRT3847_28703C.1
cgcgtccgcccacgcgtccgtacggctgcgagaagacgacagaaggggatcccgcccaacggtatctccttatccgtgtttttttcaaaatttgagctcgtttgttgtcgtgtttgtttataacgttggtgtttctaaactcgtgtgcgctccgattcaaattccaactccgaatcaaaccctagtacaacaatccaacgaaaccttcttcttctcaattctccgatcccatcctcaatggaaaacccggattcctctcttcctctctccatcaagaaggagaacgtcactcccattacctctaaaatcgcggaacttaatgaatcgagatcggagcttctgggcagagttcagagtttgaaacaggatttgcaaagttggaggtcgaagttagatacacaagtcaaggtctatcgcgacgagctgtcagaacttaagaaaacacttaatgttgaagtggaccaccttcgagcagaatttcaagatctgaggactaccctgcagcagcaacaagaagatgttactgctagcttaagaaacctggggcttcaagatgtctcagatgtcaagcatgctccatcgcaggaaacaaagattgaagaaattgtgaaggaagaacaggtggtggtacctgaagaagataatagcagcaaagtaactgaaaattaaatggcctttttaatttggagtatctgctactcgcagtgtacaccctagagaagctgaatgactctgtattattggtagatatttgatatgtttgattactactgttgggtataatgcaggatttaaatcaatggtaaatttcccgttacccttccttgggtataatcgatatttaattgaacaaattatggtatgctttcatatcttctnaaaaaaaaaaaaaaaaaaaaaaaaaaagcggccggttttaaggaatccaggc

SEQ ID NO: 63888 - DNA, 357 bp, Glycine max
  Clone ID: PAT_MRT3847_28704C.1
gcctgtcgttctttttttttttttttgtttttgctccaacaggcattcattcgttattcgaaatttcgtctatctttgttccccccttaaaactgcaacaaaaaggacgatcgcgagggacgagctaaatgcgcactacctaaggatgagaatgtcatctcaatagagtataccaacattaatgtaactgatcagacacgtgaaacatattcgtactgttagcccgcacagactttgcctatgagcgcatgataatgagcagggctcaattggcgacaaagtggggcctggagtctacgtatctctggagataccagagaaaataaccaaaagtgatggctactatgacgagcattt

SEQ ID NO: 63889 - DNA, 448 bp, Glycine max
  Clone ID: PAT_MRT3847_28705C.1
acggaaatccattgaagttttaatttggaaggatggtgagagttagtgttttgaacgatgctcttgagagcatgtacaatgcagagaagaggggaaaacgacaggtcatgatcaggccgtcttctaaagtcatcatcaagtttcttctggttatgcagaagcacggttatattggtgaatttgagtttgtcgatgatcatagatctggaaaaattgttgttgaactcaacggcaggctgaacaaatgtggggttattagtcctcgttttgatgtgggtgttaaggaaattgaaggttggactgctaggttgctcccttccacacagtttggattcattgtgctgacaacatctgctggaattatggatcacgaagaagcaagaaggaagaatgttggaggcaaagttcttggtttcttctactgaacatggttttgagcatccattat

SEQ ID NO: 63890 - DNA, 335 bp, Glycine max
  Clone ID: PAT_MRT3847_28706C.1
cttagggttttacatttgttacgtgagactgcacaagcacaactgaacgttgttttaaaaaaaaaaaagacaaacaatagaaaaaagaaaaaaaaaataaaaaaacaaaaacaggtgccgcaggtgaataataaaaatatatgagaactgcctaacgcggacatagacaataaaaatgataataaaaactgggggccgaatttaataaaattcaagtttacccactcggacatgacattgaaaacacacattcatgcaaagctgaagcatattgccacatgaacttaaaaacgttcatatcatggaaacatacgggctaaaacgaaataaatatg

SEQ ID NO: 63891 - DNA, 292 bp, Glycine max
  Clone ID: PAT_MRT3847_28707C.1
ggtggaagcccaaagcagtttttttttttccgtcttgaacaaacccagagcaggttattaaaccacgtttttcacttatcctttggtggatgggcttctaaaggaaagcagcggtaaaggccttttttaaggggggaagagggggaccggaggagctggaaacttggggcctttgccttgggacaggggtaacaaggaattcttcggtacatggtaactttcaattaagactgggggtggctaattctcatggaaattcatttttttcatcacgatataaaagggctttcgg

SEQ ID NO: 63892 - DNA, 388 bp, Glycine max
  Clone ID: PAT_MRT3847_28708C.1
ctaatacttctcgacgcactttactgattcgcctaccatagcacagagtcagctatcttattcgaaacaggggaataacaaccctcctcatccaaaaaaacttattcctcaacaatacaacacattaaaaacgtttctcccagctaactaccattttgtgtaagaccggaacaatgctattcgtgctaacttcctttggaccaacacaatgtgtcattaattgaccatatatgtagtcacatcttctgaatttcaaaattgcttgatgcaaatatgaagctatggagattcaattgcatcccccacttaattattacacactttatataaagccacaggttaatcaagtagcaagattctttccatgcaaatcaatataccttataca

SEQ ID NO: 63893 - DNA, 329 bp, Glycine max
  unsure (1)..(329): unsure at all n locations
  Clone ID: PAT_MRT3847_28709C.1
nacangcacgcntacgtnagctcggaattcggctcgagnncannctncgctctncnatanttttnnatncccancnaanaatngactattccatnanganagcaanaaancnnaaaataanctatagaatgttaggtcaantgtaatatcatatgtcatgaaaaatttgnntctgatatntatgtacnatatgcngcgaatcacttanagttctatatatacattcctnaggnggaangngaaaaacgcaaanagancggagncccnaggagattngaganagccgtgnacngatggatacnagaacctgcagancncgangccgngnn

SEQ ID NO: 63894 - DNA, 524 bp, Glycine max
  Clone ID: PAT_MRT3847_2870C.1
aatgcaaacttgatttatattggttcggtcacgccttatgtctacattcagtcctcaaacaacccacttgagattttccactatctttataaaaatcttttttacaacttctgaacacccaaggaatcactttcctttgtgttcaggaaacttacaattcaagagacaatcaatctcttgattacaacttactttctgagatgaacaaaaaaatttctcttctttagagtggataatacaatttgaagttcctagatgaactctcaatagatttgcaagtgtgtgcctaagagttgttaagagagcatttgacaatgaagttttcttggaataactctcttactttttgaaatcagacacacatatatataggcccttcgtgtctttctaaaatggattgaagagatgtgtcttttaaaaagttttttctgaatttttcactggtaattgatacaggtttttgatattcattacaagtatcatttgaaggatcatgacttttcaaattgattctcagagtttca

SEQ ID NO: 63895 - DNA, 363 bp, Glycine max
  Clone ID: PAT_MRT3847_28710C.1
atggcattatcgttgaacccaaacctgattggagcttcgatgcttggaaacgaagctcgctattgcttcccccactaaacgttcttcacatttcaataaaacaatatcgcggttgggtctattacaactatttgttgcacatgtttcttgataagatatgctctggtgagttccttccaatttaaaactactgtatgcatatgaagttattattttttgacaagatatttgttttgaacatcttgtatttcttagtctgccttggtggaatagggaatcctgtttagttatatcatgtgactacacattaacttgctctcctaaaacaatgactactttgttcgaggtacttattgctggaat

SEQ ID NO: 63896 - DNA, 365 bp, Glycine max
  Clone ID: PAT_MRT3847_28711C.1
ggggtgttttttttttttattatatttcattttttgtttttgtaaaaaaagtaagacaaattccattggtaaaaccgtttgattgccttgccgttgatatgaaccccttgaggagtgtaacgccctaaacattcccacattcctctttcaaaacaactagccctggtgggggggagccccccttgcccaatgtctcatgtgcgctgtcttccccctgacgagaggggtaccttgggaaaagactggagggaccaagatcacctttctaatggccggagggggcccaaaccaaagagcggaccaaaataatcccctcggctcggagttgtgccgactagagaaacttccccagggttgtcccaaaa

SEQ ID NO: 63897 - DNA, 378 bp, Glycine max
  unsure (1)..(378): unsure at all n locations
  Clone ID: PAT_MRT3847_28712C.1
tttnttttttttttttttttttttttttttttttttttttaaagcaaacatttttttattattataaaatggtttacaaaccagtttatttgaaatttctcaagatctaaaatgcatagagcccagtttgttttttgcaaactagaagaaaaagagcaaactgttgaatcactttcacgatgtgtagttgtcctagcccacaaagataatttctgacaacataagtaatgccgagtctttatagtgacaggggatatgccttagagaattaaggcctcaccgagaacttagntaccccctgttgaaggatggacactttcgcaaaacacattgtgggtggcatgaaaacaagttcgtggggattttgagttacacaac

SEQ ID NO: 63898 - DNA, 399 bp, Glycine max
  Clone ID: PAT_MRT3847_28713C.1
gttccaaggaaggtttcccgtcatcactgtatgacgtcctccttctttggggggggggggggggggggggggggggggggggggggggggggggacccgaaaccccaaccacgaggaggtaatacacaaaaaagggtaatagcgagtgcaaaaataccagacaagcaacgtcaagaggataaaggaacaaaagacgggtataggacgatataactccacccggggtcctctggaaaataacccccgactccattgtaagccaatgcctatgccttaaacccgaagaccccccaataaccccggcccccatagaattcccccccctgggtggccgtgaaatgttccccctcgacccggcagtaattattgtggacccgatcggccgttataatgtcctgg

SEQ ID NO: 63899 - DNA, 307 bp, Glycine max
  Clone ID: PAT_MRT3847_28714C.1
tttttcgtagaagtggaaagctaggtgtagagataaaattaagaggtgccaaaatataaggcttctttaaattgaaaaatctagaacttattaactttgatagaaaacttagaagggagaccttttgctttacattgtgtgtgcattaattcctctgctccaagccaactatatgatcagtgtattaaatatgaaatgtgaaactcaaccttcactttacctcttctattctccttgcacacaaaggaataatattgttactgcaggctttcaattaagggtttaagtcatgcaaaaactgcaccta

SEQ ID NO: 63900 - DNA, 274 bp, Glycine max
  unsure (1)..(274): unsure at all n locations
  Clone ID: PAT_MRT3847_28715C.1
aacgcgcagaacgaaccccnatcaaagaggcacaatggctacaatggtggcaccaaggcaccagggggacgggctaaaaacggggccaagtgtagtgctggcgaatcatccactgaaccctatatcagaggacactactaagcacacgcacatgaatctgctgccacatcatacaagacaaaatagcaggcacgacaaaaaggacaaatagggagcactaatccaacacactacgagaagccaaaagctcaaagagcagcagaagacaaggcag

SEQ ID NO: 63901 - DNA, 307 bp, Glycine max
  Clone ID: PAT_MRT3847_28716C.1
ggctcgagaagacattgaccgtgtgtgcaggggtctacctaaaagactacgccagcagaggctaacctataatggcttagacctgacagtggcctcatacaagagtaataggctagagataataaatctctcgcttgatccttgcctgagattgatacttgtgcaaagctaaacctcgatacaagattttgaggtcaaacaggcgataaaaaaaatatctaagcttgcctaatctccaaaagtgacaagacttaaatgaagtgcttatgtgtcttactaggactaatgaatgtagaatcgagttggg

SEQ ID NO: 63902 - DNA, 918 bp, Glycine max
  Clone ID: PAT_MRT3847_28717C.1
aatggctccttgatttgagaaagaaaaaaacccagttggtatggcgaaatcggcgtcgaattctgtgatgcagaccctgaagcggttcagatacagaaacaaacgaaacccagtagacatggcgaaatcggcgtcgaattctctgatgcagagcctgaagcggttcataaagaagccatgggagatcacgggcccgtgcgcggaccctgagtacaaatccgcattgcccttggccgtggagtaccgcctcagctgccccgccaccgtcaaggagaagcccatcatccccaactccctcccggagaccgtctacgacatcaagtacttcacccgcgaccagcgccgcaaccgccctcccatacgacgcaccgtcttgaagaagcccgacgtcgagaagctcatgaaggaacagaccttcgccgtctccgactttccgcccgtttatctcaattccgccgttgaggaggacatcaacgctcgcggcggcggataccagtgactcacaggtttgtgctattgtgggatgacattattggccctgtcaactttctgttatttgtcaatggaaaggtctgtgtagtctttatcacagacctgtaatgaccgtccattttaaagaggtgtgtaaacattttacatcaataaagtgtagctggctggagttaaagtttaactatatgtttacttatttgtggatgtgggatcaaaaagtaaattgattcaatgacttgataatggttagaataatttcccctgcttattttgattgagggaagcttttgaatatcatttcaaaatttcttcagggcaactagacggagcatgcagcttacacatcttggaaatgaaatccatattttgtttatagctttaggccttgtagctataaaatctgttcttttcctaatcttggttccc

SEQ ID NO: 63903 - DNA, 1060 bp, Glycine max
  Clone ID: PAT_MRT3847_28718C.1
attgaaagcacttgggcatatatatgttcaacttggtcaaactgacaagggccaggactttattaggaaagccacaaagattgatccccgtgatgcccaggcgtttcttgagctgggagaattgttaattctttctgacacccgagctgcactggatgcattcaaaactgctcgtactctatttaagaagggaggtcaagaagtaccaattgaattactcaataatattggtgtgcttcagtttgaaaggggggaatttgagcttgctcaacaaacatttaaggaggcactaggtgatggtgtttggctatctttcatcaacgaggaaaagaagtcttccattgatgctgctacttctactctccaccccaaggacatgaaattatttcatgaccttgaaagcaatggtcaccatgtggaagttccttgggataaagtcactgtactctttaacttggctaggttacttgagcagttaaatgattctggaactgcaagcatattgtatcgccttgtcttgttcaagtatcctgactatattgatgcgtatctgaggctagctgcaattgcaaaagctcggaacaacattctgttaagcattgaactggttaatgatgccttgaaggtgaataacaagtgtcccaatgcattatctatgcttggtgagttggagttgaaaaatgatgattgggtgaaggcaaaagaaactctccgcgcggctagtgatgcaactgaaggcaaggactcatatgccactctttctctgggaaactggaactactttgcagcagttcgcaatgagaagagaaatccgaagctagaagctactcatttggaaaaggccaaagaactttataccagagttctgattcagcattcttctaatttatatgctgccaatggtgctgcggtagtcttagctgaaaagggccattttgatgtgtcaaaggatatctttacccaggttcaagaagctgccagtggtagtgtttttgtccagatgcctgatgtttggataaatctggcgcatgtttattttgctcaggggaattttactttg

SEQ ID NO: 63904 - DNA, 644 bp, Glycine max
  Clone ID: PAT_MRT3847_28719C.1
aatttatgttgcgcaccgagtatgactcgccaatcgcttctctgaacaattctggataatttcaggaaaggaggatttttggagagaaaatacagggagcaggtgcatttagaaagtaaggaggtgattttagcatttggagcccagtgttcacgaacccaacaacaacaataaaaagagaaaaaaattaatttgccctatgtctagctttacgacatcgttttgctcttcttcatgaaaccattcgccataaaccctaaacggctaaacccctccatgttgctttctgtgctcattgcaacgaattgctaacgacacacagaccacagagaagctacgacagagaccaaggatgtcgtcgtcttcgtcggaagatgaatctatgtcggaacagagcaatgaattaggacttgatttcatcctgagcttggacaatgttccatcaaagctccctccacacctcgaactcttcaaaacacgcgttctttgcaacaatgatgctcctgtgcatacagatactgtacaatattctggtgcttatgctattttaggagttgataatagtgtgcgtttggatagcttctgcgaaaacttcaaggttgaagtgaagcgacttacggatagcgatatagaatttgatatga

SEQ ID NO: 63905 - DNA, 442 bp, Glycine max
  Clone ID: PAT_MRT3847_2871C.1
ttaaacccttcaaattttccaccgcaaaactgtttcatagcatgccaccaccgtttccacacacatatctcccagccttcgaaatttctctccgttggttgggggaactgctcggttactgaaaccatcatctgggtcgcgaagattttttggaaaaaaaaagaaaaataataatctccgatggcttcggctgctatcttctcgtcgtacggcggcgccggtcgccgtcgctggaggcgtttctggcgccggtcgacctctccgacgtggcgttgctggggactctcatctccgtcgccggcgacatcgcgtcctgcttctccggccaccggttccccttccagcgccggaacctgcgtgccctcatcggaaaagttgagattttccggtcaatgttagggtgtctgagagactccgccaccgccggagctcttcccccgac

SEQ ID NO: 63906 - DNA, 896 bp, Glycine max
  unsure (1)..(896): unsure at all n locations
  Clone ID: PAT_MRT3847_28720C.1
cccgggggcgacccacgcgtccgcgcagatgcttccaccggagctcatgccaaaggcggcggtggccaacgtggcggcagcaccgcttcctccgacatccgctccgccatcgcagccgtcgcaagcaccggcgcatggcattgatcccactaagatccagcttccctgcgcctcgtgcaaggccatcctcaacgtccctcacggcctcccccgcttcgcttgccctcagtgcggggttgacctcgccgtcgatgtctccaaggttaagcagttctttcccgcgccgctgctgccagaagaagttaatgaggttgctgttgaagtggagcgggacgaagatgaaggtggcatggttggagaaacatttacagattatcggccgccaaaagtatctattggacctccacacccagatcctgttgtggagacatcttctttgtctgcagtgcagcctcctgagccaacttatgatccaaaaattaaagatgatttggaaaattcaaaggctttgtcttgcttgcaaattgagacattggtctatgcttctcagagacacctccaacacctctcaaatggagctagggcagggttttttattggagatggagctggtgtaggtaaaggtcgaactattgcagggctgatttgggagaactggcatcactataggaggaaagcattggggatttctgttggttcagacttgaagtttgatgctagaagagacttggatgatgttggtgcaacatgcattgaagtgcatgctttgaacaaactgccttattctaagcttgattcaaagtctgttggggtcagggaggggttgtttnttcgacgtacaatagcctcatagcatcttctgagaaaggtcgttctcgtctccagcagctcataca

SEQ ID NO: 63907 - DNA, 245 bp, Glycine max
  Clone ID: PAT_MRT3847_28721C.1
cacggctttggtgagagagagggtatattctgggtttcgatactctttggtaacgaaaatcgtcaccatttataaatcctttctgcttaactattgtgacgtacttctcttatatattcgttgctagttttgggtttgtttctcaccacgtcatcggctaaggtttctctgtagcctgtgaaccatactgggatttaccaatgcttgctgccagttgacaatatagtaaagggacaattccttgt

SEQ ID NO: 63908 - DNA, 466 bp, Glycine max
  Clone ID: PAT_MRT3847_28722C.1
tccaaggaaggtttcccgtcatcactgtatgacgtcctccttctttgggggggggggggggggcgggactaaaagtagaattggtaacccgcgcgggacaggagacggctagttaatgaaatttctcggaaaggtaagctataaagtatagactggggttcgggccgtaggccaagcgcgaaggggggtaggtaatcgcaagacaatcttgagtgaaatatatgtgaacatggcgagatagaaggggaaaatgagcggcaggggcagcttagcaaaagtcaaggaaagcaacgtgccaggtggcagggagcaattacaaaccaaaccaattgtgcgtgacacggccgacccaccagcggcacgggagccgacagtgaaagacgtaacgagattagtcgtagaattgctaaacgtaaacttatgaagtgggtcgacggattaaaacaacgttattggggttagtttt

SEQ ID NO: 63909 - DNA, 319 bp, Glycine max
  Clone ID: PAT_MRT3847_28723C.1
gaacaatttaagaacccatgtcataacctttgcactgggttattcacagacggtgtttatagatctgggtgcaaactcagggtgtgggatgagcaccatattgatgaagatgaccagcctgtttgaacgagcacaaaatccaccccaaggataacacccttactgcaacactaaaatgtatcacgccaccactgctataccattgtatgatgaccacacctgtgaccaatctgtcataaacgagaagctcgtacatgagcttgagcctagagcctatgatactcatctgatgcatgaaccagcttatgatctcatggat

SEQ ID NO: 63910 - DNA, 265 bp, Glycine max
  Clone ID: PAT_MRT3847_28724C.1
tgtttataagcgaccagtttacaagctggtggtttttcaattgggggtttatacactggaggcttgtaaacccccaattgaaaaaccacccgtttataagactctagtatacaagctagcagtgtacaagcctccagtgtataagccaccagtttagaagtcaccagtgtacaatgttgcagttgagaagccaccagtatacaaagcacccgtttataagcgaccagtttagaagctagcagtgtacaagctaccagttgagaag

SEQ ID NO: 63911 - DNA, 278 bp, Glycine max
  Clone ID: PAT_MRT3847_28725C.1
cttcaaccagcatctgcgcttacttcttataccgtctacatttccatttccgtctgcaacatacatacatagctaggttcagagaacgacattgatcaacgctccctactctttgtttacagggtccaacctagatcctgtatctacgccttgcctttccaacgatcctgttatgcctcgatttccaaccaaaagcatgacgagatcgtgagggaaattctgcaataaaaccggcaaatgttcacatacgctcttacattctttcccattttgtgcat

SEQ ID NO: 63912 - DNA, 278 bp, Glycine max
  unsure (1)..(278): unsure at all n locations
  Clone ID: PAT_MRT3847_28726C.1
ggggaaannntttatttggttttttttaaccaaacctattttaattgcccattacaacataatttgaccacatacaaagtccacccctttcaaaaaatttcattggcctagaaccaacccaattttataaaaaaaacaactttggggcgggcctaaattttacattccaacctatttcaaccccattcttaagtttgccaggtccttaaaatttaaggggccaacccccccccccttcatttaataaagaaaccttttttttgcccataccccccctt

SEQ ID NO: 63913 - DNA, 849 bp, Glycine max
  Clone ID: PAT_MRT3847_28727C.1
tttctatttttctctctctctcacttacaagcgtaatcaacgaacttgccttgccttgccttgcctctttctgatttttatttttaattccctcgtattttcggtattagaaaaggaaataataacgagtgagctctagaggcgctcgcgtgtcggtaatcggctaagcaacttgcctcgcctctttctattttttattgctttttcgtattttcggtattagaaaacaaattaaccagagagaggcgcttgccgtaacgctaattgtgaaagaagatgcaaccaacatccaacggctctgattcgcaagcgacggagcagcggacgccgccgccccagtggatgccgatgcagtacccggcagcggcgatggtaatgcagcaccacatgatgccgcctcaacattacgctcctccgccgccgcagccctacatggcctaccaccactaccaacaacagctgccgcacgccctgcacgcgcaccatcagggatccagtgccgagaacaagaccgtttgggtcggcgatttgcatcattggatggacgaaaattatctccaccgctgtttcgcttccaacggcgagatttcctcaattaaggttattcgcaataagcagactggtctatcagagggttatggatttgtggaattctattcacatggcacagctgagaaagttttgcagaattatgctgggatattgatgcctaacacagagcaacctttccggcttaactgggcaacatttggcacaggagacaagcgttcagataatgttcctgatccttctatttttgaaggaagattaactgctgatggtacagatagcatgttgcatgaaacattt

SEQ ID NO: 63914 - DNA, 398 bp, Glycine max
  Clone ID: PAT_MRT3847_28728C.1
ataatgcgttcgtctaagatggataactcgggggctgttttcgatggcgagcgtgggaagccacagagacgaagtgaactatgccatggatggcgggggagaagaagaagaggacgaaaaagcaccacaggaggaggatgacacagacatgcaagaagatgaagaggaatatactttcaggcagaaaaccgtgatgaatccttgcggactacgatgtgatcaagatgataatggcatctaaccctaccagcagcgaaagcgtcttgaacgggaaggccaagctaaaaaaagcgaaaagtaccggaacaaagccatagtgaagaaccaccttttaagatggccagggaaggtgacatctctggggcaaagattgcatatataaaggaagccagtggatc

SEQ ID NO: 63915 - DNA, 750 bp, Glycine max
  unsure (1)..(750): unsure at all n locations
  Clone ID: PAT_MRT3847_28729C.1
aannnttttnnnngaataacattnttgaaatacgaacttgattttgggccttatgaaaaatcccaagttctagaaaacatgttaagctaaaattctagaagaatattctagaaaaatcttttgtaaaacataattttagagtaatttataaaatattttagaatgtgtaagtaactttatatgtatgaagaaagttttagaggagnnttatagaatattctagattaagtgtgttgataaaattctaaccattagtttgggaggaaccaatataaataggggtattgtattaaaatttgtatgaagtcaaatcaaggcataaatcaagaagtggtcattttgtacaagtaaccttcttccaaattttctaatctctctcactctcaaatatttccttcattagtaaaatttcattccaacataacaaacattgctatttttttatttgagggtatatattcttatctaatgtagaataattcttttctcagctcatttagtagactccactggtttaccctgacaaagtcagtagacaattccaatagagcctacataaggcaatatgcatgggtatcaacatggcatttgcaactaccatataccaatggttataatatggcttgaccatgacctctttgcacaagcttggaaagatcatgaagggtnnnnattacaacatttggagcgaaattaatccttactaagcgagaccatctcgctaagcgtgacccnnntactgnatctgga

SEQ ID NO: 63916 - DNA, 540 bp, Glycine max
  unsure (1)..(540): unsure at all n locations
  Clone ID: PAT_MRT3847_2872C.1
tacggctgcgagaagacgacagaagggtagtaaacatgggggtgcaaatagaaaccaggcccacttgggccttccaggaagttctccagaaggcggtgccttatgtaggaagcaacctagctcgcctgggcgagctgggtggcaagccctccctcattttcctataaatagggggaggagggaagaacaaaaatgttcaaccctcctggtatctgagattcacttaaaattagtcagaaaaattgtttcggtgaaaaaaatccaagccgaggcgcttccgtaacgcttccgagatgtttccgtgggtgatttcgcgaagattttcaaccgttcttcgtcgttcttcggtcttcaaccggtaagttcccgaaatcgaacttttcaattcattctatgtacccttagtggtcctcatttgtttcgcgtgcttttatttttatttcatttactttccgtacccccttttggcgtgctttagtcatttatttaagtcattttctcacctaaccaaaaannnnnnnnnnnnnnnnnnnncnnnna

SEQ ID NO: 63917 - DNA, 325 bp, Glycine max
  Clone ID: PAT_MRT3847_28730C.1
tcgtccacgcgtccttctacgcatccgaccacgccatgcgcccacacttaccggcagaggtaatttattgtggagcggggaactgcctagagatcggatagatcaccaacggcgaaagcactctgctgggccgacactgacactgtgagatgaatgctatgtgagcgagtgggattagatcccccagagggcctagcccgaaacgatggatactaagcgctgcgcgtatcgaccctcgcactgctgtagcttacgccttaactattccgcctgcggagtaccttacccagaatgaagactctaaggcagacacaagggcggaccc

SEQ ID NO: 63918 - DNA, 390 bp, Glycine max
  Clone ID: PAT_MRT3847_28731C.1
ctcgagccgcatttatattgtgtgctttgatcttgcaagacttcaattcatataaaccaaagatatactatcttcataagcaaaggactcaaagtaatagttttctttaaaaaaaattgaagtgtgggggggatctacatctctatgggatcatcactttcgttactctcatcagcctgggaagaaatcgttaggcattcactctttggtctgtctttgaacttcacttttggttccaaagatggggctgtgattttgagatcaggcagcttcaagaaaagagaatcagaaactacttcaaagggtacctctactaccaacagttcaagcaagttgaaagattgcaggcccgaacacatggtccttgtaagaaacccttcgtgcattaaa

SEQ ID NO: 63919 - DNA, 383 bp, Glycine max
  Clone ID: PAT_MRT3847_28732C.1
gccccccgaggcccggccggaaataatcccgggggggagagctccaaggcgggggaccccttttgttttcttccaagaaataaacatgacactattcaatggccactaatgacaccattaaactgctgcgcacgccgtccactttacctaatatcatttgtaatatataactaccctctaaaagtacttccccttgccatatagcagccatgtccttccagattaatacggcctcattccagcctattacaaacccctgctattttagcaacatagcctgtactgcaatagaagccttagatgagactgcaacgactatccatgcgaacgatacccccatttgctaatgcacaccccttcctcctgatatgccaccccgtctt

SEQ ID NO: 63920 - DNA, 260 bp, Glycine max
  Clone ID: PAT_MRT3847_28733C.1
gttgagaaataaggggaaaaaatggtgtcgctgaaactgcagaagcggctggccgcaagcgtgctgcaagtgtaggcagaggcaaaggatgtgagcttgagccccacatgcaagtgcaatcgaatatgctccatgagcacaattctgcgggcaaagacatgcaggaagttgggttcaaggcatgggtttatcatcagggaagccaacccaagattcacttcacgctcgcgtgcgtcgtaggattgaaggaggcaaagaag

SEQ ID NO: 63921 - DNA, 409 bp, Glycine max
  unsure (1)..(409): unsure at all n locations
  Clone ID: PAT_MRT3847_28734C.1
tnttatgtttttttttttttttttttttttgggagtaaaaggtaatttaaaattttcataaacaaaaggataacgtaatggtatttcaaggtcccatagaatcaaaattgatttagaacttaaattcagaccccaccacgaagtggtataacaaatttaaacccttttttctgagggagtttccctggtaacgatgaacaactgaaattattgtggattctgcttctgccctacaataacctctgggaagaaaccaccccctgctcatcatcatcatctggtccaaagtacccatcttcaaactctcccattccacgttttacccggaaatcttcttttcaacccatctcaattttcggtggcactatctttattcttggaaaacttttgcataccacatgcacacctt

SEQ ID NO: 63922 - DNA, 249 bp, Glycine max
  Clone ID: PAT_MRT3847_28735C.1
ctatgacaaagatttcagatcagatataattgaatctattctatgtgggtccctgtttccatcagagttttcaatcaatgatatagttaaacgttgggttgagattttctctggatttgataaagtggaggtcaaggctcttgaaaagatacttgagcaaaaacaaaggttacaggaagagatgcaaaagtatctagttctgaggcagactagtcaggaaaaagacattcctgaggcccaaaaaaagat

SEQ ID NO: 63923 - DNA, 192 bp, Glycine max
  Clone ID: PAT_MRT3847_28736C.1
cttggaatgaaccatcctcattgacccaaaaatgtgggttaccagcacactgaactcctgccaactgcaacattcgaagttcaacttttgtgatttccctgccattaatgaaaacctgtgtgtttccattgcttgcatccggtttgatgggacccccaacattcaaatgaggactaataattctgcaaggct

SEQ ID NO: 63924 - DNA, 482 bp, Glycine max
  Clone ID: PAT_MRT3847_28737C.1
atcaaacacgacaagcaaattactatattaacagaacagtcaaattaagttggacaaaaaagaatagagctaaagaactttctcctctatacacattttaaaagaaagttaataacagagaacttttttaatacatggaagatgctaattcatcctcactgccaattctcaactgaccccattgctcgaggagaatatttgcgaggcaattaagaggctgtccgtatatttgcttcatggatctgcttaatcccatccatgaggtaaatgggatcatagtgcctcaatgatttgggattgggatcagtttcatgtaatcctgatatatttctgcccgtctgatgagtgcatctgcgtgcaagcacgacccttaaagtaagtgcatccataagaaaggcaagcaacctaagattaagaaagacccatactggccatacaagctatccacaaaccaaagtacaaacgagttcagggtgaatgcc

SEQ ID NO: 63925 - DNA, 603 bp, Glycine max
  Clone ID: PAT_MRT3847_28738C.1
aaaatggcggggatgcagaagctgccatacggcgacgttgattccagtttgagggccttggccggtcgcgccgagggtttcggccgcctcgccattggtggcctccacggtcctctctatttcgtcaccactctttcagatgatggccctgggtcccttcgcgaaggttgtcgtagaaaggaaccgttgtggattgtgtttgaggtttcgggtacgattcatctttcatcgtacctcagtgtgtcctcatataagacaatagatggccgagggcagagggtcaaattgactgggaagggtttgaggctcaaagaatgtgaacacataatcatatgcaaccttgagtttgagggtggcaggggtcatgatgtagacggcattcaaatcaaaccaaattctaggcatatatggattgatcgatgcacccttcgtgattacgatgatggcctcatagacattacaagacaaagcaccgatatcactgtatctaggtgttgctttgggcagcatgacaagaccatgctcattggagctgacccgactcacattggtgatagatgcatccgggtgaccattcaccattgtttctttgatggaacacgg

SEQ ID NO: 63926 - DNA, 304 bp, Glycine max
  Clone ID: PAT_MRT3847_28739C.1
cttaaagttttcgaataggcaacgcacacactagatgggggggctattgattatgagggtgctatggcttctaaactcacaattgctaataacgtaactgattaacacctagatatgatacttaaatccagtacctttaatgagttcaaagctcacaatgaggattggacgaaaccctatgatgctttctgtatcatgctgaactatttacatacatatcatctcactcaatgaggtcatctggctcactactcacaagatcaccgtcaaaaacttgtatccaaatacagtctgcattatcaga

SEQ ID NO: 63927 - DNA, 322 bp, Glycine max
  unsure (1)..(322): unsure at all n locations
  Clone ID: PAT_MRT3847_2873C.1
attctatgctgancgancgnnnagcncgngaattctannnnnagcacatcagcnanngnaacnatcactcgccnngtganccnngnnnntcanagnggtatnggcnntncncgatgtcgatgagnacgncatgagagnnanantanntaggagtcanngtagcgagtangaaagnanncngnnnnnnagntaaggngntngagntngnngnggnnncntnntnngantanggcnnngcaatantnnngnanggntagantcnantgcntngcagtngancctngnntcngttnngagnanantnntnnngttnaatngnnng

SEQ ID NO: 63928 - DNA, 296 bp, Glycine max
  Clone ID: PAT_MRT3847_28740C.1
gcacgaggtttatttatgtggtaaagaggcagtattgttgtgtctcattcatgagttcattatctgaactgagcttttgtatgacatatatcatattcagtgtcttacttgcattgattcttattcctagttggctaatagggatggctaaactaaaactgggttgggaatattgttctctaaattttactcactttctattttttctgggagctttcctttcttagggctgtccaatccataaaagtcaaatagtaaatccccctaaagctatcatgagtagaacaccaaagaga

SEQ ID NO: 63929 - DNA, 199 bp, Glycine max
  Clone ID: PAT_MRT3847_28741C.1
ctcacgcatgcgaacacacgtgggaggatgtgatagtacatcacacagagacccgtttcggggggtaagatcctatcggccggtcttcaagagccacacttgtgacagagttggcgagttggcatggctcatgaacaagggaggcaggtgaaccaggatggatgttgtgaaggagcccacgtatttgaagaaccgtgat

SEQ ID NO: 63930 - DNA, 370 bp, Glycine max
  Clone ID: PAT_MRT3847_28742C.1
aatctgaatctggatctgaatccgatgcatctccttcttctctgcaagatcttctcaatcctgcggactgtgacttggtgttatgaatcaaccatcagacaaatcaaaccatgaggaggcgagcgttaacagaataagaacaggattgctgagttggcttgcaggattgggcccttggatgatcctgttgggaatatgctttttctgttaggataattgtttgcaattctggtattgctagctttctctaaaacctgcaaaaaaaggaacgaataattagcaaatgaagcttataaattgtcaacccatgtcatgaatttgcaagcaaaaatacaaagttcttttccttatcttatccctttctttgaag

SEQ ID NO: 63931 - DNA, 171 bp, Glycine max
  unsure (1)..(171): unsure at all n locations
  Clone ID: PAT_MRT3847_28743C.1
agttcccggggtcacccacccctcccaccgctgcgagaagacacataagggggggggcacgctgttcactttaacgaaggatcaaaaaccctgtgaaactgtgtttctttncgccagttnattnaattcccttggagcttacanctatgatcatcaacaaccccccttttc

SEQ ID NO: 63932 - DNA, 806 bp, Glycine max
  Clone ID: PAT_MRT3847_28744C.1
ttgctgattttggactttcaagctacgagaggtggaaagaacatgccagctattcggggtatctttggctatcttgaccccgagtatatatcttccggaacgttcaccaagaaaagtgatgtatacagttttggggtgttgctctttgaaattatagctggccggaatcctcagcagggtcttatccaatacgtccgtgagcttgcagcaatgaacaccgagggaaaagttggttgggaggagatagttgattctcggctcgagggaaaatgtgattttcaagagctgaatgaagtggcagcacttgcctacaaatgcatcaaccgtgccccaaagaaacgcccttcaatgagggacatagtgcaagtgtttacacggatcctcaaatcaaggtaccaaaggaatcatcatcacaaaaagtccctctcagccacagttgatgaagtttccattgatattgatcagctagagaccaagagttctgtcactgaccacagaagagaagaatctatagatagtacagctgacatttatgatttgtagaataaggttttgcatttagctaagttcttttggttacattgaatttttggtttttgcctttggatttgatgatgatgcccgccatcatcttctgtagttgtgttaacatgtttttttgttgttttattttttttctcaattttttattttatctgtcttacctagttctgttgtctcgcagaaatgacactacaaaatttgtatattaatacttccaagaaccaatttgaagttacaaatagaaagttacctttcttgcccgt

SEQ ID NO: 63933 - DNA, 660 bp, Glycine max
  Clone ID: PAT_MRT3847_28745C.1
ctaaattactgtgtttttcctccctattcaagtttgagagcgaagttatatagatttgcttattcactagagagaaagatggaaagtagtgaatatcatactctacacattttcttcttccccttctttgctcatggtcatgtgataccaacccttgacatggccaaattatttgctgaaaagggtgtgaaggccactatagtcaccacacccctcaatgcacctttcatctccaaagccattggaaaatccaaaactaagcacaacagaatccatatccaaaccattgagttaccttgtgcagaggctgttttacctgatagctgtgaaaatactgactcgatcacttcacaagatttgtttgaatccttctgtatggccacatgtttcctacaagagccatttgagcaactgatagaaaagcaacatccagattgcattgttgctgatatgttcttcccatgggcaactgattctgccgccaaatttggaattcctaggcttgtgtttcatggctatagttttatctccttgtgtgctacctcgtgtatggaactctacaagtctcacaacgacgctgagtcatcatcggttggcattcctaatcttccgggtgaaattagaatcgaaatgacaatgctgccaccttatagcaagagt

SEQ ID NO: 63934 - DNA, 1099 bp, Glycine max
  unsure (1)..(1099): unsure at all n locations
  Clone ID: PAT_MRT3847_28746C.1
ataaatactactccaaatctatgcttccaatccacttctcttcatcgcattggtcactatctcgtaattacttcctatatatatttctctcctatctttgtgccttagaagaatatttgccatggagttcggttttaggcaccaacttgggcttgtttgtgtgatattgctgttccctgcactatgtaactgccaggaatatttcaccaaatcaagagcaacctattatggtacccctgatggcttcgggactccaacgggagcttgtggctttggcgaatttggaaggttgatggatgggtatggtggaagagtcgctggggtgtcagggctatggaggaatggagctggctgtggtacatgttatcaggtaaagtgcctaatgccaaaattatgcgatgtgaatggagtaacgctggtggcaacagactacggtcagggagacagaacagacttcatcatgagcccaagcgccttctcaagattgggagttaataaaattgcatccgaagagattaagaaaaaaggcacagtggatattgaattcaaaagggttccctgtaaatacaccggaaatgtcttgtttcatgtccagcaaactagcagcaaccctggttacttggctgtcgtcattctcaatgtaaacggaaaatacgacgtcactgctgttgaaatgtggcagaagagtcaacaacgatgggtcccactacgcaggtcctatggggcagtgtttgactttgctaacccacccagtggtgaaatcctcttgaggtttaaagtgggttctaattggaagctgccgaagatccctatccctgcttattggaagcctggtgctacttatgacaccaaagttcaggtttattagaaagataaaaaagcacgaatgctgggatcccaacaacatattacaatgaaataagctctagtattattactctgtttgtttgaaataagcacatgaatttgcacatcaaagttcatctctttgaatgtaattagtattactctcctactttcccctataaaattacatgcaatatgaataaagtaaaagtggttgttgtataaaaaaaaaaaaaaaaaaaaatnnanttta

SEQ ID NO: 63935 - DNA, 467 bp, Glycine max
  Clone ID: PAT_MRT3847_28747C.1
tgcgagagacagaaggggacgcaattgaattcaccaaggcacagttacctggggcaatgagtcaggactcgaaggcttggaagcacgccgttgaacaattcaaagctggggaacattctgcagcagggatattggtgaacacttttgaggagttggagaagatgtacgtgagagggtacgagaaagtgggaagaaaaatttggtgtataggaccactttctttacatgacaagttattcttggaaagggctgggagagatggtaatgagacatcactggatgaatctgaatgtctaaattttctttcttccaacaagccttgttctgtgatctatgtctgttttggaagcttgtgtcgcattaatgcttcacaactaaaggagattgctttgggcttggaagcatcaagccaccccttcatttgggtgattggaaagagtgattgttctcaagagatagagaaatgg

SEQ ID NO: 63936 - DNA, 563 bp, Glycine max
  unsure (1)..(563): unsure at all n locations
  Clone ID: PAT_MRT3847_28748C.1
gcacgaggaagtacttcagataatgtgaattatcttgtgtatccgaatccaacttaatgttacttgctttttacaaaaaaaaaaaaaaaaaaaaaaaaaaaaaaaaaaaaaaaaaaaaaaaaaaaaaaaaaanaaaaaaaaaaaaatttaaaaaaaaaaaaaaaaaaaaaaaaaaaacctggggggggggcccggaccccaattccccttttagggggtntttttaccccccctcacgggccgtngtttaacacacgngggactgggaaaacccgggggttccccaattaaatggctttgaaaaaaatcccctttttcgcaggtgggggtataacgaaaagggccccccccatccccccttcaaacattgcccaccctaatggaaaatgggacccccccttgaggggcccattaacccggggggtggggggttaacccaaanngaacctaaaattgccaaccccttagcccccgtctttttgtttttttctttccttttccccagtgcccgggtttccccgcaagcttaaatgcggggctccttttaggggcccaataaaccc

SEQ ID NO: 63937 - DNA, 419 bp, Glycine max
  unsure (1)..(419): unsure at all n locations
  Clone ID: PAT_MRT3847_28749C.1
ttttgtcatctttgcagattcagagtaaatatggttttgccaacaaagaatcttctttcaaaaggtctatctccgagacaactttggagcggctatctgagctatttggttcattttctatctttcaacagaggggagagcctaaaggtacaacttgatgaacattttctgatctagggtggagaacttacttcgggtgtgtttggacacacacatatctaacttcttgttgcttctagtagatttagagagagagagggnaggttccaaacacacacgacataatagccaaatgctttattaatctttgatacgtaatttttcagccttgttctggcttcaagaataagtttttttacattntattaggagaaaagaaaatgctgatactttcctggttctacttgatgaaagcatgc

SEQ ID NO: 63938 - DNA, 482 bp, Glycine max
  Clone ID: PAT_MRT3847_2874C.1
aggcctaatatcatggaagtgaatttcatatgtaaaagaaagtaaaagagggtccacttattttttaaataactaatgagggtccacttcgtgttctcccaactattcaacaaaaatagacactttgtgttctttccaccttttgcaattctcacacttgaacccaatcaaccaacagtaacaccacccaaactacaaacacaaaatgcaaacagaaaccaagacttgcccttttggaggaatttttgttttttaacaaccagacaaacagcgccacacctgagcaaattgtttcaaactaaagggttataaatttacataactagcaaactgtacctcagtgtaaacacatataatccattgctgtattctctacatcaaaactcttctttttcaagtgtgccaagcaaactcagaaattatcatgttgggacaagaaaaaggggctcttcatccactctaaaagttttaattaattaaac

SEQ ID NO: 63939 - DNA, 471 bp, Glycine max
  Clone ID: PAT_MRT3847_28750C.1
tgagcacatacgattggttatggtggccgccaaagaggtggagcacgtggagggtatggtgctggtggggagcctcctggtggctatggccgaccccaaacacccccaccccgctccgggcctccccccacccccatcaccccccgtttctcctccccccccattccggggtgctcccccccctccgcctcttaaccccccatcgcaccacccttcctcccccccccatccacttttcttatccctccctgttaacagagcctccccccactccccccttttttgtacctccgccctgccccctattgccccccccccgctctcttaccccccctcacccccctcctacccccccctcccttttccctcccccctttccccccgattctccccttattaccctccccccccctatcccccttttccccccaccccccctccccatccccttctttcccccccccccccccc

SEQ ID NO: 63940 - DNA, 275 bp, Glycine max
  Clone ID: PAT_MRT3847_28751C.1
cccacacctccgaactaacaaatacaacttttttcatacctacattcaaaataggacacgggccttaacaagatggaactcacgcctacacagatctttataccattgaaacatacacatgtcgaacataccacgttaaaatctcgcttcggagcaaacttaatcatccgagaacatacttatcacttacatacttattatccacatctcagcaatatgaaaatttatttaacatctccaaactcttctatatagaaacataacatcaaatacta

SEQ ID NO: 63941 - DNA, 370 bp, Glycine max
  Clone ID: PAT_MRT3847_28752C.1
caaaaaaaaaatcggggaaacttttttttttccgtaagaataaggaatcaacagggccttttgctaatccaattatacaatggggggggttccttttttaatcagaaaaactagggcttttactgaacacttataaaaaaaaccctcgagaccttaaaaaaaaaaaaaaactccctaaagcctttttttcctctccaggccctttaaattcccttttaacaggagggaatatgctcggaccacctaaacaatgggggctgggcataagggacttttcccaccaccacgaattacctcatgggcccattttgaacaagggcacatgggcccacatttgtacaaaaaagaatcgatttggttataaaaacaa

SEQ ID NO: 63942 - DNA, 632 bp, Glycine max
  Clone ID: PAT_MRT3847_28753C.1
ccacgcgtccggggaaggggaccaagaaggagtggctgggggggtggaccgcgaggtttataggctgcctggacgcgcctgccaccgcatcgcgaaccaaggcgcctgcaccaggagcgcggatcaacgcgcctgtacgcagagcgcgacccaacgcgcctgcaggcctggcgcgacccaaagcgccagcaccgacagtgcatccaatccgataacgccagcgtcagcagcactttgcctcgctgtcggaagttacaggttgctaaaggacaagctacaccatctgtagcttctcagccatctcagatgaatgtgacttctttagactgggatcatggttcactgactaatagtctgcaaactacgccatttgaaaggtctgaaactgatgtagtggaggctcccacaacagaagatgaaggttgtactcgttgagactcattaactcaatttagtattttactgttttggatagtttctctttgggtgttgatgcccctttatgacagttcattacatcatcctttcactaataagctaatttgtataaaaggatcattcgcttgcttgcatgtaatttttatttttatgatgcattcatttattagtaacacatggtattttgatataaa

SEQ ID NO: 63943 - DNA, 328 bp, Glycine max
  Clone ID: PAT_MRT3847_28754C.1
gtggtatattatttgtttttaatctgatgagataaaaggtaaataaataaacacgaatggataaaaaaaaaacaagaaaactaataaatccactaataaaaccaaggggaaaataatcaaatagggccctcaaaaggatcaaagaaaaacgcctacgaaaagaaaaataggatttcataaagagaagatcagacctctccaaggggagggaaaaccaatccaaaaaagacagggatgacaagaaaaacaataaaggatcaggggaaaaaatctgaaggggggaatatttgggggaaaacatctaatgggaggcccaagaaaccccccc

SEQ ID NO: 63944 - DNA, 2341 bp, Glycine max
  Clone ID: PAT_MRT3847_28755C.1
tacggctgcgagaagacgacagaaggggatttttgagtgtttgtgagtttgtctgtgacactctctctttctctctctctacgcttcacttttccgtaataaacccttcaaaagcgaaagcggtttctcgtttttggaccttatctctctttctaaggttcgattctgcgtactttgggaggaacagacacacatgaaggattcgaattcggatctgtttgacccggtcatggcgatggagtccgagtggtctcgcggcggcaccacctccgatgccgatttcgccttcgccttcaacgacagcaacttctccgacagggttctccggatcgagatcatgcacgaccccgtcgacgcccgccctgattccgacgcctgcgccaccattgccgactgggcccgccaccgcaagcgccgccgcgaggatatcaaaaaggataacggtgcggatcttgcttcggtgccagacgagcaagttttgaacgggcatcaatctgaagcggatgagtgtgagaatcaagatgaagaggctgatgcaatggttgaagaaccccattctggtgatgaagctacaaatagtaatgattcagactggagcatggactgctctgcaggtgcagttgttagagttaaaacgctgcatatcagttctcctatcctggctctaaaaatgccattaatctataagattttcgaaatgtcaatgtgagaattctgagcactgaaatgttttcccccaaggtaacgtctctaatgaagctcctcttatgaagctacttttagtacgctttcagcattacgatgaagattccttggtaatggtaaatgtaaactcccttgatggatgtgatgatgttagcagcttcttgttgaattggaatatggattgctctgcagttgtgagagttagaacactacacatcagttctcctattttggcatgctaaaagtcctttccttctggctgatgtatcccaaccattgactgatgctggagtcagagcagagtcctggtcgatacaaggatataaccaagttccaggaagaggcttatggcgttgcccctagctggattaggtaatatcttgactagtgatgatctacaggtcgcatcagaagatgctgtatatgattttgagttgaaatggtctcgacagcagtacactaaactggaagacaggcgagaagtcctgggtacccggcttgcacaattaattcgcttcccttacatgacctgccgaaagcttaagaaggtcttgacctgttctgactttgaccatgaaattgcttccaagcttgtacttgagggcctatttttcaagtccgaggctccacaccgccaacggccgctggcagcagtagagacagcatcttcaaatcgtcgttttgtggagagagcatacaagtaccgcccagtgaaggtggtagaatttgaacgtccccggcagcagtgtgtggtgtacttggatttgaagcgggaggagtgtaacaacctcttcccatccgggcgggtttattcccaggcgttccatttgggtggacaaggttttttcctatcagcacattgcaacatggaccaacaaagctctttccattgctttgggctgtttttgggaatgcaggaaaagggctcagtgagctttgccgtcgactatgagtttgctgcgaggtctaggccgacagaggaatttgttagcaagtacaaaggcaactacgtgttcactgggggaaaggccgttggctatagaaacttgtttgccattccatggacttcgttcatggctgaggatagtctttactttatcaatggtgtccttcaccttagagctgagctcaccatcaaacactgacccccatttctagttgtaaactttctatctattccggttggtagccttgaccttttttttagatctcaaattctcattttctgttaacacaagtaaatgaagtaatctatcaaaagcttaaatatacaggcatgtgcactaaagtggatagtgttgcatgtgttccctaagggaaatgcaatcttaaataaaaattagttagcaattccatggacgtcgttcatggctgaaaaaagtctttactttatcaatggtgaacttccccttagagctgagctcaccatccgacactgactgggatttaaacgtgtaaacctttttttctagtcgggagctctgactttttttgggcaatgtgtctcattttcagataacctgctgtaatattcaggcaatgtgccctaggtggctagtgctggatgtgagatcaaatgaattgcaatgactttactttttctttcccttagaattaaaagattcgcgtgactagc

SEQ ID NO: 63945 - DNA, 811 bp, Glycine max
  Clone ID: PAT_MRT3847_28756C.1
ctcgagctcgaacccgcccagcccctcatcttccggagaacattggacatctcctctctctttttctgtgcggcgctcgagcaggccgggtcgggagtttctgttctccctctttcaccgcagtgttagggtttctgtagcctccaaccagaaagagagggaaatggctcccaaacatcctagtacgggtttgtttgttggattgaacaagggtcacgttgtcaccaagaaggagttgcctccacgcccttcagatcgtaaggggaaaacaagcaagcgagtgcactttgtgaggaacctcattcgagaggttgccggctttgcaccttatgaaaagcgaataactgagttgctcaaggttggaaaagataagagggcactgaaagttgccaagagaaagcttggaacccataagcgcgcaaagaagaagagagaggagatgtccaatgttctccggaagatgagggctggtggagctggagacaagaagaaataagtcttgtttactttttctagtttcactagactgtttcgatgtacgagttgtcttatttttgttttagttcaagattttgctttgagaaatatgttttacctaatcgagacatgatttactgaaaaagtacaattggcttattttcgacatgcattccaaattgatgttttattgttacatattgaaaaatgttgtaagcctgtctgaggaggtttatcatatattcatttgtgtatatttttgaaaatgcaaattcaaaacttctttttgtattatctggattaagtaataaggaaatcaattgttttagattac

SEQ ID NO: 63946 - DNA, 335 bp, Glycine max
  Clone ID: PAT_MRT3847_28757C.1
aaaaattaagggggcccctttacctcaaaattttgggggaagcccgcccattttgaaaaatttagtaaaatcttttaaaactgggctttttttttttgcccctaaaacattgaaaattttaaaaatgttccccccaggtcccataaaaatttttagcatttggatcaacccacccttcaggaacaaaaatttttacttgccaagtttgttttgcctccaattaaaaatgggaaaaaagttcccctgttaataacatccttgttggcttttccaagggcaccctttttaaaattcttgtaacccaattggacttttttgaaattcttttttttttg

SEQ ID NO: 63947 - DNA, 354 bp, Glycine max
  unsure (1)..(354): unsure at all n locations
  Clone ID: PAT_MRT3847_28758C.1
ccacgcgacgcgntcttcagacacacaatttgaaatttcagtatggacaacaccactaacacacccgtattgcgttctatggcgcgaggagtcaccctctctcgactcaaacaaaaccgccactgctgcggccctctccttccctatactctgatcttctcttctctttctttcgctctttacattcttcattcttccttcctattctctccgcacattctgcataattgaaagccccgaaactgtacaggattttgccacgatggagcttcaagaaattcacgacaacattcgaagtcagaggaacaaaatcttcttacacatggaaatacgttcgcaggcttatgatacaac

SEQ ID NO: 63948 - DNA, 258 bp, Glycine max
  Clone ID: PAT_MRT3847_28759C.1
tgccgccctttttttttctttttatttgaatgactaatttattgcaacttacaaagcatctaaatcaactacaacttcatcatctgaattttggggaattcccgtgggcttcttctctctctctctttttttttttttggtggccgggtttccaattttaattaaatgaacaattttgaaggggcttaataaatttcatgcacataataaaaatctcaacctgtgactgatttccccaaagctaattttccagggtat

SEQ ID NO: 63949 - DNA, 250 bp, Glycine max
  Clone ID: PAT_MRT3847_2875C.1
gttagcctcaaaatttctttggggtttatttaattcaataaacttagttcttatcatagacacattaaacgcattggacactgggctgaatgcaacgcacacccgcatgcatacgatggtgcgcacccatgaaaaagggggtgaacgacctccagcctagtgggatggggcacaaaaaaagcaaaactgagtgaactgacaaacaaagccccagtaccaggggctacaaaaacaacaaagcgctcttcaa

SEQ ID NO: 63950 - DNA, 778 bp, Glycine max
  unsure (1)..(778): unsure at all n locations
  Clone ID: PAT_MRT3847_28760C.1
gttgaagaaagtggcgatgatgccgtaccccaaaaacacgaacgaggaagccaaagccaacaaagccagaaaacccaaaccaccaccgagtttcgtttctcgtttcaccaccactttctcctcgatggcgcgaaaaccccttctgaagcaaaccctagctacgctctttctcttcttcgtgctttatgcaatcttcaacgccttcttccaccccaccgattcctccgccttcgacgccgccgccaccttctcctccgcctcctctgtcctcctctccgctggcaccaccaaatccttatacgtcaaggttttcctctacgatctcccgcgaaggttcacctccggcgtaatccaccaccacacgcttgcgcgtggtagtggtggtgttggtggcagcgcctcacgcgccacccccgatgacgtggcggatgcgctaaagtaccccgggcaccagcatatggcggagtggtacctcttcgcggatctctcccgagccgagtccgaacgtgcaggctcgggctcgccagtggttcgggtcgcggatcccgaagaagcagatttgttcttcgttccgttcttctcatcgctgagtctcatcgtgaacccggttcgaccgccagggtcgaattccggtttggagaaaccggtttacagcgacgaggagaatcangaggcgctggtggagtggctggagaagcaggagtattggaagaggaacaatgggagggatcacgtgattgtggcttctgaccaaatgcgatgtaccgaggcatcgatc

SEQ ID NO: 63951 - DNA, 431 bp, Glycine max
  Clone ID: PAT_MRT3847_28761C.1
ttcttttttttttttttatttttcttttttccccttttttttttttttgttttttttttttatttttttttttttttttttttttttttttgggggaaggggaaccttttgccccctttatggaccaaaattatggctttttcaaggccaccttaaaatcatgaaccgccccattaaaaaactttcctatgctaaagacaatttgaaaaaccccctaaaggataaaatattctatccccaaggccctgttctaattccccaaggaagaaaaaaaaaccgggttgttgttgccccccacataaggggtacccggttgcaaacctcatctgctggtaaaaaggagggggatcaacttctccccggtacaacaagggatggttttcttgatgtttttggcccggtttgttcccggccccctgggtcccccccga

SEQ ID NO: 63952 - DNA, 275 bp, Glycine max
  Clone ID: PAT_MRT3847_28762C.1
ataaatttgaagctctggctgctcatgacgctctggttgagctcagtggagccatgaacactactgcctgcagtctgatgaagatagcaaatgatattcgatttttgggttctggtcctcggtcaggtctgggagaattgatcttgcctgaaaatgaaccaggaagcagtatcatgccaggcaaggtgaaccctactcagtgtgaagcaatgaccatggttgcagcccaagtcatggggaaccatgttgctgtcactgtcggaggcagcaatgga

SEQ ID NO: 63953 - DNA, 460 bp, Glycine max
  Clone ID: PAT_MRT3847_28763C.1
ggctcgagcacagcgaggcttcgacagcttcatcacattccttccaaaacttccctctcttgttcaattgacggtctggacctacactctttcttcctcaatcaacacacggtctctttaaaagcagcttcgccacgctcctgtggcgtcatcatacattatcacaaatctttgttacagaccctctcaacgaacaatatgctttccaagcttacctttgccatcgtggcacttcaagccagccttgccctagctggcaaagccgtcatcaccaaccgctgcgactacgacgtctgggactggtcaatctctactggccatgcctcctcatccttcatggtccctgcaggaagctcccacagcgagggctacactggaagtagcacttccctcaaagtcagctagttcgacgctatggtcgccggcaagcacacacagtttgggtactccatcgcggctg

SEQ ID NO: 63954 - DNA, 381 bp, Glycine max
  Clone ID: PAT_MRT3847_28764C.1
caagaggcatttgaattttcgtgttttgatcagaatccaaggaaaacatcacataatttcggaatcacaagttaaagtttcatgtagcagacgaagagaaaagaatggtatcggaggatttggagaaacatgaattggatgaattgcagaaacaattggggaataagctaaaatttgaatccgcaacttcggctctaaaagctcatctccaatacacgtaaccatcagcatctcgatcgcttcacaaaaccttttaattgggtaaaagacaagttgccactgtgttgagaagcacgtatagagcagcatctttctggaaagctggactgggccattttgagtatgatcaattacatgttgtcgaaagcttctgagaaagag

SEQ ID NO: 63955 - DNA, 638 bp, Glycine max
  Clone ID: PAT_MRT3847_28765C.1
gtgctctgttcgtgcctcgacgtttatcatctctccatctccatttctctctctcccttttccagaaacgcaagttatggcaaaggcttacccaactgcgagtgctgatgaccacaaagcagccgacagggggaagaagaagctcataggcttcatggctgagaagagacgcgctcctctaatgctgcggatggcatggcactctgctgggaaccttatgacaaggggcacgcaagaccgtgaggacgcttccgaaccatcaagcacctctgactaattggttctcagagctaacgacggactaggcatcgatgtcagggttttggagccactcaaggaggagatacctatttggagctacgccgattgctaccagctggctggtgccgctgaacgttgaggacactgcttgtactctgaagtgccattccaccctgccagagaggacaatgcctgagacaccacgatagggtcggttgcccgatgccacaactggtgcagacccttcgacagatgcgtctgcgaaagatatgaggctgactgaccatgatatcgctgatctatctgctaggccactatctggtagctgcacacaaggagacgttctggactagagggaacgtgcacctctaatcctc

SEQ ID NO: 63956 - DNA, 289 bp, Glycine max
  unsure (1)..(289): unsure at all n locations
  Clone ID: PAT_MRT3847_28766C.1
gtcgcacgcacgcgtacgtaagctcggaattcggctcgagngaggtacttagaaagggccaagctgggcaggatgtgtaaggacagttttatcagctagcagactgcgtgtgggctggggctgttctggcgttgggagggtcgctgggagtgtccaactttggggaagaagcagatgcaggtgccttcagtgtccagtntggaggaacactcaccttgacttgcagttgggctgngaacatcaanatcaaantatngggtgctgcacctctcaagnntgtttttttntc

SEQ ID NO: 63957 - DNA, 225 bp, Glycine max
  Clone ID: PAT_MRT3847_28767C.1
agttttcacgaattatgtttattatgtgacaaccacagttggagcaggagaggaacgttctgagttgaagttgttctctcatgggaggaaggtacaaaaatttggaaggcctgcactagagattgaaggcatagtggttgccacatgattaagtcctctaattgcatgttccttgaacattgatgacatgggacttatatatgcttttgcagagaggtagcacaa

SEQ ID NO: 63958 - DNA, 337 bp, Glycine max
  Clone ID: PAT_MRT3847_28768C.1
ggcccccaaaactttttgatagatttgaaggggaacaaatttccccgggaaaagtaaacgggatcgattccccatgatacaatcaaactttttaaaaaaattttaataacaattttccagtttaagcttggaaaaatcaactttgggaaaacagaccccataaatcagctgggatcaaaaaaaataacagagccgtttgccaattttggagggctgcccatgaaaacaaatttccaaaaagggcccatgtcagtttttgctcagcagggcatcgcacccccaaaactttgatgaatcaaacagtttatacaatactcattttcccagccaacatgaa

SEQ ID NO: 63959 - DNA, 616 bp, Glycine max
  unsure (1)..(616): unsure at all n locations
  Clone ID: PAT_MRT3847_28769C.1
tttttgttcccctttcatctgtttatagacctaaaaaattcgttgaaaagccctagcttcttccctactccttattttagctcgattttttcttcctttctccaatcggctttacgctcgatctacccaaatacaatagcatcaggtgctgatattagtcggatacaatattaccttgcgcacccacccggtcacgttcaacggaaccacaaaggaaatggtgtagtcgattaatactccatcatagtcattacagaacagccaagtgaagaattacgtacatctagctacttgatacctttcacgtaatcgatcgatctgagttgccaaagtggatcgaaaacatggaaagagaccacttcctttggaagaagaagagaaagcgtttccgatttattcttctcggtcccagcaagacatatcggctgtggtatcggctcttgttcaagtcattggtggcaatccagaacacaaagatccaacaacagcgtctcagtcaagtgttgttggaaatgattcnnntgaacaatcacaaccaccacaacatcaaggtatgccgttcctgcctttgccacatatattcatatatacattttatgcctctttcttcttatat

SEQ ID NO: 63960 - DNA, 350 bp, Glycine max
  Clone ID: PAT_MRT3847_2876C.1
ggggaaggtcccgaatctttaagggaaacaggtatcaagcgttacaggtttgctcgtctatgaataactctgccagggggaaactggtaaacctttcctggccaattttggaaaccagctttgatttctaacataaactctccctttggagcccaaaaaattctacccgcaaaacatgtttggatgtggtaagtttatgctcctcccactgtatccatatgttgaaccccgtcacctcccttggaaaccacacgcaattttctcaaacaggaaaacttttggccgtttttggttggtgtaccattcacatgccccacatccttgggccattttcccctgagatttaaaag

SEQ ID NO: 63961 - DNA, 251 bp, Glycine max
  unsure (1)..(251): unsure at all n locations
  Clone ID: PAT_MRT3847_28770C.1
nnngcgtaggcnanctcngnntncggctcganngtgggnactancncngtnaannnggntgncatntctgtntganngttcatntaagtncagcatacggacacacncacaggacgangcagntnanccanangnnncnggnngngnacagnnacannanaangcnaacagancgtnnnatcatnaaagagnnnnacaanaacacncgannnnatntaacaangacgcaaaagtannnctgaatantcngt

SEQ ID NO: 63962 - DNA, 512 bp, Glycine max
  Clone ID: PAT_MRT3847_28771C.1
ccacggaattctttgattccaaccccagggcctcggggaaagaatttcaccttccttaccaaaaaataaagggttggaaataaaatctaaacttgaccttcatcttcgggccttttttaaataataaaaataaaaccatagggcagtatagtttggctgtattgaaccaaatggccccaactaatttttgggctaccaaattttatctgcaccaaaaaaggaaaaaataatatggataaggccatttttccctacctacaaaaaaaacccctttttatactctcctcccctgacccctacctttttttgggtcggccggaataccaacctctgaaaaaaaaaaaaaaaaaattccccagcagcaccgaatccccattcaaatttcaaatcacctgggatgaaaaaccgaggacgaggtccccgcagcagcttcaacgggaccccaggcaaaaacggggtccaagggttgctccacccaactaaaagaaaccccgggggccccttccttctct

SEQ ID NO: 63963 - DNA, 435 bp, Glycine max
  Clone ID: PAT_MRT3847_28772C.1
tcgtttttcctagtcagaaaacagtgctctgaagcgaaggcgttcataggagcgctacatgtcagccttcgaaacgacgttgatttggtcctggaccggatcaagaacgagatcgctctcgaccaacagcatatagctgtaatgttcgagaaatgggagattctcgacgagccagagctgcagagcgcctattgatagcctcgaggaagagattgacatccgttgcgaagagcatccgaaaacagatgtcgtgacgataatcgaccttgtacgttgcatgaagtgcgttctgtacggagcgtctacgccgtgcgacagaactgtcactctggggtggaaccagttgtaggagctgaagattgcggtagattaccggtgtacgatagcctagagttcatgcagcgataccgttttgccagcaacatgacaaacata

SEQ ID NO: 63964 - DNA, 448 bp, Glycine max
  Clone ID: PAT_MRT3847_28773C.1
cttcgttttttttttttttttttttttttgataatgaaaaacatattttaccctaatggatttaattttttaactttcattttattgatgacattaattaatgggttgatgaggggcattcgacaccaaaaattaattttttggtagcaaaaaggaaaaacacagtacgtttattggggcaaaaaatttatttatgggcccgcccaaagatggcaccaaatggggggaaaaaaaaaaaaaccactttgggggggaataaaagctctttattattgacatgggggttttaaaattacatgccccaaaggacaacgccccccttgggctacggagttccttgcggtaaaaacttgaagctaaagttatgggccagcgggtctccctctatgacctaaaggggtattttattgggggggatgtgtatgccatcaaccatttgcggaaacaa

SEQ ID NO: 63965 - DNA, 143 bp, Glycine max
  unsure (1)..(143): unsure at all n locations
  Clone ID: PAT_MRT3847_28774C.1
ctatatattttgagttattacattcatactgttatctgtatctaatactccaacatatatagtatcttactcctttctatagaatctatattatattaatggtatttgtnggctgtgacttggtccgttattaactgggtgga

SEQ ID NO: 63966 - DNA, 132 bp, Glycine max
  unsure (1)..(132): unsure at all n locations
  Clone ID: PAT_MRT3847_28775C.1
caaagaactgaatttgtgtggatgcaaagcgcatgtaactgacctacgcttgngaatccccgtccatgagaccgccagagctccaaaaaagttagcttccgcggccaactcttaaaaacttagggctttcaa

SEQ ID NO: 63967 - DNA, 322 bp, Glycine max
  Clone ID: PAT_MRT3847_28776C.1
gtccggaattccccgctcgaccacgcgtccgtcgaactggactagagggaagggctttggagggtacgaatgataatttgcatgataggagggatggtgcgcacaatggttgtctggttgagtaggagcaatgtctagaggcaatgcgcgccataaaatggtgcttgttgatcagcttgatcgccccggcccgccgacctgcagtaacctccattcgggttcgcaaaatgatgctggcattgtatgaacctgtcggcaggttaccgtacacataaggaaattgggaggccgaggattcctacacagctgctctgatttttgt

SEQ ID NO: 63968 - DNA, 199 bp, Glycine max
  Clone ID: PAT_MRT3847_28777C.1
gcctaaccctaaggtttgcttcgacatgaccatcggcggtcagtctgctggccgtatcgagatggagctctacgccgacgtcactccccgcaccggcgataactttcgcgcgctttgcaccggcgagaagggcgtagggcggaacttcaagcccctccactacaaaggctcgaccttccatctggggaatccttatttt

SEQ ID NO: 63969 - DNA, 509 bp, Glycine max
  Clone ID: PAT_MRT3847_28778C.1
ttccaggaaggtttcccgtcatcactgtatgacgtcctccttctttgggggggggggggggggggggggggggggggtggggataagggggaaaagattcaaagggataaccggagaacaagttgtatcggtaaataggtttgtataaggaaggcctgcaggtaagagtgaagcatggccgtcgcgtagcgacaaagagctacatagagagtaggatgtcacaaatgcgtataagaagaggcgaaaaatcgcgcgaataaaggaataagttaatgatgatgtgaatgagaaataaaaacccgggggtacacgccccccaaaaccgaatggtttcaacgagggccggccacgttgtgtagtgtaccggttcggcgatgtagttgaagaggagagcaggcagtttgcaaagtacgtaagtggtattcatcacgacagtgcgtcaataaattacacgtacgtagacaacttcagacggttgtcgaatataaacaccgtagagcaaataagga

SEQ ID NO: 63970 - DNA, 579 bp, Glycine max
  unsure (1)..(579): unsure at all n locations
  Clone ID: PAT_MRT3847_28779C.1
cacgcgtccggaaacgacatatcgcagaataagggtttcgtttcttccttcgcacctattcattcttctatctgcttgcaattattagcgccaaaataatcccaatgaatcggtcatcttccgtttcaaatttccgaaacctcacagtagctggttctctctctctttacgattttcagtagcgcatcttagaccacgaaatttgatgcatgccttgtttagaatatgttaaaacatttaaatttaatcttaggaaatccagagaacagaagcggttgactcttctttcatcttgtttttttttttaaatctaaaaaattcntaagcggtggctgaatttctagattttttntttgttaattttaatctttcatttttgcttttgaaaagctagcagttccattgatttatatgtattttctttttgatgtgctgttcaattaatgaagcctgaaaaaccctcgatttcagtaggactagcccttggttgaaggggttggctttaatttatcacaaggctgtttaataggcaccggaactggtaactaggcccctaatttccagtctggttctgaattt

SEQ ID NO: 63971 - DNA, 152 bp, Glycine max
  Clone ID: PAT_MRT3847_2877C.1
cttccttttggttttttttaaatgactacccccgactcccgcacatataaatggaacaacattagatccaacatgtcagagcatgtatattctacactccgcctttgccgggcaaaacagcagttgggggcttatttcgtacaaatataaat

SEQ ID NO: 63972 - DNA, 226 bp, Glycine max
  unsure (1)..(226): unsure at all n locations
  Clone ID: PAT_MRT3847_28780C.1
gantggggttagttgaggtccaagaanaacgggaacggtantggagatggaatctctgatattncgatggggaccagaacnagatacatcnngatgacntctgatccagttgaggcngtgaagtttagcnaagcaggcngtntgggancannagntntntctatgnatgtgccgatngtgcttctctcnattncgtgnntctcggntntgatgngggtgttatgaa

SEQ ID NO: 63973 - DNA, 597 bp, Glycine max
  unsure (1)..(597): unsure at all n locations
  Clone ID: PAT_MRT3847_28781C.1
gttatcagagcgactagcggggagcccaaacnagggcaccgcaggagaggaaggagnacaggcggaanaccggcggagcngcaagcaggcaaacccacaacgccaggaagaacggaggcggagcaggacacaagaaaaaaaaacggagcggagcacctgcagaggangannggagaaaaacaaagttgccacatgcaacaatatttaagccccaacaacccgaaaggcggttgagttgctgacacattttaaggattttcgcagcatctgcttttagcactcatgtatactttttttgtccattagatccttgtgatcgtggaacttgtagatctgctttgaatattgagttttttttaataaagcctttaccttgtgatcctttaagtttgccaaagtatttttcctagctaagaattagatgcctaattttgggatgaacaagcaagaaggcaggtgtcaacaggaagcaagggccagagacatgatcttgaaagaagaggggcaagagaatctcgagctgntcctgcacctgatgccaatgctgaactgccactgncaatgcagaagagacaaaggcaggctcattcaaaaagc

SEQ ID NO: 63974 - DNA, 1469 bp, Glycine max
  Clone ID: PAT_MRT3847_28782C.1
ccacgcgtccgattcaaactgctgcgtgtctctctgacaaccttaaattttgcttctttctctgccagaaacgcatgaaggatcaaaatggttgccctttttctctttattggttggtaaacaaaaacacgtgagagtggagtaatatatggagttggggtgtgggttttacactaaagttaacaactttcgtcgttttggggggctttgaaagagtgtcatggtcatggagggaagaatctgcgaggaattaaagcccaggtattatgctctttgtgccattggaggaatgctcagtgctggcaccacccatcttgccatcactccctttgatgtcttgaaagtcaacatgcaggtgcacccaattaagtattacagtatttcctcttgctttactagcttactgagggaacaagggccatctgttctttggaaaggttggaccggcaagttctttggatatggtgctcaaggaggatgcagatttggtctttatgagtattttaaagaggtttattccaatgtattggtagaccagaacaggagttttgttttctttcttagtagtgcgtctgctgaagtgtttgccaatgtagctctatgtccatttgaagctgttaaagtgagggttcaagcacaaacctgttttgctaagggattgtatgatggctttccaaagttatatgcatcagaaggcacacgaggattctaccgtggactaattccacttttgggtcgaaacattccattttccatggttatgttctcaacatttgagcattccgttgattttttgtatcggaatgtggtcaaaagaaaaaaggaggactgttcaataggtcaacaacttggtgtaacatgtttagctggatatgcagctggatctgttggtagcttcatttctaatccggctgacaatattgtatcttctctttataacagaaaggctgatagtcttgcactggctatcagaaatattgggctagccaatctatttaccaggagccttcctattagaatgttgctagttggtccttctataactttgcaatggtttttttatgacaccatcaaaattttaggtggaatgtcaactagtggtggagttagaactgacatgagaggaaatggggcaggctagattcagaaaaatggaaatctgcagttacatttttcaggctgacttgtgtattgcaagtcattttatactatatacagggttagttttgtggtggcttttgctttctgctaccatttagtccttttgaatttgtcattataggctttcattgatgcctttgaaatttgctttccaaaaagaacgaggagcccatttatattctcacgtgtactagcatattaggtgttgcacataacaaaagaaaatacaaatttacttgcaatgcttgtgctggcaatttaccagctaaggttttacccatgcctcatggcatgccacattcgatctt

SEQ ID NO: 63975 - DNA, 2181 bp, Glycine max
  Clone ID: PAT_MRT3847_28783C.1
tacggctgcgagaagacgacagaagggggacacacatgggcaaaaaagaagtgtccaggttcatcctcctgaaccagtctctgtcgaagaaggaaggtcataaatatataaaaacctaagcattgacccttttgccccacccacgctgcctgttacggattagcatcaaagcaagttaacaaaatttgggtgcgtcctggattgacccttttgccccctctccctcaccctccactaactcctcctttttggtttttataaagcacattcccaatagaggagggtccctacacaacacaacccttcaatgacgtccatggccactttcttcgcccaaacctccttcccctcccactctctctccaaaaccttcgatacccatttcgcccctgccccgaaagtcaacgtctttgtgaacttcagggcgaggaggcacgttggggtgcgagtttcgaacgcgctgatcgaaccagatggagggaagctcgtggagcttgtggtgacggattttgagagggatttgaagaagggtgaggctctttcgttgccgaggatcaagctctcaaggattgaccttgagtgggtccatgtcctcagcgaaggatgggccacacccctgaaaggcttcatgagagaagccgagttcctccaaacgcttcatttcaactcgctccgactcgatgatgggtcggtcgtgaacatgtcagtgcccatcgtgctggctattgatgatgcgcagaagcatcggatcggggataacaaaaaggttgctctttttgattccaagggagaccccgttgcaattctcaataatattgagatttataagcatcctaaagaagaaagaatagcccgaacttggggaaccattgcccctggcctaccttatgttgaacaaactataaccaatgctggaaattggttgattgggggtgacctagaggtcattgaaccaattcagtacaatgatggacttgatcattttcgtctatctccgacacaactccgtgcagagttcacaaggcgcaatgcggatgctgtgtttgccttccagctccggaatcctgttcacaatggccatgctttgctaatgactgacacccgaaagcgccttcttgagatgggctataagaatcctgtcctcttgcttcatccacttggaggctacaccaaagctgatgatgtcccacttgattggcgaatgaagcaacatgagaaggtacttgaggatggtgttcttgatccagagacaactgtggtatccatattcccatctcccatgcactatgctggacccacggaggtgcagtggcatgcaaaggctaggatcaatgcaggggctaacttctatatcgttggtcgtgaccccgcaggcatgagccatccagttgagaaaagagatctgtatgatgctgaccatggaaagaaagtattgagcatggcaccgggactagagcgtctaaacattcttcctttcagggttgctgcatatgacaagactcagggtaaaatggcattctttgacccttcaaggcctcaggacttcctgttcatatcaggcacaaagatgcgcacactggcaaggaacaaagaaagtcctcctgatggatttatgtgccctggtggatggaaggtgctggttgattactatgatagcttagtactctcaagcaacggcaaagtgcaggaagctgttccagcttaatcttgtatcatatcataatgtatatatctcatgattgggagaaaccttaagctttatgtattctcctgctaagacatacttcacgaggatcctctggcccaatttaataataataataataattaaaactctggggaggcacaggcacagatacattgcctctctctgtatgtatggcatttagacagcctcttgcacttatggtgcaattgtgcatgccaactctctgtaatataatgaatgtggttgtgctaaggaggatttggtttgatcaaaaaaaaaaaaaaaaaaaaaaaaaaaaaaaaaaaaaaaaaaaaaaaaaaaaaaaaaaaaaaaaaaaaaaaaaaaaaaaaaaaaaaaaaaaaaaaaaaaaaaaaaaaaaaaaaaaaggggggggccccccattttggaacctcccccccccggaatttatttcggaccggggcccggggggggcccaatttttcctttaaggg

SEQ ID NO: 63976 - DNA, 358 bp, Glycine max
  Clone ID: PAT_MRT3847_28784C.1
tggcttggaacctttgggctgatttatgtgcttgtggcttggcttgtttgggcgcttgacctcctacttacagatacggttattgctatcctcgtagtagccctcacctttctacctatcggttctaaggtaagtgtaggtaaagcgagcgttgtagccaaagctctagtcttttaagttataaggccgggtactaaggtcctgtctaaagatgccggagctgtcgccgcggttatcgtcgtgagcgtagcctcagtcagtaatgttacggttaccgaagcgccatcgggcatcgacgatgggctctcggtccctctctttaatcaccctcttgcggttttcgggggaaaagactgcg

SEQ ID NO: 63977 - DNA, 205 bp, Glycine max
  Clone ID: PAT_MRT3847_28785C.1
gatcctatctttatcctcacttttgattttaaactccattcctttacttggtttttgattcacaagtgtggcggggcatttaaaaattaactaaaacttatttaccaattagcacctatggcgtctaagaagaacacagtagtttttgaggactacttcccttcaatgatggataaactggacactgacgggtttatgaatgatc

SEQ ID NO: 63978 - DNA, 450 bp, Glycine max
  Clone ID: PAT_MRT3847_28786C.1
gttttcccaccatggacaacttggaagggatctttgcagacattccctgtcgctgcaatcaatgagcaaatgcaaaatcttaggcatgatgcagtctctgagggggcttatccaccatggattgcagggtccgatgaagaaaactatcccttgactagaaaagtgcagcgtgacatatggatccatcagcatcctttaaactgtagtatcccggatgtcaagttccttgtcactgactgggagagattacctggatttggtattggggctcatattgctggcatgtgtggacttcttggtattgcaatcaacgaaggaagagtccttgtcactaactattacaacagagctgaccatgggagttgcaaagggtctttcccttctagttggagttggtacttctttcctgaaaacttcctaaaatgtcggctacgtgcatttgaactcatg

SEQ ID NO: 63979 - DNA, 2088 bp, Glycine max
  Clone ID: PAT_MRT3847_28787C.1
aaacccctcttccggtccggattcccggtcgacccacgcgtccgcgccgctttgctgggccctcgatctgctcgtcttctcagaccgccaagcacccagttcgatgggggtcactctgccagcttcaaaaccatcacaacaagaagcaatttcatccccctatacgagctaggtgagttctcagttcaacacatcgtgtgaaaaaaaaaaaaaagaaaataagaagcctattttcgtaatttgtatgtgataaagtgcccatcttgatgtatgtacttcttcacttctttgaatgagtccctagtttgagatttatctaaaacattttgaagtgattaaggtgccaacagatgtgactattattgtgttgggtgaaggaagcatggtatcaaaaacattttgaagtgattgtgatccctagatttgactatgattgtgttgggtgaaggaacatggcctcatggttgtgtggttttctttgtgatccatgagatgaaatgagatgagaagtcagaaaacatgtatcctaggttgttgttttgtgaccaaacccattttaagatggcttcttcttcttcttcttcttcttcttcttcttcgcatcaaatccagcaaactgagggttacttgagctaaggaatcatcattgccttcttctctaccaccaccaccaccatctggcactagaattagtcctgctgttctattcatcatagtggttcttgctgtcttgtttttcatctctggcctcctccacctgcttgttagatttctcataaagcacccttcttctgcatctgctcaatccaacaacagacaccaagaactttccacatctgatgctcttcaaaggcagcttcagcagctcttccacctccatgactctggcttggatcaggctttcattgatgctcttcctgttttccagtacaaggagattgtggggttgaaggagccttttgactgtgctgtttgcttgtgtgagttttctgaaaaggataagctcaggttgttgcctatgtgcagccatgcctttcacataagttgtatagacacatggcttttgtcaaactccacatgccctctttgtagaggaacacttctcactcaagggttttccgttgagaatcctatatttgacttcgatgatcttatggaggatgagatgtgtccttggaatggggagaatggattcaatacccggcagaaaacagttgtggttgaagaaagtgtggagaaagagaaaggtgttttccctgtgaggcttgggaaattcaagaagctaagtagtgtggaggggggtggggagagtgaagtgggagagacaagtagcagtaatttggatgcaagaaggtgttactcaatggggtcttaccaatatgtggttggaaattcagacctaagggtggctttgaaccatgatgaaattggtaaaggtcaagtcacaaggctcaacaaaggaatggaacttgatgatgggaaggtttcagtggaggagggggatgtggaaggaaagaagattagtagtgtcagtaaaggtgacagcttttctgtgtccaaaatctggttgtggccaaagaaggggaaattgcctacttctttggatggtcaaattggcatgccaatgccttcttttctaaacacagattttccaaggatgagggatacagaaggggcatgaaaggtatccatccacatgttttttaatttttttttttacttcttatttcacttgaattcgtttcaatccattgattaaaactggcttcccctccttacttgtcttacaattccaaaaaaaattggtgtgctaattttgacattgtgatgactgattgtgccacatactattgatgtattatgattgtactttatgaagatataagaaacactgcatctgtttttcttttatcaaaaaaaaaaaaaaaaaaaaaaaaaaaaaaaaaaaaaaaaaaaaaaaaaaaaaaaaaaaaaaaaaaaaaaaaagggcgggccgctcgcgatctaaaaccggaccgcgtggggtcgaccccgggaaattccgggaccgggtcacctgcaggcggtaccagcttttccctataggga

SEQ ID NO: 63980 - DNA, 311 bp, Glycine max
  unsure (1)..(311): unsure at all n locations
  Clone ID: PAT_MRT3847_28788C.1
tttnggttttttttttttttttttttttttaaggactaataacagttcattattcattaataaaattaaaagcccgccaaccaaaaaaggagttccagaatcttctgaacaaaacaaaatcacaccctataacctattgaaaaaaggggaccatggtgcatggtatttattattcttaataacccccatataattataatgggctattatatagaacaggaaacttttacaggattgggccatggggggttccccaacccccaattaaaagaggggattggttttggagccccaccggctttttacatttt

SEQ ID NO: 63981 - DNA, 520 bp, Glycine max
  Clone ID: PAT_MRT3847_28789C.1
ctgcagtctgatctgaacagaataaagaggagtgatagcaatagcatgagcaggtcgagagagcatgcaattggagatgctgtgaacactgaaattcttaggaagcaaagttcacaaaaaagcattgctgaagagggagtagtagtggaagagaagaaaaacaaagggagctgtgaaatgggaaagaaggaatgcttgaataattcaaaaagcatgaatgagggagttcatgatttggcggaaaagatgaaggaattggagatgatggatacgggtgatgttgagcacgagctagacattgaagaggcactccactactattcacgtcttaaaagtcctgtttatttagacatcgtggacaagttcttcatggacatgcactctgaattctctgttcaagagtcctctatcagtgtcaaacgctctaagtcaaagggaaggcctgactcaatcaggttgtagataagatcattttaatgcaaacaatgttctagttctactgttttctcttaaaaaaaaa

SEQ ID NO: 63982 - DNA, 665 bp, Glycine max
  Clone ID: PAT_MRT3847_2878C.1
ggataaaggacagttttaatctcttatacttcaaaatagttgatgacacaaacaagtagagtataacacaaatgatataataagagataactattattattcatatttctccaccttatgtagaatgactggagcgccatattggggttgaatagtcatcaccatagttggagcatgagtataggttggagaaagttcaaacgagaaacattgtaaaatcatcgacaaagcaatctttgcttccaacaaagcaaaattttgtgcgatgcatattctaggacctcctccaaaggggaaaaatgaaaatctaccattcgtggccttcagaactccttcagaaaatctctcaggtttgaactccttagcatcatcaccccagagctcactatcatggtgaaccaaaattgttgatatgaaaatctccactccagcaggaaatgataggtttccaagtttcacatctttgataacttttcgaggaacaccaactcctggagggtataatctaagaacctcatacaaaatcatagtaacaatctttaattgattcagtccatcaaaagtcggtttttggttgccaaaaacttgtgagacttcctcccttgcgcgtgcttgccaatcagggtacctactcaataatatcattgtccaaacaagcaaaactg

SEQ ID NO: 63983 - DNA, 589 bp, Glycine max
  Clone ID: PAT_MRT3847_28790C.1
cccacgctttcggggatggtatcgtggcctcgtcaatgcacatggattggggtgctcttgcaacagtctggcgggaagaaggccctaaagctctgtatgatggctggctaccctcagtctgaggagttgctggagaacagaaactttacattcttggatggaaaagattggggttcggctggtactaacatttgattgttaaatgattgacatatcctaatcatttttgcatgagaccactatgctggggtgtatgcatataccgaatgaggaccgtaatgcctccggatgtgaatctctgaaaaactgggggatctggtctaaaccatttcggatgaaagctcaatactctgagctaaaagcgactacaacgcttggatgtggagctcatgctggaacagttggccagactgtggctcacccacttgatgtctttcaccaaataatgcacatggtgggatgggaagatgctgattcaacctttgctggtgaggagaagagcaaactcgtgtatactggcatggacgatgcattcacgtataatgtgcctactgatagagttggagcattcttcaagggcctatttccc

SEQ ID NO: 63984 - DNA, 504 bp, Glycine max
  Clone ID: PAT_MRT3847_28791C.1
ttttgggcaacaataagactcagagcatccaagtttttaaccgaatagaagtatacgagttttaaacgactaacatagtgcacattgtgagcagatattaacggtccatgcaacgagtgccatggccgtgggcaaaacttaacgaacgcttagatatctcatatgcagccagcataaccaccacttcaacgatgctcatttcttgttggcggcagccttggtcaccttggcaccggctgggaccttcttctccacgttcttgatgacgccgacagccaccgtttgcctcatgtcacgcacggctgaacgaccaagaggagggtactcagagaaggtctccgcacccatgggcttggtgggaatgatcttaaccataccagcatcaccgttcttgaagaacttgggctccttctacaactccttgccggatcgtctgtccatcttggtcaccaactcaccaaacttgacggcaatgtgtgaggtggtggagtccagcactggggc

SEQ ID NO: 63985 - DNA, 405 bp, Glycine max
  Clone ID: PAT_MRT3847_28792C.1
gaacactgcacattatgaatgatgtaaatctatttaacgcagctcgtgctgtttcttttatgatccaactataatggttcatggtattgctccttgagctccaccctattaactccgtgacacttatattgataacaaaaaagagccgtgcattataaagatatcctctccttcctcatcatcttaccgtccttcacgtgcaacctactaatagatacttctaaggagcagcgagatccttagaagcctcacagaactccagattattgcatgcgggtcaccaacataccaatagacaagagccctcttggcgaacatcacagcaaacttggggctgctgcgacagaacccctccttatctgtggcgttgcagctgatcatgcttacaggacgctgaaccttacc

SEQ ID NO: 63986 - DNA, 146 bp, Glycine max
  Clone ID: PAT_MRT3847_28793C.1
cgtctgtcaaacttttaccccaatctctggctccatgactaggaatcttcctcggaaggattaaatgcatgtaaaacgctaggcgaccccacaaatagtggaccaaatactacccggctccctaaactatacatagctataatgag

SEQ ID NO: 63987 - DNA, 379 bp, Glycine max
  Clone ID: PAT_MRT3847_28794C.1
gaacaggaagaagaggggccacgtcacgccgtggccacggaatgaatcgcgaaagcacagggaagcaccgatggaggacgcgggtaacggcgagaggcatggacgcaaacaggatgctcgtgcgacaaataacacccagaggttttttttttaggcaggaatgcgctattttcacaaaggtcggtttaaatcccactcccggatgcggaacatcgacaagctgtggaccctgggcccgcaagaagtgaaggacgagggctccaaggagaacagggggccgctcagcgacgtcacggaggtggggtacttgaaggctctcggaaagggcgtttcgtcgcagaaccagaccgggggggggcaagccaagctctattccaag

SEQ ID NO: 63988 - DNA, 275 bp, Glycine max
  Clone ID: PAT_MRT3847_28795C.1
ttctatctccaccgtccacaatttcctccgaaataaatgcaccaccaacaatatatttcattcctcttccacaagcattccctctttcttgcatgatcatcactaccactctttcttattatatttgccaatcattctcatccaaattaattgtcatctaatactcccatcaaaacatcatattcacaagccgaaaagatctctcatcatatccacttttgtgagctattcaattaatttaaatacatcagcattccctttttataaaccacttc

SEQ ID NO: 63989 - DNA, 397 bp, Glycine max
  Clone ID: PAT_MRT3847_28796C.1
ggctcgaggtcaccttcaaaaccagtcaacctacgtgatgctgatctcatccattttagggataagtaccacaaagctcctgacggttctatcacgaaaactacagcccaggaacacgttttggtagccaagacctaacagattgcatgcttacaacagtagcatactgattgggaagcttgaatttggcattgtagccggtccagtagtctcaacgctggtataccggatggatctgcacttgatgatgactggcactgcctgaacacgtggctgagaccttagagacacattgggggccctcgtctcaagtcgggatgaaccccatgatgatctttgcaaacatttgcaatgccaggattaatattgaacagatggctgacgcttaagctcaagc

SEQ ID NO: 63990 - DNA, 930 bp, Glycine max
  Clone ID: PAT_MRT3847_28797C.1
tacgtgagttagccgaaagctggaaggcacacattctgccgcctcgttttgctccacgtccgcattgccatggaagcctccttgggagtcaagctctgggagtctcctcttttgtctccctcactccctcttcttccttctctcaatctccacctttccctcttcaacgcgcctcctagctcgcagtttcttctcagacaccgttcccattgataacaaggaaaaggaacaacttgtaacttctgtcaaacctacttactcccctactcctcccaatcgtcaccttcgaactcctcacagcggctaccatttcgatgggactactcgcaaattcttcgagggttggtacttcaaactttccattccggaacggaggcagagtttttgcttcatgtactccgtcgagagcccatcctttcgtaaaccactgacgccgctcgaagtggcccaatacggctccaggtttactggtgtcggtgctcaaattctcggtgccgatgacaaatatatttgtcaattttctcctgaatcacaattcttctggggaagtaggcatgaactaatgttggggaacacgttcgtgcccaaccaaaattctaaacctccaaacaaggaggttcctcctcaggaatttaatgatagggtgctggaaggttttcaagtcacccccctttggcatcaaggttttattcgcgatgatggaaggtcaaattatgtagagacggtaaagacagctcgttgggagtatagtacacgtcctgtatatggttggggtgatgttggttctacgcagaagtctactgctgggtggcttgcagcttttcctgtttttgaaccacattggcaaatatgcatggctggtggactgtcaacaagttggatagagtgggatggcgaaaggattgagtttgataatgctccatcttattc

SEQ ID NO: 63991 - DNA, 335 bp, Glycine max
  Clone ID: PAT_MRT3847_28798C.1
aaagagacgctccctcgttatcactccaatttagatttacgaaaacgaaaaggaaaattaagctcgggctcattcatatcgaacattgacacaagactactacgacgaatgcagatacatgactccagcatactttgttttcatttcatcatatgacaaccttatccgttactttaatgtttcttgatccatacttaatttactttattattgtatatttatctcttccatttacaaaaaaaaacatttgtgtaaatttccttctttgaagtaaaaataaattaaatatgtactgaaaatgcaataatattgtgctttattagccatttataaac

SEQ ID NO: 63992 - DNA, 288 bp, Glycine max
  Clone ID: PAT_MRT3847_28799C.1
cactttgttctggtattgacgcaattatattaggaaaaaagttggttgactgtttttgcttaattgacttctaaaatgttcaaattgtctagttctaaaagtttactaaatgcctagtgcagttaaacatactcttgtttaagtgtgtgttgctaaattttttactgtcattactaaataatctgtgtggcaaaatgtgtgtcagcacttttccctccttttttatctcctattttcaggagtcaaatgtagccataaactgtatccttgtctgacactttagctaaa

SEQ ID NO: 63993 - DNA, 432 bp, Glycine max
  Clone ID: PAT_MRT3847_2879C.1
aaggggaaaggaaaatctttattaaaagcaaccctggcccgaaaagggggccctttggcccccaacaggcaaaaaaaaggcccaaagcggccctttttggggaaattaggggagcccccctggaaaacaaaccccctttttctaaaaaaccatttaccccccaaaaacccaatccaaataaaaagggttttggggccgtttattgggagggaaaaccccccaaaacttccaaaaccggggggggtttggatttttttaaaacaggggaaacccaaaagtttcagggggcccccccccccctttggggggccctgggttaaaatcccaaaccaagggggggggggaaggcccggccttaacaagggaaggggccgcccccccaaaaaaagggggctggggggccttattaaaagcaaactttgcccggaccca

SEQ ID NO: 63994 - DNA, 279 bp, Glycine max
  Clone ID: PAT_MRT3847_287C.1
aaacactcaatcaaatgaatatttattatagttacgctttaagaacttgtgaattgaacagatgagctataggccatacaatacactgacgtgccttcggagctcatccttctcaaaataaacgtctgcaatgttacgtatccggtgccacgttagtcagctgggagacccatgctggaggcactttcctacggggcgcaggacgttaagtgatgcgtgtgaccgagatccactgcggcgtagagcgtgttacagaacctcatcatgtgcttgacatat

SEQ ID NO: 63995 - DNA, 321 bp, Glycine max
  Clone ID: PAT_MRT3847_28800C.1
gaaaaaaacaataatcctttttaaatgagaaatcacgttaaccattttttccccccgtaataaacaatggcattaatgcgtttcccatccttgggaataacttttagcataaaagggttaaaataggctcatgcattatcagtttgccccgggggggcctgtccccccaaatcatgggttagaccatgcccaaattttagttttggccgatcggtcgcccctttttttacctggtttttaagggaaccaaccccataaccgggccctttttcccaaaaacgggccggggagactttcatttcatttttccgagcaaaaatt

SEQ ID NO: 63996 - DNA, 550 bp, Glycine max
  Clone ID: PAT_MRT3847_28801C.1
tcttccatacggctgcggaagacgacagaagggggacactcctgaagaggatgatgagaaaagcgtaggggtggttgatccctcagaaatcatgaagggcagcaagatgtactacaggtacatgggatcactcactgcacctccttgcactgaagacatcatttggaccgttgataagaaggtaagaactgtttcaagggggcaagtgaagttgctcaaggatacggtacttaaatattatgccaaatggaatgcaaggccgctgcagcccctaaatcaacgagcgatacaactttacgtcccaaagacaaagaataaacccgtgtattagtttttcttgttttgaaattaacatctgtattagtttgagcattgtagttttatttagatttatttgagttctctgtttgctagtaactattttcatttcatataataagtgttgtcttaagtggaagcacataatgtttatctaagggatttttttatatttgagatatatatatatatatattttattgattaaagaaaaaaattaataatttccccc

SEQ ID NO: 63997 - DNA, 278 bp, Glycine max
  unsure (1)..(278): unsure at all n locations
  Clone ID: PAT_MRT3847_28802C.1
gtttctgaggtgaccgagcagcttcttcaaatttcattttgaagttggtcaattcgattgacgcgcggggcatggtaaggcanattcaacttcacgccgccacgattggtttggtttgttgagattacattaccaaaactattcgatttggacatttcttactgtgcatgtttcataggcatttaaattgcatctccacacttctattgcaanatcaatactacttatttttcctttcccgtgtaatgtgattggtgtggttggtgttnntcagaatt

SEQ ID NO: 63998 - DNA, 341 bp, Glycine max
  Clone ID: PAT_MRT3847_28803C.1
aaaaaacaaaaaactaaaaaaaaaaaaaaaatatacaaaaaaataaacataaaaaaatggagggtaaattttatccctaagctgtcataaccactcaaactaatcaattacacaagtgatcttggaagacgaacatgcccaatctataatgattcatattacttactcagttctcacatcattggccattctctttccttccatctctattcttatcattttttagataaacgctttcctatatatatacctcatgtacatacgtcatgctcaactgatggcgatttgtcaccttttttttcacactctctataacactgcattgttcaacctgtactctc

SEQ ID NO: 63999 - DNA, 609 bp, Glycine max
  Clone ID: PAT_MRT3847_28804C.1
aaaaacaagggatatttcataccaataacatgattaacataaaaaatataacatggattctaaatcaattgttcaaaaataatttatttaaaactaataaaaaaatgaaatcggatcatcaacatgaccaatttaaactactataggggttgctttggggaccaacacaattgttggtacacccaacaaacccacgtgaaggggcaaaaatgccctttacttaattttttaaagcgtaattgtctccttttcccacttgacgttcatacagccattggcttcttctccctttgtttacatatcttcttcatcgggcctccgctcccaccgttcatgccactagtgactgcaaccgtagtcatcgccttgttctcctttgtcgccataagtctgtttttctctctggcggatttattgcacatgcatggttgggagggattggagatccgtataagttatacggattgacaatccatcaacaagtaaggactggtttagttcctcaaatctgtctatgccaccaagcaagttgatatactcattagaccattttccatgttttttaagcaaatgattgtgcaccaaagaccatgaatcttcacttatacc

SEQ ID NO: 64000 - DNA, 252 bp, Glycine max
  Clone ID: PAT_MRT3847_28805C.1
ggttctaatgtgagattgttcgctgctgtcactcgctcatcgtcatgggttgctctgtgcattgtgctcggtttttctctcacctgaaagtgtcttgctgcggtgataactgtggttgcggaaactcctgcaattgcggtaacgggtgctgtggctatatgatgtagccacacttcatctacactgactcaaccaacaacgacattctgttcatcagagttgcatctgttaatgctcaatttgacggtgctc

SEQ ID NO: 64001 - DNA, 660 bp, Glycine max
  unsure (1)..(660): unsure at all n locations
  Clone ID: PAT_MRT3847_28806C.1
attcccggngtcgacccacgcgtccggttccgaagagaacggcacgagaaattcaaattgagaatccaacacagcacacagacacaacagcatagtactcctaagaatattgcttgcacccgaaattcacgctaacacctctctacatccaaattgaaatgcactgcccatgatggcgggtgacagagcaccgagagtgactggcatgtgactctagcaccccaccctcattcccttgtcccgatgcacacgccaccgaatagttgcaaatccaacgaaaacgaagccgtttctactaacgaggagaacttctccgtgagaagctatctcacgacagcgcagtaatcagctgtccggcgagatcgtgacacgagcagtgctctttgaggctatccatggaagaaggaacctgctacggagcactaagatactttacaacacacgggcttcagactttccggagagagggccacggggacgccgaatgcggaagaggaaaaggaaacctagtttaaaggacgcatcaggtctatctggaaatctaattgcttagactgtgccgcggcgagaagattctgctgagataaaggaatatgatacgtgggagatagacgtacgacgctctcatgcgagagagaacgcgagcttcgagagcgaacc

SEQ ID NO: 64002 - DNA, 1125 bp, Glycine max
  unsure (1)..(1125): unsure at all n locations
  Clone ID: PAT_MRT3847_28807C.1
gacagagctactaatgaatccacaggccatggaaaaagcacaaaaggaagtacgaagcatcttgggagaaagacgagttgtcgcagagagtgatctgcatcaattggagtacatgagagctgttatcaaagagatatttcggttgcatcctcaagttccagtattagtcccaagagaatccatggaagatgttgtgatagaggggtacagaattccagctaaaacaagattttttgtcaatgcttgggcaataggtagggacccagaaagttgggaggatcctaatgcatttaagccagagaggtttttagggagtgatattgactacagagggcaggattttgagctaataccatttggagcaggtagaagaggttgtccagctattacttttgccactgcagttgttgagcttgctctagctcaactcctctacattttcgtttgggagcttcctcctggtattactgctaaagacttggacctcactgaagtctttggcatctcaatgcacaggagagaacatcttcatgtggttgctaagccatactttccatgaagactcatgatacagcaagcaagcatagaaaggcattgaattggactcaaatagttagtgtatgtttggattacagttgaaaaagtggagtttgtaaacttaagtttagttaaaaattaggtttaatgtaacaaaatttctgtttggaacgttttatattcaaaaagaaagcaagagaaaagttgctttagactcaacctcagtttggatgaaaacaatttgccagacatgctggcacaactttctatgggatgaaccccaatttggaaggccaaacacaaaccaaacacaccctaagttgtttggtacaagttaatgttaagcagttggtaacttatcaactgtgtaaataaaagtgagaagacaaaatgaatcattagcgaattctatgactggatgaacttggttctttggaagttttcactttctactccagctattttgagttgcttgatgaatagatagaaacatcttcacaaggtcacattcattcgcccttcacctncgtaaacgaagaaattgtaaatccaaatttttggacagaccccttgcatgaattttaagca

SEQ ID NO: 64003 - DNA, 844 bp, Glycine max
  Clone ID: PAT_MRT3847_28808C.1
ccccaacccacaaacatttactaagatcaatccacacactccatcatcatgcatcaagcaattccctatagatcatggcgccctctccataaccccaccacccacttctccccattgccattaattgcacattcccacaacgatgatgataaaatgaggaacattgttaacaataataataataatattcattcttcagcagggagaatggtgctcaacatggtttctgagaacgcggttatagtgattgggagaagaggctgttgcatgagccatgtggtaaagcacttgcttcttggtcttggtgttaaccctgcggtttatgaggtggaggagaaagatgaagagggtgttgccaagcagtagggtgttgccatgcatatggaaggaacaattcgtagtgatgaaggtaacgcttcacaggggtaggtgcagggggatgcggtttttagaatgggataggatcatggaggattagatcggatcatggctggttcctatcctcaaaaaagctggggctttatggctatgatgtcttcatcttcccttttttttttttaatgtacaatagttatgctgaggttcaaaacctatgaactcgttcatactacttcaatctcttgtcactaggtcgactttgattttctcttataagtctttagttttgtgacattatattagattgtttttatctaatttttcaatttttatccttggtagtttgaggatgtttaatttctcttcttttttgtaattttccttaatgttggttaagaatcactttcttgagccttcaatttggctggctattttgatgacatacatgaattctgatgtactggat

SEQ ID NO: 64004 - DNA, 1249 bp, Glycine max
  Clone ID: PAT_MRT3847_28809C.1
ccacagaacggctgcgagacgacgatcagaagggggaagtgtgcttgatcctaatttcctttaacttcgaattcatagttttctttctttctcttgtggccggtgtgagggagactgagaccgaagcaagagtcgatggcggacccctactactcatacggtgctccggtaggcgctgacggagctagcattgcaaggagcagctttgctggttatatcccctctgagccttcaaattccaccactgaattgaggggcattgggtcagattacctgcagagagatataggcttgttttacagtgctgatgataccttgggctccagagttcattctgagcctgttaagggttattcgcctcttgcagatccttgtctgagtaaaaaacgagatacaacaccattgggcattaataatggtgttcctgatgtaagcagtgaaagaccagcttctaaaagcagttatgacggtctaccaatttcggcggcagactcaaacattctgtttgtgggtggacttccaaaagactgcactagaagggaagttgggcatcttttccgtccctttattggctataaggatatcagagttgttcacaaggagcctagacgtagtggagacaaagctatgactttgtgttttgtggaagtttgttgactccaattgtgctctcactgccctggaaaccctgcaaggctacaagtttgatgataaaaagcctgactcaccaactttaaaaatacagcctgcacactttcctttccggctaccatctgatcatggcaacagcttatcaacatgatacactgactggacattgatttcttgggagagaatgtatttgatggtgctcaaatgtcagatacagatattcatttttagtttccaaattttaggttaggcctggctgttgaatatagtatatggatgcaagaattctggctacaagccaattttttaatctagaatattgattattgccattggataattttcattattatattttggcccgtcagtaaagcctctccaatcaccggagtaaggctgtggctttgtacatttgagtttttgaccctcttatctctaactatggctggagaatgggagtttcatgtatttaacctttcattttaatcttttatgctctagcagggaattgtaacaatagttaggacttgtgaaaataataatcatcgggtatccctttgtgtgcactacatcaatgagtagtcccacaaaaagtaaa

SEQ ID NO: 64005 - DNA, 392 bp, Glycine max
  Clone ID: PAT_MRT3847_2880C.1
atcaacatcactgctagcagtgatagtagaaacaccatcctgactattaaaatatccttcttaatttctggcttgaaatctgcagccatggttccctggtggctttgttttgttccaaggattgtatctttaggaatagaagctgaattatccgagggaagatattcattgtgtcctaatgttgagaccatcaaaatcatcctgggacaataattgtagttaaagtttgcttcccaatttcaataaattaagcttttaccattctatttcaagcaatcctatgtccatcttataataagattgtggttttaaatcacggttttttagatttatttgaggttaaaattttctgatttatataaccaaaagcttgaagcatgcttggcaatctg

SEQ ID NO: 64006 - DNA, 500 bp, Glycine max
  Clone ID: PAT_MRT3847_28810C.1
gggtttgcactttggttttctataagtataaagtttctaccaactcatatttggtgggacttagagaaatagattttctgcagatatctctcaatttcccctcagtttctttactatgttttcttctttgaggaggatcctaatttctttgttatctagcggggtccccttcttttttgattgacaaaggtttctgcatatgtgatcagtgttcccattgccatgaataaaaagtatgttgttttatattggatacaagaaacctttaagataacaagtaaatacatcgagttttgaagaggcattcatacttcacagttcacattgctaaatgtctttaacttttaaacgattctcatgtatatcaagatttctagtgtacaaagcatataactaatgctagttctttatcatataacagatgaactaatgcaacaaatataactcatttccacaaaacatcttgcaacaaaatgaacttctactctccaagctcttat

SEQ ID NO: 64007 - DNA, 500 bp, Glycine max
  Clone ID: PAT_MRT3847_28811C.1
cttccatcatcttgccttcctgttggcggcaacgggataggaatttatttccaaattatggttattaatccagggtaacattgactcccacccaatccgtgatatgcgaatggacctctggcagtgttaaatttcacctaactacctggaggggcccaagaatatatgcctctatcacccacatcacatatcactttcacttcaagtttgaaaattttcccaagatcaccggcgttttaaacaatgaccggtctcggcttatgtcatacatcaaaggactcctgcaaaactgtttaacttccactaactccaaattgacaccaccaaaactacatatttggttattgatactcgcatctcataatttatcatccaaatcaacaaaacctccactacaaattattgcattcaccccgtttgaaatgtgggcaccctgctcatttgcaatttgcttaaagaacggttctttcaggctattgcttatgaactgtgcacacctt

SEQ ID NO: 64008 - DNA, 304 bp, Glycine max
  Clone ID: PAT_MRT3847_28812C.1
gttcatgcttaaagcatgatctagagtcacctttctccgcatatgtaattacgagatttctgaagaactaaatctcatttacagatatcaggtccgaagaggtatgtgagcgtgcatcaatacactctacagatgatatgctctcatgtctatatccaaacgtacaagctgcttctcgctgcatggtgcgtaaccacttcatttatgactgagactgctttcagtacgcctttggctatgtccagtgcactagacaaattgtgtgatcaacactatcgaccacatcagcgacttatggcacggc

SEQ ID NO: 64009 - DNA, 402 bp, Glycine max
  Clone ID: PAT_MRT3847_28813C.1
cccacgcgtccggcgagacgagtccgtttctaattaatgataggtgtcaagtggaagttcagtgatgtatgcagctgaggcatcctaacagaccggcagacttggctattttggatgaaattgattctggtttggatgttgatgcgctcagggatgttgccaatgcagttaataggattctcaccccagaaaagtccttgttgatgataactcattataggcggattcttgatcttttgaatcctacacatgtccatgttatggacaaagggaaaattgcaaggtcaggcgacatatcgatgggagaagctattgaggctgatggatatgaaacagtctctgctttaacataatacagctagtatcgatggcagtattgcatgggctggcattcagtaattg

SEQ ID NO: 64010 - DNA, 425 bp, Glycine max
  Clone ID: PAT_MRT3847_28814C.1
cgtattcttggctacccacgcgcctttctgccgccgccggccagctcatggcggggggggttttaactaactggcgcgttgaccaaccgccaatcaacatcagtggacgaaacaatgaccgaagtgcaagcttatcagcatggaatgatgctgaccgcacagctgctgatgatcaccggcgcacatggggacatcctggtggcgctgatcaacagagcggtggtgatcgtggcgcacgcagcgttggagaacaccgatgatctgtacttggaccaagaagagggcactggatgctctcctaccggggctactctctcttgaacccaatcttttgtgaggttgtatagaataagggaaagggtcaaacatatgaagaaatgaaaggtggcagttagtgttctactggctacaaaagctaatgccct

SEQ ID NO: 64011 - DNA, 482 bp, Glycine max
  Clone ID: PAT_MRT3847_28815C.1
tttggattcaaccaaaatcaagataaaatataacgcaattggttttattctccgaaccttttttttttgtgtgtgttcagttatttgtacgtgatagaattagagagaaagagacaaactgagttttgtgtttgattctttgatttgaaaataccatgcatgccgctttccattttaaaaattaaaaacaaggtctaattttcaattgggtgtccatgcctgtacatggctgtgtctcttaaatagtctgagctataaatgtacacagattgcattttgcttatgttagaatgttatattatgcagattgcagagtatagcggcaacataccaggatcattatgacttgtggctgctttggagccaaatcgataaaggcaaaacgcccttcttatgttcctggtgaaattgatggctatccgctagataatgtcaggcaattttctgataaagaactgagattggcaactgataattataat

SEQ ID NO: 64012 - DNA, 458 bp, Glycine max
  unsure (1)..(458): unsure at all n locations
  Clone ID: PAT_MRT3847_28816C.1
caaatactacaacaggtgcgtgcctctgcctcttctttattcttttctcaatatttgcttttttatccttgcgaaatttggtgttgtaacttaaaaaaatgcatttttaaatcttaattttgtaagataatccttatattagattggtatcaactccctagttagtttttggcttgaattttgtaagagagagagagagggttttgttctgtgattgttattgtttttttattgtagttataggcagaagagaagagggtttttggagattttttactttttttttattggcaaatgttagtttgtttgttttgttagaaaggtcaattgagggattcgatcccgcgacttaactccctcccttatcccttgatccttacccaaccactgggctaaccttatatctccagagggttngtagttttttanagagagagagagagagagagagagagatt

SEQ ID NO: 64013 - DNA, 1759 bp, Glycine max
  Clone ID: PAT_MRT3847_28817C.1
cccacgcgtccggttttttttgaagttttaatctttttggattcaaccaaaatcaagataaaatataacgcaattggttttattctccgaacctttttttttgtgtgtgttcaggtatttgtacgtgatagaattagagagaaagagacaaactgagttttgtgtttgattctttgatttgaaaataccatgcatgccgctttccattttaaaaattaaaaacaaggtctaattttcaattgggtgtccatgcctgtacatggctgtgtctcttaaatagtctgagctataaatgtacacagattgcattttgcttatgttagaatgttatattatgcgtgggattacatcacgtttgagtttttggtttctgattctaaggcctattattggctcgaggtttccaaccttaattctcttatcaaccaggccagattgcagagtatagcggcaacataccaggatcattatgacttgtggctgctttggagccaaatcgataaaggcaaaacgcccttcttatgttcctggtgaaattgatggctatccgctagataatgtcaggcaattttctgataaagaactgagattggcaactgataattataatccaaacaataagataggacgaggaggttttggaactgtttaccagggaacattaagagatggaaggcatatagcagtgaagactctctcagtttggtcaaagcagggagttcgcgaatttttgactgaaattaaaactttgtcaaatgttgaacatccaaaccttgttgaattgattggattctgcattcaaggacctagccgtacattagtctatgagtatgtggaaaatggaagccttaatagtgccctacttggcacaaggaatgaaaacatgaaactagactggagaaaaagatctgctatttgtcttggtactgctaagggtcttgcatttcttcatgaagaactttcaccacctattgtacacagagacatcaaagctagtaatgtactacttgacagagatttcaatcccaaaataggtgattttgggctggctaaattatttccagatgacatcactcacattagcacaagaattgctggaacaactggttacttagcaccagaatatgcattaggtggccagttaaccaagaaggctgatatatacagctttggggttcttatacttgaaataattagtggcagaagcagtgccagaaggacaaacgggggaggatcacacaaattcctcttggaatgggcctggcaactttatgaagagaggaaattgttggagtttgtagatcaagacatggaagaatttcctgaggaagaggtaattaggtacatgaaggttgctcttttctgcacacagtcagcagcaaatagaaggcctttgatgatacaagttgttgatatgctatccaaggcaatccaactcaatgagaaagaacttacagcaccaggattcttcacaaatgaaggagaatcctctagaaataactcaaaccctgtctcttcatttattactattactcaagtgaccccacggtaatgtgaattgcagggttgcaaatggaataaaaaagtaatgtttgttttttaaaagattatttgatagccgtctattatttttgtttcgatttttttttcaaagaatataatataacatggcttgaaagcaatttcgtgcactagtgcatgttgaaaccagtagagaaaaactttggcatttgccgagtaatacggtaggtaatcggga

SEQ ID NO: 64014 - DNA, 254 bp, Glycine max
  Clone ID: PAT_MRT3847_28818C.1
cttctgttaattcttatcttcttaataccttataatcttctatagttctatccatgtcactttaattctctttacaagaataacacacacaactagatagttaataatttttgtaaccaggttctttggatggtttatgggttatttagttgtgtgtgttattcttgtatacaccattaaagttacatggatagaaccatagaagattataaggtattaagaagataagaattttccgaagaaaaaaaaatgta

SEQ ID NO: 64015 - DNA, 726 bp, Glycine max
  unsure (1)..(726): unsure at all n locations
  Clone ID: PAT_MRT3847_28819C.1
tctcgctcgagttgactgttttgcttatcaattactatcactattaatggcagttcttagttctggagaattccttggggcatttcttgttttcgttgtaatccactactggaggctcaacagacacaccccaattgctaagtggcccattcttggcatgttacctggtgtattcctcaacatgcccaccatctttgattatataacttctgttttgaaacgtgaaggaggcactttcatgtttgaaggaccatgcctatcaaacatgaacataatgtttaccagcgacccaatgaatgtgcaacacatcaccagcacaaaatttcaaaactatgggaaagggaatgattttagagagatttttgaaattctgggagatgggattttcaggtccgattcccagttatggaattataacagaactatacttcattcagtttttaggaaggcaagttttcagttgtttgttcaccaaacaatcatgaacaagattgagagttgtctacttccatttcttgatcgtggatggaaagaaggaatggaagtggacctgcaagatgtattccaaaggttaacctttgacaacatctgttccattgttttaggatttgatccgaattgcctttccatggaattcccagaagttgcatgtgagaaagccttcactgaagctgangatgctctgctctaccgacattcaggccaaaatgtttatgggagctgatg

SEQ ID NO: 64016 - DNA, 158 bp, Glycine max
  unsure (1)..(158): unsure at all n locations
  Clone ID: PAT_MRT3847_2881C.1
gcacgagggacactcncnnnngnncncncgnncctctcatattcccaaccccttttgttttgcttagagttagagaactgcacatcacacccaaatggaagagaccaaatccaagttcaagaggatttgtgtgtactgtggaagcagttctggtaaca

SEQ ID NO: 64017 - DNA, 421 bp, Glycine max
  unsure (1)..(421): unsure at all n locations
  Clone ID: PAT_MRT3847_28820C.1
ccttctcgtccggtgcgttgtatggaaaacgagaaccaaaatgggctacgaggattccaagttggagatcttgaaggagatctgcaagagctcctccaacattggtggtcacattaaaggccaagggacagccactgcttctgctgacacttctgacaatccttgcatcaatcagagcatagctgaagcgactgaagagaatttggaagaatatgaggcgggaatggtagcttgcaatgcatcgaccaatacatcgatgactattacaggtgcgaatagaggacagattgtgcgacaaattggggacacattgaaggccaaggtgaaacctttgggtagactgatgacaatagagatggcaaaaagacttgcagaaggaaatgangaaattgatgagagtgatgatatgcgtgatcattgc

SEQ ID NO: 64018 - DNA, 366 bp, Glycine max
  unsure (1)..(366): unsure at all n locations
  Clone ID: PAT_MRT3847_28821C.1
atcataaaccccctccagagaacaagaatcaaagaatggcaactatgactggtgtgagcctttcaagccccagggttttcttcaacgcatcaccctcaccgcaaaactgtacacttagtatatgcaatttattggtcgcccattgcatgctttgttagactagcaacaatacttaccagtattacgttgggtttgttggagtaaacttcaatggtgatgattatacttcttttatttgtagcaactgtaatacgaattttggggatttgcataaatatttgttttttcaatggannanannnnaannnaaaaaaaaaaataaaaaaaaaaaaaaaaaaaaaaaattaaaaaatataataaatttaa

SEQ ID NO: 64019 - DNA, 159 bp, Glycine max
  unsure (1)..(159): unsure at all n locations
  Clone ID: PAT_MRT3847_28822C.1
gaagaatcttctttcttcacgattccgagaagttggtgtgatctgatgcgagtgttaanaatataagctgatgagaaaaaagaaagaaggggaagtggcattttttttttttcaatggagtcagatcttcagcagcaccctcccatgtttttggatcac

SEQ ID NO: 64020 - DNA, 455 bp, Glycine max
  Clone ID: PAT_MRT3847_28823C.1
cagagaaaacgaagctcgcttcttagcatttcaagaacacgagttaacatctctaccctaggaaaaaacatcccacctattctaaaattaaacccgcctaacctacaatctatcccgccaaactaaaaccctatcccgcccctctataaccaactccaggcctttatttctgaacattgacccttttaggtggatataccacgcttttaggcttcttcacggcgctttacgggattcttcttggccttttcaggagtcatcttcttaggctcagcgcttaccttcttgggctcgggcttaggggcttagccttggccttgggggtcgcaactttctccttgttatgggcaacagctttgttcttaggagcaggacttgtgggctgctaagccggctttttggtgggcttatccggagctttagggggtttatcgggagcagacttagctttaaca

SEQ ID NO: 64021 - DNA, 172 bp, Glycine max
  Clone ID: PAT_MRT3847_28824C.1
cagcatagtcacactcctttctcagccagaagagaatagattgcagagaaaacctgacgtaccagatgtagcagaaaatacaagttatagcaccacctttgttcttctttacaatgctaaaaaaaaaaaagaatacccacttaaagatataagagatcccgagaaagttttt

SEQ ID NO: 64022 - DNA, 325 bp, Glycine max
  Clone ID: PAT_MRT3847_28825C.1
tgaccttggcacgaagttcgtcgccaatctcacctaagatcggaagaactggacgtgcccttggctgagacctgatggctagacccaacatactgttgaggactacaatgacaacggagccatggctccaatcctcgtccacactgtgctcatctccacgcatcatgatgagactgccacgaatgatgacattgcgactgatcttacagaacacttgattaatcctgtgattcctgagaacaccttgatgagaataccatattccatttgaacccttctggacacgtatgtcattggatggccacatggcgatgctggtctcacc

SEQ ID NO: 64023 - DNA, 697 bp, Glycine max
  Clone ID: PAT_MRT3847_28826C.1
tccggtccggagttcccggggcgacccacgcctccggtgggggtatttgggtcaacctgcataccttatgggagaaccactgctgatgctgggaatgccttttattcttctgtgccaagtgagtgatagtgtatttagtgtctgcgctagtgtgtataatgtgttcagcgatatgtgtttgccctttacagaatcttcatgtgatactattttgtgtgttcagggggggcgttctgggcaactttcctcattgctaacattgctgcgttaattgcgaggcgggctatgacaacaggcacattttcttgtgtaaaacaggcaggtggtcttggttgtgtccctcggcttaaaataattcatacctctcggaaattcatggggggggtctatatccctgtgataaactgggttctcttggctggttctttggtgcttggctggtctatatccagcattggtgagattggaaatgcgtatgggaatgattttgtgtcaatttctttatttttatctccatagataattttggtaaaggtatcagccatatacacatattgcgtatcaaattgtgaataatgtgaccttttcaatggggatcaactggtatagggtgcgtaagaagcttatagatactgcgattacttgggaagacattgagcctctcttataatttcacttgggtatcctcaactatagg

SEQ ID NO: 64024 - DNA, 293 bp, Glycine max
  Clone ID: PAT_MRT3847_28827C.1
gcataggggaggggtgaattcaacaggaaagtcggcagactagaaaaaagaaaggagcaggaaaaaaaaagaagggagaaagaaactaagcaaatagttagggcaggaaggtaaattgaaaagagagggaacatgaattaaggggaaaaaggtgtagcagggccaaagaggggggaaggccaaccatgcccaggagcacgggaccggccataagggggggcaaacaagggggagggggcggttcatgggaaggggaacaatgtgaaaaaagggcaaaagctccaagtcaggaa

SEQ ID NO: 64025 - DNA, 373 bp, Glycine max
  Clone ID: PAT_MRT3847_28828C.1
cccacgcgtccggaaacaaataaaaaactatcaaaaaaaaaaaaaaaaaatataaataatgggtgactctattatacaaggatcatagctaccaaatgtcagaatatacctttggatcagcgatattccaagtttcatgacataaaaaagcctggcattaaggtaacgacacgttactgtagtatttatcgttctacacgcaattactttgcaaatgacagacttacatcaattgaaaataatcttagctaatgtgctttacttcagttcacatgatatcatgaagctcgtgatgagaaaatcatccaaatagacttgggaactctgataagaacactacttacactttacactcccattattaccaactttc

SEQ ID NO: 64026 - DNA, 272 bp, Glycine max
  Clone ID: PAT_MRT3847_28829C.1
atcggatcaatcttgaccggtaactgcaaaaaatccagtttttcatatagggggggacaataaaacttggagtaagaatggttataaatttttcctgcgttaaattgtgattccctcataattccaaaaaacattcgaaacgcaatcataatgtgtaaaggctggggggcctaaagagagaactaacttaaattgattgcgttcccctccctgcccgattttcatgaagttaacctttaataaacaaaccattaaagaaaattcccactccc

SEQ ID NO: 64027 - DNA, 361 bp, Glycine max
  Clone ID: PAT_MRT3847_2882C.1
tgactttcacggaggaaatatcactcattggagtgaggtccttggggaacttaccaaaataggtaaactgtctccttatgatgttgaaactcccaatggttccatgtaggatcataaaattgaccaatctagaattgaaatttccaaaagcacatttggatgaaccataaaggctacacatctattggcaaaaattttgactaagggcacatataaaacaaaaattgatttgtagctcactcatataattaactgaattattaaaatgggggccacaggtgcgattcctgagaatacatgcatagcatagaggcccgctatagaatacgttaataacggggcctgccatttgtgatattta

SEQ ID NO: 64028 - DNA, 494 bp, Glycine max
  Clone ID: PAT_MRT3847_28830C.1
agaaaaacacccactcttattgacgcagcctatagaataggtagaaactggcgaaaagagtgtgttacaaagtgtcttgctggcatttcttgcatgacaacaatgatttatgtacagggcatacttttaactacaattgccttttttagaaggacaattagccaaaggacacccttcatggttattcccccaccaattaagcgtgaagccgtttttagagcaaagcaagaaacagcaatattgacataaaagctgcttcacctttaagaccaccaggacagcacataattgcagcggttgcaccattcttgtgtgcatatataagctataaaacctgagaaaaagccaactactgtccaactagttaaggacacagcatttgcaagtggtattatcaatgtaacacccaacaacacatgcatgagaattagatgtatccatttttgttcttgaaatgccttgatagcaaaccaaactataaagggaacaatatc

SEQ ID NO: 64029 - DNA, 248 bp, Glycine max
  unsure (1)..(248): unsure at all n locations
  Clone ID: PAT_MRT3847_28831C.1
aattgattaagcaggagaacccgcccangacagggggaggaaaacaaaaacctacggagggagcccacaccgcagcgaaaaaacaggaggaaaagcggctggcggcaccagcaaacacggaggccgcacccacaaagccgggacaggccggagagagagaggaaaaggacgccaagcagcgcacacaagaggaagaggagacgaagaggacaacacaggagcgaacggcaacaacctctgaaagggga

SEQ ID NO: 64030 - DNA, 1138 bp, Glycine max
  Clone ID: PAT_MRT3847_28832C.1
gaccccatctgttcggtcagtggtgcagccaactaactcaacaattctgaacaatgtgtatagctttgtttctttggcaatgccacccactgtacccttttcttcttttgaataacagagatgaatatcacaataggcctacgaagccagtgtcttggtgggaagattgtgatattttggcaggaagggacgaaatagcaatgggaacatggttggcttgttccacacaaggaagggtggcttttctcaccaatgttttggagcttcataccctccctgaggccaaaagtcgtggagacctacccgtactatttctcaagagcagcaaaaaaccgaaagaatttgcggaaagcctaaaatcagaggctcattattacaacgggttcaacttaatcgtggctgatattgtctcgaattcaatggtgtacatctccaacaggcccaagggacaacctattaccattcaagaggttccaccagggttgcatgtactttcaaatgataagttagattcgccatggcataaggctctgcgcctagaattcagtttcaaagaacatgttgccaaacatggggaaggtgagatacctgtgaaggaggtgattcaaaagctaatgaaggacacagttaaagctgacaaaaactcactacctcgtatttgttcacttgattgggaattcaatctgagctccatttttgttgaagtagaaacaccactgggtttatatggcactaggagtagtgctgcattaaccgtaagatcaagtggtgaagcaagcttttatgaggtttatctggatgacacaaagtggaaggaacatgttatcgatttccgtatcgggaagttgaactatgtcacggatgaagtagcctagggcaaaagtaatatatagcacaatgctagctttactatgcttaattaataaactccatcactcataagcgaggaaggatcaagatcaattgatccattctcttcttatttatgtaattgatgatattgaaatgatatgccgtcaataagctagcacggctaacagagtgcatgtatgaagattagctaatgaaataaagtttatgatgaataacatacaaaattgtaccggccaaatggaatttaattctcccagcttttact

SEQ ID NO: 64031 - DNA, 1132 bp, Glycine max
  Clone ID: PAT_MRT3847_28833C.1
agcaaattaattagcttcaccatggactcattgttacttctaaaagaaattgccacttccattttgatcttcttgatcacttgtctctccattcaaacattcctcaaaagctatcgccagaaactcccaccggggccaaaagggtggccagttgtgggtgcactccctctcatgggaagcatgcctcatgtcaccttagcaaagatggcaaaaaaatatggacctataatgtacctcaaaatgggcactaacaacatggttgtggcctctactccagctgctgctcgtgccttcctcaaaacccttgatcaaaacttttcaaaccggccctccaatgctggtgcaccccatttggcttatgatgcacgggatatggtgtttgctcattacggatcacggtggaagttgctaagaaaactaagtaacttgcacatgcttggaggaaaagcacttgatgattgggcccaaattcgaaatgaagagatggggcacatgcttggtgcaatgcatgattgtagcaagagagatgaggccatggtggtggcggtgatgttgacatattccatgaccaacatgattggccaagttatattgagtcgtcgtgtgtttgagacaaagggttcggagtctaacgagttcaaggacatggtggttgagctcatgaccgttgctggttacttcaacattggtgacttcataccctttttggccaagttggacttgcaaggcatagagcgtggcatgaagaagttgcacaagaagtttgatgcgttgttaacgagcatgattgaggagcatgttgcttctagtcacaagagaaagggcaagcccgatttcttagacatggtaatggctcatcatagtgagaactccgatggggaggaactatcgctcaccaacatcaaggcactactcttgaacctattcaccgcaggcaccgatacatcttcaagtataatagagtggtccttagccgagatgttgaagaagcccagcataatgaagaaggctcatgaagaaatggaccaagtcataggaagggatcgccgtctcaaagaatctgacataccaaagcttccctacttccaagccatttgcaaagagacctatagaaagcacccttcaacacccc

SEQ ID NO: 64032 - DNA, 363 bp, Glycine max
  Clone ID: PAT_MRT3847_28834C.1
gggggaacaagggcgcataatttattaaagcccccaaagaaaaaacaacatagtgaaattttttaaatgacttggtgacccccaagttgaacaacattaaggggaacttgggccccttatttaaacccttttttttccatttaattagctgggaccagcctaatttgttggaagggaaagaacctcctgatgtttttccaggggttaggaaacttaaagggccctctttcgcccttggggccccccaagaaaaccctccattgggctccaaagagaccaaccatgtggtttccctgccatattaacttacttctcgctgctgtttgtatgaaactgcatttggaggggaaagatcttgtggat

SEQ ID NO: 64033 - DNA, 807 bp, Glycine max
  Clone ID: PAT_MRT3847_28835C.1
cggctgcgagaagacgacagaagggggcgaatagattgcaatattatgcaataatgtgaaaaaagttgaaatatgcatgcttttcatttttcaatcttcccttgttaaaaggagagactcactcacttccattgtcactgctcctttctcggatctctctcttcttcttcttcgttttctcttcgcgagtgagagatggcgcaaattctgcttcatgggactctccatgccaccatcttcgaggttgataggctcaatgctggtggtggtggcggcaattttttcagcaagctcaagcaaaactttgaggagactgttggtattggaaagggagttactaaactctatgcaaccattgatctggagaaagcaagagtaggaaggactagaatcatagaaaatgaacatactaatcccagatggtatgagtcttttcacatttactgtgcccatatggcttcaaatattgtattcactgtgaaagatgataatcctattggggcaactttaattggaagagcttatgtgcctgtttcggaggtcttggatggtgaggaaatagacaggtgggttgaaatattggatgaggaaaaaaacccaatactggagggttcaaagatccatgtgaagctgcaatattttgatgtcacaaaagaccgcaactgggctcgaggcattagaagtcctaaatttccctggagttccctatactttcttctcacagaggcaaggatgtaaggtattctctgtaccaagatgctcatgtgcctgataatttttgtacctaaaatacctcttgctggaggc

SEQ ID NO: 64034 - DNA, 646 bp, Glycine max
  Clone ID: PAT_MRT3847_28836C.1
aaaaaaaaaaaaaataaaaaattaaaaaaaaaaaaaaaaaaaaaaaaaaaaaaaggggggggaaaatataaaaaaaaaaaaaataaaaaacacgtgtataaaaaaattatagtatttttttatagtgtccccttttgttcacttttttggccgtttttttacaattttaatattgggaaaattgtggtttttttcttttttttctttttgtaaattttccggtttttcctttttggtgtaatttttaagaggtccccatgtgtccctttttttaacatttgcctaatcttaatgctgttggctttccctttttttctcctttttttgccccattggtgtggtgtttgcttgtcgcttttatggtacttttgtgtgcccttttttccccggttcttttttttttttccttttttttttccccacgttcgtggttttttctttttttttttttaattgggtgctttttttggtgccctttatttcttttatggggctttttctccgagttactttttaatagtgttattgggcacttatttgaattttcttttattagattttttttccctttttgcctccttaagttgtttttctttatttgtggactttttttttccctttttgtccctatttttacaattttttt

SEQ ID NO: 64035 - DNA, 2908 bp, Glycine max
  Clone ID: PAT_MRT3847_28837C.1
aagctcgcgattccgctcgtgcggctgcgagaagaccacagaagggggccaatagattgcaatattatgcaataatgtgaaaaaagttgaaatatgcatgcttttcatttttcaatcttcccttgttacaagggcccagactcactcactcactcacctccatttccattgtcactgctccttattcggatctatctcacaccctttctctcttttcttcttttctttcgttttcccttcgcaagtgagagatggcgcaaattctgcttcatgggactctccacgccaccgtcttcgaggttgataggctcaatgctggtggtggtggcggcaattttttcagcaagctcaagcaaaactttgaggagactgttggcatcggaaagggagttactaaactctatgcaaccattgatctggagaaagcaagagtaggaaggactagaatcatagaaaatgaacatactaatcccagatggtatgagtcttttcacatttattgtgctcatatggcttcaaatatcatattcactgtgaaagatgataatcctattggggcaactttaattggaagagcttatgtgcctgtttcggaggtcttggatggtgaggaaatagataggtgggttgaaatcttggacgaggaaaaaaacccaatacaagagggttcaaagatccatgtgaagctgcaatattttgatgtcacaaaagaccgcaactgggctcgaggcattagaagtcccaaattccccggcgttccctatactttcttctcacagaggcaaggatgtaaggtatctctgtaccaagatgctcatgtacctgataattttgtacctaaaatacctcttgctggaggcaagaattatgaggctcataggtgttgggaggatatatttgatgcaatcactaatgctagacacttcatatacattactggttggtctgtttatactgaaatttccttggtgagggattctaggaggcctaagcctgggggagaccaaacacttggtgagcttctcaagaaaaaggcaaatgaaggggttaaggtattgatgcttgtttgggatgatagaacatcagttggtttgttgaaaaaagatggactaatggctactcacgatgaagaaactgcacagttctttgaaggcactgaggtgcattgtgttttatgcccccgcaatcctgatgatggtggtagcattgttcaggatttacaaatttctaccatgtttactcatcaccagaagatcgtggtggttgacggtgcgatgccaggtgaagggtcagataggcgaagaattgtgagttttgttgggggtattgacctctgcgacggaagatatgacactgccttccactcacttttcagaaccctagacacagcacaccatgacgattttcatcagcctaactttcctggtgctgctatcacaaaaggtggtcccagggaaccatggcacgacatccactcccggcttgaaggacccatagcttgggatgttttgttcaactttgagcagagatggagaaagcaaggtgggaaggatgtacttgttccactgagagagcttgaagatgtcattatccccccatccccagtaacgtttcctgaagatcatgagacctggaatgttcagttgtttagatccattgatggtggggctgcttttgggttcccggagactcctgaagatgctgccagagctggtcttattagtgggaaggataatatcattgatcgtagcattcaagatgcttatattaatgctattcgacgtgcaaagaacttcatctatattgaaaatcagtatttccttggaagctcttttgcctggagtgctgatgatattaagcctgcagacattggtgctttgcatctaatcccaaaggaactttcactcaagattgttagcaagattgaagctggggaaaggtttgctgtgtatgttgtagtcccaatgtggccagagggtgtcccagaaagtgcatcagttcaggcaatattggactggcagaagagaacaatggagatgatgtacaaggacattattcaggcactcagagctaagggaatcgatgaagatcctcgaaactatttgacattcttctgccttggcaaccgggaagtgaagaaaccaggagaatatgagccttctgagcaaccagatcctgattcagattatcagagagcccaagaggcccgacgattcatgatttatgttcataccaagatgatgatagttgatgacgaatacataatcgttggatctgccaatatcaaccaaaggtcaatggatggtgctagggactctgagattgccatgggtgcttatcagccctatcatttggctaccaggcagccggcacgtggtcagatccatggtttccgcatgtcattgtggtatgagcaccttggcatgcttcatgactccttcctccagccagaaagtgaagaatgcattaataaggtgaaccaagttgctgacaaatattgggatctgtattctagtgagtcacttgagcatgaccttcccggtcaccttctccgctaccccatcgggattgccagtgaaggagatgtcactgagctgccaggatttgaattcttccccgacaccaaggctcgcattcttggtggcaaagctgactacctcccccctatcctcactacttaagtttgattttgtactttgttacaaacttgtgattgcttacatcctaatttgtgtttttattactacttagtaataatcttaatatagtctgtgatgtcttgtggagatttttttttcttctatttttttgaagatgtcagtgacagattttagttatctgatggctttgactggtttctaatcaatgtttccttttctctcccaaagttactgttgtttttctacct

SEQ ID NO: 64036 - DNA, 359 bp, Glycine max
  Clone ID: PAT_MRT3847_28838C.1
ctcctgtcaaagaccaaagaggctgtgggagctgctgagcattctcagcaatgggtgctgtagaaggaataaataggatagtgacaggcgagctgatttcgttatcagaacaagaattggtggattgggatacctggatataaccaaggatgcaatgcaggacttatggactatgcactttgagttcataatcaacaatggcggcgttgattctgataaggattacccataccgagctgttgatggtagatactacacatatagggaaaatgcctcaagtcctctctattgatgactaccagagatgttcctgcctatgatgaggtaacccttgaaaaaggcccttgcaaaacagccct

SEQ ID NO: 64037 - DNA, 370 bp, Glycine max
  Clone ID: PAT_MRT3847_28839C.1
ctcacgcgtacacaaaaaatgagattgtggcaaaacaggaagcttctgcttatatgtgaagaaaagctgcagatctgcacaaatgaggatgccaaagccggtgcatatatacgaacgagaaagctgaattgctatctgaagagcatgagccaggaaactatagttacaaagcatacacatttggtaggagagagcataaagattaaccgatcaagtgacactgaagaacttgaacaggtaccagaatgacacactgagaagaaattaaacatcaacgattatggtaatttcatacaggaggaataacaagagatggaaaacgaaactgaaacgcacttgacttaaactgcaacagaaagtgtaccataag

SEQ ID NO: 64038 - DNA, 389 bp, Glycine max
  Clone ID: PAT_MRT3847_2883C.1
tcactcaggacgctgatccctttttggagaacccctgataatgcccttatcctttgccgctatgtagatggctaaaccgaaattgagactcggagcttgatgcttaaataatgggggtcaacgctggtgatgcctgtacacctgaacaaaaccaacctgggggcatgtggaaggatacggatagtgatgaggaagaggaggccaaaacaagacgtggctggggccggcatacgggtaaaggcagaacctactctctttccaactccattcgctgataacggacctgaccctgctggggctaccacataactctttgctctacctgaggagccaatttctttatcaaagggaaaatttagaaacggaacctacttacctgccggaatcat

SEQ ID NO: 64039 - DNA, 278 bp, Glycine max
  unsure (1)..(278): unsure at all n locations
  Clone ID: PAT_MRT3847_28840C.1
tcacaagtttgtactagtagtagcgattctgctgctattctatcataaacaacacactgattcttattcattttcggcgatcacggacgacactccagataatacgtatatgaaagtatatataaaaaactctttaattattcaatagaactaggctgtgcatctgtactaaaaaatggtaaagcgcttacatcctatcacgatcatgcatatgtatntgctagatatttgattactttcgacgtatcatatagatgctaccctggatattcgctata

SEQ ID NO: 64040 - DNA, 483 bp, Glycine max
  Clone ID: PAT_MRT3847_28841C.1
ccagcggctcagtcttaccaacatggtaccgtaaggtcgatccctacaaccccagcaaacgcaccctcctttgccactcagaatttatcctcatcacagctggagctgggcttcgatggagccgaagttgagtgaatgatcgaccgttgtgtgaaactcatctggtatctgtatcaatatgtccatggaggacttctcacaagaactacactgctgaaccatctctgtgaatggatcatcttcacaactatttgatctgatgccaatcgtacactggctcgaatatgactgcactgatgatggttgtagaatgattgaacgatgttcactatctgcattcctagaaatactatcttacactggtcctctgatctgagaaatactattgtgaggcgcaaccaaactggatacttgactcctactcctctagaccactgctaaatgcaggaatacctgctggctgcaacatgcaatgacctctgc

SEQ ID NO: 64041 - DNA, 353 bp, Glycine max
  Clone ID: PAT_MRT3847_28842C.1
gcggtgtgagagctcagcttcaggacttggatgtcttcctcactgttgtggatatcaacaagggagctctttttgtggcagagttcaattcaaaggcgcataggggtactactgattaatgaaagataaacaaacatcgaactcgttggccttaaagaacaacaacataagcatcaacatgaagagcaacctttggaagtgcggaaatatacagctgaattgcctgaacaagatatatttgtaatcccaacaagttatccagctgtggtcaacgctacctcagatctgaatatctttgcttttggtatcaatgccgagaacaaccagaggaacttccttgcaagttcgaaaga

SEQ ID NO: 64042 - DNA, 400 bp, Glycine max
  Clone ID: PAT_MRT3847_28843C.1
gatcctgttattgcttctatttactatttactcttaccaacgttttatctcagcccattgaaaaatttaacacagcacatctaactacaatacatcttcctatacttatcacctctgtatccaaacccaattccattcttatcactttacattcttcattatctactttcctttgatcctcttgctactaaccttcaaccacaatttcaaacttttcccacttgttatcatttattaaataagactaacatattctattccaattatgtccataatatttacaatgtcataaccttctttaataccatcaaatttcaaaacatatatattcaaactaccttaatcatctttaacatttaatttatgattataacactctcattccatttacaaattattc

SEQ ID NO: 64043 - DNA, 1478 bp, Glycine max
  Clone ID: PAT_MRT3847_28844C.1
ctacagtttcggtccttccaatcatcccgtgttctggtcgacttttctcccttctccccatttgctcattctcctccccattctgctcagacaccgcacagcgaacaaatccaccattcattttcctttttcgcaacagcgcaatggctcgaagatccctcccgctcctgaagcacctcctctcgcggcggatcccggcccgatccgtgacgtacatgcaccggccgggcgatgggtcgccgcggccggtgacactgatcccgggcgacgggatcgggccgatggtgactggcgcggtggagcaggtcatggaggccatgcacgcgcccgtctacttcgagaagttcgaggtccacggcaacatgaaggccgtgccgccggaggtcctcgattcgattcggaagaacaaggtctgtctcaagggaggactcgttacccccatgggcggtggcgtcagctccctcaatgttcagctccggaaagagcttgatctctatgcttctcttgttaattgtttcaatctccctggccttcccacgcgccatgataatgtggatatcgttgtcatcagggagaacaccgaaggcgaatactctggcctcgaacacgaggtcgttcccggcgttgttgaaagccttaaggtaataacgaagttctgttcagagcgaattgctaaatatgcattcgagtatgcttacctaaataacagaaagaaggtgactgccgtgcacaaagcaaatattatgaagcttgcagatggtttattcttggaatcttgtcgagaggttgctacaaggtaccctggaatcaagtataacgaaattattgtggataactgctgtatgcagcttgtttcaaagcctgaacagtttgatgtcatggttaccccaaatctttatggaaatctagttgcaaatactgcagcaggcattgctggaggcactggagtcatgccaggaggtaacgttggggctgagcacgctgtgtttgagcaaggtgcgtcagcaggaaatgttggtagtgataaaataagggaacaaaagaaagccaatccagtggcccttcttctctcgtcagctatgatgcttaggcatctccagtttcctgcatttgctgaccgtttggaaactgctgtggaaaaagtcattttggagggcaaatgccgaacaaaggatcttggagggacaagcaccacccaagaggttgtggatgcagtgatagatgctttagattgagtcattttattagttgctgatttcccaaatgaagtcagtctcgtatattcttttctaaccagttttaccaattgttttgcacacaccaaatgcaaaatagcaatttttggaataaagtttatgcaacacagaaaacgatgtatcttttattttgtgtgaagaatttgtagagaatgtgataattgtttctctcctatttaaaagccgtgatttggcgttattactacccctgatagaacctac

SEQ ID NO: 64044 - DNA, 493 bp, Glycine max
  Clone ID: PAT_MRT3847_28845C.1
cccacgcgtccgactagaaaaaaatcgattcactcgtggactcctgcagtaacccactcattaacataatgaggttccagcactcagctatggcatactgtgcatacatggacatttgatctcagtggacatgctaaagactggctcgctccaatccttgatgatctgcacatattttcacagaactgcagctatcacattcacaatgatggaggcgaacaagctcaatatggccgacatgtacaccaacatctttactctgctaaatccatcacatccgagatctcatgaaccttacccggtgcatgagcatttccacgcaatatactaagaactggttccttgtactcaccagtacagcctcattctgagcaagctgctgtgctacagaccatatgtatctcctgaagcaaaagtgtgtgtacaaactaggtacaagaacatgcaacgacgccctgaaggctaaaaatgaaacgctagctctaggtgaggc

SEQ ID NO: 64045 - DNA, 286 bp, Glycine max
  unsure (1)..(286): unsure at all n locations
  Clone ID: PAT_MRT3847_28846C.1
taaanacagcagttacgcngctctttntntgtacgacncatatgccccnncnccncncnctctgtgcatctgtgagagtggntgcatagcatatggatatcanatgttatncnnagaaaanaactgnnatggatanncatcagagggtaggaagnnnaaggcagagagnnntataaacgagaacgagatacgcgttacttctctacgaaggacgatgaattacatcagtgacgcnaccantgtccttcaggagaaaggatntngtganattgttctcanagcntgg

SEQ ID NO: 64046 - DNA, 1118 bp, Glycine max
  Clone ID: PAT_MRT3847_28847C.1
gtgcaaaagacaacagtgtaccttcaaatatttctgagaagtaacacatccctgccacggcatcgatccgagtgaccttcttcacaatagatcctcagccgcacgatcattgtcttttgggtgattcctagccgtccataatctcgaaaagatgaacaaaggagacatgtaaaagagatctttgtaagagtcatccatatcatacccttcactttcctgggaaaaaattggaacctgcctctgttaaagtttgtatttttctgagtgggtgggttgattgagagtgctgtgcaagctttggaactttttcccaacctgctacttcaatggccactgaagaggttaacaaacctcaatcacttcctccataccctgagatgatagtgaaagcacttgaagcactgaatgagccaaatggatcgaacaagtcagcaatatcaaagtacatagaaaccacctacggtgagttgccagacgcaaccgttttggggagtcaccttaacaagatgaaagacagtggagagctttctttcaaacagaacaattacatgaaagctgacccaaatgccccaccaaagaggggccgtggaaggccaccaaagccaaagactccattgccaccaggcactgttgtgtcccctccaaggccaaggggtcgtcccccaaaagaccctaatgcccctcctaagtctcccaaggctaaggccacccctggaagtggcaggccaagaggaaggcctaagaaggttcctcggtctccggccgtcgccgctccgaccgccgtctccagtggcaggcctcgaggtaggcctcccaaggtgaagcctcagttgacagaagtcagtgttgagtcatagaatgacttctttctttctaattgatgtcaaaagatgtagtgttctactcttgaagaagtgatgatgggtgtgatcttagattttgtgttgatgtaatttctttgtaaaattatgtagtggtagcttgcttattatggggctttgtgttggttattcttgctaattactactaccaaagagaacagtgacttgagctaatggtgatttggtttcttgtggtttgttccttagttctaacttataaatccataatgtagaagg

SEQ ID NO: 64047 - DNA, 3571 bp, Glycine max
  unsure (1)..(3571): unsure at all n locations
  Clone ID: PAT_MRT3847_28848C.1
atgcgctggctgttctagtctctctatgttctcaacnatgtggattattgtaagttggtaatgcgtgaggatgagcatatcataagtcttcttatctatatctcacagaatggaaatgacagaggaaaaggaagtgcattggaattgcttcatcttttgaaagatattgacattgctgagaatgaaggttgtcctgagccaaatatcaacaactcttctcgagattctaacagttaccaccctgaagaaaatcaaccatcaaagaaatccacgtttctgaagaaactatcaccgttctcaaagtccagttcacatgcatcaaaaaccaaaagatgacaatgaatttctctgcattttgtagcacttatttgtggcatttttagctttgaagattcaatcgcaaagcatctgctacttaattttgcagagtaacaacaggtagtatgatgatgtgtatatagttgtgcttatgagttttgagattctgatttagggcctgttaaagtcgacagttttctgacttctcttttccttcctgtcaacatactagctaggtagaccaattacacatttcttgtttattcatattgtgtatatatatttaacactttgcagtatttggctactactgtaaaatagatattagtgtaataaaggtgcttgccaatatttttttaccttagacgcgtttatccgcgcgaagtcacaaccatggataattccaaccttcaacgtctcttcactctcttccttttttccctaattgcaccctctttggctcaacaatccttcagacccagagccctcgttgtcccagttaaaaaagacgcttccaccctccaatatattactcaaatcaaacaaagaacaccactcgtcccagaaaacctagtacttgacatcggtggccaattcctgtgggtcgattgcgacaacaactacgtctcctccacttaccgccccgcacggtgtggctccgcccagtgctccctcgccagatccgacagctgcggaaactgcttctccgccccaaaacccggctgcaacaacaacacgtgcggcgtcacgccagacaacaccgtcaccggcaccgccaccagcggcgagctcgcgcaagacgtcgtctccctccaatccaccaacggtttcaaccctatacaaaacgccaccgtttcgcgcttcttattctcctgcgctccaaccttcttactccaaggcctcgccaccggtgtcagcggcatggccggtctcggcagaactagaattgctctcccctcgcagctcgcttccgctttcagcttccgtagaaaattcgccgtctgcctctcatcttcaaacggcgtcgctttcttcggtgacggaccctacgttcttctccccaacgtcgacgcttctcagctactcaccttcacgccgttattaattaaccccgttagcaccgcctctgctttctcccagggagagccttccgccgagtatttcatcggcgtgaaatcgattaaaatcgacgaaaagacagtgccgttaaacaccactttgttgtccataaacagcaaaggcgttggtggaaccaagattagttccgttaacccttacactgttttggaggattctatcttcaaagcggtgacggaggctttcgtgaaagcttcttctgctaggaacataacgagggtggcttctgtggcgccgtttgaggtgtgcttcagtagggagaacgtgctcgccacgcggttgggggcggcggtgccaactattgagcttgtgctgcagaaccagaagacggtttggaggatttttggagcgaactcgatggttagtgtgagcgatgataaggtgctatgccttgggtttgtgaatggaggtgagaatccgaggacttcgatagtgattggaggatatcagctggaggataatcttttgcagttcgatttggctacttcaagattgggattcagctctttgctctatggaagccgaactacgtgtgctaacttcaactttacctccgctgcgtagaaggaaaacgtttcaataattagcattatctcattctctcattcataataaatgccgcctgcggaatttaggttgagcttcgcaactacgagtttcaaataaactgttaaacacaagtattttctatttccttttgatacatacagggttcatgttttttaatttggataagcccctacatggttcatgtatcttataagtttgaatatttgttcagagacacacgtaatccaagtgtgggacaccttcattgctcataaatgcattttgttagaagcttagaatttaacttttgtcaccatttgttcccaataaaaaaatcagtaattgagtttcagttcttgatcttgacattatcatcattgttgttgttgtttgataaaaaagattcaaaatgttttctctatagctttgtaccgagagagagacttgactggataggttagtctctaatatgactgattcaccttcttgtatctgtgttgtacacataaggtagggatatgggcacataagaggataagcccagcccattgcatgttaactgtcattttcttggggctttgagaaaatatttcctttttcctctaatacttataaaaaagtcacttcgtttcttatttgcaaagatttgaagaggaaattgtgaaaacaacattttggtgaaaaaggaaattgaaacagaaaatgttttcttaaaccaacaagctattcagcatgtccagcttcttttacatacaaaatcaaatctaacctacaactgtacagatggagctttatgatagtatggtagggaaagaaggtacagaaggtgagcaggaagctaagaatgcctataaagctgcaaggaaggaaagtgatggtgctattgaggcagctatttgtgataaggtttcttcagcacttgttgacagggttgatactatgctccagacacttgaaaaagaaattgatgatgttgatgctaaaattggagaccgctggcggttgctagacagggattatgatgggaaagtgacacctgaggaggtagtatctgctgctatgtatctgaaggacactctgggcaaagaaggaattcatgagcttatcagcaacctttccaaggatagagatgggaaaatattggtggaagacattgtcaaattgggcacccagaaagaagaagccgatagagatgaagcgggaagatcatagtgtgttccattgatattaacttcatggttctagtcgagttccacatcattttatctgtgaaattgtgttgtattgccatgttttctttgaaatgtaactgtaaagaacgatggttggttttctgtaatgaataatgatctcatagaaccccaagccatgcccccaacaaagtattacaaggtagggatcttattcaatagaaaggttggaaaatgcaagcacaaagaaattaaaattattaatgtgtcaaaacaagattaatgtatttgcattcctttcaaaatgctttgttgccctctgtactgtctgaatttcagtccaaaacttatttaatcattgaaggcttctgtaaaaa

SEQ ID NO: 64048 - DNA, 756 bp, Glycine max
  Clone ID: PAT_MRT3847_28849C.1
aattcggctcgaggttcctgtgtggctgaagaagaaaacttttcttcctctctctttctctctgttcattacttcacgcatatattccttcaaattcattcaactttctctcatccaatccaatcaacaacgcacccttcatctcttccctttcactcattctttgatcccctttttcttcacgccaactctctcttctgggtttctttcattttcagaatctcattatcacctcactgtgattatcttctaattccaaattggtgtttggttgctgagaaactccaagaaaaaaaaaaatacagcttttccgtgtattgatgatcctctgttcactcagaaaacttttctcttttgtgtgtagagtctagtacctcagactgcatgacccacttctgaattttctttgttttcgtcgtccttcgttagaaaagctataaaagacaagattttttaatctggatcttgtcttcttctttttttccttactcataccatattttgcttcatttttttttttttttactttgttgagacttgagagtgttggaaaagttggggactgctctgcaatttggttgtgttcgtggtgatgatcggttttacattccggtgaaggcaaggaagaaccagaaccagcgtaaaccggttcagagagagaagggtgttggtgaaactgagagaactgattcagtttcaaagagggaacttgttgcttctgagaatgggaattccaatgagtcttcatactcgttg

SEQ ID NO: 64049 - DNA, 332 bp, Glycine max
  Clone ID: PAT_MRT3847_2884C.1
tcatgtagaacgcaggtagcaattgcctaatcacacggtacatacaggaagtgattgtggagccatagctcatctgcattaggagcacggccaaaactttctggacatgcttgatggtatctctttatttgttcttctgcgatactcgagaccccagttctatagtggcactggatgcaatctacggcactttcttgtacattgattggggtatagatggctcctactggatatcctctgaatatgaaggggttgaatgaccgattgctaacatattgcacctttcacaccttgtcactcgtattctagcatatagagagcattccgcagat

SEQ ID NO: 64050 - DNA, 409 bp, Glycine max
  Clone ID: PAT_MRT3847_28850C.1
aaacaattggaaaggaacctttctttcccaaattaaatcccttggtttaaaggggaaggtttgtttacatataaaaatgttccccccaacaaagtttttgggcgggaaaaagttccccacccccccaaatttttttttaaaaaaaaaaaattttttttttcaatttttttaaaacgttaaaaactttttttttcaagtcctttgcgggtcccattagcaacagattttgaggggggggccttcccggtttttttttttttttttgcggccttggcggccttaaaaccccccctcggggcaaaaacctttccagttttaaaggtttccctgttggaaaccgtttccccgggcgcctcaaagggggggggcccttcaaaccttgttgaacaaagcaattgtcaaagggggt

SEQ ID NO: 64051 - DNA, 487 bp, Glycine max
  Clone ID: PAT_MRT3847_28851C.1
gtttgggagcactagagagatttgtggccagatctcctaacctgaagagtttaaagctgaatcgttcggtgcccgttgatgcactgcaaaggataatgatgcgagcacctcaactatcggatttgggtattggatcacttgtccatgatccagaatcggaggcctacataaagcttgggaataaaaaaagagagaatggggaacgaggaagaagaagaagaagtggtggctgaagttgaagcagtggaagccgtgtatggaaccgattgcgtccttctccgttcattccctccccatttccacatctctctcaaacccagaaccgctgatgtttcatcccaacagtttgtggaagctgttctggagatacaagcaagctcacagtatccaaaagaaccaccttctgttgatcttgtggattgcaagggtctggatgaacaaagaaagaagtatctattaaattgcatacagagtaaagcctatgagc

SEQ ID NO: 64052 - DNA, 406 bp, Glycine max
  unsure (1)..(406): unsure at all n locations
  Clone ID: PAT_MRT3847_28852C.1
atcaattaaattatttttttaaaaaatttttatgaattaggtacgaatcttatatataaaaatgaaaggaggattaaaattcattgatattgaaagggataacaaaaaatgcggtgaaacgggtcgatgcatgattaaagttgaaatatgtgcctgacttgaatttggcagtgcatagaatatgtagtcaactagtcaatgatctatagtcatatgtaataccaatttactaactgctatttttgaccactttcatgttttttttttctccttatgtcgntgacttatgtgcgatgcattatttattatataaatatagtgtcatctagaattgcatgcataaccatgacggagtgtggtcactgtttgggattagtttaagaaaatgtaattaaaatgtcatttt

SEQ ID NO: 64053 - DNA, 566 bp, Glycine max
  Clone ID: PAT_MRT3847_28853C.1
aacccgaaaacttttttattaaaaaaaaataaagttaagggttgggagtttgtcaaaaaacaatgtttttaaaaaaactaacccaagccctaagttggttagggcgttgctggaaaaaaaaaaaaaaaccccttttcgcccccatttttaaggcatcttttttctggccccatctaagggttgggccaccttggcaaaattccacccctcgggcaacttatttttatgcaaaacccccaaacctcaccctattaaacatttaaatcccacataaccccccccccccatgatcaaagccaaagccctaaacaggggattctcttcaactatatccaacccattgaacccctcataacccaccccaatttacaaaacaattttaacccccttgaacccttcaatttcggggacaaaaatatctgacggttaacttttgttcggcagcgttaaaaaaaaaccttacggggcacaaagggacaaatttgcctctgaaatgattggcaaggggactatctctaattgccagcaaaaaaacatatttggcaaaaaaaattttttttttactt

SEQ ID NO: 64054 - DNA, 401 bp, Glycine max
  Clone ID: PAT_MRT3847_28854C.1
gaaaaatcaagcgtacattttggctttcctagtttcgttattccttcttagttctcaagccgttatctcttgttttttgagtttgttctaattggtttttctttcgtgcccacctcatgttcttcttctacttttaagggtttgagaatggctcattacatttacagtcagttatcaaatgcctctattatcatatacccaaatctgcctcattatgtgttcacttgaaaaaaggcactagccgctaacaattggggaaattgccctctagaattaagttaatcatagtgatatacgtttagttttcggaagctgatccttgacttgggttgcttcataaaaggtttagatgcatatgatagtttgtactactgtccttgaaatgaagcatgaacgtgaag

SEQ ID NO: 64055 - DNA, 1392 bp, Glycine max
  Clone ID: PAT_MRT3847_28855C.1
gaattcgagcttgtacccggggatcctctagagtcgacctgcagattatcctgatacccagtgttgacaaaagtaaaactcatgattgactattggtctgtttgtagttcgttggtggtagagttaactggaattgaatcagtgcattgtttagtaggatgaaatgaacttgtgtttgtgtagtgtagaatctggtgtttgcttctgactatatttcattctcttctcttggtttccttgtgtttctttctagattgggcaaggaacttatagtaatgtgtacaaagctaaagacatgatgacaggtaaaattgttgccctaaagaaggttcgatttgacaatttggaacctgagagtgtaaaattcatggcgagagagattcttattttgcgaagattggatcatcccaatgttgtaaagttgcaaggtttagttacatcaaggatgtcctgtagtttgtatttggtgtttgattacatggagcatgatttggctggacttgctgctagcccaggaatcaggttcacagagcctcaggttagatcaggtttgccttaaaattacttgtatcatttggtaattggtacattttcttttcaaggaataggatttgatgtcccctaatactgtgccttcattgcaagttaaatgttacatgcatcagctggtatcaggactggctcgaggtcataaccgtcatgtactttaccgtgttattaaaggatcaaatcttcttattgacaatgaaggaacacttaagattgctgactttggactggcttctatttttgatccaaaccataagcatcccatgactagtcgtgtagtaaccctttggtatcgacctcctgagttgcttcttggtgccacagattatagtgtgggtgtagacctctggagtgccggatgtattttaggagagttattggctgggaagccaatcatgcctggtcgtacagaggtggaacaattgcacaagatatacaaactatgtggttcaccttcagatgagtattggaagaagtcaaagttgcctaatgctacctcgtttaaaccacgagatccatacaagagacacataagagagacatttaaagattttccaccttctgctctacccctcattgatacacttcttgcaattgatccggtagaacggaaaactgcctcagatgctctaagaagtgagttctttaccacagaaccttatgcttgtgatccttccattctcccaaaatatctcccaagcaaggaaatggatgctttacgacgggatgatgaaatgagaagagtaagagctgcaggcaaagctcaagctgatggtccaaagaagcatcgaacacgtaatcgtgctgcaaaagcttttcctgctcctgaagccaatgctgagc

SEQ ID NO: 64056 - DNA, 306 bp, Glycine max
  Clone ID: PAT_MRT3847_28856C.1
gggtgagacagggacggaaataaatcgaaaacggataaagatgaacgtaaacaacgacttggtattgctaatgatgctacaaagggtgaattccgaccacctatgcaaggtgggctccatcttcaacatcacaccccgctgtagtctcagtctaaacatatggccttatcggatgagtgggtgtcaggcacggaatttctggacaccaacttgactacagatttggtgctgcatgtcgtgttagtatagggattgtcgtatggagtggggaaaggaattgctcaagctgacaacattatttccttt

SEQ ID NO: 64057 - DNA, 461 bp, Glycine max
  Clone ID: PAT_MRT3847_28857C.1
ttggggggggggggggggggggggggggggggggggggggggggggtacacgttaaaaattacataggggaggagttagaggataccgggacatagagatacccaaaacactgagcagagagtggtaaagtttgtgctaatagcaaatatggggtttcgatatagtgctgagtaaatggcgccataggatagatgcaggaaaagaaatgctattcggaggtcacacagagtaaagctgcgtggaaaaggaagtggtacccggaagcaaattttgcaatctaagaggcaatatgaacccctggcgaagcattagcacgttctcattggtaggcatgccggaatgatatgcgaaaaagcaaataggagtgtctaaaaggaagaggaggaaaatgctaaaacgaaggaccccgcggtatagcacgtggcttgtatgaatataatttgctggcaaaccatggggc

SEQ ID NO: 64058 - DNA, 492 bp, Glycine max
  Clone ID: PAT_MRT3847_28858C.1
gctcatgatagctgaagctagatgacgaccaagcgtagtctgcgctatcattaatctctgaactaatcatcaccgggaccgaattaaaacacataggggcagaaacattagggatctatgatcaatggaccttatgctgaatctatagcccgggcaaatcggggccatgtcacgtcgactggcatgaaaagaggaacggaacctgcggaagtttcaagataaagctacaatgttaatgtatgaattatgatgattcttttggaaaattagacaccaaaaacgacgtcactttggcgaattatagttatatatggtgcatacaatgagaatgcaacaggggcttgatctattctagcgagtgagccctctgtatatcacgacgagaatcgatcgaacagattcacagacctcgggcaacatgagcccttcgtcatacttgggtactatcagtcgctccatacataatcaaggcctctataccgtttactgttt

SEQ ID NO: 64059 - DNA, 329 bp, Glycine max
  Clone ID: PAT_MRT3847_28859C.1
tccggaattcccgggaaaaaaaaaaaaaaaaaaaaaaaaaaaaaaaaaaaaaaaaaaaaaaaaaaaaaaaaaaaaaaaaaaaaagggcggccgataataaggttccgggctttcctcctcgtgcttccgaccgtcatcttcttctatggtgtcaccaaattccaatccactgcccccacctttacaacctattgactggtaaacccctggcgttcccccacttaattgggtgggggcacataccccttcccccacctggcgtagtccgaaaaagggccgtactgtaccaccttccgaccagtttggcgccctaatgggtgatcggtccc

SEQ ID NO: 64060 - DNA, 326 bp, Glycine max
  Clone ID: PAT_MRT3847_2885C.1
gtcacgcgtccgttaaggtataatgagcgtcatcaattgaccagactgccactgtggcacagatgctcactctgtgagcagacgcggagctatcttctttctaggacactggagctggaactctgagaaacattgaccgaaccactacttgtgaaatttgctagaaaacccagttctgttctcgaattcgtgcccacatggctagacccttcatcagaggctccagagctcagcgcgtgtctggtctatcttggtgcctcagcatcttctgaataagccccgctaatgcaggaggcttcactgacttagcaaacaagcgggacctc

SEQ ID NO: 64061 - DNA, 409 bp, Glycine max
  Clone ID: PAT_MRT3847_28860C.1
gaacaaatgtaactgaaagtcagcgacattaattttccattcaatagattcatgttacaaattctaatctgaaacaaaaacctggtattttccaaaagtttattgaatctttcaataatctacacgtttgttccttaccaatcccaatgcttactctgtcttcacaacaagtgactcaaatccatcgttattggtgcccttttggtggagattatttccaaaagccattcctccatacccatattgttgaacaactagcaaagatgaacgcgaaccaaaattgtttgaggccaaaatatcccctataactccaagttctaagcattcacaccattctagcaaatttgagaagactttagagctcctacaattcccttgtcccactacgtacaaatcacaaccatttttt

SEQ ID NO: 64062 - DNA, 544 bp, Glycine max
  Clone ID: PAT_MRT3847_28861C.1
gtctctctcactatatttcactctctaatatgatccttctccacttaaataagtgagatatatggacattctcatttagacctttattccacataggaaggaacctaacaaaatccaacattttcctcctctattttctccttcacattacccttttctgtctttttttttccgattacttccatgtttcctgggattgagttagcaatattgttaatttagcagatcatgcaaaagggaacgttttagattggcctaagcgcttcaacattatttgtggaattgcacgaggacttctgtatcttcatcaagattctaggttgaggataatacagagaccttaaagcaagtaatgtcctacttgaccatgagttcaacccaaattatcagacttttgcatggctagaactttttggggagatcagatcgaaggaaacacaaggagggtggtaggaacatacggttatatggcatctgaatatgccatttatggtctattctcagtgaaatctgatgtcttcagctttggtgtactaatgctgga

SEQ ID NO: 64063 - DNA, 389 bp, Glycine max
  Clone ID: PAT_MRT3847_28862C.1
attacccaacttggcatttttttgctggtcttaaccgaattcccagaccatgagttaagatccacccccagaccttcttttaacaaaagaatttttaatttatttaccttttaaacctgggagttggaaaaacccttgacctttttgattggttagataccggctgattccattcattttttaagtaaaggcatttggccttcctaccaggcccttggggccttaaattccttggcttccaagggaaccacggtgggaaccttcaagctttacaccggctttggatccaagcctgattttcccttggaggataacaccagttccaaaccttacttaaccagccattttaaaactgtcaagctcaccattactaggaatggactggaagc

SEQ ID NO: 64064 - DNA, 163 bp, Glycine max
  Clone ID: PAT_MRT3847_28863C.1
cctagttattacttgtttctcacttctctcgtaacactgcgagagacgcacggtcagatcactctctcggttattaaacgacgcaccaagagctcccttcatttaaacacccccccgggggcttatatcctgccccataaatagaggggacaaatcccaccaa

SEQ ID NO: 64065 - DNA, 572 bp, Glycine max
  Clone ID: PAT_MRT3847_28864C.1
ggttttttgtttcaaagaatgaatttctatttttctaattcgtggttagtattattgtaataatgtgtcaaaaagaacatatcgtacaagttcgaaattttttcaataaaaaatatccaattgcatttcaaatgcataggataagggaataaaaaaaatatttattgcagaccacaatgaatgggtcacgatcttctctccaaccgtctttcactagatcatttctcctctgcctccgtttttgttgcctgtccaacaacatatgagatatattgtatcaaacaaacaatatcaactaattaccagatatcagaactggattatgaagcaacattgatcatacaagaacaattacatctgactggtgaagagaaaatataagaaaaatctgaagtaaagttgacctgaagaaacaaaaaattaaatttttatttcctttcacttgtcctcagacttaaatttcaaaattttcttttttctttcattttctttcttctttatcaaacataggatacattgcaatcataaccctaaatatgcatttaactagtcagttacgcgggcatttttac

SEQ ID NO: 64066 - DNA, 265 bp, Glycine max
  unsure (1)..(265): unsure at all n locations
  Clone ID: PAT_MRT3847_28865C.1
cgtnngctcggtantcngtncnagcntnttntntcttncgagtggntncnttggngtggttccagnntgtntngttcnnnnttntccntcgnnngntntngacctggtgntnngtnngngnggncggnnnngnnnngnncngtnncnncgantnctcnctnnnngctgtngtgcgtcggttnganggccttnnnttngngncnctgntnngacnagtnngggggggcgggngcnnangntggnnggtnnntgnnngntggggnnn

SEQ ID NO: 64067 - DNA, 504 bp, Glycine max
  Clone ID: PAT_MRT3847_28866C.1
aaatcatcaagcaactcaacatggttgaccctgatgagaaagattccgttggcaacctaccttcaagggctcttcatattgttagcccagatttgaagatcaagctaagttttctgtaccctgcaacaactgggaggaacatggatgaggtgctgagggtgatagagtcattgcagaaggcctcaaagttcaaggttgctaccccagcaaactggaagccaggggaccctgttgtcatatcccctggtgtcaccaatgagcaagccaaggaaatgttccctaaaggcttcgagactgtggatcttccatcaaagaaggagtatttgcgtttaactaaagtttgatgatgttctttttcaagtagtagaaccttcttcagctatgccaaatctcagttcaatcaaccttaatcaaactatatatatgtcttgttaaagtacactattttgtagcactgcttgttttgttatatataagaatatacagtttaatgtaaaaaacacc

SEQ ID NO: 64068 - DNA, 1294 bp, Glycine max
  unsure (1)..(1294): unsure at all n locations
  Clone ID: PAT_MRT3847_28867C.1
gggcaaatacttcaatctgtgttttcaactttttataaccttagctatatttttatttctggaaagcaagctattcccataatggaaaggcaatcagaaatttaaaagtctgaaagatatagaaatcattagtgaattttatttttttgaataaagtaattttcataaatatgatcacaggatcactaaatttagaggaaagaagaaaatttagaaatttatttaaaaaacaaaacggtgagaacgtacaaaaggtgaatagtagtagtgtgtaggtggagaatagtgtgagagttgaatgacatgtaagcaacagcacaatcacacccgtaaccaggaacatgccacgttctcttcatgcaagcaactctcccctctttataatctcacttgcacacgttctgatctatcatacaggtaacttctctgcatccaaaatgccaggtcttaccatcggagacactattcctgatcttcaagttgaaactaaccaaggcaaaatcaagcttcatcagttctgtgctgatggctggaccatccttttctctcacccaggtgatttcaccccggtttgtaccactgagcttggtaagatggctcagtatgctaaggagttttatcaacgaggagtgaagctcttaggtttatcttgtgatgatgtgcaatcccacaatgagtggatcaaagacattgaagcctacactccaggtgcgaaagtgaattatccaataattgctgatccgaagagagaaatcatcaagcaactcaacatggttgaccctgatgagaaagactccactggcaacctaccctcaagggctcttcatattgttggcccagatttgaagatcaagctgagttttctgtaccctgccactactgggaggaacatggatgaagtgctgagggtgatagagtcattgcagaaggcctcaaagttcaaggttgctaccccagcaaactggaagccaggggaccctgttgtcattacccctgatgtcaccaatgagcaagccaaggaaatgttccctcaagggttcgagagtgtgaaactcccatcaaagaaggaatatttgcgcttaactaaagtttgatgatgttctgcttcaagtagtagaaccttcttcagctgtgccaaatctcaatgcaatctagtcatctatctaccctaatcaaactatatatatgttttgtttaagtacactattttgtggcactgcttttgttattataagaaagaatgtacagtttaattgatcttttgttgactgtnccacaaaaaaaaaaaaaaaaa

SEQ ID NO: 64069 - DNA, 214 bp, Glycine max
  Clone ID: PAT_MRT3847_28868C.1
ctccgacgaatactatgccaactccattaaggacgaaattcgcccagttgttgagcttcacgaagagcttgatattgatggtcttgttcctggagaacccgacagaaatgatatggtcgactacttcagtgaacaattgtccggctttgccttctcgttaatgcttgtcgtgcaatcctatggctcccgttgcgagaactcaccgatcatctat

SEQ ID NO: 64070 - DNA, 725 bp, Glycine max
  unsure (1)..(725): unsure at all n locations
  Clone ID: PAT_MRT3847_28869C.1
aaggactccacaactaaattttattatctttactatcgttttaagtcctcagcatttaacagttctgtcgcagcattcttatttactacaatatattgttcgcaacctcggattataggaaagaaacaaaaagctcatgtattctacactgaaaactagatcaaatgattattagaaatgctgtgactacggcctcaaaggaagcagcttcaagtcctgttgactgttgaccacattatgtgtgtactttctcagtaacatcaattaattgtgatcactcatcacttcagtgacacttggagctccagtcatgagttacttggtgttacatagctagccgcttctaaactgcaccttattgtttagcctgtgaataaaggaaggtaccaagaattgcaatggcagctccaagggcattgacgggctgaattggtgtgtggaagataaggatagaagagacaattaccgaaattctcttcattgtgttccctatgctgaatgttaagggagaaatctgatcaagagacatgtaagagacttgattgtacagatggtagaagacactctgggcagctacccaccaaacaaaattgggaccaatttcagacaaggctgtttgccaacctgcagcccacatctttgggcccctccacagcaatggcaaaaggcgtgagaatcnntagagacannntnnaaagacangcatagtaattnntntccctaac

SEQ ID NO: 64071 - DNA, 344 bp, Glycine max
  Clone ID: PAT_MRT3847_2886C.1
acttaagcttcggattcgggtcgaggttgtttgtcactctgtagaacactactacatccagacctggtgctaaacgtaagttctcacaccatatcggttctccaggttcagcaatacccacattttgatggttgattttctagctgataggccatggctattcgaagattgcttgatgttgatgttgatcccaagtcgaacgcagagacgtaggggtacgacgatgtgaactccatggacaaactcaccgcagccttctccaatgattagaagatgattgacgttcttgagggtgatggcaaatcagttgtgtctgaccacgacatgcgttatggtaaatgttc

SEQ ID NO: 64072 - DNA, 170 bp, Glycine max
  Clone ID: PAT_MRT3847_28870C.1
caaggaggtggacgagcagatgataaacgtgtagatcaagaactcttcatattttctcgactggatatccctcaatgtcaagtcgaccgtgtgtcacattactcctagagggctctccatggcgtccagatgcattggaaactcgccatcgattcaggagatgttcacga

SEQ ID NO: 64073 - DNA, 263 bp, Glycine max
  unsure (1)..(263): unsure at all n locations
  Clone ID: PAT_MRT3847_28871C.1
tntatttggttggnctntganaaccacaaccccaatgttatagaagactataagtccactaactctggactgatgttttgttttctttacaagtnaaactttcnttttgtccatganattgacaccattgatcantttngtcctcgaccttaaganaagccaantttngtcattgacttcgttnctntctgtnnntttngtcttgantttngganatntcntcnttttngtctttgattttnactcctttcnntcnatttgat

SEQ ID NO: 64074 - DNA, 341 bp, Glycine max
  Clone ID: PAT_MRT3847_28872C.1
tgtccaagtcctgtcaccacggaatatgctaatgcatcctggtaatggtgctgagtgcatcttcgacgatggaccaatattccctgtgtgtaaagtagatggtcatggcgcatggatatcacattactagcagctacataggcatgctaagactagcgcagacagccagacacttgcaaaagctgaaatagctggagacatagctggtccacttgagcttgcgtataaacaacaggcacacctaaatgacgcacttaattagcagcaacaacattcagctgcagctgtaagcaaacctaagatgtgagctcatgttgtcatcgcatattcaggaaccagct

SEQ ID NO: 64075 - DNA, 767 bp, Glycine max
  unsure (1)..(767): unsure at all n locations
  Clone ID: PAT_MRT3847_28873C.1
atgctgtcggccagttatgtggtccgactcccgatgacctgccccccaatcccattcatcctctgactcttcttctcttcaaaacaaacaaataaatatccgtttttccaaaactccattaccattaccattcacaatgagttattacaaccagcagcaaccgccggtcggagttccgccgccgcaaggttatccgccggaggggtacggaaaggagggatatccaccgccgggatacccgccagcgggatacccgccagcgggatacccaccgccgggatatccgccacaacaaggctatcctccgccgccctacccggcgcaggggtatcctccgccctacgctcctcaatacgctcagcctccgccccgtcaacaaaattcaactggccctggttgtttggaaggctgtttggctgctctctgctgctgctgtctattggatgcgtgcttctgagatgagatgacaaattcaaattggaattagacggaatcaactcaataaaatttgtttctacttctctatttcctttgctttatcttgccccttgttgactttttatttttaataataatactatgaaactattgttgcttccaaaggccaaactgcctgatttgtttattgttaagaaatttagaccttcctttcctgttacaaaaaaaaaaaaactccattacacttacacttgattaaaaaaccaccaaaacgggttctagtgcaatccaaaaaattacgtagcngncgtgcagtgcgacgtcagtag

SEQ ID NO: 64076 - DNA, 764 bp, Glycine max
  Clone ID: PAT_MRT3847_28874C.1
gagttttttttttttttttttagtaaaagtgaaaaagtgaaataaattctctcatgacatcatgccatgtattaattgtaagcttgtcacattatcttaaaggttgtgacttctgttctttcacaggtaacaacttgctcaacaatctatatactcatttcctaatccatattggtaggacttactcaaagtggagattcctgaagcactatgagcacatgaactcctacatactaataaataaaaaatttacacgtaatcctaaaagttatatatatatcactttgactgagcctatctcctttggaaattcaagaatttgatgccataggcaaaaacgaacatgaagaggataacccagcctacatgagcagcagcaacaacgggaaggaaatcatagtcaaaacccaagttttgtttaaggaattccttcaatcccatgcttccagcacctggtatctccaattctgcatttttgtcacccagttgtgaggtaataaggccatatagtgtccaagaaacaggagaagcccaataataccatctccaccacacaggaatttgcgtaataagaatgataaagccagagaacaagttccagaaactcaagaagaaggacatacaaattgcagcaacctggtgacccggtgttagtgctacaatcatcattccatacaacgtgaagtacataaagcacattaatatatagtagtagaaccaaaagaagcttgttgccttccaatcaaacccaatcattgagtaaa

SEQ ID NO: 64077 - DNA, 423 bp, Glycine max
  unsure (1)..(423): unsure at all n locations
  Clone ID: PAT_MRT3847_28875C.1
tcncgagccggggcacaacaacganaanaacaacgngccncgcaccgaacagagcacaccaagggcaccgaaagcgccacagcacggcaagaacacacccgaccaagagggccaaggggaaaagagaagaaacagggggacaacaaaggaaaggaccncaacanggccaaggaggccccacaagggggcgagaccaanccaaaccacacagagcccagccagncggangagaaagacaaacagaaagggccggaaagncaggcaccgccaggcaaacagggaggggcacaggagccnggaancaaggaacagagacaagagnnaggnccgacacgcaccaaggcggagacacccgccccggacaaggccgaggagaanggcgacaaagcngccccacgggacaaggancgaaaaacaagcaaa

SEQ ID NO: 64078 - DNA, 604 bp, Glycine max
  Clone ID: PAT_MRT3847_28876C.1
ggtccggataatccgggtgacactcactatcggggcgttttttttttttttttttttttttcgattaacgaacttgcaccatgtatattcaacacaagaacattccaacagttaacatgttaactccccaaaggaaagcaataaaacactttatatatgcatatttacaacataaattacattatcataagaccataaatactagagatcaagacaagaattaggcacgattggtctatctttgaatatttgacacgcatgctataacatcaatttctatcatcacaatccaaataactataatactaaaactgtagtcagtaggtttttctccttgcagtctctagcaactcatcatgccttatcagttccatttgcaaactatactgggcatactgcattgctgacattttcctggcagtaaagaattggctgcaagcctgcaagtgatctcaaatatatatgctctcctcaacagcttatatacaattgtattaagtatacttttagttggccatgtaagactgttgctggccagcctggtaagagcaaacctttgttggatcatattatagtctatagttttgatcttgttcggaccttg

SEQ ID NO: 64079 - DNA, 199 bp, Glycine max
  Clone ID: PAT_MRT3847_28877C.1
cgttcttttttttttttttattttttctttttttttttcggggcatcagggttatgtttggcttttattcaaacatccaatttttccaaagagtgcttccaggaattactaatttcaactaccaattaatgatcacaacaaacttttattacttattcatgcatttgtatgctttacaacataattctgcccctctaaa

SEQ ID NO: 64080 - DNA, 781 bp, Glycine max
  Clone ID: PAT_MRT3847_28878C.1
ccacgcgtccgccagcaccgcacacattattacattacacccaccgaaataacacaaaataactgacacagcatccttaatttcatcaaaatatttttcatgtttatgcgaagatcacggtgaagtgaatcccccaacaagtactatattatcagccatgtcagatgatcaatttcaagcaagtggaaactggtgggaaacagcaagaagcgtgagatttgagagtagagaatcacaatcttcttctggcctcaccaacaacattggaagctatgcagcttcttggcaacaacatcaacaacatgacatggcaacaaggtcttcttccatggataacaactctgtctcaggtggttcctctgtggtcttccatgaccagaagcagcttcaagttcatgattcatcaccagcagccacttccaccaatgaccccaactttcacatgatggccttgggcctctcatctcaagccatggactggagtcaagcatctttgccgctgcgaggtgagaagggttcagagaacagtttcaggtcgatgttgcaagagaatttgagctcatcaggcacaaattttcagcagcaagaatgtgggagcaacagtataggcttgtctcaacaccaccatcaccatcatcaacaagttcattggaaaccagaaaagttgttctcagctgagtcatcaagcaacgaattcaagaggggtttctccttggaccaaacacagttttttcctcatacagctccggggacagcactgtcacaagccaaggcttgcctt

SEQ ID NO: 64081 - DNA, 215 bp, Glycine max
  Clone ID: PAT_MRT3847_28879C.1
gaaagagaacaatggcaaagttaataaaattgctttgagttcaacacaggggccaagattccttctgttgcgttaggcacttggccagctgagcctggtgttgtacccaaagctgtcaccacagccattctggctggataccgtgctattgatcgtgctcaagcgtatcacaatcaagcagagattggttctgctcttaagaagctttttgatga

SEQ ID NO: 64082 - DNA, 155 bp, Glycine max
  Clone ID: PAT_MRT3847_2887C.1
tttaaaaacttggggtcatcgttacgccaaagacttcctacttagcttactttcataccctacggaagttactcttcactctcaagtaccttttcccaagaagcatataagtactaaacctgccaccttgttcgactgccctttatataaacggg

SEQ ID NO: 64083 - DNA, 595 bp, Glycine max
  Clone ID: PAT_MRT3847_28880C.1
aatgtaatcggaagactataactcataaccacttgaagcaatttttattgttccctcggcataataatcccatgcacgtttcttaaaacttgtatacagaagaaataattgcaattttattcaatctggatctcttgtggagcttcctcagtcgttgactcttctgtattggcttcttcttcactaattccagcagcttctgcagtcctagtaacccattccttgaggggctcctcattcaaatcaagtcttaaaatacccgcaaacattccgcccaagaatgccactggttccttgagagcttctttgatgatgaggtcttgttcaggattaatgaaaaaggctttaaccccatttccatttccattccttttcgcagttccaaagatgtttgtgctcattcctcctcctattatggttggcccgtgtgacaaaaacctagcttcttgcttcggtttcaaccaccgagtactttgcagtggcagcagaggagaattaacaaggagagacatagctaaggttgcttggttgcaacacggacacacgagtccaatgcctagggggctacgctctcgtaaattaggggaaaataatc

SEQ ID NO: 64084 - DNA, 3280 bp, Glycine max
  Clone ID: PAT_MRT3847_28881C.1
gtggttgtggatggtggacgagggtgaagaagtggtggtggtggattgaaaaaggagggaagttgagaggttatgattgatggtgaattcgaggaatcattgatcattattgtgttgtggataagtgctattttggtgtgtttggtgatggggatgaggaatcagcttcttcatcagggtaatggtggtgctggtgctggtggtggcagaaccaacggcttcattccaagttctttccgtgctctctctagctacctcagaattgtttcctctggtgcttccactgttgcacgttctgctgcatcggttgcatcatccattgtggagagggatgatgaccctgaccatgatcaggttatctgggctgggtttgacaagttagagagtgagggtgaagttattcaacaagtacttcttctaggttatcgatctggattccaggtttggcatgtcgatgaatcaaacaatgttcgagacctggtttccagacatgatggtcctgtttcgtttatgcaaatggtacctaatccaattgcgtctaagaaatcagaagacaagtatgcaaacagccgccagctgttggtagtttgtactgatgggttttttgctggaagtaacaatgttcaggatgggtcgaccaccccttacaatggaagcactacaaactcccatgaccaaataaatggaagctatctgccaactaccgttcggttttattctatgaaatcccaatcttacgttcatgtactgaagtttagatcagttgtttattctgagaggtgcagttctcgggtagttgcggtttctcagtccactcagatactgttttgatgctaccacattagaaagggaatatactttacttaccaatcctatagtaatgagttgccctggttccggaggcataggttatggaccacttgctgtgggaccaagatggcttgcttatagtggaagtccagttgcaatctccaattcaggacatgtgtgtccacaacagttgacaccttctggaagatttcccagctgcttcaggaggtgaatttgagattgaaaggattccaacttgcatgatcgaagctagatcaaaggacttggttccaattttcgactatattcagactccaaaagtacaacaaacaaggattgctgtgattcattacaatctgtaaattctgtctctaagggcaatggaactattaatggccattcaactgatgcagataacattggaatggttattgttaaagatattgtctcaaaaaatgttattgcgcaattctgggcccacaagagtcctatttcagcattgtgctttgatcctagtggcaccattttagtgacagcttccattcaaggtcataatataaatgttttcaagataatgcctgcaagtgagactttgccagcttctgttgctggtccttcttatgttcatttgtataggttgcaacgtggctttacaaatgcggttatacaagatatcagtttcagtgatgacagcaagtggattatgattagttcttcaaggggaactagccatctatttgccataaatcctcaaggaggacatgtaaatatccagtcctttgatgatagttttacggcaaaaaatagtggattaggcactacaactaatcatgcagttcgtcagtctcatagttcggccatgcaaatgcctaaacagcagagcctgtttgttactggccctccaatcacactttctgttgtaagcagaattaggaatggagctaatggctggagaggcactgtaagcggtgctgctgcagctgcaactggtaggaaaaatgccctttctggggccattgcttcatctttctgtaactatagaggcaatgaagggaacttttctaaggcaaagtatcaactgttggtcttttcaccctctggttccatggtacaatatgctttgaggacaataactggtcaagattcagctgttgtttctggattgtcccctgcttatgaatccattccacaggctgatacaagattagtagttgaggccatccataaatggaatatatgtcagagtcatagtcggagagagcgagaagataatgtagacatatatggtgagaatggaatttcagacgtcaataaaatatatccagaggaagtgggggaggagaaaaacactagcccgaaaatcaagaatggagttatgaaagtgaatctctgtcttgaggaggagcatcttttgtatatttcagaagctgaactgcaaatgcatgaagctcagacttcattgtgggcaaagccagagatatattttcattcaatgttgcaagaatctaccataatggatgaagaagcagctgcttcaggaggtgaatttgagattgaaagtatgccaacttgcatgattgaagctagatcgaaagacttggttccgattttcgaccatattcagactccaaaagtaccacaaacaaggactcctgctatggatagcaagacaaatgaacagctgttgcatcgcagttctaggctggccggaaatggcaggatttcacccaggactattttggaatctcctgagagtgtgactaaggctggtgatgctgtttctgaatttagaagtggaattgaaggaactgagtgggataatcatttggtggcatctgaaactttgaactttgtaaataacaatgacacctttagaccaaatactcagcatgagattgtaaataatagaatggagcacttaaacaccggggctcatctcatgtatgtaaatagtgacagaaagcctgaaaatgaagaatcattttgaagaaaatggagatgaatttgattggaggcatggaaatattgtttcatttggcactggaggcttaattaacactgttaatttaatatggttggagaggtagagaaagcttgaggagtatagctttactactgcaaaattgtggatactacgatgggtttctttgtctgttgacattgtaaataagagacagatgtatatctataattagtttttaatgtgtaagtaatagaatcactttgtatcttcctcccttttttattctattaattaaattgatttgtaaatcttgtattagcatataatgcttctaggggcaacttaaaaaaaaaactaggatacattaaaataataaagaaaaagacaacaaagttcttattgatgttatcactggtatttatattagttgtgtataggcataggcattgtgtgcttgtacaagaattgttcatcatatatgtggaactgttggatatatttattttt

SEQ ID NO: 64085 - DNA, 439 bp, Glycine max
  Clone ID: PAT_MRT3847_28882C.1
aaaaaaggcataattccaaaaaacaataggccaccaattcgcaagggggggggcggggggggccccaaaaaaaaaccagggcgcaacccccccccattggcgggtttttttcggaaattttatcaaaggaagagcccgggaactaaccggggggaaaccggggccatacccgaaccaaaaagggccaaaaaaagctgcctgcaaaggcaaacggcacaatttaagttcccccatcacggttcggggcccccggggcaccccccgggaaccccccggaaattccggcccgggacccggggggcaaccaattgtccctaaagggaggggcaaaaaagcggggcaaaaacagggccaaaggggaaacccgggggaaaaagaaatccccccacaattccaccccacaaacaaaccggaagaaacaggggaaacccgggggggc

SEQ ID NO: 64086 - DNA, 315 bp, Glycine max
  Clone ID: PAT_MRT3847_28883C.1
ttttgtggtcagggggtcccatgaacccttagagataactggtcttccctgagaggaaaaatttccctattacaaaaaaaattcacccgttttttttatccaaattctgcctgggggttgtcccccccagaggaattactatacttggggcaccactcacccccctggtccttccccccaaaacccagaactttagaggagtttttatgaccccccccctttttggggccattttattggtacaaatttaaaggaggggagtgcccgtttctcccccggggggggggggggcccccaagaaatgggctttccttt

SEQ ID NO: 64087 - DNA, 233 bp, Glycine max
  Clone ID: PAT_MRT3847_28884C.1
cattgcattgaccagattcacatagatggatgtgaattttggcccacacttgcataaagatataaagaagatttatgttttaactctcagtaaaccttacaagtcatccataatttggtgtaccacgtctgttgaattaaaataaaatgaaataaaataagatatgtagtgccattgagagagataactgcaaaatattggacatagataaagaagatttacgtaaaagacta

SEQ ID NO: 64088 - DNA, 393 bp, Glycine max
  Clone ID: PAT_MRT3847_28885C.1
ccttcacgcaaatgggaaaggcttctctgaattctctggcctccgatgctcatgaggcttccttccatttattagaaaatattcagagagttccattcttgaatttgccttcaaacccattccaggtgtaacctgggaggattcaagaaggtgtgaccgaagcaaaacttgaggttggcataaacgggtttggaaggattggaaggaacttcttgaggtgctggcacggtcgcaaagacttccctcttgatgtcattgccatcaacgacaccggcggcgtgaaacaagcctctcaccttctcaaatacgattccatcctcggaaccttcgatgctgatgtcaagcctgttggcagcaatgtcatcttcgtggatggaaaaggaatcaaagttg

SEQ ID NO: 64089 - DNA, 319 bp, Glycine max
  Clone ID: PAT_MRT3847_28886C.1
gactatagagtgtgataggatgatgatgtagctcatgcttatcatttcgaagatcagtgttggtgcttgcagcttctcgtcacctgaagatggccagatggcttgggaactgccgctgcggatgatactgactgtgcgacaacccatgcagaggctgacacatgtacccgatacttgagctacactgagtcaaccaacagcgaaaccttcatcatgcaagtggcacctagcacggctcaatgagacggtgctgaaatgggcgttcccgatgggaaccatggatgcttatgaacaccaaactgttactgcaatggctgga

SEQ ID NO: 64090 - DNA, 263 bp, Glycine max
  Clone ID: PAT_MRT3847_28887C.1
cgacccacgcgtacgaaaaaaaataaaacttatgaaaaacttttatattacatcataaactagcataaaaacagagcgcggacaaaaaaagtgaagaaaagaaaaaaatcaaataacaaaaaaaaaaaaaagggcgaccaatttaaaggttcaaaacttacgaacccttgcttgcaacactatacctattataaagggtgactaaaatcaaattaactgtccaactttttaaaacttgtgaactggaaaaaccgtgtctttac

SEQ ID NO: 64091 - DNA, 303 bp, Glycine max
  Clone ID: PAT_MRT3847_28888C.1
gttttatctagaaaatactaggggatatgaaatgagcgttataacagtttccatacccttccttgggggaggaaagttaaacaaggaattatcctccaatcagatgacccttggagttgactatattcaagggatggtatgttgtggaaccctgaataatgatctgcattgtcttggggactgaataaattacttgagcagcattttttacaaaatgtccaagccccttcttgtaaatggaactctcactgttcactgtttccttggactttcccccccatgccgattccaaagaatgatgcc

SEQ ID NO: 64092 - DNA, 182 bp, Glycine max
  Clone ID: PAT_MRT3847_28889C.1
ttcttctgcgataagactacagaatgtgatgcacgattttcaaaggaagttgagtaccttcttaagaaaggatggattccttgcttggaattctattttgatcacggtttcatgtaccgtgtacacaacaagtcacctatatactactattgactctactggaccatgtgtaatctgcctat

SEQ ID NO: 64093 - DNA, 267 bp, Glycine max
  Clone ID: PAT_MRT3847_2888C.1
aaaaggaaaaggccccaaactctattaacggggacacttgtacctgaaattttatgggcaaaacgggtccctttgaaaaattttggaagatccattaaaagctagactataatcttggccccttaaaatttcacaatgcttagaatgctaccccctagcatcttggcacttttcgtcccttggtttgagccacctacttgtggtagcagagaaattgacttgcccagatcgtgagcccttccattcaaaagtggaaaaaagatcccc

SEQ ID NO: 64094 - DNA, 449 bp, Glycine max
  Clone ID: PAT_MRT3847_28890C.1
gttgcgacacttgtattgcagtgcacataatatccatgagctctttggagcaccaacctttactaccgaggcttgattcacactcacacgggcaaaacttgtcatcagatgccattgaagaattcttggaacataggcctattgcattgagatggtggtcaaagcttattgtgtgggagtcaaggcttctctggctcctctctggggcttctattgttgtgtccattttcaattatatgctaagttttgtgaccttgatgttcactggacatttggggtctctagagcttgctggagcatccgtagccagtgttggtattcagggtctagcttatggtattatgctggggatggcaagtgcggtgcaaactgtgtgtggacaagcatatggggcaaaaaagcatggagcaatgagcatcatattgcaaagagcaatcatcttacacatt

SEQ ID NO: 64095 - DNA, 307 bp, Glycine max
  Clone ID: PAT_MRT3847_28891C.1
ctttcgtgatactgattcaacctagtttgtcatagttacaatccccacagtgatggcaattcgtgagtcatctagattgagcgctgacgtgaagaaggaaaatgttcctgtgaatatacttattgtcagccatattcttcctccatgtacccgtgattgcgagtagtgtgctataaaaagatagtgacaattgcgtgctcttgatatacttcatatcgatccataatcctttagcttattgatgatccaggcaccactcagagatgctgcgatgagatgtgttacagctctcaattttctgcgtgac

SEQ ID NO: 64096 - DNA, 737 bp, Glycine max
  Clone ID: PAT_MRT3847_28892C.1
gtccacaagaagctccagaagctcactcgcaacgtctccgaagctattgcttctttcagaaactccctcaacctcgattctcctccttcttccaacgctgatgcttcttctcggaaactcgcgtggggaagcgttgttcgcaatctcactcagctttaccctggaagccagctccccgagaaactcatgtccaacattcgcaagcattacgattccttgcccctcagttatgcacaggcgaattcggctcgagagaatgtgtttcttcacataaagttgatggagcaagcttcagagagtgaccagccagcgattttaattcaagaggaatgtgatggtgagattcaggggtctgctttgaggctcacgtttgcttgcaactctccgatttcgtggcctgcaatgtcgggtgcgttggatagttcctccatttgctgcaagaggatgcagatctttgagaagaagggtttcaccttgggggttgtgcttcttgtggttctacctgggcatgataagttggtgaggaccagggttgaaaatgctttgaagtttgccatgaagaggccgaaaaccggtgctgtcaagcttccctttgggctctgtgggtgccaagaagagaattctaaagggagagagcttgtggagattgaagaagaaatcagtgatggttaccgcggaaaggagtttgagaattcaagccaaaggattcagcttcaagtgcctttgccttcttcatc

SEQ ID NO: 64097 - DNA, 399 bp, Glycine max
  Clone ID: PAT_MRT3847_28893C.1
ggaattcccggtcgacccacgcgtccgaaatgaagatgtttatgaactggcattagaagctttttaaacttcgctgcgatgtgctccatctaccccaagggaggacattgcctgtaggcacaggcatcgcctggcctaggacacggtctggagggctgttggtcaggactgtcaggctcacgtcggcctacttggaggtggactttctcttgattcttaagactgaggtattgactctccttgcttcttggcatccacgggctcctgagtataggcttttagctcctgggcagagtccttgggttgtgtttgacactccaccttgagctttcggcattgtgtgtctggcctggtgtaagcaggtctgaccttgctttctttacagcatagtgttattca

SEQ ID NO: 64098 - DNA, 291 bp, Glycine max
  Clone ID: PAT_MRT3847_28894C.1
ctacaggatcatctatggtagcacatcgtaccgacgtccagagtatttagttgcagcaaaccaaaccagagcaaaatggcagcagccacagcctaattcatgatgtcaacaccagcctcatctccgaccatccaaaagcatcatcatttgaagccatgcaacgtgtgcttacaaggtcttagacccataacatggttcaccaaagcgttatcaaccagagtgagcagcagcaccaaaagggtcataccaagagctggtgctagagctgaactcaactcagccagtgcgata

SEQ ID NO: 64099 - DNA, 410 bp, Glycine max
  Clone ID: PAT_MRT3847_28895C.1
acataggacaacagcctgatatagagatagcggcggaatggacattcaaccttcaaaaagacgatcgagggaaaaaaaaaaaaaaaaaaaaaaaaaaaaaaaaaaaaaaatcgcagaaagtgcaaaacaaaaaatggcataaaaaaaaaaaaaaaaaaacaacgaaaaaaaaaaaaacaaaaaaaaaaaaaaaaaagagggggggcctccacttagagttccccccacccccgttttaatttaccccccgttcccaatcgtgggacaaatttcccattaagggaacttaaataaaattcggtgaaatccctgcccaaacctttatccggggaaaaatttgtttcttggcttttttaacccaacagaattctttgcggaaaaaaaaaggtttactcctgggggcccaaaag

SEQ ID NO: 64100 - DNA, 107 bp, Glycine max
  Clone ID: PAT_MRT3847_28896C.1
atcgctggtggaggaagcaccgaatctcaatggcttcttcggtgttctggactcactcccattgctagtcgtctaaacctgcttctctcgttttccgcctcgagcgc

SEQ ID NO: 64101 - DNA, 477 bp, Glycine max
  Clone ID: PAT_MRT3847_28897C.1
ggacgaaggcttctgccctaagatttctcgcatctcgtttttaccatcttgtcttcgtggccctcacttgtggttgtgtctgctgtggtgttatggacactgctagtgttaatacagcacaataagaaagtgtgaaaggggccgggaaaggtggcgggagcggtgcggcacgtgggttcccctcacagcactgtgcacggtgcctgcttgggttcctccatgtggaccagcaccgctgagcggccactctgcgccaggcactgttcatgggtgatcacggcagcccccttattacagacaagcaaactggggcttagccagctcaagaggctcgcaggtaggtgggggagcctggagctgaacccaggcgtctgacccaggtgctcccccttagccacctgcctccatgagcacttggcaccccatggccccggtggtgctgcacgtgagccgtggcgtatcttaatcgacgcgcac

SEQ ID NO: 64102 - DNA, 226 bp, Glycine max
  unsure (1)..(226): unsure at all n locations
  Clone ID: PAT_MRT3847_28898C.1
ctgctccagtgctacttcctcttccatcacataaaaccctagtaaatccaattggggattttttctttctagaagaggattgaaagggataaaaaggtcatatcagactgaagaatatccgagtgactgaaatgggctctggtggacttggccatctggacctacgagnacttgactcgagtcgatgtcttcactttacacaggggctgtgcttgagaggtgtagg

SEQ ID NO: 64103 - DNA, 220 bp, Glycine max
  Clone ID: PAT_MRT3847_28899C.1
atgtctagcacggagggccagaccatcaggagcgaggagtgagattgcatgagggggggggaagccgctggtggttgaagaagtggaggttgcgccaccgcaagcaggtgaagtgcgtttgaagatcctctacacctgtctttgccagactagtgtgtacttctggagtgcgaaaggccaagctccatagtagcctcgcatagtttggccatagaagctt

SEQ ID NO: 64104 - DNA, 516 bp, Glycine max
  Clone ID: PAT_MRT3847_2889C.1
gcttcctattttagtgcaggggaaaaaccagtagtgcaagggcccctcatggcgctcaaagacccctaatggcacaggaggaaatgctgtcatgaactggcatggggtgtcaaaactgcaaggctgagtcaacatcgcaggcctgaggctactgcaatgcatgtgggagctatagaaattatcattgatagttccgcaagtccgcactgcttcatagttggtgctatgctaccgattgatacaaatcataccaatcctgaaaatgcagcccgtataaatgttgaagcgcctttcagaggtggacagtccattcagccggttgcacttacgaaccccaccgtgcatatagagcttaacattagtgcaccgcttcagcttttgagtaccactaccaatggtgattctgttcaaggaaaagatctcgcaatggttaaagttaatgtagcatgtgctgcttgcggcttgacatcaagttacactccaacttcattgatggaatctggtttgcaaaaagac

SEQ ID NO: 64105 - DNA, 652 bp, Glycine max
  Clone ID: PAT_MRT3847_288C.1
ccacgcgtccggaaacttagaggcttttttgcattccttttgtggcttagcgagctctctaagcccaatatgcctctggaataaaattgggctaagcgagccagtccaactaagcccaaggaatttagtttttgtaggttttgttcatgcgctaagcgagccatgcccgctaagcgcaaatacctctctgtcttagaatagggctagtgaacctatctcgctaagccactagtgttagatgtagtgagtctcgctaagtgcccattggcgctaagcctagatagtctgtcgcactaagcgtgccttatgcgctaagtgcaattacctctatgtgtgtgaataaggcttagcaagtcactctcgcttagccgcaattgtgtttcagctaagcgagagggtctcgcttagccattgttagtgtttttttgttgtcgcactaagcggattactgctatttttgtaggcgcgctaagcgagcacatctcgcttagcgcccaacctattttactggtttgtttttcttgggtctgtttttcaataacatcttgtctaacttcatccctttgttgtgttttgggtgcagatggccttaaagaagagacgtgcttcatccttctcgatctcaggagccctatgacacatccagaatttt

SEQ ID NO: 64106 - DNA, 319 bp, Glycine max
  Clone ID: PAT_MRT3847_28900C.1
cccacgcgttcgacttaaactacattctatttgtttaagctttttgagactacaggaggctgtttttatggattccgttttacgacttaaatggaaattcatggatgagaactaatgaataatgctatacgtattgtattgctatgttgtacgatgaactacaatccaactaaggacatgcggttcactggctccgtctatttgccccacatccctggtcccatgatgaaaatctgcatgcttgtagatgctaagcatgtagaataggcagagaatataggactggactggatcgatctagatgccttgacaaaactaa

SEQ ID NO: 64107 - DNA, 656 bp, Glycine max
  Clone ID: PAT_MRT3847_28901C.1
ccacgcgtccggcgcgagacgcttatgactaacacaactggcagcgagtggaacagggcatagacgaagctaaaagcctcacacgctgtgcgtcacaaagatcttgggtcacctctacggctgcacttcacggtgcagtcgtgaactcctacttgcgtgtgaagacattgaaacggcactggatcgtgacatctccatgggggattaacgaagactagcctccctaccatggcctacacgaatgagaagtggcgaatacactggtagagcattggattatctacacgcctgtgacatcagtcaccgagacgtgaaaacgaactatattctcctcccgacactgttaggctacggagcatattgtggactttcaagagacatgcccaacaggagactcacatggggtacgcagcttcacaagggtccccagcgctatgttgaccctgcataggataaccgctgcaccgtacctacagaagagaggagcttgagttggagaggcgtcagcctattgctagaatgacacacgaagcatttatgcttgggaaccttgcaagggcaatcacatcaactaggatttgtacttttcatgacaactgcaccgataccagatttagatgaggaaagtatcgtgtttgggcagggcatcaagggag

SEQ ID NO: 64108 - DNA, 556 bp, Glycine max
  unsure (1)..(556): unsure at all n locations
  Clone ID: PAT_MRT3847_28902C.1
gaaaaaaagggggggggtggagctcggggaaaaatgctcggcacgtgtttgttgtaatgccggagaggaatgtgggttgtgggacggctatgatatcggcttattcccagagagggtatgcctctcaagcattgagtctttttgtgcagatgctaagatcaggtacagaacctaatgagttcacttttgctaccgtgcttacttcatgtataggttcttcgggttttgtcttagggaggcaaatccactctcatatcataaaattaaattacgaagcacatgtttatgttggaagctcactccttgatatgtatgccaaagatggtaaaattcatgaagctcgaggcatatttcaatgcttgcctgaaagagatgtagtttcttgtactgccattatctctggatatgctcaactgggtctggatgaagaggcattggagctatttcgccggttgcaaagagaaggaatgcaatcaaattatgttacttatactagtgttttaactgcactttctgggcttgctgctctagatcatggcangcaagtgcacaacca

SEQ ID NO: 64109 - DNA, 1659 bp, Glycine max
  Clone ID: PAT_MRT3847_28903C.1
atatgaaaatttatgcaaatcatactagattactagattctatataaagcaaagtataagcttaaatggaactaaaattcgggatttcctaaatgatgtaaccatcattttcacttgcaaagaaataagatataaaaatattgactcaaaagatacatttactacaacaaactcaattggagagtaagagagacatcatataatatgcaaaactttatggaaaaggttcatatcctcagccaattacatttattaaaagtagggactatgtccctgtgttccttcggccaacacgagcaacaaaaccagccttgattggagcaactgatcttcctgatccacacttctcacaccggagaaagaagagacgattctcctttgtaagtatagtatccggactcttgcacccaaggcaaataacatattcattgacatatcgtcgcagaattccttcaaagttctttggtgcaaaccttccctttacaaccaatctctgctgtccatcaagggagccacttgtacccaattcagcaagcaagaaagccatgacatggtctggctgccgatgcatcgttttgcatagatccataaaattgacaaacacagttttctttgtgccctcacgaagaacttgaggaggcctcataactgtccttcgccgatctccagctagttcaggattattctcacgtagaatgttaaacaccctgccaagaagctcctcatattcataatcacgatcactcccttcccaaggatagcgagcctggggagcaaccatttctccttcatcatcttcagggtgatcatccaaatcttcatttgcatctccactctcatcattcaagttactcatttcaacaggcttcttcttcttctttttcaaaccagcaaatgcagtctcaaccccctcagaaactgagaggttttctgtcttctcagccaatttctccacagggtcatcagcaggatctacaattgtaattttcttcttcttcttcttcttggtaggatcaaaaggaacaatttctggaacctcctccttcatctcatttggtgtttcgtcggccatgattgcttatagcgcggaggaaaccctagaagtgagtgcagagaaaatcgaatcccttgagaacaagagtaagtgcggccgatggttgcgaaatgagaacgcgtgggggacgccgggcccgggagacccggaggccatacagaaatgtgaactaattcaatactgtatatttccaaatagtcattgaaatcaagcttttacaaacataaagcatttaacaagttgctaaagctaaaaccattatttaactcgtgatgttcactcttctgattgcctttgccctagtacaggaatgtcccaacgttattgtgctcccagatcttgtgaactccgtaatccacagcccgctctccgaggaaggcgccggcgatgatgaaggtgacgtagacggagttgcggcgcatgaggaccttgtagaggctttcgaaaacgcctcctcctctgcttcttcgaggcactgaatccattacctctgttagggttaggttagggtttcagatctcttctctttcgcaagtggacggagaatgagtcaacgaggtgagaccggttcacggtggctgctccgaattcaacaaccgcggatt

SEQ ID NO: 64110 - DNA, 918 bp, Glycine max
  unsure (1)..(918): unsure at all n locations
  Clone ID: PAT_MRT3847_28904C.1
ttgacatcacggttttttttgttcnaccgcctatgcaaagcatactagatgactaagattctatataaagcaaagcctaaaagcttaaatggaactaaaattcgggatttcctaaatgattagtttgtgaccatcattttcacttgcaacgaaagaaaaagatataaacatattgactcaaaagatacatttactgcaacaaactcaattggagtaagtaagagagacatcatataatatgcaaaactttaagaaaaaggttcatatcctcagccaattacatttattaaaagtagggactatgtccctgtgttccttcggccaacacgagcaacaaaaccagccttgattggagcaactgatcttcctgatccacactgaaaagcaaaaaaaaaaaaaaaaacagtattataggatttttaatgacagaacgcagagtgcccacaacacattcacgtttggcagtgctgttaccagatataagacaaacgcaactttcaatcattttggatctcactactttcacaaaataaacagtgattcgagaagtatgcaaaaaataatccttaaacattaagataaagttccataatccttgaccacaaattgaatgaactaccaaccaaaatcccttatagactaattgatcataaataaaacaaaatattaaaagaaaccatcacctttgagaggagcttatcgcaaggtgggtaagggcagacacttggcttaaaaactataggtactaaaagagaaccaagcaaaagtgtataaaaaattcaccttctcacaccggagaaagaagagacgattctcctttgtaagtatagtatccggactcttgcacccaaggcaaataacgtattcatctgaaaaaaacaaagaggtatatcaacttcaactgatggcccgaaaata

SEQ ID NO: 64111 - DNA, 1903 bp, Glycine max
  Clone ID: PAT_MRT3847_28905C.1
gctcttgtttgaattagcagggtttctgatgatacagttgaaaccactcaagatgatacacttgaaaccactcaagatgatatagttgaaactactcaagatgatacagttgaagcaacacaatatagtgatgttctactgtcatttaggtttgatgatcatgaccttccatttaaattcagggaagtcatagtatctgatctgcgattgcttactttgttggaggctggtcttccatcttgggtcatcttccttcagtcatatccagtgttatgcaatctttatcgtccttggatgtgcccacttgcaagacttttatattttttgatctcatttgttactgtcctcattggattctatgatttatacaaaaatgttcctgttctcaaggcaactgcatctcgtatatgtgggcctcttcttgattggattgaaacttgggagatggtttcaagggtcaaatacttaggcacaatgctgtttctacataacttccagaaggctgttaggtggtttcttgcctttacacataccatgcgatcatttttttcctttcttgttcaacctcttgtagagtcattggtggagatttttggatttcttctcccaagcttcaagtttttgtttgaattagctgaaagcatcttttctgtcatttggctcgtagtggatacttcttttgatatagtgggaaatgtactggagctgctcttttcaccattttggtttgtcctcaatgttgtttggagcattgctacttgtatcttatatcctctattttgggttctttgggaattactatatgctcctgttcgtcttgttctggtgatattcagttttgtggcttccatatgttcatacatttgtaatatgcttggcaacacatggcagtttgttagcaggattttccagtttgcagcatcttctgaagcaacagtcagtgcttctgaagtttctatgtggcgaactctttggaatgaccttttttcccagattttccgtgctctcaagagcatactctatgggtttgttgccttcttcacagcctgcaataggcatcgactaagcatttataatcatgtacaggagttcgtccaaagattatatggtacgtgccaaagatcaaggcaagacgactctagagacaatggaaaaacttgcttgccgctgaatttgacggaagaaaagaagaacgtttgattgtattgtgtcttttcagagacagcactctgtattggaaaacaaatttggtaacttttacaaatctaacatcaacacgtcattttcagcaaactcaattcgattaccgttgcaattttaagattatttctctgtaacaaattttgattttaccttttcccctctctttagttccccaagtttacttctcacagttgtctatttatgatgagttttatagtccaatatgtacaaagtatgtacagtacacttgtaaatttcctcaatgtatattcaaaattgaacaattgtaaaatgcaccagttttgtacaatttacagtcactaattttaaaattacttacgggcatgtgatggtagaatatatctattccagcttaaaagacagtgcttagtagacatttcttgagaaattgcactttccgttggtaattttagtaaggtgttgatggtgaactgtcaatattgttgacgtgtagttattcaattcaatttcaagaaaaaccttgtcacttttggtagaataaaaaaaaaggtattggaaatgaagctagtcatttcttttaggtgtaggaatttagttaaaataaggcacatacttctgctaagtgtaagaactgtgaaatccaaatctgtatgctacggtacagagatgccaaatttctaaattgaagaaagtattgtgttaaaagttttagagtagg

SEQ ID NO: 64112 - DNA, 680 bp, Glycine max
  Clone ID: PAT_MRT3847_28906C.1
acggctgcgagaagacacacaaggggaaaaaaaaaagagaaatggatctgcaacgcattttgtatctgaaagagaaagagggtgctcatttcgcagccatcggccgcacttactcttgggctcgagggattcgattttctctgcactcacttctagggtttcctccgcgctataagcaatcatggcggatgaaacaccaaatgagatgaaggaggaggttccagaaattgttccttttgatcctaccaagaagaagaagaagaagaaaattacaattgtagatcctgctgatgaacctgtggagaaattggctgagaagacagaaaacctctcagattccgagggggttgagactgcatttactggtttgaaaaagaagaagaagaagcctgttgaaatgggtaacttgaatgatgagagtggagatgcaattgaagatttggatgatcaccctgaagatgatgaaggagaaatggttgttccccatgctcgttatccttgggaagggagtgatcgtaattatgaatatgaggagctgcttggcagggtgtttaacattctacgtgaaaataatcctgaacttgctggagatcggcgaagacagatatgaggcctcctcaagtgctcgtgagggcacaaagaaactgtgtatgtcattatatggatctatgcaaacgatg

SEQ ID NO: 64113 - DNA, 236 bp, Glycine max
  Clone ID: PAT_MRT3847_28907C.1
actacacatgttaatttacctgaatatgctggaaagagggcggcttattaaactctttactgctgacctgtacaacaaaattaccccaatttgacctccaccacaaaacataacatattcaaaaaactattctcaacactattgcataatgtaatttcctaacatcttatctccacggcatgttcaaatacaacttaatacacaaaatcaatcattgatcatcttataaatattcc

SEQ ID NO: 64114 - DNA, 475 bp, Glycine max
  Clone ID: PAT_MRT3847_28908C.1
gcacacacccgcaaactcggaattcggctcgcgctttttagatttttcctataacatgtattacaccctctttggctttaaaaaaaagagggaaatttatataacactaaaaagaacaaaaaacgggtctaatttaaagaacattttcaaccccgagtctaaaatataatacataactccacctttagtgaatacaagacaatctcctaactgcacttggcccttccatgtgtcaaaaggaaaacgcaaacttaatcttgctttttgaccacggcacctatgacaagctactttcttaagctcccaaaaacaagctgatcaatccttcctttctctctcacattttgaggattaatggatcacttgcaaggaaggctataaaaaacctgacgtgaaaaggattattcataatgacgcttgccaatgcacatgactaaatttttaccagggcaacaaacacctagggggttaactg

SEQ ID NO: 64115 - DNA, 283 bp, Glycine max
  Clone ID: PAT_MRT3847_28909C.1
tcatatgaaacctgccccggagggggcatattatggggacctttactttacaacatatttctaccatcaggtttcaaaagggagcgttttacacaaatcttttcttccctgggttcacgtgtgttctcaaattttagggctctgaattgcctagaaaaaatctttgtgagaaatcttcacacactatttttgcattacctacgctggctaaaccggttctttagaattgtgggagaccttaaacattgatttataccggaacccgacttttttttggggcaca

SEQ ID NO: 64116 - DNA, 883 bp, Glycine max
  Clone ID: PAT_MRT3847_2890C.1
cagacatattggcattcgcagcacgagacagtgtttccaaagtgggtggcataagctacgacgttccatcgggacgaagagatgggcgtgtctcgatcggcgatgaagtgctagacaatcttcctagaccatccttgagcgctgatgatcttattagtaactttgagcgaaagggtttgtcagcagatgaaatggtgacactctcaggagcgcattcaatcggtgtgtcccattgtgtagccttctcagaagacttaagaagggtcagtgacacagtcacacaagatccctcattggactcttcatatgctgaaacgttgaaaacacagtgtcccccaccaccacccacctcagacccaacagtgtctcttgaaccatccacgccaattcgtttggacagtaaatactatgagggattgatcaaccaccgcggcttgttgacttcggatcagacattgtacacgagccaatccacaaggggaatggttcaaagcaatgctaacaatggtgccagttgggctgacaagtttgccctagcaatgcttcgcatgggttctatagaagtgcttactggctccgatggtgagatcaggaagcagtgcagctttgttaattaatttaagggaaaattgaaatagtttgcgattgttctactgttttgaatttgattcataccttccattcatgaggatggccaattcaagtgtatatccctctagggtcgttatttatgtgccttgcctcttccttttaatacttgtttgttttcctaaataaataatttctttcccttgcatttgaactatgtttagattgttccattcttggctaaatctaataaaatttaactagttcttttgttggctcaaaaaaaaaaaaaaaa

SEQ ID NO: 64117 - DNA, 152 bp, Glycine max
  Clone ID: PAT_MRT3847_28910C.1
tccacgcgtccggaattctccagagagaagtttaatcttaatcgatcatcacttcacttcacgaaggcatcatggcagacgagacccagaacaagtatgagagctctgaagttgaggtccaagatcgtggtgtttttgactttctccgtaag

SEQ ID NO: 64118 - DNA, 456 bp, Glycine max
  Clone ID: PAT_MRT3847_28911C.1
atctcccgtctcgacccacgcgtgagacaggcgttagaacaccacagaaagggatctgacagcactacagcaagtgatcaacaaggaagatagaggatcaaatggctacctcaatgatctctaccgcaactgttaccactgtataccgttccatagccagcatgtgcgttatcattcactggcactaagtccactagatgccttacctaccttaaagaccatcaatgacatcacctacattgctaacatcggtagaagacttcaatgcatcgcatcaaggccaacatttatacccaagaaggataagactctttcgtatgtgccatacattgatgatacacaatcgacactggaagtagaataccttaatatgaatgaatggatcccttgcttgcaattctagcaggagcacggaaacgtgtaccgtgagcacaacacgtcaccatgatactacta

SEQ ID NO: 64119 - DNA, 440 bp, Glycine max
  Clone ID: PAT_MRT3847_28912C.1
tccgacgagattgaggcgggggttgatttggaagaaacggttgatttggaagaaacccagctaaggtaaactatcgcaacccctaactaaaccttcaaaggatcatcatgggcagtcacaatgctttggctgccactttcggaatattaggtaattaaccacctacacgtgctcatcatcgatcattgctatctttctttctttctttccctttcttgtttcttgcatcttggtttctagatagctatttattgatatgcatgcgcaccaatttactctaagttctttaattaagtagatgtccgttcgtgtgcatgtgctgccttatctcctctcctctgcatttgcaattctcctccaatccattttttccatctttgtatctcacttacaattcgggtcatgcaattttaattcattattttttgtgtgtgtgtgtg

SEQ ID NO: 64120 - DNA, 184 bp, Glycine max
  Clone ID: PAT_MRT3847_28913C.1
cgaggctagagagctcggccccatacttcgctggaataagaagggagaccctaccgaagctcggaaacaccgccgcatggtgaagagccccaaggaccctaccagaccgaggaggcctctcagtgctattttctggttaatggaggagctaacgaagggattcaaccaaaaacatcctcagaac

SEQ ID NO: 64121 - DNA, 261 bp, Glycine max
  Clone ID: PAT_MRT3847_28914C.1
ccccttacacccagtgcccgccactacctattccctaactagcgaccattattctatccttccctaccaaaaaatttcacagaggctgtaacagctcacatcatcaaagagcgtcttgggacaatcacaactctccttaagtagcgtcccatcagaattggcccaacaagctcgaaatggacaatgagctcctgaactgcaacaagctgcaacattgtttcacccacaacctgaacaaatgtaggtacaactcaacaggaa

SEQ ID NO: 64122 - DNA, 599 bp, Glycine max
  Clone ID: PAT_MRT3847_28915C.1
cttgattgttagttgatgtaatcagattcactagaaaacttgagtgaaaagaatatgcatttgatactgcttgactgggcttaatattatgacgtagataggatccaaatcaagttattgtcaagatccatttttgtctgaggttaagttattcttatgtgctgtcacaagagaagcaaaggaggaatattattccacctagtgttttctcggcttagagcatttgaaatgtaatcattgggcaaatttcaatccctccagataaacctatgggaagcttcatgggctttcacgaggtggtgattgatgggaggatccatactcttagattacaagaacctatttcagatgtggcgtggatcaaaagaaggatctaatattgtcaacctgactcaagaaaacttctagtactcatacttgatagttgaattttgtttgccctccacatccttttccggtcatgattttgcttacattcttcatatctgtaacttgccagtgtctgcactgtaaaattccgatgcttcatagttcatatcatgagtagtttgtatccgaatatgacattttttgttaaggaaaatatctttctatttaaa

SEQ ID NO: 64123 - DNA, 453 bp, Glycine max
  unsure (1)..(453): unsure at all n locations
  Clone ID: PAT_MRT3847_28916C.1
gggtntggtgggtgcacgtcattgtgcgatgcaagagtgcacacgtacgttgcccgcgtacgtgagttcggctctctctcaccggagccttactggaacgaaaccaaaaacaagagcctttctccctcaccaaagaagaagaggcgcacgatggccgatcaacttaccgttgaacagatctccgagttcaggcggagtctttatcttgttcgacaaggacggcggagggattgttctctctctctctctctcaaggtgtgcgtattcgatttgatttgatatatgcgtgtgcggtacttgtagagcggggtctcttttcatgataatggattaggaaaacttgatcacttctgattctattttagaatcctttttttgctgatgctgatttggtagaggtagatcttggataagctggactttgtggaaagggtgagagataaagagttcacg

SEQ ID NO: 64124 - DNA, 296 bp, Glycine max
  Clone ID: PAT_MRT3847_28917C.1
ggaattaaaaattctggatcggcatattaaatccccaggtcgttttcaaatccttatcataaaacccatgaggccaatttaaaatattcttagtccacacccaaaattttttcaaaagaaatttccgggattttagcccgaccaaaatcttaaataagggaatttctaccccatcgataattaaattggaggggaattatgagtgagcagtaccacacgtcttacccttaaaatcaaaataccaggtcaaaggttcaaggtaactatggacagaacggtaaaaaaaacttgataaa

SEQ ID NO: 64125 - DNA, 639 bp, Glycine max
  Clone ID: PAT_MRT3847_28918C.1
aagtgggaaggagcaatttataaattcctcttttaaacttggggatgggaagaagtgtacatttctttttacatttgacagcttttactcatcgtatttgactagagttaagaggacctagcaagtcatcacactttgttccctcacacagacactcataagggttggcatagaaataatcctcttccttcggcttgtctacatcgactcgccgatgagttggctgtcccattcttttttcatgaacctgtcgaacagcatttgaaaattcattccatggaagggttccattttgatgcatgtcaaacaattctacgagctttttccgatccaataagatggatttcttaaaaccagaatacctgcgatggccttccacaagttttgccatgttaccataatacgtaggaacaaaggtgttactggctactgaaaccataaaatctaaagctgccatttgtgatgaatgattctgaaactgctgcaactcatcattgaccagcaatgtctctttcttaacaattcttggaaatgcagctctgagttgtgctaatcgatgttcaccaccataaatttcaccagctgcaatatatatttgggtgtctccctgtcaaaacccaaggcttgcagaattaaggc

SEQ ID NO: 64126 - DNA, 193 bp, Glycine max
  Clone ID: PAT_MRT3847_28919C.1
cgtctcaaacctcttcgttccttcgattcattaccattgtcttgccagaaatggtgcccaaagaactgccagttacgacgattcgtcgtacacgtggagccgcagggcaaattggatatgctcttgtccctatgattgctaggggagtgatgctgggtcctgaccagcccgtgatcctccacatgcttgacat

SEQ ID NO: 64127 - DNA, 494 bp, Glycine max
  Clone ID: PAT_MRT3847_2891C.1
ggatgctacagataaacatttcatcatctcaagaagctatagcattgtttttttttttttttatctcattttctgcattgttgagtcagaaatcccattttgcttttaccctcagatctcatctcaggatccataacatgacttccgcacggaataagcatcctttgcctcctgcagttcatttcgttaagattattctcacaacaagtcttgcagatggaatacttcttccaaaaaaattcactcgaaaatacggggatggcatgtcaaacccggtgtttctcaagcctgcagatggcactgaatggaaaatacattataccaagcatggtggtgagatttggtttcaaaagggttggaaagagtttgcaacatactattctctagatcatggtcacttgctgttctttgaatatgaaggaacttctcattttgatgtgcacatatttgacagtagtgcccttgaaatagactatccctcccatggtactcat

SEQ ID NO: 64128 - DNA, 227 bp, Glycine max
  Clone ID: PAT_MRT3847_28920C.1
tttacgcgttttgtgactcggtcctttacaagttcaagtttggctggtgcctaagaatgtcctgctactccgagcgcacacagttgcagatggccttcaaatcgtgctcatccattgctttgatgcttacactcaacctactcttgtatttacattgctctaggtgcggcggttatgcatgccctatccctatgcaagaactagatgcagcgcagaatcataaccat

SEQ ID NO: 64129 - DNA, 411 bp, Glycine max
  unsure (1)..(411): unsure at all n locations
  Clone ID: PAT_MRT3847_28921C.1
agagtaaaaacatttcattggatggggattgtataactattgannnctatacatatgtacaaattgatgaggcaaaattttcaaatcctcagccgatccctaaaatttggatgctttgcaggatttagagagaaaatcatgactctaatcttattgagtcgtgatgttcaaaaggcaggcccttgttttaatcatgtgcctaaatacgccctccaaaccattttctatgctttcaatggcattctccaaagcttccaatctttcatgtgcaccctgcatctttgcaacattagtaccttcacttaaaagggtgcttaaagatgcctccacacactgcaacttattggagttctcttggttctcttcacatgctatcactcccttgtgcaataattgtgctaccaataacca

SEQ ID NO: 64130 - DNA, 630 bp, Glycine max
  Clone ID: PAT_MRT3847_28922C.1
ggtctaaaatatcaaattaattaatatataaggggccatagtgtaatccctctttttttttttttttgaatgggaatgaatatgtttggcatttggcaattacatcaagttatcaaataccatatctgaatgacaatttcgaaaacacatgcaactgggaatggggtatcccattgtcacgtatccctcaaaacctgatttgcagcccttgattgctccctacatttgaatgcaggtattatttatttgtcaaacagacacctaagagtgatctcataagcagaaaatatagcaccattcacaacaaaggctctagcaaccgcagttcctaaaccccgccatagcacaacgtatccttcctcttcaacgctcttccgaagacaatccaaaatgcctttgtatttccgcgaagaaagtgtctgagcctgcaatcttgtctttataacgtccaaagggtagctgaaaacccaactcacaaccccggccaatcctcctgataccaacatagtattcaagctctctccacaactttttctgcaacctgggtgaagtttctccctcgcgtattcatatgtccaaaagtaaaggccatgcgcaggtgcatctcttagtatagtgatgccaagtcct

SEQ ID NO: 64131 - DNA, 353 bp, Glycine max
  unsure (1)..(353): unsure at all n locations
  Clone ID: PAT_MRT3847_28923C.1
cgggcgtgcgcggggcccctagagcgggcgccccctccatattctcnttttcatcatcaaacaacaaccccatgggggacactttagacaacgttccgggggtcaccccacaaaaaaaattttttgggtcccggggagaactttaaatggacagcccggtgtggttacatgaccaagcctaccaaccctgggggcacccacagcaaccgaaccccctttagggaaccacccctggggtaatttcttatattccggcaccagacaagccaacagcaaaatgtcggttatggacgggcgggccaggcaagaggaaaagacccggagagtattggactcatagtgcttctgcaacc

SEQ ID NO: 64132 - DNA, 382 bp, Glycine max
  Clone ID: PAT_MRT3847_28924C.1
ctatgattaaaaatttttttttttttttttccccaaaaaacaatttttggggacccttaggggggccccccaattgttaacaggggagggggggaaaaaaaaaaccaccccctaaaaggggaaaaggaaggggtttttttttaaaaacgggggggagaagggtcctcttgtatgcccaaagaaacacaaaatttttcgtagggggcaaaaaaaaggctttaagtaaaaaagagggggccaaaaaaaccgcgcgggggggtccccccggaaaatcccgaccggtacgccgaggggaccccatttcccttttggggggggtatatagggggggggcaaaaaaggggaaccgggcataccggggggaaatttttaagagccaaaa

SEQ ID NO: 64133 - DNA, 217 bp, Glycine max
  Clone ID: PAT_MRT3847_28925C.1
agaaagatcaacaagggaatgaaaagaacagagaggaggagcaagcttgaagagaaaatgaccagaaaagggagaacaggtgcgcttgaacaccgagaggaacggaagacccaaatgaagagcgcttagaaaggacacgaagatggcgccaaacggccacagtggaaggcctcaatactgtgagcaaaagagggaaaacagaagcgggggatgccag

SEQ ID NO: 64134 - DNA, 569 bp, Glycine max
  Clone ID: PAT_MRT3847_28926C.1
ggcacgcggtttttctccccagcagtccctaaaatcacatggtatcagagcttcggctctgatcttgtggtgtcccgccatggaaaaaaatgctgcgactggagaaaattcctccaccacttctacgaattctggtggtaatgaaactgtatcatcccctatcatatctgattctctgtccataggtaccaatttacagcttgtgattcaaaagctgaatggtgaaaattatgttgaatgggctcaatctgtgaaactggcccttgatggcaagggaaagttgggctacctgacaggagacacctctcaaccaggagtgaccgacccctctctcccaagatggaagtcagaaaattcactaatcatcgcatggctgatcaacttaatggactcttgcattgggaagtcatacttattcctcccaactgcgaaagatgtgttggaggccgtccgtgattgttattctgatctagaaaactcttctcagatttatgaacttaagactcaagttgggcagtccaaacaaggagacaaggatgtcacaaccctttacaatctcatgggtactc

SEQ ID NO: 64135 - DNA, 217 bp, Glycine max
  Clone ID: PAT_MRT3847_28927C.1
ccaagtcggaaccaacccattctccatggaatggactggtttggccaataggcaactgagcacgggcaacgatattctgtcgtgcgatcatgctagttctgacggatcgatcaccaagccaagtatgagcaacacggtataaatgacaaacagacttagcggtggcgatgaaaaattgatgcgagaaaggacacaccagccgatggcttgcagttca

SEQ ID NO: 64136 - DNA, 452 bp, Glycine max
  Clone ID: PAT_MRT3847_28928C.1
agacgacagaagggggcgcgagatagagactgaagattgaagaacagtcgtcggctcctcgctcgcccttcgctgctgcgccatcaccgtgcccttctcaaagcgattttaacctaaccgcgttctttttttcttcagaaatcgagcataaggatttgaggattgaagtattgaacaccaaatcctttatacttgtgagtttttgttgcgtcaaattcttcaattgaaaactttgttattaggaattagaatcacactgcgttcctcactgattgtgtgaccgtagtgttctacataaatttttagggccatatatcacgttgtctctcacttcggctaaatttcaccatttcacacactaaccacacttttcttttgcatctccaactccactccacccgttgccctaactgagtttcgcgttggtatacgcagtgttattgatcctattc

SEQ ID NO: 64137 - DNA, 301 bp, Glycine max
  Clone ID: PAT_MRT3847_28929C.1
taggatgaatattccttcaggaagaacttccagaagccaatatttgtggtctgtgattctgatttttgtaatgggattcattgctggcggttttattcttggagctgtccacaatgccattctcctcattgatgatgtaattctttttggtgcggatgctgcattattcacttggaatagctgctttggaaagaaagccattgatgggtgcatttcccgttatccagatgcagagcttaaaactgcccagaatgggcaatttgggaagggttgtggggagggtacctgcggcaaccccccc

SEQ ID NO: 64138 - DNA, 125 bp, Glycine max
  Clone ID: PAT_MRT3847_2892C.1
gataactttaatatggaccataactgaacgttttgatcgtatcgaaccgatgctataaagactggagctcatgcatctcatgagcgctctaaccatttggacgagcgcgtgctaagatgagacaa

SEQ ID NO: 64139 - DNA, 436 bp, Glycine max
  Clone ID: PAT_MRT3847_28930C.1
acgagatggtgaaatctattgctcctccaaaccatatacggtttgcgccggatcgtccacgctgtgtaaactcgtctcgtggtggaatcgtgttggttcggacgaaaaacccgctctgttgttgcaccaagcggattggcttttgtggtttcttcatggaaggcttggggttacagattttaacaatgctttgatggcatcatttaataggctttatcactattgagttttgcacagctaggaggtttatgtttgtgtcgcagttttgaccattgttttctgttttgcaggttggctatgatcctgaggtggactcatatccttcatggctagtctctcaaccatattatcatcttttaccttcggttgttgctcctggaactccaattagctcgtttaaaggaggaaattggaaataagtacgactagcgccttc

SEQ ID NO: 64140 - DNA, 117 bp, Glycine max
  unsure (1)..(117): unsure at all n locations
  Clone ID: PAT_MRT3847_28931C.1
ctcttgtggntatggagtggccactggaggacctttctggnctggggnacttngtgacanatcntgnaatnagtncctangcagtcatactgngatgacctacttcaaactcancat

SEQ ID NO: 64141 - DNA, 289 bp, Glycine max
  Clone ID: PAT_MRT3847_28932C.1
aaccaaagaaaaatttttttgggttttttccttttccttttggtcaaccaaaaaaatttgaagaaaagggggaaaaagaaaatacaagggggagtttattttactttacccgtatatttatgtttggagctatacatatacggaggataataaaaactttaacgaataaataattaggggttaattttactatatgcaaggaaaggggctttaaaaaccggggtttttcccatttactcgggggaggggacttagggacccactaccaaaactggtccggtttccaatt

SEQ ID NO: 64142 - DNA, 599 bp, Glycine max
  Clone ID: PAT_MRT3847_28933C.1
gttagaactatttatttggttcattccccgtcaccatccttgaagtacataaaaatgtgcattgtgtaagagtcttcagaccctgcattcctcctctatgcacaggtcagcaatgactgcttaaaaatacaaataaaatagaaatgacttttgagatgcactaatggaacaaagacctcagttcaacaagccacagaaacaatacatacatctcattcctgaatctgaacaggctcaaaacccctctcaattgaagaataccagttgagttttccttcttctcaggttttgagttgttgaatttgatatctgccaccaaacgagcaaactctgttaccataagagcctcctgagggatatcagtttttattatatgcttgcttggctgtgggatccactttgacacaaggtcatcaaagcctgtttctgtagctgcataaaacgatgcttccttctcttcataagggataatgaagtcatgaacatgtagtgttccttttgtcccaacagcagttatatccattgtcaagttggtcaagaaggagcagtggaaggttgctactttcccatctttccagtgtaaagaagccccacaagac

SEQ ID NO: 64143 - DNA, 1419 bp, Glycine max
  Clone ID: PAT_MRT3847_28934C.1
cggacgcgttttcggacgcgtgggaagttatcccacacatgccacgtcactagactcacaccagaaactctcaatggctgaaactcccacaatccgtttcggcgtcatcggctgcgccgacatcgcgcgcaaggtctcgcgcgccatctccctcgcccccaacgccgccctttacgccgtcggcagccgctccctcgacaaggcgcgtgccttcgccgccgccaacggcttccccgccgccgccaaggtgcacggctcctacgaggcggtcctcgacgatcccgacgtcgacgccgtgtacgtaccgctccccactagcctccacgtgcgctgggccgtgctcgccgcgcagaagaagaagcacgtcttgctcgagaagcccgtcgcgctccacgcggcggagttcgacgagatcgtcgaggcgtgcgaatccaatggggtgcagctcatggacggtacgatgtggatgcaccacccccgcaccgccaaaatgagggacttcctctccgattctaaccgtttcggccaactcagatcgattcacactcattttacatttgctgctgatgccgatttccttgagaatgacattcgtgtgaagccagatcttgatgcacttggctctcttggcgatgaagggtggtattgtcttagagcaatactctgggctgccaactatgaactccctaaaactgtaatagcctcacacaatcctgagcttaataaagctggggtgatattgtcttgtggggcttctttacactgggaagatgggaaagtagcaaccttccactgctccttcttgaccaacttgacaatggatataactgctgttgggacaaaaggaacactacatgttcatgacttcattatcccttatgaagagaaggaagcatcgttttatgcagctacagaaacaggctttgatgaccttgtgtcaaagtggatcccacagccaagcaagcatataataaaaactgatatccctcaggaggctcttatggtaacagagtttgctcgtttggtggcagatatcaaattcaacaactcaaaacctgagaagaagtggccaacaattagtaggaaaactcaactggtattggatgctgtgaaggcttcaattgagaggggttttgagcctgttcagattcaggaatgagatgtatgtattgtttctgtggcttgttgaactgaggtctttgttccattagtgcatctcaaaagtcatttctattttatttgtatttttaagcagtcattgctgacctgtgcatagaggaggaatgcagggtctgaagactcttacacaatgcacatttttatgtacttcaaggatggtgacggggaatgaaccaaataaatagttctaacaacttccttacctgttttcatttgtgaaaaaaaaaaaaaaaaaactcg

SEQ ID NO: 64144 - DNA, 157 bp, Glycine max
  Clone ID: PAT_MRT3847_28935C.1
cttactcgtccgcaaacctgaggctgatgagtgccctcttgcattcgtgaactagtatgtaatatttcatccacttaaataaagcgcattactatgtgcaatgagtgcgcttaaatattaaagctacgacagaagaggaaatgaccgaagagataag

SEQ ID NO: 64145 - DNA, 286 bp, Glycine max
  Clone ID: PAT_MRT3847_28936C.1
ctcgagccgcgagcttaaccttgttgttttcaagaaacgtgttggaaacgctacttcattttaccaacatgggaatttacccgctgattgggccaggctcacattcactaaatccctcatagagttgatggagcccctcgtgagtgagaaacaaaaaccaccacctcttgagtttcacaagaggagtccccatatgccccaaaatgtggatgtgtccactatgaagaggggggggtgtatttacacttggggaggggagcgcctttatgcccaagttagtgattgg

SEQ ID NO: 64146 - DNA, 597 bp, Glycine max
  Clone ID: PAT_MRT3847_28937C.1
tgatcattgacattgtagcaggtgcatcaacatgttctactaattaccaaaagcacaagcataaaggacacttggaacaagcatgaattctctgtgctactagacaaagaaagaagcagcgagaaccaccaagaaatagaagatagccaaatcacaacagattcagtcctagactcacactcacccacgtcgacatcgttatgcaccgtgtctggatcaacaagtactaatagtgggagtgtgacagagaatgagtcactaaaaaagaaacgtggtagtgttgacatggtgccagagatttggtacacaatggtgaaccgccgaaaaggagtccctcatcgatctccattctactgataacatatcctccaaccaattgttttttcaatcgaataaaccaattttgtaggttcagagttcttacgttttcacatatacttccaaaaaaaatgttataaccagtgagtcatttttttattacttgactttcttttaagttaatgcaattgatatgtagtcccctttattaacaagggaatgcattgaacaaaactagaggatgttaaaatgcttttcaattacagaggcacaagcgcc

SEQ ID NO: 64147 - DNA, 246 bp, Glycine max
  unsure (1)..(246): unsure at all n locations
  Clone ID: PAT_MRT3847_28938C.1
gngtttttcatttcatcgtgcattcaatggcaaccacagcagntccnggcncnnaccatggtgagcacctcnttcatgnggaggcaacctatgancancacaagcctaaagacatncccacngttggtgaagctctttttggtctgaaaagtggacgaggtggtcgtgtcacttgcatggcctcgtacaaggtgaagctcataaccccagaaggagaagtggagtttgaatgcccagatgatgttt

SEQ ID NO: 64148 - DNA, 113 bp, Glycine max
  Clone ID: PAT_MRT3847_28939C.1
ctctacttttctagaacctcaagcaccttatactcagtgaaatatcacttttgactaccttgacggacagtgtttgacattttgatattaatattactggtgtctctaatttt

SEQ ID NO: 64149 - DNA, 698 bp, Glycine max
  Clone ID: PAT_MRT3847_2893C.1
ccacgcgtccggtgtcatttttcttattctcttcctctctttctctctaactctgagatacaaaggagaaatagtaataagaaattatggctggttattcaaaaactagtactactacctcagcttctcttttgatcctttttcttctctttggtttctctatggctaaggaaatgttggttggaggcaaaactgatgcatggagggttccagcctctgaatcagattcactcaaccaatgggcagagaagtctcgtttccaagttggtgactatcttgtttggaaatatgatggtggaaaagactcagtattgcaagtgagcagagaggactatggcaattgcagtatctcaaaccccataaaggagtacaatgatgggaccacaaaggtaaagcttgagcatccggggccattctacttcatcagtggtgcaaagggtcactgtgagaagggtcagaagcttgttgtggtggttttgactccaaggggaggaaggttcactggcattgcaccttcaccatcaccttcaccttcttctgcttttgctgagtttgaaggtcctgctgttgctcctactagcagtgccactgctttgaatggggggattttgatgatggctatgggagtggttgctgctatgtgggtgtttcctatgtgaattggttcaattctatatgatatgttagtgttgtttagc

SEQ ID NO: 64150 - DNA, 222 bp, Glycine max
  Clone ID: PAT_MRT3847_28940C.1
gtaaagcttacttcagcacctataattgtctacaagtaattcagcggctgcatactcaccggagacgatgagtcaggtccagccaccgtgtctcagaagccagaaccccatcgtatacggcgacgtactgggtcgtctccggggaccttagctagaagcctgtcgcaccggcactttctgccatgatgcagagcgcgtagactctagtgctcggacaaaccc

SEQ ID NO: 64151 - DNA, 229 bp, Glycine max
  Clone ID: PAT_MRT3847_28941C.1
gtctggattagacgatcaaagtcctactgccttcgatccttgagctgaggcatatgctgataactctggtgctgggtcaaaggagtctgtgcatattcgagttcggcagcgaattggtaggaaaagcctgaccaccgtgcagggattgaaaaaagagtgcagctgtcacaggatacttcatgacgtgaataaagacaggtgaggcaatggaacatttgttaatgaccca

SEQ ID NO: 64152 - DNA, 1789 bp, Glycine max
  Clone ID: PAT_MRT3847_28942C.1
gggaaaaagtaagggagagaagggggatgttccatgtctctgtgaagaagctcaaagcgttaaactgcttcttcttcttcaatggcggcagaatcatctcgcagtagcgctaaacgcccctttatggaagaagacgacgacgaattctccaaaaagccaccagcaaaaagggttaggtttccaaagggaaagaaagtgaagccaggagatgaagtggtggtggacaaagcaaatgttgaggagggtgaagaagttgacttggtgaatgctaaaactgctaccaatgctgccaaagagcgggaaaaactcagaaggtttctaaagggaaagaaagtgaagccaggagatgaagtagtggtggacaaagcaaatgttgaggagggtgaagttgacttgatgaatcctaaaattgcggctgccaaagagcgggcaaaactcagaaatcaaattactgctgaactccttagggagagtgctggaggtatcacaaacgatttatcggctgctgaagtgacatatgaggataatgagaattttgttgatgatgggattcaaattgagcctttcaacctagataaagattgagtatatgagtgagtttatgcttaaggaaattttgtttgatattgatgagagaacgagaataagtattccatgattctctgtagcaacaaatgttgaagatgtgggccccccagacctttcttctaaagatattggaatcatgaagaggcgcattgcaaatgttcttgaacctggggaaacggtcttgcaagccttaagaaggttaaaaggtaacagtgatagaaaggcaaaaatgtctgctgagactaagattgtatttgaccagctaactgaggatgctatgaagctgatggagaatggtgaatacaatgttcctcgcgaccggacggcggatggtgaatacagttaagttattctcactgggcttgcccaggcaaattatgatatgtttgctgatgacgtcgagcatgatacaagtaacccttctagaaatgcaaataattctgctgggcattttttttcatttgacatgcttactggtcctgcgatttgggtgttgtaaaatgtttatgtgaatgtttatcatgaaaagcaagaggtttttgatcgtgaagcagaaggatatgagaagttagcccaggcaaattatgatatgtttgctgatgatgacgagcatgataccagtaagccatctacggatgaaaataatgcagttagtcaatcttcttcagatgccataaattctggtcctgagggtggagcatctcaaagcgattacgtgtatgatgaatcttctgggtactattacagcagcaatttgggctattattatgatccaaatacaaggctctattactcagcagcatcggggcaatggtactcctttaatgaggagactagcacatatgaagaagttcacgaggttgcatccaatgtgagctgagtgactgatttaagggggagaataggctatttagcatagccacaatcactgtctatcagtggctcatcatgtacagaccgaagcactcttgatctttttgtacgttatgagggactttcttcttaggtgctactgcaaatagttatgcttttatctcttcaaggttcctattttatagtagcttaaatttttcgcgtgtaaaaattacttagaatgatcccttgaagttaggagctatacaatgtttacaaccttaaactaactttttttacctaattttgcgttacttaatcctcacaatttcacacttccctctctctc

SEQ ID NO: 64153 - DNA, 607 bp, Glycine max
  Clone ID: PAT_MRT3847_28943C.1
aatcagatcaatcatgccaaggaagcagaacttggatttattggtgatggaaccctttgtgcccagataataggtggtggttttagttacctcaatagtggggtggaactgcaagatactcaaaagttggtgccctccaatgctggtaaggttaatagtggggtgacagatgaagaaagtagattatggggagaaagtccattagagtatggtctagaagaaattaaacagctaattagcactagtagttgcaacaactttatgcttgatgacagcaagacaggggaaatggccatgtactactgatgctgactagttaaaaatcaagaacatttgaaagggtaataaacaagggcatgggttgaagttagaactagtactagaagattcagatttgatttggacttggtgtgtgtttttgtgggggaaaggtagtgtactagtgttcaattggtccacttactttttttacagtacatgttgatgttggaagtttcctttgttttgtatcatttacttggtgcaggtatcattaacccccccataataacataaccatgatggatgtgtccaaaaacaaatgaatcagaaaggaattgaggaaacc

SEQ ID NO: 64154 - DNA, 834 bp, Glycine max
  unsure (1)..(834): unsure at all n locations
  Clone ID: PAT_MRT3847_28944C.1
ggcaaaaagaaaaaaagagaagggggaaatctcttcttcaatggcggcagagtcatctcgcagtagcgctaaacgcccctttatggaagaagacgacaatgaattctccaaaaagccaccagaaaaaagggttaggtttccaaagggaaagaaagtgaagccaggagatgaagtggtggtggacaaagcaaatgttgaggagggtgaagttgacttggtgaatgctaaaactgccaccaatgctgcaaaagagcgggaaaaactcagaaggtttctaaagggaaagaaagtgaagccaggagatgaagtggtggtggacaaagcaaatgttgaggagggtgaagaagttgacttgatgaatcctaaaattgctgctgccaaagaacgggcaaaactcagaaatcaaattacttctgaactccttagtgagggcgctggaggtatcacaaacgatttatcggctgctgaagtgacatatggataacgagaattttgttgatgatgggattcaaattgagcctttcaacctagagaaagaaagggaagaaggttattttgatgctgcaggaaattttgttgaatatataagagagaacgagattaaggagccttacaggatgcatggcttgataatgttgaagttgatccaaaatatgctgcattaagctctgtagcaacagatgacgaagatgaggggcccccagacctttcctctaaagatattggaatcatgaagaggcgcattgcaaatgttcttgaacctgnggaaacagtcttgcaagccttgagaaggttaaaaggtaacagtgacagaaaagcaaaaatgtctgctga

SEQ ID NO: 64155 - DNA, 214 bp, Glycine max
  Clone ID: PAT_MRT3847_28945C.1
cacccgtttttttttaaagataaaagtgtacttgccaaaaacactgtgggaggaaccatactgtgtagtgatcaattggcaaattgttacgagagagggcacttttacagcaagtgttgatcagcagagcacttattgtattaaaggaatgattactgcgcaggccacagctgggtttcctgagaatacaggtagagcatatggcctgtgctat

SEQ ID NO: 64156 - DNA, 457 bp, Glycine max
  Clone ID: PAT_MRT3847_28946C.1
tggcttggaacctggcttggaacctttgggctgatttatgtgcttgtcgtgagaagatgatagaaggggatgacgagctgacccgacaatcaagacaccgccacctgcgacaccgacttaacccgacactactgaaacttaacccacattaccgccgaaccaaccactgacgaaagacccactactctcacgggaccaaactttgaaccccccaccggaaacccaagagaaacaaaatacaacaaagaccacggaagcaaacacctccgtacccaccgtcatcgtatcgcccacctcagccttcatcgtccccccatccacaacccatgcaaaaatggcaagctaaagcgatcaaccctatcgaaactcgatcctcctacccccactaacgcaactaacgaccaaaaaaaacgaaaaaggcccctaacccccggctccagcttgaaaaacaaccccc

SEQ ID NO: 64157 - DNA, 420 bp, Glycine max
  unsure (1)..(420): unsure at all n locations
  Clone ID: PAT_MRT3847_28947C.1
aaacactaaaannattgttttccaaaatttaaaactggtcaggtgcgactacactggggagaagaaccgtcatttttaaccccacaagcgcgatgcaggaccgggtcattaatagggactcaaactaagcactccatgtcaggatgcccgttgaatatttcccaacaatttcggtttccaaggccctcaatcatccggggctgcggtggttcacgagcttccatgaaagttggttaacagtgccccaataagttaggcggcttatgtcgacaagatttgtttctttagagataactcgaaggactttgcagggctaatggacttgtgaagaatgcgctgatagcgctgaaatttcgtcttaacatacatagaacctttttccctgtcattctcgggcggtttcaaataaatattgccggg

SEQ ID NO: 64158 - DNA, 350 bp, Glycine max
  Clone ID: PAT_MRT3847_28948C.1
ggctcaaagaaccggaacttatcgacaactttaccacccagagcaacttatcagcagcaaaggatgtgcctgacttcaatatatcctcaaccattgttccatatgctaggcgatagctctctgggatcagaacaccaaaaatcccttgctcacaatcggtcgcgccaacccaacatgtgattcttccgtcgcgttcactgtggatgaatcggtggcacatgataaccgtttggccatcgaaattaatatccttttcgagcgcgccctcgccaccgatttggacattgaccagatccacattgctctcatggaactccttaagccacctggcgacggctaatccttccagt

SEQ ID NO: 64159 - DNA, 378 bp, Glycine max
  Clone ID: PAT_MRT3847_28949C.1
cataaatatccgtgtgatgagtgtccttttgcatttgtgaactagtatgtaatattttattcacttaaataaagcgcattactatgtgcaatgagtgtgtgtaagtgtcaaaaaaaaaaaaaaaaaaaaaaaaaaaaaaaaaaaaagaaaaagatcaaaaagaaacaaaaaagaaaaaaaagaaaaaaaaaaaagaaaaaaaaaacaaaaagaaacatgggggggccttttaaagggaacaatattatctgcctcgggaaaaacacaaaaaagatgtaccattgtgcgccctaaattaaattgcataggccgtgacaaaaaacaattttagaggaaaaaccttggtgtaccccaattaaatggcttagaagaaaaacc

SEQ ID NO: 64160 - DNA, 834 bp, Glycine max
  Clone ID: PAT_MRT3847_2894C.1
ccacgcgtccgcccacgcgtccgtacggctgcgagaagacgacagaaggggattcactcactcacttcagtgtcattttttcttattctcttcctctctctctactctgagacacaaaggaaaattataagaaattatggctggttattcaaaagcttcagctctttggatcctttttcttctctttggcttctctgtagctaaggaaattttggttggaggtaagactgatgcatggaaggtttcagcctctgaatcagattcactcaaccaatgggcagaaaagtctcgtttccaagttggagactatcttgtttggaaatatgatggtggaaaagactcagtgttgcaagtgagcaaagagaactatgtgaattgcagcatctcaaaccccataaaggagtacaatgatgataccacaaaggttcagcttgagcatccagggccattctacttcatcagtggtgcaaagggtcactgtgagaagggtcagaagcttgttgtggtggttttgactccaaggagaggaacaaggttcactggttttgctgcaccttcaccagctccttctgcttctgctgagtttgaaggtcctgctgttgctcccactagcactgccaatgctttgaatgggggaattttgatggtggctatgggaatgattgctatgtgggttttttttatgtgaattggtgttagtgttgtttaacttggtgtatgagactgtcacagtgaggtgattgtctgtggtgttattttttgtaggaaaaaatatgatttgattcatttttataatatatattatctatgttctggcctttgccccgtttttcc

SEQ ID NO: 64161 - DNA, 525 bp, Glycine max
  Clone ID: PAT_MRT3847_28950C.1
tggcttggaacctttgggctgatttatgtgcttgtttatgtgcttgtttatgtgcttggcttggaacctttgggcgatagtaggggctattaatattgaaataaatttatcaagacggtccttcccgcacttccttcagcgtcgtcctccgtagtttccacttctacgttctaagggtccgtcatccatcataaattaaccaagaagttattagcgcataagttcttagcgcataagttattagcgcataaattattggcccacaagttaaaattattggcccataagttgaaattattggcccataagttattacacaagaagttattacataagaaattattccacggaaagcatttcttagcagaggataatatttacgttcaaagtaagtaacgaggctcaccactcatccaacaaacaagaggaatcgtcccgcgcacctcagtaccgcgacccataatcctgcagtaacgtacacctccgatctccgtacgtatcctaacgtcctgcagtaccaacgac

SEQ ID NO: 64162 - DNA, 433 bp, Glycine max
  Clone ID: PAT_MRT3847_28951C.1
cacaatttttcttttggttgtgaatttccaatctcaggtgctgcagaggttgaggaggaggatgacatgtttatcttggtggctcctcaaaatgctgtagggaattgtattattgatgatctaagagccatgaccaatgctgctgaacacagaccagttatactaatcaatgctaggcttaaggttcagttcctagctccttttgtatgatttactgcttgattttgaggttggtattattaaatgaagattatctgaatctgactcagtactaagtcaacttcataacatgcctggttgaccttggtcctttgtaatgtggaactcatataaccatgttatacataaaaactgtttgccaaatagtataaccgagtatcttcaattgcatgcctataaatgatttttaatgatttccacctttttgaataac

SEQ ID NO: 64163 - DNA, 525 bp, Glycine max
  Clone ID: PAT_MRT3847_28952C.1
tacggctggaagaaagacgagggacgggtacacacacacaacttaatgtggctgtgtggggaaaaaacaacaatagggtgcggttggatagatacacaacttggagtgcttgaaggagcatcggacagggctcctgcaacattggttcttacattattgggcactggatggccagtgtcttttatgtgactggtgatactccttatgacagtaggagcatgactgaggaggctgatacggctgagcacgatgctgaagaatgcttgcgagctcgccatgaagaacacaatacatagtatcactagtacaccgctccgaagagaacagagattgagagacccattggggacacattgcagaccacataggatgctttctatacactggagtgtcttgatatatgaaaaattctgccacaaggaattgcgagaagtataagaaatgatatgatatatgaggatcttgtgcatgactatgcacacgattgaatggatcaattataccatgattacgctcatatcatat

SEQ ID NO: 64164 - DNA, 1315 bp, Glycine max
  Clone ID: PAT_MRT3847_28953C.1
gtctgaatgctgtgtgacatctaaagttggcaagataattcaaagcagagagtgatcacagatgaaaaggccgctgtactgccagtgatgaagcctataattgaagtgtatgtgacactataatagaagcatgtatgtgacactatgcaattagataaacctcttggctgaaattaacattataatgaagttaaacttgattttttttcaatccctcctattaggactcgccttgttagtttattgagatcacatccatggtcttagatcagacgttcgttgcctattaattctgaactgtgttattttaaaaattctcttaatgcataatctatcccctactaggtattcatctctggagattgagcatatcactttcactgctttgattcaccatcaggatatatcacagcatctgctgccaagtttgttattcaccttttgcgcagccacgtggatccctgtcatttaatattcatatttgctacatataatttatgttctccaatgtactttaacagggttggtgtcaaggcagccaatgctgcaaaaatgaaggtagtggctgtcccatctcgaagggaagctgattgtcacgggctagcaaatgttgttcttcactcacttttagagtttcaacctgagctatggggttcttccaccttttgatgactggttagataacacactacctattgacccaatacatctgagtggtttgtatgttagtggatgtctagaggaagcgacagagaatgcaacacttgcttttcctgatcaagctgttgggctttacttcggttgggccaaggtcgatacagatgggaacttcaagatattggtcagcattaatattgacttctcctgtgttggctacaaaagaattcatgtttatcttattgatgcaaacagtgaccttaaacataagcagaagatgcaaatccatcttgttggctacataagagcgtgggataacaaggaattcacgtcaacggaattggagaaactcgaagaatacaagtctattgcgagagcttcactgtatttgccatcattcacttgtttatagagaagcctcacatggaggagacagtcaagtgaccatatatttggagatgggaataataactatacaacttgttgcagctttcaccacaataataataacaatgaaattaattgtctatttttttttatcagaatgaaattggttgtgtaaagtaagatatgtatgaaatgattcattaggaaatgtttgtaataattgataaatattgtatcttcaaaaaatagcaatcaattgatgttcactatc

SEQ ID NO: 64165 - DNA, 339 bp, Glycine max
  Clone ID: PAT_MRT3847_28954C.1
aggaaaaggggtaaggggggctaatttcctttattataattgggggatttattgaggaagggggataccaatttttgaagtttcaaaaaaagccagaaagatgggggtgataatcatgaagttgatcgaattggattaattggaatggggattggccaaaagggaaaccttaatggccttgaaaagagcatcacccttggtttttacaattttgaaatggtcttggtggggctgaccattttctttggtttgtgtttcgacggtgagcttgccaccagaaccttctttgggaccaacaaccaatttggaggggaaaggaatcttttccgttgggggggg

SEQ ID NO: 64166 - DNA, 364 bp, Glycine max
  Clone ID: PAT_MRT3847_28955C.1
agggacggatattgttaatacaggcaaaaaaacggtccttaatctaaaacacaaggttctgtggggtaattacggttccttaatacggacgccctttaaagcaacaaattgtaacgctcctcccctaagggcaaaatgggtttccaaagcccacccttattttttcacagtattttttgccaggagaaaaagggttcgaattggttccctcccaatgacaatgttcttgtcaaagggacccctcctggaaatcttaaacaatcgaccgcccttggtttttttgaccaataacttaccaaacgcataaaggctattattctttataatgaggtcttttgcacccccaggggttttcggtttaaaa

SEQ ID NO: 64167 - DNA, 507 bp, Glycine max
  Clone ID: PAT_MRT3847_28956C.1
tactgcttgcgagaagacgacagaaggggacgatcaccaattaaattcttgatcataagcttaagagtccaaatccgagcaacttgaactaattgtcgaggacgccttcattgccacctatgttatgcatcctcttcaaactcacactcttcatacataattagatacattggttgcgcgctcttcctcgtttcctttgtctttctctttcggctttttccatcccttcctttctgcatgcagtgatgctgtgataaactgtgttagagcaacatcatggaacttttcaacatgtaatgattaagaaggaagatcattcatttaactgattaatggcactgatttccgagctactggctaacacaatactcttggtgatgaggcatttttctctacttagactggcatgcttgtttggtatcagaatcgcattaactgtcatatatacttggacggagttgatcggaacaacaattaggtttcatgcaaacattatattaagaatta

SEQ ID NO: 64168 - DNA, 322 bp, Glycine max
  Clone ID: PAT_MRT3847_28957C.1
atcgtctagctatgtcgatcgaactgtccaaggtcctgtcacgcggcggcgaatgtcggtggtggtggggcggcagtgcgcgggcgcgcgcggggggtgtgtattgcaaaagcgtggctgctccagccgaatgcgccggcatccaaatgttgctaacgctcctaatcgtgctccaccgtgctaacagcgatttacatggcagtgatatggacgtaattattattcagattggccgtagcccagccgtattgcggaacgtgtaagggccccgcatgcaaacccgcgcgtttgtgcacaatcaccatgctaaagcgccattaaa

SEQ ID NO: 64169 - DNA, 1442 bp, Glycine max
  Clone ID: PAT_MRT3847_28958C.1
ggctgtgttatgcggggggtgtgggtagcgaggctcgggcgtctcgtggggggcttctcaaagcagtccttagaagacagcggctattgggattttctcgattactctttcattgatcaagcgccccctgatttcctttggtccaataatactattagtgtgaacaccgaagttgacattccaggtgatgctgctgcgtgtcaagagaacaccaagaagaggggacatgctgattcaagctgccaggtgggatctaaagcttgccgtgagaagttgcggagggagagactcaatgaaaggttctgtgacttgagctctgttttggagccagggagacctgtgggatcgcgcgcccccgctctcctcgttgccgctgtctgccgctgcagccccctggtggctgatccccaggagcgcaccccattgaagctcaaagatccaacctcccacgcggtccctacgcaatatttgaaggttgtgttattctgaaagagaagatagggagggcggtttggtttggtgcaaatggattccttagaagacagcggctgttgggattttctcgattactctttcatcgatcaagcgccccctgatttcctttggtccaataacaataatagtgtgagcaccgaaattgacattccaggtgatgctgttgcttgtcaagagaacaccaagaagaggggacgcaccgattcatgcttcaaggcgggatcaaaagcttgccgtgaaaaattgcgaagggagagactcaatgaaaggttctgtgacttgagctctgttttggagccagggagacctgtgagaacagataaaccagctatacttgatgatgctatcagagtcttgagccaacttaaaaccgaagcccaggagctcaaaaaaacaaatgaaaaattactagaggaaataaaatgtttaaaggcagagaaaaacgaactacgcgaagagaaacttgttctgaaagcagataaggaaaggattgagaagcagttgaaggccttgcccgttgcaccagcagggtttatggctccacctgtagctgctgctgctgcagcatatcaagcaggggtgaacaagatggccgtatatccaaactatggctacatcccaatgtggcaatatcttcctcaatctgtcagagacacatcacatgatcatgagctcaggcctccagctgcatagttgtttctattattgttgcactttggataattatttaacatttgcgaagtattgacatgtaaatattgtcatcgtttcgattatttatttttattttttacttagtataatgtgctaaaaataggttttcaagtaatctatgatggcaatgacatgaaaactctgtcgatgtacattgcaaattgcccagttcttcacttcttagtagctcgctaaattcaatactaaatttattgaaagttttattttatgag

SEQ ID NO: 64170 - DNA, 360 bp, Glycine max
  Clone ID: PAT_MRT3847_28959C.1
gaagtgattatcttaaaagtattccataaatcatccaaacatattcatggaatattatcctcaatttatacatgcaagctaaaatcttattcgatgcaacctttagtgtcattgactttgatctttacattttgggatatactacaaccgcgaacagggactactctttaatcttcatgagaccattctggattgggtgacccaaaaacatatcgccccgagaggaagaacaaaaaagtggggaaatcgcttctggtatgtataatggaagagtctaggtaggaataataccatagcacttcaagagggatatcgacgccctgcatgccaccctaaggtagaaaaaacactctggcttgc

SEQ ID NO: 64171 - DNA, 453 bp, Glycine max
  Clone ID: PAT_MRT3847_2895C.1
tacggctgcgagaagacgacagaagggttgtctccttttcaattggtgtatgaaaaatcatgtcatttaccagttgaaatggaacacaaggcatattgggctctgaaatttctgaactttgatgagaaggcatccagggagcatagaaagatccaattgttggagctaaaagaaatgcgattaacagcttatgaatcctcacgactttaaaaagagaaagtcaagacatatcatgataagaaattgttgaagaaagaattcaaactgggacaagaggtactactttttaattcaagattgaaattatttcctggtaagctgaagtccaaatggtctggaccctttgttatcaagaaagttcgatcttatggtgcaatagagctatatgacccataaatctaaacttcaaatagaacatgggttgtaaatggccagaggttaaaactgtaccat

SEQ ID NO: 64172 - DNA, 539 bp, Glycine max
  Clone ID: PAT_MRT3847_28960C.1
atacctatcttcaccttttatacaatctccagcaaacccacaagagatctgattaagtaatatctttccttgttttctgtaaccttcagtagagacatcctttgactcatcatctgtcaaaaccaacccactttcaagatcaacttcagtatcctcatccttggcactcttaagatccatctcaaacccacaaatgatagaaacaaaactaatccaacttttctcccttcttgttacctaccctacaaaattttgtcctctaaactgtctcccttaactaaatccttaaactcaatccacctcctcaacaaaagatatcacaaaataaaaaaagtaaacccaggaatggactgacccttgcttgaagggaagagaaagaaggcgagatccgatgagggacaaaaaagcatgagaaacggagttcacaacgttacagggaaactacgtcactgcctgcaatcttaagtgttcaattaaaattcaaaatctttttctctctcttttcattgccagcgcccgcgtgcgcggctcgagggcga

SEQ ID NO: 64173 - DNA, 386 bp, Glycine max
  Clone ID: PAT_MRT3847_28961C.1
tgcacaatgaatcctttctggaaagtctccatggcatgctttgtcaaaatcctttagcaatgtgagcgccatcgtgcaaatgcttccgccatcgatacttgttgggcacttcgaagctctctacgggccgtgcgacgacgaacgcagggttccccggtgtctccatgtcgcggccgaccatggacgaaattctgcagatatacgaattgctattctcgtaactcaccttcaatttcagacctatcatcaccgatctcaccatcattgtcgaaaagcaaatgggttgttttaattttccgcttcttcgaattcaaatgtcataatttgggttctaattcttaagtctttttttcttttaacgctagaggacaataaaggtttttaat

SEQ ID NO: 64174 - DNA, 321 bp, Glycine max
  unsure (1)..(321): unsure at all n locations
  Clone ID: PAT_MRT3847_28962C.1
ttnnaangnnagatattttactcttnataataccggagataaaaagcgttttacggtttaccaattatatgcactaagagttatgtctatcatgaataggacctattattgaatgattgtactaggttgcatttttctgccacttattgtgtgagcggtcataaatttgttttagagcgatcttgatttaaggtgaaggggtatttaaagtgaattgatttatgattgtaagtttatatatatgaagtaattattgtgtaaaatattactatcattaattttcaatcttatccaaatttttgttttattataaaattttta

SEQ ID NO: 64175 - DNA, 368 bp, Glycine max
  Clone ID: PAT_MRT3847_28963C.1
cactcgcgatcctactatcaatcccttaatcattcactaagaagatggcaatgctgaagaagctgctagagaatgtctgggatgatcctgaggctgggcctgaacctgagcgggtcctaggactgatcacactactcactatcgttgaaagtaatggtgacgggctgcgtaacacgctgtagatgacgttgacaccgacagaccacaacgactaccacgacgactacgacgactgcaacgacaccgggagctgaccacaaaggtaggagcgtctggcagagcgtgagccattctgggagcaagaccatcgcagagtccatgggtgaccaaacagttgacaacactctcactgactatgacagtgtgta

SEQ ID NO: 64176 - DNA, 1326 bp, Glycine max
  Clone ID: PAT_MRT3847_28964C.1
ccacgcgtccgcgacacgaactggagaagcagtggttgatatccaggatcgactacctgaagctcgtgttgtttattgctcagcaactggagcatctgaacctcgtaatatgggttatatggttcgacttggtctttggggagatgggacttcattcactgatttccgggaatttctaggagctcttgacagagggggtgttggagctcttgaactagttgccatggacatgaaagcaaggggtatgtatttatgccggacacttagctatgagggtgcagagtttgaagttatcgaagcaccattagaggataaaatgatggacatgtataaaaaggcagcagaattttgggctgaattacgtgtagaattgctgtcagccagtgccttcctaaatgacaaaccaaattctagtcaactatggcgattatactgggccagccaccaacgtttctttagacacatatgtatgtctgctaaagtccctgctgctgtgagactagcgaagcaagcattagttgaagaaaaatctgtagtcattggtcttcagagtactggagaagctaggacagaggaagctgtaacaaaatatggttctgaacttgatgactttgtttctggacctcgagaattgctgcttaaatttgtggaagaaaattacccgttaccagaaaaacctgaacttctcccaggtgtaagaggatggggtaaaagaactccaacggaagaaggcattctgcaactcccggtgtttcagtaaaaggaagggttagaaaagtagccaagtggcagcctcctagtgatgctgaaagtgatgaagaatctgaatctgactctggcattgaatctactgactctgatgatgagtttcaaatatgtgaaatttgtactacagaggaggaaaggaaaaaattgctacagtgttcctgctgcagtaagttagtccattccacatgcctgatgccaccaattggtgatatagttcctgaagagtggtcatgccatttgtgtaaggagaaaacagatgaatatcttcaagctagacaggcctacatagctgaacttcaaaagaggtatgatgcagcctcggaacgcaagacaaaaatattagacataattcgtgctctggatcttccaaataatcctttggatgatattgttgaccagctaggaggccctgacaaagttgcagaaatgacaggaaggagaggcatgcttgtgagggcttcactggaaaagggtgttacttatcaggctcgtaatacaaaagatgtactatggaaatggttaacatgcatgaaaagcagctctttatgggatgtaaaa

SEQ ID NO: 64177 - DNA, 1091 bp, Glycine max
  Clone ID: PAT_MRT3847_28965C.1
cgtttctttagacacatgtgtatgtctgctaaagtccctgctgctgtgagactagcgcataaagcattagttgaagaaaaatgtgtagtcattggtcttcagagtactggagaagcaaggacagaggaagctgtgacaaaatatgtgtgtatttgaattctctgttcatttccacataaagcaattttgttttctgcagttcagttcctcacttgctttagttttttggatagggttctgaacttgatgactttgtttctggacctcgagaattactgcttaaatttgtggaagaaaattacccattaccggaaaaacctgaacttctcccaggtttgagacttgttttgcttaatgattttcattttttttctagttattgtgcgtttagttgctcttctgttgtaggagaggatggggtaaaagaacttcaacggaagaggcattctgcaactcctggtgtttcagtaaaaggaagggttagaaaagtagccaagtggcaacctcctagtgatgctgaaagtgatgaagaatctgaatgtgagtttcttcgaaacaaattttgaagaatcctatgcacttccttgttcctcttgtgcttctgctgtgtatggtatttaggcatttttcctattaccaatatccaagactgtagccccctatgttgggtcagctaaattgaacaaatgaaaccgttttgctatttaggaagtccaatatccaagactgtagccccctatgttgggtcagctaaattgaacaaatgaaaccgttttgctatttaggaagtcaaatattcagaaatctatttagatgatctctctctgtttggttctcttttttcttttaaccagtcttcttttttctttaaccagactatcttccagttgatcaactttacatactgcaaacttttggtcttctcttttacatgaccaaaccaccataggttggtttgtgtcatctttctctccataggtcatgcactattttctctcaaaaccactaacacagttgctcctgatctaattttttttttttttgagggggtatgttcattcattcggcacaaaattctcatctctaatatt

SEQ ID NO: 64178 - DNA, 389 bp, Glycine max
  Clone ID: PAT_MRT3847_28966C.1
acaaaccactatcttcaaattcataatttaaattttccaaactttaatccaaaacgaacatttaccaaaccttatacaaaaaaaaaaagattcccccatgttcttaaaaaaccaataacaaccctaaaactttcaaacttgttaaaaggccaaaaaactccactttattcaaagggggtactttaaccctttatctcaagggggcgcgggaaccatcacacacctaatgccgcgatttctatctccacattaatacgtaatctttaatccaaactaaaggatattattatggggggcggggtatcccaacacctgatttagaagggcggtgccaacaccaaaattttaagcccaattggcacacaaccatcttagggcacactcccatt

SEQ ID NO: 64179 - DNA, 150 bp, Glycine max
  Clone ID: PAT_MRT3847_28967C.1
cccacgcgtccgcacatgctattgcctacgcattccttaacacggtctgggactctatcgttcaagaggatacaagcttacttatacgtgaataccactacatacctcttctatagtgtgacctaaattcacttcactgtcactatattg

SEQ ID NO: 64180 - DNA, 117 bp, Glycine max
  Clone ID: PAT_MRT3847_28968C.1
cgagcggcatcgagcggctcgagtccagcgcttgtttcttgctacgtttcttcaccatgtcaactgctgggaacatcaccactgaaatcggggatcatgcaaccgctacaaagtggt

SEQ ID NO: 64181 - DNA, 390 bp, Glycine max
  Clone ID: PAT_MRT3847_28969C.1
ggctcgagggctcatttgtgcagattgctattgcaattccatatgcaaagcggaacaaataagttgtgttcatgaaaaacaactctgttgacaatctgtccttgcatcctgctcaaggtagacaaactggaaagcaacatctacatcttttcgtcagtcaacgaataaacggactcttatgactgtgatcttggcgatggtacgcctatggccatattatatttatactctacctgcaaagcatgtcaaggagtagtcctcaaaacggagatgatcgcaaaccccacactctttttggcgtgacaagacgccttctttgggtttattactggcccaactcctactaatgcgtatggtgagattgaacgcctcattattactgccgacgat

SEQ ID NO: 64182 - DNA, 297 bp, Glycine max
  Clone ID: PAT_MRT3847_2896C.1
ggatcacattgttaagacttagtggcttaattacaggatcatggatctcatttactgaaggaattctattaatatagcttattctttcattcacactcattttttttaacaagttctgtaaatccatgttcatttgccccattactgtaaaatagttacctcagttgtattgaaactggaagagtgccgcctatttctggtacactctcagattgtgcttcaattttctagtttcattactgatattatgtacttcttctacaatcaatgacaaaaattatgcttctgtttgttcct

SEQ ID NO: 64183 - DNA, 443 bp, Glycine max
  Clone ID: PAT_MRT3847_28970C.1
ttccactcgtccgtgcggctgctagaagacgacagaaggggaaagttacagaagtaattgtaaacatggagtttggttattgtgctgtgtttctgatactgcttcttccaatctcatgtgcagattctacctcagttgagaagcaattcagggaatgcttgttaacccaacttgatggaaattctgaatacattgaaaaaataaccttcacctcatcctcctcgctatatccccaagtctgggattcattggcacaaaatcctagatgggttagttccacaaggaagcctcttatcattctaacacctttccatgaatcagaaattcaagaagccattctatgcagcaaacaacttgaactgcagctcagagttagaagcggtggccatgattatgaagggctatcttaccttggtaaggtcccatttgtgatggttgacctc

SEQ ID NO: 64184 - DNA, 196 bp, Glycine max
  Clone ID: PAT_MRT3847_28971C.1
ctcttctaagttctaacttctaacgctccttttttcactctgagctgcatattagaaggagaatccaaacacaaggtgttagaatagcaaaattaagagatcatattctatacatcaccgttccgagtctctctcagtaccctctctctatttacgtgatgcactctcccgtttgccttttcaccagcctcacata

SEQ ID NO: 64185 - DNA, 595 bp, Glycine max
  Clone ID: PAT_MRT3847_28972C.1
ccgaggagtcttgctaactacttagactgaaggaaagagaagcatgagggtgttttctcggttcaaatttctgtcaagagcagtgcacgaggaacaagagggtgagcatgatggggagagaaacaggtaccctttaacagaagcaagtttgtgcacgtccctaacgctaacagtttggagaaaatcccttgtgattagttgtaaaggattcactgtgatagattcatatggaaaccttgtgtatcgggtggacaattacatcatgcaccctaacgaactcattcttatggacgcttcaggaaactctcttctcaccatgcgccgctccaggaagctagggttagtagatagatggtttgtgtatgaaggggaaatggggaagcagagtacgaggagtaagtcggttaagtcaaaagagagaccagtttgttgtgtacggaagcgtgtgaatattttagacggcaaagccaacaaggttcaggcctacgtgtaccgcgctgcctcggattcagataaacgacatccggcgtttacagttgaaggttcctatgcacatagaacatgtaaagtgttggatgagtacaagaatgccgtc

SEQ ID NO: 64186 - DNA, 1634 bp, Glycine max
  Clone ID: PAT_MRT3847_28973C.1
ctcgagccggcaaattcttgtgggcatccaagacctgcttgatcaaccaaatcctgctgaccctgcccagacggagggttatcatctattcatccaggtagctaacctaaaaatcctacacttttcactgtttattaaaagaaacttaaatttgttggctaccttcactttttattttttgaattttattatattattactttacaatgttgggaactcatggggatactcaaacaaggatgggagtcaaaattaccccaagaagagggatggagaatggggaggctcctcttagccctgtcccatgcgggtgccatcttggggtttcagattttagttttgcattaccaaaggtgtgtccttatataataataattctttctacaggatgcagctgagtacaagagaagagtccgacagcagtcaaagcaatatccacctctttgtctagtgttatatctgctcactttcgcaaccgttatagtatgttagttgtgatatcaaatgtgtgtgtgttgatgaaaatgaagatgtgattttcagcttgactaatatggaaacaaagttgacttaggagagggatcttctgaggactaaaacattagattttaatataattttgtagttagaacaagacccggctcaaatacttgatgctctgccgcggcaatacaaaaagccgcgtttgctttggaggctcgcactcacaaccacaacacaacgcggcagagcgaagagaaggggcaaaagagaaagaagcgcttatcgaactcggacggaagcactgagttgactcggagggagtggaaagtgttgttgcgtaatgtctggtggtatcgctcgtggacgcctcaccgaggagcgcaagtcgtggcggaagaaccatccccatggttttgttgcgaagccggagacgctgcccgatggaaccgtgaatttgatggtgtggcattgcactattcccgggaagactgggactgattgggagggtggctacttcccacttacgctgcactttagtgaagactaccctagcaagcctccaaagtgtaaattcccacaaggtttcttccaccctaatgtttatccttctgggactgtttgcttgtctatacttaatgaggatagtgggtggagaccagccataacagttaagcaaattcttgtgggcatccaagacttacttgatcagccaaatcctgctgatcctgcccagacagaaggctatcatctattcatccaggatgcagcagagtacaagagaagggtccggcagcaggcaaagcaatacccacctcttctctagggttacatcagctaaatctataaactatttttagtatggcagatgtttcttcatttgctccgtgttaaaactgttttatcattgtgattaatggctgccataacatttagacatgattgtgttagctatttatgattactcccagatctggaagaagtgttaatatataaaaaatatgaaagtcaaccaatgaatacttggtgacatgtttctgatgtttgctgctacatttttatatgaatggatcattactataagtctataatgaattacattgctaccttctatggagcatatcgaaaaaaaaaaaaaaaaaaaaaaaaaccac

SEQ ID NO: 64187 - DNA, 549 bp, Glycine max
  unsure (1)..(549): unsure at all n locations
  Clone ID: PAT_MRT3847_28974C.1
aaaaaattnttattntaanngcccatnnnaganngaacatgnngngggcntngangaantaggncgtaangatgangaagnnttgnacctgagggactgtcnataaggtntggggantgnangnnttaatntatgnantgncgtggatngcnnatgannggtgtgtngtncncgataggangcgtnagcagtgagtgnganaggnggtagtgtnngtgngtngnggtgnacgntggnngagagtgtcgtntgnngatgnancnagangangagcngcntnccattgnntgaagtntgnatngatgtnaggagngtagatntngagngntnganngagagaagcnnnagngannngngngacnggagtgnagagtgngnagtgggtgagantngagtnagngtagnngnntgtcgngangtagntgngaagtntgtgtanagtgngngngaggannagngngagtgnnnngngtgcagnggtaggagagagnganngnnnngtgnagtggaacgnggngngnngcnntgangagatangaanangtgnat

SEQ ID NO: 64188 - DNA, 262 bp, Glycine max
  Clone ID: PAT_MRT3847_28975C.1
caatgaagcagtgatgcttcttcttcttctcatgctctctgtaaccccccaaaccctcataatctcaattctcatagtcacatgtctccctactcttatttattattattacatacataatcacaatttgtcaatttccctggaagaaaaaaaaaaccctgaaaaatctgctcgtttggatcccatctaggggggcaccccggatctccgattctctggatcactcccaagttctcagctttttgggttttggcgaaggggg

SEQ ID NO: 64189 - DNA, 735 bp, Glycine max
  Clone ID: PAT_MRT3847_28976C.1
ctttggcgaaagcgggagcaaggtgtgaatcacgggatccgatttgacaagcgacacgaacttggtgtagagaagctccaccttgtcaacctcttcactgacaaacagtgagaaaacatcatcagcaatggcctgagcctccttagcagttggaacaagacccggttcagatccttgatgcactgttgccactgtatttgaacagccaggtcctgagggcattgcaggagtccttggcgagtgaacttgccgcgagaatgagtgccatgagcaatgccacggataatgctattgaattgaagaagaacttgtccattgtgtacaatagggagcgccaagctaaaatcactggtataactcaggaaatcatgtttgaggttaatgcctccatttatcacaatgttataggagtttttacttattataaaggaagaaacgtctgccatagtaaaaatagttcataaatttagctgatgcaaccttagagaagaggtggatattgctttgcctgctggcggacccttctcttgtactctgctgcatcctggatgaatagatgatagccttctgtctgggcagggtcagcaggatttggctggtcaagtaagtcttggatgcccacgagaatttgcttaactgttatggctgatgtttcttcttttgtcccgtgttaaacctgtgttgtcattgtgattaatggctgccataacattaaacatgaatgttttagctatt

SEQ ID NO: 64190 - DNA, 1322 bp, Glycine max
  Clone ID: PAT_MRT3847_28977C.1
ttttctctcttctctgcttcttcttggtcaaatcttaagagctgaggagaatcaatcgggagaaatatgtctggtatcgctcgtggacgccttgctgaggaacgaaagtcatggcgcaaaaaccatccacacgttcgtatcactacttccttctcttttttctctgcttttatttcatcaatttcatttccccctttcgttacaatcaatgcttgggatgtgaatggtttgtgtgttgatgctgctgaggatgagttcttcaggttgactaccaaggaaggaaagttgactgtggagagagatgttgtgaggactaaaaccgcggatttttcgccaattttgcagtttgaacaagactccgttcagatccttgatgcactgctgccactgtatttgaacagccaggttctgagggcattgcaggagtccttggcgagtgaactcgccgccagaatgagtgccatgagcaatgccacagataatgctattgagttgaagaagaacttgtccattgtgtacaatagggagcgccaggctaagatcactggtgaaattctggaaattgtggctggtgccaatgccttgcaatagtgcaattaaggaaagtttaggactaaaagctgaagggagagatttgtgatatcaatggtgtgtgtgttgatgctgctgaggatgagttcttcaggttgactaccaaggaaggaaagttgactgtggagagggatgttgtgaggactaaaaccatcgatttttcgccaattttgcagttcgaacaagacccggttcagatccttgatgcactgttgccactgtatttgaacagccaggttctgagggcattgcaggagtccttggcgagtgaacttgccgcgagaatgagtgccatgagcaatgccacggataatgctattgaattgaagaagaacttgtccattgtgtacaatagggagcgccaggctaaaatcactggtgaaattctggaaattgtggctggggccaatgccttgcaatagtgcaatttgtaggtattgtttacttattataatgatgggtggtggttgcccttttcattttctaatgtggttatctaagacacttgtgcaatttttacgcttctgttgaaacttgaatgaaatgcgcaggctttgtgcaataggaaaaatgcgatcaaatctgaagcggacacttttttttttgttatgttttttttttttttccttctgaattatgtatgtaatgaatcaataatagatctataatataaagattcagagagttatctctgttgttttgtgcacccagagttatctctgttgatttaa

SEQ ID NO: 64191 - DNA, 787 bp, Glycine max
  Clone ID: PAT_MRT3847_28978C.1
cctaatcagatggtacagtagttcatcataaaacaaaggtgaacttgttgcacaaccactgattaccaatcagggaattccgattaatataagaggtcaaatcgatcgtattgatacatatacaaaaggtgatcatagttatgtcaatatcattgattataaatcttcagaaagtagtgcaacactcgatttaacaaaagtttattatggtttgcaaatgcaaatgatgacctacatggatattgtattacaaaacaaggaacgtttaggtcttacagatattgtgaaaccagggggtctactttatttccatgtccatgaaccgcgcattaaatttaaaagttgggcagatatagatgaagaccaatttcaaaaagactatatcaaaaactttaaaatgagtggtttgcttaatcgtgaccaagaagtgttagacgctttagatattagacttgaaccaaagtataattcggatattgttccaatagcattaacagctaaaggcgctataaatcagcgtagtagtaaagtagctgatgaaaacatcatttatcaattaatagaacataataagaagaattttatcgagacagccacccacattatggatggacatacggaagtggcacccttgaagtacaaacaagtattaccttgtcaattttgtaattataaatcagtttgtcatgtagacggattaatagatagtaagcgttatagaacagtagatgaatcgataaaaccattagatttaattcaacaattaagaaatgaaggtggtgaaaga

SEQ ID NO: 64192 - DNA, 664 bp, Glycine max
  Clone ID: PAT_MRT3847_28979C.1
tcgtacggctgcgagaagacgacagaagggggatatgatgtaatgtaacattaaaatcacagaaacaacaacgctcactgattaccaatccatcgtttttgaactccacataaggctaaactaaacacctctctctgcaaaacaaaaccactctcttccttcccacgaatctctgccacatagcacataacactgaacatatcaacctaagacctgcctctgattctgagtaacaaaaggctttggctcttttaacacattggtgaacctttgtacacaacacttttgctcatatctaaagcatcctagcagcttaaaaaagggagactaaccatccagaaaaactgtatggtagagctttatgcatttgatgaaagggtgaccaggaactgctaggaatacaattacaaagtttgaccactcattggtctgataacttttctccactaagtaaataatttctttttagatgcaaacttctcagaagcacccaacttcagctggtatccatttataccaccagcctgcacaagatattgatccctacactcattaccaaatactacaaagcaattcatgcgatgaaatgcatgataatagcagcagccagggaaccactatttctttttgaaccagcaaggatcaatactttacccttgaatca

SEQ ID NO: 64193 - DNA, 253 bp, Glycine max
  Clone ID: PAT_MRT3847_2897C.1
acgttaactcaacattcggctcgagacgaagttcacccgctcagttgcacatatctgtctttccatctgcaacacatcattgcacagcgacttcttcctactgttctttgaaccatgaatgtggcagggcatgtcttgagccactcacatggcatctcccatgctccaggtcacgtagctgggtctcatcgtcacgacatcactcagttctttccacactttgctacgcttaccacatatcatacttcaaagg

SEQ ID NO: 64194 - DNA, 1062 bp, Glycine max
  Clone ID: PAT_MRT3847_28980C.1
gtgtgttgatgctgctgaggatgagttcttgaggtggactaccaaggaaggaaagttgactgtggagagagatgttgtgaggactaaaaccgcggatttttcgccaattttgcagtttgaacaagagggcgttcacatcctggatgcactgctgccactgtatttgaacagccaggttctgagggcattgcacgagtccttggcgagtgaactctccggcagaatgagtgccatgagcaatgccacagataatgctattgacttgaagaagaacttgtccattgtgtacaatacggagcgccaggctaacatcactggtgaaattctggaaattgtggctggtgccaatgccttgcaatagtgcaatttgtaagtatcgtttacttattataatgatgggtgtttttttttttttttttttttgtccatatctagagaaggtagtaatgtaatttattatagacttatagtaatgatccattcatataaaaatgtagcagcaaacatcagaaacatgtcaccaacaagtattcattggttgactttcacattttttttatatattaacacttcttccagatctgggagtaatcataaatagctaaaacattcatgtttaaatgttatggcagccattaatcacaatgacaaaacagttttaacacgggacaaaagaagaaacatctgccatagtaaaaatagttcataaatttagctgatgcaaccctagagaagaggtggatattgctttgcctgctggcggacccttctcttgtactctgctgcatcctggatgaatagatgatagccttctgtctgggcagggtcagcaggatttggctgatcaagtaagtcttggatgcccacgaaaatttgcttaactgttatggctggcctccacccactatgccccatgaagtatagacgagcgcaccggcccagaagggtaaacattagggtggaagaaaccttgtgggaaattacactttggaggcttgctagggtagtcttcactaaagtgcagcgtaagtgggaagtacccaccctcccatcagtcccagt

SEQ ID NO: 64195 - DNA, 512 bp, Glycine max
  Clone ID: PAT_MRT3847_28981C.1
cttgaatcggaaggcagatgaccatggcccgaactcggccttgaggagagctagcgtgttatcagcgtgtccttggctctgagatgcgcggccctagaaatccagcgcccataacgtcaagctgaacgccctcaatccggagaaccccatagactccgaatggctggtcattaagacgtggctccccatctcaggccttcacagggtgccgacgctgacctatctggataaagccttaaccgcaacgccccttgcggggatcttcctacactccgtgctaccaaagaacgctacatacaacaacgtcatcggtatcattggcacaatattcatgatggatcctagcgataatcatgagccccaccattctaagcaactatgtctaagccagagccccagatcgagccaaagctgactccttgaacagagggtgacttgatggcataccctactggtggtggatggtggatgtacatcactgaacacactcctgatgttgccgctgctatctg

SEQ ID NO: 64196 - DNA, 1406 bp, Glycine max
  unsure (1)..(1406): unsure at all n locations
  Clone ID: PAT_MRT3847_28982C.1
ggctcgtgtattatttagatatctaaataattattactatacaaaatcattttatcgaatcatattgtttttattatcattattgccgagatttgatccgttctcttgagatgaaatgactagggttatctggaagtcaatcaaggacaagctcattttgcccttcttggagttggacatcaagtattatgacttaggccttccttaccgtgatgagaccgatgataaagttacaatttgaagtgcagaagccactctcaaggtcattgtggcattcaaggggcaactattactccagatgaagctcgtgtgaaggagtttggcctgaagtcaatgtggaagagtccaaatgggactattaggaacattttgaatggaactgtcttcagagctcgagccggtggttgttgcttattcaggctcttgcatctcgtccaggtggaccacctttcgttcacgtaaccggtgttgatgattcccaatcatttcatgcaaggggtggaggacttcacattgtagggaaacgcctctcagattatgccaaatcttgtggagtgccatttgagttccacagtgctgcaatgtgtggaagtgaggttgaactagaaaaccttgtaattcaaccaggggaagcactagttgtgaacttcccttttgttttgcaccacatgccagatgagagtgtgagcacagagaaccacagagacaggctattgagattggtcaaaagcttgtcacccaaggttgtgacacttgttgagcaagaatccaacaccaacacttctccctttttccaaaggtttgctgagaccttgagttactacactgctatgtttgagtccatagatgtggccctccccagagatgataagcaaaggatcaatgcagaacaacactgcgtggctcgcgacattgttaacatggtagcttgtgagggggatgagagggtggaaaggcatgaactcttggggaagtggagggcaagattttcaatggctggttttgcaccatgccctttgagttccttagtcacggatgcagttagaaatatgttgaatgaattcaatgaaaattataggctcggatatagagatggtgctctctatctaggatggaagaatagagctatgtgtacctcttctgcttggagatgttactgactcattgtcatagcctcataggtatatgtatattttcctccttgttaatttcttcccttttttggacacttagtcattattcagtcgtatcttcagtttctcaatagaactagctagttagagacttagctttcttccaacgtgtatcctttaccttttgtgggttcagctgagtcttttaacatttttgtacatttcaatgctacatagaaggtaagagaaaacctcagttattgacanaaaaaa

SEQ ID NO: 64197 - DNA, 2478 bp, Glycine max
  Clone ID: PAT_MRT3847_28983C.1
aacaaaaggctttggctcttttaacacattggtgaacctttgtgcacaacacttatcacagaaacaacaacgctcactgattaccaatccatcgtttttgaactccacataaggctaaactaaacacctctctctgcaaaacaaaaccactctcttccttccaacgaatctctgccacacaacaaataactctgaacatataatcaacctaagacccgcctctgattctgaacaacaaaaggctaatttggctcttttgacgacaatttttgctgacacctaaagcatctagcagcttatcaaaatggagactaaccatacagcaaaacggtgttgtaggactttagtatgcatttgatcaggagcagctaggaagcatttttacaattacaaagtttgaccactcattgttctgatcactgagtaaataatttctttttagatgcaaacttctaagaagcacccaacttcagctggtatccatttatacctgcagcctgcacaagatattgatccttacactcattaccaaatattgcaaagcaattcatgccatgataatagcagcagccagggaaccactatttcttttgaaaccagcaaggagcaatactttacccttgaatcatccccagcaatcaatgatctcataggttgtgattctccttcctatgctagtgtatcatccaataggagtcctttttctccacaagcttctcattcagaccagcatcagtcatcagacaacacctatggatcaccaacaagtgcacactctagatatgatgatgacggctacgaattgaagaacaagcttagagaactcgagatttcgttgttggggcctgattcagacattgttgatagttggcactgctcctacaagggtggccgccacagagcatcatctccaacggctaaacacaattgggatcagattgtggaaatgattccaaaattagacttgaaagaagtcctcattcggtgtgcacaagccgtggcagatgatgatattgaaacagcagtgggatttatgaacaatgtattggcaaagatggtatcagttgggggtgatccgatccagaggttaggtgcctacatgttggagggtctaagagcaaggttggagtcctcagggagcataatctacaaggccttgaaatgtgaacaaccaacaagcaatgatctcatgacttacatgcacatcctgtaccagatttgcccatattggaagtttgcttacacatctgcaaatgctgtcattggagaagcaatgctgaatgaatcaagaattcacataattgacttccaagttgcacagggcactcagtggctgttgcttattcaggctcttgcatctcgtccaggtggagcacctttcattcgtgtaaccggagttgatgattcacaatcatttcatgcaaggggtggaggacttcacattgtaggaaaacgcctctcagattatgccaaatcttgtggagttccatttgagttccacagtgctgctatgtgtggaagtgagcttgaactagaaaaccttgtaattcaacccggggaagctctagttgtgaacttcccttttgttttgcaccacatgccagatgagagtgtgagcacagagaaccatagggacaggctattgagactggtcaaaagcttgtcacccaaggttgtgacccttgttgagcaagaatccaacaccaacacttctccctttttccaaaggtttgttgagaccttgagttactacactgctatgtttgagtccatagatgtggccctccccagagatgataagcaaaggatcaatgcagaacaacactgcgtggctcgcgacatcgtcaacatggtagcttgtgagggggatgagaggctggaaaggcatgaactcttagggaagtggaggtcaagattttcaatggctggttttgcaccatgccctttgagttcctcagtcacagctgcagttaggaatatgttgaatgaattcaatgaaaattataggcttcaacatagagatggcgctctttatctaggatggaagagtagagctatgtgtacctcttctgcttggagatgttactgactcattgtcattgtcattggtatatgtatttttttttatccacaaatattatttgttagtaatatattagcttttattagcggggaatttgaacccatcacctctccccattcccatcattggtatatgcatattttcctccttgttaatttctttcctttttatgacattaagtcattatttagtggtatccgctgtttctcaataggattaattagagacttagctttcttccaacgtgtatcctttaccttttgtgggttcagcttagtctttaaactttcttgtacatgtcaatactagaaagaacgaaagagaaacctagctcatatttattgacaaaccctgttttgcagtttttagagtatagtggttactcattttaaaaa

SEQ ID NO: 64198 - DNA, 251 bp, Glycine max
  Clone ID: PAT_MRT3847_28984C.1
cattagtcctcatccatgaatttccattgaaggggggaatctttattcaagaatacagggtgatgaaatttaaaaagcaaaaacaaatgggatttttttttaagttcaaacaaacaaagtggggtgggggttcctaatcctttgctaattttttacacttataatcctgggggcttgtttgctataaaactcatgcactgcacttggcaaacgttgtctaattccataataccgattaaacctttttgtta

SEQ ID NO: 64199 - DNA, 398 bp, Glycine max
  Clone ID: PAT_MRT3847_28985C.1
taacggcgccttaaactgccacggaggagtttaagactaataccaagactgggctactcatggatggggctcaccagaaaggctaatgtgaatcattgtagagtgcaaactgcggcgatgtaacatatacaggctgtcaagggtggtgctatagcatggacttgcatataatcaagtgcttaggtcccacatactctattgtgtgaaggaggatcacaagaatgttaagctggagaaaactgtaatccctgcaaagataactgggctgccggatccttggactcctgaatgtgcataggccacatgatctttctagatagggagagagcatattattgtcaaaatcaaagatgagccttaaaagttggaggcatgaaatgaattttttaacctgttaa

SEQ ID NO: 64200 - DNA, 205 bp, Glycine max
  Clone ID: PAT_MRT3847_28986C.1
tcgggtcttgccttgctggtttcttctctgctgctttcttcgttgttcggtctcctgttccgcttcctcgtgctgtgtgccgccttctttgtgcttgggggcttgggctttcttccttggccttgctgtgttttcctccttcggttccttgtctttccgtctttcttttgtgtgttgtcgcgctctcgctttggtcgggcggccg

SEQ ID NO: 64201 - DNA, 560 bp, Glycine max
  unsure (1)..(560): unsure at all n locations
  Clone ID: PAT_MRT3847_28987C.1
ctggtgctaactttcgtggcgatataaatattcttctcgttggcgatcctgggacaagcaagtcccagctacttcaatacatacacaaactatctccacgtggcatttacaccagtggaaggggaagttcagctgttggattgactgcttacgtaaccaaggaccccgaaacaggagaaacagttttagagagtggtgcccttgttttgagtgaccgaggtatatgttgtattgacgaatttgacaaaatgtctgacaatgcaaggagcatgttacatgaggtgatggaacaacaaaccgtttcaatagcaaaggcaggtattattgcttccctcaatgctaggacttcagtgttggcttgtgcaaatccaagtgggtcaagatataatcctcgcttgtctgtcattgacaacatacaccttcctcccactcttttgtccagatttgatttaatctacttgatgcttgacaaggctgatgaacagactgacaggcgccttgctanacatattgtgtccctacactttgagaatcccgagaacgtggaacaggacgtgttg

SEQ ID NO: 64202 - DNA, 260 bp, Glycine max
  Clone ID: PAT_MRT3847_28988C.1
ggatatagcgcatgccgatctggctccaacccaccccatcaagctctcgcctgctctcaacatctcagtgctctactacgagatcctcagcacccctgaccgtgcttgtaacattgcaaatcaggcctctgatgaggcaatcgccgcgctagacatcccatgagaggagtaccacaaagacagcactccgatcatgcagctcctgcgtgacaatataactgatggagtgccgacaccaacgaggacggcagtgatgacat

SEQ ID NO: 64203 - DNA, 322 bp, Glycine max
  Clone ID: PAT_MRT3847_28989C.1
ggttcaattgtgtgattgtttgttgttgtaacccgtccttctcctttggtggtccggtgtcggcgttggtttttcccctcaccggaaaatgtcttgctgcggtggtaacggtggttgcggaacctcctgcaattgcggaaacggttgcggaggctgcaaaatttacccaaacttgacctacactgattcaaccacaaccgaaatcttggccatggaattggaaccggttaaggctcaatttgagggtgctgaaatgggtgtgcccgctgaaaacgatggctgcaaatgtggaccaaactgttcctgcaacccctgcacttgc

SEQ ID NO: 64204 - DNA, 180 bp, Glycine max
  Clone ID: PAT_MRT3847_2898C.1
gctgattttaatacttcatatgcgagttcatagggtgatgatgtaattaatccagctcatttatcttaccaactgatagctatttaacacttaactaaactttgtgataatataaacgtctgcagcaagcttgacttgtaaaaatcattaaatcatgagatggattacgtcaagaatata

SEQ ID NO: 64205 - DNA, 362 bp, Glycine max
  unsure (1)..(362): unsure at all n locations
  Clone ID: PAT_MRT3847_28990C.1
gcgggnaanagnnncngaagaaaacaacgaaagcgngcaaacnganagngggaggaagaagacagccaacaggagggcagaggagcaagcngcngcngagccngcnacagagaaaaagcngaaaaagcggaccnngagggnaccannaaagnagggagagaagaaaacnggannnggaaggcncnancacaagannnncnngcngaagccaaaagaaaacnacaagnacgagagaaaaaagaagcagacagaaaaagaacagcggagngaaaaanaaagggagaagganaganagagacaacgaaggaaaagaaggaaacncnngaggagnnggaaaaagnnncnacaagngaggaacgcca

SEQ ID NO: 64206 - DNA, 264 bp, Glycine max
  Clone ID: PAT_MRT3847_28991C.1
cgagaaaaccacacaaaaatacctctattcaattgaagagaaaagacataccatcataagggggatgcgttttgtgaacggggggcacatcatcaattgttacactaccctacaagttctgctgaaaatagcgaaaattcgacacttaatattatgatcttgtgggaattaacaaaaattttcacattgtaacatattgttaatctgataggattagattacttgcttcaggaggtttcaactagattaaagcttatgtttcta

SEQ ID NO: 64207 - DNA, 528 bp, Glycine max
  unsure (1)..(528): unsure at all n locations
  Clone ID: PAT_MRT3847_28992C.1
gtttttaagttccttttatcttttttttttaccccagatagagggtaatatggatggatgtgtgaagaagctaatatgagcagcgtgttgagcagctgtcatatgagttctcgagtatgatgtactcagccaggganatgagagttcatttgtagggaatattgattggtggaaacttggagggggctatagtgaggttcaagaaaagttgtttcactcctaagtagtggtttgggtcatgcaagagtaaggaagcacaaaaaacttcaaatccctttttctgaaaatattctcttggacaaccaaatttgcgaaaccgatcatcattcaaaatgtctgcaggttcctcatacaatttttactgagaattcagttcagggattgggtcaaacagttagaaattcaatctatatgatgggaaaccctagttcggagttgagctccaatgtgagaagccctctagagcgtacccgacaaactgcatctacacgttaccactttcttgagctgcaacaaatgaacgatcaa

SEQ ID NO: 64208 - DNA, 256 bp, Glycine max
  Clone ID: PAT_MRT3847_28993C.1
ctttgtacgaacactatattggaaagtaattcatatacgatatagaccacatcggagaagctatgcacagaccaggatttagggtagaggggtgttgcttctgataatcacatcgtaaaagttgtttcttcagtttgctgagcttggttatggctctatagagaaatgtaggctacaattctcgataataagtgagaggtggtacgtcttgttcattcttgtaactatgtggtctttccccattaccttaattcct

SEQ ID NO: 64209 - DNA, 220 bp, Glycine max
  Clone ID: PAT_MRT3847_28994C.1
aacagatttaccttggaaggaaagcagtgacaacctgccctacaaagaatgtacatttaaaaaaggaagtaaaaagtgagaagtgcattagaggcactaatcactgagattaggctctactgtttcttctagtataaaaatattatagggttaccaaaagtataattgtgtaagcgcgctcagtccccggcccaataaactaaagttacccaaccctaat

SEQ ID NO: 64210 - DNA, 447 bp, Glycine max
  Clone ID: PAT_MRT3847_28995C.1
ttgttttttacttttcgttctagttttggaagaaaaaatctccaacattgcagaaaaggttgtagcatttctttggaaaaggaaataccccataggcaattttccttaatcaaatcccccaaaaactggaggaaaaggattgggaataaaataggccctttcccgaccccccccgaataaaaacctaccctaaattttccccaaaggggggttttttttcccctctcgggaagtttggggcggtcccccaaaaacaaaaagaaaacccgggaacccttttttttgctaatacccgggtaaggaacgggcctttttttttttttccaaacccctgctttgaattcttaagaaaaaccccttaaaaatggggcctacttttgcttcttaccttccccaaagttggggggggccctcactttttggggcttttttccaacttttgggggg

SEQ ID NO: 64211 - DNA, 152 bp, Glycine max
  Clone ID: PAT_MRT3847_28996C.1
acacagctgcaataagactacagaaagggatccaatcgaattgaattctgcagagataataagaaacttaatagatcatgaattcactccactaatacattatgtcatacaagacccagaacaatatgaaagctctgagtgttgaggtccaa

SEQ ID NO: 64212 - DNA, 1878 bp, Glycine max
  Clone ID: PAT_MRT3847_28997C.1
ataaaaccacacggctccagcctgcgatgcccctcattttctcatttctttctctctttttccttttgttttgtccaagacactggcttctggagtttgaggtacacaccgtcttggaaggattctccacattccattcaccacccctttgcctttgtgtcctccaacttctctgcaagattttctcactttctaggcccttgtctcaggtgatagttctacacctatcataatgccattcaggagcattgtgcgtgagctcaaggagattggagagggcattagcaacatgtatagaagaggaggagaagccaagcatgtaaatcgccttgagatcgctctggcaacatgtatagaagaggtggagaagccaagcatgtgcatcgccatggaaaatctcacattgcaccagaatgttccttaccaccaccaccatcatcatcttcttcttcttcttcatcttcatcatggcagagccggtgggctaatttgccacccgagttgctattagacataattcaaaggttggaagccagtgaaacttcttggcctgcacgtagagcacttgtggcatgtgcctcagtttgtaagttgtggagagagataacaaaggatgtggtcaagacaccagaacagtgtggttttatcactttccccatatcactaaagcagcctggtccaagagactctccaatccagtgttttattaggagagaaagaatgacttcaacatattgtttatatctcggtctgagccctgctctttctggtgatatgagcaaacttttactggcagcaaagaagattagaagggcaacatgtacagaatttataatatcattggtttccgatgatttctcttgggctagcaacacttacgttggaaagctgaggtctaattttctgggcaccaagttcacaatcttggatggcgagcccgcgcatgaaacttcacttccactgaattgcaagttgcagcaaagagtccatctgaagcaggtacttcctaacaaggttgctgctgctgctaactacaaagtggccacagtatcttatgaactcaatgtcctccgaacaagaggtccaaggcgaatgcggtgtatgatgcacttaatccccatatttgcaatccaagaaggagggaacgcccctactcctttgaagtttaccaccaattatcttaatgatcatgcgtctaccaccaccgagcatgcatctaccaccacaccagactcaaaaggaaagaaaccagaagttgttgagtttgactcaactggcactgccaatactccagaatcaatccagcgggcaagggaaccattggttttgaaaaacaaagctcctagatggcacgaacaactgcaatgttggtgcttgaatttcaagggaagggttacagtggcctctgtgaagaacttccagcttgtagcagctgctgaaccatgccaaaatgtttcagctgcagaacaagaaaaagtgatactacaatttggaaaaattgggaaggacatattcaccatggattaccgataccccctctcagctttccaagcctttgcaatatgcttgagcagctttgacacaaaaccagcttgtgaatgaatgcatgatcatgacttctctatccccgttgcggacaactagtcctgtcatgtcactcttccttgatataagatgtatatattttcataaggaaggagagaagctggactaaataggtctactcattctaatgagtactttcattctgcatgcacaagtttaatttgtgtaatgctagctgttaggattgatgtttaatggcaactctactgtaaacaagttcgttaaacttaattttctcaaccatcaatcacaaaaaagaatcaccttcataat

SEQ ID NO: 64213 - DNA, 172 bp, Glycine max
  unsure (1)..(172): unsure at all n locations
  Clone ID: PAT_MRT3847_28998C.1
gagttngaggacttngaggtggtagtggtctaggnggnggaattnggggaggcatttacaaaggaattggaattggaggangcatttacaaaggaattngatttgcgaggggttngncttggnctagngccaatcnggtgnngtaggtggtgtcattggngctttcaagcat

SEQ ID NO: 64214 - DNA, 474 bp, Glycine max
  Clone ID: PAT_MRT3847_28999C.1
ggattccacgctagtctctctttttattttttacccagcactaaataccatacgagtttatcttcaatccttgttggaggagaattgggcgaatatggcttgaactactttgatcgatgagcctgtcagctgcattcaattttcacaccgaaagtttctttcatggatgatggtccttgggaaataaaggttattcgagatcactttggatttccaacatctggggtataatctattgaggacagaacgccttatattacaaaacctggaactgctaaattctttgagggaggtattgcatactggcggaaaaggggaaagaaaccaatgatcggaaagtcattaggggtttgattgctttggcaatcacccatggcatatacctcactttagggctcactgccatctgtagacttgaaaaacatgaggggcaggctccatgtttaaatcatccaccctacgggggctgccatg

SEQ ID NO: 64215 - DNA, 505 bp, Glycine max
  Clone ID: PAT_MRT3847_2899C.1
gtcaggatgcggacttttttggttgcagcgtgtgttattgcactggcgcaagccgccgtctcgcatactaaggacctgctgaagagatctccgttcttcgatgtgttcgccaacttgcaagacgataaaactggaattttccagggcgaaaagtatgattccggctacatcaagatcaaggaagcttttggccaagcaggtgaaatgttctactggcatttccctgcccgaacatctgcagaacaagctcctcttgtaatctggttgaccggtggaccaggatgctcttctgagatggcaactttgaatgaaaacggaccgttcttcattcaaaaagacggaactcttgtcaaaaattcccagtcatggaccgaaagcgcaaatgttgtctgggttgatcaaccgccgggaaccggcttcagcaaagcacacttccactacgtctttaacgaagaccaaattgctgccaatatgggtctcttcctccaaggattcctggccgccc

SEQ ID NO: 64216 - DNA, 456 bp, Glycine max
  Clone ID: PAT_MRT3847_289C.1
aaacagcacaggcaaatagattttaaagaaaatgattcatggacacaaaataagatagtttctacttgggcaggctatgggacagcatctgcaatgaactttcactcatcatcttcatcactatcagcagcagagttgatagccgccacgcgtgcaatcaacttagccttcctttcctcataagtcagcttcttcatgttgtacctacaaaagagccagatattctcaggaacattctccaatcagtaaatactaaggctatgttaccaatacaaaagttctaaaagtaaaaaaaaatatatgatcacacccaagataaatagcacaaaaatacctgaaaataaatccatgccagcaacaggtaaaaattaatgccagaaatcaaatgagaaaatagatgcatacattacactatttccagaatctagtattccagttcaagtaaaaaatcaactt

SEQ ID NO: 64217 - DNA, 425 bp, Glycine max
  Clone ID: PAT_MRT3847_28C.1
tgttttttttttttttttttttttttttttttttttttttctttttcttgggtgttttttggttattttttccctattgatcccctctatacacaaaacccggggaaagggccatctcaccaccctacttcctgcccgataaaacgttggagggaaacccaccgcggacaaccccgcacagaccttaaaaaaccccagggttctgactaaaaaaaaaaaaacaagcggccgggctcaaaaatccaccgggaaaaaagggggccccaaccccccaggggggagagaaacgcccccccccgacctcgggttccaaaacacccggacagggggccaaacacccaacctcccctaataaaaaaaagcgggggggccccccccgagaaaagaccccccccccccccaaaggaggggcgaaaaaagggggg

SEQ ID NO: 64218 - DNA, 437 bp, Glycine max
  Clone ID: PAT_MRT3847_29000C.1
aacctttgggctgatttatgtgcttgcatggtcgtgagaagatgataggggggttacatataaccttcaaacccaacgcgctgcgccctacaggcgaaattactagagaccccaacaatcacgtaacgaaacacaaactaacgcaaaacacttatgcacccgacgaggcccaagcagcatcttaacaaggcgacccctatcgttctgcgtagccgcactcgcccaacgaacgaacaacgtacaatgccccccagcagtattcgcacgtaaaaaaaaaaaaaaaaaaaaaaaaaaaaaagtggttgtctcagaggacttaagtccatgcatgtgcgtacgtgatgctacagtctcctcacagcgctattcaaacctaacctatcggttgctgccccataatgctgcgatcgggaaaatttcggtgccatttaatccaa

SEQ ID NO: 64219 - DNA, 405 bp, Glycine max
  Clone ID: PAT_MRT3847_29001C.1
cccactcgatcgtccacgcgtacgaggacgcgtgggcggacgcgtggggaaattttgataaaccgtgaacacagggtgccgcaccttaaaagcggaaacaaaagcaatcgttggttgatttcaagaatctctcaatgtctttctacttgtgtgagtacgatttgttaggggaaagaaaatcattctctgtgctggccacagacttggtgaatgattttcttttccactcttagaatatttgctgaacactcttctatgtgatatagagacttcgtgtcagatttaaacttcttctgtgtatttctcagctttttgttgaattacaagttcaagctggagaaatctgggattattactaccactcttcctatatggcataggattgcgtgggtagactttactatt

SEQ ID NO: 64220 - DNA, 523 bp, Glycine max
  Clone ID: PAT_MRT3847_29002C.1
acccaatgcatttgcaacactccgttttttaccactaaacacaaagtccacacctccgccaccctggccaaattctccctaactgggaccgtaaagacccgtaacggaatcagaatcgcccttcccagccccaaacacaaaaccatgggaaccactctgtactccactactgtcaacattaccgttgacctgatgatcggagcgaaacccattgaagcccgtgccacacccgaactggcatatgtatgtgtaagctcatgccgctctttcaggttctgcagcttctgctgctgcttcttcctcccgaagcttctttaaagacggaggtggtcttacaacaatgcttttcttccattttttatgaacctttctggacaaactgttattgataccctgctcaatttctatttcccgcttcacagagaagcatgctagcaatcctcttgcgcatgctaccgaaaatcgcggacttgaactcgtggcgatccgatttctgaaagctaatcatgactagctcgccctt

SEQ ID NO: 64221 - DNA, 404 bp, Glycine max
  unsure (1)..(404): unsure at all n locations
  Clone ID: PAT_MRT3847_29003C.1
gctcaactatttcaaaaacaaaaaaagaaaaggaaaccatacaatccaatattttaaatncctggatagcagncgtgtagcagccgaccccaaaaacacaatagcgagataacagataacgtgttgttaattgttaccacaacttgaaattaggacctatacccaaataaacaaccatctcaaccccacttcagttcaggatgaataaattattaaatttcatgataatgcaattttctaacaactataactataaaattattgtttttccttcagggggagtgagggaggtagacagaactagaagcaggagttgcaactaagacattaaccaatggaggagttagtggtgatcccttcatcaatgatgaccagctagggaaatggttaggaatactatgaag

SEQ ID NO: 64222 - DNA, 274 bp, Glycine max
  Clone ID: PAT_MRT3847_29004C.1
ctcccccactgaagttgcatatccctgatcatttaaccaaggaaaccacttccgctgcaatcttaaaaggacttcccagttactaattacaactctcttattctcgaattcctatgatgggatataccctatttttctgcccaatggatctgcttcctcaatactcagaaggcgaagattccgactccccctctggaaaccctagttgcccaaagcgcctactaaccggacagtcctccttgccccaaggggtcgaaaacgtgatagccctcac

SEQ ID NO: 64223 - DNA, 1990 bp, Glycine max
  Clone ID: PAT_MRT3847_29005C.1
tgtctgattgggttattaggattgctgtgttctgcattgagaggaacttccttttgaggaagagggtcttgtattttgtatatggtgtgaagaaggctgttcagaattgtgtttggttggggcttgtgttgattgcttggcatttgttgtttgacaagagggtgcagagggagacccgcagcaatttcctcgagtatgtgactaaggtgttggtgtgtttccttgtggggactttggtgtggttgttgaagacccttatggttaaggtgttggcttcctcttttcatgtgagtacctactttgacaggattcaggaatcgctgtttaaccagtttgtgattgagacgctttcggggccgcctttggtggagattcggaaggctgaggaggaggaggagaggcttgccgatgaggttcagaagcttcagaatgctggggttaccataccccctgatcttagggcatctgccttttctaatattaagagtgggaggttgaggagtggaatgcttccgaaaagccccagatttaagagtgacaagttttctcggcctctttccaagaagtctgatgagccgaatatgatcactatggataacctgcataagctgaatcccaataacatctctgcctggaatatgaaaaggttgatgaacatggtccggaatggggctctttctaccctggatgaacagattcttgataactcgatggatgacgagaatgccgacgcaaattagaagtgaaaacgaggcgaaggctgcagctaagaaaatatttcaaaatgttgctagacgcgggtgcaggtctttgttcccgggtgacgtgctccgcgtttcccgcgccgttggagcggctacagccatgaagccctttgaagcagcgtctggtgcgctgtgtggccgcatctcggcctggacgtcctgggcgggcgaggccggcttgggagggggtccccttgccttggcagtgatggtcaccatttccgcggtgctcgaccttcatcgaatgctcaattttatagttggaattgttatactggttatttggctcttgatattggaacttgccaccaccaaatttcttctctttgtgagctcacaggttgtcgtggttgcatttatatttggaaacacctgcaagaccatatttgaagcaattattttcttatttgtcatgcacccatttgatgtgggagatagatgtgaaattgatggggttcagatggtggtagaagaaatgaacatattgacaaccatatttctgagatatgataatcaaaaggtcatcatccctaacaatgtccttgctaccaaggccatatataactattaccggagtcctgacatgggagatgctatcgaattctgtttacatatatctaccccagttgaaaagatttcactcattaaacacagaatacaaagttacattgataacaagaaggagcactggtatccttcacctttaatcgtatacagggattatgaccaattaaacatggtgagaatggctatctggccaactcatagaatgaacttccaagacatgggagaaaggtttgtgaggagatcccttttgcttgaagagatgatcaagatttttagggagcttgacattaattaccgtctattgcccctggacatcaacgtgagagcgactcctaccacctctgatcgtcttccacctagttgggcatcagttccaactccaagttgagtagaaggaaattcggcattaactgctaggaagtgctatattttagcaggatagcatattgtaaagagaggatcttttgtttttagattagtttcatacgtaccgaggttagtttgtggtagctatgatgccataccttggtttcttatgtagtagttttgttcaaatgattagtattaatcgctacctcgtttatactatataccatattcagtctaaagtttctatatttctaccttttgtcctaacataagggagctaattaatttct

SEQ ID NO: 64224 - DNA, 419 bp, Glycine max
  Clone ID: PAT_MRT3847_29006C.1
ataagtgcagcaggtgctgaagacgacgctgttgatgccgttactcctccagaaggaagcgacaacagtattattgacgcggatgagtcacctagattcataccattagtgagagattgcccctcgcatgctagtcacacatgcacgggaaatgatccgtgccataatccccgacgccaggccaatgaacaggccatgccgattggctttttgcctcgttgattctatgcacaagtgcatggcatagcatagaggactcactcagagataccgcagatcaaaacaacctatctcccatgtcctctgttcctgcttcaagcctcaatccgccactcctcattcagactgaaaaattcagagccgtcttgaagccctgttcgcatgttccatgttattaccacccgcgccaccacccccgc

SEQ ID NO: 64225 - DNA, 665 bp, Glycine max
  unsure (1)..(665): unsure at all n locations
  Clone ID: PAT_MRT3847_29007C.1
agtcctgacatgggagatgctatcgaattctgtgtacatatatctccccgcgtccgaaagatttcactcattaaacacagaatacaaagttacattgataacaagaaggagcactggtatccttcacctttgattgtatacagggattatgaccaattaaacatggtgaggttggctatctggccaactcatagaatgaacttccaagacatgggagaaaggtttgtgaggagatcccttttgcttgaagagatgatcaagattttcagggagcttgacattaattaccggctcttgcccatggacattaatgtgagagccactcctaccacttctgatcggcttccacctagttggacatcagttccaactccaagttgagtagaagaaggaaattcataacctcatgtcatcttgtgtgtgtggaaaacccgcggcattaactgctaggaaatgctatattttagctggatagcatattgtaaagagagggtcttttgtttttagattagcttgatatgtactgaggttagtttgtagtagctatgaagccatgcctaggtttcccatgtagtagttttgttcaaatgattagagggttaatcgctacgtcttttatactataaccatattcagtaaaaaaaaaaaaannnnaaannnnnngg

SEQ ID NO: 64226 - DNA, 395 bp, Glycine max
  Clone ID: PAT_MRT3847_29008C.1
acttcgaatcagttcacgctgtcaaactctacaacaacatcaaggagcgctcgagtgcccaggggaattcacctttgccgatttcgtcacgccggatcctcatcgaaccaacgctcttctcaattttggtgcctatagggacgccaggttgaactgtcttggaaattgaggacgaagtgaatgcgatagaggcgcaacgaacagagttggaggagaataggatgttgcagaacattaggtagagcactgagttacattaacaataactgagacgacaaattaatcaagaccagcttggtgacaaaccaactcttgatatcattgaagaattaaaagcacttggtggagatattgttgtaccagaaagttatacaaaaacctggtactttaatttt

SEQ ID NO: 64227 - DNA, 1362 bp, Glycine max
  Clone ID: PAT_MRT3847_29009C.1
acgatgttgtcaccgattgcaaatctcacaaggtggtcgttaagggagcggctgcgagaggacagaagggggagagagagagaggctgaaacaaagaagtgaaaataacagcaaaaagtaggagctgcagcagctcccccgaagcttatctcagcggcagactctgaaagctgtttgagtagcctcaacccggagaatagcaccaatgggagaggaggaaaacaaaccagaggaacccatggcaaaggagaaaaacccagaggaagaagcaacccaagagaaaaaaccggagcaagagtccaaagaggaagttgctgctgctgctgctgctccgccaccgccaccgccaccgccaccgcccgagattgtgctcaaagtgttcatgcattgcgagggttgcgcccgcaaggttcgtcgctccctcaaaggattcccaggtgtcgacgatgttgtcaccgattgcaaatctcacaaggtggtcgttaagggagagaaagcggatccgctcaaggttttggagagaatacagaggaagagtcacagacaggtcgagcttctttctccgatcccgaaacctcaagaggagaagaaggtccaagaggaagagaagcccaagcccaaccccgaagagaagaaagaagagcctcagattgtgatcggttctgaaagttggcatgcattgcgaagcttgctctcaggaaatcaagagacgcatacagagaatgaagggagtggaatcagcagaacccgatctgaagaactcacaagtgagcgtgaagggggtgtacgatccagcaaagttggttgagtacgtgtacaagagaaccggaaagcacgcagtgataatgaagcaagagccagaaaagaaagagaaagtggaggaagcaaaagaggaagagatgaagagtgatggcgaaggggaagaaaacaaagagaagaaggaaaaagaagaggcaaagggtgaagaagccaaagcagaggaaccaacaacaccaacaattactgaagacaccaacaaggttgttccagaggttaagattaatgaatacttctataacccaccaaggtatggcatggaggtgtatgcatatcctgcacaccctgcacacccagggtatttccattcctaccctccccagattttcagcgatgagaacccaaatgcctgcactgtcatgtaaaaattgaaggtgtcaggggtgatatgggaattaggggaaattgtgaagtttggtgggggatatgaatatagataccctttcctgtgttacctgtactgtgaaagtacaatgtatgcataagctatagaattttgtaagactttctggttccttgtttaagtagaatatactatattacttt

SEQ ID NO: 64228 - DNA, 580 bp, Glycine max
  Clone ID: PAT_MRT3847_2900C.1
gtggtttaaaacattttcaaagggcatgtattttttagagatacccacagggcctgtctactgcacagcggaccgccgggcacggaaccgaaaggaggggcacgccgcaaatacagccgccaaagcccacgcaagaaaacaaaaagggcggccgccatctgcacatgtgacataggggggaatgcagaaacagaacggaacgacccccggtccaaccaaaagggcccccacagggggggtcccgaacccaccctagagtcctggccccaacagcggcagacccattgaccgaagggtaaccaaggggccactccaacctacgggcctggcccattcacccgggacccaaacaaaaaagcccccctatccgcccccgaaaactgagccgggaccggcaccgggggcccattgctggaaaggcagtgcaaaatccacgacattggggtccccttcgggacaaggccaacccccatcgaggagagagaaaatacaccccggcccacaagaaaccgggaccgggaaagagacatgatgcacccggaaccagaggggaacgggtcaaaattgccctgaaccggaa

SEQ ID NO: 64229 - DNA, 1255 bp, Glycine max
  unsure (1)..(1255): unsure at all n locations
  Clone ID: PAT_MRT3847_29010C.1
ggctcgagcttcaagaaaactcttgattcttgagagtgttaaatttcctatttatgtcttcttcctcaaacccttctcctttttagtactgtccccagaacaagtccatcatataccatatggaaaccaattctagtttcttcatacactcacaagaataataaattaatatcctaatatcatattcatattcctgagaaagtgtttgtttctctctatctatatggcagccttcatcctcatctccaagtccaagcttcaatccacagtacttgttcttgtcctaaacctatctttcttcttcctcttctgtctccttctaaaggcttattatctccaccctcctaactcaaattctcaatctaatggccccctcaaaaccttcaaccatgaaagattgttcagagatgttagtgttgaaggctgcactgacctccacaagtactcagattatgagtccaaatgtttgtatgtgaagagccatcttgactgcaggtcaaaagggtacataaactatctccaaatcttctattgcagctttgggaaattccaaattttgggacaaaccatccttgccttgtggcttgtggttttgttctatcttttgggagacacagcttcaaactacttctgcaactcattggaaggtttgtccaacatcttgagactctccccaaccattgcaggagtgacgcttctctcattaggaaatggtgctcctgatttctttgccagtgttgtgtctttcacaggatcatcctcaaatggtgccgttggactcaacagcatccttggagggtctttctttgtgtcatgtgctgtcttggggatcataagcattcttgttggcccaaaccaggttcaagttgataaggccagtttcattagggatgttcttttcttccttttctctcttctcatccttctcatcatcctttacattggtaaaatcactttgttggcttcaatctgctatgtttccatctactttctctatgtctgtgctgtctcagccacacatctcatctatggaggggacaaaatgattaatgaaaggcaataccaatactctgatgatgagtcatcatcatcatcactagaagctagcatacctttgttaggctacgttgatgaagagaaaacaaagttggcagagatagtgntgggtggtttgaaggaaaaggaccaaaaccaaaaccaaaagcaagatagtcatagttagtagtacttttttttgggggtaacaattcattgt

SEQ ID NO: 64230 - DNA, 1608 bp, Glycine max
  Clone ID: PAT_MRT3847_29011C.1
tacggtcgcccacgcgtcggcccaggagagcggctgaaacaaagaagtgaaaataacagcaaaaagtagcagctgctgcagctcccccgaagcttatctcagcagcagatactcaaccctgtttgagtagccgagaataacaccaatgggagaggaggaaaagaaaccagaggaacaacccaaggcagaggagaaaaaaccagaggaagagaagaagaaagaagaagcagcagcagcggaaaaaccaagcgaagagaaaaaaccggaacaagagtcgaaagaggaagttgctgctccgccaccgccaccgccaccggccgagattgtgctcaaagtgttcatgcattgcgagggttgcgctcgcaaggttcgtcgctccctcaaaggattcccaggtgtcgacgatgttgtcaccgattgcaaatctcacaaggtggtcgttaagggagagaaagcggatccgttgaaggttttggagagaatacagaggaagagtcacagacaggtcgagcttctttctccgatcccgaaaccgcaagaggagaagaaggtccaagaggaagaaaagcccaagcccacacccgaagagaagaaagaagaggctcagattgtgatgacggttctgaaagttggcatgcactgcgaagcttgctctcaggaaatcaagagacgcatacagagaatgaaaggtaagtatgcatgatttttcagatttcattttcactaagcaacactccattatgcaacacgaggtctttctttttattgaacttatgattataatttaattagcggaacaaaaacatgtagaattgtgctttcactgtttgaaactttgaatctgaatcacccatgtgaaagggattattattattagtatttcgttattctcattccattaatcccactacctcggcacttgaaattgaatcaattaaattaataaagtcgtcaggtttcggatgaagtgatgctgcagctgtggtcaaattctgtcactttataatctcatttagtaatatttattgcaattaattaataccgagccccatcatttaatttgagctcaagtgatttggtggagtattttattacgcacactgattcatcagttcagttagtaacgtttaccatcgatcacctggatcaattgacatagtgttatgtatgttggttaaataattggaagaagaagctctgataataaaaaaaatacactatacacttagtctagacaaaagaaaaaaaaaattactaacatatttttgttattgtgcaggagtggaatcagcagaacacgatctgcagaactcacaagtgagcgtgaagggggtgtacgatcacaaagtgggctgagtacgtgtacaagagaaccggagagcacgcagtgataatgaaaaaagaaaaaacacaaaaaaaaaaactggaggaagcccaaaaggaaaaaataaaaagtgatggccccccccccccaggggcccccccccccccgaagaaaaaatccccccccgccccccgggggcccccctttttccttaagggggggggtaaaaaccccgggggaaaccagggccaacccgggtcccgggggaaaaaggtttccccccc

SEQ ID NO: 64231 - DNA, 709 bp, Glycine max
  Clone ID: PAT_MRT3847_29012C.1
atccgaatggaagaagaagcagattacaggctgattgtgataactgcttcagtagggtttctcctcttgtttctgtatgttttgaaatcgatactactaaagagtaaaaacctgccaccaagcccaccttatgctttgccactcataggtcatctccatctgataaaagaaccccttcacctaagtctccacaaactcacagacaaatatggccccatcatatttctctgccttggcacacgcaaggtcctcgttgtgtcctcaccttcagcagtagaagagtgcttcacaaagaacgatatcacttttgcaaaccgtcctcaaacgcttgcggccaagcatctcaattacaacaaaaccaccataggggttgcttcctatggccactattggcgaaacctacggcgtttaaccaccgtggagctattttctaccactcgccttgccatgctcactagcgttcgagtagaagaggtgcagttgatggtgaagcaactgtttgaagaatgcaaaggacgtcaacaaataatgatagacctcagagcaagacttttagaggtttctttcaatattatgctgaggatgatatctgggaaacgctattatggtaagcatgcgattgcccaagaagggaaggagtttcagattctgatgaaggagtttgtggagcttctaggaaagtgaaatttgaatgacttttccccttact

SEQ ID NO: 64232 - DNA, 181 bp, Glycine max
  Clone ID: PAT_MRT3847_29013C.1
taccaggtctctgtctcttctcaccattagtgatattgttacgattcacaaatcaattccaattccaagcttcgcggaatctgttccttttgctatagattcctctcgcggaatctgacctttgttatttctagaatgatgataaatcatttttgttgataatgaatctggagttccttga

SEQ ID NO: 64233 - DNA, 339 bp, Glycine max
  Clone ID: PAT_MRT3847_29014C.1
gccagtcgttcgaagctctgcatcatcggttgcgggccgggggcgcacaccgtcagcatagacgcatcgcgcgccgagttgacgccggtcctctgtgaacgctggacggtgaacggcgtctgtcccgggggccagctcaccaccaccaccgacgtccagtacttgtggggatgttccggctgcatgcttagtaccgacctcatggaccggtgccgtcagcagtcggcacgcttcagtgccgaggtagtcacggagaccggcaccgccgtctacctctagcaacgtacgtttagggtgtactccgacttcagcatcgtgaaagccgaatacggggtggtc

SEQ ID NO: 64234 - DNA, 372 bp, Glycine max
  unsure (1)..(372): unsure at all n locations
  Clone ID: PAT_MRT3847_29015C.1
gagagaacaaattaannccctaatggggaatggggcatgtaccattaagtttacttcggatacacataacaactcacatggccttaagtacttcaccaaacacagatcttaaatcgctcaaggggcatncnggccctccccctcactncccacagacgaagttgctagcctaaacccactcgttgccattagcagcatcaggccggcgatcgcgcaggcactccaactgaccctttaacaacacaatcgcgctctcaaagaggccaatcatacatatcacggcccatcggccgccctttacttcctgcaccagacgctcaacaaaagccccttgctcacaaatcaaggcccaatgggcccaaccttccaccc

SEQ ID NO: 64235 - DNA, 465 bp, Glycine max
  Clone ID: PAT_MRT3847_29016C.1
aggaaaaaaaatttcagatcatttttaacaattttttacaaagctcaatttgaggaattcctctaatgaatcagttgatccgcaaagccaaaaaaaaaaaaaaaacttatttcatgccctaggcaactcccatgttaaagagaaaagaggggattttggtggaagtaaacttgacaacctggccctcataagggttatcttactggaagctacttggaagacttttcaaaagatgtagaacccttttcaactactttgggttcaaaagatgccgaaccctttccaatagctttgggatcaaaagatgttgaaccctttttaacccctttgggagaactagaaaatttttcagctttaacgggcttacctaggctttcttggagaggttttaccctggcctctgtcttgcgaagctttttccatctatagggtgtccccagagcaaagccccccttttcaaccatt

SEQ ID NO: 64236 - DNA, 733 bp, Glycine max
  unsure (1)..(733): unsure at all n locations
  Clone ID: PAT_MRT3847_29017C.1
gaaatgagccttacgccacagtggcgagccttatatattggaagaaaatcagaatgaacttggttcttaaattacaaaactagtgtcaaggcagnttgactacaagagtgcatatgcatcagaggtgggcggtatttcttttttaactgatgtgaatgttgataaaagtgatcataggttattaataatttattctctttcagattggaggaaagtgagctttaaccatgtcagaatggtcattattggtatcacaagtaacttttgaatgattttgatgcattgaatataaccatttcttttgctttcttaccctttacttcaagttttatcaccagaagaaaaataattagaaaaaaatatttttttatcattttccatactgagttctgttaactttttctttttctttcccaaatcattctgtttacaatttacaccctttttgtcatgcttctaaattcgttaaaaaaatatatttaaaattatttatctgcgttatgcaagtcgactttgattttgtaaaaaaaaaaaaagcaatttctgctttttcttctcctcagaaaattctgtgatgtttcttaagcgtgagaaaaatgtaaaaacatgctggaatttgtttttacaaaaatcaaaattaactttcagaaaatcgacttacatcatatgaataagtctctttagaatatactattttttataattttaaaagtaaaatataccacttgaatcc

SEQ ID NO: 64237 - DNA, 185 bp, Glycine max
  Clone ID: PAT_MRT3847_29018C.1
ggggagatttcaaatatattttacctatatgcaaatggtgatatcatacataaattataatacaaagtggaattttgtttcacagacagccgaaactacttgttgatggcccttatggagctccagcacaagactaccagaattttgatgtactactcctcataggattaggaattggagcaact

SEQ ID NO: 64238 - DNA, 511 bp, Glycine max
  Clone ID: PAT_MRT3847_29019C.1
aaaaacaacatggtgttttttttatcttccaattgtaaagaaaagaacgagcctgtgctcttttcttaaattgttggattatattatttgaaagctggcccatcataacaggacacctaaaaacagataacggcttaatcctttctcttttcacaagcagactgtgtggacccttcctttttttctcctgcaaaacactgatcaattggcagatttgcacaacttactccaccatcttcctgaattcgttcttgattgctccaaagctgtgctgcttgttggttcagaggagaactaatgtgtggctctccatgcagactttggattgattgaagaatggctgtgacatcctacgcaaaggaccatttatcctgtagtctgtgcaaacatttgttgcgctgcacatcacaattggggaggaagcaggacgtttgaaacttgactttcggaggcttgaaagggccctctttggggaaggagagtgatagcttatactttgggcctttaaaca

SEQ ID NO: 64239 - DNA, 135 bp, Glycine max
  Clone ID: PAT_MRT3847_2901C.1
ctcttcttcgtctcaaacctctgcgttccttcgattcgttccatttcttccataatggacaaagacccagttcgcgtactcgtcaatggagtcgcaggcaaattcgatatgctctagtccctatgattgctaggg

SEQ ID NO: 64240 - DNA, 208 bp, Glycine max
  Clone ID: PAT_MRT3847_29020C.1
attctttcgagggttatattattttaaccgaaccgaagaacgacagagacggaggcatgcatctcctaacgagaacgcggcggatgcatacagatgtgagaatggaaactggattcccacaatatcacaaatgctggaaagactggaacagatcttaagcatccagaggggttctagatagagatactgttgggaattccactgaaag

SEQ ID NO: 64241 - DNA, 1828 bp, Glycine max
  Clone ID: PAT_MRT3847_29021C.1
ccacgcgtccgaaaacccaacatggacgataaacccttcttccactgatccatcatccccacccaaaaaggcccgagcttcaccacctccttcttcttcccttcccccactcttcaaccccacacaaacctccctccttccaacgcagtaaaaccttactccgagcctccaccgtcgaatccccaaccccaaaacgccgcggcagaaagaaaaaacccgaaacacaaaccccctcaaacaacacccctcccccccaaaacgcagacaacaaaacagaagaagacgagctccacgactacgacgacggcgtggacttcccctactcggaccctcccttaatatgctgcttcggcttggcgcggaaggagttcgtccctgcggtgcgggtgcaggactacccgatgcacccggacatctactccgagtggaagatgctgcagtggaagccccccgagttcgcacgtgcgccgggcggcccgccgtccaacgtggccgtggcgcacgcgcgcctcggggggcgggcggcgttcctggggaaggtcggggacgacgagtttggagaggagatggtgctgatgatgaacgaggagagggttcagacgagaggggtgaagattgattcgaagtgcaggacggggtgctcctacatgaaggtgaagtttgaggaagaagggaggatgaagatggagacggttagggaggccgcggaggactcgcttcttgcaaatgaactcaaccttgccgttttgaaagaggcaaggattttccatttcaattcagaagttctaacatgcccctcgatggaatcaaccctattcagagcaattaagtggactaagaagtttgacggccttgtattttttgatttaaatctgccattacctctgtggagatcacatgatgaaacaagagaaattattaaaaaagcatggaatgaagcagacataattgaagtttcacgaagtgaactagaattccttctagatgaagaatattatgagaggaagagaaattataggccacagtactttgctgaaaattatgaacaaaccaagaatcgacaagagtattaccattacactgctgaagaagtctcgcctttgtggcatgatcgacttaaattcctgtttgtgactgatggaacacttggaattcactactataccccttctttcgatgggtctgtgatgggaactgaagatgtgctcataacaccatatacttgtgatagaacaggctcgggtgatgctgttgtggctgccattttaagaaaactaaccacttgccctgaaatgtttgaaaatcaagatgttttggagagacagctacgctttgctgttgcagcaggaattatatctcaatggactattggtgcagttagaggtttccctactgaaagtgctactcagaatctcaaagaacaagtttatgtgccttcattgtggtgattaaaattgtatctgtaacttcaatagagcttagcagagccttgaggcattagttggtagttattgtttgattatttatttggaacttctctgcaagtgtttgatataaaatgggggcagatgaacacaatcagattgcaaaaattgtttggttgtttcgtttggctccaactcatgcatgtatgaacaggaggcggatgtcaattgaaaattttgtaggtaaaattcagatgtacactattcttgtaatggggttgcagtttgtatttgtaatactcttcccttcctcattgttcaccttctgctttagttttatgtaccttcattctatacatgcaaaattcgacaattaactatctgtttattttgaagttgagtgc

SEQ ID NO: 64242 - DNA, 166 bp, Glycine max
  Clone ID: PAT_MRT3847_29022C.1
cgacgacgtcgttgcggccgtgcgtgacgtcgtccccgatgcgaaattgagttttctgaaggtagggaccccaaaaagggtatatgcactagatctcttttttgtttaattaggaaaaatttgtaaaattgtgaagtagattaatacgataataaatagagaaacg

SEQ ID NO: 64243 - DNA, 263 bp, Glycine max
  unsure (1)..(263): unsure at all n locations
  Clone ID: PAT_MRT3847_29023C.1
ttagagttnttcttcctcataagccattgattagtccatgtttttcttnttctctctctaaagttcaaagttnttnctgttttccccccgtgtctttctctctcttgtggtggacttgangaatgctggggncagaggcttctgagccatgttctagaagactnttngngaattgggtcactgtggantcngtcatnggtggtagagaatcngagtcctcagagatctaancctntctgtctggtgnctnntgcancacagac

SEQ ID NO: 64244 - DNA, 335 bp, Glycine max
  Clone ID: PAT_MRT3847_29024C.1
ccccaccccttcctaccgcttccaaaaaaccacttaaaggggtttccatttccacttttgtgtggagatataaaaactcttacctcattcaaatcaagttcaaagtgtatttatccctctctcacttctcttttctgaactcaaacccatgtttttttcttctctactcaccactttatatttttccaacgcccactttttactattctttgccccattttcaaaccaacacttatattcaacccccgccgaacaccacgaacaccactcttactcactgctattaccttcttcgccaagaacacaccactcccccacgaccaccttttttttaa

SEQ ID NO: 64245 - DNA, 429 bp, Glycine max
  Clone ID: PAT_MRT3847_29025C.1
ttcagctcaagagagaagaatcaccagacgcagcgaagaaaaattctcctgagcctgcattcaagaggcaaagaattgagactccatctccattaccaacttttaaggtactttagtaatatattctattttccattatcaaagctttatatatatatatatatatatatatactgggtaactttcatttataataataactctttagaattgatcatgttgatatggatatatggacaggttaggaaagaaaagctgggggaccgcatcactgctcttcagcaattggtttcacctttcggaaaggtaaatttttttgtatgttctttctttcactttattttttttcccttcacggcagctttgacaatgatatggtagaatttaaacctttacattttagactttgaagggtaaattgaaaactca

SEQ ID NO: 64246 - DNA, 428 bp, Glycine max
  Clone ID: PAT_MRT3847_29026C.1
tacagctgtgagaagcgacagaaagggactcaacaaagaatttgatcagtgatgaaaaaaaacaagaaagacgaatgagagagaacccaatgtctgctaaatctagccacctcgtcttgactatcggctccttctactagagccttcaatgttaatactatagccgtaccggtacaaaccacttcacgtgatcagtagctatcttctttacataggcgatagttccgactacaaagagcaaaaaacatcaatcggtgagcagttggtgaccaagagaaccgtgcgaacgtctgggcaagaactgacactgcagtatcggatgtgaattatttctacactccaaaaggataaactagagtcaacacctgttaacggcattacaaggctatgaattgcgagactacaatgaaatacatggaccacacata

SEQ ID NO: 64247 - DNA, 596 bp, Glycine max
  Clone ID: PAT_MRT3847_29027C.1
caactaatgtcaaaggggtgtttgcagccggtgattgtcgccgcggtcagtccctggtggtgtgggcgatttcagagggacggcaagcggcagcacaggtggaaaactacctcatcaaagaagaccaagaccacaggaatcaagatgggcttgtcaagaggcagcagggcctcaacatgaagcagcagggcagcaacaaacacacagtaatgacttaggtggcttctctgatttttcatgctcataaaattccaaaaggaatttgcacagaataaaataagattgttccaagtttgagcaagagattcattggtttactttaggtattcttggttggcagttgctacccaaaggggcgaaataagcataaataaagtgaagcttagtgcagagaaagcaagagttgttttggtgtttggtgtggtcttagggtatgaagttattgcagattcgagtgttcagttgttcatagattgttttattcgggctttattgttgggaaggttaactttcttagttggtaatggtgacgatgattgcatgtaatgaaatatacaatttgattattatttagatgttacatcgtttcaattttt

SEQ ID NO: 64248 - DNA, 264 bp, Glycine max
  Clone ID: PAT_MRT3847_29028C.1
ttagaattttgttagttatgtatctgttttttttttttcaagcagccctagctagtttttgaggaagggagaaaacccttcaatttgaatatggatgatgattggtggggaaatcttgtgtcttgcgccaaggctcactctctgcttcttttgtttccaagtatttttcttccgattattcagcagactttgtgtgtattaaactattcgtgactttattgtaattttttagcaactataaaaacggaaaatcttgggtatgga

SEQ ID NO: 64249 - DNA, 302 bp, Glycine max
  Clone ID: PAT_MRT3847_29029C.1
acgacaagggatgctggtcaattcagcacacccgccgtggtaacacactttaattagtgctggtgtaacagttactagaccgtccttgctctgttggccattgcaggcattaccactctgattatattgaagctgtcgaaacgacatgttactggcgtcgaagtggtgatccctcatagcgtaccagaaggaaaggggttattggtatcttgcgtacaagatccaaatactctaatttcttatgaaccgaattgggtctatcgtttggctatcgaagatataccaaaggatcactacatgcc

SEQ ID NO: 64250 - DNA, 436 bp, Glycine max
  unsure (1)..(436): unsure at all n locations
  Clone ID: PAT_MRT3847_2902C.1
ggaccacagacggccgcccnnaacaantcttaaatttctaaaccacgcccaaaaaaaggacccgggggaagggaaacacccccgaaccccccaaaaaagaaagcacaaacagcaaagaaaacaaacgaacagaaagaaaaagaaacacaaacccagaagagagcaacccaacacaagcagcagaaaaaggaaaaacggggaagcacaaaaagcccggccanaaaaaaggaggaaaacaaccaaaccaaccaacaagacagacaccgggcccccacccacacaccgacagaaagcacaggagggnannaaagggccaaagaagccacacccggggccgaggagccaaaagcccgaaaccgaaccccaaaaaaaaacaccccagacaccaccaaacgcccgggcccaacacaaacgaaaggaacccccaaacgcccac

SEQ ID NO: 64251 - DNA, 192 bp, Glycine max
  unsure (1)..(192): unsure at all n locations
  Clone ID: PAT_MRT3847_29030C.1
caacttnttctcttctncatccttagggntttctctgctccttngattttctctctttcacacttaccatcancncatatgcacctattgaattantcatantccntccaaagctttgactttngcctacaacccnttctgggtccttcccttnncgctttattcgcagctnccaatntngcaatnncncgc

SEQ ID NO: 64252 - DNA, 415 bp, Glycine max
  Clone ID: PAT_MRT3847_29031C.1
gtgaccaataggctacctggttatgctcattcgattgatgatcggtttacgtattttttaacttgctccttcttttgtttctaatgccgtattgcccgatgtatcttctaccgtttttcttcgccatttttaccttttagtgtttcttggggtttatcccttttttccaacaataaaaagggcaaaacaaatttaccaaaaagaaaatagagggactttgaccaatagagtagaatttcaagtgaaagttggagcaagatcatttgttagccaaagccgctgacagtagtaaacataataacacactcactagtcactccccaaccaccttcaaccaaggagccatggcttgcgtttacaagaatcccgaatagcatattgaagctcgtgtgaaggaccttctttctcgcatgac

SEQ ID NO: 64253 - DNA, 227 bp, Glycine max
  Clone ID: PAT_MRT3847_29032C.1
gtccgtacaactgtcagtacaccacctaatggtactgctgcaagaacactacatattggtaccgctcctacaacaccacacaacgtgttatacatcatctatacattacatggagttcggggggcgggtgctctacactatccaaacttcttttctcttccatcctacttcatcactcttctatcctttctcctactttcaattctcttcccttcgtttttcaactt

SEQ ID NO: 64254 - DNA, 1012 bp, Glycine max
  unsure (1)..(1012): unsure at all n locations
  Clone ID: PAT_MRT3847_29033C.1
cccacgcgtccgcccacgcgtccgcaaaaaattagataaaaagccaggttgcatttcaattttgcaaaattattcaaatcgaaaggaaagaaagagaacaacatagtgcagtttccaagattaaagaatcaaatctgttgtctagattataaccttcaagtgtggggcagtgatagttatattgtcccactggatttcatgttttaagtgtatcacttatttttggcccctacttactttcccccctaggaggctgctttatactacacatacggttgcacttgtctgtgattttgggaatcaatttttcactcatcgaagtgtgatctcagatgcgagtgtcaaatttttcataactcttcaatcaaaccttgttcttcctcttgaatgatttaaacatggcagcagtgtggttctttttgaacatatatagctcttccctttgtctcatatgaaggcactgaagattctgaaatccaaagtacattagtttaccttcatgggtacttcaacaaaatgtctactcactgtcatgctacgtacctttccttcattagaattacatacaaatgaacagagagagtaaagaatgtaaactaaattatggtatagcaataataacatcatagaatagtcacattaaggaaatatggcacgggaaacagtaaatgattcgtatttcaattaaggataatgcaaatggttcccgtaactgttgtactaactgtgctacattccaatagttttttttgcaaatgtcacacacatgaacatgatatagccaacaaagttgttagagattgaattattattccatacgtaagctagtcataaataatgatcttttgtcttttgcttattcaaatggaacatctcttgcttcagtttaaatttatatgaattctgcaatcgataagttggccaaaaaaaaaaaaaaaaaaataaaaaagagggcgggcccgcccgaactagtgaggcttcgtcgtacccgggagttaattccggnaccggt

SEQ ID NO: 64255 - DNA, 1059 bp, Glycine max
  Clone ID: PAT_MRT3847_29034C.1
catgttcaatgttcttatcctttcgtctctgttaatcatgcgtgtctgtctcccactatcatcagtgcacgtaccttgtgatcttccacacacacgtgatcacacgccaatcattctctcaagcctccccaacacacttccatgattcattcactgttgcctccttttttgcctatatagcttaaggctggatttttacttgatttggtgcttgattgtctaattatcttcagctaaacttcgatggggttgtgaatattaaaatatctagccggtgggtatttcacatctcacttatattatagtccgagtttgaggtgtgtttttttaggctagatttgaagaactttccagttagttatctcttattttcaaggattattttattatataacatattgagtggtttgtggatattgttctttaattttatatatacttctttgcaaccttattattcttcagtcgcttttgtttgctcgattgaaaaatttcctctttttctttgtgattttaactggtggtctttaaattggtgagtgagacatgtggggatgggttctctttgagtaggatttaggttgatacctcacataaaagcaaagtggcatccaagttggacttcatgataagctacttgtttgttggtcgactttggtagcgatttgaggctcttatacccccatgctgctatagatatctttttattttccccaaaaatccagatccaatctttgcatctaatatctgggatatcaatcttcatatattttcttttgataaggatcttgattaggagagctcggtgttttttgttttattgggtgtgtcagaaacttgttttaaggagaagctactgagagagctgttatatgaggttcgaagctttggctatgccatgaaaattttgaattgtacaatatgggtagcaacaggactattgtttggtttaaaagggaccttaaaattgaggacaatcctgcattaactgctgttgcatacgagggttctgtactccctgtgtatgtatggtgcccctaaagaggaaggacaatttta

SEQ ID NO: 64256 - DNA, 424 bp, Glycine max
  Clone ID: PAT_MRT3847_29035C.1
gtctaattatcttcggctaaactttgatagggttgtgaatattaaatatctagccgaaacttgttttaaggagaagctactgagagagctgttatatgaggttcgaagctttggctatgccatgaaaattttgaattgtacaatatgggtagcaacaggactattgtttggtttagaagggaccttagaattgaggacaatcctgcattaactgctgctgcaaaggagggttctgtactccctgtgtatgtatggtgccctaaagaggaaggacaattttatcctggaagagtgtcaaggtggtggctgaagcagtctcttgctcacttggatcaatcactgaagtctcttggatccagacttgtgctcatcaaaacccacagtactgctgtggctctcgtggaatgcgtaaaggccattcaag

SEQ ID NO: 64257 - DNA, 1783 bp, Glycine max
  Clone ID: PAT_MRT3847_29036C.1
ccacgcgtccgatcaggtttttggatttattcaggatatttttcatgatgttgtggtaaaacaattgatacattttgatgaagtcgtggaagctgctggtagcccctagtgtagtctagtgtgacatgttcactgttcttatcctttcgtctctgttgatcatacgtgtctgtctcccactatcatcagtgcacgtaccttgtgatcttcccacacacacgtgatcacacgctaatcagatccttaccctccccaacacacttccatgattcattcactgttgcctccttttttgcctatatagttgctttaggctaaatcttgatttgatttggtgcttgattgtctaattatcttcggctaaactttgatagggttgtgaatattaaatatctagccggtgggtttttggtatcttactaattatattatctagttcaagtttgaggtgtgtttgaggctggatttgaagaactttccagttagttatctcttatcttgaagaatcattttattatataattatattgaatattccagctcaagtggtttgtggatattgttctttgattttatatatgcttttttgcaaccttattattattcttcagtcgcttttctttgctcgattggaaaattttcctcttttcttttatgtgattttaactggcggtctttaaattggtgactgagacatgtggggatgggttctctctgagtaggattttagattgatacctcacacaaagcaaagtggcatcaagttggactttcattataagctacttgtttgttggtcgactttggtaatgatttgaggctcttatacccccatgctgctatagatatctttatattttccccaaaaatccagatccaatctttgcatctaatatctgggatatcaatcttcatatattttcttttgataaggatcttgattaggagagctcggtgtttttttttatattattattgggggcgtgagaaacttttttttggaaggcaagggtgtgtgagaaacttgttttaagaagaagctactgagagctgttatatgaggttcaaagctttggctatgccatgaaaattttgaattatacaatatgggtagcaacaggactattgtttggtttagaagggaccttagaattgaggacaatcctgcattagctgctgctgcaaaggagggttctgtactccctgtgtatatatggtgccctaaagaggaaggacagttttatccaggaagagtgtcaaggtggtggctgaagcagtctcttgctcacttggatcaatcactgaagtctcttggatccagacttgtgctcatcaaaacccacagtactgtcacggctctcgtggagtgcgtaaaggccattcaagcaacaaaagtagtgtttaaccatctgtatgatccggtttcacttgtccgtgatcacaacatcaaagaaaaactagtggaacaaggcatatcagtccaaagctacaatggagatctgttgtatgagccatgggaagtatatagcgagagtggacgtgcctttactacctttaatgccttttggaagaaatgcttgcacatgcaaatggatattgtttcagttgttcctccatggcaattaattccagctgaaggaaaagttgaggaatgtccactggaggagcttggtcttgaaaatgaatcagaaaaaccaagcaatgcattactaggacgggcatggtcgccgggttggagaaatgctgacaaggctttaacagaattcgtggagcaacatctact

SEQ ID NO: 64258 - DNA, 796 bp, Glycine max
  Clone ID: PAT_MRT3847_29037C.1
ggcatgaaacgatgcccaagtagctgggtctttctctcagtttcatttcccaagaaacaccagatactctatacatttatttactctctctctctctccctacaatgcttttcaattggaaaggctaaaagatctcatctcactattactatttctactatgactccacaaaaaggcagcatatgaagctgatattgcttatccaacttttccagagatggtttctgcattttcaacaactttagaagctccataaatacattacactaaaacacacatatcagacacataataataataataatagaatagaagaagagaagctctacttttctctttctctttttccaggtttaattatgcatgcagctagatgcacacatctgagtcgtcatgataatggaagctggcaatgacatggtgtgatcatagatcataatcatatagtatctgtttctttagctagcaagagcgacataaacagacacatagatcataatccctagctagcttctcctgattctcactttttctggttaactggtccagcacatctcttatttaatttctctttcacatggatatgcataaacaacttcagcatttagggagggcatgccttcaacactcattattttacaaaacaagattgccaccagggagttgaaaattccgacccataagggcctgccagaaagatatgaatatggagagaaagaacctggagggaatagaaaacaaaagggggggggggggaatgaaccctggcccgagaaacattttttctgtggggggg

SEQ ID NO: 64259 - DNA, 202 bp, Glycine max
  unsure (1)..(202): unsure at all n locations
  Clone ID: PAT_MRT3847_29038C.1
ccacgcgtccgcccacgcgtccggctcctctttttctctctctagaattctcaaagagccgagcgaaattatacgcggccaggacccngcatggcaccttccaccatgggccaacaaccgccgcaacaataccagcaaccttcgccgcaacagcaacaaccctacgtcatgatgccgccgcaagcccaagccccgcaagcca

SEQ ID NO: 64260 - DNA, 347 bp, Glycine max
  Clone ID: PAT_MRT3847_29039C.1
cccacgcgtccgcttcaaaccccaaatcccctccacctccactttgtctcctccccggtgaaagtcacagaggagtgttgccgccgcatggagcctacactcttcgccctaagtcacacccaattcaaacaaccccaaaatcccaattcgcaagaacgactttgacggcagatttggggatgaaggctaatttctagcaaggatcacgatgattcgagaaaggagaatgcgctgccagtgcggcaacggtcttctatttatctgttattatcatgattttgcttgggttctcttttagatcttaagcaagcattgatttgggagagggcgttcctgtgttgggtcgt

SEQ ID NO: 64261 - DNA, 473 bp, Glycine max
  Clone ID: PAT_MRT3847_2903C.1
aacaaaacggaggattttatataccctacactacaacatgtaaagggcatttgcccaaattaaagggaagacaattaatttaaaaaaaaaagaaaaaaaaataaggatagacataaaaacccccaacaaacagggattcttcatatgcattcttgattccctacaggggtgctcagggggacaaaatgggttaagggaggacttccctttccctactcctaagttggggaaacaggggaaccaacacctttggaactacgggctggttggttggaaaacttgtccgggctgcaaacgttgtatttttaatataccctggcacggttctcggaccaccaggtttctggttggggctctccgaatctccttcgggtgaagcgcactcgcttaaaaacttttgttccatcatgcagggccacaagggttatgaagacaccaggttcatacgggtcaatccattctgcctcaacttg

SEQ ID NO: 64262 - DNA, 373 bp, Glycine max
  Clone ID: PAT_MRT3847_29040C.1
gaggcagcagcgtcttacagaggaatttgtaccccgtgcagatttacttctttttgtcatttctgctgatcgccctttaactggaagtgagattgcttttcttcgttattctcagcagtggaaaaagaaagcgggctttggctggaataaacctgcctatatcagaatatccttgagctgaagaaaccattgtccttcattaaggacaatatacagaaatggctgattcctgaaaatgccttgtattttccggtatctgctcggtctgctctggaagaaaaactaatggctccctctattgctggaaggctaattgaaaattattcaccctctattcttaatattggggccaccagttcttttgacctggaaa

SEQ ID NO: 64263 - DNA, 354 bp, Glycine max
  Clone ID: PAT_MRT3847_29041C.1
cacgggaaccccaatcttgctaacatcttcaaatggccctagtgggcatctgtgtggccccactattaatgctgcgcatcgtacaatggataccttatatgaacacgccgcgaatctttctccgcaataccctgacacacatttataaaagtaggcctgcgctagcaccccaaaaaaaattattaaattgcctagcaataacgctttgcgtgaattacaatagtccaggggccctctgcagaaaaaccaccaactgcatcaaacatggttcctaccaggcggggaactgcttccccctgtcactttcctgctctactcgtccgtgcccagcggagggaactgtggacccactcc

SEQ ID NO: 64264 - DNA, 220 bp, Glycine max
  Clone ID: PAT_MRT3847_29042C.1
cccaggaggaaggttacccatgacatggtacccacaaaggtatttagctaaagtgccaataacaaacatagacatgcatccaaacccatcgacaagatacccatgaaaaacctacagattctacaaataaccagtaatattcccatttaaacataaactaagttactcaagattcagccaaatcttatcacttactccaaaacaagtctcaatacaaata

SEQ ID NO: 64265 - DNA, 315 bp, Glycine max
  Clone ID: PAT_MRT3847_29043C.1
ggaaacgaacagggcgggtttttgcgctaacaagtgacaaggaggggctcgcttagagggcggcagcaaacttggcgtgggcgaaaacgtcagaatacccgggggggtcctttccctcgggggcgttaaaagcaaacacctttttgccctcctggtcaaggtcggggttgggggccatcttctggacctgccctagggggaggccctgggaaaaaaggagcttgccaaaggcggtgcaatcctaccccagggtggagcccccccctcggtcggagaaaaagcgctggaaccttaccatgccctcaaggggaccag

SEQ ID NO: 64266 - DNA, 200 bp, Glycine max
  Clone ID: PAT_MRT3847_29044C.1
gagcttgatggccgatgctcacttgcctgaggtcgccctttttttcgaggagctttcactcataccgaatattctgcaagagtaaaatcgcttcttggtctatagagggggtgataactccaaaatcacgtcaatcaaacattattgcagaagctaaaagcagaacgctatctcaagccatgcttgaaagtctttacacc

SEQ ID NO: 64267 - DNA, 537 bp, Glycine max
  Clone ID: PAT_MRT3847_29045C.1
tagctcggaattcggctcgagcccactgtggccacttatacactcctatcaccaaatacgcataccactatcaactgctctttgcgaggggctttcctcagaactgatcaaggctcactgacactggaggaccatgagtcgcacgtagcacagcccgagcagtcgctagggatgctgctggggctaactgccttgctccatcaagtatagcagcacttcacgtgcatgctttagccaatgggaaccagaccatagctgctgacccagacacgatcattcccaagatggaagtgactccactgaccatgcccatatccagctcgcatgaccccttgcatggactggtcattgacctaaaaccagcgcatcatattatgctactaggcatgatgacctgaagatgctgctcgcttcggaatgatccagcgaatctgatactgattgcaatgctctgcatctaactgtcacaagtgatgcgccataccatctagtctataccccctatatgtgtacctgcacactcttatgaatctaact

SEQ ID NO: 64268 - DNA, 339 bp, Glycine max
  Clone ID: PAT_MRT3847_29046C.1
cctccactacccatgctcaacagcccaccaaaggtatattaattagaagaaattacttccaaatgcatgggagaatgaaccaaagccatgaaaaaaaactaattgaatctattactaaaaagacctattttatttctagtgaaatcagctgagatgaaagatgggaggagaccccaccacaaaaagtcatgtgaagaggtaccatgaaatattaacctatatgcataagtattactcagggtagacgtgtcccactacaaaacacatactttttaaaatcataattgtacaacttttccacctattccaactatacaatatagcttgttagctagacta

SEQ ID NO: 64269 - DNA, 384 bp, Glycine max
  Clone ID: PAT_MRT3847_29047C.1
cgccgcttttggctacattaaatgcacacaccatttcttcataaaatatgaaaattaggctgatgacaccctccattttgcagctgccccccacgaggcggtacactttggagagattcaggaacaagttgtagtgaatttttcacaagagggattccctactgcttgtacaactcaggggcgtactgcaacatctctcacggacgatgggtgtccatatttgcacgctctgggacctgatagatcacagtctacaataccaggcgaaactgacactggtgttgggacgacaaccatatactatatgtgtgcatatgggctcaatcctggcacaccaggttatggtcttatgggcagcaggccttagcctattgcacagcatac

SEQ ID NO: 64270 - DNA, 595 bp, Glycine max
  Clone ID: PAT_MRT3847_29048C.1
caaagcatcaaactgtattgtaacatccctttttgtggacacaaacgtgttaggtatctccaatttccaatatgggatactagacagcaaaacttgtcacgtgccaaccatgacaatctccaaaacatcatattctacgtaagctttcaaacttgttcatagtgcatagttgtccaaagtcaaaacctaaaagcaaagctaatctatcctagtaaaatgcttttattaaagggtcaagcaagtatattgaggacaatggtgaaggagtatttattacaccctattaaatatttctaattccttaaacaagtattaaatgatttttgtatttattatataataaattctttctttttcaataattacttcctagttttgttttcttcactaatgacctcaaggcaccagtgcttttatacattagaaatcaacttgtaaccccccttccccaacacacacaagtgcacccgcatccccagagacaatgagagagtaccaagttcactagattattgtccttttaaactgatgcctcacaaggaggattccctacagggacaaaaagctcctctcatctgaagctttcctcatatat

SEQ ID NO: 64271 - DNA, 241 bp, Glycine max
  Clone ID: PAT_MRT3847_29049C.1
ccacgcgtccgcggacgcgtgggagaagccttcattgtaacataaatattcaaaagtatgtgaaggcatggaagtttgctatagtgtgatctttgctgttgtaattgtagaggttattgttgctatgcctatatttcctagatataagacccatatttgcttgtatatgtgacggtgcttgcattggctaaacatattctacatcgatacttatatataagatccatttttgttccttttt

SEQ ID NO: 64272 - DNA, 1088 bp, Glycine max
  Clone ID: PAT_MRT3847_2904C.1
agtgagggcgcgaatagattcatataggggaatggggagagggtagatcgcaagtattgtttttttttggaaatcacaatgccatgcatgaacataataatggaacaaaatacatatcgttaatacacagtcatatcgaataataccatgaaacaagaccactaatcttgtaccttcccaagaataaagatcagtctcatccacataaagggcgctataaattaatgcaaaccaaaaaaaccttgcatctccgttagtgtcaagctacaatctagaaatggaaagctaggaaagcggaagaccttacagagatagggaaaataagaaggatggagtgaacagaccaactgtgttggtgattttggacaattctactttccactaatgaaatgtggccttggtcagtaacctatcaaaacagtcatcgaacaaatggagtcaaacggttttatcacccatcagtagtgtatgccaccagccacaggcaacatttcttggccggcaaccagcaatagaaacttgaccaggaatgtttctgtccacagaatctcccaaaccaagctgaccatatttgttccacccccaagtgaataggtgaccatcatcagttagcaaagcactgtgacgggccccacaagaaactatactagaatgcttattttcaaaacgggaagcatccaactgtctaggtgaagtctcaggctggtcactaccggtacccaattgtccaaactgattcccaccaaatgcataaatttgaccatttacagaaacacacaatgtatgccaaagtccagcagcaattttttccactctagttcccaataaagaaggaactagagttggtcttagctgatcagcattattcccttgtccgcactggccatacagtccccagccgaatgtaagaagcgccccagcatctgttatcacaacactatgccgacccccacaagcaatgtccatcacataacttccagtaacatttgacccttgagctccagcaccacttccttgatgaaaagctgatgatttatcctttccagaagactcccccaaggtataagatgaggggatgataccataaa

SEQ ID NO: 64273 - DNA, 441 bp, Glycine max
  Clone ID: PAT_MRT3847_29050C.1
ctcactaagctcactgtcgccctgccgcccttttttttttttttttttttttcaactggcaaaagggcaagagatcaataacggtgctaaatgtaacagcccggaagtaaccgggggtggacccaactttcgggtaaattacccacttcgattggtttcaccatatagaaccgatgcttactctaaatttgggaaaacatttattgtttaaaatgttctccatataaaaggacggtggagcaaaccttttcaatcgactaaagaacgccataagtgaacccaatcatgtcatgctgggtgcgctcatccataaacttgatatattgatcaaccctcgagaacacccgatgagaaagatttgaattttgcgtaatccccccattttattccttaccccggagatgggtgatttatcggagcctaaatgccttggggaacccc

SEQ ID NO: 64274 - DNA, 837 bp, Glycine max
  Clone ID: PAT_MRT3847_29051C.1
catgaatgaaagccttgattcattctttggtgcacttttaaatgcccagacacctctcatggagttcattcctcgatatgaaagaggtctcgagcaacgccgtgaagaagaaagaaaagaggattttaatacttctaattttcaaccgattttgcaaactaaagaaccagtggaagaacaatttagaaagctttacactcttactgttttcaaaatatttcaaaaagagcttttgcagtgctttagctatcttgggtttaaaatatttgaggaagggggactgagcagatatatggtgcgtagatgtggaaatgatatggagaagcatgtagttacatttaatgcatcaaatatcagcattagttgtagctgtcagatgtttgaatatgaaggtgttctttgtagacacgtgttgagggttttccagatattgcaattaagagaagtcccttgtcgctacatcttacaccgatggacaagaaatgccgaggatggtgtttttcctgacatggaatcatggagtagctctcaggaactaaaaaatttgatgctatggagtctaagagaaactgcatctaaatacatagatgctggtgcaacatccattgaaaagtataaacttgcctatgaaattttgcgcgagggtgggagaaagctttgttggcacaggtgaatattctgtgaggttgtgcatacatagttgtacaattattttttgtagctttaactgttttcttggtggcattttagctcttctaatcaaatacctacatttttcatccgacttagtatttctacatttctaagttatggcatggttcaaaaaaaaaaaaaaaa

SEQ ID NO: 64275 - DNA, 719 bp, Glycine max
  Clone ID: PAT_MRT3847_29052C.1
agaacgacaactgaggacatcccttcatcatccaacccatttccttcaacagcagccatggaaccagatgcccaacaagcacattctttaattcctatgttgcaaagcttattcaggggacagttgatgatcgtatacaaccagtaggagttggctcacaacaggccaatcatatctatggagcagtttctggaaaaagtggcatggcctaaagctcagctccctctggaaagagcccataaggttgttcctcccggacctgtaccaactaggactgagccgacatcagctgaaccacaacctcatgtagtagatccacctacttctccagaacttgagacattgtctcctccggcaccacctctgataatcatccccgatgacttagctgatgaagttgctactcctcctgattcatgatcttgcaacattcgatgactcaactgatgaagctgctgctcctcctgattcaccatcttgcaacatagacgatggttctgacttttctgactggatggactgttgaggaagctatggctcatactgacaagaatgttgatattcctgatgcttttgtgttcttttattgtttccttttagattattattattatggtcatgattttagtacaataattcccttttgctagttttatttatgaatagtcggtttgctcatcctgaagcatttttgaatagtttaacttggtttttgatga

SEQ ID NO: 64276 - DNA, 792 bp, Glycine max
  unsure (1)..(792): unsure at all n locations
  Clone ID: PAT_MRT3847_29053C.1
cttgctgcctgcagagttaaaagcaccttcagaaataatttccatggaaattagtccagcaatgttctgccgagttaatctcaaatgcaaatgggtaagaatgaacagctgaccagtttccagttatcatcaatcacgggaaaaccagttatcctgttttcaacaagaatctccaaagctgttgcaaaataacatgttaggaattaaataaaaaatcctcccttcctttcacaacaaagaaaaatggagaagaagaatagaaaacacttctactctggaataagacatgaaccaagtatgaaaatataccttcatccacagatgttgtgggtttcaccacatgtaaatcctctttctttgtcataaagtcaccgacagtgtatagtccacttcttggctgcatataatgtcacgtcaaaacgtggtcgctacatttttacatttctcataagagtatgtactctataaatagtgaatcacttagaacatcaggccaaactgacaacaacaaaaaatcaagccggtcttgattttgccaccctgaatacaaaagggcttcctccatttgaaggaggcaaatatatggataaacttctcagtgagtacttataatagaagaaaaaattaaataaacttcttcataagttaaaattaacttatacataacataaaaacaagttttggagaagttaatatgagagaacttttacaaattaatttatgcataattntaactcatggagaaatttatttcatttnttcttcttactttattctcctattagtgcttac

SEQ ID NO: 64277 - DNA, 257 bp, Glycine max
  Clone ID: PAT_MRT3847_29054C.1
cttctttttttttttttttttttttttttttttttttttttttttttttttttttttttttttttttttttttttttttaccaaacaaagtagagccccatccacaattgtaaagagaaagggaaaaaaaatgggattggcacttgcaaccgggaagcttcaattccaaaggcaataaaaatcacacggcttaaatttcaaatttaagtccaagaaatttaaaaatcaaatggtccccccccccaaaacaatgaaaa

SEQ ID NO: 64278 - DNA, 153 bp, Glycine max
  Clone ID: PAT_MRT3847_29055C.1
tatggtcatctgcactggaccggattactgagggtggccactggattacacgacaaccggcaccaagatacgttgccgtgtgactgcgggtgattactaatcttctaagttgataaagcttggtcctagacaccttattaaaaaaaatagttc

SEQ ID NO: 64279 - DNA, 150 bp, Glycine max
  Clone ID: PAT_MRT3847_29056C.1
ctgacacgtttgaatatactactaccattatgcgtccgaagggaattgctctagagctggcgcaaatatatattactagacaaatagattttgagcaagtgaaggtgaaatgctaaataattcccgcaataaacatcaccatgctatgtt

SEQ ID NO: 64280 - DNA, 601 bp, Glycine max
  Clone ID: PAT_MRT3847_29057C.1
ggcagcaatgagagctgaaacataagctttagaataaaaaaaacggagaaagaaattcaaaagggtatctacccacgcgtccgccgaaaaatgccttttcatccgcattccttttgagctcgtctacaatggcagatgatctctcttcctttgccaaggatgctttgcttgtgaagggtttgaagagttccactttggtgtggaggcttattgttttgacccttgcaatggtctctggcgtgtatatatgttcaatttgtctgaagcagataggcactagcagcaagattggttttttagacatcaaggttgttcaaaagccatgcccggaacctaacattgaaccttgggagattccttttgtgcattaccctcacccccaaacttacagcagggcggaatgtgcttgccaccctgtgcgctatttcgctattctgtcaatgcagatatccgggagtggatggtttgagacgtttttaaacagtcatgctaacataagctcaaatggggaaatcttttcggttaacgtgagaaggagttacatgtcaacaataacagagactctggatacaatttataatctagactggttaagtagtgc

SEQ ID NO: 64281 - DNA, 1761 bp, Glycine max
  Clone ID: PAT_MRT3847_29058C.1
cagaaaacctgagcaaaaaacaaaacaaaacagtaagctaagcttcactgccatgcctgcaacgccattctcgtgttcgttcctcactcttcaaccgcgcttcaactcctacgttaaccccatcttccgttcactcaccttccaactctcttcttcgccgctcccattcaatgccaacttctccagcgtcagactccactcttcgctctcgcgagcggcggagaccgattctccgaccggcggaaggtccggcgcgctaactcccggtcccgccgtcgccggtgaagttcaaaagatcgacgtgaatcctcccaaggggacgcgcgacttcccgcccgaggacatgcgcttgcgcaactggctcttcaatcatttcaaagaggtttcgcggttgtatggatttgaagaggttgattacccggtgcttgagtcggaggcattgttcactaggaaagcaggagaagaaattaaggatcagctttattgttttgaagatcgaggcaatcgccgtgttgcattgaggcctgaacttactccttctttggcaaggctggtgatccagaaagggaagtccgtgtcattaccaataaagtggttcactgttggacaatgttggcggtacgagagaatgacaagggggagtcgtcgtgagaactgccaatataacattgaaattattgagtggacaagcctgccagagtccaggttccaagaagttgctatgcttcagtctgtgtgctggtttgacattacagaatcagatgtcggatttaaggtttccagtcgaaaggttctgcaagaagtattaaattgttattcagtaccagaaaatttatttggcaaggtctgcgtcattattgataaaattgagaaaattccagctgacgagataaagaaagagttgaaagctgttggtctatctcaagaggctgtccaggagctattgcaagtcctttctgtgaagtcattgaccgagttagaagagagacttgggagcagtggggaagcagttgctgatctgaaacagctattctcccttgctgaaaaaattggttactctaaatggcttcaatttgatgcatcagttgttcgaggtcttgcttactacactggcattgtatttgagggttttgaccgagaaggaaagctgcgagctatctgtggtggtggtcgatatgatcatttgttctcaacttttggtgctgatgacattgctgcatgtggttttggatttggtgatgcagtcatagtggaattgctcaaagagaagggtctgttaccggagcttaacttgcaaatagatgacattgtgtgtgccttggacgaagatcttcaaggatgtgctgctatggtcgctaacattctcagagaaaaagggcagattgttgagttggttttggaaagcaaaccacttaaatgggtttttaaacgtgcagcccgattaaatgctgagcggcttgtgttagtggggaattctgaatggcaaaggggtgtggttggtgtcaaaattctctctactgctgaacagtatgaggttaaactggatgatctgaagtaaatcagaatttgaattttttgtggttatgtattctgtctttactattggtattaatttcaccttgattttttttacatagtcctttgagactcaagtacttgttttgtatgtgtacatactcacctgtgtatgcatatgtgattatccatataccaaaacttccgcttctgtttacattatttatccatttaagttcttcaccc

SEQ ID NO: 64282 - DNA, 500 bp, Glycine max
  Clone ID: PAT_MRT3847_29059C.1
atttttgttttcgtgttttgttttttggtcggacttgtggtctgattcgtagacggacgcgagtatggattaagggttagataagggaagggcaaaccggttaaaaaaacgaagaagatttaaagatgggaaaaaatgggagaaaggggtggtgggggaaataggagaccggtaaaaaaaccgacaaaagctcacgcggggggagaaaagaaaaaccggggggggaaaatgagaagagcgcggtgccaaaagagagaggtaactaacaagacaggcgcacaacggaaaaaccgggtgccacaagggaaaacggaggggccaacaagatgaaagaaaacgccaacgcgaggggagaggcggaggggctattgttccccaaggaggaccgcccactcaaataagggttgaagggacccccccccccccggtaaaaaaaagggggaaaaaaccctggaagagaccggccaggggaagaaaaaaatatcgaaaaaaaagggggg

SEQ ID NO: 64283 - DNA, 139 bp, Glycine max
  Clone ID: PAT_MRT3847_2905C.1
tcctacgcgtccgccgacacatggcttaaagggggggcctatttgagtaagggggcttcttaaaatccgaatcgctaacccggagcgggattttgtgctagtggcggtagaggccacatccctgggtggggatcggtgg

SEQ ID NO: 64284 - DNA, 308 bp, Glycine max
  Clone ID: PAT_MRT3847_29060C.1
gccagcggcatagctgcaaaacttgaatactttcgggggaacagcataaaatcttaatctctgatgcacctctttccctaaaacaaaatgccagaattctaaaattctaaccatttgaccattttaaaatttttacctgtctacctacacaaatgaacacacgggctctaagtctataaatctcttaagccattaataattttatttttattctccgtatctacgagtacactagttagcttcttagctttggttctttggttttattcgttcaggcgtaccgcaacaacaacggctagaggactgga

SEQ ID NO: 64285 - DNA, 375 bp, Glycine max
  unsure (1)..(375): unsure at all n locations
  Clone ID: PAT_MRT3847_29061C.1
ctcgagccaaaacacctcgagcagcatgactttatctgctcgtattattccaccagccctagngacattaatttgcgtaacttatactgtgattgggggcgaataaatatcaaantaatattttcttttctttcctacactatttgatttcactttaacccttcatcatttactgatctctatatattttgaaaacaaaccatactcatacctcctatcttctacataaacttatctaaagaaagctaaatacatgtcttttacatctacacttccacctactttattaattaattatcaaattactattccaacatgcatctatacttaatgctaaacaatatactccttttatatctaattaaaaaacatact

SEQ ID NO: 64286 - DNA, 331 bp, Glycine max
  Clone ID: PAT_MRT3847_29062C.1
gcccaataccccactaaggatatcaatctcttcattaatttcactggtgactctctcagtacaacaatggctatactataaaaccgcacagggggggatgtactaaaccttcacatgagaactcttaatagcatcatcaacagcaaaatgttatccttggacagcgtgcatccaaagcataccactttgctataacacatactcaaattaatatttattaacattttaaatgcgcgtcacatcatgcaatgcatgacctaattcacactctctatcaggatccttaacttgtaactcatcgctgatattgtttagataaacttcttattac

SEQ ID NO: 64287 - DNA, 705 bp, Glycine max
  Clone ID: PAT_MRT3847_29063C.1
atttcaaggttaccgacacgcatatccaacgccgactaagtgcatcttatttattatttatactgaactcatgaacaagtaaaattgaaggtagaagcggttagagaagatggctagagactcccttgatgctcatgcaaatgaagcgggtttggtgcttcactctggccctatatttttgtttctcatgattgttgcatccctttctattatttcaatgatcatatttgcctgtggtaaaaagggtggtggcggtggcggtgggggatgtggtggcgatggcggtggcggtggtggcgatggaggtggtggcgatggcggtggcggcgatggaggtggcggtggcggtgggggatgtggcggtggaggtggtggtggtggctgctaagtgcatggaatatgagacaattaattaaacctgcagcatgcatgtgttggagttccctttctcaaggtagaaataataatctagtggagatgtaaactaccatatttttaagtttggtgggtcagcataatagtgataatacttcccttacttttgcttcttagtaatttactagaacgtgggtttctcggatgtatttgatgatatatgagagcggtgaatggtgtattttttatatttatgaataaaaaagtgtattgagataattatatccgaaaataattatgaactcgcggtatgctgtaaaaaaaaaaaaa

SEQ ID NO: 64288 - DNA, 852 bp, Glycine max
  Clone ID: PAT_MRT3847_29064C.1
atccaattgcgcattccttaattttcttcttcctcctgacctcagaaagaaagttgtttcaaatggcattgtggtgtggttaccttgcgcattgtgtctgccactagttcgctggtagtgggggaggtagcaaaagttaaggatgacaagactttcttcgggcatgatcttggtgggattggcttcccaggctggggtggtgatggaggtgatataggatggagtggccttgttttcaacatcagtgtctttgctgcacctctcttcattattaggcgagtcataaagacgaggagcgtcgaatacatgccatatactttgtccatgtatttaaccatcaatgctgttatgtggttcttctatggccttctcctcagggattattacgttgctgtaagttcaatgttatactcctacttacatattcattttttttttttttacctctgaactattaatttttgtattattatcatttttcttacaaaggcgcatgtgtgtcttgctcactttgtccagatccttttttgggaaatccctttagtttttcattttgctttatatgtgataatgtcgaatcaataatactacaaaattaaatgtttgcatgctccattgatggggggttctcgtaaataaatccaagtgcaatatggacaacccatatttctaagtacatgattatttaaccataacttttatgcgtaggacaatttaatatgattcttctcttctttttgattaaaagtttgattgaaaaaagatgaatttattaattaattaattaattagtgtttgcatttggatatgatgcagcttccaaacacgcttgggtttgtcttcggcataatt

SEQ ID NO: 64289 - DNA, 833 bp, Glycine max
  Clone ID: PAT_MRT3847_29065C.1
tgcttttatgccgtttcggctcgagacggctgcagctagaggacataactgtattccgcgctagttgaactgcacaagacgtgctatcaactggctcatctcaggagcaccaaaacctggtgctattgggatctggcacccggaatcttactcagcatataatactgaaatgccttcccacaatggcgctattccaacttgacagatcaacagataatgctaactacacactctgaatccatacttctcgagccaaattgattgttttccttctaaacatgaagttacctccactactttataattaataaatcataatacatgataaacaattataatctctgcacttagcacacgtgtacttttgccactgatttctgctaatcatgttgaggtaagttgggtgggggtttgattcttagttattaatttgatcttaaagtgggtcaaaagtagaaagaaactgctttatctctctttaatttgctgagatagtttgtgtttaaaagcctattccatagaaatttaacattcatggtgctgtgaattaatgccctttatcaatgctttgattaacaaatttcttagtctaggtacatgcatcatgtgcattatataaatatatgtacacttatgagatttttagtatgtgattattagtatggggattgattattgagtattactacaagtggttgagcatcttcctattgagcagttaattatgcgtaaggctctttagttatatataaaaggaagggactgggattttttataagttgttgtgtgttggttaattcagaaattcggcggtgggaactgatggtggctct

SEQ ID NO: 64290 - DNA, 174 bp, Glycine max
  unsure (1)..(174): unsure at all n locations
  Clone ID: PAT_MRT3847_29066C.1
tttanctgattgctctgncactgaggatcaaaaggccggttttcctcatttctgacgtacgctccccacccatccatgtctacttctgcaaaatcccgagatgtttgtattgttggtgttgcgcgcacgccaataggcggttacctaggcaccctatcactcactttctgccac

SEQ ID NO: 64291 - DNA, 500 bp, Glycine max
  Clone ID: PAT_MRT3847_29067C.1
ccaccatctcgcatacctcccccccatcgaatcccgggacaagcacgccgtatccccagtcttgtctccccgacccgccaccatggcgcccagcaaggacaccatgttccgctcggcggacatgtccttgacccagctgtacattgccaacgagattggccgtgaggtcgtttctggccttggagagcttggtgtcatggacttcagagatcttaatgccgacacgaccgccttccaacgtacttttacacaggagattcgccgcctcgataatgtggaacgacagctccgttactttcgcgcccagatggagaaatcggacattgcgatgcgctccatctacgacttcaacaaccccttcactgcgccatccgcttccgagatcgacgaactcgccgacaagagccagagcttggaacagagaatctcttcgttgaacgagagctacgagacgttgaagaagcgcgaggtggagctcacagagtggcaatgggttctga

SEQ ID NO: 64292 - DNA, 843 bp, Glycine max
  Clone ID: PAT_MRT3847_29068C.1
tacggctgcgagaagacgacagaaggcgggacgaaaaaatatgataaagtagaagtctccgtctccaacacactcgttctctgccgctcgctggttccgccgccaatttccgggtttgatttgaattggggggaaagaaatggagtttgttaatcgaatagtggacatagctaccagagctgtaaacagcaacgtagtgatcaatgtttgtctgcttgcgtcgtttgcaacactcggcgtaagatctatgaatcagcaaaagaccattgaagctctacaggatgagaaggagtctcttaccaaatccaacaagtccattagaaagacattgtgggactggaaacagcagctttatgctgaagcctccgctgattctgcagtggttcctctggctaggctcaaagcaatctatggcgaagccccgcctcctccacgtgccacgctcgcagatactgtgacgaaagatgcaaattcgtctggtgccaacaaaataatcgcctgaggtctggttagttatcagcacctttagaagtttttggcattggaaggctgttaataaatattttccaagagaacataaaggtattatcctgtcataatttgttattttaattgcatgtaaatgtagaacttggagggagtcaaaaaggtgaaaaaattttcattgtaaggacaaaagcacacttatttttgttatatatattatccatctaacaattttggttagataagaggatgcagtgttcaatattgtcccatcaaactactcttgttgactcccatgatgcatgtaatggatgacttttcatgagcaaaaacgttgcttcttcattttatcacctg

SEQ ID NO: 64293 - DNA, 424 bp, Glycine max
  Clone ID: PAT_MRT3847_29069C.1
cactttctaagtgatggcagcccccctcatataggggaaagagtgtttaaaacgacggctcggctgctctgtagactgcacccctaatgaaccggagctggcacacaggcagatgaatcagaggaagatccagaggaggagacccacgagagccccacaaggggtgagactaacgggaaagaaacaggacgtgcggaaaggaacaacgatggggagggagtggcaaccacatgggaaaactagcgagcacgaagcacaggagaaaagggaaccggcagaagcggcaagactctccatcacgaaggtcgcgtcactgcatagaaggcaaccggggtaaccgctgaaggaggggactatcgacaggaaagggaatgggaggagattcaacacacggcgagatgtacgctgatgtgaacctcaagaa

SEQ ID NO: 64294 - DNA, 283 bp, Glycine max
  Clone ID: PAT_MRT3847_2906C.1
ggccgacgcctaggatattcaacccctcgcccgcgataatggaaccggaatggtctatgctggctctgcctgagatgatgctcctagggcggtgctccccaactttgtggggcgtccacttcaaacccgagtgatgggagatatggggcgtaatgatgcgtatataggagacgaagctccatcgagaaggggtgctgcgacactctgataccgtatagatcttggaattgcgagttatggagccgacctggcataccatctgtcattcacggactaccatgag

SEQ ID NO: 64295 - DNA, 316 bp, Glycine max
  Clone ID: PAT_MRT3847_29070C.1
cgtttccgaatcagcaggctgcttcctacctcactggcgctaccctcgccggcggcaagaagcaccaccgcaagcaccacggcgctcgcaccaactagacgtcgctactccacccaacaccaacctagtgtcacatgcactgccctttcaccagtcacccctcctcatgtagggctgtggcttgctgcgttcattccatgcgcagcaaagggtttgtctttgagcgcactccttgtccgtttattatttgggataccaaatggtttatcccaagtcagtcttttgttaagtattaaagctgattattatttacacc

SEQ ID NO: 64296 - DNA, 422 bp, Glycine max
  Clone ID: PAT_MRT3847_29071C.1
gatcgtccggatgcgacgcgaagcgtaacgcccacacgtccgatcgcgagcggtgaaaacaacgcccaattacggatcccggagcagacgtggggtgcgcgtcttcagccgacaggctcactagatacggggcgctagacggatagggtggggaggatcactgctgcgatgaacacggtcactgaggtgatgaccacggacacggcgaaggaacaagacactaccactccgatgatgatggcaatggagctgataggaaaactggaggggggagccataaactactctgttgagggtcaggagaggatgcacaggtgcatgagagagtcatcggtgaagatcgtaaagaatttgaaagatgtcgctctgctgactcatgttattccgacaattgcgacgatgacgacagtctacatgatggt

SEQ ID NO: 64297 - DNA, 178 bp, Glycine max
  Clone ID: PAT_MRT3847_29072C.1
tttttggtttttttttttttttttttttttaacttaagaaaatgcacgagaaaatttattagaaaatcacgatgggtagcttagtttcaaagcccagtacattttggcggaatgtcaaatgggaattaaaaagaccccggagggggaactggtgggatgtcaggaacttttggaccct

SEQ ID NO: 64298 - DNA, 662 bp, Glycine max
  Clone ID: PAT_MRT3847_29073C.1
gccaagtggcaattctgcagcttgatataacgttgtcactgctagcgtttgcgctgctgaaccaaacggtccaaacatacaacgttggtgtgctctcttgaaataacttcatgaatgaccttgcttaggacagcagacctctcgttgtattctatgctgcttggtgtggacacttgaataaagcttgctccaaaatatcataagcttggtagcatcttcaagaaatccaaatatgatttaattggaaatgtttactgtgatgagcataaaaattagtgccccatgtatgaagcctctgggtacccaacatttcagtggtttacataaggatctcttgaagctatacagtcttaaggaccacgcactgctgaatcactagttgagtttgtaaattccgaaggatgaactaatgtaaagattgctacagtaccttccactgtagaggtgctaacatctgaaaattttaattaagttctgcttggatgaagccaaatatgtcttagtattgaatgctatgcaccatcgttgtggacattgtctaatgcttgcttctacttacgagagagttacctcagcatttaaatcggaggaagatgtattactagtctatctggatgctgatgaatatatgccatctggctagaaagtacgacatgagtgga

SEQ ID NO: 64299 - DNA, 242 bp, Glycine max
  Clone ID: PAT_MRT3847_29074C.1
ctcgagcgaagacatagagaacaacaatgttgcaccttctgtacgcggtgatattcggggtaatgctcgtgatcgcgagctctcctcttcaaaactccggcgaagaagctcggtcatcatcacattggatcgggtcaaccacggtcgcgagcaccgtcgtcgtcaagaccgtcgccgccactctgctgatggttctcgcttcctcgctctacagcatcgccaagatccggcgttggaacctc

SEQ ID NO: 64300 - DNA, 403 bp, Glycine max
  Clone ID: PAT_MRT3847_29075C.1
tcgtgagaagatcatagaccgggctcctaaatagagacgatgatttgacgctaagggcaattctccgaagtgtgcttgtgcgagtgttcgctacggttgcactgcaaagtattgcaagtattttgctggttcgcgaaatcttcgcggtacgtactattataccacttcgcctgataagcattacttgggtcctcctggcaaggcggacaacgaggcatccttacaagtcccgtaacaaacctcatctttttactgccaatgctcaaaagtcacggctctctacattttaagatctgaaggaaatagtttcaaaactgaacgatatcctattctcaactgatgctatatagtatgggcatcccaaagttccctcaaaacgcgcctccttctaaaactacctccc

SEQ ID NO: 64301 - DNA, 735 bp, Glycine max
  unsure (1)..(735): unsure at all n locations
  Clone ID: PAT_MRT3847_29076C.1
ccacgcgtccggcaagggcacaggcttgattcacttaatgacacatattggttaatgactttctttgagtctgcatgttttattgccagccagatgtttgcaaattggctgattggtaataatacagaaaaaattactgctccttcgtctgcagttatcttctttgctgccatatgcttcacttttatcaccagaggatggacagaaaatccaggatcagcatctcttaaggagtatagtcgctccctctatgcatacattttaggtgataaaaggatatggctgttggcatgggcacaaacttgccttcacttctctattggaattttttggatcctctgggcacctactgtggtggctgatggccgagaagtgcatctgggattgatatatccatgctttctgggctctagaatgctaggaagcactgcatttccgtgtctcactagtgggccatcatcgcttagaactgaggactgccttgtttttgcatacattatactggctcttctcctgtctattgtggcctatgactatcaggaagttggggttctggtgatactattttgcttgtttcatgcttgtgtcgggtttgttttgccatcacttgctagattgaggaccatgtaatctctttaactggagtaagtaatctttcatttgcttaatcttggatttttagttgtatttactttgttngcaggtatgttcccaatgaaatgccgtggtgggatg

SEQ ID NO: 64302 - DNA, 567 bp, Glycine max
  unsure (1)..(567): unsure at all n locations
  Clone ID: PAT_MRT3847_29077C.1
gtcattttgacaatgaggtgggaaataacctgctcacatggcatgagatcaggatcatgcagtaggggaatcataagaaaagaagataaaaagcaaggcatggaattagtgaggaactaagaagaacaggccactcggattgccaggactttatgtattttcgttcattcctgagaattctattnttgngaatatttaatagacccattgatctgatatcaccttcagtcctaccagacatctgttcaggagaggagatacatagctcggtttctgtgtgctgagagaatctgatccagttcttttacaatataacccaacacactttttgcaccactacaggattgattataacaacaatccaacttattgccatatggttgccctacttcctaagaactctgctccagttaaatattcccaaccatccactacaaaaatgactagaaaacaagagaatcatgatgagtccatttacaaacacaaaaagaacaaattacaaatacttcatcccaaaggagcaaagcagcccatttgcatatcatacaaggaagcaacctacattaa

SEQ ID NO: 64303 - DNA, 317 bp, Glycine max
  Clone ID: PAT_MRT3847_29078C.1
cgaatacacacgcacgcaaactctagattcggctctagatggataccatttccctgtctcactcactatctccactcctgagcagggaaccttcaccctcatgaatgctctcgtcttcctcctctcatcccacctcaaatactgtcatctgctctaaacccatcatttctagtctcaaaaagaaccaaacaatatctcctaaaccttcatcaagcacaagctattatgctcatgctcaacaaggcctaccagctttcactatctcctagacactcaaccctagcccaattctgatcaatgacaatgcactggcaatc

SEQ ID NO: 64304 - DNA, 160 bp, Glycine max
  Clone ID: PAT_MRT3847_29079C.1
gagtgcgcgcttagagaagagcagaagacaacgcgctcacataagaaccggacatggacgggtcacgaaagacctgaccaccgttgaatgacacagcactggaagcaccctgcacgaccccgtaatgctgtatgcatgcaccaacactggattcttttcg

SEQ ID NO: 64305 - DNA, 447 bp, Glycine max
  Clone ID: PAT_MRT3847_2907C.1
gggtgcttttttttttttttttttttttttttttttttttttttttttaaagggggcggattcctttcaactgccttttcttgtgttatttttgaaaattcaacccctgctttttaacccctgccaatttttttttttgggacccccccccctttctgggggcggggggggaatctcctttcttttaccccccccctgttaacgtgggggaccccggaaaaatttcccgaaaaagtaaaagaacccccccccccttaataacaacccctggcctaggttctgggatttctggccttaattccctgcccctttgggacccttcaaaaaaaaaatcccccttacccccaaaaacctcgggcatcccatttttgaaacctcccaaagttttttccccccctgggaggcaccgccttggaaaggctttttcctctccttcccttctttttt

SEQ ID NO: 64306 - DNA, 301 bp, Glycine max
  Clone ID: PAT_MRT3847_29080C.1
ccgtccgagccgtaccctcagcacaaccctagctcaccgtcagctgtctgtcaaggggatacctgtgctcctccatcatgcgacgagcgatcatgtctcgtcgaggtggggtgcgccgatgaaacctcgccaccgccaggtctctgttccgccgcccggggtccccgcggttcgagtctagcttcttgaaattgaagggaggacgccggatataggacacgcgctgttgggccgtgtgtgagaaggacattctcagagaggtgtttaagcacgaattagtgaggttcaacgtctttgggga

SEQ ID NO: 64307 - DNA, 131 bp, Glycine max
  Clone ID: PAT_MRT3847_29081C.1
gtatttctatcttgtgttccaactatggatgttagaatgaagggaataacagaattgcacacgcttttgcaatttcttcagttttctgaaattttcccactcgctttatcaggttaaccccgcaacgcaag

SEQ ID NO: 64308 - DNA, 361 bp, Glycine max
  Clone ID: PAT_MRT3847_29082C.1
gggcacttaacttctttttattaactttcccaattccaagtcagcgtggacataaagaaaagccatttccccaatgctataaaatcttgtacagcccaagaggtcttcttgtcccgattacctggcatcagaccccatctcagctcacaaaaagtctaagtgcgccctttcagcctcgcttgggactcactttggcatgaactgaaaccccctttttttattagataagaccgcacagtgacacaaaatgggaagcatttgttgaggcagaacggcagtgaataaaactctccacttgttgagcccaccatgaaggatctgtgctttgaccaccaatgctttcctgtatctatccgaatat

SEQ ID NO: 64309 - DNA, 582 bp, Glycine max
  Clone ID: PAT_MRT3847_29083C.1
gcagaaattgctcaacgatttcccccaaaaaatgagtttcacgggaagcgggaagaagacccaccgcaaaaatttcaaaccacaaagacagcattaatattcttcctttcatttccagttcttcttcttaaaccccttattctccttctctcttgcactgtcttacaatttgaattttccaatggcaacttctgagaacaacagcagcgcgcgtccccaacgcgaagcgaagaagagggccgcagctgcaatatcccaaattcatggcaacgccgccaagaagaaacgcgtcgttttaggcgacgtcactaacgtttcctcaagcgacgtcgccgtttccgtttccaaaaaacccgttcagacacataaaaatgttaaactcgagaaaccggccgcgccggttgccacgccggagaaggttgaggaaagacacgacccgcaactctgtgggccctacgtttctgatatatacgaataccttcgcggaatggaggtggatcctagtaagagaccattgatggattatgttcaaaagattcagagggatgctaatgctaacatgcgcggtgttcttgtggattg

SEQ ID NO: 64310 - DNA, 507 bp, Glycine max
  Clone ID: PAT_MRT3847_29084C.1
ccggttcttatacgcagggaccccgaccaggaccccgggactgagtaaaaaaattgaactctggggagccccatgcgcgataaaaatacgaagaaaaaaaaacaaagagggggaaaaaaaaaaaaaaaaaaacaaccacccaatcctgcaaccccccccccccgccggggagccaccaaactggaaagggggggccgtaattttaaaacggggggactaaaaaaaccccggggggaaaaaaaaaaagggggggggaaaaaaaaaaatgggggggaaccaaattctttccgcagaaggccccaccaaaaggaggcccccacaggccaaccccccaaacggacgccgcccccccccaaaggggagccccccccccccggggggggaggcccccccccggggggggggccccacacccggggggggggcaccgcccgcggcggccgccccccccccccccgtgggggcctcggccctctgttttccccgggcgtcctttacccggcggcc

SEQ ID NO: 64311 - DNA, 373 bp, Glycine max
  Clone ID: PAT_MRT3847_29085C.1
gaatattacagatgtcatataagtactttactcgctgttattaatattatgcttgcttatttttggggtgttgcgcattattctttcaacatttcctgcaaatttaatccgtagaaaatctgcatgtgatgctgaaatttgtagctgtgtcgcttgtctattttgagaggagtatcataagaaaaaaccaattagaagggaagataaaaaaaaccttgtaaccattggcagagaagaaaagagaaaatcattctcatagttttacagaatagtcacggcaaaatcacatttgtgacttaatttgttaaccattagaatcagatgatttttgtcatcaagttcaggacgtgtgattcttcaatttaaatagtta

SEQ ID NO: 64312 - DNA, 348 bp, Glycine max
  Clone ID: PAT_MRT3847_29086C.1
tttatcagtggccttacgatgactatgcttcagccaggcgaaatgagatcggaatcactggaagaattccgctgccgcagtttcaagaggctacgttgcagactaggtcatatatgaattgaaactattcgtgatctcagtaagactcttctgccgcccttggttatgagatcggaagacctaagctaatgacgatttcacattataccgtcctatggatgctctcatgatcatatgtgaataggatgtattcgtagacataacatgtctatcgtgtagccgctggtcatgtgatcatgatacctacatggtaccgaactcgactagactcatatgagtctcattaaa

SEQ ID NO: 64313 - DNA, 321 bp, Glycine max
  unsure (1)..(321): unsure at all n locations
  Clone ID: PAT_MRT3847_29087C.1
cccngggaaacgaacccaaacctgggggtattcttggtgaatggtggggaacacaccccattacagggaaccaaaatgggttcggttggtccagggttaacaacaaagaataaaaaaattccacttttgggaaaacagaacacctaagccataggtaccctgggatctacccagcaaagtgcccattaattgcgacagagaccaccactgggccccagaagaaagcaaaggagagatggaaggccaaaagggacacaaaaacaactggccgaagaagcaatggaactgaaggaaaaaacacttttacaaaggtgtcagcat

SEQ ID NO: 64314 - DNA, 444 bp, Glycine max
  unsure (1)..(444): unsure at all n locations
  Clone ID: PAT_MRT3847_29088C.1
atgaaaagtggaagcagaaggaacttgttcggagagcaaacgaaattctgcaggttgctatgtcaaggcttgagaaagagttggtccacattcttctccaacataagcaacacttagagcctgaatacctgtatttccattttaatagggtggatatggtgtttgatgaatcgtttcgttcggttgaggatgaataatcnttcgaggcctcccggagtagcggtgctagccaatcctaggccagcactgttgatttggtgaatccagcagtgcttgaacgtctcaagagcattgcaagtgtcatgtttgcttcaaaataccatcaggaattctgtcaggtctttgttacatcgaggagggatgccttggccgagtattttgtcattcttgagatggaaaagttaagaattgaggatgtgctaaaactggagtggcattgcttga

SEQ ID NO: 64315 - DNA, 1572 bp, Glycine max
  Clone ID: PAT_MRT3847_29089C.1
aagactttacattggggggtcattactcattacaagctagtgtcctgaagacttttgcatttagtttggggaagtgcaatattggtcaggtagctaggaagtggtgttgtttttgtgttagtgctatgggaaggcaaccctgctgtgacaaacttggggtgaagaagggtccatggactgctgaggaagacaagaagctcatcaacttcattctcaccaatggccaatgctgttggcgcgccgtgccaaagctcgctggcctcaagcgctgtggcaagagttgtcgccttcgttggacgaattatcttcgtccagacttgaagagagggctactcacagaggcagaggagcaacttgttattgatctccatgccgattgctgtctcaggtggtccaagattgctgccaggttacccggaagaacagacaatgagattaaaaatcattggaacacccatatcaagaaaaaactccttaagataggtattgatcccgttactcatgagcctctcaaaaaacaagctgcagcatcttctcaggatagttcatcctcccctgcagagcatttgccgcaacctggcaataaccttgatgatcaggtcaaagaaactgaagggattcttctcaactcagaggagaattcaagttcatcacaagctgaaaattcttctggggatgattcacttttgctagatagcatttgcagcgacgattctctattaaacagcatgtggctggatgaaactcctctggtggaagcattatgggacacaacacctaaccttgagaatactagtaataacatgggtttgttaccatcttgggaggataattgtgcttggttattggactgtcaagactttggtattcatgattttgggtttacctgtttcaacgagatagagtcacatgcactgcaaacgataggaatgaaggaagaggggcattagcacgggaatttaattgtctatgaaagaaaattaagggtaagatatcaaatctataaatgtgacaaaataccacgggctcaaatttaggttcttggtgttgaattttatctacctagtattttacaaaaatgtttctctcggaaggtggaaggtgaacgtttcctcttgtgaggttcctcgccaaccaaaacacaaaattgatagcaaagcaaaaccaaatcatcatcaaaatggcacagtacgtacgtactttcttcttctaattaaatgctgcatgtatttatgtgtacggtagggacataacaaatgggaaatgtctagtgagtgcagaaacatattgtacaaagaagtctactttgaaaataatggtaaaatcttttgtgattacaagttcacttgtattctctcctttcctgttttactgtcccattaaaaataaatggataaaaacgtagacgaaaaaaaagtcccaagttaaaggaaaagatttttaataaccccgaacttagcttttagcccaaaggtgggataataagtggcatggaaaaattccccgtgattttagggtgggttttctaaccaaatgagtttgttttgaaataattttcccagggttttcccc

SEQ ID NO: 64316 - DNA, 997 bp, Glycine max
  unsure (1)..(997): unsure at all n locations
  Clone ID: PAT_MRT3847_2908C.1
gaggttctctatttgtggataagtggggtccacctggccacgtggaccgcgccgagccgggagtgtttaacctgctgggagccgctaattcggctcgcggcgccgagctgtgtctccgtttgtttggagtggtggtggtatgagatcatgattttgttgtgtgggttgttggtggaccccactgccagcgtggcggctatggggattttaatccagactacgtccttgatctacgtttttccctcctcgctggggcttgcggtgtctacgcgcgtgggaaacgagcttggcgccaacaggggacgacgcgccaggatgtcggcggtggtggcggtgttctttgccgccgtaatggggttctccgcggtggtttttgcgacggcgatgcggaggaggtgggggaggatgttcaccggagacgaggggattctgcggctgacgggggcggcgctaccgattctggggctgtgcgagctgggaaactgcccgcagacggtggggtgcggggtggtgagggggacggcgaggccgaacgtggcggcgaatgtgaacctgggagcgttttatctggtggggatgcccgtggcagttgggcttgcgttctggctcgaggttgggttctgtgggctctggctgggcctattgtcggcccaggtttgttgtgcgggcctcatgttgtatatgattgggaccaccgattgggagtaccaggcctgtcgggcccagttacttacggcccttgatgaaggatccgacggccacaaacaaccgttgattgccactttggacaacaacaactactcttgatgaaataaaaaaaaaaattatgatgattgttgattgacggtgtaatattctttttcttttgtaataattcttacttattattaaagggaatttgtgaaatacagttattattatttaaaaattcaaaaaaaaaaaaaaaagcgcgcccgctctagagcctnccagcctacgtcgggctgcctgcgacgtc

SEQ ID NO: 64317 - DNA, 364 bp, Glycine max
  Clone ID: PAT_MRT3847_29090C.1
gtattgggagactcatattggggcaaaaaaacaacttattcagggtttgggttaaacaacccccggcaaatttgttgtggggttcatttgaccccggccaccttatttttcatccattgttgcttttgcgggggagacataaaccattgagcctataaaattctattgctaaaaggggttaataacaaacaatttggccaagttttacacattcatttttttgggggggggaaaattgaaacaggcctgggtttccaaaaaaaattggaacagacggtatctaaggggagcttcaccttttggacttggaattaccattgcaccgaagggggctaattaacttaactgcctatggccccccgcc

SEQ ID NO: 64318 - DNA, 279 bp, Glycine max
  unsure (1)..(279): unsure at all n locations
  Clone ID: PAT_MRT3847_29091C.1
agacnttattcccactgtcatctcnctntttaaacaattgcganncnattgggannatacctagacctttgtactctgagtatnctcatcaattgtttctgncatcaggctcacatacactncttgctttttctgtattcgccaacatcctcaagaggggttttcattccaaatgcaattacccttcaacacactcatnaaaggcctctgttttcgtggggcgattaaaaaagcactttacnntcacgatcanttggtnggctcaagggttccagttgg

SEQ ID NO: 64319 - DNA, 464 bp, Glycine max
  Clone ID: PAT_MRT3847_29092C.1
ctgaagatgaattttgaattggactgggttttaattgggatattcaacgatgctactattctaatttttattttggagcagaaaaaaaaaaagaacaacctgccacattgctgctatcaggtcgttagtcctagtgtctgctgggtgctgggtagtagatttttcttgtactgagcagaaatggcatgttgtatactaaacgtatcatgcagtatttggttttattctgtagtgaattttccacaaccgtgggctacaactcataaatatgcaacatatatgtttttcagtaggagttgctacattaggcagagtaaatattttgtagttttccacagtgtcttttccttggtttgaattacctgcattgagaataatgattgttgccaccaaggcatgcttgactctgagatataaatcttaacaaagaataacttctcagggggatccactagttctagagc

SEQ ID NO: 64320 - DNA, 487 bp, Glycine max
  Clone ID: PAT_MRT3847_29093C.1
tgccgtgctacatgtgtgcagtgccgcctgcttggggggggggggggggggggaactaataataggtacaacgtgtgtggagggacgttatcacaggccagagcccagcacaacagcagggggtaattagtaataaacaaacgggataggagtaaagaaatgcactgatgaaccacttgcaaacagtactggagattaaagtgcaagtggaatataaccgtaaatacttagcagatacatggaccaaccctaggtgtatctagataaagtgagcttttaaaatatactgccggcaggccggtcagaggggtgagtgagatggttaagcactgttagcgttgtgggacataatgtaaaagtcaaaattgcaaacggtgtgggtaattgtgttacggggcatcagggaacaagcattatacgcggttgggcaaggttttactcgagctgcagtgccctcctacgtgggggcgagggggtacttacattg

SEQ ID NO: 64321 - DNA, 209 bp, Glycine max
  Clone ID: PAT_MRT3847_29094C.1
ttccttggtcggcccactcgtgacgtcacacgttcgtacacgtcctaaaagaccacccaagggtctattatacattacaactatcctgttgacgattaaactttgactcttcctagcgtctcaatttggagaaattactatatgctctaaaatcactgcaggtccaatttcccactaatctcttcgttactcataacactttaatccat

SEQ ID NO: 64322 - DNA, 499 bp, Glycine max
  Clone ID: PAT_MRT3847_29095C.1
tacggctgcgagaagacgacagaaggggtccttactgcgtgttatatcacatgtacaaattcagaacaacacggaatataatgtgttaactataattaatttagataaattttgattttatttaagaaacacaagccacacgaacggaaactcttgttagctagtgaattttatacaaagtcaatgttatgtgacaatctgtttaatgactaataagctacgctatatgtacagaagtagaaagtgcttttgtgaatggcttctattctatttactattgagggccgagccgccgagggagtgtcaatgccattaaagaactaataaaatccttcattaattaccaagttgtcgtaaattgaagaataaaaaaatttatcaacagttaaataattaggtaatggagtccatcatcagtcatcatcaagttatgaacaagtccataattcaagtaaatacaaacatatcgcacaattacaacttggcattgcacacatgt

SEQ ID NO: 64323 - DNA, 260 bp, Glycine max
  Clone ID: PAT_MRT3847_29096C.1
agcggcagaagaagacgccgcctccatggtgaagtactccagagaatccgagaatctcaacaagtcatgagatgccacatgcgctgacctcagactgcggtacaagaacactaggcagactgcctttgccatcaggacgttgcccctggataaaagcgtagatagcatacctggaaagatgctttggctcattaacaggccatcccattccgaacgttctgtggtggtgttgggaggcgaactaatctaacagcagacac

SEQ ID NO: 64324 - DNA, 473 bp, Glycine max
  Clone ID: PAT_MRT3847_29097C.1
tattaagctcaaaacgagtccaatctttccaaccaagccgaggggaagagctcaccaacttcatcaaaaggattgcttcaaaagaagggtcacccatcaatctcaccaaagaagtgcttttaacagtatctacaattgtttcaaggacagcccttggcaacaagtgtagggaccataaaaaattcatatcagctgtaagggaagccacagaggctgctggaggttttgacttgggagatttgtacccttctgctgaatggcttcaacacatctcagggttgaagcctaagcttgagaagtatcatcaacaagccgaccggataatgcaaaacatcgtcaatgaacatagagaggctaagtcaagtgccacacacagccagggtgaagaagtggcggatgatcttgtagacgtgctcatgaaggaggagtttggcttaagcgacaatagtacccttctgtcgtcttctcgcagc

SEQ ID NO: 64325 - DNA, 261 bp, Glycine max
  Clone ID: PAT_MRT3847_29098C.1
ttttgtgcgccggtgttttaagggaaagaaaatgaccttttgcgttggcaacagactacgcgaatcatttgctttcccactcttagttgattagttgaccactatcctatttgatataggacttcttgtcagatgtaaacttcttctgtctctttctcagttctctggtgaatttcaagttcaagctggtgaaatcttggattagtgctcccactctcctatctggtataggacttcgtgggtagacctttctatttctct

SEQ ID NO: 64326 - DNA, 1336 bp, Glycine max
  Clone ID: PAT_MRT3847_29099C.1
ggctcgagctcgagccgctcgagccgcgaatttaagaaagatagtagcaaagtccttaattaattttcattttctagagaaaaactcagtcagcagaatgatttagattagagtagtcgtggattcactcgcgccatgtaatagaagttagttgaaattggataaaaaggaccacattcctttttttttttttttttcctttcatcgtaccattaaatttacactgaaatcgccaaatacaactaaaagcacaacactgatcctttcatttgcaaattgcaaatgcagaaaggaaaagcggattctgtctccatcctcagttcccttcctgaagatgttgccctcaaaattgcttcgctgcttcaggtgcgggatttgtgtgccttaggttgttgttcgaggttctggagggaactctgcttctcagattgcatttgggagtctcttgtcagaaacagatggcccttactctcttccttccatttcccttcttcttccactcattctcccaatttcaagaagtggaggaaattgtacttggagaggcaagtggaattgggacttagagcaaggtctgtcgtgaagtttctggaagcttgttctcgttctgagtcacttgaggttggtgactatctgaaagctgttgacaccttgattggtaccatgtttgggtttaagacgtcagaggttcttgttcaaccctcaaatgaatgtgctgattaacttggttgggctacactattgcctcacaacccttgggattccgggtgataatcttgtagaagcccttcggattcatgagatctcagatcggcgtgtctgcatcaggtggtggaaagttggtagatggtactatggcttccgcatgagggatgagtcacattctcggtgggtttctttggcagatttggcaacagaagatgatgagcatgttttgggagtgcttcgccgaggtgctgttcatgaggttttacgtgttcagatctctgtggttggtcgtccatcaaaaccttggtcttgcaatagctatacggagataaactaaagtattgatatctatctgagttactgtgtatagttatggtttgtaaagttctgtggtaataatccatgtatagtttgccatcaaagataagacaataataagttcataatgcttgttatattatttgaactccgtatctcgttgtatatagctgagacttgttaacttgatatatggcagcacctcaatgaaaataagccttaaaggttttggtgaggtatccactgattctcctcttttggaggaacgccctatttgtttttcaaccttgtttaaacaaagtttggtact

SEQ ID NO: 64327 - DNA, 320 bp, Glycine max
  unsure (1)..(320): unsure at all n locations
  Clone ID: PAT_MRT3847_2909C.1
tagctnctatcctctatgttggcctttgttgggttctggttccaagctatttacactggggttggacccattgtatatttgatggctctcctagctgatcctggtcactgcaacattttgtcggctttcacgcatttgtgcaatgtatagtttgaagaaaagaagacggaagacgtgcgtccggaatgaacatagctttatgctgctccagcaatatccggtattnnnnnnnnaatgtactttgcttcctaatccaagttttacaattgacacaagggtttgatttttttaaacaaattcgaattactattgttttaaaa

SEQ ID NO: 64328 - DNA, 480 bp, Glycine max
  Clone ID: PAT_MRT3847_290C.1
tcgctttggtgtccgatgccggaaattaaagctaaccttagtttttgagtccatgatggattaggatttcgaccatctggtgtttaagctagtggaggggggtggttcattggttggttttgaatgttccagggatgagatactggcttgtgtgagaatctttgtcatacctaagacgcgctgttacactattctccctatggagcgtaatatggtgtgccgtcagaagattgtaaatattgtgtggtatattatgaagaaaagggacaagtgttagttgttaagttgaaatcaactctatactccatggaatggactggtttggccaatagtatactgcatatgggcaccgattttgtggtgcgcgattatgctagtttcgatggtctgattaccaagcgaggatttagcaagatggcagaaatgataaacagtctttgtgacggtgatgaaaaattgatgcggtgaaggacacacctg

SEQ ID NO: 64329 - DNA, 663 bp, Glycine max
  Clone ID: PAT_MRT3847_29100C.1
cccacgcgtccgaaaactcagtcagcagaatgatttagattagagtagtcgtggattcactcgcgccatgtaatagaaaaaggaaaagcggattctgtctccatcctcagttcccttcctgaagatgttgccctcaaaattgcttcgctgcttcaggtgcgggatttgtgtgccttaggttgttgttcgaggttctggagggaactctgcttctcagattgcatttgggagtctcttgtcagaaacagatggcccttactctcttccttccatttcccttcttcttccactcattctcccaatttcaagtaattgttgcttgtttggaaaattgggttacagaagtggaggaaattgtacttggagaggcaagtggaattgggacttagagcaaggtctgtcgtgaagtttctggaagcttgttctcgttctgagtcacttgaggttggtgactatctgaaagctgttgacaccttgattggtaccatgtttgggtttgaagacgtgcagaggttcttgttcaaccctcaaatgaatgtgctgattaacttggttgggctacactattggctcacaacccttgggatttccggtgataatcttgtagaagcccttggactcatgagatctccgatcggcgtgtctgcatcaagtggtggaaag

SEQ ID NO: 64330 - DNA, 861 bp, Glycine max
  Clone ID: PAT_MRT3847_29101C.1
aggctcttacatagaaattgttctacaagatcatgcagtgcatcgaatatttaattgaatagatgtctgcctcgtaattatgtggacttcgttttgggcacttaagtaggtaaacaagtggatcaaattgtgtaggtgtctgtcaacgtggttgatctaaattggttttctcattctctgttagacacttaacaattaagtctatttaatactgaagtcttcagccttgatgatggaaagcatatgaaaccttttgaagaactaaaccagagtgtggcatgtatttgatatgtaactgtcttcatttgccgggtgataatcttgtagaagcccttcggactcatgagatctccgatcggcgtgtctgcatcaagtggtggaaagttggtagatggtactatggcttccgcatgagggatgagtcacattctcggtgggtttctttggcagatttggcaacagaagatgatgagcatgttttgggagtgcttcgccgaggtactgttcatgaggttttacgtgttcagatctctgtggttggtcgtccatcaacaccttggtcctgccagattacccagagattggaatagctatacggagataaactaaagtattgatatctatctgaattagtatgtgtatagttattgtttgtaaaattctgcggtaacatgtatagtttgtcatcaaagataagacaataataagttcataatgttcgtaaataaaagcgcagtatgcttgttatattatttgaactccgtatctcgttgtatatagctgagacttgttaacttgatatatggcagcacctcaatgaaaataagccttaaaggttttggtttatcttcttttcgtggt

SEQ ID NO: 64331 - DNA, 734 bp, Glycine max
  Clone ID: PAT_MRT3847_29102C.1
acggctgcgagaagacgacagaagggggaacaagtttaagatagtagcaaagtccttcattaattttattttctagaaagaaagaaaaaaaaaactcagtcatcagaatgattagatttgacaaagtggtggttcactgacgccatgtaatagaagttagtttaaattggaataaaaaggacacattccttcttttttccttttcattgtaccattaaattaacaccgaaatcgccgaatacgactaaaatcaaaatcacaacactgatcctttcatttgcaaattgcaaatgcagaaaggaaaagcggattctatctccatcatcagctcccttcctgaagatgttgccctcaaaattgcttcgctacttcaggtgcgggatttgtgtgccttaggttgttgttcgatgttctggaaggaactctgcttctcagattgcatttgggagtctcttgtcagaaacagatggccctcactctcttccttccatttcccttcttcttcttccactcattctcccagtttcgagtacagaaattgtttgtttggaaaattgggttacagaagtggaggaaattgtacttggagaggcacgtggaattgggagttagagctaggtctgttgtgaagtttctggaagcttgttctcgttctgaatcacttgaggttggggactatctgaaagctgttgacaccttgcttggtccatgtttgggtttgaagacgtgcacag

SEQ ID NO: 64332 - DNA, 244 bp, Glycine max
  Clone ID: PAT_MRT3847_29103C.1
aattctataaacgtgtatttggaaagttcttcgtggcaactgactcaaatgctgaaataaactcacctattactgttcatgcatctgaatatcatcgatttggatggttgcttttcctggcacttcgtgtacatgctttcagccgtttcaaagacttagtgacttgcactaatggtttaatttcaatcttggtcagcttaattattcattctctgtatttgatttgcattccaacattcatgac

SEQ ID NO: 64333 - DNA, 513 bp, Glycine max
  Clone ID: PAT_MRT3847_29104C.1
aatatgaactccacagaatcagattaacggggtgcctgaacatttttgtttgtaccttaatattacatccaaaagacagccactacattctgaaacatacaggaccacatagacaaatatcatctttgtaacacatacatggcagttgagaaagcttgttacaccttgaaagctaatatcacacatacagtacaaggaagaaagaataagaatggtaagtaattaatgaaaaatcataggaggtcccgtgctagagtcattggtttttcttttataatggtgagttcaccaccatttgatgtagttagcagatggtgattggaatcctcgtcttcactctcctctgaatctgagaggccatcagattccagttcttcgtcgtcagaaagtgcaagatgttcaggcagatgtctaacagcagcaacctgaaggctttctggcagaagacaattgcaaaaagaaccaacacgagccagccgatttatccatgcaggaataggctttccagttagc

SEQ ID NO: 64334 - DNA, 260 bp, Glycine max
  Clone ID: PAT_MRT3847_29105C.1
cgccctcgcccttttttttttttttcgaataaaaaaaaacctttcataggagctgggcgctcatataaacgagaaactacgttcgaaggcccacacatagaaagaatatcgtccgattttagcctagactataagctccatcgggcttcctctttccttccttaagaatctaaccgacatgctggtattgacgggttccttcatcatcaatcttaaacttctcatgtgtcatgaaaagcctcatatactgatcccttgcc

SEQ ID NO: 64335 - DNA, 450 bp, Glycine max
  Clone ID: PAT_MRT3847_29106C.1
aattcggctcgagatctgacatgctttctgaggaaaccatcttcgataagcaatgactaataactaacgattttccatttgcaagcatacctcgtgtcatttccctcgaatgtccacgtattcgtataacacgtgacttccgcctcttcattccaccgaataaaacacaacaaaaagaaaaaaagaatgaaaacttgaaaaccattcttttccttgcattgagtgatatacacaaatcatcttttattttaaacattatatcaatatttttttttctgattataaatcttattatgtgtataattatctttttgtttttactctctaagtatttgataactcattggggatttatcaaacatttctcttatgcattaatagcgttaagagttgtaaagagctagttttattacaagctatgttgagactttacgtgtgtgtattggaagc

SEQ ID NO: 64336 - DNA, 553 bp, Glycine max
  Clone ID: PAT_MRT3847_29107C.1
ctggggggaaacatcggggggtccccttaaaattttagtttttcccccccagtatacaaaaacgggggggcggaccaatgggccataataatgggggttttttagatgaccaaataaaaactttttaactaaaactaagctttaaatggggaacccccccttttggccccaaaagagttcaaaaggaaaattttttttggaatataaatcatcaagggggggggcaaaaagctttgcataaaaaaagcccggccagtttcatggccatactcatccctaaaactttcccggtcagttaagggaaaaagcttttcttggggagcagaggggccccttgcccatgctacaaaaaaatgacttcaaactttgcccaagggggggtttccaagggacccctgaaatcggcctccccttggaagcggaagggttaaaaagcttggttttgggtcaccccaccggggtttatttgggggggttttaaatcatggccccctttaaaaatttgagggctttttggcttccctttggggcctggattcgggggtggggaact

SEQ ID NO: 64337 - DNA, 192 bp, Glycine max
  Clone ID: PAT_MRT3847_29108C.1
agttatacgtttgttaggcaaggggtacattctcacactggtgaaatggaaccgggcgtgtaggattcactgctacaaaagctgagacgatgagaaatcccacggaaaggcatctggatcaaccttgcgtcaaaagtactagtgccttctctacgactgatgagagattggcaggcacagaacatgaggaat

SEQ ID NO: 64338 - DNA, 357 bp, Glycine max
  Clone ID: PAT_MRT3847_29109C.1
gggcaatagcggccctcagattgtcctcgccacctacttcggtgacgtggtccacaacttcgatgtcatcgactctgccctgaccggcacctacgccttccacgttgacctcgttcgccacccagaacagctcagccaggtcattgaccacctcggaccaaagcagatcctctctgccggtgtcgttgacggtcgcaacatctggaagaacaacttcaagaagtccattgagactgttgaggctgccatccagaagctcggcaaggagcgtgtcattgttgccacccccagcttgcttgttcacaccccacacacgctcggcagcgaggagaacctcgacgaggagggccgcccgtg

SEQ ID NO: 64339 - DNA, 525 bp, Glycine max
  Clone ID: PAT_MRT3847_2910C.1
gggatagcctctgaatgttttccttgacggcttttaaagcgcacttcccataccccaggtcagcactacatcgaatccattctaacacatacctgtgatcacttacctgttgctccccaagcttttgacacgtatatatctccaccactggcacgctgcaaaagtagcctatattctaattaactgctactaccaacctactaccttctctgcctagcaaccccttctcttgaatatatgaaacgtatctcaaaagcaagtctctcttccatagccaccaatctggtggcttttaccaacctccttctcaagtacgcttaccacgaatccttcctgccaattggctaaccgtgggcatcctggttgcacgctggacatgaacggcacacacgttggagtcctccatgagcccgacaagggatgcctctgtgaactgcggctacgcaagcacggtgtggttggggaggcaccgatcacacctgatgaactgggcagcaatacgaacccagctctggcatgggagct

SEQ ID NO: 64340 - DNA, 427 bp, Glycine max
  unsure (1)..(427): unsure at all n locations
  Clone ID: PAT_MRT3847_29110C.1
gtttttgntgctgaggtggtgaggaagaagatataaaagttagggtttcttgtgattgagatctgagtagagtagtagaagaagaagaagaagaaagggcagattgatgggagaagaagaagaatcagctctcctcctctcccgcagcaagcgttcttcttccacattcacttattgcattctcctcttgatcgcttccatgttcctcctcgccgtctacttctcctcctcagcaaccgccaagctccaccaccccgtggtgatcctcatttcctccgacggcttccgtttcgggtaccagtacaaggtccccacttcgaacattcgtcgtttgatccaagacggtaccgaggccgatagcggccttatcccttgtttgcccacccttacctttcccaaccactactccattgtcaccggtctctac

SEQ ID NO: 64341 - DNA, 372 bp, Glycine max
  Clone ID: PAT_MRT3847_29111C.1
aaaacagtgttatttaaacttgactattctcttaacaagtcagaagactatctatccaaaaaaataaataagcatcatcgaaataaattttgtctttttttgataattttttttataattattgctaaaaatacaaactcccgtgttagaccttgtctgttaaaataccatactcctttacttgtagtactagtactttttataaatattttaaatttgaaaaatattttccttgaatatctggcaattagtgacaaaaggaatgataaaaaaaacataattaagaaagaaggtattgttaaaaattatcaaccaatttttttatgtacatatcttcagaaagtgggtttttatgatctaataaagaattaa

SEQ ID NO: 64342 - DNA, 221 bp, Glycine max
  Clone ID: PAT_MRT3847_29112C.1
aagaccggatgccaggcgaggctacccgtttcgattaaccgtggaaataagcggaaaaaaaaaaaaaaaaaaaaagcgggcgctgtggacgatccaaacgaaccaaccctaccatgccacgcaatcgacgttatatcgcgtctatagagtcaaataaactgaacgcactgttacaacgtttaaaccgggaaaactgtgaaaacaccgaacttaatcaactt

SEQ ID NO: 64343 - DNA, 240 bp, Glycine max
  Clone ID: PAT_MRT3847_29113C.1
cacatatcccctctttctttttttttttcttcccctcaccaagaggctttcatttaaaacttttttttataatatttttcaagccttattcattacccttattgaagacaaatacctttctccacactcttatcataaagaattttttttttctccctaaaggcctatgctttccttgtttcggtcgaacaagcatctctctgtgcacgtgattgattacacctcattgcgcacgctttc

SEQ ID NO: 64344 - DNA, 391 bp, Glycine max
  unsure (1)..(391): unsure at all n locations
  Clone ID: PAT_MRT3847_29114C.1
gtttgaaaccgcacaagcacaactggtntgctgggctgctgtctagcggaaggcacattacataggagaaaaagatgaacagacactctaccaaagcgtacttctttctttatccgaacctacaaaagcgcagtgtctaggtatttcttgaagaggaatcactaagaatgcaagaactatcgcagccaaaggcacgtggagcactgttaaatgcatcaattgactacttcaactgatccatggccggcgctccgaaggagagtgctaactgtgaatggacggtaacaccgaactccagtgcaagctggactggcagaaggccgcgctacttggcaagctggaatgatcaacacgagatggaggagccaaccacactcgtccttggacacga

SEQ ID NO: 64345 - DNA, 390 bp, Glycine max
  unsure (1)..(390): unsure at all n locations
  Clone ID: PAT_MRT3847_29115C.1
gggagaaggctatgtttttgtacgcttcggtgtgggatgcaagttgggttgctgaagggaagtggtgtgggaagtactgtgggggtgatgagccttatgtttgtgtctacagggacattcgtgttcccgttggaacttctgttgtggattgagtattcacctcttttttatcgataatttttctccttctaagagacatttggtgagattcttcccttttaattatatttttttatttatttataaatcttgaattcaaacctaaagaaacacactcacgaaccacttaaaattgttggtataagtgggtgactcttaatctagttaagttgggggtgtgggttttgggggtgtattcttttgttgagtgttgttttttttttttttnna

SEQ ID NO: 64346 - DNA, 355 bp, Glycine max
  Clone ID: PAT_MRT3847_29116C.1
cttaagttagaaggacttgagttgttataattaacggaaggaacccatatacaactaagaagaagaagaagaagaggaaggtctctcaatcaaagtgattgaaaagacccaaataaaaaaaaaaaagaggggggaaaaaaaaaaattggtcaacccttaaagaatttcggttcttgaggtggttggaaaaccatttttaaaaaaatcgtgccttggccagggccttggttttgccaatttattccgatttatttaacccgaaaccgggccttgagaccaatgcctggattggaagcttgcttccttactttcgtggaaatggaggttcaagccttccaaggaattgcaaggaaaa

SEQ ID NO: 64347 - DNA, 274 bp, Glycine max
  Clone ID: PAT_MRT3847_29117C.1
caaaaggccatataattttcttttatttgaaataatgtccgggatcatccacaagattgaggagaccctccatgtgggcgggcacaagacagaggagcacaaaggcgaacaccatggtgagcacaaaggtgaacacaaaggcgaacaccatggtgagcacaaaggtgaacacaaaggcgaacaacaccatggggcgcaccaggcgggacttgtggataagatcaaggacaagatccatggtgatggccatgacacgggtgagaaaacgaagaag

SEQ ID NO: 64348 - DNA, 1809 bp, Glycine max
  Clone ID: PAT_MRT3847_29118C.1
cccacgcgtccgcccacgcgtccgccaacactcccctctctccctcttttccctgccaaagtaaccttaacctggttagggacaaacaaaaagcactcacacacacacacacactgagtgaaagaaagagaagaccaattttgaggacaaagtgaagagagaaagacagaaacacgaactgaaaagaaaggagtgagttgtttcggacagtagtagtagtcgtagtagctagatagatagagaaggtggaagtggaaaaaaggatgtctttttttaattgggaagtgaaacaaggggtgggggtggtgtgaacacaaaaaggtgtatactgacagagagagagagagagagagagagagagatggtgggctcatgaacaacaacaacgaacacagataggagcaaagaagctgttgggatgatggcccttcatgatgccctcagaagagtctgtctcaactcagactggacttactctgtcttctggaccattcgtcctcgcccgagagtccgaggtggcaatggctgcaaggttggagacgatagcggcagcttgatgttgatgtgggaagatgggttttgccaaggaaggggttcaggatgtctggaagatattgatggagaggatcctgtcagaaaggccttcagcaaaatgtccattcagttgtataattatggagaagggttgatggggaaagttgcatctgataagtgccacaagtgggtctttaaagagcccacagaatgtgaaccaaatatctccaactactggcagagctcctttgatgctcttcctcctgaatggacagaccagtttgagtcaggcattcagaccatagctgttattcaagctggacatggtcttctccaacttggttcttgcaagattattcctgaagatctccgttttgtgcttagaatgagacacacttttgaatcccttggctaccaatctggtttctacctctctcaactcttctcttcaacaaggaacacttcctcatcaacttctgttccctcaaaaccatccaccattccaattaggccacctcctccactcttcaactggggtcagaggccactttcttctgccacttccatgctatcctcaccgaattttcaacaacatgaagccaggcttgggtttccaaaagatgaggcgcacatgtttctcatgcctcatgcatcatctgagggtgcaagaatcgaggacatgatgggggagcatgaaaacgacataaaatggcccaatggcttgtctttcttcaatgctctcactggaagaacagatgatgctaagctcttgttcaatcctgagagcttggggaacaaacctggtgatcagaatcagcatcacactattggccaaaaccccaattcagatggatccaacatgcaaaatgctagtggtggaaccaacccaaatgagttcttgagcttggatagccaccaagatgatgcaaggaaaatggacaagtttaagaggagcttcactcttccttcaagagtggcctcatcaacttcatccacttcaatggatcaacatcaacaacaacaacaacaaggtgtggagtatacgaattcagaaggaggtatgtatccggatgtcatggaaacctttttggagtgaattgaggtgagttttttagtcgggggaaaaaatgaaaaatgaaagatgagaatttgtatctaggaaaaagttactacttgtgttcctttttcatgtgttggcttttcactttgtatcctgtgtttcttctgtcttccactttatgagacttgattaatgatcatttgtttgtttcttct

SEQ ID NO: 64349 - DNA, 2343 bp, Glycine max
  Clone ID: PAT_MRT3847_29119C.1
agaatttcttgtacattttggtcctcgggctgcctcatgtagagcaaaagagaagtggggttcagaagaggttgttttctgggtaaatcttgctcagaagcagctacagcaagctattgataaggaaaaaatatggtcaagattgacaacatctgaaagtattgaggtcttggagaaggatttggctgtttttgggttctttattgctttaggcagaagtacaaggtcatttcttttgacaaatggttttgatactctagatgatccaattgaagatttcatcaggtatcttattggaggcagtattttatactaccctcagctctcatccattagttcatatcaattgtacgtagaggtagtttgtgaagagttggattggcttccattttatccgggaatcaccaccgttacaaaacaatctcatatgcatagaagtaaacatgaaggtcctcccaatgctgaagcagtgcgccaagcttttgatgtttgctctcattggatgcagagctttattaaatacagtacatggctggagagcccttcaaatgtgaaagcagctgagtttctgtcgacagggcacaagaagttgatggaatgcatggaagaacttgggatgattagggataaggcattggagaccgaaggcaagaaagcagctcatagacgtagatctacagttcagtcaactataaaagagtcaggttcttttgatgaggcattgaaaagtgttgaagagactgttgtaagacttgaaaagttgcttcaagagttgcacgtatcaagctctagttctggaaaagagcatttgaaagcagcctgttctgatttggagaaaatacgaaaactttggaaagaagctgaattcctggaggcatcttttagagcaaaagctgattctctgcaagagggggttgacagtggtcggacctactcaccagttggtgaagaggaggagtatataaaagggaaaagcaaaaagaatcctaatgtaagggtggacaggagcaaaagaaatgttgggaaatcccgtggattctggagcatctttggacgtcctgtcaccaaaaagcctggcttggagtctgatgcggatccttatgaaaacaatattgaacagtctgcaccaaacgtaggggttgtggaccaagaacccaatgaaatccgccgcttcgagcttctgcgaaatgagctaatagaacttgagaaacgagttcaaagaagtgcctatcaatcagaaaataatgaagatttactggttattgatgatggtgccccttatagcgatgatgctgggggtgttcagatggtcagggttgagaagaaagaaaatatcctggaaaaatcttttagtttgccaaaagatttttccaggatattttggcaaactaaaagaaacaggaacggatgtctggcaaggaaactcagctgctcgctattgatgttgctgctgccatgggtttacttagaagggcattgataggggatgaattgaccgagaaggagaagaaaacacttaaaagaaccttgactgacatggcttcggttgttcctattggtgttttgatgcttcttccagttactgccgttggtcatgcagcaatgttggctgctattcagagatatgtgccatctctaattccatccacttatgcaccagaaaggttagatctcttgaggcagcttgagaaagtaaagcaaatgacagccagtaatatgggctcagatgaggaagtggatgaagataaatgatcagaagcaatgccgatttatgtatagctagcgaaactattctttgtgatctgatgaaaattggactgctttgttatcctctttctggaaaaaatttgttgatgccaaatttctcagatagaagttgagcatagagaagttcattccacgtgtctggcacccctggtaagcaccagtggctgcaatcctgtggggcatcaggtggagtgcccggttcccggtacttggaagggtgaccgtctttcctcaactctgaaagatatgtgatgttcaaaaagtggactttcctgctctcgtgttgcatctgtttgacaacaccagaaacaaatatgttataatatggttcaatttcaagttttgtagggtcattttctggctctgtttccatgtcacactctcctccatcattccacgtgccattcctgtatagtaaagacttgtccaaatgtaagcatgccatccaaaccccctccccccaatacatatattttagatctattctaataaagatcagtacagtatttgtgaaaagaaaagtggggggactgggaaactggtttcatattcataattgatgtctaacttttagtt

SEQ ID NO: 64350 - DNA, 371 bp, Glycine max
  Clone ID: PAT_MRT3847_2911C.1
gagatgcgtaagcgcatgggtatcaaggctgaggtgcccggtgttgagaactactacgacaagctgtaagcgaacttaccttgaatggatgatatcagatcctgtgtccttgtggatgcagaacctcaacaggctgctagcgaagacctgggacgcctgcctgagccccatagagaagccccttgcgaagacatcacggtggccttttgtcaaatgacaagccgccgagacaaggaaccaaaaaaatatggtaaataaattttgagggctagattgaggccataatcacggggaagctctccgcttggcttttatgtagtgatgtgccgatagtggaaacatgacaaaagaaatgatgactttttatgttc

SEQ ID NO: 64351 - DNA, 467 bp, Glycine max
  Clone ID: PAT_MRT3847_29120C.1
ggttggctgaacaaaatgatacagtttaaagagaaatctcgcatggcggtgcgttcattgctggagatgaaggggttggggttgcccttttgacgtgatcctgttctgatggcttctgatatacttctatatcagtctgattttgtcccgggtggtgaagatcaaaagcagcatttggagttgacccgtgacttggctgaacgggttaataatttatatggaggaagaaagtggaagaaattaggcggccgaggcggtaccatatttaaggttccagagccccttatacctccagccggagcccggataatggccttaactgatggcctgtccaagatgtcaaagtctgcaccttttgatcaatccacaatcaatattcttgatcctaaagatcttatatcaaacacagatcacacgttgcaaaaactgattcattttccaggtgttggaatttgacaacttctgag

SEQ ID NO: 64352 - DNA, 718 bp, Glycine max
  unsure (1)..(718): unsure at all n locations
  Clone ID: PAT_MRT3847_29121C.1
cccacgcgtccggagatgacgacccgattcaagaagaaccgcaagaagcgcggccacgtgagcgccggtcatggccgtatcggaaagcaccgtaagcaccccggcggccggggaaacgccggtggcatgcatcaccacaggatcctgttcgacaagtaccatccgggcttcttcggtaaggtgggaatgaggtacttccataagcttcgcaataaattctactcccccatcgtcaacgtcgaaaagctatggtctctcataccccaagacgcgaaggaaaaagccctaaaatcgaaggacactgcccctctaatcgacgtcacacagcacgggtacttcaaggtcctcggaaaaggtgttctgccccaaaatcagccttttgttgttaaggccaagcttatttccaagatcgccgagaagaagattaaggaagccggtggcgctgttcttctcaccgcttaggtttaaaaactgttttttaattgtgttgttttgtttcggataacttttttgattatatattgcaagtgatacattgtgtttttttttagtgtttttgttgttggatttaggttgattaaaaggtttatgcgaacagttttgacctaatatcctaaaaccttgttttaatgagttgtgataggaaatttattggaataagggaaacaaattttggggaggactctgntaatgaaggagaattaataaagggagcgaa

SEQ ID NO: 64353 - DNA, 1230 bp, Glycine max
  Clone ID: PAT_MRT3847_29122C.1
tttactacctccacaccccagtttctccacatacaccccctctgcctacttattggaaaaccaagagagaatagagggagttgaggaacaaccaagttcccttctcgggctcaaccacctaagcacgtctcagatttcccagatccaagcccaagcccaagcccagaactcgctctctcttaatttcttgggcccgaagcccgttcctatgaagcacgttggtgggccggcgaagcccacgaagctgtaccggggcgtgaggcagaggcattgggggaagtgggtggcggagataaggctaccgaagaaccgaaccaggctttggctcggaaccttcgacacagccgaggaagccgctttggcttacgacaaagccgcgtacaggctccgaggcgacttggcgaggctgaacttcccgaacctgaaaggctcgtgccccggcgaggagtacaagcctatgcaggctgcggtggacgctaagctcgacgcaatctgcgcgaacttggcggaaatgcagaagcaagggaagaacgagaagggtgccaggtcggggaagaagtcgaagcaaggtccgaacctggaggcgaagcccgaacctgaagcttcgggttccggtgctgctgctctgtctcctgaaagtgagggttctgcggattcttctgctttgtctgatcttacctttgatgtaaccgagccgcaatgggaggatgcttcagcacattttaatttgcaaaagtttccttcttatgagatcgattgggattctctctgaagactctttgtttttttatttttatgtctagtcttgtgggtaattaataatttagttataattaggattgctcttgtggctgctgcaattgagtttttgaagattgcagtgctacttgtaggatttggattatgttagtcttttttctttttcttttttttttttaaatttgcttattggctattcgatggtcaatatgatgtaaatctctctaccttggtcagctggttttttttttcttgcttggccatggagaatgattccgggttaggtctttgtctatgttttagtgttcgtccaagtactattattgatgtaattcaattctatttgtatctcaatttatgaatgtatttgtatttcagcttacatattgtactagtttgtttcacattttggaccatgtggtagttgtgtttggttcttgtatgaacaatcgattttattttctttgtggc

SEQ ID NO: 64354 - DNA, 118 bp, Glycine max
  Clone ID: PAT_MRT3847_29123C.1
atggatgaagacatgcaggagctccttcaagccggtccaaagtattgtttgatcgtgacattggctctagcagcatggacaagaccagggtactctagtcgcccaatggcagctgcca

SEQ ID NO: 64355 - DNA, 244 bp, Glycine max
  Clone ID: PAT_MRT3847_29124C.1
cattttccctctgcccttttctcgatggacacggacggtgtcgtttcgttcaaccatgtctcgccggaggattcccacgaggttcatgtcttggccgtcgacgacagctcgttgatcgaaaggtcattgagcgcttgctcaaaatctcagcttgtaaagttacggctgtggatagtggaatcagagcactgcaatttctggggctggatgagcagagaaggacctctgaatctgatggttttgt

SEQ ID NO: 64356 - DNA, 1066 bp, Glycine max
  Clone ID: PAT_MRT3847_29125C.1
cgctttgacttctccttcatctcttctctttgacttctccttcatctctttcgccggaaaacccaaagacccctttcgccggaaaacccaccgcaacctttgcggttcgcaactccgtttccggcttcaccgtgctcctcttacacgcagtatatatatatgtatgtatatggggaaaactaggtggttgataatattggttacctgtttatgcctgctttccttttctgatggcagagaactcaaggttaggcataaaaagcaacattaccaatacaatcatacagttgctacaatattagtggaatatgcttctgcggtatacttgtcagatttaactgaactttttacttggacgtgctctaggtgtaatggcttgaccaagggatttgaaatgatagagttagttgttgacgtcgagcattgcttacaggcatttgttggagtggccgatgatcctcatgccattatcattgcattcagaggaacaaatgaacacagcttacagaattggattgaagatttatattggaagcagcatgatataaattatccaggcatggatgatgcaatggtacaccgtggtttttataccgcgtaccacaatacaacaatacgtcctgcaattttagatgctgttgaaagagcaaagaagttttatggagatattgaaattatagcaacagggcattcaatgggaggggcaatggcttcattttgtggacttgatttaacggtaattataatttaaccggctttgcaagttatggcatttggacaacctcgtattggaaatgctgcttttgcatctctctatacgaaactagttccaaataccatccgagtcacaaatgaccatgatattgtacctcatttgcctccatactattattatttaccgcagaagacataccgccacttcccaagagaggtccggcgcttgggcatcggtggagggcgtcttgtggccagcgttggctagtttggtgatgtgtctggtcaggttccttctggctcaatgatgttgcagcgcaccttttgaggagaaaatgacaaactttcctaa

SEQ ID NO: 64357 - DNA, 644 bp, Glycine max
  Clone ID: PAT_MRT3847_29126C.1
cccacgcgtccgattattgttacgactctttgacttctccttcatctctttggctggagaaaacccttttcgccggaaaacccaccgcaaccttcgcggtttgcgattccgcttccggtttcaccgtgctcctcttacacacgtattcaactattcaattttctccttaacttttccgttttcttggaacacgttcccaattttttcccccaattgtgagcatatgggaaaaactagttggttgataatattggttacctgtttgtgcctgcttgcattttctgatggtagagaactcaaggttagacataaaaagcctcattaccaatacaatcatacgcttgctacaatattagtggaatatgcttctgcggtatacttgtcagatttaactgaactttttacttggacgtgctctaggtgtaatggcttgaccaagggatttgaaatgatagagttagttgttgacgtcgagcattgcttacaggcatttgttggagtggccgatgatccttgtgccattatcattgcattcagaggaacaaatgaacacagcttacagaattggattgaagatctatattggaagcagcatgatataaattatccaggcatggatgatgcaatggtacacccggggtttt

SEQ ID NO: 64358 - DNA, 617 bp, Glycine max
  Clone ID: PAT_MRT3847_29127C.1
gctcacctttctttaggtactgcggctgtcgtggctatgcctaaatcttgttttggaactcaaagatcaaccagcttgttccctgagggcattctgatgcctctagacggaaatgttgctgacattcatgaaatttgctctggtttcaataattcatgctcaaatggtgcaaaccttgatgctcttcagttgaaaggcctcattgtgactacaagcagtatctgcattcacgtttcaatgcatccccatattgcgaatatttttggttcagtaaataaacatgctttccctactggatttggacctggtgtaactgctgcattacatcgaattctcaatgcaggggctcaaaataaatatatgcctgctgcctgtgtcatttattggaataaaatcaataaaagtatgctataagcaatgcagtgacaggtactcttttttaaaccctacataagattctgacaatgcatctcacagttctatctcttgtttgatctcccaattgcctcagagcttgagccacacgcaaatagttcttccctgcacggttgttgcagtactagttttacatctagagagatagacaacttattttattgtagatacgaaagttaatg

SEQ ID NO: 64359 - DNA, 290 bp, Glycine max
  Clone ID: PAT_MRT3847_29128C.1
aaaaaaaccttcatttttatcatattggacgtttaacaacattgggaaaaaaaaataaacacaacttgcggtaaatacttctgttcaaattatacaaaaagaaaatttcatattgtaaagaataaaggccttcacatacttttaaaagcacacaacattctttacttgtaatgaataaaagttattttaatttcagagtttttactttttaaaatttaagacaaacaatttataatatcaaatatgcaacttataattataaaaaataatggttaaaatatattcttcaa

SEQ ID NO: 64360 - DNA, 1618 bp, Glycine max
  Clone ID: PAT_MRT3847_29129C.1
gttggccaaagaggtgaagactacgtggcgcctaagccccgtcagtgttttcagttgcaaagtagagaaaagaagacacagaaacaaaacaatggcgactctgaatctgttctctcagccatggcaacctacaatttcacctttttgttgttctaatactaacaacaacaacaacgttgtttatgcttatcataatcataataattctaaattacatttcttttccaattctcgtcaattctctgttctttctcaattgtccaccaactcctcaaaatcagttagtggaagttcagggctgcagaacagttcctttgtttctggcattgagtacaggaagcgtcctctatattctgtatttcccacaaagcctgctcaagtttcctctgtggaagatctctatgaatttatttgctcgggacctttacttgacaaaataggcatcacacaagagcaggtggccgagtccatcgataattggttgttatatggccggtacctatgcagactgtttcagcttaatgaattgttccttacagagcctcaaaaggctaggatttatcattactatgtacctgtcttcctctggtgtgaacagcagattactgagcatcagtccaagttcaaagatggagaagatatacctcctttagtgattggttttagtgctcctcaaggttgtggaaagacaacccttgtctttgctcttgactatcttttcgaagtgattggcaggaagtctgcaacagtatctatagatgatttctatttgatggctgaaggtcagaataaactaagagaagctaatccaggaaatgcccttcttgagttgcgtggaaatgcaggaagtcacgatcttgctttttctgttgaaactctaacagccttaaccaaattgacaagagaaggtatgaaattgaagttgccaagatatgataaatctgcattcaatgggagaggtgatcgtgccgatccttcaacatggtcagaagttgaagggcccctgacggttgtgttgtttgaaggttggatgcttggtttcaagccccttccagttgacgcagtaaaggttgttgatccccagctagaaactgtaaataaaaaccttgaagcttactatgatgcttgggacaaatacataaagtcttggatagtcatcaagattaagaacccaaactgtgtcttccaatggcgcttacaggctgagattgccatgagggaggcaggcaagcctggaatgacagatgatgaggtgagagattttgtttcacgctacctgccggcatactatgcataccttcctacactttactcggagggaccaaatggatcagatcctcaacatctcctaactattgaaatagatgaagggagaaaccccatccttgctacctaggttaattgtatgatagagcactgctgttttttcagttctttgagataatttgaatggctattcagcattaattagtggcatcatcagtggagtggtcaatgaatgtgtgctatttcccttgaaatgtatagagaatattttcattaattcacaataacggctaatgctttctgtttttccatgaagtggacctggctgtgtttcatgccttctttactacct

SEQ ID NO: 64361 - DNA, 469 bp, Glycine max
  Clone ID: PAT_MRT3847_2912C.1
gaaaggcggaagtggaggccggagcctgggacaccgccggcggggagagaagcggatcccgtccgagccccggccccaagtaacgccgccgccccggagccgccttggaggtccccctccccactaagtgcctctttgcatagcaccagtccccacccgcacgctctctggaccactacagctggacgggcaatggcgggtcggggaggcgcagcacgacccaatggaccagctgctgggaacaagatctgtcaatttaagctggttctgctgggggagtctgcggtaggcaaatccagcctcgtcctccgctttgtcaagggacagtttcacgagtaccaggagagcacaattggagcggccttcctcacacagactgtctgcctggatgacacaacagtcaagtttgagatctgggacacagctggacaggagcggtatcacagcctggcccccatgtactatcggg

SEQ ID NO: 64362 - DNA, 1584 bp, Glycine max
  Clone ID: PAT_MRT3847_29130C.1
ggtcacaatcaggggaagaaattagctctggcacggttacagtgtacaagcaatcttcttcataccctataacagctccttcacctctatctggccttccagaattctctcacttgggttggggtcactggtttaccttgagggatcttgaacttgctacgaaccgtttttccaaagaaaatgtcctcggtgaaggcggctatggagtggtttataggggacagttgatcaatggaactccagtggcagttaaaaagatacttaataacacaggtcaagcagagaaagaatttagagtggaagttgaagctattggtcatgtccgacacaaaaacttggttcgacttttggggtactgcattgaggggactcacaggatgctagtttatgagtatgtcaataatggaaacttagagcaatggcttcatggagcaatgcgacatcatggataccttacgtgggaagcacgtatcaagattctccttggcacagccaaagcgctagcgtatttgcatgaagcaattgaaccaaaggtggtgcaccgtgatgtaaagtcaagcaacatattaattgatgatgatttcaatgccaaggtttctgattttggcctggccaaattattgggtgctgggaagagttatgtcacaacaagagttatgggaacttttggatatgtggctcctgaatatgcaaatactggccttctaaatgagaagagtgatgtttatagctttggtgttttgctattggaaggaattactggtagagatccagttgactatggtcgaccagcaaatgaagtgaaccttgttgattggctgaaaatgatggttggaaacaggagatcagaagaagtggtggaccccaacattgaggtgaagccatccaccagagctttaaaacgggctctcttaactgctttaagatgtgtagatccagattctgagaaaaggcccaagatgggccaagttgtacgaatgttggagtcagaggaataccctttaccaagagaggaccgaagacaccgaagaagaaatcgagagggtagtggagaaattgagtcccagaaggaatattctgacacagacaggagtgagattcaggattcaagagaagaaagaagagggtgaacaacagacatgaccccaagaattcggtgggttggtgggatttataaattggtagctttttttttcctccatagctttttagattcttggatttttgcctacctcagatgggcatggcaaaggggctggcacagctggagatatttttattttttatttttttcccatgcattggttcttggtgtccttttgtttgtatataggatagatattgtttgtgtatgaaggtggatggtatttctaagataagaacccataatattggggtgtgtacagaatttgatatcttaattccaaaatatgttccataaatctgtgagaaggatcaattaatgattttgagaaacccctcatgaaacttttcagttcaactcattctgaagtccatagatctcactttcatgaaataaatattttgtttggccggttgcttttaattccttttacaacaatc

SEQ ID NO: 64363 - DNA, 282 bp, Glycine max
  Clone ID: PAT_MRT3847_29131C.1
tttttgcagataatgtattttttggggggcggattatgtgaattgcttttttaagaatataagtaaatataacgcatcaaaacaaattcaacttcaaattgcggtcaatatatgggagaaatttgctatcaagaaacttgtgaataagaagggatggttgccagaggtactggttaataaacgacaaaataatacttactgtacaaagaaaatattatgcagtctttgtttaaattctatgaaaatataacgtattatttttgttcaaacattgaggggttt

SEQ ID NO: 64364 - DNA, 741 bp, Glycine max
  unsure (1)..(741): unsure at all n locations
  Clone ID: PAT_MRT3847_29132C.1
gactcgcagattcaaacgtttccgaggtgaggctgaggcatctctctctgctttctagaatgggagctgggcgtggagtctccatctcacttgatggggtgagggacaagaaccttatgcagctcaaaaagctcaatctcgctcttttccccgttcgttacaatgacaaatactatgtcgatgcactcgcttccggtgaatttaccaaactagcttactatagtgatatttgtgttggagcaattgcatgccggctggagaagaaggaaggtggggggcaagttcgggtttacatcatgacgttaggtgttttggcaccttaccgtggacttggtattggaacaaagttattgaatcatgttcttgatctttgctccaagcaaaacatttctgaggtttacttgcatgtgcagacaaacaatgaagatgccataaacttctacaagaaatttgggtttgaaattacagaaacaatccagaactattatacgaacattacaccgccagactgctatgttctcacgaggtatacggcaagcacaacgaagaaataacatttcagccagttattttgaggggaagtgatcagagattgttgcattgttttatggtttttgccatggatgtattacactaaagttttttatgtccaatgctagactttaccataaagttagctaaaaaaaaaagcagcacttggagatctcttgctataanananaaaaaaaaannaaaaagggc

SEQ ID NO: 64365 - DNA, 134 bp, Glycine max
  unsure (1)..(134): unsure at all n locations
  Clone ID: PAT_MRT3847_29133C.1
gcagaccncngccnnctacntagcaagcaagcncaacngatggaggcaaagcgaggcnatgccctnatgtggcttgggcacgangtntcactctncctctgcgctctaaccctatccgcngntgcacggaagca

SEQ ID NO: 64366 - DNA, 1453 bp, Glycine max
  Clone ID: PAT_MRT3847_29134C.1
agagattggcttggctttggcttaatttgtttcctaagaagaagaagaagaatggaagagaagcagagagtgataatagtgggagcagggccttcggggatatcggcggcagcatgcttcacgaaacagtcgattccgtacataatcctggagagggaagactgttccgcttccctgtggaagaaatattcatacgagcgcctccacctccacctcaggaaacagtactgccagcttccccacaaacccttcccagcatcttttcctccctacgttcccaagaagcagttcttgcagtacctggacgactacgtctcccacttcggaatcacgccgctgtaccgaagaaccgtggagctggccgagtacgaccagggctgccacaactggagggtcatggccctcaacggggactccggtcagctcgaggagtaccgtgggaggtttctggtggtggccactggtgaaaccactgacccttttgtgccggagcttcaaggcctcagtggctttcctgggaagctcattcattccactgggtttcgttctgggaaggatttcaaagatcagcatgttcttgttgttggatcggggaattctggcatggaaatcgcattggaccttgtcaaccatggtgccaaaacttccattctcgttaggagcccggttcattttctatcaagggagatggtgagtttggggttgtttctgttgaaatatttgtcgttgagcaccgtggactcgctgatggtgatgcttagtacaatgatttacggggatgtgaccaaatatggggttgcaaggcccaatgagggtcccttttatatgaaggtcaagtatggaaagtacccagttattgacgttggaacctataaaaaaatcaagtctggagaattgaaggttttgccatcagaaatagaaagcgtaagaggcaaggatgtcctattcaagaatggtgagtcgcacccatttgactccattgttttctgcaccggcttcaagagatcaaccaacaagtggcttaagggggatgattaccttctgaatgatgagggtcttccgaagccgagttacccgatccattggaagggaaataatggtttgtactgcgttgggctatcaaggagaggcttctatggcgctgccgcagatgctgaaaatatagcaaatgatgtaagctccttcacgcagcatccatgtccctgagaagtgagaacaaactacaagaccaacgacagttttgctgctgcaagtttttgaaacataattattacgacatatcatggcttcgcagattgccctgttagctgccattgctgctagctagagggacaacaatataatctccaaataatactatgagctctgtatattaagagtctctaacaattaattatttataaatgtcaatacttgttgtaattttttaatgaagaaggattcacttactagt

SEQ ID NO: 64367 - DNA, 574 bp, Glycine max
  unsure (1)..(574): unsure at all n locations
  Clone ID: PAT_MRT3847_29135C.1
acggctgcgggaacccgtcacccacgcgtccgcccacgcgtccgcccacgcgtgatttattaatcttgcaaggaaacaacagagagaggtggaagatggattatcatcaggacaaccctgcagttttcttcactaccatcaagaacaccaagcaactgaaagtcccagaggagtttctgaagcatttgaataaagacttgtggagtaattcagttcttataggcccttctggtgataagtggcaagtaactattttgaagaaaggaaataacgtgtatatggacaatggttggtcacaatttctgaaagacaattcagtggtgcttgatgagttcttgctttttacatatcatggaggaaactgcttctatgttcaaatttttggtgggaatggattggagaggctatgccgcaaagaagcaagagaagaacaagctgctacccctcaattttttgatctgcctttcagcaacaaagcctcaatttctgatggatgtgagataaagaaaacangacangaacangcttctgccccaagttggcgaggacaaacaagagcaagcaaagaaaaact

SEQ ID NO: 64368 - DNA, 567 bp, Glycine max
  Clone ID: PAT_MRT3847_29136C.1
aaccatcaacagaatggaaagatacatcacaacggatataagtaatttagtgtaacatataaattgtagtagtaatatatcacattgttctccttaaactagattcgggacataagtcaccaacttgattggtaaacactcttacacggcaaaataatgttctgtttggattatggaatggtaagaaccagatataaacctacaaagtaatagggcaacaaacagagagacagagagctctgtaaggacacaaaaatgaacaaaaataccactgttgtggttacgtgtccttttttcctgttcttctgctgaaatgtgtgattactcggccaggctgtctggaacaaattcgggctggctttgagtctcttccaaaagagaggctgttctggccttcttaaacctgcttgagcttctaagaacatcatcaattgacataccttttgtgcctgaaaagctagcttttacagaacttcttgcaccattttcctgacttctcccaccatatgaaacatgtacttgtgaattcagacctgaactggtctgcccatcagaaaaatcacacat

SEQ ID NO: 64369 - DNA, 318 bp, Glycine max
  Clone ID: PAT_MRT3847_29137C.1
cacatggtaataatctactcgatcaggtcctcagtcctcattgaaaatgaaaagagtctttttttggtacatgaatgaaaagagtcttaaattaccggggctcaagattttttttttatgatattttctgctatttaattaccgaaatatctgaagaacgacaggaaaaacaatgttgtgtattataaaaacttataatttagtatttactttccaatcatgtatgctaacaagtctctagctttttttgtttgcctattaccttttttgttatcatccaaataagattgttttgagtggatatatataaaaatgaag

SEQ ID NO: 64370 - DNA, 694 bp, Glycine max
  unsure (1)..(694): unsure at all n locations
  Clone ID: PAT_MRT3847_29138C.1
cggnaattcccggngtcgacccacgcgtccgcaaaaaagacaacccagagagcgcgtcttaataaacgctcttctctgaaaacccccatttcttttcttctttcttcttctctttcgcttcttcgatcttcgatcttcgtcgctgaaaatgagagagtgcatttcaatccacatcggccaggccgggattcaggttggaaacgcctgctgggagctttactgcctcgaacacggcattcaggtctattttctcaaccctaaatctccgtactgtaatttttttaacctacatttttccgattcaatttgttcgcgttgttgagatgttaaatctggatccatttacgctgttagttctctttctgcatccgaaccttttcttcacttttttgttgtgtattatttgtgtttcgttctgtattgcttcagagatttgccgatctgtgtttgctttatgttttatgtgaacatttttttgcggtttagtttcgattgattctcagatgtacgtgtacgctgtgtattttgcgaacttttggatctggttatgtgttgttcgagtgatttggaatgtggatttgatgataacgccttgtttgtttaaattattttatttacagtttttgttgatatttatcattntatttcaaatggaccaaaaaccgagatgcatttctctgagtgttttgatgct

SEQ ID NO: 64371 - DNA, 298 bp, Glycine max
  Clone ID: PAT_MRT3847_29139C.1
gcgagaacacttttgattttagatcctagcacgcagagcttgggtcggttttctattgaccttgttggtggatgaattttagtggacagaactggagattggatcacacttatacaaaattctccagttagtaacttgttgatgagttgctgcttggaagaaaggctgcttaatggctaagattgcgacgtctgagaatgcaacaagcacaaggagtgattgggcctcattggtacaagggactctaacaaacagcaacaatgcatagcattttgatgcatgtcagtggactaaatcg

SEQ ID NO: 64372 - DNA, 295 bp, Glycine max
  Clone ID: PAT_MRT3847_2913C.1
gatcaatacaaaaaccttttttttattaactacagggcgaagaaaaatttcttgcaatctaaagcaatactgctgaggctactcataatcacctgtatgaagattatcagccttattgcacttggcttacaaaggatgtacaagcgactctcgaaattaatttgaagggtttctaaacggagcaacttatgatgaaaacctacgactgggggatcctaacaacccatggagaaaggcttgaggatgcatccaatgattaaatggatcccgttcccgtaaagaaaataaaatttca

SEQ ID NO: 64373 - DNA, 302 bp, Glycine max
  Clone ID: PAT_MRT3847_29140C.1
ggaccccattaagaaccacttcctatacattggatgcaaccaaacaacagtattgattaggatttcagaaattttgacaaaaaatcaaaataaaataaaatgtgtaaatccatgggacgttttggaacaactagagcatggagaaccatggtttatttttggaataggaagggcatatcaaaatttagttacttgagagggggacagaacactcataggcagggtggcagtaatttagttttgatgcattttccatgtatagatttttacactgtctgacaattagaaatcactctatacat

SEQ ID NO: 64374 - DNA, 518 bp, Glycine max
  Clone ID: PAT_MRT3847_29141C.1
ggctcgagatttcctttgttttatcaaaccttgtttgtttgcactcattgctaaaacaagaacgatcgaacatatggcaaccaagtttgctcatgcactcactttatttgttctagtggcctcaatgctttcaatgagcatggccaatatggattggtcctttggttctaattctaactactctgattggtggtccagattccgcaaccgtcaccaaaacaagacagaacaagaacccagaaagatcattgtgggtgggtctgagggttggcacttcggttttaactacacagattgggctttcaagaatggcccattttaccttaacgatacactagtgttcaagtatgatgctccaaacgctaccagtttcccacacagggtgtacatatttccaaacttgtggagttatttgaattgtgatgcgaagagtgctaagatgctggcaaatcccacacagctggaagagagggctttcatttcgtgttaaataggtggcagccttatttctttgcctg

SEQ ID NO: 64375 - DNA, 426 bp, Glycine max
  Clone ID: PAT_MRT3847_29142C.1
ccatctcactctgtttctctaatttccgagagcattgttaattcgcttccacgtgtgaagtcttttcagctttcgctgctgttggagttttcgcttcggtgctttacattgtggtccgctgttgtttttggatcgaattttgggtttgataggggttttgtgccaaactggaattgttgttctttcaagctatcaatcctatctgactttgaactgcttattttcaatggtgttgtatatgcctttttaacctaatatatgttcctatttcggggttattagacgtaaattggtataattcgagtactcaactgtgaaataggattacaggagcaattggtctgtcacgcgattcctggtgtttgaggtacaccatgttgcgagatgtgatactgaactttctttcattagtgtaagcagttaaac

SEQ ID NO: 64376 - DNA, 839 bp, Glycine max
  unsure (1)..(839): unsure at all n locations
  Clone ID: PAT_MRT3847_29143C.1
tttaagcatgctggggaaaatatagtgtttgcaagcgnaagccctttcgaaaacgtagatcttggtaatggaaaagtgggtcatgtaaatcaagcaaacaacnatgtacctcttcccaggaattggtttgggaactcttctgtcaggtgctcaccttataacagatggaatgttgcaggcagcttctgaatgccttgcttcatacatggccgaggaagatatcttgaaaggaattttgtatccatccgttgatagcatacgagatgttacggcagaggtcggggctgctgtgcttcgagcagcagttgaagaagaactggcagaaggacatggtgatgtggggcccaaggaactttcccatatgtcaaaagatgaggctgtggagtatgtgcgaagcaatatgtggtatcctgtgtattctcctctcgttcatgaaaaataatatcctatcgatattttcaattttttgggggacctgtgcaattcacgtctcaaattgctgctgcaaagattcttaatttatgcttattactagcaacgctgagtatcggatggcaaacagcaaaaagggaaatatatgtctccattaatttctgctgggaattattgtattaattttgaatctactaaggtcagtctagagacgagtttaagtaatttatatgaggtcttaagtttgttgttttacactaaaaaaagtattgaaatttgactttttaaagttcggtatatattgtagagtctatgctggatatatttgataatagttgggtggtttcgttgtttacaccaattataacgtttttttttataacgatgagacaaacgttttaactctt

SEQ ID NO: 64377 - DNA, 2387 bp, Glycine max
  Clone ID: PAT_MRT3847_29144C.1
cggaattcccgggtcgacccacgctttccgaatttttaattttctcgggaaaaatgtggttccacctaagaaaacgacactagcattgcatagcaatagttgatttttctccagaaaattaagaagctcaacttagtagtggtaagaagtaataacgcgcgcacacacacatacacaaagacagtgacagtggtgttgaattttcctcaaagaggatgtggaaactcgtgcgatatgccgccgcctccaacctcgcccgatcgcggcggttctccgccgcgattcctggtccgtgcattgttcacaagcgcggtgccgacatactccatgacccctggttcaacaaggatacagggtttcctttgactgaaagggataggttggggcttcggggcctcttacctcctcgtgttatatcctttgagcagcaatatgatcgctttatgaattcattccgatctttggagaataatactcaggggcaaccagataaagttgtttccttggcaaaatggaggatcttaaatagactgcatgataggaatgagactttgtactacagagttcttattgataatattaaagagtttgctccaataatatatactcctacagttggattagtgtgtcaaaattattcagggttatttaggcgtccacgtggaatgtattttagtgccaaagataaaggagagatgatgtcaatgatctataactggccagctcacgaggtagacatgattgtcttaacagatggaagtcgaattcttggcttaggtgaccttggagttcagggaattggaatccccataggaaaacttgatgtgtatgttgctgctgctggtatcaacccacaaagaatacttccagttatgctggatgttggtaccaacaatcaaaagttacttgaagatcgcctttatttaggacttcgacaaccaaggttggaaggtgaagagtatctatcaattatagatgaattcatggaagctgttcatgctcgatggcccaaggctattgtgcagtttgaggattttcaaatgaagtgggcttttgaaaccctgaaaagatatcagaaaaagttttgcatgtttaatgatgatatacagggcactgcaggtgttgcacttgctggactattgggaactgtaagagcccaaggccggccattgactgattttgtgaaccaaaagatagttgtggttggagctgggagtgcaggacttggggttctaaaaatggccatccaagcagttgcaaagatatctgggtgcagtgaattagctgccaaaagccaattctatttgattgataaagatggtctagttacaacagagaggaacaatctagacccagctgcagctccatttgctaaaaatccaagagacatagaagggcttactgagggtgctagtataattgaagtggttaagaagattaggccacatgtgctccttggtttgtctggcgttggtggtattttcaatgaggaggtgcttaaggcaatgagagaatctgtttcaacaaaacctgctatctttgccatgtctaaccccaccatgaatgctgagtgcactgctattgatgcttttaagcatgctggggaaaatatggtgtttgcaagtggaagccctttcgaaaacgtagatcttggtaatggaattgtgggtcatgtaaatcaagcaaacaacatgtacctcttcccaggaattggtttgggaacccttctgtcaggtgctcaccttataacagatggaatgttgcaggcagctgctgaatgccttgcttcatacatggccgaggaagatatcttaaaaggaattttatatccatccgttgatagcatacgagatgttacggcagaggttggggctgctgtgcttcgagcagcagttgaagaagaactggcagaaggaaatggtgatgtggggcccaaagaactttcccatatgtcgaaagatgagactgtggagtatgtgcgaagcaatatgtggtatcctgtgtattctcctctcgttcatgaaaaatgatattctgactatatgttcaattttttgggggacctgtgaaattcacatctcaaattgctgcagccaagccttttatttttatttttatctatggtgtctaatccaatgttcttaattcatgcttattactagcaacgctgagtatcggatggcaaacaaaaaaaagggaaatatatgtctcctttcattttggccgggaattattgtattagttttgaatctattaaggtcagtctagtgttgacgagtttaagtaatttatatgggatcttaagtttgttgttgtacactaaaaaatagtattgaaatttgactttttaaagttcggcatatattatactggagacatttgataat

SEQ ID NO: 64378 - DNA, 241 bp, Glycine max
  Clone ID: PAT_MRT3847_29145C.1
ggtacgcaccttcatccataactcgtgcatactaaactcagttacagacacgcagccatggttcggggaccggccaggtatgacacgcaaattatttacaaaccataccccacgtcaattttctgccgtcctgttcctcatcccatgatcagtatttatgaagttggtatgaataagaaaggtgtagatgactttcctttctttctctatctggctcattgagagatagacatccatttca

SEQ ID NO: 64379 - DNA, 473 bp, Glycine max
  Clone ID: PAT_MRT3847_29146C.1
ataaacatcaccactgccacttacatacacttcctcaaatacgtgtgtcatgttgtttgtgttggcagggttctttccttcgccgataaccactttttactctatcttggtgctcaatcctctccccttcaatccaattttctctctcttcccctgcataaattcacgcacacccacttcccaatccgcgaacacagatccaaagttcttctctttttcaccgttccacgctaattccccaactgggtcatccaaattcacaacattactttgctaatcaacccaacccaaccctaattctctgtttttcatccctttggtttttcggatcaaaattctcgacccatgtcgcgaatcttcggtagatggaagaatgcgaaggaaatggcgttgctttcggggttcctgccacgtgggcaccatcgaaccgggttcaatttttgcccaatttcgacccacctgaacatggtcgc

SEQ ID NO: 64380 - DNA, 140 bp, Glycine max
  unsure (1)..(140): unsure at all n locations
  Clone ID: PAT_MRT3847_29147C.1
atagatagggttgtctaaattantttaccttactgnagatgtcaacctggcaactatctatcagcaaaaggcactatatattaatgaaagacagcttggacaggaccatccctgccccaagaaaagaaatggaaaccccg

SEQ ID NO: 64381 - DNA, 606 bp, Glycine max
  Clone ID: PAT_MRT3847_29148C.1
ccacgcgtccgctataccaaaaaaaaaaacaaacataaattgttcaatttaaactgagagttgaatagttgagtataatctaatacccttgtcccttggagcatatatccatcgccaaagatgtgcattgatacaaaaataagatgttattcatttttattttttattttattttttcaaaatggtaaactaacaagaggctttctacgaggtaaaaaacattagttagtacaaatgacttcagaaaagtagaatattatgtgaatttaatttgattatatgataatcttttggacagctgatgagaaatatcccttaacaaaatcaaagtaacccctccctatattgaatggggaaatgcagcttccagattgattactaagtgttcttttcttcagggatacctgctgggaaatgcagcaacaactcgaagggaaaaaaactatcaaattcccttcgctcatggaatgggacttatttctgatgaactatatggggggattgcattataattcatcaatagctattcttaaaaattgtgttggagaaacaaaagtcaaatgctaacggatctctcttattttaatgaacagtcactgcggaaaa

SEQ ID NO: 64382 - DNA, 232 bp, Glycine max
  Clone ID: PAT_MRT3847_29149C.1
tcacaaatcgggtaaagtattatacaaggataacattggtaagctaaaacagccgtaccaagacccaacacattatacatactataagactttctgtgatgctaaagatataaaggtgaatctctcgacaatttcattaatgcccaaccgtgggtacccatctaatactcagctcctagatacatatgttcacactactaataatactccaatactgatcaagaacacaatg

SEQ ID NO: 64383 - DNA, 142 bp, Glycine max
  Clone ID: PAT_MRT3847_2914C.1
cgcagagtcacttttgttctcactactctcaatctcaaacctgttttaccaaaaaatctaactgatgctcaataaaaagaactagaggcatggattgaaaatgactttgatcatgtgtaagaactttatttaaaatggttta

SEQ ID NO: 64384 - DNA, 605 bp, Glycine max
  Clone ID: PAT_MRT3847_29150C.1
taccgcctgcgagaagaccgacagagaggggacgcattcatcatcgccatcaagaaaacaacatcttcaatttgggaagttcttcttcttctcagctgcaaagtccaaaaagtcagtgccagtgaaaaccggcgctccgaagacattacctctctctctaaaacattattcatcagcacagtttgatcttatgtaaatgaagtatttttagaaaaaacccagcttcactgaaaaacctcgaagcggagaaaaaaggcaacaacttttcactctcttacgcaagtggttattggcggttgctgagaattttggggcacaaatcggttcttcgaagccagaaccttggagaaccgggttagtgtcagccggatttccgggttaaggttagaaatcgaaaaccccaagggccgatccgaatcttgaccaacggcgttttcaaaccttcaagagagagttcccggtacaatgcccaattcccaaaggcaattttcagctaaaagggtcagtatgcagaaatggggtggaccaatatgggtttgggaataatggggtggaccaatggggaaaatgggggtgaaaatttcaagcctgattgaggaattgga

SEQ ID NO: 64385 - DNA, 726 bp, Glycine max
  Clone ID: PAT_MRT3847_29151C.1
ttgagatgaagggtatgttagtatgatgcgttttttatgcagattcaatattttatatgcttctgaaaccattgcttttagttacttttgaagggcatgttagtatgcattgttaatgttaacatgaaaataatagcttttgaatttgatccatacggattgccttaggttctatctgctaacataaggatacaattatttttcactgttgagctctgttaatcttcaattttagtctacctcacttacctagtaaatagattgttgtttaacttcgatatcttcttgtactgttgatgaaactataaaagaaagtatacatccatatttttttgccaattctctcaattactgtagagagagatgctagcttttgttggtactgtttatctacatcagtagaggttcgtgctcgatgatggcaaaagaagctggagaagcttgctcacaaggcatgcccttgaattttactcttttgggtcctcaaccagaagtaaagcaaaatgctggctcaggggcttcagtaactgatgccaaaacaagtagttgagcacatacaggtatatcagctgacaaagtttcaactgcaaagaagctagaagattgaacatttcagcattgcatgttctctattttggttttggttgtagcagtcacacaaaaacatatgtattgttgtatcagttacgttctttacctgcaactaatgtgaaaatcagaagttag

SEQ ID NO: 64386 - DNA, 1126 bp, Glycine max
  unsure (1)..(1126): unsure at all n locations
  Clone ID: PAT_MRT3847_29152C.1
ggaattttgccccagggtctcggaaattcggctcgagatttttttcctccttttcttcctctttcacaatgctcccttaccatacccttgaaggagcacaagttgcactaggcagaggactaacccttgctgagacaatatggttcaaatactctgccaacaaacctgattttgttcttcattgccacaacactctattcttgtgcttattttactctatagctccaattcctttcgtattaatggagcttagtgggtatgagaagctaaacaaacacaaaattcagccctcggttaagagatcattcaaggaaatgttcaagtgctacaaagatgtcatggagacctttgtcattgcagttagcccactacagataatttcttatcccaccatcaagtggattgggatcagaactggtttgtcattgccatcaggctgggagttattttggcaattatttatttactttgtcatagaagatttttcgaattattggattcataggatgctccattgcaagtgggcatttgagaagattcacaaggtccatcatgaatatgtagcaccaattgggctctcagcaccttatgcccattgggccgagataatcatattgggtatccccctcgtttctaggcccagcactggttcctgggcatataacaacctattggctatggttcattttgcgacagctagaagccatcgagactcatagcgggtatgattttccttgggaggcccacaaaatatataccattttatggagggcctgcatcccatgacttccatcactacgttggtggaaaaagtcaaagcaactttgcctcagtatttacctattgtgactacatttacgggacccataaggggtatcaatatcggaagcagatgcgcaagaaaaattctactgacaccttcattgcccaaaattacaagatgganngatagctgattttgatatttattctatgttcacatccaacatcttaaaattcagactaatttacttataaattcatctgctttatatattttatttttgtacacctatatatcactatgtactatcatatgtttcgtgctacttagcctcaatagattagcctagttaaggtccaattc

SEQ ID NO: 64387 - DNA, 388 bp, Glycine max
  Clone ID: PAT_MRT3847_29153C.1
ggcacatacaagggcacccgtcgggtgaattgaaatgtctgctggggaagtataaataacattttttatcttctgatccgaatttaattccaccgaatttataaatggaaaatatttccttgtttccctataaaatcggggggatacaaaaaacccttttgagcaaaaaaatgggtccaaaaggaaggagccatttgcccttaagctacaaaaatttaaaccggggggggaaaaaggggattagggccctaaactccacttaaaaactatgggaatggggttacaacgtttttacaatatccttttacaataaaaatcctgggttttttttccagcaacagatccatgtcctccatatagaaatatgcgggggggctcactggggggg

SEQ ID NO: 64388 - DNA, 358 bp, Glycine max
  Clone ID: PAT_MRT3847_29154C.1
gtaggtgcacacgtcaacatctgaattgacatctgcagtcatgtctgtgtataagctcactaatgtcatatacacgcaaaggctggagactctgtgggattcaatgttaaggttgtgtcagtgaaggatttggtgcgtggtcagtttgcactcgcagtcacaggatgacactagccatgacgttacaaatttcagagctcaagtgatcatcatgaaacagctttgtcaggatgcagatagctatgcgcatgtcatccactgactcacatcgcacattaccgtcatatatgccgaactgatgtccaccattcagaggagatttggcactaagcttgagaaagaaccgaaatttttgaca

SEQ ID NO: 64389 - DNA, 1775 bp, Glycine max
  Clone ID: PAT_MRT3847_29155C.1
ctcgagccggaaacgaaaacctcaacccaaaccctcccgaattgaggtgacttgattttccctcttctctttttctctctcgtgagtctcgtccctgaagcgaaattctagaatggcggaagaagctcctgcatctgaaacctccgtcacaatgcctcaaccggcggaagtcatcaccgtcgacggaaccctaacctcttccgagaatgacaagagcggaatctccgtcgatgccgccgcgcacggcggtgaaaagacggtgtccaacgctgaaccttccggtagcgatcctcagaagtctctggagttggcgaacgagctgatggaaaaaggaaacaaggcaattaaggagaacgattttggagaagcagctgataacttcagccgtgctctcgaaatcagagtggcacattatggtgaacttgctcctgagtgtgtgcacacatattacaaatatgggtgtgcacttttatacaaggctcatgaggaatctgacaaggctcctgatgaagctgatccattggctgatgtgcccaagaaggaggatggatctcaacatggctccaacaaagatggttctgtgaagagttctttgaatgctgaatcttccactgcttctttttcaagcaatgccgagcaggatgtgacttcaaatgaccagggtggagcagtggatgatgggtccactaagaatgacccggaagaagatgatgaggatagtgatgctgaagacttggcagaagctgatgaagatgagactgacctggacctggcatggaaaatgcttgatattgccagagccattgttgaaaagcaatctgtcaatacaatagaacaagtggacatattatcaacattggcagatgttgcattggaaagagaggattttgaaacttccctctcggattatcagaaggcactaaccatcttggaacaactagttgaaccagatgatagaaaaattgctgacttaaattttcgcatatgcttgtgtttggaggttagttctaagcctcaagaagcaattgcttactgccagaaggctacatctgtttgtaaggcacgattacatcgtcttacaaatgaagtaaagagttgttcagatttgacatctgcttctgagttagctcaggatgttccagcatgtcccaaatctgagtctaataactcaattttggataaacaatcagagattgaaactctcaaaggtctatcaagtgagctggaaaagaagcttgaagatttgcaacagttagtgtcgaacccaaagtcaattcttgctgagatcctaggaatagcagctgccaaggcaggcaatgtgaaggaatcatcttcagcaatggtgagttcctcacagttggctactgccaacggcagtggaggttttgattccccaaccatttcaactgcccacaccaatggatctggtggagtcacacaccttggtgtggtgggaagaggagttaagcgagcatcaaatgccactccggcagaaggaagcacaccaaagaaaccggcattagaatctactgaagacaaaggtgatggcaacgcacactgatgtaggtcttggtttgtttgtatggtgtgtttaatttgaactttgaatgcaaccatacaatttggttacacttttgaactattgataaggacattttaaggggattgactgttctcaggggaatagtgttatgccatatattatccttattgattttatgtgcagctaattgatattgtcaaaactttcaagttacttaaaatgttaatcctat

SEQ ID NO: 64390 - DNA, 690 bp, Glycine max
  Clone ID: PAT_MRT3847_29156C.1
aaagagagaggagagagagtgcacagaaacgcaaacactcacttctctttttctacgtttttcatcccaacttttcttttccctcaaccattgcgtctgtttgatcaaagtcaaaacacacccaaaaagaccaccattcgcaataacacaacacagcacaaaccccttctcttctctccctttcaacacaacacaagtggtttttcgttttctcaaacaagaaccagttccttaagcacgcggtatttgtctctgtctcctcggtgcaacattacgtacccacacacactactactgcaataggggatcgagaaaaacaaacagcatcatcccagtgacgacgacgatcacattttaatgagaatccgaatttgagattgttggaattttatctttcaagattttggatctgcgaggatgaagtcttggtcactggacgagtggaggaactacttcgggtctgcgaattcggatatattcgagataattgagcacgccataattgtggcggcttcggattgtcctaaggagtttagagtgaggagggattggattgcagagaggttgttttcttgcaggttgactcggtgtgtggggtgtgaccgtgttgagttggctgtgggtgcagatagtaaaaaagagaaacatgatggtgatgatggtgattatgataagagtgggttttgagag

SEQ ID NO: 64391 - DNA, 264 bp, Glycine max
  unsure (1)..(264): unsure at all n locations
  Clone ID: PAT_MRT3847_29157C.1
aattcggctcgagaaaggttacagcgtgtatagctgcattcatattggtatatagtcatgattgtacaaaagatgaaattattgtttctcaatgcgtagtttaataagatgaaggaaaggcaattaaaactgtatttgcttcaagcaaagatcaccattctatactcaaaataatacataccatacaaaacttgctacctttaaaaaaaaaaaaaaaaaaaaaaaaaaaaaaaaaangncnnacaaaaactattgatgcttttt

SEQ ID NO: 64392 - DNA, 497 bp, Glycine max
  Clone ID: PAT_MRT3847_29158C.1
aaagagagaggagagagagtgcacagaaacgcaaacactcacttctctttttctacgtttttcatcccaacttttcttttccctcaaccattgcttctgtttgatcaaagtcaaaacacacccaaaaagaccaccattcgcaacctcttctctccctttcaacacaacacaagtggtttttcgcttgctcaaacaagaaccagttccttaaacacgcggggatcgaggaaaaaacaaacagcatcatcccagtgacgacgatgacattaatgagaatcggaatttgagtttgttggaatttggttttcagaattttggatctgcaagatgaagtcttggtcactggacgagtggaggaagtactttgggtcagcgaattcggatatatttgagataattgagcacgccataattgtggcggcttcggattgcccaaaggagtttagagtaaggagggatgggattgcagagaggttgttttcttgcaagttgactcg

SEQ ID NO: 64393 - DNA, 382 bp, Glycine max
  Clone ID: PAT_MRT3847_29159C.1
gcctgcgcaagggctggggccacgagcctcaccttctgtggaacgccttcgacatgcacaagcacctcaacgagcacggcaccatgaagatccccaagtgggatgccaccaggtctactggcagcccttagaggaattttatccttgtgacaacacggtctgactattttgaatcattttccttgggtttgtgagcgttatttacttgtaattgtttcgctgggcgctaggacatgtgcgcacattttgtgcagttgtgacaaggagacgcatgagcgattttccggaggcctaaagcatggtggaaatagaagatactgagacgtcgtacgcggcgtgatatacatgtatagaagtagagagacgattttgttgatacgtc

SEQ ID NO: 64394 - DNA, 611 bp, Glycine max
  unsure (1)..(611): unsure at all n locations
  Clone ID: PAT_MRT3847_2915C.1
ccacgcgtccgatctaatatttagctcagataaaaactgttttttcagcatttatttaataaccaaacaatctatgactaaaaccaggccccactctgtctttatagtatatatctggttttataaatttgccgatcactccctggttttgttgtttgcgtagtgcagatgcaattagtagaattcctccttggcccaggcttgggggtgtttctacttgcacattttgttgagaagggatcataatgccaattcagtaatcaaggaaagaaatagaaatattttacatctacatttgcataattgttgttgtcttgctgataatctcgttcatgcgaacctgaaaatttggatgtgttccccaatgctatatttactaatgtgaacttttctttctcatgaaacttctctaagaatttcttcgtgtgttagaagaacttggctaccttttctctgggacagngagtagttttagtttaaattatgtcaacttggacagatgttgtaggtttactgaatattttttggcttttcctttctatgtatacctctctaacatatttaaaaatcataattttataggttgcctaatctatgaggtattctctgga

SEQ ID NO: 64395 - DNA, 757 bp, Glycine max
  Clone ID: PAT_MRT3847_29160C.1
cacgcgtccggtttgatcaaagtcaaaacacacccaaaaagaccaccattcgcaacctcttctctccctttcaacacaacacaagtggtttttcgcttgctcaaacaagaaccagttccttaaacacgcggtatttgtctgtctcctcggtgcaacattacgtacccacactgcaatagctagaaagaaagaaacattcagattcttttgattatttcccgggtttccaatttttcgttttacaacaaccgaagaaaagggtctttcttttctttttttccctgaggttttggtctgtaactccagaatcttgaaacaacatcccaacaacgcaaaaacacgacgatgttgtttcttgtcatttattaacatacgcgtttttttgtgtgtgtgtgtgtgtgttggttcatgtttctgttgttgttgttgttgtttatcgaatccacttccgttttgccgcacattaatccaatcgaattttgccaaatcggggacaccccgcatgaaaaatcttagtaaattcaaaaacttcaatgattgattgtcgaaaatcttgttacccttttgacccctccatcattgctgtgttcaggggatcgaggaaaaaacaaacagcatcatcccagtgacgacgatgacattaatgagaatcggaatttgagtttgttggaatttggttttcagaattttggatctgcaagatgaagtcttggtcactggacgagtggaggaagtactttgggtcagcgaattcgga

SEQ ID NO: 64396 - DNA, 280 bp, Glycine max
  unsure (1)..(280): unsure at all n locations
  Clone ID: PAT_MRT3847_29161C.1
gtcgcngcacgcgtacgtaagctcggaattcggctcgagntcgagnngncngcangcngtcttnatnantnagcannangntcgntntnntnnacagnnatncannngggntngcnttcncgcagcagggtagncntatgcgggcaatgacatctgcgatcgaggtatctgtggatatgacantgcgnggngtaccggatantnccggcnnaancgangtgnnaggactcantnactnaaatncggannnctatntcnnntaangncccgtgncggccnn

SEQ ID NO: 64397 - DNA, 312 bp, Glycine max
  Clone ID: PAT_MRT3847_29162C.1
gttgtgtttcatgtttgctaagtataatggcaaaatgaacaggcctagcagtggaggggacctccaatcaatgggggctgaagcatcttgtaatcctccaatactccgtaggaatgcttcttcctcttcaaatattagtggccttgcttcgcaaacctatcctacaaattcagttcctctgaagcgcacaaccagctggtcttttgacgaaaagcttcttatacagtctctctataaaggtctggcttttgtgtcaaaaacctattccattgtgctatatttgcgggatgttgataggctcgtatataaatc

SEQ ID NO: 64398 - DNA, 398 bp, Glycine max
  Clone ID: PAT_MRT3847_29163C.1
agcagacgaccattatttccttttcttttttgtaatatgaaaccaagggggggctagttatacaggcaaatacaaaaacggctgagtgtccgatggaatgaggcttataatacacctatatgtgctatttcttcacatacatctgtgcacaataaagtatttggaactgcattgccctctaaacacaggtatcaaaacaccaacactataattattaaaagacattttttactcatactgtccaaacacagaaaattctacatttaaattggtgaaccctacatctaacacaagattgggaccacttacatactttgactcattacctgccaaatatagagcatcttttgccacattcctttggcacatgatgaacaccttttaagttgaaataaatt

SEQ ID NO: 64399 - DNA, 216 bp, Glycine max
  Clone ID: PAT_MRT3847_29164C.1
tcacttagaagaaggtctgctcaaatagtgtggaaggattggaacatcggcagtcatggtggagctatgtcagaggaaacgactataccgagattcttagaaggggtaattctgctcaactaattgagaatgtcatcaatacgactgatgatgacttatcagtcaggccatttgctcatcaacttgctaaacgggagctcatgtacgtcacggact

SEQ ID NO: 64400 - DNA, 454 bp, Glycine max
  Clone ID: PAT_MRT3847_29165C.1
atcgctgtcagaatactacagaacgggggtctagcgtgatgactgaatgaagatgcaactcattcttgttatatagaagatatgcgtgtgggttagatatatctgtcaactgaacaagccttgatgcgatgaaaactgtactggactaaactgctgcaagtacggcaaccgctactgagtctgaaacatgtacatagactggaactacactgagtcaaccatcacatataccttggtcaatgtagtgccacctgttaaagctcaaattcaggcttcatgaatggctctaccagatcagaacgatggctgcaaattgcgaccaaactgctcctgcatcccctgcacttgcaactaaggtgtttggagagcaagctctaatcagacatagcgcttaattaacaatcttgatagactattagtgcagatctaataacttatgtcataagtatcagat

SEQ ID NO: 64401 - DNA, 540 bp, Glycine max
  Clone ID: PAT_MRT3847_29166C.1
aattcggcaccagaatctagcattcattaggtatgaccaatcataaacttaatatacattgaaatagtaattgaaggtaacaaagtccttgactcctcgcaaaagttaaagttatctcaagtttttttattagttgtcatgaatggatacatgtcaaagcaaaaattgcatgtttgtatgtgtgtgtgtgtatggagcttggagccattattggattttgtaattatgactacagatgagagttgtgtggactggattccaggcttgaagaactttagactgaaggacctgcctgactttataaggacaacacagatcaaaataactatggtagaatgtttcattgaatcagcaaataatgtgcacagagcttctgctgttattattaatacttctgatgaacttgaaagtgatgtgttgaatgctcatacctctatggtcccctctctttaccctattggtcctttcccttcatttttaaatcaaagtccacagaagaaccacttggcatctctaggttccaatctttggaaggaagaa

SEQ ID NO: 64402 - DNA, 415 bp, Glycine max
  Clone ID: PAT_MRT3847_29167C.1
aaaaacagaaaaaggcaattaaattacattaaaaaaggcccgggtttaattcccggtgggtctaggttttgcaacccaatcaaaggggccgggacaagtttcccccaggggaagcgttcgttttgtaaaaaaccgcattcgggggggaaggggctccaaagggaccggaaaactttggggcgggggccttccaaatttcatttttggcaaaggggaatttcccagggcccggtaaatggttgacccgggaattggaaacctcataattctgagccacccccaaaatggggggtccaactcccggggggtgttacccggaaaggcggggcccaaaaattgggaattactggaaaagtaggcgcccgcgggccgaatggttattgaagccaagggggttctcaaacctccaaaagtt

SEQ ID NO: 64403 - DNA, 270 bp, Glycine max
  unsure (1)..(270): unsure at all n locations
  Clone ID: PAT_MRT3847_29168C.1
ccagnctggaaganatttttangtacagagctgnagctcnacaganagttaaggaganaaacnagagancaanacaancagcaacntggtaggggtgttcatgtggataagtttnaagagaagaccngattcagtgctganagcagaactcgagagaagtcacaagnnaggtngagggaagatgtngancaaagaggngacacnncgaagttgtccaagnggganngtanaggcngagaaagcagcnccatggnanacacaaaatggnag

SEQ ID NO: 64404 - DNA, 480 bp, Glycine max
  Clone ID: PAT_MRT3847_29169C.1
ggcataagctcgatttttccctcctcaaaatacaaaaacataacaaaacaaaaaaaaaaaaaaaaactacctttacctgggaccatcaaagaaacaaaaagcactatgtttatttgatttatctttggtcacacaataaaacaaccgttggcattctcatcactgaaaatttcgaagggtggagattgaaagcgataataaggagagtcatggtcgaagcctgcacacatgtagggcaatgatgaaacatagtaagaaggaccacccattgttcccatgggcatgggacataacctgttgttgttgcgagttgctaaatacaccacttggtgaggataacagtatgtttcaggatacacgtatgattgctgacgtgtagggctcaaattcatctgcccagaacactgcacctccgatccagtgtgcgcaggtgcatcaccacatgctgcactcactccaccgttttgacctttctttttt

SEQ ID NO: 64405 - DNA, 116 bp, Glycine max
  unsure (1)..(116): unsure at all n locations
  Clone ID: PAT_MRT3847_2916C.1
gcctggggcatcaactttgattacagtatcacttctttcgnngncacccctnactgtngagntngancgattagnantccagttcaaccaatctaatngtaattncgtcattacna

SEQ ID NO: 64406 - DNA, 925 bp, Glycine max
  Clone ID: PAT_MRT3847_29170C.1
gaggcgtcagattcacttggctcacacttcttcttcccttctaactctcatcccatactcctcttttccaaaggaaagtaacaccaaactaagcaaaactaataatgccatcaccaacaccaataccaacggcagtgtttggtggtgtagaaactcctaatggagactcttctaacaccaagcctcatcccaaacaagaatcgcgtgacctctctccttttttgtcttgctcttaccccatcactcttaagttcattgacgtggcataccgattgaagatagaggacaaacaaaaaaacggaggcagcatcaagagattttttactccgcacgaatcatcaccgtcagatcaaggatcaagggcgggagcgtcgcaggagcgaactattttaaagggagtaacggggatagcacatccaggggagatcttagcggtgctgggcccatcggggagcggaaaatcaacgctccttaacgcgctcgcagggagactccacggacacggtctcaccggaacaatcctcgcaaactcgagcaaactcaccaaaccggttctccggcgaaccggtttcgtcacacaggacgatattctctaccctcacttgacggttcgcgagacgctcgtgttctgcgccatgctacggctcccgcgcgcgctcctgcgctcggagaagatcgcggtggcggaggcggcgatcgcggagctagggctggggaagtgcgaggacaccataatcggaaacagcttcatccgcggagtctccggcggggagaggaagcgcgtgagcatcgcgcacgagatgctggtgaacccttccctcctcatactggacgagcctacctccggcttggactccacggcggcgcaccgcctcgtgctgacgctcggttcgctggcgaagaaaggaaaaacggtaattacatc

SEQ ID NO: 64407 - DNA, 212 bp, Glycine max
  Clone ID: PAT_MRT3847_29171C.1
aggatgcgcatttttattccttcaacaaagccaaactgatcaaagctgacacctgacacccacatttactattacaagaaattaaaacaacattaaattcctttttttaaggaaccaacgtacgctgaactttaattaaacaatatttttcacaatagtccatgggacttagagacttataaatgcctctaattaagggggggcgttttttt

SEQ ID NO: 64408 - DNA, 186 bp, Glycine max
  unsure (1)..(186): unsure at all n locations
  Clone ID: PAT_MRT3847_29172C.1
aagnngtcgcngnacgngttcggntctcgggntnggntnntnctttcatttgacaaggaacattgnnaggnaagtnccancantaatagtatctncgatgactanattcataantgacanataattgcagtaanttngtntnntatgcatgtagtcnccgtaganattcctagtgntgaaccttcc

SEQ ID NO: 64409 - DNA, 530 bp, Glycine max
  unsure (1)..(530): unsure at all n locations
  Clone ID: PAT_MRT3847_29173C.1
caaccggggaaaaaaaaaggggtcgcgttgtaacccgaaaccccaaaaaaaccccctggaaggaagggccccccccccttctattctcccccaataacccccaccaaggccttacctaaattaggcaacccccctggcccccctgtgatggtcagatttttgggcggggccttccttttttcccccccccagggggggcgggggggcccccaaccttgggggggggccccaaccccggcgccagcaaaagtactggggcccttaaaataccccccccccttccctgcccccgggaaagaataatttggtgcacccggacccgcaaaaacatttttgggggcccccacaaacatttggggggccccggaaactggcgggggttaaaaccctaatgaaagggaaaaaacctttgggaccccagccacaaactcctgcatgggggcccctccggaaggaacaaaaacctnggggccgagaactgcccccctgttcttaaaagaaaaccccccccccccataccgagagggcct

SEQ ID NO: 64410 - DNA, 857 bp, Glycine max
  unsure (1)..(857): unsure at all n locations
  Clone ID: PAT_MRT3847_29174C.1
atcattatgtgtcaacactcaatacatcactaaaagaatattcaaaaaaattacatcaaattgaaatctaaatcgtgtcaagttctaatttcctatacactatttccagcaccttttgatgtgcagctcaaaagaacttgaggaaatttttaaaaaaagcaattgataattccacatgtatttctctagggagaataattatataaacaaaaagtgtaaaagtaaaatcaacttgtgatcagcatgcattacaacttttcctacatgtaccataataatcaggagatccaatcatgaacacagggtttcgttgacattctcccacggctgcccaagcgggacaactgtcatcttcatcagtgcattcaccaccatctaatgtggctgagactttacctctactaattggttttgcatagaagtatttaattgcagaccacatatcaccctcaaggacagggcatctagcatggaagctactcttgtcaggagaagcactcgggtgaagagagaaaaacagaattgcattcccttttactggttggagaatgttgctgctattactacaacttgaccagctgctactcccgggcactgattcaggaaagagaatttgacccccttgagtagcagcatttgagagatatagaacaattgttgccattaaaggtccacttaattctaattgggttttgtttgtaaaataatctaagttccgaccattcggctcaggcccataatgcatgacctgcnnnggcttgctgtactcnnnnnnaaggnnngnncnnngtgaaagtctttcttcaattcttgcaagaatatcatcttcgatatccaannnnntttcaaccccctct

SEQ ID NO: 64411 - DNA, 258 bp, Glycine max
  Clone ID: PAT_MRT3847_29175C.1
atggctcgtctcgcgatcgcttacgacgacgagctccacgtggccctatacgacttcaccgcgactgctcgttcctgcaggacctttataatcatcttctactagttccgcaaccctaactacaacacctttgccaccatcaccgagatccgattcttcacccctatctacatcaccaacaaacccaccggaaaacccttcttctactacgaatcttattttctccacgcgactcatctactttagcccgagctgcgt

SEQ ID NO: 64412 - DNA, 356 bp, Glycine max
  Clone ID: PAT_MRT3847_29176C.1
aggggaaaagggttttttttaaatttttcccgggggagtccaatactgttaaagccctaaagaaaacagtgcgtttttccccccgattgcggggccccactggggggtgccccgcacaatcttttaaattgggttgaagggggaaacccccttcccaaaaaggatatggcaaacccttccccgggatttttgaaggggcttttaccagggtaatttgtctaaaaaccccaaaggcgggtgggttttctccttaaaaaacgggggaagaacgggggaatttaaaccctttaccagggggggcaccagaccatggtgggattttttttaggggggtaaaaaacaaagattcccaattt

SEQ ID NO: 64413 - DNA, 241 bp, Glycine max
  Clone ID: PAT_MRT3847_29177C.1
cccaagcatccggaggaagagcatgcacatgcttgagttctaaaaatgggaaaaggctactgcagggctgtctctgccgcatccttggctggcaacgagcttattctgggtgcatcaccccccatagtcagcagggtcagcatgaagaataccgttgcctagcgggccttctacaaaagcccatcgtgcgaaccattccgagtaccgtacttgagcgcattgtctgacgagcccccttcct

SEQ ID NO: 64414 - DNA, 243 bp, Glycine max
  Clone ID: PAT_MRT3847_29178C.1
cgcacaccacacccttcccaattctatttcatttgctggaccattctaataaagggcaactgccatctccaagggagtgaaatgaaatcattgctccattatagccattaacaacttaccttactacgtcaacaccttcgttccttataatcacattaatgtttccactggaccacaagtacataccatcatctaatggatacttcacttgagattctgattaaagcccatatattcatagcc

SEQ ID NO: 64415 - DNA, 269 bp, Glycine max
  Clone ID: PAT_MRT3847_29179C.1
tccaaagattctttcaattatacactacatactatttttcaataattcaataattggatattaacatttaatgatcttatgattcatcattcaatgtataaactgttaactaaagccttcatatcattaaatactctccttataaacccttcaccatgatatcattatcatcacctttgtttattctaataatgatttatgttataatctctttcattcaagttgattaattcaccccatattttctctctctcaaccatattcctctt

SEQ ID NO: 64416 - DNA, 335 bp, Glycine max
  Clone ID: PAT_MRT3847_2917C.1
acaacagttaattaactttgtttccatcagcccccaaagctggtaaacatttgggttttttaacaaaataaatcaggtagtcaactgtcaactgggaagtttcaaatcattttgggttttagtcaggaaaaattcatttaaaaatagtttaattgttttcaaaaacaggttgcccaactaaaaggggggggggacccatgtttttaaggtttttaaaaattccatgggttgaccgcccttcgtcttgttcataataggggttggctcggaagttggatattgccttttaattggaaaaacagcctggctttttaaaaaaaaattgttcccaaaaa

SEQ ID NO: 64417 - DNA, 806 bp, Glycine max
  Clone ID: PAT_MRT3847_29180C.1
atcttttacatgcaaaagaaaataaaaaaaaaaattaatatacagaaagatagagagagacataaccatgcatactccggagttccttacatccacaaacccaactcaaaaacaaataaactaaactagagttaccgaaaataacaacacaaaaattaaagaagaccataattctctctcaattataaataccaaaaaagaaattaacaaaaacgaatttggaagttcagtttgaaaccttaaattaacaaaagaagagaatcgaagtgatcaagattttgcatggacaacatctacactagcgccgcaagacaagaacctatgaaaaatcctaaacaaagcagcgcatgaaatttccctcattttcctccaaaccaaacacttccttctcctaatcccatgatgagaccttccctgcttcttcactctctccttaaccctcccaaaacatttctgggttttctccggcacactctctttcctcgaaaatttgtagcttcttaggtacatctgcctgcacgagatgctgtccaccaccctcggatgcccgccgcacatgtgcgaaccaccgccccttctcctcacaaactccgcgtccgattccggccacttgtagaggttcacgtacgtcgcacgtaccggcacgcgtgggtcacgtgcgtcgtttacacactttgataagcacacagaactcatcttattattctccttcaatttcaattcctctctagggtatgtatgtatgcaatacaactacgtaactatatgttttatattataaattgttattgtagaaatatatatga

SEQ ID NO: 64418 - DNA, 351 bp, Glycine max
  Clone ID: PAT_MRT3847_29181C.1
gctacatgtggtagtggacgtggtggtttaccttccggggcttggatcagatttgcagttaacaatcgctcctcagatatcaacacaaggattcgcacagcacttgggaaaggtaagaaaattgtttttcttactagagtcgatcctttcccagtagctttactggctgttctttttggtgtcaacaatgaaatcctgagttctaacgccactaaccctatgctgacgcgactttcttgagaactgtaagagtcttaaatatctggttgatgagctgccttctgcattcgtgaactactatgcgatactatattcacttaaacaaagcgcattactatgtgcaacgagtgt

SEQ ID NO: 64419 - DNA, 548 bp, Glycine max
  Clone ID: PAT_MRT3847_29182C.1
cccacgcgtccgggtaatactaacaaggagaaatcataataataattgtggtaaagtttctgcgagaagacgactgaagggggcagtgaaacatgggggactcaacttgtctcatgcaacaaccattctgttatgcttcagggatttccaatgaagccagtgagaacaacccaattcatgcacttgagcagtcaatttcgtttgggagattcatgtcagagtccctggcatgggagaagtggtccagcttctcccacaaccgctatgtcgaagaggcagagaggtactcaagacctggttcagtggcacagaagaaggctttctttgaagctcactacaagaaacttgctgctcagaaggcagctgcattgcttgaacaagcaaacaatgaggcacaaaacaattccactggacaagaagatgagggagtgattgacaatgacaatgacactcataatttacaaataagtccaaattctgaaatggttgtcaaggaagaacaagatgcaaaggtattgagtgttacctctgatgagcatgatgtcttg

SEQ ID NO: 64420 - DNA, 185 bp, Glycine max
  Clone ID: PAT_MRT3847_29183C.1
atttaagcctttcgataagtataccggggccattggggctagtgaatcagttgggcaaaagaacatacactacgagattcataaattggacgatggtgaaaatacaagaaaaattcccatggctatggatttaaactggatccaaaataaattgcgtcgacattgaggagcaaaaagacatttac

SEQ ID NO: 64421 - DNA, 1812 bp, Glycine max
  Clone ID: PAT_MRT3847_29184C.1
cggctgcgagaagacgacagaaaggggcagtgaaacatgggggactcaacttgtctcatgcaacaaccattctgttatgcttcagggatttccaatgaagccagtgaggctcaccttgaaaaaaactgtgaaacttgtgcgtttcagaacaacccaattcatgcacttgagcagtcaatttcgtttgggagattcatgtcagagtccctggcatgggagaagtggtccagcttctcccacaaccgctatgtcgaagaggcagagaggtactcaagacctggttcagtggcacagaagaaggctttctttgaagctcactacaagaaacttgctgctcagaaggcagctgcattgcttgaacaagcaaacaatgaggcacaaaacaattccactggacaagaagatgagggagtgattgacaatgacaatgacactcataatttacaaataagtccaaattctgaaatggttgtcaaggaagaacaagatgcaaaggtattgagtgttacctctgatgagcatgatgtcttggtcagactcacagccagtgagcatgattcaaactcaagtgtggaggcaagtgttacacctgaaagtaacaaggtagagggagctgaggcagtaatggaagaagtagcagttgtgggaagttcaatgaaggttgaattgcaaagccaccttgaagatgttggtgcacagaaggaggaaagtgaaaagcttagtgcaattgtaacacctccaattttgacaccaatagtgaaggtctccaaatctgatcaggaagttttggctagtgtgggcaagaagaaaccaccagtttcttcctttaagttgtcaaaggctaatggaacctcctacttaacctctacacctgttaagtccactgctgctatttctttcaaaagagataacattgctacaccaatgagcaataaacctgctaatgaaacctccaagttcactactacacctgttaagtccacagctgctatttctttcaaaagggataatattgttacaccaatgagcaatacccctgctaatggaacctccgtgttcaccactacacctgttaagtccacagctgctattactttcaaaagggataatattgttacaccaatgagcaataaacctgctaatggaacctccaagttcaccactacacctgttaagtccacagctgctatttctttcaaaagggataatattgttacaccaatgagcaataaacctgctaatggaacctccaagttcaccactacacctgttaagtccacagctgctatttctttcaaaagggataatattgttacaccaatgagcaataaacctgctaatggaacctccaagttcaccactacacctgttaagtccacagctgctatttctttcaaaaggaataatattgttacaccaatgagcaataagcctgctacattaagcactgcagataaaaagagatctactcctagatcagttaattttacacccattagagaacttaacagattgactgcttcagtcatgaggaaatttgaaagtacaagagctggtgctggttcttccaaggcttcaaaggataactcgactacactaagaactccaactatggcttccaaggagatgcaaaaccaatcttcattgaccccattaactgaaaagaaaaggaacaaaacacctcttgatttgtcatcagcaccagggaaccatacgggtggttctaaatggcgcttgctttctggagaaaatagaatgagatccccacttatatcatcccctttcagcttgaggccagaagaaagggctccc

SEQ ID NO: 64422 - DNA, 377 bp, Glycine max
  Clone ID: PAT_MRT3847_29185C.1
agcatgtggaaatttcgctgatgataccatgaattttgaggcttttccccacaagctgatgcacttgggagagattaaagacaaaaatgtattgaaattatcacaacaggaatttcttacagatcgatcaactcaagtgcgttctgcaacaactctgaaggatgatgggaggccatatttgtatacaatgcagcatgataggtaagtgtctacaataccacgagattttgtcattggtgtcaagttgacaaccataaacaatatgtgtgcatatggactcaatcctggtatttcaaggtctcgacttttgggcaccatacttcagtccatttcacagcaaactgtttgcaatcataatggcatcagcgagaacacca

SEQ ID NO: 64423 - DNA, 345 bp, Glycine max
  Clone ID: PAT_MRT3847_29186C.1
cgaaaataagtgtattcattatgtccttgcgaaaactgctctagtacatcttgctctctccagcgaagtagaagtcttgcccttatctctctaactgcaatcacatgacatcatcatccatggctgccttagtctgcactgaaggagctgtcaacagtgctctcgagaacctgaccgggtctggacctggggtttcagactccacagtcatcctttttatgggagcagcttgaagaaagttctagactcaaggctccccattccatagactccgctctggaagcttcaggattgcggctgccgaacagaacaaagacattgaagatacccacttgaacccacccg

SEQ ID NO: 64424 - DNA, 330 bp, Glycine max
  Clone ID: PAT_MRT3847_29187C.1
gcacgcgtacgaagaagcggctcgagtgaacacacatttacagctccaaaacctttatttcgaacggtcgatgctaaaaaaaggggtaaacctaaagggggggggggtcataaacagcggttgactgatgttaattacctcagacaactggaccaccctaatacatctaaaacaaacctttactgtaataagggagaaaactgggctatcttatttgactgtatgcctacatctacacagactataccttgctaaaacaattatgcacggatacacactcttacagcataaacgcagaattattacatgtgaccttttccaaccattatc

SEQ ID NO: 64425 - DNA, 667 bp, Glycine max
  Clone ID: PAT_MRT3847_29188C.1
acctgattctgattttcagttcagtttttttttcttttttaattattattatgactttgtctgttctttgaatcgtgtttgttagtgttggtgtgtattgttcgctgttctgctctgcccaagcctaagcctttggtttttgacccatctttgggtatatgtgcattgcagttttttgacccatcttcgatgcttactcgatttgattttctccctcctattcgcttattttcccccatctaattgaagtttctggaatttgtcttctcatttttttttttgattagttttgtttgttctggttccgatcacatcagtgctttctgttaacactcttttttgtgagtgtgcagtggagtattttggttgtttatgaacaaatccttcacggttctttcgatgggactttggtcatttttaattattgctggacttttttattttatttattatttccagataaaattataagttcactgaattggttccatgatattaggtttcctccagcaagaacacagtatccttaagtggatcttgtgtctaagggtgacttttcccagtcaacatcagagtaatgaatgatctttgcattgcctttgtcctcatgtaataatcctttacctagtacataatatattttgcctccctaaaataccctattgtt

SEQ ID NO: 64426 - DNA, 418 bp, Glycine max
  Clone ID: PAT_MRT3847_29189C.1
gagagagcagaacgtgaagcattgggaggtttgcccctatatcaaaataccttcatgaaatacttgatgcactcaaggaatggatcgttggtactttctttgcagtatttccctgccaaggttagatggtgaaccatttgaattcaagccaaggttttgaggagattgatagataattattctggcgagcgagcaatgtatcaaataattttagttctttttttcttttatacaaggattcagactgcaccttattatattgaattcacccgcaaaattgcaatcttcaaaaaaaaaaaaaaaaaaaaaaaaaaaaaaaaaaaaaaaaaaaaaaaaaaaaaaaaaaaattttttaaaaaaaaaaaaaaaaaccccccccaaaaaaaaaaaaaaaaaaaaaattaaaaggggggccccc

SEQ ID NO: 64427 - DNA, 326 bp, Glycine max
  Clone ID: PAT_MRT3847_2918C.1
aggtgagccctccaccaccttctctatctcttccttcaccataccattacacatcaccgccgactcctttcccagctcccgctcccaagtacatttacaaataacctgcacctgcattctacatatatgctcccccacctgcacctatatacaagtatgtattaattgcggaagcaccatacacgatataccatgtaccagtctttatccatgaatttacacaagcgctatttaaaataaattaaaacacctatccccctcacaaagtgctttgaataaaactctgaatgtgtcatcttttcactacaaaattggagattcttacc

SEQ ID NO: 64428 - DNA, 332 bp, Glycine max
  Clone ID: PAT_MRT3847_29190C.1
cccacgcgtccgcgccacacgtacgcatacgcctttttccaataccattgataaaagcaaattggggaagattcgctgcattggtgctggatatcctcttaacactactatggcagtgatcgctcttacatgcccattcatcgaagacgctaagggtgatatctctaaataccacattgcaggctagcacagcgaccagctccctatctatgaaccaggccttgatggtgctgtgaaccaatgcctagacaagaaccgtttcttcagcactgatgtctaaaagcatgtctttaaggctaacatacctgttagctttgtcaacaccccaacca

SEQ ID NO: 64429 - DNA, 268 bp, Glycine max
  Clone ID: PAT_MRT3847_29191C.1
gcggcctttttttttttttttttttttttgttttggacaggctaactggcaccaagagattcatgtactgcaactataagagcacagggcagctgaaggaagaagagcaaactcatgaattgacgtggctggattaagccgatgaggacaggctatgaggatgaattgattgctttacacaggcaccatatgacttgtgataggtgtaccaaaaatgacaaggcatgctaaactggccgcgcaagacataattgtgtagggcatgctc

SEQ ID NO: 64430 - DNA, 1499 bp, Glycine max
  unsure (1)..(1499): unsure at all n locations
  Clone ID: PAT_MRT3847_29192C.1
tacggctgcgagaagacgacagaaggggccactgatttctccttcatgtttgcacggttacaccgttataatacaagccttaatccccacttttgtctctcacaatcgctctcaatctttccagattttctcccaaactgnttaaacccggatcgcgtgtcaaattgttcttctgattttctcattgatcgcgattatcgcatctcaaatcgaacttgagtcactggtccgtgaaactgaatcaagagtgtatgccttttcggaaatggtgtttgtgggtcttgaaatcctgcaaagcgacgaaaggtgaatagcaccaatacgaagtccatttcattttgcagaaaacaacagggaaagaaatttctgaccctaaccgcgtgtcgttaaaatcctcaaacgcagagtagacatagaattatcaaaaagcggggaaagggagattgaattcgatcctgggacgttaacgttgtttcaattcaattgtggtcctgtcggtgccctatctcagacgacgatgtcatctttatatagaggggaatccaggaggtacaacaataaaccaagaggacgtcataatttgacaacgcagaagaagcaagagattaaggaagcctttgagttatttgatactgatggctcaggtactattgatgccaaggagctgaatgttgctatgagggcccttggatttgagatgacagaagagcaaatcaatcaaatgatagcagatgtggacaaggatggaagtggagcaattgattatgaagaatttgagtacatgatgacagccaaaataggagaaagggacactaaagaggagctcatgaaagctttccatattattgatcatgataaaaatggaaagatatccgcattagacatcaagcgcattgcaaaagagctaggtcaaaatttcactgacagagagattcaggagatggttgaggaagcagaccaagataatgatcgagaggttagtgcggaggagttcatcacgatgatgaacagaactcgcttccatcactagtcttatctatatgggggcagttgatatctttgtttggctgcactactagtataggaaaattaaaaataaaataaaaaactgaagctatgtactctttgctattgtaaaagttgtatgaatgattcctatctatgtttgggtattgcctatgaataaaattgatgtgtatgtccatattttggtttaattcgactcatttcatttacctgaacaaactctgcaacctgatgatgcgtgcaatgtggaaagccagtcaaatgatcaaatatctgcatcgaccagcatggaggatatctctcattcatcggaaaatggaatttctgatcttggggctgagaatactgcacctgctaaagaagtttggaaagctccaaaggccggagaaagggcgcaaaaagaaatcattgacttgtggaaggaaaatggtttttctagtctaattattgctgcaccagagttggatacttgg

SEQ ID NO: 64431 - DNA, 532 bp, Glycine max
  Clone ID: PAT_MRT3847_29193C.1
cacacacgtgcgatgttgacataagggctccgcttctcgatgaagacagatcgaactctagggagagctattcatgctttaggcctgtactgctacatgaacttattaacgaagacatccttgatcagtcaggcccatgggagaattaagccattgatggagattccttatactacaatcttcacagagctgttcatactctgagtgggggtccaaagcaaccggctgccaatgctggtgctctctctgaagatcggagagacccgctgtaggatgagctcacagcattcttagatgaagctgaccagggttgagctcatcacacactgttaggaactcagggggtacctctgcagaagctacctcattattgggcacccataggttgcgagagcgggagtctgctcatgttgccatctacatggaggatgggtagggagtcatgcatagacatggggctagcatctggcagtatattgaagccacgcaatctgcctatataaggcagaataactcttaggcaggtcttttg

SEQ ID NO: 64432 - DNA, 390 bp, Glycine max
  Clone ID: PAT_MRT3847_29194C.1
attttctttagtgcgattctacctccaccttctgggtggagtcttataaaactttgggagggataaaaaaaaagaagaaaaaaacaaaaacaaacacaaaaggattgaagcaccatggttttctcttctattccagtctattcagatcctcccaattggcagcagcaacaacaaaatcaacaccaagcaaatggaattaacagtcctcagctgctttcgccgctacctcagccgccacaggctcctcacgtgggggttgaagccggccaaacccggtccggtcctatggcggatcgggccaagattcctgcccaggaaggagttctgaagtgtcctctgtgtgaatccaccaacacaaagttttgctacttcaacaattacagcctctct

SEQ ID NO: 64433 - DNA, 611 bp, Glycine max
  Clone ID: PAT_MRT3847_29195C.1
gtccaaccaaccaaaataaaagttcatacattagatttccaaactattaagacctaacaaagtcttgtcagcacgtggaaagcattcgagatttagggttacagtttgtttggaagcgtttctggaggtagatttgacttttaagttactagcttttagcttgtgtatgttcttatagccattgccgaacatgagcttaatgacaacaaccttaaataaagaactgaataatgatgaaactgcaatatcagctgagacttgttcaatttaaaaacttttacccaacaatttaagggtgcattacatgtacctccctaaagatattccaatcaaaataaatgggggaatagaaacatccctgcataatgctcaaccacatcccaagaggccaaaaatcatgaaatactcgggtcagttaaagaatggctacttttttcttcactggtgcagggaggggtggcaaggtgctcatgtcaagccaggttgagatcagagcataacattacgacagttcttataggatccagattgtccacacctgttggatgcaggagagtctcttagtgacatgctactgttctatccgagtgaagatactgcttgctgatttg

SEQ ID NO: 64434 - DNA, 644 bp, Glycine max
  Clone ID: PAT_MRT3847_29196C.1
ggaaaactacgaaatatagttattttgttgtaaaagaatgatagtggcttctttactatttttgagatttgtcaaataaaaaagaatctagaattgtgtatgagaatgacccattagtcaaacttgtgatattaaaggtaaaagataaattatcttattatattgatggggaatgaccatatgaaattaaacatgcaatttcttatttagttaaatattttattttttgagctgattaatttttttcttaaataaactacttttttttattgaatattgaagtacctatttatgcctatatgattgtttgattagtttccattatcatattgaagtagttaatttaacttcctttttaataaagtggagggtaatggaaaagctttttgtgtcggtggtcatgtggtatcaatggttacgtctttagttggaggtacaacttgtccaaaccagcaaaaatccctacacttgaacaattgaattaaatagggtcccaaatacttgttagattttcttttatatagttatcttttctgcatatagttgtaggtatatgtaaagttagttgttttttataatgattatatatattcatgtaatcaaaattatttatttaattttttacctagttgcaggtattcctg

SEQ ID NO: 64435 - DNA, 366 bp, Glycine max
  Clone ID: PAT_MRT3847_29197C.1
acgtactgctgcgagaagacgacaggagggggaggcggtggtgctgttattcgcccccgtagacgcgcattttacggacaccggcgagctttcaacgtggcgcgaggcgccggcctttcgcaacggaagagaatgccggaaccgtgcgcggagcgacttgcggatccacatcgacatgacgctggacacaacctaccttccatggtccacctgcggagagttctccggcctgcgggacgcatgatgtacggagaacattgtgagccactttatggagaccacgcgccaaaccacggagatgcttcacatcattaccgcgacgttccacggcttcgccatatgcctgaaccaattcgacgcgaacct

SEQ ID NO: 64436 - DNA, 357 bp, Glycine max
  Clone ID: PAT_MRT3847_29198C.1
gaagaggccagagctgtcataaatacaatttttacatgtggctcggataatcattctccaggctccgccaacgcacggaggcggcatacgcgcccactctgcttctgaggcgatttcgctgtattccaacgaacgttgccagacaccgacaacgacaacccaaccctaacaaacaagctggtgtcccgagccccaacctacaagatgctaaacaagacactgagagagtattcctgtattgcccctgtcctatacatcgaagaccgtcgtactttgtcagaatcccaggccatcaacgttgtggcggcagctcatgccgacttcgtgcacgtgatccatctcgaaaatgaccaacct

SEQ ID NO: 64437 - DNA, 304 bp, Glycine max
  Clone ID: PAT_MRT3847_29199C.1
attaaatctttttttccattttaggaaatcatgggatagggggactgaataaatgacaacattggggtttaaccatatgtgacagatcttcgtaaattttatacattgagcgagaatgaaacctttaacaacggaatctctcacctgccttaaatagaagggtaggccgaatcaggttgacatgaactttgtaatgtgctcatcttcaaccttgggggaatcaatttacagattacccttttggtcccttgataaaaatgcggagtatgcgaatgaccaatatgctagagacacaattatcact

SEQ ID NO: 64438 - DNA, 2395 bp, Glycine max
  unsure (1)..(2395): unsure at all n locations
  Clone ID: PAT_MRT3847_2919C.1
ctgattggaactagaaagtagaagctgaaaagagaagaggttgcgaccaactttgcaatcgcacctcgaatcaatcgacactcagcggaaaccctagaaagtagaaactgaaataataataataataataataaaaataatagaatgcgaatttgggcggaactagaaagtagaagctgaaaagagaagaggttgcgaccaactttgcaatcgcacctcgaatcaatcgacactcagcggaaacccgagaaagtagaaactgaaataataataatattaataataaaaatgatagaatgcgaatttagagattgtgcaaatggcgaagcattcggtggcaatggcgaagaagcggtggccgataatgttggcggcattcttgtccgtctcaataggaactgtgagtttaatgagatccaacaactccgattcctgcaacacgaaccactttcccggtccgagggatgtgcgccggcactcccgtcactattgtacctctccaccctccccctcctcactctttggaaattgtaaattctacagggcaaactataatgtgcttgtgtttgtgaattgtataccaccatatctttcctcgtttccgccccctccggtatgcatgtggtcgatgctcgggctcatgatctcgcaacctttggacctcgctcaagtaactctcttgctcatggaactagcgtttctgctacgctccgccggatccgacgtcgtttggatcaccaatcagaaacctcctcaacccgacgatgtggtcatctacactttggagaacaaaatgctcgacagaggagtgcaggtggtggatgcgagaggtgcatgggcttccgatggggctcgggtggctgcccgggtggcgtgggcttctgctctggctgggatgtggctcgctcctcccctttgtggcaggggcccggagggtctcccatacgtctgctgggggctgcatgaattgcgcgggcgtgcgttgagagattaaaatgcctgaaacttttgttgtacatcttggaaatagcaaggagcttatggaagttgcagaagatagtgtggcaaagagagttcttcgtgagcatgttcgggaatctcttggagtgggctcgagtgatctactttttgccatcataaatagtgtttctcgtggtaaagggcaggatctatttcttcgctccttttatgaaagtttgcaactcattcaggagaagaaactccagttgccatttttgcatgctgtgatagtagggagtgatatgaatgctcagacaaagtttgaaatggaacttcgcaaatttgttgttgagaaaaagattcagaatcgtgttcactttgttaacaaaaccctggctgtggctccttacctggctgctattgatgttcttgttcaaaattctcaggcacggggagaatgttttggaaggataaccattgaagcaatggcatttcggctgcctgtactgggaactgcagctggaggcacgatggagattgtggtgaatgggacaaccggtttgctgcatcctgtcgggaaagaaggcgtgacacctctcgccaagaacattgtgaaattggcaagtcatgttgagaagaggctaacaatgggaaagaaagggtatgaaagagtgaaggagagatttctggagccccatatgtcgcagagaattgcattggttttgaaggaagttttacagaaggctaagcaatagccattaaattaaccaggttaggtacttccctgttaaattgtatatttattccacaggaaaaagagaatgatttggtgagaatgaattgtatatccaatgtcctttatcccatacaggaatgcgagcaagtttgccccccttttaaaaaaaaaaaaaattattagttgaaatggatgtaaaactcgataaataaagtggctatcactctatttggcaagtttaacataaatttcaactaataataattgtgttttctaaaaaaaaaagggcttagagtatgtttacaatagtgcattgctaatatttctttgtatccattgagatgagacacaattactttccatgtatcggggcgcttcttgttttgtttgccaggagcatcnntacaaagatatgtaccgtttgctgtatgcaattgggtgatatgtctgatgtcgctatgattatttttgaatttgcgttcaagctggtgcaatttggagagattcaggaaaaagttgtattgaaattttcacaagaggaatttcttacagcttggtcaactaaagtgcgtactgcaacacctctgttggctgatgggtgtccatatttgtatgctctggcgcgtgatagttcagtgtctacatttccatttgatggtgtcattggtgttaaggcgacaaccatgaacaatatgtgtg

SEQ ID NO: 64439 - DNA, 535 bp, Glycine max
  Clone ID: PAT_MRT3847_291C.1
gaaaattgctggacccctctcaatgattccttggcatatatataccgtgatgatccttttcttaaggttagttcccaagtttcaaagaatttggattcatagttctccttgatcagatatcagggccgcgtaattttttttgtttttttgcgtacttgaggacactacattacacagacaatagtagttagcatcagagataagcatgtaacataaaccatgtgcctggggtataagctttattaaggatatacttcttagagagattttaaagtaaatttatctttaaaggtaggatagaagccaccccaatttcccaacacagtcatttcttaatctatattcaagggattcggttactctaacgtgagtaatttcagtggttaatgagaaaatcaattattgacattatagatattaggtgcacgtgaataataatagattacgaatgttttaaaataccatcgattgattgaaattacttatcttagcattgctcctttacaagagccaaattcaattcagagattcaaat

SEQ ID NO: 64440 - DNA, 495 bp, Glycine max
  Clone ID: PAT_MRT3847_29200C.1
cggcccgcacatacctagggttctaaaaaggttcagctatcactaccttgcaaatattaacgtaacccatgcttctgttcactcactcccagcccaacactgatctatttggaactattctacgactgcggctatacctgtactcaatttgataaattagggcaatgactaatgaccataaaagacacaatccccggctgaacatagatgaggacatcaatggggatcctgttgaaaggacagtgctggagctatactatgagaaagctacccgagactgcagaaaactttcatgcattatgtgcaggaaaaaaaagtatcagaccccatactgtaaaatcacagcactacaacggttatttcttccatcaaaatataaaacgtttcattgtgcaaggtggagacattgtcaattgaaacggaactgctgtataaatcatgtatggtgcgaagataccagataactgacctatgctaaagcttgatgctaccaca

SEQ ID NO: 64441 - DNA, 239 bp, Glycine max
  unsure (1)..(239): unsure at all n locations
  Clone ID: PAT_MRT3847_29201C.1
tgtttcatcgatgggtngcacagttgttgctgaagtacccacaaagaggggaaggggcagaagggccctgaaggagaaaacccatcaacgaacgatgctaacatcatcatagccacaccaatttcgccatcatccgaaaaggcggcacaagtngttccctcanaganaaaacaagattcanagangcagcaatcttgngtnttctttgaggggcaacnagattgctgcttcttgaaaag

SEQ ID NO: 64442 - DNA, 287 bp, Glycine max
  Clone ID: PAT_MRT3847_29202C.1
aaaaaacaaacaattttttatttttttacaaaagcatatgggggatataaacaattttcttgctttctctctttttggttctatccttggccattctatcattatgggtattggggggaaaaaaattaatgggaaaaagggtaattaacaagggggacccactttgcacttaaacagggtgccaaaatagcgggtaagccctcctacaaaaattcctaccttaggggggggcatgtttttttttgagaaagggctggttgccccctcagggccaaattggacaaaaa

SEQ ID NO: 64443 - DNA, 399 bp, Glycine max
  Clone ID: PAT_MRT3847_29203C.1
attgagtgggtttggggtgtctttttcgcttaaaaaaatacctttactaattcagaatatgagcagcggcgctggaaaggttggagcgcggcacccccgcttccggttacaaagcaaccagggggggaaaaaacccccccatctctgttacaccgaaaaggacaccgttcgcgacacacgtgggccgaaaaaaagggaccatttgaaaggccccaaaaaagagggggagaggctgaacctctacaaggcgaaactacccccccaaggaaacaaaaactctgtcgtttaaggccgccatgcaggggagaacactgcttcggggaagcaccacaaccccaaggcccccggggggggggggaaacccccacctttctacggggcgggaaaagggcccaaagg

SEQ ID NO: 64444 - DNA, 373 bp, Glycine max
  Clone ID: PAT_MRT3847_29204C.1
ctcgagccggagagagtgcaataaaagcccaagagtggagagtcaatcaaactcgttgctctcggactcagcttcattcaatccggtgaacaatctaatcgaatctcgaatcctcttactttccctcttcaatttcaactcacattcctctacttcaatctcaatctcaaaccagctgcatcagaataaaaacctagaatttcaccatgaaaaccagaaaagaaaagaaatgaacattgacaagagcagcaccgacaacctcgttagcatcattagaaagctgggccatcttggcattcttcttgatgttcctctccatatactagatcggatacttccttattttccgcacactaaccctcaagatccgacc

SEQ ID NO: 64445 - DNA, 211 bp, Glycine max
  Clone ID: PAT_MRT3847_29205C.1
ttcccttgccgctgccattaatggctgctccggcgtaatccacctcgcatgtcctaacatcatcggtcatgtctaagatcctgagaagcagatactggagccggcgataaaaggatcaattaatgtgttgaatgctgcgatggaagcggtggtgaagctcatgatggcgacttaattcgtctcatacataatacctagccctaactggcca

SEQ ID NO: 64446 - DNA, 131 bp, Glycine max
  Clone ID: PAT_MRT3847_29206C.1
ccactggaaatgacacacacaagggctgccaccaaactgaaagtaattcggccgctctacaggatccaatcttacttacgcgtgcatgctacgtcacagcccttcgatagtgtcacctagattcaaatcaa

SEQ ID NO: 64447 - DNA, 185 bp, Glycine max
  Clone ID: PAT_MRT3847_29207C.1
attataccatgtgtttttacctactcattcttttgtttttctctctatcaacccaatgccagactgacctattgaaggtatataaagcgaaattaacgtataaaatcatgcttcttatcctaaaagcccaaccccaatgttttttacttcttccaatctcccataacaaccttttatagtattcc

SEQ ID NO: 64448 - DNA, 753 bp, Glycine max
  Clone ID: PAT_MRT3847_29208C.1
acaatgaattgttcgaagaagtacactattacgcgccacgcctccggccagcagaaacggtgccgttctgctcattaatgtcctcctcgtcctgctccgcctgctccctggcgaggatctccgcgagatgctccagcgcgtccttcgccctcttcctggccacggcggcctccctggcgcgacgttccgcatcgaaccgtgccacggcggccgccttgctcatggacacggcagcgatccgggcagcagtgacgagcaccttggcggactggacgtcgacggctccggtcttgcggtcggggagtttgaagtaggtgaagttagaatcgagacaagtagggcagaagaacggtggtgctggcgcgggtgcagcggaggggttggtggaggggaacgcacaggaacggtgtgcgacggcggggcagcggacgcacatgaggcggtggtggggagggaggggcgagtcgtcgtggagttcgaagcagagagggcagaagaggccagggtgctgcttgaggacgcagttggtgcagtggcggcaggtgtgggcgcggtggcggatgttgtggatggtcagagatagggtttgggtggcgccgcagatgtcacagggcgacagagaggattgccgtgagttcatggcggaggaagagagagcctccgtacgtacgtggctggcgagtggttccaacggtaaccctagaaattcaagagaacgagaaagagagaaatgggctggggccgaataggtgg

SEQ ID NO: 64449 - DNA, 423 bp, Glycine max
  Clone ID: PAT_MRT3847_29209C.1
ttttgatcataggttgccggaccttaaaaccggaaacaaatgcaagggttacttgatttcaagaatctgttaatttttttctactttgttgagtacgatttcttaagggaaagaaaatgactctctgtgctggccacagacttagtgaatcattgtcttttacattgttagcttatttgatgaacactctcctatttgatataggacttcgtgtcagagataaacttcttttgtgtattttttagttctctgtataatttgaagttaactctggtgaaattttggattagtgcttccactctaatatttggtataggactttgtgggtagacgattctatatgtttactttattggagtttatttttatgacagacccgtattgacgtgcaaagtggtcttattttaaaaacacttgggcgat

SEQ ID NO: 64450 - DNA, 484 bp, Glycine max
  Clone ID: PAT_MRT3847_2920C.1
accgggtccggaaattcccgggtgcgacccacgccgtccgaactctttatgcgctcttgtcattatgctaagggaacgaacgtaacgaggaataactatcgggccatgggacctgtgctcttggcttctgaaccagtcagaacagcagccttcatgcagtatgaaaagggcatgaggctgggtactaaaaggccgtgagaagcatgaggtgaaagggacctcggcttattggatactgcatgataagaaaactcttgctactcggcatatgatacctgcgcatgaaatatcctgatatgttgactggacctattacacatcggtggtcaaagttcgatgcttaaggaccacgaggcgacgactcacattgagatgaactgggcgagaaactcatggcagctacatcatcgatctgatttaatgggaaatcctgcgaaggatggccaaacgcagaacctagggggagctgctgctcttgcctcat

SEQ ID NO: 64451 - DNA, 187 bp, Glycine max
  Clone ID: PAT_MRT3847_29210C.1
ccttctcgttcggctactcgttattgcacgcttggggtctgtgtgaggtcaggccaaatgaccttgtggtcatacccaatagcactatcaactgaatcacctgaaagaccgtatatgtttatgcttgtatggccctgggtagctaacagcatgcttcattcgatctgtgattaaaccataattggtg

SEQ ID NO: 64452 - DNA, 131 bp, Glycine max
  Clone ID: PAT_MRT3847_29211C.1
ttgatatatagaaaatcgaataatgcattatggtcactgattccataagtaccttacaatccctgatcatgcgggagtatggaatgtgcaggaggtagtgaatatggttcttttctttaagtttttttttc

SEQ ID NO: 64453 - DNA, 644 bp, Glycine max
  Clone ID: PAT_MRT3847_29212C.1
ttttttttttttttttttttttttttttttttttttttttttttttttttttttttttttttttttttttttttttttttttttttttttttttttttttttcccacaaaaaaaaggggaaaatttttccccttaggggaaaaaaaaaaaagggggggggccccccggcactttttctttttttaaaccccccaggttttggcaataaacaaccccgaggcccccccagggttccccccaaaaaggaaaagggcccctggcttttgaaaaatgggcctttacaaccaaccccgggggggccccaaaaatttggccccgccaaaagggcttaaccccgggggccttttggggggcccttttcccccacccctttggccccaaaaaaccccccccccaaggggcctttggggcccaatcccaaacccaggtccccgggaaagggggactttttttttttaaggggccggggccccaaaaacccccttttttgcccccgggggggggggaaaaagggggggcccccccctaagggaaagggggggggctcaaaaaaacccaaaaaatgggccttccccctttggacccaatttttaaagcccccccccggttccctttaagggaacaaagggccccccctggggcgg

SEQ ID NO: 64454 - DNA, 462 bp, Glycine max
  Clone ID: PAT_MRT3847_29213C.1
acgacttttccttcgattttttagatagttccacaagaccatagaaaacttctagcatccaggggcttgtattgacctgacgcagacgaaaagcgggatcgcaatcggttttgcatttaccgcaaacaggaggagtcctgtggcgttcggatcaatcgcacggcgccaagcttaccgttgtcgtttgggtgctggtggcgcacgaggcccctcgtcgaattgcacattgacgaaacacaatggcgaggcaatttcgaagaacaaatggtttgcacggtccccatacgacgggtcagatcagcgcatggattgccctgttggcaaccttggtgcaatttttgctcgtcgtttctccaatactgtcgttggaagctttcatccctgttacagttgtctttgtgggcctcgtgagtggttccttttactacggataccttgcgcagttcattgattcaatggaca

SEQ ID NO: 64455 - DNA, 502 bp, Glycine max
  Clone ID: PAT_MRT3847_29214C.1
ttccacgcgtccggtttgctcttcgattgttggccatattttgtttgatgagattcgatttctcgagtgttttcacccattttaacccatagtttcactgtcatgaaaattggacatcggaccccgccgaggcagaaaagagccactgaccctcccccacagttcgattcttccgatttgggctctccgcaaaaggtttggtcactgttatgcgagaaggacgagaaattgcgccgagatccgcacgtattttcgcgccagaagaaaataaacgccaaaatgcgtgccatgctgctcgactggctgatggacgtctgtgccgacaaacagctccaccgcgaaactttccatctttgcatcgattacatcgaccgtttcatcgcattgagtgaccaccaaatgcagccccagcgattgcaactgttcggctccaccgccctggtaattgcgagcaaagtcgaggaaatttatcctccgaaaattgcggagattgccgaataca

SEQ ID NO: 64456 - DNA, 251 bp, Glycine max
  Clone ID: PAT_MRT3847_29215C.1
atcaaaatctcattaaaagcttgacttgtttcaatatattttttttcaaatacatggacctggaaaacctagtctggccggacccatacctaaaaaggtatggtatctggcaattattgtcttttatattgaaaaccatcttttggaggggcaaagggcgggggatgtttattttttggttactgcaggggaggcaatttaggattagggggatttaatcattttaaatcatacatatttaattttctttt

SEQ ID NO: 64457 - DNA, 831 bp, Glycine max
  Clone ID: PAT_MRT3847_29216C.1
ctagcttgcatgcctgcagcttataagtatccattcagttgataagtatcaaattaaatacttcaatttaaaacagcggtgtataatgaagtatctttttgaggaaaccaacataactatttaattataaattaaacttgtaacatataaatacttttatctagctattctttaaaaaatctaataaataaaattttaagtgaatttatatctacatgagtttcacgcagataataatataaaacgaactatgataaatatttatataattaaaatccataatttttttagttacaattaatttttttcagttaaaaattaggctctcttttattaatctttcatttaactatatcaaaaaaacaaatagttataccatcatctataaaataacgtatagaatgaattataaggtcttttttttttctgatttgaaatataagttcttgtcaaataatatgatacttttctctatcaaaacttcaaaaaagtcaagtatatagatgctgataaattaagatccacttacattaaaaataaatttgatcaaattaattcatttaataactttttgtgaataacgaatcctatcaatcatacgagattgatttttaaagtttacacaatcaaatttaacaaattttaaaactatacttaacgagtctgtgtgtgtgtgttttggatcaaaatgctttttataacgaatgtttttgtaaaaattagcacgaaatcgataagcatcgcatattttttagtttcaactattcaattatctattttctctctccattatcttactcttaattggtcatttcgtctttcattactttt

SEQ ID NO: 64458 - DNA, 271 bp, Glycine max
  Clone ID: PAT_MRT3847_29217C.1
cgcatgccattcggatcatcatagttcatggtattgctgctcttgctgtttatagcacagttggcacttatatagaaatcgctgcgagaagaataaaggcctcctttaaatgaagctctaacttattgagctggccgtcactatacatttgatgattcaactaactacacgcgaactgaacttattctatattggcagatggcaatgaatccactttataagtctgacacatgggtataagagaatttttatatattgacacggataaatt

SEQ ID NO: 64459 - DNA, 349 bp, Glycine max
  Clone ID: PAT_MRT3847_29218C.1
tgctttactgttgcagacctgctatgatgaaagaagtgactttcctccctgaaatacaagacacactaaacctatcagcacaaactttgcatgaagaagaaatgtgcatttaatgcaagcattaaatgttccaatggcctcaagacttcagatgaataataaagggaagaattgaaccattgggagaaaacaaataccttaaagaagaaagttataaataaaagaagctttgaagaagcaagacataaatcatcctgtgtaaatatattttttcattcattcttgtaaagcttcatgaaatccttgtatagatacctaagctctcaaacaccttgtaaaccttgagaga

SEQ ID NO: 64460 - DNA, 801 bp, Glycine max
  Clone ID: PAT_MRT3847_29219C.1
ccacgcgtccgcaagacagtaggcggcgccgttttgaagtaaggttgtgtttgcttgcgttgcgaagcctgttgtgtcactattgaaacttgaatcccctcttcaacgccgtggtgagagtctcagtcgccgctatgttccgcagaatcttgtcccatcatcgcacactctcagcctgcgcccacaatgcaacaacacgctctctggccactcgccgccacgcccccaatgtccctccacccccttccttcctaatcccacgatcaaggcccctttcttccaaaacatcccaatccaacgaagccgctgaaagctccaataaggccaaaaaggacgtggcaaacgttgaagatccctttagtgcccctacctataacattccggagaagcctgtgacgtttgtggagggagcgtcctacagtgttgtcattcttgcgggactcggaatcgctgctgctgccggatatgctgttttcaaagagcttatttttcaacctaaggagtacaagatctataacaaggctctcaaaagaattcaggatgatggtcaggtacgggtgaggattggatttccaattactggttatggtcaggagagtagaaaccgagctgctcgccaaagaattcctcacagggtatggactgatgaggaaggtgttgagcatgtggaggttaatttttatcgatgcaagcgcaagagtctataacaaggctctcagacgagttcatgatgatggtcaggtacgggtgaggattgatttccaattactggctatggtcaggagagttgaatcgagctgc

SEQ ID NO: 64461 - DNA, 1856 bp, Glycine max
  Clone ID: PAT_MRT3847_2921C.1
tcatagtttgaaaacactggtttgaatttgattttgacatcattgatcctgaactaataatgcataccataaaacagcaaattattatttagctgcaaagttgcttacttatttccatgcgcaacgttttttactttctagtctgagatgcgccccacatgggcgtacggctggccgaacaagctagaggaggaagagagaaagaaataaagaattggcgtgagtcgctcgtaagtttgtgatggcggcctcttcttcctctctctccgtctccgacgactcctcttctcaccgtcgcaggcgtcaccagcgccatcgccgataccgtgataaggactccctcaagattcaaaagaagagaaagccacaatcccaatcccgcggagaacctcgctatacgtatcaccgccactcttccgattccgattcctattcttcatcttccctctctgattactccagaagtgaaagttcttctgatagtgagcataaaacatctcgccgaacaaagaggaataaaaaggatgaaaggccaaagaaggataaaaaataggattgaaacaaaagaaaacaaaggaagataaggtagctgaaagcaagagaaatggactgctgatttttttaaatgctagtttttattagatttgatatggtacaacaaaatctgccaagaaactaaaaatttacttacgtgggtggataaattattttttcattataataaccgggcagccttcaatttccttgcggaagaggagggggataccattatataatgtttacaattgtaagacatatgtggttctcaatcagtggatttctcttttacggaatatgttatgagcttttgtacaatgaggagtttttgacccaacagattccatacatggtattttgagattgggcaatcattgtgttatgtgccaagactttttttttttcttgtgtttatttgggcacatgtgactgtaattattaaatatttgttcccttctttttttcacttccctataacattctgaaatagcttatgatactttctgcctattttgtgtattggctctttgaaattggagctgggatctgtgacatgtttgggcgcttgattgacttgcttggatgttgtttcttggtggggtttgtcctggcaatgggagctttatatagaagcagcatgatgagaggagcagcagccctgtgcagctttccaagtttttagggcgtgacaaagatgacggtgtccgtcgcagtgctgtatctggcaagaagattcttctgaaacttgagaaaacaaaggaagataaagtggctgaaagcaagagaaacgaactgctgaactttttaaatgctagttttgattagcattgagaaggtatggatttgatagaagggtacaacaaaatctgggaaggaccacatttacttacacaggtgcagaaattatttttccgttataagaaccgggcagcctaccatttccttggggaaggggagtgggatatcataatattgtgcttaccattgaaagacatgtatggttctcgatcagtggatttctcttttatgaaatttgttatgagcttttgtaggatgaggagttcttgacccaactgattccatacatggtattttgagattgggcaatcattgtgttatgtgccaagatatttttttcttgtgttgatttgggcacatgtgactgaattattaaaaaatttgttcccttcttggtttccccccgataattgttcttaaaaataggtttggattgaattgattcaacctaaagatcttaggttcaattcttgtccattgtccttcattgatatatcatttgtaagtacaaatataattcc

SEQ ID NO: 64462 - DNA, 432 bp, Glycine max
  Clone ID: PAT_MRT3847_29220C.1
cgcttacgcacgcttgcaatagctctcaagggaagtggagtctgtggcatgccctgagttaacctgtattggatctgctgacggcgctgctgtggaggtctatgtgtactactaaaattgctacgctgctgctgtgactgcatgccatgcagtagctgcctcaattgaattgccaacaaggactgcggctggcttatacatcgaagcattctgacgcttatgaccatgatagcttgcgatatcaaggtgcggaaggatcgcataaggcatacaatgcaagcctgtgctaaggtccggtggccgacagtgtcagctagacactgtcgctaccattgcgaaatgacctgcaatggcgattacccatgctgatcgcagggaagcctatgtggttgatgtacaaagttatgctggagaccatgttggtattgatgc

SEQ ID NO: 64463 - DNA, 261 bp, Glycine max
  Clone ID: PAT_MRT3847_29221C.1
cgtcctttttttttttttttttttttcaacgcttggcgacggggggagggaatctggttgtttctcttccattttttcaattaagatcggtttttagaaaaaacattttttcacaaaaaaaaaaacgtccgatttttttccattttttaatttcccctttccttgtccggtggttagtggcaacataaaattcacgttccccaggtgggccaagagttgctctaaccacaaaggctaatggccaaaaagccttttagccct

SEQ ID NO: 64464 - DNA, 350 bp, Glycine max
  Clone ID: PAT_MRT3847_29222C.1
agtcttttttggtgttttattatggggtttgggaggatgaaggtggggaataataataataaggggccaactgaggagaagaaggagcggctgtagccactgcaatggaggggaatggtcctcgggagagtaatagagatgactgtgttgttggtggtagcggttgcaccagcggtggcaactggggttgtggtggccaccattaagcatgatggtagttgttcatgagtcactgaggcatagatggaactatgaaaacaccaatggttaatggtagaatgctaaaaaattacactatttctactcctaataaaatactataaaaagactagagaaaaactataaagaga

SEQ ID NO: 64465 - DNA, 290 bp, Glycine max
  Clone ID: PAT_MRT3847_29223C.1
ccccggccgccttttttttttattttaaaaaaaaatctttataaaaatatgggggaggaaaattttgagcctgggtggaacaactaacaatttccggcttatcacacctccaatgcgttcccaggtataatccactaccatcatcacgtgaaacgctttgctgatttgcactatagttcctacaactttgacatattttaccccttaactgcaagtaaaggcgcaaaattcttaaacaaaagaacctagaagcggcatggaccaaaaaacatgttgataatcttgtaaac

SEQ ID NO: 64466 - DNA, 168 bp, Glycine max
  Clone ID: PAT_MRT3847_29224C.1
ggaaaaccggcggacgacgcgtccagttgcattgaacgaacggatgttgcataccactaataggaatacacaaacccaatggagggctactattgacctgatatacgtacctgatcattttgttgtagaatttataagtgttcccaaaagacaaagggattgctactt

SEQ ID NO: 64467 - DNA, 435 bp, Glycine max
  Clone ID: PAT_MRT3847_29225C.1
aggcttgaagggccgtcaaccaacccttccggttgaaatacaattttttttttttgcagggttccacattttcaacatacacaagaaaggaatgtaaagaagtgcctaggcctcctgttttatagtttggtttggttataaatcttcatcttctttggaatctgcctaagagttatggcaactgatgatgagaaactaagactaccaatgttaagagttgtgaacagatgtgtgtacagcacaaccaaggcagccgtgattggcctcacaaaatctgtggctgcagatttcatccagcagggcatcaggtgcaactgtgtgtgcccaggaacagttgatacgccatctctacaagaaagaatacaagccagaggaaatcctgaagaggcacggaatgatttcctgaagagacaaaagacgggaagattcgcaact

SEQ ID NO: 64468 - DNA, 458 bp, Glycine max
  Clone ID: PAT_MRT3847_29226C.1
gtgaattctctacggggatatatcatcacatgcattccgccaccaaacttttccagtcattatcgtaactcgtctgatgatgcaaagaaaccgtgaaaaggcctttatagccatgaactccgaagaccgcctaaaagaagaagtctatgctcgaaagaagaaagacaaagaagaagactcaggggagcgatccgcttagtcaacctcctcaacggtggggccgtcgtcgccgccagcgccgggggcagcgcctccgggagcgccaccgggcataccgccgggcatgccaccctcaccaccagctccatagaacttcatcatgatggggttggcaacggcctcaagctccttctgctgagactcgtactcgtccttggtggcggtctggttgtcgtccaaccaggtaacggtcttgtcgatctcggccttgagcttctccttgtcaccagcatcaagct

SEQ ID NO: 64469 - DNA, 272 bp, Glycine max
  unsure (1)..(272): unsure at all n locations
  Clone ID: PAT_MRT3847_29227C.1
aacttntgctacttcctactccaaccgcacttntgntccgcanttatcngngcacggtcacgatcgngcatcaanggtttggaagcattgccagtatggtagacagcagtgcctctgcagcagacnacgatgttgaactcagttgccgttaacgaccctttcatcaccacngnttacatgacntacatgnttaaatacgncagtgttctggncactggaagnatcacgatgtcaccgttnaagacgagnngacncttctcntcggngcnaag

SEQ ID NO: 64470 - DNA, 428 bp, Glycine max
  Clone ID: PAT_MRT3847_29228C.1
ctgcttgggggggggggggggggcaaatgggggaaagcaccgactaggggagcatgacaaaccaacgaactacgcgcctaggagtaaaaaaaccggaaaggcaaccaaaagccccacgttaggatatatgctgatgagtacgattaggtgtgctacctgatttgggaatgaagcttccgtgtaggcccacccagctggttgggtaataacgccggcagcagcagggtacccaaacccaaacacaaggaaaaagaaaaaaatgaccacagaagtaatgggggaaccaaccgccagctacatggccggcggaaccagttcggtgaagatgagaacccaacctctgccactgatgcagtgtgggagccgtagcggtagtgcaggtagcagtagcgcgaaggttgagggtgcttggccaggaccaagtaagt

SEQ ID NO: 64471 - DNA, 419 bp, Glycine max
  Clone ID: PAT_MRT3847_29229C.1
tgctgcctcttgcacagggtgccgcaccttatggggggtttctttagccatcggggcttgattccaagaatctgtcaatttcttcctacttgtttgtgttcgatttcttaagggaaagaaaatgactctctgtgctggccacagacttcgtgaatcattctcttttgcactcttggtttatttgctgaacactctcctatttgatataggacttcgggtcagactgaaacttctcctgcctctctctcagtgctctggttaacaccaagtgacaagctggcgaaatcttggattagagctcccactctcctatctggtctcagactccgtggggagactcttctatggttgtcctttctttcactctctttttgtaactgatccgcattggcggtcaaagcggtcccattagaaaacac

SEQ ID NO: 64472 - DNA, 1300 bp, Glycine max
  Clone ID: PAT_MRT3847_2922C.1
gctggacatactgagctttgacgtcgtctctctgcagttggacggagtcggctcggcttgaatgtttgtgagctcggatctatctgaatggggcaagcgctgtcgcgaattcaccgtatgattgtttcgagcagtgtaaaagagaaaaagaaaaacacagcaatctcgcgagttcaacctttagccatggctagcaattgttcaatagaaggaccactagtggaggagttcacttaccaagcaggatcagctcccttcaagagttgtcatgcttctaccattgttgaggttgataaggatcattttttggttgcctattttgggggtacattcgagggggcacctgatgtgaaaatatgggtgcagacttacaagaatggaagatggcaagcacctgtaattgctgatgaagaaccaaatgttcctatgtggaaccctgcactgttcaaacttccatcagatgagctacttctgttctataaaataggccaagaagttcaaaagtggagtggattcatgaaacgctcatatgataaaggcaaaacttggacaggaagagaacagcttcctcctggtatattaggacctataaagaataagcccattttgctagaaaatggtgatttactatgtggatcatccgttgaaagctggaactctgggggtgcctgggtggaggtaacaacagattttggtaggtcatggagcaagtatggcccaatttacattgaaaataaacctctgagtgtgattcaaccagtaccttatcagactgcaaatgggaaactacgtgttttgcttagatcctggcctcggaaggatttacatgtcagaatcctttgatggtggcaaaagttgggggtatgcaaagcctacacaactccccaacccaaactcaggtattgatggggttaaactgaaagatggccgtctattgcttgcttataatacaatttcaaggggtgtgcttaaacttgccctctctgaggatgatggtgattcctggcatgaggcacttacattggaggatacattgggaatggaattctcatatcctgctgttattcaagcaagtgatgggcgagtacatgtcacttatacatataaaaggacacaaattaagcacgttgttgttaggccaaggcgatgcaaatctacttgtttctgataggcaggcagagataacattaatgtctgcaatatgtatggcctttttgtatcagcagttacagataaataacgcaatgactatggcccacctgtaagcacatgagcaaggactaaaagcatgagtattctt

SEQ ID NO: 64473 - DNA, 478 bp, Glycine max
  Clone ID: PAT_MRT3847_29230C.1
tcgtcggctgcgagaagacgacagaagggggtgcgagtgtttgatggtgtgactcggtctcctgctcttgttgttctgtggctgtgtgtgtgtgttctctcacctgaaaacgtctagctgcggtggtaactggggatccggaagctcctgcacgtgcggcaacggctgcacaggctgcaagatgtacccagactcgagctacactgcgtcaaccaccaccccaacctcggtcatgggagcggcacctggtaacgctcaattggtgggtgctgaaatgcgtgtgcccgctgacaacgatggctccaaatgtggaccaaactgctactgcgacccctgcatccgcaagctaggtggtgagagagcaagctacaagcctagatagcccttaatcccgtataatgataaactattaatgtgtagctgaaaacttaagaactaaggctgtgatggttttcagggcactctggcgctctgggct

SEQ ID NO: 64474 - DNA, 791 bp, Glycine max
  Clone ID: PAT_MRT3847_29231C.1
cggaattcccgggtcgaccacgcggcggaaaaccagctttgctggaccactactaagcactctacaacacaatcttgcttgcttttctctttttactttgattatttgaacacatgtacttgctttactttaaagaacgagtagaactttttgctttgattgtttaatttggatggggattggggctgtggtgtgggggtgggggatggtatgggatggggtgggggatgtggtttgagctggggtatggggggtggatgggaatggggaggaggggtggggggggcaggggggggggggtggaccggcgggggaggaggggggggggggggggggggtgggaggggggggggggggaggaggggggggaggggggggagggggggggagggggggggggggggggcggcggggggaggggggggggggggggcgagagagtggggggggagggggggggaggaggcgcgcggacgggcgagggggggagggggagggggggggggggggggcggcggaaggacgggagggcgaaggggggggagggggaggacggggggggaggggggggggaaggacagcggggggtgcgaggggagggagggagtgagggaggagagggaggaggggcgcggggggggggaagggaagggtagaggggagagaaaagaggggggcggggggggggcgagcgagaaagggggggagggtggggaaaatggggggggggagaggagggggaagggcggggaggggggggacgggggggggaggcggcagagggaggaggg

SEQ ID NO: 64475 - DNA, 401 bp, Glycine max
  Clone ID: PAT_MRT3847_29232C.1
tcacgtgcgcccattcttgcgggactacgcaggcgttgttccggattatacaaggttcatattgacaccattgattagtcgtgccgaatggctgcgggccgtaaatattgttcacgagatgaggcctcctgacggctagttctataaggacgtgtcaggaaatacatggacgatgttattgggaagcaccgttgctgatgcgagcctgagcccttgatcaatggtgcatatctgatttcattgtgttaacccttgtgcttcccgagacacaagccacctgaacctaccattgatggcaggacactggccaaacattatctctcgggtaggatgtccgctgagctagtgttcgatggatgctctgcagaacagtgtgaaaggcaggtcagggacaggaaccc

SEQ ID NO: 64476 - DNA, 805 bp, Glycine max
  Clone ID: PAT_MRT3847_29233C.1
cccaggatccgagatgtggaaacatttgccgaatctacatacgccgaagcctagaaataaaaaatttaaattaaatattattgctccatccggaattaatttcccacctaccttgggataagtggttgccggaagcttgagacttgaatggtaatgacttgaacacccgattctggtattaatataacttaataagttcatcccgtgaggtaatctatacccgtgctataaggaatataaaaacggacttgtatttttcttttataggatactggaaatgagactacagtaagagtccgggtgtaagctcaagtagtggtagctccgtgaataacaaactctatatttaattcctacccactaagtcaaggagtccagtctgagtagctggatcatcgaaagacttccattagtgaatcgttatagcattttgtatcgatagcgcttctttttgaggagattccgtctttggtccatgcttgcgatctcggttgtgaaattaaaattatcttttggcttggtaatggttttctttttctttagggaatgaatgttgttcctttgtttcatcgcatagaagttttgttttgcccaagtctgaagatagagcgtcgtaaaaaaagaattaattacttaaaggaatgagctctcacaggttgagttttttcggccatattttgcgtataaaaaaaatagcgtatagagaagtccgtcctttcttttgttaaacaggctggctgtgacttcggctcccttacaaaaaaaaaaaaaaaaaaaaaaaccaaaaagcggccgctctagagga

SEQ ID NO: 64477 - DNA, 402 bp, Glycine max
  Clone ID: PAT_MRT3847_29234C.1
ccggaagaaaatcccaaccattgaagtttaccatggaaccctgccctggacgcaaattattccttttacaaaaaccaccattttaccttaatccattaaaatattcttccagggaacccaaatgcctttgtccttggcgttaaggacctaaaagagggaggtcccaatccaatctaaggtttttaaaagaaccatttaagcctgtccttccaccttttaatttttggttaacccaaccgtggcaataaattatattggtttccttaaggtccctttccggaagaaccacattttcttattaaaactttagttatttaaattccattaccatttaaccttggtgttggacaagggttcttcccttcctttttttccattcattaacgacaagcctttttccga

SEQ ID NO: 64478 - DNA, 699 bp, Glycine max
  Clone ID: PAT_MRT3847_29235C.1
gggaaaataaacgaaggagaacatggtttcctttagtattgatagacatggtgaacaagtttggaattccatgcaagaaaatgaagcagctaatgaagaagggagtagtaaaatcggggggtaatagagttaattagaagatgcggagggaagatgaacgggatagttattgatggagtcatcccaggggttgccacgccagtcctttaagaatggcatgtccctaacggccttccagacggcgctgttacacttgaaacccgacccgaaggcgatctgccagacccgatcccccttggagacccgacccttggcctccgtgtaggccagctcgtaccagagggagctgctggaagtgttaccgaatctgtgcagggtcatcctggagggctccatgtgccactcgctcagctcaagattcttctgcagctcgtccagcaccgctctccccccggcgtgtatgcaaaaatgctccaaggccagcttgaaatccggaatgtatggcttcacccccgacatcttcagcaccttccccctcaccagcgacaccaagaacatcacctgctccgaatatggcagaaccaacggccccaaggtcgttatgtttgttttcaacgcccccttctgtcgtcttctcaactccctcgccaaacacacccctattttcccgctctggtcctccttttggtatacgcagtt

SEQ ID NO: 64479 - DNA, 425 bp, Glycine max
  unsure (1)..(425): unsure at all n locations
  Clone ID: PAT_MRT3847_29236C.1
acgagatttgattcagtttccatggctagcctcaaggttgcatttttggctgcagtgctctgcatggttgtggtgagtgcacccatggcacatgcagctatcacatacagacaagtaacaaataacctaatcaattacatcaattacctccagaacaaaagaacaccaccatcaaaatactacaacgaagtaaaaagcctcaataccaccaccaagaccaccaccaaccaccagacagcatacaactgcctcaagtcgaccaccagccaaatctccaacttcaaagccaacaacaccacctcgctccccaacaaataccaagtctccatcccctacaagatcagcacctccaccaactacactaccatcaaagtttgaaaagaaantcataaacgcaagaaaccaaaaactactcactagtatat

SEQ ID NO: 64480 - DNA, 520 bp, Glycine max
  Clone ID: PAT_MRT3847_29237C.1
aataaatcattttccccccccccaaaaaaggaaaccccccctcccccaccccaaacgtaaaaaccccccgcccgaccccccccaaaaatttaacgccgggaaaaaccccgggccaaaaaatccgagggggcgaaacacacaagaacagggaaccaaaaaaaaaaaaaaaaaaaaacaaagaccaaaggaaaaaaaccaacaaaaaaaaaaaaaaccaaaaaaaaaaaaacaacattaaaaaaaaaaacaaaaaaaaaaaccttttttaaaaagaaagcaaaaaggaaacaaaccttgcaaaattgggggaagagggggggaccttttaagcacaaaggcgaaaaaggcctcccaccttggaaaagccttggaaaaaccaaaccttttttgaaccaaatttttaaaaaaagacttctggaaagccccctaaaggtaaaccaaaaaggggggggaaacccccaaatcctaaaaaaaaaagggttcaacaaaaggcgccttaaaaaacagagtttcagggggc

SEQ ID NO: 64481 - DNA, 245 bp, Glycine max
  Clone ID: PAT_MRT3847_29238C.1
ctttaaaatttgaatcaaaacgttcagtaactgctggtaatcgattaccattcttgtgtaatcgattacacagtgtaaagtttgaattcaaatttctaatagctgttataagtcattttggccattggtaatcgattacatcctctggtaatcgattacgagagagtaaatctcttgaaaaagacatttttacttaaatttcttggccaaaccttttgcagtttcaatttgggattcccttccta

SEQ ID NO: 64482 - DNA, 351 bp, Glycine max
  Clone ID: PAT_MRT3847_29239C.1
tgttgagaagcgtcagatgaccaaggctgtagcaatattggatgaaatgaatgtggcaggtgttggaccaaatgaacacacatatacaactcttatgcaaggttatgcttcactgggtgacactgaaaaggcctttcagtactttacagtgttgaggaatgagggcctggagattgatgtttatacttacgaagcgttattgaagtcatgttgcaaatcaggcagaatgcagagtgcccttgcagtcacaaaagaaatgagtgcaaaaaatattccaagaaacacttttgtctataacatactattaccactccccaccaccttctcctaagaagccctacaagtacccat

SEQ ID NO: 64483 - DNA, 445 bp, Glycine max
  Clone ID: PAT_MRT3847_2923C.1
ggctcgagcgaccgtggctgtatcagtgaggaactctaggctgttatgctgctacaaattcccagccaacacaacttcatagataattataggccacaagcgcgctctggctgcatggctgaatgcatccatacctgttgatgcacttgataaagccctcgaacacccaggtggagtcacacacagaaagctgttaatggagctaaaagtccgagatgctgatactggcaaaggttgagcaaagatgcaccgcaagaccagtgaagggatacaccagggagctgaaggacaccagagaggacctagattgagctgctgccggtgcttgaacaacatgctgacatggaccttggacggggaaggcagactatgaaaaacgtacgagactgccgcgagctgttgatctgtgtgaaaagcacaggggactgctcgcacttttagagac

SEQ ID NO: 64484 - DNA, 758 bp, Glycine max
  Clone ID: PAT_MRT3847_29240C.1
agaaaaactcacaaaccagatagagagaatctaatcagaacagagttctgttccttactctctgattcccgaagaactcaacgatccaatcgcaaccggaagcaatcgatcagtgagtcaattgcatccggcaaggagaacaataatgacctcggagttagaaatttctccggcggacactcgcaaggctcccggcaaggagcaccaagccgccggcgtcggaatcctcctgcagatcatgatgctggtcttgtccttcgtcctcggccacgtcctccgccgcaagaaagtttacatcatccccgaagccagtgcttctcttctcatagggttaattgttggcatactagcaaacatttcagacactgaaactagtatcagggcgtggttcaattttcacgaggagtttttcttcctgttcctgctacctcctatcatattccagtctgggttcagtctagcgcctaaaccctttttctcaaattttggagcaattgtcacgtttgctatatttggtaccttcatagcttcaattgtaacgggtatcttggtttatcttggtggcttgctctttctgatgtataggctaccttttgtcgagtgcctgatgtttggtgctcttatatcagctactgatcctgttactgttttgtccatatttcaggaactgggcacagatgtcaatctatatgccttggtttttggagaatctgttttgaatgatgccatggcaatttctttgtacaggacaatgtcat

SEQ ID NO: 64485 - DNA, 189 bp, Glycine max
  Clone ID: PAT_MRT3847_29241C.1
aaaaacatgtgtttaccggtgtcaatcattacatacaacacccacccggaatttatggcctcctacacaaacctcccaaaagctaaagtctggtaaatcatgacggggaaaaaaccttgatgtcttacaaatgtcatttgatgctagactcccggaagaacaaatgcccattggttatgcatgctcaat

SEQ ID NO: 64486 - DNA, 1057 bp, Glycine max
  Clone ID: PAT_MRT3847_29242C.1
tatatcatttatcctaaagtacttcttaaactaattaaactatattagtctataaagtattacaaatcatgctacatagttttacacctttgaataagactaacaattatccgggaagtattataccatttatcctaaaatactaattaaactatattagtctttaaagtattacaaatcatgctacatagtttctcaagtattgaaaaattcttcaaattagtctctcaatgctagtaaaatatatcaatccagagactaacttaaggaacattcaatactttaagaactacttgtataatttataatttaattaatttaaggactatttgggagactacattgatagtttattcaaatacctatcaagcaatctcttggctatataacaccggctaaacaaataaggacgatatagattagagtctgaaactaattatctgatgtaactgtttcacggtcaaggtccaccttagaccacttactaatacgattacgggctataattacctgctcatcccaattagttttgtaggtgattatagttaggactattgtttgaatcagtgtcccaaacaacattccaatccaaatacccttgacttgcaagtgaataatgttaccaagcactattccaactggaatacctatgaggtaataacaccctatgttcacatatgctacaatgctttgccaccctgctccaacagccacccctattgaaatcatataatttcatgtcgttcagactgtaaaaacaatagggttcaaatcttaaactattaaaagttctttaaaccaagacaccaagatttataaagcatacctgagagtacaggttgaatactgtttagtaacaaagaaactgctaacaaaggtgacaaatcccccacagcagtagccacatcttcgtttgaagtaaagagataagctactttttctcttaaaaataagaaaagaacaaataaaataaaaccaattgaaaaggatgtaagcactgtcacaactatagagaactttgcatcttttgagcttcctcttccaagttcatttgcca

SEQ ID NO: 64487 - DNA, 1062 bp, Glycine max
  Clone ID: PAT_MRT3847_29243C.1
agcaactacttatataattttattaatttaagaaatatttgagagagaatatactgataggatggtactatagtataataactatcaagcaatcccctgaatgtataacgtacaatagccaaacaaacaatgatgatattgataaataggagtctgaaactaattatctgatgtacttgtttcatgatcaagttccaccttataccacttactaatacgattacgggctatagttacctgctcatcccaattagttttgtaggtgattatagttaggactatagtttgaactagtgtcccaaacaacattccaatccaaatacccttgacttccaagtgaataatgttaccaagtactattccaactggaatacctatgaggtaataacaccctatgttcacatacgctacagtgctctgccaccctgctccaacagccacccctgagagtacaggttgaatactatttagtaacaaagaaagcgctaacaaaggtgacaaatcccccacagcagtaaccacatcttcgtttgaagtaaaaagataagctattttttctcttaaaaataaaaaaagaacaaataagataaacccaattacaaatgatgtaagcactgatacaactatagaaaactttgcagcttgtgagcttcctcttccaagttcatttgccactctaacacttgctgcagccatgaaaccaagtgctatcatcatttcccatccattgatgttaatacatatagagagagcattgatttcaacctcagcatttttcatgttaccagtcaaaagaatcaataccgtgttgtaccagagctcaagacataacatggcaccagatgaaagggaaagcttgacaacaggcccaagatctttgaatgctaaaaatgagaaacctttccatgtttcatcgcaccaaccacacgtaataaatattaattgaccaatattaggaatccagaatgccaaaattgttgaaatcattgcaccaggaatcccaaacttgaattgtatagtcaatagccaagaaagaaacacatgaatgattataaataaggc

SEQ ID NO: 64488 - DNA, 261 bp, Glycine max
  Clone ID: PAT_MRT3847_29244C.1
ttggagaataaaataaaaaaagggcgatggtttctgtaaaaggctaaaacactctggtacacttaaatacctatctgactcagatataaaaaaacacattaacgtccggcctttgtataggtaccaatttatcttcccccggttgctaagcgtatactttttttatcgggtcacccaaattacattacctgcccatccttttataacttcacgatggggaaaaccccggtcttccccaacataatcgcctaggaatacatc

SEQ ID NO: 64489 - DNA, 1765 bp, Glycine max
  Clone ID: PAT_MRT3847_29245C.1
ttcagagactaaatcaatgcatattcaatactttaaggactactcatatagtttgattagtctaaggactacttaaaagagagtgatactttatctaatgtacaacactgggcaaacaaataatgaggatataaataggaatctgaaactaattatctgatgtagttgtttcatgatcagattccactttagaccacttattaatacgactacgggctataattacctgctcatcccaattagttttgtaggtgattatagttaggactatagtttgaattagtgtcccaaacaacattccaatccaaatacccttgacttgcaaatgaataatgttaccaagcactattccaaccgggatacctatgaggtaataacatcctatgttcacatatgctacagtgctctgccagcctgctccaacagccactcctgagagtacaggttgaatactatttagtaacaaagaaacagctaacagaggtgacaaatcccccacagcagtagccacgtcttcgttggaagtaaagagataagctactttttctcttaaaaacaaaaaaagaagaaataagataaacccaattacaaaggatgtaagcactgtcacaactatagagaactttgcagctttggagcttcctcttccaagttcatttgccactctaacacttgctgcagccatgaaaccaaatgctatcatcatttcccatccattgatgttaatacatatagatagagcatcaatttgaacctcggcgtttttcatgttaccagtcaaaagaatcaatattgtgctgtaccagaactcaagacataacatggcaccagatgaaatggaaagcttggcaacaggccaaagatctttgaatgctaaaacagagaaacctttccatgtttcagggcaccaaccacatgtaataaatattagttgaccaatattcggaatccagtatgccaaaattgttgaaatcattgccccaggaatcccatacttgaattgcattgtgaatagccaagagagggacacatgaatgattattgataaagctgccaaaaatgaaataatgacattcttgctttgagattgaaggaatgtctggcagttgtttgagacaatataagcaaataagataggaattgaccaaagagaaatggttcctgccacttgtcctatgctctcatcttggcctaagagcatcaaaattgggcttgtgaagatcaacaggggaagaagacagattgcagttaagaataaaactatcgatgatctttgaagatacactcccatcatgtcatattcttttgcaccgtatgcttgtccacaaagtgttgacaacgcacttgccattcctaacagaataccattggcaaagcgtatgatgacagtgaacacaagggcataggcagcgagttcccttgaaccaatatgaccaataaatgcttggcttataacattgatgccaaaggttgtgaaccttgtgaatatggctggtgctgccactatccacatcaccttgctctcttcccacaccctcttcaccaatgataatttctcttcttcttcttcttcttctgattttttttctctgctcaacagcttcttctctagattcccctccattttttgtgtcttatgtcgttgttggggactcttaagatcgatcagagacttaacagttcacaagggagtttggggctgatattaaaacagaaaataaaaaaaagaatgagtatatatcttatcgttgctcttgcatgagag

SEQ ID NO: 64490 - DNA, 444 bp, Glycine max
  Clone ID: PAT_MRT3847_29246C.1
cgcaggagacccaatttattgacgcaccctcaggtcgaactgatcccgacaaaaccgtcttagcccttggccgaggcaataacgaaggatcagctgtaagccgctccaggcaagccgtagacgagggatgcaagagcgtgggtttcgacagttctcgcggattccagactgtttccaccgttggcgatgggaatggtaacttcgtctccactgcgcaagccgagtgcacctgagcattgtggtcagtcaaggagcagcaagccaacagctgtacttcactgtcctccctctttgtgggcgagcgggactctttcttaacgaccatggacgagcggaaatctcactcttcttaacggcctgaagacatacacgatccttgaataactacgtgattcaccttagtctacactacgttcctagataattatatgccccgtgatcgtt

SEQ ID NO: 64491 - DNA, 301 bp, Glycine max
  unsure (1)..(301): unsure at all n locations
  Clone ID: PAT_MRT3847_29247C.1
acaagaggaagggcttactttacaggacaacccaggagcggcccacaacaacacagnaggcagaagggggcccacacccgcacgccaaggagcacgagaggccagcggccacaacaccaggggagaccgacaaaggggagaagcagacaaccacaaacaagaagagcgcagaggggcacaaccccggcatcccaggcgcacgacggacgggcaccaaaccgaaacccaacngacagcaaacngccnggaaccaaanggcaacagngagaacaccacggaagancgaaacaagcaagcagag

SEQ ID NO: 64492 - DNA, 178 bp, Glycine max
  Clone ID: PAT_MRT3847_29248C.1
gaccctcgtaacttcgtgggacaaataggggaggggcaggtcaagcttccttcactctcttttattctttatgccgacctgccagaaatcaaaatggtcctaaaaaactgtgctgttacatctgtaatttagtacctggatcaccctatcaatgttatgtatcaaatcttcgattcct

SEQ ID NO: 64493 - DNA, 508 bp, Glycine max
  Clone ID: PAT_MRT3847_29249C.1
cccagcgatcgatcaagttgaataatgaaagatagtagtcctcttggaatgggaatattggaaactagtatagaaaattggggattaaaaaaaaaaaaaaggtttttatcattattcaggcttagggggggggattttgctttcttggagcgccttttggggggccgtatttttaaaccaaatacaaccccgggggaagttaagccccaggttgggggggccttttcccaggccgatcccaaaatgggccaaaggggataagccctttttcttaagggggggaaaggggtaaccgaaaaaatcctttttccttaggaatgagctggggttgaatttgggcaagttccccctccggttggaaagcaaacccgggatgggccctgaaagggggtttttggacccatcaaaagcggagaggggaacgaccaggcccaattgttgggggatgggcccagtaaataaattatccgggggggccataattttgaggtaggcccccattgggggc

SEQ ID NO: 64494 - DNA, 341 bp, Glycine max
  Clone ID: PAT_MRT3847_2924C.1
cggctgcgagaagacgacacaaaggaggtcatttgttgtaaatttgtcttttagaccaaaatggatggattagggaatattgaaagaggcagggggggactctttactaatggatttactaaaaatgaacgaatcaactacatatagactattttctcttgctcctaaaaaatattctattttacttatattggcattagttgctcattttgacctttttttctataaaataaatttcaaaacaacatttcttaattatgatctaaaggaggaggggttttttaaaacaccgcttaaaattttttttttttaaaataagaaaattattttgcacccttaat

SEQ ID NO: 64495 - DNA, 501 bp, Glycine max
  Clone ID: PAT_MRT3847_29250C.1
cgggattcggctcgactcgagccgaatcggctcgaggctgttgttgttgtttatgatctccgattttattttttggcgaactgaacatgcctatctaagtcataacaaactgatcacagaaaataggaatgaccaaatgaattgtaattctcattgtccagaaaaagatatcacttatatggaaagattccctgagctaggatgcatccatgatagctatatgtactgctaaaattacaggaaaaataactgataggtagtcattcagttatgttgaactggctgcgtagtcatttcgttataatgagctggttaatcattttttttatcagcaaatgttagtttcttagcaaacgagatcgaacctgcgacttttcccctcttcccttcttccttcaccatccaactcaccttatatctccttgggtaatcatgttttagattgtgtaacactatatgctggtgcttcccctcaattcttccgttttgttggggagattc

SEQ ID NO: 64496 - DNA, 297 bp, Glycine max
  Clone ID: PAT_MRT3847_29251C.1
ttttaataaataccataatttatggaactaaaatataatgcagatccataacacgacacaagtgacattgcatactgtgcgagtgtccaaatagactgaaaccacctttaaactgaacatagcatgaatcagactgacaatacctaatcccctgcatctcataatgctccaatatcctgaagcactagttaataacgccaaagttatccattgtggacctatgatctatccagaccatactaatgattgggccagttgacaatttaagccccatcagaaccagaacaacactgggtt

SEQ ID NO: 64497 - DNA, 259 bp, Glycine max
  Clone ID: PAT_MRT3847_29252C.1
atacttgatcgacttgaccaagctgtatcgaacatgatgacacgggaaattgcattgctgatcatacaacctgaatatgctcatgctccatctgagtcctctcaggaattcgctagtgtacctcctaattccactatctactacgcccctgtgatacttgcctgggtcaaagataaagcatcgtgggatctgaatacacgagatgaggttgaggctagtcggaagcaataggaagcacggtatgccgcttgtaaggtta

SEQ ID NO: 64498 - DNA, 220 bp, Glycine max
  Clone ID: PAT_MRT3847_29253C.1
acatgaagctgtctgtatggagttcatattggcctttattttgttggacgaacatctgggtgatatgacttatttttgaggaaactattttggttttgtggatcttgcactctttccattctacacttgcttctaagtctatgagactttttgtagccttatcattgagaatgagtgccccatgtttgttgcttgggcctagaggtgcctacagaaagag

SEQ ID NO: 64499 - DNA, 265 bp, Glycine max
  Clone ID: PAT_MRT3847_29254C.1
ctatggccaagctagttttgtcgctattgttttctgcttatcagtagctgctgcttcgctttcagatccagagagtagcctacagtcaaacgagtgccagatctacaaactcaatgacctcaaaccgtataaccgtatagagtcagaaggacggctcattgagacatggaacgctaactacaagccattccagtgtgccgttgatgcactatctcgctgcacgctcaaccgcttcgcacttcgtagacgttcttacaggaatggt

SEQ ID NO: 64500 - DNA, 204 bp, Glycine max
  Clone ID: PAT_MRT3847_29255C.1
tatgtttttacggctgcgagaagaccacagaggggggggtactattagagagcctattccatccgcgacaaaggctgcgccatacccatggggctcgattaggttctcccttttacccaaattatgcagtcattttcagcgttctactatccacttacacttgagtaaatgaatcatgtgatgagaaaaaaactgcatcaattt

SEQ ID NO: 64501 - DNA, 186 bp, Glycine max
  Clone ID: PAT_MRT3847_29256C.1
aacattaacttcttcgtttttttttttacgaaacaaaaattaaagattgcgcttggagctttctaaaagggttatcaaaaaacaaaacctcaaattattcattcaattgatacatttcaatcttccatctacacataattcacccatattaaaccccaatctttaaaaaacttctaactttatcct

SEQ ID NO: 64502 - DNA, 311 bp, Glycine max
  Clone ID: PAT_MRT3847_29257C.1
gactgatctgctaagactagcttaaggctctccgacctaataactccaatgagctgcctctacaagtagtcgacatgcgacgtcaatattctgatcaaatacttctgagtgtaccttttcattgaatcattagcattactcacttaataaagctatcgtttagatgtttcaccatcaagatatactctgtaatctgatgatggttaatcactatactgttacaaaagctgattactttctgtcagttccatatagatgtacatcaaaatgcctatagactaacagttagttacagagcacagctgttacac

SEQ ID NO: 64503 - DNA, 415 bp, Glycine max
  Clone ID: PAT_MRT3847_29258C.1
gcgtccgtagaagacgacagaagggcccaattgtgtttatatgtgcattataagcatacttgcattttaaaaccttgaatgatatcttgaataatggggatcgtcaaattccatacttgtgttcggaaatggaatcattgtgcttacgtgaggctctaagattctaataagatccgccatttttttaaattaaaaaccacgccatgcttgccacgtctgattttgtattatagaaagccaaaaaattaaaaagtgaaagacgcactcactcactcttggattgtcgctgctgttagttgcaactgcggttgatgtttgtgatgtcatcatcttctgtctttttccaacttaaaggataaataattgggtcacataatctccttatgggaatttgggggttaggatttacgacact

SEQ ID NO: 64504 - DNA, 250 bp, Glycine max
  Clone ID: PAT_MRT3847_29259C.1
ctttgcttgatttggagaagtttttgctcttaaatgggatcaaccttaacctctccgataccacccagaaggtgatcgcagagtacatatggatcggtggatcaggaatggacctgaggagcaaagcaaggactcttccaggaccagttagcgaccctttatagctttccaagcggaactattatggtttcagcacaggttaagctttctggtgaagacagtgaagtgattttattcccacaagccattt

SEQ ID NO: 64505 - DNA, 590 bp, Glycine max
  unsure (1)..(590): unsure at all n locations
  Clone ID: PAT_MRT3847_2925C.1
gctacaccgttaggatctctagttcatgcgactatcgagattttgtacgtacgatgcccgctgtttttgtttctcgtctttggcaacatgtactgtcacgtgatttgtgaatggatcatcccaaccgccagtgtatggctcatattaaatgaccttcgcgacgatgcatagacctgctggcataccttatggttatagatcgatctccttttgcataacatatccggtatgtatagtaagcaaacaatgattactgataacgtgctgtacagtgctnagaatctgagatgggctctttgagacggtgaaaagagatttaaagcccccattactgcaccttcttttcgtggaggaaatgtttagccacccactcgggatgacggaatgtataaggaagaactggacttgaccctttttatgggatccatggtgagtgtcatcgcacatatctcaagcatgtaaccgagtaatatgcatggtgcgatggaattgaactctgccaacaaagtagtcggcggtcaaacctggaagagaatcgctagctgcttgttgtgctatttgcacatacggggctacacgagagtatgact

SEQ ID NO: 64506 - DNA, 904 bp, Glycine max
  Clone ID: PAT_MRT3847_29260C.1
aaaaaagaacagagaaaacgggagagaactggccaaggagaggaaaagagtgttgcagattttggtgcaataatggcaacaccaaaacagtcatatgagcagcaacaacaaccaaatgtgcagcgagtgaggaactcggggatgattaacagcaaccagagtccaatgagggatgacaaggaagaggagatgtcaagatcagctttggcaatgttccgagcaaaggaagaagaaattgaaaggagaaaagttgaggtgagggataaggttcacgcttatctcggtcgagtagaggaggaaacaaaacgattggctgagattagagaagagcttgagggtctcacagatccattgaggaaggaagttgcaatagttcgaaagaagatagacagtgttaacaaagagttaaagccactgggccaaacctgccagagaaaggagagagaatacaaggaagcccttgacgctttcaatgagaaaaacaaggaaaaagctcaacttgttactaaactaatggagctggtgactgaaagtgagaagttgaggatgaagaagctggaggagttaagcaaaaacgtagataccctgcattgaaatgctaatacaaagtaacctacttctggatattcagtgtcatgtaactagaatcatgtcgttgtatgtggcataatttgtggttctattgtattttgcagacttaattaggaaatgtgcattggacacctaaattctgaacatttacacaaattcttgtcatttttatttgagatgtgccgattctgtcatcaaaagcaaattgaatacttggaaagatctagttaaactaatccacgctttcatgtttcaacttacgttactgatgtcacgaattcaaaagtttgccattttaataaagttgagagac

SEQ ID NO: 64507 - DNA, 251 bp, Glycine max
  Clone ID: PAT_MRT3847_29261C.1
gtcgcagttgctgagggcgccccatgctatgctggcctggacaacggctaacttgcatgctatctgcatgtgaacactaactcagtgacttgggctacgaatgagaccatcctcgctgtcgataaggcattcctgcttcctatggcgaggccacactggatttttgaacgaaagaacgaggtaacatttgcttaggcggtttggggcaatctgaacatcctgggggcgccaatgactaactcaccgggaag

SEQ ID NO: 64508 - DNA, 346 bp, Glycine max
  unsure (1)..(346): unsure at all n locations
  Clone ID: PAT_MRT3847_29262C.1
gagtcatatcatagncctgtccccttcatgctagaatnnctgggagccatagatatgataatctgataggggtggagnttggcaactgagtgacatgatagcatgatcatgtcatcgagaagtgcgtgagctnatgcttcataatgaacagtggcttatgaattggaataacattatatgttnnngttttggctttagtgctgggatatacanncttgaatggagctgatgcatgatgcttattttatatatcctctccgtctttcgcgtttgagaactaagannacttgaaaatccttgaattctgctttggatttgtcttcataaaacttattgcgtatgacca

SEQ ID NO: 64509 - DNA, 627 bp, Glycine max
  Clone ID: PAT_MRT3847_29263C.1
accggtagagcgggcgcgaccgacgcgtacgcccacgcgtgcgttttttcttggaaaaatgtaaagaaaaaaaaaggaaaagaaggaaaaaaaaaaagaaggagaaagaagtggaaaataaaagggagaaaaaaaaaaaaaaaggaaaaaaaaaaaaagaaaaaaagaaaaaaaaaaaaaaaagggggggggggtttaaggggacaaaggttaactaacgcgggggggaaaggaaaaagctttttaaagggggaaaaaaaaataaaataaaggggggggcgtttaaaaaggcgggggggggaaaaaacggggggagcccaaattaaatgggttgggaaaaaatccccttttggggggggggggaaataggaagggggggggaacagagggcctttcaaaaagggggggaacccggaagggcaaagggaccccccctggtaagggcaaataaaggggggggggggggggggttaccccaagggggacggtaaaattggagaggcccaaaacggccgggaatttggttttatgcctttagttttagggaaagttcggagggttttcccggaaaggataaaaagggggggggccctagaggggtgcggaaaaaggggtaaagggggtcta

SEQ ID NO: 64510 - DNA, 440 bp, Glycine max
  Clone ID: PAT_MRT3847_29264C.1
tcggcacgaggcagctcagcagtaaattattatctggctccaagcccagtttcaataacaactttaaacaaagtcgattctacagcactcccacattaaagttccaagttaaaccttatgatctccatcgacttgataaaggaccttcactcgaagtagagactaataaagaagatttagtctctgcttttaaaaccatgtacgaaattcgacaaatggaaataatagcagacaagatgtataaagcaaagaaaattcaaggatttttacacttgtataatggagaagaagcagtagtcactggtattgaaagtggaattcgtcctgatgaccacgtcatcactgcatacagagatcatggctttattttaactagaggaggaaatgctgaacaagtttttgctgaactccaaggtaaagtcactggaacttctcgagga

SEQ ID NO: 64511 - DNA, 348 bp, Glycine max
  Clone ID: PAT_MRT3847_29265C.1
cctcccagaaaaaggcttaaaaaaaaaagggggggtgtcaaaatcaaaaatggccgattttgatacgaggggccccaatcccgaaaccttaaaaaaaaaaaaaaagggggcccggggggtttaacccccccaccaaaaggccaaaaccctggaacttggggaaggggagaacaaacccccttcatttagggggggggggagaaaaaaaaaaaacccgggggcgcaaaacccccccacggccaaagccgagggtttttaccaccccaaaaaaggggaagcgaatttcccaaaaagggggttattttgtaagaacctggttcccccaaaccctatctttaaaagaccggg

SEQ ID NO: 64512 - DNA, 260 bp, Glycine max
  unsure (1)..(260): unsure at all n locations
  Clone ID: PAT_MRT3847_29266C.1
tttantttccttttttantttctttttcccagggcccagcacccgggggggttctcaaggatgtacgggcctaaccagcaccctgagctgattgtaattcgccacaactagacacacataaggcgtgcaaccagccttcttggcctatagagactgctgggccattcaaaccactgctccaccttgcacctgtcaggggcacatggggcaaacaacctccagaatcacagtacagtactttgattcacctgggcaaaaac

SEQ ID NO: 64513 - DNA, 322 bp, Glycine max
  Clone ID: PAT_MRT3847_29267C.1
gaagggctctacaaagatcagcactactttaagactcctgaagaagctgcagccatatccattaatggcagggagggaattgaaccccggaagatttcttggccaatacacacaaggtgctgaaaacataaggcttatagatgaagcatgccattaacaatgctggccctaggcccatgcatcatggagatgcgtcataggatcctttcgcaatgatccaagaaagcaaccttatggaaaccagcaacaaacaaatgttagcactaagaaataactacagaaccgcacaaagccttacgcatgggaagatgatgaagcaaaa

SEQ ID NO: 64514 - DNA, 976 bp, Glycine max
  unsure (1)..(976): unsure at all n locations
  Clone ID: PAT_MRT3847_29268C.1
ggctcgagaattctcatcacataatggcttgtagaccttcttctttccttgcacttcttctcatcaccactatccttcttgccactacatggcaagcagttgctagacgccacattggtccaaaacactcaaacaatggggacaagaaagagcctcagtttttgttccctcctgaaggtaatttccattttcctggctttgggggagtagggttgccacctttctttgggtttacacctcaaaacccaaacactggtggtagtggactagggtcaggaccagctggtcgtggttacgttccaggtggtgatgacacgtttgtcccaaaccctggttttgaggttccaaaccctgggagtggtggtggagttccagttccagttccagttaatccgtgagtgctctcaatcatgatgaggcatcatgcattttttgcatgattgcactagttaaggttgtgcagtttccaagcccgttatgcttttgacaaatagaagtactagtctactgtttttttgtatccgtgaataagtaagtagttctctgtgtgtactttatctgctattcgtatgcagagcctctctgctcttttcttgtttggaatgaaatttaagcatgctgtaatgctggttgtattcgttgctttcaattactactgctagtgcctcattatatatatatgtgtgtgtgtaatttcttaagatatcctattatctttctaattggttcccgaaccaatatcttagaacatttgtatggtacagccggttggagattatgaaaaaaaaaaaaaaatagggagtggtttaacccgccctaattgcccgtggttttacaaggtggggattggaaaacccctggggttcccaaattaaatcgcttgcgagaaaatccccttttcgccagttggcgtattagcgaaaaggcccgcacggatcgcctttccccacagtggcgcancctgaatgggaattgg

SEQ ID NO: 64515 - DNA, 592 bp, Glycine max
  Clone ID: PAT_MRT3847_29269C.1
aatttctaaaaaggggggattcaattaatgtccatgattctcctctccctctacactctctctcgtattccatccgctcatcacttctttcatgtccgctccctcgctccaaaatgacaggagttcctcaaccactgcgctgatcctgttcttcttcctcctcctcctcctactacaattacagcaacagaggcattaatgcatatactttgcttgcagggacgtagacctctgccctatatggatatgtgcttgctagaccttggaaagaacgccggaaatcttgaagatctaagtacacttcttatcctcctcctaagaacgccagtgtgacatatgctagacccgttctcctcacctgcgatgatagctgactcttatgcgacatttgtctgtctaaatatagatactctgttgcctccatcgctggaccactattgcaacaacatccacttccaacgagacagctcttgcctccactcacggtgaccacacttccaagatacttgattgtgacattgccaggagcttcaaggtattagtccgttcctaagacaacaccttgtcctggttagattcccttcattgcatc

SEQ ID NO: 64516 - DNA, 619 bp, Glycine max
  unsure (1)..(619): unsure at all n locations
  Clone ID: PAT_MRT3847_2926C.1
tcgatctgtcgctaggaatgtgccagagtgccgtgcatgtggttttgtggttttgcgcaagtatcgggacggtctgataccggggaaaaaagcctgcagctgcaccataggtaattgtggcggcggcagaagccaatgccaagccgtaacctcccggggctaccgcagcatctgttgaaccttcgcggttttacgaggaggccctcattatcttagattccgcgaagccggcccagcccgtacaaccagctggatcgcccgcagcaactgtaagtaaaaaccccgagatgtattggcaacgagttgagacactagcctagacgtactaatgcccagcagagccacaacagggcctagtatataggggataagcactggtcgcggcttttgcaacaatatttgcgatggtggattcacctattttgtaagtttaaccttaatacacacaacagcatttagaggagcgggcacatgngtaagcgcttgcttagcgagcggctaaggtaactgcgtggcgtgtgcgagcttacgccaacaatgtaccgaggcgctgggcagtgccgcagcccgcacttattacggttagagagcaaccgagctgtggttgtagctaaggtgt

SEQ ID NO: 64517 - DNA, 481 bp, Glycine max
  Clone ID: PAT_MRT3847_29270C.1
ggccggggcaagcggtcgctagacgccacattattccaaaacactcaaacaaaggggacaagaaagagcctcaatttttgttccctccggaaggtaatttccattttcctggctttgggggagtagggctgccacctttctttgggtttacacctcaaagcccaaacactggtggtagtggactagggtcaggaccactaggtcgtggttatgttccaggtggtgatgacacctttgtcccaaaccctggttttgagtttccaaaccctggcagtggtggtggagttccagttaatccgtgagtcctcccagttatgagctatcatgcattatgcatgattgcaccttttgacaaattgtagtactagtctcctgtttttggtactcgtgaataagtagttctctgtgtgtacttcatctgctattcgtatgcagagcctctctgctcttttcttgtttggaatgaagttaagcatgctgt

SEQ ID NO: 64518 - DNA, 3184 bp, Glycine max
  unsure (1)..(3184): unsure at all n locations
  Clone ID: PAT_MRT3847_29271C.1
tacaaaccaaagatgtggacagaagcttggactggctggtttactgagtttggaggtgcagttcctcacagacctgctgaggatttggcattttcccacgcgtccgatataatatttatgcgtggcagccaaatctataagctatcagatgcaaacttctggcaaagcacctgttagaccaaaagttcatttatcttgtagccctggacagaaaatctcatcaatcaaatttgctagctttggtactccagtaggttcttgtggaaacttccatgaaggaagctgccatgctcacatgtcttatgatgcctttgaaaggaattgtgttggacagaacttgtgcacagtagctgtctctcctgaaaattttggaggagatccttgtccaaatgtcttgaagaaactctcagtggaagctatttgttcctgatcattttaacctcagaaaatacatcgattataagtctcttcacattgattattcccaccactattcattttaatacagttcttttgggtcaaccaaagtctacacttctgaatctgatcatcacaagcattattatttcggctttaccaaggtgaagttgcagaaaacacaacacaccataggttgaaagcattgctgacctgattgtgatacttgtgttctgcttgtatacagtcggcgagggcccagatgaagatgactcgtgttcctattcatggcggattctcttggctatcattcaatgaagaaacaaccactactgatgatagttccttcactatgactggcctgttggagcagttaaatacaacaagagatttatctgattacttgtggtactccacagatgttgtgcttgatcccaatgaaggatttctgagaaacggaaaggatcctgttcttactgtgttttctgctgggcatgctttgcatgtttttataaatggtcagctatcaggaactgcatatggaagcttagaattccctaaactgacatttaacgagggagtgaagcttagagccggtgttaacaagatctctctactgagtgttgcagttggactcccgaatgttggtcctcattttgaaacatggaatgctggtgttcttggtccaatttcattaagtggtctcaacgaagggagaagggacttgtcttggcagaaatggtcttataaggttggtcttaaaggtgaaatcttgagtcttcactctcttagtggaagttcctcagtggagtggattcagggatctttagtttctcaaaggcagccattgacttggtacaaaacaacatttgacgcgccagctgggactgcaccattggctttagacatggacagcatgggcaaaggtcaagtgtggttaaatggacagaatcttggccgctactggcctgcttataaagcatccggtacctgtgattactgtgactatgctggaacttataacgagaataaatgcagaagtaactgtggcgaggcttcccaaagatggtatcatgttcctcaatcatggcttaagccaacaggaaatttattggttgtgtttgaagagctaggtggagaccccaatggaatctttttggttagaagggatatagatagtgtatgtgctgatatttatgagtggcagccaaatcttataagctatcagatgcaaacttctggcaaagcacctgttagaccaaaagttcatttatcatgtagcccgggacagaaaatctcatcaatcaaatttgctagctttggtactccagcaggttcttgtggaaacttccatgaaggaagctgtcatgctcacaagtcttatgatgcctttgaaaggaattgtgttggacagaactggtgcacagtaacagtgtcacctgaaaattttggaggagatccatgtccaaatgtcttgaagaaactctcagtggaagctatttgttcctgatcattttaacctcagaaaataaatagattaaactctccagattgatttttcccaccactattcatttcaatacagttcttttgggtcaaccaaagtctacacttctgaatctgatcaacacgagcattattattttggctttaccaaggtgaagttgcagaaaacacaacacaccatatggttgaaagcctgtaaagattgctgagatgattgtggatatgtgtatatacttgtgttctgcatgttatacagaggtgaaaggtgatgatttgcttggtgcactatgagacgatactgaattgagtccatgtgctagtgttttagacttaggtgtggaagcctcttgcttcctgtaatattagttttcccttgtaagctgcattcatagtgatttagtttctttcttcctgtaagaaacttctcaagatgataaagatcagattcagtcattttggtttcgttatttcatgcattgtggcttttggtttctagatgttcttggtttagtgaattgcaaggtttatacagaaagggggatcatttgtcaattattatatgtatcatggcggaacaaattttggtcgaactgctggtggtccctttattgctacgagctatgattacgatgcgccccttgatgaatatggattggccagacagccaaagtggggtcatctgaaggatttacatagagcaataaaactctgtgaacctgctttagtatctggagatcctactgtacaacagcttggaaactatgaagaggctcatgtttttagatcaaagtctggagcttgtgctgcattccttgcgaactataacccacaatcttatgcaacagtggcatttggaaatcagcattacaacttgcctccttggtctataagcattcttcctaactgcaagcacactgtttataacactgcaagggttggttctcagagcacaacaatgaagatgacttcgtgttcctattcatggaggactatcttggaaagcatttaatgaagagacaaccactactgatgatagttcgttcactgtgactggcctgttggagcagataaatgcaaccagagatttatctgattacnnttgtggtactccacagatgttgtgatcaattccaatgaaggatttttgaggaatggaaagaatcctgttcttacagnttntgtctgctgggcatgctttgcatgtttttatcaacaatcagctgtcaggaactgcatatggaagcttagaggccnccaaact

SEQ ID NO: 64519 - DNA, 323 bp, Glycine max
  unsure (1)..(323): unsure at all n locations
  Clone ID: PAT_MRT3847_29272C.1
aaccacgcgtccggtctttacatcacaccctctttccccctttgccaaagctctgatcctttccctcctcaaatcccccgntcctcaactttccttgttaagggtgccccgtttcccagtttccgaaaccatttttggtccggggctccccccaacttcggaaaagattcgaattttccgccccctttttttggttccaaaccctcctgaaacctcctttccccattcggggttttaaaggaaacgccttttaaccgttccattaagaaggaaaaggaaaaggaaaatccctgttgcctttgttggcaataacaacaattcca

SEQ ID NO: 64520 - DNA, 307 bp, Glycine max
  Clone ID: PAT_MRT3847_29273C.1
ggaacttgtgctaaatgaggcctctattgctgtatggcagaagcctatcgacaataactgttaccataaccgagacattgatgcacattctgcatcatatgataccgatgatgaccccgatgatacatggaatgctcgtcttaacgcatgcatcagtgcattacctactattgaatatcgaagagatgttacaaagggatctgggttggttaagcaaccaccagacaggcttcatatcatgcatttgaatgccattctatgcatagatgaactctcgagggctgacacgatatatcggttcgatata

SEQ ID NO: 64521 - DNA, 1847 bp, Glycine max
  Clone ID: PAT_MRT3847_29274C.1
gcaacacagaaccttcacataaagtatcttaaatttttaatcccccaaaaaggtcaaaacaaatcaaaagaaaaaaaagaaatatatatatcactgtctctcactcttccaatctacaacctcccattttttttccttcctttcacacagtgttttctcttcaatcattctgctaaaagtaggagacttgagcaacacagcaccttcacataaagtatcttaaatttgccatccccttagtgctttaccaagctgagaaacaccacaacaccaacaagggtgttgcttagtattattattgattattattcattgtttggtgctgacatgagcttcaacacgcgagattcgccccacgtcacttacaatatatatataaaaacattgcaaagttgcagccccggttatttttattatttttattccgatcatcattttgcatagagaaaaagcaaggaagaataataagggagagagagtgagaggaagaagggaaaaccaaagacacttcctagttacttccctctgcagccataatagaataaccagcaccaccaaaggtgaatcatggttatttgcttgaagctcataataatgtggaatgtggcactgcttctggttttttctctaattggttctgctaaggcctcagtgtcctatgactcaaaggctatcaccattaatggccagagaaggatcctcatttctggatccattcattacccaaggagcacccctgagatgtggccagatcttattcaaaaggccaaggatggaggtttggatgtgattcagacttatgttttctggaatggacacgaaccttcacctggcaagtattattttgaggggaactatgatctggtgaagttcataaagctggtgcagcaagcaggcctttatgttcatctcaggattggcccttatgtctgtgctgagtggaactttggtggtttccctgtttggctaaagtacattccaggaatcagtttcagaacagacaatgaaccatttaagtatcaaatggaaaagtttaccacgaagattgtggatatgatgaaagcagaaaggttatatgagtctcagggcggtccaataattctgtcccagattgaaaatgaatatggacctatggagtatgaaattggtgctcctggtagagcctacactcagtgggcagcacatatggctgtgggacttggcactggggttccatggatcatgtgcaagcaagaagatgctcctgatcctattattaacacttgcaatggcttctattgtgattatttctctccaaataaggcttacaaaccaaagatgtggacagaagcttggactggctggtttactgagtttggaggtgcagttcctcacagacctgctgaggacttggcattttcaattgcaaggtttatacagaaagggggatcatttgtcaattattatatgtatcatgggggaacaaattttggtcgaactgctggtggtccctttattgctacgagctatgattacgatgcgccccttgatgaatatggattgcccagacagccaaagtggggtcatctgaaggatttacatagagcaataaaactctgtgaacctgctttagtatcttggagatcctactgtacaacagcttggaaactatgaagaggctcatgtctttagatcaaagtctggagcctgtgctgcattccttgcgaactacaacccacaatcttatgcaacagtggcatttggaaacatgcattacaacttgcctccttggtctataagcattcttcctaactgcagaacactgtttataacactagttctcctgcagcacactggtttataacact

SEQ ID NO: 64522 - DNA, 439 bp, Glycine max
  Clone ID: PAT_MRT3847_29275C.1
attcccgggtcgaccaacccttcggacaagccttcgttacggcggcaaaagaacaataaatgggggtaccaggtccccaaaccatggctaaacccaccaggaaatttattggttgtgtttgaagacctaggtggaaacccaattggaacctttttggttaaaagggatatagatagtgaatgtgctgatatttataagtggcagccaaatcctataagctatcagatgcaaacgtcctggaaagcacctgttagaccataagttcatttatcatgtagctcgggacagaaaatctcatcaatcacatttgctagctttggtactccagcaggttcatgtggaaacttccatgaatgaagctgtcatgctcacaagtcgtatgatgcctttgaaacgaattgtgttggacagaactggtgcacagtaacagtgtcacctg

SEQ ID NO: 64523 - DNA, 720 bp, Glycine max
  Clone ID: PAT_MRT3847_29276C.1
ggagatcctactgtacaacagcttggaaactacgaagaggtataacttgattttgttatctgagaattaacaatcctatctaaaatctttgtaactaggctaaacttttaactttcataaccaatgtacaggctcatgtttttagatcaaagtctggggcttgtgctgcattccttgcgaactataacccacaatcttatgcaacagtggcatttggaaatcagcgttacaacttgcctccttggtctataagcattcttcctaactgcaagcacactgtttataacactgcaagggtgaggcaaaaatcaaacaaagttttatttcagattactagagctggggtagttatgtcttacaatggagattttcttactaaagtttgatcaactatatgctatttagttgaactgaacaatttttttaataatgaagagaacagtattcttttcagtagttcttcaacagaagatttcagcagcagtgataatttcaaatctctttacaggttggttctcagagcacaacaatgaagatgactcgtgttcctattcatggaggactatcttggaaagcatttaatgaagagaccaccactactgatgatagttcgttcactgtgacttgccctgtggagcagataaatgcaaccagagatttatctgattacttgtgggtactcacagaatgagtgtgaactataactctaatctttttact

SEQ ID NO: 64524 - DNA, 408 bp, Glycine max
  Clone ID: PAT_MRT3847_29277C.1
cccatgcgtacgggcgaacagtgtgcaggcagatctggaagaactggacctggacactgttaccgactctattcttttgcaggcgatagtaatgaatatgatgagcactgtacgtgcgaagatgagaaagatcctgttcatggaggtgcacttctctagaaattcatgcatataaaaaaggatgaaaactttccatttcctacttttcttaaagattcttctgtgcttgagggtgagaattgtttgacagctgtagaagcacttgataacaaggatgaacttacacttttaagaaaagccatggaacattatgctttgagtgcttgtcattatagaatgcttacaactggcattaaaaatacagggcatgagcataaatgttatccaaatatgcctttgggatatgct

SEQ ID NO: 64525 - DNA, 207 bp, Glycine max
  Clone ID: PAT_MRT3847_29278C.1
aaaaaagaaatgtatcggataggacgaacaacatgctgtggaggccatctcttctcgtgcttcgagactgatgatctgctgcttgctcttgaggttgacctgagattcaatctaacggatcttgatttacattgtgagacatgtaagatgtgtgcctctggacaaagtgctaccattatcggtgaagagcattccaagacgagctgg

SEQ ID NO: 64526 - DNA, 1687 bp, Glycine max
  Clone ID: PAT_MRT3847_29279C.1
cggctcgagacggctgcgagaagacgacagaagggggtggcactgtggctaagtagagaggtagctttccctgtaagactgttacttaagattaccaagaattctagctagctggttagttcttttgtcatttcaaagagaaactgagagagccatagctagggagaataccatggacaaattgtatgggttgagtcatctcttcatgacagtgtttcttcataacttctccatgttcatggtggtaccagccatcaccgatgtcacaatggctgctctttgtcccggacaagatgaatgctcacttgccatctacatcactggttttcaacaagcgatgatagggctgggcacgcttgtgatgatgccactattgggaaatctttcggataagtatgggaggaaggccatcctcacactccctatgatcctcacaatcattcccgtaggcatattagcttacagcaggacgaaaaaattcttctacgtctactatgtgtttaagatactcatttcaatggtttgcgaaggaagcgttccttgcctcgccctagcttacgtggcagataacgttccagaaagtggacgaagcactgtatttggaattctttcaggaattgggtctgccgcatttgtgtgtgccaccttatctgctcgatttttatcatcagccctaacttttcaagtttctacacttatcgcggtgattggagcactatacatgcaatttttccttcgagattcagtcattgatgacaagcacctttataccccaatcatatcacaaggaaatcccataatatctaaggtcaatggaaacttggaaagtaagaagcatcttttgaaagcattgcgctccataaaggacctaacttctttcctcaatagcagcttgaccattaatcaagcagcaattgttgctttcttcaatagccttgcagatgttggccttcatggatcattgttgtattttttaaaggctcaatttcactttgataagaatcagtttgctgacttgatggtcatttctgggattgcagggactgtgtcacagcttcttcttatgcctattttggctcctattttgggcgagacaagactactctcagttggcctattcttccattgtgtacatatgttcctttacagcatggcatggtcctccttggttccttatgcttccgccatgttctcaattttatatgttttctcacacccttgtatacgaagtattgtatctaaagaagctggtccccatgagcagggaaaggctcaaggttgcatttcaggcatatgttcaattgcacatattgtttctcccttggttttctctccattaacagctctattcctttctgaaaaggcaccttttgattttcctggattcagtataatgtgcattggatttgcttcgatgatatcttttgttcaaagtttgatgcttagagtggctcctcccattttgaattaggcgaatataaattagttagagccttcaacggtgcttttattgtgctttagccgatcctcatatgtacaagctctacctttaacgtgcttttgattaggaaacaatatattgtataagttcattcctagtagacatttgacaaacttctatagttttttttttttactattgtaccaagtttacttgtatatcaattacgggttttttttacgagcg

SEQ ID NO: 64527 - DNA, 169 bp, Glycine max
  unsure (1)..(169): unsure at all n locations
  Clone ID: PAT_MRT3847_2927C.1
agtccttttaaccaaaaagtcccacagcagcacnagaagaagaaagaagggcaaaaaaaatgnaaaaggtagancngnnaattgnagccaatcnaaggtttatnagnaaggagactncctgggnttnaantggntccnatccttggaagnagncattatggttnatgcg

SEQ ID NO: 64528 - DNA, 418 bp, Glycine max
  unsure (1)..(418): unsure at all n locations
  Clone ID: PAT_MRT3847_29280C.1
gcgagggtgcaatatnngtgccattgaccttgcagcnnatcatttattaagggtaatattataggtgagggcttctggagtgattgtgtgcgtgcgnnngtgaccttttgcttttgagtgggtggtgtgtggttggtataaggggcctttctgtggaangtaaggcttcacagtattcgagggtnnctgcttntagaggagtcttnngtttgggggttaggtatggcccatggcatatgacccttcttgggctaaccccaagtnntgattgnngatcaagtgccaccctttagtanttagtttccctatttaatatgnntaattaaggcgttnngttttaactttttaattttcattnnaaaaaaaannaaaaaaaaataaaaataaacaaaataaggggccggccccgccgacttag

SEQ ID NO: 64529 - DNA, 836 bp, Glycine max
  Clone ID: PAT_MRT3847_29281C.1
cggactcgtgggcaacaatctcactatcctcttttttttccccatcaaaatctaattgctctctggtctccctcttcacccactcaccctcgatcctcttccacctctcttagttcccttccatcaagggtcgatctagatcttctttttccacacccaatatttcctatttcaacccctttattcatctccctgtaaaactcaaaaaaaaataaaaaacacgaagaaaatatacatgggttgcaccatgagggaaaagcatatcagagctaatcggagaccccgatcggtgaaaccggactcggattcttgcgacaaagatgccatatccaaatccatagcggagtctggtcttaagcccttcaaataccatctggatctcaacgattcttcccagagtccgaattcaaaccctaatgtagaggaaaccgggtggggttactgtacagaggaacaattggaagagattctgttgaaaaacttggaatttatatacaacgaaactgtgtctaagcttgttgcgttgggatatgatggggatgttgctgttaacgccatactgcgaaatgggcattgctatggtggcatggatgagctgacaaatattttgcacaattccttggcttttttgaatactaatagtgatggagatggtggtggatatagtagaaatggtgggaattagcctgagtctgagcctgtggtctctgatttggagcggggggaggagtactctttgccactgatggaggggcagttgcaacaagtgatggctcattctgacaaaagggatgccatgtggctggcgctcatgagagatcttaatgacgggaggg

SEQ ID NO: 64530 - DNA, 397 bp, Glycine max
  unsure (1)..(397): unsure at all n locations
  Clone ID: PAT_MRT3847_29282C.1
ggtggtnatttttttttttttggggtttttttttcagggggtttttttttttttttttttttttttttttttttttngttagcggaaggcatttataagcctcgcttattttatttaggggaattgatttccaacaaccaaagcctttttttaatactcccacacttgtgtctcactccctgggagaaaggccctttttttttttggccagggattctttataaagtttttgaaaccgaaccactaacggtttttttttaaacaccaccaaaccccgggttccattattatgaccaattctaatcccaatttccccacatttgtcatcctcaggttgttggggacaaaaaacaacctttttgtttttgaattcatcatcaaaaaccttttcaagttt

SEQ ID NO: 64531 - DNA, 473 bp, Glycine max
  unsure (1)..(473): unsure at all n locations
  Clone ID: PAT_MRT3847_29283C.1
ggccgctcgaggcggccgggnncgggaatactacaacggcaccgacgtgtccgggctctccggcgctgcaccttctgacgggcccaatgctgacaattcttacgacgcatgatccacagggacccacgcatcgaccctaccttgaactagaacctgctcaaagctgtgtacctcttcccagtcccccaatacgagcgtgcttgaagagagaacccccaacgggatctagaacaagtactacggtagcctcgtcaaacgacagggctggttacctcgagaccaacaacagtacgaagatgtcggctactaaagctaacagccaactccattgctgaaaaccagaaactgttctttgaaaagctttcaaatgctgatgataagatgagacaagaggatgagttgtccgtcaaactaggacagattcgcgccaaatgctccgttccccaacaagaatatggtggtcacctctgtgt

SEQ ID NO: 64532 - DNA, 103 bp, Glycine max
  Clone ID: PAT_MRT3847_29284C.1
gcggtgtccaagaagtgattagagaggaaggaacctgactgattaggttttgtatacaagtttgataagttggaattagcttgaatgagcggcactgtacatg

SEQ ID NO: 64533 - DNA, 448 bp, Glycine max
  Clone ID: PAT_MRT3847_29285C.1
taaattcaagccccccacaccgcgcgtcccagaacatcagcacggcacccgacgagcactattgttgatagcaagacgaagtagcggctagaacaaagcagagtacagcggcggcccgagagccgacgtcggtcgggccttccaatccaccacctcgcgcaacagcagcggcagcagcagcagcagcagcgcttctgtaacacgcccgccgacgactcgcccgcctacgttcccccatccccgctcctggcctgcaaaccgtcccgccgccatcatgtccaacgccgtcacgggcagcacctttgcacagatcatcgatcgcgtcgtgcaagcatcgcagaatgacttcgaggagagcggtgtcgaccagcagacgctgcaggagatgaaagagatatggcagaagaagctctccgcccttcatgtggcgcaaatgccctgggacccg

SEQ ID NO: 64534 - DNA, 268 bp, Glycine max
  Clone ID: PAT_MRT3847_29286C.1
aaagaaacacctgccatatgcaccttttattataaaaaaagtttaaaaaattggtttagccttccaacaaaatttaaaacaaaacaaaacttactaagggttacctttggggttttttcctttaccttgaattaaaagggtcatgcctataacttggttattttttttgaaaagggttattttataacttatttccccttttaaaaaacacttattttttaccaccagcctttttagcaggggggggagggtccttgttacttgggcc

SEQ ID NO: 64535 - DNA, 531 bp, Glycine max
  Clone ID: PAT_MRT3847_29287C.1
gcggccggccttttgctgtttgtttctcataagatctacctttatcatgagacggatagatactatttaaaactgcggtacactgaactcattcactgacagggtactataagtcttggttctagggtacaagggatcaaagctttgtgcgttgtccaataatcagtccatttgtgctttagtataactcgtggcatgcttgcacgtctatattatagtaatcaaagaatgccttagtgctatcaactttgatatcgacaggtaacttgctcctatcaacacctacatcattcgggatgagactcacaatacttcatgcttcttcatatagaacctgtccccaactgtgaagacaactactcttgatcattcatcattgccttcacgaaggatcttgtgctcttgtcactgctactaaggagtattactgtggaacatccctctgctggtgagaatattggaggattactggttgtcaaatcacctgagagagtccttgagcattctttgccctgacacaggggcttgcgc

SEQ ID NO: 64536 - DNA, 188 bp, Glycine max
  unsure (1)..(188): unsure at all n locations
  Clone ID: PAT_MRT3847_29288C.1
caacaacacaaaacacgacagagtggagaagaagatattgcttctgtttattttttcccttatgtaatgcatcagaagaaatccgaagttcagattggacaagacagagcggcgtctcttccgatttcaaccagcactcgcctctnccactcgcaaccctaactccgcacccagaccacgattcactg

SEQ ID NO: 64537 - DNA, 608 bp, Glycine max
  Clone ID: PAT_MRT3847_29289C.1
ggaaagttagttcagtcctaggtttctattctttattctttgataaactgtgaatatttactttcaattcatatttgttttcctcttgaactggataaccgttgttgttgttagtgttttatatgcatagatctcccacaggcaatttagttcctctagacatggagattgaagctatgttgagaaggaacagagcagagaggagaagaaaattactgcaagacaggacagcagcgtccattcttaaggaaaaaactcatttttctgactcaccatcatcaagggaatctgcgacctatttaccagaagtcgtttccatggcggatgaacaccaacaaagagttacccttgaggactattcaagcagttcagtgccgcaattctttaccagcattgcacatcctaaagtgcaagctcacaacataaactacccttattctttgattcatttaatacaggggaacttattccaaggattaccaaatgaggacccatatgcacatttggcgactttcattgaaatctgtaacactgtaaagatggcaggcatgccagatgaagccattagactcagtctattttcatttttcttggcacgagaagcccaa

SEQ ID NO: 64538 - DNA, 1355 bp, Glycine max
  unsure (1)..(1355): unsure at all n locations
  Clone ID: PAT_MRT3847_2928C.1
gccccaggtagataacacaacaccaacaattgactctcacaagcgatgtcttctctctggttccttaaactgtccctcaaatgccttgatcacctcgcatggcctcttcttgctttggggtatcctctatgtgcttccgtacaagcaattgagactgattccaataaagaaactagggatttgatctcgtattggatacttctctcgttaatatacctctttgagtatgcattttcggggattcttcaatggttccagttttggccttacattaagcttatgatcatcttctgccttgtcacgccagactttggacgagcttcttatgcctataataaccttatccgcacttgcatctccttaaatccacaagcaatcatatgtaggttaaataactggaggaagttttttgtcaagaaagatgactttttactgcatgtagagagatatctaaacgagaatggaactgaagccttagagaaactcattgctagcaagaacaccaacctattgaagaacacaacttataaacctgatgcagaagcaacaaatgcaattatagcaactgataataatgaaacgcaacagacaaatgagacaaaactccaaacacagcaaaaaaccatcaaagatttggaggtgattgagaaaaaagaaattcttgcaggcaagcaagatatttctgttgtgcctaaccttgtgccaagtcagaatgcttcaccagccatggtggaaactaaaatattagtggggaaagacacagctagtggagagcttcccgagagttctacacataaggaagtgcagaaagagtggacatgcgctttatgtcatgtaacgacatctagcgagaaaaccttgattgaccaccttcatgggaggaaacacaaggcaacttgtgaatctctgaaagcacaaaatcaacctgtgccacataaggtgaaaagtgatcagtccaaagatgatttgaagcaaaagaacgttatctatcagataaattccaagaccaagagtggagagaaggtaggaaaagaagccatggaccataaggtgcagaaactgcaaaagaaactatatgaacctgctgggacgagtaattccaaatttctgtgtgaagtctgtaatgtctattgcccttgcgagattgctttggcctcacacaaaaatgggaagaagcatttggctaaaattaaaacttcaatctgaagtgtatatttgtaacaggtatacgagtttacattgaaatttggtaggaagtttggacatagagaatgcttaatttggtatctagtttgaaattttttttcacaagttcagtgtacttttgctggagatagtgaattatnngcacgttc

SEQ ID NO: 64539 - DNA, 199 bp, Glycine max
  Clone ID: PAT_MRT3847_29290C.1
ccacgcgtccgggctaagctatcgcctaagggcacaaccgtcattcccactccaaaccgtttcttctatggtccacgtctctccatcccaataacaaagagaggtatcgaagtttgttcccttcttatcagaaagggaattacggtaacggggatattgggcttctgtttaacatagtttcttgagagagcttttaacc

SEQ ID NO: 64540 - DNA, 171 bp, Glycine max
  unsure (1)..(171): unsure at all n locations
  Clone ID: PAT_MRT3847_29291C.1
ctcgatggaaaagtgatggatttgcatacgatnngtggctcgatgattanntcttcgtgtttgtagtcatttatcaaattaggttccgacagcttgcttttatcgacgacgatcgttggtggtacattgaagtggatccgagtgtgttctgtcttcttttccttcagtcgc

SEQ ID NO: 64541 - DNA, 230 bp, Glycine max
  Clone ID: PAT_MRT3847_29292C.1
gcctgcctccgacaaaacggggaccacggggagcggcgaacgggggaaactctaagacaaaagcagcccgagaccccgcatgacaagaaaacgagcgccacgacacggccatcccgggggacagccccacaacgggggaagcacaaagacacacagagcaaggccaccggacagacaacgaaggctacaggctcaccacggaaaacaaaacagggccagaacacggcccc

SEQ ID NO: 64542 - DNA, 142 bp, Glycine max
  unsure (1)..(142): unsure at all n locations
  Clone ID: PAT_MRT3847_29293C.1
ggaggangctttgtggtagtggggttaagtgtacggacggttanttaagactctgaatgcngtcaaaggacangacaggggagctccctcgttttagatcgctgttgtgttgctcactaccactcatacttggnatgaaatc

SEQ ID NO: 64543 - DNA, 449 bp, Glycine max
  Clone ID: PAT_MRT3847_29294C.1
agttaagtaccatgctgatttttgatgtgctctgattttgatggatggagttctcttcattgggcttgatatatgggggccccacccttaaaaagcattgcctcctaaaggagggggtgtccccccaaaacattgcacaatgggcccacgggggtttcaaaaaactgtgtttttttgaataaaaaaaaaatgtttttttcttttgcgtcgtctgcacaaaaagaggactttttgaaaaaagacaatcctgggtgaaaacgtgtcttgtttgcatttttacaagtgggagctttgtgattattttaccaaggaatcatggaccccctctgggaaactgctttaaagggcccctttgttttgggggggccacacattttgattatgctttgatttgccgaaaaactggaatctttctcatttttttctacatccggggttttttgggtttt

SEQ ID NO: 64544 - DNA, 351 bp, Glycine max
  Clone ID: PAT_MRT3847_29295C.1
atggataaggcgctggtctacggaaccagagattctgggttcgatccccagtggagtcgtttttacttttgggtaatttctttgaataccaaaagtctaatgacctgtgctattgtccaagtgtctgttgtattctatccattggagacaccacaagaaatttttgctttgattatgaaaaatactgaaatcacaactaagagtctagtaggacaaagaaagtcacatgattatttttctcaagaacattacactaaacatcaagtcgagatgacatttaaaacatatttgacatctagtgggaaaaaaagaatgaagtataaaaatatgatgggtgaaatagatttataa

SEQ ID NO: 64545 - DNA, 1456 bp, Glycine max
  Clone ID: PAT_MRT3847_29296C.1
ggaataaacaaaaatttccccatacggccatgaactagggaagcaaatttctgggcgtggcggctaaagtttgtgagtggtctctgccaccaaccccgcactgtgtcggatcttcaatggcaccttccttatgtctatcccttccaaacacttccgaccttgtctgatttcaacaagctacactcttcctctttccacccaaaaaaaccgaaccggcaatttaagtctggctggggcccagaggtgcggcccgtggcggcccatttgggtaaccgaaagaagcttaatgcgttgagcgaagatggagagagcagctaccatgggtcgatggaggataagcaattcgtgcgttcgtttcgcgaggcctggccttacttgtgggcctatcgtggtagcacctttgttgtcattatttccggtgaaattgtttctggccctttcttggatgtcattctcaaggatatagctttccttaatcacctaggaatccgctttgttcttgttccggggacacatgtgcagatagacaagcttctgaatgagagaaggtgccagcctatgtatgttggtagatataggataactgatgatgaatctctggaagctgccatggaagcagctgggggcataagattgatgatagaagcaaaacttctgatggactgcttcaatcattaggctccttcattgttgttgagagagaaggacagataattgcttgcgctgcactttttcctttctttgaggagaagtgtggagaggttgctgcaattgcagtatctcctgattgtagaggccaaggacagggagacaaattacttgattatatagagaagaaggcatcatctataggatttgaaatgcttttcttgctcacaactcggacagcagattggtttgtaaggcgtggattttcagaatgttcaattgattatatacctgagaagaaaaggaaaacgattaatctatcccgcaagtccaagtattacatgaagaagcttctacctaataagagtggaataactgttagtagcagatttacatcctcttagcgcatcttttttccaccggggaaaggttggttggatcaagttgtttggcactttcttagagtgtaggtaataatctcctaattatatggttgctagaaaatcaatagctattatttcatttccagattttgagttttttttttctctctcaccccaaatcaatcaatgtatgttggtttgatagttgttacacatacatggactcatagttcttttgtagcttctttacattaagataaagaaattaacacaagtgactagtgaggagagtgaattacataaagcaggatgcacaatcttcaatacttagggatttttttacttaaagggctcttggaactttataaattacagagacttaagcttccatggcacttaaataggaaatctgattttctttattg

SEQ ID NO: 64546 - DNA, 124 bp, Glycine max
  Clone ID: PAT_MRT3847_29297C.1
aacaaacacggccactttattacgagtgggagggatgacacatttagttttatagtcaaccgaggaggtatcagaaacactgtcgtgtgcgcgcgtgaaagggcatagaagagtagagcactct

SEQ ID NO: 64547 - DNA, 999 bp, Glycine max
  unsure (1)..(999): unsure at all n locations
  Clone ID: PAT_MRT3847_29298C.1
cggacgcgtgggtttttttccgtttttcatcaaactctcaatttttttggtatattccactctgtctttctcttcaatctcccgagaagctaagtttagtgccatatagttgtggaaagttgaaagttgaaaccccttcatggttgctgaagttcattcaataatcacctaagtgagtctaataataattaatgctattgaagctataggtttgtgttcatttacagcatttggaggaagcaaaagggttggtagctgaaattcacactcacagcagcaagactttgccttaaaataaagaatcaagcgtttcctgaattggattctctgcaaatcaggatctgctgcttcagggcttcactgtttgtcttgtagcttcttctggaggtttctatggagagtagtggcaagatggaagactatgaagtgatccagcaaattggaagaggagcacttggtgcaacttttcttgttctacacaagattgagaataagaggtatgtgctgaagaaaattcgcttggccaagcacgcagacaagtccaaagtgacagcacaacaagagatggacctaatagcaaaactacattacccatatattgtggagtacaaagatgcttgggtggagaaggatgactacatatgcattataactggctattgtgaaggaggtgacatggctgcaaatataaagaaagctcggggatcttatttttcggaggagaaagtttgcaaatggttgactcagttattattggctgtggatgctaccttcacttcaatcgggtactccatagagatatcaagtgttccaacatattccttacccaagaaaataacattcggctagtgtgaatttggacttgcaaagcttcttaatactgaagaccttacttccccnngctgttggaactctaactacatgtgtcctgaggcctttgctggtatgccttatggttataaatctgatatgtggtcacttggttgctgcatgtttgaa

SEQ ID NO: 64548 - DNA, 195 bp, Glycine max
  Clone ID: PAT_MRT3847_29299C.1
ggagtcttttaacgcatgtttctagacacatacgtcattgggacaagatctcacatcgttcaagcttctcctacttctgccctacaatactctcgaatcttctcttgtgtgttgtacccgcatcgtgaccatcagtgacagtgactgctgtcgacatctcccaatctcacgctgagtgacatattatgtgaatga

SEQ ID NO: 64549 - DNA, 285 bp, Glycine max
  Clone ID: PAT_MRT3847_2929C.1
tttaccaaaaatatgatcattaaaaaagataataaagctagataattatgaataccaatctagccatgagcatcggtggcgggagcgttagggatcttcaggacaatcaaatgttttgcagattgacattttaaacatatttttaactcatgcgacaaaactacataagaaacatttagtaggcttaattactagatgtctcaccatgtaagggccttcaaactcataatccagtttccagtgataatggcacgtgcctacccctgaaatacaactcttttttat

SEQ ID NO: 64550 - DNA, 140 bp, Glycine max
  Clone ID: PAT_MRT3847_292C.1
ctcttattctgcgacacctcgcataaagatgcgagcctttaaattcttaaggctgttgaggaccccaatgtgtcaaaccacgagttgcaaggggtggatgaactaagttcttgtggccacagagatggttagattgatag

SEQ ID NO: 64551 - DNA, 376 bp, Glycine max
  Clone ID: PAT_MRT3847_29300C.1
atatactgtgatcacaggttgccgcaccttaaaaccggaaacaaaagcaatcgttacttgatttcaagaatttctcaatttcttcctacttctttgtgtacgatttcttaagggaaagaaaatcactctctgtgctgggcacagactttgtgaatcatttttttttccaatcttaagttatttggttgacccccttctatttgattttagactttgtggtagatttaaacctcctccggttctttcccaagtctttggtcaaattccaggtcaagcttgtgaaaattttgatttaagcgtccccacttctatttgggttatgaccttgcggggggagccttctatatttctccctttttttacactctttttttta

SEQ ID NO: 64552 - DNA, 296 bp, Glycine max
  unsure (1)..(296): unsure at all n locations
  Clone ID: PAT_MRT3847_29301C.1
anttcacgcacgcgtacgtaagctcggaattcggctcgagatnanancaaatgagtnanngaggngacangtgtgagctncacacancatacananccgngcanaaannctttcntnnannnnaatttgttgtgatctgggaaancattattacatngcgagtcccgttgntgctgcttacnnaacaccccttnngaatttgaattttcctnncncgagnangctnggtggannaggatctcgtgacgctcggntctgagatgannntcgtccgtcacctacaccancttcaccgn

SEQ ID NO: 64553 - DNA, 633 bp, Glycine max
  Clone ID: PAT_MRT3847_29302C.1
ctccatgatgggtctcaggtgtcacaatcagaggacaaggcagtgagaagagaaaagaaggaaagggaagggaaggaaggaaggaaggaagaaacgagactctacatggttgacaaaatttgataaagtttgtttctttcaagttttgagctgtttctctttcactagagttgacggaggtagacagagaagaatatgataatggttgaaaaagggtgtagtctagctaattttgcttgaaatttccacaaatggaattcggatccattgttgttgaccagatctgactaccccaatttcattttcaccaccttttaactagtccatgatttgcataggttgaatttgtctcctcctttgggcttctcagacatgggaaatggttttcttaaatccgtgctttgcattccgggatcgttttcaatcagaaaaggtgataaattagttaaaacgtgacaggctgtgatatcagtagggtgtgagggtaactttttgtactacatagacaaggattttgatggaggagatgtcaaccacggttacagtgccatggagagtaggtaattcagtgtgtgataagccaaccatagctacccacatggatgtatccagaattaagctgatggcagatgc

SEQ ID NO: 64554 - DNA, 160 bp, Glycine max
  unsure (1)..(160): unsure at all n locations
  Clone ID: PAT_MRT3847_29303C.1
gtgggggtgtgagctttggaacaagtgattgtgcctgagcncagccaaangggtggccttttntcctntctttnatcttcnctctcnctctctgtctttataangcncagcccaaataaatgaaangggcttgcccnattgcacntccttaacagcnnag

SEQ ID NO: 64555 - DNA, 518 bp, Glycine max
  Clone ID: PAT_MRT3847_29304C.1
cagggttcccagaaaggtgatagacaagatggtaggcatacaaagaaggtttctctggggaggtggagttgatcaacacaagattgcatgggtcaagtaggagacagtatgcctccctaaagacaaaggagggttgggcatcaaggacatcaacaaattcaatcttgcattgcttagcaaatggaagtggaacctattcaatcatggtggagagcggcaagggttttggaatcaaagtatggcggctagaggggtcttgatgaagtttcaagtgatagtaatgtctcgttatggtggagagacctaaaattggctattcataatccgcaatatgagacagccctacagggaggaatagtatggaaggtggggaatggggaaaagatcaaattttgggaggataggtggcttgatggcgacacaacacttcttgcaaaatatcctaggctgtatctaatttcctactagcagaaccaaaacattcaggagatgggagctcaagaagctaatggatggga

SEQ ID NO: 64556 - DNA, 356 bp, Glycine max
  Clone ID: PAT_MRT3847_29305C.1
gcgcataaaaagttgatttttcttttttattggaaagaagcatagctgctgaggccctgtgtgtatgtaccctaaccagggcgttttctgaggaactgcccttgcgtagcctttctttctgcccgtcctgttgcacgagaccgagcacgcgccagtcccacccgcgggccgatgtttttgtcccctcggtcattgacggccacctaggaccccgaagtgacgtccccgaggatcctaaggggtccttcaggctcggggatgtccaaggcttggaagccctgcgggcacaggccaccgtctctctgatgattcttgatgacatattcctgacctgtgaggtttatccgcactcctcc

SEQ ID NO: 64557 - DNA, 233 bp, Glycine max
  Clone ID: PAT_MRT3847_29306C.1
cccaaggcctgcttccccttcacaatttcctcctctcttttaatctctttcagctttgctggatcaattccaggctctttggacggggcctccttttcgggacttccaaattcatatccatcattttctgcaacatccttactctcaattttggattcaaaatccctccccttgttttgggaacctttcggagcggttctggattcttctgaccagcaaaattttcttgtgga

SEQ ID NO: 64558 - DNA, 626 bp, Glycine max
  unsure (1)..(626): unsure at all n locations
  Clone ID: PAT_MRT3847_29307C.1
gttgttgttgttgttgtgcttattgtttttggtttaaaagctgtgttagtttcaatctgttttgcgatgtgtgtgaaattgtgaatctgttcttgttgtttagatagataactctagaatcttaagtttgtttgattttactaataagcggagttgatattttactgaactggttttgctcttttttgtttttttggcttctgaatcctgtgttttagttttgcacactattcaagtttatctcctccagcaggggaactaagtagggtttttcgaatttgatattggaatattaattagttaaattgagcatttaggagtgtgtgtgggataaaatattttgtgaattgatctaattttgttctagttgctagaattgacttcttctccccttatttgttaggtcataagggtaattaagtaaaatacctgatataagatcaattcattttgtctttaactctttattgtgttctgaagaacaatggaattttagttgtaaatcaattcaaacaatcgaatgtctttttttaaaaaaaatggagttgaaatgtgatttttaaatcagttcanatagtatcagttacaactaattgtgattctgaatggaaactttatggtatctg

SEQ ID NO: 64559 - DNA, 1632 bp, Glycine max
  Clone ID: PAT_MRT3847_29308C.1
gcgaggcccacgcatttgtacggaggaaggaagacgaaggaagcgggaatttggaggaaggaaggtaaaggaagcaaacgcaagagcaagagcaagagcgaaagcggcagagaagatggaaggagaagagggttctcagcagccacagttggtgctcgcggacaagctattccttctccggcaacccgatgtgcaagacattgacaaggttcgctacaaagaggatgtcttcactcatgtcaaggaaaacgatatggtccctctgtacgaaaccctagtcgctgattccgtgttggacttggatcgtgcccttttggactctatgcgcgctaaaattgacgacgagctcaccaagctcgacgaaaagattgctgatgccgaggaaaacttaggagagagtgaagttcgtgaggctcatttggcaaaatccttgtttttcatccggattatggacaaggagaaagccttggaacatctgaaggtaacagaaaccaagacagttgcagttggccagaaaatggacttggtgttttatacattgcagcttggtttctttgacatggattttgatctcatttccaaaagcatagacaaagccaaaaacttgtttgaggaaggtggtgattgggaaaggaagaataggctgaaagtgtatgaaggcctgtactgcatgtccactcgaaatttcaagaaggctgccaagttatttttggattctatttcaaccttcaccacctatgaactttttccctatgacacctttatattttatactgttttgaccagcattatatcattggatagagtttccctaaagcaaaaggtagtagatgctccagagatcttgacagtgattggcaaaatcccatatctttcagagtttttgaactccttatatgattgccaatacaagtcttttttctcagcatttgctggcctgacggagcaaattaagttggaccgctatctgcatccacacttccgttattacatgagggaggtcagaacagttgtttattcccaatttttggaatcttacaagagtgtgacaattgaagccatggcaaaagcctttggagtgacagtagatttcattgatgtggagctatcacgttttattgcagcagggaagcttcattgtaagattgataaagttgcaggtgttcttgaaactaatcgccctgatgctaagaatgctctttaccaagcaactattaagcaaggggacttcctgctgaatcggatccagaaattgtcacgtgtgatagatctttaggtcatctcttgcattttagattaaaatttactggaaaggcagagataatgacaatttcaaatttgaaggacatccttttgaatacatttctgtagtccatttgatttccaaatatgaacggttgaacttgctgcatccaaatatgtcaatcagttttcaattatttctgtgaaaaaagaaataaattgttaatctgattgcgtataaaaaatgactggctgatgcaaacacatgtttgatcattgtgcttgccttcgacgagatttcccttctatcccttcacccgatttcttccgagtcctgctaggttgaaacggaggacttggtaccctatataatcagtgagtgttacccat

SEQ ID NO: 64560 - DNA, 769 bp, Glycine max
  Clone ID: PAT_MRT3847_29309C.1
ggaatagctattttgttggaaggagcctgcgcgtccggtaaaggaagccagaggagatggaagaagagggttctcagcagccacagttggtgcttgccgagaagctattccttctccgacaacccgttcaagacattgacaaggttcgctacaaggaggatgttttcactcacatcaaggaaaacgagatggtccctttgtacgagaccctagtcgccgattccgtgttggacttggatcgtgcccttttggacttcatgcgcgctaaaattgaagacgagctcaccaagctcgacgaaaagattgctgatgctgaggaaaacttaggagagagtgaagttcgtgaggctcacttggcaaaatccttgttttttatccggattatggacaaggagaaagccttggaacatctcaagataacagaaaccaagacagttgcagttggccagaaaatggacttggtgttttatacattgcagcttggtttcttcgacatggattttgatctcgtttccaaaagcattgacaaagccaaaaacttgtttgaagaaggtggtgattgggaaaggaagaataggctgaaagtgtacgaaggcctgtactgcatgtccactcgaaatttcaagaaggctgccaagttgtttttggattctatttcaacctttaccacctgtgaactttttccctatgacacctttatattttatacagttttgaccagcattatatcattggatagagtttccctaaagcaaaagtagtggatgct

SEQ ID NO: 64561 - DNA, 250 bp, Glycine max
  Clone ID: PAT_MRT3847_2930C.1
ggggaaggcacaaatgatggcctccagcggaagggggagagacactggcaggagtgagggaactggcaaaaccaatccaagggggcgcagatcgaaggccaaatggatgcaccccaacgatttgcctttccacgacacactgcatcccaacaacccggggagtgcctataagcctggccccaatacccgagattgctattacgtatcgacagaaataggcctacctcatagcgaaccccttgaagggaag

SEQ ID NO: 64562 - DNA, 326 bp, Glycine max
  Clone ID: PAT_MRT3847_29310C.1
gaattcttaataatcttcattcaaaaaccatatttttttatctacacctgcctatatataccttaactaattcaaaacccctaaaataatactgcacacgggcgaacaaagaaacttaatctctttaatttatgcttactttttcaaagcttaaccacccaaagaaaatccgagaagaactctcaacgtaattctcctcctacctggaccattccatatccggaaaacttctcgctgaatagccaacactacatgatacgcacatacatgaacaagaacaattattaccattcctcctctcacctccacttcccaaacttcaatga

SEQ ID NO: 64563 - DNA, 244 bp, Glycine max
  Clone ID: PAT_MRT3847_29311C.1
caccttgcgaactccgccttctacaactctctcttctgctgcatcttccattcacagaacaagatccaccaccttctccttctcctcttgttccccaccaactcttcgcttcaatctccacagctccctctctcttacttccgcttccgcttcctctcccactaccgcttcgaccactgagctggacgcctgtcctccttcagcccgatcgttcccgacctctcgttttcgctcttttcgaaaa

SEQ ID NO: 64564 - DNA, 616 bp, Glycine max
  Clone ID: PAT_MRT3847_29312C.1
attcggcgtggactcgagccgttctcttaaaaaacttctgatatattccaatctgttgaccatcatacattctaacccttacgcatgacttagaataataacgtgaaatcaacaaatggaaaacataatcttcatgcattgttaagaaaatgaagcaaatgtgtgtatccaagaagccaaaactatagttagtttaatcttctccccattagcactaaaacaaggggaacaaggttaactattaacatattttgaaaaaataaaattgtaaatccacctgaaaatgttaatgatctctatgtaaagcatcttcaagatccagttccacccctatgcgattttttaaaacggtactagcatgtaagggggttttgcacttgcactggagctccttgaatctctcaatgtcaaaattttgcctcttgaaaagcttcctctgccttgaaagaaagagcctcttcatgaagtcttggtatgtagggtctcttgaagtgaataagaagtaggcgtagcctatgaccaacccagtggttgtggtaaaaaacgcaatcggttccattacatcccatgaaaattcccagaatgttagccggaagaagaagccgacagtgattac

SEQ ID NO: 64565 - DNA, 1190 bp, Glycine max
  Clone ID: PAT_MRT3847_29313C.1
gggaacaggggcctgttgaatttgtaagactgaaaacctgcgtcaaacctactgagtaattactaagtctcgcgtccatacggctgcgactcccaaaaagcatatgtatgtgcttggtgagaaagaagtccttttaggttatagggaaggggatagtgtcaggttcctctctattgccaagaagttaaaaagacaaaattccaccagaaggtatatcctgaagatatgatcaatcagtccaatgggcacctgaaggccaggtaaatagccggtataacttccttcactctctggtagcgagaaagcttctgtaaatcagagggtagaaggtgaagcggtggtggtgatctagtcttcaaaagaaaatctcgaagaactagacaatactttacttaccagccttactaggcaagacagaaaccaatcctagaactacaagatgatacgacttctcctaacgacaagtaaaggcatacccgaacataaaggagagcggctttccctctattagaaaacaagaatggaagtccatataaattagggggaaaggagaaagctcaagcgcgtggcacaaaacagtgggttcctgatcttgtcttccttcaggctaaagcttcaagtctcaatccgaagtcaaagagaactattcaacaacatccctcttttctacatacattcctggggtttttggttgcttggtttgcttaacgttaaaaatttctatcgtcaatagataagggctcagacgatgttatctttcccccttgggaaagcgctttaacattagtgaagactagctatatatcatgctacttcagctagaagctatatgcttcttttctgaagactagtcttcagactcattctatcctatctatccacctgagagagatcactcctgtgaagagcctcacctaaaagaccagtgacagcctattcttgcagacagcggattctctttctttatcttcatgcggccctactcgggtttgccctgccatttgcaggcatttgcaatgcgcggggttgaaaaaagaatgaggagaggcgagtgatgtttgattgtgatgggccaatgactgtgttgagtgaggggttgaggccgggcttgggaggtgggggggctgctggggggggggcgcgccgtcgcggggtggggggggcatggggcgggtggtggcggcgggggg

SEQ ID NO: 64566 - DNA, 579 bp, Glycine max
  Clone ID: PAT_MRT3847_29314C.1
acaaaagttggtagcttccttccttcttcaaacgcaacgaagtttctttccactttcaaaattcccacccgcccctttgttctctccgtacaacatcatcacccctgattctgggtcatttaaatccccgaatttcatcattcgttattttcatcgtttttttgcctcttatttcatccaattctcgctttttcaacgatcacagtgttgacccttgatgggtttttctcgtcgatcataagcatacccgggtttgtgaaaaaggtttctcctttccacgtgtggcttcacttgtcatcgatcctgagctccatatagcttgcaacgctgtggaactgtgtactttgttgctccttttctctgtttccccgtgtgtcaattcagcttaggccataactggatcacatgaaaatgaagccttcttcttccaatgaagaaaaccatgacgtggaaaatgccaagttggacaaagtcaaagttagaactccaaggaatggaaggtagttcaattgcacaatcaggccttgttgtctggacttgcatattgcttttcctcatgtggcatgatattggtcaaca

SEQ ID NO: 64567 - DNA, 357 bp, Glycine max
  Clone ID: PAT_MRT3847_29315C.1
tttttgaacaatacacttgctaatggctggggggtatgcaaatacgcataattggatcttgggtgttcacgtggccaaacaccaaaagatagtgagagtgataggtgtaataatcccaataaaacagaagaatgttgacgagaccatataacacggatattacaacttccacagcagttattcgcttctgatcttaaaatgaactccgcagacctgatacacgtctaacctatgctggagttaatcttcagctcttaggtacagagttttcaccccagaaatctggagtctgacacaccttttctaaatttagaattgaagccatttgagtaacacgtgcgaacttgtctctaacag

SEQ ID NO: 64568 - DNA, 328 bp, Glycine max
  unsure (1)..(328): unsure at all n locations
  Clone ID: PAT_MRT3847_29316C.1
gtcttgtgcttttgtgtaaaagcaatacttgttgatgtcgtatccttgcttagttataacatttcttttaagcccatcagcttgctttcttaatgtttcagaagcattttcatcaccaatgattgtatctttaaaccaatcagagaaagtcttgttatgcattttcaagacccagttctttgacatttttggttgactttggttgactaaaccttcatgctgaagtatgtatggcaaagcttcattactggtgntcaacacatacaagtgagcttgtaacaaatcttttagacttggagtgataacatgcaatccttttgaaccctta

SEQ ID NO: 64569 - DNA, 1844 bp, Glycine max
  Clone ID: PAT_MRT3847_29317C.1
ctccctcatcaccttgctaaattctctggctaattcgcgattttcttgtagtaaacagagcaagcgagcttctccaattcaacatacatggcccccgaaaccgattcaattgaaatgttcttcttccccttcgtaggaggaggccatcagattccaatgatagacgcagcaagagtgtttgcatctcacggagccaaatcaaccattctagccacaccctccaatgctctccacttccataactcaatctcgcatgaccaacaatccggtcttcccatcgccattcataccttctccgccgatatatccgacacagacatgtctgctgccggtcccttcatcgactcctcggctctcctcgaaccgctgaggctgtttctcctgcaacgcccccccgactgcattgtcatcgacatgttccatcgttgggctcccgacatcgttgatcagctaggaatcacaagaatcctcttcaacggtcacgggtgcttccctcgctgcgttactgaaaacatcagaaatcatgtcacgcttgagaatctgagttcagactcagagccttttgttgttcctaatctccctcacagaatcgaaatgacaaggtctcggcttccggtttttctgaggaacccgtctcagttccctgataggatgaagcaatgggacgacaacggtttcggcattgtcaccaacagcttctatgacttagaaccggattatgctgattacgtaaaaaagagaaagaaggcatggcttgtcggaccagtgtccctttgtaacagaactgccgaagataaaaccgagagagggaagccaccaacaatcgatgaacaaaaatgcttgaattggttgaattctaagaaacccaattcagttctttatgtcagctttggaagtgtagctcgggttgccccctggacagttaaaggaaattgcttttggtcttgaagcttctgaccaaaccttcatttgggtggtggggtgcattcgcaacaacccatcagaaaacaaagaaaatgggagtggaaactttcttccggaagggtttgagcagaggatgaaggaaaagaataaagggttggttcttagagggtgggctcctcagctgttgattttggagcatgctgcaatcaaagggtttatgacacattgtggatggaactccactttggaaagtgtgtgtgcgggagtgccaatgattacgtggcctctctcggccgagcaattttcgaacgagaagttgataactgaggttttgaagattggtgttcaagtggggagcagggagtggttgtcctggaactcagaatggaaagagttggtgggaagagagaaggttgaatcagcagtgaagaagttgatggtggagagtgaagaggcagaggaaatgagaacaagagtcaaagaaattgcagagaaagctagaagagctgtggaagaaggtggaacatcttacgccgatgctgaggcattgattcaggagattaaaggtcgcagattggcaagacaagattagaatttcaaataagagaagaaagggttcaactcatcgggacaactttatgatgaagagtttatattcatgccatgaacgcataacaaacacaagaaaaacagctcgttactttcctgcatcactagaaaactgatactagatgcctagatctatgcatacaactagagcacattaatgctgagtttttatttcaatggaaataggagggagagtggaaacgagagtgatggaaataaaggtggttttgtttgatatcataaaaatgtagtaaaaacctgactatttgtttatttttttttatatataactgtcacactttgcaaccatt

SEQ ID NO: 64570 - DNA, 277 bp, Glycine max
  Clone ID: PAT_MRT3847_29318C.1
tgcagcatcaaatgtgctaattagaaaattgattgctgcgggtggaatgttccatcatcagagttcaagaatagccatggcctcacacatgaaaatgcatagtattggaggcagtcctggaacatcattcagaatctcagacactcagatatttttgtacacaggagttgagaatgcatcagatgcaagcactgatcagggaagtgcaggaatgagttcaacttcatcagaacacactgcatatgactcagcagcagagaacagaccctcaacaaca

SEQ ID NO: 64571 - DNA, 486 bp, Glycine max
  Clone ID: PAT_MRT3847_29319C.1
ttgtctggggcctcatggggacaagtgtgttgaacaaacagcaacagtacagagcattttgttgcatgtacgaggacaaaatcggaaccacattcctgggaattgatctagccaatgagagatgtggtcctaataatggttttgaaatgtggagttctgagtgggcaaataaaactaaatggcatttgagtttccttattgacaataccaagcagtctacagaactcgcaatgaatgggggaatttctcaggatttcgaaaatgctggtgacacttttatgccacctttttgtgatccacaggctcctgacataactgatgaaaatgctgtatcctcggcatgaactggaatccgagttttctttcgctcgttcgttagtttaattcaataaaggaaattaagcatgaccctcttgatgagttgctctgcctatttgaaaaatcacacctcttttaattgtatatgatgagtgaagttgtgtattt

SEQ ID NO: 64572 - DNA, 1652 bp, Glycine max
  Clone ID: PAT_MRT3847_2931C.1
gccgaaacaggtttcctataaaatcccgcatgtaccggagaagacgaggggaaaccgagaagaagaagatggagatgtatcagatctggagcaggagaatagcgttgggagcgttcgcgtttgttctgcttttcctatcggcctcagcagacgacgtcgttgtgctctctgaagataacttcgagaaggaagttggtcaggacagaggagctctcgttgagttctatgctccttggtgtggacactgcaaaaagcttgctccagaatatgaaaagcttggtagcagcttcaagaaagccaaatctgttttaatcggcaaggttgactgtgatgagcacaagagtttgtgcagcaaatatggagtctctgggtacccaacaattcagtggtttccaaaaggatctcttgaacccaaaaagtatgaagggccacgcactgctgattcacttgctgagtttgtaaatacggaaggaggaacaaatgtgaagattgctacagctccttccaatgtagtggtgcttacatctgaaaattttaatgaggttgtcttagatgaaaccaaagatgtcttggttgagttttatgcaccctggtgtggacattgcaaaagtcttgctcctacttacgagaaagttgccacagcatttaaattggaggaagatgtagtaattgcaaatctggatgctgataaatataaggatctggctgaaaagtatgatgtgagtggatttcctaccttgaagttcttcccaaagggcaacaaagctggtgaagagtacggaggtggaagagacttggatgactttgtggcttttatcaatgagaaatctggaacaagtcgagatgtaaaaggacaacttacttcccaagctggtatagtagaaagcttggatgtcttggttaaggagtttgtagctgccagcgatgaagagaagaaattcgtgtttacccgaatggaagaggaagttgagaagctgaagggttctgcctcaaggcacgggaagatttacttgaaagctgccaagaattacttggaaaaaggttctgattatgctaagaacgaaatccagcgcctacagcgcatacttgacaagtccattagtcctgccaaggccgacgagttaactctaaagaaaaatatcttgtcgacatatgcggcttgactttttggtgcatcattaaccatctctcatggaagctcgtgatcaatcgcagctcctgatgattgtttgactttgatatcgaaaatgctgggagatattcaacgtggatacttgtagtgcttaatttgagtctgtactattgaccttatcttgcatggcgcttttggggttaaaaattccgaacttacgattcttctccccattgtagtctacctgagcggtttaaaattttgggagacgatagcttttgtctttataccatgtgtttcgttcgttatttgatggtgtacgatttgcttataaataagaaatgaacgcaacaatcaaccatctcgaatgaaataccctttttcatttcctgtatgttgatagcctctaacgttgtaagctttacgttgcctgcaattaatgaaatcgaattttcatgttcttcatggtgcgattattctgatcttggtgctttcattcttctatgtaaaattcttcttg

SEQ ID NO: 64573 - DNA, 332 bp, Glycine max
  Clone ID: PAT_MRT3847_29320C.1
aaaagattccttgacatctcttttaattcaaatgggaatgagttgccaaatcgctcatattcttaaacataaaattttacagaatatgaatactagtgagaatggtggttgtttgctcccgggtgatcgttatccagattggtggactttccacagtgaagattcttctgtgatttttgaaatccctcaagtgaacaaacgtaacttgaagacaatgatgtgccatgtccattattcttccccagtcaatatagcaacagatggcttgaaaaatttgttggtgataaatcacacaaagaccaccattcagctttacaagagtgatgcattag

SEQ ID NO: 64574 - DNA, 491 bp, Glycine max
  Clone ID: PAT_MRT3847_29321C.1
aaatgaacatgtttaaaaattaatgtcggatgtagcttttacaacatcaagactcaggtaggccaagaacatatcaaatttgaatactatgacacatttcccggtggattatgggctaagatacgcaagcaatacaacagccacgagaaggctgctaagttgcacgggaggacctcacaccatgcaactgttgaaagaaacatacctattgtcactgatgaggaaactgatctggacgctatatcaaaacttgcttaagctgatgatgcccgtttgaccaatacatgctctgggtgagatagacctagctggctgcatgatttgttccatggaccggcgcaatgaagacagaccacatctggattggctagagcttctggatccctggcatccttgttaagagctctaaccctaagggtctgaacttaggtgcatgtgaacaagtgcatgccgcaaacagccttgtcattcaagagcgaggtggcggactg

SEQ ID NO: 64575 - DNA, 436 bp, Glycine max
  Clone ID: PAT_MRT3847_29322C.1
ggctcgagatacaaagtagattgctagctatcaaaggaaaagctaactagcatctgtgctttgggtggaggcagagaaaattcaaggaggtggatcatggccatgatgtggataagaatcatacttctagtagcggtttgcatgctttctctttcagtggaagccatggttcgccactacaagttcaacgtggtggtaaagaatgtcacaagattgtgttcaacaaagcccatcgtaaccgtaaatgggaagtttcctggccccacaatatatgctagggaagatgacactgttttggtgaaggtggttaaccatgtttaatacaatgttagcatccactggcatggggcgagacaattgcatactgtttgtgccgattgggctgcatacattactcaatggccaattcaaccgggccaggcctttgtggacaact

SEQ ID NO: 64576 - DNA, 203 bp, Glycine max
  Clone ID: PAT_MRT3847_29323C.1
ctttgtatacacaaattgggggctcactgaggtatctttgttgtactaaacctgacttattgtatgttgctggcttaattagtagataaaaccaaaatattacacttctctaacttttccaccgccaagaaaataatcatgaaatttgaaaagcactctccattatggtatactattttccagtgctgccaaaaaatgtaatg

SEQ ID NO: 64577 - DNA, 735 bp, Glycine max
  Clone ID: PAT_MRT3847_29324C.1
ggcatgtcgtgagaaattaccaagggataaactaaatgagaggcatgctattattttgcatattgtgtgattgagtttagtcttctaaatctcatggcttcaatttggcatgattttaaggtttctggaattgagttccatcctggagcctagtatgcagcccaaatcagacaaagttgcaatattaagcgatgcggctcgagtggtaatccaattgagaaatgaagccatgaggctgaaggaaatgaatgatgaactacatgcaaaagttaaagaattgaagggtgagaagaatgagcttcgtgatgagaagaataggttgaaggaagagaaagaaaagtttgagcatcaagtaaaagtggcaaatatacaacccagcttcctgcctcaagccccagatgctaaaggacaagttggtagccacaagctgatacctttcattggataccctggaattgccatgtggcagtttatgtcccctgctgcagttgatacatcaaaggatcaccttcttcgacctccagttgcataaagtggttagcaatagcatccacttcttttttgtatgcgttttatttttgtgtaagttatccattcagtctattgtgttttttctaaagttactggtggaaagtgtgctcggaaactagttaattatataaaattgtgttgttgttgtctgaactatgataagaaagtgctacatgtcatggctacaaagtgtgttgcttgatt

SEQ ID NO: 64578 - DNA, 1044 bp, Glycine max
  Clone ID: PAT_MRT3847_29325C.1
gtaattttgacgtgattctgttcgcctacaattaacttgacagttgatcatacacactcttcttcttcttcttcttctctcttcttgcttgcaatatggacatgaattcctcaggtggtgcctgcggttggctttatgattatggctttgatatccctgttgctggttctgacttcatggcttcagactctggtggtttcagttgggggccccagagttacaacttcaagggtccttcaaatatgagcttggaaatggaatactcactggattcaactgtcatggaaaatggtccttcaaagcggttaaggactgaatcatgtgcatctggctccaaggcatgtcgtgagaaattgcgaagggataaacttaatgagaggtttctggaattgagttcgatcttggagcctggtagacagcccaaaacagacaaagttgcattattaagcgatgcggctcgagtggtaatccaattgagaaatgaagccgagaggctgaaggaaatgaatgatgaattacaggcaaaagttaaagaattgaagggtgagaagaatgagcttcgtgatgagaagaataggctgaaggaagagaaagaaaagttggagaagcaagtgaaactgacaaatatacaacccagcttcctacctcaagccccagatgctaaagggcaagttggtagccacaagctgatacctttcattggataccctggaattgccatgtggcagtttatgtcccctgctgcagttgatacttcaaaggatcatctgcttcgacctccagttgcataaagtggttagcaatagcatccacttctttgttgtatgtgttctttacatgtgttatatttttgtgtttaagttatccatcctgtctaatgtgtgttttctaaagtcactggtagaaagtgtgctcggaaactggttaatagtataagtttgtgctgttgctgtctgaactatgataagaaagtgctacatgtcatggctacaaagtgtgttgcatgattaaaaataaaagtcagtttaagtggttctttgctgt

SEQ ID NO: 64579 - DNA, 1008 bp, Glycine max
  Clone ID: PAT_MRT3847_29326C.1
gcggccgctttttttttttttttttttttaaaatgtaaaaggcaatttacttataacatccctcggcagcaaaggagcaaaactaaaaccctgtagctgcttgtgcaaaaagagttctcatacagcttataaaatagaaaagtcaccaccgcccatcaagaacccagttttgaaaggtaggtggctgcaatgaaatggctgatacataaaagtaaaactataacaagtaaaagcacctatactctcaaaaaataaaatactaataaggaaccactgttgtgtgtaactataaatgtaactatgatcgcatgtacttgaagaaacacaaaaatgtattcacttcttcttctgtgcagccttggtgaccttggctccagttgggtccttcttctccacactcttgatgactccaacagccacagtttgtcgcatgtccctcacggcaaaacgaccaagaggaggatactcggagaaagtttcgaccaccataggcttggtgggaatcatcttaacataacctgcatctccatttttcaagaatttgggctccttctcaatctccttaccagatcgcctgtcaatcttggtcacaagttcggcaaacttgacggcaatgtgagaagtgtggcagtcaagcacaggagcataaccatttccaatttggccaggatggttcattataatgacttgggatgtgaagttggcagcctccttggcaggatcatccttagagtttgaggcaacaaaaccacgcttgagatccttgactgcaacattcttcacattaaatcctacgttgtcacctggaagggcctcctggagagcttcatggtgcatctccacagacttaacttcagttgtcaggccagtgggagcaaaagtcaccaccataccgggcttcaagacaccagtttcaactcgtcccactggcacagttccaataccaccaatcttgtagacatcctgcaagggaagcctcaaaggccggacgcgtgggctcttgggctc

SEQ ID NO: 64580 - DNA, 817 bp, Glycine max
  unsure (1)..(817): unsure at all n locations
  Clone ID: PAT_MRT3847_29327C.1
tccaacgtcagcccacgcgggcgactggttactcatcattctccattctacgcatacacactaccggcttttctctctcaaacatcgttatcgcccttcgctccgattcgacgccgttattcccgccgccgtcgatctcgacggcacgaaacctgagacgaacaactccatttctcagttatttgcttatattttgagaggagcacaaggaaccgttttgtactaaagagaaagtgagagggggagatgaaataagttcttacagaagatggcgtcgaggcaaatggaagagattcggaagaaattggctgacctaaattacccgagagcgaatgcgcctgcacagtccctcctatttgctggcatggagcgctatgcccttctagagtggcttttctttcggcttttaggtgataagtcacccttttctcaacaaaacctacaaggggatggccatgatcgtgacgaggagactggtcgaattcagtatttagcagagattgctaagtttttgggtattacaacaaccgtagatacagatgccatccaggggcatggaagctatgaagaccgtactgaaatgcttcgtcttattgttgatctagtggaggcaacaatatgctcagataatccagaatggagtgttgacgagcaggtagccaaggacatccaattgatagactccattgcagaaaagcaagctcaaatattttctgaagaatgtaaattgtttcctgcagatgttcagattcagtccatatatccattgccagcttattcgattctggagttgaacaaccaaaatttnttgaatctc

SEQ ID NO: 64581 - DNA, 321 bp, Glycine max
  Clone ID: PAT_MRT3847_29328C.1
cacaaaaaaattcgataatagattttgagaagggggttcaagaacaaacttgagttaaaaaagagctcattaaacattttttttttttgcacagcaaaattttatattatatattaaaaataaaaatcagctctgggtgcactgaagtgcacaacagataatatgggcagtgaaaagtcacccccagcgaagagtcacccccctctaaaagacatgcacaatacaatacaggtgaccagctgtgtaaaacccctctaagagagcccctccttcaagttaggagcccagtggttaaaaagagtggggaatcccttctccata

SEQ ID NO: 64582 - DNA, 676 bp, Glycine max
  Clone ID: PAT_MRT3847_29329C.1
ggctcgagctccattctccgcatacactcactacccgcttttctctctcaaacatcgtcgccgcccttccctccgattcatctccgtcggcctcgccgacacgaaaccgtagacgaataactccaacaattctcagttctttctttaatattttgagaggagcaccaggaatcgtttggcactaaagagaaagtgagagagggagatgaaataagttcgtactgaagatggcgtcgaggcaaatggaagagattcggaagaaattggctgaccttaattacccgagagcgaatgcccctgcacagtccctcctatttgctggcatggagcgctatgcccttctagagtggctcttctttcggcttttaggtgataagtcacccttttctcaacaaaacatacaaggggatggccttgatcgtgatgaggagacaggtcgaattcagtatttggctgagattgctaagtttctgggtattacaacaactgtagatacagatgccattcaggggcatgggagctatgaagaccgtactgcaatgcttcgtcttattgtagatctagtggacgcaacaatatgcgcagataatccaaaatggagtgttgacgagcaggtagccaaggacatccaattaatagactcctttgcagaaaaacaagctcaaatattttctga

SEQ ID NO: 64583 - DNA, 315 bp, Glycine max
  unsure (1)..(315): unsure at all n locations
  Clone ID: PAT_MRT3847_2932C.1
ntttttagagaaaaagaagtacaggataaaccagataaccagagattcagagaggcgtgtaggggttaggctttagccggtaccttcctccccctaagccgagaatagcagatgatagcgtgaacccctcttaactagaataccagtgctacannttacttttgagtttcaattcaagcccaattttaatttccaaatatttactagtgtattaaattcaagttcttttttattagatgtaaaataaagatttaagcttctatttggccaaaaggatttaaccataaccatgatcctctcgagcccgaatttcga

SEQ ID NO: 64584 - DNA, 388 bp, Glycine max
  Clone ID: PAT_MRT3847_29330C.1
ctatgcgtgcgaataggcattcttgaacaacaagccaacagcaattttgtaagaaagatgttggagaggtgaatagtgtaaccccttctggatgtccggtcacagctagtggcactatgctttttaaagagatgctcaattgagatagttataaaaaaaacttgcgggcagatgtctaaggttttggggacggcacctgaggacaaggcgaggaaatggtcacaacttcattatgtttcgagtaataatctggaaacgcaagaagcttaacttgtcaatctcgtaaatgtgttacgagaattgtatttgcacagttcagaggaagctcgacaatagacaaggaaagttgtatctggcatagaatggctgtagacagatggtgagcctg

SEQ ID NO: 64585 - DNA, 261 bp, Glycine max
  Clone ID: PAT_MRT3847_29331C.1
tatcacagaagccatatgtgtatgccagaatattagacttttgcgtaccctcagcgaagtacaatggtcgatatgatgaacacagagaaacatgtgcactagatcatgggattgctggtcactacgaaatcgatgcatcgtcaatctcgtacgcccgtgaacgaggaatcatcgtagaagctgaacgtccagatggcgatcgagattgccatcgtgaacgagcgctcgaatctaggcggcaacgagatccgtacgagcacg

SEQ ID NO: 64586 - DNA, 407 bp, Glycine max
  Clone ID: PAT_MRT3847_29332C.1
aaagggggaaatggcgaacccaacccccgggaaattccaaataactttaaaaagaacttttaaaaagaattttttttttccccgggaataaaattcccccggataaatttggttccccaaaaaaaaaaaagttttttttgcctgagtggggttaattatgctcccattgggccccaattttttcttccccgggggaagctgtttccactggggctgcaaaaatcggggggaccaaaacctttttgggggacttggggaaaaaaagaactgggaaaacagggggttttttccccgggaccctattttttatagggggcccctttcttttggccttttcaaaggaagatttgggggggacaaaagccccccttggggggggggaagcccctggcccccgaaaacttttt

SEQ ID NO: 64587 - DNA, 421 bp, Glycine max
  Clone ID: PAT_MRT3847_29333C.1
acgaggaatctataagctccatatattatcatctacatccctatatcttaaaagcacacatttccagatgaaggacaagttatttttttatatacgttcttttctttgatattcaaattaagcttatgacaaatcaaaatataagtaataagttgtgcatgcaaattatcgtgagtttaattttaatatacgatcagacaatcagttagaaattattgtatatatgacttttaaagtaattattataaaaataaataatcttatcgtacataataataatctatgactacataatataaacattaggcagatgttaaccccttagtatcttagggaccctgacttaaagaataaaagaaaaaaatgaatttatgggatggggaaaaatgtgttctataccttctaaatgggttcttatatg

SEQ ID NO: 64588 - DNA, 614 bp, Glycine max
  Clone ID: PAT_MRT3847_29334C.1
catggaagcaatatatatggagtgctatagagatagagagagagagagaaagaaaagagtgtatgtatttatgcgtttgtgtgagagatagagagatagagagagagaaagagttgttgataaaaacataattattttttcttcttggtctttggagggtcatgtagatgtagtagctatagatttttggtttatttgttgataccctttttcttctttatcttatttttgttttgaaatctgaaacctttcaaaatcggttttgggtgtgagtgaatctcgtgagttgaagttttttttctttctttctatctttgcaccgatgaggatccggaaaaggccggcgcttttcccttcttcgctctcgccgctgcgtctctcagatccccacctgatcaaccggtcaccggtggtggtgcaactaagcgacgctacttccaccgcaccgaaactttctttttcttcttctgcacaccatgctgctttcgcgcctccttcgagcttggatcgtttccagccgtctgatcagcctctcccttcgatcgggaaacaaagcaacggctccgatgatccctccggcatcggtgaaagtggggcacacagacagcacaaca

SEQ ID NO: 64589 - DNA, 199 bp, Glycine max
  Clone ID: PAT_MRT3847_29335C.1
ggacatatgttgtcctgaggcgtggatagaaatgccaatttcgctcccttgtcttttcttgcacctggacacaatattttgttccgaatgccttatcccttgtatatcacttaaatattaatcataataaaataatgatatacgcgttttacgtctttttcttaagctgaacccactgtgaccatcttgcctggattcc

SEQ ID NO: 64590 - DNA, 334 bp, Glycine max
  Clone ID: PAT_MRT3847_29336C.1
gagaactaacatcagattttaagatgatagcaagagctttgacaatgacaggacatgccttggttaaaatggcgaaatgctctaacgattaccagtctgctattgagacttatcttaaagcactcactgatcaccgtaaccctgatcctttgatcaacacttaatgaagctgaaatggctaagaccgaactagatcatcaagagtatcttgatccaaagttggctgatgatcagatagaaaaaggaacttaactcatcaaacatcacaactatcctgatgctgtcacccattacgcatgagtctactcgaagtcatccatgtgatcctatggct

SEQ ID NO: 64591 - DNA, 202 bp, Glycine max
  Clone ID: PAT_MRT3847_29337C.1
ttttggtttggggtgtgggtcctatgccttccatcaattatttgaactttcccgcgcttttttagattacccatgttcatgggaagtttctagtatacaaccaatgtaaccggttaatcaaaactttattaaaccagctatacaaaaatgcattcaccgatttttttcacctttcaaaccgtagagaattatcacactattt

SEQ ID NO: 64592 - DNA, 1696 bp, Glycine max
  Clone ID: PAT_MRT3847_29338C.1
gcgggccccggcccggaatccccgggtcgccaccacgaagaaacaaaagcaaaatttggggcgagaaagcgaagcaccaggtggttttaaagtgctcaagtttcactaccacgcccactgttagatcttctcctttctcacctcttccaacaatacatcttctgcctactgctaggtgaaatgcagaatccagatgcaaatcaacttcccgaagttgattcgttgccagatgggtttgttgagagtactacagagcctcttgctcctgcaactccatctcctgaacaagagaaacccctgaatagttacaaggatgatggtccctctgaccttattcattctaatgaacgatcaaatgatttgggagaaaaagagtttcaaaacaatcatgactgctcagcggagagtccctctagaagctctatgcagcagacagaaggggcacagattacacctcctgtagctaattctgttcccgagtctctgctgtccagttgctgtgaggtaaatgagcaacaacaaggagaatgccaaagttcagatggatcaactgttgtacctttggagacaaaagcactgcctgtaaagagcacttgtccaccagagactgttgattcttcaaaaaacaaaaaacctgaaactagtgaaaagcgcaaaagtgcaaagcgtactcttaaatcagagaaggagcttttagaatttacactgaagtaccaacaagtgttggcagaaagagatgcagctcttgccgtccgagataagcttgagtcactgtgcagagagttacaacgccaaaataaaatgctgatggaagaatgcaaacgtgtatcaactgaggggcaaaacttaaggctggacttgtcagccaagtttcaagatgcaatcaaggatgtcagcaataagcttgaggagcgaaaggatgatgcctttctcagctaaaggagaatgacatgttaagaaacaagctaagacagctagttgaacaatatgaactctctgagcagcaacatgcacagaagttgaagcaaaaatcattggaactacagcttgctgatttaaaaattaagcaacatgaggaaaaattggttcaagaacggtcacagataaaagtatatgcagaacaagtatctcagttattagcaactgagaagagtttacggttgcaactgacaactgatggagaaaaattccaacaattccaggaagcattgtctaagagcaatgagatttttgaaacattcaaacaagagattgagaagatggcaaaatcaatcaaggaactcaagaaggagaatcaattcttgaagagtaaatctgagaagtctgatgttacactcatagagttagttgatgagcgggagcgcatgaagaaacaactggagaaaactaaaaatcagaaagaaaaactggaatcattatgccggtcacttcaggcagaaaggaagcaaaattcttcagagaacaagagcaataactcggttcaaacatgaagaagaatcggttccttcttccatctggatggaaatgtatttttctaatagtggcattaatgtgattcttttgcttttttatccatttcaagatttaattgtgtaccttttcttgctttttcacgacaaattctagtattggaaagtttgttggaatcttcgtgcgtcgtcggatttatgaatccttctacgaaaaatatgacttt

SEQ ID NO: 64593 - DNA, 670 bp, Glycine max
  unsure (1)..(670): unsure at all n locations
  Clone ID: PAT_MRT3847_29339C.1
gacctaacttaaactaaacgtgagttcgttaacaattcgtctgatccattgacatccccactattgatttgacgcaaaagatgctttactgaatacaaatcgaatgcagaaagtagtttaaaaaatgttttacaatagctctgttaaatgttccaataaacagcgtcctcatcactcaaaattggaataaaaagcaacatagaatgcataagccacattgccttcgccaattctgctcaaagcaaacacacatctggaaacaccaacggatccaccttggtgaaggaactacataaatcagagtcatttgaaggctggttcagcttttttcttttctcaccaacctttgctcctgtaaacctcgtcgtcatttgtagtttggtattagccctaagttggagtgtcattgctgcccttaggaacctcataaagggttacgctggtaccgccagtttgaagcatttgatcttcctcattccccccctttgactgaaagttttcgagaatttcaacaacctggctcattagcggtctacctttcgggttttggctaagacactggtatgctaaatgggccaccttcaatgcagttntacatgaatattgcccctctagttttgggtctaggattttcaaaagttttttgttatgattcattaggggacgggcc

SEQ ID NO: 64594 - DNA, 753 bp, Glycine max
  Clone ID: PAT_MRT3847_2933C.1
atttaatgtagcatgtgctgctgctggcttgacattgaagaacactccaactccattgatggaatctggcttgcaaaaagacagaggaggaattgtggacgtctttggaaggatggcttagcgtggatcataacggtaattagccccaagagaaagattctgaggagggaaatttttgctttgatgttaaatcgcgctctagagtgtaaaaagtgtgctctacaaaagcacaatttggtagtggaaaaaccttcaaatatagatataaatggtgctggttcacattcttcagaagattttcctgaaaaggaagatcaagaaaaacccaaaaagattgatgccagattgagacaaagaatagatcctcaatacaatgaggttcaggctcagatggaaacaaatttgtttaaattgtctcttgatgatgttgaaactcctaaaggttccatgttggatcttaaaatattctcaattctaaaaattgcactttcccaaaagacacatgttgtgaggaaaccactgtctgcgtgagtgattctatttggctaaattttgttgacagaagggcatattttagaagcaagttgtgtgattttgcagtcgcacttcattcgtattataaggaattgattaaatatggttggccaacagtatggtatttcctgaagaatacaaggtattagcattaggcctgtgcctaggaaatagttgcctttaggggggcgtgccagtttttgatatttacaccatctt

SEQ ID NO: 64595 - DNA, 907 bp, Glycine max
  Clone ID: PAT_MRT3847_29340C.1
ctggctttggccgggccgaggggggtccgatcccgggcctcaccccgggttctgcgcgcgtatggggcccctcggctcgagctgctcctgagtatgtcatgactgggcatttgacagctagaagtgatgtgtatggttttggggtggtgctgcttgaaatgcttattggtagaagagcattagacaagagcaggcccagccgagagcacaacttggttgagtgggcccgtccactactgaatcataacaaaaagcttttgaaaattctagacccaaaactagaggggcaatattcaagtaaaacggcattgaaggtggcccatttagcataccagtgtcttagccaaaacccgaaaggtagaccactaatgagccaggttgttgaaattctcgaaaactttcagtcaaagggggaaaatgaggaagatcaaatgcttcaaactggcgataccagtataaccctttatgaggttcctaagggcagcaatggcactccaacttagggctaaaaccaaactacaaatgacgacgaggtttacaggagcaaaggttggtgagaaaagaaaaaagctgaagccagccttcaaaagactctaatttatgtagttccttcacctatgtttgtgcccgagataagtcttcttccagaagttgaagtttcaccaatgtggatggcaattaaaatttgtacaaaatgttaacaggtggatccggtcggtgtttccagatgtgtgtttgctttgagcagaattggcgaaggcaattatgtggcttaagcattctctgttgttttttattccaattttgagttgctgtttattggagtattcaacagagttattgtaaaacattctttaaactactttctgcattcggtatgcattcaattaagcatcttgtgcgtcta

SEQ ID NO: 64596 - DNA, 276 bp, Glycine max
  Clone ID: PAT_MRT3847_29341C.1
gtagcagatcgcgtctctcgaaggtctcatgagatttgtggacatcaagtacgatgatttaaatttgctgctaacttttttttactaccctactttcatcgattataagttttctgtttgtccatttttctgtaattaagatttaaatgtatagatgtggtggtggacggggatctgtgtgggtatgaggtggagattaactcccccttatttaaaaagcccattcctggttcgagcatatgttattattcaaatagcctcactagattttagcag

SEQ ID NO: 64597 - DNA, 241 bp, Glycine max
  Clone ID: PAT_MRT3847_29342C.1
agacgacagaaggggatcgctattgtgattatagcagagaaggcaaagaaagaaaataatgagtaggtgtgtatcttgtgcgctgattcccaataagaatttcttggtatcaccaattcaaatcccaattcataatgcagtaaaggttaggggcaacaatagaacttgtgggctgcgcgttcagttttctaggggggcctctcccgcggttttttaaacaaggcgaatcgagggttttttt

SEQ ID NO: 64598 - DNA, 365 bp, Glycine max
  Clone ID: PAT_MRT3847_29343C.1
ttcgcgatatcaggtgccgaccttaaaaccggaaacaaaagcttcgttacttgatttcaagaatcttccaatttcttctactccttggtgacgatttctaagggaaagaaaatcactctctggctggccacagacttagtgaatcatttctttccactctagcttatttgctgaacactctctatttgatataggactttgcgcagattaaactttactgtactttctcagtctttgcttaatttaagttaagctggcgaatcttggattgtgctcccactcttctatctggtataggaacttcgtgggttgacttttatattttttgtcctttttcttcacttcttttctttctcaactgatcc

SEQ ID NO: 64599 - DNA, 386 bp, Glycine max
  Clone ID: PAT_MRT3847_29344C.1
ccatttttcatttcttgagtgtcagaaaaataaatatgccgtgccttggggaaacctccttcggggtgactacatcgcttgccgaggaaagctgcttgacatgggtacgcatgctctcaaaaaatgcgcattagtggagctgctggattcatcgcatataatgttgtgaaccggcttatacggagttatccgcagtacccaatgggtgttcttgacccacttggaaattgctcgaaactgaagactctcactccttcaaagaaagctcccaactgtcaagacttgaagggggatatcggaagtgctgaccttgtcaactaccatctcatcagcgagtgcattgacacaataatgcactatgatgctcaaacccctgatgacaactc

SEQ ID NO: 64600 - DNA, 258 bp, Glycine max
  unsure (1)..(258): unsure at all n locations
  Clone ID: PAT_MRT3847_29345C.1
ttgtaatactagcaatttcttgggggatatactcagtaatgacacaatacaacgcannaaacaccctattttttggtacacaattaagcgtcttgctcacattattgtgcatcataacaatgattttactagtgcatacaacaacatgcatggtaattactaagcacaataccattttttggaagagatctccaacattttcaggattgcgtaaaggtttaacctaaaaaatttactgtccctttcttttttcaaaaa

SEQ ID NO: 64601 - DNA, 582 bp, Glycine max
  Clone ID: PAT_MRT3847_29346C.1
ttccttttttttttttttttttttttttttttttttttttttttttttttttttttttttttttttttttttttcccaaaaaaaaagggcaaaaaacaaaaaaataaaggttttaaaaaaaggaaattacattattagggccctcaaaccaccccagggggggcactaaaccttctttggcacccggtggaaaaaaaaaatgattataaacccccccccaatattaacaggaaaaacagttaaccctgaatcgggaaaaaaaaaaacaccccacgggttttggccccggccaaaagaaacaggggaaaaccgccccacaaaaaaaaaaaacacctcttctaaatctgctgggccagggaaacaaaagtaccaactttccaacccccaaaaaaaacaaaaaacagccttctccccaaagggggggggggggaaaaaatttccccaaaaacccctttttacgggggggaaaaagggtttttttgaacccaaaaaaagcataggggacagaacttgcacaaaccaaaacaggggctttggcaaaaaaaaaaactgctcaaacagggggagccaagggaggccccg

SEQ ID NO: 64602 - DNA, 426 bp, Glycine max
  unsure (1)..(426): unsure at all n locations
  Clone ID: PAT_MRT3847_29347C.1
tcctctagagcggccgccgcggtcttttctctcttgtttttctttacaccaaaaacaattctttgcagaaaaaggtgctaacataatagctgctgcatatatctctgaaatataaatctaattatcccccaaaaaaaacgaccttttatgggctgcgttncactccttaaattttttaatccccccaacaaattaatttctctgttagacccccaccacaggccccgatgatgaaccacatgtgtcacccgtttttgggcaaaagggggttgatcctcgttgcctcttcctacaagatccccacgggaccaaaaggtgctttttattgtcctctaccacttgggggccccccataccatactgaggtcaacataatttaacccggcccaccccttctcccaaaaacctccacttttcttggatcgc

SEQ ID NO: 64603 - DNA, 834 bp, Glycine max
  Clone ID: PAT_MRT3847_29348C.1
atgacagcagagactccagtactatcttcattcttcaacacagtcaaaagcatcaacaccgcaaattcaaaaaaaaaaaaaaaacacaaagcaacacagcaagaagggaatcgaaatgcacttgagcgccattttgcggtacacggttttgatttcctaatttgtggagttgcgcagatgctgaggacctcgaaggggtcttgctggagctgcttctcactgccgccgccatcgacgtcgtgcttcttcgacttcaagcggtgccccagcatcttgcgccaccctcaaatcaaacgacgtggtagatcgaaatggaagggatggggagcaagtgatatttttcccgtgtgttgtggcggtgacggtgagatccaaaaagtggaccatataaagcacagaatcggaatcgaaattgcatggcaccatataaagcacggcctctcctcgatcatcaacttcttcgagccaccaggtgtaagggaagaggtagagaggctcgagggtgacgaaatcgtgatggtggttgtggtcatggttgtagcggtgggtaggggaaggaatcgaggtcgtcagagaagtaatcggagaagaggttgttattgtccatggtggcagctacggtttgtgagagtaggaagcgagcgagggacttgcaaagatgatggagagtggagagagaaacaagagtctcttcagatttctcctaatctttatataattttttattttttatttttaaattatgatggttgttcagtaaaacccggcgaaaaatttaattcgtataacattttaaggcggttttcaataactgtcttaaaatgtgcatcgtaa

SEQ ID NO: 64604 - DNA, 420 bp, Glycine max
  Clone ID: PAT_MRT3847_29349C.1
ccttctcctccttgcaattgttcttaatctttgactcctgcttatgactctcactgtcaaaagcccaattctctagcacagacgggggaaaaaacccacaagtaaccctcaggaactccatctgggggcattcaacaacaaacacagctaaaaagccaacaacatcttgaaaagcgccaaaaaaaacgggcaaagggtacaaaacaaaaaaaaaagaatacccattagaaccatccagaggaaagggttacaaccgggggaaaaatttttaaaaaaaaaaaatcaaaaaaaaggggggagacaaaaaaaaattcaaaacccccattaagaggggggggaaaaaaacagaacacccccaagatggggggggcacccttccactccgcaagaaaaaaagggcaccccataaaaagggggggg

SEQ ID NO: 64605 - DNA, 141 bp, Glycine max
  Clone ID: PAT_MRT3847_2934C.1
ccggtgccgccgccgccaccagcacgaccatttgtgtcactctccgaatggcagccattctatctccaatccgaaccctcaaattccgtgctcccaatcccaaacctctcttctctgccaaaccgcctcccatctccacac

SEQ ID NO: 64606 - DNA, 495 bp, Glycine max
  Clone ID: PAT_MRT3847_29350C.1
ctcgagccgctgtccgccaaggagatctccgaggttatccttgttggtggtatgacccgtatgcccaaggtcaccgagtccgttaagagcatcttcggccgcgaccccgccaagtcggtcaaccccgatgaggccgtcgccattggtgctgcgattcagggtgctgtcctggctggtgaggtcactgaccttctcctcctcgatgtcactcccctgtctctcggtatcgagaccctcggtggtgtcttcacccgtctgatcaaccgcaacaccaccatccccaccaagaagtcccaggtcttctccaccgctgctgacttccagtctgctgtcgagatcaaggtctaccagggtgagcgtgagctcgtccgtgacaacaagctgttgggcaacttccagcttgtcggtatccccccggctcaccgtggtgttccccaggtcgaggtcaccttcgacattgacgccgactccattgtccacgtccacgccaaggac

SEQ ID NO: 64607 - DNA, 179 bp, Glycine max
  Clone ID: PAT_MRT3847_29351C.1
ttttgggttttatataaaagaaatggggttttaaaccataaacatagaagaaactttcttcatattacaaaccgttagacacttaaaagattattacagaaatccactagtacaagcggttaaagaaccagaacttaaagatttaacccctttttcccacatagcctttcaaccaaagg

SEQ ID NO: 64608 - DNA, 426 bp, Glycine max
  Clone ID: PAT_MRT3847_29352C.1
accatatttcgctaggcctttgagtgcatgagtttaagagattaattctctaggactcacaaaacagacaattatctttaaatttttgaaactccacagtatataaacgatcaattttgaaagcctttccatttgtaccttgggttttccctttaaaggtatttgcaaaatgaactttaaagggatcaaaggccatgaaatggtgttgtaaagaaaacaaagaaaagaggaataggaagcatgagagaagattcaacataagaagggtaaatctcacaagaacgaatttatttgagagttgctcaatgatattaggaatcattttctgcaacaccgttatgttactgtgacagggaaaaaagcgaaaaatgcttagtggtttgcagccatgtagtctatatggaagaacagaaaccacattatctt

SEQ ID NO: 64609 - DNA, 209 bp, Glycine max
  Clone ID: PAT_MRT3847_29353C.1
cttccagccttcaccaaccctaccacaccttgattatttcatggtgctaagtgatttggtgcggttgatggtggggaggccccatgacatgcgttacgtgcgcggacaatgctgacatgctcgtcctcaacggacccgcgtcgatctgacgatgaagctaatgcgcgcagacacgcacgcaacggtcatgctagtcgcgcaacaattcg

SEQ ID NO: 64610 - DNA, 236 bp, Glycine max
  Clone ID: PAT_MRT3847_29354C.1
tcggtgttcggctcgagtctggagagtgctccgtgttgtgtaggaaaatggaacagttaatccctatggctcatcttaatcttattggatgatgccacctttattctgcatttatatctcatacactggcctcgttttctgttgtttcttagattttatttccttttctttattttaaatgggctgaattatttgttaatgaaatgctgaacacccctttggtttcccatttaggg

SEQ ID NO: 64611 - DNA, 389 bp, Glycine max
  Clone ID: PAT_MRT3847_29355C.1
agctcaacgataaaatgggttactttattacaagaaggagcatgaattcccagaatgggttttggaacaaaaaagattgatccataagcagatccgggtaccggatttttaccccaatatgggaaaatattaagtcacccccttggtccctaacccaaaaagctccgacgaccttcgttatcagtaaacagagagtcacatgcaggactgggcacactcattcatagttgatgaatgcatattgctgctccatgcctccataaagcttaacccgcattgctaggcccaacaatattacctaattttgcccaatcccagatgttttgcatgctgatgggtgactataccattggacaaaaaaaaatttgagttcttggatataaacatgc

SEQ ID NO: 64612 - DNA, 847 bp, Glycine max
  Clone ID: PAT_MRT3847_29356C.1
taaaaattggttgaacaatcgaaaagctaggctagctcgcacagctagggatgttaaagcagcagcaggtgatgacaatcctgtcccagagaagcagagagggccagtacctgggtcctatgactcacctggcagtccaggtcaaaatgttgtgcttgttggtgtacgaggagacgaaattggcagaggaaaagtgtttcaggtgcacggtaagtggtatggtaagagcttggaggaattatctgcccatgttgtggatattagtgagctcaaagctgataaaggcatgcggctaccctatccatcagaagccactggcaacacatttgcagaggctgaaactaagttaggagtcatgagggtgttatggggttcaaacagagtttttgcattgcgacctgaatgagtttaatcatgcttcattagctgcaatctgttgtcaatcttccatgtggttccttgaatgcgcatgttctttatttccataaacattagctgaagggatagcagattggttggctgagaagaacaataccgaatagaaagagtccagtttgttagccaaggatgggtagaaactagaagaggacacttatgttgaaaacaaggttgattcagcaatggaagatggtttagtttaggatataacccaagagccataatcggcagcaaaaatgttggtagggtcttgtacaatatgtggaactgtggtaacgagtgataagatctgaatttaacttacagggaacaagtgaacgtaaattctgtttagattaaaatttgcgaatcttgctcatttcatgtcaacagttataatatcataagaaaattaaaagattagattatt

SEQ ID NO: 64613 - DNA, 1326 bp, Glycine max
  Clone ID: PAT_MRT3847_29357C.1
aatgattttaaggtacatattttttgctgataaggtagagattcaagacataactaagcaaaccagtttttttgttttggtgggacccaaaagtggccaagtgatggagaacttgaaccttggtgatcttgttggaaaaccatatggcacacatctacattttaatgttgataagcagcctataactataggggttggaaacatcatttcggaagatggtttttcattattgatgtctccagccgctgctgcatccatttggaaagctattcttagtcaaggagcaatcccaatgggttctaatgcatggaataaattacggattattcgaggaaggcccactcccggaatggagcttacaaatgaattcaatgtcctggaggcctgtctatggaactcggtttctctaaacaagggttgttacaaaggtcaggagactatatctaggctcataacatatgatggaatcaagcagaggttatggggatttcatctttctgctgctgcagaacctggcagcattattacagttgatgggaaaaaggttggaaagttaaccagctacacatctggaaggaagcaatctgaacactttggattaggttacatcaagaggcgagctgcttcggaaggagacactgtaattgtcggtgacaacatcaagggaacagtggtggaagtaccttttcttttgcagcagcgtccaccatctggtagttgagcttcctgtgtggtggcgcttattggtgttgttgaagaagcagatgcataatactagtaaattagttaaactgttagtgaaggtgtttttgttatctttatcatgtttgtggcgaattagtacatctgtggtgaatagcaccaatcttggataagaatacatcttttgcttctgttcttatcttcttggaggctgcctccttttccagggtactctcgaatgacctttctacagtcctaccagaagaattagaatgaagcagcctgagtccattcaacataggagtctcaataactttcccaatttgtgaccatgtcttctaaaccaacggtgtttcgtttcgccaatttggctaattttcccaatttggccaattaagactacagcagcagccctttgacacgcagtttgttccttgtctccaacctgcttctcttcattctttagaaattggaatgttatcttgtagaattagaatacaaaattttgctacgttattcttagccaaaaccttgaattaattaagaatatcaatttgggttgacaagcttgcttgcttgcctgaataccaattttagaagtcacatgggacccaagtcggttgt

SEQ ID NO: 64614 - DNA, 3485 bp, Glycine max
  Clone ID: PAT_MRT3847_29358C.1
cggtccttagttacaggtcgaaagacgcttcccccgatcatcaaaaaatttaatccagaacacttttaattcagtataacactgtccccttatagcctttttttaataataaattataatttaatatacctaaagctaaaagtcagcctgtcaggaaaaatgcttcaggccaacatgataaggaaagcatgttggcgataatacttcctatactcgctcctttcaagttgctaacacatagttttaaaggaggattagtccagaagaaacgctaagcagaagaaaacatacaactaacttgatatatgcaagcaaggaaatcagatttgtactctttctgcatctcaataaattgtagagagactctgaaaatttcactattcattttctaactgaaaaaggatcaatgctgaagattgatttggaaaagcttatgggatctcttcctttgcaccttactacactgctgatgtcagctgttagagatgaagcactgttcagatacctattatgttgcatgggataattgcactacttgtgagaaatagcctcccgtatttctaagttcgagcagattgtgctagatgatgtgaaaatgatggaacagctgactgacttggttttctacatgcaaattgttcttggtggttacagacaggaatactatacttgtaggtaaatgcgctgtatgcattctactcttgtagcctgccatttatatcttttaatagcatttatatcaacacaatggcaagatagtggacgtgtattgcttgcgcactccaagtttagaatctttatcgatgcagctttaggatcagttcacatgattgaaaattttttaacgaatattctggtagcatatcatgaagatatttctgtggaatcaaatcttacagcagaacaaatggtttattatctctgtcagcagtgtgaagcttctctgcagtttcttcagtcattatgccaacaattttttgtatgttcaggtttactagtaacagataactcaagttatggccttcacaagactgtccaaattgctcttttcatttccattaccactgatatagcctaatgcagtcagttctttggcatgattctccttaagcttagcagaaagttgacaaacctcttcttccacttgcttcttcttagctttctgctcagccttgctacctctagctgcagcttttttcatctcaacttcttttttctgcagttgcaatatctctttcctgtgtcgtgaaagaatttcatcaagagtttcctgctgcttctcaaatgttttgtctgaaatcacttctttgtgtgcttgctcctcaatttcttgggtatcctccattggagcaacccaagctagcgcatacggcggatactaaagttctgacagcaataatttcgctctcccatggagattttttatcctgttggtgttcatctaatctcttaaagatggaggaggatgcaagtcttgaatatgatatatttgctgcagttggatggattttggattatacttcactggatgtaagaaatgctacaaatttggaattcaacctaatccctaacagcatgcctaaggcttcttatgcacatcataggacatcattatttgtcaagttctttgcaaatcttcattgttttgttcccaacatatgcgaagagcaggagaggaacctttttgttctgagcactcaaagatgagcctgatatgcagcgaaatgcagcttcacttcaatcatttttgcttctgatgctcctaaagctgccattgctagcaagaacctccactcattgttaagtcatgcagaatctctgattcctaacttcttaaatgtggaggatgtgcaacttttaagagtgttttttggcgaattacaatcactatttacggctactggatttggggaaaatcaagtccaagatagcaaatttgaggagtcattatattgggataagctttctaaattcaacaggaatgaacattatcagaaggcacagagtgcagggggatgcccgtcatctttaactggaaaagaacatgccgatcttaataagaagggtggcaacttcaaggaaggaatgtctgagaattctgcatttccagacatggaccaacataataccagagctgaagacacaaatcaaggcaagggcctaaataggctaaatcaggtagatgataaaggcatacctggtaaaactgcatctggaggagctagagaaatggacaaggatgctcagaatgttgaaacaagtggttcagatagtagttctgcaaaaggaaagaatgttgttgataatatggataatggagagctttcaaaatcaaatgagcgtcttaaaagaactgcagttgaggaaaatccagaggatgaaaagattgaactttcacaaaggagaaaacgaaaacgaacaataatgaatgataaacaggtgatgctgattgagagggcactcaaagatgagcctgatatgcagcgaaatgcagcttcacttcaatcatgggctgataaattaagtgggcatggttccgaggttacatcttcacagcttaaaaattggttgaacaatcgaaaagctaggctagctcgcacagctagggatgttaaagcagcagcaggtgatgacaatcctgtcccagacaagcaaagagggccagtacctgggtcctatgactcacctggcagtccaggtgatgtatcacatgttgcgagaatagcttcaggtgataataaatccgagccttctctggctctggctcggtttgttgatattggttctccagaatttggtcattgcaatgcaggtcaatatgttgtgctcgttggtgtacgacaagacgaaattggcagaggaaaagtgtttcaggtgcatggtaagtggtatgggaagagcttggatgaattatccgcccatgttgtggatattagtgagctcaaagctgataaaggcatgcggctaccttatccatcagaagccactggcaacacatttgcagaagctgaaactaagttaggagtcatgagggtgttatggggttcaaacagagtttttgcattgccacctgaatgaatttaatcatgcttcattagcggcaatctgttgtcaatcttccttgtggttccctgtatgcgcatgtttttttttcccataaacattagctgaagcgataacagatgggtttgctatgaagaacaatactgaatagtaaagtctccagtttgttagccaaggatgggtagaaagtagaagaggacaattatggagaaaacaaggttgattcagcaatgaaagatagtttagtttaggatataaacaagagctgtagtcagcagcaaaaatgttggtagggtcttgtacaaaatttgtttctcagaattttccctgcagcatggcaattgacaatatgtgaaactatggtaacgagtgatgagatctgaatttaacttaaagggaaactgtgaacgtaaattctgttt

SEQ ID NO: 64615 - DNA, 149 bp, Glycine max
  Clone ID: PAT_MRT3847_29359C.1
aggggcgggttcaataatatcagtagtagtaattgtctggcatgacctacccttagacggcaccagggggtagagatggatctacacgttcatgggcgacacgtgcaagggggctaggggggggtaaccgcgcctgggggatgacccca

SEQ ID NO: 64616 - DNA, 262 bp, Glycine max
  Clone ID: PAT_MRT3847_2935C.1
cttatatcattttatttttttttttggggggggtttttttttgaaaaaatgaattgacgggaaaaactcccccaattggaagctttttcaatgaagatccaaattatgcaacaccaaaaaaaaaagcgcctttttttttccttctctttccctcccttggtgcgaaggctaactcccaaaactaaattcccggtctttatttttaaaactcaagggcggcaaactccaaatgagaaagaaaaagccgggccccacatttctt

SEQ ID NO: 64617 - DNA, 337 bp, Glycine max
  Clone ID: PAT_MRT3847_29360C.1
acgaggggattggagcgtagcctacctaaccaaccaccgtgattattcctctccctaattctaggcagtccaactctatttatagctgactgctaactaactaactgtctttaacagacttgaatggttacaaggctaactaactaactgcctttaactaacttgaacagttacaaggctaactactagcagttacaaagctaactactaactgtaactgatcttagtcagctacctaatccaggttctggctgctgctctgacttcctcttatacttggcatgtgtccttccttcatacacttgtgtaatcggtaacctaacacgttctcacaaga

SEQ ID NO: 64618 - DNA, 707 bp, Glycine max
  unsure (1)..(707): unsure at all n locations
  Clone ID: PAT_MRT3847_29361C.1
cccccagtgtatattgctcagaaaatggtgtgactgcagttataacngaccaaggttcaagtgatancacttgattttcattcttagcaaacatgcctttagccggatggctcaaaccactgatgcagctgcttctntattagcccttggcgtggttgatattgaatatagacgtgttgcatgcaagctacccagataaaaacataccaatcaagatagatgagagcagcaacaacccatattacttggcttttgtcatttggtatcaacaaggaaggagagacataactgctgtgcagctctgtgagactcaaaactttgtgtgccagttactggataggagccatggggcagtgtggactactacctctccaccgagtggacccttgtctttaaggatgttatttagtgatgaagaagagggagaagaaacatgggttgttcctgttaataacatacccggagactggaaggctggtgaaacatacgattcaggggtacaagtgaaccaatagagaatttagcagcaaaacaaattcattaatatggcatactattatgattttatttttctacgaataagtagtgatggcatagtagggcagtacatactatgcatgtcacccaattccattgtattgcngtaattttttcatttttacatctctaatcatacaaatttaataacaatgttgaaacgacttgac

SEQ ID NO: 64619 - DNA, 200 bp, Glycine max
  Clone ID: PAT_MRT3847_29362C.1
acggaaaaaaaagcttctaatagcatttaataatattattggcatagttacaaagtggagtttcaatctgtgtaaagaaatttcacgaggacctcctagctgagtttatgtaccctatcatatcatcaaaagagtacaggctcaagacgggtgagatatatatatatatatatatatatatatatagggggggggggggg

SEQ ID NO: 64620 - DNA, 345 bp, Glycine max
  Clone ID: PAT_MRT3847_29363C.1
ttttggtctacacttattttttttaacagcgtcggtgtttgcaaaataaaagcacccgttgattacaatggaacttgccactgtaaatcacaaacaaaggcattctaaaaaagggggcttttgaataccattgcaccattttcttgttacttcccacttttcacttttcaagacccaggggtttgcaaagttaaaactctttccctgcccaaaaaggcacctttttggttctttatgtaatccacagaaaaagagatgtgagccatgttcagccttaatgaaattttgccaactgaaaatgtaaccaatatttcttaacaagcttcccaaacagtgatccttttt

SEQ ID NO: 64621 - DNA, 258 bp, Glycine max
  Clone ID: PAT_MRT3847_29364C.1
cagcgacttgaacactaccagcaccttcttcgttgcatcgcttccgactttgctgttctcttctttgattctctgtagtcgtcttcttctctcttcttctctccatgtcttcctcgctcaatccgctctcgccgagctcggcatcaacgtcgaggccaacgatccggttctcacgggcctcgactcctcgctgccctcttcttcctcctccaccgccgcgcatcccatctctcctcccacctccacttccaagctcga

SEQ ID NO: 64622 - DNA, 1320 bp, Glycine max
  Clone ID: PAT_MRT3847_29365C.1
accgcccggacacatggcaactgttcctgctcgtctctgttatctctccacaaaccccacaaccagaaacctcaacttctcagttttaaaaccaaatgtgttgtcactgcgttcattctctcttcctcaaaaacactatcttcgtctccgtccctgcaagtgttcctccaccgcccccgtgtccaccaccacctacgagttttctgatggttcttcggaggtggagttaagattaaacataggaggtttggatgtccgaagctccagagatatattggttgatacaaatgatacctctttagctatcagagtgttgcggccaggatctcccatcacactcatagaaactaatcctctttttgatagggttaaatcctccgaaacaatatggtatatagatgatgatcaacttgttgtgaacttcaagaaacaggacccagatttgaaatggcctgacatcatggagtcctgggaatcacttactgcaggatctccacaacttttacaagggacatccatctatcttgttggtgattcaaccgaaatcaatcaaaaagtggctcaagagctagcaactggtcttgggtacactccactgagcacgaaagagttactggaattatatactaagcagactgtggattcatggctgctcgctgaaggctctgactcagtagcagaagcagaaagtgctgtacttgaaagcataagtagtcatgctagggctgtagttgcaacattaggagggcaacacagtgctgctggaagagctggtaaatggcaacatctttatgcaggatttactgtctggttgtcaaagactgaagcactagatgaagattctgcaaggctggagacccataaaaacgtcaaagatggcataatttcatacacaaatgcagatgtagttgttaagctacagggctgggatcctgcttatgccaaaagtgtggcacaagcatgtttaagtgccctaaaacagttaatccagtcagacaagaaacttccaggtaaaaaaagcctctacataagattgggatgtcggggtgattggccaaacatcaaaccccctggttgggatccatcaagtgaaggtaacacaactcttggtacacagtaatgatgcttgaaattagtgagtaacatgtaatttgtttatacaagtttttctaccacaaatgtaatataagagacagcttcattgatgttattctactcagcaaaaccaaaagctccgtagtttgataactaagtgatggatgctgtaacataattaaggacttgttggtcccaaaactggtcatacaaccttttgaaaaa

SEQ ID NO: 64623 - DNA, 571 bp, Glycine max
  Clone ID: PAT_MRT3847_29366C.1
gggtaggggtttttttcttcccccaatggggaccccttcatttaaaattatatttaaccctcggtgggggggcccaaaaacaaaaaaaggacccccggcgcttaattacaccctcatattttaccctacctaaaaacatatttttttttttttggggatggtaccaaccccttccccccaaaaaaaaaattaaaaacggttagccttttccaaaagaaaattttattttttttttagagaattggggggcttaagagtaaaggactttttaaaaagggccgggggacttttttttaggaacaaaaaccgggtaatgtttgggaacacttcacccgttggaataatcacacctttaaacaggtttcccaacttattataatttcttaaccgcaggaaaaagtggctaagggtaaacctatttttttttttgggaagggcaagggttcccggcaggttcaaaaatttttgggggagatattttaaaaccggggggagataaaagggaacgcccgtgcccaaggggggaaaggaaacggctttttttaaataccttgccaacccggttaccggg

SEQ ID NO: 64624 - DNA, 179 bp, Glycine max
  Clone ID: PAT_MRT3847_29367C.1
ggctcgagcttcggatgtcaattttatctatacgacgaagatcacttgttactcggggtaggggactttcaccagtgcgccgaataccgttaggcttggtgtatgatggatcagactcccccatgcaattttcgtctcacatacgacaaagatctgcatgcgttgactggttcaacccc

SEQ ID NO: 64625 - DNA, 741 bp, Glycine max
  unsure (1)..(741): unsure at all n locations
  Clone ID: PAT_MRT3847_29368C.1
ttcgggaanaagaaaggcgaaagacttttcgtttggaattgagaattcgggatgttcgcgtcacgaagatgatcgaggcggtgttgaacgatcgattgcgggaagaaggtgcgcgtgaagtgcaacgacgatgacaccatcggcgacctgaagaagctggtggcggctcagacgggcacaagagccgacaagatccgcatccagaagtggtacaccatatacaaggatcacatcactctcaaggattacgagatccacgacggcatgggtctcgaactctactacaactaaacacgaggcctatacccatctcaattcttctttttatagatactagctagggttttgttttttagggttcccaaattttgatttgtttttcggcaataatcaatggctcgtaacgattatgcttcttttaattcttcgagttacacaagtaatagcgtcaaattttcgttttttgttgattcaggtgtgttttatgcatgatatattactatgatctgggaatgggatgaggcgccaaatgtaattttgacttgcgaaagtccctatgatttgaataatgtacatccccgaatgatattgggtattacataccgatgacaccctaagttgctttgcgatatataacctatctgatgacttgttgctaagcttcattaatctgatcggtggaagtgtttgatcatcaaaagaatacaacgaaatagggctgagtgtggcccctatggccgc

SEQ ID NO: 64626 - DNA, 2181 bp, Glycine max
  Clone ID: PAT_MRT3847_29369C.1
aaacacagaacccaaataaagcttagcaacaagacaaacaagtcatcagatataggttatataacaaagcaacttaagctgtcaacggtatataatacccaatatcattgggagatgtacattatttcaaatcatgggaactttcgcaagtcaaaattacatttagcgcttatcccattcccagcacatagtatatatattacgcataaaacacaccttgttgtgtttagttgtagtagagttcgagacccatgccgtcccacgcgtccgcacagattcagcctttctcagtttctctctctagaaaaaccaaacctcgctactctcttctccctttttttttgtagttctttccttatttggccttcacactccgaactgcgaaatccttttttagcaaaaaaaaaaaaaaaaaagagtgagagagcgtgagacagagagagtggtcatcagtcatcaccgttgattgattaagatgcagcaatctaacacatgatcaacacacttccaccgatcagattaatgaagcttagcaacaagtcatcagataggttatatataacaaagcaacttagggtgtcatcggtatgtaatacccaatatcattcggggatgtacattattcaaatcatagggactttcgcaagtcaaaattacatttggcgcctcatcccattcccagatcatagtaatatatcatgcataaaacacaccttgtgtttagttgtagtagagttcgagacccatgccgtcgtggatctcgtaatccttgagagtgatgtgatccttgtatatggtgtaccacttctggatgcggatcttgtcggctcttgtgcccgtctgagccgccaccagcttcttcaggtcgccgatggtgtcatcgtcgttgcacttcacgcgcaccttcttccccaatcgatcgttcaacaccacctcgatcatcttcgtgacgcgaacaaccctaattcccaattccaaacctaaagtctttcgccttcaatcttttacctaaagtccttcgcctatagttttacgttcgaattttttggtagttttaaccgttcattttacgcatagtttgttgcattaaacttttgtaatggcctatcatagtgttaaagctgcaaaagttttttttgatgccattactgaccgttcaaagggctatggtttcgtcaggtttggagatgacaatcagagaacccaggccatgactcagatgaatggtgtttactgttctagcaggcctatgcgtattggagctgcaactccaaggaaatcatctggccatcaacaaggtgggcagtcaaatggcacagccaaccaatctgaagcagattctacaaacacaactatatttgttggaggactcgaccctaatgtttcagatgaagatctcaggcagccattctcccagtatggtgagatagtctctgttaagatacctgttggaaagggctgtggttttgtccaattcgcaaacagaaataatgctgaagaggcattgcagaagctaaatgggacaacgattggcaagcaaacagtccgtctttcttggggccgtaatccagcaaataagcagtttagaatggatttcggcaacccctggactggggcatattatggggcccctatgtatgatggctatgggtacgcattgacccctcgtcatgatcccagcatatatgctgctgcttatggggcttaccccctttatggaggccaccaacaacaagtaagctgaacgaagtgcagtacagtgctggagtaccattcacaacaagttagacagtatcgagcttgaatgtgcaaattaagtttctctgttttaacttgcttgatctgttgaattcttaagacaagaatccctcctaattgtggagcggagatgaattttgatagcctgaggtagctctgtaggggattcaattagtcatttgtttaggcctgtaggagtaatgactaatgaggaccttaaacttattataggaataattgtcttaagtatgacaacgtgtgtgtttgcttgctatttatttgtttccggcagttgacattgaagctttgcctttgttagtttataagggtcatttcatttctttgccagtattttgcttgcatgccctatgctattcagaagcgattataggaaaaaaaaaaaaaaaaaaaaaaaaaaaaaaa

SEQ ID NO: 64627 - DNA, 422 bp, Glycine max
  Clone ID: PAT_MRT3847_2936C.1
ctcactcgtccgattctttctaaggttgcacaagacatggttgaggaatggtttgattgtgttgatgaggaggataccttcattgccgcaaccatagctgaagagccttacaccacgctcatagttgaccttgcgaaaagagttcctacatcgactggccattgaatgccccaaggacgagaaactttctcgtcgcaaaatttttgacaaacctaacacgcgctgcttcactattctccctatggagcttaaccttgcgccccgtcagaaggccctacaacctgcgaggcccactatgaacaacaccgacacgctccattgtcaagctggactcaaacccatactccatggaatgccctggataggccaaacacataccgagtaacggcaacaaaactccccgaaccgaatactcctatttt

SEQ ID NO: 64628 - DNA, 123 bp, Glycine max
  Clone ID: PAT_MRT3847_29370C.1
caactacgatgctctgactgagcttggcgatcatatcatcctaagcgttcatgaatatggcaaacattactttattcggtgctagaaccgcaagctttctaacttgaaataaccataaaccct

SEQ ID NO: 64629 - DNA, 192 bp, Glycine max
  Clone ID: PAT_MRT3847_29371C.1
ctctcaataatctggggccgccctctaatcttttctctcccctttaatctttccaaacatcctcccccctcccggggaaagggtgttttattcaactcctataataccctttcccctcccgattgaaccatactgtcctcttcagaagaatcacaaactttaacttaaaccaaagaaatctaaccccaaaaa

SEQ ID NO: 64630 - DNA, 188 bp, Glycine max
  Clone ID: PAT_MRT3847_29372C.1
aaagctggtacggctgcggaacacgcgggggcgacccacgcgtgcgcccacgcgtccgtgcacgttttcgaggacgcgtgggcgtgagcatgtgccactgcgaagggttgcacagaggacaaaggcgtgagaaacactctcctcagagggcgtggcagcacaccctgtcgatgacaactcaaccctca

SEQ ID NO: 64631 - DNA, 861 bp, Glycine max
  Clone ID: PAT_MRT3847_29373C.1
ctctcacgggaggcaactcctacctgctcctactccgcgcgtccgacatttccattccccactaccctccaacttcctcttcaattcaattcatctccctcaccgtctcccttttgactcaagaccattattattagcgtgtttggtttcacgtttctgggatgtgattttaagaagctaatacttatagatttcacgtctcgagcgtgatttcttacttctgaacgagtttccaaacacgctatacgagatgttagacctcaaatacatgtgggtgcttgtttcaatcaacaggttcattcaagacaccttggaagatgagaaaaccaggaatggtctaaaattaagatggacttccaacttgaggattcaaaagcaggaattctttgaattctctgagcaatcagtgctgtccaatctctattggggtattgacagcattgaggctgcaattcaagctcaacagccagaagaaagatccttcaggctaaggaactcagaacaaatgcttcaggtgccagcaatgcttgatgaggaagaggtcacagccacaattccaaaccgttacttggtgtgctgctcctacttttacctctcagtggttaggaagctccagggagatgagtggcaggcagcactgcattttctccaagcagttttggtctcaccaaagcttgtttggacagaatttgcatcacaactttgtgaaagtcttttcccacaatcaggcatcaccatgatgcagagaaacaagagcagtagaagtctggaatctgtgtcttctgaggatgagatggatgaagcaattaaggaggtggcaaggaagtacaaggagtggcttgtgtattaccaggtcatgct

SEQ ID NO: 64632 - DNA, 206 bp, Glycine max
  Clone ID: PAT_MRT3847_29374C.1
cccttccgcccacccttccgccaacccttcggtaggtgggagaagaccaccgaaaggctccttccctcaagcccttattcctgggttcccattggggggaggttcttcttgacccatcctcttcttggaagggtggcttccctcaacccttcttcttcttcattccacctgaatttaaattccaaaagccaaaggcccccttggtg

SEQ ID NO: 64633 - DNA, 332 bp, Glycine max
  Clone ID: PAT_MRT3847_29375C.1
atagatacaaacacttgttgttatagcaaagaggaggcactcaagaaaataaatcgggacaacttgcctactgatagtgacttacttaaagggtcaatgatcataactttccaaaagtattggcttgcttgcaatagccgcacaatacatatgtactcgcttttgcttacggggtacatttccgggggtgaccaaccattacagttaaaaaatcgattcaacaatttgttcaaagagctgttttcagatcacaggatttttgctacggaatcatacggcaatacttccatctcgagtgttttaatacacaatttttccctcaagagagggga

SEQ ID NO: 64634 - DNA, 529 bp, Glycine max
  Clone ID: PAT_MRT3847_29376C.1
ccacgcgtccgcgcggtccccggcgcgttcacccccacgtgctcgcagaagcacgtgcctggcttcgtggagaaatccggagagctgagggcgaagggggtggatacaatcgcatgcatttcggtcaacgacgccttcgtcatgaaggcatgtaacggaaccttcaccaaagccattggagtcgaactcgatctcagcgacaagcccgttgggttgggtgttaggtcaaggcgttacgcgcttttggccgaggatggggttgtgaagctcttcaatttggaggaaggtggtgccttcactttcaggacatcctcgacgttctttgaaattatcgtaattcttcttcttcccctttttaatcgggttggggttttgttaataacgtggatgggttattataataatttcctgggctggtgttgagcaagtttagtagtgtatcattttttaaagagtgggtaaatcggaattttgttgaagcattcttgtaacattttaagcttacatacagagtactacctgtttcttg

SEQ ID NO: 64635 - DNA, 715 bp, Glycine max
  Clone ID: PAT_MRT3847_29377C.1
tagatcaaggtcggtcatgtaaactatcattaccaatgagtgaggatacaaaaacaatggaatctgtgtgaggtatgtgaaagtggtaagtgattccctctactcttctgcttatactacaatgtcatttatctcgggttctttggctggtaatgaagcaattcatatgtgcatcagacattacattacatggcatacataatatttcatgcattatgatgcggctttaagttgactcggtattttcttgatcttggtgtgaagacaggtgaaccaactccaagatataaagaagggaaaggggggaattctaggaggaggaggtagaagtagacacagaagtggcagaaagcaaaaaatgttctatggccatgatgtttgatctaatgactaccctggaatttccaccaagtaatgacctgcaactaaaaatttggggggggaaggactaaggaagagcatagtttatacaacggccattgtaacttcctgccataccatgcaaaatctatggtactggcaccttcaatctcttgttcccaatgttgcaattgtacaatcatgctagtgctttaaattgaaatcaattgaaaatccatttaagcctctttcatttatgcaaattgccacagttcaaaagtgcaatattaaccatttattgaagtaattaggcacagttcttaatgttaacttctatttgaaaggaatattcttt

SEQ ID NO: 64636 - DNA, 633 bp, Glycine max
  unsure (1)..(633): unsure at all n locations
  Clone ID: PAT_MRT3847_29378C.1
ccacgcgtccgcggacgcgtgggcggacgcgtgggtggcaatggtgccccggaagatgcaatcgaggcctagccgccattattttttcagcatcagatgacactacaatgaccaaaaatattcgtgccactcatgctcccgttgatggacacattggcgttagacctcttcttcatgttgttcaagacatttttcaccgcgctgcctctctcatccctggcattgttcagggaaaacaagtgcagatggatgccatgaaggacagtgcataccaatctgatttagctaacgtgatagatatttcgtaccacacaatcaacaaaatttcctgcgagatatgttgcaagtgttcaagcggtggnagatgtacatgccacaaccatgggaatactgggcatgctctcaagctattcatgggatgccanaggtggtgatagcattggcagcatttgcagccaacttgggggaggttttgggctggtggctcagctttatgccaccaaccgtcttgctaagtctgttgcaaagttgaagcacattcatgaaacactggaacaagtggatgatttgggaccaaagtttcaaacagtcaacaacctttttaaggcaatgttggatgtaaccaataacatt

SEQ ID NO: 64637 - DNA, 264 bp, Glycine max
  Clone ID: PAT_MRT3847_29379C.1
cctaatttttcgatttcagttagcgtatcatcatcacttaaggagataatggtgtcaaacgtgggagaggcaatgaagaggaacaggcacatgcaaccatatgcacagaatcagcagcagcagctgcagaaacagcttcagtgcaacacacgaaaagctggcaagttcattacgagcagctccaatctggaagaggatggggcttcgtctgccagtctcttactaacttgcatatcttgttcaccttccgatgcttaacgcgca

SEQ ID NO: 64638 - DNA, 203 bp, Glycine max
  unsure (1)..(203): unsure at all n locations
  Clone ID: PAT_MRT3847_2937C.1
tcttactcccacgcttccagagaatatannattttctatacttcgttcgcaaattcattctttgatgcatgcttctttactaatttcgagcagagcttacattttntctaatctctaccattattattccattctcactatttaatatcaaaatatccaattctcttcctacatatttttttaacttattttaatcacattat

SEQ ID NO: 64639 - DNA, 347 bp, Glycine max
  Clone ID: PAT_MRT3847_29380C.1
tagatgacgaatctgggaattctattgccacccctcgagggacagaggttactgtgcaactcaaggttgtgacacccgctgaacacgtgggggtgctctgaagatgaggaaggatgatcatcatggtaagtgtgtgtgtgtgtgtgtgtgtgtgtgtgtgtgttgatatcatttcacaataattgtttttggattcgacttatttgataccaccctacttagctcaattagtgtataattttcagggttgcaaactaagatcaatgagagggaactaagctatttgaagatcaagaagacagtgcatgaaaatgggaattcctgcacaggttaactacagcttgctt

SEQ ID NO: 64640 - DNA, 281 bp, Glycine max
  Clone ID: PAT_MRT3847_29381C.1
acggctgcgagaagacgacagaagggatcgaataagataaacaattacaaaaatacttggtgttgaatatatggggtgtgataatggaaaaatagaagttgggggtggtctccatgtatagcattttctggccaaagcccatgtccatttggtcacatttctttacggtgtatttttaggtccacttaagatgaagctggtaaatttggtctccattaaagatattgtgccatgggataagaattttttcctaactatgagtagctttgtgacacacggtg

SEQ ID NO: 64641 - DNA, 473 bp, Glycine max
  Clone ID: PAT_MRT3847_29382C.1
tggagtggtacgcctatcttaacgactgtttgccctgcgttgtcgagcccgcaacgggaatgggattaattccaacagaggcgctccactttataccggcaaccaaacaaacgagggtggccagggacaccacgggcaaaacggactgataagagggggcggcttactcacctacaaggaataaaaaatctgaattgacagacacaaccgaaactagaatttgtcaccggggctcccatgaactaggggaagatgggttgccccctgaaatggggaaaacggaaaagtgggttcgtcttcgagcgcgaatcgaaagaagataataaacgaatgatccggcggaatcccttacttatcctgaatcttgggcgcacgttcgcgaactggtcaaaagactccacctccaaagtaatacgtttgccgggaagggtattaactaagtatatggtgcctacgcggggtccacacaccca

SEQ ID NO: 64642 - DNA, 434 bp, Glycine max
  unsure (1)..(434): unsure at all n locations
  Clone ID: PAT_MRT3847_29383C.1
cctacgcgtccgctaatttgggcactccaacggaacaaaatcagccgcaggagcagcagcaaaaggcagggacagcagcggggacaacgactacagctgcagcaactgacgctgcttctgctgcggctgtaatggaagaacagactgttcccctgaagctccgcgtcccactcactctgagcatttccatctcaaatgtcgcttccgcttcttgcattggtcccctctgcgccatttcgtccacttcgtgcgccagcggtgtgccgccgagttcggcaggtccaaccaaacgccgtggcaccattgaggagactgactatctgatgggaccgctcaaatcggtccatcgccggagggcggacccacgcgtttcgatgggaagcgtactgatggagatactgaacgagctgaagaacatcgncggntccgaacac

SEQ ID NO: 64643 - DNA, 260 bp, Glycine max
  Clone ID: PAT_MRT3847_29384C.1
ccagtcgtacgaacagatgcgataggacgactgagctgggagtcaatataaaggtacagtgttaacgttggaactgtggccaccatctgaatgtagcgagtgcactgtgcctatacctctctggacgaagcattccaaatatggaaagacgcttttcatgtgcaacagtacagtcagatttacttcgcgcgccttcattcgatgcgaacacttttatattacctcgttactcattggaaacccaatttttccgtgtgcac

SEQ ID NO: 64644 - DNA, 542 bp, Glycine max
  Clone ID: PAT_MRT3847_29385C.1
ggctcgagccctattgtgaccgttgtcgagttgagccatgataccatcacccgtgcctcagtcactcatcaccattctgctcttgctcctccccaccacaaccctctcagtagtactatccctccctctcgacccaaagcaagtaaaagccctccaatccctcaacatccccagcccaaaagacccatgctcccaacccacctgcttcctctgcgacacctacacacccttgcgacacctgacctgcctccaactcacgaactgttccacttccatccaccactccctctgctgcacagccctcaaatccctctgcaccctgctcaccctacacctgctcaactgccccatcacaccctcctcccccacccacttccctccccaactcctgtccctcacctccatcaacagcctgccgcacctgtccggcgcctgcctgtgccgcctaaaaaacctgacccacctgaccctgtcctacctgaccatgaaaccctacctgatgctctgccacttcaccggcctgcaaaccctaatcatctgcc

SEQ ID NO: 64645 - DNA, 534 bp, Glycine max
  Clone ID: PAT_MRT3847_29386C.1
ttacggctgcgagaagacgacagaaggggctcgttactttctctctcctctctcatcacacactcaaactctctctctcactacattggttcaaaggcaaaaatcctgacttgggtctcaatcgaaagtgataggccacaaaagagagcctttagtttcaacaccacacttcactctcagctttaatggcgatctcggggaacgtgccaccgttgctgcaggttaacttcaattgggtttgctttctactttgaaattgccaaaaaaagagccaaaaaaaaaaactttggttgttgttgcaagtgtggtggattgttttgtttctggggtttctaaggtgggagtgaatttgttgggctgctgtggtttttggatttgggtggtgtttgatttttttaaggttggtttgtattttgtggggggtgtggactatggagtgaatgcattggcatcatcatgggggaggagaatgttggggaatgcttgtgcaatggcttgaagcaaattgagggtagtggctgctttgagctaggg

SEQ ID NO: 64646 - DNA, 168 bp, Glycine max
  Clone ID: PAT_MRT3847_29387C.1
agcaggggcaaatgacaatggttttgtggtagtggtaatttgtgaaacattgatttggtacagatggcgtggagaaaagggtgtgaggaagtggctaattcggagcctctgttccacacgatctacgcttgtgtcagcatgggcgttaaggacggctacggctgcatc

SEQ ID NO: 64647 - DNA, 267 bp, Glycine max
  Clone ID: PAT_MRT3847_29388C.1
atctctcttcgttttgttcttccttgcgctcctcctcgttcgttcgttctccctcgcgtagatcggtcatggcggagaccgagacgtttgctttccaggctgagatcaaccagctcctcagtctcatcatcaacaccttctactccaacaaggatttgattaagaagcattctgagttcattagctacccaatttctctttgggttgagaagactaccgagaaggagatttctgacgatgaggatgaggaagagaagaaggatgagg

SEQ ID NO: 64648 - DNA, 289 bp, Glycine max
  Clone ID: PAT_MRT3847_2938C.1
gaaaaacatggatatggggtggatgaatttaattaaacctcatatgattaatgggttaacatgggcgtctcaccggcgttgccagagactcttaaaaattacatcatgctgctgtctcttggcttcaagattgtattcttgccaggaagatatcttgacaaattggaccgcatcagaagcaaacctatagaaggctggcttccacacatggcttcagttaattctcaacgatccacatattatcactacaaatgcactttcatacaaataaccaatgagagagaatctg

SEQ ID NO: 64649 - DNA, 1193 bp, Glycine max
  Clone ID: PAT_MRT3847_29391C.1
ccacgcgtccgcttctggtggctttgccctctctttcccatcccaaacttcttttctttttcctcaatactcactctcttcattgtgctgccactggtgctcgccatccttttccatgcccctccctttgtcatctactctcactccagcgacccatttctgtcgtgttgccttttatccccaagatctgaccttgtagaagaactcttgaagaggaacaatgactttggggatcttttgtttctactttagttggggttattgatttcttttctcaagagtggcagagacagaagtgcacggaaaaagacttggtcatcatgggcagtagagataagagcgcatgaatatggaatcttgcaagaaataatttatctggaaattttccacatttatttcaagaactggtaccctatccaggagatttatagagcttatggctactttttgaagaaggattatgtgataaaggagaaacatttgaattacgaagctctcagttgaggcactatgcactaaaggatgttatccacttatccaacaatttgccagataaatatggaggaagatttattttcacaggaaatagaagagaatcggatgacatattggagaaaataacagttctgacataggagtggaataaggttgtagggggattctcatactctttttcaaaaaagatattaaatcaagtgtatttgggggctcttagcaatattggacatgttaaggatcgtgaggatttttttttctgatcttaggggaatatgagtaagcagtttgtgggcaggatggaatgaagatgtaatgggcagagtatctaaatgcagtaaatccaataattgcaacagagaaatatcaaaattatctaataaatgatgaaaagggaaagaaaagtattgtagtaggagtctttgttttttggactggtagagcttttgcatatgaagggactttctgctactcttagcgctggcaagatgagtatttacgcatgtctaggttgaagtttgatttttatttaattatattatccaattgtaatgagtagaaaatatagcaataggatcagattatcgattataaatcagctggctaaggggtgtatttattagctagatactttttttgctactttttgtgctggaactaattgattttaataataataaaaaatcatcttttgcctt

SEQ ID NO: 64650 - DNA, 703 bp, Glycine max
  Clone ID: PAT_MRT3847_29392C.1
gggcagtggcagttttttttaatcagccaaataaaataaatatattcataaacggaacctgtggtactaatagtcaaatacacacaccctcataaacagagaaatccccacatatgtcatcatggttaaaaaaatatttatgccctaatgacaagcataaataaaatataaccaggatttgcacaaaagagaacccatctagtcatctttgatttgttctcataagatataccccaggacatgtaaatttgctgcccttatcctactgcatacccaatagatgtaaataactatcatcaacaaataggataaccaatgaatccctgacctcaaaatctgtgtcccaacaaaaaaagtgcaccatcagagagcatcaatcctgcttgcacctcacctcttgacagccattgaccacgtttttaatactcacacacaaataatctagcacaccataaaactccctaccaaaatctatcctgccaaggtccactcaccatgtacaaatgcaccgttctcatgaccacaggccacatgaattgaccaccacctctgcacttctgcatctaggtagtggcagtttatactgatacctctttgctccattttccttatgtgtatcccctttgattgatttggttataaaagatgagaaattctgaatatgcatattttcttttttctttctttgggttctgggggacat

SEQ ID NO: 64651 - DNA, 350 bp, Glycine max
  Clone ID: PAT_MRT3847_29393C.1
ttagttctttttcttttttttttcattaaattctattgtcatcctaatgatagcgagagaacatttatttttgctgaatcatataaaatgtttttgctggtgaaggatcacatacactaactcttgacaaagggggaaatttatagaacattacggaaaaaataaagcacctttggtctgggagggagggaatcattgtgacattttcagaaccagaagtctctacggcgtccttatgcgcaaaagtcgcttgccgagaaagttggtcccctttttggtaaagcgggtaccccctccccattgggggggtgaccgacttcctatgtgaaagatgggtcatatttgacaaa

SEQ ID NO: 64652 - DNA, 287 bp, Glycine max
  Clone ID: PAT_MRT3847_29394C.1
ggttatcatcccggggatttttttttttttttgttttttttttttaaatattaggggtaattcacggcacaccaccatttttttattttgtacataccaccaaaaagaggcaaaaattttttttaacggagaaggctgtattaaagagcaataaaagagaagcaacgggttaaccctcacaacagggggtgtagtcgctgggcgcaaccgccaatggtgggagaacttcgatgagggaagagggccatttatttgattaacgaaaaacaaccggtttggaaatggta

SEQ ID NO: 64653 - DNA, 668 bp, Glycine max
  Clone ID: PAT_MRT3847_29395C.1
ggcgtccacgatagttgtttgtaggaaatatttttcctgccacagttaatgaattacgacctctatgccataactaacccctgcactctatctattcctgtgtcaccactgcatacatattatatttacctcatttgccttaaactcagctcaggggaacaaaatgttcatttttttggcaaattggcataaggatttaattaaaaaatgttgatataggtagttaaagttgtatttcacataccagagtttaacttagtcgattgaatagagtgtatgaaatctgggactgtgttcaatttttacgaataaaaaaaactatatttcacataaaagaatttgctaaacatgtcactagtcaaccaaaaaactctgaatttacattttttatatcccttttaaaattccaaatacatatattaatgtcaaatttgtttaaccctgctatttgatcatatgacaacaacatcaacaaagaatttgacctctcaacttttatcatagccgaaggttacaataaatcaaaattaaatcagagtataaaacagttagtttttggatttaaattaagttgttgaggcatagagcactaaagctttgccttattgcaagaaccataagcagggaaaccacgagcaattaagcacggtttgaaaaacatattcatg

SEQ ID NO: 64654 - DNA, 330 bp, Glycine max
  Clone ID: PAT_MRT3847_29396C.1
cttaattatccactttcataaattggccacgctggacaacaaaaatccgtttttttttttttgtttaaaaaaaaaaaaccccgaatgttagacacaaacacgccctactactactcactacggggtttatatatacccctccaagaaacggggctccccacaaatgttaatcactacactttcggggtcgaactaaagaaaaaccggtgaggaaggaggaagaaaaaaaaaggatggtttccccagtttcgggggggagaggcaagggcgtcggtaagggcgcgtttggggttgtcaacgtgggggtttcaaaaagagataatcgcgttt

SEQ ID NO: 64655 - DNA, 441 bp, Glycine max
  Clone ID: PAT_MRT3847_29397C.1
gtccgatttgttagtggaaagaccttgaactatgtcataattggtgctggctctcattcttgagaagattttccggacaaggaagatcaagaaagacccaaaaagattgatgccagattgagacacagaatagatcctcactacactgaggttcaggctcacatggaaacaaatttgaccaaacagtctcttgatgatgttgaaactcctaaaggttccatgttggagcttaaaatttctgaatctaaaattgcacttgccaaaaacacagttggaggaaccattctgcgtagtgatctattggcactatatttgacatagggcaatctgagagcaagtgtagatttgcatcgcactcatcgtattaaaggaaggattgatacggtggccacagctggtattcctgagatacaggtatagcatgagcctgtgctatgaata

SEQ ID NO: 64656 - DNA, 291 bp, Glycine max
  unsure (1)..(291): unsure at all n locations
  Clone ID: PAT_MRT3847_29398C.1
ggagaccttattgactttatagccaacttcaatctagacttttgtatgacctttttaagagcccaagtcccttccacctntccctcgccttccacacccctatcttcaccatcttccatccagtcttttcctccacctattccttcctcaccattcttcactcattctccaccaccagctttcactcccccaacaaccccactcatctttcctaccccttcctaccctccttcttaatcttcaccaccctcatcttctccccctacctctccttctccttcatcttcacca

SEQ ID NO: 64657 - DNA, 2351 bp, Glycine max
  Clone ID: PAT_MRT3847_29399C.1
acccacgcgtttctttagggagttccaaacactttctcaccctattatactattacccagtccagaagaaactatccctctaaaggcccacccacctctttttctctctctctctctctctctctaaacacccacaacacaacaaccgaatcctttttttttttgttttgttaaacaaaacagagaaaaaaaaagttgtgaattttccagttgcgtttctgttccatacaatttcgatttcaatggcgaggcctaatcaggaggcagttgagacgttcgtcagcatcactggtttgccagaagcagtagcgctacaaaaacttgaggagcatggtggtaatctcaatgaagcagtcaatgcacattttactgaaggagacagaaatctaacgaccggttctcacaacagctctgctgtatttcctcaagatgatttcatggatatagatgacgaacatgatgcagaaattcccagaagaattccaccactacttccagcttctgcagcaaatgtcaatccgttttctcttcttgatccaacaattgggagaggtatatttggtactcgtttcgattcaacacgtccggcaccatttgttacacatccaagagaggtaagggagattcctatagaggttaaggatggtaggatcgctcaatccactcctcaagctggtcatgttccatccattgaagatgtcactggaactgtcgatgcccatggtccagatatccatgggactgtcataattgatgatgaagatgatgaagatattccacctgcacagattgcacatcaagatgagcaaacacaaaagatcttggctgatacttcactcaatagcagtgttagacctagtgctcctgaatctgagaatttgccagattacagcaatgacatagaagaagaaatgattcgtgcagccattgaggcttctaaacaggaggctgaggaaaattatagaaatcacaaacttgacaggcaaattgacttaagtgaatcaggatcacagccaaggcaatcatatttggaggatcctgagcttgcccatgcagtttcattgtccctgaagacagcagagcaagaaaaagcattgcgagtacacgggggagattctggatcaccaacagcagggccatctaagtcatcggaggcaggaaatacggactatcaccagaaacatcctcagacaatgaggatgcttttaatttgatgatgaagatgacgaagtggaggagtcgccaatgtctattcctaagatctgatagacgacagtctctgtttgactacataggatattggtagggtggtgaaaccaggcagttacagactggtgagaccatatcctaggcgtgcttttagtgatggagaaagcgccgcgacattggatgaacttggcctaaccaacaagcaagaagctttgtttttagagttaatctgatgccttgatggaatttactacaggtggcatgctattgaagtctttagtttattaagattaaaatctgcatcacaatacacagacggatgttgcattttagctttaatatgagtttctactgtttcggtcattgaatttataaagcttgataagggaacaacaggatgatgaatatcttgcatcgttacaagcagacagagaaaaagaattgaaggccatggaggaagctgaggctgctcgtgaagaggaaagacggatagcagaagaatctcgcaggaaattacaggaagagcaggaattggaaacaaaattagcagccaaagaagtctcactaccaccagaaccatcctcagatgatgataatgccgtgaacttgatggtaaaaatgccagatggcaatcgtcgtggacgtcgattcctaagatctgataggctacagtctctttttgactacatagatattggtagggtggtgaaaccaggcaattacagactggtgagaccatatcctaggcgtgcttttagtgatggagaaagtgctgcgacattggatgaacttggcctaaccaacaagcaagaagctttgtttttagagttaatctgatgccttgatgcagtttgctacaaaacaagctattgaagtttttagtttattaaaattaaaatatgaatcacaatacacagacggatgtggcattttagttttaatctgggtttctactgtttgggtgatgcaatttataaatttacagatctataagatcaacatacagtaccgtcagagctttacttgtgatgactaaatcgttatggcgaatgttttgtatattttgcggtaggattgaaataattcatgattattgattaatgaaattgcaactatcatttcccttaaaaataaagggcggc

SEQ ID NO: 64658 - DNA, 130 bp, Glycine max
  Clone ID: PAT_MRT3847_2939C.1
tggctatgctctaaaattttcacccagcagattgtattgttcttgaaggataaggtgcttatagtctttacttcatcttttacggatatgctaatgtttttatctctgctaatgcttactattattatca

SEQ ID NO: 64659 - DNA, 332 bp, Glycine max
  Clone ID: PAT_MRT3847_293C.1
ggtgggggtttttttttttttttttttatttaaattttatttttttttttttgagaccgaattcctagtttaccaccgccggaaggggaaataaaagcctttttattgggaaccgaaaaaacaataaacggggggaggtgccaaaacggaggggcgggaaaaaccccggggacccaaatttaaaggggatggaaaaacccccccccacccccctggcaaataaataaaaggccaaacgggaacgcccccccccaaatttaaccaacataaaagggaaaggggaccgcccgtgacccccagcaaaaaacgtgggaggggggggggttaacccc

SEQ ID NO: 64660 - DNA, 156 bp, Glycine max
  Clone ID: PAT_MRT3847_29400C.1
tgttaattcatccatgttactggcatgcgtgaatctaaatcggaatgcacttgatccagaggatgcagaggaggtatatgacgactatgatgttaataatgtctctgataatctcagccattaggagtatgacaataggtcatataactactcatc

SEQ ID NO: 64661 - DNA, 1277 bp, Glycine max
  Clone ID: PAT_MRT3847_29401C.1
gagaactcccaagattgccttcatgttcttgaccaagggacccttgccaatggcaccactctgggagaagttctttagagggcatgaggggctttattcaatctatgttcattcgctgccatcttataatgctgatttttcaccatcatcagtctggtactcgtcaccccgcccaagccaggtggcagagtggggaatgatgagtatgtgtgatgctgaaagaagacttctggctaatgcattgcttgatatctcaaatgaatggtttatcctcttatcagagtcctgcattcccctccaaaacttcagcattgtgtacctttacatagcacgctcaagatatagctttatgtacggctgcgagaagacgacagaatgggggagaggacggtatgatggaaacatggcacctgagatcgacatgagtgactggcgaaaaggctctcagtggtttgaaattaaccgagaactagctcttaggatagttgaagacaatacttactatcctaagctcaaagaattctgcaaaccacacaaatgttatgttgatgagcactattttcagacaatgttaacaattaatactcctcatcttttggcaaatagaagcctcacttatgtggactggtcaaggggtggtgctcacccagctacctttgggaaggatgacatcaaagaggaattcttcaagaaaattttgcaagatcagacatgtctttataataaccagccatcttccctttgcttcttatttgcaagaaaatttgcacctaatgctttgggccctcttttagacatagcacccaaagctctaggaattggaaaaaggcatagcttctaagctacatcattgaaggagcacacgctgacagaagcatgttagttagccatctgctaactctgttttagtcgcatgattcatcatctaatctccctgctttgcagaaattttgagttgctcctccagcatttagatgtctaggacattgaatctaaaccatattttacagaagtattagccaaaatattgattaatactttattggattatttattagttaagtaaatattgtacccatctttttggaatatgttttgtcatttacacaagttatttttctggccattaaaaaaaaaaaaaaaaaattattttgaggcatccagtatgtggttctttcaattggcagtttccatctctgctagttggtttatcttgcaactaagatgccaaggccagagctatgaaatatactcagatgtcagaattatagtttgtt

SEQ ID NO: 64662 - DNA, 409 bp, Glycine max
  Clone ID: PAT_MRT3847_29402C.1
gataacacatattcatacaaaaaagagaaataggctggaccataaaaaaatgcatgatttagttttacattaagtgtaaccaacagcttgctcaagatataatattagggatgaaattgaccttattacactcaatgagattgatgagtgcaatgagtggttagtgggacaagtggatgatgataatgacttggttcatgctgatgacccacacttaattaaaatgtatacagggaggaaaactagcagcaaaaaaagaaagcagccatcaagtggtggtattattattggagctgcccaagcttccaataaaggtccagctgcaagttcaatctcaagaggaaaagggaaagcccatgatgtttaatgaacaaacagaatttgagagccgagtctgaggcaattgaag

SEQ ID NO: 64663 - DNA, 602 bp, Glycine max
  Clone ID: PAT_MRT3847_29403C.1
cttttcttttttttttttttttttttttttttttttttttttcttttttttttttttatttttcttttttttttgttctttttttttttttttaaaaaaaaacctgcgactttatttaagggggcttccaccaaaagcgggctgaaaatcaaacctatgccccgaacttgggggttcgaaaaaattaaccaggaaaatggccttgcccgaaaacaccaaattgggggccatcagatgggaaaaggccccacgttgggcttcccccttataaaatctcatttacaaatttaaccccctcacggggatcagaataaccggtttcacggggggatacctgccggaaacctgtgcctacagggcctttggggggagttgccccaacccgttaggattttttccccccatcccaccactttaatggtactaagagggcgaataaagggggggcttgctaaaccagctgcccaaaaggaaggggagagtttggggtaacctgatcctgagatactgggtttcccaccccaaaccgtttccaaaaaaaagtttgcccgttaaatccctgatgacgagcacaacccggcggtttaaaaagaccccccaag

SEQ ID NO: 64664 - DNA, 170 bp, Glycine max
  Clone ID: PAT_MRT3847_29404C.1
gtggttcaaaatcgctacgattgccacatcttacaagacacttcggtgggtagttctattgaaaagagccttgtaggaaaagcataaaatttctggcgggctaaaaaaaggtaggtcggtttaggaaactaaaagaatcgttgaatagctctttcgcctcgagccgaatt

SEQ ID NO: 64665 - DNA, 1758 bp, Glycine max
  Clone ID: PAT_MRT3847_29405C.1
cccacgcgtccgctctctataaccggcctcctaattaaactcacttgttggtggaaaattaattaaagtacttcttcattcaatggatcagcttggaatcattcaaccatcttcttcaaccaaggttgaaagaaggctagtggagaaaaacagaagaaatcaaatgaagaacctgtacaacaaactcaactctcttctccctagctataaccccaaggaagcattaccactgcctgaccaagtggatgaggcaatcaactacatcaagagtttggaggcaaaggtgaagatggcacaggagaagaaagagaatttgcagggaattagaaagagatcccgtggttgcttctccaataatagtgccaattttgctgcaacttctggtttcccaaaatcgccacaacttgagattcacgaagtgggttcttctctacaagttgttctgacttgtgggctagaccaccagttcattttctatgaaatcattcaaatactgcatgaagagaacattgaggtcagaagtgtcaattcctcgctcgctggagactcagtgcttcatgttgtgcatgctgagattcctcagtcttttcttcaatttggagctaccaaagtaagtgagagattaaaaaggtttgtgaatgggtcctgcagtgatgtggaaacacagcccgagttgtgggattttgaaattggtactgatgatatgtggggtttctagatcttacaaggatgcatttaccaaaagttttgtaaaataagaaaaaaaaatgttagctataatactacaacaagctttaagagtactgtatcaaacatattttgcccatgttccaacaggttttgacgggaattaactaacgagatggtttatcttttgtttgtttgtttgttatgatttgtaactttcaacattaattcagaaaacaaagttctcctcttcacattaaatattgatacctaacataattaagaggtggacggtggtcagtttcattgactgtcttataagtatctactatcctaaatcaggttcccaaaaccataggcacatgcatattaattatatgtctggatcatgaattgcactcattctaatgacaaatttcataagcttcttctaaaactctctcaatatgaggttctatttgatgtcaacaagcaaataaaatattgatggaaaagacagtagtgaaccgaatgaagatgttggctaggatttaataagtagatgggagcacataaatatgttaattgcttcgctgtggattagacagttcacagaagaagattcaatagaaccttgctgagtttcttttccaattcccttgtactactgtccgccattggttttcaatgctcaagggctacacatcttgattcatttcactaatttttggcctttgctaaaacttaacataatataaccaagcatcatataactagctaaatttaattataagaaatttaattaactcatgcggaagaagtctttttctgttcgtatatagggtttttgtttagcagacctttctttgcaaaaaacaataggaaaatcaggtaagttgttctaatctttctcaacatatatatacttggtttggcgtaatgcaagctggaccaactcttatgtttttatgagcataaactaaaattgtaaatgcttttttcctcagtgtgttgtgtatctagggttctgtaatggttaaagaaaattttgttaatttatatattaataaaaaaattggagctgacacttct

SEQ ID NO: 64666 - DNA, 247 bp, Glycine max
  Clone ID: PAT_MRT3847_29406C.1
gtgagtcgtcaagatgcacacatgaaggattaaaatccacaacgatcaggaggctgaaccagctgaatttgaggaatcagtcggacaggcattgacagatctgactaataccaacaatgagctgaacagtgatatgaaagacttatacatagactcaattgaacacatggatggcattggtaaccatcaggatgtggtgatccatgtccgctacagattaagagaaggattaccgaagattcatgtc

SEQ ID NO: 64667 - DNA, 215 bp, Glycine max
  Clone ID: PAT_MRT3847_29407C.1
gcgctgcgtcgtgtagagccatgcgctgaacctctgttactggttaaagtgtccagaccgaaccctagcttcaaatcttaaccacgcgcgaccggtgcataatgagcacagctacgccttttaacaaccccaactctgatacgagggatcacgacaagaccgatgtggctcacattcacacgatcaaggatcaggagaatgctctaaaggtgtcg

SEQ ID NO: 64668 - DNA, 437 bp, Glycine max
  Clone ID: PAT_MRT3847_29408C.1
aaccaattgcttctaactaattaagaaatgttaatgcattctaattgcttaaaaaagtgttcaataaattttatattgttagcataataatgctttctttttaatgaaaatttcatatttttattttcttaactataatgtctttattccataaaaagactataatgtctttaagctaattagcatttgccaaagtattattcctgggtggtttattgaaaaaaaaaatgtagcactatgaaatagtgtagatggatgtaacactaaaaaattaaggtacgtgtaatgaatcaatgtggggtttgttggcttggttcaatcaaaaccccaaatggccttttaaccaaacgggcttacctcatccaattccttatgggctaaagaaattaactaattaatttattcatataaaaaaaagtgtttttcacgggcctggt

SEQ ID NO: 64669 - DNA, 375 bp, Glycine max
  Clone ID: PAT_MRT3847_29409C.1
gggtatagggctctagcagaggttatggctggcatatcaacataattcggagactgacagtgacatgtgatcttcaagggtgcctgccttactgcccaataaacatcatcgtgcttgaaaacaccaagagcctgtagtgtgatagagaccatatgccctattaatgggagggcacggatgcatctcatcaactctgagagctaggagagcgtgtctttatgaacaacatgagaaaagagccatttgagagagaatgctgcatcgagttgagcgaatcaagcatgcagagacctagagggactacgccgaggtacgactataccatctgcagagtgatggaagcttgacgacagggattgcaacggctaccgaaga

SEQ ID NO: 64670 - DNA, 338 bp, Glycine max
  unsure (1)..(338): unsure at all n locations
  Clone ID: PAT_MRT3847_2940C.1
ggaatgaccatcaacagtaagccaatcgtacttaaatcaataattcaactctttttctgactttggacaggagcaatccagtcttctggagcgcactattttgcccgaaatattaagttgatgcctcaaaaattgactagaaagaaaggtccatcatggacctaaagggggttctaattaaatattgtccaatatatttgagctaattcaaatcaccaatnaccattaatgggagaaacaataggttaagcatgtttagcttttgaatgagccgccacaattatttgtccctatgcctagaaaagtactcccaagtactgcagcacatttcgtgtcta

SEQ ID NO: 64671 - DNA, 193 bp, Glycine max
  Clone ID: PAT_MRT3847_29410C.1
cgtcgcgtcaagcgacgcgttcgattatggcgatatcgaaaagcccggatgtcgaggaattgattacggaggaagtggaccggctgatgggtccggaccaggagtttccttcgattgagcaaatacgacaaatgcattacctgaacgcagtgattcacgacggcttgatgctggaccaaccgattcagttata

SEQ ID NO: 64672 - DNA, 411 bp, Glycine max
  Clone ID: PAT_MRT3847_29411C.1
ctactcgtccgcccacgcgtccgcccacgcgtccgcggacgcgtgggcaatttagaaaatttctaccgcattacattaggtggcatctgtataccttgttgatctacattttcccatttttttttactgctgaaattaaatataagcggaatctgagtaatattaatatttccggctaattttacgacggcagatacaaattctggtctaaacacgataaaaattcttctcttgcctaataaggaaaagattgaattgattttgaactcaaaggcatttccttgctgacgttattcgcatcctgagcttatgaatttggaataacttgttgctaatgaaagcctctaggttcaaatccctgttgttgacatgttggattccacttaggttatataagtttgctaaaatttt

SEQ ID NO: 64673 - DNA, 129 bp, Glycine max
  Clone ID: PAT_MRT3847_29412C.1
ggctcgagcgttcccaaacccagtggaaagtaacgtaatgaatcgaacggcggcgaaacggtaggggagcgagacaagatactaatatacatggcaaggattggtcatcagattcacatcctgaacaga

SEQ ID NO: 64674 - DNA, 457 bp, Glycine max
  Clone ID: PAT_MRT3847_29413C.1
ttatgttctagtgagtattataatattgaagatattaatttatttttaagaatgatgataagaagtgagaaaaaaagaaattcatattccactagaagtgttaaatgatatcattcattttcaaacacatgcattgcttctataatgttattgactatacttgcaacaattagttgtccgtttgtctccatttgctgactttggttatgcttctcttggttagttgactttctcaagtagcatggtaatgataatatattttttatgcatatacaagcacacgtataccagtgtgctttctcttgttctcttctcttttcatttttctctggtatggagcatttgagccacaactttcttggcaatttgcctattgagtcaaccagttataataaaatgttatatatatatatatatatatatatatatatatatatatatatatatatatatatat

SEQ ID NO: 64675 - DNA, 415 bp, Glycine max
  Clone ID: PAT_MRT3847_29414C.1
aaccaaaaaacatttttttcctttttttttaaaaaaaaaaaacggggtgggggcttggaaacatccctcaccaatcaattaaaggggcccctcaggggtgaaaaaataccaggggttcaagaaccgtataaaaggatttcccaaggtttaaggccccatatcacccccgggaaaaaagattaccattcttgggggggggggcttttttttttaaaagcggggggaagggggtatatcccacccacccccaccaaaggtgttgggaaggggggaatcgccctgtttggggaaggtattctgtgtaacccacagttctttctgcgtctcaatttttttaaggttaagggggggggcggtttttttccgagctttgcctccccataacaattttttttaccattttgggggggggggg

SEQ ID NO: 64676 - DNA, 261 bp, Glycine max
  Clone ID: PAT_MRT3847_29415C.1
attctcagccgcaaaacaattgctttgtgattccatcaccatcagtaggtgcatcacattccactcctgatcagcatgttatcttggccaatattggtgggttccaaaccggggttcatgatttcagtgcatggagggagtgtagaagtgagatgctagtcatacaaactatggatggacagaacttacaaggtcagggattatctcacagccttggaatccacatgaccctcaggagttcaaatgccttctatccatgat

SEQ ID NO: 64677 - DNA, 1220 bp, Glycine max
  Clone ID: PAT_MRT3847_29416C.1
gttcggagcctccgttgctatgacaattctatacaagcgtaacgtttgcttaagatgagaaaaagcaaccacttgatcggtctcttaaacttcctaacattcctgctgtcgattccgatcctaggaggcgggatatggctgagcagcagggcgaacaacaccgactgcctcaagttcctgcagtggccgctcatcatcatcggcgtcagcatcatggtcgtgtccctggcggggttcgccggcgcgtgttaccgcaacaccttcctcatgcggctctacctcgtcgtcatgttcctggtcattgccgttctgatcgggttcatcatattcgcctacgttgtcaccgacaaggggtccggtcggagggtgatgaaccgcgcttacttggagtattatcttgaggactattcggggtggttggaggagcgcgtggcgagtgatagctactgggggaagattgtttcgtgtgttagggattctaaagcatgtgggaggatggggataaccattaatgggatgcccgagactcctgatatgttctacatcagacatctcacccctattcagtctggttgctgcaagcccccaacagattgtggctatgtctatcagaatgagacagtgtggatcccaggatcaggattgatgggagccaacccagattgcacaaggtggagcaatgatcaagagcagctttgctatgcatgtgattcttgcaaggctggtgtgctggcaagtctcaagaagagttggaggaaggtctcagtgatcaacattgttgttatgatcatccttgtcattgtttacataattgcttatgcagcatatagaaacaaccgcaagatggataacgatgagccctatggtgaagcaaggatgacaaaggcacaacctagtgcttttcatctttagtggcactatttggatgccaaaacgttaatttcagctgacttgtcttatgattttggacctttttctcccttgtaactaggttgctctcatctcatggctttgtatcaaactatcctagttgtacaaggatttggttttaatcttgaagggctgaatgtatttaattattactattatatttgcttactttgcaacttctgtttttgctttgaagattctcattttgtaatgttggaattagtattgatagatttataaattcggagaaatgtcttgcattagtggtaaaaaaaaaaaaaaaaaaaaaa

SEQ ID NO: 64678 - DNA, 440 bp, Glycine max
  unsure (1)..(440): unsure at all n locations
  Clone ID: PAT_MRT3847_29417C.1
tgcagataaatatnnngaccaaattaaaaattaaacctgaagttaataataacaactgtggacctaataagaaagttcaagacacgtaaaattccaaaaaaataaatgaaaaaacggaatgaaaattttatcctgaaatttggagcagagaaattttgtatttttcctttccaattctataggaagagaaggataatttgaatggataaatacaagaatgtttttgagttgaaattaattaaaaataaatgtacagggaatggtcctagatatttgtgggagatattttttggtttgggggatctttctcgagcaacttcagagtctcttcacaaagctgcccctgattcttggtcttttatcagcgtttaatttccgaacttggtatcttatcttctttgagaacaacctgttctggcgcttctctttgtacctaagaa

SEQ ID NO: 64679 - DNA, 330 bp, Glycine max
  Clone ID: PAT_MRT3847_29418C.1
cgcgagcgttcacagtttattttctcacctacaggagattaacaggggggaatttccttaagggggcgatggaagatcttgcatacttggcaaaatcatatacagtgaactgactcctagtctttaaaatatacaaaaatgcatcaaggattcaagaaatttcatcaaaaaaccacaaacttggggaaaaaattgtaacattttattgtcactgaaggtcagtacacattttctaatcacaacatattggaagagactcggaaacgtatattgttaataatggaacggaagattgccgataattaatcaggcttctattttcagctttat

SEQ ID NO: 64680 - DNA, 364 bp, Glycine max
  unsure (1)..(364): unsure at all n locations
  Clone ID: PAT_MRT3847_29419C.1
ccaaactgcaccagnctngnggggaaagcgctatttcaatttggggaggggccaaaaaaaatttttattaaaatctttacaaaaggaatttgttacactttcgacaactaccttgcgcacatcaacaacaaatataatctcatggatgcccataacaagatgctattacatactgatcttgcacgccatcataacaactaaatttgtacttaagttaatgcacggcactttccaatccagttgttccatctaagtttaatccatcaattttacatgccaaaagtttagatcaactttttttgttgaagaccaaaattacattgtaatttgccaatagattttaaaaattcttttaaagtttaat

SEQ ID NO: 64681 - DNA, 525 bp, Glycine max
  Clone ID: PAT_MRT3847_2941C.1
cttgcacctgtttccttggaaggaaacacggaactagacccattattattattacgccaagtctgagaaaaccatctagaagaaggaatattgttgaatggtggtgaattcggaaactgtggaaacactgaaggaccaccaggttgaggggtagcataaggatatgttgagtgcataggagcggaaaggcatgccagtagcattattcaaggaagagcaatgaatttgggggttgttggaggaagacccaatattcatgttcgtgttattgttgaaagttccaaaatggttgggcctcagaacagagacctattggtggcaaattcaggatttgtgtcattgcgaagttgaagagtgtgaacttgaggttcaacagggtttggggtattgagaaaattcccagtcccaggtaatattaaagtcattagagcattggcagctgcaagttcttcaccaccatcatgttcatcttcttcttcttcttcttcatctagtacaagcttattcctgttagttgtccatgag

SEQ ID NO: 64682 - DNA, 455 bp, Glycine max
  Clone ID: PAT_MRT3847_29420C.1
cttctcatggtgagacccttggggaagatgggagggctttattacagtgctcgcaggttaccgtaccataaaacgggaaacaaactcaaacgaatgtggtcccaggacctattgtgatttaaatccacaaaatcctgttgtgtaaatagggggagggggaaactgtctgtgctccagggcactctccggagtgataaaagaatgcctttttctatagggggaggagctggtgcaaagaatgctattgtcatgaatatgccaaatgcacgtcctttcgatggggacaaagttttgttggagatcttcgaagtttgaagctggctaaatgacggattccctacatcaaatgtacagatccgtttcttgatagcattgggaaatttggctgatgacacccattaattttgaggctttttcccacaagctggtgcattttggagagattcaggaaaaag

SEQ ID NO: 64683 - DNA, 502 bp, Glycine max
  unsure (1)..(502): unsure at all n locations
  Clone ID: PAT_MRT3847_29421C.1
tnnnnncnnnnntnnttttttttttttttaggaaaaaaatatttgcatccttcgtcagtgccaaaccaatacagttcacaatgcaataattaattttttccccgtcatacctcatgctctagaggacaatacagtggcaacagtcgtctaacctcgcaaaaacgtcaagccaatcaaatacagtgaaacttcagacatacataattattctaaagtagattacaatgtacaaggaaaaagagaaaagagcaaacacatgctgccagaagagaagagctgaagcttcactaactgcataaccccttaagctggcaattgctcccagtaaaatagcacttggtgtggtgtactgtagcaaaagcacaaatttaaacatagcatcattctcaactagggaaattagctaatctgacaatgccacattcccaattccaaggacaggaggctccaggagcccttgcaaaagtaataccaatagtagttttaagcccaagtttagact

SEQ ID NO: 64684 - DNA, 472 bp, Glycine max
  Clone ID: PAT_MRT3847_29422C.1
ggcacaggatacctttctattcacatctgaatctgtaaacgatggttaccccgacaagctgtgcgaccagatctctgatgcagctcttgatgcgtgccttgtacacgaccctgacatcaaggttgcctgtgagacatgcacctggaccaacatggttatggtcgtccgacagatcacgatcgatgtcaacgatgactctgaactgattgtaccagacacatgccgagaaataggattcatctgtgatgatgttggtcttgatgctgacagatgctacgctgttggtcaacagttgatctacacaggcccggatatatcccagggtgtgctctgccacatcacctgtcacgcaggagtagtatgtgctggtgaccagggtcacatgtgtgtgtattgcactcgtgagacctctgagtacatgtacttcagccttgttcttgcaaccagactatgggctcgcctcacagagtta

SEQ ID NO: 64685 - DNA, 845 bp, Glycine max
  Clone ID: PAT_MRT3847_29423C.1
tctcgggagtaaaaaaaacatatcttcctcatttcatctgtctttttaacattgctacaatgcctggaagaagatgtataaacaggaatcctacatctgcatttattgagccgatccatgagatacaatttgaacaagtgctgggtcctataaatagatataccaattatcctaatactataggaggattcccaatgcaaactcaattgcaaaatactcaacagactctgcaacaaggattatcaggctttcatcataacttgtatggaataagagagtcatccttgaggaatgttaggatagggtcccctgtgcaaaatcaatttccaaacacttcacagactttacatggaggagtattgggcattcatcataattcctatgaaataggagagtcatcatcatcaaggaatgtaaggatgagaatgacaattgaagagcctcaactgagtagctcactttatccaactggtcaagtcagtagaaacccttccccaccatgggctggacgaaacacaacttatgatccatcatatgatacgcgcggtttacctgtggatccccatttaagatgccttacctatatgaattgcaaccagccatgggctataagaaacacactttatgatccatcatatgcactgcgtggattagcttcggacccccatttgagatgtttgtccttagaaaatgcagccaaccatggtaatggtgataggttgggttcgaactgatctcaagcaatgacttcaccttgacaagggagctgtcattcatctatgctttgagtcatgataatttagacaattatgagaatttttgagattttaattagcttttctaag

SEQ ID NO: 64686 - DNA, 229 bp, Glycine max
  Clone ID: PAT_MRT3847_29424C.1
cactggccgagctggcaagcagttccagcaaatctaacgtggaccgccctgtataatgcagatgatccgggagcccaccacaaagtatgccaacctgatgccgccacgctggcgaactactacaacacacctcacggctaaccaggagagactctgctcacaagagaggagaccttcacccattgtggaaagtagactagcggtgatccacttcaatcaagacagacgc

SEQ ID NO: 64687 - DNA, 320 bp, Glycine max
  Clone ID: PAT_MRT3847_29425C.1
gtcagtcttaagcgctcaaaacgtccttactctaacatatcagtatgtgctggcatgctgggcaggagatgctctaaccggttcattgtcagattaacatgcatctgaactgtctagtacttatcatgaatctgtaccactttgctattacactttacgacttgatgcactccaatatgtagaaaaacgctcacaatcactccagatcgatcatgttcacactagaactttaaaagaagctgctaaaaaggtttgctccatctacaatcagagatctggaacagcatagggagctacagcagccaatggaaacagatgtg

SEQ ID NO: 64688 - DNA, 1415 bp, Glycine max
  Clone ID: PAT_MRT3847_29426C.1
acatgctcgcgtccgttaagaagtttcattcggatcgtgagagaggttaagaagttttctagagttgttgtttgatagagaaagagagaaaatgggaagagctccttgttgtgacaaggcaaatgtgaagagaggaccatggtcaccagaagaagactcaaagctgaaggattacatagagaagcatggcactggagggaattggattgctcttcctcagaaagctggtctaaagagatgtggaaaaagttgcagattgagatggctgaactatctaaggcctaacattaagcacggggaattctccgatgaggaagacagaatcatttgcagcctttatgctaatattggaagcaggtggtcaattatagctgctcagttgccaggcaggactgacaatgatatcaagaactattggaacaccaaacttaagaggaaactcatggggttgcttccttcatctcatcaaagaatagcaccctatcaacaattctcctctcaaaacccttcatcatttccttctcactcatcgctatcctcttcacaatatagggactactactacaactcctctcatcattattacatcccagcaccaacctcatctttcacatgccttgaaccaatttctgctccttcaagtaattacacaaacacaacaacaacctccaactctctctctttttaccaacaccaagagcccttggtcagtgttagtcccaggcagtattaccccatcacagacagttccatgcttgtgtttggtagtgaaacaagttgcagctcctctgatggaagctgcagtcaggttagccttggcagagagatcaaacaagaagacatggggtttcagaatttcatgtttggagatcatcagaacatgaacaaattcatgaacattaatcatgatggaggtgaagaatatgtgaaccaatggacacagaggccaaacgggtacatttttcagactcaacaaacagcattggattatgatcttgaggtcattaagaacctaatttgtagcaacagcagtagtaatagtaataatgggtacttgagtgttgatgaaaacaagacggaggagaagggtgtgtactacaactactgcaactgaactgagtgcaactgatgaatgaactgactactgcaagtgatatcagagagatatgatcagtgagaagcatgggattgggaagattcagaaaagactttgaggttgtgtggagttctgtgttgtgttctttaatgaaatgagataattcttattttgacagtacatggtaaaagcttctttatatttttgtgtatatcccctaggaagtgatgatttgatgacgatgatgttagattttttttttgttaattaagtattctctccaatcagatattaatgttgtgaaaaacagccaatgtcc

SEQ ID NO: 64689 - DNA, 260 bp, Glycine max
  Clone ID: PAT_MRT3847_29427C.1
cttacctgccttggacagtcaggagggagacgagctccttgtggcgaagttagaggctgtggtccctcctcttcttgccctctctctgcctctgtgctcagtgtgagggtctgagtggatggtaggagtgagtgattcctccccctccccctctgggtgctgttcatccagcctaggggtgcccagcctgtctgaatggggcagtgcccaggcagggtcagtgttttcactcctccttccttggcctttctgggctcctc

SEQ ID NO: 64690 - DNA, 332 bp, Glycine max
  Clone ID: PAT_MRT3847_29428C.1
ctctcgcgttcactagggggatggtaaaaccgtctcttacccaatgcacttaccgaagggttaagatatcgcttactcctatagggggtggagtcgcggcctagactgctattccaacgattttaccagacgcggctacttcaatggcgcgacatggggagggggatcttgcataggacctatataagatgactactacgtagattcattgtacagggtctcttgtcataccgatccgaacttcggctactaccaccctcaatgcagaggggtggccgcacttgccgatgcacttgctaccgatctcggaaaaagttgaacagctattttca

SEQ ID NO: 64691 - DNA, 1589 bp, Glycine max
  Clone ID: PAT_MRT3847_29429C.1
gtttggattctcaaagacagattgagattttacacagagagagagagagagagagagagagagagagagagagagagagagagagatgggaagagctccatgttgtgacaaggcaagtgttaagagagggccatggtcaccagaagaagacacaaagctgaaggagtacatagagaagcatggaactggagggaactggattgctcttcctcagaaagctggacttaagagatgtggaaaaagttgtagattgagatggctcaactatctcaggcctaacattaagcatggagatttctcagatgaggaagacagaataatttgcagcctttatgtgaatattggaagcaggtggtcaattatagctgctcagttaccaggaaggacagacaatgatatcaagaactactggaacacaaagttgaagaaaaaactcatgggtttgcttcctctttctcatcacagaaaacaaccttcatttccatcctcttttacccttcaaaaccctccactctctccttcagctcaccaactgtacggagagtactgcacctacaccccaacaacaaccacatctttcacaagtaatattgaaccacccttttcccttccttcaagtaactatgcaagcacaagtgacataactacctcagtttctcaccccttttaccaaaaccaagactccatgcaatgctattacccaattatgagagacaacagcagcaacaacaacaacaacatgctcatgtttggaagcgaaggaagttgcagtacttcctctgacggaagctgcactcaaggcagagaaattatcaagcaagaagaaagaattggctaccacagctacaataatgattataactttatgcttaatcacagcaacaatattaatgatggagaaaagtcatgttttggtgagtggtttagccaaacactactaacaccgttggattatgatcttgaggatattaagcaattgattagtagcagcagtagcactactatcttcaataatgttgatgaaaacaagacagaagagaaggccatgtactactactactactagtgactgcaaactgattatgatgatgatgatgactgaatctgactactggtaaaaaaatatgatgatggagaaagggtatgttgatgttggtgtggcaaagattcagaagaaaaaaaaattgatgagatttttctggggttctgcgttctttgatgaaacatttcttgttttgacagtacatggtaaaagcttctttatattttgtatatatcttctcggaaagggtgatgatgattatgatgacgacgaagaacatgatgttagattatttttttgttaattaagtattctctccaatcagatattaatgttgtgaaaaacagccaatgtcaattcaaattattttatattagggattatatatatatatatatatatatatatatatatatgtatatatatatgtatatatataacatagtttagtgtgttaagtactactactacgcattgttataaattaatctatatcttcttgatatgtattatgtaattatatatgagaatttgtgaatttgttatc

SEQ ID NO: 64692 - DNA, 505 bp, Glycine max
  Clone ID: PAT_MRT3847_2942C.1
gccgtatcgagcccctccgaggaaagatagagatagatagagagacaagtgtgaatgtgctatggttcctgagaagaaacatgcaacgaaaagtcatgcatgcgaccttgtgacactacgacaggaaccttctcgagctagacagacacggctctgatagcaggactacacccttgaagctcctgtgtggtctgagctgtccatatgctgagataccatagcattaccgggtcccgatgatgtattgtccgcccgccatgagtagcggctgaccactgtgtcattctccgtgcgagtgcgagcggacacgtatgagccattcgtgaccccagtgcaggactgccttcacatagtacgcacatgggtcttaaggtggaaggccttgatgttcacgaacaccatgctggtgaactagacaatgagatcacctctcttctgggacacattttcatggagtgaatgctctggaaggaagatgctgacctatcttattatattgcacatg

SEQ ID NO: 64693 - DNA, 398 bp, Glycine max
  Clone ID: PAT_MRT3847_29430C.1
tcgcgttacgcgtgggctctctctctttctcacttacactcacacaatctctctcttctatgtgtctttctctttccagcttggtaatattagtacaagaagagtagtagtagcttctggaggtgttggtgttgtgctgcgatctattaaaaggatagatatttatgccacattcagacgtttatgcttagtacccaattggcgaaaaaaaaaggtgcatagctcgctaggaatttgatgctgccgtcagagaaacccccctgcaaagggaaactttgctaaaataaatgctgtctctttcagtcatgcgcaggaattttgaggttgaatgctacgcccttggtagtgccttgttcttggattgcaaagaccaatcccagaattttaatggcttgagt

SEQ ID NO: 64694 - DNA, 148 bp, Glycine max
  Clone ID: PAT_MRT3847_29431C.1
ggttctatcaaaaaagaaactgtagattaagctgagagatgaattagtccaaagcaaattcaacgccgccgctgaacacccttcattttctattaataataataagtctctcaaaaatcttctggactctgccacgcccacagccaga

SEQ ID NO: 64695 - DNA, 778 bp, Glycine max
  unsure (1)..(778): unsure at all n locations
  Clone ID: PAT_MRT3847_29432C.1
ccacgccgtccgcacacacagatacagccgtttagaaagaccttcgaatttcacttttttttttttctcctctcacacaagatagataggattttcttctgctaccttcaaaaacatcacaacaagaagcaataacaccccctaatacgagttaggtgagttctcagttcaactcatcgtgtggaaaaaaaaaggaagaaaaataaaatactatttttgtaatttgtatgtgataaagtgcccatcttgatgtatgtacttcttcacttctttgtatgtgtccctagtttgagtgtaaactaaaacattttgaagtgtttaaggtgtcacaagatgtgactatgattgtgttgggtgaaggaaacatggtttcatggttgtgttgttgtctttgtgatctgtgatattagatgagatgagatgtcagaaaacatgtatcctcctaggttgttggtttttgaccatacccatttgaagatggcatgggttaagcatcaaatccggcaaaaagatggttacttgagctactcaccaccccttttgtcttcatctttttcttcacctccataccctcttggtgctactttccacaaggattcatcattgccttcttcaacaccaccaccaccaccaccatcatctggcactagaattagtcctgctgttctattcatcatagnggttcttgctggcttgtttttcatctctggcctcctccacctgcttggtagatttctcataaagcacccttcttctgcatctgctcaatccaacacca

SEQ ID NO: 64696 - DNA, 279 bp, Glycine max
  Clone ID: PAT_MRT3847_29433C.1
aattatgaaatctaaaaaacccatgtttcaaagataattaaaaaacttggggccattggttagttaaaaaaaaatcggtttttgggctaatttttgggaaacttcagggcacaggggatcatgaaaaaaagccttggcttaccattcaaggtaaatggctccaatcaaacaatttccgtgtagaaagtatggagcccccctctcgccgaggtgctttttctgaaaggggctccaaggggggtactttttagctctaaaccaccggggaagccctttcta

SEQ ID NO: 64697 - DNA, 147 bp, Glycine max
  Clone ID: PAT_MRT3847_29434C.1
cctcgaagcgcaatcgtgaggaagagaaatgaagtgcttcatgtattgatactgttatggggactgagtagcaatggacataggggagtttactgaagttaaacgtacacataaaaaccccttatatgtgggtgaatggaaataaaa

SEQ ID NO: 64698 - DNA, 778 bp, Glycine max
  unsure (1)..(778): unsure at all n locations
  Clone ID: PAT_MRT3847_29435C.1
ccacgcgtccgccaaagtcaggtctccactacaacattgttccttcaattccagttccattccccattaccatcaacaccttttcagtagtatacttgttattacactctcattaattagctacatatataatttatatccataaccatgcctgaggctcatagccactacctttgcaacaagccaaatggcaaacatgatggtgctactaatactagtagcatcatcgagcacaacaacaagaaagctctgaaatacattgaggatgttactagcaacgctgatgaaattcagaaaagggtccttgctgagatcctttcttctagtgcacatgctgagtaccttcaacgccatggcttggatggacgcacagacagagaaactttcaagaagatcatgcctgtggtgacatacgaggatttaaagccagatattgatcgcattgctaatggtgatacctccccaattttatgttccaaacctatttctgagttcctcactagctctggaacatctggtggggagagaaaactgatgccaaccatagaagaggagctagagcgaagatcattactctacagcctcctgatgccagtgatggagcaattcgtacctggcctagacaaggcaaaggaatgtactttctgttcataaaatcagaagccaaaacccctggtggactcttagctcgtncagttttaacaagctactacaggagctcacacttcaagaacaaacacattgttttgacccttaacaaactacactagccccattg

SEQ ID NO: 64699 - DNA, 375 bp, Glycine max
  Clone ID: PAT_MRT3847_29436C.1
ccagacttttcaaatttgcctaatctggaaaagctagtgctgatagattgtccaaggttgtttgaggtctcccataccgttggacatctcaataaaattcttatgataaatttgaaagattgtattagccttcatagccttccaagaagcatctacaagttgaaatctcttaaaacactcattctctctggatgtttgaagattgacaagttggaagaggacttggaacaaatggagtctttgatgacccttattgcagataacactgcaataacaaaagttcccttttcaatagttacatcaaaaagcattggatacatttctatgtgcggctatgaagattctcatgtgatgtgtttccttctattattttgt

SEQ ID NO: 64700 - DNA, 2718 bp, Glycine max
  Clone ID: PAT_MRT3847_29437C.1
tttttttttttttttttttttttttttttttttttttaaatgaaaacacaaatgattttatattagatttctgacacaattgagggctttatacaaagatattgccttgatggaggcatgtaaaaccaatacatgtcgacattcttagtaaagagaaaaatgaagactccaaaccccagtttcttatcctggggagaatagccaaaacaatgatgaatcaactgtgccacgtcatatcccagatctcacataatctccacctgaatcacagaaatgcatgattccgatcacccaaataaaactttctaacaagggagtctgttttaaattctattagtaaccggtagatgaaaccaaaacattatgctcctttaaacgtttctgaaaatgagctaaacgggtttgcaactgcaggatgccagcagccttctgagaaagaatggcgtttagtcttgttatgtaatcatccagctgattccctggttgatctgcttcaaccaagaggttcatctcctctctaacaatgttcatggtctcctctacttgtgtccggtgagcatttacaaggtcctcttcttcctgtaggagggcatttaaatcatcctcagcatgtgtggtttgaggttcaacttttgggaggtccttccatttgatctgaccactgggtttcttcaatttgtcatctgttgtagcatatgattccatctttccatttttcttcaatggtggtttcacctgctcgtaatactcttcagaggggctaaaatcatccccttcattttcatcaggccatccatctgtcacgcgatcctcataggctgacccagtaacagaagataagggaactgtacttgattctttaaggttgaaatttgacgataaaacatccttctttgaattgttccctttcgataggctttttaccctgtcagcatatcttaatgtattcagagtatgttcacatgaaccagtgcttggtgatatgcatgaaatcataacggtgcgggagttgccaacaaatgaatccctcaaaacttcagtcagtttactgcctctgaaagggatgtgtccttggtcattgtccagagctcttatgcattcctttaaggcaagcaagctcttattgatctcagcaccttctattcttgtctgtttgtcattatctgtggtatccgctccacgttcacttccagcaagatctatgaaggagagcttcccaacaacacgaggaggcttggatacatttccatcaactgatctcttgatagcaagctgaagtattgcatgtgaccgtgaagactcctcatttgcacctgtggtgccagtacttcttgttgcatttccttgctcaatcagttccttgatggtctctacatccgatactcggtactcttgcaaaccaacaatgcaaacttgttgcttaccatcctccctcatgcaaagtttttttcgatcattaaggagatcaaaaagcttcccaccatatatttcaaagaaactcacaaacaactgaaatccctgattcctgtaggtatggtgcatcaatctcaagatgtcccttgatgctttaagtggcagtggcttcattgtgtaagtttttccacttcctgtttgcccatatgcaaagcaagttgccttagtgcgttggaatattattggaactatgggctccacagtttcacgatacacctcatcatttgtaacctcttcattcaagacggcatcaaaaacaaattcatgcttttctacatactgagttaggtcaaccttcagtttagtctcgtgcactgttaaagaattggaatatgtttctatgatgtcctcctcattttttgctaattccttcttattcattggtcttttacgaaccaccactttaatctttgctacagaattagatttctctttgtctgcagggagacttttcaatatgttttcaggagcacgagctctgccagtctgtttgctcagcatgtaagtttcagagtcatcaaagcttctaccccggccaggttgatacagggagttggcatcatatgcattggagactggcagctcgggaggaagaagctcggtgtcgaaggactgcagatccaacaagccggggctgaatcaccggacaaatcttcgccattctttttctgcatcgaagcacggtaaccgccgggaggcgtggaaggctccatataatactcgtttcctccgttaaagctcctcggcgcattccggtacattcttcctccttgtgcacctccgtacaagttatagtcctgaagcggaggaagttgattggaggaggattgaaggtgttgaaggccagccgactggagccacctgttgccgttggatgagctgtcgaggaagttatcggagtactggcgctggtggtgcacccccgccgcaccagatctcagcccctgtctccctgcaccgttcatcttccttggcgatgatgagatcggaacggaatgatgaggtagaaggacagtggagtggactggagtgaaaccgaagatataggaaggatacgatacgagcgacaaaaggtgttgtaagtgaaaccaagggaagggggaggaggctttgaaattttttgaagggactccctgcctagcacgtgcgacgacgtcgcgttgggggttagggtaggtcccgtggtttttcgaacttgtcccgtcccacatgggtggggacggcctctgtttttcggacgcgtgg

SEQ ID NO: 64701 - DNA, 221 bp, Glycine max
  Clone ID: PAT_MRT3847_29438C.1
atacacaaagggggcagggtccatttcctttttttaagctaccaaaaaaaattttacggcaacatcaataaggtatattcaatactatagtccatacaaaacccaacttgtatactttccattaataactacaatgattaattacaataacacatactttttcaagaagaccaattccttaatgattaaatttaataccaaccaattgaattcaaaacata

SEQ ID NO: 64702 - DNA, 1262 bp, Glycine max
  Clone ID: PAT_MRT3847_29439C.1
ggggggtggagttcaaatttaaaaatgtaggctacgtgaaatactatgtgtgccattatacacaccttcaattccgttacattattaaacaactcattttcactttcttccttaatctccctctctattttcgttttaccaaacagtctctaagtgaggggggggggagagtttcaaaagagagaaaataacatttatttgtagcaatattttgaaaatgtaattatacagtatagagcttaaaaagaaatggtagttccatgtcagaaattatgcaataaaatctttgactaggttatagagttggttttggtgcttacgagcacgaacctcattcccatgacatcccccttggtcaaaacgggtgaccacagccacacccttctcctctatcagtcttgccagagccatctgatgatccagaagtgggtccccatggcacccactcaccagcacccgccacgcaagctgcctcacccgatccagaatcacaggcccatcgccagccgtgggattgcaatactcgggatcacggtcaacccccaggggcagcgacccctcccacagtaagtcacacacgtgcggcggcaaaaccggatcgtccacaagcctcacctcagaaggcaccctcttcgttcctccgaagaacggctgactcaatatcagccctctgatcttaagtggcgccagataattgtctccataaacgttaagctccgcagctacacgtagacccacgtggtacgcgatgtttgctccggcgctacttcccataaggtaacagttggaaaaatccgcgtggttgcgcaaccaatcgtttgactgtgctttgatccagtgcagcgcttcgacggcatcttcgtacgccgcggggagtctgtgttccggtgcgaggcggtactccacggaaacgacgatggagttggtgtcgtctgcgaggtttacgcatgcgtcgtggaagaagtcagaggcggcgctgaagaggacgaagccgccgccgtggaagtaaacgacgagagggaggttgttggagggggaggaatcgagtgcttcgcggggtaggaatatgcgggcgaaggtgttgtttgatcggttgatggttgcgtcttgggtgaggacgggaagggtgggattgagtgagggtgagatgggtgggtcatcacgctggcgagtgatcgtgccgtcggaattggggacgagtttgagatgctggaagggatcaactttgctagacatcatagacatagtccttcgagacatac

SEQ ID NO: 64703 - DNA, 201 bp, Glycine max
  Clone ID: PAT_MRT3847_2943C.1
ggctcgaggggctttatctacagcagcaagcccatggcctccaaagggggcgtgctatcaggaactgcctcatccaatgtgtggcggctccccttgttgcagtatgcgacgatggcgatccatcacccactatgcaggcctgttgagatcatgttgggccctgaattgaaccaagccttgtactgtcacctatggagtggc

SEQ ID NO: 64704 - DNA, 421 bp, Glycine max
  Clone ID: PAT_MRT3847_29440C.1
aatcaatggtagaacctagcagagagaaaatgtacgtggatcacgcgttttcgatttcagatgaggacataatgatggatgcagcgtacacggtgagcaacaaggcacccatgaaggagatcgccctcgccgtttcccttctcgtctttggaaccctagctatcattatcggctccctcatggcctacaatcacgtcggcggcgacaccactcacgagtttggtgagttatgaaagttgtatcagtaggtttaaaatctcaaaggagtgcacatgacccatatagtcgaagacaggttcttgaattttagtctatacttaccatatcattgcggattgcatactaccctctcctcctccctttccttttcttttccctcttgtttctgcattctgtggacaacaggtatcaaaattatttc

SEQ ID NO: 64705 - DNA, 449 bp, Glycine max
  Clone ID: PAT_MRT3847_29441C.1
tatgaataattacatcatacatagtcatgaatcatgaattaaagaaagaagacatcctgtatagcctaggagcttactccttagagctctgtaattttattttatttttgtaaggaaaagtggcatctatgaacactcttgtttacaattatgagaaacataatcttataaaaaccaaactagctatctccatcaatttctgaattgcgtttgatgcctgaagggtcgacttgagtaatacttactgtattaatttcttcatcagcatggttctttgatgcttcccaattcacttcaacagtgttatcttctacatatgtgacttcataaatgtgttttctaaaccaacttcctttgccagcatttgaaatgttttcttcatgcactatttcagtttcattaacattaggtgggacaccattttcatcatgaaagctcggacgcgtggg

SEQ ID NO: 64706 - DNA, 869 bp, Glycine max
  unsure (1)..(869): unsure at all n locations
  Clone ID: PAT_MRT3847_29442C.1
cccgaattcccgggtcgacccacgcgtccgcttgttctctcactccctctcaactctcttctctctctctctctctgctgctgcaactcaaagtacacaaaacgtgaaaagctgggatggaaaccattggttctgtggatgacctcttggatttttcatcagacataggcgaggaagatgattacgatgacaaacctaggaaagcctgtccttcacttaactcaaaatgcgccggcccatcgttgtttaacccattggtccaggagtttgcagaagaggagcttgaatggctatccaacaaagatgcatttccttctgttgaaacgtttgtcgacctatcatctattcaacccggcacaaccaagaaccaaaaatcagccccagtacttgagtgtagcacaggcagtagcaacagtaataacagcactaacagtatttccctcctaaacagctgtgatcacctgaaggtcccagtccgtgcacggagcaagagtcgcagtaggcatcgccctggccttgctgagaattctagtcagcaagtctggtggagacagccaagtaatggaacttccaaagcagatgaagggatgaaaatctcatccatcggtagaaaatgtcagcactgtggagctgaaaaaactccacaatggcgggcaggtccctctggtccaaaaacactntgtaatgcatgtggngttaggttcaagtctgggcggcttgtgcctgaataccgtnnctgcagtagcccaacttttcatagtgatttgcattctaattccacnagaagaagtagagatgaggaggcagaacaaatgggaatggataaatgcaagtagtagtgagcagtatttttagcattcagcatgcta

SEQ ID NO: 64707 - DNA, 514 bp, Glycine max
  Clone ID: PAT_MRT3847_29443C.1
aaaacactgccaaccatggtcgcaggcaaggtcttctctgtgcttccgctccttggcttggcgctgggtgcttccatccgcctggacgctcgacagagtgatggctcgtccaactcgaactcgaccgcggggccatatggactgtcgaatgccgactgttcgaacgtgacgctctcagtacccatcaacatcacgctgaccaacttcactggtgtcgacaacacctactcgaaccagtcgtacattacgcagcaggtgatcgagttcactcaagcccaggccaactggacgagcgagcacgtctccaacaccacctttgcgctcaatcgtaccttctccatcgcgggcacgtactgcaagcctcgtcagggcggggacaaggatgtgctgatcaacctggtacatggtatcggcttcgattcgagctactgggactttgcattcagccccgagtacagcgtggtcaaggtggcggcgagctatggctacgcgacgttcaggtacgacaggatcg

SEQ ID NO: 64708 - DNA, 600 bp, Glycine max
  unsure (1)..(600): unsure at all n locations
  Clone ID: PAT_MRT3847_29444C.1
aatgaattatttaaatcaaaatagcttagagatgtattgattttcattttaaaaattaaaaagagatatcatttttaaaataaatttttaaaaactacttttcttgaactactttattttttagaaacaaaaacagttttcgaaaataagaaacggataaatgttttttctctgtttcctttggatgttccaacgtccaaccgttattttattttttacggatgcaaatactggattattgaaatttgaaagggtttctttccaatattactatttggaggaaaaaatgaattatatttattcacagaactagttttttgagacgcatacgcgcacgtttcattggtatttcttttttacatcattagtttttattttttcttacttcatcatttggtattttattttaatgaaagtactatctttcatactaattaatactttaatttagattaaattgtaattttagttcctctaattttttaaatttaatagttntgatctctctaatttttaattataacattttgatccttctaattttataaattaacgattgttagtccctaatagattattaacacataattgggatgaata

SEQ ID NO: 64709 - DNA, 769 bp, Glycine max
  unsure (1)..(769): unsure at all n locations
  Clone ID: PAT_MRT3847_29445C.1
cccacgcgtccgcgatagcgaacaagtaccgtgagggttagctgcgtggaagatgctgatgatagatacgcataccaaaccgctgtgagcataggaggacatgtgttcaaaggaatcctctatgactatggtcctgaaaataataaccacaacaacagtaataataatagtaataataattacacggctggagaaacctctgctagtgttgttgctgcagctcagcccttgaaccttgctgctatttcttcagctgcacttgttgatacttcctctttgtattcggctccggctaacgcattcatggctggtagtggtacgcaattcttccctcacacaagatcttgaaaaaggaaaaaaaaaaacaaagaaaacggggattgcgtgttggttgtgtctcactctctcacagttcttctctttcacaccaactttgtgtttctagtagcatttgatgatgatattgttgttgttgatgagaatgaggccttgtggtaaatttgacactcatattttgaagtgggagaggaaaaagaaaagacaggagagaaaaatatatatatatggatggatgtttatttttattttttttgtgcaaattattaatgcttagttcaaagatagatcattcttctccatgttgaaaaactagctctaaagtttacttgtttcttagctttgtacgatataaggacacatctggttctaatgttgtagtttggtgtagagtgtgtcttcttttgtttaaaaaannnnnnnnnatattttt

SEQ ID NO: 64710 - DNA, 552 bp, Glycine max
  Clone ID: PAT_MRT3847_29446C.1
ggaaacggcaagcaaaggaaaagtttccttccgatttctaaatataaaaaaatatatataaaaaaaaaggggaaccggggaaaaaaaaaatgggggaccaaaccatttctttttttattagccaaaaaatgggccaggaaagggccccaccctatctataaaatccaaacccaaggggccaaatcggttttttcttcaccatggcaagcatttccgggaggggggcccaacacccgctggaacccgggaaagttgacgttcccgcccccggcgaaacccacggattggaccaggggggggcattcccccacggagcacttttttccgggggggttcacccccgggcaaacccccgggggggatatgaggccgttcttgccctgaccgaacagggggaaggcatcggggaccctcggggcccccccccccccgcggggccggaccggcaaaaggcggcaaaccccgaagggttaaagaacccgtcgggaccggggtaaaggtcttccatgacacgcgggaccccccccggggggaccccggatccgagggagc

SEQ ID NO: 64711 - DNA, 1680 bp, Glycine max
  Clone ID: PAT_MRT3847_29447C.1
cggtccggaattcccgcgtcgacccacgcgtccgagcttgtgttgtgtggtctcttgagtttcccgccttcagtgaggtcagaggctatggaaacctaatggaagacgcaaagaaattgtacgaatcactctccaacgccaccgctcaagatccaataatcctcaaagacaaagaccttcgcagcgtttgcgaaaccctcttcgaccaactcaactccaccttccgccgatttttctccgctctgcctctgcgccaccatgaccctcacgcttggtctcttccgcctccgtattcacggctgtggccaattgttgaagacctttctctcgttctgcgctgctgtcttcttctcctgacgctcccgcactccgatcagaagtttctcctcctcaagtgccgttcccttcttcgcgtcttgaactccttcctctccctcgatgtcgccgaacgtcgcggcttgcgcttccgcaactttctctccgacgttgacttggagcttccttcttgcccttcgtatctatgcgcgctgcttgaggtatttgcagatgagcttttaagaaatcaatctttgagaagatatcttatgaaggttgattcagtgtcttccaccattgaaaaactttttgtgtgccatttcaaccaaggtgatattgccagtgtcctggaggtgataactacccatttcatcatgtcagtttctaatgagaaagcatttgaggatttcacaagtggatttttttttacattgtaacaaggattttagatttcctaaacttagccttgcgccctccatgatgttactgcttgaccctgttgtgttttctgcaccaaagatgttccaggcacacacattttcaatggtttctgaagctccgggttctggcttatctgcagagattttagctccagatatgaattgcgacctaacagcacttcaaaaactattatctttgactctatgcacgtgtctagtttgcaaatagatggcttttgtgttgagttgaaatgttcctataattcatacctgcttgagagagatcagctaacttttaaagcttatatccagcaaggcacaaggaacaaattaaatcaagtcttatcaaaatcagataattcatgggactcctatcaatgcaaaatgtcttccaaaacaaaagctgaccttttggctgactacattgcatttatgaaagatagacagtacatatttgttgattcatgctgggacgcgactaccttaatcttagattgtattatccatcaagctttctctcaggatgccactggagatgcagtataccatataaaggaaaatactagtgcccaagatatatgccttcttgcagccatattgaagttgatgagtgtttcattgctacaggcaattaagtatctaagcaatggtagtgattcagattgtttaaaaacaatgggtagtgcctctgtgcgtgagaaatatgatttcttgatcagcatcattgacctttttcaacaatttaagttctgcttaccaattcaaactttatttaataatgtgatgaaaactcagaaatcaaattacaaagtctccaaatcaatgcttgtgcactttataggcttgctatctataagttttggcaatggacttgatttgctagctaaagggtgtatactcgtacttatggcactgatgtgtctat

SEQ ID NO: 64712 - DNA, 283 bp, Glycine max
  unsure (1)..(283): unsure at all n locations
  Clone ID: PAT_MRT3847_29448C.1
gnttgcnaggttganctcggatactccgaggtttgaagttgaggntctggaatgtgggagtgttgataatgatgaagagnnnnnnnnnnnnnnnnnnnnnnnangaggaggaggaggttgttgttgttgatgattgtggatcggtggagagtgctcatagtgtttttatggaggagggtgacatgggggtggagcaatcgccttcgccggagatggcggcgatgactcgccaganaccatttggcatggcggaggcctcgcccggtttgagaagggtagtgcc

SEQ ID NO: 64713 - DNA, 383 bp, Glycine max
  Clone ID: PAT_MRT3847_29449C.1
gggagttggagattgttcaactgcgggaatgtctccagatgagagggagaaattcatagcaatgttgaagcagaaagctggagaagagtaatatgatgatgatgatgatgccactagagcatagagaaaaaaataataaaaaaaaaaggtttcttataacttatgaataggtgcaactttatttggcattctaaatgccaaataaagttgcacctattcataagttataagaaaccttttatttttattatttatttctctatgctctagtggcatcatcatcatcatcatattactcttctccagctttctgcttcaacattgctatgaatttctccctctcatctggagacattctcgcagttgaacaatctccaactccc

SEQ ID NO: 64714 - DNA, 251 bp, Glycine max
  unsure (1)..(251): unsure at all n locations
  Clone ID: PAT_MRT3847_2944C.1
ggccattcagatgtcttcttttgtctttgtttctcttacaattttattttgcgtctcttctttggagaagagttttgcctttcacacaacatacgacataggcatcaancactcgcgcaggtcatgtgctcagtcgctctgttggggcttcatcctctaccgttcttggattgccagcaatggccaaggtgtggtgagtgtcgtgctccatggtgggaaagtctgcaagcagctcattcctagggatgggg

SEQ ID NO: 64715 - DNA, 198 bp, Glycine max
  Clone ID: PAT_MRT3847_29450C.1
gttcagtccttttattattttttttatttatttattatattcaacaaaaaagcacacgaatgatgatcctataaaatttgaaaggtgcagttgggcgccggacgcacaggcgcttagaagcactagcagaggacaactgagggtccagactcgacggactcctgcttagagatccacatatgttggaaggtagagagg

SEQ ID NO: 64716 - DNA, 1029 bp, Glycine max
  unsure (1)..(1029): unsure at all n locations
  Clone ID: PAT_MRT3847_29451C.1
accttctctttcttatcatccccttattatatttcccaggggaaccaaacctggctcccccctctccatagatctcccaagtcccatgccctggggcttccatctctcaaaagctcaaccacttgccatggcagcagcagcgtcaatgtgtatgagcttcaacctggcaacagcattcaagggtctctctttttcttcttcttcctcatcgttcttcgctggaagtggtagttattctctccgcgcgggtcccacctcggtggtgtcgctgccccggcgctgcccgctgaccatagagaacgcccacaagaagggggcgggcagcaccaagaacggccgcgactcgcagggcaagcgtctcggagtcaagatatacggcgaccaggtcgccaagcccggctccatcatcgtccgccagcgcggaaccaagtttcatgcaggaaagaatgtggggcttggcaaagattataccattttctccttgattgatggagttgtaaaatttgagaaatatggacctgacaggaaaaaggtgagtgtttaccctcaagaagtacagcctgagaaccccaacagctatagagcaaggaagagagagtacttccgagtgaggcgtgaacgcaaaaaagctagacaagaaggagcaatacttaaatctcaactggtgctggcttctgcagatgatgcagcaatcactaatccagtgtgttgattctgattcaatcgtctaaatgtgtaaaataccctggtccccattttttactcttgtttatccgtaaaacctttagcattgtattgagttttgttgaagtagcaatgcacaatcagtcatcatgcgccatctgaatcaaaacattgcttgatgaattctacagtatgagaatttgttttgtagtatttggaataacatctattgaatttttggtcgagatccttagacttaaaaaaaaaaaaaaaaaaaaaaaaaaaaaaaaaaaaaaaaaaaaaaaaaaaaaaaaaaaaananaaaaanaanaaaannnnananna

SEQ ID NO: 64717 - DNA, 378 bp, Glycine max
  unsure (1)..(378): unsure at all n locations
  Clone ID: PAT_MRT3847_29452C.1
anntcgagcggncgctttttttttttttttttttttttttttttagctaataaaaatgaccaaatttgttaaaagcaaattactggccactganctttttcaaaagtgatcagtcatcaagttatgatgatgatgatttttcaaaaccatgctgggatctctgcatgtgcacacgctcaatgcctcctcaatgcagctgcgaagatattaggctgaattcatgccactcagattgtaagagctgtatgtgcacacgctcacagccagaacagtgtctttgttttgacaccaacgacttttgttacaaaccttgcaagtccagagatgactaaaaaaactaatagctttctcaaatggacgaaaccactttaggctttg

SEQ ID NO: 64718 - DNA, 156 bp, Glycine max
  Clone ID: PAT_MRT3847_29453C.1
ctcaacatcatcattcaatagagagaagagcgtatcgaggaagagtagaagatatccgtgatctcgattgtgttccttagcacgtaacgaggcaaacattctaaattgcaagagaccctgcctctctctctatgtctcttcaatcccactgaactt

SEQ ID NO: 64719 - DNA, 320 bp, Glycine max
  Clone ID: PAT_MRT3847_29454C.1
cgtcgcatgcacgcgtacgtaagctcggaattcggctcgaggcaactgcgggtcctgaagcgcgggctgcagcaggtcaccggccacggcggcctgcggggcctcccacgggttttcttcagggcaaatgatataaggctcggtaccttggtgggggaagacaaatacggaaacaaatactacgaagacaacaagcagttttttggccgtcaccgctgggtcatatacaccaccgaaatgaatggcaaaaacacattctgggatgtggatggaagcatggtgcctcctgaatggcaccgctggcttcactgcatgactga

SEQ ID NO: 64720 - DNA, 5088 bp, Glycine max
  Clone ID: PAT_MRT3847_29455C.1
ggcctaacacgagtggtggatgggcagcttgtgacgactttactcatcgctcctctcaatctgatccaattttctgcccttgacaggggagatagaattcagatagtgcaagagaagcgtaatctccaagttatcatcttttttgttcccttttgttttcagtgaagaacataggctatagaagatcaatttcctaatattaaacactgggtttttactcattgcattacctgcagatgctagaaatattatgttcgctggctaaatggaatttgccacgcttgatatcgtaaaagtatatactactacatcaaaatttctcctgtgaaagacagaatataaaaatctaaacttacgcttccccgcaaaagaataaaaaataacaaaacaaaaatgaaacatagaatatgttgttaggggacacattgaatccatcttgaactcgaatcctccgtgggccttaaccaacatcaactgtttcttcattcacgactgaagtattcatccccacgtggtcgtcacgcagttatgatcccacaccgagcagagtgaaaacactcaactcccaaagtcccttctcagcttcaccatctctttccaccccagttgccgccacgcccaccaccattggagaacctaccattcctgcctcctccacctcttccaccaaacctgtagttcccaccacgaccaccattatcaccaaatctgccacctcttgattgtggctctttctgttgcaactgtggcagtgttttcactacctctaaacatacattcgaggcattttcctgaccattaagatatatgtctaaatctttagctggtacatcaaaaacaacgccatttccatcagcagtgagtgaaagacctttcacagcctcaaccttctcttcaggcaaaaatctcctcaagattgaatagccataagattgggtatagattggtttcccagtctcaaggactaatgtaacatagttctccatggaagtgagaagtgatctttgctttacatcggtataaccaacagccttggcaagagcctttgccagtaattcaatgactggtaaaccagaactgttcaaaagctcttcagcagcagacttgaatgcaggaaccacactatcagacacttggataatcatttcagcagcttccccactaacagctttggcaatatcatcgggctgaggggcggatacgtgttcaaattttacaccggactctctttctattctaggtatgttagatctttttggatcataaagcatgacagcaaccccagtattacctgctcttcctgtgcgtccagaacgatggatataggcttctacatctcgtgggggttcacactggataattaactgaacatcattgatatcaagacctcgagctgccacatttgtggcaactaatgtcatgaatttcccagacctaaagccagacagagtaacctcacgtgttgattgctgtatgtcaccatggagagcttttgctccattcaagatccctgcaagctgagaagcacattcttttgtctcggtaaatacaattgtccggcctccactgctataacagcgaataatatctgggataagttgggccctggcagaactagtacaaggaagaacaatatgcctaacattggtgctggccttcatttttgtatttccaacaaggtcagcagttttcttatctggcttcaaaaattttaaagcaatttgcttaacccagtctggcaaagtagcactgaaaagaagtgtctgaactttattaacattttctaccttgcctagaatcatttcaacatcttcaacaaaacccatcctcagcatttcatcggcttcatcaaggacacgaaactttagttggctcaggtcaatatttcccttctcaatatgatccttcacacgacctggtgtgccaatgacaatatcaacacctctcctcagcttaagttcttgaccttgatatggagctccgccgtataaacaacatgaactcaatcccatcgccccaccatacacttcaaaatcagcatgcacctggcaagccaattccctagtaggtagaagcacgagaacactcggagtcctcccgtagccagtctttctcgcagattttgctggaccatttattaaagactctaatatgggcaacacaaatgccagagttttaccctgaccagtgcgagcacggccaaccaaatcagaaccatcgagaacggtgtcgaaggtcatggcctgaatgggaaacagcgattcgatacccttctccttcaatttctccctcaatggttccgaaatcctgaagttggaaatcgcgttggggtcatccttcttttcttctttaggctccgttaccaacaaaggctgttctttttcttcggacttgacaacctttttcttctttttctttttattctgactgtcgtcttctctggaagcaggttcgggttcgacgaggtcggagctggtctcgtcgtccccattgttgtagctgtaagcggcggggcatggcctctggttctaataaatctgaagccttgcgcttcttcgtcttcttccccgaaaccccatcgaggtcgggatcagtgagggattgggtctttggtttctttttgttggaaataggtttaggggtggtggtgtcagtttcagagagagagagtgaaggcatggtgatggcggcgtgaagagaagaaagagaaagggagcgagagattttctcctgcttgaaagggggtatggcaatgaggtgcagaagcaggagaacaaaaaggagtaagcgccgccgacgcacgattgggtgtagattagtttgccagtctcaagaagtaatttaacatagttctccatggaagttagaagtgatctttgctttacttcagtataaccaacagcctttgcaagagccgctgccggcttgtctgcggctgccacaccagaattgttcaaaagatcttcagcagcagaccgagtaggcccccgagcaatgaacattgcttggtttctctttccatattctcttatcattgagagaccctttgtcccttcttctcaagatctcattgcatttccctccctttacaggggagatagaatttagatagtgcaagagaagcgtaatctccaagttctcatcttttttgttcccttttgttttcagagacatacataggccccagaagaacaaattgctacaacctattttgatttgagatctgtctgtctctttggtttcacttcagggctcaaagtgaggaatgcgaagaaaatggggaggaaaggaaatagttggttttctactgtgaagaaagctctaagccctgagccaaaggagaagaacgatcagaattcaagtagatcaaagaagaaatggtttcagaagcaaaaattgcagacttcagaatcaacctcacaatctgataatgcaccacctcttcctctacctgagattattttaactcatgtcgagagtgaaatcaaccatgatcgggttgaagttgcaactgcagtggatgctgaggaacctgttcttgcagttcagacagcagctgctgaggttcaagccacaacaattgttcagtttgacaataaaccaacagaagaagtggcagcaatcaggattcaaaaagcttttcgtggatacttggcaagaagagcattgcgggctttaagggggttggtcaggttgagatcactgatggaagggccagtggtgaaacgtcaagccattagtaccctccgttctatgcagacttttgctcatttgcaaactcagattcgttctaggaggctcaggatgttagaggagaatcaagcactacaaaaacagctcttacagaagcacgcaaaagagctagagagcatgcggcttggggaggaatgggatgacagcgtacaatcaaaagaacaagttgaagccaagttactgagcaagtatgaagcttctatgagaagagaaagagcaatggcttattcattctctcatcagcataactggaagaatgcatcaagatctataaacccaatgttcatggatccaaccaatccagcctggggttggagttggttggaacgatggacggcagcccggccctgggagagccatagccagatggagaaagagaagaatggcaataaatctctaagaagttctagccgtggcattaccagtgctgaaatcagcaaagcatttgctaagtttcagctcaattctgagaagcattctccaacagccagccaaaatccaggctcacctaacttcgagtcgcattcccaatcccattcaaatcctcccaagccaccttctccagcagttgctaagaaactgaagaaagcaagtcctaaggatatcttggctatagatgatgacaccaaaagcatggtaagcgtgcagtcagagcggccacggaggcactccattgctggatcaatagtgggagatgatgaaagccttgcaagctctccatctattccaagttacatggtgccaactaaatctgcaaaagctaagtccaggatgcaaagtccatttgctgcagaaaacggaaccccagataaagggtcctctgggactgcaaagaaacgtctttctttcccagcttcgcctgctaggccaaggaggcactcaggtccaccaaaggtagagagcagcttcaatgctgaaatcactgtgggaaatggtgtggctggttgattatatagccacagaaaatatgatgcaatgcaagcatttgaaatgtcatgacaaagttaagacaaaaagttcatttgaattgttcccttatttatttatttattatgtgtatctcaatcttttcatttcttggaggctattggtttgagggtgaaaactgttttaccttctacattttatctatttgtattctcatgtatctactcacaatttgcactgagaagttgaaaggtgtgattcatgatagtattatggacaaaagaacaagtcagctgtcagaagcctttcggagcttccccagtatctctgttactattgattcttatgtgatataaaatgtatatttaatttcataatctcaaacaacgaacgcgtgggtcgaaccag

SEQ ID NO: 64721 - DNA, 608 bp, Glycine max
  Clone ID: PAT_MRT3847_29456C.1
ccaaaatattaaacactgggtttttactcattgctttacctgcaaatgctaaaaatattatgttcgctggctaaagggaatttgccacgcttgatatcgaaaaagtatatactactacatcaaaatttctcctgggaaagacagaatataaaaatctaaacttacccttccccgcaaaagaataaaaaataccaaaccaaaaatgaaacatagaatatgttgttaggggacacattgaatccatcttgaactcgaatcctccgggggccttaaccaacataaactgttttttcattcacgactgaagtattcatccccacgtggtcgtcacgcagttatgatcccacaccgagcagagtgaaaacactcaactcccaaagtcccttttaagtttcaccatttttttccaccccagttgccgccacgcccaccaccattggagaacctaccattcctgcctcctccaccttttccaccaaacctgtagttcccaccacgaccaccattatcaccaaatctgccacctcttgattgtggctctttctgttgcaactgtgggcagtgttttcactacctctaaacatacattcgaggcattttcctgacca

SEQ ID NO: 64722 - DNA, 1465 bp, Glycine max
  unsure (1)..(1465): unsure at all n locations
  Clone ID: PAT_MRT3847_29457C.1
cccacgcgtccgcccacgcgtccgctttccattccatattctcttatcattgagagacccgttttgtcccttctcaagatctcattgcatttccctccctttacacgggagatagtgcaagaagcgtaatctccaagttctcatctttttgttccctttttgttcagagacatacatagtcccgccccagaagaacaaattgctacaacctattttgatttgagatctgtctgtctctttggtttcagttcaggtatgatatcttgaaatttacatattttctggataaagggtcaaagtgaggaatgcaaagaaaatggggaggagaggaagtagttggttttctactgtgaagaaagctctaagccctgagccaaaggagaagaacgatcaggttaagacaaaatttatatttaacctatctcaggtatacaggatgttccttatagtgttagcaactgcttttgcagaattcaagtagatcaaagaagaaatggtttgggaagcaaaaattgcagacttcagaatcaacctcacaaacggataatgcaccacctcttcctccacctgagattattttaactcatgttgagagtgaaatcagccatgagcgtattgaagttgcctgcagttgatgctgtggaacctgttcctgctgttcagatggcagctgctgaagttcaagccaccacaactgttcagtttaacagtaaaccaacagaagaagtggctgcaatcaggattcaaaaagcttttcggggatacttggtatgttttgcaacttttattgaaaccaatgtaacttatttcattcttctatttttattttcagcctccctcttaccaatatctgttgaatgtttttactacaagtgaaaaacctcagttacaatagtgatatagcacttttttgtttactgtacactaacagttggtcaaattcaaactctttaaatgtgaatccatacaaaaatttatttattaaatgtcctatttaattatgctaacttatgaggccatacatggtaagtaatcaataattgctgcaaaagaaagcttcttgattcagtgataaactattttcaagctgaattttcttttaaaatcatttaggcaagaagagaattgcgcgcgttaagggggctggtcaggttgagatcgctgatggaagggccagtggtgaaacgtcaagccattagtactctccgttctatgcagacttttgctcatttgcaaactcagattcgttctaggaggctcangatgttagaggagaatcaagaactacaaaaacagctcttacagaagcacgcaaaagagctagagagcattcgggtctgtgtttcatgtccctgatatattttaaaatgctaatctattgacacgngataatgtttattttgaggtttaatatatggaatttggaatgctttttacttatttcaaattctcataacagcttggg

SEQ ID NO: 64723 - DNA, 816 bp, Glycine max
  Clone ID: PAT_MRT3847_29458C.1
ttcgtgttcacttgagaagtgattttcaagtgatagaagacacgagtgttaattgcttaagttccttctatgtttaattaagctcatttaatttctaattgatcaatgaccagttaagcaatcaacaagcgcaagtacccaactggccaacaactacaataaaagttaatcaaaacacaaacatataaaccactgaatcaatgacgcaaaattaaaacgtaacaaagcgtataaatgatatcaccaccatgcatgatgcatgcatgcatatattgcgcgcggtggatgcaaaatttccccatatgcatattaattctttaagccgcaattttgggacagtactctcgttgaacggctttcatgaggaggctatcgtgttcaagagccatctgaacagggagaaatccaagtccattcgccatggcaagcattatctgcttcgtttcctccttgaattcttcaaggtcaaccctcccattcaagtcgtggtcgaattgcacgaacatggactcgtacacacgtgcgagttcgtcggggtcacgcttcacgtcgacgccgaagtgggtctcgaacaccctcagcctctgcaactccttcagcatctccgcgtaagagagaagaccgtccttgtcggtgtccagttgggtgaagaggtcgctcacgcagacgttgaaggcttcctcgtcctccacgaatcctacgatggttgcaccgtctagtatttctacactcatgatttttaaggggacaatgatggaaagagagagtagtagtgagtggaatttgcttgaggcaccctcgagccgggaattccgg

SEQ ID NO: 64724 - DNA, 289 bp, Glycine max
  Clone ID: PAT_MRT3847_29459C.1
cttatgtcttctctttgttgctctaagcaaaatatatataaataatgtattgaattaacacaccggttacactgggagcttatgatgatggtggtgtgttaatgatgctcttgatactgtataaacattttgattatctgctatctgtgaggagagtctcactcttttagagccacgtatatgtgaacattgttgtctacccaatgacacccaatatcaacagaactttggatctagaattactatggatggatcactattgcattttcaacattcgcattataagaca

SEQ ID NO: 64725 - DNA, 501 bp, Glycine max
  unsure (1)..(501): unsure at all n locations
  Clone ID: PAT_MRT3847_2945C.1
gttgcgtcaacgccttctcggccttttcggcatgttcttctacttcgtttgcatgttgctctgttcgaatagtccttctgaaattgtgtggcgtcccgtcctgtggggcttcttcctccaattttccatgggattggccgttttgcgttgggattggggttccaatcagttcgactccctctccgagttggtgctcacctttttggagtttactcacaatggcactgattttgtgtacggttttctctccacgccaccgaaaatttgtggaatggaccccgttttcgcctttcataccgcacaaattgtcatttattttggcgccgctgtggcattgctctaccattttggcataatgcaatttgtgatcaaaaagatgggatggcttgtccaaattacgctggacacaaccgccaccgaatcgttgaatgcctgcgcttgcattttcctcgggatgagtgaggcgcctctgctgatcangccgtatttggacaaaatgac

SEQ ID NO: 64726 - DNA, 612 bp, Glycine max
  Clone ID: PAT_MRT3847_29460C.1
tctcagaagtaaaagagactcaacaaacgctctcttgcacagagaagatccaaaattcgcaacaatctcctctttctctttcactctttcactctcccactctcattccgccgccatggacgatccaccgttgcagaaaatcgcgatttcgggacccaccctagcctccctcatccagcgcttctccacctccccctcctccctccacggcctcctcttcggccacgtcacccccctccccctcactctctccgacgacgacgacgacacctcctcctccgccaccctcctcgccaccgtcaccggcttcctcacctccccctccttccacgactcctccggcaccgtcctcccctcctccctccccacctcctcccccctactcggctggttctccgctcgccgccgctcccccctccggccctccatgcgcgaattctccgtcacctcctccctctcctctcttttccaattctcttcccaaatccaaaacccaaactcaatttcctccgaatcctctcttttccctccttgcatcttcctcctcctcgcctccccctcctccttcgaccaccaccactcccatgtccacacgcacgattaccgcgcctt

SEQ ID NO: 64727 - DNA, 1034 bp, Glycine max
  Clone ID: PAT_MRT3847_29461C.1
tctcctgaccattaagatatatgtctaaatctttagctggtacatcaaaaacaacgccatttccatcagcagtgagtgaaagacctttcacagcctcaaccttctcttcaggcaaaaatctcctcaagattgaatagccataagattgggtatagattggtttcccagtctcaaggactaatgtaacatagttctccatggaagtgagaagtgatctttgctttacatcggctaagaaaccaaagaaggtaagtccaagcccaaggggcagctgggttatggacgaggactccaaaagcttggtcagtgtacactctgaccggttccggaggcactccattgctggatcgatagttggagatgacgaaagccttgcaagctctccatctattccaagttacatggtgccaactaaatctgcgaaagccaagtcccggatgcaaagtccattagcagcagaatacggaacaccagaaaaagggtcctccgggactgcaaagaaacgtctttctttcccagcttcgcctgctaggccaaggaggcattcaggtccaccaaaggtagaaagcagcttcaatgctgaaatcacaagctcgagtcgagctcgagccgaatcggctcgagacggctgcgagaagacgacagaagggcgagaaaatgggtgaaaaatttaatacgaactgaaaaatctttcaaaaatatcgcatattataaacactaaaatgagaaatcaagcatccttattatactatatggatatactcttcactgtttctttatctcttgaatctgttatactttccaactgagacttaggcctgattcctgataagtgcacgagtcctttcctatcttgtcactatcttcagagccatatcctctgcactctcctttctcactgccacgatgattttttgcataatccaatgatatgctaatgctttgttaagtaaggtgcagcgtaaattcttcctcaattttgtcaatggaagtattttgttactgaaatatagtggcatgctatattatgtaac

SEQ ID NO: 64728 - DNA, 701 bp, Glycine max
  Clone ID: PAT_MRT3847_29462C.1
ccaggggattttagtttctcatttctaattgatcgatgacattgaccagttaagcacaagtacccaactggccaacaactacaataaaataaaactaataatcaaaacacaaacttacaataaaccactgaattaatgacacaaaattaaaacgtaacaaagcgtataaatgatgaatagtaataattatcttctattaattcttaattaagcggcaattttgggaaagtactctcgttgaacggctttcatgaggaggctatcatgttcaagggccatttgaacagggagagatccaagtccattcgccatggcaagcattatctgcttcgtttcctctttaaattcttggagatcaacccttccattcaagtcgtggtcgaattgcacaaacagggactcgtacacacgtgcaagttcatctgggtcacgcttcacgtcgacgccgaagtgggtctcgaacaccctcagcctctgcaactccttcagcatctccgcgtaagagagaagaccgtccttgtcggtgtccagttgagaaaagaggtcgctcacgcacacgttgaagacttcctcgtcctccacgaaacctacgatggttgcaccgtcaagaatttccacactcatgttttcttctcttaaggggacaaacaacaacggaaagagaaattagtagtactgagtggaatttgatgtgattggtt

SEQ ID NO: 64729 - DNA, 211 bp, Glycine max
  Clone ID: PAT_MRT3847_29463C.1
tccgagcacgctggaggagggatacacgagcagcacgaaaaacacagttagatagtatagcaagatcatggcgttctctagcaacgcttggtctggtgttcaacgcaggctacgatgcaatggcacttgcgtgggaacgttccctctcctgagaactaaagcatctctgttcaagccccgtctgcgctcacagctgttcacaatcgcaagc

SEQ ID NO: 64730 - DNA, 1329 bp, Glycine max
  unsure (1)..(1329): unsure at all n locations
  Clone ID: PAT_MRT3847_29464C.1
gcgtttcactgttgagattcaaaatggantgcgcttcgctggtggggttcggggtggggggagcgatggtggtggtgccgttgaggatgctgtgaaggctttgttggagggtctaggggaagatgtgaacagggaaggtcttagaaagacaccacttcgtgttgccaaggcccttcgtgaaggaaccagaggttacagacaaaaggtgaaggacattgttcaaggtgctttattccccgaagctggtctagataatagagttggtcatgcagggggagcaggtggactcgtgattgttcgagatcttgacttgttttcctattgtgagtcctgcttgcttccattcccggtcaagtgtcatgtgggttatgtcccctctggtgaaagagttgttggtttaagcaagctctctcgtgttgctgatgtatttgcgaaacgacttcaagagcctcagcgtctggcagatgaggtatgctctgctttacatcggggaataaggccagcaggtgttgctatcatacttcaatgtacacatatccactttccagacatagaatcagtctttcttgactcaaactatcaagggtgggtgaagatacttgtttcctcaggttctggggtttttgagaacaaaaatgcagatgtatgggatgatttctttggtcttcttaaatttagaggcatcaatatggataaaattcatttgagaggatcatctgatccatgctggtgtccttctcagtcttctctatctgccaaagtttcctcgaaaataggaccagtcaatcctgtaatggttactgcagtagcttcaattattgaatctttgggagaagatcctttgaggaaagagcttatagggactccaagagggtttccaaaatggttgatgaactttcaaaaccataactttgatgagatgtgatagtagttgtagaggcaagccacacatgtatgatttcgaggggaattgagaagtttggaagtagtacggctactattggtgtgttaggacatttttcaaccgaccctactgcaagggcatcattcttgaagagtattccatatcctacatcatctggggagcaatgactcgtgtttgagaactcactggaaataatttagcactagatcaggtcattctctgcactgtgaagtttcagtgtcagcagttgaggtacccaagcatggataagttcagaagatatcctttaatggataatctgtatgtttttcagttcctggaattgttgtttcagtacgagatttatggtcagaatttgtctgacgattgatagtcacatcattatcgttctgtcttctagagtc

SEQ ID NO: 64731 - DNA, 310 bp, Glycine max
  Clone ID: PAT_MRT3847_29465C.1
gccacacatacccaaacatatagcctgctcactgtttctcaccgagttactcagtgagcgcataattacatatacatttacttatacatccactcccagacacaaccctgttgaattccctatcaaattggaatataaaatggcaatttgaggatcaacgtacacttacccactctaattcctaatcttgaacccttgccttaaaaattaccctcaaaataaaaaatttctaacacaaaattcaactcattcttcaatccaatcttaaaaccttaaatacaacctcaaaaacttcaaaaccccccttaaa

SEQ ID NO: 64732 - DNA, 217 bp, Glycine max
  Clone ID: PAT_MRT3847_29466C.1
aacaccaaaatataccaaaagggggacgggggaaactcaaaaccgttaagccgcaaacaacaaaaaacccaaaaaccccaccacaaccgaccaggggtagaagaggcaaagaccgtccctattagcacaccctttgggaggacgcgttagtgatgtcttttctgaagagccccctcaggggcaaactgagcgacacccccctgggagaacctcccgc

SEQ ID NO: 64733 - DNA, 281 bp, Glycine max
  Clone ID: PAT_MRT3847_29467C.1
aggcgtccgaacacgtctgagagggggagcaatgacgcaacgtcacgtactcgtaacggggccttccgttcattcgcgttgtttattctagacgtcacactgaccttgaccgatcatgttatacacatctctgtctctgaggtactctctctctcagctcgacatgattcaacgtggtatagatactctattgagcgactatactctgggccactgttaaatggacttgactggtcgcgctacacaaccgactgatgctgatgagacagcttcgagagatc

SEQ ID NO: 64734 - DNA, 1181 bp, Glycine max
  unsure (1)..(1181): unsure at all n locations
  Clone ID: PAT_MRT3847_29468C.1
ctcaggcggcgggcggacccgctcgaggcgccgggccgggtaaagaggggcctattggcgccgccgcaggcgggggcgccaagcaaataacattctcaaaatgagagtggtattaattactttattcctgtttataggtgcagcagttgcagaagacgctggtattgatgccattactcctgaagaaggcaaagccaataatattattgaggcgtatgagtcacctagattccaaaagtttgtgacacattgcagctcacatgttactcaaacatgcagtggaaatgatccattaaataatcaggaggccagtagaatgaatagtccatttgggttgtctttttgcctttttgattctatggagaagtgcttggcagaccataaagcctcacttaaagatccccaagataacaacaacctagcttcaatgtcgtctcttcctggctcaatccaaaatcagccactcctcattgagactgtaaaattcagagccgtcttgaaaacctgttcccatgtcagtgcacgatattgtttcactaatcctaacgttgctacatcggctttagcggattgtctcatgccatctctcactcattgtgtttatccttctagttctatcttattaccacccccgccaccacccccgccacttatttagatctttgaagtacttgctatagaaaaatataactgggtttgctcaatcagcctatgtaataatcctttgcctagtcaagggacaagtcttaatctatcttgaaacatccatagttatatgtcaataatacatatgattgacttgcaagcttgttttatgatgaaggatttattataccttcaatattccaattagctacatctggtttgtgtaagaaatcacttgtcatgaatcatgatcgttaatggctttcctacttaatagctagtaattaataaaacatgttttacatctaaaaaaaaaaaaaacttgnanacaaagcanngatgtgncatgggctaaatttcagaactgccagattttactgccatacagtccgtgacacaaccagcttcatgtttcccttggtggctggcgatggaaccaaaaactcagcacttcctgtttgccactcaaatacttctgcaatgaatcctcccatgctttatggaactcatggcgagtgattcctgaaaccaaccct

SEQ ID NO: 64735 - DNA, 362 bp, Glycine max
  Clone ID: PAT_MRT3847_29469C.1
caaaaaaaaacaaggtaaacaaaacccaaagacagcctgtttaattggggctttagctgccgagaaccctggacccctttgcgaaggcccacgaggaccttaaccgtttgttcccatgagatgcaggcattagacacgggctgccccaaagtaaggttggggaggcaaagggctttggatggaatcctttgcatgcgctacaccaggtgggatccgatcatgacgcccacgatcgaatcccggggggccgcgctaaaaagctgcccggaaacgttgcaaggaccaaaaaacttgcacagggtttgctcggacaaaatcccggcctaccggagctacttgaaggtcgcccccaaaccggtttt

SEQ ID NO: 64736 - DNA, 157 bp, Glycine max
  Clone ID: PAT_MRT3847_2946C.1
ccacccacagcctaattattagcatcatccctctactattttttaaccaaatcaacaacaacctatttagctgttccccaaccttttcctccgaccccctaagaggccccctcctaatactaactacctgactcctacccctcacaatcatggcaag

SEQ ID NO: 64737 - DNA, 934 bp, Glycine max
  Clone ID: PAT_MRT3847_29470C.1
gccgggcccgggactatctttcggagatgacggaaaataaaaaaaaaaaaaccaagcaaataacattctcaaaatgagagtggtattaattactttattcctgtttataggtgcagcagttgcagaagacgctggtattgatgccattactcctgaagaaggcaaagccaataatattattgaggcgtatgagtcacctagattccaaaagtttgtgacacattgcagctcacatgttactcaaacatgcagtggaaatgatccattaaataatcaggaggccagtagaatgaatagtccatttgggttgtctttttgcctttttgattctatggagaagtgcttggcagaccataaagcctcacttaaagatccccaagataacaacaacctagcttcaatgtcgtctcttcctggctcaatccaaaatcagccactcctcattgagactgtaaaattcagagccgtcttgaaaacctgttcccatgtcagtgcacaatattgtttcactaatcctaacgttgctacatcggctttagcggattgtctcatgccatctctcaatcattgtgtttatccttctagtagccctacgcccccgccaccacccccgccacccccgccacctggtatttagatctttgaagtacttgctaatagaagaataactgggtttgttgaatcagcctatgaactaatcctttgcctaatcaagggacaagtctttatctctcttgaaacatccctagcgatatgtcaataatacatatgattgacttgcaagcttgttttatggtgaaggatttattataccttcaatattccaattagctacatctggtttgtgtaagaaatctctcgtcatgaatcatgatcgataatgactttcctactaaatagtaattaataaaacttgctttacatcttcttcttt

SEQ ID NO: 64738 - DNA, 440 bp, Glycine max
  Clone ID: PAT_MRT3847_29471C.1
ttttgaggattggtagcaatgtagtacctgtattcttgaatggtggtgaaaggaacatatcacattctttaaagcatgctatagtatatcttggatttgagcatgaatgcccccgtggccaccgttttctttttgaatgcagaacatctcaccgaacttggatctgcatattcattatctgaagaatctcatatatcttctatggagcctgctggcagaaatcaggcatttcatactaaagtaagcaagaatgcttcctggaacaaagttcatcgaagctcaaatgaaattctttctgcaatctcaaataaggaaagagatgtgaacaaatctaatcaaatgattcctaatcgtgatatgaattccgatggattaatacatacttccattccactacataatttgacatcaatgaatgcaaatgcaaaacccctgaatct

SEQ ID NO: 64739 - DNA, 494 bp, Glycine max
  Clone ID: PAT_MRT3847_29472C.1
aaaatatattataaatgaaaaactaaaaggataataaataaagctgactcagtaacaatagtagtagttgtcagtggagtacaatcctttggaacttgttctgtgtgggggaatcagtgccctcacagaaaacccttttcctactgactctcccacagttcgaggtgaaggaatcttgatgaggaagttgtggttgtggtggtgaaggaatggtgacaggtggaatctcaaaggactcaagagggggtggagggtgtctccattgaggaagtggtcctgcaagaagcaatgtctgcagcaaaggaccagctttcatcactgtttgcaaaagcttacccttttctggcaacggtttatttggtgagattagctcaatcattgactctggcaactggtgctgttgtgggggcaaatgcttcataactggagaggaaacaatgctttcttcacaatctgatgaagagaggccattgttggaggagtcattaattccc

SEQ ID NO: 64740 - DNA, 391 bp, Glycine max
  Clone ID: PAT_MRT3847_29473C.1
atatttggggttttagtgacacaaggggctactctaaaagctttggaggaatgcaagcagacaggtctagctcctgctcaactacctgtagtgtttgaaagagcaacgccatccatcactagttctattcatgacgcaaccatctgaggacaggttatatcaaggagagtgatgctcacacatcagctgatacacggttaccaacctaagacggggtaaacattaaagataggtaggatatatgcatcgctcctgccatgcttcaatgagtagaccttctaagtgtacttaccggtcgctcgccaagacacgtgatcatgaataatctctgttcaccatggcccacattaggttgcgccacgaataagaactagacgagaatggactagct

SEQ ID NO: 64741 - DNA, 141 bp, Glycine max
  unsure (1)..(141): unsure at all n locations
  Clone ID: PAT_MRT3847_29474C.1
cggaaattncccggggtgcgacgccacggcgtgccgtgttgaatacattcccttgtagtttatactgaaagatgggtttgaagatggcgttactgatcctagggctttgcctcatgcatccttttggggctgctctgcggt

SEQ ID NO: 64742 - DNA, 339 bp, Glycine max
  unsure (1)..(339): unsure at all n locations
  Clone ID: PAT_MRT3847_29475C.1
ngagttcatgctctcccaaaagcgccagcagaagcccggggagaacttgaacacnnagaagcggcagcaagagcccngngagagctcgnnctcaaagccaccggagcaggagnncccccagagcaccancaggaaaaaccancagcagaagcccnngaagagcgccgagaaagagnataagccgcaggccagccagaacaccngcaagaagcccaagcagaagcccnggccgggnnccnncaaagaaaagcancagccgaagcccagncagagcaccnagnagaagcacnncgccgagnnnagccagaagncccagcccnngacgcaggacaaggacac

SEQ ID NO: 64743 - DNA, 1597 bp, Glycine max
  Clone ID: PAT_MRT3847_29476C.1
ctggacgcctgcagtaccggtccgggattccggtcgaccacgcgtccgccaaagcaaagcatacccacaacacactgtttttgtttttgtttttctgtgtcactgttctcacataatctggtttggcggtgctaagcacaaacatgtccaactcgagggtagctgtgaactcaaaactaacggttgtgtcgagcagacccgttagtgcttcgggtaagggtaaggctcatgcgctatccgcgcttgacagtgccatgggttcacacacagtgcatgttatatactactacaagaacgaggagaagtggtttgagtcgtttgatttgttggaccctttgagggaatcgttgtctgaggttctgactctcccccctgtccggacgggtcggttgggaaaaagaggagtggatggtgggtgggaagtgaagtgtaatgatgcgggcgttagggtcataaaagccagcgtggatgctacacttgatcaatggctcaaatctgcctctggctccgaagagaaccttctggttgcttgggatcatatgcctgatgatcctaccacatggtctccctttcgaattcaggtaaacagattcgaaggaggaggtgttgcaataggaataagttgtagtcacatggtggcagatctaactttcttagcatcatttttcaaatcatggacggaagttcaccgccacttggccattacccaccctcccttcgtcgctccacttccaaatcacgccgatgatgatgcagagtctctccctcgccatgcaaaaacacactctccgagaaacatggctacagccaccttcaagttttcaagttcaatcatcaaccgatgcctctccaaagtccatggcacgtgccccaacgccaccccatttgacttcctcgccgctctgttttggaatcgcatcgctcgggtcaaacctccaaaaaatcaccaccaaacacactgtctttgcatttgcaccgactttaggaatctcataaaagcgtccctccctattgggtacttcggaaatgccttgcacttttcaatgctctcgcagaaagtggaagacatgcaattaggaggcatagtcagtgcagtgcatagccacctgaaagggctttcagaggaagaaatatggtctacgaataatgaagggaattattattgcatgtatgggactgagttaacttgtgtttgcatggagcacttggtgtttgaggaagaaaatgagtcgttgctatatgctgcaatgtttgggaataacgagaagccaattcaagtttcatgtcgcgtggggaatgtggattatggtgaaggtttgatcacggtgatgccttctgaagaaggaggactttcgagaacagtgatggtgatgcttcctgaggaagaactcgctgaactaagcaaagatgaagcaatattggagttggagccagcgatgcttcttgctggttctgtcagtggtggaccattgacttaatgcaaaatttaatttttcgacttcttgtctctctctaatgctgccaaccaatacttacacgtggagtacgtgagaatctcagacactttttttttatatttttattcatgtgattgatt

SEQ ID NO: 64744 - DNA, 236 bp, Glycine max
  Clone ID: PAT_MRT3847_29477C.1
ggctcgagaccagctacacagcatcagtacgggtatacgaggcaactactgtgctctcatggggaagaacaccatgatgaagcgctctgacaccgacgcacgctgataaagccggagaccatgcctatctcaaccttatccgactacttgtctgacgggagggatggattttcaccagggcctacctgactgaggatagtgaggaggatgctaaagacaaaggaggagcgccagct

SEQ ID NO: 64745 - DNA, 579 bp, Glycine max
  Clone ID: PAT_MRT3847_29478C.1
acttaacgttttttattaatttaaaatatgaattgaattgaaaattcaaataacatgaaaaaagaaatatactaaaaaaaaaattttcttaaataaattttaggaaaattatatttttattcatggcaatttaaaaaatcttaaacaagtttggaggggcccatggttatacaagggcaacccctccgtccaccactggatggcaaagaggggggggtgctccagcaggggggggaggttacagggcatgggtagcatttggcaaaaagtccaaatgggacaattgggtttatcaagtagatcatgctggcccatcctccaagcccaaatccaaccaccaaaacccatccaataatgaatgcattgaaaacatacattgcagtccaacttggcatgaaaaaaggaggcttctctgcaacattctgtttggataaggaatttctataagtgagcatgtgggctagggcagggatgatgtaaacagtgaagctcacgagtagagatccaacagctgaattaatgggcccaaagaaagggaagactatggccaagaaccatctagggagcaccactgtaaac

SEQ ID NO: 64746 - DNA, 327 bp, Glycine max
  Clone ID: PAT_MRT3847_29479C.1
atcaaacctaaccagtaaaaatggtgaccgtgggggaggtccgcaacgctcagcgatcccatgtacccgacaccatacttggccttgtgcaccgccacactgtccaactgcgtcttccaagtcgattaccatgactactacttccatattaccaacagcgaacacatgactgatctcgaactaaagttcatgcgcatgagtctaaagtacatcatagagaaaccatacatgcacctgacagtggagtttctggtcgagaaccagatcatctgcgagtacaaggcgccatcgacttacgtgagacaagacgtagtgatgatggaggtg

SEQ ID NO: 64747 - DNA, 439 bp, Glycine max
  Clone ID: PAT_MRT3847_2947C.1
tcaagccgagcactgacgagaaggagaaatgataaaaatccaatattattggtcttggatgatgtttggcctggctcagaagcccttgttgataagtttacagtccaaataccttattataagatcttggtgacttcaagggttgcatatccaagatttggcaccaagattttgttgggtcaacttgatcacaatcaagcagtggcccttttcgctcactatgctaaactaaatgacaatagcccatacatgcctgaagaagatcttttacacgagatcgtgagacgttgtatgggttcaccattggtgcttaaggtcactgccggatcactctgtgggcagccttttgagatgtgggaaaaaaagaagcttatcaacaaaattcttgatccaatggattttactcaaactgcatttgctgatcatcttgagaatgact

SEQ ID NO: 64748 - DNA, 933 bp, Glycine max
  Clone ID: PAT_MRT3847_29480C.1
agaaatcatcagtgggtgagttcaaaaaatagtatagataggaagcactttgttctggtgcatggggcatgccatggagcatggtgttggtataagctcaagccacgcttggaatctgctgggcacaaggtcacagtgcttgaccttgcagcttctggagccaacatgaagaaaattgaagatgttgacactttttcacagtatactgagcctttgttgtttctattggacacaattccctcaaatgaaaaggtagttctagttggtcacagctttggagggctgaacatagcacttgccatggagaaatttccagaaaaggtagcagttggtgtttttctaacagcttttgctccagacgttgaacaccacccatcttatgtcttggaaaagtacagcgagaggaccccgttagctgcatggttagacactgaatttgctccaagtggaaacaaaacaacaatgttctttggccccaacttcttgtccgacaagctctaccaactatccccaattgaggattttgaattggccaagactttaataaggccatcatcactcttcatggaagacttgactaaacaaaagaacttctccaaagagggatatgggtcagtgccacgtgcctttattgtttgcactgaggaccttgcaattccattggaatatcagctcttcatgatccaaaatgttgggttcaatgaagttgtagagatcaaaggcgcagaccatatggctatgctttgcaagccccaagaactatttgattccctccagcagatagcgactaaatatgcatgaattcacgtagcatgctttaattagttttatttgttgtgtttgaatttgacttgtaatagaatattataagatctctcgtttgaaaccccgagacaaataaataaagcggtaagatatatggccactcatccc

SEQ ID NO: 64749 - DNA, 418 bp, Glycine max
  Clone ID: PAT_MRT3847_29481C.1
ggctcgagggcgcacgcaacgtgccttttcccatacgaaggacaccatcacgccgttttctagtgcccggggttttggatccattgaaactgataccgtatccttctgccattagtttagccgagaatgaatcccaagacagccgtagcttgagctctaccgcgcgtcacggtcgttgtcttcatcggtgagagccggtaccgatcgccgggctacgccgagctctgagacgggggcagaaactgtacaacctggcacgccgccggccagaactcgacggagttcgagtgcaacagaatgctgaagcgcgccggtcgacaggagacccttgccgacaagatctaccggtttcactggacactgctcgtagaagggatcccgctacttctcagcagattcgaactctacgttatgccgt

SEQ ID NO: 64750 - DNA, 230 bp, Glycine max
  Clone ID: PAT_MRT3847_29482C.1
gagagggttatttgagactgaccatctgaaacttaacatacagtcccagcaagatcccaaggagaatttgcagaaggcctaccaggagaagaccctcactaaggcacctgccaagtcacccgctcacgcttacgtggtcggctggccaccaatgtggacatacagcacgaacatgacagtcgagcacaaggttcgcactagcgatcgacagcatgagacacaacaagacg

SEQ ID NO: 64751 - DNA, 278 bp, Glycine max
  Clone ID: PAT_MRT3847_29483C.1
cctttatagctaacaaggggagctaatttgagcgattatacaaacccaagtgacacaaaaaagaacccttctagcaagccttgtgttattacaacatgcgctggaaaagataagcatctctcttcaggaaccggcagactcggatgagaattacccgacgagacctatactattcaaatgtaatatgcggtgctgaaaaatatagtagaaagtccaggcaaacccttgtagcagaccctctcacagaaattgcactaggggctctggacatacccagg

SEQ ID NO: 64752 - DNA, 2984 bp, Glycine max
  Clone ID: PAT_MRT3847_29484C.1
ccacgcgtccgattattttttctctctttctctgaaaaattcccacgtcccatttctgtcaatgattctcttacatgggtcttcgctgaaatccaagttcatattgtgcagctttgcttcactgcagctttgttagaactttggtgaaggatttccataaagggaaagccaatttgagctagatttgggacaatgggcgcctcaagctccaaaatggaggatgataaggcactgcagctatgtcgtgaaaggaagaagtttgtgaggcaagcacttgatgggcgttgctcactagcagctgctcatgtctcatatatacaatcactgaaaaataccggaacagctctgagaaaattcacagaacctgagggtccaattgacacttctttgtacactaatgcaacaccagatcagccacttgctttaactgaaaggaccctctcattttcttcacaatctgtgtcacatcacatagatgcagctgaacatgaaaatttctctccaactccctcccctcctagttcttctagcaagttccgagcaaatcatatgaaacatagcactatttcttctaagaaagttgaagaaaaaccacctgtgcctgttataagaactagtaacatcatcaggtactactacacagaatgccagtgtaatgtctggaacagcagcatttgaagattcctctcttccagctggaactccacagtgggatttctttggtctctttcaccccattgaccatcaattttcttttcaagatgggaagggtatgcatcaagatatagggaatgctgatgacatacaaagactaagggaggaggagggaattcctgagttggaagacgacgaagagaaggcttcatctcatggaagggaacactctagggactctgaagacgaatttgatgaagagcctgccgcagaaactctagtccaaagatttgaaaatctaaatagatctaacagtcatgttcaagccaattttgaacctgccacaactaagcctctcagagggcattcagcttctgaagttgaattagtgaatggagaaaaggggaactctgcttatttatctccattaaagacagcacctatgccagctttgcctccacctgaaacaaataaaccaatggagaaggaaagtcgtaatgaaaataaagtcacccctaagaatttcttttcaagcgtgagagatattgaattgctctttattaaagcttcagaatctggccaagaggttccaaagatgcttgaagcaaacaaagttcactttcgtccaatattccaaggaaaagaaaatggttctctggtgtcctcgtttttgaaggtatgtttctcatgtggggaggacccaagccaagttccagaagaacctgctcaaaactcggttaagtacttaacttggcataggacggtgtcatctcgatcctcctcatccagaaaccctttaggagcaaactcaattgacaatgctgaggaccatgcaaataatctctttgataattcttgtatgatctccggaagtcatgcatcaaccttggataggctatatgcttgggaaaggaaactctatgatgaagtgaaggctagtgagatagtcagaaaggaatatgacatgaagtgtaaattcttaaggcaactggaatcaaaaggagaaaagacctctacagttgataaaactcgtgctaaagtcaaggatctgcactcaagaatcatagtttcaattcataggataaactctatatcaaagagggttgcggagttacgagacaaagagcttcagccacaacttgaggagttgattgaagggttgaatcggatgtgggaagtgatgcatgaatgccacaaacttcagtttcagatcatgtcagcagcatataacaacagccatgctagaatcaccatgcattcagaattacgtagacagattacttcctatcttgaaaatgaactccaatttctatcatcaagctttaccaagtggattggagctcagaaattctatctggaggctataaacggatggcttctcaaatgtgttcgtcatgaagaaaaatcatccaagagaaaaaggaagcctcaatctggccctagccattatgatcttccaatatatgtcacctgtgcagtctggttggataaacttagtgacttacctgtaaaggatgtagctgattcgattaagagtttggcgacagatactgcccagttcttaccacaccaggacaagaaccaaggaaaaggtgctcatcctcatatgtcaacatggaaggctgatattggtggcgaatcagcagatggtttattgagagatgacatatcagaggactgggttgcaggtcttgatcaatttcgacgaagcttgattcgatttcttagtcaattaaataatttgtctggttgttctgtcaaaatgtacacagaacttcgacaagccattcaggaagtcaaaaattaccagcgtttgaattctcagtctcaaaatggtcatttgaattctcagtctcaagatggtcatccgaattccgaatctcaaagttgatccatcagagttacaatctcaagtggtttaggctgaaaacaaacatccacacgataagagaattgcgatgaaacattgtggaattgcagaattatagcattgtgttgagcatacaagtccacaggatgtagcatttgtacatggtaggatgtaataaagtcattacagattgccacacttatttgttcatttagtttttaagaatagaagggagctgatagattgcactagagagactatgagtgcatggttaaggactcagtaaaagctgtaagtactaggttctgatggtgaagaaatttgggtgcaatttttttgctaataaagggtttgtaccaggacttatactcccctccttgattttctttgcttgtgccattttttcatttacgttatgtgtatataattattgattaataatattgtttgaattttatat

SEQ ID NO: 64753 - DNA, 240 bp, Glycine max
  Clone ID: PAT_MRT3847_29485C.1
gaacacactgcagcgagaaccaaagagagatataagcttcttccagtttccgaaatcgaagcattagggttagggttttttccgatctgagaaattcgcggtccaatggctgtggaacctgagagcaccgtcaccaccggctccgccgacgaatctctgctcgatgagatcaccgataagctacacggccacgattcttcggcctcttcatcttccgactgcgactcctactccgaaaaa

SEQ ID NO: 64754 - DNA, 196 bp, Glycine max
  Clone ID: PAT_MRT3847_29486C.1
cccacacgtccggtacagactgctaacaggttttacatgcaacttcctaagattactcagggggaaactaccgggatattcattcaccacaaccagaatcttatagacctaacaatttatatgatacccgtactgccctataaatatgaagctaaatgtacattacacaaacgatccgacgtttaatcattactac

SEQ ID NO: 64755 - DNA, 1398 bp, Glycine max
  Clone ID: PAT_MRT3847_29487C.1
aattcttggttactcagtcttcctttcctctctctcttgtttggattcttgtgactgtgacattccctagcgttatcagcataaaacaataactctcttaaattgagataattttttatctctacgccataccctaagagccccgagttgcaacgggtgccgagtgcttccaaagggttgcaacgagtcttgtatcctgcggccgtctccgcagtggatcgacacgcccgaagcacaagcgcatgccactgtcttcgctgcgaaattctttggccgagccgacctgatgtccttcatttacaacgtccctgaaccccaaaggcccgcctctgttgtcaatcctctttgttgttcgaagcgtgtggaagaacggtgaacccttgtccacggtgctgttgggcttttatggaccggaaactggcacgtgtgcccggcggcggttgagacggtgctccgcggcggcaccgtcaggcccatgccggagcttctcggcctagacgctcccactcccactgccgatgacgcttccgaaggggaagttacctgtaccgacaagtggagagtccgagatccgaacccgaatttcccgggaacccggttcccgggtttgaggtccgataaggccggttctggtggcaaacgcaagcgatttgaagagctcgccaagcttcagacggcgacgacggatctcaatctccggctgacgccgagttttctgcagaacgcggcgagctacggctgccggcaggaaattcgctggccagggtcgccgtcgatgaattccgaggagtccgggacgacgacggcgtgcttggagagcgggatcggagatcactacgctcacgacggagaccggaaagtgctgaaccttttcatttgagagttctcttttgctcttcgaagtttcgtgtttgagggttctcgctgacgcgtctttttgccttttttttttttaacgctttattttgagaaagaggttttcccggaattgaatccggtgagattttgttagaataccggcacaggatttttctctctgttgttctttctagacagggagagaaagatgagggttagtcggtgataattttttttttccttttgatctatcaaacatgttatgatggtgggacatgaatgatgaatattaaataacttaattggcactgcttttctctagagagaaaaatgagagttagtcggtggtgatcccttttattttttattttttttctgtcaaacatggaatatgtaaacagtcctgtggtcgtccgtggcatgaatattattaatatgaaattatgaataaagactagatataacgtttgttttttaaaaaaaaaaaaaaaaaaaaaaaaaaaaaaaaaaaaaaaaaaaaaaaaaaaaaaaaaaaaaaaa

SEQ ID NO: 64756 - DNA, 1168 bp, Glycine max
  Clone ID: PAT_MRT3847_29488C.1
cgttcctccaataattctctcttctaccattcattcattttatggtcattggccatgacccaaaccatgtccaggcccaaatgactggctccaattctacaaccaaaatctcacaccttcaatccctgacttcaccgttactactgcagctgctactactgctatcgtcgcggccacgagtcctccacaggacatgccgaatttgagcccatcaggctcgacccatttaagcccggaggggcgcgtggccaagcccacgcgccgtcgctcccgggcctcacggcgaactccgaccactctcctcaacacagacaccacaaacttccgggccatggtccaacaattcaccggaagcccgagtgcaccctttgcatcaaacccatcattacgcaccacaagttttgccaaaccaaacgggcttagggttcccctcacgccctgtcccgagcccaaccaccctcgtcatgtcaccaccccctataacaaatcttcaacaacaacacatgtttcagcagcaaaaccaacagtacaatttgtatagtactggtggtggcgcacaaggtggaggagacagcaacaacaacatgttttttcagagactaagcaacaacgttaacccaatgagttctccaacaagcaatgttgttgttagcaatagtaaccgtggtgatggtggggctgtgaatatggatcatggacgtttctttccaaacacttcttcttcttcttgattgatgaatctgaatctgaatctgattaaagaagaagatgaagaaattaagcacttcattattctccagtaggaacacgggtagcagttttttttgtttttgtttttctttggtccgcatgctgaggctcgaaagtgacataaagcagacagttaggtgctaacttggccagaattgttgaccaaccaatgtaaaatactattattataatagtacactcttctttaggtttttaattacttttattattactactgttatttacttttttttttttttacttttagtttttgttgttgttgttggaattgggctctgcttctagatagccctggatggcgcaaccaatcccaatgcccacttttttgttttttattttctttcttttttgtatctttcaacttttcaagtacttgattaattaaaaaaaaaaaaaa

SEQ ID NO: 64757 - DNA, 287 bp, Glycine max
  Clone ID: PAT_MRT3847_29489C.1
ataaaatattatttttttttgtttcttttcacagattcaattttttattggccacccaaacaaccttttccagaaacaaagcaaattccctcaacaatgatgccagccagcccccccacaaaaaaatcacggtgcaaaaacaccccaaacccaaaggcccaccaacgcgcaaacagacccattaaggagcaaccaacacctgcatttcaaagaggaactcgcccacccccctgggacccaaaccagaaccacacccccaatctgcgcatgcatcaagaaaaccaagc

SEQ ID NO: 64758 - DNA, 283 bp, Glycine max
  unsure (1)..(283): unsure at all n locations
  Clone ID: PAT_MRT3847_2948C.1
cgactacatcgagttcgaggatgaggatattgataaaatctaatccctctctcgccctgcaattatcattncatataatatcatcatcctcgaantcgatgtagtcgttggcggtggcgtngtnctnctccnangngtnnatngngttcgaggatgaggntnttgntnnantccnnatcnctctctngcnctcaattatcattcatatngtatcgtcatcatatctgtctctagcaatatttcgntatctgcttgtcnccnatctccgtgttggatttcgttt

SEQ ID NO: 64759 - DNA, 468 bp, Glycine max
  Clone ID: PAT_MRT3847_29490C.1
gtaaacgaaaaaacttaaaaatggggacccaaaaaaaaagaaacctttttaggcaaattggtaagttaaaaaaaaaccgaactttaacactggggggcccttttccaactaggggggccccaacaaattacccttcccctctccgaatcctcttttaagaaaaagaaccctttttctatccctttgaatgggggtcaatgggccctccaaatttaaattccggcgggcccatccacgtacccaatggacccacatgctttttcaccgccttttggaataacaacaactttaagaaaactcgagggaggggttttgacaaaaccaaggaaaaattggggccctttgccaaaccttatggttgtggtgtattgaaggaattggaggtcggacccttttgagccaaaaaatggaactggccgggggaagttttaccacaatggggggaaaggatcccaacccttttttttt

SEQ ID NO: 64760 - DNA, 302 bp, Glycine max
  Clone ID: PAT_MRT3847_29491C.1
ctcgtagaaaatgctaatacttctctataccgtctaacttttgacctggggactatggagaagtctaagagctgagctaactcacgagctaacaaatgtcactaactcaattataaccattgatcatgacatgaaacatgaattattgcaaaagtcaaaattgtagctgaattttgccatcattatccgatatgcatccgagatacatgaaatgatcatcactataaaaggcttaacattttaatgaaactttgatagattatttcactatcacaaattcacctatacattgcaagctattt

SEQ ID NO: 64761 - DNA, 405 bp, Glycine max
  unsure (1)..(405): unsure at all n locations
  Clone ID: PAT_MRT3847_29492C.1
ccaggaaggtttcccgtcatcactgtatgacgtcctccttctttggggggggggggggggggggaactaaaaaaatgaaggaaaacgaagggtataacgagtggagtagtcctattaaaaaactaacatctacactctacccccaaggtggaagggtttagagagcagaaaaagggagatgaagtgacactgtagttcgacaagtagctgtcgtggtcatggtcttattggtattattgcccctgttgttgcagtgtgcagatatagtatggacgaggcccggctaaatcctggtaattgttggtaatggtgtggtagaagtggtgggtgttatatgtgccggcgtagttanttaggttaacgtggtgggtatcgtaggtgtaaggggtgttggggtagtgcatg

SEQ ID NO: 64762 - DNA, 511 bp, Glycine max
  unsure (1)..(511): unsure at all n locations
  Clone ID: PAT_MRT3847_29493C.1
ttcctccgaaataaatttatacgcancgaagaccccgaaaacatattggatttcattatcaaagggtagtagccgaactcgcaagaagctggaggattcacaattttccctactctaaattaaactagacaatcatcttgcccctatgttttgctcgacgcgaaagcgccacacaacaaaataattcgcgtagtactaccaactcgaattgaaagccaacgatcaccccctcttctctggttaatcgccaattagatactaagatcccatagttgaatcattgataacaatcacgccacaatcgctcgaagtcgacaaggcccggaaacggaatgcattataattctagggggaacggcccacaacgaatggggaagtgacgcacaagggaaaaagtgcatggctggcaacaaccgctataaaaggctaaaaacccttaaggaggtgccaaagcgaacaaacacgtccagaccacaacatacacttcattcctggaggaagactacaaatg

SEQ ID NO: 64763 - DNA, 1473 bp, Glycine max
  Clone ID: PAT_MRT3847_29494C.1
ggctcgagcgcagagcaaagcagagccaagaagaagaagaagaaaaccaacataatcaacaacaacaacaacaaaaagcttgcaaattagaagaatcttcagttaaaagggaagaagaacacacaagaagaaagagaagaagaaacgcgcgcgaatgaagggagaattagagttgccacctgggttcagatttcaccccactgatgaagaattggtgaatcactacttgtgtaggaagtgcgctggtcaaccaatcgcggttcccgtcatcaaagaggtcgatttgtacaagtttgatccatggcagcttccagaaattggtttttacggcgagaaagaatggtacttcttttctcctcgggaccggaaatacccgaacggttcacggccgaaccgcgccgccggaagcggctattggaaagccaccggcgctgataaaccgatcggaaaaccgaaagcgcttgggatcaagaaagctctggttttttacgccggaaaagcccccaaaggtgtgaaaaccaattggattatgcacgaatatcgcctcgccaatgttgaccgatctgcctccaagaaaaaaaacaacaacttgaggcttgatgattgggtgttgtgtcgaatctacaacaagaaagggaagattgagaaatacaacacaggcgcagcgaagatgaatgttgagatggttcatagttttgagcacgagaacgagacgaagccagagattcataagctaggaaatgagcaattgtacatggagacttcggattcggtgccaaggttgaacacggactcgagcagttcggagcacgtggtttcgcccgatgtcacgtgcgagagggaggtgcagagcgaccccaagtggaacgatgatctggacctaaagctagaaaacgcgtttgattttcagtttaattacttggacgataataacctttccgtggatgattacctttttggcactgttcagtatcaaatgggccagctctcgcccttgcaggacatgttcatgtacctacagaagatgtgaaaactgaaaacgaaacgttttgagcaacatgggacccgcaaatatctttgttttattatttttttaaaaggaaaagtcagcatttgtatgcaattgcattgcacctaacatgtgatgtgggctaggccaagcttagcaactattcttattctttgttctagagagatgagggaatgttgaattcggctgaaatgggctatttggattggttcttggtgtaaagaaaaaatgagagaaggagattaggtgctgcagtaagtaaaaagtaagtgagcaaattgatgataggttattggagggttaatgtgtgggtgtaaggactcacttaggaaaattcttgttccattgctattccagcatatgattttttcatatattttgtaatatacaactttctacttttccattcaaaggaaacaactgaatgaaaaatcttgctttcc

SEQ ID NO: 64764 - DNA, 537 bp, Glycine max
  Clone ID: PAT_MRT3847_29495C.1
aaaaaaaaaaaaaaaaaggggggccccccttttttttttttttttttttttgggaaaaactttgaaacttttacttttatttaatacctttatcaaggaatacaaatcccatccctcctttttttttttttttggtcaactttgaaggagacaaaccctttagctttttttttactttccacaacaaccactttttttgacccattggtcacaaaaagggctccaaatttaggctcattttgggcctaaaatgaattttgaaaatgggttatcctttttggaaacccccaaactggtgaaaaatcacccccccccttggggccttttccgctcgcagttaacttcccaaccgttggtctcaagctcatgccattcacattggtgggaacaatccccccttgatcaatgcttctaaatgccccctttaaatttacaataggaaccttttttttgggggcccccttaaacattttttcaacttttttcaggcctaaaatttgacctttaattgacttcaatacaatattagcctcccct

SEQ ID NO: 64765 - DNA, 1452 bp, Glycine max
  Clone ID: PAT_MRT3847_29496C.1
ggctcgagagcaaagcaaagcagagccaacaacaagaagaacaaaaccaacatcaacaaccacaagaagaagaagcttgcaaattagaagaatcttcagttgaaagggaagaacacacaagaacaaagagaggaagaaacgcgaatgaagggagaattagagttgccaccagggttcagatttcaccccactgatgaagaattggtgaatcactacttgtgtaggaagtgcgcgggtcaaccaatcgcggttcccatcatcaaagaggtcgatttgtacaagtttgatccatggcagcttccagaaattggctactacggcgagaaagaatggtacttcttttctcctcgggatcggaaatacccgaacggttcacggccgaaccgtgccgccggaagcggctattggaaagccaccggcgccgataaggcgatcggaaaaccgaaagcgctagggatcaagaaagctctggttttttacgccggaaaagcccccaaaggagtgaaaaccaattggatcatgcacgaatatcgcctcgccaatgttgaccgatctgcctccaagaaaaacaacaacaacttgaggcttgatgattgggtgttgtgtcgaatctacaacaagaaagggaagattgagaaatacaacacgaccgcaccgaagatgaatcttgaaatgattcatagttttgagcacgagaacgagacgaagcctgagattcataagcttggaaatgagcaattgttgtacacggagacttcagattcggtgccaaggttgcacacggactcgagcagctcggagcacgtggtttcgcccgatgtgaggtgcgagagggaagtgcagagcgaccccaagtggaataacgatgattatgatctgggcctacagctagaaaacgcgtttgattttcagtttaattacttggacgataataacctttccgtcgacgatgacccctttggcactgttcagtaccaaatgggtcagctctcgcccttgcaggacatgttcatgtacctacagaagatgtgaaaacgatacgttttttttggacaagatgatgggacccgcaaatatctttattatttttttgtagtaaaagtcagcatttgtgtgcaattgcattgcacctaacattttgtggactaggccaagcttagtaaactattcttattctttgttctagagagatcagggaatgtggaattcggttgaaatgagctagtatttggattggatcttggtgtaaagagaacaaaaaaaaaaaaggagaaaaggagttaggtgttgcagtaagtaaaaagtaagccgaatgatggatgataggatattggagggttaatgagtaggtgtaaggaaaattcttgttccattgctattccagtatgattttttcatatattttgtaatataccaacttctgcttttcaattcaaaggaaacaattgaatg

SEQ ID NO: 64766 - DNA, 271 bp, Glycine max
  Clone ID: PAT_MRT3847_29497C.1
ggctcgagatatctctggacaccccccacatttctattgtgcgatccaaacatcttagtcattggccaccgaggcttctgtcctgtccgatcgctgatgggtacagacgatcatcatataaaaccacgtttcatcaaaacctatgcacttgctggtgatatattgccgaagaatgctccttggctgccgcttataatttcagctatcatttgccaggcaaggccttgggagaaggcgaccaatacttattcctgattggaatgggtgattc

SEQ ID NO: 64767 - DNA, 179 bp, Glycine max
  unsure (1)..(179): unsure at all n locations
  Clone ID: PAT_MRT3847_29498C.1
tnnagcngnttcaangancttagtggcaccaatctacttagagcctanatgcatggcttncctattaatcatgcattanacaaaaaggcaaaagcactggtggatcctttgaatatgaagcttatattgnacancngaaacgananaagntggangctgagngcgcctcacgaatnatg

SEQ ID NO: 64768 - DNA, 2348 bp, Glycine max
  Clone ID: PAT_MRT3847_29499C.1
ttaaggctattgatctgtcgcagaatggattaatgggtcccatacccaaggggatattccagctcaagaacctcaacaagctcttgcttctctccaacaatctctcggggaaaatcccttctgagattgggaattgttcctccctaattcgattccgagccaacgacaacaacatcaccgggagcattccctcgcagattgggaatctcaataatttgaatttcctagacctagggaacaatcgcatttccggagttatcccggtggagatctccggctgccggaatctcgcttttctcgacgtacattccaacttcctcgccggaaatttgccggagagtttgagccggcttaattcgcttcagtttctcgatgcgtccgataacatgatcgaaggtaccctaaatcctaccctcggcgaactcgcggcactctccaagctcgttctcgcgaagaatcgaatctccggctcaattccgagtcaactcggttcatgctccaagctacaattgctggatctcagcagcaacaatatctccggcgaaatccccagcagcatcggcaacattccggcgctggaaatcgctctgaatctgagcctgaaccagctctccggcgagatccctctggagttttccagtttgacgaagctcggcatattggacatatctcacaacgttctcagcggaaacctccaatatctggcgggcctgcaaaatctcgtggtgctgaacatctcgtacaacaaattcacgggacgcattccggacacgccgttcttcgcgaagctgccgctgagcgtgctggcggggaacccggagctgtgcttctccggcaacgagtgcggcggcagagggaagtcggggcggcgggcgaggatggcgcacgtggcgatggtggttctgctttgcacagcgttcgtgctgctgatggcggcgctgtacgtggtggtggcagcgaaacgacgaggggaccgcgaaagcgacgtggaggtggatggaaaggacagcaacgcggacatggctccaccttgggaagtaacgctgtaccagaaactcgatctgtctatctctgacgtagcgaaatgtctctctgctggcaacgtcatcggccacggccgatccggcgtcgtttacagggtcgacttgcccgccacgggactcgccatcgcggtcaagaagttccgtttgtcggagaaattctccgcggcggcgttctcgtcggagattgccacgctggcgcgaatccgccaccggaacatcgtgcgcctcctgggctggggggccaacagaagaaccaagttactgttttacgattacttaccgaacggtaacttggatactctcttacacgaggggtgcacaggattaattgattgggagacgcggctcaggatagcattgggcgtggctgaaggtgtggcttacttacaccacgattgcgtgcctgctatcttgcaccgggatgttaaggcgcagaacattttgttgggagacagatatgaaccctgtttggctgattttggtttcgctcgcttcgtcgaagaggatcacgcttccttttccgttaacccacagtttgcaggctcctacggctacattgctcccgagtatgcttgcatgcttaagatcacagagaagagcgacgtgtacagctttggagtggtcctactggagataataacggggaaaaggccagtggatccatcattcccggatggacaacaacatgttattcagtgggtgagggagcacctcaagagcaagaaggacccagtcgaggttcttgattccaagctacaaggccatccagacacgcaaatacaagagatgctacaagcacttggtattgctctcttgtgcacaagtaatcgtgcagaggatcgacccacaatgaaagatgttgctgcattattgagagaaattcgtcacgaccctccaacaagtgctgagccccacaagcccaagcccaagcccaagccctattcaaccgaggcttcttcctattcctcctcctcagtcacccctgctcagttgttgctcctacaatctagctcccattcctcatcatcacttgcttattcctcttcctcagcagctggctaccaccctccaaggaaccaatcctgaattgaagaatattcaagccctagaatatattaattactatattttcaggattttagaccatgttagatattttgattggttaattaattagttagtacaagtcattaacgttagtgtaatgtgggaattgtaaaggtgcttttgagtatcccgattgagataaggtaaaatgaaatgagtgtacagaagaagcttaattgattgacacgattccatttt

SEQ ID NO: 64769 - DNA, 406 bp, Glycine max
  Clone ID: PAT_MRT3847_2949C.1
ggctcgagactagttctagatcgcgagcgaccgcccttttttttttttttggttgggtaaatattaactatggaccttaacttttacaccctggcaacttccatggttacttggttattattatttttagattgagggaaaaaaacccgggcccggttaaaaccggatcttttggccggtcaaggaaccttgggccgaagaaggacatttagggcaagaatcaaccattttcggtgtgggacccggttggaaatcacgaaccaaggccaattccagttggtgaaacccggcacgggaagaactgacgaaccccccacctgggtacggccaaaacggtttaaaaaaaccccggaacgcgccaccggaaaaaccaagcgcccggggcgggtaattgggccgcaagaag

SEQ ID NO: 64770 - DNA, 535 bp, Glycine max
  unsure (1)..(535): unsure at all n locations
  Clone ID: PAT_MRT3847_294C.1
ccacgcgttcgtttacgctttcggcttctgacggacacatgtattttaaaggtaccaagggtctacaaacggcattgacccccatatcatttaagtgtcctaaggcccggactagatttaccgctatggggttcatcgactctattgctagattaccacggacgatttgctctacacaatgaacaataaaacaacatggtcctctggactcgtgccgtcggggtgaactttcctgaacgctcatgccattgtcttggttgcacctaccattgatactgtgcacggatttttcaacattggaaacggttttttgaggctcgggatatatagcatcgagcttgggatcctcgcatattacaggggatccagaacctgggtccaaggttccagcaaacttattgtccaaaactttctgaggcaaacttctgctctccatgatgggngggaagctgcataagctaattatgtggcgccatctcaaccctggcgaaaggatctgtcaagtggaatacattatgctccataaagggattat

SEQ ID NO: 64771 - DNA, 283 bp, Glycine max
  Clone ID: PAT_MRT3847_29500C.1
ctcgagccgaatccctcaccaccctcaagtttgcagacatatccaccgagaccccaacaacctctgatttcgtttctctcgaaagattgtgccttttcgattgtcggttcgagtgagtagaggaagaggagcttgatcttttcaggggctgtgttagtttgaggtgtttgtttctacatgattgtcagtactatggcaggtttaggaggttcaaaatctttgccccccaccttgtagacttcagcatcaagggaatgagagtggatgaagtgtttggttctga

SEQ ID NO: 64772 - DNA, 314 bp, Glycine max
  Clone ID: PAT_MRT3847_29501C.1
taatcagagacttaatggcaacaattatggattcataaatttggagaaataaggtaatagaaggctagctatatgcttaacacagctagttcgaaaacgagccatcgaagtatctaactgcgcattatagctaatctgtctgagccatctcttttgaaggtatgacacctgctaggttgaccgcgccccgagggagactatggtaaggtcggatagatcgagtcttttgatactcttattcttaggattgggcccctcagtaatgaaagctattgaagaatgcctcccacccgaaagagaagaagacatcgaga

SEQ ID NO: 64773 - DNA, 473 bp, Glycine max
  Clone ID: PAT_MRT3847_29502C.1
gtggagtttttttttttaaatttttttttttgtttttttttttttttttttttctttttttttgtggttttttttttttgtcccaacaaccgcggccccaggggggaataataattaccaaaattattccagggggggaaaaaaaattttttttccaggggggtgggcaaaaagccgagactctggaaacaaaaaagggggaacaaaggggaatcgggggggggcaggacacccacgggagtaaaacggggcgttttttttgcaagggggaacccaagggggggggacaaaggggggggcccgccgacaaaaaaccaaggaagcggcctccagaaatgaagcgggccaaacctcttaaataaagggggcgcaccaaataaacccaggtgggggggaggctcttcaggaacacagggggcgccaaagggcgagcggggttaatagaaccgccgaacgggggggtccccccggaa

SEQ ID NO: 64774 - DNA, 599 bp, Glycine max
  unsure (1)..(599): unsure at all n locations
  Clone ID: PAT_MRT3847_29503C.1
tggaggaagtagtagcagcagcaagggtggtganggtggtaatggtgtcaaagagcagaagaaaatggtgaacaatggaaaaggggataaagggaaagaaagggcatcaaggcataataacgttggaggaggttcagggtctggagataaaaggaatagtaagaatgttgagaacaactcacagtcaaagagaagtgttggtagacctccaaagaaagcagcagagacaaatgcaggttctgcaaagcgtgggagagaaagtagtgctagtgctggcaccggtaaccaccccgacgaacgttccaagaaatgatttccaaagcttcatagttagcctcttttgttcctctcctgtatattaattattattattattattattattattattattattattgtcaaagcatgtgtttttttctttgttttatactgctaatttattgatcagctatagcctgtagtcagttgcctggtacatgtaacagtattttgatttcgggtaaaaccttgtaacaacattgtcctcttggggactgcttttcttgattttttggtttaacaggaaagcatagtcactgcttgtgctcgatttggtc

SEQ ID NO: 64775 - DNA, 366 bp, Glycine max
  Clone ID: PAT_MRT3847_29504C.1
gacaagattagctgtgaaaaaaagaaccacacactttacgagttcccagatctcagcgtggtggagaagtgatagaaccacttgttagtaagcagtggtttgtgactatggagcctcttgctgagaaagctcttcaagcagttgaaaaaggagaactgaccataattccggaaagatttcaaaagatttacaaccattggctttccaacattaaggattggtgtataagcagacaactatggtggggacacaggatacctgtatggtacattgctggaaaagagaatgaagaggactatatagttgctaagaatgctaaggaagcacttgaaaagctcacaagaatatgggaaggatgtagaaata

SEQ ID NO: 64776 - DNA, 269 bp, Glycine max
  Clone ID: PAT_MRT3847_29505C.1
gtgttggagttagagagagatagaccaaaaaaaaggttcagaagaatcagataggttagatttatatacaaaataaagcatagatacacttggagttggagttacccattattctctctctcactcacacacactcagagtgcaagctcgagagatagagatggaggatctcgaggaggaagatcacggatcggaggaggtgttggctgtcaacttgaccatggagacggtggcggcggcgagcagttcattgagattcattatagggc

SEQ ID NO: 64777 - DNA, 485 bp, Glycine max
  Clone ID: PAT_MRT3847_29506C.1
taagaaaaaaaagatactctttggtttcttttcaattggctgtatgtgatgtctccatatattatatgcctcctactgcaggttaaatgttacatacatcaactgctatcaggacttgagcactgtcatagtcgaaacgtacttcaccgtgatattaaaggatcaaaccttcttattgacaatgaaggaatacttaaaattgctgacttcggacttgcatctttctttgatccaaatcgccggcaacccatgactaatcgtgtggttaccctttggtaccgacctcttgagttgcttcttggtgccacagaatatggtgcggccatcgacctttggagtgttggttgcattttaagagagttattggctgggaaacctattttgcctggtcgtacagaggtggaacaactgcataagatatacaaactttgtgggtcgccttctgatgagtattggaagaagtcaaagatgcctaatgctacttt

SEQ ID NO: 64778 - DNA, 328 bp, Glycine max
  unsure (1)..(328): unsure at all n locations
  Clone ID: PAT_MRT3847_29507C.1
ngttgggggaagcggtgggccaaaattaatgagagacttgaaaaggcacacggccaagcatttcatatatttaatttattaaacttatccacttagttgcgcacatatctatatataattctggtttattcactcaaaaacaaacaaagtgctgcatataaggggggaaaagggggccccaacttcctcccaagctcccccacgacaaagacaaaacctttgccatgtatgttccaataatcagccaagggggtggacatctctggctcaggaatctccaatcttgagcctttcaggggctttgaggaaaaaatggacttgggatccc

SEQ ID NO: 64779 - DNA, 121 bp, Glycine max
  Clone ID: PAT_MRT3847_29508C.1
gctcgagctccatcgtgatagagttgataggtggactggactgaatagtttcaccagagccgatgcagcaatgaacaaccagctctccagccccagctgcatcttcggcctccgcctatgg

SEQ ID NO: 64780 - DNA, 344 bp, Glycine max
  Clone ID: PAT_MRT3847_29509C.1
aattattcctcaattatttcccacttttcttctctctcaagcaaaagttttcttctctcattctcagcgttctgaatcgaaactaatggcttcagagacagaggtgttaaatattatttcctctgttttcgaacgcttcgagagaaacatgtctctgtttctgcccttcatcttcggcttctctgacgccacctcaggacgagatagcgacgacccagatcacgaaactgctcacacagaaagttcactgcgtcaaagaattatccttggtgaaccccttgactcagggaatggtggtgatcgacggcggtttgagcctcgaagctctgtttcgcgaactcgcc

SEQ ID NO: 64781 - DNA, 371 bp, Glycine max
  Clone ID: PAT_MRT3847_2950C.1
actcaattcatggggatttaagtttcaatctctatcaaagtacacaaattcagagtatattgaggctgtaacctctctgcattaacatatttcaatacatacaaacccacaaatacccactcctgaaaacaactaactggattattcaaaaagattacgaagggtaacacagaaatttgatataaaatggagggtatgctgccaagccatgatcatcttccatcatcaaaagcaatttgtacatgatcattaatgctgtcatacccaatagtatattgatggctgctgctatcaccaggttcacagacgctagatgatcccttttgaagcaagtgagcctcctctggattttgaaatgtattgatccaagg

SEQ ID NO: 64782 - DNA, 132 bp, Glycine max
  Clone ID: PAT_MRT3847_29510C.1
gctcaccctagggcgaatgagaaggccgtttctttgatacttactaaaccagatttcggcctttaaaatctgcacaataccatttgtctttacgatggtaaggcaccctttaaataaacatttcgcttttga

SEQ ID NO: 64783 - DNA, 867 bp, Glycine max
  Clone ID: PAT_MRT3847_29511C.1
ggttggtgatagaagctcggtgaagggcaaagaagttgttgtttatgggaattctgatcaggatgagaaatgcctaactgggttgggtatgcctatctggcgtgacgaattaaggttaaaatcgtcgatggtagaggtgtccacatttagtgcgcaacagtaccggcaagaggtttgaatgaagatatccatatccaaccaaaaccaaaagcaagatcaagatgagaaatgggtagagagggatttcttgagtttgagtgagacaagggagaattcttcaaagagatccatggaggaagagtgtgaaagggagacgaatggtggcagcaagatgcagaagcttgagactcttagcctctctcttgctttgcctgatgtgtcgctctctctcacagcctccaacgctttgcaaaatggcgaccaactcgttaggccaaagcctagtaagccatccacaaggaccacaactactatcaattcatgttcaaatgattacacagcagcttctgtgtctcactcttactctcaccctttctcacacaaccaaagttgctcactcacccgaaattcgaccgagaatttcgagtactcacacagcaaagatgatcaaatttggcattgtggggaggggactaatggctcggttcatagcaggttcaagccaattggagatggggttgctttggtcaatcattccttcatgcaagggaatagtcagtataaggctactagctcagaaaaccaatctgttttcccttcagaattgcctgccagaatgagatttgaagccaagtcagagggctcaagaggaaagaattctgggaatttaagaggggttggaaggtgtggatggtgggaaaattgaaa

SEQ ID NO: 64784 - DNA, 261 bp, Glycine max
  Clone ID: PAT_MRT3847_29512C.1
atcagactttactcaaaaaaaaaattaacagtttaaacgatcgataacagtgtacagatcaagggattcatggggttctaaaacagaatttaattacaaaacaatgattaaaataatacggggaggctcttctaaaggatccaagattactcacacttccatgggactctttaactattcttttggggaacttaacatcaattaactggccgatgttttaaaacgacttaactggaaaaacctgggactacacccagctta

SEQ ID NO: 64785 - DNA, 1389 bp, Glycine max
  Clone ID: PAT_MRT3847_29513C.1
atgctccaccaccgcttcctcctcgtaatttaccccggacaaggccaaataaaccccgctcttcagtttgcgaagcgactcactgccatgggtgcacgtgtcactattcccatcactctcgacatgcaccgccgcatgaccaacacaaccgccgtccccggcctctccctcgcccccttctccgacggctacgacgacggcttccacgccatccgcggcaccgactccgattacaacctctacgcctcggaactcaagcgccgtgcctcggtgttcgtgtccaacctcatactctccagcgccaacgagggccaccctttcacttgcttactctacaccttgctcgttccgtgggccccacaggtggcgcgtggactcaacctcccaacagctatgctctggatccaacccgccacggtgctggatatcctctaccactactttcacggctacgctgattacatcaacgacgaaaccaaagagaacatagtgcttccgggattgtcgttttcgctttcaccccgtgacataccatcgtttttactgacgtcgaaaccgagtttattgtcgttcgtctttcccttgtttgaagagcagatcaaacagcttgacctggaagctaaccctaaggtgctggtgaatacttttgaagctttggaagaagaggcgttgagggccgttgataagctcaacatgatccccatcgggccgttgattcctactgcgttcttgggtgggaaggaccctgaagatacttcctttggtggtgacttgttacaagtctcaaatggttatgttgagtggcttgactcaaaggaagacaagtctgtggtttacgtttcatttgggagctactttgagttgtctaagagacaaactgaggaaattgcacgtgcgttgttaggttgtagttttccgttcttgtgggtgattagagtgaaagaggaagagaaggaggaggaggaggagctgtgttttagagaggaattggaagggaaggggaagttggtgaaatggtgttctcaggtggaggttctgtcgcatggttccgtgggttgttttgtgacacactgtggttggaattcgaccatggaaagcttggtttcgggggtgcccatggtggcctttcctcagtggtcggaccaaaagacaaacgcgaaactgatagaagatgtgtggaagataggagtgagggtggaaaatgatggggatggaatagtagaaaaggaagaaattaggaagtgtgtggaagaggtgatggggagtggagagttgagaaggaacgcagagaaatggaagggtttggcaagggaggcagcgaaggaaggtggtccttcagagaggaatctcaaggcgtttcttgatgccatggcggcgttgcagttctaa

SEQ ID NO: 64786 - DNA, 378 bp, Glycine max
  Clone ID: PAT_MRT3847_29514C.1
aaaaccagctagggcttcgatttggatagatgctctttaactcgaagcttctgcggagtgtattataggaaaatgctcccactcagtgaacgcgtaagcttaagcttcgtgttgatgaggatggcattgatattaacaataacaatcttagtcagcaaggtaaaaacgaaacggaaaattcatgctccgtgacacgaaaatgaggaaaaaggaaacacagattccattcgtagcgtgatgcgtcttgtcgttttttatggcactttacttctctactgggactcctatgttctctctataccttctttctcttttttattgtgaaagaaaggagggattaaaatccacacaaaaaaaaaatggaaaggaaaagaaaaa

SEQ ID NO: 64787 - DNA, 553 bp, Glycine max
  Clone ID: PAT_MRT3847_29515C.1
gactcaaacaatgattagtacagcataataaaaacatcgatcagtatcaatatcagcgcacaacatatccacatccagagtttgagaattattctgatttttgagaattgaagttcatagaactaatggcttttagagggtttgcctctgtctagttgcggtcatagtggccactatgtggagtcaaaatgctgcccaatcgggttgcaccaatacactaacaagcttaagcccttgtctgaactacataatgggaagttcttcaaccccatcagcttcatgctgctcacagctctcaagcatagtccaatcttcaccacagtgcctttgctccgtgctcaatggtggaggttccacttttggaattaccattaaccaaactcttgctctgtctctccctggcgcttgtgaagtacaaactccccctgttagccagtgccaagcgggcaatggaccaacaactccttcgactgctccagttggttctccttctggttcttcagctgaatcacctcaaggctcaattactccttctgctttagactttccctca

SEQ ID NO: 64788 - DNA, 2323 bp, Glycine max
  Clone ID: PAT_MRT3847_29516C.1
gtcggtcggccgaaagggcccattgaacccccgtgtctatagcctccaatcggttactgggaatacattcccccaaatctgttcgtgggcagaaatcgggctgtagaggtttgtgatgctcgggaaactcgttgccatatgcatggggggatcattcccggtggagcaaggagatctacacaagaggtggaagttggtgagtaagaggttgagaaactttcaccaatgtgttgtgcttcctgtaggtagcttatctagtggactctgtaggcatcgcgcaattctcttcaagagattggcggattacataggtttgccatgtcgaattgctcggggttgtaggtactgtgtttcagatcatagatcgtcttgccttgtcaagattaaagatgatagacagctctcaagggaatatgtagttgatctggttggggaaccaggaaatatccatgggccggattcctctattaatggagcatatgtgtcttcaataccttccccatttcaaatttctcatttgaaagaatcccaatcaccatatgtggatgttgcagcatgttctcaatctcttggtggtgctattttagactgtgtacaggaagatcaacaagctgaagaaactgatctgcagaaaaataataatggctctatttatcctgcaatagatcaaactcgtggaggtgcagaaccacctctaattccttttggcttgaaagggaatcacaaggaatgtgcaatccttggtttattaaattttcctccagtatatgaaggtgtttctgaggatcttcacccagccactgaagcatcgttacatgaataccccaggctcagtaaagattcagttgtagtactagaagcttccaacaaagagatagagatcattgtaaaaggaagttctggggtaaaaagtaactataagcaatctacggtgagcttatccagcgaatcaaaacaggaacaagaacatgtaaaaaataaagttgaaaatcagggtgctggtaatattccaagatacttgaatcttgaaccatcacttgcaatggattggcttgagataccatgggatgatttgcgaatcaaagagcgtgttggtgccggatcatttgggactgtgtatcgtgctgaatggcatggatcagatgttgctgtcaaagttttaacagttcaggatttccaagatgatcaattgaaagagtttctaagagaggttgcaataatgaaacgagtacgtcatccaaatgtggtgttgttcatgggtgcagttactaaacgtccccatctatctatagtaacagaatatttgcctaggggcagtttatttcgcctaatacataagccagcatctggtgagattctagatccaaggagaagattacggatggctttagatgtggctaaagggatcaattatctccactgtctaaagcctccaattgtgcactgggatctcaaaaccccaaatctgttagtggacagaaattggaccgtgaaggtctgtgattttggattgtccagatttaaggcaaatactttcttatcatcaaaatccgttgctggaacacctgagtggatggctccagaatttcttcgaggagaaccttcaaatgagaagtctgatgtttacagttttggggttatcctgtgggaacttgtgactctgcaacaaccatggaatggacttagtcatgcccaggtggttggagctgtcgctttccagaataggagactagctatccctccaaacatctccccagcattggcctccctcatggaatcttgttgggccgataaccctgctgatcgtccatcttttggtagcatagttgagtcgctaaagaagctactgaagtcaccagcggatgcaataaaaatgggtggggcaataacataaggagtactctgcccatgacgggtttttggttgctgaaatttattaattaacctaattgatggcatgaagccctttggttgttgcaatttgtatatcgatcggttgattcatgcaaacccatttcgtaagggcacttaaagcaatctttggattcttctgctaaaatgatgacctcaagctcttttatctatagctttgagatcaataaaaatagtgacttgctccctccaagctataattatttggagcttgctattgtttttcagattgtatatatgtaataaattatttggcaatatatatctgatatctcgtctataaccctgttcttaagtttctgattgtggtgcaaattacccccttccttctaagaaggccattgtgtgtcatggaaaatttggtactattttttacgtacgccagcgcctt

SEQ ID NO: 64789 - DNA, 811 bp, Glycine max
  Clone ID: PAT_MRT3847_29517C.1
gttagtagacagaaattggaccgtgaaggtctgtgattttggattgtccagatttaaggcaaatactttcttatcatcaaaatccgttgctggaacagttgaactttcacttcatggtgccacatcttcaataagtgtgtaactctcttaattttattttcagcctgagtggatggctccagaatttcttcgaggagaaccttcaaatgagaagtctgatgtttacagttttggggttatcctgtgggaacttgtgactctgcaacaaccatggaatggacttagtcatgcccaggtggttggagctgtcgctttccagaataggagactagctatccctccaaacatctccccagcattggcctccctcatggaatcttgttgggccgataaccctgctgatcgtccatcttttggtagcatagttgagtcgctaaagaagctactgaagtcaccagcggatgcaataaaaatgggtggggcaataacataaggagtactctgcccatgactggggtttttggttgctgaaatttattaattaacctaattgatggcatgaagccctttggttgttgcaatttgtatatcgatcggttgattcatgcaaacccatttcgtaagggcacttaaagcaatctttggattcttctgctaaaatgatgacctcaagctcttttatctatagctttgagatcaataaaaatagtgacttgctccctccaagctataattatttggagcttgctattgtttttcagattgtatatatgtaataaattatttgacaatatatatctgatatctcgtc

SEQ ID NO: 64790 - DNA, 209 bp, Glycine max
  Clone ID: PAT_MRT3847_29518C.1
tcgacctcccacacctactcctaatcctcataatttcttttctcacaatctctcactctcggtacctgtccaattcctatcatcgccataaacccacaaacaatcccaatttcatctccatttaaactcaatatttatttcaaacatctttaacctcttcattcatataaacttatcttatatctaatattaccaacccttaatatact

SEQ ID NO: 64791 - DNA, 351 bp, Glycine max
  Clone ID: PAT_MRT3847_29519C.1
cttttatatactctctctcccgtctctcatatcttcaggtttttttttattcctttactctacttgtgacaattccaaccgaagctgccctatagcctcctctttaattccatctctaaatactccatatggctataacacaaaattgttcggggaaagcgtttcaattctttttccatagagaatgttaaataaaatcctaaattatctgattgtcccaaaaacctagaaatcaactcaatttgttcactagttaaaaggaaacgtctcttatgtttgagctccaaaactcaaactttaaagccctatctatttcttttccttacggcccacttaaatttttcttccttt

SEQ ID NO: 64792 - DNA, 118 bp, Glycine max
  unsure (1)..(118): unsure at all n locations
  Clone ID: PAT_MRT3847_2951C.1
tttgcctgnaacaaacaaaccctttccntctcttcctgctctccctgcatnnatataaaataacntgacttggttgttgctgntncaatccaagaagtatggaagagtntgaggggng

SEQ ID NO: 64793 - DNA, 655 bp, Glycine max
  unsure (1)..(655): unsure at all n locations
  Clone ID: PAT_MRT3847_29520C.1
aactgaaaccactgttctgaagtctaattataatcaatcccaacttaaggaaaatgagagtatgcagtttgatgctatgatggaaaatctaagaatgcaagagtcagagtttgaggatggcaaatttgatgcaaaaaatagcaatctacctccacttgattcttctttcggagatttaagtactgtgcaggtcattaagaatgaagatcttgaagagctgcgagaactaggttctggtacctttgggactgtgtatcatggaaaatggagaggaacagatgttgctattaaaagaataaagaagagctgcttcactggtcgatcatctgagcaagagagactgactgtagagttctggcgggaagctgacattctttccaatcttcatcatccaaatgtggttgcattttatggtgtggtacagcatggaccaggaggaacaatggccactgtggcagaatatatggtggatggttctcttaggcatgttttacttcgcaaggatagcttttggaatggaatatttgcactcaaaaaacattgtgcatttcgacttgaaatgtgancatntgcttgtaaacttgaaagatcctttacgaccaatatgcaaggggtgttgattnttggcttatcanaaattaaacgaaataccttg

SEQ ID NO: 64794 - DNA, 277 bp, Glycine max
  Clone ID: PAT_MRT3847_29521C.1
ggattatcagaccgccgggatgttctgcgaaccaggcgagctttatacagcgcgcacgtgttgggaatggactatgcgcgacaaggggaggcacagaattgagcataactgtccctgggctggccagtgcaggggagtacgaaactatcggaacttcatcatgcttagtgcgacataaaccaggttgtgcatatatgagattacgggcaagggtataaagattgcccacagcgggaactggaacacaataacacatgattatgtatcaaaatttctg

SEQ ID NO: 64795 - DNA, 490 bp, Glycine max
  Clone ID: PAT_MRT3847_29522C.1
aggaatttgccgctttacatgtgtaggagtgccgcctgcttggggggggggggggggggggggggggaaaacggaaaataagctagcaggctagggagcaggtacccggttaggagatgaatataatgtgtgggaggaagcataaagataaagataggtacttatgttaaagatagcatggagctagatataatgcagaaaccaagtgccggttggtaagggtatagggagggaaaattaccaatactatggaactaattagacccgttggacagacacagatgctgcccaatgttgtgcaaacgtaagtttgatgcatgacaaccagacactaaactcgaacctaggggagtgcctttagactccgggagcaagcgtgtagtgggccgtggtgtgagaactggtggggtaagtgtggtaactggtgggttaaattgtggaaagcttgtgaagccattcctagtacaacgttacgacgtgttattagtga

SEQ ID NO: 64796 - DNA, 1478 bp, Glycine max
  Clone ID: PAT_MRT3847_29523C.1
gcggccgcccttttttttttttttttttttcgttgcaaatagaattttgtttaacctatatagtatgaaggcgttaaaactacaatcattcatacaatttcgcgatttatggggtcaaaattaaagaaaacatgtaaatgctactacaagatcagtgcagaattatagtacaaaagccgcccccgtccggaataagtagcttttttcacaaagaaaagaaggtagtagattactatctcaatggcattggagcttgcaccagtatgtgaaaaagtggagccaaatcctgcaaactcgtgaaacgggaacagcttaaaaggcccaaacttctggggaaaaaaaacgtgaaatgaagatcaaatcggacagaatctttttatacagaatcacatcatttgttgatgaaggtctgctgcctgctgtgccagttccaccatcatagcctcatcgaagaacttatttatgctcacatcctcactcattccctttctacgtcttgtcttcaccataaactcacgggcaagatgctgaataggtgcgggttcaagtgggcgcaaaacaatgcttttatccagaggatctccaggaacaatagcccaatgatcaaaaactgacatgcaaaatgcttgaccttgtgtatgatatctcaagtctgtttcaaatccaaaagattctatcacgggcaaaaatgccttaacaatataagctggggtgccaggctgaggaacatcagcagtaacatgcccacgccttcgagataatacagtgtaaattgcagacacacaatctattggtgtttgaatccggacgcgtggttccataagacgaggagtagccatgaggaaagctgaataggccactcgtctagctgttggaatgatctggccagacccccgatgaagtgactctgtagcaatctttgcatcaacaatcttgaatttaacatttctgatgggctcatcacagagaggcccttctcgtgcaccccactgaaatccctgaacaatggaatccttcacggcattcattagatccttgttaacttcagttggaagggtgtcatctaacagaatattgggaccctgcttatcagggccaaatgcccagattgaccgtgcagcaagaagatcccagtcatatttagtctggaaaaagtcacctagtttctttttactccagtcagtgctaacaacaccattctctatgtcctctgcaagacctctttctaatggctcagcaaccatagttattttattcttcttgtttggtgtttcagcaaaacatttcattgaggaagattcaacaacagtttcacaaaatgagacaacaggatctgctaccttgacttctacttcggaatagagctctctcaggtccttcataattgaatccaagtacagctcaccagtccctaaaatagtgtgctccccagattcctcaaccttagtaactgcaagaggataactcttgcttatttt

SEQ ID NO: 64797 - DNA, 409 bp, Glycine max
  Clone ID: PAT_MRT3847_29524C.1
tgccatactagcaagtccaggattaatgtctgggtctgcacgcttactatacctcggacgtcctttcgagcatttaaagaaacctaggactccccactcagaagaagaaccaacatggcacccacaatctctaattattcgcattctataagggttgcagagccattcattgcttcctcctctaataaggagtcattcaccttagcatgcttgcactgcactgcatatcatcaacggaatgcttattcttcaagtcaccagtgatgctcacatgctgatcgttcttgacttcacagacacattgtgtggtccttgcaaactcatggaccctggtcccctataggctgctggagatcacacagaagtggaggacatcatgattgatgtcgatgtgtatacaggatgtgac

SEQ ID NO: 64798 - DNA, 474 bp, Glycine max
  Clone ID: PAT_MRT3847_29525C.1
accaggtgcaatgttccttatacctaggatttcttttagcagtggcattatctgtcgagttagatgttaacttcactggatgtcataagatgaactgatattgagatttgaaaagactgtcttcatacttaaattctttacctactggtaggctattaattataaaattcaatttcagatattaaacactgctaattgaaccatgactgttgtattttaagtcttaaaatagatcgtagtacttgtatgatctgtagtttcaactgttcttgtgtgttaccaagtttgttctcaatgccatatgttttaatcaagtttttgaatttattatgcctttgattggtttgagaatgacatcaatttttttaaagatatttttattgaatgttgttttatttgattcacagttgattttactttgtatgatactgtttttcattgaagtaatgtgcttttagccagctgtttggttta

SEQ ID NO: 64799 - DNA, 622 bp, Glycine max
  Clone ID: PAT_MRT3847_29526C.1
gtgagtgtggcatagatcattgaatcaatggccttcgccaccagcgccttggtttgttcaaacttgctcggaaggaaggttctagtcacaagcaaatcatccactccactaccatttcttttcaagagaagcatcttaaaagctcagaattcagagcaagtcaaatccgcatcttcacgggctgctctagctgcacttatctctcctccgcgagcctctctgtgaccccagaagccctagccgctgataacttgacccctccccccgtgattgaagcgcaacagagccaaccctcatcccctttctcacagaacctcctcctcactgcgcctaagccccaatcctcttccgacctccccgaaggcaccaattggcgctacagcgacttcttaaacgccgtcaagaagggtaaggtcgagcgagtcaggttcagcaaagacggttctgccctccaactaaccgcggttgacggccgtcgcgcctccgttattgtccccaatgacccggacctcatcgacatcctcgccatgaacggcgtcgacatttccgtcgcggaaggcgaatcccccaacagcttgttcaacatcgttggcaacttgctcttccccttgctcgcgttcgc

SEQ ID NO: 64800 - DNA, 3132 bp, Glycine max
  unsure (1)..(3132): unsure at all n locations
  Clone ID: PAT_MRT3847_29527C.1
ctccttgaatttgataaaataattattgattcttacagtgtacaagtcagagcgtattttatagtacaaacataattctgtgacttgcgtgtatgattatgcaacatataattcggcttttccatcaatgaatagactcatgaactcttcaccatccacagtttctttttctatgagaagttgagcaagcttgtgaaggatatcaatgtgagttgagataatatgtgttgccctagaatatgctctctctaccagttccctcacttccgcatccactacatccgcagttgccatggagtaatccttttgcgatgacatctgttgacccaagaatggatttccaccaggtccaccaatggcaacttgtccaatttttttgctgaatccaaatctctcaaccatctgccttgccactcgtgaaacttgcatgaagtcgtttgatgctccggtggtgacattttcctggccaaaaataacctcttcggcaacccttccacccagggcaacagccatctgattttcaaggtaacttctactgtacaatccagactcgagcctctcttcgctgggagcaaaaaatgtgagaccaccagcttggccaagatatcaattattcctcgtggctacagggtcatattcaggcattatcacgtacacgcgagagaagaccaggaaaaatctatggcatagaatccagcaagtcgggcatatatagacgctttgtcggaaacggtgagggtgtgtttcaaaatcgaaaatctagagcaaagtgattgattccagttccaatggccttgggcaccagcgccttgatcggaaggaaggttcttgtctcacccccaacccccaaaacaaccaaatcatctactccgctacaattccttttcaagagaagcatcttaaatgctcacaattcacaagctgctctagctgcccttatcttttcctccgcgagcctctctgtgaccccacaagcccttgccgctgataacgtcacccctccccctgtaattgaagcccaacagagccaattaaacccctccaactcatcctcccctttctcacagaacctcctcctcacagctccaaagccacaagcctcctccgacctccccgaaggcaccaactggcgctacagcgagttcttgaacgccgtcaagaagggtaaagtcgagcgagtcaggttcagcaaagacggttccgccctccagctaaccgccattgacggccgtcgcgcctccgttattgtccccaatgacccggacctcatcgacatcctcgccatgaacggcgtcgacatttccgtcgccgagggcgaatcccccaacagcttgttcaacatcataggcaacttgctcttccccttactcgcattcgcgggcctgttcttcctcttccgcagagcccaaggcgggcccggcgggcctggcgggctgggagggcccatggacttcgggcggaacaagtccaagttccaggaagtccccgagaccggcgtgagcttcgctgacgtggcaggcgcggaccaagcgaagcttgaattacaagaggttgttgatttcttgaagaatcccgataagtacaccgcgctgggcgcgaagattccgaaagggtgtcttttggtgggcccaccgggaaccggaaagacccttctggcgagggctgtggcgggggaagctggggtgccgtttttctcgtgcgcggcttcggagttcgttgaactttttgtgggagttggtgcgtcgagggtgagagatttgtttgagaaggcgaaggggaaggcgccgtgcattgttttcattgatgagattgacgccgttgggaggcagagaggggcggggctcggaggtgggaatgacgagagggaacagactattaaccagcttctgacggagatggatggcttttctggcaattctggtgttattgttttggctgccactaacagaccggatgttcttgattcggcgttgttgaggcctggccggttcgacaggcaagttactgtggatagacctgatgttgccggcagagttaaaattcttcaggtgcattctagaggaaaagcacttgcaaaggatgttgactttgaaaaaattgcaaggagaacccctggattcactggggctgatctgcagaatctgatgaatgaagcggctattcttgcagccaggcgtgacctcaaggaaataagtaaagatgagatatctgatgcgcttgaaaggatcatagctggacctgagaagaaaaatgctgttgtctcagatgagaagaagaaattagtagcctatcatgaggctggccatgctctagtgggtgctttaatgccagaatatgaccctgtagccaagatatcaattattcctcgtggccaagctggtggtctcacattttttgctcccagcgaagagaggctcgagtctggattgtacagtagaagttaccttgaaaatcagatggctgttgccctgggtggaagggttgccgaagaggttatttttggccaggaaaatgtcaccaccggagcatcaaacgacttcatgcaagtttcacgagtggcaaggcagatggttgagagatttggattcagcaaaaaaattggacaagttgccattggtggacctggtggaaatccattcttgggtcaacagatgtcatcgcaaaaggattactccatggcaactgcggatgtagtggatgcggaagtgagggaactggtagagagagcatattctagggcaacacatattatctcaactcacattgatatccttcacaagcttgctcaacttctcatagaaaaagaaactgtggatggtgaagagttcatgagtctattcattgatggaaaagccgaattatatgttgcataatcatacacgcaagtcacagaattatgtttgtactataaaatacgctctgacttgtacactgtaagaatcaataattattttatcaaattcaaggagaaaaaacaattagcacagcagcttacgcaataaataaataaaaaatatggttctacggctgagttacactttcgaatgagcagatcataacgaactgtatacaagtatagaacgatttcaactgctgaaaccccattnttttaacagaatgttatgaacctat

SEQ ID NO: 64801 - DNA, 316 bp, Glycine max
  unsure (1)..(316): unsure at all n locations
  Clone ID: PAT_MRT3847_29528C.1
ggncgcccttttttttttttttttttttttttttatattaccgttttccgggggggtaaaaagaatgagttttgccctaccatgatataactttttaacttgtcaggaaaaattctaaagcgtcaaaatggtataacccaagcataaccagtttttttgggaaaggaagcagtttttatacatactacacttaccatgagttaaggtttttggatgcaaattacaccctaaggaactgcgtgcccatgtagaaaaccggtaaactgtcgaggaaacctttgcaccttaactttaaattgcctcaattttcttaaat

SEQ ID NO: 64802 - DNA, 204 bp, Glycine max
  Clone ID: PAT_MRT3847_29529C.1
ttgtacactgctggaggtggaaatagaaaagtttactaattggactgaaatacactagtgcggtgagtatcgaaaaatggaagatttgatggtggttggtgaaatataaaattggtggggcaaatcgcgctaatgatgtataaaggagagtcagtatactggcctgtatttgttatatggagtagaaaatgaggacgaattttt

SEQ ID NO: 64803 - DNA, 619 bp, Glycine max
  Clone ID: PAT_MRT3847_2952C.1
ataaaagagaacatagtctacttttctcaatttcatataaaaaagtttcaatcctttttcccaaattcccactatgtacttgactttcaacaacaatatttgcgtcctaacatcaattccagcaattccaaataaagcaaggttggaggccttcgattggttgactctaaaccttgttctggaagcatcattgggtagcaggcattggaccgttggaagggaaagccttggttcgcttggatgatattgatgctcttgccacttcacatatttgtgatgttccgcctgcggttagtagagatgacgatgtccctgtgtggaaacactctacggatggggtgttcaaggtagcttctgattacaaacagaataatagggatcctttatttcttgctatttggaagtcagctatgatcttcgtcaggaatctactattcgagattgtgtcttttgcccataaggtgtgggatagtgggaatttctttttggttgagaaataatatgtccatgattgtgactcagtcgggtgctgactgaaagtcatgggaatggaaacgcagcttgtggaggagttcttagagatcacctgggtaatgtggttcttgcctgtgcttacaac

SEQ ID NO: 64804 - DNA, 1049 bp, Glycine max
  Clone ID: PAT_MRT3847_29530C.1
ggctcgagccagagtggcaccaaaaagcagattgatgattcaaagagagcttttgagtttgaaaaagaaggctctcacattgagaagggaagggaaaatgaatgaagcagaagaagaaatgcagaagggtgcagctcttgaacgtcaactgatggagatggacaaggcttcgaatgttacaatatcacggacaaataccactgataatgtcccacatacagcacatatggaagctgatttcagtagaaatctgccacttgaggaaggaagtgaagatgacgtaacagatcaagatatgtctgatccaacatatctttcattccttagggacttgggttggaatgatgacaataatgatctttctaattctccaagcaagcctttgaagaaagatgatgatcattttgtgcctgtcaatgatgcttcattaagtaagcattctacaaatatcttggttcaagcgccaagaagtaaagctgaaattcagagggaacttttgggtttaaagagaaaggcccttgctttcaagcgtgaagggaaagctgaagatgctgaggaagttcttaaaatggccaaagcattagaagcccagatggcagagatggatgctgcaaagagtaaagcacaagttgaggctactgtcacgaaagacagacttttcaatcctccagttgatgaagaaaggtacatggctgtttcagaagaggatatgcatgaccctacattgaattcaatgcttactaatctagggtggaaggatgatgaatttgaatctgtggccataaaagaagatccagttaaggaagctactgctacacacactgtggatctatctgcacatgattcttcttcaggcattcctgctacagcttcaagaagtaagggagagattcaaagagaacttttaacattgaaaaggaaagcacttgcttttatgcgcaagggagagatagaagaggctgaggaaaatttaaagcgagccaaaactctggaagaccaaatggaaagctttgggaactggaacaaggactcgtcacttaatggttcta

SEQ ID NO: 64805 - DNA, 734 bp, Glycine max
  Clone ID: PAT_MRT3847_29531C.1
cccccaccgccccccctccgcctcccctctctccctgtccaaaattccgtcctgttatcgctttctcggtgtctgtctctgtcgccccctttctctctctaaatccctttctctctctacctgactcaaattccctgattttatcgttttctcgccacaccccagattccgccgcgtgagggtgagccctccgatgtgctgacgtcacgtcaccatgggccagtgctacggcaagaccaatctcgccccggaaaatgacgccaccgcggccaccaccaacaccgagaccaccgcggttgtcgccggatcaggcgacgtcccgccctctccgctgccggccaaggacacgcccgcgcgggccagcccctggccgagtcccttcccccacggcggcggtggcgtgacgccgtcaccggcgaggggcacgccgaggaggtttttcaggcggccgttcccgccgccgtctccggcgaagcacataagggcgtctctggcaaagcggctcgggcacgcgaaggcggcgccgaaggaggggccgatcccagaggaggaggcggctgcggctgcggcggcggcggagcagacgctggataagagctttgggtatggtaagaattttggggcgaaattcgaaattgggaaagaagtggggcgagggcattttggtcatacttgctatgctaaggggaagaagggtgaactcaaagaccaggctgttgcaattaaattcattt

SEQ ID NO: 64806 - DNA, 442 bp, Glycine max
  Clone ID: PAT_MRT3847_29532C.1
ggccatttttaatggaatctttgtcaaacgtacttgtttggggaacaagaatcttgtttttattttttctgctggagaaattggattctcctcagtcattatgttttaaagtataaattgtaatgcaaatgtcttgatgacgatgttgattccctaaacaattagcaaaatatcgtctttttctttgggtagcataaagcattgtcttttagttgcaattgctatgcttattttatttcaaattggcatttctagatccaatcttgtatgttacgaaattaaaaaggttaggaatatctgattaaagaattgatgtcccttccactttcgagggaatcaaattcttcccctgagatcacttcaaagggaagataagaatcaatggctaaagtgtgcgtatctatattatgtagaccccttacttcaaaaataaatcttgcaa

SEQ ID NO: 64807 - DNA, 218 bp, Glycine max
  Clone ID: PAT_MRT3847_29533C.1
cccacgcgtccgtccacgcttccggaagaaagttttataccttacggatggtgtaatgaagaatgattaattattgcatagcgcgggcggcgaccaagatcgaagactcagacagtgacacatagaaacatcttcgctttatttcaatggcaccaagcaggtgcttttacagactcgagcaactacgccagatatgacaaaagtgaggttattttggg

SEQ ID NO: 64808 - DNA, 500 bp, Glycine max
  Clone ID: PAT_MRT3847_29534C.1
gaaaaaaaaaattttttttacaaaaaaaacccaaccattttttttttcccaaattgggcggggggtttccccctaaaggaaaaaaaaacaaggggggcaatccaacccactggtccttcccggcaaaacacaaaactttagggggatttttaaaaccccccccgttaatggggccaatttaaagggacaaatttaaacgggggggagggcgcttccccccccgggggggcggggggcccccaaaaaaggggccctactttctggctttccctggggaaaaatggcacccccccccctttctttaaattaaaccctggttggagggttttccggggaacccgcaggaaccccccccttgaaaaattatgggcgggcatttttggaaactttgggggaggcctttttttccccaaaaacttaacggggggggccccggaggagaaaatacttgggccctcagctcgaaaaaaaaccgggccagaaggacccccttttggggg

SEQ ID NO: 64809 - DNA, 189 bp, Glycine max
  Clone ID: PAT_MRT3847_29535C.1
tgggagtagccatcgtcatgtccggcatcttggaacatacgtacgccccaagaaacatcgtgtatcggcgctaggcactcaagacgtgtggggatacacactgagcaatcgatcattggtttcacgacagtattcgaatgccctcatcgcaatctaacggctcattcgtgtcggtcgtcgcactagcag

SEQ ID NO: 64810 - DNA, 605 bp, Glycine max
  Clone ID: PAT_MRT3847_29536C.1
tggtgattgtttctttttttttttttttggtgtgtgttttgttttttttttttttgtgttttttttttgggggaaaaactaaccccgtggccattaaataaccccccaccaaaaacatttcccccccccccttttaaagtttaaccccttggccccccctggtggggaaccccccaacccaaaccccttaaaggggggggggggggccaactggaaacaaaaattttggggtcccaaagggggggcaaaaaaaagggggggaaatttcccgggggaaacttgggaaaaaggggggcccatcccaccggcccaagtttcccgggttttttcaaaggggggaaaaaaaattttttttttttgttgttacatgactgtggaccaaaaagggggaaaaggggtgggccccattttaggggggccttgttttggggacccttattgggaataaccacccccccccttctcattaaaaagggggcccccccccccctttggggggggggtcgagccaattttggagtttaacaccggggggagggaaagggatagttttttttttgggggccctaaattaaatgggcgggggggggttttaaaaggggggg

SEQ ID NO: 64811 - DNA, 349 bp, Glycine max
  Clone ID: PAT_MRT3847_29537C.1
acaggttcctatgttttgtggatcttactctctagagaaagcagtatctcgcgttgcacgaggggttggtaaaacgggaaaacatctatttttaactgatattgacaatggaaaaccccctcttcttcttcagatggttcgtgattcctaagatattaaattcctgtctgctttacgctccttcaaacaccgtgttgcctatgcaaatgttcgatatgaccaacttgttggatggagtacgttatctatcatgcgtataaaggagctccctaagcgccggcatctttcaagacatgagaagtacccgcatattggtaatgtagaaacagaaaaatctacttttgttgtt

SEQ ID NO: 64812 - DNA, 454 bp, Glycine max
  Clone ID: PAT_MRT3847_29538C.1
ctctcgctggtggataacgaaatttcttaggtaattctctcttctctctctatctgatctcttcacgattatgaggttttgcttcgatcaagttcaatttcgtttttcttcttcttttcgtttgtgttttgaagaaattgaagggaaacaaattccgaaaaatgaaaaatctcgagcgatcgtttttctttgctggtttttgttttgtaattctgcgaaattggtgatttgttgaatgatttgcttgattgatgcttgggaactcatggatttggttctttcttgttagaatttctaggaatttgaagttccagtcaggcaacgctttattttctcgttcttcttctttatcttctttaggagttcgaatattgcattacctaagaccgatcttttactcaaaggagtcaacagagagaccgttttgaatttcttggttgagatctgaccttaa

SEQ ID NO: 64813 - DNA, 1097 bp, Glycine max
  Clone ID: PAT_MRT3847_29539C.1
gtttgaggcttgagggataagaagggattctcctgttgtggcgtgggagagagaatgggagaggagcagaggagcatagcaaggctacccttgttctccatacagtctccagagacagagagatcaggaatggccactcctccacttgagaccttagcatcagtcccatttcggtgggaacaagtgcccggaaaaccaaggccatccactgccctcgtgcctttctccaacccccctgacttgttgcccaagtgcttagaacttcctcccaggttgctcataccttctcccgccactgtctttaaggtttccaccaacaattgctatggttcggatacaaagctgcttggtgccatggttctcaccaaagccaatgactattgctggtttggttcttggaggaaaaaagccttcaaactcaataaaagagaggtcactggtgccagccatgtctttccttcttcctctttagacaccgacgtcccaaacatgaaacgttctgccaattctcgcctctggacaagtatttgtgaaggtttgaagcaggtagttccatggaagagtaaaaaactgaagaagaaaaatgggagtggacttaggttctaattttattttcatggacagcatcgtctggacaaaaatcaattatccactgaatctgtaccatatttttttacttaattagatgacaatgatatcctaattatagaaggggtgtcagacagaaagcctgtttcttttgttatactgctaagtgcaaaactttgggttaactagttcattcatgcttgtaacctggatggtgaaagttgtacagcttatttaattcatgctcgctagaatatttgctcttaattgaagtgaagttggtatctatctcagtttgtgcagccattatttgttagtcactgctcacacctctgtcggtgtgccccggccccccgggaatatgatatggatggacacacacatcacaagttccttaatggattgtcggtacaatatcaacgataactttatgctattaagtgagctcattaggcttaattaagtattatttttttacacatattgttcattataaagtttcttttaat

SEQ ID NO: 64814 - DNA, 1980 bp, Glycine max
  Clone ID: PAT_MRT3847_2953C.1
ctccaaggtttttccataactccaatccctcatcgcccaagtcgccatcgagtttttcacttctcaaatcaactctacgactatccaaaagtcgatgtggaatctgtatgcagagcgcgaggagtgggcaaggaacagcaattttcacagcggaatgctctcacacgtttcacttcccttgcatagtgaagaagcacccgatcgtcacgtgccccgtgtgcaacactagctggaaggagcttccggtgctctccatcaacaacaacaacaacgacaagagcgacaagagaggcttcaaggtctacaacgacgacgagcctctcatgtctccaacttcactctctcgcttcaatcctattcccgagtcagaaaacgaagacgaagaacaagaacaagataacattaacacggagtttaagggctttcatgtcaatccacttcccaatttacattcaacgacggtgattaggaggaacctccagctatcgttgctgccggaggcggccattgtcgccgccaaccgaaactacgagagttacgtcgtcgttttgaagctcaagccgccgcacgtgacgaaaacgtcgcgtcgtgctccaattgacctcatcgccgtgctcgacgtcggtggcgccatgtccggcagcaagctccgtctcatgaaaagctccatgcggcaagtgatctcgtcgctccgtccaaccgatcgtctttccatcgtcgcattctcggccggatccaagcggctgcttccgctgcggcgaatgaccggtggcggccagcggtcagcgcggcggatcgtcgacgcgctcgccgcgattgatcaaacaagagaaggaactccggtgaagaacgacgccgtgaaaaaagccgcgaaagttctcgaggatcgccgcgagaagaacgccgtggcgagcattgtagtcctctccgatctgaacgactcacgcgctggaaacaacatgcacaaaccctcgcttgtttccaccacgcggcttgcccacctcgaagtcccagtgcacgcggtgcggttgggagagtgttcccacgcgctctcagacgacgcgctggcgaatttcgtgggaggtttgttgaacgtggtggctcaggacgttaggattcagttagaggtggtgtctcgatcccgcgccgtggagatcgcgggcgtgtactcattatcgggtcgacccgtttctctcgggtcatcggattggatccgtctcggtgatctctacgcggaggaagagagagaattcctcgtggaactcaaagtgcctgcggcttccgctgggtcccaccacgttctgaccgtacgatcctcctatcggaaccccctcactcgtgagcctttgattcccgttgagcaggcaatgctcgttccgcgtccccacgccgtacgatcctcgtgcgccaagatcgaacgcttacggaacctccacgtcactgcgcgagccgtggccgaatcttcccggctcgctgaacataatgatctctctggagctcatcacttgctctcttcggctcgcgcgcttctcttgcagtcaagtaagccggaagaggagtttctccgctggctcgaagccgagcaagccgagctgcaacggcgcagacagaggcaaacacagagaaacagtcgtgttgaagagaaggtggagccgcttacgccgacttcggcttggcgggctgctgagaggttggctaaagtggctatcatgagaaagtctatgaacagagttagtgacttgcatggatttgagaatgccagattttagttgtaatttttattttaaaaatgttattgtgcatagatgaaaaggaattattaatagagaattgttttttagaaatgagcatgagacaaggagtagtactagacgactagaacctttctgggttaataaggaaaggaagcgatagtgatggcaaagtgaacccacatacatgtatgacttgattgggcattgtggctagctgtttcttctc

SEQ ID NO: 64815 - DNA, 402 bp, Glycine max
  Clone ID: PAT_MRT3847_29540C.1
aaaccccaggcctaattttacattttgggggtatttttttgaaattggggataaaaaacatggtttagccccaaaaaaccaacccccgatttttttctgttctacaagtccaaaatacagctttttaggggaacatggaatttttccttaaaaaaaaaatctgaccccacttcaccgggggttattgggttttaaaatcttttgggggcggggtggggggggcttttgttttggcctatatcacctcaggggccccaaaaaaaattgggtacttggctctggaagtttccaaccaaaccccctgaaccttatttggtccaaactcgggtactccagggaagggggtttttctaaaaaccaaaaaggcatgtggcccccggtcaaaacaaaatacaaatcccc

SEQ ID NO: 64816 - DNA, 191 bp, Glycine max
  unsure (1)..(191): unsure at all n locations
  Clone ID: PAT_MRT3847_29541C.1
tcctggctggcttgntctccggttgcgcttctctcttctcgcgtggctctcgtgggcctcngtctcctccttccctgcgggcttcttcgtngtctgcttgtcgngtttgtggcggtgtgtttggttccttggtgtttggggtgctgtttgtggcttgtcntgtgtgtggntttcctgtttgccgtccgtgt

SEQ ID NO: 64817 - DNA, 170 bp, Glycine max
  Clone ID: PAT_MRT3847_29542C.1
cccagttacattcacaccatggattgcatggtacttatcgaacgtgctcgtatacaggaccgcattgagcgcactactgatagggatcgaggtgggcctggaccatggctaccttctggtgcgcccagttgtgatagcctggcctgtgaggaacaccgagatcgccgggc

SEQ ID NO: 64818 - DNA, 566 bp, Glycine max
  Clone ID: PAT_MRT3847_29543C.1
gcgaatcaggttgagatattcatagatagaaatagagaagaagaaatggatcctattacagcacacggtcattctcttccccctcctttccacgcaggaagagatctccacctccaccagcaacaacaccagttccactccttacaagaagacgagcagagcggaagcagcggaggcctaaacctcgcacacaaaagggaacacgaagaaaacaacaacaacaacagcagcgatggcaaagaaggtggaggtgctggctccggcgaaaccgaaatttcaagaagacctcgcggaagacccgccggattccaagagcaagcccaaaccccccatcatcatcacgcgcgacagcgccaacgccctcaaaacccacgtcatggaagtcgccgacggctgcgacatcgtcgatagcgtctccgccttcgcccgccgccgccagagaggggttcgcatcatgagcggcaccggaacggtcaccaatcgtcaccctgaggcaaccggcttcttccggcgccggcgtcactctccacggaaggttggagatcttagccgtcgccggtgcatac

SEQ ID NO: 64819 - DNA, 359 bp, Glycine max
  Clone ID: PAT_MRT3847_29544C.1
tctacgcgtttgaccacgccaccggaaattttgagaaaccgtgatcactggttgtcgcaccttaaaaccggaaacaaaagcaatcgtacctttgtttcaagaatcttccaatttctgtctactctatggtgtacgaatcttcaagggaaagaaaatcactctatgtgctggccacagacttcgcgaaatattttcttttccactttttgagtatttgctgaacacacttctttttgatataggacttcgtgttagataaaaacatatatctgtttataacttagatacctgttaaatttcaagcttaagactggtgaaaatttgtaataatgaacccacccttctttttggtataggac

SEQ ID NO: 64820 - DNA, 418 bp, Glycine max
  Clone ID: PAT_MRT3847_29545C.1
atacattagtaacgggcgccagcgtgctgtaaataacccttttcagacatcaagatgaccgctactaggtcatgcatagaggtgctgggagcgtgtgcattcggatgcttgagcatataaactggcttcaagccttatctggagaaagctcaaaaccatatcgcgctctaccaatctgacccttttcaagaagaatcatcttcagctttctgcagaacgcccttaataaacacacacactctgatcggcttaagaaaaatggaaagaaacctcgttgccccaaacttgtgacggtaattaactaggtttgtattgttcaactttatttatcgttctttgaatttgctcacataataatatcatgcatgtaccttgaggctagtgtaggcgttgatgatatcatcctgagttggtatac

SEQ ID NO: 64821 - DNA, 409 bp, Glycine max
  Clone ID: PAT_MRT3847_29546C.1
tgaattcggctcgagacggctgcgagaagacgcagaaggggaggaaaattcaattattaaaactgaaaacaaggatctaaaatgtggtcgaccctctcaaattattattcaggattatgatgatgatgatgaatggccagaggaagattctgatatagggggatatggtggaacaactcatcccatggtgaatgaagatgacatatctttcagtgatcttgaggatgatgattatggcattaaacccgttagttccagtacaggttcaaaggtgatatgaaacttcaaacagacacgattgtcgtaattttaggatcagtagatcctcactcatcaccaagaacaatgaaaagattgcctgatgttgggaataacaaaagtgcttgtgtctggagtattcttttgtata

SEQ ID NO: 64822 - DNA, 561 bp, Glycine max
  Clone ID: PAT_MRT3847_29547C.1
gagcaattgaagtgatgaagacaaggcgtaatcggagaagaaactcgactcaaattagcggagggtcgtcctcagccaaatccaagatacatcctaggtgtgactgctaatcaacacgtgcagatactccttgcgcctggcgttcctcttcgacctaattcccaccccactcaacgactgtgccgagcccgcctgcgccctctctgacccacacaagaagaacggttccaataccaaccccgtcgattcctctttcttgttcattgacaaggatcgggacgccaaacatgcccgccagggttcttgactgctcgccggcggattcaaggtcgaaaggtctatacttttgggttaggcgatgccgtattcaaaattcaaccggatgctttggcagaccgtgaaggttgttgctgaggctactccctcttcggagggagaatgggatgaataggctgcattcttcacattccttatagccctgggaggtggaattgtataagacaggcactgctttctaatattacaacaagtagcaagcggccttgagactctaacatgggg

SEQ ID NO: 64823 - DNA, 237 bp, Glycine max
  Clone ID: PAT_MRT3847_29548C.1
ggcggctcgagcgaaaagccaaaaattttatgagaacagactccatatacagaaagaggaagggcggtacccaaatcaggcgcggagctgccagggaggcaagaaacaaaccacaggagacagtcagtgcaaacgacactgaaaaactgattggccaaccactagaagaatccagcatacccaatcatgaaaaacccacaaacggttattccggagacacagaaggggaaccaaatg

SEQ ID NO: 64824 - DNA, 618 bp, Glycine max
  Clone ID: PAT_MRT3847_29549C.1
gctcagaaattggaacttcaactataagaaacatcaaatacaaagtcaccaaaaatatatattattccatacaatacaatttccataatcccataaaaaaatgccagattaagataagtaatttgatgcaaagagccttaatcttccctcagcattttgtttttttgttaattgagaaacaaggcacatttttctacttttactcgtcttactctgcaaaatttagtgaagacaaacggatttctttagtaaccataagcatagaattccatgacctctagattgatgaataaaattaattttgaaatctcatttgtgagctaagatgtgacactatcttcagtccttgacttcttacttttaggttcttcatcgtcttcctgattgagagctccattaatagcgtcaggacccaaaagagagacatgtttgctagtaatttgacgtccagcccttagttttggaccccagtgtctttcaggatttggaagaaatcgagcaaccttctttgcttgtgccttactaagagatgctacagctcgagcaaaattagcctgaagagcaggttccttttgcaagtataatacttcctgggtgatctgctggctgaggctttac

SEQ ID NO: 64825 - DNA, 1257 bp, Glycine max
  Clone ID: PAT_MRT3847_2954C.1
aattcggctcgagctcgagccgaatcggctcgagacggctgcgagaagacgacagaagagactatcagcatgcccctgctgagccagaaaaacctattatagtttatactcgtaggtcctattccaggaaacaatgttcagacagcaatcttgttgtggttcctgaaaagccttttgtttgtgcagatgagaattctccggctgagcttgtgttgaactttgctgagctggattctgttccctcagaaatgcacctaaataagatttttaggcgatttggacctctaaatgaatctgaaacagaagttgatagagggagcagccgggctagagtggtttttaagaagtgtactgatgcagaggttgctttcagtaatgctaaaaacttcaacatatttggatcagttcttgtaaattacaagcttaaccatactccaagtacattgttcaaagcttcatctcttgccacaactcaagaccaggagaacggagatgcatgttgatctctctaattctgaacttaatatgatctaatcgttggtagtcataattattttagtatcactagaatgtttttaaggaagcatgtcagccaacccacaatctagaacagtgaagataaggaggaggatgtatcaaacattcagctttcaatctcaccacttcaagacaaaaggaaatgattttgcacttttgcagcaaacatctgagactactaaagaaagaaatatggaagaaaacaagggtattacttacttgagcaaatgtgcttagtgatttttagctatcacaataccaatgtatcctttgttagctctatttacttagatatatgtgtcattacaaaatgaaagttttcagtctgggagcagtagcattaaaagcattagttagatccatttggacattcaattgtatattggctttaaaatgttgataagtaaacggtcctgtttctttggtttagctagtttggggcctcctaatttaattgtcacagtgaactatagagttgaaaatactgaaacttcggtttttgtaagattttcctgtttgttagtgtttgcactgtgcatcttttgtttgatttggcacaattttgacatgtacttcaaatgtgattctttctagcaccaaccccatatgataagaacaattgtcagattctatcgtggaaaacacaggaatttgatgagtgagattctgagtaattgtttatgtaattttcttctgtttgaaaaaattattcattgtaat

SEQ ID NO: 64826 - DNA, 323 bp, Glycine max
  unsure (1)..(323): unsure at all n locations
  Clone ID: PAT_MRT3847_29550C.1
tcnatgcacgcgtacgtaagctcggaattcggctcgagagtaaacccaagcccatgaccactaacaggagccctatcagctcttctactcacatccggcttagtaatatgattccattacaactccacaattctcctatcattaggcctcctgacaaacatcctaactatatatcaatgatgacgagatatcatccgtgaaggaacataccaaggccaccacacccctattgtacaaaaaggcctccgatacggaataatcctgtttattgtctccgaagtattcttctttgccggatttttctgagcattttatcattccag

SEQ ID NO: 64827 - DNA, 414 bp, Glycine max
  Clone ID: PAT_MRT3847_29551C.1
ccacgcgtccgtacggctgcgagaagacgacagaaggggattttgtgtttaattaatctaataaaataacccaaatttcgaatggggtaatccttccgagttctgagaatgagatgttgctaaatgtttcagatgttgtcgacaagtatgaggttcaacttattagggcactacgaacatactctgggcattgaaaactggtttgtccctcgaacattttccgcaccatatggtcccacattcttagatgcctaatcattggaaaaggctactttggctctacttgatgaattgtatggctgggatttttttccctttgcttgtagaatcctctcaaaatttatttaaccattgtgtactcatttagaaaaaaaaaaaaaaaaaaaaaaaaaaaaaagcggccgctctagagga

SEQ ID NO: 64828 - DNA, 279 bp, Glycine max
  Clone ID: PAT_MRT3847_29552C.1
cgattctttgaagtgtattcttcgagaatcacacggctcgttcctagcacaccgctgttaagttcgcaggaagaaaggttcctctcatgcagcttaccaccaaagctgaacataagtttgccccaactactgttggtgtgcagaacccacaccgttattgacctggtaccgctgctcttactgcgactaagcaatacctgaagagtacccgccttttgctgcggcagctgcccttacagaggctggaccgtgaaattgctcttgactttaagactgatc

SEQ ID NO: 64829 - DNA, 553 bp, Glycine max
  Clone ID: PAT_MRT3847_29553C.1
ccacgcgtccggctatgtggtggtaaagcttcagaaggggtttttgttggtgctttcctttccatgtgttcaacagcagaggtcttgaagtttttgatggagaaaaacaccactaatgctcttgatggacaagtcacaattgggaccctgattttgcaggattgtgctgtaaggattgctctttgcattggttacagatctgggaggagcctcaagggggtttcaaggagagagatcaatgaccaagctgctggtgacgataattgcattcctctctggactgtctatattgcctagaacttgccttacgtgggtgcttaatctgatgataagcctctcttcataaactatagagctctatcaatcggcatcaggtgcgttatgcttgctatgatcctggtgtagcgataaaactggactaagtctataactacgttcctttgctgctggagtgatgattgcaaacactgatttggctcaccatacactagagcaaattgaacctattggcagactttttgctgatcttttccttggcagagttggaatgctg

SEQ ID NO: 64830 - DNA, 1327 bp, Glycine max
  Clone ID: PAT_MRT3847_29554C.1
cccgcgtccggcccggctgagaaaatagcgacgcggaagcacgctcgtcttcacgatccggcgcggcgtgtcctgcgattccgctctccgacgagtcggcgcagggtaaagaatcgcgcgattcgtctggaaatcgagattctagcacgattcatcccagatatagagattcaaccacgattctggaacaaaaacgaaacaacctccgattcgtatcggtagcagctggaatcgtatcgaatcgtgcgatacgtatcgtgaatcgtacgatactaactaccgtgctaccgggtgctttgctcttcaattctgcagaaattcagattggtcaattaaattaagggctttcttttcactccaatgacgaagaagaattctaaaaagacaacaagccagttacaagagaatactgttgcagaagaggagagaccttcttctacacccaaaaaagcagttaatgaaattgatgaaatattcgctggaaaaaagaggaagaaatctgaaatggtaaacaccggaaaacctgatgaagtaactaagaagactgacaaaacgaagaagaaaaagaagaatatgaagaggaaaacctatgggtcagatgatggcaagtttgtagaccggccttctcgaccaagaaagaaacagaggatggacttaccatccttacatgtatcgttcgagcctgggactacagctattcatgttttgttgcaccagccatgaacacattgatgtggtacaattctttcactgatcggcatttcatctccattgatgagcttggcatttctctcatcccgcctgttacaaagaggttagcttgtggggattatgtcaatggtgccatgttggaaccctctaccatttactcaactgtaaggctcttctatgagtcaaaggctcagcaaggtagagctgtggtgcccttaaggtgaatgaaggggtagtcctacgcccccattcatggtagtcaatagccctctatagcaggataacggagcgcagcagccctgagttactatggaagtcgaaatcgctgagcgattttcaataaccgctgtagcggctgcaatagtggtctaaatacagcttttcgggtgctacagcgcactgccataatattagacttcaaattctatatttactccagaaacatcattgtttgggtaaaaatttacaaaaaagttacccctgttttgaccctttattcctttacacattacaagattatattttatcctatgttttgttctttctttctttaaactttccactcaattcacattttgtcaattttattttatctaatttgttaagtttttttttt

SEQ ID NO: 64831 - DNA, 373 bp, Glycine max
  Clone ID: PAT_MRT3847_29555C.1
ggaagaagacactaatatacaaaaagcttctatttttatcttaaacaagtttgttttctttgattctctgactacattttgtttgtttctttgtttctcacaatacaaaagtttaaattttgttgtgaaccttagccttctccgatgtcccactttttttggattttatgatttttcgcaagacaaaagctttaatttttttggacattctcccttcattttgttttctgagttctcgcactacaaaaaatttaaatttttttgtgttcttgagccttctacagcttgcgttgtattttgggtttatatctggatcattgggtaactttttttttgtttttttatttttcgcaacccaaaagcttaaattttt

SEQ ID NO: 64832 - DNA, 420 bp, Glycine max
  Clone ID: PAT_MRT3847_29556C.1
tttttatctcaaacaagtttgttttctttgattctctgactacattttgtttgtttctttatttctcacaatacaaaagcttaaatttttttgtgaacctcagccttctctggtgtcccactttttttgggttttatgatttttcgcaagataaaagctttaatttttttgggtgttcttcctttattttgttttctgagttctcgcactacaaaaaatttaaatatttttgtgttcttgagccttttacagcttgcgttgcattttgggtttatatctggatcattgggtaacttttttttatttttttatttttcgtaacccaaaagcttaaatttttttgggtgttctgcctttatatattttttcctttaatgctagctgaagttatttcaataggttatatttttatatttgttc

SEQ ID NO: 64833 - DNA, 286 bp, Glycine max
  Clone ID: PAT_MRT3847_29557C.1
tgagtgaccggggtgttataggtagggcttttaaatggttcccaaccttagaaaatttatttttgccaggatttatatttctttaaattcaaataatcagaggggaggtacaagggatttccactttctttggtgggttccaatttaaccgagtctcatcttgatcaaaacttcccttgtccccaaaacttataccttcaaatgcattacgttccaaacccactgagcaatgtatcttctagccatccctcccttggtcaccttctaagaacctgtattttcttca

SEQ ID NO: 64834 - DNA, 433 bp, Glycine max
  Clone ID: PAT_MRT3847_29558C.1
attaaccaaattaaagggacaggggatagcgtaacttatataaaactgggcaaagcgtttgaatcaaaaactgaagggaaaacctttttccctttgaaatcccatacaggatcactggtcaatctaaaaaaatagggggggggaaaaaactttgttccttcaccctggaattttacatgtcccaaaaaattacgtttttactccataaaaccaatttcaagccatggttttgcagggccactgaaatgaaaaacagctgcagcttcaaaattctttttgctaatttcgggggagggggggggataacctaaatcagtcacaagctttgatgaacttataggatgcccttgacccttaaatgtcataaagggggggggaagcactcctggattccacattggcatcccggacttggggttaagtttcaaccatt

SEQ ID NO: 64835 - DNA, 410 bp, Glycine max
  Clone ID: PAT_MRT3847_29559C.1
cggaattcccgggtcgactccacgcgtccgcattttcagacacgagaacttcattggagaaaaatggtggccgataattggggatacagtacacgaaggtcttttagttgcataatttgatttgaggatttgaaatcagaaacgtatcatttacttagtgagagatttatttattttatgttaatgaaatcataattcttaaatttggagttgtctgaatttaaaatttgtaatgaattgagaaattgaaatgaaggaaacaactagtagaatggtggtgaaccagtgggcaccggtggtggtaggggagttaacgataattttaaaaaaagttttataataataacaaatttcaatccaaatatattaaaaagttgatatatctatcatattttaagtagataagcaaa

SEQ ID NO: 64836 - DNA, 184 bp, Glycine max
  Clone ID: PAT_MRT3847_2955C.1
aaccgcaaggtttttcaatggctgtgcttcccctacatcatttctggtaatggccgggatggttgtcacccaacacgactggactgtcaccaatgacaaaattgctgctgacctcaaagagcatgagatcaagccggtggcgccagataaacaccaggatgagaaaaccgtgggtcacttgaac

SEQ ID NO: 64837 - DNA, 438 bp, Glycine max
  unsure (1)..(438): unsure at all n locations
  Clone ID: PAT_MRT3847_29560C.1
ttccttngnnggaagattccggttctcaaaanaanataaaaaactctctancgacaaaacatgaatagacaatcataattactaaacaaaaactcaaaaagtggtccttttgcttttcctaccaaatgatgcagggggcataactatcacgtgtccttttttaacgccggggggggggggagcaaacctacaaaatttataaaaaaataatttaaactgagggggtgcgggaggaacttacaaaaatgaccccaccctggttgtccagtacttaaatgaatcaacgaggaaattacattctactggtcccttttaattgtagtgaagagaaaaatctagttgggcaatatcactccttgcaaaaaagcaagatgtttaatgcgtgactaagaaaaccatcctttaaaacattggaaacaaaacaattgccaataattc

SEQ ID NO: 64838 - DNA, 345 bp, Glycine max
  Clone ID: PAT_MRT3847_29561C.1
ggacggtcttcatcctgggcatcaattacgccgatgccaattctcagaggaaggggacagatgaaacgctcgagtttgtcgaatttcgagatggcctttcctaggtgctcggctccagaacctcaatttcaagagatcgtactcttttggcgtatttgcccaggaacgatggtccgctttcgccagggctgtgcacgcttgcaagccagagcttactcttggtcctacttggcagaggctggccagatcctggcgaggaagatgctcggccacggcgaggagcacgtctaggatcaagcgttctcccatagtgctgggattgttttgctgaaagcgaaggcaaga

SEQ ID NO: 64839 - DNA, 486 bp, Glycine max
  Clone ID: PAT_MRT3847_29562C.1
gttaaaagcattttgggatttcatacaaaccttgaaggctctcctccacgaaaattgcccatcttcatttcttctccatttttcatgcttgtacttgctatggatagctaaattccccacagtgcttggggttggaatctaatgacactaaacctcttgtatcttatttgattcttaatatatagaagctcatatttctcaaccttttatcttgttttcatgctttaatgccttgtatagactaatcaaccatatcttgtgggtttctctacattaaaaagtgttgttaaacctagacccaatataagataactaaggattactcactagaaatggtgaatgaactcttagtcctcttatgatcatgagcttaatgcaaatgttgttattgattcactgagaaattaggaattgatatcaatgtttaggtttaagtcactaagaaattaggatttgataacatttatggttgaggattgattggtt

SEQ ID NO: 64840 - DNA, 694 bp, Glycine max
  unsure (1)..(694): unsure at all n locations
  Clone ID: PAT_MRT3847_29563C.1
ccgggtcggcccaagccttccgtacggctgcgagaagacgacagaaggggacaggatctgtgctttgcggtcctctgctttgtcagggttgactgctctgcagctcgataacttcatggaaccatcaacttgttatggtgttttttctcctatcgacaggtccaagaacgagcggtctggctgtttcattcgctgtcgcaagacggcttgagtgttgtggccagcaccgaggcgttatattccgaaccccttgtccgaggccgttggtcggtgaggttggggcaaaccatggcagcctacatatcgcattcgcacgctagaatgctttcgcgtgtgggattgtctacttgtcggcacgatgcaggagaaaggagaggtgatgcgctgggttgaacagtaaacgatttgagaagtcggcgtgcttcagatgcagtgtttcgggccttctttgggtatccgggccatttgacaagttgttgccaagctatgggttggcttgcaagatttttagctagctcggtgatgtttgaagcgtcgcatctgtgatggaccaagctcgattcggcgagaaatccgtagttgagatgattccccaccgtccacccgttgtcacgaaaaacgcttcacctcgaagggcctggacggcaaaaaaaaaaaaaaaaaaaaaaaaaaaanagcggcccgcttctagagg

SEQ ID NO: 64841 - DNA, 333 bp, Glycine max
  unsure (1)..(333): unsure at all n locations
  Clone ID: PAT_MRT3847_29564C.1
anttngcacgcgtacgtncanctcggncancggctcgagctggggccacgagnttgttagnaatctagctggagagnttgntcnngnaatacacaannacgccnnaagtgaagcggcncccatagcatananctcanggancnttgtgacagcacattgnngcntttcnnatgnngccataatgcagaacctgagncngtngatcntttgatngaggttnaagntctgganatgttgngtggacangtggacaaaccaaattttaaaaggactgcctatatctcacccgttctgcagctnccttcccaggnccagctgatatgctagttctgg

SEQ ID NO: 64842 - DNA, 244 bp, Glycine max
  Clone ID: PAT_MRT3847_29565C.1
acaagacataccttatagattggatcataatttgaacgtttgtgacataaattggatcaacattaacttgcaagttttgatgttttaaatgctcggagacagattttattgtatagtaatagtaattcttctcggattgcttgaggtagaagagaactttatttgtatggtaaatttttgtaggctcgatcaggattgtctctagtagaagatattaatatgcaagcggtggggaggcttggca

SEQ ID NO: 64843 - DNA, 360 bp, Glycine max
  Clone ID: PAT_MRT3847_29566C.1
aattcggctcgagcctcgaggagggagccgtttgtgaattgttggctgcatgaggagattatgacgatgatgcttgaggctgggacagactgattaataccgtctagatggataactgacccttgtttggacatcactacaccattgaaccgcagctcatgggcagatgcttctcctgagctcggatctcatgacaacgcattgaccaacgcacaataccagacatacaagacctcttcaagaaccatattacccagatccgggatcagtggaagcatgaaaaagcatgattcacgaatggataggtgcgcaaggctcaacatatgccgaacagaactaagatgttggagtactatatct

SEQ ID NO: 64844 - DNA, 143 bp, Glycine max
  Clone ID: PAT_MRT3847_29567C.1
ataggctgcgagaagacgacagaagggggcagcgctagatctatatgctcatgcaagcatcagttaattcaggagagcatctcctcgattcacgctacccctgttctgctcttcttactacctttcaaattttaaaaggtata

SEQ ID NO: 64845 - DNA, 492 bp, Glycine max
  Clone ID: PAT_MRT3847_29568C.1
caaactaattttttcaaatgtcccaccatactcgaattagtgtatattgaacgaattgaaagggatcttttgtctgcctagtcatattcagtgtcggctaggacctcaccaccgatttcatcaccaatctcaccatcgaactctccatccctcacttcttcattccctacttcactaccagaaaaatcttgcacatcgtcgaaatacactattgacaaggcaccctttcttcccacatcaacgtcaaagatgactcttttgtcatcagaccctctgatgtcctcataattcctatttgccatgccccttccttgataagattacctacatgtaaatctgactcatgggggtccaccaacgagttggcaaggtatgatgattccagataggcagaagaagatgcccatatagtggcttgaatacgctggtcgtcaccttcatctcttgaaaaataccaccccgatttaggtgataaccagccagcgcattcct

SEQ ID NO: 64846 - DNA, 298 bp, Glycine max
  Clone ID: PAT_MRT3847_29569C.1
ttttcacgcggtctacggctgcgagaagacgacagaagggggagggccttttgaatcttttctcggtggctcaacacagtgaagcgactgaccgtctgacaagcccatgtcgaagcacattaacgtcataactcacatggggacacgagatgcccttgaagtacaccctagagaaacagaaactgaagaccataataatctgagcaacccacgaaggcgactgggtatactctgcctgcacaacaagtgtttattcactatgtgaaggtctttggagctgccccaacccaacaggaca

SEQ ID NO: 64847 - DNA, 491 bp, Glycine max
  Clone ID: PAT_MRT3847_2956C.1
tttctcttttttgtaaaaacttattcccttgcatgccttgggacttacttactaataatacttatctggatgaactcggagacgggcagttccttacaggaacaaggagctcatgttccatgagggcgctgggaggggaaaacaacattgttcacagcccctacatggctactgaatattgctgaggatcctattctgtctacgttatgggacaccttataggctcgattcgagagcttaatcctagcacacgggattatgcgcttaaaaagtcctactcccttcgttgcttcccaggaggtcgctccatggggcccctacgttttcaatgattctgtatccctccttctacagcttcggtgtgtcacctgatttgtcttcagatgataactaaccggagtcctgatggggatgcctgcgaactgacttctcccatgagaagaatcccacctcctttaagtccttggctgttacatgccctagactcagag

SEQ ID NO: 64848 - DNA, 542 bp, Glycine max
  Clone ID: PAT_MRT3847_29570C.1
ctttcaaactcattcttttttccttcaaccaaggccctctcgccctatcacccccaaacattctccatttcatctccatagcttccctccccatcaaccccaaacaactcccaccaccaacaaataaaaaccacacaaacaacaccacccaaaagccaaaatggcttttcctcctaaaagtgcttatttttgcaatgatcatacgtgcttatgactatagagaaaatttacaccctcatttcatcttagtcctatattgttgccacatgtaccttggcatagaacttgtgttagcccttagtgctgccccggttcgaaccgttttagggtttgagattgaaccacaattcaacgaaccctacctttccacgtcccttcaagacttttggggtcgtaggtggaacctcatggttacccgtattctacgccccaccgtataccaccccgtataccgtattttcatacactttgtgggtccttcttgtgccatgtcaagtgccgtgttggccacgttccttgtgtccgggctcatgcatgagtta

SEQ ID NO: 64849 - DNA, 197 bp, Glycine max
  unsure (1)..(197): unsure at all n locations
  Clone ID: PAT_MRT3847_29571C.1
tctaaaaatatactcatatactcatctcaaatacctcacatacttgacgctaatttctaaaacccntacactcttaccaaaacattcatcttaatctccaaactctctctcaacatctcccccacattattataacattctacacctacacccaatccaacatattcattaacttccaataaataaccacctatatc

SEQ ID NO: 64850 - DNA, 291 bp, Glycine max
  unsure (1)..(291): unsure at all n locations
  Clone ID: PAT_MRT3847_29572C.1
tcgcangcncgcgtncgtcagctcggnnttcggctcgagcnactnancnntttggnnattctcataactcantnttncngncngancgtgatggtgatncagttctttntatcanatnnttgcngttttngctagccttggccntggcattttgaggnagattccgntgattgctngttgcnactctggaaattctttccnttttaacntttactgtacggttattctttactgttggnncngttgagttttgtnttatttcnatttgantaggaaatagganataggnnn

SEQ ID NO: 64851 - DNA, 784 bp, Glycine max
  Clone ID: PAT_MRT3847_29573C.1
atttgagtttgagattcacgtcacagcacaacagatgaaggatttgagccgcaattactggaactggacacagtagtattttttcagtgcattttagctgttaggcaaaaaagttgtcgaatggagatgattttaagggagaaggacgcaaatgagtgggtttaccgaggcgaaggagctgccaatcttgttctcgcatacaccggatcatctcctacgtttattgggaaagtgatgcgcattcgtaagtgtccaaggaatggcgcagagggtatgtgtatgaggagcccctctgctttgactgcgctcgaacgcctcctctggaaagacgttgatgaactcatttcatcttcggacaatgaaattgcatgccaattatttgcccaccacgttatgaagccattgcttggtcccaaatatgttgatgctgggatgcttgttgaggtgccaagggaatttctcgaattggttgaaaagaatgttattcgtcaacgtcctgcttggagagttgataatgctcgggtcgacatgcatcgtggttctgtgcttctcatgtctgatcattcagtcttcactcatggtaatctaggatctagcccctgcatatctgttgagataaagattcatatctgaaggaactgctatcaaaaggaggataactcgctttcaaatgcaccaagctctgaaattgcatcaaggagagatatcattgctaagtaaatacaatccacttgatctgttctctggatcaaaggaaagattttgtacagctatcaaggttctc

SEQ ID NO: 64852 - DNA, 412 bp, Glycine max
  Clone ID: PAT_MRT3847_29574C.1
ggtcgtgctcactctcttctcttctcttctctagacactcaatttccttccctcagaggaaagcattcattgttaatgtgcatcaatcacaatatcatttgatcatttaatacaaatggctgaagctggtagctctcagacagagacaacgaccaaacctcctcaacttatataccggtgtaagaaatgcagaagaattgttgcttcagtggaaaatatagtttcccatgagcacgggaaaggagaatcaagcttcaagtggaaaaagagaagcagtcaatcctgggaaacggaaaagcaatcagttgattgcacctcagtatttgttgagcccatgaaatggatgcaggcagtacacgaaggtcatgtggaggatgaacctttctgtatggcttgtattgctggtcgggta

SEQ ID NO: 64853 - DNA, 191 bp, Glycine max
  Clone ID: PAT_MRT3847_29575C.1
gttaatgcaacgatacaacatgagtgggacttgccaaacttcattatgcttacatcaaatctaaagtgcgtgctttaaaaaagtgaatctacatgggatgagatattacttgccaaagacgataatcttaatagtgttaatgtggaagacaacatctaagacgcgctgcatcactatgcactctaaagagt

SEQ ID NO: 64854 - DNA, 345 bp, Glycine max
  Clone ID: PAT_MRT3847_29576C.1
ggaagcttaagcttaaccgtaaaggcgaaaaaaacccgggaaccacacagatcgcaagatgcttccattgttacaccccatattaggaatggccattggggagaaaaaaggaattgggtacataagaaagtgaagaactgatttaactcagaaaacccaacaaaaagggcctatgattgggaatttactttgttccctcccttcctgcaaatctccaaatcaaggcctcctcaaaaaaataaacccttttacttccaagagaggtggggccaacccctatttaagcttggttggcaaaaaagggaccaacggacccagaacacgcccccctttgaacaaagggaa

SEQ ID NO: 64855 - DNA, 516 bp, Glycine max
  Clone ID: PAT_MRT3847_29577C.1
gtgtttttttttttttttttttttttttttttttttttttttttttttttttcaaaaaaaaacattggaaaagccacttttttttggttcggggacccccctccaaccaaaggggggccaaggggggtaccctaccccctgggggcgaaaaatttggccgggcgccttcagctgaccgaaatttccccacctaaaaaaagccatcactccaagggggctccctccccgcccaaaaaaccatctctgggtttttttcaaaaaatctgccgttcaaacattttaaaactctctcaccggtgggggggaatggggttcccccgcccttcggatcttgcatttggaattcgcattcttctacgcgggggattctttggtggtgccaatcccgggtttcaacaacactaggggggctaaaactaccgcaaatgcgcttgatgcgcctggccatttttttacatgaagaaaaaccccttcccctgctgctgaaatgttgtccaatcagcgcataaagtgggg

SEQ ID NO: 64856 - DNA, 258 bp, Glycine max
  Clone ID: PAT_MRT3847_29578C.1
gttctagatcgcgatctagaactagccaattcactctttttcttctcgccctctgccgtggaaggaagttgtaacaatggttgttctaccaacggcggacctaatggccccaaatgcaccacatgtaccaggtggtaatgtaaggtggtggattcaagggtcaagggttaccgggggggcaaccggtttttcgggccccgtggcaacctgaaaggggttggagaccacctggtggttaaggagcctcttgagaccaaa

SEQ ID NO: 64857 - DNA, 330 bp, Glycine max
  Clone ID: PAT_MRT3847_29579C.1
tccgcccacgcgtccgcctagttgaagaaattctttctatggttgcacaagacatgggtgaggaatggcttgattgtgttgatgaggcagcttcctttgaggaagtgtctttaagtgcaacacttaatggtgttgagggtctggactatatggaaagaactcctcttgccacatctgagggctttcctcatgtgctttcacgcaaaaatggcgacaatggcaaaaggagatctgcttctggggatggtgaatagatgacattgattccgggaaccagtgttgaagaggctgacaacaagctcatccgggaacttgagaaatgtggtccta

SEQ ID NO: 64858 - DNA, 1216 bp, Glycine max
  Clone ID: PAT_MRT3847_2957C.1
gatcgattccttatgcatttttagtcccttatcttccgtgttactcaaggcaacttcagtatccactaactatccctggttgcaactagtgactcatcaacagcatattctagccatgtcaagtcctcagtgttttgagaatccaccaaaccttaactcggacatccatggagcaggaactgtccaagaacttggaggacttaattcctacgtcactggatcttccgattccaaattggcactcatcctggtttctgatgtttttgggtatgaagcaccaaaactaaggaaacttgcggacaaagtagcagcagctggattcttggttgttgttcctgatcttctgtatggtgattacattgttgaccttaataatcctcaatttgatcgagagtcatggcgaaaggctcatggaaaggataaggcatgtgaagacaccaaacctctaatttctgctctaaagagtaaaggtgttaaatccgtaggggctgcaggtttttgctggggaggggttgtggttgtgaaacttgcaatttccactgatattcaggctgcagttattctgcatcctggtctaatcgcagataatgaatttaatgaggtcaggattcctattgctatactgggagctgaaatcgaccatcttttcccaccagaaaggttgaagcaaattgaagaaatgttgtctgtaaaagctgagtttgagagctttgtgaaactataccctggtgttagtcatggatggactttgcggtacaatgatgatgatgaagcaactgttaagagtgcaaaagaggcgcatcaagacatgttgaattggtttatcaagcacgtcaagtgaaaattgttttcaccaccagaagatgcctgtcattgatttgcagttaatttttttagtagcaaataaatattacttattattgaaaagggccaatttcatgtacaagatgtgtccaaagcggcccaaccaccatgatacaaaaattataatatcccaccagaatatcactagcatttctcttataataacaatactacaactgcctaagaaaaagatacagcatagacaaaagctgcactatgcggcttaactcctagccttcatgttattggtgtgacgtatccattgccaccgaatttactaatgattaattctcgttgaaaaatctgatgatgatcacttttaatgaaaaaaatatgctattttttcttccat

SEQ ID NO: 64859 - DNA, 371 bp, Glycine max
  Clone ID: PAT_MRT3847_29580C.1
tgttgcgtgggtgtgtaacaagtggattgtactatgttaattagctgcaaagatatgaaccttaacaagtgttgttggagagcataacttctagtgatggtaggctgatgagggaagcatattgctggtgtgatatagagcaggggaatatcatgtggtacaacaacccatagtgtcacaggaggaaattctgtcttgtagtgcaagagacttcataactacaatggcgagataaaataggaagcctcatgctactgcaatgcatgtgtgagctataagaaactataattgatagttgaataggttctgactgcaacataggtggcgcaatgcttttggatgatacttatcataccaatcgtgtaaatgca

SEQ ID NO: 64860 - DNA, 176 bp, Glycine max
  unsure (1)..(176): unsure at all n locations
  Clone ID: PAT_MRT3847_29581C.1
gannnnnnnnnnnnaaacatggaatcccatccattttgcatattttcaatttttcatatccaaatacaagtaaattttaaaggccctcccaaaaacatttgaaatgaccccctttcatgtttttggatcttcacacactaacatactattttaccaccgacccctgggccgacccc

SEQ ID NO: 64861 - DNA, 515 bp, Glycine max
  Clone ID: PAT_MRT3847_29582C.1
gggggggggacccaaaagggaaccccctttaagggccaaaaccggaaaaaaaaaacggaacttcacttaaaattggaaaaaaaacatgccccaaaaaaaaaagggggaaaaaaaaaaaaagttttgccaagctttacagggggaaaaaaaaattcaaaaattaaaaaactttcataaaacaaacaaaaaagggggcatttctccagaaaggccctttaaaactacgggaaccaattttcctgagtatatcccgcaattgggggttcccccccaataaaatcccaaaaaaggaacccacccttgaaaaataaaaacaaacaaaattcccaaaccttacaaaaaaacccttggaaaggaataaacttcggaaaaaatcaaaaaaaccccgtttttttaaaccaattccccttgatcaactgggcccaaaaaaaatccaaaaaaaaaatccccaaagaaaaaatcccccaattaggtgggcaactaaatacatgggaggtcccaaaaaaaccccaaaa

SEQ ID NO: 64862 - DNA, 633 bp, Glycine max
  unsure (1)..(633): unsure at all n locations
  Clone ID: PAT_MRT3847_29583C.1
ggtgtacaacatcttggtggaaaaaacaaagtctgtccctggggctaaggtagaaaataacaagttttgcttgtccgtgcactttcgctgtgttgacgaaaagagttgggtgtcattggctgaacaagtgagcttcgtgctcaacgagtacccaaaacttaagctaactcaagggagaaaagtgcttgagattcgaccaaccataaaatgggacaagggcaaggctcttgaattcttgctagagtcactgggatatgctaattctgataatgtatttccaatctatattggggatgatcgaactgatgaagatgcttttaaggttttacggaggaggggtcatggggttgggattctagtttctaaaattacaaaagaaactgatgctttctacacttagttaagggaaattgacaccagcccataatttggtcaaggggtggtgccaaattatatcccttnttcttgttcgaaataggaaatagtgtgttccataatttaaagttttagggaagaacaaagttgaaatagctagctaggttctctctctattttctttttctaatgtaatctattccatcacacgtttgcatgcgcatgcggatagtagaagaattgatgtnntatgccgca

SEQ ID NO: 64863 - DNA, 368 bp, Glycine max
  Clone ID: PAT_MRT3847_29584C.1
gaagatgcttttaaggttttacggaggaggggtcatggggttgggattctagtttctaaaattccaaaagaaactgatgcttcctacactttgcaagatccaacagaggttgggcagtttttgaggcatttggtggagtggaaaagaacgagttcccaataccacaagttgtagattcttagatgaattcagggaaattgacaccagcccataatttggtcaaggggtggttccaattatatcccttttcttgttcgaaataggaaatagtgtgttccataatttaaagttttagggaggaacaaagttgaaatagctagctaggttctctctctattttctttttctaatgtaatctattccatcac

SEQ ID NO: 64864 - DNA, 416 bp, Glycine max
  Clone ID: PAT_MRT3847_29585C.1
gagaccaaacttgggttttccttttttctttggctcccccccaacagggggacaaaaaactctacctttttgggtaaaagatccccaaaggacaaactccccctttttaataaaaagctaaaaggcgggccttttggggttttatgccaccaaaatgggggaaatccaaccgggaaaaaaaggaataatggaagataatacccgccctacgggcccctacattggggggtttacatcccggaaatcttaggggcaatttaaagggtccagataacccaaattttttccaatttctttggggaacctgggtaaaccccttgatggccctgcataggggggggggtgatttaaatccaaccaggggtccccctaaagctttttgatttcccaagggcaaaattggctaactaggcccc

SEQ ID NO: 64865 - DNA, 1455 bp, Glycine max
  Clone ID: PAT_MRT3847_29586C.1
ggctgcgagaagacgacagaagggggacaacaagcagcccactctctctatctcttctctctgtgtgtgtgttatgtgtgaatacacatgaaaatgcagaagttcaaattgcttctagtgctattcttcgctacttgccactcctctttgtccatcacagatggtttgttgccaaatggagacttcgaggttggtccaaaaccatcagagttgaaaggttcaatagtgactacccccaatggcattccacattggacaatctcaggaatggttgaatacataaaatcagggcagaagcaaggtgacatggtgctggttgtgcctcatggtacctatgctgttaggcttggcaacgaagcttccattaagcagaagatccaagttgtgaagggcatgttctactcattaacattcagtgcctcacgcacttgtgctcaagaggagaagctcaacgtgtcagtggtgccatccaatgagaagagtgattggggagtgtttcccattcaaactatgtatggaagcaatggttgtgactcttatgcatgtgggttccgagcagattaccctcgagtggaaattgtgatccataaccctggcgtggatgaggatcctgcttgtggtcctcttattgattctgttgccttgaaactcttgcactcacccaaacgaactagagacaatttgttgaagaatggaaactttgaagagggtccatatgtgtttcccaaagaatcttggggggttctaattccacctcacatagaggatgcctacagtcctttgccaggatggatggttgagtctctcaaggctgtgaagtatattgattctgatcactttgctgtgcctgaaggaaaaagagctattgagcttgtagcagggaaagagagtgcaattgcacaagtggtcatcacaataattggtaaggtttatgaccttacttttgttgtgggcgatgccaacaattcatgtgaaggttccatggtggtagaagcatttgctggtaaagatactatccaagtgcaatatcaatctaagggtaaaggagggttcattagaggcaagcttcgattcaaggctatgtcaacacgcacacgcatcagattcctaagcacattttacaccaccaagagtgacaacactggttcactttgtggacccataattgatgatataagattgcttagtgtgcgttattcttaatatgcttgatcaaattgcacatagctagtgcactcggaagtcaaaacacacgctacaatccttattcaaaatacaataatagtcttttgcactacatctagtgtacacctctgttgaagactaagagtagaatgttcatgatgataattgatacatctaaatcctaattaaaaggggggaagaagagattgagggagttgtgaaagttgagaattatgaaaacatatatttcttcttataatatctatctat

SEQ ID NO: 64866 - DNA, 262 bp, Glycine max
  Clone ID: PAT_MRT3847_29587C.1
gtcggacgtccgtatacctcgtggatgctatctacgctgagccttggattgacaaagcaggtgtcgagtgatactggctcttggcatactacttaactcaatgcctggggctcccgtaacattgccacacaacttcaatgtaggctccggtcacatatagaacgttgtgcactaatcttacacagtcatgggaagtgcataacctaaacctgttccggagactggtagaagctcatatacctaatctcgctcatgattcact

SEQ ID NO: 64867 - DNA, 611 bp, Glycine max
  unsure (1)..(611): unsure at all n locations
  Clone ID: PAT_MRT3847_29588C.1
tcggaaattaattacttacttgtgtccaatcacttgtttctatttgcatctatataactccttgaccttcgcagggtccccatatcgaccgctgccaaaagcacagcttctaatgaactcagttagactttgttccaagagaaagaccaatcaaagcatcatgactaaagttgtgtgtgcacttcttcttatttttgtcatggcttttgtgactcaagttgcttatggtggcggcgaaggatcacttacgccccaagaatgtccgggggcttgcgattatcgttgttcaaaggctgatcggactaagaaggcgtgcctgaacttctgtaacatgtgctgtgcgaaatgtctgtgcgttccatcaggaacctatggtcacaaggaagaatgtccatgttataacaattggaaaacaaagagaggaacacccaagtgcccctaattcaacttcattattgatattcatcaataaaatgtgtattcttgtggcgtgctatggtatatgcatgccctccgtaaataaatgtgtctgcgcttatcttattttcaaaaaaaaaaaataaaaaaaaaaaaaaannnnannnnaannnnnnnannnnaaaaaaaaaaaa

SEQ ID NO: 64868 - DNA, 248 bp, Glycine max
  Clone ID: PAT_MRT3847_29589C.1
tctgcgagaagacgacagaagggggaaggaaggatgggggatgctgataatatgataaaagaaatgcgagaaaaagggatgatgcctgatgctgttactcataacatattgattaatgggtattgcagatgtggggatgcaaagagagcctttgggcttcttgatgaaatggtggaaaaggattcagccaacactggtcacatatacatcacttatatatgttctgggtaaaaggaatagaatgaaag

SEQ ID NO: 64869 - DNA, 2091 bp, Glycine max
  Clone ID: PAT_MRT3847_2958C.1
ccacgcgcgcgcgcaattccttcttgcaacccgcgagacggtacgagatcttgttgcttgactcgtgacgctataataataagatggccgattgtggtgctgaaagcgaaaggaaagttacgatacgaaacaatcatggcgaaaatctcgtcgggatcttacataacgcggcttcaatttcgcttgttatcgtctgccatggcttccaatcttccaaggaaaggattcccatggtgtaccttgccgctgctctgggaaaagatggatttagttcttttcgcttcgactttgcaggaaacggggaaagtgaaggttcatttcagtatggtaactactacagagaggttgaagatctgcgagctgtagttcaacacttccgtgagcagaaatacgtaattacagcaattgttggtcacagtaaagggggtaatgtggtgctcttatatgcctcaaaatataaggatattcatattgtagtcaatatatctggccggttcaatctagcgagaggcatggaaggtcgtttgggcaaaaaatttatacaaaggatcaaacaagatggatatatagatgttaagaataaaagagggaagattatgtaccgtgttactgaagaaagtttgatggaccgcctatctactataacccatcttgcctgcttattgattccccaagattgcagtgtgttgacaattcatggatccatggatgaaattgtacctgcagaagatgctttagagttcgctaagttcatatctaatcatgaattgtgcttcatagaaggagctgatcatgaatatacttatcatcaagatgagttgaccagcttagttttggaattcatcaagattcatattgacaaagacaaagatacatcgaagcaggcacgatttggaagagtacataaacctattcattcccggttgtagtttgtgcaaatatgtgtagatccagtatttcttttgaaaccatctttcttacaaataaagacacagccttcataaatagatcaccaagaaaagatggacgaacctcatcccatttctaacattccaagtgcccacctgagagccgataattattagcatttgcaagggtgagttgaccagcgtcgttgcggagttcctcacaattaaacctcaatagtacccatctgacaagtattgttgcatcatcatagccaccgccaaaagaatattgacaatgctaagtttctcacaattaaacttcaatggtacccatctgacaagtattgttgcatcatcatagccacatgccgggttgtcaatctgaatttaaactcttatgactactgttaaaagtttatgctcttgcagttactacagatgagtgatgaaatgaataattggacataacaagcatgaacctggctcatctggtggatatgatatatgaagcactgctgattgaatgttggttatcacaggtgagtagccacggctagccagtaattaattaaaaagggtataaatcaaaacaattggtctacgtttgtaattttgcagatttcagactatacagactgccgtgtaaaaatttacttatggccataacattatgtccattagtgcatatgatatatgaagcaccgctgattgaatgttggttattacagttgagtggccgcggctagcaagtaattagttaaagggcatctatcaaaacaattggtcttggaggttgactactacgttgtaattacaaattacaaactacatactgccgtgtacaaatttacttatggccataacattatgtacatttcctctatgtccaccataattctttcctcatcattacctctatattcttttgggataatcatgaacacaacccaatatcatatttcagaattgagttcagaaaagactatgagagtgcgactatggtccaggttcaaacttgcttttggtatgcttcttctgctcaatcccactattaggaaagagactaggaaatggacggggagttagggacactttagcgctccactttggtcagtggtcaccaaaagaaattagcctctgtacttttgatctaataataattacatcaaaattttctttcaaa

SEQ ID NO: 64870 - DNA, 263 bp, Glycine max
  unsure (1)..(263): unsure at all n locations
  Clone ID: PAT_MRT3847_29590C.1
gtacgtacgctggtaccctagagcgcgcgctttttnntttttttttttttttttttttttaaccaccctcttttgtctttttntaacagcacgggggcctggtgggacccccggataattaccgaccgctacctgcgggccaaccatttttatatatagtgagtttaaagagagctgggagaaagcaagtcatagttctgtgcggaataaaaatgttatcacaataccacaccacacaccatccggacgcataaacataaaag

SEQ ID NO: 64871 - DNA, 422 bp, Glycine max
  Clone ID: PAT_MRT3847_29591C.1
tttggggggccgggaaatccacccaggggatgttcttggttccggtcctttacgacgggttggccaaccacaacctggttgggccttttttttttggcggggggggcccccagttggaccaggccatttccaggaatggccggagcctttacctttttgggcagactgatggtggggggccgaatcctttggggatggcgaatggcggggtggggaagcctagggtggttgttgttgagcccatttggcagtttatggaaagggcgcggtccccattggggaggaggaccaggaccttcttccttcctgggggggtaaacagaattggggaatggccacaaatttccaggatgggggttccccatccagccagccttgaggtccttgttggggaggttgaaggacaacttaatcgccatgct

SEQ ID NO: 64872 - DNA, 1077 bp, Glycine max
  unsure (1)..(1077): unsure at all n locations
  Clone ID: PAT_MRT3847_29592C.1
ggctcgagctcgagccgctcttcccatccttcgttcctcctgtcctggctcccctttcccccaatgctgtaattctctttctcttcccacatttttcttctattttttaaacctaatcacccttctctttctcttcctcattcttattccattcaactctcattcgtaacacaaccaacccttttcgccctcttaattttccctatgaattctctctccccctctctctctccacaccccattcagcctgcttcattcttcactcctttttcttcatccggtttcattgcaattttctattgaatgcatctgatttgtgtttgcaataaagaccacataccttgagttcacagggttttttggggtggaggggtgcctgtgttttggagggtggtgttatcttattcaatggttgttggattggtttgtctgaggattttgtattggtgaactgtttcagtggtttggagatttggggtttggagtttgaaggtgttggtgttggtttttgccgtgattttgttgagtcatgaatcgtagagtgaggaggaaggtggcgaggaagaacaaagggaatgtggtgcagtctagtttccctgaagatcaagatgaggttttggatttggaaccccaaaggcaagggtttgttgattggaagtgcttgcccgatgatacagtaattcagctgttgtcatgtctgagttatcaagatcgagctagcttgtcgtcaacttgtaagacatgggaggtctcttggcagcttcctgtgtttgtngagttctcttgatcttcgttcgcacagttttgatgccggcatggctccatcggttgctcccaggtgtgtgcatcctcagaagctcagggttcgccgggcagagtctgctgatgccataattaatcttcgagcttagaactggcggtgattgagcggtgactattgcagaagattactgatgcaactctctcagtgattgtggctcggcatgagttacttgagagccttcagcttggaccggatttctgtgagagaataagtagtgatgctattaaagcaatagctcattgctgtcctaaatg

SEQ ID NO: 64873 - DNA, 545 bp, Glycine max
  Clone ID: PAT_MRT3847_29593C.1
ctttttcagttttgttcttactatactgtaatattaatgtcctttacatctcaggcctttacttttactttactttctaggttgttaagctctgacaatttcagtacaagacgttgcaggcagaatttgttcactgtttcttttttctatcatgataaacagtttttctaacgcggaagctgtatttttctttttttaacattcttaacaaatactattttctactgttcctctttcaagatctccatgattatgtactagtatacaactatagaatcatattctttttactattctttgttgtcaatgatctaactttccatattagtgaatggtgtttcatttgcattactgcaaagtataatatattctgatttgaaaaagaaacacgatctcactcattatttgcgagctgatttatcgtggttcatttaaatgtgtaatcatacttaagaattagtcatagttgtaaattttgtaccaattagcttcttaaagttattattcaacagtcctttactggctattgtatttttaagagaatg

SEQ ID NO: 64874 - DNA, 482 bp, Glycine max
  Clone ID: PAT_MRT3847_29594C.1
cccccccctccctttttgggggggaaaaaaaaaccctggggggttagggggggcgaaaaaaaaaaaggtccccccggaaaaacggggttttttttcccaaggggaggtttggttttgggggggcccaaccaaaaacctttggaaagaaacaaaatttttttaaggcaaaagggggcccccctaagaaccccccgggggggttccccatttaaggcccgggaaaattttttaaacctggaaaaaaaaaaaaactccccccgggagaaagatggccccttcgggcctaaggaggccacccctcttaaaaagggggcctttaagggggccctggcccgggcccagggggaaaaaccctttgccaggaaaaaaaccaaaggccctgggaaagggaaaaaacccttccccccagccagaaaaaaggccgacaaaacctttttaaaaaacaaccccaaaggggttctaaccattggggggccaaaatt

SEQ ID NO: 64875 - DNA, 1147 bp, Glycine max
  Clone ID: PAT_MRT3847_29595C.1
ccacgcgtccgcagagaagctgagccatatcatatcagatcctgcttcttcttcctttccctttttctcactcccactcttcaaacttgcctcactctcaccaacacccaacaaacaaagttacttcattgcaaactctatattagtctttactctatttgtttattccaccactgaacaaaaccagagaaagaaagaaacaaccaccccacgaagcaagtaaagcaaagcaacccattacgattcccgcgtaaagcaccgattttgacactgaatcccgagacccagatggcgcaatagcccgatacgtaattctcctcaaatgggtcactccaattcttcctcctcctcctcgtcaccttccaagcgcggccacgcgctgcggcaatggcggctcctggacctcgtctccggtgtgttcttcttcctggtgctgctattcttcgccatggtcttcaccccgctcggcgactcgctcgccgcctccggccgccagacgctgctccgctccggcgccgacccgcggcagcaccaccgcctcgtggccgcgatcgaggcgaggggccatggctgctcccatagtcttgccggtagtgagaacatcatgccgatggcggaaaaggcttttttttttaaaaaaaaatttcccaaaatttactattggaagatcgggggtggacccgacccaaccctaaacccgattttcgaatcaaaatgggatgaacagcatgcagcacacgaactcccgaactccagagcgagccccacgtgaactccagcgcgagcacgagcatgagcagcacccaccaacatgagttctctcacggtctcacccgaagtcaacgatggcatcacgcacgcgagcaatggacagcgacggtgacggcggcggcagcaacggctacggactgcgtgatggcaacaccccgtttttttgttctgtttttttttttgtttgacacttttttttaatttttggttctgtttttttttttttctgtttgacactcttttttaatttttggttttgctttttttttttctttttttctgttcagtcctcttttactaattacaatggctgaaccatcatctaatgctgtaacctttactttgtactttggattatggtttttattctttttgt

SEQ ID NO: 64876 - DNA, 659 bp, Glycine max
  Clone ID: PAT_MRT3847_29596C.1
ggaatgctatggttaccctctcatgttctggacgaggcatgcgacactaaggtgcgcctgaggaaccgccaccaaaagctccaaaaccatcagcaaatgcatcagcagcgtcatcataaatcacctggagaaccaaaatcacagtactcaaaatctggctcaagatcttcgtatcaaaggccaaaacttgccaccaatggtggacctggaatgcgagctattttcttaggatccgcgcatagatcatgtggcactggcgtgttcttaccccaaagagcaggcacaaacttccaaccaagcaagaggccagcctgtgctcctatcctccttccagctcgagttgttcaagctctaaatcttaatgtgcgtgcattaggtctgctgatttcacccccgcaagttcagagttatgacccgagatgcagggaagcatacaataataattcagcagaaaagaaaagtgatcagaaagatgcgtccaagcaatgtcgttttatttctcagaaccaatgttcttctccagagatatttctcccaaaggaatggacttactagctagcttttcattttcaaagagaaaatttaaatttgggaagcacacaaaggggagttaacatcggaccgtgtacatacaaataaataaaaaatgaaatcatgct

SEQ ID NO: 64877 - DNA, 612 bp, Glycine max
  unsure (1)..(612): unsure at all n locations
  Clone ID: PAT_MRT3847_29597C.1
tctcgagccgaatcggctcgagtcttacgtctgttttctctgctctctctttctctaatggagttcctcagtttactttatggtgctatggcattgtacttctgtttcctgatctggaaattgtttgatcagagaagggaccaagagtgctacgtattggactaccaactttacaagccaagcgatgaaagaaagcttggaactgaacgctgtgggaagatcatagggaggaacaagcacttgggtctgaatgagtacaagttcctcctcaaggccattgtcaactctggcattggtgaggaaacttatgccccaagaaacgtcatcgagggtcgtgaggcaaatccaacattggatgatggtgtcacagaaatggaggaggttttttccatggcagcattgaaaaagcttcttgaaaggtcaggaatntccccctcacagattgatgtgctagtggtgaatgtttctatgttcgctgttgtttccttcttgacttcaagaatcattaaccactancagatgagggaggacataaaggcctaccacctcactgngatggggggtgcagtgctagcctcatttccttggacatcataaggaacattttcaagt

SEQ ID NO: 64878 - DNA, 161 bp, Glycine max
  Clone ID: PAT_MRT3847_29598C.1
ctcggatttccgctcgagccgcggccgacatggactgtttctcatggcttgcaaatgtgtgcttgaggcatccctagcgttgagtatggccttatctttgttacaacgagcttgaaggaagaagacctgttttacattcaaccacgagtttctacaaagca

SEQ ID NO: 64879 - DNA, 296 bp, Glycine max
  unsure (1)..(296): unsure at all n locations
  Clone ID: PAT_MRT3847_29599C.1
ggggnncaagagaaagggcaataccatttattcctttatcattaaaatatatttcttaacaaaaaaggtacccccctcactgaattacatcagcatgacacaggattttttttaagatcctctcccacaggggacaaagggttacaaacttttgaatatacaaatttaaacacttacaagctttggggggcataaaatgggaggataatatattttgctatcgccatgaggattggttggggccatccaacccaccataaggctctttctttttacgaacactaccagccaggtgg

SEQ ID NO: 64880 - DNA, 1438 bp, Glycine max
  Clone ID: PAT_MRT3847_2959C.1
aattcggctcgagagcagtccagacagagaactgagagaagaccctcacttcctgtttggctcgacgaagacctcacttcgcccaacctgcgtctccggcggcggctgtgtaggctaacggctccttccctcaccgtcactgaaacggcgtccctgaactcgcaacactgccctccctctgactctgatttcgttcgaacttcgaactcattcccacttcgcagtcctcgccatgcttcgttgtcggcgactcctcgcagtggcaaacctcaaacgacatagctagagatacagggtgcgatttgtttccattttccagtcaatcctatactccttaggctattgtaatcttctgctaataaggaggaattattattgggttctgaaaacatgttgaaacaagcaattggcagaatcttcagaaccggtgtttatgcttgtgaaggaaatagagttttgccttggatttatgtgccttcgagctttttccaccatggacaagcgcacatggcacctagaagcttttttggggtagaggatttccttgatgatgacaatagccgaccttacacataccaaaaagggaagaagtcaaagaatcccaataagcacatatcattcaaacaaagaacaattgcctacatggaaccttttacacttgatgtgtttatctcgaaacgttttgtatcagcttcactcactcatagggtaacaagcaaacaggttgcagttgccgggaccaactccaaggacataaaagctgttcttaggtctcgttccgacataccggcatgcatagccattggtaggattttagctgaaagagcaaaagaagctgatgtttacactggttcttatactccaagggatagggacaagtttgaagggaaaatcagagctgtagttcaatcacttattgataatgggattgatatcaaggtttatcttgattgagttgagtcactcaagtttttgggactatcagtttagctgttgatatttcggttcgccttgtgtgtttgaacatgtccatttagtttggtttttatgataatgggaaaatatcattattagaattacagatttcgtaatttacttttatgaatgagttatgttgtcgtaattgtagttagttattcgttttaattaatgttaaataataatcgtgttacaaataagacatttaatgtttcatcaggctactatatatggtatagaccccaattggggacgcattgctgctgcagcttgttactcgggggtttcattccatcaagatttacttagggtagagctgggggatattttactaatgtatggtggggaaccacaattatttgaccggtaggatttctatttttggttattttacttgcacttgcaaattagtaaaaaataataatagtttttgacattttatatacattcaagccttgac

SEQ ID NO: 64881 - DNA, 2163 bp, Glycine max
  Clone ID: PAT_MRT3847_295C.1
gaaaatgcaaaactgacaaaagaagtgcagttcccaaatggcaataatctttctttcaagctccgcaattcttcttccaagtcttgctttctttctcacattatttaaccttgcaagttccgaatcattcatcggcgtgaactacggacaagtcgctgacaacctgccgccgccgtcggcgacggcgaagctgctccagtcgacggccatcggaaaggtgcgtttgtacggaaccgacccggccataataaaagctctggcgaacacggggatcggaatcgtgatcggagcggcgaacggggacattccggggctagcctcggaccctaacttcgcgaaaacgtgggtgaacaccaacgtcgtaccgtactaccctgccagcaacatcatcctcataaccgtcggcaacgaagtgataacctcgaacgaccaaaacctcgtgaaccagatgctgccggcgatccagaacgtgcagggcgcgctcgacgccgcctctctcggcggcggcaagatcaaggtctccaccgtgcacgccatgtcggttctcagggactctgagccaccctccgccggaaggtttcatcccgaatacgacaccgttttgcaggggctgttgtcgtttaacaatgccacgggctcgccctttaccattaacccttacccttactttgcctacagaagcgaccctggcagagctgataaccttgctttttgccttttccagcctaacgctggcagagttgactccaacaccaacctcaagtacatgaacatgtttgatgctcaggtggacgcggttcgatctgcgttggatgctatggggtttaagaatgttgagattgtggttgcggagacagggtggccctacaaaggagacagcaatgaggctggtccaagtcttgagaatgctaaggcttataacggcaatctgattgcccacctgcgatctatggttggaaccccattgatgccagggaaatcagtggacacatacctctttgctttgtacgatgaggacttgaagcctggacctgcttctgagagagcctttggactctacaaccctgatcaatccatgatctatgatgctggcctctccaaacagcaagaaactagtagccccgtgccgacggttgccccgactccggatgtgtcaaaatctccagtgattccagcgccaacagacccgggtcaacaaacacaaaaatctccagtgattccagcgccaataggcccgggtccaacaccaaataaagcagaactcttaattggacatgaagccaccattttgaagtctttaataatgttcacagttctcatcttaatgttgtaacaccaaataaagcagaactcttaattggacatgaagccaccattttgcagtctttaataatgttcacagttctcatcttaatgttgttctagctagtagtggtatttaatataatatgtttcttaatttcattgaagactactccggatgtgtcaaaatctccctctactccaaagccaacagtttcaagtccaaccaaaacaaataatagtgcaacatggtgtgtgccaaaaggaggagtggcagatgcacagttacaagcaaatttggattatgcttgtgggcaagggattgattgtaccgcaattcaacaaggaggggcttgttttgaacctaacactttggtaaaccatgctgcatatgccatgaatctattgtatcaaacagctggacggaatccattgacttgtgatttctcgcaaacagccatgttgtcaacgaataatccaagttacaagagttgtctttatgctggaggaaatgcctaacccagaaaacaagtagataaaggagggcactttttgttgttttaattattctctcttaattgctaagaaatgttctggttcttggagtgttcatgtatggaggaggatcttcttcctctatttgtagtctcaccttttttagtctttatcagaagcaaattgatgctttgtttatgtgtgatctgtgaagcgtggtttaggtatgtgtgttgttcaatcatcgtttgaaatcttggggcccattatttaagtaatatatagagaaagaggtaggggcatatcacattataaagatccttttttttttagtgaaatgtgattagtcattctaatccgttatat

SEQ ID NO: 64882 - DNA, 646 bp, Glycine max
  Clone ID: PAT_MRT3847_29600C.1
gtaaagaatctttcatgattcatttccaaatgtgaatgtaatttacatggctaagagctccaacaatccctccagaaataaaaaccctgccacatgaacaactaagccccatacacattaatcattgattcatgaaaatcaatgcaacactatttctagcataaaccttaagacaatggaaccaaggaatgcagaaagccattgaaaaatgagaaattttcgggcacgaggcatcccttcaaatcagatggttaaatactcaagccaagacaacctgcattatccaagtgtttttcccacctccaacacaccacattcattttaatagagcctctttaacaaaagaaacgttatctgttttactagccagaggtgacagaaggcgcttttcttgatcatcatccaatcccgatgttgattgagatccacacggcgaggcagtcgaaagaattctgtaatttcatcttctgaacatttatgatatttctgggagctggttatcggggagttacttcaacatcttccgggaggagacacctgcaaagggaacctagtttaacaagccgattcacccaacctggaatccgttttcccctccatctatgagacatatcatccggaaaaagattgcaggtcttaaaaataa

SEQ ID NO: 64883 - DNA, 259 bp, Glycine max
  Clone ID: PAT_MRT3847_29601C.1
gaggttcaccagtatcacctccgtaacaacactcatcctctttctcagcctctatacacacaacaaaaaacccaaaaacgtcaacaactttaccataagctgcggcactaccggacaatcttacgacggggaaaggacatggacgggggacacaggttcaacgttcttatctcatcaagacggcaccgtttccgctaatgcaacaacacaatctccttctaccaatcaagtgccctacaccgacgcactcttgtcccgt

SEQ ID NO: 64884 - DNA, 449 bp, Glycine max
  unsure (1)..(449): unsure at all n locations
  Clone ID: PAT_MRT3847_29602C.1
gggtttttaattttttttttttttttttttgtttttttttttttttttttttttttttttttttttttttttttttttttttttntnngggggaaaaaaataaaggggccttttttccagagggggggggccaaggcacctttttccccccctttcctccttcgggggtccccaaaccnnggcccaaccccgggaaggggaaacccaagcctgggaggggaaagcccccccccccccctggcgagatttggaaatctaaacccccgtggggggccccttttgtttggcatttcccccacccccccttgggcccccttaaaaaaggggggtcttcgggggggggggccttggggtgggggggcttcccattggggggctggaaacccgggggcttttaaacggggggtgggaaaagggggggtttcccccgggggggctgggaaccgggg

SEQ ID NO: 64885 - DNA, 288 bp, Glycine max
  Clone ID: PAT_MRT3847_29603C.1
agtctctttcttcatatcatttggaaatttggctgatgataccatcaatttttaggctttttcccacaagctggtgcattttggatagattcaggaaaaagttgcattgaaattttcacatgaggaattgattacagcttggtctactctggagctttctgcaacaacactgtttgctgattggtgttcatatgtgcatgcaatgcagcatgatagcgctgtttctacatcaccatttgattaagtgatcggtggatagtcaacaactataaacaatttgggtgcata

SEQ ID NO: 64886 - DNA, 643 bp, Glycine max
  Clone ID: PAT_MRT3847_29604C.1
cgtaagggcggaattcggccaccattttttttttctcttcctctgaagccattttttcttccttcctttttggtttcctattccttcttcaattatctctcttcatttagttgtgaacattttttcggtctcgtcgaagcaatggtggcgggtggcaattccaaatccgacatctcctttgctggcacttacgctagcagtgctttcgctgcatgtttcgccgaggtgtgtactcttcctttggacaccgccaaagttaggcttcagcttcaaaaacaagctgtagttggtgatgtggtgaccttacctaaatataggggtttgctgggaacgattggaaccattgccagggaagaaggtctttcagcactctggaaggggattgtgccagggctacatcgtcaatgtttgaatggtggtttaagaattgcgttatatgagcctgttaagaatttctatgttgggcctgaccatgttggagatgttccattgtttaagaaaattctcgctggatttacaactggtgctatggcaattgcagtggcgaatccaactgatcttgtgaaagttagacttcagcaaaaggaaaattacctcctggtgtgcccagccgttactctggatcattaaatgcttattcaac

SEQ ID NO: 64887 - DNA, 522 bp, Glycine max
  Clone ID: PAT_MRT3847_29605C.1
ggctcgaggtccaatactatattgctctctaagctttgattactggttaagtacatacgccttacccacaactcatgtcatgtgttagtggcgttgtggtatttcatgcgctagataatggagttagcatgcaacacaatatgacgcaagagatatggatgtggccttgcttcttatgatattcatgatgatcacttctgtatcacactaaagcatcgtggcgttgcaaaagcatgtggccgcaacatttgagactatctggtcgaaatgcttggcctagagaaaagccaaattgatgacttggaccacctcctctacaagaactatggaacatctatggctggtttacgggcaattggatcttactgagactgcgatgagtatcacagacttgtgtcatgggagactactgttatgagatgttgaaaccagacccagttctgaggaacctcctgctgagcctaccctataggagactgaggttcacaaactcacacaaagtgcatgcggttaatgcactaa

SEQ ID NO: 64888 - DNA, 225 bp, Glycine max
  Clone ID: PAT_MRT3847_29606C.1
gcgagtgccacgtccaaacaggccttcgagtaaccaataactgagccctacacccttgagaaagatatcttacagatgcgtgtctctcataatgcagctcttaatacacaaccccaccctttgcacttttaattatcaaaaccacctatatgaacccttatatccactatcgggtgttttgtttttatttttattaaataattatttctacttaatttttttttt

SEQ ID NO: 64889 - DNA, 219 bp, Glycine max
  Clone ID: PAT_MRT3847_29607C.1
gactgatctgctaagactagcttaatgcgtcggggagctaataacaacaatgagctacatttactagaatttgacatgtgacgtcaatattctgatcacatactctggattgagcctatttattgaatcattagcttaactccttaatacaagcacaacttgagatatatcacactcacagttttactctgtaatctgattatgaacaatcactgtact

SEQ ID NO: 64890 - DNA, 464 bp, Glycine max
  Clone ID: PAT_MRT3847_29608C.1
ttccacgcgtccgggggaaacttgaagtgccatcggataagtggtggagtttgtttatttgattgattttgcaaatcaattgaatgattggatccccaatcaccccacaaggtattcgtatgtatactccgttgccttacttcattctatatggaacttcctcaatgattttggaaaatatatgtcttcaatcaatcattctgaaagggtctaacccaaaagtttttatcattttggaaatgaaaaatggaaataaatttgtttagtatttcatttctaaaagggtcttcttgttccattagatcctactattactagttgttattctttatgttttaacaatattgtttttttttttcttttttgaaaggcaaatctaaactttgcattaatgatgtaaatgatagtttaacaatattgttgtgaaactgtgagcagtaaatttatttcgatgttgttgaatt

SEQ ID NO: 64891 - DNA, 1017 bp, Glycine max
  Clone ID: PAT_MRT3847_29609C.1
agcatcaatttgaggtggatatatatatatacacacacacacacatctcgcatgtcatatttggtccttatatcattaaatttctctactccttttagctaaagtagaagagcttcctcgtcattcacataaaactcgaattccatttaattattacaaaacataagagacacgagaggaagattgaaagaagaaaaaaaaaagatattaattctttgatgatgctgacactcttttccattctttctaaagcagcccaaagaaatccacttgcaccaggtttcaattactacacaatatatatatgtatttcagaaacttgagaaatgattctgagaagattgaaccatttgcaattcagtggttgtttggcatgagttatcatcactgatcaatgactctcgtggtcttgatgcccaaagagaactaagggctctaagacggccataatactctccaatcacaagaaaacaccttgctgcttgacgaactgtcagcaatcgacataattggtgaagggtttgttgcctcaaattatcagcctgagcaacaaattcttcaaggtggccaagcttggtcatggctgccaccatctgttgaacaccgtcggcgatgggcccgccggcaatggtgtcaacatgtatctgctgaagctgatcaagaccttgactgagagcttcttctgtttgcagtgacgaatgcccgagttcacatatgaccataatttgctgctccgccaggggctctaactgtggtatcaacattgtgatgagctctgatggtttaaaaccacctatccagaggaagcatctctcagctggggaagtccatgtgccattaataagatgaaacacatctgttttagcagccacccctttcagcctgaaaacttcatcataatgagacagaaatccatccacaatcactcttagttcgccgtccatttttggactgccggcgatggtgtcaacaagcgcctgctgccgctgttcaagcccttgagtgagagcttcctcc

SEQ ID NO: 64892 - DNA, 306 bp, Glycine max
  Clone ID: PAT_MRT3847_2960C.1
ggtcgaccacgcgtccgggctttctttattttcttctccctcttccttcttcttgtttcatctagcacttacatatcatcgctgcttgcgaccaaggcaaggcttcctatctctccaaagctctctaaactggatttatggcatgttggtatgagctattctcgccttaaaaacgtggtttgttcactagcaaacctttaagcgttctaatttaaaagatgtagcatgccggggcgccatcttcacaaagcaaccttgcacgaatgtgtatttactgcggcaaatcctcgtggtgctttattggct

SEQ ID NO: 64893 - DNA, 498 bp, Glycine max
  Clone ID: PAT_MRT3847_29610C.1
cacacaatgtcagcaccatccggtaacccaagcgaagtcaagaacgcctcaaacgttgttgtcccagccaagacagccccagttgcagtcgtccaaaaggattcaaccatcgttggtttcctaaaggatttcgttattggaggtgcctcaggtgccgttgccaagaccatcaccgcaccaattgaacgtgtcaagattatcatccaaactcaagacgccaacccacgtatcatctcaggtgaagtcccaagatacactggtatcgtcaactgcttctcacgtgtaagatccgagcaaggtttcggtgccttctggcgtggaaacatgaccaacgtcatccgttacttcccaactcaagctttcaactttgcattcaaggactccatcaagaagatgttccccaaatacagccccaagaccgaattcggaaagttcttcttggtccaattggcatcaggaggtttggcaggagctggttcattgtgcatcgtctaccct

SEQ ID NO: 64894 - DNA, 275 bp, Glycine max
  Clone ID: PAT_MRT3847_29611C.1
gagggatcgcatttgtaatcacaataacagattttcaaactcatcaagcttcaaagcgaatcttattgagaaaatgtctggtcctggtaaaggtggcgacggtttaggaaatggaggtgtcaataagcataagaaggttcttcctgacattcatctagtgcatcacaaaacctgtcattcgtaggttagcgacaagatgttgcatgaaaaagatcagtggtttggtctacgaagcaaccagcagaattctgaccatactcctggggaacgtgaat

SEQ ID NO: 64895 - DNA, 305 bp, Glycine max
  Clone ID: PAT_MRT3847_29612C.1
acctatcgcttatagacaagaaataatgactctcagatggggatatatgaactggtattagtgggataccttatctagcctatcttcaatccaaatgaaatgcgatcgccattacttgatgaattccaattccaaataattaagacataatccggcacagcagacgatctatctattgctataatgagtcttattataactctcattaataatccacataactggagactggattaccttggtttcagcttacactacatctcgacgtactaaccatacgcatattgtgataagcctatcgtact

SEQ ID NO: 64896 - DNA, 268 bp, Glycine max
  Clone ID: PAT_MRT3847_29613C.1
gcgacaaatggaggtgtaatggcgcgtctccgtctggaccaaccttacggcaaggcgctctgcggtttatgggctgcccatatcctatactacaacccaggtaggccagataaacctgattacgacgagggacgacccgagaggaccgggacgcagcatttcgtggccacacacagagagggggacactgtagagttgatagtatggggctgtaaacaacacagtatcagagggggctcgaggtgatcccttcctagactatcacctc

SEQ ID NO: 64897 - DNA, 452 bp, Glycine max
  Clone ID: PAT_MRT3847_29614C.1
gttttcccaattcaacgtaaaggtgcaatgggtatcgagaaggctcaaatcaacattgtggtggttggttatgtggactctaagaagttaaggaactcaataagcctgttgctgagagacaaattgctgtcattaacttaactgccaaatataaggcatgaccatcacaccaaccttaaaaactagtttatcacaattaacttaattacttttcattaatttaatttcaatttaaaagggaaaaatttattgtacttgttatttatattacatttattgtaaaaattaaaaaattatcattataatatatttattttcctttctatttcatttgtattaattgtttatttgtattttcattcttattctattattatttattatttttcatttatctctgttttaatttattattatttgtactattatctctattttattatcgctgatac

SEQ ID NO: 64898 - DNA, 356 bp, Glycine max
  Clone ID: PAT_MRT3847_29615C.1
ctgtgctatgtttttctcttgaaacattaccaacattacaattagcttcgggagttcagggattaccacttttgtggcaaactgctaacattctgacgaaaacatattattatatcgggacgatcctgataggacaaatagagcttaaacccatgaccctggatacccaactatgaaacacggtgaggagcagagttcattattgatctaaacataaattgggccggtttgcgaagaattaacttacctgcgagcattataacttggtgttcaatatataaatgtgatcagcggcctcctctgatgctatttggttagttgaaatgaaccaccctattctgcacaaccactttctc

SEQ ID NO: 64899 - DNA, 353 bp, Glycine max
  unsure (1)..(353): unsure at all n locations
  Clone ID: PAT_MRT3847_29616C.1
gagatagattccgccgaaagaaatagtcttgctaactacaaagacagtgttaaccagagactgaaggaagcagaaaagagttagagcatgagggtgttttctaggttcaaatttctgtcaagagcagtgcacgaggaacaagagggtgagcatgatgggggggagaagatcaagtaccctttaacggagggaaatttgtgtacgtccttaacattaacggtttggagaaaatcccttgtgattagttgtaaaggattcacggtgatagatccatatggaaaccttgtgtatcgggtggacaattacatcgtgcaccccaacgaagtcattcttatggacgcttcangaaactc

SEQ ID NO: 64900 - DNA, 322 bp, Glycine max
  Clone ID: PAT_MRT3847_29617C.1
tgacgacagaagggtacgggtgggatgtattttacagaagggtacggttgtttcaagacgacagaagggttcggctgctagaagacgacagaagggtacggttgcgagatgacgacagaagggttcggttgtgagaagacgacagaagggtacggctgcgagaagagacagaagggttcggctgcgagaagactacagaagggtacggttgctagaagactcacataagggtacggttgctagaagactacagaagggttctgctgctaaaagaacacagaaggggggtgtcaccataattatagatatttttatgattcaa

SEQ ID NO: 64901 - DNA, 979 bp, Glycine max
  Clone ID: PAT_MRT3847_29618C.1
cttttttctccgttcttcactgtcccttccatttaatgccatcaaccaaaccataataatcttatagtgatgctttaaatttggttggctacataaccagctaaggttaattattactaagctttactaccccaaaacaatggaaaggagcaaaatacaagtgctttatgatgctagccatgccgtgttttctcaagaggggcttggccgattcatatgtttgagttgatcatttaatttgcagacaaaattgaagctattgatgtaggagtcgacgagtccgggttgtgtgattctccaacatcagacgcaaccgttgatagcagcagcagcagcagcaacagcaagggtttgctttgtggacacggattctctgagataacatacattcacattcatgaatgtgactatttctctatgggtgtattctgtcttccagcaggaaaagtgtttccacttcatgatcacccgggaatgacagtgttgagtaagctcttgtatggctctacctgtgtcaaagcttatgactggatcgcattggattgtgctggaagccaaacaataggattggctgggagggtagtggatgaagtaatcaaagcaccacaggaaccatccatattatttccaagaagtggtggcaatattcattctttcacagcgttgacgccatgtgcaatactagacgtgctatctccaccatactctgaagagtttggaaggccttccacttacttctcagatatccctatcccttctcttaatggttatgccatacttgaagagaaaccaatgcctagtaacctagttgttcaaggagcaccataccttggaccttcaattgtaaccgttgaccattacaacttcggtcaaatcgattttgataatcacgtgtaaattgagtgtcttttttgaacagtacaaattaaatagaataatacaaaatactattcatatatcatatttaactaattcaact

SEQ ID NO: 64902 - DNA, 169 bp, Glycine max
  Clone ID: PAT_MRT3847_29619C.1
acagaaggtgactcacttaacaatcaatcaacacttccaggtgcgggtatacacatcttggttgagccataactctctctaaacttatacttgcttcccttcttgcctcgcttatccttcttcatcttgctgatgctgaacaatcaccacatgtacaaactcaaggctc

SEQ ID NO: 64903 - DNA, 165 bp, Glycine max
  Clone ID: PAT_MRT3847_2961C.1
tcgggctcgtcacttcttgctcttagcccttctcctcttcgccgccgtgggcaccgccgcgatgggggtgggcgcgttctacgccgacgacattcttattcgtcaggtggtgccagatgtttgcgaaacccaaaaggaggacaaccttcttaacgccgagcacca

SEQ ID NO: 64904 - DNA, 1004 bp, Glycine max
  Clone ID: PAT_MRT3847_29620C.1
ccggaattcccgggtcgacccacgcgtccggaagaagcaaaatacaagtgctttatgatgctagccatgccgtgttttctcaagaggggcttccaacttttcaacaaatccattatgtcaaaaatttgttagacaaaattgaagctatggacgtaggaatcgacgagttcgggttgtgtgattctccaacatcagacgcaaccgttgatagcagcaacagcaagggtttgcttggtggacaaggattctctgagatcacatacattcacattcatgaatgtgactatttctcaatgggtgtgttctgtattccagcaggaaaagtgtttccacttcatgatcacccgggaatgacagtgttgagtaagctcttgtatggctctgcctatgtcaaagcttatgactggatcgcattggattgtgctggaagccaaacaataggattggctgggagggtagtggatgaagtattcaaagcaccacatgagccatccatattatttccaagaagtggtggcaacattcattctttcacagcgttgacgccatgtgcaatactagacgtgctatctccaccatactctgaagagtttggaaggccttccacttacttctcagatatccctatcccttctcttaatggttatgccatacttgaagagaaaccaatgcctagtgatctagttgttcaaggagcaccataccttggaccttcaattgtaaccgtggacgattatgtgggtgtttgagttgtcgttggggtcctcaaaatcggggggagatatcttttgcaaacggtcgttagatctgtatgaagacatgtgctgccacataatgaacgacaattcaaacatagccggcaacttcgatcaaatcaatcaattttgataatcatgtgtaaatgtgtaaattgagtgtttgtgtgtacataagttcttatatctaaatgtaaatattttttttaaaccaccttatttttatgagttggttatgaaactaatttt

SEQ ID NO: 64905 - DNA, 750 bp, Glycine max
  unsure (1)..(750): unsure at all n locations
  Clone ID: PAT_MRT3847_29621C.1
tttttttttttttttttttttttttttttttttttttttttttttttttttttttttgttttttttttttttttttttnccgggaaaaaattccccaaaaacctgcaaaaagtttttgttttccaaaagcccaccaaaaggggggaacccccacccttttttaaaaaaaaaaaaaacccgggggaaaattcctttaaaaaaaaacctttcctaaattgaacaagggaacaaagggtaggaaatttgaacggcccccccccggtttttaaaactgggaccccgggccctggggtggattttcccctcaaaaccacccccttttcctcaaaaacctttgaaaagctttaaaggccttttaaaaaaaaacccaatggggggcccccctctttccggggtatatctaaaaaaagagccgcctggaaaaattttctttcccgaaaaaagaaaaaggggcccaaaaccgggggggaaacgcccaaaaaaaaccctttgaaggattttaaccaaataaaaaaaactggggggtcccttgagaggggaaaaaccttcgggggagagggggcgcggtaaaaaaaaaccccccatggggggattgtgaaaaataaacaacgattggggaagcccaagcttgccaaacaaaatttggcgaggggggagggaaacccccgggggggtgaatttaaggcgaccaagggttttttttaaaaaaaaaaagaccctttacaaaaagtttttttcccacaagggggg

SEQ ID NO: 64906 - DNA, 1868 bp, Glycine max
  Clone ID: PAT_MRT3847_29622C.1
gcaattgcaacataactagcaaaaaaatggaccttctcctaaattgcctaaaccttaacaccattgctattgcatcaatcctttctctaatcttcttatgtttgtttctatatcgtaaaaattctcgtgggaaagatgctccagtagtgtctggtgcatggccaatacttggtcacctctcattgctgaatggttcacaaacaccacataaagtgttgggtgctttggctgacaagtatggacccttattcaccatcaagctcggtatgaaaccggctttggtactcagcaactgggaaatgtctaaggaattgttcaccacaaacgaccttgccgtttcatctcgccctaaactcgtcgccgttgaagtcatgtcttacaaccaagcctttgttggcttggcaccgtatggaccctattggcgcgagttacgtaaaattgtcacgttcgagtttctctccaatcgaagaatcgaacaacggaaccacattcgtgtctccgaagttcgaacttcgattaacgagctattccgacatttggtcgattggaattaaaaaccggtatactcatacactggtagaaataaaacaatagttggcgtgacatgacagttaacatggatgtttctttttgtcatcgggaagaggtattttgttgctatgcacgatggaggcagagacagaaagcttaggtttatgaactatattttggacttcatgagtttgaggagagtttttgctggaatgtcccttggccttaacatggggcatttgactttggctaatcttgtgcatgctttagaggtattcaatccatcggttgaacctgtagacattaatgaattctagggatttacccacaccaaggcttctcgacttgaggttttagtcaatcgaggtctgactcccaagaagtatgaaactttttaacgcttatatctctcttgggttcattatggttctttttccaatggcacaatcttgtaaattactttgggaggatctgatccaacagcgaatattttgacatgggcacttactcttcttttaccaaaccctcttgcattgggaaaggctaaagaagaaattgatatgcaaattggcaaagatgaatatatacgtgagtcagatataagcaaacttgtgtatcttcaagctatagttaaagagacactaagattgtatccaccagcccctttttcatcacctcgtgaattcacagagaattgcatcctaggtggataccacatcaaaaagggaactcgacttatccataacttgtggaagatccacagggaccctagtgtttggtcagacccattggaattcaaaccagaaaggttccttaccactcacaaagatgttgatctaaggggtcacaattttgagttgttaccctttggaagcgggagaagagtttgtgctggaatgtcccttggcttaaacatggttcatttcactttggctaatttattgcattcctttgacatcttgaatccatcggctgaacctgtagacatgactgaattctttggatttaccaacaccaaggctactccacttgagattttggtcaaaccacgtcagtctcccaactattatgaaactttataacccttatgtcagtcgtgtgatccttattgttctttttcaaatcgtggtttgtcgtctattctaagttaaattgcgtctgttttggaaaattttgttatgtaaccttgcgatattttaatttttcttaattaggtagatgcattgtactggcttctatttactgatcgtgaaaacccgtggttttgttatcaatttatttgtattggcgtatggttaaaataatattttaaatgggttataatttttttccgccag

SEQ ID NO: 64907 - DNA, 378 bp, Glycine max
  Clone ID: PAT_MRT3847_29623C.1
cgtcctttttttttttttttttttttttttttttttttttttttttataaaaaaaaggggacgggctttttttcttgtgggcaaaaaaaggaaaaaacccctatttttctggggcaagaccaaaacaaaaaatttgggtttgggcgtcgaccaaacaaaacggggggtaaacactgttacccctccctggaagggcccacgggttgccaaacgggggggggcatagatgggggggaaaaaatccaaaaaccgggtttaaaacccaccccactaaaaatcccaaggggttccaaaaggcccttacccccaaaaaaaaaaaaccggtttgctaaaagggctttccagacccttttaatttaatgggaatctgtttggggg

SEQ ID NO: 64908 - DNA, 335 bp, Glycine max
  Clone ID: PAT_MRT3847_29624C.1
aaaaaacccttttaaaatttttatattaaaataacccaaggcccaaaaaaagagggtttttggtgggctttttacataaactttcttaaacacgagggcagaaacttaaaatggcctgaagcttgcaatgaaaaaatttcatggggcagcttgccttttttttataaaaaaaaatgttttttacaaatttgggttgtttttaaaaacaacaatacgttggttttggaaatttatccatgactgttttattacaaactttttttttggagggacggttcttctaaaaacaaacatgggggggggggagctttcctggattcaaaaaatcgggggga

SEQ ID NO: 64909 - DNA, 166 bp, Glycine max
  Clone ID: PAT_MRT3847_29625C.1
ccgaagacgaattcgttgtcatagagtgggaggagggagcaggaagaggctgagcgtgcaatagaaccttgccactccgcggacctgtcgggcctccgcgacctgactctcatgcgcgtccaccttggacctcagcgcctccgaacacctcgcgggctcgaccgag

SEQ ID NO: 64910 - DNA, 483 bp, Glycine max
  Clone ID: PAT_MRT3847_29626C.1
ttttttttttttttttagatattgtatatatacaatttatttaataaattaatgtcattcaaaatacagtgccagaacatggtgcagttgaacatgctagtaatgtttgtcatgaagcacctgtgctcatgttagattggcggcgccccactactgctagtggttcctgggattaatgccagagcagcgctagttatctgctcttctgcacagctagtgcagagaattcctgaacagttcaccttactaatcctaacccccacacgcacacaacaggttaaaaaaaacacaccctgacagctaacagatctatacacaatcactctacagtaatgcttgttattaaattaagatgtaatgacctggttaacccactctaaatcttgaagatggagaactacatcagcagcagatagttatatgcatgagccaatgttaacataatacagaaagtggaggctttttctgattaaagctccacgc

SEQ ID NO: 64911 - DNA, 339 bp, Glycine max
  Clone ID: PAT_MRT3847_29627C.1
cactggttccttgtagctcttcactgcagttccaacataggtcgaattgtatgcagggggtatactaagataggcagggcctaagacatactcacttgccctcgcctacggagagacccaaacattagatccattattggattccaatcttattattgagaccactgccatgaaaggatattgcatataccatgggaaatagaggctaagatgactcaagtaggcacttagtatgatctcaaaaacatcattacaagaaagattgctgcacacacaattgtgtatactggacaggttcaatacattacacatatgaccaacaccgtgcccgcttacctc

SEQ ID NO: 64912 - DNA, 385 bp, Glycine max
  Clone ID: PAT_MRT3847_29628C.1
ttccccgttttaaataaaacaccggcccgccatacaataaatacactttattttaataatataatatatccaccactcataaaacactatttttataatgatatactcatatttaattattccacacccctaaaaaaaacactaatctcctataccccctcttataattcaccccacaatatccttaaattttctaaactaaatctattaactatctaattctctaaaatatcaacctatcaccccctattattttactctatatcataaaaaaattatatcttttcacaaaattttttttataatacctcatccacatcctttttttctcatacatcattataaaatacctctttcatcactatacaccctttatttacctccc

SEQ ID NO: 64913 - DNA, 457 bp, Glycine max
  Clone ID: PAT_MRT3847_29629C.1
ggtggttccaatgccccttttcccacaaaaacaacattcgacgcaacagcaatggtgtttgcaaacccaaagaacgaactaaagcggataaggaaacaaaaacggctcctcctaagatcaccaaccacgcaaatgcagacatttcagttcaatcatgaccgaaatagccttcacatcacttgattttcatggggactgacttttgtgacttgcggtgtatatgttttgtaacttataatattgctacacggtatctcttactgttatataatgaaagttattgatgtaatatgtgaggatgtttccccagactagtccctggattttaaatttaaattaaatgctttcagcaggactagtagcattaggggtcttattatacggttttatctattgtgctaaaatgggtgtgttttgcgtgtccttatcatgtgatgatgcacctttgcttttccac

SEQ ID NO: 64914 - DNA, 377 bp, Glycine max
  Clone ID: PAT_MRT3847_2962C.1
aaagctgtttttaggtctcgttcagacaacccagcatgcatagcaattggtaggattttagctgaaagagcaaaagaagctattgtttacactggttcttatactccaagggacagggacaagtttgaagggaaaatcagagctgtagttcaatcacttattgacaatgggattgatatcaaggtttatcttgattgagtttagtcactcaagtttgtgggactatcagttaaggtgttgatattttggttgaagcagtaggccccttgtgtgtttgaacatgtccatttagtttggttttgatgataatgggaatatcattattcgaattacagatttggtaatttagttttatgaatgagttatgttgtcgtaaa

SEQ ID NO: 64915 - DNA, 261 bp, Glycine max
  Clone ID: PAT_MRT3847_29630C.1
ttaaaggggcaatatttgcaaatcgctttgaaaaaaacactaaatttttaccttgtttcgagaaaaaacactcctcgggtttgggaaggaactaacacggccattattattactcaacccatggggtttttttttttgtggggaaaaaaaaaatcacacttttgaacaaaatgcagtttaaggggctgaaaaaaaaaacccttcccttcttacccacattaaacacccggaaaaaaccccccctaaaaaaaattcaagggg

SEQ ID NO: 64916 - DNA, 545 bp, Glycine max
  Clone ID: PAT_MRT3847_29631C.1
tagctctgccactctagctctaccacttaataataatatctttagacgttgattcatatatatctagctttctagctccatcatgaagactggaaacagatttgtggggatagctcatgccaagcagaaacttcagagaacactttcacaaagaatcaaaatggcttcagctgttgctgatgttccaaaaggccacttggcagtgtacgttggagagaaccataagaggtttgtgattccaatatcttacctaagccaccctttattcagagacttgttggattgggctgaagaagaattcggattcaatcacccaatgggtggtctcactattccatgtactgaagattacttcattagtctaacttcttctcttaattaattactattactagttcaaaagctggcaatgctttcattggacattggttattttcattttcctagtggataaggattaccaccaagttagattaggccttccattcacattttgttctagagattctccttaatccaattgcatcccaagtgatgatgtcttc

SEQ ID NO: 64917 - DNA, 271 bp, Glycine max
  Clone ID: PAT_MRT3847_29632C.1
ctcattaaagttggaggggcacttggggatcatatattctttacatactccttgaagttcttcgactcttgcacacatttttttagcgaaaaagggctgttcaatattgggggctctgtttcccaggacaatctaacttgctgggggcccggcccccaaaaagaatggaaaagcccgcagaagggggttgcccttttgcgggcccccttctgggacaaaacactgaccgaagagccccgcctttcttttccaaccccccgggacaagctcc

SEQ ID NO: 64918 - DNA, 515 bp, Glycine max
  Clone ID: PAT_MRT3847_29633C.1
cgcctcttcctcttacaaaccacagaacccacacacttgcatacatacccgcgtcttacacgcgtttcacccgcctcgcctctgccttacacatcactctcgcatacccttgacctctgatgacatcggcgccctagtcacctgctccgcccccaacaactagaccaccccagttccccccgcggcttcgtccgcccattgccacacaacatgccgtcagtattctggtcatcccaccgcaggtggagagtgagatattgggtcctcacagctgctgttctctacgtttcatattgtttcgtgcgcggcatgcccctcctcagcaccaacctaccgccctacaccggcaaacacgatgtcggcaccatcgacctcgaggtacctgtcaacccaccgcgacgcgtcgatgagaccatcaacacagagactggcgagctcgctttccaagtcgacactgtgctagtctctgtctttacccttctggaatggctccaaagcacaagagagcacctttg

SEQ ID NO: 64919 - DNA, 599 bp, Glycine max
  unsure (1)..(599): unsure at all n locations
  Clone ID: PAT_MRT3847_29634C.1
ggctcgagctcgagccgaatcggctcgagggcatttaacaactcacatagctattgtttcaggtcctggtttcagccacctagtccctatagttgagttcagcaagcgacttatcaagcttcacccaaattttcatgtcaactgcatcattccctcatttgggtcaccctcagaatcctccaaagcctaccttaagactcttccttcaaacatagacaccatcttacttcctcccattaacaaacaacaattaccccaaggagtaaaccctgcagtcactattactctttctctgccatcaatacatgaggccctgaaatccttgtcctctaaatttcctttaacagcgttggttgcagatatttttgcatttccaaccttggaattcgcaaggagttcaacgcactatcctatttttacaccccttgttcagccatggtactgtcactggctctacacatgccaaaacttgatgaggaaagttcaggtgagtacaaggacctaacagaacctataaagttacaaggttatgtaccaattttgggggtgatctncagcttcacccaagtcgatcaacgaagctacaagtttttctgacg

SEQ ID NO: 64920 - DNA, 1834 bp, Glycine max
  Clone ID: PAT_MRT3847_29635C.1
gttgtcccgatccccgggtcgacccacgcgtccgaaaaaagaataataattttcatctaaaaaaaaaccaccgttgaatttgacagtcccggcgaggcatgttcttgctccgagtccactcagtggaagaggagcaccctctggatccccgaaccatcttccaatcccaaaccaacaaccctaaattcagccaacgcagaggcgcgctccacttgttccgaacctcttcccactcctctccctcttctcttctcttcatcctcgccgtccccaactacctctccttccacgacttcattcccttctgtgggccccacctcgaccgtctccaccaccttctcttcatcaggaacgacggaacagaagatcgctatagcgtcttgatcgagttcgccgatcactttgccgccgacgcattttataccaatttcaatgccaagaagttttctcctgcagaggcagaggtgtgccatattttgtttctgcaatccgtggagtattcaaaatatgcagaagctgcggggactcctcctcctggttgtacggaaataccaacttgtccggtttgtcttgagaggttggacccagatacgagtgggattctcacaacactttgcgaccactcatttgattgcccttgtgtttcaaagtggacgtatttgtcttgccaggtttgtcgattctgtcagcaacaggatgagaagccaacctgttttatttgtggaacattagatgatctctgggtttgtatgatttgtggatttgttggatgtggaagatataaagaaggacatgccattgctttttggaagggtactcagcattgctattctcttgattttaaaacacagcaaatttgggattatgtgggtgacagttatgtccatcgactgaaccaggacctgtctaaaattgatggcaagttggaggagatgaattttcgctgtatgtcactggaaggagattgtggtatgtgcgaatgccgtgaagatttgggaattaatggggcccttttcaacagcaaagttgaaacgattgtggatgaatacaaccgtcttcttacatctcagttggagacacaaagacaatattatgaatctttactagtggaggcaaaaagtaaaatggaaagttccatgtctgaagcagtggagaaagctgcagcttctgaaatgcaggatatccaaaatgaactggaaaagtgtacagaagaaagaaatgccattgctgaggtcaatcagaaactcataaaaaatcaagagatttggcggaagaagtttaaagaagctgaagagagggaagctaaatcaattaaattgatgaatgagaggataattgatttggaggaacagattagagatatcaagatttttctagaagcacaaaaaacaattgataaaatgtcagattcaaatgggatcaaggagggaacagtcctgccggtggcttatgagcaatcttctccaggccacagtaagagaaacaaaaagtctggccgaaggaggaattagttgcaacctcaaccagaacacaatattcgaacttatgggtagtctgctttttaggagggaaggacactgcttctgattattacactgatacttgttgatatatagaggcagttccaactcgtggccatggattgctgtctgcatattttagatgttgtatagtttattcttgtaaacagttagtttaacgaatttcgtggtcctaaccctttcctctctgatgccgttcgtggttacgatggtaactaaccaaaaattagcaagtaacaatttagctccattgcaatgtcagagtcatattttcagtaaattctttattaatc

SEQ ID NO: 64921 - DNA, 119 bp, Glycine max
  Clone ID: PAT_MRT3847_29636C.1
acatggaagagagttttacgagaaatacgaaggggggaaccttctattaagacagaaaaaagtccctttccatctaaactgctgttttgttagactgaatggatcgcccccttctgtcg

SEQ ID NO: 64922 - DNA, 775 bp, Glycine max
  unsure (1)..(775): unsure at all n locations
  Clone ID: PAT_MRT3847_29637C.1
gggtcgacgctacgatacggctgcgagaagacgacagaaggggatctcagaaacaatctatcaaacacatattccgataaacagaaacaccaccgttgaatttgagaatcccggcgaggcatgttcttgctccgagtccactcggtggaagaggaccaccctctggatccccaaaccatcttccaatcccaatcccaatcccaatcccaatcccaatccaacaaccctaaattcagcgaacgcagaggcgcactccacttgttccgaacctcttcccattcctcgctcccaacccagacctctctttcttctctcctcttcatcctcgccgtccccaactacctctccttccacgacttcattcccttctgtggaccccacctcgaccgtttccaccaccttctcttcatcagaaacgacggcaccgaagatcgctatagcgtcctcatcgagttcgccgatcactttgccgccgacgcattttttaccaatttcaatgccaagaagttttctcctgccgaggcagaggtgtgccatattttgtttctgcaatccgtggagtattctgaatatgcagaagttgctgggactccgcctcctggttgtacggaaataccaacttgtcctgtttgtcttgagaggttggacccagatacgagtgggattctcacaacactttgcgaccactcatttgattgcccttgtgtttcaaagtggacgtacttgtcttgcccaggttgtcaattctgtncagcacaggatgagaagccacctg

SEQ ID NO: 64923 - DNA, 785 bp, Glycine max
  Clone ID: PAT_MRT3847_29638C.1
aatattatgaatctttactagtggagacaaaaagtaaaatggaaagttccattctgaagcagtggagaaagctgcagcttctgaaatgctggatatccaaaatgaactggaaaagtgtacagaagaaagaaatgccattgctgaggtcaatcagaaactcataaaaaatcaagagatatggcggaagaaggttaaagaagctgaagggagggaggctacatcaattaaattgaagaatgagaggataaatgatttggaggaacagattagagatatcaagatttttcttgaagcgcaaaaaacaattgataaaatgtcagattcaaatgggatcaaggagggaacagtcctaccggtggcttatgagcaatcttctccaggccacagtaagagaaacaaaaagtctggtcgtaggcggaattagttgcaacctcaaccagaacacaatattcgaacttaagggtagtctgctttttaggagggatgggcactgcttctgattattacactgatacttgttgatatatagaggcagatccaacccatggccatggattgctgtcctgcggtatattttacatgttgtatagttgactctgtaaacagttggttcaacttattttagatgtttcatggttgtgatggtaactaacccaaaattagcaagcaacaattcagctccattgcaatgtcagaatcaaattttctcaacacattacttcagtaaattctttgaaatttattaaaatgcacttaatgatatgaatttcacttcttattgatga

SEQ ID NO: 64924 - DNA, 572 bp, Glycine max
  unsure (1)..(572): unsure at all n locations
  Clone ID: PAT_MRT3847_29639C.1
agagaggaaagggttaggaccacgaaattcgttaaactaactgtttacaagaataaactatacaacatctaaaatatgcagacagcaatccatggccacgagttggaactgcctctatatatcaacaagtatcagtgtaataatcagaagcagtgtccttccctcctaaaaagcagactacccataagttcgaatattgtgttctggttgaggttgcaactaattcctccttcggccagactttttgtttctcttactgtggcctggagaagattgctcataagccaccggcaggactgttccctccttgatcccatttgaatctgacattttatcaattgttttttgtgcttctagaaaaatcttgatatctctaatctgttgcatcatcatttaacccatcacatgacaataaatttggaaaactgtaaaactgcacaaagaatcattgaagctagttgcaatacctgttcctccaaatcaattatcctctcattcatcaatttaattgatttagcttccctaaatgatcatatatttagacagggatcgagaatgaagntatagtctga

SEQ ID NO: 64925 - DNA, 353 bp, Glycine max
  Clone ID: PAT_MRT3847_2963C.1
tttaccgtacataatagtcataaccagctcgagcagactatacatgtggtttataccaaaaatgggtcttggcattgggatattcttttaccctagttgatagttttatttgagcttgtggtggtatttttttatagtatgtttggactttggataatttgaaagaaaatggggataataatgttttattattatttagttgaagaaaatggtgatggttccttcattgacagctttactaatattcggagggtgtcttctacagtaaagacagagcacaatatactgggtgttgtggttgtaatgcctttttgcaatttgaagatcataacaatcgttggaatataaaacta

SEQ ID NO: 64926 - DNA, 278 bp, Glycine max
  Clone ID: PAT_MRT3847_29640C.1
tgctgtacctatgttagcttaagttgacacgctccattttatattttttttcttggttaataaactaatagtcaactccatcattattggctttgagcctttaaaaattatattatctgtttatatcaaaataatttcgcctgaggagaggaataatggagcattgatagttaagttgtttaaaagaaattaattagaacgctaccacagtgttttatatttttattatttattcgtcaaacgcaaaataacacaaaatatctatattaactcatctt

SEQ ID NO: 64927 - DNA, 285 bp, Glycine max
  Clone ID: PAT_MRT3847_29641C.1
gggatctaatgaacgaatgcatctttgatgttgacaccaacgttttgcaaagtctagattagaaacttgtgtaactggaacagatatgctcattcttatcttgaatcaagaccctaatcttctgcgatcctattttgttcgacaggaaagattcgctatttttggacttttgggtaaaggaatgttcacagattttggagaagacatgcactgtcagtatctttgaaaccttcgtaattcatttgactcatgcacatcttctggaccacagagggacactattat

SEQ ID NO: 64928 - DNA, 626 bp, Glycine max
  unsure (1)..(626): unsure at all n locations
  Clone ID: PAT_MRT3847_29642C.1
tgagaagccaacctgttttatttgtggaacattagatgatctctgggtttgtatgatttgtggatttgttggatgtggaaggtaacatattatcatttcttctattttcactgataaacttgtgtatgaaactgaaagcccctaattaatatattaatatatgaaaaagtaaaaaaaaattgtccttgatatgccatgtacttttgttttgttggggaagactttaatgccgtgattttattttatttttatctagatataaagaaggacatgccattcagcattggaaagatactcagcattgctattctcttgattttaaaacacagcaaatttgggattatgtgggtgacagttatgtccatcgactgaaccaggaccagtctaaaattgatggcaagttggaggagatgaattttcgctgtatgtcactggaaggagattgtggtatgtgcgaatgccgtgaagatttgggaattaatggggcccttttcaacagcaaagttgaaacggtatggttctcataagtcacatattaaactcttgaatgtctttttgccttttattcatgaataaatctaaatcctcctacattntctatctactaatcttcctacattgaatga

SEQ ID NO: 64929 - DNA, 235 bp, Glycine max
  unsure (1)..(235): unsure at all n locations
  Clone ID: PAT_MRT3847_29643C.1
gtttggcagtggacngcttctgttctcagncattacaacagaactagcnattttaggatcaaaattttccgtctttatttgttaattctccgcacgatgtctcccgggcttctccgattaatccgtgacgtgaaagccccaatacacgtgccaaaatggcgcagttggtgttgcagattagccccaattgtatccacggctgatctgtgtcaaagcaacggcgaaatttcttttt

SEQ ID NO: 64930 - DNA, 843 bp, Glycine max
  Clone ID: PAT_MRT3847_29644C.1
gttttagaagtaattcatatcatctaacattataattattcataaattggatgtaccaaagtcaagtaacagaccagacaggcattgagcacaattctgaacaccgtaacgataacataattggggtatccggttctaattctagtaaaatgcaacattgctggcaagaaggggcaaaatgcctcaaatatgatacaactagctgtctagtgtctacattgtttgttacacaacaatgagaactacaatgcataagacttcaggtaccattctcagcagaatcatcgttgtcatcatttctctgctctagttttgaaatctcacaccgcagattctctaaaatctgcctcttctgtgtttccaactctttatggaaatccatcctcattttttccagttccaccatctgctgccttttactattttctatcttctcatatatcttactgaatttctgaatggaatcagcaagtaacctgaaggaagaagcttcaccactgccccttctcttctttcttttctttgcttgaggtccatcagaaccttcttcaccagtagattctgtattgtcaggactatccctcatttcatccaacccatttgcatggttcaaatgaactctggggttcataaaaacatactctcctgagtctacaccacaagagagaccagcttgttgcggaggagaagccattagctcatccatacttttaaaataaacccatttgcaagctccaccatcactatctggaaatttagccttctctttcttgtattttttcttcaatgtatccagacgatttctaaactgagtatctgtcctttcaatttttgaaacttgtg

SEQ ID NO: 64931 - DNA, 358 bp, Glycine max
  unsure (1)..(358): unsure at all n locations
  Clone ID: PAT_MRT3847_29645C.1
gtagtantgaagatcgnccnnngnnnncggagnnngannaccnctgaacacnnaggctcgngncaggtaggtangnanncacngagctagcanaganganncttngnangnccctcttagnngcngaannttccngggcgtcnccnanntcagngnggtnangtttnnggnncgcnngnnnagnncacncntnngggannngnnnnntcntcaggaaaggnnntnggaccngganantngcngnaacnggagntggncggaanagnataaaggnccttaaaanccgtgncancnnanggcgttnatcgangttgttggnnncggacnccnagttngggngnaaggggcnncctncaac

SEQ ID NO: 64932 - DNA, 496 bp, Glycine max
  Clone ID: PAT_MRT3847_29646C.1
gaccaatcctcttttctcatgtcgtttgtgtttttaaatactccaaaaggaggagttttggtacactctgtacctatctttcacacttgcctatctatttcaatctccatcatttcaattttttgctttgctttattaacccataataagatcagaatttcttctcattatatcttaatttaaattttagaatgttgattttgcatgtaaaattagtaataaggaattttatgatggttcagctttctgacagatggctatataaaaaaaaggttcatcatatgtagctttagtttgtggcggcaaagatagtaaaaccaataatatatcattctaatttttgcatgctaagtgcttcaaataattaaattaaattgagcaaattaccactgcaaaacctaatcaaatgctaatcatgttggcatgtccacataggatgcaaatatatccacaggaaatcaactgtgtattttgggtagggagtctaatttttgat

SEQ ID NO: 64933 - DNA, 507 bp, Glycine max
  Clone ID: PAT_MRT3847_29647C.1
cgcaaccctcgggctttggatgtcactactcttgggagcacaatggacgaaaaacactgcttggctgaaaaagaaaaattcacagactaactacgagattgtatatgaggtggagttagtagatgaactgataagcaaacatgaggcatactaaaggggcaaagacgaatacacgggtttgattgtttcaccactcttgtgttcttaaacgaaggagctatggaactcaagtttatgcagttggacgcacacgttcttactcattccccttgttcatttcaaaccattagttatggactgtgtttcacttcatggtgcatgacgagaaccctagtgtgtcgttttgtgaatagatcgagcctctttccgaccatcaggcggttgttaggataaccaaatcgtttgagcactcacaacgcttttcacgcgcagggggagtttgagaagaggttgtattgctaactaggagtctttctaggacgaagagttcgcaaagaatattgaaga

SEQ ID NO: 64934 - DNA, 3290 bp, Glycine max
  Clone ID: PAT_MRT3847_29648C.1
cttccaatttttgttttcttctataatatatttagaagaaaacaaaaattggaagaaggataaaacataatattaataagaagcaaggagctgggggaacttcatgagactaagattccctcacatctttggtctcattattatgggggtgcaaaaatgaagaaaagaaaaacattgaagggtggaaacttcggttcaccctcttctcccccactctgttactcagccacagtagaccttctttataaatagcgatgcagagcttagcattcagattccccccaactcttggctctttttcttcttagaaagagagtgttagaattgtaattatatagtactagtagcacttgataaagcagagattctgcttcaagtgtcaatccccatccttttaccacttgttatcatccacacattacactgccaatctctattcaaaattcaataacccacaaactaaaactaatggctctgttttcaaatcaccgacactcttccgaagcgctcttgggctttctactcttcctcgtattcagaggggtttcagtttcaggggcaacatttaccttcgtgaacaagtgcgattacacagggtgggattttaggtacgccggaactcggaagcacaggctttgaacttgcgaggagtcaagcgcgtccggtaattctgggctttggggaacgtgcgccctggttaaaccacgtttaacatgcccatcaataaagtcaaaggagctcttaaattggtcgcccccaaccactccccatctcttcgctctttttcttcttagaaagagagtgtttgaatattatttatattcttcatgtctgattaaccttgcaacttggttctaccacctctctctcccaaactctctttgttgtgctgcttcagcgtctgcaggtagcaaagatggcgacattgactgcttcaagtaacttagtctctagaaattctcatgtccatcatggaccaacaactgcttcatatgagtctaaagcagtagcaatgggacttagatctctgaagcagacaaatactcataatggactaagaatttttaacccggtggatgagctacttaacagaaccccaattaaaaccaatgcagtgcaagctatgaggaagggacctcaaggcaagaatgccaggcctaaaggcatgatcacatgtggcatgactttcataattataggaaccgaggtggctccatggtgcaaaactggtgggttgggagatgttcttggaggtctaccaccggcattggcaggttttgggcatcgagtaatgactattgtgccgcgctatgaccagtacaaagatgcatgggatacaagtgttgtaattgaggtgaaagtaggagatagaacagaaaaggttcgcttcttccattgttataagaggggagttgatcgtgtctttgtggatcacccttggtttcttgaaaaggtatgggggaaaactggacaaaaactttatggaccaactactggaaatgattacgaagacaaccaactgcgttttagcctcttttgccaggctgctttggaagccccaagggttctgagtcttaattccagtaaatatttctctggaccatatggtgaagatgtcatttttgttgccaatgattggcacactgcccttatcccctgctacttgaaaagtatgtaccagtcaaggggcatctatacgaatgcccgggttgttttttgtatccacaacattgcttaccaaggaagatttgcattcgccgacttctcacttctaaatctcccagaccaatttaagagctcctttgactttattgatgggcatgttaaaccagtggttggaaggaaaatcaattggttgaaagctggacttatagaatcatggtttgtgataaccgttagtccaaactatgctaaagaactggtgtcaggtccagacaaaggagtggaattggacaacatcattcgcaaaattgatgatgatggtcgtttggttggaattgtgaatggcatggatgttcaggagtggaatccaaccactgacaaatatatagctgtcaaatatgatgtttcaacagtattggaagcaaaggctcttctgaaagaagccctccaagcagaagttggattgccagtcgacagaaatattcctctcattggtttcattggtaggcttgaagagcaaaaaggttctgatattcttgcagaagccattccccaatttatcaagcagaatgttcagttggtagccctaggaacaggaaaaaaacaaatggaaaagcagcttgaggaacttgaaatatcataccctgataaggccagaggagtggcaaaattcaatgttcccctagcccacatgataatagctggagctgattttatattggttcctagcagatttgagccttgtggtctcattcagttacaagctatgcgctatggatctgtaccaattgttgcctcaacaggtggattagttgacactgtcaaagaaggcttcactggatttcagatgggtgccttcaatgttgaatgtgatgctgtggatccggctgatgtggatgctatatcaaagactgtcaaaagggcccttgcagtctatggaactccagcttttacagaaattatcaagaactgcatggctcaagatctttcatggaaggggcctgctaaggagtgggaggaagtgctgctaagcttgggagttcctggcagtgaacctggaagtgatggagaagaaattgctccacaggcaaaggaaaatgtggcaacaccataataataagaacaaagatgtgagggaagcctctcctagtctgagtctcgtgaagttctcccagccccttgcttgttattaatattatgttttatatccttcttccaaatttttgttttcttctaaatagattatagaaatgtacatggacacggaaattacactattcgaatcagtgtaatgagtgcaggtctttcaagattagcataaattaaagcgtttcttaatagtctagatatgacacaggctatgttgggcaaacaaggagttgtgctgtatatccaacttgtactgcttttgtcatgtttggctcctataaaaggtaattttacggcgccggagcctccccgccggccacgctagccgagtttacactcggcaccggctccatggactactacgacgtcagcctcgtcgacggctacaatctgcccatgatggtggtggccataggcggctcggggtcctgcggcgccactgtgcggtgaggatcccggtgcccgtctatgttgggcga

SEQ ID NO: 64935 - DNA, 332 bp, Glycine max
  unsure (1)..(332): unsure at all n locations
  Clone ID: PAT_MRT3847_29649C.1
acaaacacaaaaaattatatatatatatatatatatatatatatatatatatatatatatatacatatttgtgtgcatatctatacaattaggtacacaaaaatcctcatagacatggaggtaaaaccacaagcacncaccttanagataacggntatgtcgggagaaaacataancatggatcnaaattcnntggcnnaaaacgnntatgttgntgttcgggccgaatctcttaactcttgcanaaccaaaatgnnnaatnaaaaangcnnancgcntgcntggaatgagaannnnntattaaacattcctttgtntgcaaaatcanttac

SEQ ID NO: 64936 - DNA, 264 bp, Glycine max
  Clone ID: PAT_MRT3847_2964C.1
gcctccgacgggtacgccgaatttccaccaaagattccgagtttcactactgcattccccgctggctccccggcagactctgcccgataaagctgttcttaggtgcgagagaaagcaagaagattttttttcatcgacgcgccccagcagacgaaagacccgggggaggaggaagacgacgacccggacccggatgatcacaggggcggcgcaggcaacatacgggcatgcgcccggaacccccagcaacaccacaaggggggg

SEQ ID NO: 64937 - DNA, 492 bp, Glycine max
  Clone ID: PAT_MRT3847_29650C.1
catggtgcaaaactggtgggttaggagatgttcttggaggtctaccaccagcattggcaggtttcgggcatcgagtaatgactattgtgccacgctatgaccagtacaaagatgcatgggatacaggtgttgtaattgaggtgaaagtaggagatagaacagaaaaggttcgcttcttccattgctataagaggggagttgatcgtgtctttgtggatcacccttggtttcttgaaaaggtctggggcaaaactggacaaaaactttatggaccaactacaggagatgattacgaagacaaccaactgcgttttagcctcttttgccaggtgaagatgtcattttcgtcgccaatgattggcacactgcccttatcccctgctacttgaaaagtatgtaccagccaaggggcatctatatgaatgcccgggttggtttttgtatccacaacattgcttaccaaggaagatttgcattcgccgacttctcact

SEQ ID NO: 64938 - DNA, 1364 bp, Glycine max
  Clone ID: PAT_MRT3847_29651C.1
ccacgcgtccgcttggctctttttcttcttagaaagagagtgttagaattgtaattatatagtactagtagcacttgataaagcagagattctgcttcaagtgtcaatccccatccttttaccacttgttatcatccacacattacactgccaatctctattcaaaattcaataacccacaaactaaaactaatggctctgttttcaaatcaccgacactcttccgaagcgctcttgggctttctactcttcctcgtattcagaggggtttcagtttcaggggcaacatttaccttcgtgaacaagtgcgattacacagtatggccagggattttaggtacgccggaactcggaagcacaggctttgaacttgcgaagggaggttcaagaagcttccaggctccgaccggctggtccggtagattctggggcagaaccggttgccaattcgacggtttggggaaaggaacgtgcgccaccgcggactgcggctccggcgaggtcaactgcaacggcgccggagcctccccgccggccacgctagccgagtttacactcggcaccggctccatggactactacgacgtcagcctcgtcgacggctacaatctgcccatgatggtggtggccagaggcggctcggggtcctgcggcgccactgggtgcggtgaggatctcaacccggcggtgcccgtcggagctgagggtggagggcggcgacgcgtgccagagcgcgtgcggcgcgttcgggaaaccggaggtatgctgcaacggtgcgtttagtaacccttccacgtgcaagccttccatgtactcgcaaatgttcaagtccacatgccccaaagcctatagctacgcttacgatgatgccactagcaccttcacgtgttccggcgctgactacacaatcacattttgtccttcttctccaagtttaaagtcttcaacggattcaagtccaaagggaatagatggagggtcagggtctgtgggaggttcatcggttgagcaatctgaattagcttctacttcgtggttagccgacatggcaacagctacaggggcctcaacacgaacacggcctcttgttgcatcaaaggtctctttttctgtggtggtggttttcattctctctcttttggtcgcttagcttctgggtccccctctcctagtgacgtctcaactacatccttatcttccttcttccctttcacacagacacaaaaacaagatcgatagcattgatacgcagtgataaaaaagagtactgttgtgattattaaattatatagcatatatgtaaattttaaggtgggactagcagtataagcgtttcaatcatttgttgccgggttattttgtta

SEQ ID NO: 64939 - DNA, 1455 bp, Glycine max
  Clone ID: PAT_MRT3847_29652C.1
aggaatccatttaccctcttgacgaggagagggtacggctgcgagaagacgacagaaggggatctgcaacatttttatctaccattggggtttcactgttcagtgtaactctcaagccatgtctccgggtcccgttattgacgcagccaccgaccccggcgccgaccaacaaattccctccgtcgacgacgcaatcctcaagaagaaagctcacccccaggaagatgacgctcccattgtcgaggacgtcaaggacgatgacaaagaggaaaccgaagacgaggatgaggacgatgacgacgatgacaaggaagatgacgcccaaggtggtgctgagggtgggaagcagagcagaagtgagaagaagagccgaaaagcaatgttgaagttgggactgaaacctgttactggcgttagtagggtcacaatcaagaggacaaagaatgtgagcattgttattgttctatctgtgatctatctgggaggcggatggattttaaccaatttgttttatgcattagattcttttcttcatctccaaacctgatgtcttcaagagtccaaattctgagacctatgtcatatttggtgaggcgaaaatagaggacttgagctctcagttgcagacacaggctgctcaacagttcaggatgccagatgtgggatctgtaacggcaaaacaagatcaagatgctgcagctgcagcggtgcagcctgaagaagaggaggaggaggttgatgaaactggtgtcgagccccatgacattgatttggtgatgacacaggcaggagtgtcaagaagcaaggctgtcaaggcccttaagactcacaatggggacattgtcggtgccattatggagctcactacttagtttcggtttatgttccatttgtagtttttgatttttggggatgattttggaactagtgccatcgtttttgtggtagtcaaaccatatatttggtccatatggttgtgcttaccttataatttcttgtggtacgatgtgatgatcaatgatcatattattttgttgtctttacttatagtagccttcttttagctctatatctttttgcccttaagttaacgtctagccctaaaattcgttggtttaaactttaggtatatatggttggtttgttgtatctgtacctgcaacactaaaggttcatgtcccgtggcctttggaaaatgggggccattgagctaggaatttttgtatcttaggctatattgatgattggattaaattgaattaattttaaaattttaaaaaaatatttgttgcattttgaaatttacaaagttatcattagtcctccacgatgtctagcttggacaaatatatgttggttgttgatagagatgcattgtgatcggacgatctttacactatgtaaaaagaaattgatttggatagcgtgagtgaattcttgttgcacatgacaagc

SEQ ID NO: 64940 - DNA, 1320 bp, Glycine max
  unsure (1)..(1320): unsure at all n locations
  Clone ID: PAT_MRT3847_29653C.1
cacccccaacctctccccatctcttcgctctttttcttcttagaaagagagtgtttgaattgtaattatatactatattgctctatatatactaaaacgtactaacaattgataaagcagagattctgcttcaagtgtaatcatccccatcctttatcaccttttaccatcaacacattaatatactgctaatctctatcttccttctctattcaatattcaataacccacaaactaacaaataatggctctgttttcacatcaccgacactcttatgaaacgctcttgggctttctactcttcctcgtattcagagaggtttcaggggcaacatttaccttcgtgaataagtgcgatcacacagtatggccagggattttaggagcaccacagctaggaagcacaggttttgaacttgcgaagggaggttctaaaagcttccaggctcgtaccgcttgcgtccggtagattcgcaccggttgccgattccacggttcggggaaggtggnatgnnagctacttaacagnaaccccaattaaaaccaatgcagtgcaagctatgaggaagggacctcaaggcaagaatgccaggcctaaaggcatgatcacatgtggcatgactttcataattataggaaccgaggtggctccatggtgcaaaactggtgggttgggagatgttcttggaggtctaccaccggcattggcaggttttgggcatcgagtaatgactattgtgccgcgctatgaccagtacaaagatgcatgggatacaagtgttgtaattgaggtgaaagtaggagatagaacagaaaaggttcgcttcttccattgttataagaggggagttgatcgtgtctttgtggatcacccttggtttcttgaaaaggtatgggggaaaactggacaaaaactttatggaccaactactggaaatgattacgaagacaaccaactgcgttttagcctcttttgccaggctgctttggaagcctctcctagtctgagtctcgtgaagttctcccagccccttgcttgttattaatattatgttttatatccttcttccaaatttttgttttcttctaaatagattatagaaatgtacatggacacggaaattacactattcgaatcagtgtaatgagtgcaggtctttcaagattagcataaattaaagcgtttcttaatagtctagatatgacacaggttcccaggctaaaaatatttggctccaaaaggtgggtttttttttttatataattttattttgatcctgttcatgtctcgaatctaagactattaacatgggttatatc

SEQ ID NO: 64941 - DNA, 423 bp, Glycine max
  unsure (1)..(423): unsure at all n locations
  Clone ID: PAT_MRT3847_29654C.1
gggggaaacgaggtagctccttctttttgggttggtttggggggggggttctccccccccccaacaaaaaaaagggggccccccatcccaacccccctttttattaacaactttgtagttttaacaccaaataatttttggggggggggagttaaatataatccccccccaccatttcttcgttggaataattttctgccgcccctctattattaggactccgcaggctttattcattaatcgtggtggtggcaacttttcttgttgaataactacccccctttgatggaggaatgactaaaaaattgtcaacaatgctgtggtgggttgaaaaattctcaagaaaaaacggttcctgaggcctactctnttaaagaaggttcttgcggccgtcgtggtgaagaaaaattggtctggaagaat

SEQ ID NO: 64942 - DNA, 624 bp, Glycine max
  Clone ID: PAT_MRT3847_29655C.1
gcacgaggcactcttacactgcaacaaacccttattaactcttcttaaaacgcgttattttatgcctctctttccgttaattttccttttcccattcctcaagaccgatttgcatcaagttttttttagggtgaattttgtaattggttgatgctttcattttcttcatcagacgtcacattcttagggttaatgttgctatttatatatgtattcagcaatttggtattatttgatatttgatggccaatatttatatacaaaatttattttagttttaatttccattcagcctcttcatcaaacgccttgcgtcaaggttcccttaccctagtactctctctctctctctctctctctctctctctctctcgttttctgtgtcagtttcttgtttttggtttcaggtgttgatgagtggtggtttgcttatttatgcttcttattcacagaagaggagataaaatagttcaaccatgtaggcataacattttaccatcacctccactgtcctctagattcccctctcatcacttgagatagatttcttcgcaaaatgaatccaaaacgtgctctggttctgtttgaataaacttctcaatgaacagtacacttatatgagga

SEQ ID NO: 64943 - DNA, 482 bp, Glycine max
  Clone ID: PAT_MRT3847_29656C.1
cccacgcgtccgtacggctgcgagaagacgacagaagggggaagcaattcattcaataatataatgatgattcttcatgttaaatctttgcccttctgattaaccttgcaacttcgttctaccacctctctctcccaaactctctttgttgtgctgcttcagcgtctgcaggtatcaaagatggcaacattgactgcttcaagtaacttagtctctagaaattcccatgtccatcatggaccaacaactgcttcatatgagtctaaagcagtagcaatgggacttagatctctaaagcagacaaatactcatagtggacttagaatttttaacccggtggatgagctacttaacagaaccccaattaaaaccaatgcaatgcaagctatgaggaagggacctcaaggcaagaatgcctggcctaaaggtataatcacatgtggcatgactttcataattataggaacggaggtggctccatg

SEQ ID NO: 64944 - DNA, 589 bp, Glycine max
  Clone ID: PAT_MRT3847_29657C.1
ctgttctttctagtgcccaacagcttactttctaagtgcattctttgggctcgagttctggtgtaacaaacaagagtgcgccttccctaaaaaagttgggccagaccttggtggggttgaatcttcaaaactgcaattcaattggctgcaacacagttgagttcctagtggagaacttgtggagatgtgatattctggcttaatatcttaaccatccaattgcaatatcagggaaggagatataatttaagtgacaaaaccgaatctggaaattcaggatagatagtaaatgtatcttgtgcaatgaactcacaggtggcgacattccacatactttttggacagatgtacctacctatctagggtggattgggtgggagtttgttgacatagttgttttccagggaactatgatagatcctttctttagcccttttttttcaagcatttttcatacagaaatgcttgttacaacaacccttttggccttgctacttgaggccacttcctttatgctatggttccgtgagaaaacctttactatgtcttggttgatggttgcctctagatagatagtacattggatatg

SEQ ID NO: 64945 - DNA, 159 bp, Glycine max
  Clone ID: PAT_MRT3847_29658C.1
gatccaaaggggcacctttgggggccagccaatcaagatttaacttgtgcatggatggttgccctgatggaactacttcgacatcgtttgtgtttcccacagtgctcgttggtcttctgcaagagggtctctggatatcctgcgttcggcaacgctgca

SEQ ID NO: 64946 - DNA, 443 bp, Glycine max
  Clone ID: PAT_MRT3847_29659C.1
ttttgggtatttcctcttggatttccgctcacaggcatgtgcaatatcatttttaatgagacgctcattagatatagctatgaaaaattactgcgccaggctaaagctccaagtatgtttctacaatccttcaaaaattatgtttctttgtgtgtgtatggtgatgataacttaattagtgttcatgaatatgccaagccttactttagtgggtctaaaatgagaagctctcttgctggacataatatcaccattactgatggtattgtcaaaactagcgcgaatttgcaattcacaaagttagcagatcgtgaattctcaaagagaaactttatgcagactgtctaaagttttgtgggtggctctctgaggacaaggctagtttatggccacaacttcattatgtttcgtgtaataatttgtaaatgcatgaagcttttctt

SEQ ID NO: 64947 - DNA, 254 bp, Glycine max
  Clone ID: PAT_MRT3847_2965C.1
tcgtaatatttagtacagtgattatttctaaactgtgaagtaaaaaattatatgaatggatttagaaataatcgtaatatggagtacagtgatttttttttgacagaatgttgatatagatacataaaacgttttcttttttagacagaaagaatggagaattatatattatgctgtacatgtagaagtgagtgttcagtcaggactctcgcaggatcatgttctgagtcggtgatctatgtgtcatggtctga

SEQ ID NO: 64948 - DNA, 172 bp, Glycine max
  Clone ID: PAT_MRT3847_29660C.1
tcttttctataaaacaacttacagatatcccaactctttcccattacaacattcaaaaacagttcttccttcacctgatgcttcatcttcatcatatcattcaaatctttttcaaaacccttactcaaaaaaccattaccctttacgtataaaactcttacactatttacaa

SEQ ID NO: 64949 - DNA, 375 bp, Glycine max
  Clone ID: PAT_MRT3847_29661C.1
gcgccagaaccctcggaattcggctcgagattttgtattttttttttttgggtgttgctttttcactgcgctcactgcccttgggggcgcggcgcataccccttcaaaaactaaaaaaccactctatctctatctctctctctttctggaccacacccaagaaaaaccaaactcctccagtgcctcttatgtacgtcgactcctgcggacacttgatcctaccaccaaacagcccctcaaccaattcctaacggacacaaccttctctccttcagcttctctttatcaacctatggcggaatccgccaattaggctttgatcaacctttcacagattacacgggcatgggctgcaagcgaggatgaatttgcaac

SEQ ID NO: 64950 - DNA, 266 bp, Glycine max
  Clone ID: PAT_MRT3847_29662C.1
gaccccctctctctgcgactctgcttcggttcttccttcagttcaccagctgcagacaatggcagacaagaagcggaaggagaggaatgaaggcaaccgccaaagaccgaagtcgaagaagaagcggccaaacactcaacagaaggagaggggcccttgtttgccctcatctttgcaaaaacagcttgactgtttaaaccctaccacttcctttgacagcattgattctgacgactacaatgacaatgatgtacacgagtacaagg

SEQ ID NO: 64951 - DNA, 193 bp, Glycine max
  Clone ID: PAT_MRT3847_29663C.1
ggctcgagcttgaatgtgactgagcatgtacatcttctcttcacacctatggctcaccatgggcctgcctgtgtccccgctttgggtgcgcaccagacatattgggtggtcatactggactgcatctacagtgccatttagagtgtatgtaacaacatggacttttaaaacacaaacataatgtcctacggcg

SEQ ID NO: 64952 - DNA, 126 bp, Glycine max
  Clone ID: PAT_MRT3847_29664C.1
ggctcgagctcaaattctatcttctcttatcacattactaactctctatccatatttgcttccggggacagatccatttattacaacacctacaagctccactatcccatacaactctgattttcc

SEQ ID NO: 64953 - DNA, 335 bp, Glycine max
  Clone ID: PAT_MRT3847_29665C.1
ccacgcgtgcggccacgcgtccacacacgcgtgcatacacgtgttagacgactgcaaaaagtcatcggggaagggatagattagaaaaggatcgagttatactgtgctacaattctgattgattatctctgacatagcctcgacaaccttttatgttcaaatgaacactcgcttatcaggcccgtactaccgaggataaatgctcacgttttaccctttctctggaatcgcccgacatcctttgactttagatcacttatggtaaatgcgattcaacttcagttgaacacatgtataggcaaccatctataattgaatcttacacatttcttaca

SEQ ID NO: 64954 - DNA, 455 bp, Glycine max
  unsure (1)..(455): unsure at all n locations
  Clone ID: PAT_MRT3847_29666C.1
acacataaatgcatttttctttggctatacttgggtgggcataattgtattccagaagggacacaaattcatgggggtcgcgaaattggaaccccaccgaggaaacatttttttttataaaatggacaaaaaccttttaaactatattgcgttcaaacactgagaaatgacatgttgaacatacccgccttcactgaacttgagaaaccgggaatataaggggggcactcaaacactacttagaatctctcgctcttttagtcgaggccggaatatcgaaaggcgcgcttggagacggacgagacttgctgttctgggagaaagcccgagactaaaccgggggtggtccctgtcaataagactttccggctggtgcacttctgtcagtggggtgattccctcacgagcaatggngattgtgaatccactttgcttgctatgagcagcatttagtg

SEQ ID NO: 64955 - DNA, 401 bp, Glycine max
  unsure (1)..(401): unsure at all n locations
  Clone ID: PAT_MRT3847_29667C.1
aaaattcagagttgatccacctctaggggagccaaataagttcattcctgcacctcaactcaagtgcttcagttatgaattctctgctgagaggtttgaaataaccccaggtcatggacaagctgctgcttgtgacctgtgtggtgttagccaagattattctgatggattgaaacttggccttggattgtataatcctggaacatctgaggtcgggcctagtcaatctaaggacgaacctgagacagatgaaattaatgatgcagattggagcgatctcacagaagcccagctggaagaacttgtcctgactaatttggacacaattctcaagagtgcaattaanaaaattgtagcatgcggctacactgaagacgttgctactaaggccattttaagac

SEQ ID NO: 64956 - DNA, 245 bp, Glycine max
  unsure (1)..(245): unsure at all n locations
  Clone ID: PAT_MRT3847_29668C.1
attgagaagaaaggtatattagaaaagataaaagagaagcttcctggttatcactccaagacagaggaggaaaaggaaaaggaaaaggagagtggtgctcattgatttaagatgnacanggtttttgttgttggagatgcatgattgtggtgtggctttgttttcatttcatcatatgacagccttgtgggtttctttgggttcttgtgatactaattacttattattggattatctcttcatta

SEQ ID NO: 64957 - DNA, 370 bp, Glycine max
  Clone ID: PAT_MRT3847_29669C.1
cgctctgtgagattccaggcaacagtggggaacaaaatttagaatctcaaatagacaatggcctctaccagacattcaaacagaatttaactttggaagaagctaaatctgccaaggtctcatcagaagaccgacaacttcaagctgttgccgaaggtttagctgcttctgttctgcactcgagcacttcttcaaatcttgatttgcatgccagggatgtgtcccatcatgaagacactggcaatgaagatgttcaaaataatcaaacagatatacagcataatgataaaactcaggatctcaaaagcaagcttccagagaaggcaaattttggctttccagtatcagatgttggagctttgcaggttat

SEQ ID NO: 64958 - DNA, 253 bp, Glycine max
  Clone ID: PAT_MRT3847_2966C.1
ccccagaaaatagattcaatattataagcagagtttcataattcagattagccgatctttatacagaagcgaccatttaccaaacatttaaaaaataaaaatagatgcaaccctgagcttgacacaccgctcacaagtccaaaacactggaactagctgaaaggcaagactagaccactttattctaaagatcgttggtttaacacaaaacacccagactgcactataaaccatcgacaaacataatacataa

SEQ ID NO: 64959 - DNA, 259 bp, Glycine max
  Clone ID: PAT_MRT3847_29670C.1
cccatgcgtccgcgggtgttctgcgactttgcgaatccgatttggtctcaatgccgacattcctttttggattcgactctttttttattctacttgtttttgatggaccgcaaagcctatgaccatcggcctgctcctccggcacatgctcacacccctgaatacttagccctccaggggaacacaacctatcaagacgacctatatttaaggactaggacaggaatgcgtaaaaggcttaggtgcacatgacatgtgg

SEQ ID NO: 64960 - DNA, 255 bp, Glycine max
  unsure (1)..(255): unsure at all n locations
  Clone ID: PAT_MRT3847_29671C.1
gccaaganattccccaaattgcaatctatatatatagctagatagcattgtgtactggacatccttcaaccagatcattcagccgaacggcctgctaggtgataaaacattccacctcgtgataagtctaggactccaccaggaggccttgaaacttctggggcccacattgggtgcacgaccggtccttgcctcatctgtaacacgtcgtaatcgtgggaatgttccgctctacgggtgcttctaagcgtcgaa

SEQ ID NO: 64961 - DNA, 103 bp, Glycine max
  Clone ID: PAT_MRT3847_29672C.1
tatggattggctcagtgctgggagtttgtgaatggcagtgcttgtgagagatgtttagcggatgctgtcacgaggattggttcgtgttccacgcaagatgcga

SEQ ID NO: 64962 - DNA, 304 bp, Glycine max
  Clone ID: PAT_MRT3847_29673C.1
gtcgagccgattacgttagagagtggacggcattggattcacagagtacaggtcgatatacgagtgcctctggtggggaggtggttagaactgcatagaggatgcatactaggttgattctgaataaggaatctgctgctaggtcacagtcatgatgacaggcatacgcacatgaactggagattaaagtgtcacgattagaagatgcgaatgtaaggattaaaagactaaatgaaatggagagcgcattgacatctgtgccaacagctgaacctagaccgaagctacagcttatcagaactag

SEQ ID NO: 64963 - DNA, 251 bp, Glycine max
  unsure (1)..(251): unsure at all n locations
  Clone ID: PAT_MRT3847_29674C.1
nctatccttcctgcccctgtaaaaaggctatggtcgatggcttntaagctactctngccttactggaaaagctatncgatctacgggaagnatgnntgataagnaactnattggagacccgcatnnataagatcctttnnnaaccnntcggnnattncgccctcccactactggctagnattncgactgtnnngnnagacaggtnccattatgcagnacttcatagtattttgactntggatntaagatag

SEQ ID NO: 64964 - DNA, 177 bp, Glycine max
  Clone ID: PAT_MRT3847_29675C.1
ccacccttaattttacaatcaagattaatcatgaaaaaatcattctatacaaaagaagaacttggaacgaaatttcctctccttaatttcctagccttggaccctctgttggagaatcttttacagttataacatcccatccgattggaaggtttaaaaatcaaaattaaacaaatt

SEQ ID NO: 64965 - DNA, 786 bp, Glycine max
  Clone ID: PAT_MRT3847_29676C.1
tgtttatacactttccaaatcccaattgaattaacacttactatttagatataaatgttagtccctatttgagtttcagctccgtccacggatagaaataacgacttcaaccgaaagtcaaagccatggacagatcctaacatggttggaaaataaaattatttgcacaaccaaagtcctataaagaaacaacgtaggtgtttccgatgttgtttctatggctttgcattgttcttcattctactacttggaatgaaatgaatccttaagttttacgtttcacttgatatgaccactttcaacaacaacatcaccactaccactctctcaaatgtctctttctcgcaaaccactttctccgtcgccctcgaccccagccaagcaaatcgacgccggtgatttagctccggcaccgcggttgaccaggcagaggaagctccggcacctcactcaccaagacattggcttcttccattccgacgagtcttcgtttcttcccggtttgccggagtttcgctcccacgccggttccgaccaccggtctttctctgctctgccgcaaccgctgccgcttcccgaagcgccgttgacccgtcgagcaaaatcaatcagctccagttccgtaaatcgtcgtcgcctttcatcttcgttagaacaacatggctttgctatttcgaggagcacagtgtatcaagaagcagtggcacgtacaaaacctacacttaatttggataaatcctgcttggattctactctggcaaatgcaaatacaatctgagagagcat

SEQ ID NO: 64966 - DNA, 395 bp, Glycine max
  Clone ID: PAT_MRT3847_29677C.1
ttacaggtcttaaaagacaaccttttttgttaagctaaaatggaaaaataaaaccattcttagccccaaaaatgagcatttcataaacttctcccgcatagtaacatacttcagatacactactggcctgaaagaacttgcatacaaccgcttaagcatataccaattcatgcgatagcccatatggctcaaatctttcaagtgacccagctcactatataggcacttgcccatcgccccaagctggcgaaaacaaactgacctacatttgactgctgagttatgtcattgtgccttaaggctaattacgagtttcaataccctcggacacaaaaggatatgtttcctaatgagtcccgcaaagcaaaggcactggccctcgttatacaacgttt

SEQ ID NO: 64967 - DNA, 1051 bp, Glycine max
  Clone ID: PAT_MRT3847_29678C.1
gaaagaagaagctacttgttggctcgcaaatgaagttgtgtgagaactgagaagggtacttggtgtggtgggtcttcctaatccattgaaaggaaattattaaaatatgaagtctgctcttatctaaatcacccttatttatccagattaagatagccttcagcagaatataagaagctgcaaagttcccttcttttggggcagagtcaattcatcaattaggagttgggtgagagaatggaagcctcagagcagaacaattcaaaggtagtgttgattgattctttgcagtcatgggagttccacgtcaaccaagcctataatcagaatactcctgttgttgttcacttcactgcttcatggtgcatgccatcggtggctatgactcctgtttttgaagaactggcttcaagctatccggaagttctgtttctcactgttgatgttgatgaagtcaaggaggtagccaccaaaatggatgtaaaggcaatgccaacatttttgctgctgaaggacggtgctgcggtggacaaggtggttggtgccaatccagaagagataaagaaaaggatagatggggttgctgagtccactcgtgtctcactggcatagttaagcatctgtatgatattctactgttgcaagttgcaagatatgtgcttgtggtcctgcactgcactatggcatctgagtcaaagctttttgtgatgttgtatgttgttgaatatcagttcaagtgtaatttccaaatttgataagcgcaatgctttggttactgattaatatccgcagtttttgtatcagccaaaattttacatttcgtagttttggttgttgtggatttatggtgctctttccctgcaagttgtgaattcaagggttatgtcctgctgtctttatattggttcttttgcgaatgaaatatatatgtatattttcaagatatgtctcaatcagttgagtttaatgtatgaactggtttgccaatggaccaatttcttgcaaaattaacaggtggagaatgagcatgtttgctgctaaaaaaaaaaaa

SEQ ID NO: 64968 - DNA, 1358 bp, Glycine max
  Clone ID: PAT_MRT3847_29679C.1
cacgaattctgattccatttacgcccgcttccgccttctttctcttcgaatctcgtgcacgtgccgttgcagcaaaaaatgccagaaattcagttgggtatgcatactatcagatcacatggaactagagtggcaaggacacatatgcacgactggttgattcttttgcttcttgtgatcatcgatgctgtcttgaatttaatacagccatttcaccgttttgttggagaggggatgatgacagaccttagatacccattgaaagctaatacaattcccttttgggctgttccgataatagcaatattgttaccactggctgtttttctcgtttactatttcattcgtaaggatgtctatgacctccaccatgctataatgggccttctattttctgtactcattactgcggtgatgactgatgctatcaaggatgctgttggacggccaaggccagacttcttctggcgttgtttccctgatggaaaaggggtgtttgatccagtaacaagtaatgttctgtgtactggagataagggtgttattaaggaagggcacaaaagtttccccagtggacatacctcttggtcctttgctggtcttgtttatcttgcttggtatctatctggaaaacttagggcatttgaccgcagggggcatgttgcaaagctctgtcttgttttcttaccattcctcgtggcagctatgattgctgtctctcgtgttgatgattactggcatcattggcaagatgtgtttgctggagctcttatagggatgataattgcttcattttgttacttacaattctttccacctccatatgacgtagatggttggggacctcatgcatatttccagatgttggctgaatctcgtaatggtgctcagccctctactgtcaataatgagattcatcatgtgcaatctgctgagcttcaggctgtatctttgtatatcccacctcaacatgatgcagatacacgaggcaatagctgggattcaagccccatgttaggtgcatcccaaaatgtaagaacacactgacgacataggaaagatcaccaacatgtccataatctgtaaaaattataggagggattcgttgcagataaaccactttagcatcgttggcggtttaaaatgcggatatcaatcaatttctttgcttgttggattggaaatttgggatgtcatgttagttgtctttaattttccgaccagcttatatttgttattagttgtcaaagcactgtttctatacagagaatgatttaatcggctcaacaggattcaagcatacaatattttgcaactcgaggaaaaggggggaataaatgaatttcttgaactcctat

SEQ ID NO: 64969 - DNA, 338 bp, Glycine max
  Clone ID: PAT_MRT3847_2967C.1
tcgtgctaaattactgtgtttttccttcttattcatttttgagagcgaatttatatggattttttttattcactagggggaaagatggaaacttatgaatatcatactctacacattttcttcttccccttctttgcctatggacatgtgataccaacccttgacatggccaaataatttactgaaaagggtgataaggccactatattcaccacaccccttaatgcaccttttatctccaaagtctaagtaaaaaccaaaactaatctcatcataatccatatccaaaccatttgttttccttgtgcagatgctgtttcacccgttagcttagaaaa

SEQ ID NO: 64970 - DNA, 249 bp, Glycine max
  unsure (1)..(249): unsure at all n locations
  Clone ID: PAT_MRT3847_29680C.1
gnagncnagggcntgtgttgtcanaatccnaganagangtnatggcgaacatagacattcgaagggatcttgangcagcagcagccttatgntgggngcgttccgaagacgaagatagtntgtactttnncnnccngcttctcgatcctaaaaatgaccgaggagcttctganggcgggatgaacgttgctcgtttcaatntctctcatggnacccacnactatcancagganaccctcaacaatctca

SEQ ID NO: 64971 - DNA, 436 bp, Glycine max
  Clone ID: PAT_MRT3847_29681C.1
atcactttcaactaccaagtccctaggacattagacccaaggatcaaactcttggtcagacttcctatatgtcaccgttctcgtcctctagctgccgagaactcgcgatcgttattactctatcccgacatactctctgtgatcatcatgcctgtctggccctgctgccactgcagataacttcgatggcgcactcacttgtgctgagagaacaaaactctctgctgccatgtctgatatatactgtccatactatattgacgatcggtgaagctgctcattcctctgacaccgctggagacagagtcggggaactctcacttcctaatggagaactatatgctgggtactttcttggaacattccagacgcgcaggttgagtatcgtatggacagatgcttgagtatatgaaggtgagtggtgactaaggatgag

SEQ ID NO: 64972 - DNA, 553 bp, Glycine max
  Clone ID: PAT_MRT3847_29682C.1
ctcactattttgagacaggcttgcatgggtgcaggtcgactctagaactagacaggtgacctaacctgaaatgccaaattgcattttcaggtatatggacattatttgctgaggaaaaaatggaagaaatgttgtagttggaagaagcacattccttatttgtctgagtcaagtagtacaagccatctctgctttcacccaaaccaatcatcttcagtgatttctgctcctgtatggaacaaatagtgtcagtgaaattgagtgtataaggtgtatggtgacataattgagagacagaaatcaaattgactgtaaaggtaggaacatataggacattggtgatactaaaagaagaggaaaacacaactgtgcctgcatatttagtggtgacatgattaccatttggtaattttataatcatgggattgatttcactataagagtgaaaccagtgcagtgaggcacatatgtgatgactagcacctgtttctatgattccggtatcaagagcaatattattacaaatagatgaattaaaaaaatgagatttttt

SEQ ID NO: 64973 - DNA, 605 bp, Glycine max
  unsure (1)..(605): unsure at all n locations
  Clone ID: PAT_MRT3847_29683C.1
ggctcgagcctgaatgcaccaccacaaatagctttaatcaaaataatgcaggcccaacgtatcaaacaactgagggtaataagtagtggaaggtgtttattaggagaaaggggtgtaaacagcagatggcccacaaggaccttactaatggaaaagctacaaagtctatattttcgggaattaaccctcacacagaatccataggaacagccacatcaaaacgatcaaaagaagccgactcacagatacctataaaatccattggagctgatgaagggcagattgaagaggcattaacccaatgggagcttgcaaaactcatgtgggtgtctacagattcagagcagacaacaatcatccataaaattattgacatggagaccacagacaagaaagaggctgaggatttgggtgacaaaaaacctgcatcatgagtattgnttcctacaatgttagagggcttgggaaaggggtcaaatgggctgctgttcggaggcttgcaagaaaaaacaaaatggacatcttatgtattcaagaaacaaagaagagcaaatcgataaacctatgtgtcaagccttgtggggagacatggatgttgtttggga

SEQ ID NO: 64974 - DNA, 336 bp, Glycine max
  Clone ID: PAT_MRT3847_29684C.1
aaagaatgcctatctataatatgctcattcaatttatccacatgccagcaccctaaaaaagaaaactgggtgcgtgccttttttttccgatacccttgctagattattcttatttaatttgaataatttgatcatgtttttggaccagggttggattaaaataccacaaggtaccgggaggtgcagtaaccacccttagggaagcccgtggattttgggccatggcccgccaggtgaaccagccaagatattggttttaagtattcccatttttggttacaccattggtttcaacaccattttaacaccactgtgaacctttttgggcccaccagg

SEQ ID NO: 64975 - DNA, 290 bp, Glycine max
  Clone ID: PAT_MRT3847_29685C.1
gagggggcagcgcttgatttgaggccaggcaggccccactcaaccaccacacctctcctcgttcacgctgcccctttctgctcttcttctacctttcaagttttaaaagtataaggatggcagagacattcctatttacctcagaatcggtgaacgagggacaccctgacgagctctgcgaccaaatctccgatgcggtcctcgacgcttgcctcgagcaggacccagacagcaggagttgcctgcgagacatgcaccaaaaccaacttggtcatgggcttcggggaaat

SEQ ID NO: 64976 - DNA, 121 bp, Glycine max
  unsure (1)..(121): unsure at all n locations
  Clone ID: PAT_MRT3847_29686C.1
ctgngagnagaatcgntncgccnaggaacnnanncaactttgcaatttaacagctgagaaagaagatctgtganttctctctctcttttngttgntctctgtngtgtgcagagaaaatcac

SEQ ID NO: 64977 - DNA, 749 bp, Glycine max
  unsure (1)..(749): unsure at all n locations
  Clone ID: PAT_MRT3847_29687C.1
cccccccatttcttaaagttccaatcttgttatcaatttcgccccttttcgtttctggccttgtcttgaaattttcttttttgacatagttgtgttgcattttggattggatggttttgctgttatggaaatgattaactaagtcagtaattttgtttcattagtataattagtgatgctaattattggttgtgtggagaatttttttttagtggtgtgccaacaaaggttgatctagttggtaaggaatcaactcatatcccacatccgatgtgaggaccttattggtgggtaatgtgtaagaatctttgtaagcactctttaagtcttgatgcctaccctggcccggtgagcccctcggacctaactcacctaaattattttatccggcaaaagaaaattgcatagtggtgtggaaaggaggagggaagggacaccgacaagaatgaagttcttaagagggacatcatggtaaataataggctaaaatataattttggtgtctgaatttttggttttgtattgattccctaagtttaaaatgtttcagtttggtctcttaaactgtctctgtaagacaaaatggtccttccatcaggtttttgcactattgatgttaattttggctgacatacattaaaatctggtatgggatttataatagnttggccatgtgtcaccaagtttaccagattagtatgataaacttgccaaaggatcaccttgggctaaaacatttaaggggacca

SEQ ID NO: 64978 - DNA, 247 bp, Glycine max
  Clone ID: PAT_MRT3847_29688C.1
ccggcaatatgtgcaaagtaattgggactcaaaatcttctaaaatttctggttcacaatagcagggggactacttgtgtccaaaattaaataaatccaaccaagatgattggggatgaactttaactagcacttttacctttatatgggtgggagaatgtgactaaaatataaaagagcccctacagcccgggataaaagctacaggatcatttttccacaagggggtttggcgggaaattagaact

SEQ ID NO: 64979 - DNA, 1429 bp, Glycine max
  Clone ID: PAT_MRT3847_29689C.1
gccttcgggtccaggctcttgagagcggatcgaagaaacagatgaacaacacattgcatcctctcagtgttctcaagctctccaaaagaatgagcactagcatgagggagtccattctcccaatttgtctcttagatgcaactgcttccccttgcaggtcaccttggaagatctttactcatcatgagattcaggttgcaaccaattcttttagccaagaaaatttgattgggaagggtggttatgctgaagtttacaaagggtgtttgccaaatcgtcaattagtggcaattaaacgtttaacaagaggaacagctgatgaaatcataggggatttcttatcagaacttggcgtaatggcgcatgtaaaccatacaaatactgctaagctggttggttatggagtggatggtggaatgtatctggttcttgaattgtctgaaaaagggagccttgcttcagttctttatggttcgaaggaaaaactaccgtggtgtattagacacaaaattgcattaggaacagcaaagggtatattatatcttcatgagggatgtcaaagaagaattatccacagggatataaaagctgccaatatattgctcacgaaggactttgagcctcagatttgtgatttcgggctagcaaaatggctaccagaaaattggactcatcacaccgtttcaaaatttgaaggaactttcggttacctagctcctgaatacttgctgcatggcatagtagacgagaaaacggacgtatttgcatttggtgtattgctattagaattagtgagtgggcgaagagcacttgattattcacagcaaagccttgtgttgtgggcaaaaccattgctgaaaaaaaatgatattatggagctggttgatccttcactagcaggtgatttcgactctaggcaaatgaatcttatgctcttggctgcttctttatgcatacaacagtcctcaattcgtcgcccctctataagacaggttgtacagcttctgaatgggaaccttagctgcttcaagggcatgaagaaaactcgaatgccttttttccgaagagtgtttagggaagaactacttgattctgattaggttgaaaggaacaggaggtcacatgatcactgaatggtgaagctgatctctctgatcccttatttctgggggagtttcagcagctagaaattgcctcatcaaactgaaaattttcactttgttgagcccaaaataaaaagcattttaaaccattcaacttttgtacataatagtttttatatatataatggtattaatgttaattgttagatttttgtgggccagggaagacattgtagttaccggtgaggccttaacgtcacaacaacgcgtcaagttagcggtcccgccaggaggggtctacctatgtctgggggggggggggggat

SEQ ID NO: 64980 - DNA, 233 bp, Glycine max
  Clone ID: PAT_MRT3847_2968C.1
cttattgctatagtataggtcaagctgaatacctactctccacacacaagaacgcgcatcaccactatagcacttctttctctgtcggcctttttacttcctactgcattaaaccctgttaccttctcactaacacagaagtgcaagaccagaggaccgatcaaaaccgttgctttcagagtgagggacaacatcaagccttgaccacagtggtggagtgcttcagaatgctc

SEQ ID NO: 64981 - DNA, 240 bp, Glycine max
  Clone ID: PAT_MRT3847_29690C.1
gttttttttttgttaaaatagatttttcgaaagaaaagatcaaagtataaattagggatccctttccctgaaagtgggggtggggcattgattactgggccaggttgcacaggtagttaccagttatgctgctttcagtgctttgaactgtaaaggaataatgatagttattaatacctggattatgtcaatatcttcttatatggtgtttttctgaatgatattttttaatctgagagc

SEQ ID NO: 64982 - DNA, 382 bp, Glycine max
  Clone ID: PAT_MRT3847_29692C.1
gttggatatggaagatgtagtggccgttcatgaactgcatatatgggccattacagtgggaaaggttttgctagcttgtcatgttaaaatcagacgtgaagcagatgcagacgtggtgctggacaaggtttgccttgggcacctaaatgcatcaatggtgttaatacaagagggtcccttccaatccagataagcagctgtattgtgttttggagtgtattaccgacaagttttgtgcttcacaagcacaagattgtaaaggttctcagctttttactgtactatcaattaaatttgttgatgctataactattggtgatcgaaactcttttagcacgttaccaaagacaaaaatgtgaaaagaaattattttttattgatc

SEQ ID NO: 64983 - DNA, 319 bp, Glycine max
  Clone ID: PAT_MRT3847_29693C.1
tccttcttctggggtttttttttttttttttttttttttttttttttctttttatttgcccccttctggaaagaacgggagcggcgcaagaaaaaggggggggggggaaaacccgggggggacccaaaggaagcggggggcagaaaataaaaaaatctttttcaaagaggggggagaccagggtagccccgtccgagcttcaaaaaaggagcgctgcctgaatggagaagggggccccccccggaacagcacaataaacggagacggggggggggggtactcgcaccgagaccgctacacccgccagggccctagggcc

SEQ ID NO: 64984 - DNA, 311 bp, Glycine max
  Clone ID: PAT_MRT3847_29694C.1
acgcccacgcgtacgcccaacagcaagaacgaataatttaacttgtaaaccatcccattcaatatcagttgagccggggtatctatctacgacgcctagggggtcgatttcttcgtacaacactacacatgccccaatggccccgcagggtactaatgcaagagcccagcaaaggtcacagtggacgacttcttatactcctgccttgataccgccggcaacaactcaaacataattaaagccgcattgacccctgcattcgacgcacaattccccgaccttaacgggcttttaatattcattgcacgcct

SEQ ID NO: 64985 - DNA, 479 bp, Glycine max
  unsure (1)..(479): unsure at all n locations
  Clone ID: PAT_MRT3847_29695C.1
cctgcgagcggctcgagccctaatcactatatcaatataaaagaagaagaaaaaggtaaaaaagttttcctcatgaattggtgcttctcatatagttttttcttttcccactttcaagttagaatacacagaattatgagctgtgaactcttattattcatttaatgttcatatgatcatctgggtctttcttgattatggagtctactaccttctgtcggtctgttgattaatcttgatgtttattatttattttctatacaattcttagcacaattcaagacataacgaatttccaaaaaacaaaattcttcttttggtttatattacgcatcatctttattacctataacttgaattctgtttgctctgcctcttcatattttattttgtgttgaaattctttgttcttccttgtatttgcatggttntagatgattctgtatttattgtcagttttttttaaacctgtcactgag

SEQ ID NO: 64986 - DNA, 368 bp, Glycine max
  unsure (1)..(368): unsure at all n locations
  Clone ID: PAT_MRT3847_29696C.1
attaactatatatatgtcaagcattctatctaattgctgataaaaaaaaaaaaaagcattctatctaataacgtattgcctcaacatatttgacgagaaaattgtgtagatagatttggaactaatatctttaattcataaaaaaaatgaacaataccttttaaagtcatcaaacgaaggcgaagaaggaatgaaggagcacgacaatgacgtcatcaccaatgccgtttcggggagcgggttccggcgcacgcgctcgcatgcggagccggactggagcgtgacggaatcgctgattctggtgaacgaggtcncggcggtggaggcggactgctccgtcgcgctctccttgtaccagcagtggaaca

SEQ ID NO: 64987 - DNA, 246 bp, Glycine max
  Clone ID: PAT_MRT3847_29697C.1
taggtgacgcctattttttttttatttttgagttcttctctaagctttaacattatctctgactaattgacttgctcgatgccattagtttccttactcaacaggatggggggagacgcacccccaaaaacattttattcctcgtttgggttttttgccacgggaggcaaaaaatttaacttctgaattatttctttccccccccgagggggtaaacaaattggccacataaccccattctttttt

SEQ ID NO: 64988 - DNA, 800 bp, Glycine max
  unsure (1)..(800): unsure at all n locations
  Clone ID: PAT_MRT3847_29698C.1
tagtcaaaatgccagaactgcaaatgaatatgattacttaggnctggcatatgancaagccagaagaagaaaancaagtaagagggtggataacaaccaattagctgctgtggaggacaataggaagatagaatctcgtgttaaacatgtggatgaatcagattttgaggctaatcattctgatccccatgataatttaaatgccctcctgaaggaagaggaagatcttgtaactgctcaccggagacaggtggaggaaacaataggcattgttagggaggagatgaatttgctcgttgaagctgaccaaccaggaaatcaaatgcgtgggtatatttacaagttgaataccattttatcacaaaaggctgcaggaatctttcaattgcagtcacagttggctcaatttcagagacgtttaaatgagtataatgttgtcgtaacttctggtaattgatggtggtaatgagcatgactgatgtgttgtggatggtggtattgcatgactgatgtgttgatgctttcaagattattgtgggttttggagtgcagaagaaatagtaatcaaaaccatctttgttctacacttaattcagttgattgcttagacaagtcactgttgtgacttgaactgaattgaatcacatatacaaatgtatgtccactcgctcatttgacatactattattacctgtggagagtataatgtaaagtcaaactaccctgtaggggattgcttgcagctcaaccgaaaatctttatatattttttttttgtttgtgtaccgtcttccttccttt

SEQ ID NO: 64989 - DNA, 408 bp, Glycine max
  Clone ID: PAT_MRT3847_29699C.1
ggtcgggtatgcgaaacacaaattcttaactgatttttaaaaacaaaaaacgaaaccagccttatgaattcggtagtgacaaaaatgatttccagccgcgtacagtagtgatgaaaaggccattcatccagggaaataacattggcagggggtcaggaaaactataaaaaaaatattaaacgtgttacctgcaataaatttttaattagatgatacaaaattatcatattatttatgatggcaactaataatcatgtccttgcaaaaacttttgataaagcaacagggccgggttccaaatactataatttccattcaatatttacaattcagaaggtcttggaatgtttttggttaattattttcttattttacatgaaactttcttggtagatctttattccttaa

SEQ ID NO: 64990 - DNA, 259 bp, Glycine max
  Clone ID: PAT_MRT3847_2969C.1
cggccttacgggggggaatctttaagtcccacttggctgaaccgtgggctctggagggcctcttggagcacctaatgatcgggccctgaaatcttcattttctccaagctggaatcaaagataataaggctgataggcctaactgtatcctccatttttttattcgtgggaaccccacattatcccccggtttgcgacaggacccaaagtttgcgatttcatgaatacccaagcctgggaaagcctggtggttctcttg

SEQ ID NO: 64991 - DNA, 443 bp, Glycine max
  Clone ID: PAT_MRT3847_296C.1
agggggaagaaaatataataatacacattagcttaatataacaacaaatgctgtcaattgctcaacaaggaaacaaggttatgaaatacaagtaaatacaaattactaaatagagctcaagtagtgtagtgtctgcttttcaatcacaagctctattatttctctcatttattagggttgcatagaaggccttgtgttgtgacaaccatttaatttacatggtaactccacacccaaaatataataataatcgaagatgcgcaagtaatcaagggttatgaatcaaggcatcaggttgtctttgtggtgatgaggcttggaactctggcaaagctttgtatgtttcatacaatctactaagggtagggaatttggacatatcaatatcaaatctctgaactgccagtgtaatctgtggggccaaaaacacatcagccatatag

SEQ ID NO: 64992 - DNA, 379 bp, Glycine max
  unsure (1)..(379): unsure at all n locations
  Clone ID: PAT_MRT3847_29700C.1
cttaaaaacaaaacttgaataaaataantgccaatatataaaaacccttgtcattttaacttcatcattttttccctactccaaccctccattatgattttaaaacctttaaaattcacccaaattaataaatacaacacacataactcttttccctccctaatattttatcttaaccaccccccacaatttatttaactttcaaacctatttttctttaaaaaaaactatccctattcaattttccctctccctcttccatcatcaaccactaacaatggccattatcatatacttccaaccaaatcaactactttatccctatgaccttcattttataaaaacaaccctcttattacaacttatttatttttccact

SEQ ID NO: 64993 - DNA, 361 bp, Glycine max
  unsure (1)..(361): unsure at all n locations
  Clone ID: PAT_MRT3847_29701C.1
acacatgacaacagactacagaacggangtattccaatctcttcaaatcaaacacacaaatatgaaacctcccttgacaactttataacatgtgtacggtccaatcatcacaannatacaaaataaatataacaaacttcctctaatcatactcaattaacctttcatcaccactatacccatctatcacatcacctanaccacaaacaccaacactcccacatatacaattcacttttcttcaactcaattaaaccaaaataatctcattttctattttcaacacttttccttaaccacttttattaaacttcatatatcatatcatttcaacaatcctaacatctttcttaaaaaaata

SEQ ID NO: 64994 - DNA, 416 bp, Glycine max
  Clone ID: PAT_MRT3847_29702C.1
ctcatatgtctgtctacaaatcctactttctttatactcttcgctgctcactgttgacatggctgacatagtaggaggagcggtaagaggaaatgcatgttagggcatggctgttgctgagcatagcgtgaacaccttcctggattgttagtacgaaagttcatcgctatgtgattttaaaagacgatgataaaccgacagaggtcatcattcaagaaactaaactcgctgctgaaagctatgatgacttgaatgcatcgttccctgaaaatgattgccgatacgctgtctttgactatgagaaagggacatgagaaatctgcctagaaaagaaaattttttatagaataaggttttttttaggggcccgtattcccctttaaaagctatttgccatatttagggaccggtttaaa

SEQ ID NO: 64995 - DNA, 948 bp, Glycine max
  Clone ID: PAT_MRT3847_29703C.1
gcatttaccaccggtgacatccttctaaatacagtacagcttctctgggtaaatcttatcatggatactcttggagcattagccttggcaactgaaccaccaactgattccctgatggatcaaagtccaaagggtcgaagagaacctcttgtatcaaatattatgtggaggaatctgctgatacaggctatgtaccaagtgtccgtcttgcttatacttaatttccgaggtgtgagcttactggctttgagggatgagcccaaccgccctgcaatcaaagtgaagaactctctgatatttaatgcatttgttctttgtcaagtctttaatgaatttaatgcccgaaagcctgataaattcaacatattcaagggagtcacaagaaactacctcttcatggggatagtaggaataactgttgtgcttcagattgtcatcattgaatatctcgggaagttcactaaaacagccaagcttaattggaagcagtggctcatttctgttattatagcatttatcagctggcctcttgctgtggtaggaaaattgataccagtaccaaaggctgaactcagtaactttttccgaaaatgtcttcgtagaggaaattaaaggatgaaatccgaggcttctcaccagagtctttgctgattccctctctcccgtccgtctcattttattgacaggtttacctacattcttctggtgatggaaaatagtatactagttagttgtagagattctacagatccaaacaaaagttggttttgttttatacttaggttctaacaaggttagatttgtcatatacggaatttcagctagtcttttttattttattttttatttttaccaccagtgaatttgcagtttgacaaacgctgatttatattttcgtgtgtttgaaaagttggagagatgtatgataatattccaattcattgtttc

SEQ ID NO: 64996 - DNA, 639 bp, Glycine max
  Clone ID: PAT_MRT3847_29704C.1
gtcaagtctttaatgaatttaatgcccgaaagcctgataattcaacatattcaagggagtcacaagaaactacctcttcatggggatagtaggaataactgttgtgcttcagattgtcatcattgaatatctcgggaagttcactaaaacagccaagcttaattggaagcagtggctcatttcagttattatagcatttatcagctggcctcttgctgtggtaggaaaattgataccagtaccagaggcagaactcagtaactttttccgaaaatgtcttcgtagacaaaattaaagaaggatggaatctgaggcttctcagcagagtcttttgttgattcactctcccgtccgtctcatttattgacaggtttaactacatccttggtgatggaaaatagtatactagttagttgtacagagattctacagatccatacaaaagttggatttgctttatacttaggtcctaacaaggttagatttatcatatgcgaggaatttcagctagtctttttttaccaccagtgtattttcagtttgacaaacgctgatttatattttcgtatatttgacgagttgcagagatgtatgataattccttccaattcgttgtttccccttagcttctatcttatt

SEQ ID NO: 64997 - DNA, 2764 bp, Glycine max
  Clone ID: PAT_MRT3847_29705C.1
ccacgcgtccggtcaatatcaaaaatgaattttagaaaagaaggaggctccacttgcagagccagggaggagcgaagggtatctgtggatgaatgacgatcatgccctcgttgttgctttgctcgttgtggaaaagaatataatgaattgcgcaaacaagtggatctgaattcacatgggactccgccacaacaagaaaactttgctttctcctctgctaagagtaagacccaagcacttgttactgcttctatagttattaagtcatagaaagagaaacacttcatcgcgaatcggagcatggcggagctccggcactcttcctcccttggcagccgagcctccaattctccgatgaagcgagacgccggcgccggcaccggcgattcctcccctctcattcccgacaaccacctcgccgacgacgacgagcacgatcgacactcgtccaaggaccgcgaccggcacatgtgctccttcttcaccgatgaccctagggtttcgcctcacaatcaggatctctcttgttttcaccttcttctcgttggagtcagacccaagcacatgttttagtttcccttttcaccatcttaataatctcaatgcgccttactagagctgtgtaaaaaagatgggattgttcttcactgccctcggagacaggactcaacgtatactagattgcgcaacggcattgagcacacgggtcatcgcatgttaacctttaatcaagaatcacccaatgtgccttatcactttgggaaaaataaaaacgcacaattcctggtactaatatgatttttcacatcatcaattagtttttggtttatcgtctaacttgtagaaattccacgccctcctttctccttccaggaataaaaattgatcaattttttgtacctggaaagatgtcaacacttggaagcccttcagtgctgagtggcgccaggatggtgttttaccagaacttcctcctgaaaatgaaacaaatggctatatattcatccatgctgaaggtggtctaaatcagcaaagaattgcgatatgcaatgcagtggctgtggcaaaaatattaaatgccactcttattttgcctgttttgaagcaggaccagatttggaaagaccaaacgaaatttgaagacatttttgatgtggatcacttcattgactacctgaagtatgatgttcgtattgtccgtgatatcccagaatggtttaccgataaatcagagctatttactagcataagacggactgtaaaaaacattcccaaatatgcaccagcacaattttacatcgataatgttctgccccgagtcaaggagaagaagattatggctctgaaaccctttgttgacaggctgggatatgacaatgttcctcctgaaatcaacaagttgagatgcagagttaattatcatgcactgaaatttcttcctgatatagagcagatggctaattcacttgcatcaagaatgagaaaccgaactggcagttcaaatccttacatggctctgcatcttagatttgagaaaggaatggtgggactatcattctgtgattttgtggggacaagagaggagaaagccaaaatggcagagtatagaaaaaaggagtggcctcgacggtacaagaatggttcccatctgtggcaattagctctgcagaagcgaaaggaaggacggtgtcctctagagcctggagaagtggctgttattcttcgggccatgggctatccaaaggaaactcaaatttacgtagcttctggacaggtgtatggtggacagaaccggatggctccgctaaggaatatgttccctaatctggttaccaaggaggagttggcaactaaagaggagttagatggtttcagaaagcatgtgacaagcctggcagctcttgacttcttggtgtgcttgaagtcagatgtattcgtgatgacccatggaggcaactttgctaagctgatcattggagcacgtagatacatgggtcaccgtctaaaatcaattaagcctgacaaagggctaatgtccaagtcttttggggatccatatatgggttgggctccttttgtagaagatgttgttgttactcaccagacacggacgggattgccagaagagactttccctaactacgacctctgggagaaccctctgacaccctgcatggtaaacgacggaatctgggctcctgtcaatgcaagctttgaggtaggaggggcagtttcttttgtgattattataggaggatttggctccttaaaagtgcagagtgtaattgaagatgcattagaaattgtgataaaacagatgcccataggagctaaaaaaagtagtataaagtatgttcaatcacgagaaaaaagggatcattcagtccatggtgaagataaacggtgcagttttaattcagggctcaaataccacaggttggaaactggaaaaccagagagggttagaaagagagagaattatatgatggggcgaacgaagcctttaattcaggggcgtttgtcgcgtttctgtgtgttgggcgaggaatctggttttttgggagtgatttggtacgaaggagagaaaagaggaggaggaaagaaaagagaagtagaactgaggaatggtttgtttccttatatcacaagtgtgaatagtgaagatcgggatcttggagaaagaggacttcgagctattgggcaattcgaactggtgtatggacgagtcgaagtcgaggcagcaagagttctggacttagcgtaa

SEQ ID NO: 64998 - DNA, 332 bp, Glycine max
  Clone ID: PAT_MRT3847_29706C.1
ttttcattttttgtttttttttttttttcactttgggtacttttttggttgggtgtccttttttttttccacgccttgaaagatcctctcgcacgccccgatattcaaaatttaccccttccccgtgcgagcccgctttaactttgaggtaaaacacaaaatctttttggccaggagcccttccccaatctcgacccttttttaggaagccccggggaaatttaacaatattttcccagggggggctcccccaacaaataagatatcccccttttaaaatcacccaaaagaacaccccccccccaggggattctttccggattttttttttt

SEQ ID NO: 64999 - DNA, 400 bp, Glycine max
  Clone ID: PAT_MRT3847_29707C.1
cctttagcttttcctcctctttctacaaagtacaacaaacaaacattacatctggatacatcagaactgcaaaataaaatcagaggtcaaagcttcaattgagatacagactttcctttcagattcttttcctttggttgccattggcggaggaataaaagatggtacatactccttcattttgacttggtcttgtttctttcctgcttttaatctgcattttggttaagtttcgatcaactaagttggtaattggttgttttgttgggggcgtaatgaggacgttttgtttgtaccgtgatgtggatctgttttgcaagtcacatattttttatacgtgttttgatgatgatgtacgatgatgatgcttctatatcacggataaatgaaagtttttttt

SEQ ID NO: 65000 - DNA, 2359 bp, Glycine max
  Clone ID: PAT_MRT3847_29708C.1
agagtaatgaattgcgcagacaagtggatctgaattcacattcacaacaacaaaacgttgctttcccctctctgctattaggagagacagacaactcactccttcgccaatcggagcatggcggagctccggcactcttcctccctcggcagccgagcctccaattctccgatgaagcgcgacgccgtcgccgtcggtagcgattcctcccctctcattcccgacaaccacctcgcccacgacgacgacgagcacgatcgacactcgtccaaggaccgcgaccggcaactctgctccttcttcaccgacgaccctagggtttcgcctcacaactccaggatctctatctttttcacattacttcttcttctcgttggtttagtctccctattcaccatcttcaataatctcgttagtcctcatctctctggctgcattttcagattcactactaaatcactaatgcattgcatccttcttcgcctttctaatgcgccttacttgtgtaaaaaagatgggattgttcttcactgcccgcataatcaccatcactttgggaaaatcctttctcttccacaacatcttggaagccctgtgctgagcgccaggatggtgttttaccaggatgcaaactatggtagtgtggctctgtattgggctcaaaaggagtgtagaagcgccgagtcagtgtggtcggtcggtaatgtaatgtcaatgaatattagctgccagcctgccacagtggctatgtgttcctggttgggtaatttggagactgacagtgtgggggagatgttactaatggggcagtttgcagatttcaatgatggccctccttggctccttgctgaccatgatgatgcgtttcatgtttgcaggaaatttgaagacatttttgatgtggatcacttcattgactacctgaagtatgatgttcgtattgtccgtgatatcccagaatggtttaccgataaatcagagctatttactagcataagacggactgtaaaaaacattcccaaatatgcaccagcacaattttacatcgataatgttctgccccgagtcaaggagaagaagattatggctctgaaaccctttgttgacaggctgggatatgacaatgttcctcctgaaatcaacaagttgagatgcagagttaattatcatgcactgaaatttcttcctgatatagagcagatggctaattcacttgcatcaagaatgagaaaccgaactggcagttcaaatccttacatggctctgcatcttagatttgagaaaggaatggtgggactatcattctgtgattttgtggggacaagagaggagaaagccaaaatggcagagtatagaaaaaaggagtggcctcgacggtacaagaatggttcccatctgtggcaattagctctgcagaagcgaaaggaaggacggtgtcctctagagcctggagaagtggctgttattcttcgggccatgggctatccaaaggaaactcaaatttacgtagcttctggacaggtgtatggtggacagaaccggatggctccgctaaggaatatgttccctaatctggttaccaaggaggagttggcaactaaagaggagttagatggtttcagaaagcatgtgacaagcctggcagctcttgacttcttggtgtgcttgaagtcagatgtattcgtgatgacccatggaggcaactttgctaagctgatcattggagcacgtagatacatgggtcaccgtctaaaatcaattaagcctgacaaagggctaatgtccaagtcttttggggatccatatatgggttgggctccttttgtagaagatgttgttgttactcaccagacacggacgggattgccagaagagactttccctaactacgacctctgggagaaccctctgacaccctgcatggtaaacgacggaatctgggctcctgtcaatgcaagctttgaggtaggaggggcagtaaatagaaatttgaagcagtgatattggcttgaagggaatgagattggactgttggttatcactttaatgaacagatttcctattctgagtattctctttgccgagaccaggtggattttgtcttttcatctaacttgtagcaattccccgccctcttttcttcttccaggaaaaaaaattgatcaattttttgtaccaagaaagatgtgcaaatcattaatgaatttcatgttgctaggtttcttttgtgattattataggaggatttggctccttaaaagtgcagagtgtaattgaagatgctttagaaattgtgataaaacagatgcacatgtaaaataagttataaaattattaatattttaacttttgattttcc

SEQ ID NO: 65001 - DNA, 572 bp, Glycine max
  Clone ID: PAT_MRT3847_29709C.1
tcgacctagcgtccgctaggattgtggaatcaaggaatgaaaagtttcttgaaaatgacttgatcagtgggagtgatcaatttcaaaacatttcttctaaaagggatcactatgaagctgaaccttctggaacaagtaataggttggtagtcattcccacccctcaagttaaaatgggtgttagacaaccagtgattgaagttccataagttgttgaaagtgatcatgtagatcaagttgtttgtgaggaacaacatgatgatattgaacaaactggtgaagaaccgattgaacaagttcctcagcaggatgatcaagcaacattaagaagatctactagagcaaaaatgacaacaattcctaatgattatgtagtgtacctacaagaatcagactacaacattggagccgaaaatgatcctgagacgttttcataagccatgagttctaaggaatcaaatttgtggtataatgctatgagggatgagatgcattctatggcatctaaccaagtttgggatctcgttgagtttcctgttggtgcaaaagccatcggatgtagatgggtcttc

SEQ ID NO: 65002 - DNA, 536 bp, Glycine max
  unsure (1)..(536): unsure at all n locations
  Clone ID: PAT_MRT3847_2970C.1
caacaactacgctagaggacattacacagtcggcaaagaaatcatcgaccccgtcttggatcggattcgtcgcatcgcggataactgcaccggacttcaaggctttctcatcttccattcgttcggtggtggcactggctctgggttcacatcgctgcttatggaacgtctctctgttgactatgggaagaagtctaagctcgagttctccatctaccctgctcctcaagtgtccaccgctgtcgttgagccgtacaattcggtgcttactacgcacacgactctcgaacactctgactgtgcatttatggttgacaatgaggccatctacgatatttgtcgtcgaaatttggacgtggaacgaccttcttacaccaatttgaaccgtttgatttctcaagttgtctcttcgataaccgcttcacttcgatttgatggtgctttgaatgtcgatctcactgaattccagaccaatcttgttccttatcctcgaattcactctcctcttgcgacttattctncagttatctcagctg

SEQ ID NO: 65003 - DNA, 2390 bp, Glycine max
  Clone ID: PAT_MRT3847_29710C.1
aaatatttttgcacggacgttgtccagtcaaagattacttgtgcttgataaggtgaaagtgcttgctctaggcaaaacctcatctcaatgctggatgaagcaatttcttacttgaagtcattgcagctacaagtgcagatgatgtccatgggctgtggaatgaatacatgacattgagcaaaacaagataaccatcattaacaatggatcgtgtgcttcaataatcacaatcactgtattccagatttcgatattcaaatggtccacgaacacgaataacctattctcgcgccttcagccttacttcgccatatgaaaggatgcatcccgcgagaattaataaaaagaataacgctatgcacgaaccgatatctacattccgaaaagtcggacaaagcgtaaacgttcgatgaagccatatcatacttgcgccgattgcagttacccgtgaagaagatgccaatggggtgtggatgtggagatgtgatgttaccttgatttcatgcagtaaaccgcaacaattggaatgggggttggaatgggtatgggtatggaaatgggaatgaacagacctgtaatgccgtttcccaatatgttacctggttcggctttgccagcggcaactgccgctgctactcatttgggaccaagtttttccatgcagcctttccacatgccccatgttcctgctcctgattcatctagaatgcaagcagcaaatcagtcagataataatatggtcacgtcagctggtccacctgatccaaatcagtcacgtatcccaaacttcactgatccttatcaacaatatcttggtccccaccagatggagttccaattaattcagaatcaggcaatgaaccaaccaaatgttagcaagccaagtaacaatgggggccctgcgaatccagaaaaccattagtcgggaggataaattattctttgatagttacaatgaagggatggctattgaagcggtgcgccaaccctcttccacacgtctcagctgacgcagctccgacggttagcggttccggctcggatactacagctgcacagttttagggtgttaagagaacgaactttttagctgttctcagtagcaagctaatcgatacacggctatcatgttaattattgcaacgaagttttctccctcttttatcatccttttttcccgttgaaaagttgctctcttcgagattctttaaagtgggatgcgatacgtcagacaaggctccaatgctggacgaagcaatttcgtacttgaagtcgttgcagtacgatgagcagatgttgtccatgggatgtggaatggtacctgtgatgtttcctggaatccagcagtacatgccagcaatgggaatgggggttggaatgggtatgggtatgggaatgggaatgaacagacctgtaatgccgtttcccaatatgttacctggttcggctttgccagcggcaactgcagctgctgctcatttgggaccaaggttttccatgcctcctttccacatgccccatgttcctgctcctgattcatctagaatgcaagcagcaaatcagtcagataataatatggtcacgtcagctggtccacctgatccaaatcagtcacgtatcccaaacttcactgatccttatcaacaatatcttggtccccaccagatgcagttccaattaattcagaatcaggcaatgaaccaaccaaatgttagcaagccaagtaacaatgggggccctgcgaatccagaaaaccattagtcgggttagattttccggctcctatactacagctgcaaagttttgtagtgttaagagaacgaactttttagctgttctcagtagcaagctaatcgatacacggctatcatgttaattattgcaacgaagttttctccctcttttatcatccttttttcccgttttaaaatttctcttttcgagattctttgatgtgggaagaggaactcgatagatggcacaatagatgaacgtgcattctacaccaaacgtggaggccacttacgtttagtccaattcctgcttcagattcttgttatgttcttcatttaccatcaattttctcctattaggcgttacagcagcctgtgaacctcatcgctgttatttatggagtgaaattgaagcagttcttgatctacatgcccagatggctctgttacaatgcacgatgtgcttagtcaattaaagaaaggaaattgaattattaaaaatttaaaatttatagtactacacatagcagaatttgtacaatagactgtgggattaagagattaccataaaagttatagctatttgtatggcgggtgcgcctcagggaccttgcaatctcttaatttaaagttaaaataatgatgtattggtataag

SEQ ID NO: 65004 - DNA, 442 bp, Glycine max
  unsure (1)..(442): unsure at all n locations
  Clone ID: PAT_MRT3847_29711C.1
aanatactaaactgtaacacttacaatttaatttttaaaatgagaaggctacggcataatcaaaatttgtttgttttggagactctgatcaaggatcctgcatcacttatcagagttacttgtgtctgtagtttgcagtttccacacctttgctacgaggaacattgacttgacataaaaaacaggcacataaaaaaactacagaagataaggtaattgggaatttaataagatactcttggaatttaacataagggccacaaacacatgccgttacatgtaatttttcaatgataaaggttattacatgttagcacctaacaatatatacctaggatgagcaacnnntcttggattcatgccagccagaagcagcagcagcaagaaagcaaaacaaccctcaccacatctttgccattnnnannnnatcaaaagnnctcct

SEQ ID NO: 65005 - DNA, 237 bp, Glycine max
  Clone ID: PAT_MRT3847_29712C.1
accatacacacaagaccgtaccctgcacgccattcctctcttcgagctcctcgccaacgccaccaacacccgcgccgcccagaccaacggctccgccaacgcccagcgcgcttcttccgctggcgagctccgcacccagcgcaacaaagaccagaatgttgttgcgcgcgtctggacgggcaagcagtagccaagagcttccgctgtgcgcctgccattaatgaagccgtgcccgcc

SEQ ID NO: 65006 - DNA, 157 bp, Glycine max
  unsure (1)..(157): unsure at all n locations
  Clone ID: PAT_MRT3847_29713C.1
accacgcgtacgggggccatncatcgngcatcaatggccaccacagcagctctatccggaaccattgtgagcacctccttcatgaggaggcaacctatgaccaccacaagcctaaatacattccctaacgttggtgaagctctttttggtctgaaaa

SEQ ID NO: 65007 - DNA, 183 bp, Glycine max
  Clone ID: PAT_MRT3847_29714C.1
ctcagcgagaaacgtccttcctgtcgctcctcaaactcttgtaaatgtaccgcgacagaaacaagtaaggtccccacacttcattccatctcacatctagcactaaccacctagggcacattcgcctgaataatagttaagatcacaggaggttatctggaacaatgacacaccttgcccaaa

SEQ ID NO: 65008 - DNA, 271 bp, Glycine max
  Clone ID: PAT_MRT3847_29715C.1
taaaacaaagaatcccaggcgatgagaaagatggacgggaaggaccaagatgtgtcgttgggagcgaacaagttccccgagagacacccgattaggactgcggcgcagagccaagacgacggcaaggactaccaggagccggcgccagcgccgctggttgactcgacggagtttacgtcatggtcgttttacagagcacgtatagcagtgtttgtggccacttttcagtgtcgctacatcaacgtcttaaccgttatgggagtcgccgggg

SEQ ID NO: 65009 - DNA, 345 bp, Glycine max
  Clone ID: PAT_MRT3847_29716C.1
gtccatctgactaggacatgtcggccgcccttttgtttgtattgtgttcatgtgcaacccatacccctccgtacacaagccaaacgtgctgttgaggtgaaccacaaccggataaaagaaatgaaatcaaaaggaatataaaatcctaattgggaacttactaccggtattggtgtcagtcaaactttcgaacgggcgatatctttactgcccctacgggctctgactaaccatttaggatcttatctaactctgattttattgcttttctgccgttgcggtttctccatgacagcacatattcggtccttggttaggaatggattggtttggcatttgacacaa

SEQ ID NO: 65010 - DNA, 343 bp, Glycine max
  Clone ID: PAT_MRT3847_29717C.1
tttttctttagcttctcttctcctctctcctctatctatctatatatataaaataccacctaattatagaaacttcctagaaacattaaaaacttacaaaccttctaaagacagccagaatatctaccattgaagggcgattcctcaaatcatattcaaaacaaccactgaggatattttcaactgaagaaggaaggccactaggaattaggggtttttcatacttttcaacaaccgattggtatatttcaccaacaggacacccataccaaggttgattaccagtcaacatttccaaaatagtgcacccaaatccccatgaatctgtttcaaaggatacagg

SEQ ID NO: 65011 - DNA, 807 bp, Glycine max
  Clone ID: PAT_MRT3847_29718C.1
gataattcagtgctcttgcaacaattgcctcattgggctccttgttctattacacaagctctagagtttctttctcctgcatacaagggtcatccacgggtcatggcatacattctaagggttctggaatcctatcctcctgaacgagtaacttttttcatgccacagctggtgcagtcgttgcgacatgatgaagggaaattggttgaagggtatttgcttagagctgctcaaagaagtgacatatttgcccatattcttatctggcatttgcagggtgagactgtacctgagacaggaaaagacccaaacagtgggaagaatggttcatttctagaactgctgccagcggtaaggcagcgtataattgatggttttaatccaaaggcacttgacatatttaaaagagagtttgatttctttgacaaagttacatccatctctggtgtactatttccactccctaaagaagaacgccgagctggtatccggagggagttggagaaaattgaaatggatggtgaggacctttatttaccgacagctcctaacaagcttgttaggggtattcgagtagatagtggtattcccttacaatcagctgcaaaagtcccaatcatgataacttttaatgtaattgatcgagatggggatgagaatgatgtaaagccacaagcttgcattttcaaggttggagatgactgtagacaagatgttcttgcccttcaagtaatagcactacttagagatttatttgaagccgttggcttaaatctttatctatttcttatggtgtactgcctactg

SEQ ID NO: 65012 - DNA, 256 bp, Glycine max
  Clone ID: PAT_MRT3847_29719C.1
acccagacggatgccctctagctgattggtcggctggatcagttctgtttgggcccattcctatccatttacagaactgtggaataaaggacaggaaacaccatgatttgatttacagcagactttgtcagtttattgacctttggggaggaattatggacaaaactggaatgatcacactatcaaaattcatagtactgtgagagtgtgtgaagaaagtgtaaggcaaatggagttgaatgccatcaaagaggat

SEQ ID NO: 65013 - DNA, 251 bp, Glycine max
  Clone ID: PAT_MRT3847_2971C.1
ctcgagccttcacagcttattgcaggaggaatagtggtgggtgtgatcctgcacgggggaacgcaccttgcgtgcgatttcccaagaattagtgagtcggataaatcaatatttcggcaaactattggcgcaggattcgggtaccaccggccaacgtacactcaaatttttgcgaccactgatgtggccagtatgataggcatcgtggttactatgggcattgcatttgcactggcagacaaatggtcacg

SEQ ID NO: 65014 - DNA, 1312 bp, Glycine max
  Clone ID: PAT_MRT3847_29720C.1
gctacttgtttttctttggtttttttcttccttcttgatccttctctccttcacttgattctttcattttcctcaaaactttcaaacacccacttccccattttcttcttctgcatcctcacaaatcacttcttcaaatctcccttctacaaaaaaaaactcattttcatcacacagctttgggatctatcattcaatccacggtttctggaatgaaactccccgtgtttggtgttgttcttcatcatcatcatcatcattcatgtttaacataccttcatctctttctgaaatctgcctcacccactttcgccttgcaatctccaccgcggatccatggcccttctcatgaatctcaccacacgctaccgaaaacctgcaataaaaacctttttccactcttttttatacttctgaaaagtcccacattgtttagaaaactctaccgagaacagtttataaatcctccgctgagaaaagatactagtgatttttgtcaagacgatgcaattcagactcggcaagcgcgttgtaagggttgctaaatgtgtcttccgtcggatcagggtcagaacccgacccggatactaccaccgtctcggtggttcgacgacccattctaagaatcccataacaacaaggcttctcacgtgggggcaaaaactgaagagaggagcgaagaccttatgtgggaaaaatgggtcgggttaccttccaatagggtcggatccgctttgtgacagggctccggcggtgccgaaggggcacttggcggtgtacgttggggaggaggacggcggtttccggcgcgtattgattccggtgatctactgtaaccaccctctgttcagcgatttgctgagggaagcggaaaaagagttcgggtttgaacaccccggtgggatcacgataccgtgccgacttaccgagtttgaacgggttaagacccgtatcgcgtccgggtcgggtcaacgcgggaggacccggagattgggttggccgctacaacattattgaggacccggaggttggtcaattacacacacgatgacgacgataacgagttatggtgttttggaatttttgtttttttcttcttccttatattaggttgtagtttttgtttttgttgggaattcttggggtggtgttaggctttggctctttgggagatctgatgggacatctggtgtaaatggtggtttgaacataaaagtagaattagggattcgttatgtatagattaaattctagaaatggtttttattttccttcttttttctgaaaaataattcaggtgagtttttttttt

SEQ ID NO: 65015 - DNA, 244 bp, Glycine max
  unsure (1)..(244): unsure at all n locations
  Clone ID: PAT_MRT3847_29721C.1
aagaagctaatgctaaaggtgatggagatgaagatgaaaatgaaggtaataacgatgaaaatggaaatcaaggtgaagatgatattacattcaagaagcttgagagtttgactctagctcgttaccaaaactagaagctctacacagggagttcctctttgaattttccatgctgaaataatgtcgttcagcaaacctgcagcacgaaactttccgtcttttgacatgtacgaacantgagatg

SEQ ID NO: 65016 - DNA, 112 bp, Glycine max
  Clone ID: PAT_MRT3847_29722C.1
gccgaacaagctgtcctcgcacgagatcactggcgagtataaggcccatgcacccgaggtcttccatagtatctactatggacgctgccatagcctcgaggggcgacgtcat

SEQ ID NO: 65017 - DNA, 834 bp, Glycine max
  Clone ID: PAT_MRT3847_29723C.1
gcaagaggctctagacacgctaattatgggaaacaagactactattttaatagcacatagggctgcaatgatgaggcatgtggacaatattgtagtgcttaatggaggacggatagtggaggagggcagtcatgatacattggtagccaagaatggtttgtatgtccgactgatgcaacctcattttggtaaggctttgcgtcaacatcggcttgtttaggatgggagtatgtgatgttgtgagagtaattgctactaattgttggctcattttctgcttgagttgaatcactggtgacttctgcacctgaagggtttttccaagaatgtcaggtgaaaattgtgggtggaaatgggaatgatgggacttggatcagcacctggcatttgtaggcataggaagagaatactgtaggacaaatagatgtgtaggaatttgattataggattttggagtttggttggtttgcggacttgggttgaattcttttggaaggcaagcagcttagattgagggtgttttctatccatggcattgatttgtttctcaagagagagtggaatcaacactaattctgctgaggtgaggtgactcttttacaggacttccttttcactctctctaactatgcgtggatgatgaacttattcataactgtaattttgttcttttttctttttcaatttgtgataattgtagaaagttcagatcgaagagttgtaacctctgtaaatatatagcaatagtttggaaggcattcgttttgctgcttgaatcccaagtgtttttccctacatattgaatgcatattttcaagtgtatttggccaaaaa

SEQ ID NO: 65018 - DNA, 459 bp, Glycine max
  unsure (1)..(459): unsure at all n locations
  Clone ID: PAT_MRT3847_29724C.1
caagttttttaaagcttggtaatntcggggggggggggagggctgcaaaaatatcatccagggcccgcgcgtccgacanggaaattgatgggctaaatgaacagctggaggaggattcacgggggctanagcacttgcaactccagcttggggattaaaaaancaaacntnctanattgggggggggggggggatncgttcctttaaatnaacatncttatnaacataaaacaaaaancanaacatattnnanatcaccgcccgggtgaaccttaaagtttattattatacccnagggtgtgtgcttgggtggattaaatactttttggaggttttggtcgtcatgtctanttggcttcgcatngcngatgtctcttcanttattaattagagggtgcatatagtaatatttggggggaaatanatcaaaccggaatgagcaaactattcgtttatctc

SEQ ID NO: 65019 - DNA, 373 bp, Glycine max
  Clone ID: PAT_MRT3847_29725C.1
tgatgaataagttcattttgcaaatgagcttttagacattcacttcaagtcagctttggatgatcttttgaaaatatgccagactaaaatccatgccgaccaaggagacgagaaagagcacttgaaggtgactcttttgcgtattgaatcatcgttgcaaggacttttttcttgtttgcccgattttgtcccagactctaggaatggaatggttgaagattcaaaccatatgtttttaattgccggggccacaggttgtactgttggtagtactgctctgagagaaaaagctactgaggttgtacatgcagcctgcaaatatgtcctggagaaaaaatcagatgacagcatcctgttgatactgattattcgc

SEQ ID NO: 65020 - DNA, 307 bp, Glycine max
  Clone ID: PAT_MRT3847_29726C.1
attcattctttaatcttttttttttttaaaaggaagaggggtccatccagtcctaagttatcaacatataatataccaccttgtttcatctatttcaaaattggcggaacacagaaagtctttctctatgggggaaaaatgaaagcctaccaaaacatctctccctttgggattgaaattgtaaaacaaatctccctcaattaataatataaccttgtgttcccgacacattttggcacggacttgtgaacgaacaccatggacctagttgataaaaaacggcccataaaaattcacccctgcttca

SEQ ID NO: 65021 - DNA, 302 bp, Glycine max
  Clone ID: PAT_MRT3847_29727C.1
gtaaggggcggcaaaaacggattctagtgaagagaggtgtagacttggacgttggtggatgtctctcttgccagaaagagccatcccggagtcgaactaagttgtcatgcggttacgtggagcccttgcctggagcatagatggcgaggtcttgaaatgcctgagtgtgcaagcacttttagagcctgacgcattatacgccgtgataccaatcgtgaactgactatcccacatgtaacaagtaaaccttatgcatatggcctgatgaaatgacacactggtacacatatcggtggacaacc

SEQ ID NO: 65022 - DNA, 152 bp, Glycine max
  Clone ID: PAT_MRT3847_29728C.1
aaacaacacaaaggggggagtttgctgatcgcaatacatagaccaagtgtaatagctcatgcattgccctgctttcctcgcctcctagcagtttagcaccatagcaatgccacacgtatcagaagttccctctgcaaactcagacaggatat

SEQ ID NO: 65023 - DNA, 746 bp, Glycine max
  Clone ID: PAT_MRT3847_29729C.1
tacggctgcgagaagacgacagaagggggattttttttttttttacctttccctttgacatacaacagctgcagagtgaaacgatgccgtgcctcaacctctccaccaacgttaacctagacggcgtcgacacctcctccattctctccgaagccacctcaaccgtcgccagcatcatcggcaaacccgaggcctatgtgatgattgtattgaaaggatcagtgcctatatctcatggtgggagtgagcagccagcagcttatggtgaattggtgtccattggtggtcttagccctgacgtgaacaagaaacttagtgctggcattgcttcaattctcgaaaacaagttgtctgtgccaaagtcgcgattctacttgaagttttatgacaccaagggttccaactttggatggaatggatctacattctgaattccgagttattttggtaatgatgccatggatgtcggatgaactcgttattctgtttttgaacttttttatctgtaaaaagtactctgaattttaataccccattttgaggacattatgccatcgtaattggattatgttcaaggacaactgttggtcgtatatgttcatgatgttatctctggacaaacattatctggtgaccttgagatgagcgtcattttagtggtgaattagaattatgcatggttgaaaaaaaaaaacttgtaactttgttattttgtagtttcaagaatagaataatggttggttttt

SEQ ID NO: 65024 - DNA, 550 bp, Glycine max
  Clone ID: PAT_MRT3847_2972C.1
agtctcataatatagcaagctatctacgctgatctacgttgctattgtaacaagagacgtgatgtgtctaacgctgaatataactcttgctacttccgatgactactgtttggcgttgcctctcttaaagcttatttaggagaaggccatgcaactctgattttcctgttacatggtgttgcaccacccatcccttacaacgatcttacaagagatggagccttgcatccaacggggctgatgggagaacctgtggcccatgcatttgcacttttgtaggtgcctccgtgcgcaaccaacgtctcgagcgagcatttgaacccaggtgttactttttttttggccatacggaccaacatcagcctcattagtggtttcttatactggactgaccagctgcaggcatcccttgtggcctgccaccaccgcgatataatcaccggcaagagaaatcccaggcacgcgccgcgaaatggagtgaactaatgtcgagctgtagggctagatattgtgaacacatttgccttggattgcacagtgcatgagactg

SEQ ID NO: 65025 - DNA, 376 bp, Glycine max
  Clone ID: PAT_MRT3847_29730C.1
ggctcgaggagacagaatgtcgatagagaactgctcacgtctttgagaaatgggcgctgctgccattgacacagcataatccatccatgaattcatggtcaaggatgctaagggcatagacgtgaacctcagcacctactaagggaagggctttctcgaagataacgacgatgcaaaatgtggatctacaaattccaatgacactcaggtaacagagctttacagcatatataaagacaaaggtcatgagatactggcatttacatgcaacccatctctgaaacacgagcccaggagtagccaatatgcagatgaatttgcctgtacaaggcacaatgctgtgtatcccatttatggaacggtacgagtgaatgga

SEQ ID NO: 65026 - DNA, 295 bp, Glycine max
  Clone ID: PAT_MRT3847_29731C.1
caaaaaaaaaaaaatctttattttttttaaaaaaatattaccatttttgttaccaggaccaccatttttttttttacccattttccttgggcggccttttaaaaacaaaaatgattgtccggggctttatccaggattgggggaagggcttgtctttaaaattttttttttcccccctaaaactttgggtttaccccccgcccttttagtttggggaacgtgaactttttttttcctaaaaactaaaatttaaggtgtgtggttaaaagccggaaccttgtttggtttttaaaaa

SEQ ID NO: 65027 - DNA, 720 bp, Glycine max
  Clone ID: PAT_MRT3847_29732C.1
gacctttcacctttgacatacaacagctgcagagtgaaacgatgccgtgcctcaacctctccaccaacgttaacctaaacggcgtcgacacctcctccattctctcagaagccacctcaactgtcgccagcatcatcggcaaacccgaggcctatgtgatgattgtattgaaaggatcagtgcctatatctcatggtgggagtgagcagccagcagcttatggtgaattggtgtccattggtggtcttagccctgacgtgaacaagaaactcagtgctggcattgcttcaattctcgaaaacaagttgtctgtgccgaagtcccgattctacttgaagttttatgacactaaggcccatcagagtcaagaatatgcacaatgtttgcatgctttacaccagcactaggtcatggttccaattttggatggaatggatctacattctgaattccgagttatcttggtaacgatgccatggatgtcggatgaactcgtgattctgtttcagaactttttttatctgtaaaaagtactctgaatttcatataccccctttgaggacattatgccatcgtaattggattatgttcaaggacaactgggggtcctatatgtataagatgcaatcactggacaaacattatctggtgaccttaagatgagcgtctttttagtggtgaattagaattatgcatggttaaacttgagactttggtgat

SEQ ID NO: 65028 - DNA, 232 bp, Glycine max
  Clone ID: PAT_MRT3847_29733C.1
gggggaaactgggcaatttgaccctggcacaaaattttaagattatgaaccgggaacacccaattaagcattcccccgttaataaagtttttaacatcaacgaagtccccattttttttttggaaacagttcaagaaaaaaaaaaaatccccataaagggttcaactttttaaaattggggtaaaattttagggagatttaaaaccttaccccttttttacttttccaaaaa

SEQ ID NO: 65029 - DNA, 288 bp, Glycine max
  Clone ID: PAT_MRT3847_29734C.1
aacaaccaaaaaacaatttttattaataaaatataattggatggtattagcaaaaaaaaattttttttaactctaaaaaaaaaagggaggaaagggtgcattactttttatttaaccacactaacaaaacatttggactacttgttaaatggcccccaaattttgctttcatccgagggagaacaaaatcccttttttacttttacatacagtgatttcttgttttaaaatccatatcctgaatttttcatggggtttccagcaggtttggcccaaggttcctttttt

SEQ ID NO: 65030 - DNA, 275 bp, Glycine max
  Clone ID: PAT_MRT3847_29735C.1
cacaaaaaagcccccccccccctttaaaaatcttgaagaaccgaccgagaatccagggtttttggtgtaaccattgggaaaggaaacccctccaatcaatttaccctggccccacaagggcaggggaaaaaaaaaattgaaaaagtgtttttccccatttgccccccccaacccttcctttttatgcccaatttaaaattttttaactttggggtgggggccaaataccttttggggtttcccaacaaacaaaaccccctgattggatcattgcc

SEQ ID NO: 65031 - DNA, 970 bp, Glycine max
  unsure (1)..(970): unsure at all n locations
  Clone ID: PAT_MRT3847_29736C.1
gcagctgaactttctaaatcctcgcacggctgcgagactcaattcattttcttctcctctctctctctcctagggttagggttttctctcttcatcactctctgtgtcgctccgtttcaatggctcagcaagacgctcaaaacggcgggtcggagaatgccgctgctgctgctacggtgtcgtttgtcgctgtgaagccgcagctcctcgtcgaagctcccaaagccaacgacgccattctgttcttcaaggctgcgtttggcgctgaggaagttggccgtacgctcaaccctaagcgcaaagctgagcacgagctccctctcatactctccgcagaactcaaaatcgctggctccaccattctcgtcgccgacctcgttgatgacacttcttcgccagcgaaaacggggggaaacggtgtcgttttgtgcttggagacggaggacgtggatggggcagtagctaaggcggtgagcgctggtgcagttgcggagggcgaagtagcggaaggtgaagtcgcgtgctgcggcgggcgcgtggggaaggttaaggacccgtatggcttcgtttggctcttctgcactccagggaagaagtgtgctgacgtggaggcttaatggcctttgatgttgttctgagtctaattgtttggattatcagttttagttgtagaattgattagggaaaggtcgtacgtgtctagttaagacatttctcttcttcagtctttcagtcttttatatctaagtgggattagtattaatctaatggttacgcgtgtatttctattttgaatattttgaagtgcttctcgtttgtcattagactcattatgaatgacattagttgttgacacattaaaatagtcaaatttatcttctcttttgaataataaaaattgcagcccatgctcgcttctctacctgtagnngctactaatttctgttttaatatgnnnnnnnnnnnnnna

SEQ ID NO: 65032 - DNA, 305 bp, Glycine max
  Clone ID: PAT_MRT3847_29737C.1
aaaagagtctggcgcttatatgaatcaaacatcagctaacgcttgacattaatggccatgtattattgtttatgcctaattcgatgggactaagccggtctgctgctgcatgtaatgaaaatacttgaagaataagccctgctatgctatgccttatcttagggaatgtgaagtattgtttaccggataacattacttcacattccacttactttggcatttactagaaaggcctatactcgatgtattatattatctatcagcaaaaggacctgcttatgaccttaggaggaggcacaaacacc

SEQ ID NO: 65033 - DNA, 1122 bp, Glycine max
  Clone ID: PAT_MRT3847_29738C.1
cggacgcgtggttcttgggctttagtaaaaggtgaaagggaaggttccgtgattttgatttacgcatccattcggataacgaaagcaattttgatttgtgtcgaggaaaggacaggtcttagaacccttcttttcttcctcgtgtgcgtgaaaacgaagcaacgccacacgatggtgttctacttcaaagcgcgccctgaagccggcgatttcaccatcttcatgggcctcgacaagttcgagaacgaggaactcatcaaatacggttttcccgaagacatctggttccatgttgataaaatgtcttcagcccatgtctatgtcaggctgcacaaaggccagactctcgatgacctgagtgaggctttactggaagattgtgctcagcttgtcaaagcaaattcaattcaaggaaataaagtgaacaatgttgatgttgtttacactccctggtctaatttaaagaaaactgcttcaatggatgttgggcaagttggttttcacaactcaaaaatggttcgaactgtgagagttgagaagcggataaatgagattgttaacaggctaaacaagacaaaagtggaaaggaaacctgatttgaaaggtgagcgagaagcagtcggtgcagctgagagagctgagaggaaacaacaactgagagaaaaaaaacgccgtgaggaattggaaaggcttgaaaaggagaaacaaacagagcttaggagctacaagggtttgatggttgcagaaaatatgacatccaacaaacaaattgcatcaggaagcaaatcattgcaggaactggaggaggatttcatgtaatcaatcattttattgttgggttataggcagatgactggtggccaacttaccacctggcagatttatgttgattaaacaaccctactttggattctgaagctgcattatcttgtttgaggaaaccaagtagtgtgtacacaaattgtgattgagggataaaggaaaaggatgggggcaatgtaatgaatggactatgttcctggtaagggcaatataccttatctataactataactttgcttaagacaatggtttttgttattgatattctcacagtcgattaaaaaactgaaatttcttgct

SEQ ID NO: 65034 - DNA, 112 bp, Glycine max
  Clone ID: PAT_MRT3847_29739C.1
aatatacatgtgacacttgggtgctaacttgggattacgctatggccttagatgtaatctagaatgccaccatgatgtttgtaagggcacgcgatatgggacttgatgaaca

SEQ ID NO: 65035 - DNA, 474 bp, Glycine max
  Clone ID: PAT_MRT3847_2973C.1
attatttttatgctgaaactgccggtagtagtatttatggtgggccattaaaaggtggaaggaccattcgggtgggtacattagcaagtaccattgggcgaattgaaccaaacatgaatacaaagtggcagctttggagtgccactaccaatggggattttgttcaaggaaaagaactggcaatggttaaagctaatgcaccatgagctggtgatgggttgacataaagttacacttcaacttcattgatggaatacggttagcaaaaagacaaagggttaataggggagcactatggtaggatgtgttacggtgaacataacgtctaccaggcccgagagaaagatttgctagagggaaaaacttcctttgataataaatctcgatatagataggaaaaagtgttctattcaaaagcacaatgtgttagaggaaaaaccttcacaaatgatataaaaggtgcgtgggcacatt

SEQ ID NO: 65036 - DNA, 1435 bp, Glycine max
  Clone ID: PAT_MRT3847_29740C.1
cgcgtacacgccacaaaggtgtagggaaggttccgtgattatgattttcgcagcgattcggatagcgaaagcaatcccccacccctaattttgatttgtgtcgaggaaaggacaggtcttggaaccctaaccgcacctctctctttcttcccgtgtgcgtcaaagcgaagcaacgcgacacgatggtgttctacttcaaagcgcgccccgaagccggcgatttcaccatcttcatgggccttgacaagtacgagaacgaggaactcatcaaatacggttttcccgaagacatctggttccatgtcgataaaatgtcttcagcccatgtctatgtcaggttgcacaaaggccagaccatcgatgacatgagtgagggtttactggaagactgtgctcagcttgtcaaagcaaattcaattcaaggaaataaagtgaacaatgtcgatgttgtttacacaccctggtctaatttaaagaaaactgcttcaatggatgttggccaagttggttttcacaactcaaaaatggttcgaactgtaagagttgagaagaggataaatgagattgttaacaggctaaacaagacaaaagtggaaaggaaacctgatttgaaagctgagcgagaagcagttaatgcagctgagagagctgagagaaaacaacaactgagagaaaaaaaacgtcgggaggaattgggaaggcttgaaaaggagaaacaaacagagcttaggagctacaagggtttgatggttgcagaaaatatgacatccaacaaacaaattgcatcaggaagcaaatcattacaggaactggaggaggatttcatgtaatcatttattgggttatggacagatgactggtggtcaacttactacctggcagatttatgtttttgattaaccaaccctactttggattttgaagctgcattatcttggttggttgaggaaaccaagtagtgtgtacacaaattgtgattgagggatgccgggtggggaggtgaatcctgataaggtcaatataccttatctacaactataaccttgcttgagacaatggtttttgttatttaatgttctcacagtcgagtcaaaaactggaatttcgtgctatttttatcgtggtcgtttacgctagtcgggttttgaaatttgtttccctctttgaattggtgttcactgcttgcgaaattattggggacattatgtagtgtttatgctacatgcaatgataatactcttgttgggaacattatgtagtgttccctgtttggaatataggatacatactaatattgttaccctgtatttaggagtgaaaattgggcaaatcacttctcgagggtgaagagttaggtaatgtttgttattagttgagggaccttcaatatttgttcaaaaagtgaaatggaaaaaaaattgtttgatttttaatt

SEQ ID NO: 65037 - DNA, 236 bp, Glycine max
  Clone ID: PAT_MRT3847_29741C.1
cgattcattcttttttttttttttaatttgaaatgtatatcctatataactgacctggacccttgttcatgaaatgaatcattcagaattaaactgtccacctgacaaggtccaaattaacgattcacaaaataaaaaaaaacctcgtgttccccttctctagaaagttccagactccagtccttcaaaattggagctccatcacccatttaaactaaaatgatgaccccgcaaaa

SEQ ID NO: 65038 - DNA, 260 bp, Glycine max
  unsure (1)..(260): unsure at all n locations
  Clone ID: PAT_MRT3847_29742C.1
aggcgaattatacatgtcctaaatctatcgaaggtagctcatcatgtttttattacgcttctcataacagactccattcactcactctatgaaccccaaccaaccaaccacatgccactgattttgaaaaggaaaggggaagggtttcgaaatgatacttaccaccacattccttcttacgacgactcgataaacaaaagaagagaacaaaaaggcaaaaactactccttnagaaacaacccagattcacctattaaagc

SEQ ID NO: 65039 - DNA, 1858 bp, Glycine max
  Clone ID: PAT_MRT3847_29743C.1
aaagctctacagcgcaatcatgcttttccccggctcgtgctcgagccgcttcaacagccgcaacatgctacttcgcaccaaacactcactttctctctcctcactctacactcgccacagctaccagattcgcgaaggggtttagggttccgttcatggacgctgttgaattgccgttaccacttgacgtggcagccacccccaaattgatgggatcggagggtttctcgctaattcaaaatgatgttgcaagtataaaaactgtgcctgagtttccttcctgcaataaatttgtagaaactcaactctctaagaattctagtctgctgccccatctcgagggtgaagaggtgtccaaaaatacgcctagtggtaatggcagaaatttttctgtaattaattccagattagaaggtgtaccattacaacgaaaagcagcaaaatcaaacaggagtaatagttcttgttcaaagaggccacggatgtcccaaccagaagattctttgagccctaatggaattgaagagtcaaaggatatttctgacaaacttggattgcataatttaaactgtacttctccagagaaaaatcaattaccaaagcaaaagagcaattctagcaagcgtggtgataagaggaattttaaagtgccttctgtgaaggctaaatttgagtcatcctctatgaagatgggtgcatcaatcttcttacatctggggggaacaacttttttgggctatatggtctgaaacatgattttcatgatgtcacaaagcttatggaggaaccaccgttagaggagcttcttaggggcacttttgacttccccattttaagcaaagataaagggaagaaaacatcaagtatgagtgatagtttttttaattcagttagaaaggcatgctctatccttcagcacccgaaacccattcggtcccaaaatatggccgagatggattactcctccaacatgaaaatgtcaacttgccaattgagctcagtttgtgcaatagaaagtgttggtaatggggataaagagcagtcttgcacattagacatgtcttcatgtcagaaggatcattgtagtgaagtagaaagtacaactagtccacttgacttcccgttacatcaacctaaggatgttttggaacgaattgcactccatccattccaggatttggagtctttgctgcttgatgtgtccaagcctgctgttaccacaaagaatggtaatgaccaacggtcaggcaagcaagtgtctcgtcggccaagcctgccaacctttccatggtcacatgcttttggtcattctagaactaattctgacgcaggtaagttatcaacaagtagaagtatgtgccaaggtaaatggtcaaggataggtgtcattgctagctctacagatgctgatcgcagttccttctcaaaccttgattcattcagttatgatcagagccttgttccttcatctggtagttcagacaaaaggaatttctcatctttatttgctaaccttcctttccatcaattggattcttcatcttctgtaccatgttcagaaatttctcaggctaaagcagaatttggaggccaagtcgacttgaatgaatgatgaatgcgctctactttctttttatcatctgattcttctcttctccctctctctctgggaattatcttactgatctctgtcctgaaaatacagaatttggaggccaagttgatactaaagaaaatggtatgttgttattgagaacaacacatctttttgaatgtgtacacttgtttgactattttgaaaatctgttctttctaatctaacttttttactgaagtttctagtatagcaagacctcct

SEQ ID NO: 65040 - DNA, 384 bp, Glycine max
  Clone ID: PAT_MRT3847_29744C.1
ccacgcgtcgccacgcgtcgtacgctgcagaagacacgaggggacggcacagagaatatcaggttctagatctatccgacgtcgccagatccaccaaccgttatggctgcttcagcgggatgaaacggctcgttttcggttcttggagccgcactgcctcgtcttctctgatgggagctgctatggccacaaagaggggtgggcgtggcttcatgggtgtgatgagacctgactgggagaagctattgtcctgtgcatggtggattttgggattatggcttatatgctgtattatagaccggattaatcaaggccaatttattacctttgaggtatgcacatcttctctggcttgctgtgctggctggcttctgtgcatggtat

SEQ ID NO: 65041 - DNA, 136 bp, Glycine max
  Clone ID: PAT_MRT3847_29745C.1
tgagcatgatctaaaatttgattactgtgaccagtcatttactaaaaatacttgagcaggttattctataaagtacattccaaatgcaaagttaccttgcgttggccctcacccaatgaatgtcatacttgttggc

SEQ ID NO: 65042 - DNA, 408 bp, Glycine max
  Clone ID: PAT_MRT3847_29746C.1
agacaacatatgcaccttcagcatctagccaaggcatgcatcagacacctgcttcatccagaacagaagggttttcttatgcttcccaaacatatccgggaaacttgtcatacaacagttatgttgttccttgggctcaacctcaatcgaagtcggatcttcaaacccagcctcagcaacagacatatcaatcccatgcccaaaccccaaccccaaccccaaccccaaccccaaccccaaccccaaccccaacctcaactcaacaattacatccgcattatgaatctgaacaagctcatcatcatcaaccgacccaacaggtaaggtcccagccccagtcccaacaggtaaggtcccagccccagtccgaacaattgcaatcacaacccctgccacaatccccacgtg

SEQ ID NO: 65043 - DNA, 256 bp, Glycine max
  Clone ID: PAT_MRT3847_29747C.1
cacacagattccgccctaagggaacctcttgctatactctcgaaagcttcccttcgacatcaccataataggagatgaaccacttctattggctaatacgagtgccattctaccatatccgcatcaggcaccaacaaagacactcggcccaaccgctttcttctgctaccatgacatctacgacgccgaaacctccgtcgaccacctctcctgcttcaaccccgccaaccgctacctcatccttctctattatcaa

SEQ ID NO: 65044 - DNA, 353 bp, Glycine max
  Clone ID: PAT_MRT3847_29748C.1
aaacccttgagtttgttcgtcatgcatggatcaatgtttgttctggaggaattatagggcttggataagcagaggaggatcgtgtacgtttgttacagacattctctacacttctcacccatccagagagtgttcctattaacgcacttgttgctctaaatggaacccctcttaacgatcaaaatcctgttgaagtatgggagatgactcgcatcatatcagctgaacgtatcgtaatctcaaactcattggtcaggttatcagctgacacatttcgattctccatgccagagcaagtattgttctcacttccaggagcatattcaattttcaccggtcaaacctgtctcact

SEQ ID NO: 65045 - DNA, 138 bp, Glycine max
  Clone ID: PAT_MRT3847_29749C.1
ctaatattgatcgttcaatatcagatcatgttctttgtaatgcgtggattgtatattggtgttgagggacgtaaggtagcacttgggggaagcttaatatatggaagagaagatgtatctgatattgtctcatttggg

SEQ ID NO: 65046 - DNA, 445 bp, Glycine max
  Clone ID: PAT_MRT3847_2974C.1
ttcttcgcgtccgcccacgcgtccggttttaaatgcaattgattttctgcatatatgaaatgaaatctagatttaattcactgtgcaatccggaggaagatttaattcaatttgtttggttctttgaaggatttgaatatcttaatgagttttcaaaatgagtaaaatgaaagatgatttgaatttgatgctggacttcacttaatgctcttgcaagcaaaggaagagttacaatatttgatggaacactttgtctcttgagaaaattcactaaaccacatgagttttttttattcaagcgcattgctttaattatggaacgaccactgttgtgcactcgtgcttgaatgactgtgattcatgttatagcgtgctgtgcttctgaagagatacttactctattattctggttcgatctttacgtgtaggatctcatatacttatt

SEQ ID NO: 65047 - DNA, 190 bp, Glycine max
  Clone ID: PAT_MRT3847_29750C.1
atgtaattgactgtttttttttttttttttttgttgaatatgctgggcccgttcccgtccaagcccgttaggtcgtctttaatcaaagaagaggtaattttgttggaaacaggtttgtcggacgcaaggaagctttggacagaactatagatgcatctctcgccaacaaacagctgtaaaaaggatgcta

SEQ ID NO: 65048 - DNA, 215 bp, Glycine max
  Clone ID: PAT_MRT3847_29751C.1
atatacttggtcttctctagaagtatatttatcagactttcgataccgcccggatatgatcggtcttgccttctcttgcactctgaacatagtgcgatcggttgcctattgcagattaagatctgcatattgacattggctgaacggagttagttcctagaatgctaacaccgatcccttatcattgggtattggttacagaggccagctcctaa

SEQ ID NO: 65049 - DNA, 731 bp, Glycine max
  Clone ID: PAT_MRT3847_29752C.1
aaaagtaaggcagactgaatttggaagggaggtacctttgtttgaagttgaggcaacagctgtggagccagtatttcaaaggctgtactcctacatatttgacacggacagtgtgggatcttctgtcacagagatggatagaccagtgccaagtgcaatattcattgtaaactttgacaaggtgagagtagatcctagaaataaggaggtcaatcttgatagttcaatgtatgagaaaattcctgacctaactgaggaagatatgaaaaaacaagaaggagattacatctaccgttatcgttacaatggtgggggtgcaactcaagtttggctaagctctggcagatttgtggtgattgacctttcggcagggccatgcacttatggtaagattgaagctgaagagggaagtgtctgttctagaaccctgccaagattacaaaatgtgattcgtcctagtagtttgcacacaacttctcatcaatcgagcaatgatatttttcttgggcagcttgcttctttggtatcaaccacagtggaacatgttattgcacctgatgtgaggtttgaaaccgttgatcttacttcaagactgcttgtacctataattgtcttgcaaaatcataatcgatacaacattatggaaaagggtcacaattacagtattaacatagaaagaaattgaggctgaggtgaaaagcatgcttcacgatgggcaagaattagtaatt

SEQ ID NO: 65050 - DNA, 363 bp, Glycine max
  Clone ID: PAT_MRT3847_29753C.1
cctttttttttttttttgactgaatctttcttttttttttttactttttttttggggggggcacaaatgtatatatatattaattgaaaaaacgttttttgatgattcaaaagaaacacggattcataactggaccgtgtattttaaagcatgctcgaaacgtattgaaaaaacttttttgtgagggggaaggaaaaatttttttcttcgcctttgttttcaaaaagtgaataaatactgtgagcatctctgtttaaaatacttttgccaaaggcccatcaacaaaatttgtttaagggccccaccccagagctctctgacaattccctagggggtggtcgtaaaaaattgagatgaattatc

SEQ ID NO: 65051 - DNA, 880 bp, Glycine max
  unsure (1)..(880): unsure at all n locations
  Clone ID: PAT_MRT3847_29754C.1
tacggctgcgagaagacgacagaagggggaaggtgggtggagaagactgacattgcgtttgggaaaatcaagcaaacatgccactgtgtgttcactactctccatgcaatagcattggtgttatgccgcaattctgcacccccaggaccaggaccagccataataggaattgggatttgcagagacttagaattgtcgcaaaatcaaattcagatgcaacccaatccacatccacctcccttctctcatttctctgtcccttactcaagctcttctctgcaagagatccttctcaaccacgcaattttactttcgagctagcaacatcttccttggctagcttgtcaaggtttgcatggggaacaaaatccatagctgagagttcactgaacaaagaaatcacttcagatcttccttttagtttgcagctttttgaatttgaggcatgccccttttgtagaagggtccgggaagctttgactgaactagatctttctgtagaggtctatccctgtcctaagggttctgtaagacacagagaggtggtcagaagaactggtgggaaagaacagtttcctttcatcattgatcaaaaaagtggtatttttatatatgaaagtggtgatatcgtaaaatacttgtttgagcgatatggagaaggcagaagtccatcatcgggacttttggagagcactattttcactggatggatgccgacaatacttcgagcaggtagaggaatgacgcgttgggaacattccaggcctgaccctcctccaggaaagttggagctcttctcatatgaaaataaccctaatgctcgaatagtgcgtgaggcattatgcgaattggaacttccttacattcttcanaatgtagg

SEQ ID NO: 65052 - DNA, 372 bp, Glycine max
  Clone ID: PAT_MRT3847_29755C.1
agcctacagcccaaaaaggtcaatcttcacattccggatctagcgatgcacgaggcatgccttctggagcccgggcaggtggatactctcacatggcccatgctccaacagtcgcaactacctgaggagcgaggtttgcctactcccataacatggaacaaatgaacggtgtccccatattaaccgacatctcaatccctatagaatatatgacgataaaatgttcaactcgttctacatttatgggaacattgccagaatatatcttatcttaaaaaacccagatcatgcccttatccagatcgtaaatggtttctaagccgaaatccaagcacatattctgaagggcaccatcttccagatacagcgata

SEQ ID NO: 65053 - DNA, 269 bp, Glycine max
  Clone ID: PAT_MRT3847_29756C.1
cttgggttggggctttttttttcgggggtttttctaaaagcccataaaaattgcctgtttgggcaattgggttgaagctcaagtccccattaaagggtttatggggggtgggatttcccccaaaaccgttatatggaaggaaattattaggggggaaacctctggctcgcgggtaaaaaaagggggtggtgcaagctaataattttgttccccttaatctaaccgtgtggccccttcggctgtggaaacatagcccccgattgcggggg

SEQ ID NO: 65054 - DNA, 288 bp, Glycine max
  unsure (1)..(288): unsure at all n locations
  Clone ID: PAT_MRT3847_29757C.1
aacaacaaaanccaatccgagttttataaatacttcccccccttctctacactaaaaaaccatcccctttcctaatttttttcccaaccttcactaacacaaatcctctacccatacaattccatacaccttacctttattccataccatcaattccctaatatttaccccaataaatactttccttaatcatcaccaaaacttttttccttttcaaaattaatatcctactcacaatttaacacaacatacaatccttaattatattttgtcaatatattttttcct

SEQ ID NO: 65055 - DNA, 941 bp, Glycine max
  Clone ID: PAT_MRT3847_29758C.1
actggacccgcggtccgacgtcgtgaacgaggaggtggtgctgttgcattgcgtgaacaaattgaggtgtgcgatttgtacgaggtagtggtgctgttctgttgcgtgaacaaattgaggtgtgcatgttcattattgggcaccgatggattcagtttctgtgcaaatagcgacgtcaaaatttgttctttgccccgcggcgacggccagttctaagaagaatgccatcatcaatttcagttccaatttcaaaggaactctcaccaaaatccatgccatttccccaaatggctctgcctctagctgcacttcgcgtgtgtctgtgtcaagtttaaagacagacaagaacaaaggcagaagtaatcttgaatccctgttttgttatgataaggctattccagaagaaataattgagaaacctgttgggttatctttggaagagaaagctattggtaacaattcccgatgcactgattgccaggccaaaggtgctgtgctttgtgccacttgtgctggttctggtctatatgttgactccataatggaaagccagggcataattgttaaagttcgttgcttaggttgcgggggaacaggaaatataatgtgtgcagaatgtggcggacgaggtcatctgggaccaaaatgatcaagtctaactttttggagttttactgtaccaacaatatgtaatatctttgttgatattgcttgtacccattttttatttttttataaatcaaggagtcgttacgactgaaacccaagatatttaccaaaatctctgctattcctcacgcatgaacttaagtttagatggttgtcatatttattcttaagtttctcttagtattttctttgctcacccctcccagtgatgattacctgtaatacttttacatgattgaaagttacattcagttgatttattaatgaactat

SEQ ID NO: 65056 - DNA, 156 bp, Glycine max
  Clone ID: PAT_MRT3847_29759C.1
acgcgttcgaacacttccgagaagactaccgaagggtatacttcattcccttattcggttcttttataggtttcacttcttgcatttttgccagttgtctgtcggatagcaagatctctttgattaaattagtgtccttatctttacttacctttt

SEQ ID NO: 65057 - DNA, 530 bp, Glycine max
  Clone ID: PAT_MRT3847_2975C.1
ctttttttttttttttttttttttttttttttttttttttttttttttttttttttttttttttttttccaaaggcaaaaaaaaacccctggtaaaattttttagcaagggatttaacatcaatcctttttaaaaaaaattcccccctatcctacaattcaccccgaataacaaaacccctttacccccaaattaaacccccccccaacccctaatttttaaacctgggcctttttcgggggaaattccccccttttaggttttttaaaaacccttttgggttttttaacggcctttaggggagtttttttcgaaggtttagggggaacctttttggggggggccttaaggggcttggccttgggtttgggggcccaaattttgcccttgggtttggaaacacccttttttttaggggcaaaaattttggccttgaaaccggctttggggggggcttaaccccaaattttggggggctttttgggagaacaaagggttttaaaagaaacaaacattaacggggcgagctg

SEQ ID NO: 65058 - DNA, 222 bp, Glycine max
  Clone ID: PAT_MRT3847_29760C.1
ttttgttttttgaggcgaaccagcgaaagcaatggaatgggtagtaattatctttccggcgagaggttaagtacatagcgctagtgggtctatgctccaaattaaaggcaacttcgcacaatcggatgcgaattagctacgcagtccataaacagattacacttatctcggctatgacatgtaatgacaccccaattagtatatcggatcgagcctgctcta

SEQ ID NO: 65059 - DNA, 470 bp, Glycine max
  Clone ID: PAT_MRT3847_29761C.1
gatccaagagtgacccgagacacagattcttaccaaataaacaaacaaaaaaacacacacacacacactttccattttctgtggttcttcttctcacttctctaatcttctcccccctctgttactccccgcttctctgaatccctttctgttaatcatctgtctttcacctcgtgattccaaaaagattcaaactttgaaaatttttctcgaaagccaggtgttttcagaatcgagatccagtttctttttatccttttgttaagaaattattattttctttcattcagccaagagggttgtttttgatccctcaaagcttttttctttcttcttggattaaaggggttgtctattttaaacctcttccatccctttttttttataaaaaaaattattatttttttttgtaatttttaaaagaaacgcaggtcgatttttttaatcaaagatctctgtggtgtagttgg

SEQ ID NO: 65060 - DNA, 608 bp, Glycine max
  unsure (1)..(608): unsure at all n locations
  Clone ID: PAT_MRT3847_29762C.1
atgattttcactttacttatctttgcccgatatctgcacaccggtgcctgtttgggtgaccttaggagccaatgcccatttaggatagtctgataacagacttttctttatggccnagatagctggatttttaacgtgtgagactagatgggcttctgttttagcacatgctgtatctttaaacagacggccttgtgatacctatcccagacaagggcgaacaccgcctgacctggagatgatactacagttgttacatatcgtaacatccaatgactaagtgagctttataggatgccgtcgatggctacactgttgggtgagacaatggatgatgttgccatgcatattgggagaggggacactgggatacagcctctatccttttaccacgctagctgacacgcctgctgttgctgtaggaggatgctacacgcttacaggcttaccaatgagcacttgcatcttcagaggacctgacatgaatattggttctgacccaattcaactcgcgcatgcctcagtcgatacattttcctcacctattttggaaacgggatcgactttgaggatggatggtaggaggggctgtagtatacgccatctca

SEQ ID NO: 65061 - DNA, 254 bp, Glycine max
  Clone ID: PAT_MRT3847_29763C.1
attggtacaaaacaaaatgctgctgctgtttggctgatgatgcgtccaaggactgatccatccgctcaataattctagatattgccgccagcaactgctttttttgttagaatctaaagactgagttaaaggaaaagtactttggtggaaaactttacatcattcaaaaaaaaagccagctaaaatgaggccgcacagccccatgcctgatatcatgcacatataggtgagtgccgaatctatatataccattg

SEQ ID NO: 65062 - DNA, 763 bp, Glycine max
  Clone ID: PAT_MRT3847_29764C.1
ccattggaaagaaaggttgaccccttgaaaaggccaagtttttttcccccaaaatcaatgctttaaggtgtggcacaatggagggatgtttcctgacccctttcaacctatggtgctctagatggatatctttactgcaagccccctttctctcagttgttcaaggaaaagggtagctacagttatctgtccaagcaagcttcattaaagaaaagtgaaatgcaacaccaagaacaagaggctgtggagaaagctactacaaccgatgatgatcgctcagagtcagagccagacacgacaacaacaacaaaggaagctgaacaagctgatgatgatcactctgagcaagagcactagattgattgatggaacattaatttttgcaagcgggggtcttcacttgtgtctttgagtaaaattgatctttctggctacaagtaaatccccatttcatttgggacattttgaagttcctgattgattgggtcgtggccttgtgtcattcccacaaaagggctattacagtattatgtgttccataatttgcaaacaatcagtaggttaagcctctctgttctttggggcatgtacatgactttctcaagccaaagtgcatgcatgcatgcatgcctcagtcatttcagatgtatttcattctgtgtattaagaaacagatatcagagtagaaaaagaagattctattgtctgaattgatgatggattacaaaagcaatctcttttctatacaactctccttaattat

SEQ ID NO: 65063 - DNA, 1248 bp, Glycine max
  Clone ID: PAT_MRT3847_29765C.1
acggctcgagcacttcgctgaacggttcgagcttagctcaaacctcacctcaataatctttcgtgctagctagcttaatcatattccaattccaacagaaccaaattctgctagctagctagtacgtcaaaggaaataaaataatatggcattcagcgggacccaacagaaatgcaaggcttgcgacaaaactgttcacttggtcgaaggtttatctgtcgatggggctgcttatcacaagaattgcttcagatgcagccattgcaatggccttcttgcgataagcaactactcatccaccgaaggggttttgtactgcaaggtgcactttgagcagcttttcaaggaaactggcgcctaccccaagaaatcccagtcgtctggaaagcctccactcgagctgaatagagcaccaagcaaactttctgccttcttctctgggactcaagagaaatgttcaaaatgcaagaaaaccgtatatccattggaaaagttgaccgtggaaggcgagttttaccataaatcatgctttaggtgtgcacatggaggatgtttcctgaccccttcaacctatgctgctctagatggatatctttactgcaagccccacttctctcagttgttcaaggagaagggtagctacagttatctgtccaagcaagcttcattgaagaaaagtgaaatgcaacaacaagaacaagaggctgtggagaaagctactacaacaacgatgatgatcgctcagagtcagagccagagacgaccaacaacaacaacaaaggaagctgaacaagctgatgatgatcactctgagcaagaacactagattgattgatggaacattaattttgcaaggggaggcttcacttgtgtctttgagtaaaattgatctttctggctacaaatagaacaaccccatttgggacattttgaagttcctgattcattgggttgtgtggctttgtgtcatttgggaagattcccgcaaaagggctattacagtattatgtgttccataatttgcaaacagtcagtgtagacagttaaccgttaagcctttctgttctttggggcatgtacatgactttctcaagccaaagtgcatgcatgcatgctacaatcatttcagatgtatttcattctttgtattcagaaacagatatcagagtagaaaaagaagattttattgtctgaatccatgatggattacaatagcaatctcttttctaaaaaactctccttaattat

SEQ ID NO: 65064 - DNA, 414 bp, Glycine max
  Clone ID: PAT_MRT3847_29766C.1
ggagagagaaaaaaaagaactgaaaattttataaaaatagatcccaaactttttcttttttattgggacaaaaaatttttttttaccccttaaagatagagtcaggggagaatgcttctttaaaaagaaactaataaagagaaaaccttttctttgaattgggggatctaaaaatctccgattagggaaagctccctccctagttttggtgaagctttgccagtttagcccggggcttttttttagtttttgaattcggtgaacacttccaataactccccacaccgatttcacaggttgacttttttttttggaagctttgagcattatttttttgggcttactcttttttaaaaaaaattggttcactcaatttccgggggggtaaagcttttccttccccaaattttgaaa

SEQ ID NO: 65065 - DNA, 491 bp, Glycine max
  Clone ID: PAT_MRT3847_29767C.1
gtcaaactattgggagatttttttaagattaaagcaaaatgagaaaaatttctgacactcaaatccggggtacaaaactgagagcatgacaccccccaaaatgcatactggaacataagcgggggcgccactcaaatggggtgcctaaactacaaaagacccataaagatcactaggactggggtggctatcaactgtaataacctaagcctaatgtggctgctgtgcaattaaatgaactataacttctagcggggccaatgcgtggagactccacaaagtgcaaggtaggatcacctgcaaggattctgggcaaatacaagaaaggctcctcaaaactgtgggtgcggtaatctcaaatctcatagggctgcaaatgcttcttgctgtggaaaggaacctgcttaaccttcacttggctggtcttcacatcaaccttggtaccgaaaagaacaattgggatgggctcacagacccagcaaagatcccta

SEQ ID NO: 65066 - DNA, 3668 bp, Glycine max
  Clone ID: PAT_MRT3847_29768C.1
ttgactgaacaaagttatggaggtaatgaggttgcacgaatactttcgcctctcactacaaatacacatctcatctgatccgtcgggtcttcagcaagaagggaagaaaactaaacgtccacttaattcaagtgacaagctttttaaggagatacgcgatctcaactttgaagttgttgtccagattttgagccaaaaagctacttccatgaagcaagactacacagaaatgacaactactacgcgaacagttggcgagttgatggactttttgaaaaagctgaactcattgaagaagatgacctggcacataaatcttgctcagcatctatcaacattcacatcaaagccttcatttcttgggcaacttgatatggaacatacaattgtagaggcccagagttatgatatatgctttgagtatattgaagaactgatccataagcaggagcctttgacaacagtcttacgccttctaatcctattttcgattactaattctgggttgccaaagaagcattttgactacttcaggagagaactactccacagctatggatttgagcacatagcaatgctaaacaatttagagaaagctggactttttaaaaagcaggagtcaaaaagcaattggcttactataaaacgtgctctacagcttgtggttgaagacactgatacggccaaccccaatgatattgcttatgtcttctctggatatgcaccactcagcattcgactggtccagcatgccattcgatctggatggcgtcctgttgaagaaattttgaagctactgcctggacctcatttggaaatgaagaggggtggattctcaaatagcccatcatttgacactttatcagggattcaatccagcatagccaaagtacctgatggaaggcgtgctgtggtgcttgttgtctttgttgggggcgttacctttgcagagatttctgcacttcgatttttatgtactcaggagggaatggcatatgatttgattattgcaacaacaaaaatagtcaatggccaaaccttggttgaaacgtttatggaaaagctaggttgattaatgagtgtagctttgtcagtttatcatcccgagtatctttgtttgtttgtggtggtgagtttatcttgatgatgccttaccatctccataagcattcattttcatcaactgctaagctaactgaactctctctcgttgttcccttggcctctcgctctataaatacacatcgcatcattctctcacttgcacattgaaatctgaaccttccggatttcgttttgctttgttcaggtagccagccagtcatggtgctcttcaatgtttcacgcgtagagaccactcccttcgatggccagaagcctggaacctctggtctccgcaagaaggtgaaagtgttcgtgcaacctcattacctccataactttgttcagtcaacattcaatgcattaactgtggaaaaagttagaggtgcaacgctagttgtatctggtgatggtcgttatttttcaaaggaagctattcagattataactaaaatgtcagcagcaaatggagtaagacgtgtttggattggtcaaaatggattgctttcaactcctgcagtatctgctgttatacgtgaaagagttggagctgatggatccagggcaacaggtgcatttatactgacagcaagtcacaatcctggtggccctcatgaggattttggaattaaatataatatggaaaacggtggacctgcaccagagggaattactgacaagatatatgaaaacacaacaacaattaatgagtacttgattgcatcagatctgccagatgtggatatcaccacaacaggtgttacaagctttacaggccctgaaggaccatttgatgttgaggtttttgattcagcaagtgattatataaaattgatgaagtcaatttttgattttgaatctatcaggaaactgctgtcatctcctaaattcacattctgttatgatgcactacatggggttggtggagcatatgcaaagagtatatttgtggatgagcttggggcacaagaaagctctttactgaactgtacaccaaaggaagactttggaggaggacacccagaccccaatttgacatatgcaaaagagttggttgctcgtatgggattgggcaaatccgaaccacaagatgatcccccagagtttggtgctgcttctgatggtgatgcagatcgcaacatgatacttggtaaaaggttttttgtcactccttcagattccgtggccattatcgctgcaaatgccgttgaagctataccatacttttctgctggtttaaagggtgttgccaggagcatgccaacctctgctgccctggatgttgtagccaaacatctgaatttgaaattttttgaggtccccacgggttggaagttctttggtaatttaatggatgctggattatgttcagtctgtggtgaagaaagttttgggactggttctgaccatattcgtgagaaagatggaatctgggcagttttggcctggctatctatacttgcatataaaaataaagataaacttgaagacaagcttgtcactgttgaagacatagttcgccagcattgggctacttatgggcgccattattatactcgatatgactatgaaaatgtggatgcaggtgcagcaaaggaactgatggcatatttggtcaagctgcagtcctcactttcagaagtcaatcagattattaaggggataaggtcagatgtttcgaatgttgttcacggtgatgaatttgagtacaatgatcctgtggatggttccatctcatcacatcagggaatccgatatttgtttgaggatggatcacgattgattttccgcctatctggaactggatcagaaggtgcaacaattcgattatacattgagcaatatgagaaggatccatcaaagattgggagactttcaaacgaagcacttgctcctcttgtggaagttgcgttgaaactttcgaagatggaagaattcactggtcgatccgctccaacagtcattacatgaacacattcaagtggaaggtggttagatcctgaagcttctcccagtcatttcttctttgtccagtatcttacggatagccgaacactagttttggttgtttgcagcctttgctatgggaaattgagtggaatttgatcagtttctttatctaaattttgatatgctgaataagttgcaactgccgagtgctaatttatatatagtcttaatatgatggctcctcttgtattggcgttttattatgagcattctatccttccttttttttttgtccctgcggtgagatttgacttctctcctaaactaactttggaagaagatagatggccaccaccagctgaacaaaggctagccgtttcgttgcaaatatatttttatttttaggtttaaaaaaaaaacattgtgttattcttgattttagtccaagagatgaatgaatgatgctagaaattctcaaagctagaaatggtgaagagatgaatgatgctaatgttaaagcaaagaatgttatccttcatgagttaatgcaagaagatattaatgtgtaaaaaattctcttctacactttcaataattgtataggtctatttgataac

SEQ ID NO: 65067 - DNA, 876 bp, Glycine max
  Clone ID: PAT_MRT3847_29769C.1
attcgagagaaagattgaatctgggcagttttggcctgggtaggtatacttgcatataaaaataaagataaactcgaagacaagcttgtcactgttgaagacatagttcgccagcattgggctacttatgggcgccattattatactcgatatgactatgaagtatgatacaatcgcattttctcctactttgttataattggttttgaaaatcagttagtgacctcaattttttttccttaaagaatgtggatgcaggtgcagcaaaagaactgatggcatatttggtcaagctgcaatactcactttcagaagtcaatcacacatacatagttagatctgaagtttctcccagtcatttcttctttgttcagtttctactcgaacactagtgttggttgtttaatttgtttgctatggacttgagtggaatttgatcagttactttatcaatattttgatgtgctgaataagttgcaactgccgagtgctaattctattatatattcttaatatgatggctcctcttgtattggcgttttattaggagcattctttccttccttttttttttttggtccctgcggtgagatttgacttctctcctaaactaactttggaagaagatagatggccaccaccagctgaacaaaggctagccgtttcgttgcaaatatatttttatttttaggtttatgggtcattccagataaattcttgcttatgtgaacacacccccgttatctagcattacgtgctagcattgcagaaagcttttgaagaaaaaataatacattaccaacatcagtccttggaggaggatgtgaaaaaaagtgttggtatttttcaagtaaccaattttaatataatacttag

SEQ ID NO: 65068 - DNA, 476 bp, Glycine max
  Clone ID: PAT_MRT3847_2976C.1
ctcgagccgaatcggctcgagatttattttaaaatgtcagctagacgctaattgagacgttactaaaggtgtgcaattcaatggagaagtatgcaaataaggtaagaaaaatctaataaattcctccattttcctcaattcgtactcaatcatatgaagtttcatttttttaacttttatcctatcgaccaaattataaattatcatccttggaaccccagaaatttccttgcaatgataatttcatggacttggccggctacttaccatcaataatatactgtagtggattttttttttttctgtatgctcatacctccttgagaaacaaacaaactccaacaattattttcagatactccgaggaaagattttctgaatcaaggatggtcattatagaatctggatagcctattttgttgtacaaggtgaactggccaataaatatatatatttattgtgatgattggaatccc

SEQ ID NO: 65069 - DNA, 1252 bp, Glycine max
  Clone ID: PAT_MRT3847_29770C.1
ccacgcgtccggcagatagcactaacattctcaataatgctagtaactatccttttcacattttcattattgacactactactttaggataaattcttagttgtttctagagaaagaactttttcatgctctatagctttcagtgtgtaccatctcagctttgtgggtcatctgtcttccactttcacaacattttgaatatgagggggcatacattgaaagaccagtagtgctatttttgctctgggataaaaaattctcattcttcttctacttctattattcctatgagggacccccctcctacaaagcaaaatttattattctatacttttgaagcttatcccaagcttgttccaacaccatagatagtttaactacacagtatatgaactctggcctggcacttgcaatatgtattataagaggattagtttgtgtggagggctataaatatccatctcttcagaaacttatgctcaattattaacaagaattgtgtgctcttagtaacttatttctatatgacaggttctgatcaagtgttttaactgacctataccaattatctgcaatgctttcaggtacccgtccgcaggaagttaatatggttgattggctgaagacgatggttggaaacaggagatcagaagaagtggtggacccaaacattgaggtgaagccatctaccagagctttgaaacgggtgctcttaactgctttgagatgtgtagatccagattccgagaaaagacccaagatgggccaagttgtacgtatgcttgagtcagaggagtaccctttagcaagagaggatcgtaggcaccgaagaaatcgtggggttaactcagaaattgaatcacataaggataattctgacacagatggcagtgacattcagggctctagatcagaaagcggaaggtaacagcaggcatgaccaagagaatgtattcttttttaggatcagtggggtgtataaagtgagtgattttttttttataatattcttatgttgttagattcttggatttgcctacccaagatgggcatggcagaggctcagcaggggataatattttattttatttttgtttcttttcctttcttttgtggtagaaggataggtatttctagaaggatatatattgtttgtgtatgaaggtggatgttatttataagaaccaaaatatttggggtatgtacagaatctaatagcttttctagatttatttgataaatctgttggcct

SEQ ID NO: 65070 - DNA, 367 bp, Glycine max
  Clone ID: PAT_MRT3847_29771C.1
gtggccgccctttttttttttttttttttttttttttttttttttttttttttttttttttttaaacctaaaaataaaaatatttttgcaacgaaacggctagcctttgttcaactggggggggccatctattttcttccaaagttagtttaggagagaagtcaaattttaccgcagggaccaaaaaaaaaaggaaggaaagaatgctcctaataaaacgccaattcaagaggagccatcattttaagactatttaatagaattagcactcggcagttgcaacttattcagcacatcaaaattttgataaagtaactgatcaaattccactcaagggcccatagcaaaggctgcaaacaaccaacac

SEQ ID NO: 65071 - DNA, 580 bp, Glycine max
  Clone ID: PAT_MRT3847_29772C.1
cgatttttatgtactcagaagggaatggcatatgatttgattattgcaacaacaaaaatagtcaatggccaaaccttggttgaaacgtttatggaaaaggtaggttgattaatgagtgtagctttgtcagtttatcatcccgagtatctttgtttgtttgtggtggtgagtttatcttgatgatgccttaccaatgctatgcctaacgagttctctttggacgacactgaactgatggtttgatgaaagctttatttgtgctataaaatcctcctgtattgtttttcttagagggacaatggggggagggtgggacctagtcctttgaggggactgtctggaattaatagtatgagtgctatttttctatgtgctctatttcattgtgttattcttgattttagtccaagagatgaatgaatgatgctagaaattctcaaagctagaaatggtgaagagatgaatgatgctaatgttaaagcaaagaatgttgatccttcatgagttaatgcaagaagatattaatgtgtaaaaaattctcttctacactttcaataattgtataggtctatttgataac

SEQ ID NO: 65072 - DNA, 195 bp, Glycine max
  Clone ID: PAT_MRT3847_29773C.1
ctagagatgttgctatcgctggctgaagacacgtgagcccgcttagagattgaagatttcagagctcttggaccatgtttgaagattcaattcttcttcctttcagctaagttcacagtgaagtatagcctaagatttgacaaacatctccagatatttgtattgtttgctcctttgcttatttgacctctcacg

SEQ ID NO: 65073 - DNA, 485 bp, Glycine max
  unsure (1)..(485): unsure at all n locations
  Clone ID: PAT_MRT3847_29774C.1
gattatataaaattgatgaagtcaatttttgattttgaatctatcaggaaactgctgtcatctcctaaattcacattctgttatgatgcactacatggggttggtggagcatatgcaaagagtatttttgtggatgagcttggagcacaagaaagctctttactgaactgtacaccaaaggaagacttcggaggaggacacccagaccccaatttgacatatgcaaaagagttggttgctcgtatgggattgggcaaatccgaaccccaagaagagcccccagagtttggtgctgcttctgatggtgatgcagatcgcaacatggttcttggtaaaaggtagngttgtccttaatttgtgatgaatttaaatattctctaacttttttgtgtaatatctgtgtatcccctgtttgttaggnttnttgtcactccttcagattccgtggccattatcgctgcaaatgcctgtgaagctataccata

SEQ ID NO: 65074 - DNA, 180 bp, Glycine max
  Clone ID: PAT_MRT3847_29775C.1
cccacgcgtccggcggggctacccgctgagtttaagcatatcaataagcagaggaaacagttctatatgtgtttcatgaacctcctttcttttcctttttggagaactcatttaaggttgtatttggaaaactctatgcttaatttcttttaagcattatatgatgatacttgtgtgact

SEQ ID NO: 65075 - DNA, 772 bp, Glycine max
  Clone ID: PAT_MRT3847_29776C.1
ggctcgaggtcatccagcccaaaagccttcatcaataaactgctaagctaactgaactctccctctctccttcctcgttcctttcgcctctcactacaaatacacatctcatctcatccgtctctcacttttaatttttctctgcaatctgaaccttccggatttcgtttttctttgttccggtagccagccagccagccatggtgctcttcaatgtttcacgcgttgagaccactcccttcgatggacagaagcctggaacctctggtctccgcaagaaggtgaaagtattcgtgcaacctcattacctccataactttgttcagtcaacattcaatgcattaactgtggaaaaagttagaggtgcaacgctagttgtatctggtgatggtcgttatttttcaaaggaagctattcagattataactaaaatgtcagcagcaaatggagtaagacgtgtttggattggtcaaaatggattactttccactcctgcagtatctgctgttatacgtgaaaaacttggagctgatggatccagggcaacaggtgcatttatactgacagcaagtcacaatcccggtggccctaatgaggattttgggattaaatataatatggaaaacggtggacctgcaccagagggaattactgacaagatatatgaaaacacaacaacaattaatgagtacttgattgcttcagatctgccagatgtggatattacctcaacaggtgttacaagctttacaggccccggaggaccatttga

SEQ ID NO: 65076 - DNA, 342 bp, Glycine max
  Clone ID: PAT_MRT3847_29777C.1
atttttaccattcagggggggggtggggggtgtgattttcgaagggaaatgaagcggattcgagaatgagggcagcttcaaaaaggcgtgggattcagataacttctatttcgaggccaatcaagccctctgatttcgttgactttgacctcattcttgctatggacaaacagaacagaggtaaagtttggtcatgtgttatgacgtgataaacttttatgtaagtacttataagagtagaaaataagaatagaaagtgaattgaatttcttgtgtaagctaaaatcaatttatgcatttcagctaccggagaacttaaataaaagcacttatataaaagtt

SEQ ID NO: 65077 - DNA, 533 bp, Glycine max
  unsure (1)..(533): unsure at all n locations
  Clone ID: PAT_MRT3847_29778C.1
gaaggggggntngagtattgctaccctggctttcccttcattcacattttgcagggcgcttctttctcattgctggcaaaatggcaaatgcagcgtccggaatggctgtgcacgatgattgcaaactgaggtttcaagagcttaaatcaaagaggagctacaggttcattgtgttcaaaattgaagaacagcaagtggtggttgagaaattaggggatcccacggaaagttatgaggactttatggccagttttccagctaatgaatgtcgctatgcagtctatgattttgatttcacaactgctgagaattgccaaaaaagcaagatcttcttcgttgcatggtcaccagatacctcaaaggtgaggatgaagatggtgtatgcaagttccaaggatagattcaagagggaattggatggcattcaagtcgatatgcaagcaactgatccaagtgagatgagcttggaccttgtgaaagcgcgagccatctaagcctcctttttttttttttttattgttatctcagctttc

SEQ ID NO: 65078 - DNA, 423 bp, Glycine max
  Clone ID: PAT_MRT3847_29779C.1
taccttttgcactagaaggatgaatgcttcccatgcatgtatgatggcacaactatcacatgacgtgctgagctcatgaacccttatactagtccaagcggcaccacgaaccgtgaacaaaccacgcatcactgggagtgtaagatgctataccagatcgattctggcactacggtcattcgttgttaaacacctgcacgaaacagggcctacgtgcattcttcttgccctagacattatcaatccacgatgggctagctggctgcactgttgaggcttcccatctgcataatctccgcattatcctctggagtttccatagcttgcgagctcaactgccactatccttattgcagtggcgcacactatcgattctgctgttgccaactgatctctctacacgttgtgaattgccccacatat

SEQ ID NO: 65079 - DNA, 373 bp, Glycine max
  Clone ID: PAT_MRT3847_2977C.1
gggcgatccacgcgttcgtggatggatacttatttttcatataaaatatattttttttttttaattatttttttgttaatttattttttttttattttgggaaaaaaaaaaaaaaaaaaaaagggggggggggggttttaggggattcaaggtaacggacgcgggagggcgacgtcatattttttttatgggggcacttaaataattggaggggccgtggttttaaaaggttggggggggaaaaaccttggggttaccaattttaatcgctttgaggacatccccttttagcgagatggcggggtagccaaaagggcggaaccgatcgcttttttaacagtggctcatcctgaatggcaaaggggaaacccct

SEQ ID NO: 65080 - DNA, 457 bp, Glycine max
  Clone ID: PAT_MRT3847_29780C.1
accaggtggttatgtcagtgatgcagtgtatgtatttaaggggattaatgagaaaaatgttgtctcgtggaactcagtcattgttggttgtgcacagcatggatgtggcatgtgggctctagcactctttaaccaaatgttgcgggaaggggttgatcctgatggaattacagtgactggtttgctttctgcttgtagtcattctgggatgttacagaaagcaaggtgcttcttccgatactttggccagaaaagatcagttactcttacaattgagcactatacaagcatggtggatgtacttggacgatgtggagagctcgaggaagcagaagcagtggtgatgagcatgccaatgaaagcaaattcaatggtatggttggctttattgagtgcatgcagaaagcactctaatttagatttagccaaaagagctgcaaatcagatatttgaaata

SEQ ID NO: 65081 - DNA, 514 bp, Glycine max
  unsure (1)..(514): unsure at all n locations
  Clone ID: PAT_MRT3847_29781C.1
cgccgccggagcgaatggcggtgccacttcaaacgccgcgccccccaatttgatgccgcagaacggtgctgagtattcctcgctttatgtaattgtggcggctctccagcaacaacagcagcacaaccgttccgccgctcttcagcagcaactctcccactcacagcaaatgatcgacatcgaccgaatgcgtccgcccgtgccccccacggcgttggtaccgccgccgcactattcgcacggcgccgcgcatcataacggcacgtcaattgcggccgaattgcgtcattcgctgcacgcttatcaggcggcgctggtggcggcggctgaacgcgcgagggaggaacaacggcagagacagcagcagcacctgcagagaacgcggagaccaaccgcgagcggcgctgagaggcaaagcggcggcggacgaatgcgcggcggnggaggcgcggaacagcaaatacatcaattttggaactctcagcaagtgaatggacgcacgcgttacgaatgc

SEQ ID NO: 65082 - DNA, 468 bp, Glycine max
  unsure (1)..(468): unsure at all n locations
  Clone ID: PAT_MRT3847_29782C.1
ttttcgcnncccgcgtccgcccacgcgtgcgggggggggtggcgtgcttttgcgagttgctgtgggttacgcaaaggctcctttttcagcttcttcgtgttgctgcgagttgggcgatggcgtgaatggcctcggcaggggtattcttggttacgcacgtggttgctccgctgaggtggggggggggggtgctcacgtgacttcgtgggtgaatgaccttgccgaggaattgctgtttctctgttggggggctgtctttgggcctgcaaagccatttcgtggggggatcccagtgtgttttgctgagttgtgaaacctggttcctgtcggctcacatgggtgtgggtgggaaaccagttgtggacaattggtgattccaaagctggcttttgcaacaggtgcttggggtggggccttttgtggttaggtttttagtccctgggggggaccgcgtcttggattaggggc

SEQ ID NO: 65083 - DNA, 515 bp, Glycine max
  Clone ID: PAT_MRT3847_29783C.1
cgggggggaaaaaaaaaacctttacttaaactggaacctttttattaccacaaaggcggtttttccactccccttattgctgccttaagcaaactcaagaggggacctcccttaaggtttaaaaactttactaaccaaatacttgctattgattgaccttttagaaacccgaacccaaacgggtaaccctccttttaaagatatggctaaaccggtttctaaccggggtttctggccctattgaactacccgattataaaacccccaaaccaacccatgcacaaaggcctttatttgcatgaaacacaattgcttccccaaacaaagccttaccctatcctgaaaaagaggttacttaaaagaaaaaactggtgaaaacactaaatcacccatacattgtttgggccggaaccctaaataaatggccccccaaaggtgcggcattccccccaacggataaggggggaaagacaccctactaccctttccacagaaggggctttgggcaacacgtg

SEQ ID NO: 65084 - DNA, 235 bp, Glycine max
  Clone ID: PAT_MRT3847_29784C.1
gatctgcaactagaacaacatatattggggcggtgtgtattataaaaacatacaatatatttcaattctgatgcatagcatataaaacgcagaaaaaagaagtgttatggttaacttgagtcggggagagggggggataataacatctaaattcacaatgtccactagtaattgggttaacttacatgtacaaaactacacccgcattatgagaatacccagcgcactataagca

SEQ ID NO: 65085 - DNA, 445 bp, Glycine max
  Clone ID: PAT_MRT3847_29785C.1
cccacgcgtgcgcatcatattgctggcactatcccaatgggctctggaaccctccttggccttcaacggctggagttgccatctaaccacctcactgagaaaatacctactgaaactaccttatccacgtcactctctttcattgatgtgtcttggaaccaccttgagtcctctttaccctcagatattctttctattccatcccttcaaaccttcattgcctctcataacaattttggaggaaatatcccagatgagttccaggactgtccatctgtctctgagctggatctttcaaacacccatatatctggcacaatccctgaaagcattgcttcttgccaaaaattagtaaaccttaaccttcgaaataactgcttgacaggagaaatcccgaaatccatcacaaagatgcccaccttatctggtcttgatctgtccaaca

SEQ ID NO: 65086 - DNA, 1500 bp, Glycine max
  unsure (1)..(1500): unsure at all n locations
  Clone ID: PAT_MRT3847_29786C.1
cccgcgtccgtttcttttctttctctctctctctctaagttcagcttcaaaatcaatgtcttacttctcagcagcatggtgctagggttcgttttgttcctctccaaacatggtcttcaagggaaggttcttctcttccaagaaatccgattcttctagccccgatgcgtcctccaatagtcctcgatctttctcctccaattccccttccagatccgacaagaaaaaaactaaatccgccgcgaatcaaaccctagccgccgcttccgccgtcggcagcggcggcggcggcggtctcgctccgtgccggcagacgcaggtcaaggatggaactaagaagaaggatgtggtcaaggggaaagaaagtcaaacgccgccgccggattctcgaaaggattctccggcaaagaagttgatggcggcggagggacgggagtcgccgtcgtcgttgtcggtgtcgccgattctggcgtcgtcgctggggctgaacaggatcaagacgagatcggggccgctgccgcaggagagcttcttcggattcaggggcgagaaagggacggcggcgctcggcggcagcaacctctcccggccgggtgtcggtgcccgcgccggcgatgggaagaagaaggaggtggcgaaccagagcagggtggggtttcatgaggattccgtcggcggtgccgccgccaccggaggttggggcgataacgggagcaattccgatagcgtttcgacgtcggggagcttgccgtcgcgggagcagagtccggtcgtgttgccgcggtcgcggttgcagaacggagaatcatcatcggaagctgcaggcaaacaggtatcatcacgggctcagtctggaggcttaaaaagtgcagatatttgtactccagagacagcatatgattttgaaaacccaaaggagtctgaatctcctcgttttcaagctatattgcgcgtcactagtgcacccagaaagaggtttccttcagatatcaaaagtttttcccacgagctgaattcgaaaggtgtctggccttttccattttcgaagcctcggcggttaaataaccttgaggagattttggttgttattagagcaaaatttgataaagcaaaggaagacgtgaactctgatctggctatttttgcggcagacctggttggaattcttgaaaaaaatgcagatactcatcctgattggcaagagaccattgaggacttgctagttttggccaggagctgtgctatgacttcatccggtgagttttggcttcagtgtgaaagcatagttcaggagttggatgataggcgtcaagagcatcctccagggatgctaaagcagcttcacactcgaatgcttttcattctcacaaggtgtacccgattattgcaattccataaggaaagtggtttggctgaggatgaacctgttttcaatctccgtcaatccagagtcttgcattctgctggaaaattattcctnctagtgtgggaaaggatact

SEQ ID NO: 65087 - DNA, 650 bp, Glycine max
  Clone ID: PAT_MRT3847_29787C.1
ccaatgaaccctaactctaaaccaccaaactgcagccatggatatgtcgcaatcattgtgggctctgttctcggcttggcgttgctgctgttgcgtgtctgaggcggcggcggagacagtcagcaaagccgcgaagccagtggtggctgcgctggcggaggcggggacgtcatcgtcaaaggagggacgggaatctagttcgtcgttgtcggtgtcaccgattctggcatcgttgctggggctgaacaggatcaagacgagatcggggccgctgccgcaggagagcttcttcggattcaggggcgagaaagggacggcggtgctcggcggcaacaacctctcccggccgggtgtcggtgcccgcgctggcggtgggaagaagaagtacgtggggaaccaaagcagggtggggtttcatgaggattccgtcggcggtgccgccggcaccggatgttggggcgataaggggagcaattccgatagcgtgtcgacgtcagggagcttgccatcacgggagcaaagtcccgttgcgttgccgccatcgcggatgcagaacggagaatcatcatcggaagctgcaggtataattgcagctctgtgtatgtgcggattctgcaaagattctgattgagttggtgtgattgagtgga

SEQ ID NO: 65088 - DNA, 406 bp, Glycine max
  Clone ID: PAT_MRT3847_29788C.1
ctgcttggctttgaacacattagctttagatttatttgatgaaaaagattaataaataggctccaataataaagataattaaattgggtttattccattcaaagtatctgataatgatgaatatgatctattttctttttctgtttttgcccctgcattttatgggtagcgcgaaatatactatggtgtaaaattcatcgtagaggtgaatttctggttggaatgggaatcaaatttgcataatgatggatgtaaacttcatattacttgttctcagaggacattgttcgtttttagtaaatggcagtgttatgattgaactgtgattcaactaacaacgattcagtatcatattctaagagttatttttggtagttatttcattcaaaaacacattgtatatatt

SEQ ID NO: 65089 - DNA, 901 bp, Glycine max
  Clone ID: PAT_MRT3847_29789C.1
caacgcgtccggcctagctgagttccgcatgggcacagtagaaatgatcattgcatttcacatgaaggctttggtctttttcctttggctgtttgtcccctcattgggcaaagacttgctaagctgtgagacaacttcacctgatgcctctggctaccattgcattgaaaatgtgtcacagaaccaatgtgagacatttgcactctttttaacaaactcttactactcctctctctccaacctcacctcttatttgggactaaacaagtttgtcatagcacaagcaaatggtttctctgcagacactgagttcctctcccaggatcagcctctactggtacctattcattgtaaatgcataggtggcttctctcaggctgagttaaccaaaactaccgtcaaaggagagagcttctatggcattgctcaatcactagagggattgacaacttgcaaggctattagggacaacaaccctggtgtgtcaccttggaatcttgatgacaaagtgagattggttgttccattgagatgttcctgcccattttcatctcaagttagaccacaaccaaagcttctgctttcttatccagtaagtgaaggtgatactatttccaatttggcctcaaagttcaatattactaaagaagctattgtttatgctaataacatatcatcacaaggccttaggactagaagtagtcttgcaccctttacctctattctcattccacttaatggtaagcctatcattggtcctttggttaagcccaaggaacccgattcttgcaatcaaacaaccagcatcccagtgaccagtccacacaagaaatcaccaatgtgggaagactgaatttgggcattggcctagctgggggtgcactttggagactgcattgct

SEQ ID NO: 65090 - DNA, 240 bp, Glycine max
  unsure (1)..(240): unsure at all n locations
  Clone ID: PAT_MRT3847_2978C.1
ggctcgagggtgtataggtgagaagcgattgttaaattttgagccaagtggtatcttctcaggtgcggtttcttattgcatgccctcaattctctattcaatcaagtatgaaaattcgtggattctggttaaattgatgctcaattgtgaattttatttgtatgtgaaatgttaaagattcattaccgtnactttttatcctattattttaaacacaaagaatgttctctttccattttt

SEQ ID NO: 65091 - DNA, 548 bp, Glycine max
  Clone ID: PAT_MRT3847_29790C.1
ccgagaaactttttttttttttttttttttttttttttttttttttttttttttttttttttccatttaaacccattttttttttttccaaaaaaaaaccaattaggggacataaaaacatttttataggcggggcccccccccccttttttttgggggccccccccttaaaccggactctggggccccccctttgggcccccccgcatttccggcccggggcctccacccggacaatctggccctatacggggggggttccaaccttgccctaatagggggcatataagaccccgggggaaaatgggtatccgctcgcactggcgaaaaaagtgcgggccggaaaaataaaacaaaaagccgggggggccaaatgagggggcaaacccggggggcccgagtggggcccccccccccctttaaaggggggaacccccccgccccctttcaattaagaaacccgcccccccccggggaaagaaggattgcgccacggcccccggggggggttttttttttaccggcgccagggggattttttttttgcc

SEQ ID NO: 65092 - DNA, 473 bp, Glycine max
  unsure (1)..(473): unsure at all n locations
  Clone ID: PAT_MRT3847_29791C.1
aacggcacctacttacgcagtacggccttactctctcttgccttgctgtctttgccttcgttccacccacacacaagttcatctttggcttgcaagtactaccaagatgtctgctaataaccccacaatggcacctaccagagaaccgaaggcagcacatgcggccaccaacggcgacgcagagcaatacttgcaagctggtcagggaggcagtcccattggacgcggcatgtccatcaccctaacgccggaacaattcgagcagctgtacttgcagcctggaggtaaaggaggaaagggagatctttcgaagcgcttcggtaacccgactccgctcggaatcgctggcttcctgctgtcattgacgccattatcaatctacttgatgggattcggccagactgctgccactncggccacatcgcanattggcgcatactacgcccttggtggagtctgcatgaatttggctg

SEQ ID NO: 65093 - DNA, 261 bp, Glycine max
  unsure (1)..(261): unsure at all n locations
  Clone ID: PAT_MRT3847_29792C.1
ggntttngtgctgannttcnagancttgttcgcttgtgtnccaaaaanaggcagactatgttgttttcngcaacantgactgaggaggttgatgaacttnttannctttccctgtcaaagcccttgcgtctttctgctgatccntctncnanncggccngcaaccttgactgaggaggttgttngantacgaagaatgcgtgangtnantcaggaagcngttcttcttgcnatgtgctccannncttttncttccaangtc

SEQ ID NO: 65094 - DNA, 655 bp, Glycine max
  unsure (1)..(655): unsure at all n locations
  Clone ID: PAT_MRT3847_29793C.1
aaagggtttccctgggcccaatttaagggcccaaaaaccgggnccggggtttaaaacccgggtttnnaaaaaaggcccttttcccgggngggnaaaaaantttttcccgggggggnccntttcccgggnaaagggngggnaaaaacccaaaaantttcccccccaaaaaaaccnttncccttntccttnttcccctnttnaaatttttgggccctttttgggtttttncggcccgggtttttcctttccccccccttttnccggttntcttttttncgggccgggnggcccccgggtngggtttcccgggggcccccttcccttttncccgggggaaanccgggggcccgggggccaaaaaaccggaaagggggaaaaaacccccggccttgggnaattnccaantgggcccaaggggttgnggtttcccgaaattgnggnccggggtttggaaacggttccccgggggccttggggggaagncaaagaaggncaaccccaancttttttttgnggaagtttcccaaagncgncaagggtttccgggggaaaagggccgttaacggatttccccggaggaacgaagccaacgattaacaagggtaacaaagggtgttccaagggcttaaacatgcggccggcggcccgncncggc

SEQ ID NO: 65095 - DNA, 630 bp, Glycine max
  Clone ID: PAT_MRT3847_29794C.1
tcggctggcgtccgaccacagaagggggtacttggttatgaacatcggaaagggaacgtctgtaaacggaagcaaatgaaagcatcatggcaggaatcatgctggtggaaatgaaaagataaagcacattggcgcctggaatcaagccacaccaaaggtcacataagctattatgttactggcaaagaggaggagcagcctgctgtttttactggagacacactgtttattgctgattgtgggaaatttttcaaaggaactgcagagcagatgtatcagtcactatgtgtaacattaggttcattaccaaagccaacacgagtttactgtggccatggggagaaggtagggtgcaagtctcccgttgaagctttaagagagttacggaagctgaaagacaactggaaggggtagtggaattaactgattactgcatactccatgtgaaggtgtttttatatgcatcttgttactgttgctgaaactgatcgaaaagaaagatatgagataattgtcttgtcatgttaggggagcggattgtgattaaaatttccaattcctcgtattgtcatctagacacgtatgttacgttggttagtctaatactaagatgttccatttcattcatgg

SEQ ID NO: 65096 - DNA, 713 bp, Glycine max
  unsure (1)..(713): unsure at all n locations
  Clone ID: PAT_MRT3847_29795C.1
anaananattttttttttttttttttttttttttttttttttttttttttttttttttttttttttttcaaaccttatggtgtacttgatgacgtttctgatattcttttttaaaaaacccatagggaaaaaaaaggcccttccaaaaaaaaataacgcccaagccaatcggggggacaaaagggggcccccgaaaaattggggggtccaaaaaaaaccgggggaaaaaaaaaaaaagggccccccgggggtaccccgggaaattccgacccgggccccaagaagggccccaattttccctaggggggagattttaaaacgggggcaaaaaccgggacaaacggctcccgggggaaaaaggttaaccccgggaatcccaacaaaaaaaccaacccggaataaaaggggggaaccccgggggcgcctaaggggggggaaaccccccataaaagggggggcaaaaaagggccccttccccggggaaaaaccggtggccccaggggcaaaaaagagggcccccccccccgggggggggggggcaccactttgggcccccggggggttttttttttcaacaaggggagggagccctcctggttgcctttcccccccgggccaaaaaaaaaagttagaacgggggcggcccccccgggggtttgacccccacggcggggaaataaatctctttgggggggggggcggcacacccgggg

SEQ ID NO: 65097 - DNA, 333 bp, Glycine max
  Clone ID: PAT_MRT3847_29796C.1
tttttatataaagagagagtaaatatataatagtagtatactgatctaccagttcctatgcatgccacaccacatgataccctaacaagggaagaaagaaacaaaaatgatgacgacgcatcatagaaattgctagcggaggagttgaacacacaaagcttgtagcagaaacgagaagcatgagctgtcgttagaaggaggtattctggaagtgccaaagccttacaacacccttgaacaaagttcttcctacaaagaaactactacaagtacaccttctacaccttgcaaatccacgtgatgcaaaaacacctagcgtaacacccaatccct

SEQ ID NO: 65098 - DNA, 253 bp, Glycine max
  Clone ID: PAT_MRT3847_29797C.1
tggccctcccactcttaacctgtgaggaggaggctgcgggtggcagtgatttggttgtatctgaggatcagggtgattctgaagcggtggaagatgtggacgtgaggtgaagaagaagccaacgcaatgtggaaagagctgaataggactcctttgttcaatcacaaattgctaacctcatcagcttggtaaaccttgtgtagtcacctagaagtcaagcactaaattaccattcccctgctattggatattg

SEQ ID NO: 65099 - DNA, 565 bp, Glycine max
  Clone ID: PAT_MRT3847_29798C.1
attttctcctccttttgtgcttccaactcttttctttgttatattattctctttcactttctcccaacccttggaatcgacatgactatcctcattgagcaatctgatcactttggtgaagaaaatgagagaggagtatgcaaaattgaacagggtagagatgagcatatgggaatgttgtgaactccttaatgaagtggtggatgagagtgaccctgacttggatgaacctcaaattgagcacttgctccagacagctgaagctataaggagggactacccagatgaagattggttgcacttaactggccttatccatgatctcggcaaggtgctgaatttgcctagttttggaggacttcctcaatgggctgtagtaggggacacattcccagttggttgcagatttgatgaatccattgttcaccataagtattttaaggaaaatccagactacaacaatccagcatacaacactaaatatgggatttactcagagagatgtggacttaacaatgtgatgatgtcatggggacacgatgactacatgtatctagtggcaagg

SEQ ID NO: 65100 - DNA, 1470 bp, Glycine max
  Clone ID: PAT_MRT3847_29799C.1
ctcctccttttgtgcttccaactcttttctttgttatattattctctttcactttctcccaacccttggaatcgacatgactatcctcattgagcaatctgatcactttgggcttataatgatgctggaagtgagaggcgtgaaggagtggagaacttctacagaaaaaatcacacttaccaatcagttgatttcgtgaagaaaatgagagaggagtatgcaaaattgaacagggtagagatgagcatatgggaatgttgtgaactccttaatgaagtggtggatgagagtgaccctgacttggatgaacctcaaattgagcacttgctccagacagctgaagctataaggagggactacccagatgaagattggttgcacttaactggccttatccatgatctcggcaaggtgctgaatttgcctagttttggaggacttcctcaatgggctgtagtaggggacacattcccagttggttgcagatttgatgaatccattgttcaccataagtattttaaggaaaatccagactacaacaatccagcatacaacactaaatatgggatttactcagagagatgtggacttaacaatgtgatgatgtcatggggacacgatgactacatgtatctagtggcaaaggagaatagtactacactgccctctgcggctttgttcattataagataccattcattctatgcattacatagggaaggagcctataagcacctgctgaacgatgaggatgttgagaatctgaaatggctccacattttcaacaaatatgacctttacagcaagagcaaagttcgaattgacgttgaaagggtcaaaccatactatctctccctcattgaaaagtacttccctgcaaagctgaagtggtgaagagttaattggagccatgaagtgccaataatttaccatgatagccaactagttttgtatggagtagagagaattaataagctataaagctgttgttgcagtgtggtataagatattcttgtaagttgtatgaaataatatatgcagctataaagtcctatcagaaatatttttcctttaaaggcgtcccgccggaggatatccagcgcgtcatggacgacctcgacaccgaccacgacggattcattaacctctcggagttcgccgccttctgccgctccgacaccgcggatggcggcgacgccgagctccacgatgctttcaacctgtacgatcatgacaagaacggccatatctccgccacggagctctgccaggtgctgaaccgcctcggaatgaagtgctccgtcgaggaatgccacaacatgatcaaatacgtggattccgacggcgacggcaacgtcaacttccccgagttcaagcggatgatgagcaacaatcgtgaaaatgctagcaatggcgaaaaaaaaaccgattaggcgctttggatttgatgtttatagctaggctgggcaa

SEQ ID NO: 65101 - DNA, 254 bp, Glycine max
  unsure (1)..(254): unsure at all n locations
  Clone ID: PAT_MRT3847_2979C.1
agcagcgcgccgctttttttttttttttttttttttttttngggttaacaacacccccccatttctattcccggggtaatttaggaaccgcacaagcaaaaaaatcacccccctgtcaaaaactttgtcaccttctatttacaacgcaaaaactcaaaacgttgctaccccttgtctaagaaaatagatttttctcttgttccaaacaaaaataacccctccccctctttattattttcccataaaataccttt

SEQ ID NO: 65102 - DNA, 252 bp, Glycine max
  Clone ID: PAT_MRT3847_297C.1
caagacaatatagcccagatagaagagagtgggctttttattcccttaatttgcccctttggtcacgcgttgtattcctccctcatccgcttctccaaccagctctgtgcttccttcttctaccgtctccatttccgtttgcaacattcagaactaatttcagtttccgtcactgatcaatgctgcataatctctgtttccaggttccaacctcgatcttgtcactccacgatttcatgtgattctgtaatg

SEQ ID NO: 65103 - DNA, 2366 bp, Glycine max
  Clone ID: PAT_MRT3847_29800C.1
ggagagagagcctcacacaaaaggcattcctgctcaaaccacaataagaagctaataagcctaataataagtacttacatcacacaccattttctcttataagttctgttctcttcaaaatggagactaataatgcatgtactatgcattctcattgcatagagatgtccatggaagtgcaccaagttgtgccaccacctcacaagagcacccttcagaaactcaagggtaggctcaaggaaactttcttccctgatgatcctctgcgccaattcaagggacaacctcttaagagaaaactgatccttggagctcaatatgtgttccctattctccaatggggtcctaagtataatctcaaactcttcaaatctgaccttgtttctggcctcactattgctagcttggacatcccgcagggaatgagttatgcttagcttgcaagtcttcctccaattttaggactttattctagttttgttccaccacttgtctatgctgttcttggaagctcaaaggaccttgcagttggacctgtttctattgcttctcttgtgatgggatccatgttgcatcaggaagtgtctcccacaacagatccaattctgtttcttcagctagctttcacttcaacattatttgccggtctctttcaagctttgcttggaatcctaaggctaggcttcataattgattttctatctaaggccattcttattgggttcatggctggagctgctattattgtctcactgcaacagctcaagagcctgcttggaatcacacatttcactaatcagatgggtctgattcctgttatgacttctgtttttcacaatatacatgagtggtcatggcaaacaatattgatggggatttgcttcttggtactactactattagcaagacacgttagcataaggaaaccaaaactattctgggtctcagctggagctcctcttatgtgtgtcatcatctctaccctcttggtttttgcaattaaggctcaaaatcatggcatcagtgcgattggaaaattgcaacaaggaataaatcctccatcatggaatatgttgctctttcatggaagtcacctaggcctagttatgaaaacagggcttatcaccgggattttgtccctaacaggaaggtattgcagtaggaaggacatttgcagctctcaaaaactacaaagtggatggaaataaggaaatgatggcaattgggtttatgaatgttgttggctccttcacttcctgctatgttacaacaggtgctttctctcggtcagcagttaacaacaatgcaggcgcaaaaacagctgtgtcaaatgtagtgatgtctgtgacagtcatggtgacactcctttttctcatgccattgtttcaatacacgcctaatgtcgtgctgggcgcaatcatagtcacagcagtaattggcctcatcgatctccccgctgcttgtaacatttggaagatcgacaaattcgattttgttgtgatgatgactgctttcttaggtgttcttttcatctctgtccaaggaggccttgctcttgctgttggattatcaactttgaagatactcttgcaaattacgagaccgaaaacagtgatgttggggaagataccaggaacagacatatatagaaatcttgatcaatacaaggaagctgtgagaatacctggatttcttattttaagcattgaggctcccatcaattttgccaacatcacatatctcaacgagagaacgttaagatggattgaagaagaagaagacaacataaaggaacaattaagccttcgattcttagtattggaaatgtcagctgtgagtgctgttgacacaagtggaatctcacttttcaaggagttgaaagcaacactggaaaagaaaggtgttgagcttgtgttggtcaatcctcttgctgaggtcatagaaaagcttaaaaaagcagatgaagctaatgatttcataagagcagataaccttttcttgacagttggagaggctgtagcttcactttcttcagcaatgaaaggccaatcatcaaccattacagaaggggcacacacaattgtgtcacataattgataaaataagactgcaaaatatataagcaaaagttaaaagaaaaagaaaaaaaaatagaagcagcaccaactacaagactagcatagaatttgcctaatggcaataccaatcattgtaaaatcctacagtttaaacaattaaagtgaaatgtgtacccttgttcatttgtgcttgtgcttactggatttgcctcacaggcattgtagtcataacttatatgggaactacttgttgcttgttaattcaatcgttgaagttgatttccaagc

SEQ ID NO: 65104 - DNA, 1601 bp, Glycine max
  Clone ID: PAT_MRT3847_29801C.1
ggttaaaggtggataaattaacatgtttgtactaaagatggaaaactagaaaatgaaatggaaaagcaagattttcagggaaggacttagtatctcccaattctcaggcaaggacactccggccacttataaatagcaaagcaacctttccacaaccatgccacccccacctcaattttctcctccttttgtgcttccaactcttttctttgttatattattctctttcactttctcccaacccttggaatcgacatgactatcctcattgagcaatctgatcactttggggctgaagtagaggcaaagactgaaccaataaatgagagggaactggtgttggatggtggatttctgataccacagaccaactcatttgggcacatgtttagggcctataatgatgctgtaagtgagaggcgtgaaggagtggagaacttctacagaaaaaatcacacttaccaatcagttgatttcgtgaagaaaatgagagaggagtatgcaaaattgaacagggtagagatgagcatatgggaatgttgtgaactccttaatgaagtggtggatgagagtgaccctgacttggatgaacctcaaattgagcacttgctccagacagctgaagctataaggagggactacccagatgaagattggttgcacttaactggccttatccatgatctcggcaaggtgctgaatttgcctagttttggaggacttcctcaatgggctgtagtaggggacacattcccagttggttgcagatttgatgaatccattgttcaccataagtattttaaggaaaatccagactacaacaatccagcatacaacactaaatatgggatttactcagagagatgtggacttaacaatgtgatgatgtcatggggacacgatgactacatgtatctagtaagcccttggaaaatcctagtaatatatgtattatttattatttagaatatttaagggtattatttcataaattctgaaagaaatgtctaaagtttgggtgctgtcttaggtggcaaaggagaatagtactacactgccctctgcggctttgttcattataagataccattcattctatgcattacataaggaaggagcctataagcacttgatgaatgatgaggattttgagaatctgaaatggctccatattttcaacaaatatgacctttacagcaagagcaaaattcgaattgatgttgaaagggtcagaccgtactatctgtccctcattgaaaagtacttccctgcaaagctgaagtggtgaagagttaattggagccatgaagtgccaataatttaccatgatagccaactagtttcgtatggagtagagggaataataagctataaagctgtagttgcattaattaatttatatgctttggtggtttaagatattcttgtaagttgtatgaaataatatttgtagctaaagtcctgcaaccagaggaaatgtttttccttttttgttttttctttcccttatctaaggaattctcacataatgtgaaactatacggtctcttgattctttaactgagggtgacaattaagtaaatcgtttcttaaagggacaa

SEQ ID NO: 65105 - DNA, 483 bp, Glycine max
  unsure (1)..(483): unsure at all n locations
  Clone ID: PAT_MRT3847_29802C.1
gaccaggtccctatattttatatttgggatgaatggtgtgaaacagaattgatatgaataaaagagaacccctttcttttacaacattgcttgttttgcagcaagaaaatgaagcttattttctttccatttattctcctttttcttgtgttggatcaaaactagctcatctgctgcccaatcagatcaagaccaacaaggaggaaagtcactccttggaaaagaagatagtaaaagtgaactccttgtgcagacaacaaactcctgacagaagctgtgagaaggagcaatgccaaagtcaactctttcttatatattttgttagctttcttaacaggtgttccatttgtttctttatgttccttacattggttagactcaacaagtacactgtcagaagctcctctatggatcttttgttgtnnnattattgacttgacttccctttctgcagccgccaccaaatcngactctgatgacctg

SEQ ID NO: 65106 - DNA, 250 bp, Glycine max
  Clone ID: PAT_MRT3847_29803C.1
gaccgcacgcgtccgctcagaaatcaagatactacgagtcagcactttctcttaccaggaaaataaagatagacacgacagggtctactgaggatttgggccaatacagcatccatgcactctccttttgcatcaccaatcccatcaccgcaaccaacagccgcattctaaatctatttatcccaacctatctcctcatactacatagattccacagcaaataacacgcactcaaatcatcttaatgcta

SEQ ID NO: 65107 - DNA, 333 bp, Glycine max
  Clone ID: PAT_MRT3847_29804C.1
gacagctattcctcttaagcttgctactgagtttccacactgcataccttaggtcttccgaattcgaagttaatttgcaagatggctaaggaaaaggctcaaattaacattgttgtgggttgtcaagttgacccttaaggaggcaaccaacaataacgaacttaaaaaaccttgtgtggagaaagaaacttcaagggatgccattataaggcatgcaacttccggctccggagggaaacaacaaattaagtttacaaaattatcctgaaaccctaaggtaccattttcaccaccattttgtatttaagccaaccttgccaatggtaacttcct

SEQ ID NO: 65108 - DNA, 275 bp, Glycine max
  Clone ID: PAT_MRT3847_29805C.1
tttcatgtttgctaactattttggtttaatgaacatgcctatcactacatgaaacgttcaattaaaaggggcggcagcatctttcaatccttcaatactccataataatgcttcttcctcttcaaatattacttacctttcttctcaaacctatcctacatattcattttctcttaaactcacaaccatcttatctttttactaaaagcttcttatacattctctctataatattcttactattttatcaaaaacctatcccattgtactatatt

SEQ ID NO: 65109 - DNA, 165 bp, Glycine max
  unsure (1)..(165): unsure at all n locations
  Clone ID: PAT_MRT3847_29806C.1
aacacaaccaacnncgacgacccggccgccgccaccgccananccnacgagggcgacggaagaaccaccaacggcnccancgaccncaacaaagncagcnaccncnnccgcgncggaagggccancnacnccaaaccccnccaccggngggaccggnccnccgac

SEQ ID NO: 65110 - DNA, 652 bp, Glycine max
  Clone ID: PAT_MRT3847_29807C.1
gtatgcaccctcaagaggggcataaggttttggatccccccgcatcctatgtgcccattaggactccagcgaggaagcttcttgccactactacgccttggggggctcctttgtatcaaattcctgaggagaatcgggggcaacaggtcaatggtcccaaggaagcacccggcgggatgccgctgatgaagccagaggattaccagcacttaggagcactggtgaatgaggagaatgaagaggagtagactccagatgagcaaaaagaaaggaagattatgaagcttctgcttaaagtgaagaatgggacgccaccgcagaggaagactgcattgaggcagcttacggataaggctcgcgagtttggtgctgggccgttgtttaaccggattttgccattgctcatgcagcctaccctggaggatcaagagaggcatcttttggttaaggtaattgacagggttttgtataagttagacgaattggttcggccttttgtgcataagattcttgttgttattgaacccttgttgattgatgaagactactatgcgcgtgtggagggcagagaaataatatctaatcttagtaaagctgctgggctggctactatgattgctgctatgcgacctgatattgataacattgatga

SEQ ID NO: 65111 - DNA, 206 bp, Glycine max
  Clone ID: PAT_MRT3847_29808C.1
ctttctaatagtcctgaacaatttggatatttccaccatattctccataaatgaattccttatgagcttgctttcagagaaaagaattgctgaaaatcaattgccttcaaaagctcctcatgatgaaactcttgagcattatgaaattgctgcaggatcatcaacaatctgttgctcaatgctgcaatgtctgagtatgttccaac

SEQ ID NO: 65112 - DNA, 209 bp, Glycine max
  Clone ID: PAT_MRT3847_29809C.1
ttccttccttcaatcaacatttaatattattctcaacattcaaacacaaagactcctgaggggtaaagaacttccagataatggcattttctaaccaatacgaatttggacatttcggggcttttggatttaaaacaactttgatgccaactctttttggagacagcgacccatttgatgatccctttttactgatccatttgatagct

SEQ ID NO: 65113 - DNA, 535 bp, Glycine max
  Clone ID: PAT_MRT3847_2980C.1
agccagaggggcacctatgctgaggcatttgccaaacatgagcgaaattttaatgaaaagaagaaggtactagaatggaagaatgttttggtagaagcagccaattatgctggttgggattgcaaggtcaacaggacagaatttgaaattgttgaggaaattgtcaaggatgcgctggaaaagctagatcgcgcgaacgttagtgacctggatcgccatatcaataaaatggagcaacttgcacgacttcaacatcaattctatgaggacatacgtacttatgaaaatatgctaaaacgtgatgcgaccgtacaacgtgtcacagaacttaaaatggagagaagtatccgtttgcttcgtctcacgccagatatgctctcccatttgggaaattcaagcactaatgactttttttgattcgttggaataatgatattcacaatttgttaattatttgtcaaatattatgaatattatctttgacattatgtactgatacaaaaattgaatatatggaaatgatgtaaacaatgca

SEQ ID NO: 65114 - DNA, 1072 bp, Glycine max
  unsure (1)..(1072): unsure at all n locations
  Clone ID: PAT_MRT3847_29810C.1
ggccgggacaaaacaaggtcattgagaaaccccaaaacaatcaacaatagcttgctagctactcctgttgctgtgagaaccgttgatgtagatgctttgcaagcaagatttagagactccaacaataaaagccatgcttaacacctaccatgcctccaaactctcatcaaaccagtgtggttctagccttgtgcaaacaatagatgcacctttacctctcgtatggtccctcataaggcgctttgagtatccacaagggtacaagctctttgtgaagaagtgcaaccttcttgatggggatggtggcattggaagcgtgcgtgaggtcatgatcacatctgggttacccgctggtgttagtgtggagaggttggacaagctcgatgatgacaagcatgtcttgaagtttagcatcattggtggtgatcacaggcttgtcaattatagttcaacgattactttgcatgaggaggaagaggaatacggtgggaagacggtggcgatagagtcgtacgcggtggatgtcccggcggggagtagcggcgacgatacgtgctcttttgctaatactatcatagcttgcaaccttaggtccttggctaagatcacagaagaaaaggtttgtaaggttaatcaaattaagctttaatacttaagtaggttcttcttgttgttttttttttcaattagaaatctaaactttaaaaaaaattgtaattgagtttttaatcttctatacaattattgtaattgggttcttggagttaatgaaatcgtcatattgttatttttgaggtggtttcaagctgtcagaaattcatttcattcgaggaatccaagtacaaaaatggcaaaacataaaaaattcaattacaatcttttgtagtttagaaacctaaataaaatttctcaaaacatttagggacttaattgtatattaaaccttaaattaaggtttgctttgtttctcttaagatttgttgtgatactatgttgattactgttgttattgttgcaagtctatttatagatcaaaaaaaaaaaaaannnannannnannnnannnnannnn

SEQ ID NO: 65115 - DNA, 714 bp, Glycine max
  unsure (1)..(714): unsure at all n locations
  Clone ID: PAT_MRT3847_29811C.1
cccaaagctgtggccgggtaagccttcctacctattccccgcttgcacgggagcgtgcatcgctgatcgtgtcatcaactcagggctctgtatcgactatgacgagtgatgagagccgagcgccgaccccgaccaaatccataaagccttaacacatgcctgcacacacgccttattacaacccgactcccgcacactaccggaaacaaaaggatacgcatcctgcagctcatacccaaactggctcgatccctgaaggctctcttgaagagccatacggaccatgcctgcgtactccacctcatcagcccaatccttatctcgtctgaaggacaggagagagatgacacaattggcgaatactacacgatctgcaaagatgtaccctcgagcatagccctcgtatcatatcctctggctgcattcaccagactcctagtcatgctgggccacaccgatgctgcgactgtgcccaccagtctggaaatcacaaacgtaggatctagatgtttagttttttatttatatacattagattgggtactatgaacaacaaatttacaattcacctgttggtgatggaaacataagagatattgtaatgtactacagtgataaatgaaacacatgatcttctcagctttaaagaatcacttttgctttccagaagagaaaaccatgatgaatataaaagaattggaatncccttccttt

SEQ ID NO: 65116 - DNA, 530 bp, Glycine max
  Clone ID: PAT_MRT3847_29812C.1
aagaagtctggcgcgaccgtcgagactggtggcaaccgtaagggcgacaagggttacttcatcgagcccacaatcttctccaacgtaaccgaggatatgaagattcagcaagaagagatcttcggccccgtctgcacaatctccaagttcaagacaaaggccgatgtcatcaagattggtaacaacaccacatacggtcttgctgccgctgtacacacatccaacctcaccactgccattgaggttgccaacgcgctccgtgcaggaactgtctgggtcaactcctacaacactcttcactggcaacttcccttcggggggtacaaggagtctggtattgggcgcgaattgggagaggcggcgctggacaactacatccagaccaagaccgtgtctattcgtcttggcgatgttctgttcggttaagcgctatgctggttttttagcgaaggattccataggtactatgtatagctcaagtaattatgaggatctaaatgaatgtaaagaattatcaacaaaaacaaaaa

SEQ ID NO: 65117 - DNA, 218 bp, Glycine max
  Clone ID: PAT_MRT3847_29813C.1
cgcaccagaacatgtccgagcaaccacaggttatctcatccctacccgacagcgactgacaccgtcgaccgccggccatcgtacccagacgacatgtccaccactagcagctctcgtcagtgagcgaccaggatcagcccaagagcgacccagctgcaggtcgacccgtttgggagagaaaatcagcggcacatcacgtcctccgacaccccaacatc

SEQ ID NO: 65118 - DNA, 237 bp, Glycine max
  Clone ID: PAT_MRT3847_29814C.1
gtagatcattgcctctgacatcttcacctacttggctgttgtttatacaatgatcagtgctgtcacaaggatagatccaagggctttcactgtatccgtactactgcggctataagactgagagacgaatacatgtgctttcatgcactttatgtgccatatatgctagacagcgattcataatgcttctacgttgatctttactctggctaactgactaacttgaccaatgaatca

SEQ ID NO: 65119 - DNA, 504 bp, Glycine max
  Clone ID: PAT_MRT3847_29815C.1
ggagtcaatcttaatgctgttcctagattggaggtagattcctctatcactttcctagtggaaaaaataattcaaaaaggaattgaattgattagctagtttgattaactatggtcataagataggtatgctggtttaagtttgtgactctggagattattagttggaatttgagtgggttggatgatcgtaggaagaggaagagagttaggaagataattccaataacatcactgacttttgtcacacttaaagaaactaagctggaaagttttgatgttcttcaggatattagggatttcagatttaaagattatgggtctgcttgccttttttaggtgcctctgagggtattgttgttttgacaccagatgtgcttctaaaatcaaatattttcttggtggcttttcagtttcagtttccttggatgttaaaggatgagggaattggcgctttacttcagtttatgtgcctcattctccaaatttgtgctctttcttttgg

SEQ ID NO: 65120 - DNA, 308 bp, Glycine max
  Clone ID: PAT_MRT3847_29816C.1
ggctcgaggtgtgatcctatagaatttggatcatgtgtctcaggctgtaatgatagtccgagtaacatcgcatttgagtgcatactacaggctagtgtaatacagaaagaaaaggactatgcatgcacgggaaaagatggcacctggaaatctgagatgaccatgattgcagctactgcatgtaactacagggaggtagccctagaggatgaactgatggctgcatacgtagtgtagaaagggactcttgcagctgctatcaatgctgttagtatgcagacatatggaggaggcgtgtcatgcccata

SEQ ID NO: 65121 - DNA, 203 bp, Glycine max
  Clone ID: PAT_MRT3847_29817C.1
attcgcttgaaagcaagtaactttgttccttctaaggagctacttcgtgtatctatacgcatgcataggttcttagatgggagcttggatgtcaaagacgtcgctgtcactgaggtgccatgcacatcatgttcgttctggagatctatgtcttccgtatcattagctgttgtcattgtgtcctcagctggagatggaatatg

SEQ ID NO: 65122 - DNA, 739 bp, Glycine max
  Clone ID: PAT_MRT3847_29818C.1
tgatgcaatgcttccaaagtgtgatgtgattgttatcaacacccctctcactgagcagacaaggtatacttttaaatttaacatctcagtcaatcagaaaaattattttagacttgaaatctcaagccacttataattttcaaaattattatcatgagaagtgcattatcagtattattcatatcacaaggaataaattgtttgatcatgttccagagatgagtagtaaccaaagatttctgtgattcaggggattgtttgacaaaaatagaattgctaagtgcaagaaaggtgtcttgattgttaacaatgctcgaggggcaattgcggacactcaagcaattgctgatgcttgctccagtggccacgttgcaggtaattctaaaaccaggtgacaaaaatgtttgtgcttccagcagcaaaacaagaaattattattgactaatgtagtaataccgtaattttgttaagatattaaaatcacttatgtgctttcaccaatctgcttaaatttttggattttgtctctctaaaatgaatagtagtaaaataagtaatctcaatagatggtgagaagatcaacagataatattctaacacattcataatttatgaagcatgtgtacataatactatcaagttatcaactattgatttctttaccaataattaactttacttattttacttcacaaagtgagttgttctgttatgtccctaagttctgttatgatccttt

SEQ ID NO: 65123 - DNA, 270 bp, Glycine max
  Clone ID: PAT_MRT3847_29819C.1
gctacatacttttgactactactactacccttgattggtgcatataatatacaccacactagtctgtcagatatagacaaagtatagatcgtgttgaccttggtagaccttgtcaagaccgagtaagacacagcaccctatcaaatgtgtggcgcaacacgttcatgtgggagaccatgaacaactaaccactgatgtaccataagatctactcctcaaatattgaccaccctgctcatactggtcgagcttgattatgcctactgcact

SEQ ID NO: 65124 - DNA, 249 bp, Glycine max
  Clone ID: PAT_MRT3847_2981C.1
catccgtctcacattcagactatagaaagactctatccttcgatcaaatacccggggctatttagaagcaatttaagaacaaaccataccccattttacggttctctcaagatgatcctgattccaacatcatttatttacgatattcatatcaaataataatgatgcagatgaattaactttatgtaatcatatactttagtaagcttaactaatacttttataacgagtccctatacacttcacgta

SEQ ID NO: 65125 - DNA, 669 bp, Glycine max
  Clone ID: PAT_MRT3847_29820C.1
ccacgcgtccggtggcaactcgcaacaattgtgtttctgtttttctcctcatctgacattcgcaacggtaacctaacctaacctcactcactttcatccacttctccaaaaatggaagaacaagaagaagaagctccaactctgcgactcgagatcctgcaaggccctggcgagggcaaaaccctagaattcaaacccggcaccgccgtccgaatcggccgcgtcatcaaaggaaacaatctccccatcaaggactccggcatctcctccaaacacctcaccatctcaaccgaatccaacaaatggaccctccgcgatttggattcctcaaacggcaccgttttggacggatcccaaatccctccccacacccccttcacgcttcatcacgactccgttattaagatcggagaactcacctccatccatgtcatcttcgttcctcgcgaacaacaacaacaacaacgcgcggttcagccgcggcgaaaccctactcgccgcggccgaaccgaaccggtcccggctccgactgaaccggttcagacacgcggacgcggtaaacctaggggtttgaagggtaaggttcagattcaggttcagagtgttgaggaaaatgacgcgagtgtggtggacgcggaatctgaacgcgtggattcacctgctaggggt

SEQ ID NO: 65126 - DNA, 421 bp, Glycine max
  Clone ID: PAT_MRT3847_29821C.1
aaagagaattctattgttatttaaatcaagcttgctttttggccaaccaaatacgcatgtggtctgtgtactgtgtcacacgatgtctaccaatcaggctccccctaaggatcgaacggacgcattaacatctttaaaaagggaccatcacaacattgtaaactgagccgcaaatcgcacgaaaagagtcgcccttccgcttagagagcacccctctataggcagttttcagaagttaacaatcccataaggttttagagggacttttaacgtactcgccttctgagattcaagtgtttgcacaacatccattccaacaacgatatgtctaaatacaacgtgacgaatgtgtagccatggactgtttaccgcgcaaatgaagaattgactgccatttgtctatggaccatcattttccatg

SEQ ID NO: 65127 - DNA, 151 bp, Glycine max
  Clone ID: PAT_MRT3847_29822C.1
gagattttcttcatccttctctgatcactgataactcgattacttgaacattcccgatggcttattaggtggttcttctggacctctttccaagtccatttgtgatgagggtcacgattgcacttgctgaaaagggttttgtatattgatt

SEQ ID NO: 65128 - DNA, 304 bp, Glycine max
  Clone ID: PAT_MRT3847_29823C.1
ctcctccgaccattacccaatgatccagttcaaggggaggaactgtccacgtggcacgtgccacgactggaccgagtgcccctacggccaccccgccgagaaagctcgccgccgagacccccgcaaataccactactcaggtacctcctgccccgaaaaccgccacgagaactgcaagaggggcgacacctgaccgatcgaagcccgcgtattctaatgctggctccacccttctcgctaccgaacccagcatctgcgggaaacgaaacattgccgccgcagaccgcacttcttcgcccacaca

SEQ ID NO: 65129 - DNA, 613 bp, Glycine max
  Clone ID: PAT_MRT3847_29824C.1
cccacgcgtccgcccccgtcttttctttctctctgaatttgcaaatctcaaaagcctcaaaagttagaagagagagaaagaccaccacgcacagaaacagcaataattcactatcttttccaactttatccttctctctctctctctctctctctctctctctctctctgaaactcatcatcatcgccgttgagatctcaggatactctagaaggaacttttagccatgtctagctcagcaaaagttttggatcctgcattccagggagttggtcaaagagtaggaactgaaatatggaggattgagaattttgagccagttccattgcccaaatctgagtatgggaaattctacatgggagattcgcacatcatcctgccgacaactcaaggcaaaggaagcacttatttttatgatttacacttttggattggaaagcatacaagtcaggatgaagctggaacctgggccattaaaaccggtgaacttgatgccgctattggagggcgtgcagtgcagcacagggaaatcccagggcatgagtctgacaagtttttgtcatactttaaaccatgtattataccattggaggggggaggtgcatctgggttt

SEQ ID NO: 65130 - DNA, 435 bp, Glycine max
  Clone ID: PAT_MRT3847_29825C.1
ctttcttgcaacctctcaagtgcaacctaccgctttttattatgccaccaacttcaccggattattcctcgatcatgtctcacttcaggggcaagtaccataatgagcttattgccaatgctgcttacatagacacttctggaaaggggattcttgctgctgatgatggaacagggacaataggcaagcgtttggccagcattagtgtagagaatgttgaatccaacaggcgtgcttttagggagctgatttttaccactcaccaggtgctcttaaatatctcagaggcgccatactgtttcgggaaactctctaccagagcacacctgcaggcaagcactatgtgtaagtcttgaaggaggctggtgtgcttcctggcataaaagttgtcaagggcacagctgagcttgctgtcacttatggagaaaccaccac

SEQ ID NO: 65131 - DNA, 717 bp, Glycine max
  Clone ID: PAT_MRT3847_29826C.1
cccgggctcgacccacgcgtccgattttttctttctttcttcctttttgattctgttcatctcaccgccctttttccaccatcatcgttgtcataattcatccacacacgatacacaccccttttctttttcttttctttctctctgaaattgcaaatctcaaaagcctcaaaagttagaagagagagaaagaccaccacgcacagaaacagcaataattcactttcttttccaactatatccttccctctctctctactatctctctctctctgaaactcatcatcatcatcgccgttgagatctcagtatctgcctaattaaagaactgggaagcttgggacatgcatggcagagatggggttgttctggtaacaaggagcttgttatttgcttcgttggttaaagaagtaatctatagtgaaaatagtgcaactatggaaggctggtcctggctgtattattttgcatattaaaagattactttaaaagatttcattttgttaccatcttgatcattgcttttgaaaactgacaagacaactcatgctactgaatagaatgactggccaaaccttgttatggaagaaattgtgtttgctgataaagaaaggatactcttagaagaacttttagccatgtctagctcagcaaaagttgtggatcctgcatttcaaggagttggtcaaagagtaggaactgaaatatggaggattg

SEQ ID NO: 65132 - DNA, 1451 bp, Glycine max
  Clone ID: PAT_MRT3847_29827C.1
cattcttataaataaaatttaattttcaacagagtgacggttcaagcatgttgatgcgtccgatataagtacattttatgaagcatcacgcaacagctcaagctttgggaatattaaatgaatgatagtctagttgcatatgtttgataattatccttgtagactactttttactttggctcccactatactcataaagatcagtatattctgattttcgatcttcaggatatgtcacttgaccaacccagtgaaacacctcagcaccacagtccagtaaatagcatttgttgttttccaacagtgatttagaaagttcaccttccacaggcttgatctcaacatcaacaatactgtaaagctgagcaggaattgtctctggaataatatcatcctcactgattaccttcttcccaatgggagcaaaaccaccaaagaggacccaaaattcacctgagtctgactcagtgtctaattttccatcgtcaacaattgcaacatcaccctcgcgttcatgctatttttctttcagaaactgtatgacttccaaagccttggctctttcctgaatattggaatttgcaccattgaattgataaatcttattctgagtgtctagtatgaatacatcttcatggttcaatgaagaccttgcaaaagggacctgtctcaatctaacaactcttttccctctgcatacatacaaacatgtttcaaacttctcttcttcaggttttttaaacccagatgcaactccaccctccaatggtataatacatggtttaaagtatgacaaaaacttgtcagactcatgcccttggatttccctgtgctgcactgcacgccctccaatagcagcatcaagttcaacagttttaatggccgcagttccagcctcatcctaccttgtatcctttccaatccaaaagtgtaaatcataaaaataagtgcctcctttgccttgagttgtctgcaagatgatgtacgaatctcccgtgtagaatttgccatactcagatttgggcaatgcaactggctgaaaattctcaatcctccatatttcagttcctactctttgaccaactccctggaatgcaggatccaaaacttttgctgagctagacatggctaaaagttccttctagagtatcctttctttatcagcaaacacaatttctgagatctcaacggcgatgatgatgatgagtttcagagagagagagatagtagagagagagggaaggatatagttggaaaagaaagtgaattattgctgtttctgtgcgtggtggtctttctctctcttctaacttttgaggcttttgagatttgcaatttcagagagaaagaaaagaaaaagaaaaggggtgtgtatcgtgtgtggatgaattatgacaacgatgaggtggaaaaagggcggtgagatgaacagaatcaaaacggacgcgtgg

SEQ ID NO: 65133 - DNA, 507 bp, Glycine max
  Clone ID: PAT_MRT3847_29828C.1
aaagaccaaaaacagtttttattttttggacccttgggaaggaaatgggggggccaaactttagggggggaacaaggaccaaaaactacccacaagggaatttttccaaacaggagggaaaaacaaaagggtacaaatttattttaaaaaaaccttaaaagggcaatttttaccacttttttttattgggggtaattcgggtcatttattccggggaacttaactttttgggaaataaaaaactttgatcccctatgcaaaaacaaaaaaaaacaacccaacaaaggcaatatgagccccagcaaccaccccggggaagccatatttatagccgaacttttcctaaaggaaaggtttcactggcattgggtctgacccagggcccaaaaaaggagtatttttggcaccccccggggagggcactagggcataaacactccagggggggggacccacccagaaaaaccccccccaccatattggaatttgggattttgggaaaaagaa

SEQ ID NO: 65134 - DNA, 232 bp, Glycine max
  unsure (1)..(232): unsure at all n locations
  Clone ID: PAT_MRT3847_29829C.1
tttgtgagtaagagtgacccagtanaagaagcggcttgggagcatttggtttaccatttcttctccaaatttgtttgatctaggangataaagttaatttggctacatatggagtatgtacatttaatattatttttctcttccaatttatttatgtacacaaatggacactaatggactatttgnaacacatgcaaaccgacctttacggnagtataacatataactggat

SEQ ID NO: 65135 - DNA, 868 bp, Glycine max
  Clone ID: PAT_MRT3847_2982C.1
ctttttatcccccttctgttttgatctggcctctccccatatttttttcattctgttttgaatcagtttttaccagaaaattcaataagaaatttactaattactatgaatttaatttatatttaatgttgagacatgaattgtaaattaagtaagtaaatataaactacaattacaagattgtctaaacatcctaagtttcatttttcactttcaaatagtactttgcccactggttgcgaagtgccttcaatctttctggttccaatggtctaggatcagtgaaatactgaatgatataataaaacataagttaataatatattagcaatcataataatatgaaatttggtgaattaaaaattaccatttcccaattattctggaaatttcctaagattatagttgacatccaatgcatgacgtaatacccacactcagtgcttcctttttgtctattacactaaatacattatgaaatttagatatgcaacgttcagtacaaattagtctacacaatactaaaatataagtgatctcccatttctacatcaaacggttcggattgttgcccactctgcatgtctgtcatttcaccatgccatatccacgtcgtataattcctcttaattccatcacacaacagatgctctcgtatgtcatccagtatttgtcgtcttccattcaaacaattgatgccaggacaataatattttccatcttcatccggttgacctctttgtgaagcaaattgtaagaattgctcgacgccttcctcatattctggcctgatgcgactttgattcatccaacttcgatccatctgtaacagtggtttctctatcaaataaaaccagctgaagttcct

SEQ ID NO: 65136 - DNA, 156 bp, Glycine max
  unsure (1)..(156): unsure at all n locations
  Clone ID: PAT_MRT3847_29830C.1
tactttccaccgtgacgatgttcctgcggaagctgttatagcacnnntgtgtngtaacattttgttcccnagacacnaagcagtttccnaaacgtaggcntccacccggggtttattgtnacagnaggngnatggacccngngggaangaaanntc

SEQ ID NO: 65137 - DNA, 496 bp, Glycine max
  Clone ID: PAT_MRT3847_29831C.1
gggttcttatgccaagtgcaactccactgtgatgagaaagcataatagtttgttgatgcatgatagcaatagtttactggaaggtgataactttttttatggtgaaattcctgctgtagaaagtttcaacattgatgtaccttttgatgcaccgagttcttcacatggaagaagattccataaagtagaagctgatgtgatcaatgaatcatttgaagatgatttactttataatagctgcagtgggtatggttatgatgtaaagattaatggggatttgcaacaaccttttctaaagagatgctctatgctaggaagtatcctgcatgagaaggctttgttcgtaaatgatgaacatgaactccaaactgatggcttttggagcaaacataatacagaggaggattatagaagtggtaaggatttatatgtccatcgttgtccagaagtcacaaaaaaattaaagattactagagattctgatttcctagttaga

SEQ ID NO: 65138 - DNA, 165 bp, Glycine max
  Clone ID: PAT_MRT3847_29832C.1
gccccaaactatcaatgataatttcggaggtctttactgcaacataggtgttgctatgctctagggtgatacttatcacaccaaggctgagaatgcggtgcggagggttcttggtgcgcctgtcagagggggaagggccattcgggtgggtacatccgcgcatac

SEQ ID NO: 65139 - DNA, 657 bp, Glycine max
  Clone ID: PAT_MRT3847_29833C.1
agtaagttagcttcccattgcaaatgagtttcatatgttgtgaacaaaaggaaccaaaatgcatgattttgcaatttactcccctactcaaattgtgcttatggattgtatgttcatatatgaatttgaggagcagagtggaaggatgaaagggtgcaaaagatggggaggcttttgcatttttggatagcattcgaagaataaccaacttgagaatgattggttttcaaagactgcagttttttctcatgcataataagactcagaagttgaggaaattggtagggtttttgaaattatactttttacttccatcattaaatatactcattaccctccatccaaattacgtgcttaattttgtcctgacttgcaaagcattagcattgagcaccaattgttgttctccgctatttgaactactttggtatctggcaaaaccaatgtccaggttataaatgacatgtaaagctatgcatggtttaatatatgatatgttataaaataatgttatataatataaaataattttttccatgctatctgctagagagaacaacatttcaggttacatgtaaaggtgagtattgtttgattagctctctgccatcccttatacacatgaaatgacagttcaataaaacttagttctgcaaa

SEQ ID NO: 65140 - DNA, 459 bp, Glycine max
  Clone ID: PAT_MRT3847_29834C.1
gacgcacgctcgcaattccgctcgagatctgacaaggactcgggagctcttgtcgaaggccatgatactggtttgcctgaggtttcgattcatgggaggctcttctgagccagccactttctacagagaatcctgagctacactccatcctttcctgagcccatctcgtcctaacgctgtccgttagtgatggggggatggatgttacatcttacagcgcctgatggaacatcgcttaccgttagactactgaatggtgcaccttcctactctacactaggagcgaatacgatctgagcatggctggaatgaacgcacgatagcagtggaaggtctgcagagaactacttttcgaatggggacgtctagctctgcttgagatacggcatgcagactcatgactatggatacaacgcatggccagctggcacggcgtcggcgggccactgaacctgtgat

SEQ ID NO: 65141 - DNA, 562 bp, Glycine max
  unsure (1)..(562): unsure at all n locations
  Clone ID: PAT_MRT3847_29835C.1
catagattaaataaatatttaaatttatcttaaattttgatgatatatttttatatttttattaactttaacatatcactttttacataaaaatatttatgatattttataaatatacttctttctttccttaccttttctctctcttttccttttcacttaatcactaaacaattactcattttccattttttctcttcttatctcctttcctttcattttttattctatcttcatttcacttcccttgtctaaatttctaacttttcctagttggcttcgtttcaacgaaaagtactagatattgtagtagtggactataaatttaatagtaaagttaaatccagtttcttttctacaaaaaaaggttgaattaatgacaacattgtgacatttggtttagatcaccaattgcaactgtttgacaaaaacaaaaaacaaaaacaacaactacaactagtaataaaaaaagtacaactaatacatccttgatccttgtccttaatttttgttcgggnaatatacacgacaggataatgacgattttttggtgcatcaaaac

SEQ ID NO: 65142 - DNA, 502 bp, Glycine max
  Clone ID: PAT_MRT3847_29836C.1
acggctgcgagaagacgacagaagggcagtactatcatgtagttatatattagtagtattatgtttggtaaaattatttatttttgtaataattattttaaatgtcacatgtaaagttatttgtaattggttgcaagtgaagattttttttttacattaccaaggtatcaataaactctggttataacattcacatagaagaaagtgaaaaacacgataggtaacttaaattaggtcgggtcatttcacaaaacaaaagaaactcttctgcacggaaaggttatagcaaaagaacaatgaaagggttaaaagcgcagacttatgcatgtagcttatccgaataagttttctgctttaagtaatcgatgacagtgaattgaactaggttctatatatactctttttttttttactattaggttctataagttgattccttatactgtttttttaagaggattccttatacttaccgtattaacatgataatttaatgttaagt

SEQ ID NO: 65143 - DNA, 520 bp, Glycine max
  Clone ID: PAT_MRT3847_29837C.1
ccaaccaaaggttactttggccgggtaaaaaaatcctgggggacagtttttgggaacctttgggaaaattaataaccaaaaaacccccctccttttttttggctttaaataaatcccaagtttttaggttttcattttggaaacccttaaaacctaagggggaccctcataaaaaacaaaaaagcttgcttcccccgggtcaatttccccaagcggggggcaagcaaacatattttccctttccggggggctcataaaacggaggccccactaattggagcgggggggaaacctttcaaaaatcacctttttttgcacaataaattgcagtcgggaaaaaatagtccctcagtttttttttaggattccctgaacccttcgaaatcttcctttcgtcatcaggtttcccacgggaaaaaacctcatgtttataagctttaaaccaagggggccatgcttccttaccctttttaccaatatttaacagtacaaattttaggggaactaacagctcatcatc

SEQ ID NO: 65144 - DNA, 1030 bp, Glycine max
  unsure (1)..(1030): unsure at all n locations
  Clone ID: PAT_MRT3847_29838C.1
gacctgtgggtttatggaaggataagtaataaggggaaatgatgggaaatacagtaactacatgtccttctccctactttgcccattttcattcagcgctatgattcgtctttctcctagaaaaaactagcaatattgagctctcttctaaatatacttcaggataggcatttttgttttagccccctactatgttctgctcataactggctgtctagatcgcgagcggcgcccttnnttttttttttttttttttgggaactaacaaagtaatcatcaacttcgtttattccagtaaaaaagactatgtccagtgtagaacgtagatgtgaatttaccagcgacttcaagcacagtttggtaatcctgcaattttcaccttgccatgcagcatccaagttatttacagtctagaaattggggaggaacaactataccataagatatgttttctcagaagcttcaataatttagtaaattcattgagtgaccaaaagctagtgatggacaaaaagaattcatgaaggcaaccttccagccaaatagtgagacaatctgtctcttagtgcaactcccttctcgtctacagctccacaaaccagtcgatggtaacctgagtcatgatcaagagacaaagatagttcatcctgcacttcatcgttcaagtcaataacaatgttatgaagtacgcagcaaacgagaagtaatccttggcagacggtgtttgtctggtctccacatcattccatgaatgattctccacatctctttcagtcttgccagtgctctttgtgccaccatccttgttgccaaatgctgcttgttaaactgtgcttttggttctgagagttctttcccttcataggggacaacaaggtaaggtaatagacgatagcctgaatctccgagtatatattctcttatttctgatccttcagagagctgtaatttgcttccattcaacctctcacccttctcacaaagtttattgaaatttgaactctcaaatatcaaccagtctggcctttta

SEQ ID NO: 65145 - DNA, 429 bp, Glycine max
  Clone ID: PAT_MRT3847_29839C.1
tccggaattaccgcgtcgacccacgcgtccgctctacctcaagttcttgcacaggcaactgaaatgctatacatgcgtttggacacaatgaacactacctgtgtagacaggtttattaattggttttctcatcatctaagtaacttccagttccgttggagctgggaagattggtcagattgtcttagtcaagatcctgaaagtcctacaccgaagttggtaagagaagttctagataaatgtatgaggttgttttaccatcagcgtatattagatattgttcatcttaccttctcagctctgtgtgctgcaaacccaacctgcatttacaagtatggagacgaacgcagccattttcttcctggagatgttgttgccttcctacataactagccaattgcagggcccttgcatgcataaatattaaac

SEQ ID NO: 65146 - DNA, 320 bp, Glycine max
  Clone ID: PAT_MRT3847_2983C.1
cttcagtttttacttctttttttcttgcggtttgggttttagcgcagctattacgagaggaaggcagacgatgaaaagaaccagttcacatttgaattttggcgacaccccttttccaccctgggaaattcactacctctggtcccctaatttacatgcttgccggccttgactagcgtgcgatggagaggcttgagtccgtagctgatgagatgaacaagaggtctttcacgtatgccagcgcgctggacatacataaaagcttgcttaaaaagaagatgtatcctaagatctcactttcttgaaaaggggaacaccct

SEQ ID NO: 65147 - DNA, 294 bp, Glycine max
  Clone ID: PAT_MRT3847_29840C.1
gaagtctatgttcttgaaccaggccacagatcgaccttgcaatgcaaaatgattgattattccataccagacagtgttttagttatccgaaatgtctcacatgtggagtttgaatgtgaagtaggccttgttgctgatccagctaaattgaaaggtgatcttgtatcattcttgaaggctgtgaacgaatagttggagtcataactgagctaggtgaaacagcatgctcttaaactaaagcgagatctggtaggagctgagtttcgtaactctgacctttacaaggagctctaa

SEQ ID NO: 65148 - DNA, 558 bp, Glycine max
  unsure (1)..(558): unsure at all n locations
  Clone ID: PAT_MRT3847_29841C.1
tgactagacaaatagcttcaccagttgaagtggactctggctacggagagcctattgagatgttgtcatgcccctctgatggcagtgactgtggcggagcatacatcattcgtcttccatgcggacctcgtgataggtacataccaaaagaatcactttggcctcacttgcctgaatttgtggatggtgctctaggtcacattgttaacatggcaagagttttaggggagcaagtgaatagtgggaagccaacatggccttatgttatccatggtcactatgctgatgctggggaggtagcagcacacttatctggggccttgaatgtgcctatggtgctcacagggcactcgttaggtcggaacaagtttgagcagttgttgaagcaagggaggctctctagggaggccataaatgcaacctacaagatcatgaggaggattgaggctgangagttgggtgtggatgctgctgaaatggttgtcactagcacaaggcangagattgaagagcaatggngactgtatgatgggtttgatctcaaagtggagaggaagc

SEQ ID NO: 65149 - DNA, 668 bp, Glycine max
  unsure (1)..(668): unsure at all n locations
  Clone ID: PAT_MRT3847_29842C.1
nggtttatattcccacaaaggaaaaagaagaagaagaagaagaagcgagaagagcccaaataaaaaccccagtgtcgttcctcttctaagcacaagaagaagaaagaagagggtatttttttctgcagcaacaacaagcgagtgtgctttctcctttctcctttgaacaacaacaagaaccactctctcttgtcgccacatatttaacgacaattactaaaactgtttttccgtgatggagctggctttgagtttaggagacacgtccaagtcctttacatttctcgacaaggcggtgactttaccccccaacaaggacccacctgggttctgcttggcgccgagtttcgccgagaaaagaagcgattctgagagaggaaccgcttctggttcttcagatccaccggttcagctcgaccttcttcctttctctccggttctcagaccccaacaacatcctccctctcaccttcggatcccttggctcacccaagcatgtggtggagcggcgagggttctggacgtgaacctatttcccgcggccaccgcggaggatggcgacgacggcacgtcgctgtcgtcgtcgccgaacagcgcggtgtcggcgtttcagatggattgctgcacccagaacggtaatgcggcgggaattcggaagcagaaacaag

SEQ ID NO: 65150 - DNA, 332 bp, Glycine max
  Clone ID: PAT_MRT3847_29843C.1
aaaaccgcggcgaggcacgcgtacaggtgttagctgtgccgacttttacgtgactttatttcctgatcgtcctgattaaaaacaggagaggagtttcttaagggggggtggtctttaattaaaacggaaattttcttttgggagtacttgctacttccagatccataggggatcactgcatgaaacctttttttatttcacaaccagaaaccaaagtgtacgcactaaaagagtcatatgactttgtggtaaaggctacatgacatgcttgagcatgtcgtgtctaacaagtatgtattatattttgtactatgtttactccattgcaaaat

SEQ ID NO: 65151 - DNA, 467 bp, Glycine max
  Clone ID: PAT_MRT3847_29844C.1
agttgtggtcctggcaataattgcaattgtaaatcgttttcttaaaaccttgattgtttttcccttgtaatatgtgtgctgaaatttcatgcatgaagaaatccacacgcatcgtacagacctatggattactctagcccccattttaatcaaaagaatttgaataaatattataaactcttgtgagatctgcagagctgacagtccatacatgaccctgcaatgcaagtggaaggaccgtatttatttcctcataactttcttccactgcagcagcctctctccgtctcccttctttccagaggctctttactagcaactctttggtggcagagtcaggcaccaaacctgaattcttcatgtcttcaaatagtctccatgctagtgcagctctttctgacttgcataaccttggattaatgccttaaacaaataagcatctggctctaaaccggtctggctaacca

SEQ ID NO: 65152 - DNA, 470 bp, Glycine max
  Clone ID: PAT_MRT3847_29845C.1
ctcgagaacactggtgagcttctttgctttgaatttggctccacacaatagttaatgacctttcgtttttccaccactttcattttcaaggaacatggtttttcatacacacatccatatttccttgtgcaggtgactttgtgagagccaatggactccaagagggagatttcatagtgatatactcagatgtgaagtgtggcaaatatgtaagaccctttcttattttccatttttcattttcttaacatgttttgaggtataataattttttacgatacttatataatgtttttttttttatcttctgttttaatacaaatttttgcatcggcattcttgattcctatggtaattttcttatgacctgatcataaggaagtggttcgagtccggtgaacaataaatacaaaattttgtaagaaaaaacaagtatcatgaatacaattttcataaatacaaatttttgt

SEQ ID NO: 65153 - DNA, 172 bp, Glycine max
  Clone ID: PAT_MRT3847_29846C.1
ccgtgaagtggttttcttaatgcgtaaactgtgtggaaaaaatgaaacaaaaagaacgttccataataaacccccataattcaccccatacaatgaaacgcaaacaggaaagttggactggaattttggggggggaatgtcccaaccgcaagggctcatcacatcaaaaaca

SEQ ID NO: 65154 - DNA, 203 bp, Glycine max
  unsure (1)..(203): unsure at all n locations
  Clone ID: PAT_MRT3847_29847C.1
cgaccgtaaaacgcaaaaccgcgaccacaggcagcggggccttaaaaacggaaacaaccgcaatcgccacnagagcccaagagaaaaccaagcgcagccaagcaagcggcgaacgaccccaaagggaaagaaaaccaccacaagcgcgggccacagacaacgcgaaccaaagcgccaaacacgcgaagaacaaacgccgaaca

SEQ ID NO: 65155 - DNA, 605 bp, Glycine max
  Clone ID: PAT_MRT3847_29848C.1
ctgagcatcgtctagctatctcgatcgaactgtccaaggtcctgtcacagcgcaatgtttggctgggcggggtaaagaggcacgcaagttcctttgagacatgaacaacaccagagacgcggcaaaggatgaccacggcaataaacgtactgcacgtcgattcagccacgaggcgttatgccatcgccacccatagtttatgtgcatggtttggtacttacaccgtatggggactgggcaatagtccaagtgctaaccgtgcaagagagtgaggaatccggtgagaataatacgtaatggtgcgaagttgtagcagcagtggctagggaactgacatgagcgctagttagagtgccagccgcgagatgaggtatctaattcgatgtgttcgcgacatgctggtaagacttgaactgcacgattcgaggtatgccccccttaccgcgccagcaacgcttattggagcccggcagtcgatgccgcggaaactgaagaggatacacaagggtatatcgtacacgaaaggtatagagccatggcgaagccaacacagaataatatcgcagctaacgacgtagagtgcgctaaagccgtaacacgaggat

SEQ ID NO: 65156 - DNA, 486 bp, Glycine max
  Clone ID: PAT_MRT3847_29849C.1
agtagggacacatctgataaaggtctcagaaattgaagtttcgtaagcataagatgctgctccactctttcaaagtgaaaaaatcacaagggcttcggccatcgttgaaagagcaatattatacaacttcttgctttcataaattgtggggttgttccattcaatgtttttgtccccaactaaaagtactataagtcacttttacccacacttttgtatttggccaagtatttgtaaaattgattttgaagtaaaataatttatatatatatgtatataaattattctgaaagcaagtttgatataaaatttagtgtaatttttttaaagtttaatggtgatgaattaatattttaaaacttatcaataaattataagttatcgttaatatgacttttaaataaattattaataataatttgtgtctaaattatgatatataacaattttaaattatagagatatttatatttttgataaaatcag

SEQ ID NO: 65157 - DNA, 402 bp, Glycine max
  Clone ID: PAT_MRT3847_2984C.1
atattctgacttttttctagtttgccaaccaccccaaaagaggtatgaaaagaatttcacaataaatttgaatgaaatcatacacacttaaccttattaatttacaaagaaacaattaacaaagctcttaaagccgcccgaattgatatcaacatttataaatttgcttccttggatcgaatctttttgaataggcgcttccttggactaagtaagaacaacacttgaaaaatgggccccaaataaatagaagcgacctcttctgagtcatgaagatcggagcttataggggagacactcacacttttattcaaagaactggtgtaacaaatgatatgcttaactctggtcccaatggcacgggcatttattccacaatggatactagaacaggacttatta

SEQ ID NO: 65158 - DNA, 1016 bp, Glycine max
  Clone ID: PAT_MRT3847_29850C.1
gaaactgaaaaaatggaatatttattgataaaaaaacataaatacgagagtacatttttttttcagcagacacttgacgtgtgaaacaactatcaactatgaaattttccaagcataataaatattctatagctataagtaatcagtctaagtctatcatcaatctaatgtcactatagttatattacacatccttgtataatttaccttcgtcctcatgaacagcaacatcttctagtcccacggaagagaataaaggaataatagacatatcccaggagtggcctttttcttgaaggaatgttaccaggattaaaatttgagagtgaaccaagcattagactcccaagcatttgaagcaacaacaacaccgcacaactttctttggcagcgaatattcggattgcagtgagggatcagtgacaatgtcttcagcttgcgaccataaatacacccctcgttcttcttgactgccagggacggtgttgtccagtaggaatgccaccaacagtgtaaccaccatgttcaaggacataagagcattgattgcaaaatcaagttgtttaatgcctgaacggaatggcccacttgatgctgctgcataaggaaccagataactgggcagtatcagacttgactcggcctggtattgttgaaaataagcagggatggacatgccaaggaacagcgaaacgccaactattgttatgttcctgaagctggctgattgactatactgtaaatttgagaggcccaatgctgcagtaagagcccacatgaaacacagtacagaagcagccaaggcctgtggaatggaagcaagaagggcacccactttccctataaatgagaacaggatcacgaaagctgctccaactaccactaccttccgacttgccacctttgtgatgtcaattgtgtgcgtgttttctgtcaaggttggtgcgccggtaccagaaccccaaagaccagccaatatactacagaaaccctcaagtgcaagtcctcggcttagt

SEQ ID NO: 65159 - DNA, 344 bp, Glycine max
  Clone ID: PAT_MRT3847_29851C.1
ggccgccccctgctttctgttatctgggggggaccatctaagtatatctgggcgccgacaacgacgccggcgccttgtttgtctatcttatcgtcgggtgtgttcgcaggaacccaccctaccacgtcttgatccagctcatcgatgacggacggctacagatccttcacgtccatcggtccttggaccttcaccaagttctagcttccggagaggctgaccaattgaacaccttagaacccaagaatgatattgaaaaatgacgcaatgcaacctggacagggtggcttgatctgtaacaccaccggactctctttaggctgtacttgagggaataactcctc

SEQ ID NO: 65160 - DNA, 552 bp, Glycine max
  Clone ID: PAT_MRT3847_29852C.1
tttttcagcagacaattgacgtgtgaaacaactatcaactatgaaatttcgaagcataacaaatattctatagctatcagcctatcaccaatctaatgtcactatagttatattacacatccttgtataatttacctttgtcttcatgaactgcaacatcttccagtcccacggaagagaataaaggaataatggacatatcctgggagtggcctttttcttgaaggaatgttaccaggattaaaatgtgagagtgaaccaagcattagactcccaagcatttgaaacgacaacaacaccgggctactttctttggcagcgaatattcggattgttgtgagggatcagtggcaatgtcttctgctcgcgaccattggtacacccctcgttcttcttgactgccagggacagtgttgtccagtaggaatgccaccaacagtgtaaccaccatgttcaaggacataagagcattgattgcaaaatcaagttgctttatgcctgaacagaatggcccactagatgctgctgctgcatagggaccagatactgggc

SEQ ID NO: 65161 - DNA, 467 bp, Glycine max
  Clone ID: PAT_MRT3847_29853C.1
ataagatatttttacctcaggccagaatttttttttctattttttcttttctttaagaggtacttatcaagaagtgtatccaaataggtttttaattaaactgtttagccaaactggccctaaatgcaactgttagcatcctcacgcacaatagtagtaatattttttttgcaacaattgaaacgtgctcaatttcaattgcaggttgatggtggtttagggccttcaaccatagacgtggccgcatcagcaggggcaaattgcattgttgctggaagttctgtttttggtgcacctgagccagctcaagtaatatccttactgaggagttctgttgagaaagcccagcaaacctcgatacagtaaaacaatgtcgttttaagttgcagtatacttcacaactttacataaacaatatgcttaatgttaacattttcataagttgaataaaagatcaagtgacttgg

SEQ ID NO: 65162 - DNA, 282 bp, Glycine max
  Clone ID: PAT_MRT3847_29854C.1
gagtgaagaggcaagatttaatagaggaattaatcaccatatgtatgaaaaagttttttcaaaaacttagtatcatatggatttttctcacaacctgtttaccaaataatttttactctctggtaatccattactagattattgtaatcgattaccaatatcaaaatggtttttgaaaagctttcaactcaaattacaacatttcaattgtattcaaaaagctgcaatccatttctatgttttgtttataaattaccagtgtgtttgaccgatgaaattcaa

SEQ ID NO: 65163 - DNA, 1242 bp, Glycine max
  Clone ID: PAT_MRT3847_29855C.1
ggctcgagctcatattccagaatgcaatttaactgaatcagaggaagatataagcaagaacagtgccatttactttgacattttgggaatgtatatggttgtataccgtcaaaagtttgctaatatgctgcacaattcagtaataatgcagtcacttctaatatgggttacatcattggttatgggtggtataccagctgcagcttcattggccttgtcgtgtttgagtgttctcctcatgtgggtctttgccttaagtttctccttccttgtttcatttctcctacctttgatatcttcatctccagtaccatatgtttcaagcccaatgttggtggttggattatttggtgcaccagcttttctcggagcattgactggtcaacattttggttttcttctacttcaaaaatatctttcgaatacactatcaaagggaaggcaattgacccccattattaaagcggctgttgtcaagatggaggctgaaagatggctctataaagctggatcctttcaatggcttatacttctcattttgggaaactattttaaaattggctcttcttacttggctcttgtttggttagtttctccggcatttgcatatggtttttttgaagcaacactaaccccagccaggctaccaaagccactcaaactggcaaccataattctggggttagccactccgattttattttctgcaggcatatttattcggctggctgctacacttatagggggtatggttcgatttgataggaatcctggtggtactcctgaatggctaggaaattttgtgattgctgcttttattgcttctcttttatccttgaccttggtgtaccttctttcatatgtccatctttcaggtgcaaaaagggcaatcatcctagctactttggtgctatttagtttatcacttgcagttgtattaacaggtgttgttccaccattttccgaagacactgctagagctgtgaatgttgtacatgttgtggatgccacaggaaaacttgatcaaggacagaatccaatatcatatgtatctttattttctaatactcctggaaatttgaacaaggaggttaaacagattgatgaaggttttgtatgtggtagagacaaaacagttgattttgtgactttctcggttaaatatggttgttggacctataatgacaccactaatgactggactgagatggatattcctacaatgaatgttgttagtgatgc

SEQ ID NO: 65164 - DNA, 280 bp, Glycine max
  Clone ID: PAT_MRT3847_29856C.1
cgcatagtcactaaacatttggaaagccttatccaggtatgttaagcaagtcgggtgcgtgatgtgcataggggtgtaaatttctattcacatttatgctgttctacagtgttgtcacatagtggctatcgcggcactatcaaatttctattcacatttattcttctgctggacatggcttaaaaattcggaaacaggatttaatatcccattccaatactggtccagcaatattagggatgggttctgtgcttaaggggggctgggggggcttagagta

SEQ ID NO: 65165 - DNA, 240 bp, Glycine max
  Clone ID: PAT_MRT3847_29857C.1
ctcggagtattatgtggcagtggtttgtgatgaagaggttgtgctgcttctcggtgatctaaagaaagaggcatacagaaggacggggtgcagaccagcactcattgaccccattttggtttcaaagaaagaacacatttttgggaagaagaagttctccactagagccaagtttcacgagaagggtaggtggcatgagatttcaattgagtgcaagaacaaggggaattataatgtgga

SEQ ID NO: 65166 - DNA, 813 bp, Glycine max
  Clone ID: PAT_MRT3847_29858C.1
ggaattaaatatataaaaaaaaaattacagaccgtatttgcaaaacaatgttgaaggaggaaggatagtgttgttcaggttcacatagttcccagttacgatttgggtgccgcattttttcgcccttggaactccgattccaactccatcatcacaatgaattagagttctcttgactcaatcaaaccagcaaaggtcatcatagaaaaggaccgatgtgcttctgatgctacaatgttgtctaagattgatcgtaccaagaagaagaaacataaggaaaatatgcttcatgttctggcaggtgctagtgcacggttaacacaactagaaaccagaacccaccatcttgaaaattctgtggagaatttgaaggtatcggttggaaataatcatggtagcactgatggaaaattgaggcagctggcgaatattcttggagaggctgaagatgtctcttcacgggatctgaaaccaatgcaacttactgatgaggcatttccaggtggtcctgaagatgtctcttcacaagatctgaagccaatgcaacttactgatgaagcgtttccaggtggtcctcaagacttgtccttgcttagatcctttaggaaccatgttgccacacgcctatggataggagaggaccgtcacgagttgaaggtggttaatcatgggcgaaaagtcacggacttccgtttggagaatgagcatgtgaaggccatagtggagatgtctgggctggcgccccttctagaggcatgctaccgcatagtggacaagggtctcttgtctgcttttgctgagcgatggcacaag

SEQ ID NO: 65167 - DNA, 403 bp, Glycine max
  Clone ID: PAT_MRT3847_29859C.1
gccgcaacactccaattccctcactttcatcaatagctattctcatcaactatggccgagctcgccggtatttattcacagcgaattttattatacgccttgccatgtgcaccacggcattagaagattacttgctaccggcactcaactagagactcgtgaggcctctttagctttgtcgatcatcaagccatttctactagaccagaccacccaaactcagaatcatggtggatagctgctcacgctagtatagatctccatgtggttgtatttgaagcccgacccacagaacactgtgtgtctgcatgcacaagaacttggtcctgtcactcttgctaatgcatgggatgttaaggggtttcctggtatgtggaaaatgatcatttcaaatttggagcac

SEQ ID NO: 65168 - DNA, 909 bp, Glycine max
  Clone ID: PAT_MRT3847_2985C.1
aaagaagtgaaatccaaacttggagtgagcataaatgatgtgcttgccggggtaattttttttggcattcggctatacatgcaagaaattaatctgaaatcgagccaaacccaatccacagcactggtgttgctgaacacaagaaatattgaaggttacaagtctgttaaggagatgattaacaagaccaatagtcgttcttcatgggggaatcaatatgcctttttgcatgtttcaattccagagcttagtgactccaaatatgcaaacccacttgagtttataagggaagcccatatggatatgaccaaaaagaaaaattctttggccactcctctcactggcatgcttctagatatgctcagaaaactcagaggtcctgaggctgcagctagctacttacgcagtactttgagaaactcaagcacaacaatctcaaacatcattggaccagtggagcaaatggctgtggctaatcatccaattaaagggttttacttcatggtagctggttcacctgagagtctcaccatgacgatcatgagctacatgggaaagataagaattgcatttggagtagagaagaacttcatcgacaagcaattattcaagtcgtgtttggagaattctcttgagatgataaaggaagcagcaaaaaagatttccgcataaaatcaaatatggaagatatgtactttttttgttgttgttgtggaagatatgtactaccactatattctatctatattcttgttaatatttaattattttatttaaatatatgtgatgtggtgattctgtaatagaaatttgtttctgagtggaatgtattttattgaactggaacagtatcattacggccgggcatggctgtttttagttgggaagtccctacattacatcaaaaaa

SEQ ID NO: 65169 - DNA, 502 bp, Glycine max
  unsure (1)..(502): unsure at all n locations
  Clone ID: PAT_MRT3847_29860C.1
aaaaaaaaggccgaaaccaaattaactttacttccccaccctaaaggccgcccccaaattttgaaaaaggaccccccgcaaacaaaaacaaaaaaaaaaaggtaccccgctcatcactcatcaggcaaaaaaattaccaaaagcaaaaaaacttacccaaaaaggagtcaaaaaaaaaagggcaaccgttttggcaaaaaaaaacccccacaaagttcaaagggggaagggtaaaaaaagcagaatttttgccctctaaaacccaaaactttaggcaaaaaggtcgggaaaaaaaaccaaaaaaaaaattgggtaaattttcttccttaggctaaacctctattccttcaaaaaagaggccacttttccaaatccccccccttaaggcgcccaaaacttatttgcgcttggttgtctaagcccggattgaaaaacccccccctcggaactgggccccccccccncttttttgctttgggcccgcccgccccccccccgcctt

SEQ ID NO: 65170 - DNA, 566 bp, Glycine max
  Clone ID: PAT_MRT3847_29861C.1
ggctcgaggccgaaatctccgagctcagatgacgtggacacaatttgcaccagcatctggtcacagatcaaggctaagaccggccggtcatacagcgccttcaactacactggtcctgcaaacgccgagaacgcgctcttcttgttcggcagcgatccaggacttttcagcgcagaattcgatgcagccagtccttcggacttcttctccagtgtcggtcttatcacgccggtcctgtaccggccgtggcttacggagcgtttgactgagagcctaccaaagagcatcaagaagatcgcggtgcttgagcaaatcaagaggaagacaacgaaatggggcccaattctgctcgatctgctcatgtctctcaaggccagctcacagggtgcttcgccactgattgtgggctatcaattgggttacattgagtactcgacagtgacacaagcactcagcggtatcttccaaaatttgacctcaaaggccccaatccagaatttgaagattggtgcgcacgacgccccttcgaagacgagggtgccaccagcagccagcgtggaaacgcg

SEQ ID NO: 65171 - DNA, 741 bp, Glycine max
  Clone ID: PAT_MRT3847_29862C.1
cctagacccctctcatttgtagctgcaatagtgaaataatgaaggaggaggaaacaatagtggttttggttgaggacgaagacgttccttcatcgacgcttctggatctcacgagctaccagctccacgaccttgacttggtcgagttgccaccctgcctcaccgtgaatcgcttgtccatgctggacctgcgcatagggaactctcccttctcccttcgccaaaacctcatcaccaacgctgtcgttctccctttcttttcccagaacggcctctccactctcgaggtaactctcaatatcattcattaacgctctatctggatgtgctgaaatgctttgtctggatattgaagaacattcctgatgtcggcgtatttaagaagcttcttgttttcaatgttgcgttcaacgagattagttcgctacacggcttttccagggtctctgataccctcaaggaactctacgtgtccaaaaacgaagttgccaagattgaggagatcgagcacttccatcagctgcagcttcttgaacttggctccaataaattatgggtaaattgtcgtgatgggttgaagtaaggttgtgaaccctgttgtgtcactgttgaaacttgaaacccctctcctcctttgtttcttcaatgccgtggtggaagaagaatagagagtcttagtctccgctatgttccgcaggatcttgcacactttcagcctgcgcccactatgtaacaacgcgc

SEQ ID NO: 65172 - DNA, 607 bp, Glycine max
  Clone ID: PAT_MRT3847_29863C.1
cccagcaccagagtttcacattcttcagtcaagtgttgaaactcgggggttaggcagacgaagggagcctgttcaagcggagcaatattcgcaacaaatgatggagcgtggtcatggaatgtattacacgccagcaacattttccgaatatccttcacagatgtatcagtacccctttgaaggtcatcacactgatacttctgcgagcgaacattcgttcggtggtgttgcggaaacacaagctcattttttcatggcccactatgacctcctcgcagcagcacgatgcccccatggcaaaacctaacgccctatttgctccgcaatggaatgtacctggagcaatacctgatatgggcgacttattaggtgttgatttgcatcaggaattttctgctgaggctgagcaagcagaagcggggagacaacgtggcagaagaaatcctgatcgtcaagcgcaaagatgggatcgaccatgtggcacatcctcacgacatcacggacaccataatgactgattttgatgtctctgtgtaaatttgttgttgtttgtaagacatttgattttgacagttaatgtatcgcatctcatttatcttggcttact

SEQ ID NO: 65173 - DNA, 352 bp, Glycine max
  Clone ID: PAT_MRT3847_29864C.1
attccataatttagtcatttgtaaataatatactaacagcacatccatcctgtcagatgttgttggtggcatggacagcaattccacactcaaaaatgaaatgcttcccaaaaacagaaaaactaccagataatctaatcagatagaattcttatgatcatttttcaaagggttgtcattaagcataaatttgtccaaatctaatttcttagatcacaatagttacatggcataaaagggaaatgacatctaatttccatggatatagctcatcactctgtgctgtcaagatgctgggattggaacaagaatcttaacacgcgggtgattaccatttgcagcaacgggccaa

SEQ ID NO: 65174 - DNA, 322 bp, Glycine max
  Clone ID: PAT_MRT3847_29865C.1
gacttgtacctgttggggaaccaccttttcttaaaagagggtaaacaaagcttggcaaaatcatgtgaaaaaaaggccccggggggaaagggaaaaccggtcacaattccacaaaacatacaaagccttaaccataaaaaaaaaagccgggggggcctaatgagggagaaaacccggataaattggggagggaaaaatggcgggtttccaggggggaaaccaggcgggccacttgcattaaaaaaacggccacaccccggggggagaaaaattgagaaaaccccccaaggggggttttgtttccccccgcgaaaagggaaaa

SEQ ID NO: 65175 - DNA, 265 bp, Glycine max
  unsure (1)..(265): unsure at all n locations
  Clone ID: PAT_MRT3847_29866C.1
tttcctgggaaagtggaacattgcataccacattgtaaattacaantgtagaaaggatgttaatttatcttcagtttcatgtatccttctttacttttatatttgtcttctttgatttaattcttttattactttacgtcaagcaatttggtattcatataacacatgcacggtttgtatgacacagggaggctgtcaaaaatgtttttaatccttattttgataaaggtaagctattgttggatcaagctagcttgatagtgat

SEQ ID NO: 65176 - DNA, 280 bp, Glycine max
  Clone ID: PAT_MRT3847_29867C.1
gggctaggtcaagatcgtacttatctgtttttgaagaattggccgtttggtggccatggttgttctgctaatagacaatgttgtgctcttttgctgtgactatcctttgattaccacggatttcatgacttacatgttttaatacgactgtgttcacggtcactggaagcatcacgatgtcaccgttaaggatgagaagacccttctcttcggtgactagccattcactgtctttggacacaggatctactgaatagatcccatggaagtcgactggagc

SEQ ID NO: 65177 - DNA, 506 bp, Glycine max
  Clone ID: PAT_MRT3847_29868C.1
gatccggaagagcggccgccccccacgcgtccggaatgagacactgtacttttttctatttagcaacaacccagttataatatattgcatgaataggcaaaagttgtgagaggcatggatatagacaacaaagaggcccgtcttttcactaggccaaactcaattatcactagagaaaaaaggcaggaagaaaaagtggactaaaattatgatatatgcgcacagttatcagcccgcctaaaaaaatgaaaaatattaaaaccagggaaaaacaagagaaaaaaacgggcaggggctcaatccggacacggggggccgccctggaagtccaggccggcacccgcgggcatgccaccttatcctaatgggaggggggaacacagaatgaagtaacgggcgcgaaattaacaacctgggggaagagaaaacccgggcgaaacccaacaaaagagcctgggcccaaagcaccaaatggcaaagccgggggagccccaaaaaggccccaa

SEQ ID NO: 65178 - DNA, 412 bp, Glycine max
  Clone ID: PAT_MRT3847_29869C.1
tactcgagccgaatcggctcgagacgagaagacgacagaagggcgggtgggtgtcaaattgtagcatcacaaaagaaggggtaattttatttaaagaagacaaaacagcctcggcttcacctttgtttgactatgacaacaaaatctattctagcatgtttggggtggtggtcaggtgaaccaaattcaactttgaaaccacagtgagtgtgaagcaacacattgttgcttaggaaaaatcatggtgacaccgtggttttgaggtagccaccatgattttaaaggtatccaaacagaaatccattgtgcacaaagtcatactcattttatgcgaataacgtgttgaatctaatcatttgaatgctatgcacaagaagaagaaaaaatgctatctaattcccaaaacccccaa

SEQ ID NO: 65179 - DNA, 444 bp, Glycine max
  Clone ID: PAT_MRT3847_2986C.1
aattcggctcgagcaataacttataacttagcattgtattgtgttcaaactttgtttcttccataccctcttcttctttggccttaaccgtcatatttggtaagctaatagcttcatctattctttcttgataacatttttcttttgttttctttttcacccattaccctgaatcctccacttttgattttcgatccgccatggcttcatgacccttcaaacataattgacattaggccattagtagcatggtcatggttttgagattgtgcctcaaaattcgccagcatggaaccagattttggattacagaacaataccataactctgttatttaaaaatgtacacctgtttatgtggcgattctacacattttttctttgataagatgaggctaagatacatgcgttgcgctaaagtgttgtattttcttggacaataaac

SEQ ID NO: 65180 - DNA, 416 bp, Glycine max
  Clone ID: PAT_MRT3847_29870C.1
ccacccttccgaaacttttaaggcaacttatttttttacttttaccaataccatgatgtgacaggaatattacctctgtttaagcaaggtaatgtgtaaaatcagtctcggctgtcagaataacttctaaaaggtttttttataaccagttcaagttactgaaaaccttttaaacctttctgaagttcgtttgtataaatggcttctcttggattatcaataaaagccacataggtggcaagttgtagtattatatggctctgtagagtggtgaaccttctagaggaatatatgatttattcacagttcctcaaggcctggggatgatgatcacttatacctatttttgtgcagttacatcatgttgtacattagagatggagagtttaatagctctttaactgctgtcctcatta

SEQ ID NO: 65181 - DNA, 518 bp, Glycine max
  unsure (1)..(518): unsure at all n locations
  Clone ID: PAT_MRT3847_29871C.1
aaccggnccgaaaaccggttcgatcatgcgcccggcgaatacaggacgccgcaccacaaaaccggaaacaaaagcaatcttaacanganaccacgaatcttccaatccctaccaactggtaggagtacgatatcccaagggaaagaaaaccactctctgcgctggccacagacttcgtgaatcataagcttacccactcaaagttaatatgctgaacactctcctatatgatataggacttcgtgtcagatttaaacttattctgaaactttctcagatctctgcttaatatcaagttcaagctggtgaaaacttggattagagctcccactctcctatctggaataggacttcgcgggaagacctatctatatctggccattctttcactctcttctactcactgatccccattgcccgtcaaagtgggcttatatggaaaaacacttgggcgctggagcaaaaggatgctaagtaaatgctctctggggacaacaggctcactgagaaaacaaatt

SEQ ID NO: 65182 - DNA, 271 bp, Glycine max
  Clone ID: PAT_MRT3847_29872C.1
ctttcttattatcttctctgtttctacccccaattttttagtgagtactgtgagcttttcctgttctatccaattagttaaccataagtctataactacttaaaattgggttagaatttataaatctacgtaacttgaagaaactagtttatagatatgtaaattagatttagtttggatctataatgtaatgtgtatggaattgtgatgtcaattaatttgagctataactttgaggtatggtttagaaaggaaaaagtagtatgagttg

SEQ ID NO: 65183 - DNA, 506 bp, Glycine max
  unsure (1)..(506): unsure at all n locations
  Clone ID: PAT_MRT3847_29873C.1
gcgccctgtgagtgggccattcggaacattggacagaagcccaaagagccaaattgtcacaattgtggaacccacattggcctgagatccaaaacgcttcgaggcaccccaaattacctgcccattcgtcaggacacccacccacccagtgttatattctgcctcgccggagtgggtgttcccgggggcacttgccgaccagccccttgcgtccccaggtttgcagctctcccctgggccactaaccatcctggcccgggctgcctgtctgacctccgtgcctagtcgtggctctccatcttgtctcctccccgtgtccccaatgtcttcagtggggggccccctcttgggtcccctcctctgccatcacctgaagacccccacgccaaacactgaatgtcacctgtgcctgccgcctcggtccaccttgcggnccgtgtttgactcaactcagctcctttaacgctaatatttccggcaaaatcccatgcttgggttttgtcttt

SEQ ID NO: 65184 - DNA, 606 bp, Glycine max
  Clone ID: PAT_MRT3847_29874C.1
ataaaactactcctgtgtagatgttctacttcctcatcaacgttaatttttctctcattctctggattcgtttgaagaattatattttatttttttaaaaagactgaattggtaggaagatattttgctacaactaccttttagtgtgctatagcttataaattatacttaataaacccattattccatccactgtcattttcaacagctgataataattttggttaagctagtttgaataataggtgatgaattacagttgcttataagcagatcaataaactaaaaggtatactagtctaaatttacaaatttggtgatgttgaatttttaatgtccgtcttaaaaattcggtttatcctttaagggaatcatgtgttatgttgataaaccatggcaggattggcaaagtgtataattatatcattgtacttcagattggattttgagtgtatggaactagaagcaatcactgttgtttggtgtatttacaattgtaattgttactctgaacacattctttcaaaaaagacttgcatgcatgcatgatttcctacattcttttttatactatcctatgtgacattgattgtgtcccgaatgaaa

SEQ ID NO: 65185 - DNA, 436 bp, Glycine max
  Clone ID: PAT_MRT3847_29875C.1
ttcaagaaatacaagttacatctacaagttagatttacaagttagatttgaaagcacaaaggtttggccaagaggattttctttcaaaactttattttaaagatttctctctggtaatcgattaccataggctgtaatcgattaccagtggtacaaaagctttctgaaaaacattttaagtatttttcaaaggtttttaaaacatgtaatcgattaccaaatcattgtaatcgattatcagaggtttaaaactgttacagattgccttcagttgattttaaaagaatttttaaaatatgtaatcgattacacaaatcttgtaatcgattaccagatactctaaacattggaaattcaaattttaaattaagagtcataattgttcaagaaaaataactgtgtaatcgattacaccaagattgtaatcgattaccag

SEQ ID NO: 65186 - DNA, 195 bp, Glycine max
  Clone ID: PAT_MRT3847_29876C.1
ggctcgaggtgtcattttataagcctgcatcaatggtttcttgggctccatctgcatacggcctgacgcatacagctgctataacatgggtaactctatctacgtggcataatgagcctccatgacgtgtaggtaagcttgcggcttccatggaactgcgtcgccaatggattaatgcactatacgtcacttcgg

SEQ ID NO: 65187 - DNA, 360 bp, Glycine max
  Clone ID: PAT_MRT3847_29877C.1
attcggttttatttgctgtctcacatcacgtgacataacatataaccatattcttctttgaaaccttaaattgagcttaaaaatactatataggtacttaaggttgtgtgaaaatgctaatgagccgtaacggatgtgcggagctgcgcaaagggtgtgacgaagattgtggcatactaccgtgtctgcaatggcatcaagaacccggagtcacaagctaatgcgactgttgatgttgtcaagctctatggtcgagctgtcctcaagaacctcatcaacgctagtcctgaaagccgttctgctgccatttttcgatccttgttatacgaagcatgtggtcgaatcgtgaacccaatttat

SEQ ID NO: 65188 - DNA, 253 bp, Glycine max
  Clone ID: PAT_MRT3847_29878C.1
agatcatccctgtaaatactgagctagtggagtgaggttcatggccaaaacaaggcaaaataataaatgtattcttttgtcagtgtctggtaattagggatgtatacgcactgatatagctagttccttcttaccttttatataaggtacttctatcatctggactagtttggtcaactctgtactatgcagatatcatttagtggtctacttatcttgtggcataattttaattcatctctttcctttgttt

SEQ ID NO: 65189 - DNA, 150 bp, Glycine max
  Clone ID: PAT_MRT3847_29879C.1
caaaaaaccaacaaagggggaccccaactaacacctttccagagaagtaatttaatccttcaaacccatttaataattcaaaatgggtattttcccatttgaggaggaaacaacttcccttgtggccccagcaacgctttaccaaactct

SEQ ID NO: 65190 - DNA, 1257 bp, Glycine max
  Clone ID: PAT_MRT3847_2987C.1
gatcattaagcgttgttctgccaagacaacaaagtaaggctcaatctccctatcctcatttttctaatcatgctcttcttactattcgtgtgtctgaggcacaatcgcattgcaactaagaacaaacatgcaaacacaacagcagccactaagaatggggacttgttctgtatatggaattatgatggaagcatagcctatatagtattcattacagcaaccgaagactttgacatgagatattgtattggaacaggtgcctatgggagcgtttatagggcacaattaccaagtggcaagattgttgccgtgaaaaaactccacggatttgaagcagaggtggcagcttttgatgagagtttcagaaatgaggtcaaagtattgtcagaaataaagcatcgacatattgtgaagctccatggattctgcttgcacagattgctcatgtttttgatatatgagtacatggagagaggcagcttgttttcagtgttgtttgatgatgtggaagccatggaattggattggaaaaagagggttaacattgtgaaaggcactgcacatgctctttcctatcttcatcatgacttcactcctccaattgtgcatagagacatatcagccagcaatgtcttgcttaactcagactgggagccccgtgtttcagactttggcacagcccgatttcttagctttgattcatcctatcgaactatagttgctggaaccattgggtacatagccccagagcttgcatatagtatggttgtgagtgaaaggtgtgatgtgtacagctttggagtggtggcactcgaaactttggtgggatcgcatcctaaggaaatactctcatcacttcaatcagcatctactgagaatggcatcacattatgtgaaatattggaccaacgcctcccacagccaacaatgtcagttttaatggaaatagttagtgttgccatagttgcatttgcgtgcttaaatgccaatccttgctctcgcccaacaatgaaatcggtctctcaatgttttcttactcagcttacaccattagacattcctttgcgtgagatttcattgcagcagctcatgagtcaagaactcaggcattatttaaatttgtgaactcctgaaagtgaaacttctagttgaaattagatgtgtcggcattcaataaacttttttctaaaagacttgatgcgtactagtgctctgcgattcaggcatggttaggcatcaaatttgtgtcctttgtaa

SEQ ID NO: 65191 - DNA, 232 bp, Glycine max
  Clone ID: PAT_MRT3847_29880C.1
gtcagtccccacaattttcataatgacacaagatcttgatactgattttaccttcaataattgttttacctactgctatctacaagttacatggactgattaacttcccaactattgattttattcttaacaagtttgtttgtgttacaattattctttttttcttttgatgttaatgagctaacctttgatgcttgctattaggctctcatcattgctaagctactgattc

SEQ ID NO: 65192 - DNA, 475 bp, Glycine max
  Clone ID: PAT_MRT3847_29881C.1
ccacaagagagacgcagacccccctacctctcactcctctagcactcagctttactctcatagtggaaacgtgcggctcgaggagtgagtagccacaagctagcctacggggttaggtcaacgtgtgcataagaccagtgctgtaaatagtggaacacacagcctgcggacagactctttatttaatgcaaatagtttttggatacaatagaaagcatttctggtactcctatgcaatattactcagctgtttttattgcaaaaagaaaaatgaactcactgctcaccgctgacaggagatgtacgcccttgggctcctggcctccaggagtcactgtggagagagaaccggccacgcccttggctgtagagctgtgttgaaatccatcatggaggttgatttttaacccaaactgagtgcattgtttaaaactagggagaatacaagtcgagatcactagatcacacagaaggg

SEQ ID NO: 65193 - DNA, 119 bp, Glycine max
  unsure (1)..(119): unsure at all n locations
  Clone ID: PAT_MRT3847_29882C.1
atcatttgcnagancanatggntatggaaactgtagggtnaagaagttgatccntttgtggcaattcagagaggccccagantanagaaaccagcanangngcantctaatngagcaca

SEQ ID NO: 65194 - DNA, 220 bp, Glycine max
  Clone ID: PAT_MRT3847_29883C.1
ccggctgctggtatgtaaatcataaatcgggcttgatcttcttttgcaagaaatgaaggaccgtctactgcttggatccggcacttattaccttacaacgcggagggtggccagctggatcacatttatatagctgagggggctgttcgtcatcgataccctagagccgggggactgctcctagtaatctcatataaacgtattgaggatggacgtgcga

SEQ ID NO: 65195 - DNA, 460 bp, Glycine max
  Clone ID: PAT_MRT3847_29884C.1
attacaaccattttgattcagagggatttcaataaccaccctgttcctattggaaaaactgtgaaatttacaacaaaaaaaactttggcgaaataatgcaaattttcaggatccttccatagggaccttcaattttcccttggccttggaaaaaaaaagaaaaaaattttttaaaatggagatgggaagaaaaaagggtggggggttattagaattcgccaaaaaaagggccttgttctttgccaatttttattttaccccccaagggggggagggggttttttttatttttggaaaattccaggcaaaaaaaaaataagccttttccctaaaaaaaatatgaacgggcctattttatactgcggcccttttatgggcgggaatgggcaattttccccacctttttttggggggggtcccggccttaatgggtcggggaaagaaaaattttccttttttt

SEQ ID NO: 65196 - DNA, 295 bp, Glycine max
  Clone ID: PAT_MRT3847_29885C.1
aacttctgctactcactactttaacttttcattcttctcctcattcctcatgggcaagttcactatctgcatcagctgatcactaacaattttccgattgatattcataatatctacttatatctacgattcaacactctttttccctaactactctattacatccaccttacacatcatctacttttcaaataacaacgatcatccttatttacctgcttctttcacaattatccacttattaccaaaacaatttctttctacaacacaagtcattcactaatatttcacaaac

SEQ ID NO: 65197 - DNA, 442 bp, Glycine max
  Clone ID: PAT_MRT3847_29886C.1
acaaattcaaataattcttaaacattacttatttcatactttcaacacataaacatataatataacacgacgcatgggatctgatcaaacaagagagacaactactcttactgattaaacaaaaatcgtgctgaatgcgtacactcacaacactcacaacaggacaaagcttttaaagacatacaagtgaatgtcaatactctaaagaggataacttgcaaagcacttgcagtctcaattagagaaccgcccaataataaatcaagtgccatgaccaatgtatcacgaccacaagtgacataacgcgatgcactaaacgacgtcaaatcagttgcaaatacaggacctagccaactttcataataacgcacgagcccgatcccctgatcgagcccgcacattctagaagataccatacgtaagcctagatattcaggcccat

SEQ ID NO: 65198 - DNA, 315 bp, Glycine max
  Clone ID: PAT_MRT3847_29887C.1
acgatctcatgagaggcaacactagcagagctgcactgtagccaaccagctgcgctaaaggtgcgcgctcgaaggatgcgtatctgggaactaagctgtctctcaaggcgatatctccacactgtgagatccacgaacttcaggattgacgccgtggtagcaaagtctggtgacaagagtgtgtactacgattcggaggatctgggtaacactactgggcaatgcgacttgtatggctcacatgcaacttcacgctacaaccggtcttagagcaaggtctgcgcgacatttgctgctccattgacaaacagggga

SEQ ID NO: 65199 - DNA, 1906 bp, Glycine max
  unsure (1)..(1906): unsure at all n locations
  Clone ID: PAT_MRT3847_29888C.1
cccgggccgagtcgccgccacacttcacctcgtatttcatatgtgttccaaacttcttcttggaatgtcccttcctaaataaccctcaaacaaaagccaccttaacatctcttctctgaaaattctctttagagagatagagagatagagagagagagagaaagaaattaagaaaaaatggcagcctgcactgtctactcaacacaatctctgagcacaaattgctccatctcaaccccatcaaagacacagctgagtttcttccaccaaaagcaggtagttttctggaggaacagcaacaggggcaacagcagcagcagaagaagctatgtgataacatgtgcagcaggtgactcacagacagtggtgattggtcttgctgcagactcagggtgtgggaagagcaccttcatgaggaggctgacaagtgtgtttggaggagcagcagagccaccgaagggtggcaaccctgactcaaacacactcatcagtgacaccaccactgtcatatgcttggatgattaccactctttggatagaactggcagaaaggagaagggtgtcactgcccttgaccctagagccaatgattttgatctcatgtatgaacaagttaaagctcttaaggatggaattgctgttgaaaaaccaatctacaaccatgtcactggtctcctggatccccctgagctcattaaaccccccaaaatcttagtcattgaaggcttgcacccaatgtatgattctcgggtcagagatctcttggactttagcatctacctagacattagcaatgaggtcaaattcgcttggaaaattcagagagacatggcagagcgtggacacagtcttgaaagcatcaaggctagcattgaagcaaggaagcctgattttgaagcatatattgatccacaaaagcaatacgcagatgcagtgatagaagtgttgccaacccaactcattccagatgacaacgagggtaagattttgagagtgagattgatacagaaagaaggggttaagtactttagcccagtttacttatttgatgatggctctaccatttcatggataccatgtggaaggaagcttacatgctcctaccctggcatcaaattcttctatggaccagagacttactacggaaatgaggtgtcagttgtagaaatggatggacaatttgacagactagatgaactaatatacgttgagagccacctaagcaacctctctacaaagttctatggagaggttactcaacagatgttgaagcatgctgatttccccggcagcaacaatggaacaggtctcttccaaaccatagttggtttgaagataagagatttatatgagcagctaatagccaccaaggctgagactccagtggctgcaaaagcttaggaattgaattgaacctgccataataatatatatacatatcgaccgagcaacgcagtcaaattgcattagttctcatcaaaatcatcattttctttcttctttcatgttttccacaatttcactgtgtttcatgttattttgtctattgttattaggctgttctgcatcataattaatgaaaaaaacacatatgtatgtatgtatgtacttatccgagaaaaaaaagtgaggctgagattcagttatgttgatacaagattgagacaataattggcttctctttctctagctttatccatatatgtatgtaatattttcttatcaaactttttgtgtgagattcataaattaatcaaagggaatgatctaatattctatttgttggtttctaaaaaaaaaaaaaaaaactcgcataacaaaaaaaaaaagaaacnnnnnnnnnnnnnaannnnnnnnnnnnnnggnnnntntcgnnaatggnggacttcncgatgccacttttcag

SEQ ID NO: 65200 - DNA, 486 bp, Glycine max
  Clone ID: PAT_MRT3847_29889C.1
atgacgtcccacgcacgcaagacccggagcccccagagagggcgcccccttttttttttttttataaagaatctatctttaaacaaacccccgcccccaaaaaagggggacgggacaatgggtggcacacccccgacccctcggaacaacatcctagaacacctggggagggggaaaaaaaaatcaaaccccccctaacccaggggggggccccccccccaaaaaaaagcccaaaaaaaaaaggggggccctttccaaaaaaaaaaaccccacacgagaccccaggggaaaaaaccgacccctcccccaacatatgcccctggggttcaaaaaacgggggagaaaagacccccgagagggaacccataccaaaacacccgcaaagaaggggctaagggagacaagggagccgcccccccccaaaaatcaaacaccccaaccctggaaaagccccacgggtaaaaacatgaaacccccccctcccca

SEQ ID NO: 65201 - DNA, 1631 bp, Glycine max
  Clone ID: PAT_MRT3847_2988C.1
gtgaaaaagaatgatgatgttacagtaaatactgatgaatcgtaacaaacatgattactgcctgtgaatgaacctgcacagggtgttgaggaaacaatttcccatgatcctgcaaatccttctgctaaggaaagaaagctcaagcctcaacggaattctgaagtcaacaatgttcgagttcggaaaagcaccccttctagatcagccaaggatcctgctaggattccaggtagagagagtccaaggagaacaaatatggaaaagaatttatcaaaacttgcaacaccaactacttgtttagctagcaaatccaccaaagaggtttctaaaagtgcagagaaacttgttcgtgaaagcaaaagtgaaaatgcatcaaaagtaagaaagggtgcagaatcccaactttctgcttcaaaaacagcttcgagaggaattcaagaagcagagaggatgaaccaagctttcaattctacaaagtccaatgttaagcctagggctgcggctttcaacttcaaatgtagcgagcgagcggaaagacggaaacagttctacatgaagctggaagaaaaaatgtatgcaaaggaagcagagattaatcaaatgcaagcaatgtcacaggaaaagacagaagctgatattaaaaaactccggaagagtctcaactttaaagcaacaccaatgccttcattttactgcacaccttcaccgtcacaaccacatgggaataagtttcaacctcaggctgtgtcaaataacaccagaagtaagaaagaacataataaaccaaaatgtccagggagtggagctgatgcagcatttccttcgagatcgaaggtgggaaatgatctagaaaccgatgaatccgtaacagcgagagaaccacatggtatctcagtcaaagagtgtgccaaaaataaagcatccaaagctagtttgatttctccagctccatcaaccaacaatagctgccttgcagattctacaacaagtagtcatacttctggaatgaaagaaggagcaaaggtttctttgcaaaaacatagggtaactgatagttgtaaaggagcaaaacagcaaagcaatgaaagaaataaaaatggcgaaaccgcaaaacatagaaatgatataatgcggaaaggtgtggggaatgttggtttgagaagcagttctaaaagtggtaatcttgctgtacgtgttgcctcctgaagaatttacccacttccactttacaaattgaggaggcatttcaggttccagcataaaatgctgtggaatgaataccgccactacacagatattaaggcatattgcacattgaggtagtagcatttcttgtatttttttcatgatattcatttcatggtatagctgaggcaagttatagtacaacatgatccatgttactacttctaagtttggtagaagttatgtatgcagcaaacataggcataactagtaattggcatgtttttactggagttgttggatcttgtgggctcccctccttaaggaagtgtgttcatttgctcatcagaaaagaaaagaaaagaaatggaatttatggaaatttttatatgtatataagtaatcttaaaatttatcatgatctgctggagtagtattatagattt

SEQ ID NO: 65202 - DNA, 1956 bp, Glycine max
  unsure (1)..(1956): unsure at all n locations
  Clone ID: PAT_MRT3847_29890C.1
ggggggggtagtcacagaaacacataaacaagaagacacccaccaatattttgctttctcttttcttttcctgcttataactgccttttgttttggttttaattccacctcatattttatatgtgttccaaacttcttcttggaatgtcccttccttaatacccctcaaagaaaagccaccttaacatctcttctctgaaaattctctttagagagatagagagaggaagaaagaatggcagcttgcactgtctactcaacacaatctctgagcacaaattgctccatctcaaccccatcaaagacgcaactcagttttttccaccaaaagcaggtagttttctggaggaacagcaagaagggcagctgcagcagcagaagaagctatgtgataacatgtgcagcaggtgactcacagacagtggtgattggcctggctgcagactcagggtgtgggaagagcaccttcatgaggaggctgaccagtgtgtttggaggagcagcagagccaccaaagggtggcaaccctgactccaacactctcatcagtgacaccaccactgtcatatgcttggatgattaccactctttggacagaactggaagaaaggagaagggtgtcactgcccttgaccctagagccaatgattttgatctcatgtatgaacaagttaaagctcttaaggatggaattgctgttgaaaaaccaatctacaaccatgtcactggtctcttggatccccctgagctcattaaaccccccaaaatcttagtcattgaaggtttgcacccaatgtttgattcccgtgtcagagatctcttggactttagcatctacctagacattagcaatgaggtcaaattcgcttggaaaattcagagagacatggcagagcgtggacacagtcttgaaagcatcaaggctagcattgaagcaaggaagcctgattttgaagcatatattgatccacaaaagcaatacgcagatgcagtgatagaagtgttgccaacgcaactcattccagatgacaacgagggtaagattttgagagtgagattgatacagaaagagggggttaagtactttagcccggtttacttgtttgatgatggctctaccatttcatggataccatgtggaagaaagcttacatgctcctaccctggcatcaaattcttctatggacctgagacttactacggaaatgaggtgtcagttgtagaaatggatggacaatttgacagactagatgaactaatatacgttgagagccacctaagcaacctctctacaaagttctatggagaggttactcaacagatgttgaagcatgctgattttcccggcagcaacaatggaacaggtctcttccaaaccatagttggtttgaagataagagatctatatgagcagctaatagccagcaaggctgagactccagtagctgcaaaagcttaggaattgaacctgccataatatatatacatatatcgatcgagcaacgcagccaaattgagttctctcatcatcaaaatcatcattttctttcttctttcatgttttccacaattccactctatttcatgttattttgtcaattgttattaggctgttctgcatgataattaatgaaaaaaacactatgtatgtatgtacttatccgagaagaaaaagcgaggctgagattcagttatgttgatacaagattgagacaaaaaaaaaaaaataaaaaaaaaaaaaaaaaaaaaaaaaaaaaaaaaaaaaaaanataaaaaaaaaaaaaaaaaaaaaaaaaaaaaaaaaaaaaaaaaaaaaaaaaaaaaaagggggggccgttttaaaggatcaaagtttacttccccgggcttgcgacgaaatattttttttatggggcccccaaaattaaattaacgggccggggtttaaaaacgccgggacgggaaaaaccttggggt

SEQ ID NO: 65203 - DNA, 562 bp, Glycine max
  Clone ID: PAT_MRT3847_29891C.1
agagtatttgctgcacttcaactcagatttccactaccgcatcctcctccttcaacttgcaatttttcgtcatcatttctttgggggcaactgagtggagtgttttgacttctgataggttttttagggtttcgctttaggaggcatttgggtagtcaaatcttgtcaaaattttggatctttgaaggttggtcggtggaaattgtaaaaccctatttttgttcttctgcaccgcttattgttgttgttatctatattttcttttttctttatggggactgaggatggaacaagcgatgctgataaaacggaatttgatgaacgagttcagtgtttgaaaggtgccgtaatggatggtggggtggcaattgtggatgggaattgtgtttctgaagagggccagctcttgaaaagtgaagccatgaatgttggggttgcaattgctgatgaaaatggtgttgctgaagagggtaggatcgggaaaagtgaaaccttttgtaatcgggtggcagttgcagataaaggggactctggtggagttgaatgtttgccaacatataag

SEQ ID NO: 65204 - DNA, 336 bp, Glycine max
  Clone ID: PAT_MRT3847_29892C.1
aagggctaaactaatttggcaaatttaacccattcaaaaataaaaatggtaaaaaaacaaatttgggagttttcaaaaagctaaattacaaatcctaacctttggaaaaactcaaaaaaaattttaaattttttttttcccggggggggttcaccacttaccatttgaaattggatatcctaaaataaccaggctaatttttaaacttttttttttcactggtgcaaaaatgaattggataaagggttatggaccaaacacccactttaaaatatttcaaaaaaatattggcatttttggatttaaaaaaaaaaattcccaattttaaaatttttt

SEQ ID NO: 65205 - DNA, 342 bp, Glycine max
  Clone ID: PAT_MRT3847_29893C.1
aggaaacctttggactttaagttaggagagaggaatttcgactcgggacgcgcttgaattgtgccctaggtttgcattttcgcgctcagattctttggtagatgaaaagtgacactcttagatattaagagtgggatgcatggatgtaactcaggatctgctctccttgtaaatgctgaggttgattctatgggaggtgttgttgatggcggagttggtattggtttgaaaacctctccacgccgagcagcaattgagaaggctcaggcagtgctcagactggagtatgatgcgcgtgaagaaagaagaagggaactagaattctctgaaaaaggagggaat

SEQ ID NO: 65206 - DNA, 298 bp, Glycine max
  unsure (1)..(298): unsure at all n locations
  Clone ID: PAT_MRT3847_29894C.1
gtcgcatgcacgcgtacgtaagctcggaattcggctcgagattttgtgacgcacaccaagagggcgctggtccccttcctgttagatgaggactatgagaaggttctaggcttcgtggattcggatcgggagaatggcgagaatgcatggactgtgccctcctcccgaggtcaggccctgccctccctgctaatgtcccaaaggcactcccangagtacctgtgtctgtgtccagccaggaagacaagctgcctcaatacctcccctgcctcattaccagaccaggatgagnnctatt

SEQ ID NO: 65207 - DNA, 518 bp, Glycine max
  Clone ID: PAT_MRT3847_29895C.1
aaaaaaaaaaagaggagaattatagggtttaatataagactaaacttagatccagtatcgtatatatttttttataccgttctccaattaaaattttgagttttattttagtgacagatgctggattttaatgcaattagacttggctaaaaaacacataaccgtgtgtatccgtccgaatccgtctcgactttgatgggtaatatccgagttgatcgggtatgagttcggacctcgggtttcctccaataaccaaaagtcgggtatgggtacggtatgagattattagacccgtctcgaccccgaacccgtcccgtcacttaaaatctttagaatttttgcataatttaatcaaaagacaagtttttttattactagttaattctattttagaatttttacataatttaatattattttcttaactatttttatatacacacgcgctataataaatgtattgatatataagtagttaaaaataaatgtttaacaatcaatttatttttctaaaatca

SEQ ID NO: 65208 - DNA, 1687 bp, Glycine max
  Clone ID: PAT_MRT3847_29896C.1
tctcaaatttcggcaagctttggcttttacgagtgttcgatttccaatttctcttcgcttacaagacgatcctttcattctccaggttccgatagattcgattggactcttttgaaattcatgctgtggttcagtatttgttaattctgttaaacttgttttattatactgctactatggagcaccttcctgttgaagtgattggtaacacattatctcttctcggttctgcccgagatgttgtggttgcttctgtaacttgtaaaaaatggagggaagcatggcgcaatcacctccacagtctttcattcaactactgtgattggcccctctttcatgactttacctctgctaggttggaaatactcatcactcagacaatcttccaaaccaaggcactgcaatccctgaccatattcttggatgacgagcacaagttctcggctgccccggtcattgcttggcttatgtatactagggattcgttgcgccaattgctttacaatgtgaggacaaccccttgtttcaacatcattgagaaatgcagcaggcagaggttggaggtgttggccttggctcgcaatccgatcaccggtgttgacccaagctacttgaagtttccttgcttgaagtcgctttcgttgagttttattagcatctcggcgttggatttgacccttcttctctctgcgtgtccgaagcttgaaaccttggctatggttggtgtggagattgcaatgtcagattcgcaggcttccgtggagcttagcagcgtttctttgaagttttttgaccttgaattgtttagttcggataagtttatattggaggcggatttacttgagaagcttcatttgaaagattgtagctttgaggcttttgagctgattggaaaggggacattgaaggttttgaaaattgatgatgtgaatattatccatcttgatattggggatagtacagaaaaccttgagattatagatgtctgtaacttcacagtcatgtggccaaaattttatcatatgatctcaaaagcatcaaagttatataagcttcggctgtggggtgttgtttttgatgatgaggacgaggttgttgatatagagacaatttctgtttgctttcctcagttgacacatttgtccttaagttatgatttaagagatggagttcttcattatggtttgcagggtttgtcttgtttgatgaatgtggtggtgctggaacttggatggactgtaattagtgatctcttctcagtatgggtagctggacttttggaaggttgtcccaatttgaaaaaattggtcatttatggttttgtttcagaggtcaaaacacatgaagagtgtcaaattcttgccagattctcagaattcattcttcaacttggaagaaaatatgggcatgtaaagtttgagtttgaatatgagtagtgggttctgtcgtgctcatctaatccttgccaaagtgaaagaagatacttgcatgccccatgagtttcttttgtccatttcttctgtcgtgaatcacaagaattcttcaaatgtaaagttatagattctttgtgtataagagtgaatttcagtttctatcacaatccctttcttctataatttgttactttttttcttttccgtggaaggagaacctaagatgtggttacttttacgcccttgaaaaaaaa

SEQ ID NO: 65209 - DNA, 502 bp, Glycine max
  Clone ID: PAT_MRT3847_29897C.1
ctcaagcaccgtttgcataccagatcagtagtaaagacctaagaccgttgacggtatccaccacacagaccgcgtctgctagtgcaccactagacttgaccatgaatgtaaccgattgcttgccacataataaacatgttctaaaacctgataagtgaagacatgaattactttaccctagaggatcacatgaataacgtgagcatcctcactgacactgctagcacccagatatactatcaatctaactaggcaaacagatcacatctctcggtctatctatatgcctaaagcttcccatgtgaaggtacttgaaaatgatctgtaatgcaaggaacaaatactatatttatggatgcgagtattagataaacttaacttgataagtgttgcttacgtggtatcagatgacggggatcatataaagggcggaagcgaagtccaggttgtctggtattagagacaacagtgatcattgaatattacaacaactcttttaata

SEQ ID NO: 65210 - DNA, 1409 bp, Glycine max
  Clone ID: PAT_MRT3847_29898C.1
ctcaagagagtagtatcctatccacaagacaagcaagtgaaagtacttaaagcaatggacatggtgctccaaaatctagataactaacttaattgaattgaaacatgagtgagaatagtaaaaccctgcgtttcggcatcttaggctgcgccaacatcgccagaaaagtggctcgagccattgctctcgctccgaacgccactctctgcgccatcgcgagccgttccagagagaaggcggagaagttcgccgccgagaacgggtttccggcgaccgtgagggtttacgggagctacgatcaggtgttggaggatccatgcgtggacgccgtgtacctccccctccccacgagtctgcacgtgcggtgggcggttatggccgccagtaaaaagaagcacgtgctggtggagaagcccgtggctcttgacgtggcggaactcgatcgaatcttggatgcggttgaatccaacggcgtgcagttcatggatggtagcatgtggctgcatcaccctagaactgcccacatacaacgcttgttctctgttcctcattctgctagtagcgttggaccagttcgttttatccacagcacatcaacaatgccagcaacacctgaattcctagagagtgacattagagtaaagccagagttggatggtcttggtgcacttggtgacttggcctggtactgcattggtgcttccttgtgggcaaagggctaccaactaccaacctctgtcactgctcttcctgattctacaagaaacgattctggagtcatcgtgtccatcacagcctctttgctgtgggatcaaccaaaccaaacatttgcaaccattcactgctcctttctttcccacacttccatggacctggccatatgtggttccaatggctctctgcatctcagggacttcataatcccatatggtgagactagtgcttcgttcgatctcacacttggtgctaagtttgttgatcttcccagtgggtggaatgtgagaccagaggaagttcatgtggccaatgagctcccacaagaggctctaatggtgcaagagttttctaggcatgttgcagggtattagagattgtggatctaaaccctctaccaaatggcctgaaatcagtagaaagactcacctagtagttgatgcagtgatcaagtcactagagcttggctgcaaacctgtttgcttgtagatagatggttacaaagcatgttgtcattaatccaacagatccttctccaaacatccttaatccaatgccaccatcagaaacacccttaagccaaccgagtgtttgaaaattggaatagataagtcatgaattgtagcaaggaagccatcttttgaaactgcaattcctaatcagaatcgttcatgttactgtaagtatagatgatg

SEQ ID NO: 65211 - DNA, 276 bp, Glycine max
  Clone ID: PAT_MRT3847_29899C.1
ggccagggattacatgttgtatttattcactaaataaggcttaaccacaggtagctaacaacccaggtaatatggctaacctcttatgcattaaacaaacgtccaaaatgggttaattacatgagaattacacttctttttatacaccaccttacttgaaatttggcaatttgggcatccccatttagatcttggttacttataccactcttaggcttcaaaactttggctaacacatgtgcacactgctcctaagtatggcgataatcaaacgct

SEQ ID NO: 65212 - DNA, 159 bp, Glycine max
  Clone ID: PAT_MRT3847_2989C.1
tccggttgcaaaaaaacgacagcgagggccggcacttactgacactttatgctaaagggggagagactagggggatactctttctgtgaggggtggcaatatctctggggtgagagaaagatctcaacgtagaattccaatgtctgggatggttcactt

SEQ ID NO: 65213 - DNA, 127 bp, Glycine max
  unsure (1)..(127): unsure at all n locations
  Clone ID: PAT_MRT3847_298C.1
gcagaacctagttccatggngcatgctatggcctactgaaaaatcccattgcaagtgatcaatgtctcaggattacagagctgaaacggtatcttggcaaattatggattaatagaaactggcaata

SEQ ID NO: 65214 - DNA, 247 bp, Glycine max
  Clone ID: PAT_MRT3847_29900C.1
cctcgagcgcatcggctcgaggcgttgccattctcatcctccactgtctctctctctcacccattgccatggatccttaccaagctccggccatccagcgccttcaattctcccttctggactacaaattctggtgctcctgtttggaacagcaactcctctttaaccgttggagctagaggtccagctctccttgaggattatcatcttgtggagaagcttgcaagctttgacacggaacgtatcc

SEQ ID NO: 65215 - DNA, 437 bp, Glycine max
  Clone ID: PAT_MRT3847_29901C.1
caggaacatattaagtggaaataaatcaaaataatgtgaaaatgttgatttttatacaatacacaatgaacatataattgagtataaggaaaagattaggtaattttttttaaacaaatgattactttttttaaaaaaaaagtaattaaaaaggatttgcttcataaagattacaaaaaatttatttatttttaaatatggctcaaagagagcaacaatttggttgaaaaaaaatataaaaaaatataatttactattatattttactataattgtttttggaaaaatagttattttccaaattcatttaaatagaacaactattattattatttataaataaatctaaatcagacacacttaatatttttaaaatatatatattaatttaatgtttatgagaagaaaaaaataattgataatttaatgtttatgaa

SEQ ID NO: 65216 - DNA, 237 bp, Glycine max
  Clone ID: PAT_MRT3847_29902C.1
gggggcagccaaagtaaaattttttttgataaaattgggcctcaaaaataccccttcgaaaagggtacagaataaaaaaaaccccctttcatctggggacttttttatggggccccaatccctgttacaaaactggtgggggattcaacaaaatttggttaaccacctgggaaatgccgttcccaaaacattacttcccccctgaaaaaagcccaacaaccaggggggccctcccta

SEQ ID NO: 65217 - DNA, 485 bp, Glycine max
  unsure (1)..(485): unsure at all n locations
  Clone ID: PAT_MRT3847_29903C.1
tttnntttnnnnnnnnnnnnnnnnnnttttgcatacaatatcgctctttttcctatttctgcattaatttcttaatgtttgaaaaatattacagtaacatttttatatattataataatctctttaattatttaaaaaaatattatattataataattttttaattgtttgaaaaatattatattattatgtatttctataaagaaagtaattgtacattaattaaattaaataaggaggagattatacgtaaacagaaaaaacttcatgcctgataatataatttgctctaaaagtttttttttttcattataagattaaaatttttgttaataattaacttctgtcataaaatttgattgatcatctttaatgaaatattttttataattatatttttttcatccataatatttaaattcaatattttattttaaatggatcgagtttactttattggtaattattattattattatttatgg

SEQ ID NO: 65218 - DNA, 246 bp, Glycine max
  Clone ID: PAT_MRT3847_29904C.1
tcggctcgagtctttccattctccgtgatctcaggcgctagcttatcagttattatcgttgtcgttgaatgttgtgatcacttgtcctttgtacattcccgtgcatacatcatatggaccctattaccttccaacctaccgaatcttacatctctgttctcacgggactttcctctcactcacaccctcttacttgtttccatcatttcctgcttcataattcatgtgtagccaactttgtggttc

SEQ ID NO: 65219 - DNA, 163 bp, Glycine max
  Clone ID: PAT_MRT3847_29905C.1
aagcgctgagttggaaactggtaatgccggagcgccctctcacttgaacaggctctgtttccgcgaaggtgcagacttgatccctaatggatggatgtgcactctcttaatggacgatcatgatgcacgagctgctcgtcttgatgggaccacacactacaca

SEQ ID NO: 65220 - DNA, 340 bp, Glycine max
  Clone ID: PAT_MRT3847_29906C.1
tgtggtccccacctttaagatctccgttttctcaaaaatcttcctggtttggtctttcaagatccaaccctgtttgaaattcacctgtgcttgtttttctcctacttcacacttctgatctcatctctctcacacctcacctcgttttgctttttttacttttgaatgttaccatcttaattttttctctttgggtatcttcacaaagcaaagaaattcactgagaaagccaaagccaaaggtgatgatggaataataagtacaaatgaaagatgaacaggaaatattgaattgggtcaatcggatctaatctatcgagtataagtaggtaattcacaaa

SEQ ID NO: 65221 - DNA, 371 bp, Glycine max
  Clone ID: PAT_MRT3847_29907C.1
cgggaaccaaaccagaagcagggaatggccttcattccggaatttgaacccggaattaacataccggaccttttttggttccaaaggcaatggttttcaagggcttacacaaatgggtttttaacaaaaaaaaacccttggtttttaaaaaaataaaacggccaagggccaaagggaaaaaaaaccgggcttactttcccaagcatgaagggctgagcattacctatttccaaaaggaaactagcctttcccgctcccaaaaaaatgagtaacccaaccctttaagcaatttgcaaataaatttttttccccaaggattacctaccggacaaaacttatgccgtttcttaaaggcgttggggcttttcctc

SEQ ID NO: 65222 - DNA, 315 bp, Glycine max
  Clone ID: PAT_MRT3847_29908C.1
attcgcgatatgatgatctgagatattgctaactatttacaggtccatggggcaattggttaaaacaaaccactgtcggcctgggcaaatgaaacgactcgagtcattatggattctaagacccattgccatgtacttaaggaacagttcaagaagtaaggatttcataatagaaacacactggtggaagcataaaattgtttattcgcgaatgcgcataaaagcacaataagacaccatgcacgaaccccattcttgttagagccaaatgccgcctcatccacctatagttgaggtatacgggagtatacatgc

SEQ ID NO: 65223 - DNA, 256 bp, Glycine max
  Clone ID: PAT_MRT3847_29909C.1
ttctctttttctctcttctctctcctcctttccgaggttctcagcggccaagaacaccttccggcgcggtggccgctggcggcgccaccgtgccggagtagctcaagtcccccccttttttttttacctctcgaaccctcttcactcactcgttatgaatctgaggttcgttaccaaaaaacgcgacacagcaagcctagatctaggcttaaagcgggtagaatcctacccttttctttcgtgtttggttgggttg

SEQ ID NO: 65224 - DNA, 425 bp, Glycine max
  Clone ID: PAT_MRT3847_2990C.1
cccacgcgtccgcccacgcgtccgggcatacaaagctgcatcacgactagcaagtgcaacaccacgtccagctcatgttctgagccgtggtattggttggcaaggaattggaatcttgctgaatggcctttttggaacactaaccggttcaacagtttctgtagagaatgtagggcttctaggaagcactcgtgttgggagtcgaagggtcattcaaatttcagctggctttatgatattcttctcaatgttaggaaaatttggagctttatttgcatcaataccattccccatttttgcagctgtatactgtgttctgtttggccttgtggcttctgtggggctatcattcttgcagttcactaacatgaactcaatgaggaacctctttattggtggtgttgcccttttcttaggtttttctg

SEQ ID NO: 65225 - DNA, 203 bp, Glycine max
  Clone ID: PAT_MRT3847_29910C.1
acgacatctcgtgaacacactcatacaaccacccaacacgacatactcccataatccaacatgggcgacatcacattctagggcacatacacacgtctaccaaactagcttccaactatttcttcaaaactcaccttcctacatgtatcagacacacaaaccatacactttctacccgacgccaccttctgtatcatcccttc

SEQ ID NO: 65226 - DNA, 410 bp, Glycine max
  Clone ID: PAT_MRT3847_29911C.1
caggaaaatggctcccaaaggtttaacctttccgggtgtgttaataagcctttcaacaatgtcactgaatccttccgttgccggggaaaggcaaaataatggccttgttaagaacttccacaaagaatcatgccctcaagctgaagacatcatcacagaacaagtcaagcttctctacaagcgccacaagaacactgctttctcctggctcaagaacatcttccatgactgtgctgttcacagttgtgatgcctcacagttgctggactccacaagaaagagcttgtctgagaaagaaacacatataaacttttggttgagaaatttcacgtacattgagaccatcacagaaactttgtgaaaagaataccctggagttgtttcatgtgctgatatcctcgttctctctg

SEQ ID NO: 65227 - DNA, 583 bp, Glycine max
  Clone ID: PAT_MRT3847_29912C.1
cggctcgggattttttttcagaaaccaagagcacacctatcttggtttcaaagctgtgaggtgatgctagacacacactgctagccggaactgtcgggctgacgcttccattctattctgcagtctgtgactataaggctcaagcaacccacagtgtctcttagttccacctgccagatgttgctctgagacgagagagaacaaccacccgctcctgtgatctagtaagtctagaaatgaaaccactgaccaaggtgatatctagagctcataagggacatcataatacacagcctgaaggagctaattggcttatttccgctgttggagctctgacagagtaccctagccattctcctcggttacaagtcaaagccaggtagttgactccaagccacaataaaacgcacctactggaaatggaaaacgcagccacacaaaaaactgcatactaagctatatacagactaaaggatatttcaaaactcgagataatcatagatgcctgagtcgcatataaagaactggtacgtccatgtagctcaagtgcacaccaaatggacaaatgcacatgctgaatgag

SEQ ID NO: 65228 - DNA, 447 bp, Glycine max
  Clone ID: PAT_MRT3847_29913C.1
caatatccttagtttggaggatctgccagattctatgttagagaagttgaaatgcatccatgaagttttgactaaaacacagaacagtcctactggttacagttttgaatatctatcaggaagtttctcgaggaatgctgattttatgaaatttatacagaatgctgtcttactttgtttaaccgtttttccacgtaattacatgttggaagaagctgttcttatttctgaagagctttatgttacaaaaatgaattcttctggatgtattgctatgtggtgtatatgcacgaagagaggctacttatggtaacattgatcacgcaagaaaagtgtttgacatggcattgttatctgtagaagcgcttcctgttgaactacagtccagtgctcctcttctatatttctggtatgctgaggtggagcttgcaagtactgctaatgatc

SEQ ID NO: 65229 - DNA, 387 bp, Glycine max
  Clone ID: PAT_MRT3847_29914C.1
gactccactcaatattagatagtgaagtgtgcggtgccttaacttgaattgcaccgtgcccttgctatgacattgcatataggagtgcagagctgtaacatcgaaatggggtgatattcactaccctggatgggtgctccggtactgttctgtctgatttcatctggcgaggcataatatgtgtagtgtcaagaccgtaacgctccactgaatgacaaaatcattgacttgtcgaagcgaatgtctatcaaagataagataggccacacgacacagattgaaaggagcttcgctactcctgatgagcagaacaagtacttcattggtagtctgctcagtgggggagggagcgttcacgcaacaaaggcatgtgatgcgacctggcat

SEQ ID NO: 65230 - DNA, 1583 bp, Glycine max
  unsure (1)..(1583): unsure at all n locations
  Clone ID: PAT_MRT3847_29915C.1
caatatccttagtttggaggatctgccagattctatgttagagaagttgaaatgcatccatgaagttttgactaaaacacagaacagtcctactggttacagttttgaatntctatcaggaagtttctcgaggaatgctgattttatgaaatttatacagaatgctgtcttactttgtttaaccgtttttccacgtaattacatggtgcgaagaagctgttcttatttctgaagagctttatgttacaaaaatgaattcttctggttgggttacaccatgtcgatctttagcaaaatctcttctaaaaagtgatcgacaggatttgttgctatgcggtgtatatgcacgaagagaggctacttatggtaacattgatcacgcaagaaaagtgtttgacatggcattgttatctgtagaagcgcttcctgtggaactacagtccaatgctcctcttctatatttctggtatgctgaggtggagcttgcaaataactctgctaatgatcgtgaatcttcatctcgtgcaatacatatattatcatgcttaggaagtggtacaaagtacaacccatttaaaagtcaagcatcaagtttgctactgcttagagcacatcaaggatttaaagaaaaactgagaacagtgtggtcatcttgggttcgtggtataataaatgaccagtctgtagctctaatatgttctgctgcattgtttgaggagctaaccactggatgggatgcgggcattgaagttttgaatcaagctttttcaatggtgcttccagaaagaagaagtcaaggttatcagcttgaatttttgtttaattattatataaagatgcttcaaagacatcagagacaatcaagtctgatgaaagtttgggagtccatcttgcatggcctccagatatatccctttagtcctgaacttctaaaagatgtggtggaggttggccattattacactacatctaataaattgcggcggattctagatgactgtagttacaagaaaccatctgtagttctctggctttttgcgttgtcatacgaaatgtttaaaggtggttcacaccacagaatccgtggattgttcgaaaaggcattgggtaacgacaggctttgcagctcagttttgctgtggcgttgctacattatgtttgagatggaaattgcacatgatccttctgcagctcgacgtgctttcttccgggctatccattcctgcccctggtcaaaaaggctatggttggatggctttctcaagctgaactctgtccttactgcaaaagagctatctgatctacaggaagtcatgcgtgataaggaactgaatttgagaactgacatttatgagatccttttgcaacagtcgtgacattcgccctcccactactgctagaatccgactgtatgtaagacaggtccatgatgcagtactcatagtattggacttgtatgtaagatagttacatgatgtatattgtgcttccatataccctttgtgagaaaaaagattcttgatatagaaattttgtcactcatcttttcgattagtatgattactgcaaaaacagcatacata

SEQ ID NO: 65231 - DNA, 302 bp, Glycine max
  Clone ID: PAT_MRT3847_29916C.1
tggaatccaattggagtgataagaaccaagagtatacaactagcatatttaagggtccatttgctaagaagaaattacatacgtccaaattacacttcttattattattttgttaatgtaagtttatttttttaattttaacacaaacttatgtaaacaaaaattaaaaaaataaacttggaatgaaaaaaattaaaaaaaaatgctaacttacaaattataaaaatatattaaaccgaaaaaaaaacaatggataaaagtagggaaggggattgaaaatacctaaatggttatctaaaaat

SEQ ID NO: 65232 - DNA, 928 bp, Glycine max
  Clone ID: PAT_MRT3847_29917C.1
aattgggcacagcaggagggggggcagaacagagtagacgaggagcaaaacacgcacaagtgtggtggtggcgcgccactcattgcccccatcttccatcttccatttctgcactcaacaattcacaagcaacgtaaaaaccaacactttccactcactcttctctcaaatgcacgatggaggaacaacaacaacaacggcaacaatcagagcaagaagaggaccctcgacgaaaaccaaggggtcctctccccattgactggagccggcagttccagagcgactcgccgccgcgcgagtacgacgtcgtgccggcctccgccgtcatgtcgtccgccgatcaggacgacctctccgctattcccgatcacaagctcagggagtcgattcagggcaagaagaggactctcgacgttaccggcaagaatttgcccgacaagggcgtcaagctccgcgccaccatcgaccgctaccagcaggaacttactcgccgggaacaacaaaagcgtctccgccaggaagatgacaaggaccggaagccgcagcccggacaagcttcatgcacagatgctgttactgagggtgtgtctaatgacttgagagaagagaatttgtcgtctcaagctcaatcacaatccacttttgcatcttgctttgttaataaaatggaagataatactaattgtacagcttctgatgcatttagaaaagagatatcacttttcaaacatcgtggcaaccagaaaatacacgaccatggtgactaccagaaaagacaagacaatcgatcatctagaaggagaaatgcactttgaatgtcatcaagacaactcaagtttcaatgccccagtaaactttccaaacgtaatacttttagtgatggtaaaacttgcagagcaacttccagttttggtctgcggaataatgg

SEQ ID NO: 65233 - DNA, 287 bp, Glycine max
  Clone ID: PAT_MRT3847_29918C.1
cattctgggcaacattcaaacgccggttgatagcatcagacagggaacttcaacacggagtttgcctcaagcaaggtccacggtgaccctcaacaatgggcagcatggcccttgcgttcggttcctcgctacggtatcactttagtcaaccgcgggaagagagataaccacatgtttacgggacttttgctgaatgatcatgtaattattttgccattcaagtgctggaaacataatggagcctcttttctagtatatgtcaaggtggtcagcatacctgactcaca

SEQ ID NO: 65234 - DNA, 447 bp, Glycine max
  Clone ID: PAT_MRT3847_29919C.1
agggcccgctccgctgggccaaatcctgccccaagtgaaaactcaaaaatgaaccggggtgccccggctgcaaattggacaagattaaaaccgaggggggggggggaaaaacaatggggggtaaactggacaggcttgggccgcacgtagctggaaaccgaaccacctggggccaaaaaagggtgcctcataccggagacagttgcaaccttgccctgcagcgcagaacacgggggggtcacttggtggaaggtttcaagggggccttcaacgggtggtttcccgcgggggttttgggaggaattgcaggcccggtctataaccggggcccccaagcaagggcctcccccgggaatccggggaacatgaaccccccacctgtcaaaggtaaaggtgggaccgcccactggctccctgggcccattaagacgcctaacaccgtggtct

SEQ ID NO: 65235 - DNA, 701 bp, Glycine max
  Clone ID: PAT_MRT3847_2991C.1
tcccggggagcccggcgggtgccggcgcgggtcccctccccgcggggcctcgctccacccccccatcgcctctcccgaggtgcgtggcgggggcgggcgggcgtcccgcgcgtgtggggggaacctccgcgtcggtgttcccccgccgggtccgccccccgggccgcggttttccgcgcggcgcctcgcctcggccggcgcctagcagccgacttagaactggtgcggaccaggggaatccgactgtttaattaaaacaaagcatcgcgaaggcccgcggcgggtgttgacgcgatgtgatttctgcccagtgctctgaatgtcaaagtgaagaaattcaatgaagcgcgggtaaacggcgggagtaactatgactctcttaaggtagccaaatgcctcgtcatctaattagtgacgcgcatgaatggatgaacgagattcccactgtccctacctactatccagcgaaaccacagccaagggaacgggcttggcggaatcagcggggaaagaagaccctgttgagcttgactctagtctggcacggtgaagagacatgagaggtgtagaataagtgggaggcccccggcgcccggccccgtcctcgcgtcggggtcggggcacgccggcctcgcgggccggccgtgaaataccactactctcatcggtttttcactgaccccgtgaggcgggggggcgag

SEQ ID NO: 65236 - DNA, 303 bp, Glycine max
  Clone ID: PAT_MRT3847_29920C.1
ttaaagccatacgaaaagtttgataagaatcaaagaatccatcgattggctaataggcaattatacaagttcagcgcggaaaactagctcagcatcaaactatacaagtcatcatcatcatcacaaccaaaccagaggcatgcggtatggaaaaaaccaatgacacatgacgacaccatgaattcagaggatcatctaccaaggacgcgaaagattaagcatggaacaaactaaacaatactaaagggctggaggtcattataaaagttagatgaaggacatgaacatcatgacatcatgttc

SEQ ID NO: 65237 - DNA, 509 bp, Glycine max
  Clone ID: PAT_MRT3847_29921C.1
aaacccagaccagatctagggatgatgggacttttgtttgacaatgaggacaacgtgggcgagttcataggatacaagaaggaagaatagaaggacactgaggctgacgaggaagagctgatcgctacgaagaaggaagaagaagaagctcctgattccgctaaacccgattctgagtctggcacgaagggttatgtagccatccatagttcgggatttggagactctctgtagaaaccagagcttcgtctagccattgcagattcaggattggagcatccttgacaagcgcaacacgaatgcatacctaaagcagtcttatgaatggatgccctttgccaagcgaaatctgggatgggaaagactgctgtttttgttctgtgtacacttcaacaagtggatcctgatactggccaagaagcagatatggttctttgacacacaagagaactggctgatgatatttgccacgaaggtgagaggatcagcgcatatcttgctgagctaaa

SEQ ID NO: 65238 - DNA, 454 bp, Glycine max
  Clone ID: PAT_MRT3847_29922C.1
gggagggaaccccccccaaaatgggtagaaggggaaaggaccaacccatattttcaaacaaattaaaacaaaggggggttttaaagaaaaaaaataaaaggggaccgggaaacgggggggaatattaatcccaaaaggtcaaaaaaaaatccctcaaaattcccaaaaaaaaaggggcacaatggttatttgggagccaggagtttgaaccctataataaaaccccactagaaaaaaagggggcccattccttcggtgtttcaacggccccacccccataaaattcccaaggctgggaaaggttctaaaaaaggggacaatcggggttgggggccctaaaaaaagctggaaggctaaaaaaaaaaggggggttctgaagggcgggaccccacttatttttaaaaaaataaaaaaaaatcccgccaagctaataaagggggggaagaaaaatttt

SEQ ID NO: 65239 - DNA, 197 bp, Glycine max
  Clone ID: PAT_MRT3847_29923C.1
tattaatgatcatcataatcttctttaacaatataaacactataaatattacccaaccctacctcattactctaacaccccaacattttcaactgttcttcttccaatacacaattaaatatttcaatgttttcctttcatactaaaatcattaaaagcacttaattctataaacccaaaaattaattttcaattca

SEQ ID NO: 65240 - DNA, 190 bp, Glycine max
  Clone ID: PAT_MRT3847_29924C.1
ttttgctattggtgttaatttgacatccataatcaatatgtgtgcatatgggctcaatcctggtatttcaggttctcgactttagggcaccatttctccatctattatacattaaactgtttggaatcaaatgataccagtgagaacaccattgtgttgcgattctagcacgcagagcttgagaaccttt

SEQ ID NO: 65241 - DNA, 365 bp, Glycine max
  unsure (1)..(365): unsure at all n locations
  Clone ID: PAT_MRT3847_29925C.1
ccttttttttttttttttttttttttttttttttttttttttttttttttttttttttttttttttttttttttttttttttttttnnnntnnnnnnntttttttgtgaatttttatacatatcaaaacatgtctcttacaccatatcatatataattttggaataatcatatcgttgcatcagatacatattgtatttgatacactatcatatctatgcatgacatcacagtaatactgattacacattgacagttatcttaccactattcatgtcattttactgctttcccattaacattttatactgcatattagaataaagattgtagggatttttcttatcagaattaccggacgcgtgg

SEQ ID NO: 65242 - DNA, 954 bp, Glycine max
  Clone ID: PAT_MRT3847_29926C.1
ggctcgaggaaagagaaaaaaacaaagacactatcagttatcactactcttctatcaataaaaccgcaatggtagacgtggaccggaggatgaccggtctaaacccggcccacatagccggtttacgccgtttatcggcccgagcagcagcagctccgtccgtcccggtccgtaacggcgtcgtctcattcgcttccttagcagacaaggtcataaaccaccttcgcgactcaggcatacacgtgcagcatggtctctccgacgcggagttcgcacgtgccgaggctgagttcgggttcgtgttcccgccggacctccgcgccgtcctcgccgccggtcttcccgtcggtccgggattccctgactggcgctccggcggcgcgcggctgcacctgcgcgcgtcgctggaccttccgatcgcggcgatttcgttccagatcgcgcggaacgcggtgtggtcgaagtcgtggggtccgcgaccgtgcgagccggagaaggcgctgcgagtggcgcggaacgcgctgaagagagcgccgctgctgattccaatcttcaaccattgctacattccttccaatccctcactcgctggaaaccctatcttcttcgtcgacgagagcagaatcttctgctgcggcttagatctctccgatttcttcgaccgcgagtcgctcttccgtagttccgaagccgatcctatacttctcaagaagcagcgatccgtcagcgagaaaaccgccgggcgtttccgtctccgccgcgttctcgcggcggagcctcgactccggcgagaggacgccgcggtgggtggagttctggtccgacgccgccacggataagcggaggaggaactcctcatcgtcgtcgtcgtcgtcgttgtcggcgtcgtcctcgccggagaggttttttgagatgccgcggattaaggtccatgactgggtggaagaatacatt

SEQ ID NO: 65243 - DNA, 510 bp, Glycine max
  Clone ID: PAT_MRT3847_29927C.1
cggacgcgtgggtgcggattcgtcatctgctcggttctttgcggcaactggtacggaggtgagcaatgcttcacgagcggcagaaccggcttcgtctcgggcctgaacttcgtctgcgtgatcatcaacatcgttcttctgatcctcaacttcctgaacattaactgctggggcctggagaagatctactcgattgtggctaccgtgctcttcctgattgcctccggtattatggtctggtatgtggtcgacacccgctctcgcggctggccaatcaccaccaccatcctggtcatcgtcgagttcctcctgtacctgtgggacgtcaagatcctccaaggagaagcctcaaactaaatccatcaactctcagatcaattagaccaaaaattttcccaggccaacctaaactcggaatgatatttctcattaaaacgagataacgtgtagcagattatagcatattgtttaacgaccatatgttatatgcgctactacaggtcatctcgt

SEQ ID NO: 65244 - DNA, 778 bp, Glycine max
  Clone ID: PAT_MRT3847_29928C.1
ttcacttcagaagttccctctctctctctctctctctctctctctgcactgagcttgagaagagatatactcaaaagagacagatagattcactgagaaacacgatgccgtcattgccttcttcttggttcttcacaacgcttctactatgcttcttcttacatgttacttttgcaggtgacccttatgttttctatgattggaccgtgtcctacacctcagcctccccacttggagttaaacagaaggtaattgggatcaatggacaatttccaggaccaactctgaatgtcaccacaaactggaatgtagttgtcaatgtcaagaataatcttgatgaaccattacttctaacatggaatggtatacaacataggaaaaactcttggcaggatggagtttcaggaactaattgtccaattccagcaggttggaattggacatatgagtttcaagttaaagatcacatagggagttttttctacttcccttccctaaatttccagagggctgcaggaggatatggaggaatcatcataaataaccgaccagttattcctgttccttttggattaccagatggagatattaccatatttttgagtgattggtacaccaggagtcataaggtactcacgaaagatgttgaagattggatcgaccttgcaatccctgatggtgtccttattaatggactaggtccttatctctacgatcaaaatgttgtcccaaacagcattttttaccaaataataatagtggaaccagggaaaacata

SEQ ID NO: 65245 - DNA, 539 bp, Glycine max
  Clone ID: PAT_MRT3847_29929C.1
tagactttgtcacaattaaaagaaaccatcaggaccacattgaaaacaactcaaactcaagcaagcctctctcgtatactcttagcttttattccttctctctctctctcttctcttttcttgctaaaacacctaactaagagaagatatagccatatatatactctccattaacttcttaatggatcattcccataaacttccttcctttagttgtgaacttagaataatacaagcccaaaacgttgagtccataaagtccacaaaaaacctatttaccaggttatatcttccagcaggaagcaacaaaagaattcaactcaacaccaaaaaagtttcctccaataccaaatatgttcccttttggaacgagtccttcaacttaaattgttcatgtccccaagaatttttggaaggtctaaagaaggaaagccttgtggtggagctaaggcaaagcaagatttgggggtcacatgtggtgggaaaggggagatttcttggaggcaatttttgatcaccaaacatgagttcagggatgg

SEQ ID NO: 65246 - DNA, 400 bp, Glycine max
  Clone ID: PAT_MRT3847_2992C.1
ttttttttttttttttttttccaaaagtcaattgtttacttcaaggggctggtctttggtaattgtcattcgcagatccttagtacaatacaatgcataattggaccgttaaatttacaatatttgcaccatactcgagataaatttggtgcatacatatccgaaaagatatttcacaaaattggccatgacataatcaagaccggtcgtatatggtccaaccgaaacacaataaatcgtggtttatcaacttgctgttttttgaatcctacaaaaaattggattctctatcaattctttagcagaaggccgcttaaccggatcagggtccattatgaccttgagcaagttttgaaggtgcaacgaatgaccaggcataagggggtaactttgccttttt

SEQ ID NO: 65247 - DNA, 317 bp, Glycine max
  Clone ID: PAT_MRT3847_29930C.1
agacaaaaacatgagggaagggtttcttcaaagacattccaagaatccaacgtagaccaaagtcatgcctaagaaccaccaatattacgggaacctgacttaatttaacaaccttaaagccagcccattttagaaccaatcgattggggccggataacattggtcccaaacttcacttccactaaccccctatttttttcattcttcacaccaagcttattaaaggtttattccggaaaccggaccttccctattagtaattaccatttttttcacgttggaaaaccaaaccaacccccttaccccttaaataagat

SEQ ID NO: 65248 - DNA, 1467 bp, Glycine max
  Clone ID: PAT_MRT3847_29931C.1
cccacgctctcacaaaggggtggattaatccttttgacctctaagttttctttcaatctcatgcttgtgaatctttagaagggaattctaaccaaacatcttcagccaccacattgataaggaaaatgggagtctcaggcaacaatgaagttttagtgacaacaaaggtagttgttgactatgatagagcaagtgagctcaaagcttttgatgacacacaagatggtgttatgggacttactgatgctggtgtcacaaagatccctcttatattccataaccccaaaaattctcatcatgatgaatctgatgatggttcaggtagcacacaactcagtgttccttcaatagatcttgttggtgttgctgaagatccagctacaaggaaagtggtggttgagaaaatcagacaagcatgtgagacatggggtttcttccaagttgttaatcatggaataccattgagtgttttggaggagatgaagagtggagtgaataggttctatgagcaagactctgaggtgaaaagggaactatacacacgtgaccctttgaggcctttggtgtataatagcaactttgatctttttacttcaccagctgctaattggagggataccttttactgcttcatggctcctcatccaccaaaacccgaagacttgccatcagtgtgcagagacatactgctggaatatgcaaaagaagttaagaagctggggagtgtgttgtttgagttattatcagaagcccttgagctgaatccaaactatttgaatgacattggttgcaatgagggacttacacttgtttgccattgctaccctgcatgtccagaaccagaattgactttaggtgcaaccaagcacactgataatgacttcatcactgtgcttctgcaagatcatattggtggcctccaagttcttcatgaaaacaggtgggtggatgtgtcccctgtaccaggtgctctagtgatcaacattggtgatcttcttcagcttataacaaatgacaaattcaagagtgttgagcacagagtggtggcaaaccgtgtaggtccaagagtatcagttgcaagcttttttagcacaagtcttcagccatcaacaaagctttatggccccataaaggatttagtatcagaagataatcctccgaagtacagggaaactacagtgcaaggctatgtttcctattccctgggaagaggccttgatgggacttctcctctgccacacttcaggattaaagatttctgatacatgtataaggattttattatttttatgggcaaatattagttttaaatatattagtttttgttgatgagagatttaaactcataatttttttttgttcagttaattttatatctttgatatatgtataaggatgttttaacatgaatacctaagaattctgtagtatatactttgccatatttataagacaatatgattgcat

SEQ ID NO: 65249 - DNA, 863 bp, Glycine max
  unsure (1)..(863): unsure at all n locations
  Clone ID: PAT_MRT3847_29932C.1
cacgcgtccgcccttctttctctctctttttcttttttttttttttttttgttcctctctctagattttatttgttgttcttcttctttatgagccctaactcggggacccatcgtcgtcgtcgtctttagccatgtcgctgaggaaggtcttccgctcccgcaagttctccagatcgttcaaggaggtgctgccggcggagggcgccgcaattgtcggcggcgaggacggggtcgccggcgccggtgaggagtcgtcgaatgggaataatggttggtccaacatgcttccagagatcctcggcgagatcgtgcggcgcgtggatgccgccgaggaacagtggccgaaccgccagaacgtcgtcgcatgcgcgtgcgtctgcaagcgttggcgtgacatcacgcgcgaggtcgtgcgcgtgccctcccacaccgggaaaataaccttccctgcgtgccttaagcagccaggaccacgtgacgttccccaccaatgtcttataaagcggaacaagaaaacttcaactttttatttatatcttgcccttacaccatcattcacagataaagggaagtttctgctagcagctaggagatataggtgtggtactcataccgagtatataatttcacttgatgctgatgatttatcccaaggaagcaatgcttatgttggaaagctaagctcggattttcttggcaccaacttcacaatttatgacagccagccaccccatagtggtgcaaaaccatcaagtggcaggggcagccgtcggtttgccagcaagctggccaggccacaagttcctgcccctaactttgaggtggggcaggtctcctacnaagttcacctttttgaatcaa

SEQ ID NO: 65250 - DNA, 273 bp, Glycine max
  Clone ID: PAT_MRT3847_29933C.1
aggatacacagcatatactacatttacctagttgtgttgacgcggctaacattataacaacccgacatgggcactttcacgaacgtaaacctcatagtgtctcacttctatgatgtgaccaactctgtgcattgacaagcaaatctttaaggtcttcatactctaaacccctagggcacagtcctgatatatttcacactctattagagagatgcatgcaactgttttctaataccagagctatgagctgaaatgatcaatagtaaccccaac

SEQ ID NO: 65251 - DNA, 284 bp, Glycine max
  unsure (1)..(284): unsure at all n locations
  Clone ID: PAT_MRT3847_29934C.1
gctctggatgccctcctagggttcccaagcgatcgacagaaagagaatgaattcgagccttcattccattgttcgcatgcgaggatcatttcttcctccacatnctctattccataaatcccaactggtgaacatgtgtgaaaattaccatcccaaccttttgcataacctgtcaaacctaacttacaatcccttcataaaccactgttttcactttccacaccaacaagcccttgtccaagatgacacagatatggctctgcctgggaattattactcaagat

SEQ ID NO: 65252 - DNA, 697 bp, Glycine max
  Clone ID: PAT_MRT3847_29935C.1
tcgagttttttttttttttttttggtcatgcgatttcttccagttgggaaagagattcgagagaaattctctggtgcagttgaagcgttctcccggaggaaccctgcaaatgctagtcctcgtggtgatcacaccaaacacaggagttttgaggatgtaccagtgcaaaaggatttggtaatattattcaacaataagaatatatgaatcgctatttgaaattttcatacgagaatattagggcctgtatggtttaacaattttttctgtttttcaattcctgttttctctaataataataataataataataaaattgttatatttttttcaacttgcttcctaatatttgtacaggaaatggtgagaataccaaaatattattcaccatttctgtacaaatctttgaaaataggaaacaaagtgaaaatttggtgttatgttgtaattatcaattaaatcaagaaaagataatggaaaacgttttctcaaagcaaagagatctcttattttctagatatcaggtttgtagacatgttgcatgctattgtctttttttgtatggagggtttattgtttggactttgaaaaacttttatcttggaagaaatggggaaagaagccaataagagagtaaattagcttactttttctcgtaaatgatgaggtattttttgttctaaccttacgttttaat

SEQ ID NO: 65253 - DNA, 289 bp, Glycine max
  unsure (1)..(289): unsure at all n locations
  Clone ID: PAT_MRT3847_29936C.1
agtcgcatgcacgcgtacgtaagcncggaattcggctcgagtgatcncttgctggttnccacacaacanangannagncncaannnacnnngnatnaatgntnngnacananannaattanannacnannnnnannaagtttnnaggannaaatcanannncacatncctnggnancgaccntcncananaggnangtggncncaanantggnnnngnaatgnggaatcgagnnggcaaatcaaacttcaggnnttnnnnnnnnccnntngnnanacccanacaancta

SEQ ID NO: 65254 - DNA, 288 bp, Glycine max
  Clone ID: PAT_MRT3847_29937C.1
ggggccccacccttaaaaggcctttccccctaaagaaagggggttccccccaaacaattgcccaactgggccatgggggtttaaaaaaattttgtttttttttaaaaaaaaaaaagggtttttttttttgggccctggaaaaaaaaggacctggggcaaaaaaagaaatcctggctgaaaagggcttttctttccttttttacaaattggaactttgggattatttaacaaaggattcctggaccccccctgggaaaaagttttaaagggccccctgctggaaggggg

SEQ ID NO: 65255 - DNA, 382 bp, Glycine max
  Clone ID: PAT_MRT3847_29938C.1
gtttagcgtaactgtaagctatgtgactttgttgctccagcttaccactatatttttgacaagttccatttgtacaaccgcacggtattaagatcctacaatcctttattcctaaacaatgtatcaagcaacttaacataaaattctttaatatcgtaatcaatattcagatttctacatactctactctaatcgccattttttcctaccaataaaaaaccttcttttcttaacactatatctcgcttctctctataacataagccttccactcacatatatcattagagaattatacatcaaataaataggtccttcctttaacttgatccatataacttattccatctcaattaaactttaaattgtggtcaaatatttc

SEQ ID NO: 65256 - DNA, 1013 bp, Glycine max
  unsure (1)..(1013): unsure at all n locations
  Clone ID: PAT_MRT3847_29939C.1
agatcgtgagtgtcaacctgatgctgcactttacacgtgtttgatcactgggtttggaggaagaagaaaatggatatggtatacaatctactgaaggaaatgaggaaaagaggttgttcacctgatggggggacatacaatgctttgataaaactgatactagccaacaaatgccagatgatgcagtgagaatatacaagaagatgagtcaaagtggcatcaaaccaacaattcacacttacaacatgataatgagatcctattttgtgacaaaaaattatgaaataggtcatgcaatttgggattagatgcatcagaaggggtgttgtcctgatgataattcctattccgtatacattgggaatgttagagaaggggatgaaagctcctcagcttgattataacaagtgtgcttctgatatttctaaaattgggaatgctgtcattcttgaggagttagctcgaaagatgaattttgttggtaagtctgaagtgtctaatgtcttagctagttggggctgacatgatgaagaaaagtgccaagagaagagagcctacaacatctgctaggcaacttacatgattacctgattgagttacaattggccaaggacccctttggtccaaggatgttatagcaacacaattcctttgagctagcgatcatgtntagaccatgcgtccgccctgaacttcttttttgtatattgctgttagctgtgtaaaaaaaagcatgtactagtttgaatgaaacattcggctgatccttcttgaaaaaaaataaaaaaaaaaaacaaaaaaaaaaattttataaaaaaaaaaggggcaggcccggggaggtgtaacccctaaaaaggcggtcttcttaccccccccatacaagaaggataaataaaaacttaggcgtggggggggccccctgtttaaacccctaaaatttgagaacccctgccctgaggcccaaccttttttctttggggaaatagcgttaaaccccgggggggacttgtaaa

SEQ ID NO: 65257 - DNA, 430 bp, Glycine max
  Clone ID: PAT_MRT3847_2993C.1
gttggtttttcattgttgagagagatgttgctttggaggtgaaagtgttacggaggttcctcggtggtggttgcttcagttgttaatggacgttggtcgtaggtacgccgtaaaatctgtgtttgcatgatatacggattgcataaatcgtaagttttaatataacttacggattacataatctgtatgttttatactgattatgtaatctataagttaaattaaaacatacggattatgtaatccgtatggtttatacggattagataatttgtataaaccatgtaatccgtatgttttatacggatttgtaaatttattttaaagatattaaaattttaaattttttaaaattataaatatgttagtgatgtgccatcattttcttctattttctaaaccctttttgcaccattttaattattgattg

SEQ ID NO: 65258 - DNA, 244 bp, Glycine max
  Clone ID: PAT_MRT3847_29940C.1
actactcgtgctgcattggccaaacgtatcttattcgatgcgcatcctgccatactgagacaagtcatgcctcatgagctagcctgctctgactggcctatcctgacgacatagctcttgcgagatctgatataatgcgcatgaacctgcgtgattccacgtgcagagtccacgtgcaaggcatgcttctacaggatctaccgaagcatcacatcgcatactctatggctgtatatgtgatata

SEQ ID NO: 65259 - DNA, 798 bp, Glycine max
  Clone ID: PAT_MRT3847_29941C.1
aggaaatgagggaaagaggttgtccacctgatggaaggacctacaacgctttgataaaactgatgactagccaacatatgccagatgatgcagtgagaatatacaagaagatgattcaaagtggcatcaaaccaacaattcacacttacaacatgataatgaaatcctattttgtgacaaaaaattatgaaatgggtcatgagatttgggatgagatgcatcagaagccgggctgtcctgatgataattcctacatcgtatacattggtgggcttataagacaggacaggtctggtgaggcatgcaaatatttagaggaaatgttagagaagggaatgaaagctccgaagcttgattataacaagtttgcttctgatatttctaagactgggaatgctgtcattcttgaggagttagctcgaaagatgaattttgttggtaagtttgaagtgtctaatgtcttggctagttgggctgacatgatgaagaaaagtgccaagagaagagagcctacaacatctgctaggcaatttacatgattacttgattgagttacaattggccaaggacccctttcgtccaaggttgttatggcaacacaatctctgagctactgatcatgtttagattctagtttttgtgtgaacttcttttttgtacccccgctccatctcaaaaaaaaaaaaaaaaaactatttattttgtatattgctgttggttgtgtgtataatggcatgtactagtttgaatgaaacattcggctgatccttcttgaagtctttgtcaatttgctgtttt

SEQ ID NO: 65260 - DNA, 1330 bp, Glycine max
  Clone ID: PAT_MRT3847_29942C.1
gaagaacatttagagttttgctttaatttctgatcttttagtctaaccaaaacccacctacatcaatagatgatgggtcgggagcaaagataataatatcggcactaagttatatgtacacagaatcacaaaaacagtcacacaaacgaacccacgcacgcacacacacactcacgtttccatgaattccgttttcctcctccatgactcaaaacttgagagtagtgatttaaaaagttaaaaaagaaaaaagaaaacaaatcaaagcaagtaaaagaaaattaatataagtagctagctagcttgggatatcatactttttcttagaattaatcatcagtagtggaactaacaagtggatggaggcatgagattcaagcccaagtcatctttttccaaaaccaaacgagccctgttggtctctggattagatccacaatccgggtgcacccttttcttggactgcagcgacaccccaaaaagcttggtcttgcagctattaatgttactgctggcaggcccttcaaaaatggttatagaactccttgatgtgttggtgggagagttcacaacataggtctgaggttgagtaatttgtgtagctccttgtttagggttagtagaataataccccagaagctggttcattggcctttgcatcattgaaacattattggcactacttattggagtggcagaaggtgtattgcatagtagcaaagaagaagagtaagaattgcttggagccactggcttgacatggttctgaacgaagtagatgatgtcattgtagagcttcttcatgtgcgcgagttccgacatgagcatgttgttgcttcttctgagtctctcgttgtcctccgaaagcgccgtgacggaagtgttgtagttggctgctgctgcaccgttcaccaatgaggtggctccacgtggcggcgagtcgcaccagttggattggtcgtcggagtcgttggaagtagagatgctgactctgctggagaagggaaagaaagttggaacgttaacgttgactcccaacggagaatgagcatggtggtgatggtggttcatgattccttgttgaggctgagccgtttttcttctatggatctcgcacagcaagtgtttctctcccttcttgaagaattcgttcgcgaactcccatcggtctggcacaatctttctaaaaccataggtgttgagttggcgaacgaagctggagaagttgttgtgtttgaagtagttaggaagaaggtctctggcgaattcaggaggacgccaaacgacgaaggtggtgtcgtcttcgcctcgagccgattcggctcgagca

SEQ ID NO: 65261 - DNA, 993 bp, Glycine max
  unsure (1)..(993): unsure at all n locations
  Clone ID: PAT_MRT3847_29943C.1
cggctgcgagaagacgacagaaggggaggaaaacagagtactaaacggaatttgaaaaccaaggctgaagaagttttaagagacatggagctctccgtggttgcaagagacatggaagaagttgtattgctggttgatgatttgagatcactttctgggatttctcgctgtagaatatgtcatgaagaagaatttgagagctccaaaaccttggaagctccttgtgcttgttctgggacagttaagtttgctcacagagattgcattcagacatggtgcgatgagaaaggaaatacaacttgtgaaatatgtctccagcaatatgaacctggatatacagcagccccaaagaaatcgcaaataactgatgcagcaatgaccattagggatagcctgcaaatttcaaggaatgaacaagaaccgttaaatacaagaatagtgggtatagttgaaggaaacaattactctgaatgcacgtatgcttcggatagaaccgcagcttgttgtcgatccctggctttagcatttacactcatcttgcttgtaacacatcttttcgcactccttacagatggaatggaagattatccatttacaattcttacggtctttttcctaagggccagtggaattattatacccatgtacataattattaaggcgatcggagccattcatgacaatattaagcgtcaccatcatcaggattctgacgatgactcatcgatatctgatggagatgatgaagaaaatgagcctccaaatgatgaaattttaagacattcacaatcataggtcgttatttgatttaacttgtatcagagcattatgctgatgctctgtcaagttataccattttggaggcatannnnnattgttgtaaaaaaagaaagaataattcatttattnaaatgcatatagctttgctgtatttatgctgtttcctaccaatccaagtagatnnaacagccaaatttcacctatatgtatgta

SEQ ID NO: 65262 - DNA, 397 bp, Glycine max
  Clone ID: PAT_MRT3847_29944C.1
catgtttatctcatcaggcacactaaattttatgcagggtggtatctactatcaagggggagtgttttagagaaaaatattgccaatgtcattactgatggtactattgaacgtgttccatggactaatcctaccccagatagattgcataacactgatgatagataactaaactaatgccatcataacataactctaatgtaaatgaatgaataaagtactatttcggtatcaaacatcaacttaaaagaatttgatctaccttaaatgcattcatagccggggtgttttaatcaatctttgaagattaatgtaaaacctttaactttacataaagacacttatatacttatatctgtctctacgacaaaaaatatgttacatattttaataacct

SEQ ID NO: 65263 - DNA, 181 bp, Glycine max
  Clone ID: PAT_MRT3847_29945C.1
agccagcttcttggaaatgcaggctgctactacccctgtgaagcgaggatcacacagaccttggtggttggcatctaaccagtgactttcctactctgatggcatcctatcaggtgtctatggattcgaccttctgcgactttcggaccctgaaggaacaggacggttcattgagccgcaa

SEQ ID NO: 65264 - DNA, 111 bp, Glycine max
  Clone ID: PAT_MRT3847_29946C.1
ctcccttactaaacaaccaaccagattgaatatctcggcaataaaggatctctatactgaaaagtgccatttacaatcagcctctgaaaacaatccatttttaaagtctac

SEQ ID NO: 65265 - DNA, 466 bp, Glycine max
  unsure (1)..(466): unsure at all n locations
  Clone ID: PAT_MRT3847_29947C.1
gcacgagcacatgaatacatagacattgaccatatattgatgttaagagctttatctaatggcatccactgcaggctatttacctgctattaaatccaaatggaactatgaagctttatgagtttgtagtgatatttggatgcttcatgctgattttggctcaaatgccatctttccactcattgagacatattaatctagtgtctttggtcatgtgcttatcctacagtgcctgtgctactgcagcttcaatatatattggaaaatcatcaaatgggccaaaaaaagattactctttaataagtgacacaacaaatcacttatttaaaatctttaatgccattcccatcattaccaacacttatagtagcagaatagttccaaaaattcaagttaattanaaacaatcaaaatttattccctctaatatatantacttattaatactacatacccacaccatcaa

SEQ ID NO: 65266 - DNA, 130 bp, Glycine max
  Clone ID: PAT_MRT3847_29948C.1
gtcatgcgtaatttttttttatttgtagtccaaaccaagatctgaagagggacggcagtatatttgtggagaggtagagtcaaaccatgcaaaagagtaggtccctggctgctgtgtgaaaattgttata

SEQ ID NO: 65267 - DNA, 435 bp, Glycine max
  unsure (1)..(435): unsure at all n locations
  Clone ID: PAT_MRT3847_29949C.1
cccacgcgtccgattttttcatgattaaatattaaatattttaatagtgactaaagtaagacaaacattaattatggattaaaaattagaatttaatatttttaggaactaaattaaaagtaaaaattttatataaattataattgaaaggtaaaaaatttatatggactaatatttaaatttaaatgttttcaagaattaaaaatgaaaaaaaaacattaaaatggataatttttttttacaataattgatattatcttatccggtatttaatctaaaattcttgttaaaatgtatatgactttttttttttaatgtatatgactctacgacgaattggntatgatattttaattttttaaccccggataaataccaatcttgatgtattcattctaattttttgtaacccttgttctttctttcctaccccaa

SEQ ID NO: 65268 - DNA, 3190 bp, Glycine max
  Clone ID: PAT_MRT3847_2994C.1
gggaaccaacatgtaaaatctatcatcataaagttttcagtatatcatggtaccattcctatgacaaattaactacagaaacaaattcaagcttccagtaacatctcatgaaatctgaacaaaattttgaaagtaaatagtcaaagctaaatatgcatgcagtttctccccaaagcaggagctaagcacaacaaagtgtgtttgatctactattctcccaagaggatgtatagaacatgaacataacttatgctacctcacaaacctagccacccactcagaaaattggtttcgcagctccttccacatctaaacttttcaaaaaagatagatgtacccaagcacagccaacaggaggactagcaaggtggcagctgcagcccatatcaggtaattgttagacttcttccgcttaataatagcttttggaatcgagtccgggcctcttgctcggcccctggacctgatgccactctccttttggaccttttccttcactggagccggggcttggacatcatcgttaatcttttctggctctgtaacctcgacaacttcatccttcggttcgtcctcagggttggccacggctgcagtgcctgatttcttctttgctttcttctcacggtccttaagcttcttctcagcttccttttgtgctctgatggctgctttggctgcagctttctctgctaacttcttctttctttccaaggcctgcttcgccttcacaatttcctcctctcttttcatctctttcagctttgctggatcaatttcaggctctttggcaggggcctccttttcgggactttcaaattcatattcatcagtttctgctacatccttactctccagtttggatttcaaatccctccccttgtttttggaatctttctgagtggttttggattctttctgagcaggcaaagtttcttgtggagaaggcttaggttcctcctttggctgttttgcagccatttttggtaatgcttcagcttcagcaggttttggttcttccagaattggcttttcatccgggttcctcatccgtccgtcccgactcaactgtcgcatatccaatgaggccaaaattcttttttcataatcattcctaaatgctttgtccttgttccagagtgccataaatttctcaacctctgtctgtgaaacttcatcaagagcattaatatctttctttgcagccagctcccgtgctttgttcagaaccgtacgactttggtagaaataggtgttcccctcctcgcgctgttttcttagctgctgtatactctcaaaagctttgtccctcttctgagaaacagctgtcagttcctcctgtagagactggatatccttgtctatggctttcagtgcatcatcaatttgcttgattttggaccgaattgcttctctctctttcttcactccatccaaatccccaccaataagcttaacctgatcttgaatggcttctttttgccccatagattcctgtaatttggccctcattgcagcattagcaataactttctcccttgtcccctcaagctgtttgatttctcggaggatttgtttttcctcagtcaaaggaatgctctcatgctgtatgcggtattgtaaactatatataacactgttaagttcatcctcagatgaacacaaaccaccccggccggcattatttgtagtccgcagcttgcccagtgcttgctgcagaggtccaatctctttcaatttctcatccacaatactctgaaattgcctactgtcgcctcttagagacttgacctgagaaatcaactctactcgttcagcccgctttgccttcagtgcttctgtgatctgaaaccgggcttgatttttcttgctaatatctttgtcagacaggtcgattttagacttgatggttggatcatcataaggccgccacctgacaaaataaaaagaatgaatctgcttaggtgcaggccaatcttcagcagcatctttcggggcattcacgtctgaaacatcattccctttcttttttgcagattcctctccatgtgtcccaaatttgatggcatccgcagcagctgccacatctttttccagcttgccattctccttctcattcaaaacaggttttcctccctcagtaccattctccactggtccttgaaccatctcaaatcccacaacctcacccgccatgactccaactacaagacaacctcacaaaatccaagtaacctcttttttcaagagtgtcgccaaattatgagtcagatctcactctgttgcacttctttgacctgaaaagccccacctgacaatgtcttccgcccggatcgaccggccgaagccgaccttgggtccaaaaagaggggcagtgccccgcttccgattcacggaataagtaaaataacgttaaaagtagtggtatttcactttcgctgtttccagctcccacttatcctacacctctcaagtcatttcacaaagtcggactagagtcaagctcaacagggtcttctttccccgctgattccgccaagcccgttcccttggctgtggtttcgctggatagtagacagggacagtgggaatctcgttaatccattcatgcgcgtcactaattagatgacgaggcatttggctaccttaagagagtcatagttactcccgccgtttacccgcgcttggttgaatttcttcactttgacattcagagcactgggcagaaatcacattgcgtcaacatccgcagggaccatcgcaatgctttgttttaattaaacagtcggattccccttgtccgtaccagttctgagttgactgttcgacgcccggggaagaggccccgaagggcccgttcccaatccgtcccccgaccggcacgcgacgacccgctctcgccgcggaagcagctcgagcagtccaccgacagccgacgggttcgggactgggacccccgtgcccagccctcagagccaatccttttcccgaggttacggatccattttgccgacttcccttgcctacattgttccatcgaccagaggctgttcaccttggagacctgatgcggttatgagtacgaccgggcgtgggaggcactcggtcctccggattttcaagggccgccgggggcgcaccggacaccacgcgacgtgcggtgctcttccagccgctggcggacgcgtgg

SEQ ID NO: 65269 - DNA, 518 bp, Glycine max
  Clone ID: PAT_MRT3847_29950C.1
gcaggtctttagtgggagctatcttgtctaaagttgtacctgcaacgttttccacaataagttctttttctaagttgatatggcgaagtgaacagtcgtctccaaagaaatcagatcagaagcctcagccatttgctcgagcttcacctctgacatgtttaaaggatcaccctaggaaaggtgagaagcttaccttatcaccgagtggtacgttggctgctataacagattcacttgggcgcatattgctgcttgatactcaagcacttgtggtggtgcgcttatggaagggatatagggatgccagctgtctgttcatggagatgttggtgaacaaagatattgcatcatcaagttcttcttattctgaaccatcgaagagtgattactgcttgtgtttggctattcatgcacctagaaaaggcattattgagatctggcaaatgagaactggacccacgtcttagaaacgatctcatgttgcaaaaggtagtaaaatgttacaacccagctacagg

SEQ ID NO: 65270 - DNA, 477 bp, Glycine max
  Clone ID: PAT_MRT3847_29951C.1
ggctcgagcagctcttacttttttccgatttcttacacaagaacttttcaaggatgcttcttggtattagaccttttggaggtatgggttcgatatggttatcggttatttgcgcactgcttccatcattgctatgcacgaataatagctcatgtctttgcttcagggtcggaatgcatctgggatcatagcataccatccgtgagcagagccaatggggactacgcgactacagcgatcgcccctatggctgagagcttgactgacgatgggatgaagaatgtcaagaccactactgctacccactttctaatctctacatacgatgctgatacttgggagagtgctctaacatacacactgtattctgaggatcgaattgcatcgatcatgattgaccaactcacctagatctggattgatcagcatcaacgcctgaagttcaatggtgatgatgctgacagagaatgaagccat

SEQ ID NO: 65271 - DNA, 662 bp, Glycine max
  Clone ID: PAT_MRT3847_29952C.1
cccatacataactctatcaagtttaaaaatgcttacccctctcaccattggaaggaatctcggttaatcgatgtcaatgggttgaatctggtaaatgatgaggtcaagccggttctaaagccaacactgtccataggacaaatattgagcaggaagttgatgatgccggaagagtatgaagccagtggaatgattagagaaagaagctcggcgaaacggaaggtgtctcttggtcagatgctaggcaaacaaaacggggattcatcctttgacaggcaagctgagaaggaaaatggtcagaaaccgttttctgcaaagagaaagaaatttggatttggtcgattctccctacttttgacaaaacaacaaaagaagaagaagccaacactgaacttgaggtgatggcttgcttgatcattttgtgctgacaaacattgagactatatttgcatcttctgtctgtttccatttcattcacttattgtgcaagcttgactagattcttgtttgttgcttgcttgtatattaactaaagtttgtccatcatttgtgacttatcatgctacttgtagaggtgatttatgtgaattttaactcttgtaagctgatgttataattctcctatgcatgtggtgaggttgttctttcaatgtttgtaaaaa

SEQ ID NO: 65272 - DNA, 688 bp, Glycine max
  Clone ID: PAT_MRT3847_29953C.1
ggctcgagtcgttttattatccgtcttattgttcttgttgtttttgaatcattcccatttcccagtctttctttatggaagaagttcccgacacggcggcgaaccggtccgatccggggttcagggcggagatcgacacttcggcgccgttcgaatcggtgagggaagccgtcacgcgattcggcggcgttgggtattggaaacccattctgaacggtcttagtaacaagcattttgctgctcctgagccgcatcacgcagaagagcttgaccctgaaaaactggaggagcaagctgctttattggagaaagacctgatcctgaaagaaagggaaacacttgatgtcttaaaagagttggaaagtaccaaaaggcttgtggagaatttgaaatcaaaggtacaaaaagaagaatctgaagcaaatttgaattttcagacgagtgtgtgcgaaaatatatcgtctgttaaggaggatgagagagaagataaggaaaaccgagtgagtaatgttgttcagaattcaaggaaggttgtgtcccctatccttcatcatccccagggttaatattaatggaattgaagcaagcaaaattcaatctgaacagaactacaagtgatattgctgatgttcgagcttctgttgaatctctcataagaagttagagaaagaaagactatcacttgaga

SEQ ID NO: 65273 - DNA, 2057 bp, Glycine max
  Clone ID: PAT_MRT3847_29954C.1
gctcgtgcgacaaactccaaacaccaaccttttcttgtcgttttattaccataataataataattattgttgttgtttttgagccattcccagtgtttctttatggaagaagttcccgacacggcggcgaaccggtccgagccggggctcagggcggagatcgacacatcggcgccgttcgaatcggtgagggaagccgtcacgcgattcggtggagttgggtattggaaacccattctcaacggtcttagtaacaagcattttgctgccactgagccgcatcacacagaagagcttgaccctgaaaaactggaggagcaagctactgtattggagaaagagctgatcctgaaagaaagggaaacacttgatgtcttaaaagagttggaaagtaccaaaaggcttgtagagaatttgaaatcaaagctacagaaagaagaatcggaagcgaatttgaattttcagacaagtgtttgcgaaaatatattgtctgttaaggaggatgagaaagaagataaggaaaacggaatgagtaatgttgttcaggattcaaaggaaggttgtaccccctatacttcatcatccccgggtttaatattaatggaattgaagcaagcgaaattcaatctgaacagaactacaagtgatattgctgatgttcgtgcttctgttgaatcgctcaataagaagttagagaaggaaagactatcacttgagaaaacgcgcaagaggttaactcagaattcttcaaagatatgttctcttgaggaagagctaaaccagacaaaactaaaactgctagtggcaaaagatgccggttcggataaccattcagatataacaagagaacttcagcgactgagttttgaggcagagcatttcaagaacatgggagaagctgcaaaatcagaagtcatgaaagaaatgtctgagattgaacagacaaaagctatgataaaaactgctgaaatcaggttgattgctgcccaaaaaaatgaaggaagcggctagagcagccgaagctgctgcccttgcagaaatcaaagctttatcatctcatcatgagaattcagctggagattgtgtggaaaagcatgatggagttaccctttcctttgaagagtatactgctctaacctgcaaggtgcgagaggccaaggaacaatcgaagaagagagttgtagatgctatgcatctagttgatgaagcaaatgtgtctaaaatggacattttgagaaaggtagaggaagccacagaagaagttaaaaccagcaagaaggcccttgaggaagctcttgaaagggtagaggctgcgaatcaaggaaagctagcagttgaagaggcattaaggaagtggcggtcggagggtcacaaacggcggtcctccatacttaactctaccaagtttaaaaatgcttacccttctcaccatcggaaggattctcggttactcgatgtcaatgggttgaatctggtaaatgatgaggccaagccagttctaaagccggcactgtccataggacaaatattgagcaggaagttgatgatgccggaagagtatgaagccagcgagatgcatagagaaagaagctcagtgagacggaaggtgtctcttggccagatgctaggcaaacaaatagcggatccatcctttgagaaggaaaatggtcagaagccgttttctgcaaagagaaagaaatttggatttggccgattctcccttctattgacaaaacaacaaaagaagaagaagccaacactgaacttgaggtgaataatggcttgctgttgtgctgactaaacaatgagattatattgcatctttttatctgttctcatctcatcctcttactgtgctcgactaaatttcttgtttgttgtttaatttaccttgcttgtatattaactaaagtttgttcatcacttgtgacttgtcatgctacttgtaggaggtgatttatgtgaatttgactcttgtaagctgatgttataattctcatatgcatgaggttgttctattctttcaatgtttatacatatattggcacgttggcttt

SEQ ID NO: 65274 - DNA, 774 bp, Glycine max
  Clone ID: PAT_MRT3847_29955C.1
aattcggctcgagaaaaaagtaaaggagttgcaagataacattgcggctgtaaactttaccccccaaagcaagatggggaagatgctgatggctaaatgtagaaccctacaggaggaaaatgaggagattgggaatcaggcttctgagggcaagatgcatgaattagcaatgaaactttcagtgcagaaataccaaaatgcagaactcagaagtcaatttgaagggttgcaaaagcatatggatggattgacaaatgatgtggatagatccaatgaaatggtgttaatgttgcaagataaattagaagagaaggatcaggagatccaaagactgaaagatgagttgcaaccaaaaagcctcgtcgtggaggacgggaaaacagatccagcatctaataggaatgatgatgatgaaacgatacctactgaagccgctaattaatgtgggcttttggtttacctttggaagttgaatcaaaagttacaaattcttatttttcacaagatgagaatgtgtcagttcagcctaacgttaagccaaacacaattgtataactttagacttaaagaagtttgagtaaatactcaagttagtcctgagaatcactgggaatgttttgatccctaaaaggaaaatgatcatttcatccctcaagagtgtaaattgatgaaattttggggatcgaattaggtaaagtgaatttttttttaccgtcaattattcctttacaattcactatagttatatttaaattcaaaatatccattcgaatt

SEQ ID NO: 65275 - DNA, 216 bp, Glycine max
  Clone ID: PAT_MRT3847_29956C.1
gcacagaaaaatttttgtcatgtgctttatggccaattttcaggataaaactggtcctgatctttgcaggttaaggggggaaaaatggttatcaccacttggcttaaattatttaatgggcctttggggagcctaattgccttggcttggctttgaaattagtttaaaccaacccttgggcatttttccaaacccaaaacaaattattatttgcca

SEQ ID NO: 65276 - DNA, 2299 bp, Glycine max
  Clone ID: PAT_MRT3847_29957C.1
gcagactcaatgcagctattataaggcgctcctttgatggaagtattatatttctctacacctatccatttatatggtcatcagaccctagttagttagcaagttgttgtctgttctcgacggtggttttgtgttgtagtcgtttctccacgcaagctcagagcatcaaattattctacaagcattgccgccgtatgcgaaaataaattattgattagcaccttggactgctatgacctcaggtttacgtggtttctgcgcattgtccaggctgcatgagaaaacaggggtgaatttcccccaggttttcgtgcgaggaattgagaaggatgccgcggttatttaagcatgcagcagggaaaggttcttatgttatccttatgcttgcgtttgggactaatgttttttcagagcgggtgtattctgatattttacctgaggcgcacttgtcttgaccgtggaatatttttttaaattcgtcggctccctatctcaccggctgcgacgctccgccaacgggagtccaagccctagatagggctaaaccgaggtattgacaggacgacaaccactgagaccggatcgctgatcagccagccactacaatgcacccgatccaaattccaaaaccaccactgactaccaccatcgaatctcctacatagacttttctagcttctgtacataaccttcgcatatactcggagaactatggcgcctgggacacccacgcggcgcaaaatcacagcgctacgctgtctccggtctaaaacggaggcgcgggttgtgcggagaacgccgtggaggtgatgccgcggggagcagagcttgacgctgaaaggggcgtgcacatgaccgttgggcatacttttgctatcgcccctgtggcgaagctccaccagagtactgcttccctcactgctacttcggctgggacgcccctgcgggacctgtatgaggaaagttgaaaccttgaaccttttgaatcttggacggttttgcagaaattgacgtttcaaatttcaattgaagtagcacgcacgtttcatcatccactcgcaatcgcgatcacccgttgccgatcccgaagcagagaaaacctaagccaacatgagtggcgacgccccaacccaaacccaaacccaagccaccgacaccaaaccagaagaaacccacacccacacccaaaccatcactaccaaaccggaagaatctcattctcaatctcagtctcagcctcagcctcacactgccgattatgctccataccctaaactggaccccaccgatgttgcgccaccactcaacactgaatctcgcgctcccatttccgaagatgctgccactactatgcccaaagactccaatccctatgtcactcctgcgccagttcctgcttcttctaccaagactactttagattccgtgaaagacgttctcgggaaatgggggaagaaagccgccgaggccaccaagaaggccgaggatctcgccggcaacatgtggcagcacttgaaaacgggaccgagttttgcggatgctgctgtggggaggattgctcaggggactaaagtacttgcagaaggagggtatgagaagatctttaggcaaacatttgagacagttccagaggagcagcttctgaaaacttatgcatgctacttgtctacctcggctggacctgtgatgggtgtcttatatttgtcaacggcaaagctggcattttgtagtgataaccctctttcttaccaagtgggtggtgaccagactcaatggagctattataaggtggtcattccattgcaccagctgagagctgtaaacgcatcaacaagcagaaccaaccaatctgaaaagtatatacagattatctctgttgacaaccatgaattttggtttatgggctttgtgcactatgacagcgctgttaaaaatattcaaggagcattgcagcctcattgacacacaagggatttaaaaacaccatgtattgtttataccaaagatgaggtttgtgttgataaattatccatccgtcaaagaaacatttatatgtttatctttacgtggttagttcgctagtctagtttgtggagctgttattattgtattaaaattgaaactcattcagtgttcacatgatatatttgctttaccttgttgctttctgaaagcgagagtcaattgatttgttgtaagttgaattgatatatagacggtggatttacatttaaatctattaaaatatcttttttttttgtaaaaacaaaaaaataattcatagattgattaataaaaa

SEQ ID NO: 65277 - DNA, 714 bp, Glycine max
  Clone ID: PAT_MRT3847_29958C.1
gaattcgagctctttacccggggatcctctagagtcgacctgcagcgacatccagcaagtaggagctaattggataatatcactatgcattttattaattaaatacaaggctgcatgattagctctgatattttaccaaaactctgaagtatggaagaaagaccaaagtgaaaatgatagatgtcatgtgtgtatttgtgaataataataataataataataataataataataataataataataataataataataatctcttcaaaataattataataattatatttgtggatatcatattgccatctacagagcagtagatcagttgtatgctcctacatggacacaaggcaaaggcaatgaatgtcactatatcatgtatatgaattacttgttttgatatgcctcctaataacgcagcatatatatcacttaattatttgtagttaagctagtggcttctgattcatctaatagtattattaaaactatttatgggtttctatgtaaagtcaacttcatcatgggcccaaaataagattatgatttttaaggtgcagacccttgtttttagagacagaaattactagaagttggaaaaaggtttgtacatgtggacttgaaaaggaagtggaagaaacttgaatttgataacttcagaaatatgggaaattataaaaaaggcaaaaaaaaaaatgcatgttgcaatat

SEQ ID NO: 65278 - DNA, 362 bp, Glycine max
  Clone ID: PAT_MRT3847_29959C.1
acgagcccaaggcggcgcctccactcccaacttcctccgccgcctctccgccgcctgcctcggcttcttctaccaccacttcttccccgccgttacccggtttttccgtcgaatgctccacgctctcagggtccacgtgttcacacgattctactcttgacaaccgatacaatcatacatttatactccaataatagcaaatcctttgcttttgtgtttgattgaagagtaggatatgcatatgctcttcttttttaaaaaaaaaaaaaaaaaaaaaaaaaaaaaaaaaaaaaaaaaaaaaaaaaaaaaaaaaaaaaaaaaaaaaaaaaaaaaaaaaaaaaaaaaaataaaaaaaaaaaaaa

SEQ ID NO: 65279 - DNA, 803 bp, Glycine max
  unsure (1)..(803): unsure at all n locations
  Clone ID: PAT_MRT3847_2995C.1
aaacaagttgcaactccagagtacaaagcatacatgcagcaggtgaagagaaatgcgcaggcattagcatctgccttgttgagaagaaattgcagattggggactgatgggaccgacaatcatcttttgctatgggatctaacagcacttggcttaattgacagaaactatgaaaaggtctgtgaggcgcgccgcatcactctcaataaatgtgccatttatggttcgatttctcctggaggagtgagaattggtactcctgcaatgacatctagaggctgtttagaggaagattttgaaaccatagctgattttcttcgtagggcagctcagattaccagcattgtgcaaagagaacatgggaaatcatgcaaagatttcctcaagggtcttcagaataacaaagatatttctgagctcagaaatcgggttgagacattcagttcccagtttgcaatgccaggcttcgatatttgatttgaaagtgtaaaacttctattgcatcattatgatgcgtcttggcttaccatcatttgaattattttagcatagtaacccataggttttttccacttggtcttatacttatcaagttactagtttagcttatgtgtaaattacgaatgaaaatggtagtcaaaccatcatgcggtggctatacaccatacttagcaacacttggcatattgatgaccttgagattgtagaaattgttcaagcttgatacttttttcttcaaccacaacttttgaagaaactccagtaatacaaatgttactatttcatgtaatttgaagnnacca

SEQ ID NO: 65280 - DNA, 416 bp, Glycine max
  Clone ID: PAT_MRT3847_29960C.1
ggcgaacccaagcagcaacaggggatctttgccatccacggttcatgcgaattgcaaaaggacaaaaccataaaagaaaaattcgcaaaagttggtatcttcattcttccttctttaaacgcaacgaagtttctttccactttcaaaattcccaacccctcctttgttcgctctgtacatctgggtcatttaatccccgaatttcttcgcatcttgcctcatattccatccaattctcgctgtttcaacgatcacggtgttgatccttgatgggtttttctcgtcgatcataaacatacccgggtttgtgaaaaaggtttttcctttccacgcgtcgcttcacttgtcatcgatcctgagctccatagcttgaaacgctgtggaactgtgaactttggttgcccttttcttttggt

SEQ ID NO: 65281 - DNA, 385 bp, Glycine max
  Clone ID: PAT_MRT3847_29961C.1
gctctaccggtcttgacgacccaggccgacccacgcgtccgaccacgcgtgcgcacgaatgggtcacattatcaacatggcacaaggcatacaggcccttaagggcaactacaatgtgcataaaccccaacctcctaaatcttcaagtaatcttgattttgcatctaaaaaactgaaaaattcatcaaactctatgttggttctgaaaaaagattcaatttttatgcaaaactcttgctcctttacgatttcacgatcagcggctacagactgtatgcttgacggtgcaagcagacgtccacgatccgcccgcaaatcctcaggccattccagaaccgtacgcattcccggcgacaagtccatctctcaccggcactttatgttc

SEQ ID NO: 65282 - DNA, 560 bp, Glycine max
  Clone ID: PAT_MRT3847_29962C.1
ggaacaaaagaaatttcccccctgaaattcttttaggggggaaaagaacaaaaaaaccctttttggtttgtcaaaaaaaggggggtttaaaattaaaaatttatccccctccaaaaaacccccgggaaaaaaaactttgccccatacgggaaatgacccccccaaatgtcttcccaaaattaacagggggggaaaaaagggccttttttttccccccccccaaaaacaggcccaaaaaacacatttgcaaaatttttgcttttgccgcaaaaaaaaatctgaaaggagcccctgggggaaaaccggggttaaaacagggggggtggccccccctgaccttttagggaatccccccccttttcaccaaatttgaaccccccaaatttttttttgtcacccacaggctggggggcaaacggggaaaccggaccaaggtcccgaaatttcattttgttttcaaacatagggggcaaacgtgggaaaaagggtgcccccaaaaaaaggagggatggaaccttttccccagcccttcaattggaaccccttttatttccccattt

SEQ ID NO: 65283 - DNA, 543 bp, Glycine max
  Clone ID: PAT_MRT3847_29963C.1
cccacgctttcgttttttgattttacttacccaaaacaaatccaactccaaaattggcgaaactcggaaaacaacaacataacaataacctattaacaccaagcgcaagtcttgattaccgcactgtaattggaactcaacccataaaactgaagcattcaaccatccattgtttaaaaggggggcgcagtcacagtcataggtaagggtgaatgtctccctcaatttcacaccatctgtggagaaggagggtgacatttcaagggaccaaaattacagggcagaacgggcaggtgctgatgcaaaaatgggctgtgacacgtgagaaacagggccaggggcagctcctgagctcacaagttcaaccatggcacgaccagggttgggcttgtgcttgttacacagttttggcaaaaataccccgtctccagcagccaagttgaataaaaggccaacaatggtggggcacttttggtaacatgccagaaaagcaaggtcttgacgggggaattgagggctcaaaaaaaggggcttaagatggaa

SEQ ID NO: 65284 - DNA, 407 bp, Glycine max
  unsure (1)..(407): unsure at all n locations
  Clone ID: PAT_MRT3847_29964C.1
gccacatgcaaaacaaaatcaagttttaatcaattaaatacagaatcaatgtttaatactttaatttaaaaactgaatcaaatatccctcatcttttttatttcaccgcctccacaccactgtgtatatttcttggtgttgctttatcggatttctcctcgcgaaattaagtcctcgttgaccaaaaagaggttgtgaatacaagagtacatgcatagtgggaaaggaataacataagaaggggattgggtttagttaagtttagtttggttttggccattcttcttggaagcttcatcgttgttggtgggaccgatgtagcttattctgcactgctcaattctgtctcccatgcatgccactgntttcttttcatgaacggagtggaattaattaatattactaat

SEQ ID NO: 65285 - DNA, 431 bp, Glycine max
  Clone ID: PAT_MRT3847_29965C.1
ctcgagccgaatcggctcgagatgattacacgtataattttaaattaacataaaaaatgatgttttataaggtgatttcaatcattttgtgtctctggtttccttggtccctttaacatcacaaaatcattctttaacattccggtgcgttttcacagcaacttctcttcttcatcatcaccaacaaagtcatcaccaccccccaaaaccacaacaaccccactccaaacctgaattcgaagcatgaaccaccatacccaaaaccacaacaaccccaatcacgacaaagtcatcatcagacccccaaacatccaagctcaaaatactcatcatcaacaaccaaacctgaattcaaagcacgaaccaccatgacacgttctcgaagcagcactacgacaacaataacctcgttgtgtggcatcattgaactt

SEQ ID NO: 65286 - DNA, 936 bp, Glycine max
  Clone ID: PAT_MRT3847_29966C.1
acgaggggttttacaactgcttgaatgagtatcaaggaaagacaacaactcaagtcttgattgccttggataagcatgaggatcgccatacctatgttgttgccttcagaggaacagaagcctttgatgccgatgcatggtgcactgatcttgacatctcatggtatggtattcctggcgttggaagaatgcatggtggttttatgaaagccttagggctaaaacagaatgttggatggcctaaggaaattggagaacaagacgagaatcttccccccttagcgtactatgttatcagggacattctaaggaaaggtttaagtgaaaatgacaaagctaattttatagtgacagggcatagtttgggaggagcacttgcaatcctctttgggacaatcttgtgtttgcacgatgagacattgttgttggagaggttggaaggaatctacacctttggacaaccaagagtaggagatgaagcatatgcaaactatacgagacaaaaatttaaggaacattatataaggtattgtaggtttgtttactgtaatgatcttgttccgaggttgccctacgatgacaaggaaatgatgttcaagcactttgggacatgtcttttctttaacagacgctatgaactcgaggttcttgaagagctatggaataagaactacttctcactctggtgtgtgatacccatggcatacaacgcgattttagaaataataaggagtttcattattgcccgccaaaatggagcttactacagagaaggatggtttctatttgctttcaggacaatagggttaataattcctggggtacctgctcatggtccacaagattactttaattctacccttttaggaaagattgaaaaacacttcaaagtaaagtgatgcgcatgaagatggatgtatcaatgttttaaaagtc

SEQ ID NO: 65287 - DNA, 306 bp, Glycine max
  Clone ID: PAT_MRT3847_29967C.1
ttccaaatattcactttttataataacaatacttctctccctaagagctcattatatactatataatccatccttattaacaatatatccttcctcttcaatttattatcacaatgtatatttcatattataccatagtctttttttcatttttttttcccaacaactctacttaaccttttatatcatcatcaatcacatatttatcataatatcattcaacaatttaatatcactttcatcattcataatctatcaatcaattatatttctttcttcccaacaaatttcattctacaaacacct

SEQ ID NO: 65288 - DNA, 484 bp, Glycine max
  Clone ID: PAT_MRT3847_29968C.1
aaaaaagtatttattatttgtattttatcgaaaaaacttgccacttttaaatatttaaaatcatccccaagcactaatgttaacattttcctaagtgcatatatttcaatgaatacaaatatcaaccataaatttttttgcatcagatggataactctataaaaagttattttgagctgatcaatatgaaaatcttgtgacatgccacaacaaatttggcattcgaaatgctctcccacagactacaaatccaaatagaagtgcatcaaatatatcaccgtatacaggtatttaaatgtttcactttgtaattttacatatcagctggtttaaaaattttaaatatattttcccacagaggcatggctcacagttgtttaagttatcaatggtccaatggttcaacagctgtcttgaagagaaggatataaaccctatcaatggaaaagtacaaaaagccaccaacagaatgtgtaacatagga

SEQ ID NO: 65289 - DNA, 454 bp, Glycine max
  unsure (1)..(454): unsure at all n locations
  Clone ID: PAT_MRT3847_29969C.1
cgccctnnnttttttttttttttttttttttttttttttttttttttttttttttttttttcaaaaacaaaattgggaattttttttcccctttttttttttataaaggggcaaacctgaaaccttaaccggtttttagcacaagggatatggaacctttttttaatttcccggaacccagttttaacttggcctaacgggggaaaagggcccttttttttttttttttgggggggaatttttttttaatggaaccaggcgggctaatggcgtaggaccatatggaaaaagggtggaccttatggcttcaccctttattacacaggggaaaaaaacccttaattttttctcctaaaccccaaaacaagccaaaccatggggctggacaaggaaccttcttttggaaaggatttattggaggcaaattaccccactacccaacaggggcaacttt

SEQ ID NO: 65290 - DNA, 211 bp, Glycine max
  Clone ID: PAT_MRT3847_2996C.1
tccctctgctacccactcatcctaaaaacacaactatctaaaatcaatcttacaaaactctttccaaattctatcaaagtaaacttctaacatttcctgactcataaatatataaatctaatctatctctatacacacacaacttcttctctgaccatttacatatactttctcaaattttttaattcatcaattaatctattaatcactt

SEQ ID NO: 65291 - DNA, 427 bp, Glycine max
  Clone ID: PAT_MRT3847_29970C.1
gtcaaatagcatggaattcaaaagctagatttgaactctattattctccaagctctgtatggatgttcgctgtgcacagatacaaaaagtacaaggtaaaattttatacacaattctactagaggattcttctttcatgtacccccaaatatgcccgattgaattagacaataagcacgttcatagaagctttcaacttgcaggctcgaatttgcaaatacagtcgtatatgtcccctttaaccaatttttcagtcaatctctggtttctcaccattgcaagctttaaagcatcacgcttaaaccgagcatttaagttagtatgaagtgctctccccatcccttgcaaaattatcaaatcagcatcttttgcagaagcactagctcaaactgacctgtcttaagtctatacatggactaccacaccc

SEQ ID NO: 65292 - DNA, 445 bp, Glycine max
  unsure (1)..(445): unsure at all n locations
  Clone ID: PAT_MRT3847_29971C.1
aacattaaaaagcatggaatttaaaagctagatttgaactctattattctccaagctctgtatggatgttcgctgtgcccagatacaaaaagtacaaggtaaaattttatacacaattctcctagaggattcttctttcatgtaccccctttttttcccgaatgaattagacaatgagcacgttcatagaagctttcaacttgcaggctcgtatttgcaaatacagtcgtatatgttccctttaaccaatttttcagccaatttctggtttttcaccattgcaagctttaaagcatcacgcttaaaccgagcatttaagttagtatgaagtgctcttccccatcccttccaaaattatcagatcagcatcttttgcagcagcaattatctcagagctgacctgncttaagtctatacatggactaccacacccgttctcaacaac

SEQ ID NO: 65293 - DNA, 1358 bp, Glycine max
  Clone ID: PAT_MRT3847_29972C.1
actagcaaggcatgaggcaaaaaaaaaggaatacggctgcgagaagacgacagaaggggatcctcagacatcgtaaaaccctagtaaaacccttgcgtgcttggaaatggcgctcaactcaattcttcgcaagtcgggttctttcgcgagggctcttgctgtctcgggtcaattgacgaagaataaccacctgggtcatcgcactttactctccaccgccatcagccagcaccagcaccaggattcgcttgttccaaggttccacttttcttctgtagcttccaagaagaaaccaacctccgatgagaaccttctccggctcatcgaatccgaaatcgaatgcgcccaagagaccgacgatcataacgcagctgaagaggttccgggtaattttccgtttaaaataatcgatagtcccggacaacagacaataacgcttgagagaatgtaccaagacgaggaaattaaggtagaggttcacatgccggatttggtcactggggaagaaaatgacgatgataatgataatgatagtgaaagagttactcagtcgagtattccactttcaatcagtgttcttaagaagggcggaccctatctagagtttaactgtgtgggttaccctgatgagattgttattgacggcttgtcagttaagaatcctgatctcactgaggatcaagttgcttatgagggaccagacttccagggcttggatgagaatctgcagaagtctttccataggtatttagaaatcagaggaatcaagcctagcacaatcaatttcttgcatgagtacatgatcaacaaggacagtaaagagtacttagtgtggttgaacaagctcaagagcttcgttcaagcatgagcctttgaagaaagcatgaatgttactgaatttttgtttaatcacatgctatacattcgaaggaaaagatacaaaggagattttaccatcgtggtttagctgtatctcctattggtcatggagggtagattatgcctgaaaatgtttggttaacttgatggacaaaatttagatacaatagtttaaaattgcttttaccaaaattatactaatttatctattcgccttcccagggatgctttgttaagaaaacttttagctgggattttcgtgtttggtatttggctaaaagtatgtattggatgtatgtcttaaacctctcttattttccattccattttgagtaaattgctgtcttcatttaaaaaaaaaaaaatttccattgagtaaattgctgtctttcttcaaaaaaaaaaaaaaaaaaaaaaaaaaaaaaaaaaaaaaaaaaaaaaaaaaaaaaaaaaaaaaaaaaaaaaaaaaaaaaaaaaaa

SEQ ID NO: 65294 - DNA, 1755 bp, Glycine max
  Clone ID: PAT_MRT3847_29973C.1
caaaaaacaaaaaattaaagtaggcagaggcagcgcagcattagcataacaaaattgaagtaagcctcacatcacagatttcccagtaaacaacgaacccatcatctcaatctgcttcttcactctaatcgaatcgaaagcatagcaaaatgatagagtactgcgagtaaggaaggttccaagcctcatatcacagatttccaaggaaacaacgaacccatctcaatctgcttcttccctataatcgaacccttcaaatcgcagatcaaaatcgaagcttattatacagtgatgatgaccgtgaagcaaggtttcttctctctgcgaggctcactcctcttcttcgcaatcctcacccttctctccttcacctacctttctctcaaatactccaccccaacaccccaggttgccaagctctcggtcgagaacctcaacgatgcgccggtaagcgagaaagaagagaaagaagaggttccggacacgtaccactcgccgcgcgtgttcaagctgaactatgaggaaatggagaagaagttcaaggtttatatatacccagatggggatcctaacacgttctaccagacgccgaggaagctcaccggagagtacgccagcgaaggctatttcttccagaacatcagagagagtcgcttctgcaccgaaaatcccgatgaggcacacctcttcttcattcccatctcgtgtcacaagatgcgtggcaagggcacgagttatgagaatatgacgataattgtacaaaactatgtggagagcttgatatccaaatatccttattggaacagaaccttgggtgctgatcacttctttgtcacttgtcatgatgttggcgtgagggcaacagaaggacttgagtttcttgtgaagaattccattcgagctgtgtgctcccccagctatgatgttggattcattccgcataaagatgttgctctccctcaagtgctacagccatttgctcttcctgctggggggaatgatatagaaaacagaactactcttggattctgggctggtcatcggaactctaaaatcagagttattcttgcacgtgtgtgggaaaatgacacagaacttgatatttcaaacaatagaattagtagggctactgggcatctagtgtaccagaaaagattttacaggagtaagttttgtatatgtcctggtggatcacaggttaatagtgctcggatagcagactctatccattatgggtgtattcctgtgatattgtcaaattactatgaccttcctttcaatgatattcttgactggaacaaatttgccgttgtactcaaggagagtgatgtttaccagcttaaacaaatcctcaaaaatatatcagatgctgagtttgttacacttcataataatttggtaaaggttcagaaacacttccaatggaattcgcccccaatcagatttgatgctttccatttggttatgtatgacctctggttacgccatcacacgatcaaatactgatatttagactcactctagagacccttattttgtatacaaattacagttttagcaactgagagcactgtaaatatagccaattacagcttttttatacagcagctggtttttctatattcttgcaccctgaacgtttctgttaatttgtttgttatttgtttgtggtaaggttctttgttaggttgaaactactacatgaccaagctattgaattaaggcaggtgcaattgttagaattgttcaaaatcc

SEQ ID NO: 65295 - DNA, 345 bp, Glycine max
  Clone ID: PAT_MRT3847_29974C.1
tgagaatctgcagaagtccttccataagtatttagaaatcagaggaatcaagcctagcacaaccaatttcttgcatgagtacatgatcaacaaggacagtaaagagtacttggtatggttgaacaagctcaagagcttcgtgcaagcatgagccttcacgtctcttttatgtgcttactgtcgtcatttgaagaaaagcatgaatgttgctgagtttttgtttaatcacatgctgtacattcgaaggaaaagataccaaggagattttactggtttagctgtagctcctattggttatggaaggtagattatgcctgaaaatgtttggttaatttgatggacaaa

SEQ ID NO: 65296 - DNA, 240 bp, Glycine max
  Clone ID: PAT_MRT3847_29975C.1
cccacgttttttatcacgcgggaaccaaagaggttgccaatgggagggggcaatttttaagggcccggtccgatgatgcatacgcacatgtggacacatgtctgatttaatggcaattggcagatggtgaatccccgaaaggttgcatgtcggatcttaaattaacggaatgtaaaatggggctctccaaactcacagttgtgggaacccgtgtctggactgatctcttgctaaaaattt

SEQ ID NO: 65297 - DNA, 195 bp, Glycine max
  Clone ID: PAT_MRT3847_29976C.1
gacagacgtacacagaatcgttctcatacaacacgtgcacagctgagccgcacactgataactactagggttgcgaaatggacgctggctgtaagatcaagaacggaggccagagaagaaagggctagcctcgctaagaagaagccgttctcaaggtccgtgaacgacggtctacaactacagctcggaagaatt

SEQ ID NO: 65298 - DNA, 717 bp, Glycine max
  Clone ID: PAT_MRT3847_29977C.1
gattggttccctctttgttcttctgctatctccatccccctcgaaggacttggtcaccagacctgtccttttctgcgttcctatcaggaagagaatcaaggaagtgagttggtatcttacaccagacaagactcaactgatggatatactgaagcttagctatgacagcttgcctcaaagattaaagccatgctttctgtattttggaatctatcccgaagactatatataagatcagtgcaagacaattgatccaactatggacagctgaagggttcatatatccacaagaaattggaattcggcagagctagaggatattggaccttaagaaatgcttgtatgctttgctgatggaagacgacaagctcttcaagaaacatctggacaatttcaataggatcatcttagaccttaagagcattgacgtaaagatagatgatgaagatcaagccatcattctattgagctttcttcctaagccatttgagcattttgctgatacaatgttgtatagaaaggctactctatcaatggatgaggtcaaggctgcattgaactcaaaagaaaatcaaggggggaatgactctggcagttaaaggctcttttctactttcttgtgctgatgtcagttttttgtctccttttttctttcatggtcattattgtgctgatgttttaacatcatttacatgtttattgtaaaaggctctttat

SEQ ID NO: 65299 - DNA, 559 bp, Glycine max
  Clone ID: PAT_MRT3847_29978C.1
cttagtcattgtttgctacatcaccatacgaggcacttgcaagtcacgctcttaacactaacactcttcaatctctctctattttttcaatttcatggcattgggtagaaacaagactgtccaattagcattgcttctcctctgtttggatctgggaatagcgcatcagcatcagggtcactccccttcccattctggtttctgtgcttccgatgcccataatcactgcggtgatgaccatcatcatgaccatggccatgcgcatgaccataataaggacaagattgatgctaggtcgaagcttcttcccgaagagttagcggaggaggaggatatgaaactctatggcttcggttttccccatcaccatcaccacgatcacgatatcgaggctgcagaactatccggtttaagcctttggttgaatgcattgggctgttcgtttctggtgagcatggcttctcttgtttgtctgattatcctgcctgtaatttttgttcaagggaaaccatcaaaggctgtagttgattcattggctttatttggagcaagagctatg

SEQ ID NO: 65300 - DNA, 332 bp, Glycine max
  Clone ID: PAT_MRT3847_29979C.1
atattatagatgtaataatataattctctcccagaagaatggaaaacaaatttttttaataaataatcaatcttctgtctagaaagatgtggtttagattaggaaatagcagctaacaaaaaataccagctaacaataatgtcaactaattttactctgtcatctattacaaaatttgacctgattgtcttattttgaccttcaaaggttgttgctttctcctgttagacttggagcttaagcattttcatgggctgctggaaaattagaatcaaatggcttatgattacctacatcaccatcatcatcagatgttcagaaaccggtgttgc

SEQ ID NO: 65301 - DNA, 649 bp, Glycine max
  Clone ID: PAT_MRT3847_2997C.1
gccgcgcttccttcttgttcgcaattcatggctggtaagattgaaaagaaagccccgagggttgaacggaggcatattgaggcgcccaaaaatttgatggaggtagtcttcatattagtcgatgccataacgtcgcttggttacaccgagagacggcaagtctccaacttgcccagagccatcgcttccgctgtgttggacaagggtaagaaaacagttgcaagagaatgcggtgaaagaagtgattgtgtacaactcaagtcccccgaagttataaaggagttatatgagataaagaaattgctgacacggaccatgcttttcagcgagaaaacggtttcttgggtttttatttgctgctggattcgacaaggaggatgtcctcctaagaaagagaacagctcggattctaaggccagttttcacagttatacgtgatatagaatcaaaaagtgtgttggtgtttattcggggaactcgtagcctaaacgacacgctaacagctgcactctgtgctcccgtctccttcgagcataggaggaacaacaacattgtttcaggacatgcacaccgtggtatggttgctgcagcttattggattctagactactgcactcctgtactaaaaaaggctcttgatcaatacccc

SEQ ID NO: 65302 - DNA, 366 bp, Glycine max
  Clone ID: PAT_MRT3847_29980C.1
gaatggggttaaaattctttacccggctttttgttgctgacggtgacgttcaggatgcggggtacatcggcgggggcccgggaaatatttatcttttctgtcaaacaacctgcccactctggaaacggctgagccggaggtagggtccagcggcttgaatagcaccgtacgtcgcgtggtgttctttgcgcccccggcggcccttgaaaatacggaggaccgagtgccttccacgcccggtcgtactaataaccgcatcatgtctccaatgcgaacagcctctgttcgatggaacaatgttagcaagggtagtctacacaatggatccgtaacctcaggaaaaggattggctttgagggctgggca

SEQ ID NO: 65303 - DNA, 456 bp, Glycine max
  Clone ID: PAT_MRT3847_29981C.1
aggcggaaaaagaaatttttataacaagggatagagccattgcacataatacagtaagcgccgaagaaaagccaccctagctaactaataactatactatactaatgtgaccctttataaacttagcctaattatattaataactaataatagttaaactaagacccaatatatcaacttctccgactaagttgcattaaacatagccccatataccggaattgatgacaattaccccagaggtaacctgcgaaaaaaaagaagcagaacctcgacccgtgagagatccatccggaagcgagacgaggccgaggcagtggttataaccgctggagccccaaaacctgatagggcaagcgacatttgaacatggacattccaaaacaatccggctgaggatgcccggtgtttccgccgccggaaactggcgggaaatggccatctccgggggagggg

SEQ ID NO: 65304 - DNA, 400 bp, Glycine max
  Clone ID: PAT_MRT3847_29982C.1
accagctccacctgaaaagtctccagctccaactccctattactacaagtctcctccaccaccatctccatcacctccacccccatactattaccactctccacctccaccatcaccttctcctcctcctccatactattataaatcaccacccccaccttcaccatctcctcctcctccttactattataaaactcctccaccaccttcaccatctcctacaccaccatactattatcactctccacctccaccatcaccttctcctgctcccccatactattataaatcaccaccaccaccttcaccatcctctgctcctccttactattataaatatccgccaccaccttcagcatccgcaccaccaccgtattattatgattccacacctacacct

SEQ ID NO: 65305 - DNA, 332 bp, Glycine max
  Clone ID: PAT_MRT3847_29983C.1
ggatccaaaaacggaccaggaggcgtgtggaaccgatcgactattacatataaggcaggatctttccatgcgatcatatgggagacatatgttgaaggccttctccttaatatcaccgaagtataagttaaaaactattacagtgtttaacaaattttacattagaaaccaaatatgacaatgtatttatggacctacttataccacttaagccaagagataattttccatggaacattgtcatttttttcttttgcagctggaacattgaattactatgtttaaccagcactgatatttttttaggctcctttactgcttttgcagtcaga

SEQ ID NO: 65306 - DNA, 208 bp, Glycine max
  Clone ID: PAT_MRT3847_29984C.1
ggtgcttttattgaacaagtgagatctagttcctgcttgggcaacaaaaggatggctcagagggggggcaaaagaatttccaactctagcattccatgctaacattaacaactctttccgaaaaggcccacttctatcagttctaagacaatccgctcgaccgaaacccgacaagcaaccaatacccgctgcatctgtcggcaaccca

SEQ ID NO: 65307 - DNA, 1353 bp, Glycine max
  unsure (1)..(1353): unsure at all n locations
  Clone ID: PAT_MRT3847_29985C.1
gtcgacccacgcgtccgcagagaaagatgttggtggtggcggcttgactcgagacatctgttggtatgtcaatggcaaagaaacccgtgaaatactatgtggtggacgcgtttgtgagacagcattcaaggggaaccctgcatctgtgtgtttcctgcttgacgagagagatctggtggtgtgtcaatggcaaagaaacccgtgaaatactatgtggtggacgcgtttactgagtcagcattcaaggggaaccctgcatctgtgtgtttcttagaggaagagagagatgaggagtggctgcaagcagtagccgctgaattcaatatctctgagacttgttacttatcacgcatcacccactcgctccatggaatctctaatccccgttttcgtctcagatggtttactcctgttgctgaggttaaactttgtggtcatgccacattagctgctgcgcacgcactattttcatctgatttggtggataccgatgttattgaatttgtgacactatctggagtattaactgccaaaaagattccagccatccatatcaccagtgcctcagactcacaaaacggtgaagctcaggatggattttatattgaattggattttccggttgatcctgttacagaattcagctttgatgagagtacttcactactttctgaggcattgaacggtgcatccataattgatgtaaagaggacacaaattggagatgacttacttgttgaactcacatctgtaaaagctgtctcagaactacagccaaaacttgatgcaatagttagatgtcctggaaggggggtaattgtttcagcgattgctcctccaggctcgggatttgacttctatagtcgattcttctgcccaaaattgggaatcaatgaggatcctgtttgtgggagtgcacattgtgcattggcatcttattggagcaacaagcttgggaagttcgatttgaatgcttatcaggcatcatccagagggggagttctcaatattcatcttgatgaaaagatccagagagtgcttttgcgtgggaaggctgttacggtgatggaaggctgtgttctggtctagtcgggttcttagcattgcaccaaagtatctttcagatgacaagaactgtaattgaaatactcaacttttacaatatttttatcacataaaatggacctctgagcattatgcttttgacatacacaaataagaatgttcaatatagtgcatgacttgttaaaatttgaaaaagtatgtaaacgcataatgtgtttgttaatatctttcgctaatgtaaataacaccataactacattgtgatagtttaatatcaantatcttccg

SEQ ID NO: 65308 - DNA, 263 bp, Glycine max
  Clone ID: PAT_MRT3847_29986C.1
gtgttattttaaaaaaaaacacacacttcacacatcattacgacaattaaaagaggtgtggaaatgatgtgtgaagtgtgtgttattttaaaaaaaaacaagaagtgccgatggtcagagctgaaaaacgcgtgcaatcgacgtcatgagcacaattgtagagaagatactaaccgataaaaaaaaaggggcgaccaccaattagggagctattggacccgggaattatttccggaccggtacttgaaggcgtacaagttttc

SEQ ID NO: 65309 - DNA, 436 bp, Glycine max
  unsure (1)..(436): unsure at all n locations
  Clone ID: PAT_MRT3847_29987C.1
cgtccgaaactttcaactcttttctccttcgcatggaagccaaatccaatgacagccgcactttctctatcaattgaatgggaaatggcgaaatgctttgccctccatcaacttctccctgcatgagttcttggcaacattctaaatctttaagagatagcgaagaaggtgcaaatggttctccaagatgaagcagttattatgcaaagtagagtttgatggttagtggttactctgagggtgagttaataaaaaagtttggtaattgctttctctctctccctgtatctcatactctcggngttatacagagacttttttgtgcttttatgagcagatttggatggtggaacttaattcaccctttaatntttccttataaaagtgcaagacaagttttatgtgcatcatcatcttatatatatatgctctacac

SEQ ID NO: 65310 - DNA, 321 bp, Glycine max
  Clone ID: PAT_MRT3847_29988C.1
gcaccatttgcgtcattttacagccttcctcgtcgacacctttcgaattccgtacttccaatgacattttgtgggaagcctaatggcgggccggaggggcaaaggaaaacccgcacatcttcttgcggggattcgtcgttcggtgttcctacccggagcgttgcgttccccattggctgtcaagcttctagaattggcgggggtaactgcaaaagcggctccatcatatcgcataaccgccatgaacctgtctcgaaactcttgatcgaggatactgttcccggatgtgatgaaagggttctcactatctcaagtttctga

SEQ ID NO: 65311 - DNA, 388 bp, Glycine max
  Clone ID: PAT_MRT3847_29989C.1
cacagtatgcttgtctagtgaggtttttgtaacaactcagggtggtaacttcccccattttttgatgggccatagaagattcatctatgatggccatgccaagacaattatcccagataagcgcaagcttgttgttcttttggatgacgtgagtattagttggagagctttcaaggatcagatggaagacatgctcactgaaagtgaccgcaaaggaatcatggtacctagagttagaaaaataaacagaaaaacttctgtctacacgtaccccttaccagaatgcaggtgcctacaacagtctcttgccaatcaaattgaccgcaatcttgttattctggataattacaacggaacaaaagcttaaatggaagatatgtttcatttg

SEQ ID NO: 65312 - DNA, 303 bp, Glycine max
  Clone ID: PAT_MRT3847_2998C.1
aaaacaagaactctacatacttcgtcaaatttatacctaataatgcgaagtccagcgtgggggatattccacctaagggtcttataatggcatccactttcattgctaactctacttctattcatgatatgttcatgagagttagtgagcattttacagctatgttcaatcacaacgctttcttacactgttacaccggataaagaactgatgaaatgcaattcaccgaaggcccaagtgacatgaacgatcttgtcactgtgtatcatcagtaccaggatgctactgctgactaggactagt

SEQ ID NO: 65313 - DNA, 259 bp, Glycine max
  Clone ID: PAT_MRT3847_29990C.1
acccactcgtccgcccacgcgtccggaatacgacagatagtgtaacaaagagaggtaaatgagactggtatgccggtttccatcttgtttgtgggccgggtttcggcataattgggttcgactcccatagtcccgctgcattccccctgacctctatataaaatgataaaacggactataaacactttgattgttaatggttccattattctcatttctaagggaatttttattgtaactggcttctattccctttata

SEQ ID NO: 65314 - DNA, 435 bp, Glycine max
  unsure (1)..(435): unsure at all n locations
  Clone ID: PAT_MRT3847_29991C.1
tcgagccgcctacgcctattctgaaacgctcgtctgttgtttaagctcttatcttgaagtcttncaggtcgcgctagagagggttgtgtgattgggcggtggattcnnaattgtttgcagattgcgtnncttcaggggatgcctggttatgnngtgggaaaacctatggttatgaactcttgaaattggagctcttgaagggactaatctaattgctagaagaatgcactagttgtactaaaagagttctcattggattagggtnntgccatggaccgtnngtaagaaaagaagaaagggcactatctaggcattattaaaagnnaaatggttttcaagatattccgtgcccatgattttgtatttttgttctggcaagaagaaggacannagcgtttagttgcctttacttggaagaccntnnttatgaggatt

SEQ ID NO: 65315 - DNA, 577 bp, Glycine max
  Clone ID: PAT_MRT3847_29992C.1
ggctcgagatttccccagatgatcgaagctgaacatactgtgcgacttttctcttttgagaaaccaagccaaataaatctgatccacctatccaccttgcttgtatgcactttaggagggttcatatagattcttgaatgtcctatcatctatgttttatgcccaattatttaaaacagttcgaggattagtgtgaaattcagttctaggtattagatttatgaatacaaattcttaggatgattcaagttgggcgttttaatcatatttagttgtgatcgcaatttccaaataaagtttttcattttttagttatactttaaaaaataaacaaatgaaagtaggaagatgtaatgtgtttcattgcaagatggaattaatgattatttccccagtgagatcgatgatgaacaagagtttaatgcttgtgctgcatcacatgtagattgcaagtttggctcttttgttacacgtacttgtcatgacagtatttgtgttcatttgaaagtccataataagctatggttaattgagatttgtttatttaaaacctggaaatatataaaatattgggcgg

SEQ ID NO: 65316 - DNA, 260 bp, Glycine max
  Clone ID: PAT_MRT3847_29993C.1
ccacattccatttgtgctagaaaaacctatccactgatgagtctaactgttccaaacgcctcccacctggtgtgcacagctgcctgggtccattgtcacttgggtgcatcaggttgtcctccgatttttagatgagtttcctgtctagagatgtcctagtctgctcactggctggtggcagtagggtaccctgcgtcctcgaaaagccagagggttcacctagtcagacgaaactccagaacagtgcttgtggagggcct

SEQ ID NO: 65317 - DNA, 319 bp, Glycine max
  unsure (1)..(319): unsure at all n locations
  Clone ID: PAT_MRT3847_29994C.1
ttgacattactgtttcattttgttcacccagggagcggacggggactatcaggccatcttatgaattggactccttcacatagaaacaatggctcttaacggccatgattacacccgttttaccgtctctaactggtcaaggttatccataatcattagctgagctgactgaatgattgtgaacttaaacacatgatcatctgttatcaatccaacctataagttgacgattcagatgcgtttatgtctntaggctgcgacagccgtatccatgcatggataatggctgaattcttgactaaatttgaagctagctggt

SEQ ID NO: 65318 - DNA, 226 bp, Glycine max
  Clone ID: PAT_MRT3847_29995C.1
acgaggcaaaacacatgatcggaacgagcgctatatatagaaggtacatgcttaactcccaaaaaccacccaatatccctgatacaaactctcccttcacaattaacttacctcaatcatccaaactctaaaaacaaattcctcgtgcaaaatgagggcctgtgatttcaaataaaatctaaactcctaaagtacctttcaaataataccacatttccaaaatcac

SEQ ID NO: 65319 - DNA, 187 bp, Glycine max
  Clone ID: PAT_MRT3847_29996C.1
acataacactcgcatctaattagttctccaaattgaaacaaaattttttataggccatcaaaggtcacttacattcatgctcactcttgcatttcggactctagctatatctgagactcttttatctgcttcacatttgtatggaaaatcgtaaaataaaacccacgcattccgcccacgcatccgg

SEQ ID NO: 65320 - DNA, 427 bp, Glycine max
  Clone ID: PAT_MRT3847_29997C.1
attcggctcgaggcttctcttctcaatcaaacatggacgagaagaacggacaacacgaggccgaggccatgcgccgaatcgccttctttggcgtagctatttccaccattgctactctagtcactgttatcagtgtcccaatggtgtacagccatatgcaaaccatccaatctcaaatgcagaatgaagtggatttctgcaaaatgcgctccggaaacatctggcgtgaagtcacccgaactcaagtcctctccaacgtacaagagaaaccccgtgtggctcgtcaagccggcggtggtggatgctgcgggtgtggacatgctcccgatggaccacctggcccacccggcccagatggacaacccggtggtgatggccaacccggtggacccggtaacgatggtgccccaggcaaccctgcaccacc

SEQ ID NO: 65321 - DNA, 321 bp, Glycine max
  Clone ID: PAT_MRT3847_29998C.1
gggggaaaaaaataaaaaaattgctttaaaaaggggggaagaacctacctttggctcctaatttaaaaacgatggcctttttcttatgcctgaaaaaaaagcccccttttttccttttaaaatcccaacctttagcgggccctttaaatttttatatgaagcaaattttttgggaacaaaggtcaaatccctaaattagcctaatttttgacaaacttcttttgccccttgcttttaatgggtattttttttctcaaaaatgggataactgggccccgccaaatacccaaataaaaaaaggtggccaaaccttttttcaaa

SEQ ID NO: 65322 - DNA, 610 bp, Glycine max
  Clone ID: PAT_MRT3847_29999C.1
acgagcaatccgttcgactcagaaccaccaacatggtcactgcacaagacccctgagccgcaagtaacccaagccacaacccttgaaaatcaaaccctgcgaaaaaaccaagccaaaccgccacaggcattcccacaagatagaaacaacctaagttaatgttggcaccaactttaggccttgctgtgcctctcagcactccacaccccggttgtttgaggacatgttcccaaggttgcagaagtcctataaccgggagcacaaatgaagtcaaagttattatctccttgtcttgtgtgaacatgttggcccaaatgtgcctaaccagaatggtgaaaaccaaagcgaagacacctaacatgaagctgcaagagaggccaactatggaagaaaattctgccttcgagggcttttgcgctcctaatgtgttgccaactcttgtggacacgctgaagcttattgacgatgggagaatgtatagcaaggaagttgtgtgaatcaaaatccgcatggaagccactgatgctctatgattgaccaacagcccgcataacataatcatgatctcgtaccaccaccattctatgcacacggaaatgcagcttgagat

SEQ ID NO: 65323 - DNA, 246 bp, Glycine max
  Clone ID: PAT_MRT3847_2999C.1
caagtccaacatggcggtggcgggtgtgtcccaagccatctcatccactaccgccaccagaaccccctcttgcatcgatttccactccaaaaaagcttcacttttgggcctggcacactcttgccagaccaagctctcaatctccgccagaaggagccgcaacatccactgttgctgctgcaccctcaattccgacggcacctctctcagctgggattggacacgatggtgccgccacttctccga

SEQ ID NO: 65324 - DNA, 208 bp, Glycine max
  Clone ID: PAT_MRT3847_299C.1
acacatatctcgtatctcaatttgagttttttgtttaagatagagagagaatcactggtacatttgataaaatttgcaactaagaaatctttaaacaattagttttcagtttcttcataacaacgctttctctttcacttatccttttcaccatcaatatcatacccattcatcgctctattttacctcattaccacatactctcttt

SEQ ID NO: 65325 - DNA, 443 bp, Glycine max
  Clone ID: PAT_MRT3847_29C.1
ccaggcctccaagggtaatctgttgcttcatggaccctgaagacatacttcacagtggtctcacttggataggaattgccctgagcgatcaagggtacagatactcttaagccagctccctcaagcacaaggtcttctgcacagaggcgagtatctcgcctgtccactcgaaaggagaaggagagggtctgaccataactcagcacctgcttgcccaagaactttgcacgagcaatgaggtaccgaggaaagtagctgtctgagatcacggcgatatcttgcctctcacaggaccactcgagagatgcttcacagccatctctctgttacgcacgccacccatgctcatcaatctgtatggtagaggagatagactaaacactgtagccaacagcgtgtggacagacagaagaatgcccacagcagaagcatggcgtgcaacc

SEQ ID NO: 65326 - DNA, 1021 bp, Glycine max
  Clone ID: PAT_MRT3847_2C.1
cttccgttggctttgtcacagtccactgtgcccccaagaaagttccttaacctcaaaccccttatggcaagttgctaacttctcttacttttatctttgaagccaccctcttctaacttctccatttcacaaggaagaagatcagagaacatttagaacaaaaaagagagtttgagaaatggggaggggtaagattgagatcaagaggatagagaactcaagcaacaggcaagttacatactcaaagagaaagaatgggatcctaaagaaggccaaggaaatcactgttctatgtgatgctcaagtttcgcttatcatctttgctgcatctggaaagatgcatgactacatcagcccttctaccacgttgattgacatattggagaggtaccacaagacctcagggaagaggctttgggacgccaagcatgagaacctaaacggcgaaattgagagactcaagaaagagaatgacagcatgcaaattgagctcaggcacttgaagggtgatgatatcaactctcttaactacaaggagctgatggccttagaggatgccttagaaactggtctagtcagtgtccgcgagaaacagatggatgtatacaggatgctcaggagaaacgacaagatcttggaggaggagaacagggaacttaattttctctggcaacaacgtttggcagaggaaggtgcgagagaagtggacaatgggtttgatcaaagcgtaagagattacaattcccatatgccatttgcctttcgtgtgcagcctatgcagccaaatcttcaagaaaggatctaatatataactcttgaattcaaaaacttcatcttggtgctgtcaaaatcgtatgtgtcacaactcttttaagtatatgttggtatctggttgtaagtaataaactaagcaactgacctttggctttaattgtgaagttacaacatcttgtgtctccaaccttattgggtaatcatatgacatcttagtgtgtttgtctgagtataaaaaaaaaaaaaa

SEQ ID NO: 65327 - DNA, 797 bp, Glycine max
  Clone ID: PAT_MRT3847_30000C.1
tgcatgcctgcaggttatgaaccaaattcatatttgaaaatattttgatactgaaattatgtcttctattttgattagttagcattgagaaaaccatcaaatttaactaaataatgctcattgttcttcagcttttatctttaggcaactttttaataatttcttaatagaattcaaaatattcatggttggagagtaaataaggtatttgttttggaaactagagatactacttttccactgcaaaagaagtgatgcgcgtgaatggcacaacaaaatcctttgtagctaatcatatagctgaaactactgctggagttgtgacaataagagcctttgaagaagaagatcgtttctttgagaagaatcttgatctaattgacagcaatgctagtcctttcttccatagttttagctcaaatgagtggctgatccaaagattagaaatagttagtgcagtactgctttcctccgcagcactatgcatggttatgcttccaccagagactttcagctctggtaagactttggtcattgtttcatgtaaaatgccatgcctttgagtattacaatgatcttcatattctattctttttatcctcaaaaagtaacattatctcttttgattcaagtttcttaatttcagtaatattcttttcaggatttcttggcttgtctctctcttatggctttacactaaatgcttccttacaatttttaattcaaagccaatgcagtctagaaaattacataatatctgtagagaggctaaatcaatatatgcatatacctggtga

SEQ ID NO: 65328 - DNA, 433 bp, Glycine max
  Clone ID: PAT_MRT3847_30001C.1
ataaaagggtccatgtcgaccattgagattaatatgaaccaccggaaacgcaattactggaatctgacttaacatggacaactctacgacaaccacgtggctataaattacgacgggcaaatgtcttctatgacaataaatcaccacaggtcccttggcctgtatataaaaatacaaaaactccatagttctccacaagcagtatattccaaaacagagctaatgctgtctaacagggacaatacactggttccaaaaaccggtttattcacacctgttattttttgtgcgagcaacaaactaaatcgcaactagacaagcaacgttgccgtacaccaccttggaaagacttcttgggaactaatacaagcccgccaatgacacgcgagctgtatccccactggtgtgtccaccaacgaacacgcttcacaaa

SEQ ID NO: 65329 - DNA, 647 bp, Glycine max
  Clone ID: PAT_MRT3847_30002C.1
gccctgttcggaaaatacgagctgggccgcgtcctcggctgcggtgccttcgccaaagtccactacgcgcgcaacgtgcaaacggggcagagcgtggccgatggcggtgcggtggaagaaggagtgtggggtggagttggaagggatgaatgggaggtttgggattggggtggaggtttaccggctcacggcggagctcgcggtggtggaggtaaggaagaggggcggcgacgccgtggccgcggcagtgaggggtgtgtgggaggagaggttgaagcctttgttgcttgggggtgcaaccacgtcgtatagtagtgaggaggaacaacaacaacaacatcaagaagaagaagaacaacaagaacttgagtcgcaggttgccggtgactgaagtcaaaggaaatttgaatggcttgggttaaatccaaaagaaagtcaaaatgtacaaaagttaaaagaaaaaatggaaattggtgggggcacggtgtttatgttgcataatagatggatggaagttggaaggtagtgattatgtattattttatgtttttttggtttttgtatattattgaataaaaaaggggtgtattattttgtttttttttgagggattgtgagagaggaagttgctgcggggaattgaattt

SEQ ID NO: 65330 - DNA, 1620 bp, Glycine max
  unsure (1)..(1620): unsure at all n locations
  Clone ID: PAT_MRT3847_30003C.1
taggcaaaatcatgaattgctaagcaaattttagcaaaaacgtatcagaaaacacttggaaacaaaatanaattattctcaattcccaaacataggtacaccgcaatccttgtgagaatgtcaataacacctatacttgaaaatcacacttccttgtgcataattgcttaaatccaagttaaaacccatcataaaccattctttacatttttaacaccaagaagccattgtgcaagatgagacagatatggctctgcctgggagttactactcaagattgatccaagactctgaagctcagtattaaactctttctcaaattttaggacagaatcggtgactgccacatttctggtggttgacttcaggacctgacctgatttccatttggctttattcaagccttttgaatcatcaataggttcaactggattatgtaattcaatagaagatgaaataagccattgagttgctgctgcatattgtaggcacatggatttaagcctctccaccttcttcagcagctcaggtaaaagaagtaaacactctctcaaacatttatcaaggaaaaaatcatgatgttgtataacctcatctatgctttttgctgactgaagtttgttatacatcagatgccaattgggttcaataacctcaaatgtcagatagtgcaaaaggctattaataaatttaagcatgctcctgcaaagaagagatgatctggagatagcagttccatgtgtattgagagcacgaactccttgatgtacttgccatgctccacataactgacggtcaacatgtttgcagtggaaaagaaatcgaaaaagtaattggtactttataagggctttgcttgataacactatagacagtggccagtgaaccttgtaactaagtgaaaatgtttcaaggccagtgatgctaacaggctcctccagatcattgtcaccagaatttctcagagtaacttcaagatcattaaatgtgcccaaccttctaagcagagaagatctttccacaacacaggttaagccttcatgaaaaggatctgctgcagctgctgtagtacgcaatgcaaggtctagaagagactgcagcttctcaactgagacttcatcaggctttttagccagttcatctcgtgcaatatccataaaatgtactaagaaatcaccctgatcaagaagaaggtagtgttttatagaacgcagccttcccgttagatcatacttttccataatgagattcaagagttcaccgcttgcaaagttataagcagccttaatacattcaagataatgatgatttgagccaaaactcattagttttgaattttctgatggagggacccgaacattatgcccacattctctcatgacatttagatattttcctgttgtcaaaattgtccctgcaatatttgcaaggaaactaggaattccatctttgaggctgtatcgttgttgccaatacatagcttcataatcttgagtgacattctccttttgaagagatttgtcctgggtgatgtgtaagtcaccatagggactatctatggtaccttcgtaaacccattcttacaattgttcaattccaatatgaacaagaactcgagcc

SEQ ID NO: 65331 - DNA, 1830 bp, Glycine max
  Clone ID: PAT_MRT3847_30004C.1
aaaaaactcaaaatccctcccattttttgttcccccaaaaaaacgcagcaacaccaacacctccaccacccatttgcaacgactcaccaaaatcgaattttgcaatcaacccatttcaattcacccttccaatcgttcaacgcacccttcaatttcgcttccgagtgattcctccccccaaattcagaattaaggttcggtctctggtggcgcaaccatgccggagatcggccaggcggcggtggctgcggcggcggatgacaccgccctgttcggaaaatacgagctgggccgcatcctcggctgcggcgccttcgccaaagtccactacgcgcgcaacgtgcaaacggggcagagcgtggccgtgaaaatcatcaacaagaaaaaactcgccggaactggcctcgtcggaaacgtgaagcgcgaaatcacgatcatgagcaagctccaccacccccacatagtgcgcctccacgaggtcctcgccaccaagaccaaaatcttcttcattatggacttcgtacgcggcggcgagctgttcgggaaaatctcaaagggccgattcgccgaggatctcagccgcaaatactttcatcaactgatctccgccgtggggtactgccactcgcgcggcgtattccaccgcgacctcaagccggagaatctcctcctcgacgagaacggcgatttgagggtctcggatttcgggttgagtgcggttcgggatcagatccgacccgatggcttgctccacacgctttgcggaacccctgcttacgtggcaccagagattttaggcaaaaaaggttatgatggtgccaaggttgatgtgtggtcatgcggcgtcgttttgttcgtgctcgccgcaggttacttaccattcaacgacccgaatttgatggtaatgtataggaaaatctacaaaggcgagttccggtgtccgcggtggatgtcgccggagctccggcgattcatatcgaagttgctcgacacgaacccagaaacgaggatcacggtggatggcatgacgcgggacccgtggttcaaaaaagggtataaagaattgaaatttcacgaagaggattaccatgcatccgggtcgggttcgtttttcgggccgaaggatgagagggtggtgaatttgaacgcttttgatttgatatctttttcttcggggttggatttgtccgggatgtttgggggggagtggggggagaggttggtgacgcgggagccgccggagagggttttggaggcggcggaggaggcgggggcggcggcggggatggcggtgaggtggaagaaggagtgtggggtggagttggaaggatttaatgggaggtttgggattggggtggaggtttaccggctcacggcggagctcgcggtggtggaggtaaggaagaggggaggcgacgccgcggtgaggggtgtgtgggaggagaggttgaagccattgttgcttggtggtgcaaccacgtcgtatagtaatagtagtgaggatgaacaacaacatcaagaagaagaacaacaacatcaagaagaaaaacaggaacaagaacctgagtcgaaggttgcctgtgaatgaagtcaaaggaaatttgaattgcttgggttaaatccaaaagaaattcaaaatgtacaaaagttaaaaagaaaaggaaaaaaaaatgaaaattggcggggaatggtgtttgtgttgcataatagaaggatttggaaagaggagatggatggaggttggaaggtagtgattatatattattttatgtttttttggttttgtatattattgaataaaaaaaaggagtgtattattatttttaaaaa

SEQ ID NO: 65332 - DNA, 215 bp, Glycine max
  Clone ID: PAT_MRT3847_30005C.1
cccaataataaagatcattaatttggagccattccattaagactttcggatggggatcaaaactggcgatgtggtttgcctagatccccccctgcgctatatgccgagagcgacatatactattgagtctatgttgcaaaatgcatcgcagagatgagactttggcttgggactattatcaaattccaatcgtgactgatgtcaaatcttatatt

SEQ ID NO: 65333 - DNA, 226 bp, Glycine max
  Clone ID: PAT_MRT3847_30006C.1
cacagttgcaaggccaactgatgcaatgagagctgctgtggcaagagctaaaagtgatgacgatgttctgggctgtgatccaagtgctgtgggattataaacagataggtggataaggatgggcagagaagctgctcttttggtgccatctgacactatgggaaacgaagaatctgtacactatggtagtcgaggctagggaagggagctgttgcttgagaacaat

SEQ ID NO: 65334 - DNA, 375 bp, Glycine max
  Clone ID: PAT_MRT3847_30007C.1
ctcgagccgaaaaaaaaaaaaaaattttaaaaaaaaaaaaacgggcaaaaaaaaaggcgggggttggaaaaacaaaaaaaaaacaacaccaaaaaaccaaaaaacaaaaaaaaaaaacaagggggccccccccccctagtgagcccgcccccccggaaataaattccggcccgggccctgcaggcgtcccacctttccctatagggggccgtattaaaccctgccgaaaacacggccatagctgttccctggggaaaattgttatcccctcacaattccccccaacaaacaaccccgaaacataaagtggaaaacctggggggcctaatgagggacctaacccccattaattgcctggccctcaccccccccttt

SEQ ID NO: 65335 - DNA, 261 bp, Glycine max
  Clone ID: PAT_MRT3847_30008C.1
caaactctcccaacaacaacaaaaataactaaccactttcttcttcacttcttctcagttctcacactcataaagcttattcttattattactactcgcaccctttcgttttgttttgttctcatgggttgaacttgaccccccgctgctgccactgcgacgccgtttctttgttaaatggagtgggacagcaattccgatctcagcgacgacgaggccgtttcgtttatgttaaacgacgactatgatgacgccgtcccc

SEQ ID NO: 65336 - DNA, 429 bp, Glycine max
  unsure (1)..(429): unsure at all n locations
  Clone ID: PAT_MRT3847_30009C.1
tcgaggctcgatgccgtgtcagagtacccttatcagttagattttagaggaccttcatactttaaatctttgtnaatttgggtgagtgtgacgttggatgaatcagctcatgtccatggtgttgtagtgattcgaacccattatacnatatatatatggnngtgatgtaaggaatacaaatgtgggctgtcttcttaggactatagatctattgatagtgtctaccatgtaacatttcctattagggtggcttgttccaatatgtctctacaacaatgagatgatattatgcgaaacttatgaaagaaatggattggtgaaatttaataacgaggaacagcttctagaacatcaatcctattattatgatgatgatgatgatgaaaatgtatccggggtgaccatacagatgaaacctactattcttgg

SEQ ID NO: 65337 - DNA, 403 bp, Glycine max
  Clone ID: PAT_MRT3847_3000C.1
cggttcggaatgtccgggtcgacccacgcgttcgatctctgtctccactgttgactttctcaaacctctacctcttaacaaatacctaattatggagattatattaaacctgaattgcttcaagcttagctattgttcccttatcccaaaccatcttccaagcaatgttatgtccttagctgcactatcttattctgaacctctaccacccaccatgtctctgcattaccatctacttgtgattatacatcacggagctcaacacattcaacatcaacaacactgctacaacacatgacaccataaccactaattgctgcaccctcatatcttttgcacgcataagcctcatactcaccacttactcagccgcattcaattcacagctcactaacgttgactt

SEQ ID NO: 65338 - DNA, 577 bp, Glycine max
  Clone ID: PAT_MRT3847_30010C.1
cccggcggaccggccggaattctgggctgcccacgcgttcttcgttcattatattcttctgacggggttttttaaagtacgcgtccgtctctatatttcaaaaactcaaaccctaaaatgaacgacttgttctccggctccttctcccgcaccaatgaccaagtctcgccggaccaccaccatgtgatcgagatggcggccaccgcatcgccaacggccgagggaagcgtgaatctcgaaaagttctttcaagaagttgagcaggtaaaagaggagctgaaggagctagagcgtctccatgaaaatctgcgtgggtcccacgagaaaagcaagatccttcacagcgccaaagctgtgaaggaacttcgcttacgcatggacagtgacgtgacacttgctctaaagaatgcaaagctcgttaaggttcggcttgaggcactggaccggtccaaccagaccagtcaaagcttgcctggttcgggacctggttcgtcctcagaccggaccagaacgtccgttgtgagcggactgaggaagaagctgaaggactcgatggacagcttcaacagcctcagac

SEQ ID NO: 65339 - DNA, 471 bp, Glycine max
  Clone ID: PAT_MRT3847_30011C.1
tcggtaatccatttctgacacacacacccaaaattacggagtattttaggacaaaagtgggtgtggacgatgaacaatcatccaatcttccgatctcactagaccaaacggatctgtcgattgatccgaaaaacagaacagcgcccatagcccttacgcccaccaacgaccaccatcataatcccccacaaatccggaggattcaccaaccttatccgtcatttcaccgcaacacaattctcaatccagttcaacgccaagattaagaactcatacaacggactaccagtgaatgcaccaaacgacaatgcgtcagagacgttccccgcctccttatacagacggcttctccttgcccataaaagtcagccccctcgcttacaagaaccgccaacagccccggaaatactaacctgacggtacacatagccccccgcctagatacaacgcatgcctcgacgcctcataggt

SEQ ID NO: 65340 - DNA, 1137 bp, Glycine max
  Clone ID: PAT_MRT3847_30012C.1
atctcgtgtgtttagtatcataaaaatattggagacctaggcgaattctagcatgcgaaagtgaaacttcttttgcacgtacgaaaataaatattaaccgtttgatactctttaattttcatcgcatgactcaaaattaatcactttttagcttttcttttttcactaaaaaccatagttattctagataataattaacatcagccctcactccttcgcacaccaaacccttccttcctatctctcactaatctaatggaatccgcagcacctgtcgcgcataggcctggtgggcctggcggtgatgggccaaaacctagccctaaacatcgcagaaaagggcgatcgcgatctccacgtacaaccgcgcggcctccaaagtggaccccaccctagtatcgtgccaatacacccctcgcgacttccctcaccgccctccaccgccctaggatctcgtcatcatcccttcagcgccgccccggcggcccccgccgacccaacccttccccgccactctcccaccacctccgaccccggcgactgcatcatgcgacggcggcaacgaccgtggtacgagaaaagaccgagcgcgagaacgccccgccctccctgaccatcgccgcctctaccggggcatgcgcctctcggcaggcgcagacccgcgcgcgccgcgggcccccccatgcgccctccaattcccaccaggtcctccccaacattgccgaccacgtcgaggaagtacccctgcgtcacgaacatcgacgagggaggcttctggaaactgggctgccatggttggttttagaggttgctttatcggaggaaggttgtgcgagggggaggggaaaggttgtggactggtggtgccggatgaagaagaaggtaacgtgaggggggagggggagatggaaggtcacgctagggggagatggagggggaggcgaagggttgcgggtgctggaagggggaaggaaggttgctggtgtcggaagggagggggaaggccaccggtgccgggagggaagggggagaagggaggtcttgtgagggggagaaggaaggggaaaagtgagaaaaaatgaacagtctaggagggaggaagaggaaaaagatgaaaatgagtggggagctcgagcc

SEQ ID NO: 65341 - DNA, 727 bp, Glycine max
  Clone ID: PAT_MRT3847_30013C.1
gaggaaaacgaagattcgaattaataattaaaaatgtcataaaaacaaaagaaaaaaaatgaatttgtgtcaacctgtatagcctgtgataagctgaaatgcaaagagctaacaaaatgcccttaaattagacaggttgtaatttccgggtgtagcttgaatttttaagggcgcggggccctttaattaaacccatggcagcatagtccaacccaaaaatttattggcccacagcaagccccaaatttagcccataacttcagaggtttcagcacatcctgctttgaatatacctctcccactgactcgtttgttcttaatccaaatagttgacatatataactcttttcagctttccttggatcattaattgtcaaggttttaggagcttaaacacacctagttcccctttttatggttatttatgcaatctttgtttaatcctgtctccatcacttagtgcttccccaaaatcagagaatttggaccagagcttgaagacttaggtttaggaagaatgtgacttaaaccatcggtttccattgacggcaaaatcctgaggggcacacaaggagagtgaagtagaaaaactcaagataaggccatgggattctaggaaggcatcgaacttgaggaagaaaaatgttgtattggagaacatgttcttggatggtacttttgctacttgctcccatgaagatgcgctttgagcagtcatcgccatttt

SEQ ID NO: 65342 - DNA, 959 bp, Glycine max
  unsure (1)..(959): unsure at all n locations
  Clone ID: PAT_MRT3847_30014C.1
cccacgcgtccgcccacgcgtccgtttcttttgcacgttttctagaagtttttgactcactttggtggtgttgatttcatggccacctcttagtcccagcatcgctgcgtttttgtggaattttgcaatttggattaatgggtttcgacatttgcgttctgaatggttcgtgcactcacgaatacgtgaccacttgcagctaaaacattgacctcctgtgatcatttgaaggaatgtgtagtcgtgaaatcaattgtgttgctgtttgctggaaagtggtcactctgagttttagatgctattgtctttgctgtgaagttattttatttggtcctgattgtatttcaggaaactcaaggtcaccttccccatgcttgaaagttgaggatcttgcccgtttgcaatttcagacaactcctatctatattgatgtagatgatgggagaaccaaggtcacaaatgaaagattgcttcagggttatcttgtggttccctgtgccaagcgatttattgttctctattcctttttgaagagacaccagtcaaaaaaagtgatggttgttttctcttcatgcaactcactcaaatttatttttttctcttcgtgttattggttgctgttgcgctagattcaattgtttcaagtttgtgctttcgcccctgctgtgctggattcaattgtcacatttggattcgattgtttcaacccctttcagatttgcaagacacatcatgtagttatttgtagttctatgttcctcagtttttaaaatacaccagtgacagggcatcctgggaaacaaacaagcatgcctccaatctattcactgtctaggaaaactccaatgaaaaaattcttcattctctgtttgatatactctctcttcaatgcttgtgttttgaacacttcatacttacttccattactatgnattggtgcatagaaagcctctaaatat

SEQ ID NO: 65343 - DNA, 518 bp, Glycine max
  Clone ID: PAT_MRT3847_30015C.1
cttataccaaacatgcccttctcctcctctcgccgtggaacatcctgggcctcctcgatcctcccctcttcgaacccacccaaatcaaaggcacccagaaagggtagaaaacgcgcgttggtgaaagacttcatcttttccaacttcttcgccattggcctcgtcctctccctttccctcttcctcctcatcctcctccgattcggggtccccaagcccctctacacgcactttcgtaccaccacgcgctcctcacgcgcccgccacacccgaaagcccctccctgccggtaccaagccgagcacactcgccggcgccgccgtggacgtcaccaccaaggcgctgtatgacaagattgagtttttggacgtggacggcggaccgtggaagcaggggtggagcgtgacctacaggggcaacgagtgggactcggagagcttgaggtgttccgggtgcacactcgcatacgatcctgggtggaagctcactgtggatgagtactatgatagacaatcgag

SEQ ID NO: 65344 - DNA, 416 bp, Glycine max
  Clone ID: PAT_MRT3847_30016C.1
cgacgataggggcattcgcgaatgtggaaccagctgtggctttgacacttataaatgttctcgagcacacattacagcgactaccaactgtcatctcagagaatattctctatacatgaaggcgtcgtcttgatgtatggacttaactacatattgatagcacagaccatgtaactgagcaacgcgcataatgtatggaactatattcatcatatcgctcaggagaaatgtattgttcgtgaagtccgttttacaattcggagagtcaatatacctgtcttgatgcccttgatatatctcgtcatcacatacatgggcatagctgacatgcttttccatagcaatctaggacggagtgctaaatcatactatcatttacgttagtttataggacatgataccttactggggacata

SEQ ID NO: 65345 - DNA, 465 bp, Glycine max
  Clone ID: PAT_MRT3847_30017C.1
aaacccccaaaagcatttttttttaaaaaaagaaaaattttttggttttttttttacaagggggggggggacttaaaataacccaaattttgaacaaaattttgggttttgggcccctcctggacaattaagttagtttttacccagtttttttccggcccctttgtttatttgggggaaaaaaggggggcccaacccaatgggttaaggggggaagttgacaaaaagttttaaaacctggaacttttaaaaaatccccaatttccctaaactttttttacataaaaaataggccacaattgggagcatttaaaaaattttcagggctcaagttaattaaaagggttttttttcccgaaaagtattttttttttttggggggtgtttttttaaagtacccatttgtttttagggggtttcattttttaaaaaccaactttccaatttgggggagggaaagccttt

SEQ ID NO: 65346 - DNA, 172 bp, Glycine max
  Clone ID: PAT_MRT3847_30018C.1
tgcctttgttctcgagaacgatcaatgctgtgtagtggctgaaaatgaataattgagagccaatgaagcgaaagatagccgaacattcggttcagttcagatgacagacattgtatgcagatgcatatctagcctgcgaagtgctgtagaccatggtcgcgtacaaaacact

SEQ ID NO: 65347 - DNA, 328 bp, Glycine max
  Clone ID: PAT_MRT3847_30019C.1
actggagacattcacattgcatagcaatttcgatattagactacaccttctgaacgagagatagcatagattgaatttactggtgatctaacacggcaaagggctataattgccggacatgatagcgtatcgaatgacgacttacacatacaggcttgggacccactaagaggcagttgagcggagtggggagaaatgaccatatccatttctgtattaccctccaagctagagacattatgatcgctcagaataagcattcctgtcaaaagaacacgatgtttccgtacagactattcacagacactattctataggcctatatact

SEQ ID NO: 65348 - DNA, 331 bp, Glycine max
  Clone ID: PAT_MRT3847_3001C.1
ttcgtctctttttttttttttttttttctcaaaattaaaaatatacaatgagtgaattaatgccgcagcaggagttgtcacccaagtctcatgatcttatgcttaaacgaaatcatgcatagagctttgcaagggccaccttaagtgagtctttctaaaaggaaaagaaaggtggttcatgaaacacatatcgagctgacggctccattgttgtgcaccacattatacaatcttgggtcacatgaggagcatttttttgataatcttggccatgcgcggggatgaaagccccgttggttccactcactgacaatgcgatcacgagagatat

SEQ ID NO: 65349 - DNA, 249 bp, Glycine max
  Clone ID: PAT_MRT3847_30020C.1
aaatctcgtgcggttgcaggaaaccccaccggggggggaagggttaaatttcctttctatgggtttggggaattaacctatggatctttgacaacctcaccccctcatcaatgcaattcatttctttgccctttaaaaacaaaatccgcgacatgacttttaacatcccttccttaacttcccaccctttccattttccgttgctttgctgggcgctgacatgcctttaatttaaatggaaaatggggg

SEQ ID NO: 65350 - DNA, 471 bp, Glycine max
  Clone ID: PAT_MRT3847_30021C.1
ttacggctgcgagaagacgacagaagggggggtacactcaccacacactacacactagtttgtgtttttcgcgccactcagttattcatttagaaagctactgctgagttcacaagtttctcaagcttgatggggacacaaaagtctaatatgtttgatgcacctttcaaatacatggtgcctgaagataaggaaattcccgacagacctttgccatcacattggactccttctatgcaggcatataacacttctgggtctactccaactccctttttaaatcaacaggcagctggttctcacatgcctctctacatgtgggtaaatcaggtaaacaacacactacttcaatccgatgctttgcatgatccaaggatgctctccagtaaacccacagtagctggggatgctgtactggctttttcagaaatagtacacaaggacttttttttttcaaaacctgaattcaat

SEQ ID NO: 65351 - DNA, 394 bp, Glycine max
  Clone ID: PAT_MRT3847_30022C.1
ttatttttttttttttttttggaacaaacaaggtatcttggaatgtttttatcaaatgcgtgatttattggtgcgagcaacacccatctaatatacatttaatcacaccgaaacaacaaaccctagagagtatgtgaaacagaaacttatacattatctggctcacatgagttggaacccgcgtcacactccctttcttttattttaatgataacgatgacctgcgttaccagctgcgttgcctcattctcccgcggtagaaattggcatagctccccgctcctttataactcgttggactcgcagttggtggatcggctgatcttgtaaggcacgcttacattgtaacggtcggtgagtgccttatcgtaatcctttttgatgccataatcat

SEQ ID NO: 65352 - DNA, 642 bp, Glycine max
  unsure (1)..(642): unsure at all n locations
  Clone ID: PAT_MRT3847_30023C.1
gnacacagaatnncaaatannatnnaatgaaatcgaaaatgtacaatcgcatctaaatgtgtgaaagaataaaatataaaagtccattaagagtggattagtgctgagagcttcatataatatgcaagaaatgtcaggtataaaggtgcatccatttctgaatctatgctagagtgccagtgcagcattttcagtgattcccagttccgaaaaaagtgatttcaagccagattcttccaacaggctgaaagcagtgaatccatagtaggagtggtataggtctggatactccccagggaatttgctgaaaccaccatacttatattgacaagaaagcaaaaatccacgtagagccttattgtcaacaaatttgaagccccccaaaatccttaaaacggctccaatccaaaatgcataacatgtatcgctagatttatttggtctaccttgaaaacccccatcagttccctgcctctgcaagatccagtccagcagcaatggcgcatctatcaaagaagatgaagcacaacttgagagaatattatcttcaatgaatcccattaatcggagagatgccatagcacaataagttgcacctcctgtgacacatgcgattctgcaccaggaactaatccaaagcca

SEQ ID NO: 65353 - DNA, 220 bp, Glycine max
  unsure (1)..(220): unsure at all n locations
  Clone ID: PAT_MRT3847_30024C.1
ctccttnttnaaaaattaaaaaaaaaaaaaaaaggggccgttctaaaagatccaagcttacctaccccttcattccaacttataacttttttataatgtcacccaaattcaaatcaattgcccgcggtttacaacctccttacctggaaaacccctgccttacccaacttaatcccccttcaacaaattccccttttcccaacttgccttataaccaaaa

SEQ ID NO: 65354 - DNA, 320 bp, Glycine max
  Clone ID: PAT_MRT3847_30025C.1
attaaagagaaagggcaacgagatccatggcgggggtttttggggcgcgcgacataatattgcatgaaaaggattagttctttcaggttatccaaaatcacatccttaacggactctttgcacttatgaagctctaaaaatcattctggagttggcgacaacattaaatatttggcctcgtgctcatatgacaagctctcttttggcctagagaaccgtccgcctgtgaccagaatgatttccagacactgcggctctcatgtgttacccgtgggtcaaataaagctttaacaccttcccgagcaaatttattctcgcct

SEQ ID NO: 65355 - DNA, 282 bp, Glycine max
  Clone ID: PAT_MRT3847_30026C.1
taagcaaaagccagaagaagatgaagaacccctccccatgttaaaagacgggggcgcatgcgtagaagaagaataagaagaagaataagatgaacaataagaggaagaagaagaagtgtgtgaccatttggaaggagaaaactaaggagaaagagaatctgaatattggtgtgtattctgtgactaccggtacagatcgtgcggtttcttgttctaacactgcgccttcctttaccgcttttgttttcacacgatcaaaacaactcttagcttggattttta

SEQ ID NO: 65356 - DNA, 1475 bp, Glycine max
  Clone ID: PAT_MRT3847_30027C.1
ggggaccgaatttcataactgagtgctttaggggaagaagaagcggaaacacagtgtcagaatctgagttctttgaactcaaaccctaaaaaaaacgatgtatcgttttttgtcttccattcgccatggctgtggatcttccctcacatcacttctcgcgccgaaacccacccttccattcgacgccgccctacgatctcgccgtttacctcaaaacgacggacatgttagaggattttcaagctcgaattttgattggaggaatcttattgtgaacgagaatgtgaatgcagatgattctatgcaggatgcagagaacagaaactccgaaaagtggaataatatgaggctgaatatgaatgcagatgcaaaagctcctccaaattttgtgcagaatagagggaacataaactccggctgctagaagaatgcgacagaagggagctcggtgccgctgctggtcctttgaaagacctgaaatcagggcaaaagctttctaggtatgctgccgaggcaactgcggaagttgttggccgaaaggctaggggcttgggattgaaatctgttgtcatgaaagtgaatggatttactcattttaggagaaaaaggaatgcaataatgagctggaaggagggctttactgctggttctagaggggatagaaatccaattgtatacattgaagataccacaagaaaaccccataatggctgcagactcccaaagaaacgacgaatttaggtgttatgatactgaggtggttgaagaaagcattatttaacttggatgaagaaacaatttaggtgctttttttaggcacatgatgatatttttgtttagcacatttcattatgattctagttgttacttgtagactgcgttttctgcctcttgtttacagtttgtacaattttaaagattcaataaccagaattttctgtaacagtatgtactgaatcactattctcaactaaatggggctcatacttgttcttgtgttaaaaaaaaaaaaaaaaaaaaaaaaaaaaaaaaaaaaaaaaaaaaaaaaaaaaaaaaaaaaaaaaaaaaaaaaaaaaaaaaaaaaaaaaaaaaaaaaaaaaaaaaaaaaaaaaaaaaaataaaaaaaaaaaaaaaaaaaaaaaaaaaaaaaaaaaagaaccaaaaaaaaaaaaaaaaaaaaaaaaaaaaaaaaaggggggcccccttttaaaaacccatttttaaacacccccggtttcggaagctttttttttttttaaaggggccccaaaaaaaaacccttcggaccggttttaaaaactgaagggggaaaaaaacccgcgctgaaccaaaaaataaagcgcggaaaaaaacccccttttcgcgaagggggaaaaaaaaaaaagagcccccccaaacgccccttccaaaaattggcccaccttatttggaaaagagaacccccccttttacggccaataaaggggggggggggg

SEQ ID NO: 65357 - DNA, 1051 bp, Glycine max
  Clone ID: PAT_MRT3847_30028C.1
ccacgcgtccgcctagaacaactctttcagtccactgcgtttcagaagaagaaaaagattaaaatttgacaatgtattttagtaccctctttcgtgattaagcagaagaaaccaaatgggggttggtggtaatttctgggacctgctaaagccctatgcgcgcaaagagggttttgatttcttgaggaacaagcgagttgcagtggacctttcgttctggattgttcagcacgagaatgccatcaaggccacgcatgtcagaaacccccatctaaggcttaccttcttccgcaccatcaatcttttctccaagtttggagcacttccggtgttcattgttgatgggactccatcaccgttaaaatcacgggccaggattgtgagatatttccggtcttctggcattgaattggctagcttgccggtgcctgaagaaggtgtttcagctgagaggaaccacatgttttcaagtcatgttcaaaaatgtgtggaactggttgaactacttggaatgcctgtgctaaaggctaaaggagaggctgaatcactctgtgctcaattaaatagtgaaggtcatgtagatgcttgcatcacagccgacagtgatgcattcctctttggggccaactgcattataaaatgtttctgtcccaacttcaaagaaccatttgaatgctacaatatgtctgatattgaagctggacttggattgaagaggaaacacttaatagctatctctcttttggttggaaatgatcatgatataaagggtgttcgagggattgggcttgatactgcacttcgttttgttaaggcttttagtgaagatgatatattgaatagattacatgagatcggcaaagggaatacttcacaaattcccatctgcattaaagttgaggacgatatggatatggatgggaactccccaaatagaaaactatctcactgttcactctgtgggcatccaggcagcaaaaaagatcatatgaaatttccctgtgaatattgtgtcacaaaggatgatgaaggttgccagagaaaaccagag

SEQ ID NO: 65358 - DNA, 205 bp, Glycine max
  Clone ID: PAT_MRT3847_30029C.1
caatggtgcatgatagttcagtgtctacaataccaagtgattttgtcaatggtggcacattgacaaccattaacaattaggggcatatatgggctaaccccgggaattaagggttcgggcctttgggaccattcccagtcattttacagaaactgtttggaatcaatggcacagtgagacaccatgaatttgattcagcagcaga

SEQ ID NO: 65359 - DNA, 437 bp, Glycine max
  Clone ID: PAT_MRT3847_3002C.1
atgaattagagagagtgagaggaggaagaagaagaagaagattccagaatccagagtgagaaacattaggcttatcagaggagacatgcccgagttgaaccgacaattctattactactctttgcttctttcttcatgcctcatcaaatcccaaaggtattctctctctctctctctctctctctcatttattctgcattatcctgtctccagtagcaactcctaaccttaccgtgggatcctattggtgagttttaagattgttgtttactttgtgcatgtggagtttgagctcaccttatgttcttcttaagttcaccactcactaatatatttggaaactagttctgggctacacttgttgctgttactattgttctgtttatggagttataaggttgacttggtggcaaaagggtaaaaggagaagggaggga

SEQ ID NO: 65360 - DNA, 235 bp, Glycine max
  Clone ID: PAT_MRT3847_30030C.1
cgcgtgcgtccacgcgtccgcccacgcgtccgtacaggtgttagaagactacagaagggggagagtggaaacaaaaagaaaaaaaacatcgtaagcgccttgacagcaggtttgagcggcttcttgtgtagccgactagacacagtggataccttaattcttcatgcatatggcaatgaaagaaggtgtaaccctcaggttgcgtgtctaaaccacgtgacttatgttgtcgtaa

SEQ ID NO: 65361 - DNA, 552 bp, Glycine max
  Clone ID: PAT_MRT3847_30031C.1
cccacgcgtccgacggctgcgagaagacgacagaagggtacggctgcgagaagacgacagaagggtacggctgcgagaagacgacagaagggtacggctgcgagaagacgacagaagggtacggctgcgagaagacgacagaaggggacccaactctctaaacaacacattaacctttctcatacaagatgacctaacgttattcaagacataaataatttctacggttccaaaatggacgctggcggaaagatcaagaacggcccctgaagaagaaacggcgttacgtcctaagaagaagccaggtttaaggtcctgtataggcggtctaaattacccgactggagaattggtcactatttgaagaaatgaaagaacgcccagcgtgcccaaaccagtgctcccgtttacttggccgcatttctcgagtacctaaatactgaggagcttgagttgactgggaattcctaacgtgacaacaagaagaacaggattattgccagacatgtgctattggctgttaagaacgatgaggagttggggaaattgctt

SEQ ID NO: 65362 - DNA, 556 bp, Glycine max
  Clone ID: PAT_MRT3847_30032C.1
ggctcgaggattttctcaaattgctttcggttttcgttctgattctgcaaaatcatggagatggagcgcatggttgaattccctcacacctacatggatcgacccccaagaaagagagcgcgtttgggctgggacatcgctgaggcccccaaggtaaacattctccatcctaaaatctcagatctcatattttttgaggtttttttatgtctcttgttctagatctggtggattttgtgtattttaggtttgtttggttcaagtaacgttgcttctttttgtctctaatgcagatacaggtttcaggttttatcttatcaatttttgtttaatttaattgatctgttaggtttttgatttttttttcttgttaatttatcagtttttttctctaacgatttagaaaatttattttaaattaatcattaataattagtgatatctgtctatcctgacaatgatgttgctgtgattgattggtatatgttatattttatgtctggggtgatgatttgatgtttgatttagtgtactagaattcttgtttatcttaacc

SEQ ID NO: 65363 - DNA, 912 bp, Glycine max
  Clone ID: PAT_MRT3847_30034C.1
aattcggctcgagcttccattgggccttttttcaaactcgttctctgtcatgcaataatcttctatcaagttcttctctataaatgccataccccatcacggtgctcattcaatccaacttgaaaactcttcttcaacaacccttcttttgatctgtgcaagtgatcttgaaaggagggaacaacaatggtgaagtctataaactttctcctacttctgtctctactagcctttgctcccttatgtcactgtaaaaagaaaataggaggttacctctaccctcaattctacgacggttcatgccccagagctcaagagattgtccaatccatcgttgccaaggcagtggcaaaagaaccccgcatggctgcttcgttgctcagactacatttccatgattcccttgtcaagggctgtgatgcatctgtgctgctagatagcattggaactattatcagtgagaagaggtcaaatcccaaccgtgattcagcccgaggatttgaagtcattggtgaaatttagtctgcacttagagaaggaatgcccacatacagtgtcatgtgctgccattttggctctagctgctagagattcaactgttcttacggggggaccaagctggggagtacctttgggcataagggactctcttggtgcgagtattagtggctcaaattacaacattcctgctcccaacatcacattccagaccattttaactaagttcaagcttaaggggcttgacattgttgatctagttgctctatctgggagccacactataggaaattcccgatgcaccagtttcaggcaaagactatacaaccaaacaggcaatggaaaagcagacttcactcttgatcaagtgtatgctgctgaattgcgcactaggtgtccaagatcttgtgggga

SEQ ID NO: 65364 - DNA, 508 bp, Glycine max
  Clone ID: PAT_MRT3847_30035C.1
cttgatcctctgagcggccgccctttttttttttttttttttttttttttttttttttttttttttttttttttttatgggaatccccttttattcaacttgagaaatgatataaaatttatttaaacttgaatacctacataaattccaagttccagctatcaattcaaatttcaagcctgaccttgaaacatctaagcacataaatttaatttaaacacacagcaacgctttcaaaaggatattcaaggaacatcacgacactgtttatgacttcctcaactcaccacaaaattgatcaattgacactcctgttttttaatgcagtaaacaagaggaagaaaagtaaaatgtaggggcaactttcacacgtgtcacatgacaatgatatcactacatcacttggtaattcctctgcagttctttctgatctctccccttgaccctgttaaaggagtaatgtttcccattttaaccatggacttggcaaattgttccggacgcgtgg

SEQ ID NO: 65365 - DNA, 760 bp, Glycine max
  unsure (1)..(760): unsure at all n locations
  Clone ID: PAT_MRT3847_30036C.1
attcgagctctttacccggggatcctctagagtcgacctgcagggaagtcttctggtaggggtttgtgtgaatctgctgacaaattaccattcctttccaagtcagtggcaggttctatatcagtgacatccttctcagactctgaatcagatttatcttcaagagggccagtttcttcataatcatctgctgcttcctcctctcctcttactcttctttcatttaaatgagatcccaaggaactctcatccaagcgaaatagtaggccaaaacccatgataagagggtgtggtggaagaaaatttttctttccacggatcatgaaactccctactgtcagatattcgcctgtaggagcagttttactaacctgatgaggataaacccaccaggcactagtaacaattttcgaatcccaggcctggctatggcagacctacattccaaaatgatgtggaagtggtaatagttaacatttggtttagttgatgaccaaaaagtaaatttagttaacatagtagggaaggtgttaaacacatacggtgaaacatccagcttggtttagggtcagaggtggaactggttgtgcaggcttgtgattcttgataactgtactagaagctccatgcagatcagcatgtatatatctattatacaaacaaaccaacaanatgagaagatcagaaatcaaaccatacttcaacagaaaaagttagcacattttaaaagtagatataatcatttttatttctgatttct

SEQ ID NO: 65366 - DNA, 344 bp, Glycine max
  Clone ID: PAT_MRT3847_30037C.1
ccacgcgtccgcggacgcgtgggcctggctgttacatcttgacatgctcgtttaaataagaagagtttgctttgtaaaggcagcttatttggaaaatgctatagtatgcatgatgttgataaatcaacgctgggtgcttatgttggtcaagtaatttgagtattttggatgcttcaatggaaatttgtaaacatgataatgcctggctgttacatcttgacatgctcgtttaaataaggggaaaaaatggcatgttatatcaaaaaaaaaaaaaaaaaaaaaagaaaaaacgatataaaagaaacaaactaaacaaacacaagcatgcaacaaaaataactata

SEQ ID NO: 65367 - DNA, 829 bp, Glycine max
  unsure (1)..(829): unsure at all n locations
  Clone ID: PAT_MRT3847_30038C.1
ggaaaaagttgtgttgaatctctccaaactgcaccaggttgtgtggtaatacgcctcttcaacaacccttgttttgttctgtgcaagtgatcttgaaaggaacaacaatggtgaagtctataaactttctcctgcttctgtctctactagcctttgttcccttatgtcactgcaaaaagaaaataggaggttacctctaccctcaattttacgacggttcatgccccagagctcaagagattgtccaatccatcgttgccaaggctgtggcaaaagaaccccgcatggctgcttcgttgctcagactacatttccatgattgttttgtcaagggctgtgatgcatcggtgctgctagatagcagtggaactattatcagtgagaagaggtcaaatccgaaccgtgattcagctcgaggatttgaagtcattgatgaaattaaatctgcactagagaaggaatgcccacatacagtgtcatgtgctgacattttggctctagctgctagagattcaactgttcttaccgggggaccaagctggggagtacctttgggcagaagggactctcttggtgcgagtattagtggctcaaataacaacattcctgctcccaacaacacattccagaccattttaactaagttcaagcttaaggggcttgacattgttgatctacgtgctctatctgggagccacactaaagatgaggcgagtattagtggctcanataacaacattcctgctcccaacaacacattccagaccattttaactaagttcaagcttaaggggcttgacattgtngatctagttgctctatctgggag

SEQ ID NO: 65368 - DNA, 259 bp, Glycine max
  Clone ID: PAT_MRT3847_30039C.1
ttcattcgtacgtaccattgtggtacaaaaacctgcgaccagggtaacataatattatattatttactcactcccacactgaattgcgtgcaagagtcaatgacaacattggacgacacaattcaatgagtgcacgggacatgttcgctctgctacaaaccacaagaagatagcttgttacatcagaaccgacattcacaactgccaacatgagtgatttcacaatcagtctcggtatttaaaccgtcgaacggaccct

SEQ ID NO: 65369 - DNA, 255 bp, Glycine max
  unsure (1)..(255): unsure at all n locations
  Clone ID: PAT_MRT3847_3003C.1
gcaagcacccggggggaagctaggaaaacggcacgagggcgggcaaacaccagggaggacaccaacaaccagcgaaggacgcggggggggcaggaagagaaggggcgggcaaacgagcaaaancaaggagaagagggaaaagaagcaggaggcaaaccagagaacggcaacagcagacgccgagggacaaacacgaaaaaggagcgcaacaaagcacaccagagggcaacaagggcaacacaaacaaaccaaaac

SEQ ID NO: 65370 - DNA, 166 bp, Glycine max
  Clone ID: PAT_MRT3847_30040C.1
tgcggtctcgggtcgagctcaaaaaaaggttctagatggatatgactgatattgcgtagaataatcaagaagaatattaaattcaaatagattttaggtagaaaaaagacttaaagaggaggatttgaaatgcgagatctaaaagcatatctgtccgtggcaccag

SEQ ID NO: 65371 - DNA, 290 bp, Glycine max
  Clone ID: PAT_MRT3847_30041C.1
cccacacgtccgaactaatttatttagatttttttaaaactacaaacaaacatgaacactggcatatcttaaatcgaaatggaaactaaaccactattcaatcaattcaacctttaaatatcaaatcctataaagtaaaaactttacatacgtctaaatcatatacccactaaacaaactaatcacatatctacaactttacatgatctcaaatatcgaacacatatttaccatataaacctcttatatatttaaacacaaatttaaataaaaactctactatataaaac

SEQ ID NO: 65372 - DNA, 863 bp, Glycine max
  Clone ID: PAT_MRT3847_30042C.1
cgagaagacgacagaagggaccccagaaagagaaattgaacatatgtttctaagatctaacatgtattgattggtgtgttgatggcctcatcctgatggtaccaagttctttaaaattagattttaatgtggctggatcaaccctatcatatactttaaatttcattcccttttcctttttcatctatgtctttttttttcttcttccttttaaatcattcgtgacggaatttgcggagaaggacctcgatcgattttaaaagatgattcctaacttcatcttctgattgagcataacaaacttgaaaacaacttttttctttatgattccttgattttaaatgaatgatgcgctaaataaacttttggacatgccaaagtcaacacgtgcttctttaatgtgttctgattactaacatgaattgataccctgataattattttctcttttcatataagcatgaaccgtgttatcacacatcaatggtatttcgaattggctgaataacatgaacgaggtataaaaaatagacctctttcatgttactcagaaatttctttctccatccatgcataaagctagccatatctaacattcacccatgcaatgttatttctttatctattttcatcacatcaactattttatcacgccattcttgtacacaaagaaattatataaataaaatttctgttatataattttaaaggttgaaaatatcttcttaataattaattgctaacaatatataattttaaaaaatgttatatggaagaactacatgtgcttaaaagttaatagattatttacttagttaacttttattttcctattttatctccaataattaattgattaatat

SEQ ID NO: 65373 - DNA, 232 bp, Glycine max
  Clone ID: PAT_MRT3847_30043C.1
tatcctcgttctctctgccagagatggcattgtttcgctaggaggtccccatatccctcttaatacaggaagatgggatggtagaaggagcatagctcatgtggtagagcagtatctgccagaccacaatgaatccatgtctgcagctcatgacaagtatggtgccatgcgaattgacactcccggcgtagttgaattgcttcgagctcacagagcttgatcgacccattgt

SEQ ID NO: 65374 - DNA, 147 bp, Glycine max
  Clone ID: PAT_MRT3847_30044C.1
tacggctgcgagaagacaacagaaggggtaaggtgatggctgtaatgtgaagagaagagaagctgaggtgctgttcgtgggcgttggatacgatcgacgtgaattcgatggacgagaggtgatcgggccttcgaatctgatgtagcg

SEQ ID NO: 65375 - DNA, 370 bp, Glycine max
  Clone ID: PAT_MRT3847_30045C.1
ttgtttttccaccctccgttccctcgtcgcccaagccgagggctctggtcgcttctctattggcggccttcacggacctcttcaccctgatacatatctcgcagatgatggaccggggtcactgcgtgacgcgtgctacataaaataactctacgtggatatgtgttcgaagttttcggccaccattcaacccttcatgtacttgaacgcgtcctcttacaagaccatcaaaggtcgcggccagaggatcaaactcagcggaaaaggcttggggttgaatgaatgcgagcacgacgtaatttgcaatacgtcgttcgatggaagcatagggcatggtggttgatcccatttcacaacaaaacccaatttc

SEQ ID NO: 65376 - DNA, 453 bp, Glycine max
  Clone ID: PAT_MRT3847_30046C.1
cggagacccattcattgcattgcccacaaaaccaccctctctactctttctctttctagttgatagattggtgtaaagggagacatgggaaggcttttcttgatcaatcttgaaggagacttctatagctgcaaacactgccgaacacattttgctcttgaggatgatgtcatttccaggtctttcatttgcaggcatgggatggctcatctttttgataaagttgtaaatgtcacttttggcgagaaagaagaacggatgatgctctccggattgaaaactgtcgttgacatattctgcgttgcatgtgggtccattcttggatggagatatgaggttgttcatgagcagaatcagaagtacaaagaaggaaagtttatccttgaaatgtttaaggtgttgggacctgctgacaacctcttcttggcagttcaagaagctcttgcagctgga

SEQ ID NO: 65377 - DNA, 362 bp, Glycine max
  Clone ID: PAT_MRT3847_30047C.1
gtggttggggtttttttttttttttttcttttttttttttttttttcagggccaaaccggataaatttgtatttgaaaaaacccccctttggccccctcccaacaaaaaaaaatttggggaaaattttgagaagggttctccccccaataaaaaaaaaaaaaaacccccgggttatatacccttttgaaagaacccttaaaccaaaaaattttgggctaactggggggactttttgccaatcccttttaaccaaaaccaacccaacttttatctttcaaacaaaaaaaaaaaacccggcctttttcccccttgaaattttgttgaaaaaaggccacaaaaattactcccaccttttttccaa

SEQ ID NO: 65378 - DNA, 551 bp, Glycine max
  Clone ID: PAT_MRT3847_30048C.1
aaaaaaagaaaaaatttgaacaaaaacccttttgcattatggggattaacagttttataactttaaaaagaaataacaagctttggggtcttatgcattatgaaggggaccttttgggtgataaaactcggctcaccataccccccaaaataaaaagggggcccttttgcaaacaaaactggaaatggaaattctctccaacaactttctgaaagaataaggggatttggacttcccccaaatacacaatggatacgggtttttctaaacctaataaaaactccttcaactttaagccaaaaccccaacaaaaaaaaccaaaagctggggctatcttttggtaaaaaccaaaaggggatttcaccaagcctgggaaagaaaattaattggcaaaaaaaaaagaaaccccggatcaacaaaaaaaaccaaatttgggattcccccttttattacaaaaaggggacctcctttatcagggagttgatcctcttataacaccaccttattaaaaaaaaattagggctccttggatgcaagggcaaccaccttaa

SEQ ID NO: 65379 - DNA, 2445 bp, Glycine max
  Clone ID: PAT_MRT3847_30049C.1
cggaaacccattcattgcattgcccacaaaaccaccctctctactctttctctttctagttgatagattggtgtaaagggagacatgggaaggcttttcttgatcaatcttgaaggagacttctatagctgcaaacactgccgaacacattttgctcttgaggatgatgtcatttccagggtttttaatctttttctccctgttttttttccttccatgaaacattattttttatttcttggtactcgattttacaattttttaaaggatagttgggggttttgctagataactagttgatatatatgtaaggcttttatgtgatgttccttgctggttgatcatgatgagagggatgtggtgattcaccccaaagggagggtggcaatagaagaacataggatatgatcatctcaagtgggggataaaaaatattagataagatgtacgtgccaattaatatattttctaaacagtatctgtctcaaacattttcaatgccaacactcagaatggcaagcactgctagtaggaacattcttattttgatgttctacttataaccatcagtagtacttatacatttgtgtttcttatatatatgtccatgtcatgttacattttttctgtgttggtcgccccctcccttttttttgcggggggggggggcggggttggtggtgttgtgttgggtcaatacgttatactctgctgttgtgtgattctttggctgtggaaggattgtgtttgagtgacatcacgtgtctgtgcttttggtttttgattgtgttgggtcgatacattatactcttctgttgtgtgattctttggctgtggaaggatatgctatttggactaattataaatgtgtttggagagtgataaagtgtcagttgtttgagttcttttttgggtgaaaccgtattagttcatacttgtaatggcatgccgattgtgttattttcattcagatcaaatgctgagctacaagttttcttgcatagatgaatttcttgattcgataatgatatagttttattctttttgaggaaggttgtaatttgtgcagtcatgtaaatagatagtatagtgttattcttaattgccatactgggcatggcaaggcaataaataaatgaatcagaaaccacaatgtacagatttgaggatgaagtgtttggaaagacttttttcaaataaaccaaatatcttgaaagacttctaaatattgaccctttgatcaaatttactaatacgactttttcaattatatttgaatgtccctgctcccagtcctaggtgacttggtaaaatctttttgtcatttaacatccctatctgaacttgtttaaactttttgataaaatgtcttcacataaacttctagatcattaaaattattctcttccctgataatggtacctgattgatgccttctcttatatgtttgccctggcaaactcagtatgttaaatgaaagagaggttttgggaactattagaatagttggtgttccgcttccaccttccctttgttgccacttgcaaatgtgtttcttaatccttaactatacagttcatcatgcaaactaaatgtatgagtaaaatttgtaacttgcacacaatctaaccctgcttttctcttagtctttcatttgcaggcatgggatggctcatctttttgataaagttgtaaatgtcacttttggcgagaaagaagaacggatgatgctctccggattgaaaactgtcgttgacatattctgcgttgcatgtgggtccattcttggatggagatatgaggttgttcatgagcagaatcagaagtacaaagaaggaaagtttatccttgaaatgtttaaggtgttgggacctgctgacaacctcttcttggcagttcaagaagctcttgcagctggaagtgatgctgatgattgacttactcattccatgttgtagctgaaggtcattttttatgctgtgatgacgagagcgaacgctgggatttcctgtgtcttacgataagggaaaggaagatgtccagtctagtatgggctatcaaagggaacaaatgaggtcatgtttatcaccgaagcatatcaaactcttcacgactggggtccataccctgctgatcaggtcctcaaggaacttcaagacagtcttggatttatgatctatgacaacttttgtaacatttgattctaatggccagattgggttccaactgatatgtaaaccaccattgaaattactaattcttatcaggggggtatgtttcatagtgagcatggtctcatgagctttgaacatccatcaaataagatgaaagcaatgcctagaattgacagtgagggatttatatgcgttgctaacttttgcgaagtaaaaaactggatttgttgcgtcattcaatttcttctccaaagataagacaatcctttat

SEQ ID NO: 65380 - DNA, 213 bp, Glycine max
  Clone ID: PAT_MRT3847_3004C.1
cattccaatccactcgccggctaatggtgtcaacgattcgcaagctgtagtgttggagattgttatcacattttgtttgttttacactgtgtatacaactgcagaagacccaccgaaggcgtcattgtctataattgcacccattgctattgccttccgcgcgtctgccaacatcattatcacaagcccatacatcgacagctcaattaaccc

SEQ ID NO: 65381 - DNA, 202 bp, Glycine max
  Clone ID: PAT_MRT3847_30050C.1
aagaaagattactttatgaatataacagccacaataaagttgttttgtgcaagagttaaaattcaacgattaaaattttttagcccaaagaaatttgaaaacaaaaaccttggataaaacttccaagccctctagtttttttattcaaaaggggtttaaacaacaattgcttggtgggcgggaatccttttcctaggttttt

SEQ ID NO: 65382 - DNA, 228 bp, Glycine max
  unsure (1)..(228): unsure at all n locations
  Clone ID: PAT_MRT3847_30051C.1
tcgggcttagaatagctggtctacancgcccgccagtattcacatattggaaagaattagagcgccgaggaaaaccgccgttcacggcggtgaaactcgtcttcgaatccagagcctatctcggatgctcactcttatcacattgagcgcaacgccaaaaaagtcaattttacgattgaagaattggagcagtggaaggaacaactttcttacttagctaacctagct

SEQ ID NO: 65383 - DNA, 259 bp, Glycine max
  Clone ID: PAT_MRT3847_30052C.1
aaataagtagagagagagagagggaggatgaggggaggggaggcgagatccacgaccggtatttgcttgatgggaagcgtatttcggcattttcttactcttttctgcacaatatattcaggggtggagaatgcctctatgcactccctcctgactcgtacaatcattttctctcgcgatctagtattatttgctctacactgtcctacccatctaccactttgtgctagatttaaacttcttttttatctttcttaac

SEQ ID NO: 65384 - DNA, 849 bp, Glycine max
  Clone ID: PAT_MRT3847_30053C.1
gtaccatcttgcacttgttcctctcctatctcttaattccttcctccatcaaactttgtatccaccagagccaagctcttttggttctctaaacaagggaatgatgagttatcacacagagattactgtgactgctagtacaactagcatcaacagcaacaacccttatgtgtgcatttcccctgctcctccttcccctgcagaagccaaacgtcccaatccaatggatagaatatacggtgcaataaatcattatggcaagaaggttgaagaagcaaccaaacaagctgagaccatggttggcaatatacggaatcacttaagagttagttctagaccagctgatgctgcaattgctagacttattcaaggaacaaaggtacttacatcaggagggcctgataagctatttcaacaaacatttggggtttttccaggagagaagctcttacagccatgtgcttgctacatatcaacaaactctggacctctaattggaacactctatatatccaccaaaagattagcattttgcagtgactatccactgtgccatcatccattctccctgcagcagcatgaatgtgtttattataaggtgatagtgctgctggatcagttgagcaatgtcagttctgtcacaaatggattgaatccatcagaaaaacgcatgcaggttatcacaacggatggctatgagttcaactttatggggtttttctcatatgacaaggctctcaaggctgtaaacgaggctctaaagcattaaggcaatcattccagtgttcatgtagtaacacttcacctgtgtgcttagatttactcttcattgaaaatatactttttttt

SEQ ID NO: 65385 - DNA, 304 bp, Glycine max
  Clone ID: PAT_MRT3847_30054C.1
ggcccattcaccgaggcaatgcagatagagttactgagtttccgagattaccagttgactcattgattcaacatgggaagatgctaagagagttaacgacgtatcacctcatgaatgcgtaaacgtctaagcttaagagttcaagcgttatggaactacggaacttcatgaatggagtgatattgtcaaaatttcaggatttagcgacttagcatcatgagatgcagaatggtacgacagtatggctgcctcaatggctcgaaatatcaagttgacatgtggtcgtggcgttcgagatgatcaa

SEQ ID NO: 65386 - DNA, 184 bp, Glycine max
  Clone ID: PAT_MRT3847_30055C.1
ttttctattttttttttttttacccctttttaaaggccgcccattttactaaagggggtgcccttaggtggggcgggttaacataaaacctccaatgataaacttttacatccaaacccttacaaattttctcaaacgccaagcatattccaaaagacacaatttcccatgcccatgaaaactc

SEQ ID NO: 65387 - DNA, 397 bp, Glycine max
  Clone ID: PAT_MRT3847_30056C.1
gaaccggtcacaatgcggaacccgaatagtcacccccaacgtagaagaagatatcagtctgaagaggcggtagcctaactgtgacgtgtacacgggaagcttcttggtgaacgcgcccagcggatcgaagaagtacctgtggagagactgatgtgtgtacgaaagtgagtggaacataggcaaggcgtgcgggaaatgaaaatactcgtggccttgtgtagccacctacgagggcgaattcaaatcatgtcgaatggacggtttcggaagctgcaccggatccgacagcgacacctaccacgtgttctgaagctccaacaagaagctcggttacagtcagaatcgttacacgaacggagacttgaacgatgggtcgagggagcatatcctacaagat

SEQ ID NO: 65388 - DNA, 697 bp, Glycine max
  unsure (1)..(697): unsure at all n locations
  Clone ID: PAT_MRT3847_30057C.1
gtcagagaagcaggtggatggattagcaatggtagaatttgtggagacattgctgtatctcgtgcatttggggacgtgcgattcanancaaagaagaatgagatgctgcaaaaaggagttcaggaaggaagatggtcggcaaagttcatttctcgtgtacagctcaacaatgacttggttgttgcataccctgatatttatcaagtagctcttggctcagatgcagaatttgtagtattagcatccgatggcttatgggattacatgggcagctccgaagcagtttctatagtgagggatcaactgcgaaaacacggaaacattcagcaagcatgtgaagcacttgcagaagccgctttggatcgacgtacacaggataatgtcagcattataattgctgatttagggaggacagactggaagaatgcgccactggagcgacaaaatactatacttgagctggtccaagctcttgcaaccattggaattgtgtccattggaatctggttttcatcacagctttctttatagattcaaaaaataccagtcatgtacataaaacagatatatacttctgaacttctagcctgtataatcttaattgtacatgcctcacatcttagaatctacttggtttagggcacaaagaattgttaacaataaatattttttgaagtattaatcttattctgattct

SEQ ID NO: 65389 - DNA, 479 bp, Glycine max
  Clone ID: PAT_MRT3847_30058C.1
gcggccgcccctcatttttttttttgctttacttattctttcattaaacctacaaatcctttcatacacccgctttcccatttatcttctgcatctccacaggtcacttcttcaaatcttcccagcaaaaaccaaaatctcatctactatctactttttagggacctatcactctatccacggctcctgcacagaaactccccctgaaaggagaagttgttcttcatcttggttaagaccaacataccttcctcaatctctgaaatctgccccacccacattcaccttgccgtctccaccgtggacccccggcccttctcatgaatctgatgtcctaaaacccttttcctagtgccttccataccaccgcaaagcgccacatgagctgagactactcccgaacaaccgctgataaaccttacgctgagaagatcccccgctggtgtttaaaccagaccttgcttttggggctcggcagg

SEQ ID NO: 65390 - DNA, 399 bp, Glycine max
  Clone ID: PAT_MRT3847_30059C.1
gatgaaaaattgatgcgtgaaaggacgcacctgctgttggcttgttgttcaaggatggcaatttgtaagaaagatgtttggagagttgattgtggaatcctttttggatttccgttcacagtatttgccaatcacatttaaagagaactcttttatatatctcttaaaattctcggccacgcttagctccagttgtttttcaattcttcaaaattttgttctctggtgtgttgggatgatactaattaggtcataatattaagcttcttatggtctaataaagctttactatatactacctctgtggatgcaactatcacttcattaaagacaatgattttcaaaactacaatttatgttggtgtctggacagagtatgccactctattcttatattga

SEQ ID NO: 65391 - DNA, 437 bp, Glycine max
  Clone ID: PAT_MRT3847_3005C.1
tggtacatgacactcgttgtgggtggcatgtactggagaggtaatggcatattcttgtgtacgtgcctcttacaaagtggcacgcactggaaacatagtggtgtgaatcagtaggactcaccaagggcggaccttaggttttacgagccctttggaggatcaactagggaactgtcggacctgggttttaggcatcgtgctcttgcatacatggcacttgtcgtgggtgacatgtactagagatgtaatacctgtgaggataaccaagcacggagcttgggtttttaaaaaagattatggaactcaataaatcaagatgggggtgaattggttttcaaacaaaaaggtactttttaaaaaatgagttacgaaaaaaacttttctaaacgaatctatcacaaaacgaatattaatttgaatgtaatcaattcttaaac

SEQ ID NO: 65392 - DNA, 503 bp, Glycine max
  unsure (1)..(503): unsure at all n locations
  Clone ID: PAT_MRT3847_30060C.1
gaacctaggaatgcggctcgagctaaaacactcagtaaaatcacagttttgtgatgaagaagaaaaacataaaattttaaatctttctatcagtagtctgctatgtagaataaaattttagaattatatggcttgaggcttgctttttttttggaaggcaaacatagatatatattattaataatatcaaatcagtaccagaagtactgatgaattacacataaagacaagacactaagagtgtcgcctcccaaacaaagcaagccccccaaaaatccactacaaaggcttgctacttaacggcattttaattttatgacttttattagttactttatgcatatacttttagatattaaaggtactttcagttcaaccacaatttggcatttgatcaaggcttttgtttccagatcaatgactaaaccaatatttagaaatggtttttgttatcttgcggaaaggaagcttanggaggggcgattgtcttatcccaaggcata

SEQ ID NO: 65393 - DNA, 221 bp, Glycine max
  Clone ID: PAT_MRT3847_30061C.1
gttacttctacatgtagacaatttgtttcagttaccttatgacaatgatcaatgtgcttcatttgtgattagttgtaattttatcatttatttcttttgctttcttatctagcattttcttttccaaattctatttcctggctgggagtataaaaaagtgaagaaaattgtttttggagggtaagttactggtagtggaaatattggtgtgttgagttgga

SEQ ID NO: 65394 - DNA, 431 bp, Glycine max
  Clone ID: PAT_MRT3847_30062C.1
actttctcgaggggcgcgctcattcctctgcggacagactacataatgggatttttatagtcaccaaagattctttttgtttaggggggggaaatgaagaaggggcacttcttcccaccttattctagaagcgcatactggggctcaatgtgctacattggtgttggatatggagggggctctactatggcagccattgaacttatgcaccgatccatggaagcatgctgttgttgatataactaaatcccgcatcgtagtctggatcagcgaccaccttgatatctatgaacctggccttgatggcgtagcgaaacaatgccgtggcaagaacctcttcttcagcactgatgaagaaacgcatgtctttgtggctgacatatagtttgtctttgtcaacaccccaactttaaatcattgttttggagctt

SEQ ID NO: 65395 - DNA, 924 bp, Glycine max
  Clone ID: PAT_MRT3847_30063C.1
agataactaaaagaaagtttttacagtccatgtgatcctattcgcatcgaaacaaagtaatggggagcttggcgtggaagcagcttcttctcaacgctctggaatccaacgctcacctcaagcactcttctttcatgcagctcgcaaccctaggaaccaacggaacaccttccaaccgcactgtcgtcttccgaggattccaagacaacactgataacatccaaattaacacccatgcccgcactcccaagattgaagagctcaagctttgctcctctgccgagatatgttggtatttcacagattcctgggagcaatttcggataaatggggatgtagatatcattgatggtttgaatcctgatccgctaaaacttcagcaagagaaaaatcctggtttgccagttcattgagatcaagattgcaatatttgttgcccaaccctggacttccctgtctaaatgagcaagcactgccagaaatatcattagatccttctataggtccagttgatgctttttgtctaccaatcctagagccaaatcaggttgattacttgaatccgaagagtaaccagaggctaactttcaaatcaagtgtgagtgatgcagcaaagaaaagctggattgtggagagggtcaacccataatctgctctctgtcagtgccatgttcagatatcactgtaaacaataaattgcatgttataaaagtatattagaggattgactatgacttaaaatgttttagatattcattttgtaatggttactagattagtttttgtgcttccccttgagggttgtgcttcttcaatataaaccgagtaagattggatgtgatatagcctcgtgtaaagcaacttatctatctggacacctcactgggaatttgtatagaggtggaacctgggagagaactggag

SEQ ID NO: 65396 - DNA, 229 bp, Glycine max
  unsure (1)..(229): unsure at all n locations
  Clone ID: PAT_MRT3847_30064C.1
ctctcacctgaaaatgtcttnctgcggtggtaactgtgggtngcggaagctcctgcaagttcggcaacggntgcggatgcttcaagatgtncccagacttgagctacaccgantcaaccacccaccnagaccttggtgcagggggagtggcncccagttcangnnntcaattngtnnattgntgaaatgggtgtttcccgctgangnngatggctgnnananttggnag

SEQ ID NO: 65397 - DNA, 331 bp, Glycine max
  Clone ID: PAT_MRT3847_30065C.1
aaggacacaccttttttttgctcgttgttcaaggatggcggggggggagaaagatgttcggcgagttgcatgttgaatcccttctggatttccgctcacagttatttgcaatagcatttttaatgagatgctcattacatatagctattaaaaattactgctccaggctaaagctccatgtctgtttttacaatccttcataaattttgtttctttgtgtgtgttatggagatgactatcttaattagtgttcatgaatatgtcaagctttatatttgttgtcctttattgaaaagcttcctaactgttcactatattcaccattactttt

SEQ ID NO: 65398 - DNA, 393 bp, Glycine max
  Clone ID: PAT_MRT3847_30066C.1
taaagctgattgcgtttctagttccgagttcttgcactcgttagaccaagtcctcgtcttgacaacgtttccacgcacaccttcatctttcaatccttcaccacaaacatgaagacttggaccttgacccaaattttttgaaccgggaattccaattttttttgccttttccttcataatggggatgcttcgcacacgcaggatgtgggacccacccggaatcaaacgggttgtttactgcgcagaataagcggaaccaacaacagctacaagtgatctcaggggattgtgcaaccaagaagatgcagcccaaggatgcagtgagcgaattgcagaaaacccatgaagccattcaagctttagataaacaagtttcgatgcttcagatggaac

SEQ ID NO: 65399 - DNA, 604 bp, Glycine max
  Clone ID: PAT_MRT3847_30067C.1
ttttttcattaaaagaaatggagtactgagaatttctaattcaaataaaatgaaggaaaaagtgaaagtttcactttcaaaattagagattctatattaatctattggttttttgaagtagagattctaaatgatctatattataagagtaaataataaaagagaacatactgctatattcaatgcttttctcccctatctataacatgggtcaaagatatgaatctctcactggctatttattttatacacatgcttaagcaaagagaagctgcctgaatttttagtctttacatatactgtttcattttagaatcctgattttcctatgagccacaaccaatcaagagcaaccccagaaaatatgccgattaaaagaaacagcacgagcaaattacccaatgcattctgttcagggcccttgtaaccttggggtgccacggtaaatacacaaacagtgagataaccattggttagtcccaagaaagacacaagaaggatccgccatcgcgggtcaccatattttgctgtgaagtaaaatgctgggaccaaaaggaatctagaaagcactgcaatgagtaagccctttctggattccaacttc

SEQ ID NO: 65400 - DNA, 465 bp, Glycine max
  Clone ID: PAT_MRT3847_30068C.1
ataaaatgtatagtaaagtgtgtgtggtgtctatgcctttgttgaccactttggccttgcaacttgagtaccaatcaaatcgtcctggatctccattagatttttttcacatttttaaacataattctatgcttcttaccactgcagatggtatgctcatgttgttttctttatgtattgaggcgctggaggataatttctttcatagcaggcgaatcagtaattatgtcagataactcaaaaggatttgtgccactgaagactttgaagcatacccttcctctggcaggagcatatttactttacatgctagttaccatggagtctgttcgtggagtaaatgttcctatgtacaccacccttaggaggaccacggtggtatttacaatgcttgtagaatatatgctggtggggcagaggtactcaccttctgtcattttcaggttggtatcagtgttggcttga

SEQ ID NO: 65401 - DNA, 184 bp, Glycine max
  unsure (1)..(184): unsure at all n locations
  Clone ID: PAT_MRT3847_30069C.1
aaaataacacacatcttcacacatcanttacgacaagttaataagaggtggtggataattttcaaagtagggcagagcatanctcatacaagatgggtcgatgccttagatgttcctcttattgaacttaaacaaaccgaacatagcgaaagaagaacaccaatattccagaatcatttgcaga

SEQ ID NO: 65402 - DNA, 327 bp, Glycine max
  Clone ID: PAT_MRT3847_3006C.1
ggccccccacctaaaaaatttttgcaatttatgggtttgagcccgggtttgcagttaccccccatttttgggggaagcccaagctatcctagcgaagaaaagatttacactaacaccgtttgaagggtcctacgactttcggtttttacaaggatggtcaaccccgtcccccgggggggggaaatatctcctgctataaaggggagttacctatgccttggggacggttcatcaaaaggcagggcccctgggagtattgtgatattgacaatgcataatgggctgccccgctcattaatgttggggctataaacctaaggaccccct

SEQ ID NO: 65403 - DNA, 459 bp, Glycine max
  Clone ID: PAT_MRT3847_30070C.1
gccactgctagttatgatcacactattcgtttttgggaggccaagagtgtctcgttgctaccgcaccatccaatatcctgattcggtttaccttccttctcatttttttttaatttttttttccaattttgttggtggtatttcaaaatttatatcatttttaggcttctcaaatcaaacctatatctaatactttttctgaccactagatgatgagacacgttatttttaaacatttatatgaaactggaaaacaaagttgaacttgcataaactttttattgttccattcgcaagtgaatagctcttctgatggatgtactatgcctctatgttttagtgttaaaataatggtatgcttaaaagtcttctatttaagcgtttttgggtttgcctattgtttgatggtggttgttgctactatatatattatgaagaatgcttcttttttttttcttt

SEQ ID NO: 65404 - DNA, 205 bp, Glycine max
  unsure (1)..(205): unsure at all n locations
  Clone ID: PAT_MRT3847_30071C.1
ttnaatntctttgacacctaaatccttaaatgacaacacntttgggctancctcattcacntnntnagcantcgctctgctgcattncaggtgcgcctgnnccctgggtatttggaccaagananatgcaggggtttgccaaataagttaaacatgataaaacggtttccaagtnggaacaaccanangtcccanangcatcaag

SEQ ID NO: 65405 - DNA, 568 bp, Glycine max
  Clone ID: PAT_MRT3847_30072C.1
tgttctgttgtgtagtattactacttatgggggtaaggggctaggtgaagactgaaattgcttgcgggaaaatcagacaaaactgcctgtgtgttgatgactacgtctcctagcacatagcataggtgttatgccccatttctgctcccccaggaccacgacctggaccgtctttgttggatttgggccgtgcagggacttagaatagacgggaaccatgctcacacgcatcccgatccccatccacctgccttgtgtcatgcctatgaccctaaccaaagctcttctccgctgagatccttcggaaccacgcaatttccttgtcccctagcttcacctccttggttagctggtcaaggggcgcatggggaccatcccccatagctgagaggtcactgaacaaagactgcacttcaggtcttcctttaagtatgcaacatcttgaagttgacgcctgcccgctttgcagatgggtcccggaagctttgactgacctttttctttctgaagaggtccatccctgctctatgggttgtgacccacacacagaggtggtcagaagaactgg

SEQ ID NO: 65406 - DNA, 814 bp, Glycine max
  Clone ID: PAT_MRT3847_30073C.1
gaaaagaatcttaaaagctggtggtttcatttacgtaggacgagtcaatgaaagtttaaatcttgcaagagctattggtgacatggaatttaaacagaataagtttctttctgctgaaaaacaaattgtaactgccaatccagacatcaacactgttgagctttgtgacgaagatgagtttgtggtgttagcttgtgatggcatatgggattgcatgtcaagtcaacaactggttgattttgttcatgaacaattgcactcggaaacaaaactttctgccgtgtgtgaaagagtacttgatcggtgtttggcaccatcaactgccagtggtgaaggatgtgacaacatgaccatgattgtggtgcagttcaaaagacctgctcagtccagtgtaccagcagaagagtcctcttcaaactgacaagctgaacctgaaacaaaactagagagaagtgagagttagcattattcctcagtgacagttcaaatattgtatcatatatatatatataatatatatgtgtgtgtttagtgtgcaacagtgattagaatgcgtccgcatggtcatcttcctttcatcccacattatacacaactgctattccaattaccgtaaagaatagtaccagtttttctcccgtttcttctctctcgtgtctacttttcactctaaaaagtctgttctgtatattcaatgcggctccaaatatcagtaattgtagttataatcaacaatatgcaagaatgctactagctcgggtttaagctaaagagaaacataacctaaaatgggtgatgtcttcttgacatagac

SEQ ID NO: 65407 - DNA, 398 bp, Glycine max
  Clone ID: PAT_MRT3847_30074C.1
ggggggaaaaaaaaacaattttaatttaagcctgttctgaaaaatcccgaaggggtccaacccccggggggggacccaaaaagtcccatgaaccgaaatcctaaaatttgggggaaggaaaaaccttaaaaagggggggcctaaaaaaagaatactttttgctccccccccaaaaaaaacggggggaaactttttaattttgaacctttttttggccatatgaaaccgtttttcaaattcaaaggctcaaaatttgaactcaaggggggccccaggggaagcccccccccggcttcacagaggatttccttttacccttttttttcgctcacgggaataacaatttttccttggggggccaagggcatatactgggccatgaggggtttgatttcaaa

SEQ ID NO: 65408 - DNA, 341 bp, Glycine max
  Clone ID: PAT_MRT3847_30075C.1
gggggaacctaattccgccaagtgagtggaaaatgcggtagccttgctctccaagaaggatcgtccataagcgcgtcaaaaaatttataagcacccacagtggtcgcaagatgtccgtcaaggcaagctggcgcagacccaagggtattgatttctcgtgtcatgagaaagttcaaacgatgcactttgatgcccaacattggttatggctcagacaagaaataccggcattatctaccaaatggtttcaagaaatttgtcgtgcacaatgtgaaaaacctgtaacatctcatgatgcaaaacatgacataatgtgctgagattgctcacaatgtatccac

SEQ ID NO: 65409 - DNA, 553 bp, Glycine max
  Clone ID: PAT_MRT3847_30076C.1
ttacggctgcgagaagacgacagaagggggaaaatggtggtgttagtctatgaacagtcaccctgacctgagtaaaatttccatttccagaacctcaaatcaaactcttctattcctttctctcatcaatcaattcagttctctcccactcagctgtcagctcaagtaaccctccctcaaaagtcaaaaccgggtcttctgtttgtcgtccaatttctctaaagataggaatgggaatatatctcagcagtccaaaaactgaaaagttttctgaagatggtgaaaatgactgtcttagatatggtttatcgtccatgcaagggtggcgtgcaacaatggaagatgctcatgctgcatatactgatctggatgagtccacttcattttttggtgtccatgatggtcatggaggtaaggtggttgcaaagttttgtgccaagtttcttcatcaacaggtgctcaaaagtgagacatacttaactggagatataggaacctcccttcagaaagcctttttaagaatggatgaaatgatgcctggtcaaaaaggatg

SEQ ID NO: 65410 - DNA, 1672 bp, Glycine max
  unsure (1)..(1672): unsure at all n locations
  Clone ID: PAT_MRT3847_30077C.1
tacggctgcgagaagaagacagaaaggtagagaaacaagaagaaagagatgagaacaaacaagaatcaagagagagaggtgttactacgttagtctatgaacagtcaccccgagagactgaaatttccagaccctcaaatcaaactcttctattcctctcatcaatcaatcaatccagttcccctctcggataggaatgggaatatatctcagcactccaaaaactgaaaagttttctgaagatggtgaaaatgactgtcttagatatggtttatcatccatgcaagggtggcgtgcaacaatggaagatgctcatgctgcatatactgatctggatgagtccacttcattttttggtgtctatgatggtcatggaggtaaggtggttgcaaagttttgtgccaagtttcttcatcaacaggtgctcaaaagtgagacatacttaactggagatataggaacctcccttcagaaagcctttttgagaatggatgaaatgatgcgtggtcaaaagggatggagggaattatcaatattgggggataagataaacaagtttactgggatgatagaagggttgatttggtctccacgaagcagtgatggtaattgccatgttgatgattgggcttttgaggaggggcctcattctgattttgctggaccaacttcgggaagcactgcctgtgttgcagttattagaaacaaccaacttgttgttgcaaatgctggtgattcgcgttgtgtgatatctaggaagggccaggcatacaatttgtctagagaccacaaacctgatcttgagattgagaaggaaagaatcttaaaagctggtggttttattcatgcaggacgagttaatggaagtttaaatcttgcaagagctattggtgacatggaatttaaacagaataagtttctttctgctgaaaaacaaattgtaactgccaatccagacataaacactgttgagctttgtgacgaagatgaatttgtggtgttagcttgtgatggcatatgggattgcatgtcaagtcaacaactggtagattttgttcgtgaacaattgcacttgaaaacgaaactttctgcagtgtgcgaaagcgtacttgaccggtgtttggcaccatcaactgctggtggtgaaggatgtgacaatatgaccatgatcgtggtgcagttcaaaagacctgctcagtccagtgcaccagcagaagagcaatcctcttcttcaaacggacaagctgaacctgaaacaaaactagagagaagtgaaagttagtattattcctcagtgacagttcaaatattgatcatatgtatgtagtgtgcaacagtgattagaatgcgtccgcatggtcattttcctttcatcccacattatacaccactgctatattccaattaccataaagaataccagtttttctcccgtttcttctctctcgtgtctacttttgactcttaaaaagtctgttctgcatattcaacatgcggctccaaatatcagtaattgtagttataatcaacaatctgcaagaatgctactagctcagtaaagagtgtttatgctaaagaggaacataacctaaaatgggtgatgtcttcttgacatagacaaatatttgtagcacactccttntgaaactcaaaaaaaaaaaaccaagggcgg

SEQ ID NO: 65411 - DNA, 1319 bp, Glycine max
  Clone ID: PAT_MRT3847_30078C.1
tcctttggcttgcatgacctcgcaggtcgtctataagaatactcttagctatggcttgcaaagtttgatttggagctagaacaaatggatgtgaagacaactatttgtatggagagctggaaaaggttttctacatgagacaacctgaaggatatgaagcaaaaggtaaggaagatcatgtttgtaagctgaacaaatccttgtatggtctgaaacaatctcccagacaatggaataagagatttgatgatttcatgtcaagaattaagttcaataaaagtaagtatgacaactgtgtttacttcaaattcattacacctaatacctttgttttcttactattgtatattgatgatatattgctaacaaacaatgataagagtgagttagcaaaggtaaaggctgaacttaaaaggaagtttgaaatgaaagatttaggtgctaccagtaagattttgggatttgagatgaaaaaggatggaaacaagaagtacttgttcatatctcaagagtcatacttaaagaaagtgttggacaggtttggaatgtctggagctaagccagtaaccctacctatatcccaacagttcaatctgagcaatgattaagcacctagttcagaaagagacaaggaatttatggctaaaattccttatgcaaatgcagtaggctctttgatttatgtcatggtgtgtactcgacctgatatagcatactcaatgagtttggtgagtaggttcatgtcaaatccaggaaaggtgcattagcaagccttgaagtggattctgagatacatcaaaggttcacttgggaagggtctggtttatggtggagctgataagaacagttatagttcagttgccatagaagggtttgtggactctgattatgttggctgccttgacaccaggaaataactcacaagatatatctttactacatttggtacaactattagctgcaaagcaaacttgcaaaaggtggtggctttatccactatagaggcagagtatattgaactgataaagacggtaaaagaagctctttggctgagaggaatgactcaagaactcaagctttaagatcaaatcatcatagtacactgcgttaatcaaagtgcattacacttgtccaaaaattaagtctatcatgagagaaccaaacatgtggacatcaagctacattttgttagagaagtcatctcggaaggagatgtaactgttcaaaaagttgttactaaagataatccattatgatcactaaagtgttaccaagcaacaagttctattactatttggttctgattcagcttaagtaat

SEQ ID NO: 65412 - DNA, 373 bp, Glycine max
  Clone ID: PAT_MRT3847_30079C.1
tttcggcgaccacgtctcacacacaccgccgccctcaatctctgcactacggcgacctccatgcacccgcgaactcttccgacaccctacatcgaaagacacacgcacacccacacaagacggaccatcaaaaccaacatggcactccagatggaccaagacaggcgccttcgaggcgaccacgcggtcgtccacagcaacacccacagccagattcacaggagagatcctatatcccagctgccaaaagaaacagcagaatcctgtgcgagctgaacagacaccagctccgccgggaagagaagggggaacagcaaaacagccgctgagcagggggcaagagaataactcaaacaatgcaacggcgggccag

SEQ ID NO: 65413 - DNA, 565 bp, Glycine max
  Clone ID: PAT_MRT3847_3007C.1
cacttaggatgcggctcgcccttcgtatctcgtattggatcaaaaatgaatatcgactctctctatctattctcacagctatctacaaccttttatttcgcgctctcatatgcacaacaataccttctaataccattattccatccttcgaccgtatcgtaatggatgaaccacatacctttcataatgattcacgctcatctattcaaatacatcaccttcggggccacctggactcggaaaggttgggatatactttaatactgaaacaagctctatccgccccaccatgacctgaccttcctcgagaaagtccgggactccatgcatcacctacgtttacatgccaatcactatgtaatatggaataccgccgtccagaaatcattcgtatctattaccaggccttattatagaatggctgtaagcgctctgagcgtttatgatataacgccgacgtaaaaatcaacccacctggctagctgattggaagatgcactacgtgctgacagtgctatatgactctaaagctcactggcagccagtgagcatcttgctcatataa

SEQ ID NO: 65414 - DNA, 289 bp, Glycine max
  Clone ID: PAT_MRT3847_30080C.1
ccttcgcgttcgcgggcgcactacaaattgtttgattgagggcaatattataacaggtgaagatcttcaacctactcatatggtgaatgtaattaatcaaatgtgagccacagccggtattaccttacaatacatgcatagcacctgcctgtgggaccaataatcatttgagggggcgtcccattttttatcttcacagcagactgttcttaggactgagaggtaggaacatcctgctagctcaaaaggacgggctatgttattttagcccaaccctttactgatgcat

SEQ ID NO: 65415 - DNA, 123 bp, Glycine max
  Clone ID: PAT_MRT3847_30081C.1
ggctgcgttgctgatggatatattgtgaactggctacattcaaggagcgttcatattactaatgacactggattacacttcactcagcaaagctgctttcttatagttagccaagaatgataa

SEQ ID NO: 65416 - DNA, 360 bp, Glycine max
  Clone ID: PAT_MRT3847_30082C.1
cacactcactctacttcattccttcacatttacacactcaaacataggctcatactcggaaaagggaattattgaagagcaagagtgccaacttttcaaaaataaagaaactccaactcctcctgttctagtctatactgctagcatttatcatctctttcactttttccatgcccattctttctagcaagccaaaaaaacttatttcaaacacttatctacttgtctgatgctgcaatgattagatcacacatatctataaaagcaaaactgtcatgactgataacgaacacttttaatttttttttcacttcatcgtggatgatgaaattattccagatgcaccaatgtaaatcactc

SEQ ID NO: 65417 - DNA, 354 bp, Glycine max
  Clone ID: PAT_MRT3847_30083C.1
acatagtgattattatgggtgttggtttacgtattaatccacacaatggatatattcattgcctggaaaaaaataaatatcttggaaacatggaaaagggaacagcccctatttgcttgttgaaacaagagaaactggttatagttcacatcagctatttttgtagcatgattcaacgctctttcaggcaaaagcttggcacgcacctgggtggggttgcaatgtgttaaaaagatgctcttcaaccacagccttttccatccactggttctgatagagaccctaatatcgtcgaatcgcatatgttgcctttggacgtaagatggggggttcttaatatggcatgcctcttat

SEQ ID NO: 65418 - DNA, 274 bp, Glycine max
  unsure (1)..(274): unsure at all n locations
  Clone ID: PAT_MRT3847_30084C.1
nnnnaaacgcagaacaaaatcattaagtgccaacattttatttatgcattgacgaggctctaatcaaatatacataaacgcatactttcctcacctactctgatctatgacaaaatacatattagtacatacttattcaagaaaattccctaaaatttgaagacatagacaccctttttccacaatatacctcctatttcttattccgctgcacactcacaaagtaccattctgtgtgcgccattaatcatttgaaaacagcttatgcacaccc

SEQ ID NO: 65419 - DNA, 284 bp, Glycine max
  Clone ID: PAT_MRT3847_30085C.1
gctcttaaccaaaagactattgaagtatgaatgcgttgcttcctattgttcaccagctcgttatttttctcaataattaacattttttatggttacattgttttagaatcatgttgagcatctgtaccaagttttgtatgataaatctatctctacattcacttttgatcaaaaaaaaaaaaaaaaaaaaaaaaaaaaaaaaaaaaaaaaaaaaaaaaaaaaaaaaaaaaaaaaaaaaaaaaaaaaaaaaaaaaaaaaaaaaaaaaaaaaaaaaaaaaaaaaaa

SEQ ID NO: 65420 - DNA, 475 bp, Glycine max
  unsure (1)..(475): unsure at all n locations
  Clone ID: PAT_MRT3847_30086C.1
aagtcctacacagttaatgtccattagaagagaaataaacttaatgtttccatttccagcaagtatccctttcacagtaattaattgaaagatgggcaatttttaaggcaaccccaaaccctacaagagacttgtatgcacttatctcacaattgttagaccttttctttcactctaatcatcaaaatttggtttctcctagcctaacagaactaacttctatactagcaggtacttctataacacttacaactgtacaagaattagaagggcctccttattgactctctttttagttgagagaaacaacataatttgaaaaataatttggcttaccccaagctcaaaagttcaacttgagtcctttttcatanattcaataaaaggacaggagttttcgtgacatttctttccttgcttggtaccctttttaccgggagcattgggtgagaaagcttcccgtgcgtatacaaaa

SEQ ID NO: 65421 - DNA, 351 bp, Glycine max
  Clone ID: PAT_MRT3847_30087C.1
aaaacaaaacaaaccctaaaaaatgcccccttttgtcgttttttcgaaacccaacccttttttttttttttccaaacccaacccttttttggttttttcaaaaccgaatccttttgtcgttttttccaaacccaaccctttttttgttttttcgaaacccaacccttttgttgttttttcaaaacccaacccttttgtggttttttcaaaaccgaacccttttgttgttttttcaaaacccaaccctttttttgttttttccaaaccgaatccttttgttgttttttcaaaaccgaacccttttgtggttttttcaaaaccgaacccttttgttgtttttttaaaaccgaa

SEQ ID NO: 65422 - DNA, 367 bp, Glycine max
  Clone ID: PAT_MRT3847_30088C.1
gaaaacctacgcttacaattagagacaaagaaaagaagaaaggaatgaattgatcgatggaaatgcaaggaggaaagaacgcggcagagtccattaacgaaacagttacatacatgggggcttctgccaatgctggcatggagaaaaccaaggccactgtccaagagaaggcagaaagaatgacaggacgtgatcccgtgcaaaaggagttggcggcccaaaacatagaagcgaagatgaaccacgctgagctggacaagcaggcggcgcgtcatcataacacagtgggcaaacagatcggcaccacggttgggcacatgggacatggccaccacaccaccggagccgggactggaaccggcacgta

SEQ ID NO: 65423 - DNA, 339 bp, Glycine max
  Clone ID: PAT_MRT3847_30089C.1
ctttttcacgttttagctgacattaggagatcgcactaactgtctagggagcttctcatgcctttggtgaacgtacctggctgatgtctcaatagcaattcgagcctaggtgcggtgcattcacctggaagctgtcgatccggaccacgagatctctgttctcatctcacagggactatataatgacatactggaggagaacaaaggcgactaccacaatatctggcgctactacaaccgcattgagctcgaaaaatgatggcactaggacaccgttggccataggcatctgtaagccacatggattagaggacttctagcgcaacaggacgtgatcag

SEQ ID NO: 65424 - DNA, 465 bp, Glycine max
  Clone ID: PAT_MRT3847_3008C.1
gttccaaaagcttggacagggaaaaaaaaaaagcccggatttttccccctttaattggggggggggaaggggacccccttttaaaaaacaaggggccacaaaaaaacaggaagggggggggccccccattaaaaataaaacaggggaaacaacaggggggcccccccccaaaaaatctaggggagggaaaacggaatttctcccaaggggctccccgggggcccaggaacccaaagggcttaaaaagcaaaaaaaaagggggcccccccgggggaaaagggaaaggcccccccacgggcccaatgaaaaagcaagggaggggccccggggaccccccccgaaaacgcccaattccccacgggcgctaggccgccaaaaaggcccttttttttcccgggaagggccccccaccttttaggccaagggagggccccccccaagggagacccccgggcccttaccccc

SEQ ID NO: 65425 - DNA, 144 bp, Glycine max
  Clone ID: PAT_MRT3847_30090C.1
ggctatatgcctactacactatatattgcagagtactatttttcgccgaggggggggagtgctacatataaacatgaatatattgatcatcagatgtgcattgattggttgggtgcacaaggcactggttaagctataccaaac

SEQ ID NO: 65426 - DNA, 383 bp, Glycine max
  Clone ID: PAT_MRT3847_30091C.1
atattattttttaagcaaataactccaatgggtgcatttctaaatgcatatttggcattcactaaccatgctgtgatacatacacatactacaagcacatgttatcgttgattaaactaataactacatcaaaattacatagcataaaaggcaaatcaaagagattaaaattgatagagtacttgagaatgaaaatatatagatattacacataagaatgggaaatcttggtctggatgttaggcatatacttacaacttagtaagtaaaggttgtttgacgaatatcaacaaactggatgaaattgaatcattaaacagaaaaatgcctatacatgctctggggaagagctaaacaagcataaacttgaatgctgatgaaca

SEQ ID NO: 65427 - DNA, 370 bp, Glycine max
  Clone ID: PAT_MRT3847_30092C.1
ggttactacaaatataatgtatagtaagcttgtcattataaatatatgctatcatgagattgatggttaacttttataattaattattaatgtcaaaatagttatactaataatatatgtaaattaacacctttcattttacatactccatgattcagcacctaaaatattgtttgaattgaaataaactgcaccaaatattcttatttaaaccttagccgtccagatctgcaaccttcatgaaggccatcacttgctagatctgcaaccttcaagcccaacacggtcgcgtttcagaaggctctcgaacctcgccagcagcttgtgaatgctttcttcgcggtttcatgcagaatcgcgttctggattc

SEQ ID NO: 65428 - DNA, 253 bp, Glycine max
  Clone ID: PAT_MRT3847_30093C.1
gtgagagaaggtgttggtttggtttggcgagcgagagcgagaaaagaggaggaaacaatgggcgaggtatctgaaagtaccacgacgaagaggaagaagaagggacgcccctctcttttggatcttcaaaagcgatctctcaaaaaagaacagcaaaatcaccaccagcagcgacaaagcaacaactccaattcagccaattcccacaacaacaagaacaagaccaacaaaaacgctgttccccacgacgacg

SEQ ID NO: 65429 - DNA, 234 bp, Glycine max
  Clone ID: PAT_MRT3847_30094C.1
tgggaagagtctgggcaggtgtcaaacgcttcctacgactatagaggcactgattctccatgcgatgtgcaggacgacggcattcgatattactcggctgagtaagactatgagggaggtcgctatcgaagctgcaatgaagcccgtatgagcctggagttggtccagcacgggctcatggcagtggcttatgaaatatatgatgatgtccgcgactacaacgaggggatctac

SEQ ID NO: 65430 - DNA, 292 bp, Glycine max
  unsure (1)..(292): unsure at all n locations
  Clone ID: PAT_MRT3847_30095C.1
gtcgcatgcanacgtacgtaagctcggaattcggctcgagcgatctctcgttgatctccaactgccgcctccattcgccatggaccccaactgctcctgtgccacagatggatcctgctcctgcgctggctcctgcaaatgcaaacaatgcaaatgcacctcctgcaagaaaagctgctgttcctgctgccccgtgggctgtgcgaagtgctcccagggctgcatctgcaaagaggcttcggacaagtgcagctgctgcgcctgaagtgggggcgtcctcacaatggtgtaa

SEQ ID NO: 65431 - DNA, 436 bp, Glycine max
  Clone ID: PAT_MRT3847_30096C.1
gcagatcccctgcaaaatgttggaagtgcaaaaaattcagaatctcctaaaaaccctggcaaggaattgtctattgtgggagatcttgcttctgatgcttatagaagtccactaaagaggtcgagtagtgcttcttccttaggaatcctatctaataaagaagactccagaatttcagagtttttcaaccctgaacttgagaggcacagtgaaggatttcggggaaagagttcttctaatatgattgttaggaaagaagggtcattagttcctaagcttcggtgtcggggttgtgggagcatattttgagaaaattgggtccacatgttttgctgtttattcaattgcagtgactgacgcacaaaataaaacttgatacaggaattttgagcgattgcaccggcatcttaaagatattcccaattacacattgcaa

SEQ ID NO: 65432 - DNA, 147 bp, Glycine max
  Clone ID: PAT_MRT3847_30097C.1
cggctctaagctgcatagtgagctcaacaagcgatccattgactatcttatgactgatctcctgatcatgtcatactcacatgcggatggtgcctatatgtatccctacgaacgcattactatagctactgactcatgtacaccatc

SEQ ID NO: 65433 - DNA, 735 bp, Glycine max
  unsure (1)..(735): unsure at all n locations
  Clone ID: PAT_MRT3847_30098C.1
tttttttttttcaattccaaattaccggatgacttagttaaatgaataacatgtattctaacaaatagttcaatatttacaacaaagcatttgccttcatcaatgtacgtatagagcataagggcattaaatgaaaactctcagtataggtgcctctaagaactcaagtttttaagcaaaacttaaatactactctatcttattagggaggaaaaatataccactggatcaacaccatttacatcgctaatgtgagtacacaattttggactggcagaggaaaaactaaatcaaatactttgtacactgaaatagttcacttctcacagaagtgaacaccataaaaaactgcttttctgctggacatggaacaaattgacagttaaatgaagtttaattaaaaaactcagtgactatgccgtgtaaagatctcgacataaaacgagctttgagaagaattactacttaacatgaatataatcctcagccatacgccatgggcatcaaatttcttgcattagagaacttcagttattaggtaatcatcagtgtaaatgcagtgaggaacaagatgactttgcacttgtgcaaagggttctcttcatccaatcagatggcaactttatcactgtggagcaacacttattttgaggccttaaaagatcttatcatttaatattcccactctttatgnnnnnnnctaacatctnntcngnctcctttttagcannnnnt

SEQ ID NO: 65434 - DNA, 284 bp, Glycine max
  unsure (1)..(284): unsure at all n locations
  Clone ID: PAT_MRT3847_30099C.1
antanancacctttntntctttcagctcccaagagagcactccctctgctgatagctgatatatacattaagctttaaaaattaaaaatagtaaagaaagagaaatatcctaaaagcnaattggntggtgctgtaantnanacctgangtacnagtccttggaaccttgaangaaattcctcnangtgnaaagttcccgtttgaaaaccaggannancacccagaangagaanggcccaaggccggcaanactttccnangnncagcanngcangnnnaacncg

SEQ ID NO: 65435 - DNA, 441 bp, Glycine max
  unsure (1)..(441): unsure at all n locations
  Clone ID: PAT_MRT3847_3009C.1
gtttgcgttgggaatttggttctgttttttttttttttggtggtgagtcaccaatggaaggtggaatgatttttgcgtgaaaaaatgcttctcactatttctcaaagtagctttcaaaggttcgccatatttttattattaaaataaaaaaagaattccctttctttttcttctaattttaaagatttaactgccgaggaaaacgaggaaggaccagatacgagagcgagatactaaatacatgacagctcttttatgtttatgtgatttttttttttttgaactagttgcttgtgttgtgcgctttctatgatcaccttcaccggtactttcttctcctgcttctataatcatttttttgtttttgtctttgaaaaagtgtgcataccggttttggctttgctttcacgtacgtaccanaaatgatgattttggttgttg

SEQ ID NO: 65436 - DNA, 491 bp, Glycine max
  Clone ID: PAT_MRT3847_300C.1
ttccaaggaaggctttcccgtcatcactgtatgacgtcctccttctttgggggggggggggggcatacaatatagttcgcggtggagtgggccttaggcgaaaagttggcgctgggggtaaaaaaatacgagggaaaaagaaagaaaaaatactgggctaagcgatgcctacacggttagaggcaacggtaataaaaagcaagcggagagataagagagggcatcatcgaggagcatgtgatacgtagggtacagtaaacaaacccgaagacatgtttgaacaacactaaataggctaatgtggtagatactggttggggatgttggtattattaattagagaaacgcctaggtggtgtataggtattgatgggagtttattgaccataaggtgtaggtgtagtaatatacgtgttatgagttatggctggcaggccgggggcaaacgtatgcatcgcaagttatggccggctacattatggtgtgtttga

SEQ ID NO: 65437 - DNA, 528 bp, Glycine max
  Clone ID: PAT_MRT3847_30100C.1
ggctcgagaaaagacttccttttttgcaattgtcatttgtcaccaaacaattgttgttagctctcacaagcaagcttcagcaacgacaatgaaggtcagaactagatgaagaaaccaatctcttttataatttcctccctttcatccactaatcaatgtttctaattgagtttaattttctcagggatagccttacactgttttgtttccactagatcttgtatttaactatttcctttcatgttttaaatgtagaagtaattaactattgggtcttaactgctctttgatttgttgtgttacagaaagtagtcttacagttggacttacatggcgatagaatcaagcaaaaagctatgaaaacagcatctggcctttcaggtacatctttgcttttgattcaagaagcacaattaatacatgtcatgcagcatcaaggaatcaatgatttttattaacaaaattgcttgtaattatttttgcacgggttcgatcagtttctgttgatatgaaagacatgaaaatgat

SEQ ID NO: 65438 - DNA, 454 bp, Glycine max
  Clone ID: PAT_MRT3847_30101C.1
ttttaattttgtcagccattgttcagttataatagtttacagtgtagttaatcctgcttgaacaatatgagaccaggtccatattctcgggtgtctacttatttccttgtagcttagaaagttgtaattaattaattattgttgccaatgaattagtttggaggatgccgacgaatatacctaaactaattcaagaattaattaatttttattcttgaagtaattaattttgctcattctagtgaatatacctaaatgtagtttagacataatgtctcccaatagttgaaattcattgtcccctgtaggctattgcttgttatcttgaagaatagtagtcataatgtaaatgtgatcagtacgatatgactgtataatctttattcttgtaacaataacatttaacagtagttggctcatgaagtatgctttgtttacattaatgtatattcgt

SEQ ID NO: 65439 - DNA, 509 bp, Glycine max
  Clone ID: PAT_MRT3847_30102C.1
acattgggatcgatgcacagaaacgcacattcaaaacttccatattaacgcagtacttggtctttttcttcttcatctatgcctaatgtaacccactacaaacatagttctgaaaccgaaaacttgaaatccatcatcaatccacagttagcaaccacaaaacctaatctctcccaatgaaacgctcccttcgccccctattcctactcctcctcatcatcatcctcttcgccgccatgctcacctccagcgacatcctgcgccatggcaccccctccatcgacctcgaatcgcgcgtcccaatccgccaccttccgccgccgcagatcaacgtcacgctcctccgccacgcggccgtcgagatcggcgaggagagcattagccatgagatccagaacctcctcaacttccgccactggctccacttccagaatctcctccaaaactggttccggaagcgccgattccaacccggcatcatgtccgagctgactcggtcaattaagctt

SEQ ID NO: 65440 - DNA, 2045 bp, Glycine max
  Clone ID: PAT_MRT3847_30103C.1
tccgggtcagccccagcattcggcaagatctgatttccctcttcacaaggagagaaagagaaaggcatagtttgctgcaggtttgatcttcaagttgcaatctttttgttgtctcgactgggtaagaagaacatatttgagatctgtcactttgtttcagtccagatcttcaaagtttcctttttgttcttttggtgcaaaggattaaactaaggaatgccaagaaaatggggaggaagggaaattggttttctagtgtgaagaaagctctcagccctgactcgaaggagaagaaagatcagaaatcaagtaaatctaagaagaaatggtttgggaagcaaaaattggagacttcagtctcatactcagaagctcataaagcaccaccaccaccgccacctattcctccaccagaagcgattaaattaactgatattgaaaatgaaatcagtcatgatcacgactatgttgttgaagttgcaactgccatggatgctgaggaacctgttcctgctgttcagatagaacctgttagggttgaagctgccccaattgctcattatgctggtaaaccaaaggatgaagtggcagctatcaaaattcaaacagcttttcgtggatacttggcaagaagagcattgcgggctttaagggggctggtcaggttgaaattattgatggaagggccggttgttaaacgccaagccacaagtaccctccgctctatgcagacattatctcgcttgcagtctcagattcgttccaggaggatcagaatgttagaggagaatcaggctctgcagaggcagctcttacagaaacatgctagagagcttgagagcttgcggatgggagaagaatgggatgacagcctacaatcaaaagaacaaatcgaagccaagttactaagcaagtatgaggctactatgagaagagaaagagcgctggcttatgcattcactcatcagcaaaattggaagaactcgtctagatctgtaaatccaatgttcatggatccaactaatccgagctggggttggagctggttggaacgatggatggcagcccgaccttgggagagccgtagccatatggataaagagttgaatgaccactcatccgtaagaagctcaagccgcagtattaccggtggagaaatcagcaagtcatttgctcgtttccagctcaatttggcggaaaagcactctccaacagcctgccagaatcctggctcccctagctttcagtccactccttccaagccagcttcatcatctgctaagaaaccaaagaaggtaagtccaagcccaaggggcagctgggttacagacgaggactccaaaagcttggtcagtgtacagtcagaccggttccggaggcactccattgccggttcattggtgagagatgatgagagccttgctagctctccagcagttccaagctacatggtgccaactcaatctgcaaaagccaagtccaggacacaaagtccattagccccagaaaatggaaaagcagagaaaggttcctttgggagtgcgaagaagcggctttctttcccagcttcacctgccaggccaaggcgccattcaggtccaccaaaggtagaaagcagcagcttaaatgcagagttagctgtggacaagggtgtggacagttgatcatacaagtaaaaggatggaaaagcattaaagtaggattgaaaatatatcactgaagaaataaaacaaaaagagtttatttaaattgagtgttccatttatttatttttcatatttttacgtgtatcctaacgtttcttggaggcttttgatttggggtgaaaaaattgctttgcttacttttttttatcaatttgtattttcgtttactttctcactagttgccccgaggggaagacatgcgattcatgaatcatgttggtcaaatgatagtacaaatgaactgtccgaatcctttctgtgcttccccaatcaaggacaagtatcattctggtcaaagttcctcattcttgatccttagttgtgatataaatgtaaatt

SEQ ID NO: 65441 - DNA, 895 bp, Glycine max
  Clone ID: PAT_MRT3847_30104C.1
cccacgcgtccgcccacgcgtccgcccacgcgtccgtacggctgcgagaagacgacagaagggagatgaagaaaatttcaagcatcgtgaggctattagagatttgagggagaagtacatgagcaaagtttccttggtaagggacacacatgcaaaacagtgggaaggatttcttcagcttgatgcgcagaggcgtcaacagcaggcggttcaacagatgccttctggttatcggggctttaaacagcagagctttcctgaatatgatggatccactgccaaccctcctccttatgctggttctaatctaccattggaatcgaggaacaggttctcagacaacatggaaacttatcctaataggcctcatgataattttggtgaatttcataggcgtggagattttgcaaaagcttacaacagatattaaaattctatatatcaattgagtgggtccagattgatcgagtaggctgtttaatgcactggaggccgtaagggtaggtaagtatgttgattaatcttaggattgggatggacatgcatttcggttggcgggtccggttttcctttgaaatatagttgctcagtcgtgttaagaactttgctgcaagttgtgatacattattgggttattatgtttgactggtaacgtgctactgcagcttggattgtgttatgaggagatcccttgaaagattgattgcttttagcagaatcaaatttacgttttgttcccacgcaggtgttttatgtaccctatagggtgcttatgatttatttacttgctataaatttcttgagggggtggtctggttagtatctttaacacttttctgaatgatttacctacaacgaaatggttttacgataatgaatgttatcggatgtgctt

SEQ ID NO: 65442 - DNA, 708 bp, Glycine max
  unsure (1)..(708): unsure at all n locations
  Clone ID: PAT_MRT3847_30105C.1
gaaacattaatttaactctatttcaaagatttagtattttcttgtagggatgctaggtaacttccgtgctttgatatgttgtgatatctagaggggcaacctggctgttgccagattcattgataagatgcacgaggcacaaatagcaaaaccatgcctaagacaaccttcttcaagtaagccatcaaacgatttctcgtcactgtcggcgttcgacaacgtccgtgtcacgactacagcaacattgacatcgcacaaatcattgtcatttctcttcgtttttatttccctgtttcaagaaacttcctcacattcaaaaattgtggttgagtttttgaggatgaatccttccttcctcttcatccttgctaagatcaaaacggtcacgacaacatggttgttggttggtggtgggtggcagatctaggtcagtggtgggtggtctgggatggtgatgggtagcggatccgagatctgggttgcgtcgatgattttctgtttttgttattgttcctggagattttatctattgtttttgttggatttgataatgtttaatggcgtcggtgacgggaagccgagcgtcggcgaggcaacgaaggtgttgtccctatctatggtggttaatagggagtcgaagtagatgagggaggggtggtcctgttgtgtgaatgtntgtggtgtgtgttagatgctcatataataata

SEQ ID NO: 65443 - DNA, 428 bp, Glycine max
  unsure (1)..(428): unsure at all n locations
  Clone ID: PAT_MRT3847_30106C.1
gccactgatttctccttcatgtttgcacggttacaccgttataatacaagccttaatccccacttttgtctctcacaatcgctctcaatctttccagattttctcccaaaccgttcaaacccgtatcgcgtgtcaaattgttcttctgattttctcattgatcgcgattatcgcatctcaaatcgaacttgaatcagtcatctttatatggaggggaatccaagaggtacaataatatacccagaggacaccatcatttgacaacacagaagaaacaggagattagggaagcctttgaattattcaatactgatggctcangtactattgatgccaaggatctgaatgttgccatgagggcccttggatttgaaatgacagaagagctcattaatcaaatgaaagcagatttggacaacgatggaagt

SEQ ID NO: 65444 - DNA, 455 bp, Glycine max
  Clone ID: PAT_MRT3847_30107C.1
gtgcagagagacgagggggtgccaaggagttgtgtcggatactgaacagtgtgatgaaaagaagtcttgttttttcttgctcaatttggtagcatggaatgccatgcgtacattgttcccttcgatgaacgctgcttgggcccgtctcggagtgaaatgcgcagttggaggcttgctgtggaagcacacaacatcttggtttggaccattcctgaagaggcgttaagcacaagaatacatcctgggaacattagatagactcaaacagttaccaaaagcttacttttatgccagagcctcgaatccatcccaggacacattgtgttcagtttgatggcaccgtactctttatattccatacttcaaaaaacatggatttgggggtggggaaatttaactcgaccttgtatgatgaatgggttaacaaggggcaatgcacccggcacctgccccga

SEQ ID NO: 65445 - DNA, 350 bp, Glycine max
  unsure (1)..(350): unsure at all n locations
  Clone ID: PAT_MRT3847_30108C.1
ngntcnngcacncgtacgtaagctcggaatgcggctcgagngtataccttgttgagctanagtctcccanctntnctcnntgctggagantaaagtngnagcggaatttnagnaatattcanatgngccagctantntgacgacngcagngncnnnnttnngtggagcattagacgagagaagaggcnngngttgnnnagcggnagntgtntgntgggngngaananntgtgnggnngggnngtggngngccngtgtntgtgcgggtnggnngtaggtntagnggngttnagtnggtgngtgntgnncggtgtnggnggttngtntatgngngnagaggagnnngnncgn

SEQ ID NO: 65446 - DNA, 911 bp, Glycine max
  Clone ID: PAT_MRT3847_30109C.1
ccaaaaagttagcattattgggagaaccaagaacgtaacggttaacagcaactactttgtttcacatggacgagagaaaaagaatagatccaaggagcggtttcaaccgcgcttccagaatcttccacagcctcaagccaccactccccctccctcctcccaacgccaccttctccgccacaacctacgccctctccctccgccgcaactcgctatttcccgactccaccaccgccctcatcgatgccaccaccggccaccgcctctcccactacgaggtcatcaaccgcatcgaaaccctagcaaataatttcacctctatcctcaaactctccaaaggcgacactgcgctcattctctccccaaacctcatccaagttccaatcctctgcttcgcacttctttcgcttggcgtggtcgtctctcccgcgaaccctatctccacgcgctccgatctcacgcgcttcttccacctcagcaaacctgcaattgtcttcacagtaacttcagtcgttgagaaaacacaagactttcatgttagaaccgtactcctcgactcgcccgagttcgactcgctcacgaagactcggattcagatacatcctccgagtccactcgtttcccccgtgactcaatctgacgtggcagcgattttatactcgtcggggaccacggggatgatgaaaggtgtggtaatgacgcaccgtaacctaacggcgttagccgcgggatacgacgccgttagagtaaacagaaagtatcccgcggtgttcttctttacgatgccgtttttccacgtgtacgggttcacgctcagttttagggcaatggtgctgtcggagacggtggtgataatggagaggttcagtttgagggggatgctgagcgccgtggagaggttcggagtgacc

SEQ ID NO: 65447 - DNA, 181 bp, Glycine max
  Clone ID: PAT_MRT3847_3010C.1
aaagaatatgattgattattgatcatttccggcataatattattcccaggatagaagaaggcatgaatcgatgaagtagcccgctctcataacaaaccaccaacgaccaacattgggaaaggcaaagaaaaaattggtggaagaaagaagctaaggtagaaaaaagcagagcttaagattg

SEQ ID NO: 65448 - DNA, 353 bp, Glycine max
  Clone ID: PAT_MRT3847_30110C.1
gcgagacgagcgtagttactggatacatgggctggcacaaagggatcgagcagaggtagcggatctactctacgagattgagatatacacaagcgacactgcggaatcacaatttgatcgtgaaaagaagtcacatgctatgcatgccaggacacaaagacaggatatgacgtaggcgattgaactcagagcaatttttacatagattcttctgtatcatcatttctttgtaacatagactagtagcatgtgtggaagcgggctagactatattgaacgaggaattgaaggaagcaggaaatttggtggggttcataccaacaggagctcctggaattcggctcggggtacat

SEQ ID NO: 65449 - DNA, 851 bp, Glycine max
  Clone ID: PAT_MRT3847_30111C.1
atcctacacacatttacatacatgactctcggcaacggatatctcggctcttgcatcgatgaagaacgtagcgaaatgcgatacttggtgtgagttgcagaatcccgtgaaccatcgagtctttgaacgcaagttgcgcccgaagccattaggccgagggcacgcctgcctgggtgtcacacaacttgcattgaacaattaatagaaataacagaaaagtagaaaagaaatatgggtgctttcactgagaagcaagaggctttggtgagtagctcatttgaagcattcaagacaaacattcctcaatacagtgttgtgttctacacctcgatactggagaaagcacctgtagcaaaggacttgttctcatttctagcaaatggagtagaccccactaatcctaagctcacgggccatgctgaaaaactttttggattggtacgtgattcagctggtcaacttaaagcaagtggaacagtggtgattgatgccgcacttggttctatccatgcccaaaaagcaatcactgatcctcaatttgtggtggttaaagaagcactgctgaaaacaataaaggaggcagttggggacaaatggagtgacgagttgagcagtgcttgggaagtagcctatgatgaattggcagcagctattaagaaggcattttaggatctacaattgccttaaagtgtaataaataaatattatttcactaaaacttgttattaaacaagttctcgatataaatgttggttaaaataagtaaattatatggtattggataaacaatcttaagctttatatttccatagatttatgtttgtgaatcatgcataatcgatcctttatac

SEQ ID NO: 65450 - DNA, 303 bp, Glycine max
  Clone ID: PAT_MRT3847_30112C.1
ttctattactgtccttgctttcactctcttcttctcactgatccgcattgccgttcaaagtggtcttatttgaaaaacacttgggcgttggtgcaaatgtttgctccgtaaattttctctggggacagctggctcactgacaaaacagtttttactgtgcagagattgggacatatcggctgattattatacaataggaactgaatttagaaaattcctaccggattacattaggtggcatcttgataccttgatgatttacattgacctatcttaaaacactgctgcagatgaatataagcg

SEQ ID NO: 65451 - DNA, 579 bp, Glycine max
  unsure (1)..(579): unsure at all n locations
  Clone ID: PAT_MRT3847_30113C.1
gagccgctcgaggccggccangggccgggaactcccattgaacggttaatangaaataacagattagtagaaaagaaatatgggtgctttcactgataagcaagaggctttggtgagtagctcatttgaagcattcaagacaaacattcctcaatacagtgttgtgttctacacctcgatactggagaaagcacctgtagcaaaggacttgttctcatttctagcaaatggagtagaccccactaatcctaagctcacgggccatgctgaaaaactttttggattggtacgtgattcagccggtcaacttaaagcaagtggaacagtggtgattgatgccgcacttggttctatccatgcccaaaaagcaatcactgatcctcaatttgtggtggttaaagaagcactgctgaaaacaataaaggaggcagctggggacaaatggagtgacgagttgagccgtgcttgggaagtagcctacgatgaattgcgagcagctattaagaaggcataattagtatctattgcagtagagtgtaataaataaatcttgtttcactataacaacttgttactatt

SEQ ID NO: 65452 - DNA, 778 bp, Glycine max
  Clone ID: PAT_MRT3847_30114C.1
gggccgctcccgggccgctccgggggggcggcggaataacttgcattgaacaatagaaataacaacaaagaaaataagtgaaaaaagaaatatgggtgctttcactgagaagcaagaggctttggtgagtagctcattcgaagcattcaaggcaaacattcctcaatacagcgttgtgttctacacttcgatactggagaaagcacccgcagcaaaggacttgttctcgtttctatctaatggagtagatcctagtaatcctaagctcacgggccatgctgaaaagctttttggattggtgcgtgactcagctggtcaacttaaagcaaatggaacagtagtggctgatgccgcacttggttctatccatgcccaaaaagcaatcactgatcctcagttcgtgtgatgttttgtctgtaggtggttaaagaagcactgctgaaaacaataaaggaggcagttggggacaaatggagtgatgaattgagcagtgcttgggaagtagcctatgatgaattggcagcagctattaagaaggcattttaggatctactattgccgtaaagtgttataaataaattttgtttcactaaaacttgttattaaacaagtccccgatatataaatgttggttaaaataagtaaattatacggtattgataaacaatcttaagttttatatatagttccatatactaaagtttgtgaatcataatcgatgctttatataaataagttcataagaatttataaaaaaaaaaaaaaaaaaggcccctag

SEQ ID NO: 65453 - DNA, 457 bp, Glycine max
  Clone ID: PAT_MRT3847_30115C.1
aaaaaaaaaaaaacggggggctaaacccattcaaaaacaagggaccttcacaagccccaaacaaagggttaaaaaaacaggaaaaaagcccagattcaaaacaccccttttttaaagggagcaaaaaaggggaaccaaagaaaaggcccaagggttccccccccccccaccaaggttgggacccttgggcagggcccccctaaaaacaattcctttcccttgggaatttggggaccgggaaaacccgggtttttaaaccctcttcccaacccttggtttccgggccccccccctaaatccacgaagggcagcttccctatttggaacccgaaccttggggttccaaactcttttttttgggaaacccccaaaggggcccccacaaaggacccggaggaagggtttttggaaacacgttttttttttttacaggtttttgaacaaaggccctcttggg

SEQ ID NO: 65454 - DNA, 805 bp, Glycine max
  Clone ID: PAT_MRT3847_30116C.1
actatgactctcggcaacggatatctcggctcttgcatcgatgaagaacgtagcgaaatgcgatacttggtgtgaattgcagaatcccgtgaaccatcgagtctttgaacgcaagttgcgcccgaagccattaggccgagggcacgcctgcctgggtgtcacacacctgttcgctgcggcaaaaaaagataaaagcataacttgcattgaacaatagaaataacaacaaagaaaataagtgaaaaaagaaatatgggtgctttcactgagaagcaagaggctttggtgagtagctcattcgaagcattcaaggcaaacattcctcaatacagcgttgtgttctacacttcgatactggagaaagcacccgcagcaaaggacttgttctcgtttctatctaatggagtagatcctagtaatcctaagctcacgggccatgctgaaaagctttttggattggtgcgtgactcagctggtcaacttaaagcaaatggaacagtagtggctgatgccgcacttggttctatccatgcccaaaaagcaatcactgatcctcagttcgtggtggttaaagaagcactgctgaaaacaataaaggaggcagttgggggcaattggagtgacgaattgagcagtgcttgggaagtagcctatgatgaattggcagcagcaattaaaaaggcataattaggatctactgcattgccgtaaagtgtaataaataaatcttgtttcaactaaaacttgttattaaacaagttccctatataaatgttgtttaaaataagtaaatttcattgtattg

SEQ ID NO: 65455 - DNA, 838 bp, Glycine max
  Clone ID: PAT_MRT3847_30117C.1
aaacgactctcggcaacggatatcccggctcttgcatcgatgaaggacgtagcgaaatgcgatacttggtgtgaattgcagaatcccgtgaaccatcgagtctttgaacgcgagttgcgcccgaagccattaggccgagggcacgcctgcctgggtgtcacaataacttgcattgaacaatagaaaataacaaaaaaaagtaaaaaagtagaaaagaaatatgggtgctttcactgagaagcaagaggctttggtgagtagctcattcgaagcattcaaggcaaacattcctcaatacagcgttgtgttctacaattcgatactggagaaagcacctgcagcaaaggacttgttctcatttctagcaaatggagtagaccccactaatcctaagctcacgggccatgctgaaaagctttttgcattggtgcgtgactcagctggtcaacttaaaacaaatggaacagtggtggctgatgctgcacttgtttctatccatgcccaaaaagcagtcactgatcctcagttcgtggtggttaaagaagcactgctgaaaacaataaaggaagctgttggcggcaattggagtgacgaattgagcagtgcttgggaagtagcctatgatgaattggcagcagcaattaaaaaggcataattaggatctactgcattgccgtaaagtgtaataaataaatcttgtttcaactaaaacttgttattaaacaagttccctatataaatgttgtttaaaataagtaaatttcattgtattggataaacacttttaagttatatatttccatatatttacgtttgtgaatcataatcgatactttat

SEQ ID NO: 65456 - DNA, 2956 bp, Glycine max
  Clone ID: PAT_MRT3847_30118C.1
aattcggctcgagcaaatattatttacacccacccttcctatatatataaaaaagaaagccccctaagcctcatgggaaaggaaaaccatcgagaaaccaaaaaccaaaatcaatttagaggaaaaagttggaagaagcatggattctaggcggcgtggtaaaaacgcatctattgcaacgcaagttgcaacaacttcgatcggttacaaattccagtgctgtgaacaaagcctcaattatttgtggatgccaccagatacatagaggagctgaagcaaaaagtggatggattgaactcagagctaggaaccgcggaatcatcaatctcccaagacgaactacccatggtcactgtagaaaccctagaaaggggattcctcattaatgtgttttcagaaaggaattgtcccggtatgcttggggcaatactcgatgcatttgaagaactgggacttgatgtgcttgatgctagggtttcttgcgaagacactttccagcttgaagcagtcggaggagaaagtcaagagaatgaaagcattgacgcgcaagtggtaaagcaagcagtgcttcaagcaatccaaaacatggattaatcgaagaacacatgtgctaagatgtatgtgcccctctctcgcttttccctggaatcttgtagcgtgtaagataatacactaggatacatgatcatctaattccttcctaccttaatatatttgccttcttttgttttcctttggaataatttttaagtgtctaaaatcaggtcacaattattggcttaaataccaatgacttgtgaaacttttaatatatatatatatatcgtactttttttttgtttcatttaaaaaaaactaaaaagggaacggaaataacttgcatcgaacaattaatagaaataacagaaaattaaaaaagaaatatggttgctttcactgagaagcaagatgctttggtgagtagctcattcgaagcattcaaggcaaacattcctcaatacagcgttgtgttctacacttcgatactggagaaagcacctgcagcaaaggacttgttctcatttctagcaaatggagtagaccccactaatcctaagctcacgggccatgctgaaaagctttttgcattggtgcgtgactcagctggtcaacttaaagcaagtggaacagtggtggctgatgccgcacttggttctgttcatgcccaaaaagcagtcactgatcctcagttcgtggtggttaaagaagcactgctgaaaacaataaaggcagcagttggggacaaatggagtgacgagttgagccgtgcttgggaagtagcctacgatgaattggcagcagctattaagaaggcataattagtatctattgcagtaaagtgtaataaataaatcttgtttcactataaaacttgttactattagacaagttcctgatacaaatgttggttaaaataagtgaattatatagtattggataaaaatcttaagttaatattctaaataaaaaaaaaaaaaaaaaaaaaaaaaaaaaaaaaaattgagcccaagcaaataacattctcaaaatgagagtggtattaattactttattcctgtttataggtgcagcagttgcagaagacgctggtattgatgccattactcctgaagaaggcaaagccaataatattattgaggcgtatgagtcacctagattccaaaagtttgtgacacattgcagctcacatgttactcaaacatgcagtggaaatgatccattaaataatcaggaggccagtagaatgaatagtccatttgggttgtctttttgccttcttgattctatggagaagtgcttggcagaccataaagcctcacttaaagatccccaagataacaacaacctagcttcaatgtcgtctcttcctggctcaatccaaaatcagccactcctcattgagactgtaaaattcagaaccgtcttgaaaacctgttcccatgtcagtgcacaatattgtttcactaatcctaacgttgctacatcggctttagcggattgtctcatgccatctctcaatcaatgtgtttatccttctagttctatcttattaccacccccgccaccacccccgccacttatttagatctttgaagtacttgctatagaaaaatataactgggtttgctcaatcagcctatgtaataatcctttgcctagtcaagggacaagtcttaatctatcttgaaacatccatagttatatgtcaataatacatatgattgacttgcaaaaaaaaaaaaaaaaataacttgcattgaacaatagaaataacaacaaagaaaataagtgaaaaaagaaatatgggtgctttcactgagaagcaagaggctttggtgagtagctcattcgaagcattcaaggcaaacattcctcaatacagcgttgtgttctacacttcgatactggagaaagcacctgcagcaaaggacttgttctcatttctagcaaatggagtagaccccactaatcctaagctcacgggccatgctgaaaagctttttgcattggtgcgtgactcagctggtcaacttaaaacaaatggaacagtggtggctgatgctgcacttgtttctatccatgcccaaaaagcagtcactgatcctcagttcgtggtggttaaagaagcactgctgaaaacaataaaggaagctgttggcggcaattggagtgacgagttgagccgtgcttgggaagtagcctacgatgaattggcagcagctattaagaaggcataattagtatctattgcagtaaagtgtaataaataaatcttgtttcactataaaacttgttactattagacaagttcctgatacaaatgttggttaaaataagtgaattatatagtattggataaaaatcttaagttaatattctatatttgcgtaggtttatgcttgtgaatcattatcag

SEQ ID NO: 65457 - DNA, 263 bp, Glycine max
  Clone ID: PAT_MRT3847_30119C.1
cctctccggtgcatgctcccaccgttgcacaacctacaaacaccaaccttggggacttggggatccatgcagggacccctaaaataggagggacatttatcgccctgaggactatagggccacacaagtctacaagaacaacactgttctgatttggcctatattggccctacagacaaacaaagtgttaaaccgggccccagaaaaagactttgtgccccaccacccccctaaaagactacgaggtctctccacacgatcac

SEQ ID NO: 65458 - DNA, 292 bp, Glycine max
  Clone ID: PAT_MRT3847_3011C.1
ttcctttaatggcctggttcccttggcacctctaatttttattcccctaagattcttgctgacctttgaaaaaggccccgggttccaaaaacctcccctttgggaaaccccccctttccagcccccaattggaaaaccccccgtttttaccccccccgggagaacaccccccattttaaccccccccggggaagaacccccccctggcacacccctcccgtgaaaaacccccctttacaaccccccttgaaaaacccccccccgggaaaaccccccccgagaaacccccccc

SEQ ID NO: 65459 - DNA, 252 bp, Glycine max
  Clone ID: PAT_MRT3847_30120C.1
atctagaacaggaaagtacacggaatttccgacaatgctagctaaagctgtggcaactgagtgcgaaactacttgcgacaacatcatctgactcgtcgattgtaagcaagtcgcgcggcgactcggcgacactagcgcgagtgttattcgagattccaaggcatcatgcaccactactattagccttcatgagactgatgctatcattactccacgttgtgaagctcgtagtggacatgaagctagccggcg

SEQ ID NO: 65460 - DNA, 399 bp, Glycine max
  Clone ID: PAT_MRT3847_30121C.1
attcataatttaaacgttttacttaattgcatggataatgcgggcataaagggcaccaagtgtacattataaggagtatcaattaccatgttatgattcaatgacttccaatatcatgatacacataactgggcctaaaccaaaagaatgcactctgatcgagcttcgtttccctccacctgcaatacaggggaggacattacaaccgacaagtgcaaactgccaacccgatatgaattccaaaccatagggactatgtctctgacatctgcaattcacattcttaactcttgtgatcaggatggaatgtgctgacacgtgcagtgattcatgagtcaaactgttacggaggctgtgacagtgaactgggtagcacagtcgaacatgatcatcctaaca

SEQ ID NO: 65461 - DNA, 507 bp, Glycine max
  Clone ID: PAT_MRT3847_30122C.1
accagccgcaagcaccctaccaggaaacttttctcagaacacaagcgttacactaggccaaccctcacacctggtactgtgtgcatccttcttgccggtctccacaaaggcaagagagttgttctcctgaaggttctgaagagtggtttgctgcttgtgaacggacctttcaaagtgaatgcctgccccatgcgccgtattcaccaaaactttgttattgccacaagcaccaagattgacatctctggtgtgaaagtgcctgagaagatcaatgatgactacttcaagcgccagcgtcaaaagagagccaagaaggaagagggagaaatctttgccaagaaggaagagaaatatgctccttctgaagaaaggaagaaggaccaggctgaggtagacaaacagcttattgaagctatcaggaagaatcctgagaagaagaccatgtttgcttaccttaaatccatgtttggactgaagtcatctcagtatcctcacaggattaagttc

SEQ ID NO: 65462 - DNA, 292 bp, Glycine max
  Clone ID: PAT_MRT3847_30123C.1
cacctcctacgttaaattcataaagtgggggggtactaaaattattccggtgatgtacaataagtcacctaagaaccttaacaataagctcgatttagtgaataaagtactcttgcactgagggagaagcgtggggtaatccatatggagatactctagggggcgtgggaagaaagctttatagaaaaataatactagagaccatttcccatggtgtccgtggactgagagtggaaacctgggtatagaaatgcgaggcgatcagactcatgtgttgaaaccattggtgggg

SEQ ID NO: 65463 - DNA, 323 bp, Glycine max
  Clone ID: PAT_MRT3847_30124C.1
catcgagattcctgatactggacaccgaatagataggacagctaccctacttcgcctccgtgaaagggatcggagaccatatatataatattttcgaacactgcacacatataaatattcggttgcatctactagtctattgcggagaacgaaaggcatgagccgttacatttgcccacgggtttcaggaaccagcctatcgttgattagagactcactatttatctcgccgtgagggtggataatcgcggatccagagcaaatgctgtaggagaggctgcaggatacatacctgaaccgcgagctttacccagtaatgccac

SEQ ID NO: 65464 - DNA, 420 bp, Glycine max
  unsure (1)..(420): unsure at all n locations
  Clone ID: PAT_MRT3847_30125C.1
ctttttcttcttcttcttttccttttttttttccccaaagaaaatcgctgagattttcgtctttcaagatttcgacgtccttcttcttattgcgccaaagttattgattttctcctttcccgtatttgaatcgtttattggtcattttcgtgtcggttaatttcttgtcgaaaaaaaaaagaaagaggaaggattaggagacgcttttaatgacctagattagtttaataatatcacgtttgaaatctgtttttaaaatccgcgatcacgaatcggaacatgaagcttcgttgaataataatccattttgttattctcaatgattcctcaatttccatgccttctatttttattttttttacagctatggcgatttaattattagnattattcttattggtatctccatttgactcactc

SEQ ID NO: 65465 - DNA, 378 bp, Glycine max
  unsure (1)..(378): unsure at all n locations
  Clone ID: PAT_MRT3847_30126C.1
gctggatccttagagcggccgcgnggtttttttttttttttttttttttttcaatattaaaacattatttatagaantaactgaagggaggcgattttacacatgtgttcctggttttttataatctaacaaatccttgaaatggaacacaacaaatcacgttttacaagctatcgcctaaaatgacttaaaaggctttgatcaattttcccccacatttaaagataccatgagaaccccctttcattcttggtgatctaaaagaaaacctacacacaccaaaatgccaccctttacaagatgactgcatgcgttcgtaaacttttgcaacaaaacccttaagggtgctgcttactttttttggggagcatccctaag

SEQ ID NO: 65466 - DNA, 315 bp, Glycine max
  Clone ID: PAT_MRT3847_30127C.1
cccacgcttccttcaagcattgcatccctctttatttttactctgttttgtgctttacataacgcttcgtttcaaatcaaaaggtgttctaatatcataatttgttttttccaacaatgtctaatttctttactgctataatcttcacactctttgccatttccatacttcaaacattactaatctctactaatgaacaattattccacttgtatcacaacaataccaaatattcaatttcaactatcaatatttaccaattcccatcacaatactctaagatatatatccctacccaattccacaatcccttca

SEQ ID NO: 65467 - DNA, 169 bp, Glycine max
  Clone ID: PAT_MRT3847_30128C.1
acgctgaaactacttcttacgaaacgggactacatctggctcctgagcgtacgtactgtgcgccatagtctaaggtctgtggagatgctcatgcacgcactgaaccggatctattgggtcggcctcaaagacgcttgactggtggtttggcaacacgccgttatactga

SEQ ID NO: 65468 - DNA, 170 bp, Glycine max
  unsure (1)..(170): unsure at all n locations
  Clone ID: PAT_MRT3847_30129C.1
tttgagtggagcttatgngttactatactcaatcaacttgaaatctgatgggtcgctgaggatttganctatgaaacaagagagcctnngctgagtctgaaattagaccacattagaaggatctcagnncagaatcttaccgtaaagagaaatctacttcggtttctttc

SEQ ID NO: 65469 - DNA, 605 bp, Glycine max
  Clone ID: PAT_MRT3847_3012C.1
ggctcgagggtaaatccatctggtgatgaaaataattcagacatctcaccaataaagagaattgaatagaaatctcaggaagatctgagtaaatcaattggaaagataattgagattgttgaaagaatcagcctgcctgctgtggattatgatagttcagatcccttggacaaaggagatggggatatcatttcgtacaagaatgtaggaatgccaacaggctacatggttcgtgttttccagtggaaaacatctgaactcagtaatgttttacggaaatttctacatgtgtgttatgatttactgagtggcaagactgattatgaaaattttgccaaagaactaacaacagcattggattggattatgaatcactgcttttcacttcaggatgtttctagcatgaaggatgccatcaagaaacaatttgattgggatgagacacggagtgaaggtgaaacagagaatgagataagtcattttgcagaggaagacaagttgcatcttctgagaggaagcttgtcaactttacctcaagtaactactttggatggtcatgattttcagaatggagagatatattataaggagaaagaaggccttcc

SEQ ID NO: 65470 - DNA, 1131 bp, Glycine max
  Clone ID: PAT_MRT3847_30130C.1
atgaagaataaccagcaagaacggtcccttgctgcagccagactcttgagtcatgctcaatcacacatgttcagtttcttcgtctctcatgttctagtatttgcctctggtttgctcattggaatcaccctcaccactttctctttcaaaaacttgtccctcaacttccttccatctttgtctactccaattcccatctcaacgttaaataatcagacacaagtcaccaaggctatgcatgacatgacagaggaagagttgctgtggagagcttctatggttcctacgattaaggaaatgccttacaaacacaccccaaaggttgcattcatgtttttgacaaaagggcctgtccttttgggtccactgtgggagagattcttcaaaggaaatgaaggcttctattccatctatgtccattcccatccttctttcaatgacacagtgcctcaaagttctgtatttcatcgccgcagaataccaagcaaggaggtaagatggggtgacttcaacattgtaggggcagagagacgtctactagcaaatgcactgcttgacttctccaaccaacgttttgttcttctctcagaatcatgcattcctttgttcaacttctcaacgatctataactaccttatgaactcaactgagaactttgtggaagcctatgatatgcccggtgcagtggggagaggcaggtacagtcccagaatgaggccactagttaacctttctcagtggagaaaagggtcgcaatggtttcaaatagaccgtgcccttgccattgagatagtttctgaccaacaatacttccctgttttcaagaagtattgcaggaatggatgttatggtgatgagcattacttgccaacgtttgttagtatcatgttttggaagaggaactccaacagaacattgacatgggttgattggtcaaggggtggaccccatcctgccaggtttatgagacaagatgtaactattgatttcttgaagaggctaaggcatgggagaacatgccaatacaatggcaagagcaccaatatttgccacttgtttgcaagaaaattcaatccgcagggtttagatagactgctgaggtttgctccacggataatgcaatttaattga

SEQ ID NO: 65471 - DNA, 380 bp, Glycine max
  Clone ID: PAT_MRT3847_30131C.1
tttttacagagaagcattgaatattatttagatttgttaaaaaaaaaaggacatatttaaagacaacgtttctaaggatgtatttttgagtgtgttttttacgtccaattacctaaaaagaaaaaaaagaaataagaagtcaaatacaagagtgtctaggtatatgccacctctcaagtctcagcagcatattcgaatcattcttccttgtaatggtcctgcagcaatcaatcataaccgtttgtatttgcctgcaattgctttaagttcctgcgatttttatgtttgactcaccgcaatgcatcaaccacatttttccacaataacccgcaatataaaggttttctgattcattgcaacgcaaccacaatttaaaacca

SEQ ID NO: 65472 - DNA, 311 bp, Glycine max
  Clone ID: PAT_MRT3847_30132C.1
cgcaagggaaatttttatataacgcatacacacaattgtaaagtttaaaatttaatgtgataaaaagaataaaaagttgaaggggctgccaagagaagaacggggttattatgtttaacaatacttgttagggtgaactataaagaagcaacaatagcgcaaaaagtaaaaattaggatgcaccatagtttttttgaattagttagggattactaaacctgcgagaagactaagaatttgcctccctgaggaaccttaagacagaagggaagaggttgagtttgccaagaaaaaaagtaacagaggctctt

SEQ ID NO: 65473 - DNA, 1108 bp, Glycine max
  unsure (1)..(1108): unsure at all n locations
  Clone ID: PAT_MRT3847_30134C.1
attcccggngtcgacccacgccgtccgcgatcactctccgatccgcgttcagatctcactttctctgaaggagcaaagagtcgatctaaccgtgtcgtcgttccactcaactttcagtggctatggctccaccgcctccgcagtctcatcgatcgccctcaccgtcgcaaccgtcagggaagagtgaagtctccgatctgaaatcgcagctccggcagcttgctgggagccgagctccgggtgctgatgattctaagagggatctcttcaagaaggtgatttccaacatgactataggtattgatgtctcatctctatttggcgagatggtaatgtgctccgcaacgtcagacattgttctgaaaaaaatgtgctacctatatgttgggaactatgctaagggcaatcctgatcttgcgcttttgacgattaattttctgcaaagagattgcaaggatgaggatccaatgattcggggactagcattgaggagtttgtgttcgctccgggtggcaaacttggtggagtatttggttgggccattagggtctgggttgaaggacaataatagttatgtcaggatggtggcagttattggggttttgaaactatatcatatatcaacttccacctgtattgatgcagattttccagcaacactgaagcatttattgcttaatgaccctgatactcaggtagttgcaaattgtttgtctgctttacaagaaatttggaccttagagtcatccacatcagaggaagcagccagggagagagaaactctacttagcaagccagttgtatattaccttctgaatcgcattaaggaatttagtgaatgggctcagtgtcttgtgctggaattggtgtccaagtacattccatcagataacagtgaaatatttgatataatgaatctccttgaagataggctccagcatgcaaacggtgctgttgtcttggcaactattaaagtatttctacagttgactttgtctatggctgatgtgcatcagcaggtatatgagcgcatcaaagcccctctcttaactcaagtgagctcgggaagtccagaacaatcgtatgcagttttaagccacctgcatct

SEQ ID NO: 65474 - DNA, 248 bp, Glycine max
  Clone ID: PAT_MRT3847_30136C.1
gacccacgcgttcgaagaactgtcgtctgttggcatagtttgtttttacaaagtgcaaaacgagaattggggagggcttaatattatgagatgctgaaattaagagtaatgtaacaaaaactgtacatgacgaagataaacggttttaagaaggggataagaaaaatcaaaataaaagatatcatatctaaactgcttaatgctatatgttgataatatcgttgaatgtatgttcatggcatctgatg

SEQ ID NO: 65475 - DNA, 209 bp, Glycine max
  Clone ID: PAT_MRT3847_30137C.1
gtatgagactctatcctacctgccagaccttgatgatgcacacttggcagaggaagccgtgtaccttcttaggaacgtatggattactatcttgaaattcgagttgcagcaccgtttattgtaacgggagcacaacagcttatcatgatactaccttggactctagtgaaccatgtggtagctacctatgttgaggatgcactggtgct

SEQ ID NO: 65476 - DNA, 272 bp, Glycine max
  unsure (1)..(272): unsure at all n locations
  Clone ID: PAT_MRT3847_30138C.1
ccacatatagacttcactccactctaccacacaaagcttgctgtaccatttagctatgactcatgtccanactctatcacaattgagaaatggctacagatcttgatgttcaagaccaaggaagagagtactcttccaaagactaccatgaccctcctgcagcacctttgttcgacccacagcagctcacacagttcttcttctatcaagccctcatcactgagatgatagaaacacttctgtttctttctgatactaccctcaccatcatt

SEQ ID NO: 65477 - DNA, 363 bp, Glycine max
  Clone ID: PAT_MRT3847_30139C.1
tacggctgcgagaagacgacagaagggaattgattagaagctaagcctaatcgattagtctgttcagtcgagacaatgactggtttttcaggagtctccgctttaatcggttaccggataatcataatcgattactttgttcataatcaattacattgttcttgaaagttttccagattttggaaagaacactttaatcgattgaaatgataatataattgttacttctttgaaataattgattgcattgactatttaatcaattacaggtaatcataactattttctctataaataaccagcttgtgttctcactttcgtgggctaggaaatacaagcttaaataagtaatataaagagaga

SEQ ID NO: 65478 - DNA, 290 bp, Glycine max
  Clone ID: PAT_MRT3847_3013C.1
ccccgcgtccgtactcctcggagggggcgtccgacgggctctgatgatgatgcgcataatcactttcggtcttccgatgtttccatgaggaagacgtttgtgcacctgctctggagagggtttcttatgcttgacttcttatggcttttgccaagagggggtgacctgtcatttcccatcaatattcgggtgtttcatgttttgttgaataaatattatggtgtttggtggtagaacttttcccacttcctcatgaaagatgcgcttgctctagaggacccgatcttaag

SEQ ID NO: 65479 - DNA, 824 bp, Glycine max
  Clone ID: PAT_MRT3847_30140C.1
tcgaggccccgactactacatcctcaggtggtcaatggtgtgttgctaaccagggagcttcagacactgctctacaggttgctcttgactatgcttgtgggtttggaggtgcagactgctcagcaatacaaccaggagcaagctgttataatccgaacactgtccgcgatcatgcttcttatgcattcaatgactactaccagaagaatccagcacctaccagctgtgttttggaggaacagcatctcttacaagcaatgatccaagtagtgggagttgcaaatacgcatcacccaagtcaacaagcactaatcagccaccaccaacaccaacatttgtcagcccaccaagtccaccaactccagtgatgaccccaactccaccagacatgctaaatcctggtggcggatcaactgtctttggttcagaaccaacaggaagccccaacacagccacatttgcatttaattccctgctgatgttgttcacatgtggtctgttggcttcccttcaactagcaaattacatctagacgataaacaaggtccagtcattctttatgtgatgtgttcgaattcaatcagtcttccagcagtttttgcaaaatttcaaggagtcagagtcaacaaatcttgcaattaaaattacttatacctttcatctatgtatggctgttagttgatcaagccaaaaaggatttataggtagtagacagtttttctacagtattagcttctcttccatagaaaatccttgtaattaatatcagctagcatgccattttatttaataaacagaataaaatacattaaagaacttaaaaa

SEQ ID NO: 65480 - DNA, 1983 bp, Glycine max
  Clone ID: PAT_MRT3847_30141C.1
cacgcgtccggaaaaaataaaaaataaaaacagtatctagtgtacacacagaaaaaaaaaaaaaaactgttaggaggcatcacaccacagccggggcaaggcagttgtgtaataacggattctgcgaagggcctgtcctcgaagaccgacccgtggggtctaacgtcaagtcccgctcggatcccacgcacgcgcccttccaagccgaagcctactgaaactggcttgtgttgtgccgtttagcttcttcttcaccatattctccttcttttctcagattcagcagtaactatgaatcgcgttgcactgcccaaatccattgcccagcgtttcagaggcatccaccacagcccgcggaaccagtggtgtaataacaaccgttgcgaaacgcaggtccaaagtgctgggcccgtggcttctctcctcaagtcccgttccgtcatacggttccgcgggcctgacaccctcaagttccttcagggcctgttgaccaacgatgtacggaggttgggtgagcccgttggtgacagaaccgaaaacttgcccacgcccaacgtgcctgctacatcgtttcctcctatctatgctgctctattgactcctcaaggaagattcctctacgacctctttctctataagcctcccacgtgcgacaccaagctcgatgacaccggcactggacctgattcccaaccacacgaaccctttcatttgtttgctgacgtcgattcttctgtgttgggatgaattgttgcaaaccctcaacaaataccggttgaggtcaaaggttgagattgatgatgtctcaagtgatttctcgtgctggcagcgttatggtgctggccttcttgagaagacctcacaagtagaagaacctgaagcagcctctgtaggctggggtgctggtgtggatcgtactgcaatgtcatcctctcaagggagtgatcaagggtggcaatggtttaaggatcccagattggtctgtcttggtttcagagggatcttcccgtcgaatataactccacctctaattgaggtggacaaagagactgatgaacagaatttccttctgtggagaatagagaagggagtagcagaaggatcaactgagattccaaaaggtgaggcagtaccgcttgagtataatcttgcaggccttaatgcaattagctttgacaaaggttgctatgtcggccaagaactcatagctcgtacacatcacaggggggtgattcgtaagcggatagttcctctaaggtttctagataacgatgggaaagagttggtaaacaaagtcattccaggctcagaagtaatgaacactgcatctggcaaacaagctggtacagtgactactgccctaggatgtcgtgggctggggctcttgcgactagaggaagaagctttaaaggggtcgagtgccttgtccgttcagggacaagaggatgtgaaggttgtcgctagtagaccagattggtggccttctgaatggcttcaagatcatggacagcacgctgcttttgcctaggatgcccaatgtcgttcaaagggcgagtatttatgatgaacaatttcgtgggtgaatgaataatttgtaaatgggggcgttaatgtgatcctaatgcttccagtgggtgaatagttggtaaaaaagggaaaaatgaagatggcactagtggattttcttgcggaatgagtttcattatagtaatggtagtatgctatttttcctccttagaaccttaacaattttgtaatcatatgacatcaccccccttgggggtcgagtttttatccaacatttcatcatcccccttacaaaaatgacctctcttgttggtaaagtcccggtgattcctttgattcataatctctcctaatccatggttattcatcggtggcgcaaggttagaagagctattgtttgcgaaaaaataaagttgggtaattgatagcagtatgaatgagaatcatttcagattt

SEQ ID NO: 65481 - DNA, 637 bp, Glycine max
  Clone ID: PAT_MRT3847_30142C.1
gttataacttataactttcaattgaattaacaagaaccgggacttacatttgtgtccactgcttaatacatacttcagcaatatgaattggaacttacatttgtgtatatagtttgatacatattcttatctaccttggtttacattgaggacaaaattttgaagaaactcaaaggtggccattgtggattagcaagtagcaactatccttctggcagaaatcccttaagagcttccaaccttcccatctgataacaaccttttcagaccctctcgtataccaggattaagttcaaaacatcgagtgaccgaaccacgcctttgcgaacaagcaaccgaaaagcggacgacacacctttaacaatgacacccttccgtcccacgtcataacgatccacaagatgcgacaagaactcaagaagagcacaagtcacgttgatgaacttgggaacagaatgcaccatgagcagaaccgccggcttgatgttcatgataccatccatcctttcatcatagaagagccagtcataaaacaaagccagtttcacactctcctcaacttggttactcctacaagtcaaaagccaaccaataagcacccacctaggaaaaatatctgattgaatgatctcatttg

SEQ ID NO: 65482 - DNA, 591 bp, Glycine max
  Clone ID: PAT_MRT3847_30143C.1
gacgtgcctgctccctacctaagctttagagttcgagtaaaattccaatcaagtggtattagatccaccaatattgttagattattaggaattaaagttatttggtttgtgttatacctgtattattttgttacatgaagcctaattttattttgggattttatctttgcaattataattatgattgtaagtttggaattttttttcttttcaatcacgatataataatcatcatatgtgcgttcatgttttgcgttcggattccatgagaaaaactatttttttctcgctccagaatagtcatccatttttgtttctcgttcatgtgtttttttatggttgttggttttgtttccttatgcatgccatgaatccatgccatacatgccatgatatgatatacatgtgatacataacctttggctttattatatcttcataagaaaacccctattgcgtatcgttaaatgcaatttggcttttgcattttatttttgttttccttgtttgtatttgatgaattcaatgtgaaatgtgttttgcgttggtgtcagttatgcctgacttaacaacagcaatttatggttcatc

SEQ ID NO: 65483 - DNA, 2024 bp, Glycine max
  Clone ID: PAT_MRT3847_30145C.1
catgcacgcgcccgtgagctcgcaattcggctcgagcttaattattaacacttccttagttcaatatggggaagcccttcactctctctctttcttccctttgcttgctactcttgtcgagtgcatgctttgctattagctccagcaagctcaacgagtgccaactcaacaacctcaacgcgttggaacccgaccaccgcgttgagtccgaaggtggtttgattcaaacatggaactctcaacaccctgagctgaaatgcgccggtgtcactgtttccaaactcaccctcaaccgcaatggcctccacttgccatcttactcaccttatccccggatgatcatcatcgcccaagggaaaggagcacttggagttgcaattccaggatgtcctgagacgtttgaggagccacaagaacaatcaaacagaagaggctcaaggtcgcagaagcagcagctacaggacagtcaccagaagattcgtcacttcaatgaaggagacgtactcgtgattcctcctggtgttccttactggacctataacactggcgatgaaccagttgttgccatcagtcttcttgacacctctaacttcaataaccagcttgatcaaacccctagggtattttaccttgctgggaacccagatatagagtacccagagaccatgcaacaacaacaacagcagaaaattcatggtggacgcaagcaggggcaacaccagcaggaggaagaggaagaaggtggcagcgtgctcagtggcttcagcaaacacttcttggcacaatccttcaacaccaacgaggacatagctgagaaacttcagtctccagacgacgaaaggaagcagatcgtgacagtggaaggaggtctcagcgttatcagccccaagtggcaagaacaacaagatgaagatgaagatgaagacgaagatgatgaagatgaacaaattccctctcaccctcctcgccgaccaagccatggaaagcgtgaacaagacgaggacgaggacgaagatgaagataaacctcgtcctagtcgaccaagccaaggaaagcgtgaacaagaccaggaccaggacgaggacgaagatgaagatgaagatcaacctcgcaagagccgcgaatggagatcgaaaaagacacaacccagaagacctagacaagaagaaccacgtgaaagaggatgcgagacaagaaacggggttgaggaaaatatctgcaccttgaagcttcacgagaacattgctcgcccttcacgcgctgacttctacaaccctaaagctggtcgcattagtaccctcaacagcctcaccctcccagccctccgccaattccaactcagtgcccaatatgttgtcctctacaagaatggaatttactctccacattggaatctgaatgcaaacagtgtgatctatgtgactcgaggacaaggaaaggttagagttgtgaactgccaagggaatgcagtgttcgacggtgagcttaggaggggacaattgctggtggtaccacagaacttcgtggtggcggagcaagccggagaacaaggattcgaatacatagtattcaagacacaccacaacgcagtcactagctacttgaaggatgtgtttagggcaattccctcagaggttcttgcccattcttacaaccttcgacagagtcaagtgtctgagcttaagtatgaaggaaattggggtcctttggtcaaccctgagtctcaacaaggctcaccccgtgttaaagtcgcataaatgacaagcatgatggtgtgaggatgaggccatcttatgaaataataacaaataaataaattttgtatgataataaaaagtatggcccatgtaccatcccagcgagcctatgtttatatctgagtggcgttgtacctttcaatcgccttaataaaatgtcagtcttcacgttttgtctttattctgtgtttattttcttttttgtgggcaagctagcttttatctacttttaaatgagtaatactgattatatgtttactggggaaa

SEQ ID NO: 65484 - DNA, 418 bp, Glycine max
  Clone ID: PAT_MRT3847_30146C.1
tcggattaattactgcgccaggctaaagctccaagtctgtttttacaatcctacacaaaatctgtttctttgtgggtgtatggagatgataacttaattagtgttcatgaatatgtcaagcctaactttagtggttctaaattgagaagctttctagctggtcataatattcaccattactgcacgtttagacaaaactagtgcaactttgcaatttagaaagtgagcacattgtgaatttcttaatagaaactttaagcatatgtcttatgcttaagtggaaggctactgaggacaaggcgagtttatggtcacaacttcattttgtttcgagaagaatctggaaatgcaagaagcttatcttgtcaatctcgtaattgtgttacgagaattgtctttgcacagtccataagaagct

SEQ ID NO: 65485 - DNA, 428 bp, Glycine max
  Clone ID: PAT_MRT3847_30147C.1
tttattcgttcgttttatatggaaaaaaatattgtagcaagttcgtcgtacaaacaaaatgccactattttcggcacgccggtgctgaatatgcaatctgaggtgttttgtcttcttgtatttatacgtgatagttccaaaaagcctaacgcgagagattgattagcttttgaattattgctcgaattattttgaaggaatgatccaaactggttgaaatattcatcatcaacaacctcacgctgttatagatattcgctctctctatcttgctctatctctctctcacacacacacacacacagatcctgacatggacgaagaacaccgatgctaagctgccgaatgtcacagactctgatccaacaactgcgggttctttggtagccttggcaccatgaatctatgatccaaatgctgcagagaca

SEQ ID NO: 65486 - DNA, 664 bp, Glycine max
  Clone ID: PAT_MRT3847_30148C.1
gtatgggttgtacaagaacaatcatggaggcatacttggagatgacatgggtcttggaaagaccattcaagcaatagcatttcttgccgccgtctttgctaaagaaggacattctactctaaatgaaaaccatgtagagaaaagagatcctgcattaataatttgccccacttctgttatccacaactgggagagcgaattctccaagtggtctaacttcagtgtttccatttatcatggtgcaaaccggaacctgatatatgataaattggaagcaaatgaagtggaaatactcattaccagttttgacacatacaggattcatggaagttcgttgttagatattaactggaacattgtgattatcgatgaggctcatcgacttaagaatgagaaatcaaaactctataaagcatgtttagaaattaaaaccctaagacgctatggtctcactgggactgcaatgcaaaataagatcatggaattgttcaatctctttgattgggttgcacctggatcccttggaacacgggaacattttcgtgagttctatgatgaaccccttaagcatggcccgaggtcaactgcttctgataggtttgccaaattgctaataagagaaaacaccaccttgggtgagttctttattaaatatctgttgaga

SEQ ID NO: 65487 - DNA, 156 bp, Glycine max
  Clone ID: PAT_MRT3847_30149C.1
tttattttttgtacatttttgcctccttttgggcaaaggtcatttatttcacaatttggtggtctgtttgaagcacgacaaatggcaatactacaactggagtgagaaaccacaagaggcttaattatgctccaacctccaaatttttttcacatt

SEQ ID NO: 65488 - DNA, 318 bp, Glycine max
  Clone ID: PAT_MRT3847_3014C.1
acgaccacgcgttcaaacagcacgcagggatcatcatgaaccaccgcctgtctataaagtgagaggagactatagcgccctcatgcataaacatgggacactgcaaccaattgctaacaaaccaactgttataatggccacaactgacaagctagccgactagaacttggcatagatcccaccgtttagaatataatcaatgcgttataacgtgcacatgattactctatacccctatattcgaaaccttattacaccataccacaacttctttaatacaatgtacacacacgcataaaactattacagatatagtca

SEQ ID NO: 65489 - DNA, 298 bp, Glycine max
  Clone ID: PAT_MRT3847_30150C.1
gcgccctttcgccccgtttttgggtcccaaaaccaagggggttctatgccacgggaaaagcccccggtgcgcaaaatttaaggctgatttcctggtattggggttacctcaagtccactacacctcattggtgggatcagggttggaaaagacagaggggtacttgtgggggttctcgggagggggatttaccctgctcattacattaatgggaccccaaaagaggctttggtggagggaaacttttcctttgatattaaatctcgctctagattggagaaaagtttcctttacaaaa

SEQ ID NO: 65490 - DNA, 366 bp, Glycine max
  Clone ID: PAT_MRT3847_30151C.1
gctggctcttcttacaagccattccttgtaggacaatgcttgagagtgtacaggttcaggggaaccgagctataccctgatcggtcgtcacacactgcctgataacatgatgtattgacatgtgactccagcagtcggtcaccatagcaatacgctgtacatacagagcttcacggatgccgacgatagctctgaatgcttaccacatcatacattgctcgctagattgtgagcgataggcttgtgaacaatcctaaaacgtatgagacgatgcttaatgataagcttcatggactgctacatcctattgcaaactacattgcttatgggaatatgactcatactacgggggaatttaacgtggtg

SEQ ID NO: 65491 - DNA, 654 bp, Glycine max
  Clone ID: PAT_MRT3847_30152C.1
tacggctgcgagaagacgacagaaggggacactcattatttctcatcatccttacccatctccacgcatgatatgatcactgtcacggttacatgcacatgagatttgacttttaacaccatctttgtgttacaggaaaagtactcttttaccatggcttccacttttgaaggtggctcagactcagagaaagagaacactgttgagagtgaagaagaagagtgtccagtaaaacaagttgaactcaccgttcctaaaaccgatgatcccaccatgcagcttctcacgttcagaatgtgggttctgggggttctttcatgcgtgttgttgtcctttgtgaatcagttcttttggtacagaacacagcctctgattgtaacctcaatttcagctcagattgctgtggttcctattggccacttcatggcaaggactctgccaacacgtgtgttcttcaaggattcaaggtttgagttctcactcaaccgtggaccgtttaatatcaaagagcatgttctgataaccatctttgccaattctggtgctggaactgtgtatgctactcatattgtgagtgctgtgaagctcatgtgtaaaagaaggctcaacttccttgctgctttggtagtgatgttgactactcaaatcctgggg

SEQ ID NO: 65492 - DNA, 460 bp, Glycine max
  Clone ID: PAT_MRT3847_30153C.1
tacggctgcgagaagacgacagaaggggaagaaaagacacgttagcgagtctaaggaatgagaatggcgctatcttcatcttcatcaccaccgcttcttcccttcgatctccaacggcaccgtttagttagcctcaaaccctatactcgttctcgttcttctcagtctcagcacaccgtcaccgtcaccgtcaccgccgctaaagctaaagcttcttctgctactccgttagtttactccaccagacaagggtttgacaccgtcaacattgccgaagatgtcacccagttgattggaaatacgccaatggtgtacctcaataaagttacggaaggttgtgtggctaacattgctgcaaaacttgagtctatggaaccttgccgaagtgtcaaggacaggtaggttatacttttattcatcagaagaagattaatgctaacaatacctgcatattcatttt

SEQ ID NO: 65493 - DNA, 483 bp, Glycine max
  Clone ID: PAT_MRT3847_30154C.1
tggcttcctgcgtaatttgttgccatcaaaagtctcattagaaaaaataatcttgttcctctgctgccacactgatccttttgattaacatctgtgagtttatttaatttggtgatcatattatatttgaccgataccccctgcaaatatgaattatcagatcaagagttgctggcaaagcacacgttgatggtgcaaagaagcatcgtactcgtgatcgcgccgtaaaagctgctcctgctcgtgaaggcaatgctgagcttcaattcaacattgatagaaagcgtttaatcactcatgcaaatgcttagagcaagagtgaaaagtcccctccacccatgaagatggacagcttggctttcctttgggatcttctaatgatatagacccagatattggtccttctgatgtttctttgggttcaacctcttacaccttctaaaaggaacccttcgaagcttggtcaaggcccaatgggaatac

SEQ ID NO: 65494 - DNA, 429 bp, Glycine max
  Clone ID: PAT_MRT3847_30155C.1
taccacctaaattttttttttttaattttttttttttttttttgggttgtttccttatggggggaggccagcataagttaatgaacagacttagcaactaaattgaaaccaaatgtcgcgggtacaagcccagcgtacacaattagtaaatggtcatgctaaaacgaacctaaaagctttgtctacccccattccacgggttccgaacaagataagaactatgtgtacaatctccggatcaagcactctattaagaggccattgacaaaccgttcccatcgggactcccgaatgagattgcctgataagaacaccgccgcaatggaaccaaccaactcccggccatgcagaatattctccagtcctctcagcgcccaacgatgaaaaggtccgagagcgtctcaaaatcccatagattcaaattggggg

SEQ ID NO: 65495 - DNA, 271 bp, Glycine max
  Clone ID: PAT_MRT3847_30156C.1
aaaaggcgcacggccaaacatttcatatatttaatttatttaacttatccacttaattgcgtacctatttatatataattctgatttattcacccaaaatcagacaaagagttttttttttttaaggggggggggggcccaactttatttcaatctcctcgatggcaaagacaaaacctttgccatgttgcttccaataaacaaccaagggggtgatcatttctggctcaagaaaccccaatcttgagcttttcaggctcttttaggaaaa

SEQ ID NO: 65496 - DNA, 370 bp, Glycine max
  Clone ID: PAT_MRT3847_30157C.1
gccgcccttttttttttttgtgttcaacaaattttaacattaaccattgttatgcattattaaaaagtttaatgtatatttaatacacatataaatttacataatataaaaattaattttgatgtaataatgtaagttgccataccatcaaggctagtaatactaaacagaagtgtggttgggatgttgtggaggagcggtagtgtgattgagttctggggaggtggtgttagaatcagaagttaaagggtatcctattccatggcgattactgggggaaatgacgaagtgtccacccgctaataccccaataactgtgggcagcacctgaagcagaagcctctgagttgactcaaagccggggtataag

SEQ ID NO: 65497 - DNA, 256 bp, Glycine max
  Clone ID: PAT_MRT3847_30159C.1
ctcacgcattatctattacctatatcataattttatagaatcatcatcttaaggggtacaagggattcttcaaaatatttcagttcatatctattcacactacggcttaacttgaacaattattactgataaatgaaatcaatcgtcctcatatcattcctaggtcctaaaaggttctctaaaacaactagacattgatctaccatagtgatcaataaattcaatttactggtaatctatgtaatagataatgttt

SEQ ID NO: 65498 - DNA, 583 bp, Glycine max
  unsure (1)..(583): unsure at all n locations
  Clone ID: PAT_MRT3847_3015C.1
gcaatccaaaaaaaatcttcatttaaaataaattatacaacattaaacaatatatttatcattaaaagaatgatgagtttgctagatttgcaagacgcggcatcaaacaacattgacgagattgaataaactcagtacaccaagtgttggaaatcccgtaattaatttgcataaattatagtagtactttaatttttctgtatctatatcaaaggaggaaggctatgtcaaatgcccctgctatattacgaacctgcttcatagttggatctgcccacttgccaaagattcggaagttcatataatcaaaaagaaaaattctacatcaaantattcactggtgttgnttccgtggttacttcaatcaacgataaagaatgacanattgttgtcttcctcaatgtaagtttgcactagccaggatagacatgatcactgtacattatgagccgtcgtatttaaaagcgtcaagcanttgcttctcctctgacatttgaagttgaatacacatatcccacacgttgnntgatatcaatagatcgaaacctctctgggcctaggcctaaaacagtgcaagttaatg

SEQ ID NO: 65499 - DNA, 294 bp, Glycine max
  Clone ID: PAT_MRT3847_30160C.1
caaaatcttcttagaagtgaatggttgccatttcggtcttcaagtcctttttccttttgttctcacaaaacccaacagtgcccacactcacacaccctaaccacggcaccaccacattctcttgcttcccccttcctttagccatgcttgaatcatgtggccatcgcctccttagctcgttgttgcatctcatttatctacaacgatgctccgaatctccgtacccctccaagaatcgccgccctcgaccacggaagagctcacgcttctcctgactcctagaacatactacca

SEQ ID NO: 65500 - DNA, 256 bp, Glycine max
  Clone ID: PAT_MRT3847_30161C.1
ggtctgtgaactggacttaatattcaactttcacaaggtttgtatgtggccatggcctatgtttgttagtcgaaaaagtggctacttgtttttctttcgtctattaccattatagatgattcttcccatataggtccacccagaattagcttcaataattgattgtataaagtgcaagttcgtttttggcgagtaaaggtccttctgattctgagtttgttttcgttgtaattgtaatgtcgaaagcccactatat

SEQ ID NO: 65501 - DNA, 812 bp, Glycine max
  Clone ID: PAT_MRT3847_30162C.1
cctcaacaccaccttcttcgaccccgccggaggaggagaccccattctataccaacacctattctgatttttcggtcaccctgaagtttatattcttatcctaccaggcttcggaataatctcccatattgtaacttactactccggaaaaaaagaaccatttggatacataggtatggtctgagctatgatatcaattggcttcactagggtttatcgtgtgggcacaccatatatttacagtaggaatagacgtagacacacgagcatatttcacctccgctaccataatcatcgctatccccaccggcgtcaaagtatttagctgactcgccacactccacggaagcaatatgaaatgatctgctgcagtgctctgagccctaggattcatctttcttttcaccgtaggtggcctgactggcattgtattagcaaactcatcactagacatcgtactacacgacacgtactacgttgtagcccacttccactatgtcctatcaataggagctgtatttgccatcataggaggcttcattcactgatttcccctattctcaggctacaccctagaccaaacctacgccaaaatccatttcactatcatattcatcggcgtaaatctaactttcttcccacaacactttctcggcctatccggaatgccccgacgttactcggactaccccgatgcatacaccacatgaaacatcctatcatctgtaggctcattcatttctctaacagcagtaatattaataattttcatgatttgagaagccttcgcttcgaagcgaaaagtcctaata

SEQ ID NO: 65502 - DNA, 631 bp, Glycine max
  unsure (1)..(631): unsure at all n locations
  Clone ID: PAT_MRT3847_30163C.1
ttttcttctctctctctccatagttttctttctcttcatattgtgctatataaataagaggaaaagctactacagtctttagtgttaattagtttccacttgcaaatgggacgatcaccatgttgcgacaaggtaggtttaaagaaaggaccatggactcctgaggaagatcagaagctcttagcttatattgaagaacatggccatggaagctggcgtgccttgccagcaaaagctggacttcagaggtgtggcaagagttgcagactaagatggaccaattatctcaggcctgacattaagaggggaaagttcagtttgcaagaagaacaaaccatcattcaactccatgccctcttaggaaacaggtttggtatctttctttgttgagtagtaggatatatcatatatgctaattctatttttgactttaaaatcaagtcttttgcatcttagttttttctttgagaaaggtaccagatacacatattcagaactcaagacccattatggattttttttttctcttttgaaaatgtgaaagtgatttttttttccttccacaatattttcctatgttttggaattttacaacanaacaatgaaaataatgataactatgtcactgcac

SEQ ID NO: 65503 - DNA, 256 bp, Glycine max
  Clone ID: PAT_MRT3847_30164C.1
ggcgggaggggggaaagtttatcaaaccctacccaacggacctgacttggtagggcattgcacccacacacttgtaacaacttgtggtaattttggtcctggggcaaaagtttaaagtaacggcaattgtactgctaaaggaggatcccctaaggctcgcgttgttgcctacaaaacatgcttgaataaacttgattaaagggggtgctattatgcagatattctagaaacatttgatcatgccatttattaaggg

SEQ ID NO: 65504 - DNA, 426 bp, Glycine max
  Clone ID: PAT_MRT3847_30165C.1
tttgtgttttttttttatttttttggggttttttaccttttttttttttttttttttttttttttttttcaactaaaatggaatggaaaacttttttgcagggggggcaaggatttttcttggggggaaagaaagtttttatccccaccccctggctccttaatgcatgctaggcctttaaaaaggggtctttttcttccaaaaaaaaacaagcttaaagggctttttgacatgacccaaaacaagcccggtattaaaaacccctggaaccacactttccattacaggggtgttttcccccttgggcaaataaaattcatgcaaaattggccctatttgccccgccctttttccacaaaattttttctccacctaactttttcaaaactttccccatttgttttttatctccacctaaatgttctc

SEQ ID NO: 65505 - DNA, 330 bp, Glycine max
  Clone ID: PAT_MRT3847_30166C.1
aaaaaaaaaaagaggtttattactcctaaacatggcagtgggcagtttttaacctttaagttttgacaattacagattatggattccggggcctagaaattacaaaaccctggggaacactaaaacaaaaactaaaactggccttaaaagcaaacataggcttccaaaaggaaataaggattcgatcccccatacaagtccggggcacttaaggaccggaattggggatatgcctgccagctaactagtagaaaggaaggccatttttggaccctatagtatatccaacgaaggggaacaaggaggccgtaaaacaaacattattcatgg

SEQ ID NO: 65506 - DNA, 428 bp, Glycine max
  Clone ID: PAT_MRT3847_30167C.1
ggaaaaaatatgtgagttggatgacattaagggcgcttgtggtttgtatcaccctgaataaaatatggtagtcctatgaatcaggctaccttatatttagtgatattacaataaataaatggcaaaaattttattaattgaaacaacattctacctcatagcaccaacaacgagcaacattccgaatggtgtagccaccaccacctagtatcaagaggggcacattgaatgatctcatgtatttgacacactctgcatgacccctaattgaaagattgaaacatcccaatcggtctccaaataaataatcaccaccgcactggagaactactgcaccaggccggaacacttccattatttttccgattattggtttgaacaaaaaatgataactcttatcatcaatgccatcatcaagtggaacatta

SEQ ID NO: 65507 - DNA, 779 bp, Glycine max
  unsure (1)..(779): unsure at all n locations
  Clone ID: PAT_MRT3847_30168C.1
ctcagttttacttgatacagttgacatcactgacccatctatggtgtcaattggagatgaagttgtcatttctgaaggtgttttggttcaaagccacgaggtaaagaatggaattttaagtttccatcctattaggattggcaaatgttcttccattggaccttatgctgttatccaaaaaggaagtgttattggagaaggtgttgaggtacaggccctgcggaaggttggacaagaccaacatgtgttcaaacctgcaaagcttaataatgataacaagaaatgttatgtacaaaatgcagaactactcattaccagcaaaactcaatatgatattatctaccactttatgggaatctatcttgttggctttctcagctcccttgctgcagtcattgcctacttcttatatatttggttctccaagcaacctccatcaccccaacacttcacctttgtttgcatatgtggggccttccattggataccctttacaatctttacatatgctaccatgttttctgaagtctcatcaaaccccatcatctttgccatttcatttaccagcgcctacttgcttcatggtttcatactcatcattctcaccactgcttttactcgtctcctcaaaacttgtcanaagaaaacccaatttanaacccagctttcaatgccaaatgataacttcctgccacctttagatgtgcanaaacttctctcaggaacagaaagccttctgcatatatctacgcctttttgggtgcaaaaattggcaagca

SEQ ID NO: 65508 - DNA, 474 bp, Glycine max
  Clone ID: PAT_MRT3847_30169C.1
gccgcacggcgtgctgcagccgtcaccgctcacagaaacctgtaaccaagcaagagctccctaagccctccgcctcggatagcaagcctcctggccattttgactctgattcagcatacctgccgcctgcccatactaaacccgcgccccagctcctgcgctgcatttcctgacctctgctttctcctctcttgttccgcgaccagcccgccctctccccacaatcatggctccgcccggcttgtaccagcgccccatccagcacattgaccgcaaggatctctacaccaatctggaggcccggatacagtacctgcacaccttcctcgacttcagctccagtacgtatcttctcccgcgccagccggccgccgggccctgagctcttctccgcactatcttctagccggaatccctgcgagccagcacccaccctatggcccttacattcaaagcccctcgcgtccaagtctg

SEQ ID NO: 65509 - DNA, 1513 bp, Glycine max
  Clone ID: PAT_MRT3847_3016C.1
ccacgcgtccgggcactcgctatctgtcgtagccgccagttaaagttttgtttcggaattctgactttgcttactctctctattcaaaaagaaccgttctttgctttgggtacgcagatttcatacgcagaacattcttcactgcaaatcatcaatggattcctctgccaacaacaaagagaaagagaaagtgcaagtgcaacccacacccgaagaagaccccgagaagaaaaggaaaaaggaagaaaaggctagagagaagcaattgaagaaagagaagtttcttcagaagcaagctcagcaacaagcacagcaatcatccaatgcttctacttctaaaaagagtgaaaagaaagttgtgaagcgtggtggggagggtgagaatcctgaagattatgttgatcccgagactccatcgggtgagaagaagcgtatggctcggcaaatggccaagcaatatagtccaactgccgtggagaaatcgtggtatgagtggtgggaggaatcacagtattttgtggcagatgctaacagctccaaaccaccttttgtcattgttttgccccctccgaatgtgactggtgctctccatataggtcatgctctaacagccgcaatagaggatacaatgattcgatggcggagaatgtctggatacaatgccttgtgggtgcctggaatggatcatgctgggattgctacacaggtagttgtggagaaaaagctatttcgcgaaaaaaacctaaccaggcatgatctgggccgagagaaatttgtctgtgaggtttgggagtggaaacacaattatgggggcacaatattacaacaattacgccgattaggagcctctttggattggtctcgtgagtgcttcacaatggatgaaagaagatctaaggctgtgacggaggcttttgtaaggctttacaaacaaggccttatctatagggatcttcgtttagtgaattgggattgtgttttacgaactgcaatatctgatattgaggtggattatttggaaataaaagaaaggagtctactaaaggttccgggatatgacaaaccagtggaatttggagttttaacaaagtttgcatatcctttggaagggaacggctcgagaattgttgttgccacaactagaattgaaactatgcttggtgacactgctattgccgtacatcctaatgatgacagatatagccattttcatggaaaatatgctattcatccatttaatggtagaaaacttcctataatttgtgatgctattcttgttgatccaaagttcgggacaggtgctgttaagattacacctgcccatgatccaaatgattttgaggtgggaaaacgtcacaaccttgaattcattaatgttttcacggatgacggaaaaataaattccaatggtggctctgattttttgggcatgctgcggtttaaagctcgagaggcagtagcagaagcattacaaaagaaggacctttattgaagatcttgaaacaatgagatg

SEQ ID NO: 65510 - DNA, 1760 bp, Glycine max
  unsure (1)..(1760): unsure at all n locations
  Clone ID: PAT_MRT3847_30170C.1
cggctcgaggtggaacattccattttttcggtgccattcatgatttttatcaaccgctggctcgagggcatcgagtatccgagttaagcaaggtgagttaagcttcgtcgattcacgaaattcccggaaatcgttactgagtcaactcggtatttcggtggctcgtccaatttgcacaaggttcgccgccgtcaaagcgtttccgattctccaccaccgccgtagctgccgccgtcaaccgtcgccatcgatgtcgtcttcttccgccaacgatgccgaggctctccggcgcaaccgcatcctctccagcaagctctacttcgacgtgtctccgtccaaggttccgctaatctactccgcgtcttacgacatagagtttctcggcatagagaaactgcatccgtttgattcgtcgaagtggggacgcatttgtggattcctcgtttcgtttggtattcttgacaaaaaatgcgtcgttgagcctttggaagcttccaaggatgatcttctagtggtacactctgaatcgtatttgaataccctgaagcagagttcaaaagttgctatgatagttgaggtccctcctgtggcattaattcccaattgtcttgtgcaacaaaaagttctttttccattcangaagcaggtaaattaactgttttattgaattctttttagcatctccaaaaatctcatcttgctcctaatcaaatggtaggttggaagaactatattggctgcgaaacttgcaaaggagagaggatgggccattaacatgggaggtggttttcatcactgttctgcacaaaaagggggtggattctgtgcttacgcagatatttctctatgcatccactttgcttttgttcggttgaatatatcaagggtgatgatcattgatcttgatgcacatcaaggaaacggtcatgaaatggacttcgcttatgatagccgagtctatatcctggatatgtacaatcctggaatatatcctttggattatgaggcgagaaactacataaatcagaaagttgaagtaaagagtgggacagttactgaagagtacctgcaaaaattagatgaagcacttgaggttgctgggcataggtttaaccctgagttggttatttataatgctggaactgacatcctagaaggtgatccattaggaaggttggagatcagtcctgaaggaattgcccttagagatgagaaagttttccggtttgctcgtgaaaaaaacattcctatcgttatgctcacttcaggtggttacatgaagtccagtgctggagtcattgcagattcaatagtcaatctttcgaagaaatgcttgatagaaacgagtggagctccaaagtctacgtaaagtgctcctgtgttttactgatcatgaatggtcccttgtaagagttttccagatcctttgtgtatttgggtatagaatgtttccattttagtggaaactttgatgtacagtattttaatataaaaaagaacttagtgtagatgaaaatgtgttctacgtgagttgtaacaagtccgtaaatgctgctggtatattagtactacataatgcataaatgagttgtatattatttcatccatttaaataataattattcgttattattctcttatatattaatttttctaccaaaaanaacttttcttttttgtgtattataattttatttttttttaaataatatttcatttttttttcgccaataatttataattttatttttatttttcca

SEQ ID NO: 65511 - DNA, 584 bp, Glycine max
  unsure (1)..(584): unsure at all n locations
  Clone ID: PAT_MRT3847_30171C.1
ccttatctaatttaagatcaggatgttagtgataatcatattctttcaaatgaggaggctgtgacaaggagtggacgggaaaggagttccttgaatgaccaaaatancatgatggacaatctgttgcacagaagttctgaaagtaacttatttgctctaactggtaatcagcactcttgtgcgtttcatgataatgtaaatatctctgatggaacctttgatgcactcaaagttgttgatgctggttgcatggagcctcagttgggcattgtttcttgcagcaatattgctgttgatgcatatactactgctagcattatgcagggaaaaccacaaggatgtgtatctgttcctcttggtggaagtatattaaactttgagaagccaagtgatgatggtgttaataaagcaaataaatcctgcttaccagagaccgctcagaatgaagttgaaatgttccaaactgactctatgggtctgcccaaatttcggtagcagttagacctacatgcatatagtggtgacatgcagcgcaggaagcactgtcttaataccacttgtattatagatctgcagagtgtgct

SEQ ID NO: 65512 - DNA, 445 bp, Glycine max
  Clone ID: PAT_MRT3847_30172C.1
ttctcatttaattatttcaaccttaatctatctctcaagctagcaagcttgtacccatacttcttaatttgagagaccccaaagagagaaattaattaaggtatgtgctctttctcttcagaacagtcctcaccatatgatgatcttcctcttgttcaccctccatggccatccaagagacagccccagcaccttcggttcagcctccataaaagaaggagagcacaattgcaagaagcaagacggaggaaaaggatgatcatattgaagactgaaataaagatgagaaacttgaagttgtacatggagaaccaaagcatcatagaggagaatgagaagttaaggaagcaagcagtgcttcttcacaaagagaatgaggccctcttatttcaacttcaaaagaagctttccgaacaaaataacagcaaaaccaatcaaatagctg

SEQ ID NO: 65513 - DNA, 483 bp, Glycine max
  Clone ID: PAT_MRT3847_30173C.1
ggctcgagcaagtatgttgtttccttcctcaaggaacgtggcgaggaaatatattatgaagtgcaggcaacgtgcattgttacgatgaacacggtgcttagagctcatttacgcgcttatatgcaagcattggagaaactacaattggttatagcaacatctaatgatggaattgtcgtacagactggaagcagtggactcttcattggagcaagggaaccactgaaaaactgatctgttagcttagctcttggggatgagattaatctatggaccgatagtggtgaacctgcatcactcacttacttggctgaagccatgtacaatcaatatacatgtgatgacctagtgatgagcaatgcaaggctagacatacgagctgctagttgataatctgattcatgtgatgattgttatggagaagagattatatattatgaaatctgttgacgttcattcggcgtgatcgatgatcacttccat

SEQ ID NO: 65514 - DNA, 1294 bp, Glycine max
  Clone ID: PAT_MRT3847_30174C.1
agagaactagtctcgagttattttttttttttttttaatgaaaagagttaatcaagtttttattattgtatggaaaacgttacattgttttcaaggaaaagctgaaataggccgacaatagagaattgatcagaagaaggaaagaaattcagaaacaacaatgtagtaagcgatagagggaatgaatcttatttcttcttagtgggataagaagccatcttgtagataccgcagattccctcgggttttccaatgttcctcctcattcttatgtatcctttctctccccacttagatccccatgaatttttcactatgatataatccacacctttcgcagttccgtatccaacagctgccacaccatgatctaagtcacttccgcaatgcccgtcgaaaacacccccactgtaaaattggaaatctctgcctgaagcctctatggccacactgaggggttggtttgcaagtgccttcaataggctctgttcattgttttgtggcacatcatggtacccgctaatggtgacaacttcggtttcttccttagtcatctcgcaagtaccttcctccataatgtaaggataatcttcctctttgtggagtccaccgttttctacaataaaggagaatgcatagtccatgagacccccattgcaaccattgttgtatgttctgtcacagtcaatcaactcttgctcagacagtgatgtcaaatttcccgtgactatctggtttataccctcaactgctgcaacagtggaaaatgcccagcagctaccacatgaaccttggttcttgactggggccacagcacctttctttctccaatccactgacttaggcaattcaacatctttgtaagtgaattcttcaggagactctctccttcgagagtagtccaccttaagccccagatacttgttcttgaactcttggtggctcaaatcagcaaactcattcaagccaagccagtagttgctgaccaccttgtttctctcatcaatgtgctttaggttatccttgaaaatctcgaacctaagaagcttctcctcaatgctttggtaaatcttgccatgttttgacatccatgattcaaagagttcaatgagcttatccatggactttaagtcctccgatgaatagcccacaatggagaaatcgcgtccaaaagccaaagacgcaaataagcagaaggagcaggcaaggacaagtgctttggagaaggagaaagccatggctatggttgttgaaatgtgaattcaagagctcgagccgaatacaacgctcgagc

SEQ ID NO: 65515 - DNA, 156 bp, Glycine max
  Clone ID: PAT_MRT3847_30175C.1
attaaaacagcaccttttaccagggggttccccaagatggggcattcataacacaaccaaacgttttgtttacatgtcctagatcatgaaaaaacgtgaatttctacaagaccaatattattgttcatctactcagttaaaccgcgcctgaacatt

SEQ ID NO: 65516 - DNA, 380 bp, Glycine max
  Clone ID: PAT_MRT3847_30176C.1
attgaaactaggtgagagctcaaagaacggccatccctattcacatttcaatttggggtggtctttttcttctttggctaaacgttagatttggggggaggctcagggatagcctcattaaggatccgcgaagagaccttgttggaaacgcatatcatatcagtggaatccagaagcgattctgggttttcatcgaggggagcaccctttccaggcaaggggctctcgtgtgccacccatttatacactcgttctttgtgcttggcccaaaaaactgagggtaagcctcaaacgaccaagagggcaccaagcacaccttcacgaaaaatctgctctgtccggataaaggagcccatgatgggtcaatgagattattaggg

SEQ ID NO: 65517 - DNA, 362 bp, Glycine max
  Clone ID: PAT_MRT3847_30177C.1
aattattatcaattatcattatctacagggcagggcttggaaagggaaaaaaattaaccgactcactcctctcacacaccacacctacatactagttgaaggactcttattaaatacgtcactcaaaacattaaatttaaactttccatattaccaccgagtatataaaattccatcagacaagctgatttcttgaacataatacattcagcccgaaagctgatgcaaatattcagctacagctgtaaacgttcaaaaccttagatggacgttacacatgtccaaggggctcaaacacgacatactattagtggccatggtcctgaaactcccactgagtgtcatataaaggacaaacttga

SEQ ID NO: 65518 - DNA, 573 bp, Glycine max
  Clone ID: PAT_MRT3847_30178C.1
ccacgcgtccggagaaaaccgagctttgatttctccccaacaaacacaaaccattctcaacaatgtcattctcacgaaggttaaggttttctgtctctctttccattcccaatttttcctcttttcttcaaaactcctcacattctcactttcactctcagcccccatccattcaaaatgttgacgatgccgtttcccaattcaatcgcatgctgtgtatgcgtcataccccacccatcatccaatttaacaagattttagattcctttgcgaagatgaagcactattccactgctgtttccctttctcaccgattggaactcaagggaattcagcctaaccttattactttgaacattctcattaattggttctgtcatatgggtcaaatcactttcggcttctctgtattgaccaagattctcaagagggggtaccatcccgacaccataaccttcacaacacttatcaaaggtctctgtcttagggacaagtcaagaaagcactgcactttcacgacaggctattagcacagggattccaactcaaccaagttaggtatgggactttgat

SEQ ID NO: 65519 - DNA, 280 bp, Glycine max
  Clone ID: PAT_MRT3847_30179C.1
ttacgcatcacaatcgattgttatttgtattctatggactacgatttcaaaagcgagtcagtcccatttccaacgatgtaccttccttcacctccaccttcacctatgtaccctccatcaccgtatcaacagaatcctacttcttcttcaatacttgacgttattgtttatataaagccttaatatattatcacaccttcatctcatttatcattacttgctctatataatccactgatcaacttccaatttgattttttattgtacaaaaaaaatttaa

SEQ ID NO: 65520 - DNA, 1105 bp, Glycine max
  Clone ID: PAT_MRT3847_3017C.1
cctcgagccgaatcggctcgagggcaacccctttgggtctagcactagcagccccttgtgttgtctatctgataatgctcctgcaggcatacagggagccaggcatgctcaaattggaatatctttatcagatctccaccttaacaattaagctgcagttggggttgcttcctgactaacgtccaccagcttaatttgcacactgggatttgtaatggcaacatcaccaaccatggtaagagtaaagaaagtctatcatgcttgctgaccatgggaaattctaacaagagcttggagatatctgatcatggtgaacgagacaaccaatatttctgcttgatcggaacaacagagaacgtcaccggggctacaaatcactaaatcttcaagtggtgtatggtctcaaaatttctacatgttaaacaaggaatgagagttgaatcaaataagacgggaagggatttcttagtgactcccagtcttcagtttcaccaggaaagttatcttctactgccgagttctcttggcaagtcggttctgataccagtcattgcaaggttttcatggagtctgaagatgtaggacggacacttgacttgtcctgcctttcttcttatcaagagttgtacatgagactcgctaacatgtttggaatagagaggtctgatatgttgagtcatgttctctactgcgactcatccggtgctcttaagcaaattggagaggaacccttcagtgagttcatgaagacagcaaaaagattgaccattctgacggattcaaacaacaaagatagtagaagtctgttttgcagggtttggatcacaggaactcgaaatgctgaacatggattggatgctgcatcaaataagacaggtcctctcagtatatttgcttaatatggtgtggcatggcatcggagacattgtttttagatatgaaaagttgaaggacatagttattactcagttgtaagagatgctaatatgaactgaaaattccatcaatattggcgtctttgttttcgatgtccatttgtagaaaataatgatttttcctgtatgatggacaattactattctaatattaattaattaattaacct

SEQ ID NO: 65521 - DNA, 269 bp, Glycine max
  Clone ID: PAT_MRT3847_30180C.1
tgagaagacgacagaagggctacatattcacggtgatgtttgtaacacgttttcattgcgtctttaacattttaatccttcctcttttctttcatatttatgtttaacttttgacatttgtttcatcagacatccttacaatgatgatactttattttacactttgttcttcatttcatggttattatatctatattatatgcttatgttgattatagactacatattcacggtgatgtttgtaattctgtcgactagggtattcatca

SEQ ID NO: 65522 - DNA, 499 bp, Glycine max
  unsure (1)..(499): unsure at all n locations
  Clone ID: PAT_MRT3847_30181C.1
tggcatgttagcttctcgtgactgtccaaggtcctgccctgttctgaccctgcgtttacagccctttagggctctgaccacatgtatttccccttttgccatgtctttccaatgttcatgcatcagtgcagcatgtcgtagcagaatatacatccataagtcaacactttcagcagtgccctgcttcacacccctgatgtccggcaccacgcctttatgcaaccttccatgcacttccggtccatgttgcgccaattacattcccggtgatccggaatatttcgtgtaccgggccatgggtggtcgtggaaggcgaagaaaattgaggatacgagaggaaagggggaaacgaagacaacgctacattaagaaatataagacgcgggagagggtgctgccggtgagaaaacataacatagatatatacggggcgagcgaaggngacggtgcggggctaaggagaangccacagggaggngcagaagggatagaagaaaac

SEQ ID NO: 65523 - DNA, 296 bp, Glycine max
  Clone ID: PAT_MRT3847_30182C.1
gctgttttctttttttttttttttttttagcggggtttttttttttttttttttttttaaaaaaaaaaaacgaactgtttttttaaacctactcaaaatgatagtcccgaacttaagaagaaaagtaaagggggaggggtgggcccacccctttctttttattcctccactaaattaaaaacttgctttttaacttgaagacccaacccagattgtgtttgattaaaatttacaaaggcccaggctatagggaaccgtgcccatatctaattggctttggctaccctaaccctacc

SEQ ID NO: 65524 - DNA, 405 bp, Glycine max
  Clone ID: PAT_MRT3847_30183C.1
gcggtgtatgtcctcagagaagaggttctatggatggatcccgattctgaaccttagaacagcgacctggtgtggaacaggaatccagcctcaacggggaaggattataggcgcggtgctctgatgctttgcatgactattacatcgttttacactcgctctacgcgtgaacgtgacgactcgacaaggctgctttctcatgagatgtatctgcatagggagatatgctgcgtgctgtgatgccatggacctacgcatatggagcgacatgagtcactctgttagaggaggtatcgtatgataatagccggatacagaacctagcatttgggtttcaactcctacaagcaaacgagaatgtcgctcactatcttctcaactaaggctatctgcttccaataaaat

SEQ ID NO: 65525 - DNA, 1158 bp, Glycine max
  Clone ID: PAT_MRT3847_30184C.1
ttctcccacgcgtccgtacggctgcgagaagacgacagagggggaatattttattttaataaatatataatataataactattcccaggctttttctacgctttattcatattttggttcttcgggtcctaatccgtaacagaaacaggggattcgcagttgtggagtagatctgagttgtgagcaatagattctccaaatttggcggcaatgggtgggctcaccgctgaagatctgtcgaccatcggcggaatcgccaccgtgtcgcttctccattccttcattcccactcactggcttcctttctccattgtcggtcgcgctcagaaatggactctctccaccactctcatcgtcactgcacttggagcaattttgcacgtaatatccacttcactgcttggtataacggcaattaccatggcaaacaccattgctggtgaagaaactgtgcataaggttgcttcacttttgcttgtatttttgggtggtagttatataattctgtttctgatgggaaagggtggccatagtcattcacacaaccaacccatggagaaaatggctgtagctggacttattctcgttcctgcattgtctccttgtgctacaacactcccggtctttcttgctgttggaaattcctcttccatgatggtgcttgccatcatagtactactattcagcacaataactgtgatgacttcgctagtagcgttgtcattttatggggccagtcaactgaagtttcactgggtggagcggtatgacaagcttcttgttggttctgttctgtgtttagtaggagtcttgaccctactttttcatgatcatgatcatgaagtagtttcgattggacatcactcacattcacataggaagattatttccttgtgagatatataaatgtttttggaattacatgcttatgagcattgtcacggtattgtttttattttgtatcagaagggaaaaagaaaaaagaaaaacagatgttgctgcttaggagaactgatcatcttggtctagtaaaagtcgttgtatactgagttttcaatgtgaaattaatgtgtttttagtctctaaaaaaaaaatggattaatttaatttttaaaaaaaaaaaaaaaaaaaaaaaaaaaaaaaaaaaaaaaaaaaaaa

SEQ ID NO: 65526 - DNA, 340 bp, Glycine max
  Clone ID: PAT_MRT3847_30185C.1
ggctcgagctcaaactcaatctgcacagggctactgttatatatggatacaaagcttcttgggccgtcgcctactattaacaacgcttattctctaatcaacactggaccggctgcttataacgtctcgatctgttctacggctgagacagatatagccactggcaggcggaaacttctgcggaacttgagggaaagccaacattgaccacgcatgcatgcagcatacttatcaaatacgcatatacccccgcctgggtagcctattgtgtgatcttactaacattaagggaagtgcgctcactgatcaatattcagtcaagatacatatcgagccactt

SEQ ID NO: 65527 - DNA, 333 bp, Glycine max
  Clone ID: PAT_MRT3847_30186C.1
accacgcgtacgattgcgaaaacccttaatttgggactgtccgcattatagaggctagagctgatgtgttcgcactggacggtgattctacatcaaactacgactcatactataaaggtccaatggacgtaccttgaaatgcatgcatagaccaacttgctgatgaagagccttgccatagtagaatgatataatggctgaaatacgcaaagacaaccgtacgaccgggcttgcattgaagatcgtaacctatcgggctaaatgttactggaaattacctaatacagaacagacacgctgcctaattcgattgatcaagttacgcgagactta

SEQ ID NO: 65528 - DNA, 474 bp, Glycine max
  Clone ID: PAT_MRT3847_30187C.1
ggggaaaaaaaaaaaacttccaaaaaaaggcttcccctggaccccccccggggttaataggccaaaaaagggggcagaggcccaacggccttaagaaaccccctttattacaaaagccaaaaaaaaaacaggaaaaaccggggtaacccacgggaaaaaaataacggcccccccggctttgccttggtaggggggggcaaacccctttcaaagggaaaaaaatggggggaacttttggaaaaaaacccccccaacagggggggctgggcttcatgggggggaggctggggttgggcttcacgggggggaggttttcccccctttttcccaggggggggggggggggaagggccccctttttaacaaaaggtttttaaggggggggatttttaacttttttggaggaaacgggggtttttgaggccaaaacatgggggcctttttttccaaaaaggcgcctttaaatctaagggg

SEQ ID NO: 65529 - DNA, 583 bp, Glycine max
  unsure (1)..(583): unsure at all n locations
  Clone ID: PAT_MRT3847_30188C.1
cccacgctttcgttttctcttccggcagaggctctagacacggttgagagggctgattcaacaattgntagcgggtccacaagcaaactaacatacagacggtgccgtcaattgaatagtttcgactctccaccatcgttcaggtcttccatgaggatcaatcatgtcatttacatccaccaggtctcgattaattttactttggctcagcattgctatattttgcttcattgcatctacttcaaccacaatgtcaagcatcgagtccttgggtacaatctgttacttctattacctcatgctaatcagtttggtgtcattgtgttgaactcattacgaccttctcatatataaattcttgagtttgatcaactaatcgcattatttatagtatagccttttattgaaaaacacagttactgagttagattgtcgattgcaacagattactttttatattcttggcgtatctgatttatatcacatgacatgngtaattacatatataccctgaattgaccacatattactcaaggaccaggctaatgagtatatgatgggtgcataggatacacctgaatag

SEQ ID NO: 65530 - DNA, 452 bp, Glycine max
  Clone ID: PAT_MRT3847_30189C.1
ggatcgagcatccgatcgactttagattatgctgatctactcctaccgcttctgacacgtcagtgttaggaccacgtgctgctatgaggacctacagattaggggatacagaaatgaacctacaggggataaaggtattggatgactactaggacaagtcgttccaagccgtggtgactgaagtgctaggaggggctaacaggcacactagtacatggttcaactgttgagtcgtaggacgcccatactcatgtctatcgagcatctgatgagcatagtagtcagctacagctttaaagatgctgaggctctgagtgaaagaagctatgatctcgtatctggctgcaccgagaatcacgtgagtttggggaatctgaacaattatgttattgatggctacatagttgatatggaagtacaagcatgtcatacagcagattgatgaccactgt

SEQ ID NO: 65531 - DNA, 709 bp, Glycine max
  Clone ID: PAT_MRT3847_3018C.1
ccgagttctcttggcaagttggttcggataccagtcattgcaaggttttcatagagtcagaggatgtgggacggacccttgacttgtcctgtcttggttcatatgaagagttgtacatgagactggctaacatgtttggaatagaaaggtctgagatgttgagtcatgttctctaccgtgacgcagctggtgctcttaagcaaactggagaggaacccttcagtgagttcatgaagacagcaaaaagattgacaattctgacggattcaaacaacaaagatagtagaaggtgggagaaagaaaattaatgaaattatgtataggatgtgcttccggggaagatactattgtatgtgcaagtgtaactgttccttcctctttgtgacttcaaagtctgttttgcagggtttggatcacaggaactcgaaatgctgaacatggattggatgctgcatcaaataagacaggtcctctcagtatatttgcttaatatggtgtggcatggcatcggagacattgtttttagatatgaaaagttgaaggacatagttattactcagttgtaagagatgctaatatgaactgaaaattccatcaatattggcgtctttgttttcgatgtccatttgtagaaaataatgatttttcctgtatgatggccaattactattttaatattaattaattaattaacctagatttggttccc

SEQ ID NO: 65532 - DNA, 497 bp, Glycine max
  unsure (1)..(497): unsure at all n locations
  Clone ID: PAT_MRT3847_30190C.1
atcaccatgtgtgtcttcttcactactacttgttcattctcaccctattgtgtccccattactcataacatgactattattaggattggtacagagaagataatcattctgctattgcaccccnacatgtacttgttaggagtgtgtacgctgtgctggacatgagaggctgctcatactgtttgcagaacatggtcaccaccacaaccgatcttcttcttcatccatatctttacacatgcttcagagtacttccagactcagaaaaccaccctcttcttatattcacaagatctttgcttttggctctctcttcactcgctcagaatctccaccacaactatgactattatgatgtctctcccactccagaagagtcattcatatcaatcaagtctgaagagaatgggtggtatcccgggaatagagcacagagtgaaaggaagtgtcgtcgtggaaccatcaagacaaggagaacgagagagtgatggagcatg

SEQ ID NO: 65533 - DNA, 319 bp, Glycine max
  Clone ID: PAT_MRT3847_30191C.1
agaaaaaaaggctgccttgattttaacgctaaaacatttgggttccagggggggcaaataaatttctgaaaatttttccctgaaaccccctgtggaatctttttttgattaaaaaatttcaagcttaccccttgttacccaacgccttttagggcccatttttttattgtttaagggaaattctttgcccttagtttacaaatccaagattgttgtgggctatcccaacatttgtaatccccacgggggggaattaggggcttttacatatttccggttcccctcaaaggcaacaaggtcattttattgggctgggggg

SEQ ID NO: 65534 - DNA, 254 bp, Glycine max
  Clone ID: PAT_MRT3847_30192C.1
cccacgcgttcgcctaccatcaaaacaaaaagctacaaactaaaccaaaaaatgaaaaggaacacattctatgaaagatgaaaacagataataaaatattataagctacaaattcattgggagtttgatatacacgttccatctttcttaccttgcctcgacatgctatgactcttttttgccgaaacttaagtccattgcattggccgattgcttcacaagatcatggattgagatcacctttgggaatcgca

SEQ ID NO: 65535 - DNA, 1172 bp, Glycine max
  Clone ID: PAT_MRT3847_30193C.1
aaagaaaatcaactttatttataaaatttatgtataatactcatttcaacaggacaattttgaggtcggccaactatatacagttgttaccacaaccacaattaagacaaagaatattcccatgtgcctctttacagtcaatcccatgtcccctccagatgtagtccccaaggaatccctgtgttttgtaagctttgtttcattttctagactggaatctgcatataggcttgcttctggcttctttcactcagcacaatactgtagagatcatcccagatgtggcattggtttttccttgcagatgtttagacagtatctactaaataatttgttctttcattgactgctgtccacatgggctgttctacttttaaagaaactaccaaaccatcagtggacctgtgcaccttgccagcaatacacgcatccctaccaatggctctccatttccagacactggcattccagctggaccacttagtgttaagttttacttgtgcctctcgggaagcagagaggggtctaaactcttaaggtaattatcttgatcaaatcttcagctctaataatctcccacagacaggaccacagcagttctgcagcctctgtggggactgcttctacaacttctcagataccaaagcacacaggggttcaatcccttaggcaacatggagctgcatttgctgctcaagtttaacctgcacacatcctcctgtggacttcaaatggagtctagattaactctatacccaacacatcggaaatgctatgcaaatagttgcacagtttaggaacactaacaaaacaagcctgatcctatcaaacggtgaccacaggcctgagcacactagctgagctgtgacagctccgccacagaactgctaagctaagagtactgcaattcctggcgccgcactcctgctgctctgaggaaatggttttgggggaatcatttgatattttaggaattatctgagttatgaggcactttttaaacacaatttaatccccgttactacagctaagaaactgatatccctggttactaaactgaaatttgttgacttctgtggtaatccctgatgtaccaaatcttagtccattctaatgacaaaagcagaatcaggtagtaaaagtgtcacatgcctgccgatgctgctgtgatc

SEQ ID NO: 65536 - DNA, 369 bp, Glycine max
  Clone ID: PAT_MRT3847_30194C.1
ggtgagacgagggtagggtcgcgttgtgtcgcggcgtgtcgcgcgctgcttctgtgtgtggcgtttgtgtttacacaccaaactctatctgcgtatcagcaccatgtcgaccacgcggggtggaaaagctaagcctttgaagaaacccaagtgtgatgagagggatcaccacgagggtgacatggctcacattcagaagaaaagggaagaggagaacgctctaaaagagttgagagccagggcgccacagaggggacgctttagaggctctgcgctcaagaagagtggagagatatagggtctctatatcaagagtgtacacatccaatattgagccctgtagtatatcaccatgatcacttgtgtcat

SEQ ID NO: 65537 - DNA, 229 bp, Glycine max
  Clone ID: PAT_MRT3847_30195C.1
cccacgcgtccgcagacgcgtacgctgatttgtgacttagctactttttaccgagtcttaggtactattattgctagatttggatttatcatccaccaagtctacctttctactaatctaacctccatctttaccctacactgaattatattcattaattctatattataaatcatatatatttataacaattgaaatatattttacctaataaatttactttccaatt

SEQ ID NO: 65538 - DNA, 678 bp, Glycine max
  Clone ID: PAT_MRT3847_30196C.1
cccacgcgtccgcccacgcgtccgcccacgcgtccgggcaaaatccatgtgcccacatggatgattgagagagagtaagagagagagagagagaaagagaaaacgtattatatttatgacctcaagacatcaccacaagaaacagcagcagcaactgcagtggcagcaaaaaacatagtaatagtaatagtagaggaagagagacacaagagacccaccaaggaaattttgctcaaaaccagaacttgctaccaaagttaacatcttttgatgattccaagtgactttgagcttcaaagtccatagtggggtgtggtgaattttttgaattttgaagagaagaagtgtgtgtgtgtgtgtgtgtgtgagagagagagagagagagagatgaagaagagtgagagtggggggtatgtgagagcggatcagatagatctgaaaagcttggatgagcggcttcagaggcatctgagtagtacatggactctggtgaagaacatgtggagagcttggatgagcaaggttagaggcatctcctcatgacgccgacatgactggcagattgacccctctaagcttgtcttctggactgtcactgctcgtggctcttttggccctgtccctcgcgggatttatgatggcccggatgttgccggctccgctccttgcctggggggt

SEQ ID NO: 65539 - DNA, 370 bp, Glycine max
  Clone ID: PAT_MRT3847_30197C.1
tcgagacagaatcggggtcaacgtgggtggctgacctgaaggaagcgtcttcggcggcggtggtgatgttcgagaagccgttgatgaatctgagcttcaaggacctcattgttgcaacgtcacacttcgggaaggagtcgcttctagcggagggaaggtgtgggccagtgtatagggcagtgctacccggggacctccacgtggcaatcaaggtcctggaagaggccagagacgttgatcctgatgactccgtggccaccttcgttgacctctcgagactcaagcatcccaacctgctgcccctctccggttactgcattgcaggtaaggagaaactggtgctgtacgagtacatggcaaacggcgacct

SEQ ID NO: 65540 - DNA, 666 bp, Glycine max
  Clone ID: PAT_MRT3847_30198C.1
caaagatggtggtgaggagtgacaggttgaagagggatgtggcagattgtggtgacaacaaccaaaacgggtacgtggagcaagagaagaagataaaaggggtggtgagttgtgctgggaagaaaggtggtggtggcaataataatagcatatatgcggtgttgtcaacgccgatcttcatgaggccaagcagtaccacaggaggcacagggtgtgtgagtatcatgtaaaggctcaggttgtgcttgttgatgaggttagacaacggttctgtcagcaatgtagcagattccacgaattagctgaatttgatgacacaaaaagaagttgccgcagcagtttggccggacacaatgaacggaggagaaagaactcagatcagtctcaagcagaagggtcaagccgcaacaaagggacagggcaccctcaattgaaggacattacttgtggtcaggctgatgagagggggagaattcagataacaatccacgaaaatgctgcttacaaacatttccagataagatgagatatgctttgatctgaagtttgctctctctcttctgtcatccaggggatgtatttgtatttgtcaaactattcctgtgtcacactcatgctgaagattgcatttagataaataacttacaaaaaataaaactaacataa

SEQ ID NO: 65541 - DNA, 404 bp, Glycine max
  Clone ID: PAT_MRT3847_30199C.1
aaaagcaaaaatatttttttatttttccaacttttagcccaacaaagccgaggttatttaaaatctataatacctccccccctttttattcaaggggacccttggttgggggcccgatttttttcggggggataaaacaaaacctgggttttaattaaaaccctatactggggggcccttgctttagggcaaaaatcgcccttggttttggaccggggggcaaaggaatcatcctgggtaaaattggggcgggggtaaaaaaaaatgtttttgggaagggtgggttggggttctaaaaaaaaatattggggaaccctggggctggattaaaaaaaattatttttgggaacgcttggcctgggttcaaagtcttcatacctcctaaatttgggggtggggaaaaa

SEQ ID NO: 65542 - DNA, 936 bp, Glycine max
  Clone ID: PAT_MRT3847_3019C.1
gggtgcagaagcaaatggcggcgagaagcaattgaaatttctgatctacggtcgcagcggttggattggtggtctactgggtaagctctgcgaagagcgcgggatccaacgtcgtcggcactctcaccctcgccgacgtcggccgggtgcagaagcaaatggcggcgagaagcaattgaaatttctgatctacggtcgcagcggttggattggtggtctactgggtaagctctgcgaagagcgcgggatccaatatgagtacggcaccggcagattggagaaccgctcgtcgttggaggcggacatagcggctgtgaagcccagccacgtgttcaacgccgcgggtgtcacgggtagacccaatgtggactggtgcgaatctcacaaagttgaaaccatccgaacgaacgtcgacattcccaactccatgaccatattggacgagcttctcccaatctcgctggagatggccaagcggaacctcactgggatctggaatttcaccaaccctggagtcgtaagtcacaacgagattttacagatgtacaaggaatacgtggatccgaactttacatggaagaacttcactctggaggagcaggctaaggtgattgttgcccctagaagcaacaacgagcttgacgcctctaagttgaagaatgagtttcctcaacttttgtccatcaaagactccctcgttaagtatgtattccagccaaatcagaaaaaggcataacataacttggacatgttatgttagtttaccgttttaatttacatcttcttctgctgaccatttcagattttccttcgtgtgttttgttgcatttaattttaatgttatatttgtattttttattatgatatgaataaactagttgttacctacttaattttaagtaaaaaactcttgcatcatctttttctcttgttccc

SEQ ID NO: 65543 - DNA, 262 bp, Glycine max
  Clone ID: PAT_MRT3847_301C.1
cttgaactcaaacatggcagatgaggtggttctgctagatttctgtgcaagtccatttgggatgagggtcaggattgcacttgctgcaaagggtatcaagtatgagtaccacgcagaggacttacagaaacagagtacctcttctcctccaaatggacccggttcacaggaagattccggttctcatccacaatggcaaacccatttgtgaatccctcattgctgctcagaccattgaggcggtttggcatgacagaaatcc

SEQ ID NO: 65544 - DNA, 1299 bp, Glycine max
  Clone ID: PAT_MRT3847_30200C.1
atgagcttgtcacatgaaaaaaaccctcgcccccaatcccatgtagtgtgtgttccttttccagcacaaggccatataaaccctttaatacaattggccaaggcccttcactggcgtgatgggttaccatcatgggacagtgatggaaacccagatggcgtcgccctgtgggcacctccagttagtgccataatatctgatggtcttatgacttttgcaattcaagctactcaggatctgagcatacctgaagctcagttttggattgcctctgcatgtggattcatgggatacatgcaattcaatgaactagccaatagaggaattattccattcgaagtgataactagggattatcttgtttcagatgatgaatccattaccgatagtgaactagaaatgcccatagattggattccagggatgaaaaacattcgactcaaagacatgccaagctttatcagaaccacagatcttaaagagaccttgttcgattttatggggtcactagcaaagaattgcttgacatcatccgcaataattgttaacacgatccaagagtttgaactagaagtccttgatgcaatcaaggccaagtttcccaacatatacaacattggcccagctcccttgttaacaaggcatgttcctgaggacaaggttttgtccattgggtcaagtttatgggttgaagactctaagtgtctcgaatcgctagataaatggcaacccaattcagttgtgtatgtgaattatggaagctggacagtgataacagaacatcaccttaaagaaattgctttgggctttgcaaatagcatgcacccatttttgtggattattaggcctgatgtgatgatgggtgaatcagcaattttaccaaaagagtttttttatgagattaaggagagagggtacatcactaattggtgccctcaagaaagagtgctagcacattcatcaattggactttttttaacacactgtggatggaattcactaacggaagctatatgtgaaggtaaacctatgatttgctggcctttctttgcggagcaacaaatgaattgtagatatgcatgcacaacttggggaattggaatggagctgaaccatagtgtaaagcgtggagagattgttgagcttgttaaggaaatgatcgagggagataaggcaaaggaaatgaagcaaaacgttttggagtggaggaaaaaagcactagaagccactgatataggtggctcatcctataatgacttcaataggttcgtaaaagaggctcttcattttgaagagtaa

SEQ ID NO: 65545 - DNA, 717 bp, Glycine max
  Clone ID: PAT_MRT3847_30201C.1
cagaaccgggttcggccacgcgtccgaccgagttgaatcgcgacgaagatgaagaccgaatcgcgttcgaaagaggaaacaaagacgtatcaggaatggtttaatttggcagattcagatggagatggtcgaatctctgggaacgacgccacaaagttcttcgctctctccaacttgtcgcgctcgcaactgaagcaactctgggctctcgccgatgtcaaaaggcaagggtttttgggcttcacagagtttgttactgcaatgcagttggtttcgctagcacaagcagggcaggaacttaaatcagatatcctcaaaacgcaaattgacaaggaaaatattaaacctcccgtattggaaggactcgatgctttagtagcacaaatgagtttaacaattagtgccctgagtgaagtaaatgggactcctcagcctcaagtgttcccaactaaccggtgggtttggttcaaaatcttcaaagaaattatctctgaattcagttacatcaatcattgatggcttaaagagattgtatattgaaaggttaaagcctttgggaagttgcttatcaatacaatgattgatgtgtctccattgttgaccaacactgattttgatgctaaaccaatggtcatgctttcttggtcaatattcaacaggaaaaactacatttataaaacatttgtttaaaatgtgattatccaggagccaatgttg

SEQ ID NO: 65546 - DNA, 897 bp, Glycine max
  unsure (1)..(897): unsure at all n locations
  Clone ID: PAT_MRT3847_30202C.1
tccggaaatttccaagatgacccacgcgtccgatagtttccaccgttgcctcatgcgtttaggtaaaaagaaaatcgcgacgaagatgaagactgaatcgcgttcgaaagaggaaacaaagacgtatcaggaatggtttaatttggtagattcagatggagatggtcgaatctctgggaatgacaccacaaagttcttcgctctctccaacttgtcgcgctctcaactgaagcgactctgggctctcgccgatgtcaaaagacaagggtttttgggcttcacggagtttgttactgcaatttggtttcactagcacaagtagggcaagaacttaactcagatatcctcaaaacgcaaattgacaaggaaaatattaaacctcccgtattggaaggactcgatgctttagtagcacaaatgagtttaacaattaatgccccgccggagggactcctcagcctcaagtgttccaaactaaccggtggtttggttcaaaatcttaaagaaagtgaatccggttgtttattctcaaatctagagtctgtcttggttttcatgaaattcaaatttccaagctacatgattccatgctgtgcattccattttgttcatttagtttttgccttgttggtgttgtatgttcattattttggagatgaattgataatttctctttatctgaacatctgattcttatgtgattgagacttgagactntgagagatccttgaagcttatctgccaataatgctcacttgaatgcgtgattaagcgtttaagcaaaataattgacatacggngttgtggggtgcaaaggtgcaattacacttcaatattcacatgatcgatttatggtacaaggtgcttggtgaatgtcgtcaattcttgtcacatttt

SEQ ID NO: 65547 - DNA, 343 bp, Glycine max
  Clone ID: PAT_MRT3847_30203C.1
attacaaatttttttggttttttggtatttttttttttttttattttttccttttcctaacggcacaaagggggaaaaaatcgtctttttttaaaccaatcagaattgcccaaaatgtgatggggccccaatcgccaaggggggggctttaaaaatttccaaagaaaaccccggtttaattgcaacccccgtgcttaaagcgagctcccaaaagcccgggaccctgtaaacatcatgtttagggggggacaaaacgcaccgtgcaattgggttgacagccactgcatggcttttaattaagaccctaagttcaatgcctcctcagcccacaggcttaagcaaa

SEQ ID NO: 65548 - DNA, 312 bp, Glycine max
  Clone ID: PAT_MRT3847_30204C.1
atctgaaaacattaacataagaaggaaatctttttaccataccagacaagggctaggattttaatgacactgaatacagttcccctcaggaactaaaaataatcccctattctccttggcaaaatgtggggatatctggtacatgtgctagatggacaatattcttcacaactgtataaaactgataccctccagtattgcgagttcatgagctccaacaccaaaacgctaggattgggtcgggcctccggatagggagattcgtgcacttcgctatcatcagaacaaccggggagaaaggcggactaacta

SEQ ID NO: 65549 - DNA, 391 bp, Glycine max
  Clone ID: PAT_MRT3847_30205C.1
actgattaaaattggatcataatttttctcttcaaaactaatttgaattcatccaatctgcaatcacccttacataacctggcatgactccacgtggttgtcatcaggcatggcactaactactaaccgtagtccgtggtgggattcatatcagaagggctagaaatcatatccagcaaaaaaaatatgtccccttttggcacccaataaatatttcatcggtgaaagtgcaactcttaacaaagaataccggatgaggatttcaatttaacaaactgtagaatctaacttggaaaatcaccttccctaggcaagcccatttattattggggtacttttggaagcctttctctgaagcaagcaccccatcttggctgaggacactcaatct

SEQ ID NO: 65550 - DNA, 172 bp, Glycine max
  Clone ID: PAT_MRT3847_30206C.1
ctcgagacgacgtcaactcacacgcaaactacggcactgactcacacgtcaacagcatcatggatctggtcgacgtcactccacgagagacgacgaggacacactgaccggtcgcgatcgaggccctcgaaccagctacgacgaacgcggaatgacgatactgccacgtaca

SEQ ID NO: 65551 - DNA, 394 bp, Glycine max
  unsure (1)..(394): unsure at all n locations
  Clone ID: PAT_MRT3847_30207C.1
ggttgcgagtagtgtttccatcacactgtgatgattaagcaattggcttgtttagtttagtgaggaggaacaacctattggcaaatctatgtatgcagattcaaaccgcgtcatcttcccatgtatatatttattactatgtctctaagtttaatttcatagttcctgctgggacctcaacgcactcactcaccacacccccactttattcttctctctacgcgttcgaatatgttcttcttcactttccacttttcaactccctccactcctttccttcctagacacaaaactcaaaacaaataaacaaaagggtcttctcttcttgtttgaatttgacttaaagccacttacttgncttctgtattctctatttttggtttcaacatgatca

SEQ ID NO: 65552 - DNA, 260 bp, Glycine max
  unsure (1)..(260): unsure at all n locations
  Clone ID: PAT_MRT3847_30208C.1
cggatgagngcgccactacgatggttccatntggnctgcatggnctgtggtattgtgggggncntggtntcgaatnntggtgtcaagtgctngtcgnancgtnagggtgcatgagtggtnntcgggatgncctntgttgcacggtctccatgcttngcgcntgcaangatgtnacatgcatnctttgcaaagtnannttangccttcgnggncttacgttctgacnattggttgcctgtgntgcntacctaccaaaacgg

SEQ ID NO: 65553 - DNA, 161 bp, Glycine max
  Clone ID: PAT_MRT3847_30209C.1
cttttccctcttctttttctatgatggcattggatatgatagatgtcgctccgagaacgaggcatggaggaagcacgcttccgctggtaggaaatatcatggaccatctcagacgactcctggatcctacctatactaatgtcaacattcgttacgaaagt

SEQ ID NO: 65554 - DNA, 415 bp, Glycine max
  Clone ID: PAT_MRT3847_3020C.1
cttgtttgatacaaaatctggctcaatggcagggcaagctatgctagttccctttatattaccaaaagcctgtcttattttcttggtttctgacacaagatttttggtgaatgggattctggcacttatttttttgaaaatcactgcagaagaaagaacactcatttgagggactgttatagcctcattatctttatcctttagcactaaaataccatcaggtgtttccaatacttgtaattggttcttagatattcttccaatccaattgaatggggaaaccaagaagagaagatgttctttgttttttactttttttctggttttggagcttttcgaatgccttgctttctccaaagggtgtgaactttgaagtgcaagctttaatgggcataaaagcttctcttgtggatcc

SEQ ID NO: 65555 - DNA, 486 bp, Glycine max
  Clone ID: PAT_MRT3847_30210C.1
cagaacccggggggacgacccacgcgcgcgattacgcggccgcccacgcgaaaccagggcgcgggggcggactcaagggaggagacaagcgatcccccccgaaagaaacgaaaaggacacaatcggcgaacaagaggccccggagcatgcaagggctaaggaagcaaactcaagagcggggcagagacaaagcagaaacagagaaataaagcctcgcagtaagagcaggctcacacggcgcgaccaaagaatggaaccccgcaggcaaaaaagcaaggacgatgtcctctaaaacaaagccggtttaatgaaacaaggagcggggaaaacacgaagggaaccgccctaaaatgccaaatcaattgagacaccggatggacagccaccgcaatgccggatgtacaggaaacaaacgaacgcataacaaccgaaaaggcccgaaagggggggaccaaaaagaaaaaaaaatcccacagaagccaaagg

SEQ ID NO: 65556 - DNA, 176 bp, Glycine max
  Clone ID: PAT_MRT3847_30211C.1
attcttggaattgttattttttataatataaatgtttatcataaccattttcaacatatccttgaaccttgacaccaccactataaaacccccctgttatttctgatatcgcctctcaagctgaataaaaggttcagggctaagcaactccagacacgtggggcgaccggggaaaa

SEQ ID NO: 65557 - DNA, 576 bp, Glycine max
  unsure (1)..(576): unsure at all n locations
  Clone ID: PAT_MRT3847_30212C.1
ggtacaaacaatcaaaaaacttccttaagctgggttcgaaggttgaaaattgccgttgatgcagcaaaaggattggactatttgcacaatggaagtgaaccacgaatcatacaccgtgatgtcaagtgcagtaacatcctcttggatatggatatgaatgccaaggtctgtgacttaggtctctctaagcaagtaactcaggcagatgcaactcatgtcaccactgttgtcaagggcactgctggttacctcgatccagagtattattccactcaacaattgacagagaaaagtgatgtatatagctntggagttgttcttttggaactcatttgtggaagagagccattgactcactctggaactcctgattctttcaatttggtgttatgggccaagccatacttgcaggctggtgcatttgagattgtggatgaagacataagaggaagctatgatccctagagtatgatgaaggcagctttcattgctataaagtcagtcgagagagatgcatcacacatgccatctattgcagacgtactagcagagctataagaaacctacaatattcag

SEQ ID NO: 65558 - DNA, 527 bp, Glycine max
  Clone ID: PAT_MRT3847_30213C.1
ttaccgtgctacatgtgagtagtaccgcctgcttgggggggggggggggggggggggggggggggggggatgtttaaaagaaagaaggaaaagaaaagcaaacatcggacagcccggggcggatatggaatgaagttgctgagggctacggtaaaaaaaaaaaaaaaacaggcaataaaatggggagatggggagataggatatataactcaggcttttgttggtaataggtgattaaccataatggaaggctggcacggcagcacataataaaaatgtggttgacggacctcacatggagacacccagaagtactaattgttaggttaaagcttgcgcgacttgttcagcaatgaaatacaagatggtgcatagggggtaggtgatgggtggtagggtggcaacgcgaccgaccgcaatacacgaatggtgcaaggtacacaacagcagcatggttcaaggcaaggttagcacgacttagcgcctcacgtagtgggagtaaaatggtaaattgcacaaaagttgag

SEQ ID NO: 65559 - DNA, 385 bp, Glycine max
  Clone ID: PAT_MRT3847_30214C.1
gcgaggtggaacctgttattgacagcagcagatactttgttcttcgcatagaagagaacatatgtggtcggcttcgacatgcttttattggcgtaggaggccgagaaagaacagaggcatatgacttccaagctgccttacatgatcatatgaaatatctaaacaaaaagaaaactgctgaagagatggaacaacattaccaacaaacttcctcagttgattacagtctgaaagaaggagagactcttgtacttcaaattaagaccaataaaagtggcagcagtgtgaagtccaagttttttgagctgggtctgaacaaatcccccgaggaaaagaatggagggaaagaatctatacctagtataaagtaccaccaccttcttca

SEQ ID NO: 65560 - DNA, 171 bp, Glycine max
  unsure (1)..(171): unsure at all n locations
  Clone ID: PAT_MRT3847_30215C.1
gggcagtnnctcangctcatctacanncctngattcatctaatgnagatgttatgantggaagggtcntctggagtgcatcagatgcatantcccttgaganttctttccaagaaagganaacttnnagggnccnaaggncgcccgctttcantgggtactgnntctagcg

SEQ ID NO: 65561 - DNA, 332 bp, Glycine max
  unsure (1)..(332): unsure at all n locations
  Clone ID: PAT_MRT3847_30216C.1
agtcgcatgcacgcgtacgtaagctcggaattcggctcgagaggttctcttcaaaagaaatattnaantgncnnngtnnnnatngnngngnaanantnntgncngtgnnaagagnttnanncttgtnnttntgnggtcnattcagtngnttactagtnnantggtatattgntanccagatataagatgtgntntggtgacatgncatgcattcaatntggaatgctcaattggatgtatttnagcnatgtgagtaaaataactttgcatngggcgnttttgaggacctnnccntggangattagggnatatnaaaacagtgngngattgtc

SEQ ID NO: 65562 - DNA, 379 bp, Glycine max
  Clone ID: PAT_MRT3847_30217C.1
atctgacaactttagcattgataaggaaacccttaggaaagatttttattcttcggagaatgagcctcaaaggagatggtttttccaacattacaagggtacaaacagaaaacaaatcaaagacaagttctacaaatttgtcgaaagagtcaaaattaatatccttttctttgattggtttcatgcttatgccatcagaaaggatatagattacccttggaaacaagacatcataggtgatccaacaacaaatgtcataacaaattggaaaatcaaggatggtgagttaatccaatcggaattacctcccgcaacacaatatcaactaccaaatgtcaaagacagtaacaataaacccgtcatggcaattccattcaag

SEQ ID NO: 65563 - DNA, 163 bp, Glycine max
  Clone ID: PAT_MRT3847_30218C.1
gggggatagtcaatattccttttctctcaccacatttaacccttctggaaagcttggtcaaaatgaacctgctttgaccgctggtgggtctggacaaacctctttgggaattaaaactgcaaatggaattggcattgctacccaaaaaaaaataccatttatt

SEQ ID NO: 65564 - DNA, 305 bp, Glycine max
  Clone ID: PAT_MRT3847_30219C.1
gatttcttcttcttccacattctggtagttggtgtgctctttactctttatgtaatcaccgtctatgtgtctgtcatttccatgtgttacaactctgtgagatgcgatggatacataaacaggaagacgaacttcgctcacacttgctttcgatggtctgctcaatctgaacctaattgtgatgctagggtacattttccacaccatgaaatcggaaaagaaacccaaaaccgagcggccgctcgagatgatgcacgcttacctaagcatacgtgctacgtcatagcccatcggtcgtgtcagct

SEQ ID NO: 65565 - DNA, 403 bp, Glycine max
  unsure (1)..(403): unsure at all n locations
  Clone ID: PAT_MRT3847_3021C.1
ncgctcgaggttgaattagacgaacgccaattacagtttccgggttgttcaataaggagaatgagtgctggagattgattcaacttgtgctcctgaacctcacaaaatgtctggccaaaagcgctctatattttctgccaaatcgggatttgtcatccctaaaaacgagttgtcagggtcactggtgcctattttccgaggggctaaaaagcatggggtcactgttggtgccaccaatgaagaaaggtcaaaacaaattgagaggaaatcaaaatggggacctgatcttacacaagatacagctgtcaggaggggaaaaggtttaactttgcagattcgagtggacccaattacaaagccgttggaatcaaaaaaacttgaagttggggacactcagaacttg

SEQ ID NO: 65566 - DNA, 220 bp, Glycine max
  Clone ID: PAT_MRT3847_30220C.1
atgcagaagaattgttgcttcactggaaaatgtagtttcccatgagcacggaaaaggagaatcaagctgcatgcgcaaaaagagatgctgccactcctgagaaacggaaaaggaatcagttgattgcgcctcagtatttggtgagcccatgaagtgcatgcaagcacgacacgaaggtcatgtggaggatgagcttctctgtatcgcctgtgtggctcgc

SEQ ID NO: 65567 - DNA, 239 bp, Glycine max
  Clone ID: PAT_MRT3847_30221C.1
agccactgactaatatgggacgggtgaccagaacaattcatttgaaaccttaaaggggtatcaaaacagcaaaaaggggccgccttaatttacttgggttgaaccgaccacttgggacaaaaaaggcgcatatgcccagaatctattgccggaaacaccgggtcggaatccattaccgtgggattttctcggaaacagtaatctagccgtgattcaaacatacgttcacacgcatgcaa

SEQ ID NO: 65568 - DNA, 376 bp, Glycine max
  Clone ID: PAT_MRT3847_30222C.1
agtgctttgtttgcatgtgtggtcaccatttggaataaacatttctgagattctttcctacctgccggaccttgatgatgcacccttgtaaaaggaagttgaataccattcttctgattggatggattccttgcttgcatttctctttgctagctgggcctcttgtgccgacgaacacaacaggtcaccacgatactactatgtactgtactgcaccatgtggaacctgactatgtctgcctgctctgatgcttcgcacgtgattaaagagcttcaataggctaatactgcgtacccccacggcttcatccgcatcatcggattccacaactatcgccaattgctgggcatcagcttcatcgcctacgactcccca

SEQ ID NO: 65569 - DNA, 380 bp, Glycine max
  Clone ID: PAT_MRT3847_30223C.1
cgaggagagggctcactcacccttttgctccatcctgagccgataccctgaccctagccctgattgtaatagtaatgctgattacgaccctaaccctcatgctgacacccagaacagtgtggtttggctacgttgctaccgcctgcggcactaccgccggcgaggccgatgcatgcgatactcgctcgcgctctgtctattcctcctgatggacggcgccgttcttcatcggtacccttacgaccgggagatccgccttacccggatccgactcgactgcatcgggatccagaccatccctaggcccatgctcgacggatgcttctgcgtgaccgtctaaggccacaagagagacttattctagctcacctatgacaccc

SEQ ID NO: 65570 - DNA, 289 bp, Glycine max
  Clone ID: PAT_MRT3847_30224C.1
gcatgctcccctccggcagctggtaattcggctcgagcagagactgctatgtctcttttaaattggttaagtaaaaaataatttcttaggtgttggctgataaaagtctgctactgcaaagttggtgaatgtttgtaccttacccagttccaagagtaaaactaggtctttgaatatgagccatgctgaattgctgatgctgttaatatagcttttgttgattcggcttatttaatctaagaatatattgtgattgtaatttcctacttatatacacatttttacctta

SEQ ID NO: 65571 - DNA, 148 bp, Glycine max
  Clone ID: PAT_MRT3847_30225C.1
ggctcgagcccagctgctagccactacggaaccggctttacttttcaaagaccactccacaagacagcacggggcaggattcactcgcaacccccagcagagacgggcacgaccccgccaacacggctcaactacagctaggaaggca

SEQ ID NO: 65572 - DNA, 801 bp, Glycine max
  unsure (1)..(801): unsure at all n locations
  Clone ID: PAT_MRT3847_30226C.1
ccggtccggatgcgtgggtcgaaacacgcgtccgatctctttcatttctagggtttcaaacgctctcaaaagttctcaacagtacttgaatcaactacttttggggatttcaaaatctagttatccattgttgctgtttccggattacaatgccgcctccttcgaaatccgtggaaggcgaggagtggggaacccccaccaacaacctctgggtcgggaatctgccgacggaggtcacagattccgatctcatggaactattcgctccgtacggttctctggactcactcatctcctactcctcgcgcaccttcgctttcgtcttgttcaggcgcatcgaagacgctaaggcagcgaaatccaacttgcaaggcgcgttgctgcgcgggtttcaaatcagaatcgagtttgccagaccggcaaagccgtgcaaacaattgtgggtgggtggttttagtcccactgttgcaagggaagatttggaagcggaatttcgcaaattcggtaagattgaggattttaagttctttatagaccgcggcactgcgtgtgttgagtttctcaatctggatgctgctgctcgggcgatgaaagtcatgaacgggaagcggntaggtggacgccagatttgtgtagatttccttcgatcacaatctacgagaagagattttttggttgatcatgggcagtttcaggctagaccacagcatttacaaccttcaattgggaggaataatcaacccagtaaaaatctgtgggatagggtttttctcctttcctgtcaaattgatgaacaaatgc

SEQ ID NO: 65573 - DNA, 747 bp, Glycine max
  Clone ID: PAT_MRT3847_30227C.1
ggtaaacttctccttccgagcctggactggactctgtctttctcttcccgagcctggactggactctgtctttctcttcattctcaaaaggtctccacttttggaggcaaatggcttatgttgttgtgagggggctcttcagaatcttgtcctaaagggaacttccaacatcgtaatcttattagatcaaaagttttcttttgcaccagagtcaagtcagaaggaatgaagtgttttccattctcctatggagagaagaaagatgaaccgaaaggcttgcagttgcagtcaacatcgggtcgatcagacaattccacatgtgttgaggctgaggttagaagatctggttctgcattaaattctcaggatgtttcagacaatggcagctcagaatctctcaggaggaatgcgattcccagtttgtcccagagaccctgcaacctcagagtgtttactgtatctgaactgaaatcagccacaaagaatttcagtcgctctgttatgatcggagagggtgggtttgggtgtgtctacctgggattgataagaagtgcggaggacccctccagaagaactgaagtcgcagttaaacaacttagtaaaagaggaatgcagggccatagggaatgggtaacagaagtgaatgttctgggcattgttgagcatcccaatcttgtgaaactagtgggttactgtgctgatgatgatgagagaggaatcccagcgcttctgatttatgaatacatg

SEQ ID NO: 65574 - DNA, 628 bp, Glycine max
  Clone ID: PAT_MRT3847_30228C.1
ccacgcgtccgccaagccggaagctgccgtgtggaaaacttctccttccgagcctggactggactctgtctttctcttcattctcaaaaggtctccacttttggaggcaaatggcttatgttgttgtgagggggctcttcagaatcttgtcctaaagggaacttccaacatcgtaatcttattagatcaaaagttttcttttgcaccagaggtagaatttggctgataaggctgctttggaaggttttttgatgatatggttatttgatgctatcaagtcagaaggaatgaagtgttttccattctcctatggagagaagaaagatgaaccgaaaggcttgcagttgcagtcaacatcgggtcgatcagacaattccacatgtgttgaggctgaggttagaagatctggttctgcattaaattctcaggatgtttcagacaatggcagctcagaatctctcaggaggaatgcgattcccagtttgtcccagagaccctgcaacctcagagtgtttactgtatctgaactgaaatcagccacaaagaatttcagtcgctctgttatgatcggagagggtgggtttggggtgtgtctacctgggattgataagaagtgcggaggacccct

SEQ ID NO: 65575 - DNA, 599 bp, Glycine max
  Clone ID: PAT_MRT3847_30229C.1
ttttttttttttttttttttttttttttttttttttttttttttttttcttttttttaagaccaaacccagtgtttccttttttttttggcccccccccaacagggacaaaaaaaacactacctctctgggtaaaaaaaccccaaaagacaaaccgcaactttgtaaaaacaagcaaaaaggcggccctttggggtgttatccccaccaaagtggaggaaaccccacccgaaaaaaaaaaaataatggaaaaaaaaacccgccctgcgggcccctaaattgggggggtacccgcccggaaatttaagggacaaaataaacgggacagaaaccaaaaattttacccccatttgcggggccccctggggaaacccctggaagcccatgcaaagggggggggataatttaaatccaaaaaagggaccccctaaagctttttgaatccccaggggccaaattgggtaacaaccccccacacttgacttggcccgaaacttttttttggggagaaaacccccccccccaaaccaaaaagcgaaaacaaaaccaaggggattttggaaaaaaaacttcacccccttgtaattggccattacgggg

SEQ ID NO: 65576 - DNA, 138 bp, Glycine max
  Clone ID: PAT_MRT3847_3022C.1
ctttctcctattcgtacttcttctttctcttcatcagctattgttgcattagactgagttactgctacttacagggacctcttcaactaacctctacaagaacttctgttccaagacatagtcccaacgtattcaaca

SEQ ID NO: 65577 - DNA, 280 bp, Glycine max
  Clone ID: PAT_MRT3847_30230C.1
gccgcgctgtcaaatggaaaagaggagttagagaatggcaacgatcatggcggctcacgtggcgttcctggaggtgccaccggaggttacttcaccagcctcttgaacaacctatttcctgacctattcactggacagagcatggacgataggagggacgatcatagagatcacaatcataggaacatacttggaagattacgcggagccataagtcgccgcttaactgaacggtaaaacttcagatgaatctgttcacaccctacactactacatggat

SEQ ID NO: 65578 - DNA, 195 bp, Glycine max
  Clone ID: PAT_MRT3847_30231C.1
cagaaacatagttctattggggccaaggttttttactggttaaggaatgaaacgttgtttgtacaaaatcattccttcactacccaaaaacatattcgccgaaagaattattggccgcttctaagagaagaaactacactgccacaaaaaaatccccacgaatgaacctagcacttctttgagtgcccaaacgag

SEQ ID NO: 65579 - DNA, 169 bp, Glycine max
  Clone ID: PAT_MRT3847_30232C.1
agaccggtcaatctttctttattaactgcgaaagaaaattaaaactctagtaaaagattgatattgttacaaccactgatccaaatgacccttattttagagtacagttactcacataagtgcatcttttcaaaaccttaggaaaaaatataagggggaggaacaaaga

SEQ ID NO: 65580 - DNA, 346 bp, Glycine max
  Clone ID: PAT_MRT3847_30233C.1
ttgatctctccaactaacaattagttatttgtaatttattttcgtactagtgatcatcttactttgtacattttttccaatctattccattcggcccatttaattcctcttcaaggtgcatgctttatttctcattgcatattcttttaaaatgtgaaatattgtgtgacattgtccaactcgtcttgtgcattagtcttctccttatttgctggttagcgttatgtcgtgtctccccgtttggtcctattctaacaaataacacagagaacaaaccaacctattttaacaaatataatttttttgtcaaaaaagaaaacacaaatatctttttttataatgtaac

SEQ ID NO: 65581 - DNA, 313 bp, Glycine max
  unsure (1)..(313): unsure at all n locations
  Clone ID: PAT_MRT3847_30234C.1
ctgtatcttttttaggagatgaattttattttttttaataagaggcaaaatgaggggcattggaggatattaacacaaatttaatgtacatgtggcagaatgtaaattagaatagggaaattaaggcgcccccaaagaaattggggaggggaaaatataactttatcgagaacttcacttcgcacaaaataataggccctcttatttgtgccgcgatataaaatcataaagtnctatttctgccagtgcaaacaccttgggggggtaatatgagacacatttatggtggttgctccgtcgagaattggacgat

SEQ ID NO: 65582 - DNA, 359 bp, Glycine max
  Clone ID: PAT_MRT3847_30235C.1
ccacacgcgtccgtttggatccaacaatgcttttggccccaggcattaaataggatttaaccatttaatggaaccattttaacaggatgcggaattaaagaaaattttggtggaatattgggataacgaggtaatatactaatagttggggggtttaaataaaactaatattaataattaactcaatataggcaactttacgttggggggtttaataatccagttaagatttaagctatcttggataatgttaagggaggatcatattctttggggtggaatttggggtatccaccagataacaggtggtttccggggaatattttgtgttaggggctttaatttattaattgaattat

SEQ ID NO: 65583 - DNA, 1645 bp, Glycine max
  Clone ID: PAT_MRT3847_30236C.1
cggaagaacctcttatcgaagggagggaaatgaaatttagtaatctgccctaatcatcataactggaagaacctcttcacgaaagtgcgaaacttgatcagtgttggacgcgcttcctcctcctcctccgccgccgccaacgccatgggtgacgttcagatccacaagaccaaactctgcatcatcggaagcggtccctccgcccacacagccgccgtctacgccgctcgagccgagctgaagccgatcctcttcgagggctggatggccaacgacatcgcccccggcggccagctcaccaccaccaccgacgtcgagaacttccccgggttccccgacggcatcctcggcggcgagctcatggaacgctgccggagccagtcgctccgcttcggcaccgagatccacaccgagaccgtctccaaggtcgatttctcgaaccgtcctttcagggttttcaccgattcccgaaccgtcgaggccgaatccgtcatcgtcgccaccggcgccgtcgccaagcgcctccccttccccggctccggcgatggccccgatggctactggaaccgcggcatctccgcgtgcgccgtctgcgatggcgccgcgccgatcttccggaacaagccactggcggtgatcggcggcggggactcggcgatggaggaggccaccttcctcaccaagtacggttccgaggtttacataattcaccgcagggatacattcagggcttcgaagattatgcagagcaaggttatgggcaatagcaagattaaggtgatttggaattcggtggtggttgaggcttttgggggcggagataacaagagggtgcttgggggattgaaggtgaagaatgtggtgactcgagaggtatctgaattgaaggtttctgggttgtttttcgcaattgggcacgagcccgcgaccaagttcttggacgggcagcttgaattggattctgatggatatattgtgacgaagccggggacgacgaagaccagtgttgagggagtgtttgctgctggggatgttcaggacaagaagtataggcaagctattactgctgctggcactggatgcatggctgctttggatgcagaacattacctgcaaaatgttggtttacaacaagataagagtgattgactagcttgggtgtgtccggagatcagaaaatgcttaatcagaagcaatgtttaattcctatagaagaatagagaaatcagtctgcatcctactagaatcttcatttgtgggttgcgacattcatatttttattgcagagcgagacttgcattattttttaagcagtgatgctcacgtgcacaagtacatgtattatgaatattatttattgggcttattttacgtgcattattgtgacgatgcagagatatttgcttgcacggtgcaactcatgcattcatagacaggtattgctaccgttcatagactgctatgtgctatcctatccagtcctttttttttaagggaaaaaaaaacggtttgctcttcaggaaggggtaactcaaactatgttcagtttttagattggaaaattttaaaagtccatcaactcaatttgacctgataaatggtgtttttttctttctttcaattttcttttcatattttatttgtc

SEQ ID NO: 65584 - DNA, 505 bp, Glycine max
  unsure (1)..(505): unsure at all n locations
  Clone ID: PAT_MRT3847_30237C.1
nnnnnnnnnnnnnnnnnnnnnnnnnnnnnnnnnnnnngggtttttgctcagggaagcttcaaaaattgaacaacccttgaaaaacaaaattggggtcccctaagcaaaacaaagagatttaattaactaactaaattcttgacaagaatttgaaagaggggtccccatttagggcctacaattcttcgaaaattttttcaccgaaggggaagacccctggaaaaaaaaaaaaaaaaaaaaaaacgtgacaagaagcattttcctttgctttaatttatgggcggccttttaggccttttttcgattccttgaacaaaaaggcccccctttcaatcaccacttttgattttataaacccccatttccaattccttggccttttggccattgggggaaaaactttcccaattccccctccaaccattcatttgctttttcctttgggggctggagatcgagacttttgtttttttttacagggggggccctaacaggggcaaggaaa

SEQ ID NO: 65585 - DNA, 189 bp, Glycine max
  Clone ID: PAT_MRT3847_30238C.1
ctcttcactcagtactcatcgcttacattggcataattcccacacatcatggctgagcttcactagcaggcaatacgccactaccacctctcgctaccttaacgatcgacaacatcaatcccgatcctccacctagcaggtcgtcaaggtcgctaccgccgtctcagcgggcggctccatcttgatcct

SEQ ID NO: 65586 - DNA, 335 bp, Glycine max
  Clone ID: PAT_MRT3847_30239C.1
ttttcttttttttttttttttttttttggagggaggggaagcaaccccttcttcaattgctaaaacaaaagttatacaatgcacaactttctcgcaacaaatcaaatgtccctgaccgaacgcgaggcacgacctggaaatacgggaccggaacgggggggcgaaccaatttgcctgattttgagtcgtagaaaaacttgccacaaccagggaggagggtggggcctgctggacccgtgtgtccccaccaagcatgacacaccttctcatccagaagcgcctaaactaaatgctgcttcttctaaagagggatctccctgacatcataagggggg

SEQ ID NO: 65587 - DNA, 850 bp, Glycine max
  Clone ID: PAT_MRT3847_3023C.1
aatgacggctgcgagaagacgacagaaggggattgggatgagaggatgggtgcagaagcaaatggcggcgagaagcaattgaaatttctgatctacggtcgcagcggttggattggtggtctactgggtaagctctgcgaagagcgcgggatccaatatgagtacggcaccggcagattggagaaccgctcgtcgttggaggcggacatagcggctgtgaagcccagccacgtgttcaacgccgcgggtgtcacgggtagacccaatgtggactggtgcgaatctcacaaagttgaaaccatccgaaccaacgtcgtcggcactctcaccctcgccgacgtctgccatcataaaggcctcatcctcatcaactacgccaccggctgcatcttcgagtacgattcttcccacactctcggatccggcatcgccttcaaggaacacgacactcccaatttcaccggatccttctactccaagaccaaagccatggtggaggatctggttgggaactacgagaacgtgtgcacgttgcgtgtgaggatgccgatttcgtcggatttgtcgaacccgcggaatttcatcactaagatcactcgatacgacaaggttgtcgacattcccaactccatgaccatattggacgagcttctcccaatctcgctggagatggccaagcggaacctcactgggatctggaatttcaccaaccctggagtcgtaagtcacaacgagattttacagatgtacaaggaacacgtggatccgaactttacatggaagaacttcactctggaggagcaggctaaagtgattggtgcccctagaaagcacacgagcttgacgcctc

SEQ ID NO: 65588 - DNA, 244 bp, Glycine max
  Clone ID: PAT_MRT3847_30240C.1
tttttaaagatgcactcattgttctccatggggagttatattacttgtgctaggaacaaggccaatgttgttcacctctaattcttaaaacgattacttttgttcgctgatgttcctctactacattaaaaccttgttatgacacgcttacataagtgcacatcgtagcaagctagagcgtggtatattaaacagtggaacataacttcattgaccttctctttctaagcacgcagtagcctat

SEQ ID NO: 65589 - DNA, 159 bp, Glycine max
  Clone ID: PAT_MRT3847_30241C.1
agagaagaagaagaatttgtttttttttttcacccttccggattgtcaaacccaaccactgcatttgcaggggtttatctttatctagaaccagcatcagagtcaaatccacttcactctttgaagtttctctacactcctacagcgaccttcttcctt

SEQ ID NO: 65590 - DNA, 366 bp, Glycine max
  Clone ID: PAT_MRT3847_30242C.1
tcggtagaaggttaatagggataaagctggctcgcttccctatgcccaaatgcaaggtaaaggatctctcatcgctcatttgcagaactcaagcctgatgaatgaacacaaacgccgccgtcctattgtatttacatacaaactgaccaaatgctggtgagccggggccgttgcccatggcaggcaatatgatactgagacctgctaactatctctctgatggtatcgaggataattgaagccagggcaggccgtcaactgtgtcacgcggtgacgagaccgataatgggatagacgctggaaaaggattaagacttcatacttcattgggctctaactgggcaacagtgctccattatgagctgt

SEQ ID NO: 65591 - DNA, 209 bp, Glycine max
  Clone ID: PAT_MRT3847_30243C.1
tgcagcctatagttcagggtataggtttggataccgaggctgtcggtcatatcacattagtgatgattctgaatttctgtacttttgtgttcttactccatacattccattgcggtgggtgcccagaatccgccgcttcgcggtgctaccgcattttacagcgaaatatggcatctttagaggaggctgcttgccactctccttcttat

SEQ ID NO: 65592 - DNA, 559 bp, Glycine max
  unsure (1)..(559): unsure at all n locations
  Clone ID: PAT_MRT3847_30244C.1
catttgagttcctctttcactacccagttagctctgttcattttacctttcatttcactcataaacccaaaccctagaacgaacctacgaatacttgtgcagagcccgccaaggctcttcgtccattcctcttgtgtcagagtggtataaagagcattgtcctccgtcatatccagttaaagttcgagttagttatcaaaagttgctgaaatgttttgtgttgaatgagctgcatcatagacctcccaaggctcaaaaaaagaagcacttgttccgatctctccaagcaacaaagtttttccaaaccactgaacttgattgggttgaggcaggtcttcaagtttgtcggcaggggtataacatgctgaatctgctgatacacaggaaaaatttgaactaccttcaccttgattataattttaatctanagcctgtgaaaaccttgactacaaaagagcggaagaaatcacgatttggtaatgctttccatctctgtcgtgagatcctcccgatgacgaaacttgtggttgatgccaatgttcagttccggtttggggaa

SEQ ID NO: 65593 - DNA, 1757 bp, Glycine max
  Clone ID: PAT_MRT3847_30245C.1
taaacggaatatcccggaatatccgcaggatcttgctggtgacgccatcaactagcgctgagaatttatgcttgacgtgacggagaatagtgagaatatgataacatctcgcatcaaactgtggttttaaatccatctgcaattttaatggtgtctgaattctgaaacacaatttttattatgccattcagattgcgttagctaatgattcttttgttctgtttcattgtttgcttgttccttaaagatctcaaagggtccacaatcgcacaatttgtgaactgctcacgggataaaatggaatgcccttcaagttggatatccacaaacacatagatcttgtattctttgtagtatatttaataggacattgagttatccactcacccaccacaacacattgtttctatcaattttatagcttcaaatttttggtgcaaactgacatgagttgctgctgtgagttcaacggctgtaatcaaggagccaaggttttggctgtcatttttgacttggatggcacccttttggacacagaaagggcaacaaggggtgtgttgaatgagtttttggcaaggtatgggaaagaacttgatagggagaaggaagagaagaagaggttggggatgacacaaaaggattcagcagctataattgttaaggactatgaacttccattgacacctgatcaatttatcaaagaaatcactcctctctacagggaaaggtgggcaaaggccaaagcattacctggtgctaatcgccttatcaaacatctccagaaaaatggagtgccaatggctcttgcctcaaattccttgcaagaaaacatagaagcaaaaatttatcatcacaaaggttggaaagaaagcttttctgtaattctaggaagtgaccaggttaaatctgggaagccttctccatatttatttgaagaagctgccaagaaaatgggtgtagatgcagttaattgcctggtgattgaggattccttgtttgttgtcaaggcagcctatgctgcaaaaatgaaggtagtggctgtcccatctcgaagggaagctgattgtaacgggctagcaaatgttgttcttcattcactattagagtttcaacctgagctatggggtcttccaccttttgatgactatgacacattacctattgacccattacatctgagtggtttgtatgtcactggatgtctacaggaagccacagagaatgcaacacttgcccttcctgatcaagctgttgggctttacttcggttggaccaaggttgatacagatgagaacctcaagatattggtcagcattaatattgacttctcctgtgttggctacaaaaaaatacatgtttatcttattgatgcaaacagtgaacttaaacataagcagatgatgcaaatccatcttgttggctacataagagcgtgggataacaaggaactcacgtcaactgaattggagaaactcgatgaatacaagtctattgccagagcttcactggatttgccatcattcacttgttgtttatagaaaagcctcgcatggaggggacagtcaagtgaccttttatttggcgatgggtgtaataattatgcaactggttgcagctttcacaagaataataacaacaatgaaattaattctgtaaagatatgtatgaaatgattcattaggaaatgcttgtaatcattgataaataatgtatttttttcaaaaaataaataataatatagctatcaattgatgttc

SEQ ID NO: 65594 - DNA, 306 bp, Glycine max
  Clone ID: PAT_MRT3847_30246C.1
aaaataaaactcccgaagaaaatgaaatttctaacggattggcacttacgatcataagcctccaattcaacctccaaagtaggaaggtatcctattcaaccctggtactgtgtattgcaacagtgtaaaaacaaacttgtactaatgctttcgactgctaaccacccacacagtcactttacaaagtatactttgtccaaccaagatacttatcaattgtaacccatacttttttatttgatacatgccttgctgccttgaacacaaaggtgaagctcttttgtgaaataaacaattggtctatac

SEQ ID NO: 65595 - DNA, 320 bp, Glycine max
  Clone ID: PAT_MRT3847_30247C.1
ccttctttcattttcagatgattgcctgtgtttaagggggatatatcgtgtggtgcacgctcctaaccaaaaaatactaaaggcgcgcttaatgctcagtttcgcggatggcgcaaagtaatagacaactaccgtatacacaaggggctgtgcgccccaaactatttcgggaacccgttaacataatgtggcccatgtcgaccgggtttgcaatcatgctctgattgatggcttacagagcattgcagaatgtaacgaatattgtgggaccaacctataaatggaggtggatataagcccacaccactattcctccaatg

SEQ ID NO: 65596 - DNA, 450 bp, Glycine max
  Clone ID: PAT_MRT3847_30248C.1
aaaaaaaatactactattttgcattacataaaatcattcatttacaaacaatatgaactgctacatgacacctatcacttgattacacaaaaataaatggcaaccactggaggatgttttgctgagtacacctgaacttaagcgcaaatacctactgttgcttctcttgatctgattgggacacgcaataaatagtgcatgttcgcaaaattatcaccgccaagaggtggcgtccgcaacaagcaaatccaatactgagtcgggaattgctacaaggagtttcttcaaaaaatgatctcattgtcactcattccctgaaaccacaatcacctttgagcttccaaggggcattcccatgccccctatggaaaagatggagtggagcgctccacaatatctcgcacagagcctcatgtccgaattttcccaatactgagtccccataaacta

SEQ ID NO: 65597 - DNA, 584 bp, Glycine max
  Clone ID: PAT_MRT3847_30249C.1
gaaaaatagagtattatagatatgaaaaacataattaaacattccaataataacacaaacaaaacctaaataactctatctaagatttatcatatcctaacacagcacgcgcagcgcgtatgaattggaacacagcaaaaatgagcacaacaatccccaccaaagtggaacttgctctccaagggtctctaaagtacaccaaccacaacgctgccatggtgcggttccagatgttctggtagtgcttgttgagttcatttatagtctcgtagtaacacgttgtgtttgccacaacgtgtttgcttagtccattaacgagaaccgccacttgcttatcactcccaagttcatgcacaatcactttcttctcaaccagcaactccacatcaagctgagtgtgtataagagagtcaatcagagaaacatagttgcaaatgtagggcttctcaggatagtgacactgctcaaaggcaatgaggttcctgaacacacattcggttgtgtggtccaccttcaactgggggatcctaaaacgtgccttgaagtggtttcagtatggcaagcaaccaaagcaaagaaaggaa

SEQ ID NO: 65598 - DNA, 627 bp, Glycine max
  Clone ID: PAT_MRT3847_3024C.1
gcaaatggcggcgagaagcaattgaaatttctgatctacggtcgcagcggttggattggtggtctactgggtaagctctgcgaagagcgcgggatccaatatgagtacggcaccggcagattggagaaccgctcgtcgttggaggcggacatagcggctgtgaagccagccacgtgttcaacgccgcgggtgtcacggttatcttaatgtggactggtgcgaatctcacaaagttgaaaccatccgaaccaacgtcgtcggcactctcaccctcgccgacgtctgccatcataaaggcctcatcctcatcaactacgccaccggctgcatcttcgagtacgattcttcccacactctcggatccggcatcgccttcaaggaacacgacactcccaatttcaccggatccttctactccaagaccaaagccatggtacctactctcttcttacactaccacaagatcttatcttttctataaacatcgatattctctctatgtgatgtgacaggtggaggatctggttgggaactacgagaacgtgtgcacgttgcgtgtgaggatgccgatttcgtcggatttgtcgaacccgcggaatttcatcactaagatcactcgatacgaca

SEQ ID NO: 65599 - DNA, 206 bp, Glycine max
  Clone ID: PAT_MRT3847_30250C.1
acaaatcaaacagctgccggggctttctctatgcctctgaacacattttattttacattcatattacttacactacacatagacagcaatacacaatgataggatcttttattaacaatgcacttgagatggttttaggttatgcctttccactctataaatgctataaatcaattgaaaagaatatgccataaattgaacaactt

SEQ ID NO: 65600 - DNA, 1397 bp, Glycine max
  Clone ID: PAT_MRT3847_30251C.1
aaacacacagcattggcgtctatggtctccatttccatttccctccaaaaagaaattcactgtctctcgctctgactctcttgcctctcccctttaaccttctccgccgcgatgaaattcaaggccttcgtgaccgacaacggcgtgcagctcctggagaggcggttcctcccggccctggagagaacgggaaaatcgtgccacctcttcctcacgcgcgaccacgccatgttcctccaccacctcctcaacggcgacggcgtccagtgcctcgcgcagttccgcaaggaggcgctcttccacgactaccgcatatccagccagaacgacgaccgcatcgccttcgctctcgacctctccctcctcctccgcgccctccgcagcgccgtcgccgtcgcctcctccgcctccgcttcctccgcccccacgcgcctcgagatcaagctcgtcaagaaacttccccctaattccacccagcccatgccctacctcacattggaaactcgcgggtataagtctgcggttattcaggatattcccatctccaaacccttgtcgcgggcgcaggttaccgagcttcagagcgcgctcgatacggcgcaagatctccctcaaacactcgttcaggtgcctgatttgaatcaattgttaaacttggtggatcggatgaagcaggtgggcgatgttgtgaatgtgttcataagtaagcatggggatttgagcgtgcaggtttcaaccacgctgattagtttgggtgctgagtttcggagactggtggtgattggagagaaaactaatgctcctgctgaagatcaaaatctcagtgctcagacaagatcatcgaggtccatttcgagaggagatgggcaatatgtgcaggtgagtgttaagcacttcgccaaaagcctccagtgtcacttgaccagaccagactgcactttctttgggattgctccgcagggtagttgcctgacggtgatatttcagttctttgtcccaggttctcgccagactgataaatcaatcagcttgcattgcaggcttcctgttcttgaccctggttctggttaaactccaacagtcttcttgttatgtataagttcttttttgataaccttagaaattcagttgagaaaatgtcaagttgattagtgtgtataacgactgttgtgataagctttttactagaatatcatattaatttcttgtatgcatgaaaaagttttatattacattacatctaatattttatgataatgatatagtttggtaatgtgacagatataaggtacaaagttgtcttagttaccctgatgtgcaagatagattaagggagcaaattaggctattgaaagtgtaatttttttgaagtcaggtgataatgaggaattgaaaca

SEQ ID NO: 65601 - DNA, 275 bp, Glycine max
  Clone ID: PAT_MRT3847_30252C.1
ctggcatatgatcctccaacggatggccccacattgtgggatataggtcttgctgatagatccgctgcagatgttttatgctcctgatcccagtccacaacatattaataagctttttatcaaccatgcagacaggctcaagctgtacggatcgcgggattggtattcataattgtacactgatgcagatttggcttacaccattggtgttagtgactatacgaaagattggttttatgcacaggctccgatgaaaaaagtggatcacactgttc

SEQ ID NO: 65602 - DNA, 681 bp, Glycine max
  Clone ID: PAT_MRT3847_30253C.1
agtttgcgcacctcgaccggtatcggtgtctccgccgtcaccgcctccggcggagccggtggagcagcgggggaagcaaatgttcaacgcggagttcttgagagtgatgcaagagatgataagaaaggaagtgaggagttacatgtcagggatggaacagaagaatggcttcagaataccaaccgaagcgattgggaacgcggtggtgaagcgcatgggaattagcaacatcgagtgaaggaaagaaacaaaaaacaaaaaaaagagaataaaaaacggtgtcgtttcgagattcgaatcaagccaactgaacatgaatgatgaatgatgatgaatcacagagtagagaaaagtgagaaccgagaaagagaaacggtggtgtttttttttttaaactttttttttaaattttattttgtagttaagtttaaatataagtttaatttccctttacttgagggtaaaaaatagtaataattttggcactgtgcagaagaacctcaggacagaagggaaggatgatgataatcaatcaaatagtgtttttttttttttctgttaaacagtagtaattttttgtatgaaagttgttaggaatgggtttaagtctgaaagatattaaaatggttgtaggaaggaaaaataatgtgtgtgttgggtaattgaaaaaatggttgaata

SEQ ID NO: 65603 - DNA, 572 bp, Glycine max
  unsure (1)..(572): unsure at all n locations
  Clone ID: PAT_MRT3847_30254C.1
gtttttccctttcggtcacgaattctcagacaccgtttccactcactccgcgccaacgacaattaatccaaaacttgtgaaattttttcagtgactttctttttacatgaacgacctgcacgaaatgatgccttactctcagatctttcaaaacaaccgaaactacgccgtttggccgccgtacccgccggaaaacgcggcggtgttccctcaccctacggcgttcaatccgcatccgggtcgggtaactggaaacaaaaggaaagacttttaccgaaccggttcgggtccgccggtgatccgctccggcgcgaaaggttgccggattaaccacccgaagcgaattctcggccgcggcggtgccgccaatcggctcacgccgccgttcgctccgcgcaacacaacgtcgttcataatccggacgaagaattgtggcggatgggtgtncgccgccgactcctgaggcggcgacatcatccccggcgatcctgccggcggcgtctctgtctccggcgacgttcgacgagaaggctgcgaaggagcaggggggattcaacgggtacggctccatg

SEQ ID NO: 65604 - DNA, 274 bp, Glycine max
  unsure (1)..(274): unsure at all n locations
  Clone ID: PAT_MRT3847_30255C.1
gtgaagttgagactcagagcgcgcganccaaaactcgagaaatcgaaacactctatgatcatcatcncttagtatanatatatacttcnacaatcgagagaangcnanaagnagaagnagaagagcaanaagcatactcanaggtantannatnntatcangccgtttnatcatnntgagcaannaaaggagaaacatnttcanttngcnnccgtcgagncngaagggcgtcatggctcgagaggttccccggaancggtggtcnacggcgagg

SEQ ID NO: 65605 - DNA, 225 bp, Glycine max
  Clone ID: PAT_MRT3847_30256C.1
tgatgcccaaatcattgcccatgcatatgacgggacctacgagagtggaatggaatacagaagcgtgtctgcagttgctggtccatcgatcactcatgatatagacaaagctcctacgtctcaagagattgtaaagattccctagtgagatggaactactcgacactgacaactgctatatgatgatggataaaaggctgctgatcacatctctaatgtatcatc

SEQ ID NO: 65606 - DNA, 919 bp, Glycine max
  Clone ID: PAT_MRT3847_30257C.1
aacccattggtctccattttttaactctcctttcttattttattttattttattcaagaacatgatttgaatggcaaattttacattttctataataataatagatactagctagttccttgccccttacttaaaatcctagacctttcactaaatatataggagatattctaattaaatcaaatacataaaagaaacaaaatttgcctactttttattaatacatgacatttaggagtcacaattgattttagaccacctatgaaagacttatgaccaagtctatatgtaaggttcgactcttgatcattaaaaaagtcagacttaacctttttaaaaagtttattagcctaataattcaactttcatatatatatatatatatattacacataataatatacgtaacaacattatttttcgaggtggaagtttggaaaaattacttttccgctaacgtcattgtttcctctgttttcaccttctcaacaccaaaacaaaggcacatttcttaattctcactttcttcaatcgactaatacatgcaacaaccacaaaattaaattagaaaatcaagtacctccgattgtgatggcgcttcgttcacgatctttccttgttccttctccctaagcgttctcattggagaaactctcatgcagtgatacttgagttccttcatccacgcgtccagcaaagcgtgtttctcgttcagtattttctttgttctctcatcgtccgccctaatcctctccaacttcttcttgaccgcgctgagctcctctgccagcaacgtctccggcggcactgccggaggaaccgcaacggcggtgatcggatgaaaaacaataaaaaacgtacaaggggaaaaaaagaacaaaaaaaatagaatcaaagaacagtagacaatgaaaaatca

SEQ ID NO: 65607 - DNA, 221 bp, Glycine max
  Clone ID: PAT_MRT3847_30258C.1
ggtttacttgggaacatggcggagggggaaactgactgcacatcagaagacttacccacggggaaacatactgccgataaatatccggggaggagcacaggcaaataatgctattaacacgactctgccaggtgctgatcatcaagtcagaagaaatgtccatggagaacacggcgaatgacctgataagatgactcccttctacatacaaggggcagcac

SEQ ID NO: 65608 - DNA, 461 bp, Glycine max
  Clone ID: PAT_MRT3847_30259C.1
cggctcgagacggctgcgagaagacgacagaagggctccccttctttttctttgtttgcagaggaaaaggaaaattacttgggcggcaaaagagagaggaacttgaaaaagaggtatatatattgatacgcactgcacaatttgatggcaaattctaattgcgatgtagaatcaatggactcttcacacacacacagcatgagaatagctcttaaatatttgcttaatttcttctaacgcatgttttaaacatctaaaattcaattgctgcatgctcgtttcactcgtttcaatgagtcatgattcaattcatagatgatatttaactatacattgataagcaaaatttgttgtgattgacatggaaaatagttgagtttttttttttctctcttttctatgcgtcacttctagttacgactggcgccagaattagcgaactcaatgagtcatgattcaat

SEQ ID NO: 65609 - DNA, 364 bp, Glycine max
  Clone ID: PAT_MRT3847_3025C.1
ccctttgtaagttgtatcgagtacttctgttaccatttttattgattaatatatatagtccttttttgccgatcctaagaaatgggagtctcgatgttcttttcacaaactttctaggtgcgttggttcctacttcctagttgggaaagcggggaagaagttatttaataaagactccaatgcttaagccataataggccagatttatagccgtatagttggctagggatttaggcatacttatgctatatgtttgacacggagaatgaaaataatatatatatatatatatatatatatatatatatatatatatatatatatatatatatatatatatatatatatatatatatatatatat

SEQ ID NO: 65610 - DNA, 383 bp, Glycine max
  Clone ID: PAT_MRT3847_30260C.1
gatagtctcacatgctacatttcacagatatcaatctcgcatagcagtcaacacaggtcaccacacgactttcctccaaacctttcctgagaaacctgtcagtgaaacccttaattgtggaacgcaattcaggaacgagactcgaatggctagctccttaccgtagcttccaacatgaccttacagctgactaacactgaggactacattcagggacactttaatagatttttgccagatatttcaatgatctctaacatcgttcactaccttcggagaatgacgtcggatatgcagctcaagactatagcatgatactagatactgatggctactgcatatggctaagacatatttcgaacgcgaatgtaccaccgtatttg

SEQ ID NO: 65611 - DNA, 731 bp, Glycine max
  Clone ID: PAT_MRT3847_30261C.1
gcccgttcgcggttccccagttgttaccattatcagaaatttaaagagtgtttatttagagagtttgaattgaggttccgaatggcactctctctgagttttgctcctatttgttccttcaagtcctcttgcacacaaggggcaatttccggtaattcggtcggcccgaaaaggcttttcagataaatgaggcatgtcaggattctaaggctcgaaactttcaatctttgaaggccgcggatggtaatccaagcaccaaaacaaagagtatagtttgtcctgattgtgaaggaaatggtgcaatattatgcactcaatgcaaaggtactggagttaattctgtagatcacttcaacggacaatttaaagctggtggattatgttggctatgcaggggaaaaagggacatattgtgtggaagttgtaatggcgctggctttattggtggattcatgagcacatttgatgattagaaaaatagcccagattggatattttaagaattgttaatcgttacagctaaagaaaaagaaagggagtgtgggggactaggtagcaacatgcatgttcctctgttggtcttttgttttgagtaattaatgttatactttgccagttttttcagtaaatataagattttgtttccttgattattgttccatgattttgatgtgtaaccgcagattgtactttgaataaattaagcaatgataggagaaatttggttagaa

SEQ ID NO: 65612 - DNA, 1819 bp, Glycine max
  Clone ID: PAT_MRT3847_30262C.1
catctcgagccaagtcggagcgaggtaatttcactttttaattttcattccattttctttacttcgcttttgccaaatctcgctatgcttctcttctaacctctcaccctcgctctctttctctctagggtttcgttctcattctagattcccacatagaaactgtttctgcgttatttgattcttctcccaacctttccttgatccggattaagattcctggcacgtttttgaaccgatccacttcatatcggatccgaattcgaacattcaacatctgattccgcaattctctccgaattttgctttgaatttgcttttcgaatagatgattacagttccttagacagttcaattattaaaaaaaggtacaccggttagatggtatgcagcagttgtgtaaggtctttggttgttcaagctggaaccttcgtcaacagagtgagaatcaacgaatttgggaggagtttgctggcggttcagagtttttctcattggccgattcgtgaatacaagacaatcacagggatgatggttgatacgggttctatgtcaagtgctggaccccttgttgatatgatgccagagaaagatgatgatggtcgatttgctagtggagggtggaaaagtgaagatggaagacttagctgtggttattcaagttttaggggaaagagagtgacaatggaagatttttatgatattaagacattgaagattggtggccaatcaatatgcttatttggaatatttgatggtcatggtggttctcgtgctgctgagtatttaaaggagcatctttttgataatctcttgaagcatccaaattttttgacagatgccaaattggctataagtgaaacatatcaacagactgatgctaattttctggattccgaaaaggacaccttcagggatgatggatctacagcttcgacagcagttttggttgataaccatctttatgtagcaaatgttggagattctaggactataatatcaaaagctggtaaagcaaatgctctctctgaggatcataaaccaaatagaagtgatgagcggaagagaatcgagaatgctggtggtgttgtcatgtgggcaggtacttggagggttggaggggtgctagcaatgtctcgtgcctttggtaaccgtatgctgaagcagtttgtagtagcagaacctgagatccaggaccaggagatagatgaacaaattgaactgattattcttgcaagtgatggactctgggatgtagtacagaatgatgatgctgtttctcttgcccgcacggaagaggagcctgaggcagctgcacgaaagttaacagaagcagcattttctcgtgggagtgcagataacattacatgcattgtggtgcaattccaccatgagaaagcagaactagctaatcctgacaaagcagaagcagctagtgctcagcatgagtagatgatgtgaaagcacaaaatgcatgtgttggttatattcgcgtcaaattgaatgaattgaggtcagcatatgcatgatggctcactctgcatgtcaaggcaatttgtttattcattagttttcttatgtaagtcactcttgttcttgtattgggatttttgaatcgtgttcttctcgatgatttcagtgtgtccgtatatatttcaagttttcctgtttgtagaggaatcaagttggtatttttgttctgatctaataaatgcaatatgcattttttttatcatactgatatgtgataaagtagaaatcgattaatttaaaattgtaaaacattactatgaaagaaaaagtcgacccggggtcgccg

SEQ ID NO: 65613 - DNA, 380 bp, Glycine max
  Clone ID: PAT_MRT3847_30263C.1
acggctgctagaagacgacagagggggacactacaactaaacacactagctattaggggtagctagaagtccctccaatccctctttgactatgtgcttttctagttccttccaaaataccaacaaaagcaacgacgatgaggtgacaggcatgggccgaacccatagatcgagtccaatccttagctgatagtggactaagttcaaacccttcacgctacattaggacttactcccaaagaccctacaataccacttattttacaacatcctaaaccttttcaaactgatcatcatcatggtcatgagcataaaacttcacgtcatgaccattaacatgatcatgtaaacatttccgccattgacctaaaacatggttt

SEQ ID NO: 65614 - DNA, 394 bp, Glycine max
  Clone ID: PAT_MRT3847_30264C.1
cgcgtccgacggttccaagaagagcacggagggggctcctacagatttttcagcaactgggaatctgggtcggaacctcttctgcggcggaccaatgggacactccaacgtttggaattctcacccaaaaatctacaggcctgggtcttggacttggcgagtgtgtgggaatccagatggattgatcaggaaatatggccttatgtgctgcacgcagtgcttccgtagtactgccaaggcaattggctggattaagtatcgttaaaagagctggtgtcacctacggaccattattatgttctggcactaggatgttttgaagatgttatgcttgaagacactcgagactcctttttttgatatattttattatgagacatactgtgtagaacga

SEQ ID NO: 65615 - DNA, 647 bp, Glycine max
  Clone ID: PAT_MRT3847_30265C.1
ctcagtctgttctgtgggaatcaagcaagcattaaaagcacccggaattgattcaaaccgagacctcagtaattccaatgttcgaatctctcccaaacgtcgaaatgcaccatatatgcctcctactattgtagagaagatagcataccaaatctgtgtatccataaagtagacctgaaaagggcacaagtatgataggggaccatattgcaatcactacaccaatattgtttctggcatgagggaagaactcatgccatctgtaaactgatacatgagcattcatgatggcttttgttggagccacaagaggcttaatctccaggtagtagctgaatgctagtttagatagaattagcataacccagaaagaagtgtacttcaacaatgaaattggaccctcctgcattcctcttccaacgaagagccgaggctgagaccaccaatcatgagcttcacaacaccattgttagacctctcaagaaactggcgaatgaatgggaacacaaataacagtgcagagagtatatttggagataagtagatgaagacagccaaaatgaacaaagaaggtgaacctgtaccattgccaaaccaattctttatggtttgtgcaaagccagatggattttttcaactgtaagcat

SEQ ID NO: 65616 - DNA, 170 bp, Glycine max
  Clone ID: PAT_MRT3847_30266C.1
atgcactctattaagctagaatcagctagagcttataaagaactccgcccaacagaccatctcgtactcacagaagaggagcgagttttgctctcccttgcaggccaagccatggctgcctatgatccagcctggaggaagaatcaatgtcagtctcacaagacactcat

SEQ ID NO: 65617 - DNA, 336 bp, Glycine max
  Clone ID: PAT_MRT3847_30267C.1
aaagcgacgaaaacaggacgcggcccaagccaaaaaagaagacaacccaaggagcaaacacagacaccacgcccagaccgacaacaccgaccgaaaggcaaagaggcccggaggaggccgcagaaacacacaaaccaacagcaacacaaggaaacagccagccgaacgcaagagaaaacccacccgacacaccaaaaaaaacaaagcgggcaaacaaccaccaggacaagccgacaagcacccacagccgcagaacccgaaagcaagaccaccgaaacgaaggaaacgaaacaagacgccacagcagggcgcaacaaaacacccccaaccccaggg

SEQ ID NO: 65618 - DNA, 295 bp, Glycine max
  Clone ID: PAT_MRT3847_30268C.1
cagagctttgtcaatttttattgaccttttcgtggaggaatttgagtggtcaaaactggagattggatcacacttatacaaaattcttcaattagtaacttgttgagagttgctgcttggaagaaaggttgtttaatggtcaagattgtgatgtctgggaatgcatcagtcaaaaagagtgattgggcctcattggtacaagtgttttaacaaacagtaactgctcatagcatttttgtgcatgtaagtggtcaaaattcagtaccacatttctgggaaataatctttccaatat

SEQ ID NO: 65619 - DNA, 415 bp, Glycine max
  Clone ID: PAT_MRT3847_30269C.1
ctctgtctttttttctttttttttttttttttttttgttttttttttttttttttttttggtggtgaaccgcaaaaaccaaatgttttataatttatgccggcttgggcccaaaagtaaaggggccagggacccaaagggggcaacaaatccagagtgccgtgccccataaaggggggcaaggttcttaattttagcctgattggaagggccccttcttgtaaaaacgttccactaaccctgaaaaacattgcacccaatcttcacgggccgactttgattttttttatatatggacacttcttcccaaacggggagggatcttaaactgctaacccaactatgcttaaaggggatggcggcccttaaccacacggaataaacagttttaacccggtgcacatgaaaaaacatct

SEQ ID NO: 65620 - DNA, 445 bp, Glycine max
  Clone ID: PAT_MRT3847_30270C.1
cttggggggggggggggggggggggaagcaatgcggtaccccagattgtagagcaccccaccgtaatggtgacgcggaagcaggatgagagtgatggggaaacgtgaaaatccgatgcgtggtatgcgcgttaggggagtatggccgtgtcgctgatcctttggcttgtcctacaaggtgactggatcgctttcgctagctcatcgaggatggaggtgagacatagccttgaaaagtaaggtttgccttcgtcggggatagccgatgcaagcccgatatttgtatcgtatctggtggaatgcgtgattaagctataatctgggtgcaacgtgctggagcggcttgcatagcgataggattcagtcttaggggtgatagcgctctgcttgctggcctcaagcacatctcaatgcgtttggtatcaggaggtctgcatgccccttgg

SEQ ID NO: 65621 - DNA, 354 bp, Glycine max
  Clone ID: PAT_MRT3847_30271C.1
atcggttactatcgagtcacagatggagctttttttctgagcttcgtgtcatgatccgcttgaatcaaacagggaactcatagacccaatattgagttcatttccagatgcaagtggcagtaattcgggggaggtgagtgattctgttagggaggacttgctgaaccaacacttggctgctgtggaccactgacgaggaacttgtgattggcgatattttacaggttgatgatactgtggaggattggattgcggatgctgatgaatggagtgaggattagcagaatcttgtcgatcacatggcttatcgtgctttctaacccatcagcaacggaaggattttcattatctcag

SEQ ID NO: 65622 - DNA, 228 bp, Glycine max
  Clone ID: PAT_MRT3847_30272C.1
gctcgtagatttgctcgatctcgagccgctgtctgccgcccttcatatcgtgtggttaatgctggtgatagttgagctggaactgtcgatagcgggggtatcattcggcatggcccgcataaattgttggaaggtttcttgattgctggagtgggaattatggctagtggcgcgtacagctacatcaggggtgaatatgtcaatgatcgtaagaatctcggaaaggct

SEQ ID NO: 65623 - DNA, 233 bp, Glycine max
  Clone ID: PAT_MRT3847_30273C.1
caattccttcacttgcagcactgtagcatcatcatcttcattgcaaaaccctagacttcaccttcaaccatgaccacacaagtaccacaacacagtgtccaagtccacactacaacacgcctaaacgaagctggcgtcgtccaccccggagcccgtttcgaaccgaagcgttatgaagcaggcgtctaagcgccatccatataccattccgagagaggtccaacgaattccca

SEQ ID NO: 65624 - DNA, 248 bp, Glycine max
  Clone ID: PAT_MRT3847_30274C.1
agcgagaagacgacagaagggggtggcagttgtgtgacacagaaattaagctatagcttcatagtttgctcttctcctctcatcttccttctctcccttcagacatagggacaataaatcagtgagtgtgatacagattgaagaattccagaaccatgtcccacacttagctaggtttctcactcgggattctacgtaatatagattactacgcatgctgtgtggcatgactagcaacatgttatata

SEQ ID NO: 65625 - DNA, 502 bp, Glycine max
  unsure (1)..(502): unsure at all n locations
  Clone ID: PAT_MRT3847_30275C.1
ggctcgagtaaaaatattcattcaagctgaccctgcttgagcctaaaaggattttcttgtcaagagtcaagtataatttgaactagtcaattattattccaacttttgtatttgtgtaatggagtcttctaactagcttgttgatttataattctttttttacttatctgcataatcaaagtccaaatatgtaagttttaaattatttttttatttattcttcataaaaaaattatttaatttttttccttaaaataataatttatttaatttataaaaaaaatataagctatattaaaatatttaaaacttattaaaaaatataagttctaaatatgcaactcctttaaatatttagaagaaaaactttatgattcataatgattttatttcacttaaataaaagtatctcctataaaaaaatatatttgatctctacaaaaagatatttgattaataattacanttaagagacaantatatagaaacttattataatttc

SEQ ID NO: 65626 - DNA, 562 bp, Glycine max
  Clone ID: PAT_MRT3847_30276C.1
atctatttttacttgactttttcttttttctgccaatttttgtttctcttttttggggttggtttttttttgttcaaaccaacccccatgagggtggtgctatggtaccagacgccagcgttacaaggataattctaaaccccggcccgcccaaaaaactggaaaaaaagaaccgggtttctttcttttacaaaagttttgctcccgcaatggaaccgcaaccatggcctcaacaggtacctttctaggaactggaattaaaaaccctcaatgggcttacggaaggggagactccacaatttaaaactcaccctggaagaggtgctgcaacatttttaacaagtgggcacctttcctcctccccctgggggtggacctcccccagaaaggggggtcccccgggcgccccacctttttgggaggggcggtggggggctcctaggcccccccaaccttggcgtagacaacgggaaggactcccgtggcctcccctcggacccgggggtggcccccggaattcccgcccgcgacctcggggcgtccccactttttccctataagg

SEQ ID NO: 65627 - DNA, 1279 bp, Glycine max
  Clone ID: PAT_MRT3847_30277C.1
cttggttattctactcttctttctcctcctcagaacctcaaacatccaaaccaagcattacaattcccaatttcacagaaacaccagaattaataaaacacataacaacaaaagaagtgaaaaatggcgagctcagtggagaaggagggtggcgcgagcgaggaaactttctctgtggagcttcctgctccacctggttggaagaagctgttcatcccaaagaaagctggtaccccaaagaaaaacgagattgtgttcactgcaccaacaggagaggagatcaataacaggaagcagctggaaaaatatttgaaagcacaccctggtggtccagctgtatcagaatttgactggggcactggtgagaccccaagaagatctacaagaatcagtgagaaggcaaaagcagctcctccaatagaaagcgagcccccaaagaaacgtactaaaagatcatcagcttcacaaaaggaaacttcccaggaagaaaaagaagagaagacaaaggaagcggaaatgcaagaagctgattacaccactaaggatgataatgatatagagaaggaaaaggatgttgtaatggaaaatcaagatgtcaagagtgtggaagatacagatgtcaacaaatccactcattctggagaagctaaagctggagaaaatgttgaggtacctattgaaaaggacaaaggaattgaggtctctgaagtttttctgagaaaggatgaagaaaagattgagcaaccacaggaagagacaaaagaatatcgtggatctggggagccagagaaattggaaacatgcactattgctgacaaaaaggttgaagtggaaggagtgaataaagaggaaaacatcaaaagtactcgtgaatttgaagctgaggaaatagaaggaacaaaagtgaatagtgaagaatatcacaagcttgatgagataaacaaggctgaagcagagttgaccatgaatggcaatcatgggagctgaactggcgaggtcaaaaagcctggagcagggaatagattaataagttctcggcatctctcctctcattctgacccctttggatctgtgtttgaagatgactttagtttttgttaatgttatttatctgattgtttattgaaacaatatacaattttagagcatagacctataaggtaccatccatgggtgtattggacatacgtgtagcttctagttgctattgtaacattctgttgtaagatatgtaatatggaccagtaatggatcaatttcgtaaaagagcttactcgtt

SEQ ID NO: 65628 - DNA, 515 bp, Glycine max
  Clone ID: PAT_MRT3847_30278C.1
taacgctatgcgaaacacctcccgttccgcgacgccatcccaaccgcgtcgtaaaacagtacaacaaatcgctccccacagcgccagcacacaagtccgagatggagatgaaaggaccggccatgttccactttggaggacagactgaactgtcccccaagccgctcttcaacagaagcaactcgttgccctcgaaatcaacacggccatcgctaccgtctcgcccatccgaacccttccaattcaaccccgacgacattgtcaagagcccgacaccgttatttggcaggaggaacacgctcccatccaaagtgcgccgtgctgtcgccgccgaaagaaagccatcaccgctctcgcgcagagaggacgcgccaccctccgcaccgacccacaccacccccaaggaacccacgtcaccagcgctggcacgaaaggatcccaacaccaagaccactcctaaccccaaaagcaactccagcaaggcgccctttgcaactccacaaaggtacccaggt

SEQ ID NO: 65629 - DNA, 801 bp, Glycine max
  Clone ID: PAT_MRT3847_30279C.1
tacggctgcgagaagacacagaagggggacatttttttttctgatgattcgacgtgtcctaactctgaaactctactattctttctcctccgcagaaccttaacaaccaaaaccaagcattacagttcccaatttcacagaaacaccagaattgatcaaaacacataacaaaaaaaaagtgaaaatggcgagcgctgtagagaaagagggtggcgcgagagaggaaactttctctttggagcttcctgctccacctggttggaagaagcagttcatcccaaagaaagctggcacccccaagaaaaatgagattgtgttcactgcagcaacaggagaggagatccataacaggaagcagctggaaaaatatttgaaagcacaccctggtggtccagctgtatcagaatttgactggggcactggtgagaccccaagaagatctacaagaattagtgagaaggcaaaggcagctcctccatctgtaagtgagcccccaaagaagcgtactaaaagatcatcagcctcacaaaaggaaacttcccaggaagaaaaagaacaggagataaaggaagcggaaatgcaagaagctgatgacaccactaaggatgataatgatatagggaaggaaaaggatgttgtaaaggaaaatcaagatgacaagtgtgtggaagatacagatgtcaacaaatccactaattctggagaagaagctaaagctgtagaaaatgttgaggtacctattgacgagaagtccaatgctgctgatggagaactacctgcattgaaagataaagttgatga

SEQ ID NO: 65630 - DNA, 315 bp, Glycine max
  unsure (1)..(315): unsure at all n locations
  Clone ID: PAT_MRT3847_3027C.1
nnnnnnccacttttttcttatttttttggtgggtaattttttaaacggggaaaatgcaaacatattcttctttttttcaaaaccaaaaataaagacaatcccaacaaattttttaaagtgatgaaggacctaaaacattcatgaaacagaacttgcaaaacaaaaatccaccctttcctcctccaaaaaaagagtctttccagaaaactttgccagtaaaactctatactcttggaatggagatttggagaatcgagtctccttccataattctggggggaggaattcctaagttttccattcaaacaaatcaaa

SEQ ID NO: 65631 - DNA, 1488 bp, Glycine max
  Clone ID: PAT_MRT3847_30280C.1
ttctttacattcatttttcttctggtgattccacaatgtgtcctaactctcaatcggcttcctcttaattatactctattcatctttttcctcataacctcaaacacaaaacccaagcattgcaattcccaatctcacagaaacaccagaattaataaaacacataacaaaaaaaaaagtgaaaaatggcgagctcagtggagaaggagggtggtgcgagcgaggaaactttctctttggagcttcctgctccacctggttggaagaagaagttcatcccaaagaaagctggtaccccaaagaaaaacgagattgtgttcacttcaccaacaggagaggaaatcaatagcaggaagcagctggaaaaatatttgaaagcacaccctggtggtccagctgtatcagaatttgactggggcactggtgagaccccaagaagatctacaagaatcagcgagaaggccaaggtagctcctccagcagagagcgagcccccaaagaagcgtactaaaagatcgtcagcttcacaaaaggaaactttcctggaagaaaaagaagaggagacaaaggaagcggaaatgcaagaagctgatgacaccactaaggatgataatgttatagagaaggaaaaggattttgtaaaggaaaatcaagatgacaagagtgtggaaaatacagatgtaaacaaatccgctcattctggagaagcttaaaccggtagaaaatgttgaggtgcttattgaagaggaaaaatccaatgctgctgatggagaactacctgcattgaaagataaagttgatgacaaaggaactgagggctctggagtttttctgagaaaggatgaagtaaagattgagcaaccacaggaagagacaaaagaatatcgtggatctggggagccagagaaatcggaaacatgcactactgcagacaaaacggttgaagtggagggagtggataaagaggaacacgtcaaaagtactcatgaatttgaagttggggaaatggaaggaacaaaagtgattggtgaagaacatcacaagcttgatgagataaacaagaaggctgaaacagagttgactgtgaatggaaatcatgggagctgaactggtgaggtcaaaagcctggagcagggaatagattaataagttctcggcatctctcctctcattctgacccctttagatctgtgtttgaagatgactttagtttttcttactgttatttatctgattgtttcttgaaacaatatacaattgtagaacatagccctataaggtaccattcatgggtgtattggacatacgtgtagcttctagttgctattgtaacattatgttgtaagatatgtaatatggacatgtaatcatatgtaaggcagtgatgccaagtaatttggtcctggccgtaaaacggtgcatatgaaagtctcatcactgttatggttattgcaagttacctgaatggaaataatttgggttctccac

SEQ ID NO: 65632 - DNA, 1960 bp, Glycine max
  Clone ID: PAT_MRT3847_30281C.1
cgcaacgtgtcccaactctgaagcccgcttcctcttaattactctattattctttctcctcctcagaacctcaaacaccgaaaccaagcattacaattcccaatttcatagaaacaccagaatcaataaaaacacataacaacaaaagcagtgaaaaatggcgagctcggtggagaaggagagtggcgcgagcgaggaaactttctctttggagctgcctgctccaccaggttggaagaagcagttcatcccaaagaaagctggtaccccaaagaaaaatgagattgtgttcactgcaccaacaggagaggagatcaataacaggaaacagctggaaaaatatttgaaagcacaccctggtggtccagctgtatcagaatttgactggggcactggtgagaccccaagaagatctacaagaatcagtgagaaggcaaaggcaactcctccaacagaaagcgagcccccaaagaaacgtactaaaagatcgtcagcttcacaaaaggaaacttcccaggaagaaaaagaagaggagacaaaggaagcagaaatgcaagaagttgatgacaccactaaggatgataatgatatagagaaggaaaaggatgttgtaatggaaaatcaagatggcaagagtgtggaagatacagatgtcaacaaatccactcattctggagaagctaaagctggagaatatgttgaggtacctattgaagaggaaaaatccaatgctgctgatggagaactacctgcattgaaagataaagttgatgacaaagtttttctgagaaaggatgaagaaaagattgagcaaccacaggaagagacaaaagaatatcgcagaactggggtgccagagaaatcagaaacatgcactaccgcagacaaaacggttgaagtggaaggagtgaataaagaagtcagaagtactcgtcaatttgaagttgggataatagaaggaacaaaagtgaacagtgatcagataaacaagaaggctgaggcagagttgactgtgaatggcaatcttgggagctgaactggtgaggtcaaatgcctggagcagggaatagattaataagctctcagcatctctcttctcattctggcccctttaaatctgtttgaaaatgactagtttttgttaatgttatttatctgattgtttattaaaacaacaatatacaattatagagcatagccctatcgtgtaccatccgtgggtgtattggacagacgtgtagcttgttgatatcgtaatattatgttgtaagatatgtgatatggacctgtaaaaaaaaaaaaaaaatatacggcatttgtcggcggtgacgaaaggaaagaagaagaagaagcgttctttcggagagttcgaagatgtcgggcgttaccaacaacaacgaggaagacaagaagccaaccgaacagggagcacacatcaaccttaaggttaaggggcaggatgggaatgaagtttttttcaggatcaagagaagcactcaattgaagaagcttatgaatgcttactgtgaccgacagtcggtggatttcaactccattgcttttctgtttgatggacgccgcctccgagctgagcagactccagatgagttggaaatggaggacggggacgagattgatgccatgcttcaccagacaggaggttctgttgtctgaaggatgtgattacctttgctcctcattataagtaggaattagttaacttagagctatgtatggcataagatacatattttattatctgctattatatacagcttttgccggtggattttggaggcattgtgcttcctcttcaatatgatgattatgaatggattgttatatttctgctttatctgtcttaagctgtcactgtgaatgtgatataatctcaaccctgaagcgtgtattagttcatgtccttaattttgtactttattccataggacacatttttctc

SEQ ID NO: 65633 - DNA, 1172 bp, Glycine max
  Clone ID: PAT_MRT3847_30282C.1
agcaggtgacacggaattcccgggtcgacccacgcgtccgattttcgtaggggtatcctccaccattgagtccggagtcccacgaattgattgccaaactctgttcgtgcatcctctatcatcaaagcttattcgaagccccttgaattgattgtcgttcatgcatcctcaaccattgagtccggagccccatgaattgattgcctagcgctgttcgtgcatcctccatcatcaaatcttattcggagcccgatgaattgattgccattcatacatcctccaccattgagtccggagccttacgaattgactgccaagctctgtttataaatcatctatcatcaaatcttattcgaagccccatgaattgattgccattcatgcatcctccaccattgagtccggagcgccccgaattgattgcctagcgctgttcgtgcatcctccagcatcttattcggagccctaggaattgattgtcgtttatgcatcctgcaccattgagtccagagccccacaaattgattgcctagctatattcgtgcatcccccatcatcaaatcttattcggaaccctatgtattgattgatgtccatgcatcctcgacctttgagtccgaagccccctgaattgattgcctatcgttgttcgtgcatcctctatcatcgaatcttattcggagccccttgaattgattggttgttcatgcatcctccaccattgagtacggagccccatgaattgattgcctagcgctgttcgtgcatcctccatcatcaaatcttactcccagccccatgaattgattgtggttcatgcatcctcccccattcagtcgggagccttacgaattgactgccaagttttgttcatgaatcctctatcatcaaattttatttgaagccccatgaattgattaccattcatgcatcctcccccattgagtccggagccccccgaattgattgcctagtgttgttggtgcatcctcccccttttttttgggagccccatgaattgattgtggttcatgcatcctcccccattgagtccggagcctttcgaattgactgccaagctttgttcatgcctcctttatcatcaaattttatttgaagccccatgaattgattgtcattcatgcatccccccccattgggtccgaagccct

SEQ ID NO: 65634 - DNA, 1467 bp, Glycine max
  unsure (1)..(1467): unsure at all n locations
  Clone ID: PAT_MRT3847_30283C.1
naacttatcagatatataaaattcttgcacaaaaagaagcaacgcaaggttgcagaatactacaagaaacaagagaggctccttgaagggtataatgacatggatacaatgactgaaactggttgttttccaggaagtctcactgaggatgaaatgaagcaattagcaagaagtgagagcctggcagttaatgtgtcaaatgcagctaacttggtgctatttgcagcaaaggtttatacttccattgagagcagatcattagcagtcattgcttccactatggattctctcttggatctcttgtcagggttcatattgtggttcactgcttatgccatgagaaatccaaaccagtatcactaccccattggaaagaaacggatgcaaccagtgggtatcattgtttttgcatcagtgatggcaacattgggattgcagattttgattgagtctggccgacaacttatttcaaagtctaagcctgaaatggatccccatgagttgaaatgnggtgatcgggattatggcatctgttactgtagtgaagttcattctcatggtctactgtcgaaggtttaagaacgaaattatcagagcttacgcacaagatcatttttttgatgttattaccaattcagttggattagttgctgctatgcttgctgtcaagtactcttggtggattgatccaatgggagctattattatagcagtgtacactattaatacatgggccaagacagtgattgagaatgtatggtctcttattggaaggacagcgccacctgaatttctagcaaagttgacatatctgatatggaatcaccatgaagaggttaagcacatagactctgtgagagcatacacgtttggtactcattactttgttgaagtagatattgtgttgccggaagatatgccactcaatcaagcacacaacattggtgagacattgcaggagaaattggagcacctttctgaagttgaaagagcctttgtgcacattgattttgagtatactcacagacctgaacataagatgatggtataggtactatatgccaaacgaaaaatgagttgttaaatggtttttatgggattagttaattaaccgctggctctaatgattctatttcctttttgtattttaagcaaataagtacacacgcctttccgatgttttgtatttgtcgatgtctcgcatatttcttaactttagtttaattacattgtaaagtcatcatctttgtacagcaattgtaaatagagtgggacttgctcccttacccttgtgcggcccaaccagaccctagctatcacagggcaaaatctagaaaatgtttagggtacgtgaggttgaaagtaaagaaacacctttatacttgtgctagataatacgacgttacactatttattcttatagtgttagaatcgttatatatgtttaccttatatatgttcttataa

SEQ ID NO: 65635 - DNA, 658 bp, Glycine max
  Clone ID: PAT_MRT3847_30284C.1
ccacgcgtccgcggacgcgtgggcggacgcgtgggctgtcctaactctcaaccctcttcctcttaattaatctattcctctttatcctcctctgaacctcaaacaccaaaacaaagcattacaattctcaatttcacataaacaccagaattgataaaaacacataacaaaaaaaaaaagtgaaaaatggcgagcgcagtggagaaggagggtggcgcgagcgaggaaactttgtctttggagcttcctgctccacctggttggaagaagcagttcattccaaagaaagctggtaccccaaagaaaaacgagattgtgttcactgcaccaacaggagaggagatcaataacaggaagcagctggaaaaatatttgaaagcacaccctggaggcccagctgtatcagaatttgactggggcactggtgagaccccaagaagatctacaagaatcagtgagaaggccaaggcagctcctccaacacagagggagcccccaaagaagcgtactaaaagatcatcagcttcacaaaaggaaatttcccaggaagaaaaagaagaggagaccaaggaagcagagatgcaagaagctgatgacaccataagggtgataatatatagagaggaaaagggtttgttgtaaacgaaaatatgacaga

SEQ ID NO: 65636 - DNA, 248 bp, Glycine max
  unsure (1)..(248): unsure at all n locations
  Clone ID: PAT_MRT3847_30285C.1
aatanagctggattcgaaccccacaacacaacccctttctcttatcttccaatacaaatcccttcttctctctctctctctttatcctcatttcacaactcatcaatcccctctctctctctcccaaanccaaaacctaagcatggctcaaaaggccctttttaaccggggtgggtttaaggccccccaacccctcatcaatctttgctccaccaccggcgggaccgcgggctcgtctcccccaccct

SEQ ID NO: 65637 - DNA, 418 bp, Glycine max
  unsure (1)..(418): unsure at all n locations
  Clone ID: PAT_MRT3847_30286C.1
ttgcgaccgnttagtgtcggcccaaacaaagagccaggtttagggaacgtcaccggggaagccctcacngaccgcataaatcaacggaagcatacaccgcagtagacgctccttttgctgcatggtctgcaacacggggcgcgaaactatgtgactatcaaccacagcaacaaccactgtgaacacaacagcgaacccagcgccggcaccgcctacagcactagctacatgttttgcgccacgctcaagggtccacgaaactgatgaggagctcgttaagcactacgttaagcgcaagggctgtggaaaaagcgccctatctgatgccgtctcagacggggacatacacaggagcgaaccctgcgagctaagggacaagactagggagcagaagagggaccaggaaagggcattgttc

SEQ ID NO: 65638 - DNA, 192 bp, Glycine max
  Clone ID: PAT_MRT3847_30287C.1
cggaaaaggaggaaaaattgggagaaaagttaaggcgaggggtattggtagggaaaagtaggggcccctttactccagtgccctcttggtcttgggctcacaacaacatagcagcagcgttctttctctttctgctagaaaactcgcccgggctcttctggaattcaacaatcttttcccactcttccaatg

SEQ ID NO: 65639 - DNA, 218 bp, Glycine max
  Clone ID: PAT_MRT3847_30288C.1
atcatctattttgtataccaacattgctaccggaaaaaaggccaaccaaggctgcaaggcccttaaaaaggccctcaacaaagaaaaccacatacacaaccaaccctaaacagaaccgaggcaagacaaactccaagaataaaagatacaaaagaagaaaaaaaaagcaataaaaccctccattcaaacccgattaaatatgagaaacgccaaagggg

SEQ ID NO: 65640 - DNA, 373 bp, Glycine max
  Clone ID: PAT_MRT3847_30289C.1
cggttgaggggttggggtaagttgcaccccatttttgggtaccttaattaagttggacctaagttgagggggccttaacggcattttccttccaaccggtccccttttccatttttttaattttaattaattcaaccttgttggcaatgatttaaataattctaattggcaattttttttgggggggttgggaggcctaactaatttaaacttggttggttcgaccttggaaggggatatttcttcccaaatttctcacctttccaaataagtctcacttgatctctcatataatgggttaaaagtgaaggaagacacttggaagagatggctccaaaatgcaacagttttaagggtgcttgttttggatcaa

SEQ ID NO: 65641 - DNA, 130 bp, Glycine max
  Clone ID: PAT_MRT3847_3028C.1
gcgcgggcccgcaccaacggggccgacccacccacgcggcttttattgacgaccgcccacgcgcacgacgcagggccggcaaacaagcaagacggcgaccgacccccggcgaccggcgaacaacaagggg

SEQ ID NO: 65642 - DNA, 1107 bp, Glycine max
  Clone ID: PAT_MRT3847_30290C.1
tttaattggcagcttctggaactttgatgccttgttccagccccaacaacacccagcccgtgattcacatgatacattctttttggaaactccttcaacaacaaagatattgccagaggactatgttcagagagtgaagcatgttcatgaatctggtggttatgggtctagagggtatgcatatgactggaagagagaggaagcaaataaaaaccttctgcgaacccatacaactgctgtttcctccaggatgctttaccaattagcacagaaaccatttgcccccaaaaaatatttctctatagatcgtgtattcagaaatgaagcagttgatcggacacatcttgctgagttccaccaaatagaaggccttgtatgtgatcgaggactcactctctgtgacttaataggaattctacatgatttcttctcacgcttaggcatgaccaagctgaagttcaaaccagcttacaatccatacactgaacctagcatggagatttttagttatcatgaaggctttaaaaaatgggtagagataggaaactctggcatgttcagacctgaaatgttgcagccgatgggacttcctgaagatgtccaagttattgcttggggcctttcccttgaaaggccaacgatgatactatacgggatagataacatcagagatctctttggacacaaggtggatcttgggcttataaagaaaaatccagtatgtcgtcttggaattgactaaaatgattcatgtttgtttcttgtatttcttctcatttataaattataatttatttttgtctctaagatcaaacactacctgtagattgtaagttcagtttctatatgaagaattttgatacgggagaaaaaagctacgcccttgttattttggatatgttttgaaaaaaatattaatgggaagttaccaaatttcaatttcttgtggtttggagaatgttatggtaagaaaagttatcattcctaggtaggacgcatatcaatatagtacatgtttggtttaatgttggatgcttcaaacaccacatagaatcaaaagttttgaatttttatttctggtaaaaaaaaaaaaaaaaaaaagaattt

SEQ ID NO: 65643 - DNA, 1791 bp, Glycine max
  Clone ID: PAT_MRT3847_30291C.1
aattcggctcgaggtgggttgcgtgaacgctatgagttgcatcatggagtcaaaatatcagatagtgcacttgtttcagcagcagttcttgcagatcgatacattacagaacgcttcttacctgacaaagccattgatcttgttgatgaagctgctgcaaaactgaagatggagatcacctctaagcctacggaattggatgagatagacagggctatattgaaattggagatggaaaagctctctttgaaaaatgacactgacaaggcatctaaagaaagattaagtaagcttgaaaacgatttgagtttacttaaacagaagcaaaaagaattgacagaacaatgggacagcgaaaaagtttttatgactcggataaggtcaatcaaagaagagattgatagagtcaacctagagatggaagctgctgagcgtgattatgacctgaaccgtgctgctgagcttaagtatggaactttgatgtcccttcagcgccaattaacggaagcggaaaagaacctaagtgacttccgaaactctggacaatctttactccgagaagaggtcactgaccttgatattacagagattgttagcaaatggaccggtataccattatcaaacctccaacaaacagagagagaaaagttagtcttgctggaacaggttcttcacaagagggtggttggtcaggatactgctgtaaaatctgtcgctgatgcaattcgccgttcaagggctggattgtctgatccaaatcggccaattgcaagcttcatgttcatgggtccgactggtgttggcaaaactgagcttgccaaggctttggctggttacttgtttaacactgaaaatgctcttgttagaattgatatgagtgagtacatggagaaacatgctgtttcacgtctagttggagcccctcctggttatgttggttatgaagaaggcggtcagctaactgaagtggtcaggagaagaccctactctgtggtactatttgatgaaatagagaaggcacatcacgatgtcttcaacatcttgttacagttgttggatgaccgaaggattactgactctcaaggaaggactgttagcttcacaaattgtgttgtgattatgacttcaaacattggttctcattacatacttgacactcttcgtagtacacaagatgataaaactgcagtctatgatcagatgaaaagacaagttgttgagttggctaggcaaactttccatccagagttcatgaatcgcattgatgaatatattgttttccagcctctggattccgaacagatcagcaaaatagtggagctccagatggagcgagtgaaaaacaggctcaagcagaagaaaattgatcttcattacacagaaaaagctgttaaacttcttggtgtactgggttttgatccaaattttggagctagaccagttaaaagagtgatacagcaattggttgaaaatgaaattgctatgggagttctaaggggagatttcaaagaagaggactcaatcattgttgatgctgatgtgactctatcaggcaaagaacgttctcctctaaataaactgcttattaagaagttggacagccctgatgcggatgccatggtcgtcaatgattaattttgcctactagcttcagttagataaaagcagagttttaaaaaaaaaatggtaaaactccatagggtacgaacgtagtgctttttttttttgtgtgtaactattgtcttgaggatattgtgtttaaaaataattgttgattcaggttttaaaaga

SEQ ID NO: 65644 - DNA, 1328 bp, Glycine max
  Clone ID: PAT_MRT3847_30292C.1
ggctcgagcacattttgcatctttcaatagaagtaaatggaggcagcagcagaagcacttccgtgccgagcttaccctttctgaatcccctttaacagttttttattattcacacggaaaaaaagtaagaaaagaagcttttttcccccttgatcatcactatcagatacagaccctctagagaaaaaggaaaaaaaagccttcatgtgaatgtgacaatggaagctaagcctcttcgaactgttccctcttcacacaacacttctggggtaggaggtggaccccagaagaagattgacatgggacacaagatggtaggtgatgttggtgttgttgttgttgatgaaagaaagagggttgttgtggtcaaggaagagaaagagaacacttcttcctacagtgttgaacttcatctcggggttgatgcttctcattctgctccacaagaaataaaccatgtgatcactgaagctcagaggcgtgagcttcaccatcaagttttcatcttcaaccatttggcatataatcttcctcctccttatcaccttgtgcaattccctagcaacatgtcagaatacagtttcctgggttttgatcatgggattatggtggatccagaacctcataggtgtagaagaactgatggaaagaaatggaggtgtggtaagaatgtggtgcctaaccagaagtactgtgaaaggcacatgcacagaggtcgaaatcgttcaagaaagcctgtggaaacatctcaagttaactctcctttggcaacaaagccttgtagcaagtcacacaccaaaccatcctcaaagacacaatttgaaatttcaagtccaaaccttatcgccattccacatattgacacatcaagtaccccatcaaggagcctcagtgtcaccaattgctcttctgctaataataggtcgaaaaatagtgcaagttatgctgactacctcatgtcgttttcttctgcgtccacagtgtcccctggatccactcttgccactccagttgctcctaagatggccaccttcagcagtgtgacatccattgcttcagatagaggaagttgcctaaatatatgccagaaagataacaagtccaagagctgtatcagcaacaacatcagtgttaaaagtggtgggaaaggaagaattgttggtgacactaatggcatttctactggaataggcttctccccaacgagtgttcttcaagtttctgggtgcaacccttcatacctgaatgacagaaccaacatagaatctgcatccggtaggtgccggagaacagatggtaaaaagtggcaatgcaagagtgctgttctt

SEQ ID NO: 65645 - DNA, 320 bp, Glycine max
  Clone ID: PAT_MRT3847_30293C.1
cagcgaccgggcccgaagccccgggaattaccaccccccccccatagcgaggaaacaaaaggaggggacaaaaacgggcagccgagaaagacccaaacgcgacgaggcaccaggcgaggaggacgcagaacaagggccaccaccggaaggacgcggctcggaagagagcgcaaccacgcgccgacaacccagccaagaggcgcggagagccgaaccaaaccaaacagctcgcccgcgaaccaagcccgaaccgagcgggaccacgctcacgaccaagccacgcaggaacagcaccagcggacacccacggaaagggaaac

SEQ ID NO: 65646 - DNA, 420 bp, Glycine max
  Clone ID: PAT_MRT3847_30294C.1
ggtgaaatccttaacactcatgaataaaaagacagaaattcaataataactgttgagtgttaaggatttcacaagcatgaataaaaagacagaaattcagtgataaaaagtcatgttataaacttcaaattctaaattatcttatatgctatcaaaagtctgtcaaggtatgtagatttaaaatttgcttgtgcacctaaagaatctaggctctagcaatatattacaacagaagttatggtggaatgaaacagtttctgtggtatcctcaaacagctcaacatacacttccaaagatttttcttacggttgggggagaaaaaggaaatatctacatggctctaagttgaagtatttacattttccatttatggagacacataaacaagtacaaggggaaatgttatgtaaatgaacaaa

SEQ ID NO: 65647 - DNA, 123 bp, Glycine max
  Clone ID: PAT_MRT3847_30295C.1
gcctttcttgcggccccgcacacgaggtagatcacccttatgttggctggattctatctggtggctgtcccgcgtggcacctagttgaaacaactcgctctatggggggccaacaagtgagaa

SEQ ID NO: 65648 - DNA, 141 bp, Glycine max
  Clone ID: PAT_MRT3847_30296C.1
acaccacttgctgaacggatgagctttattacagatcacgacgtcttttacactgatgcgaccgttggaggacttatgaatgctacatgtgggaatgtttctgagctcataatagcaaaatttgcccttagcaggaacaaa

SEQ ID NO: 65649 - DNA, 524 bp, Glycine max
  Clone ID: PAT_MRT3847_30297C.1
cgaaaactttctaacaagcctaattgctggaacctcactactaagcattcaaaaagcatatatataattcgatggcaggtattgcgtatgggatcagcgtgcttgccgttggtgcaggtgaagctccacggcgaccaacacaagcccaaactactactcccaacactcatcacaataacaacactacttctgaagagttcacttatttaaattctgggaagcaaaatatcaagggtcttaccaaccagactggttacgttaagggcagcgctaatggtgccatcaactttgggacgctcacaacctcttcttctgcccagatgcaaccatgaatcctttaataacatgcatgaagaaacaagaggcaactcaatacaattagttatctaaataataatttctgctgttattgcctccattttcatgtaatcttactcgccaaacccatcattgtatacatatcaagaataaaacgtgggtggatttctcaatatatgaccatctaagtttctaaccccgattaa

SEQ ID NO: 65650 - DNA, 627 bp, Glycine max
  Clone ID: PAT_MRT3847_30298C.1
aattcggctcgagttcttatataacgaagaaaaccacaaatttgaatctactaactcttaaacactacggatagattgaaggcaatcaaatcatctttatacaaagattcttcttcatcgtctatgttttcctgcatattcagttttaaggttcaagcatcttcttgaaactcttctcaagctcgacgggaatttctcagcttttctctcgttacctcacccatcaaagtttcctcttctgggtgtttgtttatcggatccggggcattgcaagatttgatcatttcacgaatcatatcattatcaaacactcccattttctgggtacttaattgggatgggttgcctcggatttcgcactctcatttctagggtttatgtcggttgcgtttggtggatacccctttgactccgaatgagcttgaccacgaaaagattggttcttggtgatcgcagtgttcaattcaataagttcggggattgattcttttacaaaggggaatattgcctttttttttctctgagatttatccgttcatttttttttttatttcttttcttttagtggtgatgcttgaatatcagagcaagattctgggggtattatgtttagaataaagagttgtg

SEQ ID NO: 65651 - DNA, 807 bp, Glycine max
  unsure (1)..(807): unsure at all n locations
  Clone ID: PAT_MRT3847_30299C.1
aaagggttttcacaccttctttgtttgctccctaatgtgactttcttgtttattgtaccacccgtgagtgatgatgagaatcaagggatgaaagcacatccttttgcaaattccaaatgaatctattacaagaacaggaacaaagagattcatggaagcattaaaatggatttattcaagacatttggcccaatcataatcctgttcaatttgaatttgagcttaaacacatgcttacactaatttgggataaagatggagctattagaggagttttgggccaaaatcactcaaattgaggtccttgggttattgactatacatgctcgagatcgagccgaattcggctcgattggctcgagcggctcgagggggtaaacatgttgatgacagtggatttgatgaggacatactgtttgattcacacaattctgaaacttttggtgatgaaacttttggtggtgtgtttggttcggtcgttaagaggcctggtgaaataagtggtggaaaaggaaatgatggagctcgaacattggcaaattcttcctccatggatcacacacaatcatgtcaatcaaatacctgtgtggatttaagccgctctggttcttatgatcatgcgaagcagttagcatcggaactccctgccaaaagctactccacatcagatggggaaagcaggtgtttttgttgcccttttctcttctgtatctacttgctttctctgtaatgacttgtatgtatttcaacatatgtcattntccaagttcaaaagcataaatttcattattgctatgatttttcata

SEQ ID NO: 65652 - DNA, 2836 bp, Glycine max
  Clone ID: PAT_MRT3847_3029C.1
ggctcgagaagaatagatgctccaattcaaatgatctgcttataattggtataattggttggagagtcgtaaattattgtaaattttctgaaattatcttcgattcctcctattaaaaaaaaaaaaaagaatagatgcttgagcacttaacaagttaaattagagtcaaataaagcaacaaagtgcttcgattgattctataacgtgaaaataacgaatttatgagtagtagtagatagagtagtgtgtttgtttatatatcgcaattcgcacatcattgtcagggtatcgattcgctcggggtgcgcgggccgacccacgcgtccggtggtcttttgaattgcatcgttacaattatgcttattagcgtgttgtgttcttagagtaattaggaacactggaaaaaaaaacccagtgaatcaacctcatttgcagcattgatttgtgataagtcgaggaaggttgatgttgatgttcaaatcctggcttggaatcagaagtgtaactttcctcatattagagtggtttttttttttcggtgaggtgttaacttgaaagctctatgttggcttcattaagagcagaaaaatgagtgatacagaaggtcaatcacattcctcgggaataacgaagaaactagatagccataaaacttatcatggtagagatcccaataatggaaatgacctttggaaagatggacttatttgtgcttttgaatacatttgaggacaaaacagatcggctaaattgagttcctcctcatcaaagatcacagacagaatgcatggccaacattcaaagatgcatcatgtcccttcggatgataaaaagaagctctcagatccttcatctgtaaatgtctcgagggagagtttgtttggtggctctgatgacgacaaggagagccagacccctaaggctgggcaatctaaaaagtatgagggaggtcattgggtaccaattggatgggcaagaatttcagaacttgtccaagcagttcaggttgatgctgactggtcttctcatcaattggaatttgaggattctgaagatgattttacagtagcagatttggcagctccttattgggagcatccggctgggcctatatggtggtgccatgtttttgcaggtcaccccactgttgaggcttggctcagcaatgctcaatggctacaccctgctgttagtttagccttgagagacgaaagtaggcttataagtgagcgaatgaaacaccttctctatgaggtcccagtcagagttgcaggagggctgttatttgagctcttgggacaatccgcaggtgatcctcttgttgaagaagatgacattccaattgttcttaggtcttggcaatctcaaaacttccttgtaactgtaatgcatataaaaggatcagtatcatggataaatgttctgggtataacagaagttcaggagcttctttctgctggagggtataatatgccgagaacagtgcatgaagttatagcactacttgcttgtcgtctctcacggtgggatgataggttattccgtaaatctatatttggggcggcagatgagattgaattgaagtttatgaacaggagaaaccatgaagatttgaatcttttcatcttaatcttaaatcaagaaatcagaaagttatcaacacaggttatcagagtgaagtggtcactccatgcaagagatgagattgtctttgagcttctccagcatctaaaaggaaatggagcaagaaccttgttagagggaataaaaaagagcacaagagaaatgattgaggagcaagaagctgttcgtggccgcctgtttaccattcaagatgttatgcaaagcactgttcgagcttggttgcaggatagaagccttcgagtaacccataatttagctgtatttggtggtgttggcgttgtcctcaccatcattactgggttatttgggatcaacgttgatgggatacctggggcagaacagacaccttatgcatttggtgttttcacggccatcctcgtcgttctgggagtagtgctgatagcagttggcatggtttaccttgggctgaaaaaccccgttgttgaggaacaggttgaagtaaggaaacttgagctgcaagaattggtgaagatgtttcagcatgaagcagaaactcatgctcaaatgcggaaaaatatttctcccaagaacttacctcctactgctggtgatgctttccgtagtgatgcggattatcttgtaatacagtagaaatactatcatactaatactttaattgtccaaggatgctttaacatcaattacttttggtgttaactgttgttccaagtctgaagttaaaagcatgaattgaaaaagcatttctctttgcttattcatgaactttggtgaatgtggattgtggaggaactcacaaccgtggttggatggatgggggacgtcagtgatgataagctcatactttcttttggacattcgtaggcctcagtctctaacaaagccgaaattcttctaggctttgctctatacaagttcttcattgaataaattagaagttttatatgaaatgaatatttgtatgcctcgtatgcaaattgttcatttagctgaatatttgtatgccttgtatgcaattgttcatttagctgaatttataaacgtcatgtcaacttagtgtatatagaagattttttttttttttttttgtaataacaaagtgaaagatgtgatactactcatactagtgagactttagacattctagttctactaaggatttgtatcgttttgctgcctttgtttttttagtaaaataagattaccttagctt

SEQ ID NO: 65653 - DNA, 710 bp, Glycine max
  Clone ID: PAT_MRT3847_302C.1
cattcacattcccaaagcattcaaaattctcaacacttttcttaagaaattctcttctcaaatcaatacaacaatgggttttcgtttacctggtatcagaaaggcatcaaatgcggtggatgcgccaaaaggctatcttgcagtctatgtcggggagaaaatgaagcggtttgtacgaaatattctcaccgacatttgcaggcatgctttggacatgttttcttcatgttatgctggagtacaactggaaggtattttctgactgatgaattataaggcaacacagatagatagcaagagatcatagaccattatatttctgaggtttgacattatacatctgttttatttcaagcggattcacaccagaaaattagataggattatcttagctactataacatgcaacgttaattcttgataaagtcctccaaggcaacaccatatgcccctgtctcctgtcggtcccatcacttatctcgttgccttccccccacaataattcatgtagccaactgtttgttacaaattctttcatctatatatattcatggttgcaaggttttagcacaaccaaaatcattgacatcctaaagcattcgtagttcaaaaattccatcttcaatttacaagtctttttggacactctgtccctaatttcaacacatacaacaatgggtttttcgtttgcctggtatcagaaaggcatc

SEQ ID NO: 65654 - DNA, 254 bp, Glycine max
  unsure (1)..(254): unsure at all n locations
  Clone ID: PAT_MRT3847_30300C.1
ttatttcttttggtatanttattattttattacccgcttcgtggacaattggggattccgggttcggatattaaaaataaatttcacccacacctcaagggcctgctactacatctcttgttttggttggagtaatgattaaatgcttggcgtggcaccagaacactagagacctagtagagaagacacggagggaaactcccatatgacatatacctcctccaacatcttgatcaactcgctatccaggaatc

SEQ ID NO: 65655 - DNA, 760 bp, Glycine max
  Clone ID: PAT_MRT3847_30301C.1
ccaatccgttgtccactgttgttggccaagggcttcccggcggtgacgactgacgagtgaaatgagtcccggaaaaattaagttgttttgtttcttctaggtctcttcgttcccaacatcccatgatgcttgttgagctgttgggttatccaagcttcaaaattctgagaaaatgaacaaggccatcttcaccagattctttcactccactcctctcttggaacgcaaatcccgcacttttggggaatctagatgcaacaattactccaaaagattccgaaaactccgtgccaaacaaacgctgcttcacgatgtcaatgcctacgcacaattcatgtgtcagagctggaaagaagatgttgatgaggatggtccatctcccagtctaggcccctcatggttcagaaaacaatattctcctaaaggctctggaaggcacaggaatgacaatcaaagatcaaagcatcaatttagaagaaatcatgaattttgcaaagatgattttgacgttgaaaccgttttccgctctgcctttggtggcaatcgatctttttattggtcctttataaatgaggaaaatcctcagtggacgaagtcaggaggcttttctaatcatgggaaatcttggaattggagacgttggagtgacaatggatataatggcacatcaaccgagtcagattgctcgcaatcagatttaatttcagatagattagcccttggaatgagcgcttctggccctatgaaacttgaagatgtg

SEQ ID NO: 65656 - DNA, 276 bp, Glycine max
  Clone ID: PAT_MRT3847_30302C.1
cttttcttttctctttgcgttgttgatgctctcaccctcgtttacctcttgtttcggtgctctgttctccactcgatacaccttcttagaaaagagttcactctaccttccctgtcttgattcctaactgaaaattcttaaagtattcccatcatcgaaatgaaatgaagattgggaatgctttaagaatttcagttatgcatcaatcatggcagttattgggtctaactctaaccaagtagtaatatttaggttcttaatagatagctcaagaat

SEQ ID NO: 65657 - DNA, 237 bp, Glycine max
  Clone ID: PAT_MRT3847_30303C.1
gcgagaagacgacagaaggggatattcctaacacaggcaaagatatgagattggaatattccaggacaaagtgaagaagtataagcaagtcaggaaataaagtagtaaactgtaaaggtaaatatcaagtataaatggaaggcattagttattatagataatctcctcatttcttatcccttcaaattaggagttatcttttataggacatttgaattgtagtacttaatctaaatt

SEQ ID NO: 65658 - DNA, 358 bp, Glycine max
  Clone ID: PAT_MRT3847_30304C.1
caaaaatgcagatgtatgggctgatttctttggtcttcttagtttagaggcatcaatatggataaaattcattttagaggatcatctgatccatgctggtgtccttctcagtcttctctctctgccaagtttcctccaaaataggaccagtcaatcctgtaatggttactgcagtagcttcagttattgaatctttgggagaaaatcctttgaggaaggagcttattgggactccaactagatttgtgaaatgggtgatgaactttcaaaagagtaactttaatatcaagttgaatggttttctttgtgatgggatagattctttagatgtcaatgaggatgtttacatccacaaaaa

SEQ ID NO: 65659 - DNA, 439 bp, Glycine max
  Clone ID: PAT_MRT3847_30305C.1
ctttcccgtcatcactgtatgacgtcctccttctttgggggggggggggggaaagaatacattgtagtatctgtaatgcgacgacaatgagaaaattggctaggaatggagcgaatgcataaaaaagcttaaaacaaaaatagccggagtttatatgcaaggagggtgtagcatagcatagcatggcaatggcgcatactgcggcgagaagtgtggtgttggggttgcttatgatgcggcccgtgtgccaagcacataggttacttgttacacccaaaggtaatatcatgggcgcattttgtaggtgcaacgtactataagtagacgttggactagtagtaagtgtacccgtaaagcgcttacgttatatttgctgtttgggtggggcccccgtctcaagtgtgcttctaaatggtttttagccttggtgttgtatatt

SEQ ID NO: 65660 - DNA, 346 bp, Glycine max
  unsure (1)..(346): unsure at all n locations
  Clone ID: PAT_MRT3847_30306C.1
acgtaatgcaccccataccacatatataacagagagtatgtcttatagcataatccttatttaccgggccaacctggtcctccaacaggaaggatttacaannttaaccaaggcctttcccttgcacagaccataatataactctgggnnngattgcactccacatcgatcagtctgttnnangccagtatacgccactaattaaccaggggtacttacattcaacaccaaccggacgcgggnnactacccggaagttcctgaccggcacctgcagacctaccagctttccataaactaagtcgaatactagcttgagnnatccaggnccctaggtgatacctgcg

SEQ ID NO: 65661 - DNA, 514 bp, Glycine max
  Clone ID: PAT_MRT3847_30307C.1
ggtttttgtttcaaacttagaaattctcaatcaggaaattgttcacatataagcaaataaactacaccattttccgcattgagagaggataggaaagatagctaaaaaggaattgttttttataaataacatgagaaagtgaatgaaatttgagtatattgaacataatcgtccaggttgaggggtggtaaagcactgcactgtacaatcagccgagctactacaattgacttggcattgggcaacctcctcgctggatttttttatcacagggaagatcaaattagagcctgaaaatttgccatacaaagagatagctgcaggtgctgggaaaaggttaaagaagctaattgaaccaaggattctcctagtaacgttttagttacaatgaattcagtagatcaaggaattctgaaggttcttcattctctttaacaaccttcatgactgtgttctttggcaaactaaactgagcaaggagatcacaaccaattttgattccagtcagcaattc

SEQ ID NO: 65662 - DNA, 367 bp, Glycine max
  Clone ID: PAT_MRT3847_30308C.1
aaacataaaaccccatttttaaaaaacattttggccaaaacgtttggaataaataaggggaagacatggaaaaaatcccttccttttgttttttaaaatggaaagaagccggatttttttttgccccaggggggaactttgtaaaacgtttaagctttttgtttcaaaactaaacagaaaataaacgggggggggccctaaaaaagatttcccaggggaaaaaaaatttgcccttttaaaacccaaaagggggggcctgaacaaaatttaattcttagccaacatactttgtccaaagggggttgaacggggccattgcaagggcaagccatggtttcattttgccattgaagggcacaacgggggg

SEQ ID NO: 65663 - DNA, 489 bp, Glycine max
  Clone ID: PAT_MRT3847_30309C.1
atattcgggcgtgctttgttttttttttttttttttttttaaattggtttttcgttaaaaatccccgggaggccaaaggggagagacaattatacctgtatcccccttatttttgtgggcgaacctgtttttcccaaaagaattttttatttttaaagcttcattttttgcgggggggggggcaaaaaaaggacacctatcaataattaacgcctaaaaaagaaggggggtggttttaaaagctcagggggagaaacttggacccgggttaaccaaaaggtttcaagcaaaaaaaggggtgcttttgagcggctgggaaatggaaaaggaagactaaacctgggacgacgtaatggacccttttgaacccaaaaggttgttcaggggactctttttctaccaccaccccatggttacacttaaaaaggatggcccttaaagaaacgacctaatagggaggaaaaaaccttactggtctaaactctccgg

SEQ ID NO: 65664 - DNA, 317 bp, Glycine max
  Clone ID: PAT_MRT3847_3030C.1
taacttatagcttagataaacttaataattatgattgcctagatgttgtgaaaatactagatgacacaaactacgatggtcagtttaaggaaattgtgagtgagattgtgaagaacaaacacaaatttcaacaatcatgggtgatacacatcatgaggaaagcaaataatttggcttactcttttgttaaagcgggactatctttatcatcttatttatgtttttatgattaagtaatttttaatctttgtttggggtttctttgtccacgtaatggagcttgccggcaacgctacaagcggccgctctagaggatc

SEQ ID NO: 65665 - DNA, 741 bp, Glycine max
  Clone ID: PAT_MRT3847_30310C.1
ggctcgaggaaaattccaatctcgatgcaacttggaacttgcagatctagataaggttgaagaggaagaggacattcttgcacttagaatgttgatacagcagcatcaacgtcacacaaatagtctgctagccaaagaagtgcttgatgattttgagaatcttcttcctaaatttatcaaggtgttccctagggagtataaacgtgttcttgcaagtatgaagtctgaggaaacctccaaagatgcattggtgcatgctgctaaagacgaccaagatgatgaagcacaagcagtggagaaggatgcttttgaagagcttaagaaactggtgatggcatctttgaatgaggaaccgagtcaggctgaatcacccaagaggccaagtcgagtcactggtgccattaaacatagagggtttgttgcttatgagcgggagggtgttcagtatagggatcctaatgttcgcatgactgattggaaggaagtgatggaggagacaaagcctggtcccctactgaaaacacagtcagcccgttgcatggactgtggtactcctttctgtcatcaggaaaattctggatgtcctcttggaaataaaataccagaatttaacgagttagtataccaaaatagatggcgtgaagcattagagaggcttcttgaaacaaataactttccagagtttactggtcgggtgtgcccagcaccttgtgaaggttcttgtgtccttggtattattga

SEQ ID NO: 65666 - DNA, 448 bp, Glycine max
  Clone ID: PAT_MRT3847_30311C.1
tacggctgcgagaagacgacagaagggacattggaggttgaggggaatgggttcaacaagctgggtattcagatttcacttaaaattagtgaagagaagaagaaaggagaaaatcaaggccgaggcgcctctgtaatacttccgtgacatttccatgatcaaattccatgaacgttcttcgtccgttcttcatcgttcgtcgatcctcaatgtattagtttttgattttgaaagttttgaattcattctatgcaccgttaggggtccattcttgcctcgtatgtcttcatcttcatctcgtctacttttgatattcttttgctttgttttaagcgagtttcgaccgatcgtttaagtcgtaatctcacataataaatgttaaaacgaatttcgaccgatcgtttgtgttgtaaactcatttaatcgcctttaaaacaaaattcaactg

SEQ ID NO: 65667 - DNA, 377 bp, Glycine max
  Clone ID: PAT_MRT3847_30312C.1
gactaaaaactatatatcccacattacctttcacaaggaaaggaactggtgtgccttgctcaacattgcctatgacgtgcatgttaacaagagagaaacatacgctctccaacaaacgccaccgataaaaaaactgttcacaacctttctatacttacagccaaggctttaggtgaacccaaacagactcttacctacatgtgatatgggggaccatgaactggctcatattactatgactttgcaggacatttgctatgaaaactgctgatgctgcgctcggtgaaataagtatccaccgactgacactacggaattcgagggctcgtattctggcgggtgaagtgccatcctactgcgacctgaatgaaacattg

SEQ ID NO: 65668 - DNA, 153 bp, Glycine max
  Clone ID: PAT_MRT3847_30313C.1
ggtatgattttctcgactgaagctgcctctgcgacgcccgtttgatttaagcctaaacctttcccgtgcaagcatggggccagaaaatggcgagaggaagaaaccaaaccttctggtgactggcacaccggggacacggaaaacaactgtgtg

SEQ ID NO: 65669 - DNA, 870 bp, Glycine max
  Clone ID: PAT_MRT3847_30314C.1
catttggggacattttgatgacccagtattcatcatccctggctgtgtcagaaggagagaaagtgactatgagctgcaagtccagtcagagtcttttatggattggaaatcaaaggagctgtttagtctggcaccaaagaaaaccagggcagactcctaaaccactgatcacctgggcatccaatagggaacctggggtccctgatcgttttataggcagtggatctggaacagattttactctcaccattagcagtatgcaggctgaagatgtgggtttttattactgtcagcagcatttagacattccctcacgttcggttctgggaccaagctggagatcaaacgggctgatgctgcaccaactgtatctatcttccccccatccacggaacagttagcaactggaggtgcctcagtcgtgtgcctcatgaacaacttctatcccagagacatcagtgtcaagtggaagattgatggcactgaacgacgagatggtgtcctggacagtgttactgatcaggacagcaaagacagcacgtacagcatgagcagcaccctctcgttgaccaaggctgactatgaaagtcataacctctatacctgtgaggttgttcataagacatcatcctcacccgtggtcaagagcttcaacaggaatgagtgttagacccaaaggtcctgaggtgccacctgctccccagctccttccaattttccctcctaaggttttggagacttccccacaagcgacctaccactgttgcggtgctccaaacctcctccccacctcatcctccttcctttccttggctttgatcatgctaatatttggggaatattaaataaaggtgaatctttgcacttgaa

SEQ ID NO: 65670 - DNA, 485 bp, Glycine max
  unsure (1)..(485): unsure at all n locations
  Clone ID: PAT_MRT3847_30315C.1
cagcccagtccgctccagtaccgctgccagaaaccaccgaaggggagattaagattgggactgggagtgggaganagatnnatgtggcctattcctgtnttcccctcccccttctttctttggagtcccccactcgcgccntttttgnntccctttttnggcccagcctggnccncnnnnnannnnnnnncnncacaaacccccccccnnncccccgcgcccgggggccnccccccccccccccccccccccccccccccccccccccccccgcccccccaccacacccccccccccccccccccccccccccccccccccccccccccccccccccccccccccccccccccccccccccccccccccccccccccccccccgcacccacccccccccccaccccccccccccccccccccaccacccccccccccccccccccccccccaccccccccccccccccgcccccccccccccccc

SEQ ID NO: 65671 - DNA, 110 bp, Glycine max
  Clone ID: PAT_MRT3847_30316C.1
actcttcttggggaattgcattatatgcttaatattcttgctgagcaaccaaataaaagccctcgttgctaccaaaagatatccatcgtacccacaaacctcggcaaaaa

SEQ ID NO: 65672 - DNA, 2004 bp, Glycine max
  Clone ID: PAT_MRT3847_30317C.1
aatcgagtgtgactgtagggcttcactgctgcctcagtatcccgctgcagaaatgagcaaatctgtccatggcgtggttcagaacctgatgcttggacagttagtggagcggctgatcttgtaagggacattgaccttgcagaaaccagggagtgcctgagcatactggtcattgatgttgtacctagcagcatccgccttgagacagttgcagcaatcctatctgaatcattcatcatcttcttaaaagttaaaaaggccaaggtcctgaatctcacagagacagagagaatgagtacggtgggagaagggaaggtgagtagtaatggtcatggatgttgcaaatcagggccaggctatgcttccccactggaagccatttctggtcccagagagtctctcatttatgtaacctctgtctacacagggaccggaatagagaagccagactatttggcgacagtggatgtggatccaaactctccaacttattccaaagtcatccataggcttcctgttccttatttaggtgacgaattgcatcacacaggctggaattcatgcagctcttgccatggagacccctcagcagaccgacgatttctcatcgtacctgcactcgtttcaggtcgcatatatgtggttgatgtgaaaacaaatccaagggctccatctttgcacaaagttgttgagcctgccgatatcatacagaagactggattagcttatccacacacatctcactgccttgcttctggtgacataatgatctcatgtcttggagataaagatggaaatgctgcaggaaatggatttcttcttcttgattctgagtttaatgtgaagggaaggtgggagaaaccgggtcacagcccactatttgggtatgacttttggtaccaaccacgtcacaataccatgattagcacatcatggggtgctcctagtgcttttacaaaaggttttaacttacagcatctctctgatggattatacgggaggcatctccatgtatatagctggcctgggggcgaactgagacaaacaatggaccttggtgattcagggcttatacccttagagataaggtttttgcatgatcctgctaaagatacaggttttgtcggcagtgcattgacaagtaacatgatacgattttttaagacccaagatgaatcatggagccatgaggttgccatatcagtgaaaccattgaaagtgcaaaactggattcttcctgaaatgcctgggcttataactgattttctgatttctcttgatgatcggtttctgtattttgtaaactggcttcatggggatataaggcagtataacatcgaggacgttaaaaatcctaaactgactggacaagtatgggttggtggacttatccagaaaggaagccctgtagtagctataactgatgatggtgaaacatggcaagctgaagttccagagattcagggaaacaagttgagagggggccctcagatgattcaattgagtttagatgggaagcggctctatgctaccaactcactatttagtacttgggacaaacaattttatccagagcttgtccagaaaggctcccacataatacagattgatgttgatactgagaaaggtggactgaaaatcaaccccaacttctttgtggactttggaactgagcctgatggtccttctcttgcccatgagatgagatatcctggtggtgactgtacttcagatatatggatttaaacatacgtgtcattatttccctttaataaacggtatctgtcatatggttgtaatgagctattatgctttataaataatgctcctgtgaatcttcaacatttcgaagacagtttgcagttgcataaatatattaagctcatcttagaaacctctttgtctagtgttgtatttctacctttgtggttacaatcaacttattaatacgtgtgtgaacaaattggtccatgcccgtttaatccagataaaaaccaattagag

SEQ ID NO: 65673 - DNA, 814 bp, Glycine max
  Clone ID: PAT_MRT3847_30318C.1
gaggaattgacttatctgggcagttgtaagtttggtgtagctaaggcaaatgcttgtctgtgcagcgagctccactcttactttctggccattcaacaccaaatcccaccaccgatttttctcaaattcgctcagcctccctctcacactcacacacaccccttcatgcttcctccaaaccatcaaccccaaccctacctcccattccgatgacgccctccgcctcaccgtgccttccgccgccgcagtcgccgccgccattcgcaaagcctccacctcccccgtccaattcaaatacgctgaggctccctcacacacacaccccttcatgcttcccagcaccgacttccaccgactctgcctccacctctttcgcagaatcgttcccgaagccctcctctcggtgtatgttagacctgctggtagttatgtgatgggttggagctgtggtgggttgcactgtaccctggagaggcagaggcagagggcattgtcattcttgtgggtcattttaatattcctgcaggcttgcgtgctgccaaggccacgctttccaattcgcaagttaatgttgtccctgaatgtaaggctgtggttcttccgatggtgaaacacccatttgttgttggtttcttggttgctgagcttccattggtggagcaggaacagtgtcagaaatctcaaagtgatgggccagaaaacctcatgtctgttgaggaaccttattcatttcctccctttttggatttagataagaagtcaagggaaattcagaatcttcaggtcaagaatgaggcagttggtatgcataact

SEQ ID NO: 65674 - DNA, 243 bp, Glycine max
  Clone ID: PAT_MRT3847_30319C.1
acttctctacactaactaattttatagtatagatgttgataccatgaaaaaatacatgtgctgaagaccaaagagaagccacacacacttctatgtaaatttttcttcaccttttttggtttgatgtaaatttattgtgcaaccgtttaattactccatatcgatacatttccttgtgaatcgaagtgattttcttataacaagctggtgcaggttacatgaatagactatctgaatgttata

SEQ ID NO: 65675 - DNA, 831 bp, Glycine max
  Clone ID: PAT_MRT3847_3031C.1
gtgttcactagtgatagtgaggtgttacaattgaccatggcagtgttacctataattggactgtgtgagttagccaattgtccacaaaccacaagctgtggaatcctcagaggaagtgctaggcctggtgttggggctgttataaacttttgctcattttatttggtaggagcaccagtggctattgttttggccttttattggaaacttgggatggtgggtctttgttatgggttgctggcagcacagatcgcatgtgtggtgtcaatttttgttgtggtgtacaaaaccgattgggaaagagagtcattgaaggctacatgcttagtgggaaagagttcatgtggcacatttgcatatgaggaccaaactgccgtcaaatgtgaaggtgttgtctttcttcacaactccgaaaagtgaagaagatacgcccccgatttaccctagtgttgaagaaatatacatcataaagtagttatggcattactcaaagcaaagttcaacctaaaattattatgattcttttagctagtattggaaaaaaaaattattcacaccccaaatcttacatccttcccctgtatttgtgagtggattctcacgtataaatacataaatgtaggaggaggatctaagattttagagagtgaatttttttttcattgtgattatacgtatgcatttacataaccaattgtgatgttgcatttttttttccttgcggcctcagtgcaaggtctagattgatggtgccatgatatacgtttgtgtaattgtaaaagtaaggtttatctaatttgtacttgattaatataacagatcgatttattc

SEQ ID NO: 65676 - DNA, 484 bp, Glycine max
  Clone ID: PAT_MRT3847_30320C.1
tttttttttatttttttttatttctttccttttttatatttattgattcattgaaaatcccatattttgcggccccgtttggtggctgggaaagcattgtggaacaacctgcctcattctgtcttacctgcggatcttcctccaatctagaaagggcacaaattcaagatgtatgaccaccctgggtcgcctcagatttggagtttaagaatataaaaaatcgaggggtgatggactaaaagctttttaaactatataaacagttggcctgaatcacccaagaattcttcaattataatagccctaaatggaagccaacacaactggcgatacaattgaattttgaccctctattgttggggaagaaccccgaaaaaaaaaatgggcggtaattcgcatgtgcttaaacccgcccagaacggggcgccaataagggggattttcaagaaacaaaaaaaattaagggggggggggaagttcccat

SEQ ID NO: 65677 - DNA, 386 bp, Glycine max
  Clone ID: PAT_MRT3847_30321C.1
ccttcactactaccactttacccaccaaaccacttatcaatcaacatgtctgacattggacgacaatccctcggtgacaaggccggagccgccctcaagcccgactccgagaagtcttacgttgagcaggccaccgactacgtcaagggcaccctcgactccgttgcctcggccgtgcagccgcaacaagagaagagcacaactcagaaggtcggagacgccctcaccggcgacaacaagaacaaggacatcgcctaaatgtctttggactcgacttgattgatgttgtgattgttagcgaagaagtataagcgacgtgttatgatgcatcgttgtcaactgtgaattgatgctcatctaggcgtttatgccatctaggcgacacg

SEQ ID NO: 65678 - DNA, 495 bp, Glycine max
  Clone ID: PAT_MRT3847_30322C.1
ctcaagttcagcctcaaatttaattatgaagccaaaacaatccctcaaagagcccaattctatgggaggttcggagtctcaaagtcccaactctttgaacccctcaccgaatgaccagccgatattggaaagagcgaccacaccagaggctaacccaccttcctctataaagaatcacattttattttctgcaagaaatgaggaagaaaaagcggagtgggtgtcactcatacaattcgcaataagagatccgagaaactggaacatcattcaaagtaatttcaaccgcgcacacaagggtcgtcaaggactgcaaggctagggcggttggggaggaagatcccaacggtttgattttgaatttggagaggtcgatctacaacttaatgggctctttggtcacagagctaagcgaagctcggactgagcagcaatataacgaccaaagtgcgtcattcgcacaactagaagaaagagaattgacaaagattcaag

SEQ ID NO: 65679 - DNA, 636 bp, Glycine max
  unsure (1)..(636): unsure at all n locations
  Clone ID: PAT_MRT3847_30323C.1
ccacgcgtccggcaaatctttgaagatcatcaaaggtgaaagcatctggtgggaagcattgaaatggaatgtagcagagtggggagatgctggtcgacccaattattttgagcgaattttttcaccaattaacgaggaggctgacatgatgaaccaactagctgcacttcaagagactcaactaaatgaatatcacaatacgacatatcagggaatttcaagttctaaacagtcgatagcaaaaatattagccccagtttcatctgtgggtaggggtagttcaaacagtgaagcccaaaagcggaaagtcgttgctgagccaaaaatatttcaagaggtaacaagaaagctttataaaactatcaatgcggataaacgaagagaagtttggacagcacagatacgtgtcaatgcggaagggtgtgatgatgatggatatagctggagaaaatacgggcaaaaggaaattcttggagctaagtatccaagaattcattntcgggtgccatgccaaagagaanaggaagaggacggccaanagggtcacatgttcagaaggaggttaaagagagtgcggatggtgaattcgtcatttctcctaatattcctttgaatgtgtntgaatctgatcctgac

SEQ ID NO: 65680 - DNA, 266 bp, Glycine max
  Clone ID: PAT_MRT3847_30324C.1
ccgacaccgttcccggcgactccgtccactgttggatttcaattggatcttgattttgaacggctgagtaaagaggcatggctgacagagacgaagagtcggcaatgcctatggacgcgaaaattgcgaagccttagcagacatcaatggaccgactacgactacggaacctggctttattcacacagcttctagagcctagagacttgactacgcttgtgcatgtgcttaagccgatgcacaacgtctgattcatagctatgctc

SEQ ID NO: 65681 - DNA, 925 bp, Glycine max
  Clone ID: PAT_MRT3847_30325C.1
aattcggctcgagcgagactacttctaaagaaaaagctgagtgctccacgcgaggaagaagagaaaattagcaaaggaaaaaaagaaaaaagagaaagaaggagagagcgagcagaataaggtgtctctcttggactgattcgcttcaatcgcatctctattctctactactcattcatttttatatacctctcttccttctctctcccaccctcaacacaaagaaaaaagtggacatagttatttaatttatttttgttcatggccgttcaagctcaatatccatccaatgtcctttttctaaacagcagaaacgggcaagaagggcatgagtattcttcattgcaaccacaaccaggaggagttgtactcttgaatcagcctcacatgttatacgacaactgcaacaacgacaatggaagtaacaataacaacaacaatatcaattctcgaaagagaggaagagaagatcaaccgggtgttggcaacaacaacaacaacacaatcactacagtttcaaatgttatcaatcaattttctttgggtcgcagcctctgcaactcgtgcatgtctctcagctccacaatcaccaacaacaaaataatgtggtctccactggcctacgcttatccttcgatgaccaacactttcaacaacaacaaagactacaacttcatcaaaatcaatctcaacaacaacaacaacatgggtctcaatcttctgctttcttatctctattatcccaaggcttgggttctcaaatcaaacaacagcgtgatgagattgaccaattactccatgcccagtgattataggggtgaaagaaatgatgacggttgtgtgggaatatatatcaggcagagcaactgcggcgggcattggctgagaagaggcagaggcattaccgcgcgctgctgagcacggc

SEQ ID NO: 65682 - DNA, 395 bp, Glycine max
  Clone ID: PAT_MRT3847_30326C.1
ctgcctccacaggcgctcgctttgatgcaccacacttagtcccgtgcctatgatgatgatcccaaagacgtatcattgatcgtttccttacggtccgaggaactattatacctcgaagacatcctggatgatgatcgcttcctctaaaattacacgaataggatgctgtctcatatgcagaaagcgacaaacacattgaagttcgtactcgtgttcccttttcgtgatctgatatcgttcgagaagcgtcacaagctccatctgatgcctggggggtcgtaatgctagacacagacaggagtcctgtacgtaggttgctgatgcagagcctcgaagtattggcactatgacatccttcaacaaaatttgggaagattatctgtactgacagcata

SEQ ID NO: 65683 - DNA, 342 bp, Glycine max
  Clone ID: PAT_MRT3847_30327C.1
tagataaaatggcgccgaggcaactcttataatggccatcagaagatctcttctgttcttttggttttgaggggaagggaaaacaaaaaagaaaaaaaacctacacctgagtattaccatcctaccaagatacagttcacattcaaagaattgaagcgctgttcctctcaatgctattttgaagataaatggtatttacacaaaaaaatgattcacccaacaccaaactaaaaccacccaacttcaatcaagtacccccaatctcctcctcctgtggcacaacgccccccttgtcctattcccgccccctaataccccccccttccacaaccctaccccccc

SEQ ID NO: 65684 - DNA, 308 bp, Glycine max
  Clone ID: PAT_MRT3847_30328C.1
caagaaaaagtttgaatatctatataaaatcataaatgtatcatgaaaggaaaacatgggcaggagatgtatgtgactataagacatatctgttggccaatagaattacgacgtgaccatgtgtttgttcccttccctaatactgatggtcgggaaacgatacataaaaatatttaactaaagcgtttacaaatgactaggacatgtgtttggcaacacttccactttattattcctatggattacggtcggtaacctcttattggggctataaaccgtttttgacattgctaaaacaatgcccatta

SEQ ID NO: 65685 - DNA, 536 bp, Glycine max
  Clone ID: PAT_MRT3847_30329C.1
cttttttttttttttttttttttttttttttttttttttttttttttttttttttttttttttttttttttttttttttttttttttttttgggcccggggggcaaaccggggcaaaaaaaaaaacccaaaaggggaaaagggaaaaaattccaaaggcaaaacacaccgcaaaaactatatatggaaaaaaaggggaaaaaaaaggattaaaaaaaaacaaactacccccaagctaaaccaggtaaaaaatccaaccctttccttcaaaaagccaaaaaagggatggggcccggggctgttgaaaaaaaaccacaggaaaacccttggggccaatttctttgaattaaggggggaaaaaaacccccgggggtttcaggtaaaaacccacccagaaaaaacatttattgggaagcgaaaatcggggagcaaattcaaaaaaaacaacgggttaaaaggccccgatccttttataaaggcaaaacggaaaaggcccccccccaacagggggaccatttttgtttggggccccgggcc

SEQ ID NO: 65686 - DNA, 718 bp, Glycine max
  Clone ID: PAT_MRT3847_3032C.1
ggctcgagaagaatagatgctccaattcaaatgatctgcttataattggtataattggttggagagtcgtaaattattgtaaattttctgaaattatcttcgattcctcctattaaaaaaaaaaaaaagaatagatgcttgagcacttaacaagttaaattagagtcaaataaagcaacaaagtgcttcgattgattctataacgtgaaaataacgaatttatgagtagtagtagatagtgtagggtgtttgtttatatatcgcaattcgcacatcattgtcagggtatcgattcgctcgggttgagcgcgggctgcgtgttttttcttttattaatttattaatataacacaatgcaaatgattactaattgaaagactctcttaggatcggtgaatgcattgatttgtgataactgataagtcagggaaggttgatgttgattgtcaaatcgtgtcctgaaatccgtagtttttcaaatgccatagcagtgtagctttcctcatataagagtggcttttctggtgaagagctaacttaaaagccctatgttggcttcattaagagcagaaaaatgagtgatacagaaggtaaatcacattcctcgggaatcacgaggaaactagatagccataaaacttatcacggtagagatcccaatcacggaaataacctttggaaagatggacttatttgtgcttttgaatacattaaagga

SEQ ID NO: 65687 - DNA, 968 bp, Glycine max
  unsure (1)..(968): unsure at all n locations
  Clone ID: PAT_MRT3847_30330C.1
ccctctcgtccgcggacgcgtgggcgagaaggatgatgaagaaggggttggtggtgtacaagttatacagagccctaacccacggcctatcgccgttaatccgcctccacctgcgctggcggcgcttcctcggcctggagcacccgcaccggtggctggagcgcctcggcctcccctctcagccccggcacgcgggtccactcctctggttccacgccgtttccttaggcgaaggaatgatcgccgttcccgtcatcaaacactgcattcggcgaatgcctcacttgaacgtgctcatgaccatcaccaccatgtcctcgtttgaagtattgagcaagtcgcttccgagtggaatcattttacagttttcaccagttgacacccctacttccatccattctttccttgattactggaaaccaaatgctattgtgctgatggaaagtgaactctggccaaatctcatcatggatgcttccagaaatggtataaaactggcactcttaaatgctcggatgtctgaaaagtcctttaaaatttggtcaagaccagtgcttctaccattaatttcattgatgttatccaagttttcgttgattgtcccattgagtacagagcagggtatccggtttcagctgctacaagcccctccttatatcataaacttttctggtgatttaaaatatgtaatagaagattttggagtcaatgaaagaggtagaattgatatagacaatctgagactagagcttacacaaaagaaggtttggatggcttcttccattcatagtggagaagaagaaataatattaggtgttcacaatgcccttatgcagcaacaacctaatacaatgactattattgtccctcggcatccacaggaaggacgagagattgccaaaaaattggagaaagaggacanaatgtcgttttgaggtctcaaatgagaagtttagcctggaactgat

SEQ ID NO: 65688 - DNA, 128 bp, Glycine max
  Clone ID: PAT_MRT3847_30331C.1
tttgaagcactttcatatgaaaggaatgcatgcatggtggtgtaggtagtcttgccttttgaatcacaaggttcctatctccttgatttttttctacttgaatcaaatgagtggcctaatacgtatga

SEQ ID NO: 65689 - DNA, 268 bp, Glycine max
  Clone ID: PAT_MRT3847_30332C.1
ggctgaccaactttccaactgcatttacgatgtctctgtcaaggacatctggggaagtgatgtaagcttgaatgattacagagggaaggttctactgatagagaatgtagcctctcaatgcggtcctacacagactgattattgagaatggaatgattggtaccataagtgcaataatcaatgatttgacctcttgtcatgtcgcgagcaccagtgagatggacgggaaccactagacgatgaatatattcaagacgtaccctgcaca

SEQ ID NO: 65690 - DNA, 272 bp, Glycine max
  Clone ID: PAT_MRT3847_30333C.1
agtttggcttgtcaaaatgatatatcttattatactacaaatatatctacatgatttcttctactagaagaaaaatacatcttattctcgccctctaagaaatccgatccaacaagtgcataccttcaactgggttgaaacatgactcagcctgaatcaattcaagacctctgaatctgatcactctgcactcctttctaacctcctgtccaccattgaagccactcattctgatcatggactttggaaaagccccataaaaagcctttttt

SEQ ID NO: 65691 - DNA, 619 bp, Glycine max
  Clone ID: PAT_MRT3847_30334C.1
acgctcatgcgtgcgtttatatccaagatcgtgtctatattgacatcatgggttatgaaccacagtgtccatccgaggaacagaaagtctctggacagtgttacctagtgtacaatctaagagccaactgtaactctggcaattatggctcgactgcagtcttactcacagatgagccgtcatgcgactttgttagggtatgtctagtgtgtactcctgtatctacgagcactgtgcagtgctccagcagagaatggagtgagcacatttttaggggacattatgatggctggtggtgttgctgctgattcaaattctaatttctgcaccacttgaactggtcatgtagcttatccaaatttgggaggtattgatagatagagggttgctgtctaaaccatagaaagggatggagtatatgtacttgtatgactatgcaggattaagcactaattgctatttgacagggcactccatcgaaagctattatagatttataggatctagctatcaacttcgcggtgcaggattactttaggacaccatacatgtgtagtaaacacaatgcaatgttgtgctaaggtttagcagggatgattggattggctgattgagtttg

SEQ ID NO: 65692 - DNA, 344 bp, Glycine max
  Clone ID: PAT_MRT3847_30335C.1
ggggggctaacctgggcatatttcaattgccagaatgtgataagggacaaaattccaaagtcaagacttccggaataactttttttgtaacaaaagttgaaaaaaaatgatttaaagaagacaaactagccttaagcttagccaggtcatacattcaatccttttctttcaaatgcttgaaagcggattgggctcggggcttttgcaaaacagtcacaggtaaacacttgatgccaaattctctgattctaggcgggatttttacacccgctggtttcaattagatatcttccccggaaaaacattttttttgaagcgacaatttgggagcagattttttcaaa

SEQ ID NO: 65693 - DNA, 1014 bp, Glycine max
  Clone ID: PAT_MRT3847_30336C.1
acctcggacgcgtggggtacaacatcctatgcgtgcaatcaatttaatgtatatatataaattagcaagaagtgaaacaattatttaatataaggtagaagatagcttaggctcgagatcatagttgacattgatggagttgcaagatttgccagaaggatgcattgcaaaaatactgtcatacaccactcctgtggatgtatgcaggctctccttagtttccaaagcctttcgttctgcagctgaatcagacactgtgtgggattgttttctcctttccgatttcacctctatcattcctatttcctctacctctaagaaggatctctatttcactctctcagaccatcccaccatcatccaccagggtagaaaaagtgttcaattggacaaaaggaccggaaagaagtgttgcatgctttccgctagaaatctgaccattatatggggtgatactgttcaacattgggagtggacaagcctgccagagtccaggttccaagaagttgctatgcttcaggctgtgtgctggtttgacattagtgggagcataaatactcttaccttgtcctcaaatactcattatgcaacttttcttgtgttcaagatgatcaatgccagtggatttcactaccatcctacagtgttatcagtaggtgttttaggaggcaatagcaatactaaatatgtttgtttggatcccaacttaaaaggcaatcatcgcttacaagaattacaatttcctaaagtgagaagtgatgggtggttggagattgagatgggagagttcttcaattctggccaagaagaaaaacaggtgcaaatgaaagtcatggagacaacaagtcatatctggaagtgtggtttcattcttgaaggaatagaaattaggcctaaacatgtctgatatgtgaaacaagttcttaggcctacccatgaatcatgatggaagggtctttgctagagtgctgagtgaaactagaaataatattaaaattagttattgttttcatt

SEQ ID NO: 65694 - DNA, 374 bp, Glycine max
  Clone ID: PAT_MRT3847_30337C.1
aagctattagtgatggaacagtcaatatggttgataaggtatatatggttatcttcatggatttgaggcttgatgttcaactttctatgtatttatgagactattgtgacagttttttgagatgcaacgccatgatgctctgaaagctcttgatatatacaggagggttgggcaccaggctgagagactgtcagagttttatgaaatatgccgtaatcttgacattggacggggagagaagtttattaaagttgagcaggttggttggatcttatatcatgcttgtttatgtcaaagacatttagcttgatttttcaatagttcttttgggaaacatatactaagtttattagttgatgatgtgaagccccctt

SEQ ID NO: 65695 - DNA, 123 bp, Glycine max
  Clone ID: PAT_MRT3847_30338C.1
aggaccaagaatgaagagcgaggagaatggctcccaggggtttaatcgttttggctgtgttatgcgtctcagcactgtcactgagtcgttgtcttgcgggggataatgggggtgttagcaact

SEQ ID NO: 65696 - DNA, 552 bp, Glycine max
  Clone ID: PAT_MRT3847_30339C.1
gcacgagattgactaaagaaatcatgtaaaaactttcgttgaatgaataagtaattaaagagggataaaaaaggtttacaattacaaaacaaagcttacaaaataagaaaatatgtaataattaagtaaaaggaaagaatgttcaagttattcactcttaagaatgaaggcaaaattaaaatggacttagatcttcttttaagactttgctatatgcacggatcaactttttgaatcatagaaaaattatatgttaaattatttattttctctctatagttttatgatttgtacattttagtctttatagtttcacgattcgtaccttttaatctctataattgaaagtgggttttttagtccctatgatttacattttaattctcttttagttcctataatttaaaaatggtatttttagtccttataatttgtattttaattctcttttaatctctataaaaatttactttaaaattataaaaattaaaaaatataaatgatgaaattacatgcaaaaatgaataattaaaccaaaattatatatcggct

SEQ ID NO: 65697 - DNA, 713 bp, Glycine max
  Clone ID: PAT_MRT3847_3033C.1
ccacgcgtgcgtaaaaaacactgtttctcttctctgtacctccccctatatattcctccccctttattattagagcacagaaagaatttctgtgcctgttttgattagaagggaggagggagaagaagaagaagggagggaatagaaattaacccagtgtttgatcaatttgtatggttcaagattgaacacaaaaaatggcggttactactcgcactctatctgccacagaaaagaaacactggtggcttaccaaccgaaagattgtcgagaaatacattaaggatgcaaggagcttaatagcgacgcaagatcagagcgagatagcttcggctctgaaccttgtagatgcggcactggcgatttctccgaggtttgaccaagcgcttgagctgagagcgagggcgttgctgtatttgcggcggttcaaggaggttgcggatatgcttcaggactacattccgagcctgagaatgggaaacgatgactcatcatcgtcttcttcttcttcttcttcttctgacacctcttctcagcagctttcgagggagggagtgaagcttctctcttcttcctcggagtctccggtgagggatcatagtttcaagtgcttctctgtgtctgacctcaagaagaaggtgatggcagggctgtgtaaaacttgcgacaaggaagggcaatggagatacttgggtgttgggtgaagcatgctg

SEQ ID NO: 65698 - DNA, 215 bp, Glycine max
  Clone ID: PAT_MRT3847_30340C.1
ggcgccctttactgattccactctagtcagtatatacgggcgccatttgaaggtgcaggcggtgatgaatatggcggacatgccatggaacagaggcgttacctttactcacgcaaatatgatcacaggcctgagagaactctgatacaagaccaacagcgctcatcataccggggtgaaataaaacgccaaatagagcctgagatattactgat

SEQ ID NO: 65699 - DNA, 1691 bp, Glycine max
  Clone ID: PAT_MRT3847_30341C.1
actcgctcactctagaattttttccctctcacactcccccttcttattcattcctattccttctttctcttccaattccaaatcacaacccttcgttttccctctctagaatcttcttctccattcaattcctactccttttttcctctctgtccctctctctctccctctctcatggcttccgatctcgaagcaaaagccaaagaggccttcgtcgaagaccacttcgaactcgccgtggaccttctctctcaggccattcatctcgaacccaacaaagccgaattctacgccgaccgcgcccaagccaacatcaaactcaacaacttcactgaggctgtggctgatgctaacaaagcaattgaattgaatccttctctaccaaaagcatatttgcggaaaggtactgcttgcatgaagcttgaggaatatgaaactgcaaaggctgctctggaggtgggtgcatcattgtctccagacaactcaaggtttgctactttgatcaaagaatgtgataagctcattgcagaagaatcttataccccacctattatagaggaaaaggccacaacagaagatgttactccaaaagatgttcagcaacaagatgatcttctagagaagccaacagttacagtgactaaacctaaatataggcatgaattctaccagaaacatgatcaggtggttgtgaccatatttgcaaagaaaatcccaaaggaaagcattactgttgacttcggtgaacaaatactaagtgttagtattaatgtcacaggagaagacacatatgtttttcaacctcgcttatttggaaagatcataccttccaattgtcaatatgaagttttgtccaccaaaattgaaattcgtcttgcaaaagcagaacctattcactggacatctctagaattcaccagagatagcgttgttcaacagagggttagtgctttgtcagttactggaggtgaaaaacctacttatccatcctcaaaacgctgcgaaaatacgacagaaggggaagctcaagtcaagaaagaggggaaagatgaaaagcttgatggcgatgctgcattgaacaaatttttccgcgaaatatatcaagatgcagatgaggatacaagaagagcaatgaaaaagtcatttgttgagtctaatgggacagttctgtctacaaactggaaagaagtgggaacaaagaaggtagagggaagtcctcctgatggcatggagttgaagaaatgggaatattaagacattttctggatcagtgttgcatatatttttatgtgggattattatacttcgtttactttttttttttggttagttaactactgaactgaagatactattttctttattttttttttaatgttcatgaggtgttgtgtccgtcttcgctagaacctgaattcatggttgttggttgaggacaaggctcttcactttggtgaatataattcatggttgttggcaaaaaaaaaaaaaaaaaaaaaaaaaccttaatttaaaataggttcatagtgtaagtttcatcatattatagattattgttaaagtatttagttgctgttgtagtttttctatatccctaagacaggttgatgctagagttttttagtattttgtgcatgtaatgccgacgcagcctagttcttgtgtttgcaactttctgttttactgtccaa

SEQ ID NO: 65700 - DNA, 1265 bp, Glycine max
  unsure (1)..(1265): unsure at all n locations
  Clone ID: PAT_MRT3847_30342C.1
tgatgtggttgttgatctcgcaggaggttgaagataagctcgttaaatcccttagccaattgagattgcgcctcaaccaagttccataaatctgcccttttccagaattgtgataaaaacgtgccattcattctccagactgttaggacagtagcaacaatggtgtggacaatttacaccttttcgaatcagcctttgcctagtgggaagacacccacgaagtgctctccagaggaaacgttttatcttgggaggaatattaagattccatacttccctccaatctccataggctttgaggtgatcactatcaagaatagaatccataatacattgataagctgagcgtacagtgtacttaccattggggtgaatttccaaataagattatcacgtgcatgaggatttagcagtggagttgccttggcagctttgatatcatcttagcttagaatattgtcaataatgtccatcctcctggtttgtgtatcatggtctatgatatcactgacttgaagattctcaaggccaattgaggcggtagtggaaataagagcattttctacagattttagccaatgttcttcccagaaattgatggattgaccattatcctgtctcatccacttcaaacctcctcttgcaataacccatgaagcaaagatactacccatacatgacttaaattattgcccaatttggcattcgaaaattcctctttaggaaattatttagctttgaaaactttataaatcataatatcttggttggtttgtagattccaaccttgcttccctagcaagattaaatcagtgaaggtgtctaaagtccatacttccatgctcctttttaatacatagtttgtcccaacttaaccaattgatgtcttttcttgattgagtttttgaacccatcaaaagttgttcatcattttttggagctcatcttcaagagttacagggagaaggaagatactcatacaataggttgaaatgaattcacctaccaatttgatgaggatttcttttcccgcttttgacaaatacttcaaggacaagtgactgatgcgcttccaaattttatcctttataaatccaaaaatcttcttcttcttctttccaatgatggatgggagacccaaatatttgcctatgccaatactttccccaaggtgggtggagatgctttgtctatgagggcatggagtattggagttgaaaaaaatttcatgacttttgaaagttnatgatttggcccgaggtttt

SEQ ID NO: 65701 - DNA, 1312 bp, Glycine max
  Clone ID: PAT_MRT3847_30343C.1
aattcggctcgaggtatataaatcgatgcctttgctcaggaactatgattacgttgcaggcctgcaacattgaggaagatggtttatttgtttttgatttgcatagtgatggcagtggccaaaggtttgtgcttcttgtattgtattactgaaaagagctgtaagctttgtaattaagcacgtacttactcttactgcatgtaggcacttgaatgctgccattagagaaaacgagtcaaataatccattggattcaaatggttctgtttttggctttcctcccaaccggtccccatattcatgcattcaaatgaatgggaaagaagtcttttgctttgctgtaagatgtgtaccacaatcaattgaatttgcccttggaaaggctggtctcccggcatctagcattgattggttacttctacaccagttacacaaaatgatctagtataaaataaaattctagcattttattgggatgcgcaaaattgtgttttttttacgttggcttatgatctgtgcaataaatattttcttcttttagttcattaaaccattatcctaaagggcactggttagcattacccttgtttttatcctttacttgctaaagtagctggcatcaggttaatttgtatgctcatttcctagtaaaaagaatgtgaaagtgaaatgtaaattaaaaaggtggaaaacctgatctatcctttatatcaagcaattcattagctgcacatgtgtgttatactattactttgctgagtggtaagatcaactttatgattgaaaacagaataccattttagttactatgggaattgcatgacatgcttgataatatattggagaaaggcaaaattaaggttgcatacttgcacttagggtgccttaattcatataagtgcaggcaaacaagaggattatcgatgcagttgccgctcggttagaactcccctcagaacgggtgatatcaaatttggctaataatagtaacacaagtgcagcttccattcctttgactttggatgaagcagttcgaagcggtaaagttaagccagggcaaactattgcaactgctggctttggcgcgggtcttacttggggttcggcaattgttcgttggggctaaatgcttttccttcactgcagaatcactactagagaagaatttcagttccaagtgtagctttcttacacatatgtgtagaaaatggggtttggggaatttgcaaaaggatggatatgaataacattcagcactgcctcaacttgtcatattctttttgtcttcaatttacattctccttgctcttct

SEQ ID NO: 65702 - DNA, 420 bp, Glycine max
  Clone ID: PAT_MRT3847_30344C.1
ttttttttttttttttttggtttttttttttttttttttttttttttttttttttttttttttttttttttttttttttttttttttttttttgggggaaaaggggcccttttttttttaaacccccaaaaaaaaaaacaacatggggaagttttttacatgatttgggaaccccccgctaaaacaacaaaaggggaagttgggccccctttttaaacccttttttttacattaaaataaaaggggccccctttattttttgaaagggaaaggacctcttgatttttccccaggggattagaaactttaaaggcccttttttcccctttggggcccccaagaaaaaccccccattggtccccaaagacccaaaaaatggggaacccccgcctaaaaaatttctttcccgggggtgttttg

SEQ ID NO: 65703 - DNA, 1472 bp, Glycine max
  unsure (1)..(1472): unsure at all n locations
  Clone ID: PAT_MRT3847_30345C.1
ccggaactcccggngtcgaccccactnctgtccgttcctttctctctctctccctctataaaggcaacaaaggtctcttgcttaaaatcggaatttttttttagacacaaatcacttgtagactgctaatgtctgtttgagttgagttgtgcactcccctgaaaatccttttcaaaaggcaacttcttttttccactcctataatctccaattcattttcttttttcttttgggggggcttcactttttaattttttaatctccaaggcctacaataggggatgccactagccttatagagtggcggtttttgtttatctagctattcttgttatgtgcaaatggtagtagctcaaggtcctatatatatgtgtatgtgtgtgcacttgttgtgacttcttcaacaactgaagcagggtgttacaactgtcttaaagtctcttttttgggagcaccaatggctttgttcatagtggttcttgttgttgttgccttggtgctctgtttttgcactgctctcttgaagtggaatgaagtgaggtataggaggaaaggtttgcctcaaggcacaatggggtggcctgtttttggggagacaactgaatttcttaagcaaggtccaaacttcatgaagaacaagagagcaaggtatggcagttttttcaaatcccacatcctgtgtcctaccattgtatccatggatccagagcttaatagatacatactcatgaatgaagcaaaagggcttgttccagggtacccacaatccatgttagatattttatgcacacacaatattgcagccgttcatggctccactcacaagtacatgagaggagcacttctttaatcattagccccaccttgatcagagaacctgctttacccaaaattgatgagttcatgaacaccaaaaaaggctaaaaccagcataatttaatgacaacttgcaaaatgcagggtaacagtctagagtcacaaagccacttcttatatttggaggagggcccagncaatgtccagggaaggagttggggatagcagaaatttccactttcttacactactttgtaaccagatacaggtgagagagggtttatttgtttacctattcaaacgtccatcacttcaaaaatttgtttgttcgatgttattactaatcctgcatattaacaaaccactggtttgtctgttttgaaaatcgaatgtaataaacacatgcagtttctgacatgtgatatttaatgtttcattgcaggtgggaagaaataggaggagataaactgatgaaatttcctagagttgtggcaccaaatggactgcacataagggtctcgtctaactaactaggctttgtgcatgtacagtaatgagatatgagatataggaatagtagggggttttattttttgtatgataatatgttctaacaaagtagaaaagtcaatgaaattagcttcttttttctcctc

SEQ ID NO: 65704 - DNA, 271 bp, Glycine max
  unsure (1)..(271): unsure at all n locations
  Clone ID: PAT_MRT3847_30346C.1
gtccaccctnacaaaaaaaaaaggagaannnnagggcgcagtttatagcccaaacgccccaaacgcagccaaacaagaaggcatagagagagacagaaagcgaaagaaacctaacacaatggcgcccaacgaacgcagctggtgctggagccaccgagcccacagcggccagaagaaacactaagcgacccaaggatacaaagcagactcagcaagaacagccagcgcgtaagccaaatggcacgccacgagcggacatagcggcatactt

SEQ ID NO: 65705 - DNA, 488 bp, Glycine max
  Clone ID: PAT_MRT3847_30347C.1
gcagcaaatctcaagctgtcaacgccaaatacgttgtcgcacctattctattctttgttgggttgctgatcttgatttgcatctatttaagagtaaggaagccaacaaagcattttgagagtgaaaccatggttgatgacgaaattaaactagtcgtgtcatcacagtttgactttgacaccataagagtcgctacgaacaacttctctgatgcaaacaagcttggacaaggtggatttggacctgtttacaaggggacactcttcaataaacaagaagtagcaatcaaaaggttatctagcaactcttgccaaggaaatattgaattcaagaatgaagtgatactaatgtccaggcttcagcaccgaaatttagttaggctccttggtttttgttatgaaagcgaagaacggctccttgtctatgagtttcttcccaataaaagtcttgacaagatcatatttgatcccatcgagcgtgcacatttg

SEQ ID NO: 65706 - DNA, 264 bp, Glycine max
  unsure (1)..(264): unsure at all n locations
  Clone ID: PAT_MRT3847_30348C.1
ctaatagctgaacgggagaaaactattcctacattggttggcattgaatgtcccacggatgataaacttactcatccacaactattgacaaacctaagactcgctccttcactattctccctatggattataatcttgaggaccgncaaaagcttcataaaaatgagaggttcattatgattaacacggacaaacttagtcgccaagattgaatcatcccatactccatgtaatgcactgctatgatcaaaaaattactgagaa

SEQ ID NO: 65707 - DNA, 406 bp, Glycine max
  unsure (1)..(406): unsure at all n locations
  Clone ID: PAT_MRT3847_30349C.1
tcgaggcgaacactctccataaaggcgcctccatcgatatctgaccattcacacatcgttctttcttacttctacctatacctggcacaaagggctaatctgaaccgcgcgaggatcgtggttcacctactaagtactccctcagngatcaccttatagccccacaagtcgaagttcctatcagtgtaaacaccaatgatcaccaggcatcctgttgctcatactccctctacactattcctcaaactcttaaatattagcgacttgtcctgatacctcttttctagccctcgccattaaaatataatagcttcaaatgggccattattggtaagcagaactcgacatgcgacatgaacctgaatctaggttacagtgcccaactactctctaacctagaccccac

SEQ ID NO: 65708 - DNA, 2440 bp, Glycine max
  Clone ID: PAT_MRT3847_3034C.1
cggtccggaattcccggtgtcgacccacgcgtccgcatataggttgtttgtgagggagaatctggggtgtgttgccattgccagctatgaattagaaggatgaaagctttcccaggagggtcaaagctgtcaaattttaatttcaaggctttttttttttttttttccccttccctgtgtttcaccttatagctacatttacacgaaatccacatactaaacacccatataatccttcacttgttcttcctctctattccgttgccgtattctttctctcaggcggaaaaaaaaaaactgtttctcttctctgtacctccccctatatattcctccccctttattattagagcacagaaagaatttctgtgcctgttttgattagaagggaggagggagaagaagaataagaagggagcgagaatagaaatcaaccccgtgtttgatcaattttatggtccaagattgaacataaaaaatggcggttactactcacactctatctgccacagaaaagaaacactggtggcttaccaaccgaaagattgttgagaaatacattaaggatgcaaggagcttaatagcgacgcaagatcagagcgagatagcttcggctctgaaccttctagatgcggctctggcgatttctccgaggtttgaccaagcgcttgagttgagagcaagggcgttgctctatttgcggcggttcaaggaggttgctgatatgcttcaggactacattccgagcctgagaatgggaaacgatgactcatcatcgtcttcttctgacagctctcagcaactttcgagggagggagtgaagcttctctcttcttcctcggagtctccggtgagggatcatagtttcaagtgcttctctgtgtctgacctcaagaagaaggtcatggcagggctgtgtaaaacttgcgacaaggaagggcaatggagatacttggtgttgggtgaagcatgctgccacctaggcctaatggaggatgcaatggttcttcttcaaacagggaaacgcattgcaagcgcggcattccggcgcgagagtgtgtgctggtctgaagacagcttttatgttaccaatatacccttctccggagattccacaaacgcgccaccctcaactccgccgcgaacccttctcgcggactccgagagcgtggcccaactcctcggccacattaagttcctcctccgccgccgcgccgccgcactcgccgccctcgacgccgggctctactccgaggccatccgccacttctcgaaaatcgtcgacggccggcgcagcgcgccgcagagcttcctcgccgaatgctacatgcaccgcgcctccgcgcaccgttccgcagggcgaatcgccgagtcaattgccgattgcaaccgcaccctcgcattggaccccacttgcatccaagcactcgaaacaagagcttcactcttcgaaacaattcgctgtttaccagattctcttcacgatctcgaacacttaaagcttctctacaattcaatcttgcgtgatcgcaagcttcctggtcctgcgtggaagcgccacaacgtgcgctacagagaaattccagggaaactttgctccctcactattaaaattcaggaacttaaacagaggttggcttctggtgaaactggaaatgttgattactatgctttgattggtgtccgacgaggttgttcccggtcggagttggagagggcacacttgttgctttccttgaggcataagcctgataaggcaactgggttcatcgaaaggtgcgagcttgcagatgagcgtgatgttgagtctgttaaagaaagggtgaaaatgtcttcgttgttgttatatagattggttcagaagggttacactaatgtgatgggtaatattatggatgaggaagctgctgagaagcagagaaagaaggctgctttgcaagctcttgaagcacagaaagagaaagccaatgaagctgctgctgagttgaataaggtcgttgagagtaatagtactcaaatgtctcaaaataggtctatggtgtcttcttctacggtgaatccggcggtgtttcagggtgttttctgccgtgatcttacggtggtggggaacttgctttctcaggcggggtttaaccgatccatgccggtgaagtatgaagctttgagctgttgattgaatcgaagttggtcggaaatggaaatgtttggtggggggctgttggagatggtaccagcagagggaatctctggttcgttcgttcacttttgttgtacaaattatgcaaaggaaaaaaaaagaaaaaatatttagactgccggaaaattttgtcaccttttccttattttatctttcattagccatccttttatttctatctctctatcagatgtgtacagattatcagtactgaatgaagactctacttttggaaaaaggctc

SEQ ID NO: 65709 - DNA, 210 bp, Glycine max
  unsure (1)..(210): unsure at all n locations
  Clone ID: PAT_MRT3847_30350C.1
aagcagggaaggaatacacttttttttgttatcgaaggaatacgtttttaaatacagataaaatatatgtaataaaattgaaaggagatactacatttancaacagaaganctggcggggggggtgcgggaaaccttaggatgaaacggtggagctgaactgggaggggggtggggcgcgcgtgcggggtggttgcgggggagggggggg

SEQ ID NO: 65710 - DNA, 311 bp, Glycine max
  unsure (1)..(311): unsure at all n locations
  Clone ID: PAT_MRT3847_30351C.1
cgattttgtgtatatgcaatggcttggagacaagatagggcaagatatgaatgaaaagtagtgatcgcaacaatttatgatcaacctaaagggtcctactgctatgtgtacctgatccagagtaacctacgcaaccatgcatgatactaactctactattaacaaacctaatttaaattcaatagtcaacgttatacaatgntgtcgattttgaaatcactctcttgatccagcttaatctgattgtaacacatactcgtttaggcagctatcattgtacccaatattcttggtatctatagccctatcca

SEQ ID NO: 65711 - DNA, 565 bp, Glycine max
  Clone ID: PAT_MRT3847_30352C.1
gcggcactactcgactaaatgtattaagatgaatgtgaaaactattaattgattaaacataggaggagggattacgacataaggggttctattgtcgaatgaatatgctcactgagacacacatgtggggcagccacatgctatgccttctcctactccttatctctcacttggtggcgactctggccaaaatacacacactggcacctgtaacatcttcagctgctaacacatttgtcaaaatttgacgcgccacccttttacacttatttctatctcttataaatctcccatttgtgtatacgagggtacctcaagaatctcttgtatttttggagatataacacctcaatgataccctaatcttataacattacttccatgaaagagcattctttaacatgatagagttccatgaaaaagaggtccttatttcctataaaccaagaaaattgctttacccctaacaccaatgaaacatattgacaagtcatcaataaggctaagactatatgatctaaacatcctgtcactgaccagcgtggaacgttccttatgatgagag

SEQ ID NO: 65712 - DNA, 384 bp, Glycine max
  Clone ID: PAT_MRT3847_30353C.1
gaaaaatacactattatttacaattgttaaatacactcgatagttcttcaattcacggggtgcatttaaaaagcgggcgatgctcaccaatcatatcctccactccacccttgtccttcacatcaccttcttctccttcagcttctacctcgacttccaacattttttcaatacactctattcttccaatccttattccatatctcaccacaattccacagcttaccactaaactttttgacctactcactacattttatcatcacttattaaccttccttacatattctatcatcctttaatctttaaattttatacatttttcactcaattgacacttatttttttatcttttctccctacatcttaagccttcaatttacc

SEQ ID NO: 65713 - DNA, 291 bp, Glycine max
  Clone ID: PAT_MRT3847_30354C.1
gacccctacatcctccctctttccctccgcatccccttcacatacttctcgcaactctcgttggacacttggtgcatccgatatcatgttcaccaaccccgtcttttcccgcttctttggtgctggacaagtgatagagactgtccgaggtggaggggtgtttcagcccgcgatagataaggctgtcaagctgttacaagatggcgaatggatacatatcttcccagaaggcaaggtcaatcagcacgccatgaaccctccaggagggctctttcggttcaaatggggcgt

SEQ ID NO: 65714 - DNA, 292 bp, Glycine max
  Clone ID: PAT_MRT3847_30355C.1
gggaaaaaccgaaaaaggaaacccttttattaaaacttaaaatcacagcattcaaaataatgcaataccccacactttttaaaaagccttattactataaacgataaaagctttgcccaaataaaattaccctggaggcaaatttttcactcacctttagcttagttatctttcaatgcgcccaaattattctttggcacatttctgtgttagccccggagggcaaccccaaggggaggatcatccctaaggattaatttctcaatttttacacccttgaaattctggtttt

SEQ ID NO: 65715 - DNA, 637 bp, Glycine max
  unsure (1)..(637): unsure at all n locations
  Clone ID: PAT_MRT3847_30356C.1
ggctcgagcagcttctctcttccttcacttattctttcattttcctcaaatctttcaaacacccacttccccattttcttctgcatcttcacaaatcacttcttcaaatcttcccaacaaaaaaaaaaaaactcattttctatcatacagttttgggatctatcactctatccacggtttctggaatgaaactttccttgtttggtgttgttgttcttcatcttcatcatgtttaacataccttcatctctttctgaaatctgtctcacccactttcgccttgccatctccaccgcggatccatggcccttctcatgaatctcatgtcataaaaaccttttcctactgtttttcataccactgaaaagtcccacattgcttagaaaactctacaaagaacagtttataaaccttccgctgagaagataaactgctgatctttcgtgtagaccatgcaattcaggctcggcaggcgcgttgtaagggttgctaaatgggtcttcggtcgggtcaggatcaaaacccgacccgtgtaccaccaccgtctcggttctggttcgtcccatttgagaaatcccataataaagcttctcaccctggggcanaaattaaagagaggagcgaagacctatgccgg

SEQ ID NO: 65716 - DNA, 625 bp, Glycine max
  unsure (1)..(625): unsure at all n locations
  Clone ID: PAT_MRT3847_30357C.1
tttgtttttttgtttttcgtttgataanangatgcaatttcggtcgggttgctggaggaggagtttttttcggggtcagtgcttttggcccaaagggggggcccagatgggccccggggggtaatttgggatcggcaaaaaaggaaccccgaccccggggcggcatgaaaagggggggggggccctcccagcgaaaagggggggggtaacctggggccaggggggggcccggggcccccggaaaaaaaaagaagtgccccgttccgccccaaaaaacacaggccttgaggtttgaagggggggaagggggaaacccggtcctgttaaggggggggacccaacccccccaaacaggggggggatttgggggggggggggggcccccacccgggtaaacccggccccgggggggggaacccccgggcccggggggggggggccccgcttccccccgggggggagggggcggaaagaccccccccggagaaggggcccccccaaaaaaacccgcgggccggggggggccccccgggaataccgggccgggccccgggggggagccaactttcccctagggggggggggtaaaaggcggggggaacgccggggaaggggttcccccggg

SEQ ID NO: 65717 - DNA, 223 bp, Glycine max
  Clone ID: PAT_MRT3847_30358C.1
agggggaataacataagaatcaaaattcaaggtatttgaccacacaatcatcataagatcaagggaggtttagatactaaacaacccagaccatataggataatttcaaggcgtcctggccatctaaattgcccaacccatcggcacctaaatatccaagatctaattcaaatccgaccgaaaaaagaaacaccatacacattctacacatcaaaactccgct

SEQ ID NO: 65718 - DNA, 316 bp, Glycine max
  Clone ID: PAT_MRT3847_30359C.1
ggtcttctggctagctcatgcctagcacattccccaggtgctgcacccacacaaccacccactacgaccccatcaccaccaccaccgagatcagcacctgcaccagcacccaccccgccagcaacaccaccaccagcaacaccaccaccagcaacaccaccaccagcagcagcaactccttcaccagcaacatcaccaccagcaacaacaccaacgccaacaccaacagctgcacctacacctgctttttctcctgcaaccttaccagtcccttccgctagttctccaccagcaccaggcacacccggacccgttc

SEQ ID NO: 65719 - DNA, 560 bp, Glycine max
  unsure (1)..(560): unsure at all n locations
  Clone ID: PAT_MRT3847_3035C.1
ggtggttttgtgttttttttttccatcntctagatttcacacaacaattgaatttatggncatacagaggtaaacgaaaaatgccacttcggcgtgggagctaaataaaagcctcacttaaggcaattggctagctgatggtaaaaacaagcacatagctattttccgaaatttctagggggccaaaaaaaaaaaaaactaatggcatgtgtaacaggctttatgatttaatatttacccaaaaaaaaataaagctgggcatatnaaccggaggggaggaaagcccagctggtggggcatnattaaggagcactgaccaaacgtgaagggagcgtgcttncgaaaagggggagccttttagtcccgtgcttgtagcgcggggaaaaacctgactgaccttgaagaaaaaccgcgctttttttgcatgatgacgggttccatccgggagatgcgattaaagaggggncttaacgaaggttgcttagggaaaaccgccaaaacctactttccgcgctgacggaaagcnacaacaaataataaggaaatacggttttcccctc

SEQ ID NO: 65720 - DNA, 468 bp, Glycine max
  unsure (1)..(468): unsure at all n locations
  Clone ID: PAT_MRT3847_30360C.1
actgagcatcgttctcgatctcgatcgaactgtccaaggtcctgtcactgtgttattaaattaggtgtagtaattcatctgtgtgttcttggtctggtgtgtaagtttcagtgttcagttggtgtttgtcctgattgttcgtgtgtatgttcgttgtcgtggtttaacacatggtacagatccctgctgcccacgagtgagccaaagtatgggtcgcgggtaatagagccaccaagtatagccaccaccgcgaccggcgaggagcagccagcgttgttgtattggttgtgtgttcacntgcagacgtaaggcccagtggcatacaaccaccattaccgtcacttcaaggataatgttgcaaccacatgcagatagcgaaaagaggggtaccacgggtgcaaccatggatgatgccaatgttaaggtagcgagggcgatttaagatgcagtaaacacgatagcatgaga

SEQ ID NO: 65721 - DNA, 267 bp, Glycine max
  unsure (1)..(267): unsure at all n locations
  Clone ID: PAT_MRT3847_30361C.1
gcngcantncaagcantncaaagcatcgggagnctactaanaatgaacttgttaggcatactcttggantcaaattacaaggaatctgaanaangtagnggtggnggantgggtttaagggaagtngtggangaagtgaagctattttacttggcagggcnngaagcaantgcanaattgcnggtcnggaacattgttgttattaagccggcatccanantggcaagcnanggctagggaagnngttttccaagtgttcgggantna

SEQ ID NO: 65722 - DNA, 109 bp, Glycine max
  Clone ID: PAT_MRT3847_30362C.1
catacataatgattaagaccccacgcaaggggtaggcggagtgattttcgttcaagaaaaaccacattcaaagggatgacactacatttgacgcatatgtgggtggaaa

SEQ ID NO: 65723 - DNA, 284 bp, Glycine max
  Clone ID: PAT_MRT3847_30363C.1
tccatccagtgtttgtgaattattaagtacacttcttattgcactgtgaattcgttgtaatccattgattaaaactggcttacgctgcttactagtctcacaattgcaaaaaatattggtgtgctaatcacagacattgtgatgacatgatagagccacatactattgatgtatcatgattgctctttatgaagatataagaaacactgaatctgactttcttttatcaaatggaggatgagatgtgtcctatggaatggggaaaaatggataaaatacccagc

SEQ ID NO: 65724 - DNA, 392 bp, Glycine max
  Clone ID: PAT_MRT3847_30364C.1
cccggacttcctccccctcctccgcgcctcctccctcccctaccagctcaccgccccggccgtcgcgctcctcctcgtcttccgcaccgaggcctcctactcccgcttcgtcgaggggaaaaaggcctggaccatcgtcatcgccggcaacttcgccatcaagcacgcgctcttacactacatcattgccttccccattgcgcttaagtgccacgtgctgtatggttcggatgttaggagtgatcttcagcatttgctagaagtggatgatctggcggtggtcatgaattcgaagcaccggcctcgctgcattattgagtttatatcgcagagcatccgtttactgaaattggaggagtctagaagaaatgccctggaatcaaagatgactt

SEQ ID NO: 65725 - DNA, 215 bp, Glycine max
  Clone ID: PAT_MRT3847_30365C.1
ggttctgctgacagtcgtttatacaagaagaagtgatgcatttgctgctcataaacgctatgataatgtacttatggatggtaagcccatgaagattgatattggtggtaccaattcaggggtgccgataagtgctcgggtgaatgtgactgaggcgaatgggagcaggaagacgactttgtaatgacgcctagaggtggccaagctggaggtgg

SEQ ID NO: 65726 - DNA, 1118 bp, Glycine max
  Clone ID: PAT_MRT3847_30366C.1
gaacgaaaggaaaatttatatttgaccaaaataaaaagaaaggaagatttattgcaacaaaagaaaaagagaatgcgacactaaggcacactttaacatgtaacagaaacaagcttcaaacgaaaggcgatcctacgttcctcaacataacaccattacatgtaagaaaaagcacgtccaaaacacattactacaatgaaacaatagtatgttaaataccatacaccataataaactagctaaaagtttataccattcaacaaaggatgtattagatgagaatcgtcagcatcaaatatgcattttgcctgacggaagcacaagtatcagaaaaatcctccacggaaaaatcaagccgcacgtttaagggtccacacacatcaacacaaacatttactcaatacacatgtcagtatctcctccgggggctcctggaacgccgttcacgaggtggtctagcattctttcttctgactgactcattaataggtccactgctgaaggcccaatcaacataaatggtttgggtaagaagctcagatccattcaaattctctattgcatttcgagcttcttcagcacgctcatattcaatcagtgcataacctttgacaaaaccagtgcggcgatcgagattcaaatgcaggttcttaatctctccatattcaccaaaggcattttgcaaatcgtcctcttgcgcttcctcgtgcacgccggtgaccagaatgatccatccctcaatggatctctgagggccagggccgccctcggcggtgagagagtcgaagtcggtgccggagaggcgagtgttgcggttggcgtcagtgtcctggcggaatccgcggcccttggtcttcttcggggcggagagagaggaagtggcggcgggggtgatggcggatttgagcttaggttgaggtggagaagcgtcggcgtcggcgtcgggggcgccgtcctcgtccatcaagtcatcgtcctcaggctcgaaatccaaggcttctccgtcggccgcgcttccttgcatctctgcttctcaacacacaacaaacacaacactaacacagagtcagggtataattgaatttcgatattagtgtgtgaaagagaaccattttatc

SEQ ID NO: 65727 - DNA, 377 bp, Glycine max
  Clone ID: PAT_MRT3847_30367C.1
aaaaaataagaggggtattacatttggcaagggctaggggtactattttaaaaggttaaccttggtatttttttccatcaggtcaaaaattaggggagatgggggactaccattccttgggcattttgaccttaacaaactccttgttgtttatttgggcggcgccatcgacattagcctctggaatcattttagcaacctctctatcagggggcattcctcccaagggtggtcatcacatgggggggctcatgaacataaatgaacccattttggtccttggcaaacactcggaacgccttttttagcttcttctaagaatcaggggccttcatttttttagccatgggggtcaaaaacccagggaaggtaagggg

SEQ ID NO: 65728 - DNA, 271 bp, Glycine max
  Clone ID: PAT_MRT3847_30368C.1
aataatctcgctgggttttggcaagggagaaagatacttacggggtacaaaggcactaaacagtgcaaatcgcagattacagggggcaagaagcttgcccggtaccaagaggctactacactcatggacacacactgaactcagggtcacattatagagccccaatcgaatcataacgctccaactaagtctatcccgctgacctctggtttacacgcatatccccagtcttttcacaaatgctcaaaaccatatggagtgctgtgaacca

SEQ ID NO: 65729 - DNA, 1434 bp, Glycine max
  Clone ID: PAT_MRT3847_30369C.1
gggaccgaagggaaattttttttttgcccaaaataaaaagaagggaagtttttttgcaacaaaaaaaaaagaaaatgcgaccctagggcacactttaacatgtaacaaaaacaagtttaaaacgaagggggatcctacgttcctaaacataacacctttacttgtaagaaaaagcccgtccaaaacacttttctacaatgaaacaattgtttgttaaatcccatcccccataataaactagctaaaagtttatcccattcaacaaaggatgttttaaatgagaatcgccagcatcaaatatgctttttgcctgacggaagcacaagtttcaaaaaattcctccagggaaaaatcaagccgcacgtttaagggtccccccacaacagaaacaagcttcaaacgaaaggcgatcctacgttcctcaacataataccattacatgtaagaaaaagcatgtccaaaacacattactacaatgaaacaatagtatgttaaataccatacaccataataaactagctaaaagtttataccattcaacaaaggatgtattagatgagaattgtcagcatcaaatatgtattttgcctgacggaagcacaagtatcagaaaaatcctccacagctatagcaatagaaaccaagccgctcacttacgggttcacacacatcaacacaaacatttactcactacacatgtcaatatctcctccgggggctcctggaacgccgttcacgaggtggtctagcattctttcttctgactgactcgttaataggtccactgctgaaggcccagtcaacataaatggtttgggtaagaagctcagatccattcaaattctctattgcatttcgagcttcctcagcacgctcatattcaatcaacgcataacctttgacaaaaccagtgcggcgatcaagattcaaatgcaggttcttaatctctccatattcaccaaaggtgttttgcaaatcgtcttcttgcgcttcctcgtgcacgccggtgaccagaatgatccatccttcaatggatctttgagggccagggccgccctcggtggtgagagagtcgaagtcggagccggagaggcgagtgtcacggttggcgtcggtgtcctgccggaatccgcgacccttggtctttttgggggcggcggcggcggtgatggcggatttgagcttaggttgaggcggagaagcgtcggcgtcgggggcgccgtcctcgtccatcaagtcatcgtcctcaggctcgaaatccaaggcttcaccgtcagctgcgcttccttgcatctctgcctctctctgcttctcaacacacgaaactaacacagggtcagggtataattgaatttcgatattagttcacgcttagtgtgtgaaagagaacgtgagagagaacccttttatgttgtcatttatccggacgcgtgg

SEQ ID NO: 65730 - DNA, 337 bp, Glycine max
  Clone ID: PAT_MRT3847_3036C.1
ctactaaacaatttggttatccctgtctttatacatgataaattttaaaggtataccaaaacctgtactagttactggggctttgttgttcaagtggacaagacaccccaaaatgccctattttcttcctctgttcaaggccaactaaccctagttccctctagttaatgcaaaaaacaacagaaatttttgactgtatgcaaaacttttaccccgcaccagaattcccgcctgcgatgacaatggggaatcaattgattctgcctgcttgacatgcccgcaagatctaaagacgcgcctccgactgaatcaaagaaaaattgcttcgtgctgatgg

SEQ ID NO: 65731 - DNA, 284 bp, Glycine max
  Clone ID: PAT_MRT3847_30370C.1
ggttgaagctccaaaactgacagcatctgataatctgttggtttatttcacttttcattaaatgaacattgatgagagaagatgccacttacccaagctttagagaatccctagtggaagattatatgataaactttcagtcctgacataacactagggcatttctagagtgtcattgctaaaacctcacggaacagacgcagccaaggtctgtgttcagcacttggtctctgttgttacgtaaaataataagcatttaaaatagtttacagatatttttgacc

SEQ ID NO: 65732 - DNA, 253 bp, Glycine max
  Clone ID: PAT_MRT3847_30371C.1
tggggatgatccgagtcaggttcgccggtacccgtaagtgaactgattccaggggctgactgctcactggtcggccgccgccctttttttttatgggaaaaaaaaatacatggtaaattaataaaatagttatgctgcaccaaaaactacacttaatcagacatgaccatccactgcagccgggataaggggacccatttctgagactaactatcacagagaccacagctatataatgccactacagagctac

SEQ ID NO: 65733 - DNA, 301 bp, Glycine max
  unsure (1)..(301): unsure at all n locations
  Clone ID: PAT_MRT3847_30372C.1
ncgtacgtnanctcggaattcggntcgagtncaattgtaagagggagctanttggtntaaggtngtanacnnangccnaatgannncncggnnnncacggattgggcttgttaatgngcatggncnaccatgtngtnggtagngnaccngnnntnatngtgngnanagcatctnactaaggtgntntngacagngtgtnaaacggnngggtngccagngtgcacgnttanncgnttacagngtgtnttactacatttggtgtctgggtcnagcattctnnncggcgtntgangatgncang

SEQ ID NO: 65734 - DNA, 474 bp, Glycine max
  Clone ID: PAT_MRT3847_30373C.1
gcaggaattcggcacgagtacactaccaagcccgagatcatcacctacaccactaagccaaaaatcgtgacttacaccaccaaacccgaaattatcacttacactaccaagccaaaaatcgtgacctacaccaccaagcccgagatcatcacctacaccactaagccaaaaatcgtgacttacaccaccaagcccgagatcatcacctacaccaccaagccccaggtcgtctcctacaccaccaagccccaacttctgacctacggcgtcgagccccaggaactcaacggtctgcccgtcgagctctcggaaggtctcgccaagaagtaaacgagctacgatttaggaacgggctactacaatatagaaaaaaaacagactttgaaataacaccgaaagtggctactggcctatttcttgtcaatttgagagtcacctgtactgcttagtggcccaaaacaatactgcatttct

SEQ ID NO: 65735 - DNA, 304 bp, Glycine max
  Clone ID: PAT_MRT3847_30374C.1
gactgccagagatcgagaaaacggggaaactatcgggattagtattgatcatggctattgcttgtattagaggttcgaacactgatctctctacttgttatactggccacatgctaaggagccttactgtcctgacaccattgattacataaaatttctggatgctgcagaagacataaatgacaatgatagtttcatggatgggaccttctttgtaaatagtgctgatatccttagtatatcagccatgctgcttctgaaaggtgcatacacgaggactcactatgtttcatcttatgaagca

SEQ ID NO: 65736 - DNA, 6523 bp, Glycine max
  unsure (1)..(6523): unsure at all n locations
  Clone ID: PAT_MRT3847_30375C.1
aaaacagacctttctttctcttgtttagattttttttgtggtgtcaccaggcctctctgtcttcttgtttctcgtaaaaggggaaaaagggggaaattttctttaagtaaagaaccctaatctttctctttccatctcaaatcgattcgattggagcgttttcagggcatcgatggagtgaaacaggagagagagagtccgtgttagatcagaaagaagagacagagacggcgccaccaatggcgggagcagataaagaattggaagagcaacttcttgaagccggtaacaagcttgtagatcctccttcgtcggtggaggagctcctcgcactcctagaacaagttgagagttgcctatcaagggttgaacagtccccgactgactctatgcaaaatgcactctctccatcattgaaagcattgattgcagacaaacttttaaggcactcagatgatgatgtcaaaattgcagttgcatcttgcatcagtgaaataacaagaatcactgcacctgaagctccttatgatgatgatcaaatgaaggatgtatttcaattaatagtgtcatcatttgaaaatctacatgataagttaagccgatcatatgcaaagatgatctcaattcttgaaactgttgcgaaagttagatcatgtgtggtaatgctggaccttgaatgtgataccctgattttggagatgtttcagcatttcttgaaagctataagggaacatcatccagaaaatgttttttcatccatggaaacaattatgacccttgttcttgaggaaagtgaagatatatccttagacctgctgtctccactcctgggaagcattaagaaagacaatgaggaagtttttccaatagcccagaaattgggggagagggtccttgaaagctgtgcaaccaagcttaaaccctacttggttcaagcagtgaaatccttgggtatatctgtggatgattatagtgcagtacttgcttcaatatgccaagatacatctgatgacttggagaaaaatgatacatgtgttactagtgagcatgtggaagataagagtgagtcagcaaaacaatcactggaggagtcaacacatgtggttaaaaaggattcaagggaagttacaccctctcaaccagaaaatactgatgtgaatatatctccaaagtcggtcatgagcaatggtgttgcatgtgttggagaagataatgttttagctgattccaagtccattaaaaaacaagaggatgctgattgttctaatcactctgaaggtttgaatatatctggtcatgaggtgcataatgatttggacactgaaaaagttgacactagtaaacaaaagccagaacaagctaccaagagacaacgaaagaaatcaagctcttcaactaaatcagcaaaaccttccaagggtcaagttgctgctaacgagaaggaaactgagaaaatgcttgactatgaaagcaacagcaagaaagttcccagttcccctcacgaggaccattctgttgaagcagcaggacctccagagaatgacaaaggaattgatgctaagatttcatcaccaaaggcatgcaatgatgaatctgaagttgttgcttctccaccaagtgagagcctctatgatgaaaatcattcaaagaaacttggacgaacaaaaaagaaagatggccctgtaaaagaagggactgcagaggatgtttcaaaggtgtcagctagtgattcagaagccaaacctgccaggcggtcagtgaaaaaggcacttggtcagaagtctgatgtgaaaaaaactagtgtggtagattcagtaaaaaaaggaagttgggctgcaaatgatgcagatgcaaaaaagcactcagccaagaaatttgatgaaaacaaaaagggtagtggtggatcctcttcaaggcagatggaggacaagaaaaagggaggtcgggggaaagctaactctgaagcagatgttgcaaaatcatctgctatggatgtggacaaggaaatggtttcttctccgacgtctggtacaaaatcaactaaagatggaaagtcagaggagactcccaagacaaatgtgaaaagggaacgcactccaggaaaagaaaatgagtctggtgtgaaggagtatggtgaaaaccttgtcggtttacgggtcaaagtttggtggcctaaggatcgtgagtttagacttcttaatctggacattttgctttgtgtacattgataattgcattatttgtattcacaattactgcatgtatctttgtgtaaaccttttccttgatgttatcgtggtcttgatgatttaatttattttgacagtttatatgttaaactgtcccttgtcataattacacaaattacttctaaattataattggtatcttttgtaaaatttagtgtcagaattgagaaagctttgacagtttgagaactagggtataccatcatgcaaattctatttatgatcagtttacctgtccattttgatgtaatagaaatatttactacatattttcactgacacataatctgttacaggttttacataggtgttattgattcttttgattctgccagaaagaagcacaaggttntgtatgatgatggtgatgaagaaacattaaatcttgtgaaggaaaaatggaaggtcattgaagctgaccagctcgaggtgtagaagaacaaagcttcccacctatctagtcctttctattgttgcactcatggttttttctttggtggaacttaaggtaataaaggaaaaaataagatagacagtagaaaacgctgtccactataaaggcttcccttcagacaggttcaaagcaagtggttcggatacacacagcgaatatattaaggattaaaatggtggaaaggctggagaagatggggattacagtgaaactggtgaaatacctgatctcaatcatgcgtcctgagaagctcacatgtccaaaatattcagactgactttatgagcagatcatttctcttgtgtttgctgggaggttttctagcagattccttccttggcagatacaagacaattggaatctttgcttcaatacaaacactgggtactgctacattagcaatctcaacaaaattgcacagggctacgtccaccaccttgccatgctaacaatgacagctgcaaacaagccaacggattccaaatgggaatcttgtacttgtcactgtaccttattgcactaggaactggtggcctcaagtccaatgtatcaggattaggttctgaccaattcgatgagaaagtatgagaaggagaaaatctcatatggcttattttttcaacatggtttttcttcttcatcagttttcggaactctggcagctgtcacagtacttgtctatctgcaagatgaagtgagtcgcagcttggcgtatggaatatgttctggttctatgatcatagccattatcgtgttcttatcaggaactaaaagatacagagacaagtctagtttggggagccccattgttcacattttcgaagttattgctgcaacaatataaaaaagaaagatgcaactcccatacaatgttggtgctttgtatgaggacactcctgaggtttcaagaataaatcacaccgaacagttccgtttttttaagaaagctgccattgtggcagaagatgattttgagacaaatttatgtggttctggaccaaacccatggaaattatgctcactaacaagggtagaggaggtgaaaatgatggtgagacttctgccagtgtgggccacaaccatcatattttggaccatttacgcacagttgatcaccttttcagttgagcaagcctccaccatggaaaggaatattgggagtttccaaatccctgcaggctctgtcacagtcttttttgtggctgcaatactaatcactctggctgtctatgaccgactcatcatgcccctttggaaaaagtggaacggcaaaccaggtttcactgacctacaaaggatagcaattgggcttgtattttccatttttggaatggcggctgcttctgtatgcgagaggaaacggttatccgttgcaaaaagtgttagtggcggcaaccaagcaacaacaacacttcctataagcgttttccttctgatcccacagttcttcttggtgggttctggtgaagcattcatatacacaggccaacttgatttcttcataacacggtcaccaaaaggaatgaaaaccatgagcactggtctctttctcacaactttgtctctcggtttcttcttcagcagtttccttgtctcggttgttaagaaagttactgggacaagagatgggcaagggtggctagcagacagcataaacaagggcaggctcgatttgttctatgcactgcttaccatacttagtttcgttaactttgcagcatttgcggtatgtgcagtttggttcaaacctaagaaacctaaacaaccagctgctatgcaaatggggccagttaatgggtccacagcagaggaaaagtgctgaaggctgaatagtttttaggatttggggattatatatatagtctttatacccattattaatgctatcatatggttttgctgctttgtagataggctgttatgtgtatgtatccgaagaatggattgattttgtgtttctcttcctgatattatagaataatgtttgggttggcatctttgtacgcataattaagcgtgtaacatagtttctggtctgttacacttttctcaatcatcaggctttctttttaatttgttatttaattttttcttcctttcgccagagtgatcaaatgaatttaggccgtgtatcaggcagctgttcatcatttgtggtaattatctcgttgttgctggcattattttctccaattgttagttaggctagtttagttgtagtatgggttaatatctctagttacttttcattgtttctaaactagatgaatgttatttgaaggcaacgcctgaaaaaatttgatggtcaatcctaaagtaatggagcagcagcatccaatagatcaaagggtgcatccacaaagtctagccagaagtccaaggatggcaacaaatccaaagattccaaggctaatagcaaatctgaggatggagttaatagaaaatctaaggacagcactcctaaaaatggtagcagtaaatctattgttgctgctaaaaaaatgagtaataaatccaaaaatactgatacttccaagacaagtgaatcaaaggatgatggcagtatcaaacaaaaaccttctgccaagtttaagcatgaaactccaaaaagtggaaaatccaagcaagaaaccccaaaggctgccatttccaaaggaaaacctgtcaaaagtggtggaaagactgatgttaatggtaccagcaaagcaagatctggtttattgaagagaaaagattccgagaatgagaactctgatgtttcagctggagagagagaagatgccaagggcaagagtgcaaattcatcaaaggcaaaaggaagtgagctgaagagtggaaagaagcgtcggaaaacctagaagtgggtatttgtcccccctgtttattccttaactgggtgcttctcttctgctcatcagtttactcttcttcagagcatttaattttttcttcctatggctaatgaatttaagctgtgtatgaggtagctgttcatcgttttgtggtaattatccagttggtaatagcattgttatctttagttattggttaggccagtttagttgtagtatcggttagtatctttagttattctagactagatgtatgttatttaaaggcaacactggatattatttggctagcaaccttcatttaaagaatgcttgctacttacaacttacccaattaacgtttttgcattgctcagtgttgagctgtggttgatttgttgagacaatacgttcagcataattgatgtggtggaagctattgtagttggcctgttgagtacttattggaatgaggtgaataatgatttggacattgaaaaagttcgcaatagtaaccaaaaaacagaaaaagctaccaagaaaccacgaaagaaatcaagctcttcaattaaattgacaaaaccttccaagggtcaagttgctgctaatgagaaggaaactgagaaaatgctcgactgtgaaagcaacagcaagatagttcacagttcccctcccgaggaccattctgttgaagctgcaggaccttcagagaatgacaaagggattgatgctaagatttcgtcgccaatggcatgcaatgatgattccgaagttgttgcttctccaccaagtgagagcctctgtgatgaaaatcattctaagaaacttggacgaacaaaaaagaaagatggccctgtaaaagaagggactgcagaggatgtttcaaaggtgacagctagtgattcagaagccaaacctgccaggcggtcagtgaaaaaggcacttggtcagaaggctgatgtgaaaaaaactagtgtcgtagtttcagt

SEQ ID NO: 65737 - DNA, 357 bp, Glycine max
  Clone ID: PAT_MRT3847_30376C.1
gtggagacacaacagaataagttccttctgttatggggtatcagagctcacattattgttggtgaaggaataacgaaagtcgttctccactgggggggggaccttttgtaggtcctaggtggacttttctgcttcaccctcttttctggcgacctgtatctgctttctgatggagctttttcccgctttccgacaccttctctaaccattgttgccggccgctggtgactctttgactgtcacctacctcttctggtgcgccgtccgccgatctacacaaaccttgttggcttgtcaccattggaattgtcatgcgctcctacatgcctctttttcagaaagccaaatagcgcactt

SEQ ID NO: 65738 - DNA, 736 bp, Glycine max
  Clone ID: PAT_MRT3847_30377C.1
atatgccaagatgtatctgatgacctggagaaaaatgatacatgtgttactagtgagcatgtggaagataagagtgagtcagcgaaacaatcactggaggagtcaacacattttgatcaggtggttaaaaaggattcaagggaagttacatcctctcagcaagaaaatcctgatgatgtgaataaatctccaaagtcagtcatgagcaatgttgttgcatgtgttgaagataatgctttagctcattccgagtccattaaaaaacaagaggatgctgattgttctaatcactctgaagaaaaagctaccaagaaaccacgaaagaaatcaagctcttcaattaaattgacaaaaccttccaagggtcaagttgctgctaatgagaaggaaactgagaaaatgctcgactgtgaaagcaacagcaagatagttcacagttcccctcccgaggaccattctgttgaagctgcaggaccttcagagaatgacaaagggattgatgctaagatttcgtcgccaatggcatgcaatgatgattccgaagttgttgcttctccaccaagtgagagcctctgtgatgaaaatcattctaagaaacttggacgaacaaaaaagaaagatggccctgtaaaagaagggactgcagaggatgtttcaaaggtgacagctagtgattcagaagccaaacctgccagccggtcagtgaaaaaagcacttggtcagaaagctgatgtga

SEQ ID NO: 65739 - DNA, 752 bp, Glycine max
  unsure (1)..(752): unsure at all n locations
  Clone ID: PAT_MRT3847_30378C.1
tttttaaaaaaaaaagactgaaaaagcctttcatttcacaatttcaccaccaagaagtttggtgcattctaaccgatcgacaaaaaggatcattcatgataattctttcaacccaaagtaagaaaacaaaacagattgaatgaaagataaaagaaaagcctaaattatatacaaacgatatataaataggggaaactgaatcctttgtctttatcctctatgatatatcataatatcatgttatatatatgatatgtaattaaaaaacccgccaaaaaaaatgtcttctgatgccaaatcatgaagaggctatttgatgggcttgggcttggacctggccattagggaagggcaatattctgggcttgcttagagacaattccactgggatttgagaagaagcattgttgttaactatagaagtttggttggttgtggtggaatttgtggctaccctttcacaagaggggcacatggtgagagtggtggctggaagctgcatgtaaaaaggttgagaagattttagggctctgagttcttgaagttccttttgcaacctcctattctcttctgttagggtctcacagcatctcttcaaatactcacaatccacttctgtttgcttcaactttgtcctggcccttctgttctgaaaccaaacctccacttgacgannncngagattcaactgtttagcnnnagcaagtttttgcnnnnnattgagagtggtgtgttctttgaaactttcttcg

SEQ ID NO: 65740 - DNA, 2514 bp, Glycine max
  Clone ID: PAT_MRT3847_30379C.1
aaacagacctttctttctcttgtttagattttttttgtggtgtcaccagacccgtgggtcttcttgtttctcgtaaaaggggaaaaagggggaaattttctttaagtaaagaaccctaatctttctctttccatctcaaatcgattcgattggaggttttcagggcatcgatggagtgaaacagaagagagtgtgtggcgcgattccgtgttagatcagaaagaagagagactcagagacggcaccaccaaatccaatggcgggagcagataaagaattggaagaacaacttctcgaagccggtaacaagcttgtagatcctccttcgtcagtggaggagctcctcgcactcctagaacaagtagagagttgcctgtcaagggttgaacagtccccgactgactctatgcaaaatgcactctctccatcattgaaagcattgattgcagaaaaacttttaaggcactcagatgatgatgtcaaaattgcagttgcatcttgcatcagtgaaataactagaatcactgcacctgaagctccttatgatgatgattctatgcaggatgtctttcaattaattgtatcttcatttgaaaatctacatgataagttaagccaatcatatgcaaagaggacctcaattcttgaaactgttgcgaaagttagatcatgtgtgttaatgctggaccttgaatgtgataccctgattttggagatgtttcagcatttctttaaaaatgtaaggtaagactatagtaaagttcagcatcatcatggcttcaaatattttgtcgtctataattctacctcaaacatgatttgattactttgatcttttactacattgtctgtgcgaactagttaaacgtgtttttattttttcgtgcttagtaacttttaaacatgtactgatattgttgtatttgtgtattgtattgaacccaatactcatacctttacctgtgcaacatggtttttacatatataccaatgcattattttggacagttggaattgcttactgtgtgggggcatggttctaaccagctccattataaaatttcagggaacatcatccagaaaatgtggaaaagaagaaaaaggagaagaaagacacagatggcaaaacagatgctaaaaagcattcagcaaagaaattagatgaaaacaaaaagggtagtggtggaccctcttcaaggcagatggaggagaagaaaaaggttaggcagggcaaagctaactctgaaacagatgtagcaaagtcatctgctctggatgtggacaaggaaatggtttcttccctgcggtctggtacaaagtcaactaaaaatgaaaattctgaggagactcccaagacaaatgtgaaaaggaaacacagttcaggaaaagaaaatgagtctaatgcgaaggaatatggtcaaaaccttgtaggtttacgggtcaaagtttggtggcctgatgatcgtgagttttacaaaggtgttattgattcttttgattctgccaaaaagaagcacaaggtcttgtatgatgatggtgatgaagaaacattaaatcttgtgaaggaaaaatggaaggtcattgaagctgactcagatgcagatgaggaagaacgaagtgatcgtgcagatcttgatgtttccactgatatgccactgaagaagaaagggaaaacaagtgctggtgaatcaaccaagcaaggaaagatggatgcttcttccaaaagcagtggagcagcagcatccaatagatcaaagggtgcatccacgaagtctagccagaagtccaaagatggcaacaaatccaaagattccaaggctaatagcaaatctgaggataaagttagtagaaaatctaaggacggcactcctaaaagtggtagcagtaaatctattgttgctgctaaaaaaatgagtaataaattaaaaaatacggatacttcaagtgaatcaaaggatgatgacagcagcaagccaaaaccccctgccaagtctaagcacgaaaccctaaaaagtggaaaatccaagcaagaaacaccgaagactgccctttcaaaagtaaaacatgtcaaaagtggtggaaagactgatgttaatggtacgagcaaggtgaaatctggtttatcgaagagaaaatattttgagaatgagaactcagctgtttgacagcaggggaggtagaagatgccaaggccaagacttcgtgttcatcaaagtcccaaggaagtgggtacttattctcgctgtttattccttacctgtcttgtgcttacagcatttaatttttttttcctttcgccagagtgatcaaatgaatttaggccgtgtatcaggcagctgttcatcatttgtggtaattatctcgttgttgctggcattattttctccaattgttagttaggctagtttagttgtagtatgggttaatatctctagttacttttcattgtttttaaactagatgaatgttatttgaaggcaacgcctgaaaatatttggctggcaatcttccttt

SEQ ID NO: 65741 - DNA, 403 bp, Glycine max
  Clone ID: PAT_MRT3847_3037C.1
gttctttcaatgtggagacattttgttggagatctcgactttgaagtttctaagatgacttctccctacattaaatgtacagtctctttcttcatagcattaggaaacttggctgatgagcacctcccaaacacccgggttggaggaaccattctgcgtggtgatctatcggcaaattctttgacagagggcaatgttacagcaagtggagatttacagtgcactcctcgtatcataggaatgataaacatggaggccacagaaggtattcctgacaatacaggtttagcatctgcctgtgctatgaatagtccctttagggggcgtgccagctatgttattctacaccattcgccctgtggactgggaatatttgtaccctgcttgcccaacaccaacgact

SEQ ID NO: 65742 - DNA, 1196 bp, Glycine max
  unsure (1)..(1196): unsure at all n locations
  Clone ID: PAT_MRT3847_30380C.1
ggctcgagggctgcttctgtatgcgagaggaaactgttatccgttgcaaaaagtgttagtggcggcaaccaagcaacaacaacacttcctataagcgttttccttctgaacccaccaagaagaactgtggagctgactcagatgcagatgaggaagaacgaagtgatcgtgcagatcttgatgtttccactgatatgtcactgaagaagaaagggaaagcaagtgctggtgaatcaaccaagcaaggaaagatggatgcttcttccaaaagcggtggagcagcagcatccaatggatcaaagggtgcatccacgaagtctagccagaaggccaaagatggcaacaaatccaaaggttccaaggctaatagcaaatctgaggataaagttagtagaaaatctaaggacggcactcctaaaagtggtagcagtaaatctattgttgctgctaaaaaaatgagtaataaattaaaaaatacggatacttccaagacaagtgaatcaaaggatgatgacagcagcaaaccaaaaccctctgccaagtctaagcacgaaaccccaaaaagtggaaatccaagcaagaaacaccaagactgcccctttcaaaagtaaaacatctcaaaagtggtggaaagactgatgtaaatggtaagagcaaggtgaaatctggttcatcgaagagaaaatattctgagaatgagaactcagatgtttgagcagggnaggtagaagatgccaaggacaagacttcgtgttcatcanagtcacaaggaaagtgatcaaatgaatttaggccgtgtatcaggcagctgttcatcatttgtggcaacgcctgaaaatatttggctggcaatcttcatttaacgaatgcattggcactccctgatgctgacaggttgactaatgactacttactatctaccgaattaacgtttttggattgcttagtgctttagatgtggttgttgttttgttgagaaatacgtacagcacaattgatgtagtggaagctattgaagttggccagttggggggccactaagtggaaggcaatctttgtacggtttgtttggtttcgatttgcatgtttgagcgttcaatattagctagtacatagatatcaacgcaatattacttcctgagaatctttagtgagttaacgtattccataatttacattgatccatttgttttcct

SEQ ID NO: 65743 - DNA, 194 bp, Glycine max
  unsure (1)..(194): unsure at all n locations
  Clone ID: PAT_MRT3847_30381C.1
actctttctcctcttacgagccttttctttcagtccattgattcnntnnnttcggtgtcatcggaacctagctggaccctgatcttcttcttcacaccgccctagaacaagatgattgtctgcgttgcctttctcggtcaccataacaatcccctgttcatacagaactttacggaagccgatgattctcttaa

SEQ ID NO: 65744 - DNA, 1213 bp, Glycine max
  Clone ID: PAT_MRT3847_30382C.1
aagtggccaccttgtcccaagccattgtccatgcgccatttgcagtcttcacttcttgtcctaagcctcaacacaaacacaaactcaaacacacacactctttcttctatcttctcccaatttgagttgagattctgagagtaacaatcaaagtttggaaaaaaaaaaagttttgagggaagaaaagaccaatatgctgggtgtggccactcttactttgggttcatccaccacaatggtggctcagaaccatgctcaacaacatgccaccactcttgcctcagccaatggaaacagaaggcacagtgtttccaacaggactcactccttgcctatgagtttggtgtctcccaccaaccaaagtttcacctttctctcttcctttaaagaaccaacacatgcacgccccttcaccactgctgttgcatctgttgattctgaccagcttgattcatctgatcctcccaccaagaatgaagcctccaagtattattttcttgttgcaaatgcaaagtttatgttggatgaggaggagcatttccaagagcaattgtttgagcggcttcgtctctttggagagcgtaatcaagaacaggatttctggcttgtcattgagcctaagttcttggataagttttctaacattaccaagagattaaagagacctgctgttgctcttgtgtcaaccaatggtccctggatcacattcatgaagttgagactggaccgagttttatctgactgttttgaagctgagagtctagaagaagcattagctttcaatcctactgatctgaagtttgagaagcctgaaaaatgggtggcaccctatcctaaatatgaatctggatggtggaaacccttcttgccccctgttcagacagaggtgaagccttaagatattatttatccacactgtttcagtgcttggtattcttaaatcttctttttccaatggttattgttcaagtgcaactggatggtagttaaagttggctaaatttgcatccagttttgtttttttgggagttagtatgattatttaaagttgaggtgttgtccttaggatctaagttgtaggagttgtattttatgtctcacaaatgagttaagtataatagataattgttatgagattgatgttctcggtttctagaaatgtatgtgaactgtgaaggcccgcaacttattagatttttgtcttttgaatccc

SEQ ID NO: 65745 - DNA, 822 bp, Glycine max
  Clone ID: PAT_MRT3847_30383C.1
ccacgcgtccgcattttttttcctctcaaaaaccaaccttcatttctccttcttagttttctctctgtcactctgtctctctgtttttcattcatcgcaggaaaagaaagaaaggaagcaaaaaaccctaatctcccgaatagcgttggattggagcgttttcagggcatcaatggagtgaagcagatcaagaggaggaagagacgcagaaatggggtctactgataaagaattggaagagcagcttctcgaagccggtaacaagctcctagatcctccctcctcagcggaggagctcctcccactcctagaccaagttgagagttgcctatcaagggttgagcagtcacctatcgactccatgcaaaatgcactctctccatcattgaaagcattgattgcagacaaacttttaaggcactcagatgatgatgtcaaagttgcagtagcctcttgcatcagtgaaataacaagaatcactgcacctgaagctccttacgatgatgatcaaatgaaggaggtctttcaattaatagtatcttcgtttgaaaatctacatgataagttaagccaatcatatgcaaagaggacctcaattcttgaaactgttgcaaaagtcagatcatgtgtggtaatgctggaccttgaatgtgatgccctgattttggagatgtttcagcatttctttaaagctataagtgaacatcatccagaaaatgtgttttcatccatggaaacaattatgacccttgttctagaagaaagtgaagatatatccttagacctgctgtctccacttctggccagcattaagaagacatg

SEQ ID NO: 65746 - DNA, 782 bp, Glycine max
  Clone ID: PAT_MRT3847_30384C.1
ttcttgatgcctgcagcctaactgtgactgacttatgggcacatatttctcctgtgtttgctgggaggttttctagcagattccttccttggcagatacaagacaattggaatctttgcttcaatacaaacactggttagttacatcaattactagtgactacttttgtcataaaaattaagtcaaccttattggcatattcaattatataagagtgaattacaggcactcctcctgagttttgtttttattattacacctagtacctttttttatttttttactttactttgagcctgtggggattgatgaaatttttttactcctaagaggggatcaaacccccaaaaattaagagattttttgtttggttaaaaaaccgaaaagtatcatgtgtaaataagagcaaatgagagtccgtgtaatttaccctttgtttaaagtggaaagttttaactatatatgcatgtatggtgatttcagggtactgctacattagcaatctcaacaaaattgccagggctacgtccaccaccttgccatgctaacagtgacagctgcaaacaagccaacggattccaaatgggaatcttgtacttgtcactgtaccttattgcactaggaactggtggcctcaagtccagtgtttcaggatttggttctgaccaattcgatgagaaagatgagaaggagaaatcgcaaatggcctattttttcaacagggtttttcttcttcatcagttttggaactctggcagctgtcacagtacttgtctatctgc

SEQ ID NO: 65747 - DNA, 918 bp, Glycine max
  Clone ID: PAT_MRT3847_30385C.1
atgttttagctgactccaagtccattaaaaaacaagaggatgctgattgttctagtcactctgaaggtttgaatttatctggtcatgaggtgcataatgatctggaccctgaaaaagttgacactagtaaacaaaagccagagcaagctaccaagaggcagcgaaagaaatcaagctcttcaactaaatcagcaaaaccttccaaaggtcaagttgctgctaacgagaaggaaactgagaaaatgcttgactttgaaagcaacagcaagaaagttcccagttcctctcacgaggaccattcagctgaagcagcaggacctccagagaatgacaatggcattgatgctaagatttcatcaccaaaggcatgcaatgatgaatctgaagttgttgcttctccaccaagtgagagcttctctgatgaaaatcattcgaagaaaattgggcgaacaaaaaagaaagatggggatgctgagggtgtttcaaaggtgtctgaaggagctagtgattcagaagccaaacctgtcaggcgatccgtgaaaagggcacttggtcagaagtctgatgcgaaaaaaactaatgtggtggattcagtaaaaaaaggaagtgggacagcaaatgatgcagatgctaaaaagcacccagccaagaaattagatgaaaacaaaaagggtcgtgatggatcatcttcaagacagatggaggacaagaaaaagggcaggtgggggaaggctaactctgaagcaaatgtagtaaagtcatctgctatggatgtggacaaggaaatggtttcttctctgaggtctggtacaaagtcaactaaaaatgaaaattcagaggagactcccaagacaaatgtgaaaaggaaacgcagttcaggaaaagaaaatgaatctaatgcgaaggaatatggtcaaa

SEQ ID NO: 65748 - DNA, 186 bp, Glycine max
  Clone ID: PAT_MRT3847_30386C.1
cagctcgagcggctcgagcggctcgagcagagattacgtagttccatttcttggttccggtttcatatatcataacttgtagtgagtgaaagaaggaaggattgttggtgatcgatcatcgatcatcgatcatcgatggccgtctgcctaggctttttaagtgcgtggggtcgggcagttgccagg

SEQ ID NO: 65749 - DNA, 501 bp, Glycine max
  Clone ID: PAT_MRT3847_30387C.1
aaaacaatcaatcattttttatatagcactcaaacatgcaaatcgaaaccaaataaaccatataaagattacgttccgcttagtgtacgtattgtctcaataaatcaaccacagctcagcactgagcaatgcaaaaacgttaattgggtaagttgtaagtagcaaggattctttaaatgaaggttgctagccaaataatatccagtgttgcctttaaataacatacatctagtctagaataactaaagatactaaccgatactacaactaaactggcctaaccaataactaaagataacaatgctattaccaactggataattaccacaaaacgatgaacagctacctcatacacagcttaaattcattagccataggaagaaaaaattaaatgctctgaagaagagtaaactgatgagcagaagagaagcacccagttaaggaataaacaggggggacaaatacccacttctaggttttccgacgcttttttcactcttc

SEQ ID NO: 65750 - DNA, 184 bp, Glycine max
  Clone ID: PAT_MRT3847_30388C.1
aagtgaaattattcagaagagagagcgcttaataactatatagccaatccaaacatttctctaaacggttcctttttcccttcttcaaaaccctcccttctacgcctcttctactgcttcggtcttcgtcgtcaactcttcattaacccaagaccactgtcaatccttcagaaacctcatatct

SEQ ID NO: 65751 - DNA, 709 bp, Glycine max
  Clone ID: PAT_MRT3847_30389C.1
cggaattccccggtcgacccacgcgtccgccttcgaatacctattaatacataaaaattaacaatagaatacatattaaaactaacaaacctaatcttgaaatacctattaatactaactaacttaatctttttataatattaagaacataatacataaatatcatttaattaaaaaatacttaccggtaattatggaggagaaagagcacacgaaaattgaagaacaaagcaaaggatagcattggaggagaagctcaggaatttcggggaggagaagctttgtaagtttgaaatgtaagttcaagttgatgatgaagattttttttataggaaaaaatgcttaacgttcaacagctaacgttcaaaaaagcaacgtttaaaaacactgcatgcaagccctagctcctggaacactacaagcctaccccctgcacccctgcactcctgcacctctgcaattgggcacaagctgtctcgccaatgggataggcgagacctgctcacggggtgtgccaagtcagcatggttctcgccattgctgttggcggttcctacatggactgtgtctcacccgtaacaatggcggtaccctccagctcagcaacgttctcgcccgtaacaatggcggcaccctttcagctcagcaggcttctggctattgcagatgggcgggcaggtatgtggctgacccaggttacgacatgcat

SEQ ID NO: 65752 - DNA, 458 bp, Glycine max
  Clone ID: PAT_MRT3847_3038C.1
ggaacgcgtgactcgttggtggtgtcataacttgatccacaacacagatcatagaatcccacctctaactttctattctatatctagcaccagcactgtctggcccaagcatttatattatattcgaaaatgtacatacagggagtgggtgggagatagagagccactaagggattcagatcaagggaagctgttgatcggagggaattcatgggatacgacagatgacaaactggaggagcatttagggcactaccgccactggacgagcactctcgtggtcgggagaagaacaatggaaagccagagggctttggactaagcaggaccgcgagaactaaccttctcaatggggttttggaagacaaacatgcctttcacagcccagcggttgaagccggagaagactttgacagagaggaccaacaaaaaactgccacgtccagagggggtaaaca

SEQ ID NO: 65753 - DNA, 560 bp, Glycine max
  unsure (1)..(560): unsure at all n locations
  Clone ID: PAT_MRT3847_30390C.1
gctcgggatccgtgtatagcggcgcgctcgcgacgctataaccggacgcgtgggcgtgtacatgggtaccaccccggtatacacggacccagacttggtagcctaccatgttaccctatagcgagttgtattatgagctcgtaagtaaacatggctagtacgtggtttctgagcgaaattgctgtgaaatacacatggtgcacacacaattacaatcgcctaagcatanaagcgtaaatttctggcagtgtgctaatgatgtgagctaacgtcacattacattgcgtccgttctcactgcctcggtatccatgaatggaaacactgtactgccaccttgtattaatgaattaagccacacgcgcggtgagaggtactctcagtattgcgcgctacagtggcatttctttacaccactgagacttgcaatacttgattgcctttcaccgcctggtcctgagatagccgcagcaagctgtacacgctgggctgccttaacgggtgaaaattatggctgaacggggcctacagccgaatataacatgatctggctatggtata

SEQ ID NO: 65754 - DNA, 311 bp, Glycine max
  Clone ID: PAT_MRT3847_30391C.1
gacgaatactaccaagtgaaaaagcaattaactgagcatatatagcgtgtaagaaagtgagaaaaaaaatcttctgtacaaagaaaagggcaagtggggcaaccttgggggtcctggccctgtccttgttaccacttccagaaaaatgccccaataagcaagttttgagggacacaaaaactttctccagtcaagggtccctggaatttggaaccaaagggcttcctttggaagaattggttctgggttttaatggcatatcagttgggccttttggacccgtggaatttgatgaatccgatgggccaacc

SEQ ID NO: 65755 - DNA, 963 bp, Glycine max
  Clone ID: PAT_MRT3847_30392C.1
aagaagtggaattgcaactcaccatgtagattttcttcaacaacttttagataataaattaaacgaggatggagtcccaggcctaacagacagagagatcaaagataatatcttaactatgataattgcaggacaggacacgattgcaaatgcaatgacatggatgatcaaatttgtggatgagaatcgacaagtttttaatactcttatgaaggagcaacttaagactgagaagaatggctcaagaaattcgtatcttacactagaggcccttaatgagatgccatatgcttctaaggttgtaaaagaagcgttgaggaaggcatctgtggtacagtggttgcccagagtagcactcgaggactgtgtgattgaaggatttaaaatcaagaaagggtggaacattaacatcgatgctagatcgatacaccatgatccaactgtgcacaaggatccggatgtgttcaatccttcaagatttccagcagagtcaaaaccatacagcttcttagcttttgggatgggaggaaggacgtgcctagggaagaacatggctaaagccatgatgttggtgtttctccaccgcttcatcaccaattacaagtggaaggtgattgattctgactcaagtattcagaaacgagcgctttttacaaaacttaagagtggttatcctgtacgtttgatatctaagaaggatgccaaaaacaaaaccatgtgacaagataaagatttacatttcccagcaattggaatgagggcttgaaggttttacccgtagattcagggttggctattttttgtttttgttttgagtggcaagtatttaactcacatgtcctaagatattgcaattactagttatctattataagcatatttcgcatgtattaatatttttaccctgtcattgtaaagacattaagtggaaaagttaaggtattagtggtgattcgggtctaa

SEQ ID NO: 65756 - DNA, 114 bp, Glycine max
  Clone ID: PAT_MRT3847_30393C.1
tttaacaacaaaggcggatcgaaatcatacccggccgggaaaaattcacagattttccaaatttcacgtgattggtggattctctacagcttgaaagacactacacccaaactc

SEQ ID NO: 65757 - DNA, 713 bp, Glycine max
  Clone ID: PAT_MRT3847_30394C.1
ggttggaattttgaaatttaaacgtgttattttactgtttcttttttgtttgagggaatttgcacacacacgatatgaaaaaacaacatgaagtaatatgaatatcaatgagactggaatggagtctgaatttggtgaattatactcttcaatcctgatttgtaatcagggtaaagtagttgcacccccagttccctcttcattcgagcattacacactctcttctcaccccttggattcttcgcatttggccactctttctgcttctgctctacactttgtaacttcaaccctggccatttcttctccaccaatttcattgcatattcaaatacttcttccctcggagcagggtcatcatcaacgatattgtaaacttccctggggggaggtgcaagaacagtagccatcagtgcctggcagatgtcatcaacatgtattctggatgtatattttcggttttttctccttttctgaccttctgacattggcttctgcttgattattgtatcaacagcacttctaccggggccatagatacctcctagtcgaaataaaagcggtgagatcccaagattgtgagccaaatttgaccagccttcttcagaagctaaccttaatttagccaacccactttccggggtttgttggataatcctcatccaccaattcaccatcacagtctccatagacactagttgaagacaagtaac

SEQ ID NO: 65758 - DNA, 315 bp, Glycine max
  unsure (1)..(315): unsure at all n locations
  Clone ID: PAT_MRT3847_30395C.1
tgagtcaagatacctttgggggagtaaatagcttgctgaactactgaaaaaggaggattgagggaaaaaatggtcataatatgcgtgccacaagggattgcacatgtttctttgctaaccttnnnacaagtggtcacaacctnnnnacaagtttannattacatgtactttaacttcaaaactttcacatatactacagctaccactgatgcatatatccctgtacactaatgtggttgttggcactgaaagtaaggcnnncctgattgaaaaataagcaggcttgcccaccatcatgtccatctatttgctgca

SEQ ID NO: 65759 - DNA, 442 bp, Glycine max
  Clone ID: PAT_MRT3847_30396C.1
aacgctcagaagctctcttctctctctaaccacacatcgccggaagctgtttaccggcgcagtggctggccggccatgggtggcggcgccgccgcgtcggaaaaagaaactcctccctttttttaaaaaacaacatgttttgattcccttttttcccctagttccaaaaccaacggtaattttttgaaaaccaacactgataaagccaaaatcaacccttgaaccttagaaaaaaggtgaactacctttgttcttaggttatcgtttaagcttcagaaaacggttacagcttgggttgtgtgggtgtgggtgtttgacgcagtgcttgtggttggtggtgtttggtgtgggcttgggcgttggtggtggttttgatgtaggttttaggccgcgttagtgagtgggttaccgtgtttgccgtgtccgtggttcacggaggaag

SEQ ID NO: 65760 - DNA, 327 bp, Glycine max
  Clone ID: PAT_MRT3847_30397C.1
ccacgcgtccgaaaaaaaaaaaaaaaaaaaaaaaaaaaaaggaaaggaaaaaaaaaaaaagacgaaaaaaaaaaaaaaacaaacataaaaaacgaataaaaaaatgggggctctttttttaggtgccctactttcaatcccctgcaccgggcctttatatttcttctactgggcatacaaaaaccctggcggggggggggggatttacattgcatcccctttcactcccttggggtgccccaaattagacaagtcccgaaccgcccccctttcccaaggggggggcaaactgaaaagggcccggcccactccctttaccaacagatt

SEQ ID NO: 65761 - DNA, 345 bp, Glycine max
  unsure (1)..(345): unsure at all n locations
  Clone ID: PAT_MRT3847_30398C.1
naaaanaaaagagggagaggacacgaaaaanagaaaaaaataaataaaagaaggaacaggacaaacaaaacataaaaaagaaataaacagaaacgcgcgaaaaataaaataactaggacccggggccctggaagagcccgccggggtccctcctaaaggggtggccgattttagccccccggtttttttcttggccctcgccctttctgggggggggggttttcctttccgggtccgcaacgattcccccctaaaacccacaggggtggccccctgggttcccttatgaggccctaacctctcatcattgactttgctttccttgccctttttccagtcggggaa

SEQ ID NO: 65762 - DNA, 728 bp, Glycine max
  Clone ID: PAT_MRT3847_30399C.1
ctattttgttattgtcgcggagatgaattttacggacttactccacccccaacacattcctttcatcagaccatatcaaatgagtccccaaacaacaatgcctaaacctaaccatcaaaacaagcagtctcaaaacaaagaaggggaattgaaaggacagattgaaagagagtttgacaggaaacagcatcagtcaatcatttcaatatcaatttatcatatggagccggagttttccccttgtgattttgttttcaacttttcaattccatcttgggagcctaatgccctttcaatgttttatttgtctgtaggaacaagaaagatcaactttaatgatttgttactactgaggagacctcaaagatcttaaaccagacatttgtaagtgatgaacaatattttgtctttgggaagatgcatggattctcccatgttgatggttttgtggaaataagcaactgcttggcggaaatgattaaatacgcagccaatgaaccgtctgccggtctcttctttatccaacatcacactcaaaatgcagtgccaaatgtcatcaaacttaagaacaacattattgacaagtctcacgaaacaactttgcagaccgaagatttggaggattccgtcgcaatggtgagatcaatgaaagagtgtggattccccatagctgatgagatgatcggagacataaaaaaatcactggttatcatgacagccagcatcca

SEQ ID NO: 65763 - DNA, 347 bp, Glycine max
  Clone ID: PAT_MRT3847_3039C.1
aattcattattttatcctttaacctcccaaaatattactgttttattacaatccaaatgactgcaatgatttatgggcggacataatagaaaagtctgatggagaaaataagtgtaactgtttttggcctttggtttttctatcacactctcacatcctagttacagggatcgtcatatgaaaaccaaaaggaaaaaatattattaatgtaatcctaaagcaagttgtaatacacgagtatatactgtcacgaaatttttggcaaactaagctggttaggcctttcaaggggaagcttctccatctttacagaaacaaaggtaacttcatcattcaactctgccatt

SEQ ID NO: 65764 - DNA, 1314 bp, Glycine max
  unsure (1)..(1314): unsure at all n locations
  Clone ID: PAT_MRT3847_303C.1
gaacaacaagcataatcaaatccaaacttaataaagcgactgagctctctttttaacaaagtggggaatatcataatcagtaatttaaggaggtggtaataaagtagtggattaacagagatggttgctattccccttgattaattattcgcaagatgctactacataacaagtggagagtttgctagagcattagaattttcaaaattcagttattcagagcccctttgctctttaagtactccagagtctgatcataaatttcttcaattccatacttgaaactgaatccttctttgacaagcttttcggaagagattattaactttgcctttgagggacaatcatcgaattcagttggaattttatattgagggtatcgtttgctgagaaactttgcaagctcaggaacactagtattgtgagcacagcaaatgtatcgaccagaagccgattctttctccgccacaaatatttgtgctcggcaaatatcctccacatgagtgatggatattgaacctgatagcaactgcatacctttcagagcgtttatgaggaaatcattgcctgttatgagggacgctgccatgccaacacttgatgggatgtctgtagtgacagaaggaccagttgtgagagtaggtatcacagtgatgagatcaatgtgattttcttcagcaaatttccatgctgccttctctgctagtgctttggaggcaggataaccccaagtgggtggctttgcagtgctcaagtactcaacatcagtccagttgctttcatccataaccagatcagttcccttgagttggtttatggtcacagcagctgctgaagatgtcaagatgactcgtttgactccttttgctcgcacacatgcttttaacacattcaagacgcctgtgattgcaggcttgatcatgtcattctcaggatcttcagaagcaaagttcacaggtgtagcaagctggaagacaagttcacagcctgctataggagcatcaaaatctttttcaccagttaaatctgctccaaatatgttcaattcgcccaaactttgcagtgccaaaaggtgaggtatttttttagtattatctgggtctctaactgtggtattgacagcataacccttttcaagcaactgcttgatcaacaaagaggccataaatccactccctccaatcacacatgccttctttccagttggcttgatagtggccatgttttcactctctcacacacttcaaaggataaaatgaaacttactttatagacccccttctgtcgtcttctcgcagccgtacgnacgcgtgg

SEQ ID NO: 65765 - DNA, 366 bp, Glycine max
  Clone ID: PAT_MRT3847_30400C.1
aatgaattaaaacgtttctagcattatttacccacttttaccatagaagaatggaaggtacctatgaaccatagggtaaggaaccgggggggggctattcgaattcaaaatatttaaaaaggagggggggcttcaaagcctcatcaagggggatgggaaaggggctaaggtggcctggaagggaaaatcaaaccattagttaaggtggcttggagaataaaatcaaggacccggggtccaaaatatcaattttaaggttggcttggaccaaaacgcgttcccccaagttcaagggaatttgaaaaagctggtaaccagttgggtccaaagcatggacaggcttcttaaaaattttaaatggaaagg

SEQ ID NO: 65766 - DNA, 301 bp, Glycine max
  Clone ID: PAT_MRT3847_30401C.1
atacatttagtggttatcctcctgagatcgttaagaaaatgccaaaaaaagaaccccaagcaatcatgagctcttgaagaaaatctaaaatatattcctccacctgcttgagctgtatatataccgcttccagatattttctctgccgtttacctcctgcaaggagctggtgtactgatatctgcatctaaattatgggagcagcttgcgcttgttctacaaaatggagctggcggaggagtatattatagatgttcttacagagctcatcatggcttcggggttattggttatgggtata

SEQ ID NO: 65767 - DNA, 807 bp, Glycine max
  Clone ID: PAT_MRT3847_30402C.1
tgaatagaaataaatgatagttgaaataaagagaagaaaatatttttctccctctcattagttataggggtagtaggatagcatttatttatccagaatacagtaacagaacaagctacatcacgaaggaagaatcacattttcggaaaaactacactacctcttgaacatttgcaaacaagtagcaccggattatttcataatccaaaccttaaatcaaacagttcatgagagattcaataagctaaaaaaaaaaggtaagagcagcagtcaaagcagttagaaatctgcatgtatgaaacattacaaaatatcattattattggatacaacacacaaattacaagttactatattagaacacaacatatatagtgtgatacggttaaaaggttttttaaattgtggccactttcttgacattgtggaaaattaaatatgatcaatacagtcacaattgcaacagcaatgcatggacacacataaaccttaatgttgtagataaaatggtggtcgaagaccgttctttaaaaccttggacacaaaacaattttagctgtgtatcaactttgcccttgcgtgaccttgtgaaatctgaaactgttcagttatacctaaatgagccattaaaaaccagacatgggtaagcaattcgccacctctgctaagctgcttggcatgatgaaaccctctacactggcttgctgcatgacacaacatctccacccaaacacgacttatcatttcccatttctgttctttcgaccatttcttttcctcttctaaagactttatcgacctcgagcc

SEQ ID NO: 65768 - DNA, 379 bp, Glycine max
  Clone ID: PAT_MRT3847_30403C.1
tccgataagacaacacaacggaacgatactgatacgcctgatggaaacagaaagagtatgggcaccatacaaggcgaggtgcaactctaatggcaagtgcctgaatcattgatataacccatactgctcgcaatgaacatggaattcattcttgtatactatttcaacatactcaaacacaaagcgactcttaataccaatggttgcactcttagacaatgttccaattaagtgaaaatgacagataaattctttaagagcggacacataaatcagacttgactcgctgcatttaatccatttcaagtgaagcatgcacattgggagttgtaatgattataacacacactctttattgtcatgcatacatacaatgttt

SEQ ID NO: 65769 - DNA, 365 bp, Glycine max
  Clone ID: PAT_MRT3847_30404C.1
ggcggcgaatcacttataaatggcgcccaagcaggacccgaagcctaaattccaggagggcgagcgagtgctgtgctttcatgggcctcttctttatgaagcaaagtgtgtaaaggttgccataaaggacaaacaagtgaagtattttatccattacagtggctggaataaaaattgggatgaatgggtgccagaaagcagagtgctcaaatacgtggacgccaatttgcagaaacagcgggaacttcaaaaggccaaccaggaacaatatgcagagggcaagatgagaggggctgctccagggaagaagacatccggtctgcaacagaaaaatgttgaagtgaaaacaaaatagaacaaacaga

SEQ ID NO: 65770 - DNA, 259 bp, Glycine max
  unsure (1)..(259): unsure at all n locations
  Clone ID: PAT_MRT3847_30405C.1
gcgcactttatttcctttaactatatatattgatgtgtggatagttgatgttagctaccaaaatcacgtaaganttgtatagtcaaatttatcaacccagaaactgtgtaactctcttaacctctcaagtttatattttcagacatgcccttcatacttgttacttcaatactttacattgtattttagtctcccaataaaatgttgcacttgcatgcttgatttatgatgctatacatataatagagatttgttttat

SEQ ID NO: 65771 - DNA, 297 bp, Glycine max
  Clone ID: PAT_MRT3847_30406C.1
ctatcaagattaacttttactccctcttctacataaatacgggaatgttctttatcatttgacatttactgtcatagcacttctaatattaactcaaactttatatactgcgatgaactgcatttccatgtttcagtgaaacatcttttatttaactgctacactctgcctgtactccatgataaatatgaagatcatctagactcttttggctcgaagtcaattgccaacattaacaaccaatattcaaatgatgatgctaatgtgttgatcaagatacccatacgacctttaaaa

SEQ ID NO: 65772 - DNA, 260 bp, Glycine max
  Clone ID: PAT_MRT3847_30407C.1
tcgtaaaaaaacacctcagggtgatggagcaaataaacaagcatttggtgttgtaacaaaaactagacatggttgtagcatcgtaatatcacgtgccccaggtgcagtcgccacaattcaacctcatggtgatgcctcgaatatcatagatctttgctacagtcacttacagactagatatcggtcatgcagactacactgcgactatatgctcattgtacaactgaactcctactcgattctgctatgacataacgaca

SEQ ID NO: 65773 - DNA, 1046 bp, Glycine max
  Clone ID: PAT_MRT3847_30408C.1
ctctgcttcctttcagagttcgctagagaagcttctgaagatgggaagagctccttgttgctctaaagtagggttgcatagaggtccatggactcctcgagaagcttttaaataccatgtttcttctttctttaaaataatatttactaattgatcactaccaaaaacagctggtcttcttagatgcggaaaaagttgccgactgagatggatgaactatctgagacctgatataaagagaggaaacataaccccagaagaagatgatcttataattagaatgcactcacttttaggaaatagatggtccctcatcgcgggaagattaccaggacgaacagataatgagattaagaactactggaatacccatctcagtaagaagctgagaaatcaaggaacggatccaaatacacacgacaagttaactgaggcaccagagaagaagaagggcagaaagaagaataagcaaaagagtactgagaataacaaagggtcagagaagaccttagtttatctaccaaaaccaatcagggttaaggctttatcgtcatgtatacccagaacggatagcaccttaacccttgattcgaattcagctacgactgcatcaacaagccaagagaaagttcaaagcccagaagcagaaacaaaagaggtgaacatggtttggggggtaagtgacaatattggagacaatggtgggattggaatattctttggtgaagaccatgacctagtcaacagtgcctcttacatggaatgctattctgatgatcatgatacgctagaaaagctctatgaagagtacttgcagctcttgaatgttgaggagaaaccagatgaattagattcttttgctcaatctttattggtgtaaacgtacaaataatggtgaaaatatatggttggaacaaataaaacaaattaagtttgctcctgctagcacgtgaacatattgtattatttattcctcagattagtatcatttatttagaatattttttaaattttaaatattattaatttaactacaaaaaaaaaaa

SEQ ID NO: 65774 - DNA, 980 bp, Glycine max
  Clone ID: PAT_MRT3847_30409C.1
ggctcgaggacgacttttgggattattttgattttccatttacgaattgcgttagggtttcgtgattttgcacccttccaaacaatcgttgaggtgctattttgatcaaatttcctgcaaagttttcttctttttcgatttctgagttttgggtcgttgaattgagaatcaatttgggtgttcctttgaagaaggttgagtaagaaagagagaagggggaaaatatgatggctgcttcttcttcttcagctaccgtcgcagtggagaaggcgaccagcgaccttcttatgggccctgattggaccatgaacattgaaatttgtgattccatcaattctaatcattggcagccaaaagatgtggtaaaagctgtgaagaagagattacaacataggagctctagagttcaattactagctctcacgcttctggagacaatggtaaagaactgtggtgattatgtgcactttcaaattgctgagaggaacatactggaggagatgatcaaaatcgtaaggcagaaggcagatatgcaagtgagggataaaattttaatactgctggactcttggcaagacgcatttgggggaccaggtggtaaacatcctcagtactattgggcatatgaggagttaaagcgatctggagtagttttcccaaagcgttcaccagatgcagctccaatatttactcctcctcctacccatccaaatttaagaaatatgcaagctggatatgggatgccaagcaattcatcaaaaacacttgatgaaaccatggcaacagagatagaaagtctaagtttgtcaagcttggagtccatgcgtcacgttttggaccttatgagtgacatgttacaagctgtgaatcccggtgatcatgcagctgtaaaagacgaagttattattgatcttgttgaccgctgtcgcacaaaccagaaaaaaatgatgcatatgctaacaactactggggatgaggag

SEQ ID NO: 65775 - DNA, 350 bp, Glycine max
  Clone ID: PAT_MRT3847_3040C.1
cgggaaaccggaaaccccattccccaaaaaatttaattttccgaacatttaaacagcctggtttttaccccaaattttgattagaaaaaaaatccccccgcccccaattcccaacttacccccccccaccttccaacgtataaccccttcacaggggcccccaaatgcaaaacccggggccgcttttaaaaacccccctaccgggaaaaccctggggttccccaattttaagcccttgaaaaaaaacccccttttgccccctgggggaattccaaaaagggccccccccactggcctttccaaaaaaggcccatcccaaaagggaaatggcaccccccctgtacgggggc

SEQ ID NO: 65776 - DNA, 297 bp, Glycine max
  Clone ID: PAT_MRT3847_30410C.1
cggagtcggtgttcaagtacgacagacaccatcacacggctgtggcgaggttttccagcctctacttcagcaagcccaccggcgatctcaagagcgtcgtcaacgataccatccacgaccctgatcacggtgctcgtcgaatcatggtgggctacatcaacaacgtcggcatccgcaacgatgaggagctcgtcgtcgacgtcaatgtcgcctatattggctactacaggttcatccgcaaggccgacagcctcctgatcgataccgtcatgcactgcgcatccagcagcgacggta

SEQ ID NO: 65777 - DNA, 437 bp, Glycine max
  Clone ID: PAT_MRT3847_30411C.1
aattaagcagctgctactgaatgattctacagatcagatcgttatacctttataagagtagttgaaggatgatagctgctatgagacgtacactaaagacaacttccgatatttatgattgatcaataatatggattaacatttgtgaatcgtgcacaggtacggaaggttgatatgcatatgcatggtctgatggatgagcataactaggttgcctattatcgtgtacttgggataggatcttatccttgttcaggttgtcattttatgccgccatttagtgacaatccaaaaaagttggcgtctgcagaggaaagttgcgactgattcctagactgatgacccaaattaaattaacaactccaaccatgctgaaaaatgaattatcccaaacgtcgtttggggtgaccatttgcaaaccaaaaaagtaggttaag

SEQ ID NO: 65778 - DNA, 1220 bp, Glycine max
  unsure (1)..(1220): unsure at all n locations
  Clone ID: PAT_MRT3847_30412C.1
ctcaagaatagtgaatctcctggcaacagcagcaacaatctaccacttagcatgaatcggagcccctcaacttccgttactcctatccctgataagtactgttgtctctctagagaagatgtgctccgtttcatcatcggttgtcttggcgcattggctccccttcctctcacttccattgctgctcttgaagcaattaattcaaactacaactatattgaatcttctactccagccattgaagccactcaaaagcttcctcaagatccaagtgcagttgctgtaatagaaagcacgtcagatggtcagtgcaagatcattggagaaatttctgcatgtaagttatggaaatgtgattacttatccgcagcatgggctttagcaaatctctctgccgggcagtttgttatgggagttgaagataatgtcaccccaaggtcactgcctcagttcagtttagatttagcatctggagaaaatgatttagctaatggtgggggttcaaggaaaccaaggaagtttagtagcaggagtgttgggttcttcagcaatactgcgagccatagctttggttctaggagcatgtataggggtaggagtgcacccctgacatgtaaaattactagttcattggctgcagtattggctcagatgctatctcacagggcaactcatgtctgggtgaccgaggacgagaacgatgaagttttggtcggtgtggtcggatatgctgatattttagctgctgtaaccaaaccacctacaaccttcattcctgctaatagatctacagaggggtttggaaatgaaattcagtgttgaatgttttgcttcaactttttcaattagtactcttagcagtttgtctctttggtgctcaatcatctcacagtacattaagatgaaaaacgagtttggattgttggtttgtacaagattgtgttaatttataatagtaataataaaaatgagtaatgttttcatgaagtgaatagtaataacaagtttggattgttggtttgcaaaaaaaaaaaaaaaaaaaaaaaaaaaaaaaaaaaaaaaaaaaaaaaaaaaaaaaaaaaaaaaaaaaaaaaaaaaaaaaaaaaaaaaaaaaaaaaaaaaaataaaaannnaaaaaaaaaaaaaaaaaaaaaaaaaagggcgggcccttttaaaaaaccaagttttactgcccgtttcttggaaggaaaaaacttttt

SEQ ID NO: 65779 - DNA, 790 bp, Glycine max
  Clone ID: PAT_MRT3847_30413C.1
tttggctagatgctatccacagggcaactcatgtctgggtgaccgaggacgagaatgacgaagttttggtcggtgttgtcggatatgctgatattttagctgctgtaaccaaaccacctacagccttcattcctgctaatagatctacagaggggtttggaaacgaaattcagtgttgaattttttgcttcaactttttcaatgtgtactcttagaagtttgtttctttggtgttcaatcatctcatattatactacagatgaaaaatgagtttgggttgttggtttgtacaagattgtgttaatttataataataataataataataataataataataataatgagtaatgttttcatgaagtgaatagctactatcaaaggtatagtatgtaatgagctaaagaaatcggttcatccaatgcgatcttggcattgtaccaatagcttagtttaggggtatagttgcagttttgtccaaacattaagtgaaggtatataggagataccttattgagtagaatattagattcgagtcttgtcgaagagttttgtcaccttaattaactctactaatcaattaatcggagtttaaagtggcttcttgagagctttacaaatgaacaagtttatagtagttaattgagcggttttcaatctgtcaaaaaaaaaaaaaaagcggtaaattatctttttcattatattggattagattttgaatttaaactttagtttaattactcatttgatccatataatttcatggttatatagtttcattatttataca

SEQ ID NO: 65780 - DNA, 214 bp, Glycine max
  Clone ID: PAT_MRT3847_30414C.1
aagggccgcgaaaatggcagatgagggagcaggtgctgtaagcgatgtgtgtgagatcgactggcaaaccatatccctgaatgaagatcaaccaacgcttccgtcgaagcagagcgacgattactacattgactcggaggctgccaatgctgaggacccaagacgagaagggatcaactatggactaccttatgattaagttcaggatgtggat

SEQ ID NO: 65781 - DNA, 244 bp, Glycine max
  Clone ID: PAT_MRT3847_30415C.1
ggaccgggaccgggcggcgtaccagttttatctatagtgagacggattaaagctgggcatgattatggccatagctactcactgttcctaaagaggactctgttacagttcggacacaacatacgtactcgggagcatattgtgtgaagcctggggcgtctattgagggagcgtaactcacattacttgcgctgcactcattgtccgcttttcactaaggaaacatgttgagccagatgcatta

SEQ ID NO: 65782 - DNA, 650 bp, Glycine max
  unsure (1)..(650): unsure at all n locations
  Clone ID: PAT_MRT3847_30416C.1
ggccgcttcgaggcnncggccgggtccgggaaaaagctaacccatcaccaaagctcattccgagagacagagagaaagatgagtgaagacgcgaaaaagaacattgccggagctctaacggcgaggcccaactccgatgaccagaaaccatcgccgttaccgtcaccggcgccggccgttccgccgaagaaggtcatcatcaagagcgccgacatgatccccgacatgcagaaggaggccgttgatatcgccgtcgccgcgtttgagaagtacaatgtggagaaagacgttgcggagcagataaagaaggagttcgataagaggcatggccccacttggcattgcatcgttggtcgtaattttggctcatatgtgactcatgaaacaaaccactttgtttatttctatttggatcagaaagctgttttactctttaaatctggctagagaagttgacaacaatgagaactgtctggtgattatgccgatgtattccgtccttgtgcttgtatatttgatgtcatgtaaactagttctcggtttggatatgaatttaaggattacttcatttgagatcagtgtttttttttttttctttcttgggtgtctttgataaataaaatattatttcttaaaaaaaacaccccaag

SEQ ID NO: 65783 - DNA, 160 bp, Glycine max
  Clone ID: PAT_MRT3847_30417C.1
caccagagctgcgttaacagcaagcccaattgtcatcttatctggcggtgtatgaactaatgtacttgccctcggcactgactgccgttttgacaccaaagtttgggagctcactaagttctacgctggcctgaccctcaccaaagaccatatggcagca

SEQ ID NO: 65784 - DNA, 379 bp, Glycine max
  Clone ID: PAT_MRT3847_30418C.1
cactagccggcggccgcccttggtccaaaggattttttaaaccccaattttttaatgtcattagcaaaacaaccaaacgcagggggcaagggtagagacagggaacggaatcacccttcacagcgggaaggagagcgtagtctggacattaatggaatgcgagagaacacacaagctagaccatgcccaacgggaggcattatacgaccctcaaactggtccacaacagacaagtgcccgcaggaatgaccattaaccttagatccatgagaggaccctgcagtgcacaagggtattgacccaggccacccactgggggaggcgtgaccatttccccggctgtgacgccaaaaatatgaaaaaggtgagggccccaaac

SEQ ID NO: 65785 - DNA, 154 bp, Glycine max
  Clone ID: PAT_MRT3847_30419C.1
tcggccacgcgttcgcttaactagcattaaaatcacgtttggaattctgcggggtcttttcccagcctttattatacggacatattcattcacccacccttttacttcccattaaaatggtcacctttacttaataaatttattggattggaaa

SEQ ID NO: 65786 - DNA, 479 bp, Glycine max
  Clone ID: PAT_MRT3847_3041C.1
aaaaaggagggatgcagaacagtggatgtctcatcgattgcttccagatggcctgcgagagcgaatcagacgatatgaacagtacagatggcaagaaaccagaggtgtagatgaagacaatttgattcgtaatcttcccaaggatttaagaagggacataaagcgtcatctttgtttggctttgctgatgattgtccaatgtttgagaaaatggacgaacaacttctggatgcaatgtgcgaccttctcaagccagtgctttacacagaagaaagctacattgtccgggagggagatccggttgatgagatgctcttcataatgcgtggcaagctattgaccatgacaactaacggtggaagaaccggcttcttcaactctgagtacctcaaggctggtgacttctgtggagaggagcttctcacgtgggctttggatcctcattcctcacccaaccttcctacctcaaccaggactgt

SEQ ID NO: 65787 - DNA, 486 bp, Glycine max
  Clone ID: PAT_MRT3847_30420C.1
gtgccttttgtgttttttggcacagacttttttgttgttcttcagaggggaatggcttggaagttcccttgacccagagaatcgcccctaagtgatccaagcacctgaatggatatttattggtcccaaccccccgggaggtcccgcttcaatctttactttagttccgtgcaaagaaaactcttcaagggggagggcgacttttgacactccccttgctgaaaggggaattgggggtgggcctcgtccaattttaaattcggcagtgggaaaatttgactctggcgaattgtgaatacaaactttcccatcgggttttttttctttataccaaaaaaatgggggttgatatgtcccaaccagaaaaagggctctttttttgatccaaaaaataggtggggcgccggttcaccccgggtgttttttgcctaaaatgtgcacccaggtgcttgcttcatcaaaaggggaagtaacgggtcttttaaa

SEQ ID NO: 65788 - DNA, 528 bp, Glycine max
  Clone ID: PAT_MRT3847_30421C.1
ttgagtctggaagattggcttcactcttctgctcctgctgatatctatgttcttgggtttcaagaaattgtacctctcaatgcgggtaatattttgggcacagaagacaatggccctgccagaaagtggctagctcttattaggaagaccctgaatagtcttcctggaacaagcggggaatgccacactacttcaccgcttcctgaccctattgtagagttagatgctgattttgagggatcaatgaggcagaagacgacctctttcttacatcgccgatcgttccaatccttgagtcatagtatgagaatggacaatgagatgtcactaccccaagcatgccttgatcgtcgtctcagtgtctgtgatagaatgatgtttggtcataggacaagtgattatgaccccagttatagatgggcttcctcggacgatgaaaacggccctagcgactccccagtcgtaacacattattcaccaatgacatatagatgtagcttctctatgggggatagagatagacagaca

SEQ ID NO: 65789 - DNA, 687 bp, Glycine max
  unsure (1)..(687): unsure at all n locations
  Clone ID: PAT_MRT3847_30422C.1
gtacgtgttggttttacaaaggagcagcttaagtttcctgcgctgaatttgttgacgatatctagaaaaaaagaatgataatgaagttgaatttgtgaattgatgtttttgtatgtgaggataaattttttagctgtggtggactgtgggaactgggaagtgaaattccagggagctgttttacatcttgagccaatggagttgttattaatttgtttgttcggatctggaactaaccaaggacagctaattaggatattcctatgttacctgcactagaacagctcggattaagtagaaatcaaggctgagttctgtgttttcgtgtggtgagtggtgattgttgagaactagctaaaaacaataacgtttactgtgtgtatttttattattcatcacatttatctgcatatgttgtgtctcactctatgattatctcccaaaaataatgtcatgatattatgataaaaaattctagatatgcaaaaggaagaagcaactttagtttaaaattaaaatctcttgatgggattttgaagttatttcctgcatagttcttttatataaaattgagaatttaatgagaaaatagagcacatcacactgtgngtctaactctcataatcattttgcanaatctgaacatgcccagatttgctatatcagatgtcgntgtatgatacattt

SEQ ID NO: 65790 - DNA, 555 bp, Glycine max
  unsure (1)..(555): unsure at all n locations
  Clone ID: PAT_MRT3847_30423C.1
gacaggggcaaaaaacatgataaacaacttggagccgtttcctgataacagggataactaaaaccaaaaattgaattgcacaactatgagagcacaggggaataaaaaaaaaagaggtggggggggaaaaatcttctttttttttccttnncnnnggggggggggggggggggcccgggggggccggggggccgggtgtcttttgacangttttnnaaaaaaaaaaaanaaaaataaanngnnnnggnaaaaaatcnttntttaacacatgctcttggggggggggacttattcctcggggacagcggacaagcggggttcccccctttgttnngggggatattgccttggcatcatgccctgctccactcattaacgttggcacttcatcttgaagggcaccctccatctttttgggtgcaaaataagctgccgacttgagctgngaactcnnatcagaatcacaaatcacagcacctgcatcatgcttgggttcaataatacaggaaaccgaacgctgggcacatatttgggaaattggtttagataaatcat

SEQ ID NO: 65791 - DNA, 1024 bp, Glycine max
  Clone ID: PAT_MRT3847_30424C.1
ccacgcgtccgctcagtctcccattctcctccgttccctagaagcttccatagactcctcgacctcgtaagtcctccttcctcaaaatcgaagtccccgattcctgttctctgctgcaactcaaagacactgttcctcgcaccatctcttcttcttcctcttctctacatctttccctcaacagaaaggataaaattcacgccccttcgcaggaagagcccctcaactctctcggtgtcgccatcggcaacctcatcttctactctctcaaccctaccgtcttcacccttgaaaccctcctgcacaagccagaaaccgctcctcgtgatggacccaccatccaagactcatcggaaaccctcaccagtgactcccccttcgttctagacgccgaaaagcctccgactttagatgccgcggaactggaatccatggaaatgattgatgggtctgacgagacggtggtggtgggtaccaattccgagcctttcttcatgagaagggttttgaaagaagcgcctgggaacaacgttaatgatttcaagttattagtgtttatggttcatggtgttgttcttgaatctggatttgtttgaatcgacaaggattctggtatggcgtttagtggttctgaccttcttgatgattcttatgctactttttcttcgcgctggctcatattctattccctagcagcacctctctcgtacgaatgtactccaacagcggcttcgacagcacaccctttcaaaccagcaatctcagacttctaatcatagcatgcaccagcaagataaagtaggtggaggtggtggtggcagtgtcactgtggatggtagcatgtcaaactcatttagaggaaatgaccaggtttcaaaaaaccagattgggagaaagagaaagcagcctggctcctcgtcaggtcctgccaatagtttcaggaacagcaaatactacaggtccatcaccaagttcagcacgctctactgcttcaactcatacgcctggagatgtgatatcaatg

SEQ ID NO: 65792 - DNA, 1010 bp, Glycine max
  Clone ID: PAT_MRT3847_30425C.1
accatatccccttcaaaaagaagcacaatagaaaaaaagatggattatatcatatacactcttttcactgtccttatattgatatcttttattagttcgataggatttgttttcaagaccaaataccaaaccccaaagtggtggtatttacgacctggcaatattgaataccagtttgaccctggaaaacttggattggctgggatgagccatctgattactgcactcattctatatggatatttgatacccatctcgctttatgtttcaattgagtttgtgaaggtattacaggcaaccttcattaaccaagacattcaaatgtatgatgatgaatctggtactccagctgaagcacggacttcaaatttgaatgaagagttgggtcaggtagacactatcctatctgataaaactggcactttaacctgcaaccagatggactttttgaagtgctccattgctggtactgcgtatggtgttcgttccagtgaagttgaacttgctgcagcaaagcagatggcttctgatcttgaggagcaggaattgaatctctctaatttccccatgcgtaaagagagtaacgtgccatgggaaaatatcacagaagatgaagaaactgaattggggactgctgttacttccaaggatgatggagctcgaaggcctgccataaagggatttgggtttgaagatgatcgccttatgaatggtaattggttgaaagaacccaatgccgatgtccttttgctgtttttccggatattagcagtttgccatacagccattcctgaactgaacgaggagactgagagttgtacatatgaagccgaatcacctgatgaaggagctgttctagtagcagccagagatctggttttgaattttataggagaactcaatcaagtgttgccatttgtgaaagattttctgcttcaggtcaagtggttcaaagagaatataaaacttttgaatctgctggactttactagcaaaagaaagcgcatgtc

SEQ ID NO: 65793 - DNA, 317 bp, Glycine max
  Clone ID: PAT_MRT3847_30426C.1
aggggaagcccaatctcttgatcagaatcttcaggccacgccaggtaatcacaaccaaatcaacatcccaaatggcttcagcttctgtactcatggggtagtcactgaccactgttaccaacaataacaacccttcatccgaagccttcatcatgccactacccctacgccaaccaaagcggattctcttcactactattgcagtgtcaaactccaatcctcatatcaatgcacctttgtaggacaatgcagttgccggactcacaacagcttctgtgacagcatcatatgtggctcccgaagtggctcatgctgct

SEQ ID NO: 65794 - DNA, 428 bp, Glycine max
  Clone ID: PAT_MRT3847_30427C.1
aagataaatcagataaataattaaacattaatggattaatgttacgaagcatgcttagatttctccactttccattagaaaatcctttgcacaaatcaaatcatccacttattctggttttctccttcatagtcacaaaatatgactcttaacttctactcataactgtgcaaaatctgtataaataactttatataaatttaatttagtgcattctattcaaatgaaactcgatacatgcggttgaattcagatataacaccaacatctatgtggataaagcatcaatagtattgttcattccataattgcttctttgatttgttatgtagggaaagaagtcacatgccaattttaaattcttttccaatataaaattaaacatataaaaatatatctaaaatcgattctgaacttagaatgaattc

SEQ ID NO: 65795 - DNA, 257 bp, Glycine max
  Clone ID: PAT_MRT3847_30428C.1
aaatgaatcagagcaagacaaaccctttcagataccagggaaaatccaaccccgattcccaccctgtccccagatataaaacatcgacaaaagccttatttcacatcaagtgaaattggctacaaggatcacacgatgccatggcgctcaggtaatccccagttctaaaagaaacaaaacttaagaaaaaagggaaacagcatacaagtgattatccaacattgtctccccactttaggcgaccaaaatcaaaagat

SEQ ID NO: 65796 - DNA, 2029 bp, Glycine max
  Clone ID: PAT_MRT3847_30429C.1
gtccggattcccgggtcgacccacgcgtccggtggcgcgggacaaggaggagccgttgtgagagctaccatggcaggttggatggtttccgaaggagagaggtgttagggttgagaaaggaggtattaattcattaacggtggtttagctagtgatagggtcaaattggagcgtgcgtgggaaataaacaaagaaaaaggtgagagtttttgattttgatttttgagtatcaggttaccgttatgatttgactttgatggtctttttcttccaccaacacaaattcaaatttcaaaacttgcttctctctcaaccttgccttaattaaccccgacaaatccagaacggggctccatgctctctcttacactaaactaaaacgccgaaaaaaaacactttctctctttcacagtgcttcacagcagaagctacctctcctcttactcgctccgtttgctcagcaaaacggtttcttttctccaatgggtgcttcgggaaggtggtttaagtcacttcttccttttagaaagacctcaactgatcaagagaagggtggtgacaacaagagtaagaagaagcggaagctatggagggcatcttcagaagggtccatgaagaaagttggtggtggtggtggtggtgctgctgctgcatctgattcttcccttacttatgcggtggccgtgatggttcccaaagatttcaagctcatcaagcaggaatgggctgccattcgcattcaggctgtgtttcgagccttcttggctagacgagctttgagggctttgagggcagtggtaaggctacaagctatttttagaggccggctagtcaggaagcaagcagctgttactctaagatgcatgcaggctcttgttcgagttcaggcgcgaaattcggctcgaggctgcgagaagacgacagaagggaaagctgtgcagaaattacttgatgagcatcgcaaccaagctgatccttttaatcaaattgagcaaggatggtgtgatattcctggaactgtggatgaagttaaagcaaagctacaaatgaggcaagaaggagccatcaagagggatagagcaatggcatactctctctccacacagtcaagactgtgtgctagtccaaacccaaaagccactaaggcaatgactcccctcaagaataacaacctaagcaataagagcttaggatatagcttgttggaacgctggatggaagccaagccatgggagagtccaatctcaaggaagagtgaaggccttgttcctgcttttcaatcaagaaggaatggtatgacaactagggtttctgttaagcctattataaccagtcaatccacttcatcatcttcggccataagctctgagtacatgtgtgatgataatagccctgtgtcaacatcttatacatctggatctccatctttgccatccacccacactgctttggtggaagcaacagaggaaagagatgctcatcaaccaagctacatgagtctgacagaatcaactaaggctaaactgagagcttgcaggagttcttcacagaattcaaagagacttgttatggaggacagtgtgtctcacagcacaacaacaggccttatgaatggagatactagaagctgttctgattctgatccttcagttaacttgtggaaggattcttgtgcaacaactctaagggcaagttatcaaaaacgacaaattaggatatgagtttctgtaacagtggcagatgttgtttactttcaatgagttcaacagcttgttgtccgttgtcaccttcacaaattagggatgagttttctgtaacagtggcagatgtgcaagttaggatagaggggctaattgacagtgtagataatataagtggttttgttttgttttgtgtgaagaatgaaatagcaaaatagtacactacttcaatctgtatggtgctttgtgcactaatatatgctttatgtatgaattatctaaactcttgagtagaaatcgagctttttatcagtgtatattattccccc

SEQ ID NO: 65797 - DNA, 182 bp, Glycine max
  Clone ID: PAT_MRT3847_3042C.1
ttgctatatatccacgttataagattgaaaacgcttgcattcaaatatcaagctagttccttctggagacttgcacaaaggtgctctcctgactggcatgatcattaattggctctatagggtctgtagtatctggaccccttagtgcattcattgcttatgttctaagtgctgtcctcagt

SEQ ID NO: 65798 - DNA, 253 bp, Glycine max
  Clone ID: PAT_MRT3847_30430C.1
catccatgatctggatgtgaatgagtcaaattacttatccctcggtcttttaatgaggtagctctccaggaattgtgcattaatgttctatgaaacgtattcatgttactgcttcgacgcatattccctacaatttacatgcggttctaatacatcctaataactgagatacatgtattgttatacaactgattcttatttcagaacatcgaccttactttatcagtctttcaaacaataagggatttcactt

SEQ ID NO: 65799 - DNA, 647 bp, Glycine max
  Clone ID: PAT_MRT3847_30431C.1
cacaacaacagctgccattaaaacagtccttcccagtatgaagatggtgccaccaaaagataaaagagcaaatgttcccataagttatttggtgttgactctgcctttctgcagctttcaaaaatgaggtctgcaacttccaagaattctagttgatgggtagcataaatcttaacatccaatggcataccatgaaattgaccagcaccctcaggcagagtccaattgtacatagaacaaggtaaaaacaatattgaactacccccaatatcttcagagaaagcaagagctttggcaaacttgctggtgtcaaaatgaggttttgacatctcaactgaagcaagagctaactgatcacccagcatgcgggaagcatttctatattttgtgcttccatgcattggccatattcccgtaacaaaggcaagctttaccaacttcactagaatcatgatcatgtaatggcaaaagagtgaaggacgcgggttcctactttacaagaagagctcgaagcgatccgcggtgaactgctaccgagaggtgtcaatagagttgggaagctgcggctggaagtggtagtggcggtggtagtcgtcctgtgcagagatcatggttccagcggagcggtgcggcgagagagatctctc

SEQ ID NO: 65800 - DNA, 697 bp, Glycine max
  Clone ID: PAT_MRT3847_30432C.1
ctctagggttcccaaaattcgtgagagatctctctcgccgcaccgctccgctggaaccatgatctctgcacaggacgactaccaccgccactaccacttccagccgcagcttcccaactctattgacacctctcggtagcagttcaccgcggatcgcttcgagctcttcttgtaaagtaggaacccgcgtccttcactcttttgccattacatgatcatgattctagtgaagcctattcatagttgcttgccattgttccttttagttggtaaagcttgcctttgttacgggaatatggccaatgcatggaagcacaaaatatagaaatgcttcccgcatgctgggtgatcagttagctcttgcttcagttgagaagtcaaaacctcattttgacaccagcaagtttgccaaagctcttgctttctctgaagatattgggggtagttcaatattgtttttaccttgttctatgtacaattggactctgcctgagggtgctggtcaatttcatggtatgccattggatgttaagatttatgctacccatcaactagaattcttggaaagttgcagacctcatttttgaaagctgcagaaaggcagagtcaacaccaaataacttatgggaacatttgctcttttatctttttggtggcaccatcttcatactgggaaagactgttttaatggcagctg

SEQ ID NO: 65801 - DNA, 515 bp, Glycine max
  Clone ID: PAT_MRT3847_30433C.1
aggtgcatttatgtcaacacttgttttcttttttcatcgatgcacagtatagtcttgcttgtgttattatttctgtataagtgcattcgtataaggatactttacttccatattggtcttatttggataacttttttaataaatatttatagaaaaggaaaataagataaattgaatctaactattttttgtataagttaatttaatttgtataaattaattttaatttatgagaaaacttacttttttatgagcatttgttttttttttaccaaattttataatatttgttaaaaactttatttaggactcctgtttttgagtttaaaggcatttgcttgcttcttgtaaattagtcactcataagaatgaagaaaaaaatccttactttacaccatggttatcaaaatcgcgttttaaatcatagaatcacacgattctacaattccatgaagcctcaacgaattaaaacaggagcataatcgaaatcaagtggattcggtcgagtttgcgta

SEQ ID NO: 65802 - DNA, 412 bp, Glycine max
  Clone ID: PAT_MRT3847_30434C.1
cccacgcgtccggcattgattatgatgcctgttcagttgcaaatgattgtggctcattgttcgttgcccaggctggaaatcacatacaaattggcggtttccatggtgctggaagcaaatgcagactgggatatgcttcactgatgccatatgttgagccagatgcgcaagctcaaagcgctgtagctcactgtgactttttccctgtggaggctgtttgtcacgagggagttgcttacataggagaatcgtaatcggaagcttatgttccaccggcgaccaacactaattcgtgggtatctcccacggactggcagctggttctaccttgtgactaaatgccgagggatttgactacaactgatgagagactggtacgcacagatcatgaagtatatgatccttttcttgg

SEQ ID NO: 65803 - DNA, 712 bp, Glycine max
  Clone ID: PAT_MRT3847_30435C.1
tgggggggtttttttatttttttcttcgttttcccccccccaaaaaaaaagcataagctgatatttcacttagatatggaaacatactgctgggcttggacttttaaaggaagttcccatgcccaagtcccagcccaagcccaagcccaagcccaagcccaagcccaacaaataaaattttaaattgcagggagatggcatagctcttctaatttattaatacttcaaatttcccccagcaaaaaatggtttgatccatttcaattaacaaaatgaagagaagtttttattttggtgacaatttccattgcatccaggggagtctcctcaaaaaaaaaaatctactgataatttggttgaaggcaagctgattctaaaggtttgacaaactttttagcctgttctagaggtagaaacatgatcacattccaagatcctagccgtccaaaatttggtatgaaccccttataaaaggcaaaaggtccatcattttttaatgtcttaacgaaacaatcaagggtgcttttgtaacttgaatctcccatcattctcgacttaaccacatcaacaggggagccaacacagactgcaaaaaatcctgctcctagaccagcaagaaggtgagttacaacattgtcggtgaatccaggaattttcaaaatagtctgttttacttgatcataggctgctagttcagcagcattaatgatgc

SEQ ID NO: 65804 - DNA, 387 bp, Glycine max
  unsure (1)..(387): unsure at all n locations
  Clone ID: PAT_MRT3847_30436C.1
ttgcacttggtggctagttatagtatccaagcaactttcattttaaatcattaaggtcttctttctatcttgactgatgggggatctgaagaccgaaaaggattaagcgatgaagccatggagtggaatcagatccaagaaaaggattaaggttttcttatttttactttattaatattgttttatttgcaggtgaaaagctgcttaagaccaactgtaagatatatgtgtcctcaatggagttgggattttttctgcataaatcatttatttatgttatgcaggccctttctatacatagttgaatttatagtttaatttggttggttgagaatgtggaagtntattttgggttgcttttgcaggggaatgaaaaagtctttgttg

SEQ ID NO: 65805 - DNA, 1064 bp, Glycine max
  Clone ID: PAT_MRT3847_30437C.1
attctatctttttcatgacacgaatgcgataaacagtgttgaaggatctgtgcgtgagttcttggtgaaacaaaggaatcgtagatccgtttgtttgtgtagtttttttttttttgtcagagaagagaagcgatggggttgtgggaatcttttctcaattggcttcgcagcctctttttcaagcaggaaatggaattatctctgattggacttcagaatgctgggaagacttcacttgtaaatgttattgctactggcgggtatagcgaggacatgattcctacagtgggattcaatatgaggaaggtaacaaaaggaaatgttacaataaagttatgggatcttggagggcaacctagattccgcagcatgtgggaacgttattgtcgtgcagtttctgctattgtttatgttgttgatgctgcagatccagataaccttagcatatcaaagagtgaactacatgatttgttgagtaagccatcattgagtggtattccattgctggtattggggaacaagattgacaaacctggggttctgtctaaagaagctttgaccgaccaaatggatctgaagtcaattactgacagagaagtttgctgcttcatgatctcgtgcaaaaactcgactaacattgactctgttatcgattggcttgtaaagcactccaaatcaaagagctaagaggctcccttatgttttgtactctaatgtaatttcagtgacatatatctggaagttgctggaggcatctgcatggctaacttggttgcagattactttattcctgcccttttctcatttgcttcttaatgtaatatcatgtccaatgacgtgtatcaaacaagatgaaattcatgtcaagggttgttttgtgcgtgaatcatattgtcattgtcagtttagttgcatttttagaatacttgcagaactgcagttgtgagaggaactgattccctgtctctgtaaattagatttttttcaatgatcagcagtgtgtgatattgttatttcccggagtctgtcaaatacaaataaatttagttggattctttatcaaa

SEQ ID NO: 65806 - DNA, 847 bp, Glycine max
  Clone ID: PAT_MRT3847_30438C.1
acggctggagaagacgacagaagggatttacgtatgctatataatatttttacacaaatatccaagaaaacttgattatttatttgttttactatttcagtagacactattaacgaaaaacacatgctacccatttaatcatcaattatctaaaatattaatttattcttttttaaaagtaatattaggcctttttctttttacatcttttaaactggaaaacaaaaaaattcttctacgaacaacccagacataaagatgccctttatcaactcgaccttgctcctctgcattcaccgacatatttgttggactggtaaaaaatcttctacgatcataaatgcctaatgttcaaattgatctatgtcagtcaccaagttgagtggcaacctatctcacatgattatcaatctttctattcttcatcaattgtaaaatactttgtactatgatccctttattagaacacagtaaaattgaaacattaattcattcatacatcaaatatgaaatatcacgtggcctcaaaatgaacatcaaggtatacataattttttctctcctttattcatttatattttttgatgtcaaatctctcctttatcaaaaatcaaaaaccttatccaatgatatacaatttagttgataataaatttgaatttgaagaaaaaaatctaggttcgatctcatagaatatattattggagaaggatgatgacctttaaaaataattaagctccgatctaggattattagtttcataagtgatccaaaggataaagcttattaagatatcttagaatatcattgggaagtttaatgcctcaactactgtgctactaacccc

SEQ ID NO: 65807 - DNA, 276 bp, Glycine max
  Clone ID: PAT_MRT3847_30439C.1
cgtggggatcagcatggattgtacccggaagctcacccacctcaaccccgggcccagtgacattgccattggccaggccatcgagcccatccccatcagccgcatcgcatagggcgctggcatcctgccggaggagctgcgcctgtacggcaacacgaagggcaaggtggccctgacggtgctggaccgcctgcatgaccgacccaatgggcggtacgtcgtggtgacggggatcaacccgaccccgctgggcgagggcaagagcaccacctccgt

SEQ ID NO: 65808 - DNA, 539 bp, Glycine max
  Clone ID: PAT_MRT3847_3043C.1
cgatctatcgctaggaatgtgccaggtgccgtacactgggtgatttttttgtgtggggggctcggtaggtgcggggttgcggcaacgtgggtttgacttaagccttattcagtcgggcatttcccggtatacgtgttcgcacacctggcagcaaatttgtatgcataatagcaaagcaaaggggcctttggtgcgtaaccagtcaacttaaccctaaccctagttgctaatattattaccgtaggctgcacgggcaccaaagtttgcaccacaatacatacaactgtatgcagccgcttgggccacaacgtggcacagtgatataacaacttagacggggcttattagcccggctgtgcctgcggtcgttaccattgccgcgcgcccacgattgcaaacgcaagcgctatctgtggcagcagcaacacggctaattgctgcacgattgctagggaaccaacaatggcggcatgcaacggtgaaacctaatgggcgctggcacggccatggggaattaggtaagctacgtggtttttcct

SEQ ID NO: 65809 - DNA, 276 bp, Glycine max
  unsure (1)..(276): unsure at all n locations
  Clone ID: PAT_MRT3847_30440C.1
ctcatntcaatttgcanttgcatttgcgttncatttgggcgttntgtttcttnctggaagcttcgttcgggcatnaatggcgtnctncgatgaagntgctcccggaaantcgaagaagggcgagnngatntncaaaaccaagtgcgctcagtgcnacancgtngacaaagcgnncggccanaaacaaggtatctatcgtcantcatcatcttcgtttcccctttntnctttancntaattaacaatcagatctacgattccgatgctacttntaca

SEQ ID NO: 65810 - DNA, 586 bp, Glycine max
  Clone ID: PAT_MRT3847_30441C.1
ggaagaagaagaaccgagaacagcacaaataaaaagcccagtgttcctcttcttgttgcctcctcttttaagaacaaacacaacaagaagaaagaagagggtatttctgcagcaccaccaccatcaactaccgaatgtgctctttctcctttctcctttcaacaaacaacaaccaccaccaccctctgtcgccacatatttaacaacaattactacaacttgactaaacaaaactgtttttctttttttcttttttttttaccatggaactggctttgagtttgggagacacgtccaagtcttttacctttctcgacaaggccgcggtgaatttacccaccaacaaggacccacctgggttgttcagcttggcgccgagtttcgccgccaccgccgccgccgccgataaaagaagcgatgctgctgagaggaggggtttttcttcagatccaccggttcagctcgaccttcttcctttctctccggttctcagaccccaacaacaacctccctctcaacttcggatcccttggctcaccgaagcatgcggggcggcgagggtgctagacgtgaacctattccgggc

SEQ ID NO: 65811 - DNA, 600 bp, Glycine max
  Clone ID: PAT_MRT3847_30442C.1
attcaaaattctgagcacatcgaagcaattgcattggaatatcagatcattcagatgtccccatgtattttccctacctttgatcatttattgtaacagcaacatttttctaagtatatacagaaatttagagaaaaggaaataaatgtaaaacctaaatccaactaaagctaaaggctacaccttaataaggcaaatgtataggaatgtttgaaaatgggtcaatggctttatccatctgtatgtaggtcactgattatgggcaagtagcaaaaatttatccctgcttcacccagcaaactcttcggtttgatttatctttgaaagaatggatctaactaatgactaaatgaaatataactatccagagtcaaagaattgagatcttcgcgttttattgacaagcatttcggatcccatccatcagggctatcaatgccactctccactcacagcactgtgcatcagagattattaacttatgcattggccttaactcatcgggacttgccccttgcagtattgatttcatctcttgaagggatgttaaccttttcccggttaatcaaatcggaaccaaaaattttgggattgatatta

SEQ ID NO: 65812 - DNA, 133 bp, Glycine max
  unsure (1)..(133): unsure at all n locations
  Clone ID: PAT_MRT3847_30443C.1
atttgagaggttntggtggaaacagttactagagtgagatctttgcaaaaggaaataacataccagaagatggatatctatttcattctcatgtaagtctagatgcatctcctgtgaatgtgttccatatgta

SEQ ID NO: 65813 - DNA, 594 bp, Glycine max
  unsure (1)..(594): unsure at all n locations
  Clone ID: PAT_MRT3847_30444C.1
atctatcgtagcaatgtccaagtccgtcacagggacggatcaccaaagagtagcaagttaaggagggtgctgctggtgcggaggctgctgcccggccttcgaccctggctggtgaggccattgccccggccgtaacctatgctgctaccctaactgcgacaacccaggctatcataattccacctacacccaaaaagatcaccgatgggaggctggacgggcctggggagccaactgggaataagggagccatgccggcgactaggactatggggagggctgaagttggggcgggaagttgaaaaaaagacaaagatagagttggggggttcgccatggctgggattccgtggctgggggtcaaggtgagggagaggaagagggtatgttgagaaggtgggagttcggtccataacaatataccccaaccatgaaggcaaaccgcaacaaggtatagatgcaggtctttgtgggtggtgtggggggacgttaagcatttttttggggggggaacagaaggnggtgtacgcggaaaatggcacacaggggctaagccagagaancatgcccgagtgaaggtcagaacgagtaggt

SEQ ID NO: 65814 - DNA, 399 bp, Glycine max
  Clone ID: PAT_MRT3847_30445C.1
tattgccccacttgttaaggtttcaggttttaagacagtattccgccagaatgccgatccaagaaaggtcaagaatatttcaaaggcggagatgtttcgtttctcccaccaggtaccttcacactggcttactggtgtagagggtcacaatgctccgaaaggttgcttggagcttgatcctgctgctactccgatggaacttcttcaggtgttagccgaggatctggagcaagtaattctaatgacaactgaaaaatctgtggaagatgaattgaagcacaaagagaattccagggaggagggtttgatcaagatgtgccagacaactaaggacgaatgttctgatgaaaggtgggagaaaaaaaaaggaagtctgagagctgcctgacaactaaaaag

SEQ ID NO: 65815 - DNA, 496 bp, Glycine max
  Clone ID: PAT_MRT3847_30446C.1
ccacgcgtccggagactagggccactcagacaccaaatctacttctccttcctctaccctgttacgtgcttctgatacctttttgttccaaacgtaattgaaggcacgacctttcctatttctcctctcgattcgtgaactaggtacgccctgacaagcgcctggagcaaccggctggcttacctaggagcttgcctgtgaacaatgaccaagcaggggcactatggggatccatctgcccacactcgagttggtggtggccatatgcataatatggatggacgacggggggaggcccagtcagataattctgaacgacggctagaggcctttactccagaaagagagaatccgtacggaaagcccacgcctgaggggcactggagatgggagatggatgaatccctgatgttcatctcggtggactctggcatgtttaccagaaaagcagtcaaaggggtgatgcttaccagccctatcatcaagggcagagccg

SEQ ID NO: 65816 - DNA, 147 bp, Glycine max
  Clone ID: PAT_MRT3847_30447C.1
gcattggcaagacgcaccaaaacaagtcggctgggcgcgccaaatggaccaccccataaaacgggcgtaattagaccacccaacgggggcaccatgttttgtacaatcgttaaatattaataaaaactaattatgaaaaaaaacagt

SEQ ID NO: 65817 - DNA, 335 bp, Glycine max
  Clone ID: PAT_MRT3847_30448C.1
gcgccctatagtggaaaatggcaggaagcaccattaacagaggagaaagatgggctctcaatggaatgactgctcttggcaccgacggaactcgtgggatcgggcactgcatagtgagtgactcggttgcgtgtggcgctgaagtgcacacctggttcaagacccaaacagagctcatcaaaagcttaccacagtggcagaggctggagagtcaggcaactgtgccgctctgtgacatgtacttaccacccctgagagagaagctcatccacgacgctgcattcgccttcgatggcatgcttaacatgtacatgaacagtgttggtataaacatt

SEQ ID NO: 65818 - DNA, 370 bp, Glycine max
  Clone ID: PAT_MRT3847_30449C.1
aaaaattaaaaaaagaccaaacgctttttttttgaaatttaaccccaggtacaaaggggaaaagacttttcaccaaaagattgggccacacttgttttaaaggttctaaaccccccccacctttttgaaaagggcatgatttcccaaaagagtggtcatttgaaacccgccaaaagtctttccggtgaccaaaatttttttaatttggggtggaaaccaccctccctggggggcgggaaaaggggtgcttcaaatgcttttgggcaaaggggggcccaatgaaaccaatggggggggcccgcgcaaagagggcattcaaagagccagattccccaatattatgaattttttggttgggggacattcccct

SEQ ID NO: 65819 - DNA, 376 bp, Glycine max
  unsure (1)..(376): unsure at all n locations
  Clone ID: PAT_MRT3847_3044C.1
acggaannnggcacgagggcgtgtgacaacactaaatctgggaacttctgcaaaaatatttcatacttcatcaataccttttntatgcgatatacgggaacatctaccaaggggttgtggtccaaaatgattttaatatgcacaagccttaattcccactgctcttatcataactggtgtggctatattgaaatcattgagaattgcaaacgcattatcatcaaacaactggaacgagttggattcaaataaacagttgaatcggtctatgatgtttgcaatagccttggttcatttttttaaacataccccacaacacgatccttttcaaggtcaactgcaaatcatgaaagtggtgcataatccggagtatctg

SEQ ID NO: 65820 - DNA, 496 bp, Glycine max
  Clone ID: PAT_MRT3847_30450C.1
acaggaataaaatgtgtatacagtcagagatacaagttttcaaacaattaaagtccaaatccaatggagaaggtgcatatttctctaccgtatgtgatcagtatgtgctcgtataatctctaaaactagaaaatattgatccgtgcatgcatttattcagtaacctattctatttttaagcattaaaacttattaacgaatttgctgaacagttataatagttcggatagcaaagatttgatatgcaaattatcaaccttggagttgatagatcgcatgcttttgctgagtacttatgactcgagctcgagctggctcaaacgacctgtgatcttaggaattcgcgttttaatattatcaaccttctgttctttctgagccaaactttccaactctgattctaactcttctctcagtgactccacttggccaccagagttatccttttgtgcttctacctgctggtacctattaatgagttcgatattctgagcta

SEQ ID NO: 65821 - DNA, 507 bp, Glycine max
  Clone ID: PAT_MRT3847_30451C.1
aaggaaacccgcctatttttttcaggaaaggaaaggcgaaaaggggaactttaaaattgggccaatgggacccccccccccccttcaaaaaaaaaaccttattagggcatgggcccaaccttcaaacgacaaaaaaaccaaggggaaggccccaacctaagaaaaggaaaaggcttgggaaaggggcgacccccgcagctacttccattttttatttaggccccaacaaaactagcattggaaaaaaaccaaaatttaaccacccccttggggaaaaaatggaaccccccggggggggggagcaggcttcccatccttaaacaaaagggttcccctgacaaaaggccccaaaacttttccgggaaaccctcttcccatggaagcaaaaagcccaaaagggtgggggaaaaccggataatctttttcccgggcaaacccccggttggggggccaaaccacaaaatcggggggggtcccaacggggaggggcccctttgattccaaccc

SEQ ID NO: 65822 - DNA, 153 bp, Glycine max
  Clone ID: PAT_MRT3847_30452C.1
cagcatgggagttgcatgtgtggcatcgccagtcaacaatcaacaatcgcgcgtggaaactcactcttgcgaggaaaccagaatttgcatatgccgttagggtttgaggcacatagttgtaccacaacacttggacggcagagggtcgtgtta

SEQ ID NO: 65823 - DNA, 143 bp, Glycine max
  Clone ID: PAT_MRT3847_30453C.1
ttctctttttctccgaagttccaggcacgaagcctgaaagccaggtgggaaatcgtatctttgaaacctggcattctgaacatatcgtccatgaggacctcaccggaaagagcttcgcttggtcgcaacaaattttcgggcga

SEQ ID NO: 65824 - DNA, 136 bp, Glycine max
  Clone ID: PAT_MRT3847_30454C.1
catcttcttccctaatccccgtaactggtccatcaagatcaaccgcaaggataagcgcctcgccatctccacctctgttgccagcgctgccgccagtgccgacgaggcgtatgacttcacaccggagttctccgag

SEQ ID NO: 65825 - DNA, 134 bp, Glycine max
  Clone ID: PAT_MRT3847_30455C.1
cccacgcgtccgccctacgcgtcctagattatttgacacctggatcagagacctggtcggttacattgaaaggaatgcggacctaccacttgcccgaaatcaacaaagcttttgcaaagcgagttgcagatatt

SEQ ID NO: 65826 - DNA, 190 bp, Glycine max
  Clone ID: PAT_MRT3847_30456C.1
ggggaacccaataaacgataaatacgaacgaatttacagcctgaaaatagactgattatataaaccctgcccaactgcaagagcataaaaactaaatcctgttacttcgactactactacgtgaataagaccatgcttttttgcgtgatctcccataagtactgaacagatgctggggcccctcgatact

SEQ ID NO: 65827 - DNA, 2338 bp, Glycine max
  Clone ID: PAT_MRT3847_30457C.1
attcccggggtcgacccacgcgtccgggttttagggctgatgtcattgttgtggatgcagagaaagatagaaggttatctatgttgaagcaactaattgtggcattagttagaggattgaattcaaatccacctgcgatgattaagaagatagctggattagtttctgacttttataagcccccaaatgttgaaagtccagcaaaagctgcacttgaggaatcatgcaacatgtttgagaatcgtggtgtccagatgctggggcaaatcaggcacggttcatgctgtcctcgagctatcttatttaaagtattagcagatagtgtaggtcttgaaagtaggcttatgatgggttttccaaatgatggagctgctgaatgtgtagactcttacaagcatatgtcagtgatagttgtgttaaatactgtggaactgctggttgatcttatgcgttttcctggccaattattaccacgatcaaccaagtcaattcttatgacacatatttctgcagcaggagagagtgattctgcagaaaatgagttcctgtgattcaccattagaaccaaatagtcctttatatggggtttcagagagtgttgaaaaggaggaaaacctccaattccatagaagatttgaagtgtcttcaaatgtatcaggccttcccctgcgatatgatgttacgatcaaataccagtctggacaggaatttgagtttttctcatagtgaacccaacattgcaactgcatttggtcggcgtagtcggagaaaggtcattgctgaacagaggactgctagttcaagtccagaacatccatcattgcgagctcatggacggtccaagcttagtggtgacaggactgcttttagagattttgctgatgaccagtctacactaagatccagctacaagtcagatggtgcttcctcatcagaagctcgtaggatacgaagaagaagtatcagcattacaccagagattggtgatgatattgctagggctgtccgggcgatgaatgaaacgctaaagcaaaatcgtcttctgagagagcaggggggtgatagttcattatctcattctccaattgatagaaccagcagttcagatcttcagaaaaatgtgtcaaatttccatcttgataatcaccatggagaggtcccccttatatttgcgtgaccctgtgacgtctcaaaaggcaatgtcgttaccctcttctccgcatgattatagaggacaagcttctgagagaagcaaggcgtcagaatatatattgaatgatgaactggagtttacttggaataaaatccttgaatcaccaatgttcagtaatagacctctgttaccatatgaagaatggaatattgatttcacagaattgactgttggaactcgtgttggaattgggttcttcggagaagtttttcgtggcatatggaatggcacagatgttgcaatcaaggttttcctagagcaagatttaactactgaaaacatggaagatttctgcaatgagatatccattcttagtcggcttcgacatcctaatgttattttatttcttggtgcctgcacaaggcccccacgcttgtcaatggtgactgaatacatggagatgggatctttgttttacttgattcatgtgagcggtcaaaagaagaagcttagctggcggagaagactaaagatgttgcaggatatatgccgtggcctgatgcacatacatcgtatgaagattattcaccgtgatgtgaaaagtgcaaattgccttgtggacaagcattggatagtgaaaatatgtgattttggactttcaagaatagtaacagaatcccccacgagagattcctcgtcagctggaaccccagaatggatggctcctgaactaattcgaaatgaaccattcactgaaaagtgtgatatctttagctttggggtgataatatgggagctctgcaccttgaataggccttgggaaggcgtacctccggagagggtggtttataccgttgctaatgagggtgctcgattggatattcctgatggcccgctaggcaggctgatttcagagtgttgggcggaaccacatgaacggccaagttgtgaggagattctctctcgattggtggacatcgagtactcaatgtgttgatgccagtgtttttatcttttgtacatagtgaactttgggtagagttgtaactttgtgctttcggctgatgtgtaaactatgaatttttgttccttatctgaaaacatatatatttgaagtcatacatcggtgcgtgttcctaagtttcatgaagggcaatgaaaagtaaatccatcactcacaaacac

SEQ ID NO: 65828 - DNA, 457 bp, Glycine max
  Clone ID: PAT_MRT3847_30458C.1
ctcgagccgattcggctcgagacggctgcgagaagacgacagaaggggggattgcatgtgaatgctattttttctcctgtttgcttggtgaactgattctggatggaggtttgtgaaagggttgttgtggttagaggcttgagaaattcagttaggattcttagcgttttagggctgtgtttgaattgtgtgtgattttgaaattttgaggaaaaaaagggtcttatgcttttgatcttgaataaaggcacagcctttgggtagtgatttaggttggttagtcgtgtgagtggagatgttggtgaagaatttttttttttttttgaatatctgtagtttaggggagttgggtccggacctcaccaggaccatgacatgccttaaggctcactgggcactgacagatcacccaacaacaaggttctcacattgcgaaagggattcgaatccacatcct

SEQ ID NO: 65829 - DNA, 451 bp, Glycine max
  Clone ID: PAT_MRT3847_30459C.1
gggcataagagtgttatacactgggagcaaattttttttcgaagccaaataaagcctaatacaggggctgaatttttttataaggactaataaaggccaattaaaggcttgctaaaagattccaaaattactccaaaaaaaatttgggttggagaaattccctcaaaacagcctctaaactagaatatttgtggtttattacccaagcaaaacagtttttcaagcaccgtttacgatccttcccccaattgggtagctattcatatccgctagagccagattttttcccgtggttgattctttcaagctgaaccggggggtccttaacccctcctttctttgcactaaaaaaactttagaaaactaaaacctttgtttctccaaaaccacaaaatgtttaaaatttggcgccttttttttttcaaaaacttcaccaaaccttttttttggc

SEQ ID NO: 65830 - DNA, 642 bp, Glycine max
  Clone ID: PAT_MRT3847_3045C.1
ataagtagcattgtcagattacagctggagcgtgtgcaaaagagaattgcagatcgcaagatgaaaatccaagtgacggatgctgctgttcaacttcttggaagtttagggtatgaccccaactatggcgctaggccagtcaagcgagtgattcagcagaatgtggagaatgaactcgccaagggtattctcagaggagagtttaaggaagaggatgcaattctaatagacactgaactcacagcatttaccaacggccaacttccccagcaaaagcttgtttttaagaaacttgcagctgattcagaatctacccctcaaggcaccttggaacccttcccacaggccccatgaattccttctacttgctctatatttttccttcacacacaaatttgagcatacagtttccttataccaattgaacaatgatgccggtgtagtttgcatctaatatatattttctattaccaatgtagatgagccaggctgagcttatttcagtaatattgagttggattaattccagcttggttaaaaattaatgcttggctatgagaagcattaaactgttcctgctggaaagatacaagcaataaggctgtatttgattcaatgatttagtttaagtaattattttaa

SEQ ID NO: 65831 - DNA, 303 bp, Glycine max
  unsure (1)..(303): unsure at all n locations
  Clone ID: PAT_MRT3847_30460C.1
aaagttaagcggaaaccccggccggaccgaacccgcaaggcccgttccagacccacccgtttcgnttttattcccgagcgacgagaacaacaaagagaggaggagattgcgaacacaccccaaacatcccaaaaaggaagctcggaacctaggcaatcccggcaacgaacccttcactctcgcaccctgcaggagaaagccaagctacgagcactggctactcccacgaaaactacttggcaagactgtttggctcaaaacacttcccaattcctggacaagtcatgcaaagacccttaatga

SEQ ID NO: 65832 - DNA, 766 bp, Glycine max
  Clone ID: PAT_MRT3847_30461C.1
attctaacagaaaaatgagaagaagcatgttgatgttactactatgcttcctattgggcaaatttacgtaagggggctcattttacaaagtatttacgggatggggtctgtttcaaaagaaataacggagggggtttgttttgtggaggaaaccgccattgccactggcggcctggctcaacccgccattgccagtggcggcaaaggtggagagaagggtgtattgtcactagcagcggcgatatggccacgtaggatggagagagaaagggtgtcgccaatgggaacggcgacacacccagctggagccgccagtccaactggcgatatagcccacgtgggactcgcccacacggctggcgagacagcctgcagctagggcacagctagggcactgttaggacacgttattttatcaattctaggccattgttagggcagatttttgcttcagaaggatgcagtaatagcaggtctaggcatgtggaggtaacatgtattcagaagcatgcaatagcagcaggtgtaggaggtgacatgcgctttaatggcgtgtaacgttccatgtgtagcttcagtttgtgtaaattttctttaaatagagtaaacttccaacgacaaataacactcaaaaatttaacattgaagagagtatcagtgtggaagaggaagaaaaagtttcatttgaagagagtattttgaagtttgctgcttctatatagtaaggatgctttatatttatttaaataaagtcttcttttctttt

SEQ ID NO: 65833 - DNA, 379 bp, Glycine max
  Clone ID: PAT_MRT3847_30462C.1
tttcgctctttagtgctgctccttgcagctgtacttctatcccttcaagttcttgcaaactatgataatcccccagtgtacaagcctcccactgaggaaccaccagtttataagcgcccaagcgagaggcctcgtgttcacacacctccacctggaaaccccccaatatatcagccgtctgcggagaagccaccattgcacaagttccgagttgacaaaccatcagtgtccacgcccccagttggaacaccacgagtgtacatgcacccatttgagaaaccaccagggcacatgtcctcatgggagatgcctgtacctacaagcccccagctgaaaaaccttcagtgctcaaaccctccgttgagaaaccagcagtgtg

SEQ ID NO: 65834 - DNA, 438 bp, Glycine max
  Clone ID: PAT_MRT3847_30463C.1
attttctctacaccaagtctcatgcctcaaagtttctgcgtttaactcggctgctatatcttttctcagctctcctttgatatgtttaagctctgatttggaccttattgaggatatctttggttagggcgagtgattgtctaagaatctcctcattctccttctccacaaaatttgtcctcctaaaagaggattgtcccacttctaccaatatcatagcatctgatccatatgaaagtcaaaaaggggtctcacctattgtcgactgtagagtgtaacgatatgcccataagatggcaaggaattcttcgtcccatatgcctttgccttctctaactctctttttcagctctttgagtatgaccttatttgctggctcagtctttccaatattgctttgcgagtggtcaaccaaggttacttaatatttgattccca

SEQ ID NO: 65835 - DNA, 204 bp, Glycine max
  Clone ID: PAT_MRT3847_30464C.1
cccactcgtccggtaatggagggctcacgaaatgacagtgcttaagatcacatgcagcgattatgataggtcttgcactgcgtgaatcattgattcagctgtgctttaccttttaaactcttgattgacaaagataaactcggatcatgatcatctctatctttacaaacacgtggacggaacacatgggggcgcccggtattt

SEQ ID NO: 65836 - DNA, 559 bp, Glycine max
  Clone ID: PAT_MRT3847_30465C.1
cccacgcgtccgtacggctgcgagaagacgacagaaggggggggtcaaagactccactcacacacagcgcactcagtttctctcgcacgaatacaacgattgctagcgttcccctcttctcggggacccagtagtcgccgtcgcagcctccgttggccgtcagaaaagaaagcctcactcgccccccagtttctctctcaaacgaaaagggatttaggtcagggttcctttcctttcttctcgcgccgtaccgctcccccagtggccgccgtcgcagccttcaccgttgatatagtagctctctaacgctgtcgtcgcagattctagtggttctctttctctatcgccgttgcagaatggaaagcagggaaggcaaatcaatttctgacttgtacgaagaaatttgtcacaaattcagagatttcatgacagagttatcaaagattacactacttggcatcttttagtatttttctatgtctggctttcaacaagcacttgattttattaggaggcctcctatagatacgaattctaaattagttcacaagataattgt

SEQ ID NO: 65837 - DNA, 310 bp, Glycine max
  unsure (1)..(310): unsure at all n locations
  Clone ID: PAT_MRT3847_30466C.1
gatnncgtngacataagnncgnaattnggtcaagngagagngangngtnggttnntncgaggcaanaattntngnnnnagggcaatnnnaggcataangntatggncgnagcncggaanggatnacnggctatggtgnccntactncgngaangaaangcgnaagtnagangnntnccngnagaagcacagaacatangtggggtngagaacnattccngaagaatgagttgaagcnagaaaggaatacatncatggtnaacaatatagatnanannccaaaanagttaancaanaaggcgtcactntnn

SEQ ID NO: 65838 - DNA, 389 bp, Glycine max
  unsure (1)..(389): unsure at all n locations
  Clone ID: PAT_MRT3847_30467C.1
gagaatcacaaattccagaaagatggcaaataaggtcaacgggtagaggacccagctttgggccttggtcatattaccaatcaaatcaaactagtgcataatataaagcatgtatatgtgtggcatgcaataacaggatattggggtggtgttagacccggngttccgggcatggagcactacgagtcaaagatggtcttccctgtctcatctcctggagttgagtctaatcaaccagatgaagctttgacaacaattgccatcaatgggcttggccttgtgaatcctgagaaaagttttcacttttatgatgaactccactcatatttggcatcttttggtattgatggtgtcaaagttgatgttcaaaatatccttgaaactcttgg

SEQ ID NO: 65839 - DNA, 606 bp, Glycine max
  unsure (1)..(606): unsure at all n locations
  Clone ID: PAT_MRT3847_30468C.1
gatgaatcaatctaaacaatttttattcaaataaaccatcgcgttctttttttcttttcaaattccctcataaagaaccaatgatttacatggggaaaacaggactgattattccagaacccattggttcactgaccagaccaactgttgttactcctttattgacttcagccatgccttgcacatgcatgaatcttacgcatatctgggaattaaaattccttgaattcctgaatttctgatcctcccttatgagataacatgaatgccgcctttttgacatacacccccagcgccgtaaccaatacgatgaccacaaaaatgttcactccatatctttggcctcttaattaactctgcacacttgttacctccaaacccttgcttaacaatatcccggtcttctactgacctcaaactcacagtgaaatctaaaacccttgttttcagtctctgggttatctttggtttagatgaagtagacgttgctgatcctaattcttctgctgtctctagcaccccattagtcctcaccttcttttcagcaactacttcttctgttaagttatccttgtctttancgtcatcactaatggggctcctctc

SEQ ID NO: 65840 - DNA, 701 bp, Glycine max
  Clone ID: PAT_MRT3847_30469C.1
aaaaagggacatgttatataataagttataatttttaaatacaataaagtgtatttactatcatattatttttttaactaaaatataagtaaatgtttggtactcatggttgctaacatatattcacttatttcttttttaaagtatatgttattaaattataactttaatttttcaaaataaataaaaggcgtgtaatttgttcaaatatttcactcaaaaaataaatgagcatagttatcatatttggagttacgttgcccccaatgaaggcgaaggtaaatctcttttaccttattaaagtgacatcattttataaggtaaaagttctttttattaactacagttgctagctatataaaagaagaaagaaagaataatgtacgtctgttgtggcttcaagacaaaattttaaaattagccaggattattattatcatttctatcgtttttaacaaaaaatattatatttctttttataaataaatgtataaaaattaacttatacatatattttcttactaaacaatatagcaattgtaattaaaaataaagataaaatttccccctcttcaaccttatttattttctgttttatctccattgatcttgcacacgtacgtgtgcacgtttacttataaaagattaaaaacaaaaactctaaaagcaaaggcaaagtaaaatgatatataaagtgacag

SEQ ID NO: 65841 - DNA, 169 bp, Glycine max
  Clone ID: PAT_MRT3847_3046C.1
tgagaattgggcattggctcagtcattctgaggcaggtggcgctgccaaacgcagaacctccgggagaaattgccaccgcaaagacgtggaagacgggtactagtagtacatctgccattatctcatattccctgtactaattacagcatcatgaacagcgagcgacag

SEQ ID NO: 65842 - DNA, 217 bp, Glycine max
  Clone ID: PAT_MRT3847_30470C.1
agcttagtcactcccagcatgaccctcactcgggccaaggtggaggtgaacatgcctaggaaaaggaaaggcaattgctctcagcatgaccgggccttggagcggttctatgaacaggtggtccaggctatccagcgccacatacactttgatgttgtaaagtgcatcctggtggccagcccaggatttgtgagggagcagttctgcgactacatgt

SEQ ID NO: 65843 - DNA, 697 bp, Glycine max
  Clone ID: PAT_MRT3847_30471C.1
accacgaggtagggggtatagtatagtattaaaattcaattacattctaaattctctattctcacatgaacatttcaaaatataacccgttacaattaaaatgcaaatggcataaaagctataatcttgatttattgtccacaactagaaaatgagtacataacgctacctagctctaggtagatacatatctacagaaagtcttgaaatagaacagaaaagaggagaaaattgacagactaaaatcattccaatgacttgagcagcctaaataacgcagctgcctctctaatccgtgaaaactcgatgcaaaacgcttgaacttcaatgaagagatctttgactgcaagtttgatcatcactaaaatcaatgacatgcttccactttcactttcttcttgtgttccattaaatatacaaatattgcattcaactctcaatagcaaacaacaaataagaaacccaaagaaaccaggcaaaattacctctactgttattttaaaggagattaaaatacaagagataagatatcctcaaaaaactaatcaaagaaaagacaaaaaaactaagcgtgaaacatgtaatactgcatgacaatctctcagaagaaaacaaagaccgtcccctaaaaagtccttggtcacagaatctaagtgcaccagtcaatcctgaataaactccaaagttaaaagtcgag

SEQ ID NO: 65844 - DNA, 422 bp, Glycine max
  Clone ID: PAT_MRT3847_30472C.1
ttgcgtggacacttgtgcttttccaatcagtctctcttttttgacgaatcagctgatgaggcaaacgctgacccaccttggatgagcataatacacagaatgcccaagggacacttacgaaaacactgacaggactatttgatgacaagagatactctaccatactgctcgaccaggaaagggactgttctggaacctatggcatgggcacaatatacccagggaccctgctgaaccatcaaggaccctggcgaactggctgactctgtaacaaccatgttgacatcgatgctaggattgattatcacctcaaggcttggatgcctcttgagagctacaccaacttgtaccaactatctggagttgttgtcgtcaaccgcacaagaagacctctatttacattccaccctgcaagagaggac

SEQ ID NO: 65845 - DNA, 262 bp, Glycine max
  unsure (1)..(262): unsure at all n locations
  Clone ID: PAT_MRT3847_30473C.1
gaggatttcggcgctttcattcataagcttcagctggcttcctcctccccagccttctcctcccaaggctcctcatcccctcacctcantcaccttcgcantttccgantatttnacatccatggacacgtgcctcgttnggngcatgctgantggnctaggactcangaaccctcttcttccantgtnnacgtngtnnnnnctctcgtcgagggcggtgcaacctgcgttgcaatactgttctcgacgattagtctaggta

SEQ ID NO: 65846 - DNA, 306 bp, Glycine max
  Clone ID: PAT_MRT3847_30474C.1
attcccggactcgacccactcatacactacttctagatctccaactaccacccttttttttttttcttcactttctattattaaatgaacttttctatatactggggctactctttacaattccctatttacatattcccacaacattattccaaacgctcttaaattcttcaacaatattttatacattcaattaaaatcatacccaacaaccatcaacaacatcactattctttaagatttacaaaccacaatttttctttacaaaatataaaacattcattataccaactttatatacaacta

SEQ ID NO: 65847 - DNA, 552 bp, Glycine max
  Clone ID: PAT_MRT3847_30475C.1
ttaccgtgctacatgtgagtagtaccaccttcttgggggggggggggggctgacgcgaatacgccgagaggggcaggcacaagcacagacgaggatacagataaaggaacctataggcttagagtggggcggatagattgtaaatgccgagatagattagaataatactaagacagcagcatagaaaggagtaataagataactaagaattttaaaggcaaggggcgagtactatggaccgctccttggtagcaaaggaacgacagcccaatgggagccgacgccgaagaaaaagaccacagccaactggagaggaaaggagagcgtggccgaccggtgagcctgcacaccgcagaagatgtacgaaaatgcagacagatggtctaggaagagtatcggaggtaaaggaaagagtatccgtgtgactatatgtgccacacatggcacccgactcgggctccgtactatacgacggcgacagccgcgagggtgcgtcaatttaccacacgggggcttatgcactactagtaacagtatcaaaagtaacggcag

SEQ ID NO: 65848 - DNA, 271 bp, Glycine max
  Clone ID: PAT_MRT3847_30476C.1
cagagttcctttctttctcctaaggagatagtttcttttcttcataagctgtcacaagttgataaacaaaacttcatacccgttgctctcgaagagtgggacaggaaatatcttgaacttctttatgggatttgtgcagattcaaataaatatcctttacccttgcgtcaagaggttttccagaaggtggaaaggctatttatgcttgtttacgagccagagatcctgaagttaggatgatatttttctctctctatcatgagtctctcgg

SEQ ID NO: 65849 - DNA, 472 bp, Glycine max
  unsure (1)..(472): unsure at all n locations
  Clone ID: PAT_MRT3847_30477C.1
ncgnnanccggctcgagtgacgacaatgaagattatccacctctctggcaagtcatgttgctcttggttcttactaggcctactctctatcattgcttcccttgcttcagctgcagagaatcactaccatgagtttgttattcaaactgtgccagtgaagaggctgtgcagaacccaaaacatactcactgtaaatggccagtttcctggcccaacagtggaagcaagaaatggagattcccttgcaattaaagtagtcaatgctggaccatacaacatctccatccactggcatgggttaaggatgttgagaaatccatgggcagatgggcctagttatgtgactcagtgtcccattcaaccagggggaagttacacataccgctttacaatccaaaaccaagagggcacactattggtgcattctcacactgtttttctaagacccactggctatggagctctcatcatt

SEQ ID NO: 65850 - DNA, 611 bp, Glycine max
  Clone ID: PAT_MRT3847_30478C.1
cggaattcccgggtcgaccacgcgtccggctattttaacctagatcaaagatgacggtgctgtgagaaaagcgtgagtgccaaaaattcacagcatccgaggagcacgtgaattccgacatgtaacggtcgaaagttgtaacccaccacgacgagtttggatctgtcgtttacaaccatcgccgatctccgccttaaacgacgcttcactgtaaccaccacactctttctcctcaccgttgcaacttcacagcactgtgtagcgttctacttttattttcctgttgctgtcagaagaccgtttagcaacggaggttttgaagtggttttcttgcttcagctacctgatgaggaattgatttattgatctatgaggttgtcgctctaatttattaagcatggataaagtttcatcagactgtccgtacccgggatgcttcttttgtgtcatgaaggattttaatccaagcaagcgcagagcaagtgtactgaaattctttagagaactaccgtgtcaagatgaagatggttaggtgtctccctatcagggggcctttgggacacgggtttttgctctatcaaaagacccctgaattcatcgagctaggaata

SEQ ID NO: 65851 - DNA, 344 bp, Glycine max
  Clone ID: PAT_MRT3847_30479C.1
ccctcgcgtattcacaatctttgatctgaaacgattaaccgaggcactttttctgttctaatgggagcaagtgcacgaatggtcgcaggtccgcataagccaatatagctctgttcagattctacacgataattgtgacagcgggtctaaacccttacagtgtttgtatggacaaatctgtctgataagcagtgatactgctaaattaactggcaccggtgatgtgataagtgcttgcaacgagtgagctttccctgtgtgtcgcccttgttatgaatatcagcgacaggatgtgaaccagtcttgtccacagtgcaggactagatgcactatgctcataggga

SEQ ID NO: 65852 - DNA, 697 bp, Glycine max
  Clone ID: PAT_MRT3847_3047C.1
gtacggcccagctcttcctcaagcgggcgaaatccacgccgcgcggcggcggcggcagaggaggaggaggggatgatggggtgcctcttcgcctgcttccgggcgtccggcggcgatggcgaggtgaagggcaccggcggccagctcgcgcatccgtcccagccccccgcgacgacgacgaccagccaccaggtccaggatggcgcgggcaggaggggcaggccgccgtcgaggaacgcgctctccgccgtgttccagcgagaagatgagggatcaaggacggcgcaagtggcgagctcgtgggcggacgagagtggcgagaggaaggagatggatcaggagcttgtgcatcaggccattatccaaagaagctgtggtgcgttgctgcaaactacaaataacattcaaagagcgctcaaatatgctgattcagttcatcagaaggaaacacattcaggatgtcttcctgttgtgtctgatgatctacatttcatggaagcgccgaaggttgagaaatgtgaaactccttcaaggtctcatcagagtttcactgttccagatgcaacgagttcttcaaaaacaaatgatgagttgcagacttccgctacttcccttgcaaataatgtgaaagagtcaatgaatgagaacaacatggaggcacttgtgcaggatgaagagcaacaccaagctctggata

SEQ ID NO: 65853 - DNA, 448 bp, Glycine max
  Clone ID: PAT_MRT3847_30480C.1
tacgcgagaagacgacagaagggtatatactattaaatataatgttaattatttactgttcaaaataatgaagcagtttaagaaatcgaacaactaaactttggcaactagcacatttactgtgggattcaaatgacaaactttatctacaatactaatatttagacatttagacgtacattacatatgtacgtaaattaatctaattaatttgagttgaatgggattgtggtaacatgattacatttttaacttaattattaattaagttaaaagttaaagcaactcatatatacttctcaggtcaaaattcatttttcatatgcctgcaataagaatatttgcagaagatttcgagaatatgcttaaagttagaccagttaaatgcgtgatttgagggccaaaccctacattaccgatcccaacttaacattcagacatgtatggg

SEQ ID NO: 65854 - DNA, 620 bp, Glycine max
  Clone ID: PAT_MRT3847_30481C.1
agagggaaggtagatactatcttggttttgcaaagattatggaagttaattcctaattgcccagatatatgcagaggatatcatatttagggctactaatgactctctgggcgaggaattttccaagcttatgcaggttgagttcgagatgaatatgatgggggaattgaagttcttccttggacttcaaatcaagaaaattgataggcatatacatacatcaatcaaagtacgtgaaggaacttttgaagaagtttaaggggacaatgcaaagcatatgaaaacccctatgcatccaaccattgtacttagactagacaaaaaatcaagaaagggggacgaaaagacatatagaggaataataggttctcttttgcatcacactgcgtctaaacttgacattgtgttcagtgtatgcctctgtgccaaattccaaaaggaaccaagggaagttcatttaattgttgtcaaaagcatatttagatgtctaattggaacttaaccttggtttgtgctttaagagagacaaagaatacaagttgcttagttactgtgatgcggatttcactagagatagagtggaatgaaaaagcactagtggaagctgtcacttcatcgat

SEQ ID NO: 65855 - DNA, 1450 bp, Glycine max
  Clone ID: PAT_MRT3847_30482C.1
gaaaagtcccgtaaaatttagtaattaagaaatcgaagagcaacacagcagagtgaagaaggaaggggttttgttttgttgttctccatgtccatgttgtcgatgaagggcaaaaggtttgtatcagtgcctgtgttggcagtgattttgttaatggtttttgtgtattactgttcaatgttcgtcttcctccaagattggctcggtttgcagagttcccctggcactttgaatgcgttcctcttctctctctttgcctctctctccctcttctctttcttctcctgcgttctcactgaccctggccacgtcccttcttcctacgccccagatgttgaattctccaaagataatgcagaacagaagaaatgtgacaagtgctttgcatacaagcctcccaggactcatcattgtcgagtttgcagaaggtgtattctgaaaatggatcatcactgcttgtggataaataactgtgttggctattggaattataagacattctttgtttttgtattctatgccaccatggcaagtatttattctacgatcatatttatgagctgtgtatttcagaagtactgggatcccattaaaggaagttctcttaagaccttttttgtcttgtatggaacaatggtggtgggtttgaccataacccttttgactctttttggatggcatgtctaccttatccttcataacatgacaaccatagagtattatgaaggaaagcgtgcaaaatggttggctatgaggtctgggcagagctaccggcatccattcaacattggcgcatacaagaacattactttggttttaggtccaaacatgctgaaatggttatgtcccacggcagtaagccatctgaaggatggggttagcttccccacgttacgtgataattcttaaaactttctggtctggccaagtcatgaaccaaagcaggtcatgcatatggatcttgaaatgaggaattaagaactcattcatctgaatttgatattcagaaaagagtttaaagagaaaagacaattgatcaacaagctttgagaaagtaaagcttatgcaacgcgttgatagatatctttaccaaaaatgtttcaatgtctgtctttcaacagcttggcttcatcgtagattgttgaaaatggaaactttatttagagcttgtaaatcaggtaacacaattttactccaattttattcctgacagtagaattcagtcttagcacatatttagagtaattgcaggtatgtcacaaaggccttttcatagtgttaaaggagagttttagattttgtttgtaggtttagccatattggttgtggcatcttttatgttcatttcgttattgagaaatgatcttcaatttcctgtgtgtaaaattgatgattgatgattatatgacttctatgtattttctgttcatcttattgtataatgacttct

SEQ ID NO: 65856 - DNA, 520 bp, Glycine max
  Clone ID: PAT_MRT3847_30483C.1
gttagctttctccaagtggtcatggtgtccttgaccaagaaaccaaagttctacggaagcagaccatgaggggtaatttttccagttgagtttagcagctgtgatggttggagtcccggagaaggagaaaacaggtccaggggaagccattttgagccacaaggtgaaaccctaagggagcaaaaaggtggagagaatagggctgtagtgttccaggtgacgaaactggaaactgagggctggaacggactcaggagaagccgaccaagagaacggcggaggcgcggcgcgtggactgcacgcgccggaggacgcgcgggacggtggcggcgcgtggctgctccgttgccgacgcgagttggccggctggctcgcgcttcccaaggcgagcctaaccctggcttcgccggagaaatgaccgccggaaagtggcggcggcagacggcggcggtggcggcgggcgacggcggatgacacctgccctgatgccaacttgaaatgaaggtgaggaggagtcaaa

SEQ ID NO: 65857 - DNA, 234 bp, Glycine max
  unsure (1)..(234): unsure at all n locations
  Clone ID: PAT_MRT3847_30484C.1
gggntcgagcaccttttgcttctctctataaactagatgaccatgcttaaacatgaccttgatacttctttctcgcacgaatctttgaacattgaacaggatactaaccatggctgaccctggaggcctggcaccaataggacttgctacactgcctctgagggggcgaaagcttgatcttaacaatgcttaaaaaggcttttccatttctgtctacaagcggaccgcgtccaa

SEQ ID NO: 65858 - DNA, 319 bp, Glycine max
  Clone ID: PAT_MRT3847_30485C.1
ggtggaatgatgaatgggcctgccatgaacatgaccatgaccatactcttcctcttaatcctctacatcaaagggctgcccacacacaccataggcggagctggatacatcaacttcactctgttaaactacataatactctcaacgaaacggacataataaagatctcatgtggaatcctgatgctgtcgatcatcatcctaccaccatgaacgttaaccaggactgcttgcgctgcactggtgcatgcttacatgtctactcctaggcctatgacttaaaaacaacactagccgctaagatagctgattatgcatca

SEQ ID NO: 65859 - DNA, 224 bp, Glycine max
  unsure (1)..(224): unsure at all n locations
  Clone ID: PAT_MRT3847_30486C.1
tcnngnagcgtacgtaagtcggaattcggctcgaggagttgctggtgtattgggcgcggcactaactatgcgcnattgcatggtgcctncgtagaaaatactntatttgaagatggtgatggcgcaaatacattnncgtggctttnaacngaanccanggctgaagaaaattanttcatggttactggntaatcgcgttggtcnnaaattctttgggggttnct

SEQ ID NO: 65860 - DNA, 764 bp, Glycine max
  Clone ID: PAT_MRT3847_30487C.1
aattcggctcgaggtccaaaacaactgaaagaaatagtgaacaatattgtgtcaccgctgaaacaaaggatcgaactaaaggtgatagaaataagctaatttcaagaatgaaagagctacttagaagggttgctgcaacaaaaacagacgaaagagaaagtttctatgatcaaaaggttttacattttagaagacaaggaaacatagaagcatttcctgaagatgatcaacgcatcagtgaatcacccaagatcagtttgacgtgggatgtggaaacctcttctgtccactcactggctacttggtctgaaaatgttcaaaccaagatttcacattcacatacttacatccctcgtagagagagtagtggcatcacttgtagaaaagaaaactggatcaccacagattctgaatttgtggtgctggaactatgaagaaaagtatctaaggaagatattctattattctatggatgatggaacttttcagcaaacaatcaacttcatgagttaatgctctgtctatgggtttttgtatacctaatttgataatcccggaattcctaggtgcttcccttaaaaaagttagattggtttggcaaaaaaagttgtaacatcaatattctgtgatgcacctaatgtttatcgaacttattttccttatgtctggaaaaaatatgtttggcaaaaaaaaaaaaaaaaaaaaactaaacttaattaatattgaagagtttacccgtcaaaaaaaaaataataaaagaaaaa

SEQ ID NO: 65861 - DNA, 816 bp, Glycine max
  unsure (1)..(816): unsure at all n locations
  Clone ID: PAT_MRT3847_30488C.1
gtgttttgtttcttctctgcaccctttgggatctcttgcatagaccaaccccagaagaaggaaaaaaataaaaaataaataaaaatcaacccttttttgtaaatccccaccttttgttctgctaaagaatttatttttcctttttagttcctgcaatttatctttctggatcctaattgggtttgatctttctctttcaatttggtgattatgttgaaaattcttgaatttttatggtggttgaatttttttcagggtttggatttgggggttaggttcagggtttcttttgaattggtgtggtgattggatgttgatctgggttttgtgcctgtcatgtatgtctttccttgggatttaattgggttttggaaattggaacgtagtttatccccaatatttttatgggcttcctttctatttcttcattccagatgcttctaacttttttttgtttgatttggtgattggatggtgtgcaattggaatattttacaattgtcatgtctgttattgaaatagaggtttctgcttggaaatcattactattttggttgtttatttgtttaaatttgtgcagtagatgttttgcttgggcaaataagtccttgttgttcatgaatctttgagaacttgcaaaactttgtggctttgatactgctgtataggattttgttatttttgtcatgtctattttttattctattggtttcttcttgatatttgatattgggggctaagattcgaatttgatactctatgctatgatccatgtncatttgattgggtatatgactttaacagtgccttccattc

SEQ ID NO: 65862 - DNA, 157 bp, Glycine max
  Clone ID: PAT_MRT3847_30489C.1
ggctcatagctatacagaaaaagccagcacgatgaaaccgatacacccaatcaatagtgacaccttcattggaagccttcaaaccccagttacatccaaccccttaagtgcatggtacttgcccaacctaaccgcatacaggaccgccgatgagccc

SEQ ID NO: 65863 - DNA, 311 bp, Glycine max
  Clone ID: PAT_MRT3847_3048C.1
gggggggaatttgtatttttgcacaactttatttcaccttctttttttttcccctaaaaaattgggcactggcccaaaaaatcaacaactaacgggccattaggaaaaaaaccatgcgggaccttttttggacgcccaaaaatcccggaacccacaaaaaaaactattgaaaaggaccccaacggggcccgagaaactgagaaccccccttaaaaaccccgaaaaggggagacccacaggggttgggccccccccaatggcacctcactaagggcggggggggaccacacaggggataaacaccgggcaaa

SEQ ID NO: 65864 - DNA, 220 bp, Glycine max
  Clone ID: PAT_MRT3847_30490C.1
tgaattcggatttagactcgagagataaccttgcctattttctcatctttacctctaaacctacttgcttggtacggggtctgtgttcattactgacggagctgtaactatatatgtaatgaaaacctatgcgtggtaagtgggctcgactatctaacccacctgacactctatctgaaccatgccaaactccattgtctttctgacttggtctctactc

SEQ ID NO: 65865 - DNA, 392 bp, Glycine max
  Clone ID: PAT_MRT3847_30491C.1
aaataaggagattcacaattttttaaggaatatataaggtgaagacaccagaatccaaaataggaaatgctacaactttttatcgatgcagctggacaagaaaaactactgaaatatttctttcaaaattcaacatatacatcaagggtttgctaagcaagcattaatgatttaatgtaaaagggccagcagtcggcatatttttttacaaaagtgacgtgttgacagaatttatctgctgatgctgaccgcaaataccaacataaaaatgaaggagacaggctcatctccatcttcatgcagggggtgctattttgctcattacatgcctttccattggtgttcattcaaaattcgatttcggaaatcattaaccatgagaggcaaccctt

SEQ ID NO: 65866 - DNA, 371 bp, Glycine max
  Clone ID: PAT_MRT3847_30492C.1
ggatcaacaatctgtctcatgatgtcacttttgccgccactccctatgtcactctaccgaatgcactgagaatatgcccgaggcatttaagcacatgcgcctttccaagagaaccactttgacggcagatgatgtccatgctgcactcaacctgataaatgttggtccaatatatggatgtggatcaggtagccctttacggctcaaaagagctgatggacaccataaactagttctatactgaagacaaggatgtagacttaacagatgagatcgtaagttttttaccaaaagcactccttgatactgcagttacatgccactggcttgccattgaaagcgtgcaacctattattacggaaaaagctcct

SEQ ID NO: 65867 - DNA, 786 bp, Glycine max
  unsure (1)..(786): unsure at all n locations
  Clone ID: PAT_MRT3847_30493C.1
gcatgcctccagttttaaaagccttttatgggcagtacagtttttccctgtttgctctcctgctttttcttctgttataccacctccgagcattggcatgtgctgagagagctaaatcaacttcaaccttgaacataaacatactatagttactaatgttaaacattcaaggggaaaacataaaaaatccacatgtataaaaatatatagaaaatcagcgatgatagtgacaatggcaagataataagttaatgaaaaattgataataaagacttattgacatagaacaacctataagaatttattcttttatacaataaataaaaaaataaaaaccttatcncacagggagtgtcttctcatcatcatccatttcatcaagattgttgcttaacagtaaagtcatgcagttcctgtcgagatgaagcttgtcaatgagaccagctactgggtttccagctttcttttcttccttcaccatccgagcaaggtcatcccagttcataccctttgcaagagctacacgaacagctaatatagcagcatccacatcttccaagttatattctatcaattctgccatcttaacacagtgatcagcttctttcctcaaagcatgtactcgattntcctacacagcagaaatgagataaanttatgctgagtatcagatatcattttttggagttatattnntgtgtcctggtggtactacattcaatcataaatgaattgttttaaattatagattgaagccagtactcanaacatacatgcatctgatta

SEQ ID NO: 65868 - DNA, 359 bp, Glycine max
  Clone ID: PAT_MRT3847_30494C.1
actattatgtgtcccttgcaccatcagcttctctctttggttcccctctcatcgcgtcataagcacctcaattctcactattctttacaaatttgaggttcaaacgctacgactagggtgcatcccgtgggttcctaaatattttttttcgattggggtgcagggagcaaataagggggtgtagtaagtaaaatccattagtgatgatgtatataaaaaccaaaaaaaatattacatgtactaaaagcaaaaaaaaagtttaggtagtaatttgaaatgtttaaaccatttttttatatctctaacacttttactattattttctctatttcctctttatcttaggataaattaccaca

SEQ ID NO: 65869 - DNA, 732 bp, Glycine max
  unsure (1)..(732): unsure at all n locations
  Clone ID: PAT_MRT3847_30495C.1
gaattcccgnnggtcgatacggctgcgagaagacgacagacgggggaggaaaggcgaggataattttttgcggagggaaggaggaaaacgacgacgcattgaatggagaatcagaaggcatcggcgtattacgagaacagagcggttcagttcggggtagtgagcaccgactggctcgctcaggcccagtccgccaccgtccattctcctcctcacaacaacgatgacgacgaagagataccgttctcggtgatatcggagttcgacaggtggcgcaaacaccccgatttggcggaggccgtggccgccattcgcgccttggccgccgtcatccgctccagcaaggcctccaccatgatgcagctcgaaatccaactcaaaaacgcctccgataccctcaaatgctgggatacaacctccatctctctaaccgccgcctgcgatctcttcatgcgatacgtcaccagaacttccgctttggagtacgaagacttcaattccgccaagtctcgcttgctcgaacgcgccgaaaagttcggcgaaatctccttcaaggctcgcaagatcattgcaatgctcagtcaagattttatattcgacggctgcacgattctcgttcacggattctcccgagtcgtgcttcagattctcaaactcgccgcgcagaataacaagctctttcgcgtcttctgcacagaggggagaccggatcgaacgggtttgaggttgtca

SEQ ID NO: 65870 - DNA, 620 bp, Glycine max
  Clone ID: PAT_MRT3847_30496C.1
ggctcgaggagcaacttgcatcatcagcgtcttctctttttctcagtttctccttcttcttttttaaaggtgctgcaagcatacgtgtgattttctggcacaagaaggaaaaagaaaaagaaaaaaaaacaacgtggaatcgcaacgggataaggtgaaacaccaacgttgtgaggtgtgaacaaagtgggctctgttatcaatatcattgtaatctctttctctgttcacgcaaaacttgtttttcctttttacttgtccctgttttgtgggagtggtcttacctattcgggtgagttttctttatgttgttttcatcctgttgctaatataacgccgtcaagattattttttttttgtccctttttcgcaattttcctaacatattggaacgaattggaagtacggcgttttatctggacttaacaagttctgcttttgttgcatgttgcatgtctgtcacatttgttgggagattaaaacgatgcactgttttatctcaatcttctcactaagttccggaattacactttctccggcttcaatttccgacaagtgaaagaccttttaaatctagcatcatgatttcattttcggcatttagatttggtttctttgtt

SEQ ID NO: 65871 - DNA, 164 bp, Glycine max
  Clone ID: PAT_MRT3847_30497C.1
aatcttgattgtgttgagcatcttcttgatcaaatcttgaagatacagcaaaaggaaagaggaggggaaaaaaaggggcgctccagagggattaagcttaagtaagccttgaagggaagttaaaactcctccaaaagggccactaaaatcaaattaagtggcgt

SEQ ID NO: 65872 - DNA, 359 bp, Glycine max
  Clone ID: PAT_MRT3847_30498C.1
cccacgcgtccgcccacgcgtccgcccacgcgtccgagctaagttgcagatgcaggtggacttgattacaaccaaacatggtatactgcagccaactgaaacaatttatgtgaaattagttaaagcttttctagaagctggcaagaccaaggatttagcagtgtttcttctcaaggcagaaagagaagattctcccttttccaatgacaactcagccttggttcatgttattaatgcatgcatttcacttggatggctggatcaagcacacgatcttctcgatgagatgcgtctagctggagttagaaccggttcatctgtatactcttctcttttgaaagcatattgccgggcaaata

SEQ ID NO: 65873 - DNA, 381 bp, Glycine max
  Clone ID: PAT_MRT3847_30499C.1
tcgtccacacgtcccgtatcaggtgtacaatacgacattatttctattctcttcccaaataagaaccttgatatgtttcatcatgtcactcctaattacccttattgaggaaaaaaaattgttggttcaaccaattttctaatatttcaagttaatgatatttgcgctccttaatatacttctttatctaaccagaccttttactttttgtgccctacttctgactctaaattttttgttccacaccttttttttcttctgattttctattataaacccccttgtaataaaagtgctgtgtggttatagtatatttctcttctctaatgtttagcttactaataaggctctattttttggctgaattaaataattgtaaac

SEQ ID NO: 65874 - DNA, 435 bp, Glycine max
  Clone ID: PAT_MRT3847_3049C.1
ggctcgaggggtgcgctccgttctctcatcgtaccgaacgctcgggaagttgctcactgtcacatactactctgaatggggtgtccagatcatggcccacgctgacgggcttgaccagaagaagaaatggacgtgcgggggatctgcatgcctctccgagcgtggtgaggattttgccaccgaccgtctactaccctacttgacaccggtgagtatactatttatatgaagaatgctggtgagtaagagctgataacatcttgaggatgaactgagttcagaggttatgttcagagtttctagcacgggaggccaagtgagctatagcattgatgtagcagaactgactgatgttctttagtatgtctacagtgcccgtgaggacaagatacagagggacgttggtcaccaatcttactcggataagatactgac

SEQ ID NO: 65875 - DNA, 249 bp, Glycine max
  Clone ID: PAT_MRT3847_304C.1
gggaagtttcctagaagctcaactcacttcacaattatattcgattgcttctgttagattaaaattagtttatcgcactcacatcaccttttccttattaccaacaataaggagtaaaaaaatccccctttcccctttgaacttttcattactgtgtcgctttagccaatttcaacgtttgagctttgcaggcattcattcattagtatcataatctggacattcaactagggtttgattcgtagtgtg

SEQ ID NO: 65876 - DNA, 311 bp, Glycine max
  Clone ID: PAT_MRT3847_30500C.1
caaattatccattttcatttcgggaatagcggtctaagcaatgaaaaacatgaaaatgggaaaataaaatgtttattatcttgacataaactttgtaaaggatacaaacagggtggccccactaaagtgagtgttaccaacccttggtatggttcaccagcacgactcaaattggttggaaattgcttacttatatggttgtcgctatagctttagttataggagaattacaaaggggttcctaaagaaaactcccccatcatcgggtgcctccttatttctcaggatgggctaccaacaggtgatggcat

SEQ ID NO: 65877 - DNA, 373 bp, Glycine max
  Clone ID: PAT_MRT3847_30501C.1
gcacgactgaccttatttttgatactggcctttaccgtagcatctattgtcaagccaaggctaacaagctgactgatcttattcgtcatggagtaggagcccatgatgcactgaccatatagacttcatgttcacaaaatttacattgcttgtgcattatgcatactacagttgctttggtaattgtgaacatcaacactcatacgtgctcatagctaggagacattattatcctatactcccaaatcaactaaatactttgattgttttacggtctttctgcatgataattggaatatctcgtattttaagacaaaaattgccctatacctatatatgtgctaggtacttacattcaatttgaaaaataaac

SEQ ID NO: 65878 - DNA, 309 bp, Glycine max
  Clone ID: PAT_MRT3847_30502C.1
acaaaatttgcttcacttgaatggaattccaaaaggagctagggtgacgttagtctataaataaatagggtgggattgatataggaaagagttggaaattttgtactcacaatcactcaaaccttacacatttgtccactaggatacagaggcgctcagaagagcaatgtatgaacttccaacgagaaagtaaaattgttcatttgatttagttctcctcctcttcattgatttttgttcgtcactctccattcttgtaatttctcttttattttcttacaataatataattctttcgttaatttaaaa

SEQ ID NO: 65879 - DNA, 340 bp, Glycine max
  Clone ID: PAT_MRT3847_30503C.1
gccttccattgtgctttatacctgaggaggtaaccagagccgttcacacccccctctctgttcttcaaaacgcaccttattcttccccctattttgcatcgcatttgttcttgaatctctttggtattcctcctcagagcctctaatcagagagagagagagagagaaagtgagagatggagagaatgttccctcccaagaagccctctactatgaattcccatgacagacccatgtgtgttcaaggagactcgggtcttgtcctcaccactgaccctaaacctcgccttcgttggactgttgagctccatgaacgctttgttgatgcctgtactcagct

SEQ ID NO: 65880 - DNA, 255 bp, Glycine max
  Clone ID: PAT_MRT3847_30504C.1
gcgataaaagctcttgaagaatacaaacttgctccacctcaaattatgaccaaatttgtacgactttaaaactttctactgtatctggggagagaccttcttaattcatgcttggaggatatttacatattatgcaatttgctctaccctaccatacttggatcaatccaccggggtcccattcttttgtcccataaaccttcctttgattcttacaatgggggccaaagagtgagagaccacccgcaggagtac

SEQ ID NO: 65881 - DNA, 913 bp, Glycine max
  unsure (1)..(913): unsure at all n locations
  Clone ID: PAT_MRT3847_30505C.1
ccacgcgtccgtatttctctgcccttgtttcttttgcattctttatatctccttcaacatcctttatccatctcaaatctgactacatctttcttacccttcaacaatggttaacccaagtactataattcccccatcctccgaagaatacactgttcataattctattggatcttcctctcaccaaatgccaccatcctcaaacaaaggttgtggtaggccccttggatccaagaacaagccaaaaatacccctcgttattaaccaagatagcgatcttgccttgaaacccatcttcattcaagtcccgaaaaatgtccgtgttattgaggccgtggtccaatttgcgcgccattgtcaagttagcatcacagtgcaatgtgcatctgggtctatcttggaagccactctctgccaaactcttcctgacacttctactttcgttgtttttggaccctttactttgatttccctcaccggaacctacattaataataacctttccgcttcttcttcatctttatcatcaccatctaatcttgaccataactgttcttttacgatttccttttgttcaaatttaggtcaaagctttaatggaattgttggaggaaaggttatagcagccgatgatgttactgtagtggttactattctcaaagaactttgagaatcacaaggctgttatcaaaggtgctggtgaggaaagggatagcaagaaaccttatgcatgtcatccagatgacaatgagaatatgtttaggttcaattattgttgtttgatttaatttacctgttttttttcttttaatatttcatgtatttgtacctctgtgagaaaaagagattatgagttcaaggaatgacaagaatcttctcccatggtggtttnnnnnnnnnaannannnnaaag

SEQ ID NO: 65882 - DNA, 227 bp, Glycine max
  unsure (1)..(227): unsure at all n locations
  Clone ID: PAT_MRT3847_30506C.1
cacacaatctcaaccaaagccttgaccatgaaagcaaaccctttagngntcttccttcctcttcaccataggcaaangggttcanaaccccaaatgngntgntaaccatnaacatgnccatgatgggtnaaaccttcaagtnnttcatgggntcaggccatggtcccctttangggcttaaaaagcaatggnantggggagagantgtgncnnaaannnnnaanggc

SEQ ID NO: 65883 - DNA, 143 bp, Glycine max
  Clone ID: PAT_MRT3847_30507C.1
atccatctttgtagctattgactgtctattcttctccgatatgttcatgcatggctactgccgctcactgagcaaacgtggtgtacgatttaaaactcttgtcttttctttgatgcacagattccgagctgttcatactgagc

SEQ ID NO: 65884 - DNA, 428 bp, Glycine max
  Clone ID: PAT_MRT3847_30508C.1
tacgatgcctgcacgcctactctagcatgatcctctggctgaagcccaattccacatcttcaagaaataaggacgcgcgatgcgttcatatagtcgaattggagcttattcagttacacttattaagcctatcctgaatccaaaggaaatgagatcggaattcctcggggaattccaattccacattgtcaagaaataaggtggcatatatgttcatatctgaatcggaattattcgttatcttattaggcctatcctgaagccaaaggaaatgatatcggaattcctcggtgaattccaattccacattttcaagaaataaggaggcaaaaatgttcatatatgaatcggaattattcgattacttactacgccgatccatgagccaaaggacatgagatcggaattcctgggcggtaccaagctcg

SEQ ID NO: 65885 - DNA, 267 bp, Glycine max
  Clone ID: PAT_MRT3847_30509C.1
ctactcactcactcatcagagctatatattaattttcttctaccaaaaaaacgcaaatcaggtgacgttgcactactctgctcactcgctccattgtctatcgattccttcaaatcaggtttttgcattgtgatcatgacattcgttgctgcacactgttctggtcatcaccacagggaattggaaaggagcattggtgtcatcccttgaagaatttgagtcaagaagcaaggggccaacaaccttaagagatattggactaagaag

SEQ ID NO: 65886 - DNA, 254 bp, Glycine max
  unsure (1)..(254): unsure at all n locations
  Clone ID: PAT_MRT3847_3050C.1
cttttcttctctctcaacaacntcaccngtcttcctcctngatcatgtccnacttcaagggcnagtaccatnntgagntgntctnctatgctgcgtacntcnncactcctggaaagggtatttcttgctgctgacgagtcaacagggacaacgggcaagcgttnggncagcatcagagtagagaacattgaatccaacaggcgagctcttagggngcagnctttcactgcccnngtgtncttcaatatctcant

SEQ ID NO: 65887 - DNA, 349 bp, Glycine max
  unsure (1)..(349): unsure at all n locations
  Clone ID: PAT_MRT3847_30510C.1
gatgggggttaataatgcagtcaaggctggatctgttgaggtagcacgaagacacgtatacattgaagagcggagaccaaacagtaacatcccttcacgacgaggaangangggtagaggtangagtagctatcaattatcagaggcacaaagaggacgttttggtccaaggagcttttgcaggggaagtggccaagatggaggtgaatgggagtataacaaacccaaaggaaacggtttctatagacaaagtacccgtcaagagaggggatattcttcaaggtatcaagggccaagaaatggtcagaaccctgcccaatcagcataaagttttaagagaaacaaattt

SEQ ID NO: 65888 - DNA, 239 bp, Glycine max
  Clone ID: PAT_MRT3847_30511C.1
cccacgcgttcgatttattgaggcgaatataataatttgaatctttctgtggtgctggagttccaccaaatgatcgagcccacttccatgatcaagggatttaaactggtggaggggagagggactcttgagtaaaaacagagtttatgcgggcacgacatatcctatcttagacaataattgtttcggcgacacagcgtcaattgctcaatactcataaagatcaaaacctcaaatta

SEQ ID NO: 65889 - DNA, 432 bp, Glycine max
  unsure (1)..(432): unsure at all n locations
  Clone ID: PAT_MRT3847_30512C.1
aaatacagctcaccacccattttccgctgtgcaggtgcactgctctaagatatggaatgtgtctccttcttccttcctccctcccccctttttacttttaagattttttacatttttttattgtacatggtgtttgattgtgtgtaaatacttatactataactatataagtttcccaaaatatttcactactttaaaccatattttcaatattcttcaaanctagttttattacactctttattaataaaatatattagagatactaagtcctttcttatttacactatatatataaaaaacanctaaaaatatattaagataatcttcctaccttatatttttcttacaagtacctaattatcctttaacaaaagttcttacagattctatctttcaatattattttctcttttattttcattcattact

SEQ ID NO: 65890 - DNA, 532 bp, Glycine max
  unsure (1)..(532): unsure at all n locations
  Clone ID: PAT_MRT3847_30513C.1
gtgcgttttgtttttttgtagaattggttagccaaccacaatcggttgcgcaagcctgtgaatcggacatgccacactcccttatcgatcgatcactcggccacaatatctacttcaatcaccgtcactccttgtcctaatagtgatggcagtcgtcagtgtgacgcccccggtgacgataagtctctcgagcggagtttcagtcgctgtcgcaacggcagccccggttctctaccggtttcgaggtggagtagcagcccgtccccttccccggctccgactccggatatgcgcggctatagcctgagacgtacccaatcgcctttatggcagtgtcagcctcaacagcgccaacaacgaggcacaccagaaccccttttcagcccagacgagggatctgagtcgcagtctgcaacgcacactactacatggagtacggcacacacacaccctggtgccactaacatcgttgtcccacttgcttttccagcccttggcctaattaccggnccaaccggcaacacacaaacac

SEQ ID NO: 65891 - DNA, 429 bp, Glycine max
  Clone ID: PAT_MRT3847_30514C.1
cgactttgcaagctccagcatctgctatctgactagatgacctcgatcctgatgcttggtcttgatgaatatgacaccaggatgcccctcagtcaaagcttcgcgcccagatgatagacaatgcctctaagaaatctgtcgaacactctatgcaacatcatgatgcatctgatagtacagggaagaaagaggatcctgactgagctagcagctcaccaaagggcccttgtagatatgattcgcattccattaagattggccctcttagctgtacggagcgccacagcactcattattggacaccagcatatgagagcctagatctcatgttctctgcaaagcatagcatacttgcagcttgcaagagacatgcctcgcttatagtgagcagcatgatatgtgtggaagatcggagcctagatgcttaat

SEQ ID NO: 65892 - DNA, 615 bp, Glycine max
  Clone ID: PAT_MRT3847_30515C.1
cggccgctcgaggcggcaggccggggaacttctcttcctcgcaacttgttccatttttcttccttcctcattcctcacttccgtcccgaaaatggcttcaagtggcgttgcgggaacttccacacccgaattctaccagaacgtcgtcgtaatgcgtcacggcgatcgcatcgacaacttcgaacccatgtgggtgtccaccgctacccgaccctgggacccaccccttatccaacagggtcgggtccgagccttcgccacgggtcgcaagttccgcaacaacctccctttcactctccaccgcgtcttcgtctctcccttcctccgatgcatccaaaccgccgccgaagtcgtcgttgcactctctgccatcgccgccggcgacgaccccaacgtcatcgtcggcgatgacgtcccaatcgatccctccaaactcaaggtctctgttgaatatgggttatgtgaaatgatgagcagggacgctatcagacttgaggtggctcctaaagatggaaattggggctttgatgtatcagagcgtgaggccatgcttccggctgggacagtggataagaatgtggaaccggtctataaagagttgcccaagtgggaaga

SEQ ID NO: 65893 - DNA, 394 bp, Glycine max
  Clone ID: PAT_MRT3847_30516C.1
ggttgtattctccaatctgaataggcatccatatctagttacaccttaatttcaaatattcaatcatacattagtaaattgtatggttttgaatgttcatattcagcaatcagcgttcttgtttatctggattttaaatttttgctaggtaaagtctgaaaaagcaaaatctatgatagtttgattttgtgctcaaaatctagagtagtatttaaccattacgtttgttaccaaatctgtcataagtcaaataatcataaattctgaaaaatacaactaaaacatgattttgtttgtatttttgagtatggggttatggccactgctacgcaaccaattttctgttaccaatagcttttactacatatagagtctattttgtcttctatcagaa

SEQ ID NO: 65894 - DNA, 188 bp, Glycine max
  Clone ID: PAT_MRT3847_30517C.1
ggctcgagcccaaattcttttttcctcgatctcagctcgaactatacttgctgatctgcaaccaaggacaggtcaattaacatcgcctacgtgcagcaggactccctaaaaaaacgaataagaaagataccacactacggtctgcatctccgagatctctgaagcacagcctcagactcaagcacagc

SEQ ID NO: 65895 - DNA, 561 bp, Glycine max
  Clone ID: PAT_MRT3847_30518C.1
cggtcgcgtgggttgacgcgtgggaccaattgtttcagcaggagcttggggagctgcaaagaatgggctaactaataatggaaatgtatattctactgttgtggatcaatttgctaaattaaataagcaatattcaatattggatactgtggaggattatactagatggtggaatgatttatctccacgaaagcgaacaggaaatccttatacagatggtctcattggagtggaagccaatcctggtcctaatccaatgaaaaagttaaagaaggaaattaaaaaagaagcgaaagttgttcgtaaagtaatcaagaaagacaagaaactattaaaaagacgtcctggcaaattgatgactcgatatgttcctcaaactgcccctgtttcagctcctgttgcgataggtagtgtttcacggaataattcacatacgatcggtcgtattgataattgtatagctgattgcgttcgtgttggtgcgattaatgtgcgtggtacctgtttctcaaatattggaaattgaacaagcacttgtgctgtgatcgaaatggtcttact

SEQ ID NO: 65896 - DNA, 597 bp, Glycine max
  Clone ID: PAT_MRT3847_30519C.1
ctttgattttgcatcctttggagtgagctctgatactcttggatttgctgttcactttcagacttccaaattgcaaaggatgatgaagaagaatcagagcaagcaagttaactcgttgaccacgacacgtttgtcaccattggcgaaacccttcacgctcaaccgttctaccctccaaccctgctcaagttcccctttttcagggtacccttttcttgaatcgccaaaagaatgtgactttgatgggtttggggaggatttttcgttgcctagttactcacccttgtgccatgggaagcaaggagaaggggattctcatgagagtttgtttcacaagggtaagcatgctgttgatggagtgagtccctgcccagagtctgctggtactagtacaattgtggctgaagaccttccatcgaattctaaaggcttaatgcattcagctaacgaatctatctctgttcctctttctaatttcaaggtttccccactcaaattaccaataaccgaattgccctccgctaaaaacacttctcaaaatcagtcttccaagaatttgggtgaaagtgactctgatgtggattctccttgttggaa

SEQ ID NO: 65897 - DNA, 2380 bp, Glycine max
  Clone ID: PAT_MRT3847_3051C.1
aattcggctcgagaccttctcgatcgtgtcgagcttttcatcccctctgtccctctttctttagtcctttctcacctcttttgttgcctttctttcacgttttttcgtttcgctcgcgttgaaatcgcagagaccaccggcacgccaccgtgaaccaccgccgccgcctccgtcagtcactgtgccaaaaatgttgccggcgagcgactagatgatggtttcttatgttgtggaagctgtgggagggtgttggaagattacttttttgctgaggagccttcatttgttaagaatgcggcagggcagagtaaattatcaggcaattatgtaagaacagttcaaagtgagtactctgaatcacgtcaaaggactttagatagagcttatgatgaaattaaatatttaagttttggccttggagttaatgatgaacatatggctgaacaagctttgaccttttataaaatagcgcttgagcgaaatttcacccgtggacgtaaatcagaacaagtacatgctgcttgtctctacattgcattccggcacaacaataaaccataccttcttattgatttttcaaattatttaaggacagatgtttatgtgctaggagcagttttcttgcagctttgtcaagtgttaaggcttggagagcacccaattgttcaaaagcctgttgatcctagtctttttattcatagatataccaagaatttgttaaagcgagggagtaaggctgtctctgatactgcactggccattgttgcaagcatgaaacgtgactggatgcagacagggaggaaacctagcggattatgcggtgcagcattatacatatctgctcttgctcatggtattaagtgctctaagccggatattcttaaaattgtccatgtatgtgaagcaacattgaccaaacgattggtagaatttgaggataccgagtcttctagcttgacagttgaggagttgaatacaatggcaaaagagcatgaaaaaaattcaatgataatgccaggaggtggattaaaaggttgtatttcaaaagacctactgtgtgagcacaaggaggatagtggggtgacccattttgcacttggattatgtgaagcttgctataaggattttgataagctctctggtggacttggtggtggtttggatcctcctgcattccagcgtgctgagagggaaagatttaaaaaaacacttcctgaggagagtgtcgatgaagcatgtgctttggcgaatgcatcaaatgatcagtttaagagccacaaagaagatttgcatgcctatgtgccagaaagtattggggctaatgttgagcatgaggccactaaagatggtaaatatgatgattctcatagagaagatgaatcagaaactttatctgatattgatgatgaagaagttgatttgtacattcatgatgaggaggggaagcatatcaagaagttactatgggaaacagcgaatcgggagtatcttgaggagcaggcagccaaggaagcagctgcagcagctaataagaaagcttttgaggcaaattttgaaaactgttcggaggatttactagcagcaagagagcttgctgcatcttctgctgaagccgtggcaaaatccagaaaggaaatgagacagaaacgagcctatgaggcaaaaaatacaaggccagctcaatctgctgcagaggcctttggccaaatgtctaataaaaaaaggaatttgcagggtctcaaatctaaagtcaattttgaactcctgaatgaattgtttgatgaaatggaaaataccgatgatctcaagaaaccgaagaaagtacggtttgatctgcccctagataatgatgacaatataccgtccaaggttgaggacaaaaatgaagatgagatgggattagcggatgaattcgatgatgaaggtgatatgggggagatgtatcaaaatactgaaaatatggctgataaatatttccctgaggatggtgatttcggctatgatgactatgatgattattactaaaatgttgctagatgatgtttctgattttttttagcaattcatactcaacatggctggcagcgtggaaccgaagattgtcagagacccagaaatctttggaagctaagttgcaatctgataagctagtatcactacacgagcttttttaatgattccacatgctttaaagaaagcttgggaattattgtaccggaaaatttttaggtaggtattaccagcatcactctgcttaacacaaaatagggggttagattatgtgtttcattttaaattatacttatctctaaacatttttttaaatatgacaatcaggaagttgattatttatgcttagtttgtgtagaaattctcgctt

SEQ ID NO: 65898 - DNA, 193 bp, Glycine max
  Clone ID: PAT_MRT3847_30520C.1
gtggacagccgcgagaagacgacagaagggggggcaaatggggagaagaagccgctgattccccacgccaaaagagaagagagatgtgccgtcaagccagacgaagggaggcacgacaaagccaagcgaacaagcgcaacaaacaccggcagaacggcccacgagacagacagggaccaagcgccgggggaca

SEQ ID NO: 65899 - DNA, 256 bp, Glycine max
  Clone ID: PAT_MRT3847_30521C.1
cggcgcagcttgatccttatagcggcgccttttttttcttttcttacgttataaacccggggagagatttttatgggggattgtctattgtataaaatcactctaaacggccaaagttttttttcagaaaggcccttttttctggggaagccccgcccttaatcaaatgggagctggtctgcaaggttccagagaggtcaccgattaagctggactctatgaacccccaaatatattttcttcggtgccacaaaca

SEQ ID NO: 65900 - DNA, 226 bp, Glycine max
  Clone ID: PAT_MRT3847_30522C.1
actcccttgtttcagagaggagctaaatcccacatataaatatatctggaggggagtataatatgctatcagagtataatagtggaaagttagctagctactgcctactaatatgaacacaagaaaaaaaaaaaacaaagaagtgatccagattgcctgtaccaaaattttgccttattgacagaagaaagaatggctcataaatttgaggagtcccagctagcat

SEQ ID NO: 65901 - DNA, 889 bp, Glycine max
  Clone ID: PAT_MRT3847_30523C.1
ctttggaaagcataacttcctggacaatcagtaatttcagtgaaaattttgactcaaaggtaaatcataagtcagcaaatgattctgaggagatggctagtgttcttaaagatgggacagggatacctagttccttcatggttctatttttatgtgcattttctgtatttggcttcttggtcatcatttttttggcgcatcctggtcataaaagaaaagggatgaaaatgaaacaccatagaaccaggagatgaaacttgtaacatggatacataggggagggacatgacttcgcaaccgtggctgaaagtgcctctttaaacattcttctcttattctgatactgtaaaatctgcaggtaaagaattttagactaccctgcagtgaagttatcataaattgaagggcacaagttatgctacccgagagattatgacttcattcccatagagcatgataatatgaacgttcaagaaactcacttgaacaggtttaaaagtgcttgtactattttgtactcaggaatcataaaatggttagaaacatagaacgagactcaaccctgcaccttcaatgttcaaacaggttggtgttaaacagggattgtcctgcagaataggggcgtaaattactttatgattcacacgttttttatttgtcacagcaaaggcattcggtgagctgtgtcattttcttaaattattgtaacattttattcctctcaatatttgtattggatttgtaataaaatggtgttatatgtcagcattgacaactgactattctagaaatattattacaacactgccaaaaaggatatattattagaaatattattacaacactgccaaaaaagaaaaaagaatttcttggtagtgttcattacacc

SEQ ID NO: 65902 - DNA, 260 bp, Glycine max
  unsure (1)..(260): unsure at all n locations
  Clone ID: PAT_MRT3847_30524C.1
gtgtcgnanggcgggtgnagtattagnttcggcgtnnantnanaagaaagngncaatgcaagccgcgtctnnggcatcgnatanngtctagaatatcaaggctaggtgnatatcgnatgttaaancagacacagatcacactancttgccnngctggcactcttcaccctcaaagaagaaaatgnggtacatctgantcggctttcgncgantggaatgaactcttctgcganngattgttatctcaccccaacganatc

SEQ ID NO: 65903 - DNA, 247 bp, Glycine max
  unsure (1)..(247): unsure at all n locations
  Clone ID: PAT_MRT3847_30525C.1
cntgagntcatctaggananctgngntatctttaanagantgnggcnnnntcaaaattccnaactggnnattgctncggcnggttcgangggcngaagncgacttgggtcaaaaagaggggaattgcccntttccgtttcnggattangtaaattaagnttaaagtnnngggaatttaattttggggttccaagttccaattattctanaacttttaagttatttaaaaanttcnggntaggttnac

SEQ ID NO: 65904 - DNA, 260 bp, Glycine max
  Clone ID: PAT_MRT3847_30526C.1
ggagaggtagtggttgtgctttttttgctcaccactaaaagtaatcaaagggccatttattgtttctcctttgatgggtcacccttttatttatgaaaacaatacaaagtttttcggggggcttccaattattccaacaatttcaacaaaaaaaaaggttccttgcctttccttttcgaaacccccaaactttttcgaattttttcgcaagcggttttataacccacaatgattttaactccctttggaaaatccccccc

SEQ ID NO: 65905 - DNA, 260 bp, Glycine max
  Clone ID: PAT_MRT3847_30527C.1
ggcgtgagaagccatgagcagcaaagtctctcgcgacaccctgtacgaggcggtgcgggaagtcctgcacgggaaccagcgcaacgccgcaagttcctggagacggtggagttgcagatcagcttgaagaactatgatccccagaaggacaagcgcttctcgggcaccgtcaggcttaagtccactccccgccctaagttctctgtgtgtgtcctgggggaccagcagcactgtgacgaggctaaggccgtggatatccc

SEQ ID NO: 65906 - DNA, 444 bp, Glycine max
  Clone ID: PAT_MRT3847_30528C.1
gttttgcaccggaaacagttcgacttcacactctagtgccaaaacggcacgatgatacgacgttatattcttccgcaatcgccgcctaaccctataccctaaccaaacctgatttcaccagaacataatccgacaccaacctggccgtttaataggagggttgcaagcttggttgcaaacaccataaagcttcaccgatgcgccgtcggcgccggttccggcctaggcgcgcggatggagaccgcgccggcggttaaggcacccgtactgctccatatccacactaaggttgttaagaacgagaagactaacctagatggacacgatgagtacatacagaaaggaagcatggattagtctcacgttttgcccgatgctttcaagggaataaagcaaattggtgaaattgagtggagatctcatgggcctggtcagggtcagaat

SEQ ID NO: 65907 - DNA, 494 bp, Glycine max
  Clone ID: PAT_MRT3847_30529C.1
gtgcttgcaattcaagccatctaaaaggcctacttttagtgcaatgctggcaatatttctccgccatttgcaggaaataccacgcagccctcctgctagccctgataatggcttagataagggctctgtgtcaaatgtgatggagccttccccagtacctgaattggaagttcctcaggaaaacccaaatcatcttcatcgacttgtgtctgaaggagatactgcaggtgttagagatcttcttgcaaaggctgcatcagaaagtggcagcaactacctatcaatgctattggaagctcaaaatgctgatgggcaaacggctcttcacttagcttgtagacgtggtagtgcagaacttgttgagacaattctggagtgtagagaagcaaatgttgatgtattggacaaagatggagatcctcctcttgtttttgcattagcagctgggtccccagaatgtgttcgtagccttatcaaaagaaatgctaatgtgc

SEQ ID NO: 65908 - DNA, 1645 bp, Glycine max
  Clone ID: PAT_MRT3847_3052C.1
ggctcgagcaacaatgtcttgaactcacaatacctcaaggcagcacaggagttgcttgatgaaatagtaaatgtccgaaaggctttgaagcaaactggtttggaaaagcaacagagtttccgtgatattggtttagatggctccaaagattcagatggaaaatctaccagccaatccgtgcagatatcttcaggccccaatggttctgctgcaaactcttcatgtgagctatcacctgcagaacggcagaatttgttggacaagaagacaaagcttttgtcaatgctggatgaggtggataaaagatacagacagtactgccaccaaatgcagattgtggtgtcatcttttgatatggttgctggatgtggagcagctgaaccatacactgcacttgccttgcgcacaatatcgcgccactttcggtgtttgcgcgatgccattagcggccaaattcaagtgactcaaaggaacctcggagaacaagagggaatacctcgtctccgctatgttgatcagcagcttcggcaacaaaaggcccttcagcaacttggtgtaatgagacaagcttggaggcctcagaggggacttcctgaaacctctgtttcagtactccgtgcatggctctttgagcatttccttcatccttatcctaaggattcagagaaaattatgctagcaaggcaaactggcttaacaagaaaccaggtggcaaactggttcattaatgcaagggtgcgtctatggaagccaatggttgaggaaatgtacaaagaagaatttggtgattctgagatgagcagcaatctattatcatcagagaaaacactcaaagctccaagagatgatgttcaagcttctgacaataaaagggaagagtcccaggacaacttaataaacgttgatgatagtgttcagcatcatgggttgaagttagatcatgcctcggaattggacagagggatccaaagcagtgatcatggagaaaatgccatggatcctagaattggaaaattgcaaggtgaccaaaggttcaacatgaacaacagcaataacaatagtccttattatggtgatggctgcataatggcttctactcctgccacatatgatttaccagagttaggtaacattgccgtcgatggccacgtgtcgcttgcattggaattgaggaactgtgaaagtcaaggatttggtgtgtcaaatgatgacatgcataaacgacataagaaaacattggcttcttccccagagactgatttgctagattaccatttcacagacccaggaaagcaacaaaacaagtttggcaatcctcacctattgcacgagtttgttgtgtgaagaagggttggagaaaattctaaagttttcaagggaactaaggaaatgtgtaccaccaaagtagtagatagatagacaaaagcctatgttgttgttgttaacttggttgctcattcttgttgtccacagatcataaaaagcgatgtaaatcatgaaccgtacaaaaaatatacacgtaggtatgtgtagatatattctcttgtaatatcgtggatggatgattggttgtatcatgtgcaggcaatttttgtaaggacaaggaacttatcttgtgcatcatgatgtataagggaatcttgtc

SEQ ID NO: 65909 - DNA, 314 bp, Glycine max
  Clone ID: PAT_MRT3847_30530C.1
tttacgcgtgggtccccacgtccggaaagcttagtggctttttattcaatatccgggtccaaacggagcccatgatcttccttttcgctttctcagtttctcagtcgcctttcaagaagagcgattgatcgcgtgcgtgcgtgcggcttgatgaacaatgatattctttggcttccatagctatgctcggatccggaagtgactacgaatctagaacccttggtgggacgaacatcttctctgagctcgtattggctgcattctctggtgacaaatgcccgaagcttcatgcttgaggaggcgttcggacatgt

SEQ ID NO: 65910 - DNA, 353 bp, Glycine max
  Clone ID: PAT_MRT3847_30531C.1
aggaaacacttgaaacatcaaactttaattcaggggggatataaggtttttgcctccaatcacacagataattttaaaggttacttaatgaaaaaatttgtgaaattctaaaaaacactataattaatacctaaaaaatcattactgtaaaatattttttaaacaaccatttcaactattaattttttctggaaacacgattatacaaacatttatataccattttctatgacttaaaataaaaaatggaacccgttatctcatcaatgtgctgtgccataatttcggaaacaatctccataaatgtggcttcacttgctcttggaaaaacagattcctaaacttcctttaca

SEQ ID NO: 65911 - DNA, 461 bp, Glycine max
  Clone ID: PAT_MRT3847_30532C.1
ttttaatgtggagatattttggtggagatctcgtctttgaagttcctaagatgacttctccctacattaaacgtacagtctctttcttcatagcatttggaaatttgactgaggacaccttgaagtgtgaggcgtatggccacaagacggtgcagatagcagagattcaggaaaaagtagtattgaaatgttcacaagaggaatttcttacagcttggtcaactcaggagcggactgcgacaactctgtcggctgatgggtggccatattagaatgctatggaacatgatagttcagcgcctacaataccaggtgattatgtcattggtgataagttgaccaccataaacactatgtgtgcgtatgggctcagtcctggtatatcaggttctcgatttttgggcgccatggctcagtctatttcacagcagacttgattggaatcaaatggcagcagtgag

SEQ ID NO: 65912 - DNA, 515 bp, Glycine max
  Clone ID: PAT_MRT3847_30533C.1
ttccttggcttataataacttctcttaaatttttctgtcctggcagtagtgtttactctaaatttttaatctctaatttctctctccttaattgtgtgtagcttaactagttaggcaaaatgagcacaaggcgatggccgagacatgtaactgtaagaggaaggaaaagaagggcgaaagtgtgtttggccaataataatgctgtgaaagtgagaccttccttgcaaaagaagcttagagagcttcagggagcagttcctgggagtgagggaatggacatgcacactttgttccaaagcattgaacaatacatacttcaacttgaagctaaagtcacggtcctaaggtgtttgtccaatttgtatggagtatagaaggagacaacaacactcctaagcactcaacctatttagaaactacatctgggctctaaagaaagggtgaaggtaaggttaacaccattaccgggcttctttcattggggcgtggagggaataataaggttgtattttatt

SEQ ID NO: 65913 - DNA, 650 bp, Glycine max
  unsure (1)..(650): unsure at all n locations
  Clone ID: PAT_MRT3847_30534C.1
aacaaaacaataattttatactctattttcattacaccatttttttaaaaccataaaataacaaaaccacccctttaaacgctgtctctctacctttattttccaaaagtattaaaaaaaaaaaacttacgcgtgaacattgttgttgtgaaataaaaaatcaagtaaataatcccctggctatgcagaacattttccctgtgccttatgtctatattatgctaacaagcatgaacgtgtaatgggaagctgtggatttgagaatgaaccagtgacaatgcgattggcaatccagctatttgctgcgtcagtgtagtgcacgccatcccagctaatgtgggaagaaggagatttgcatgaaccagcataaatttctgtaccattaaccgttgcattgtaattcccacagaagaagtgattaccaccctcatgatacccacaacagatttcagatgggtcaacaaatccttctttcttagcattactgattagctgatacttggcagagaacatgtccacatacacaaaggaggcatcaaggtacaatgtccttagtttaccaccgtatcattgagctttctattgaactccttngccacgtcgtttgcatatacgacacagccgttttggtcaagatatccttctgctgg

SEQ ID NO: 65914 - DNA, 172 bp, Glycine max
  Clone ID: PAT_MRT3847_30535C.1
catcatattcggtggggggaaaaaggcgaaaagtctagaaaataacggagaagtctaggggtttccctctgttcaccgggaaacgtcgagaagaattccgacacatcttctcctctatcaaatactacgtctttcctatcacactacacattcatgcccttaaccaaaccaa

SEQ ID NO: 65915 - DNA, 507 bp, Glycine max
  Clone ID: PAT_MRT3847_30536C.1
ggtaggttgtaaatagcatttattcagaccttctgattcacagcaacacacgatcacagactgatgcacccctgcccataaacccttacccctaaactgcaccaccagcaggtggctcacttatatacacaactgcgaaaatttctgatgccaccacggggccagcacgcttgtgtgaaaccaactgttgagcttacacataggtgtaccctacgtaactcaaccacagacttattgatcatacaatagtagtaacaagggcacccagctatattaccataataccccgggggcacgctcttgcacatggctggcaaaatggtgaacctgatccccacaacgttgaccattttgaaactggcttctttcactcacactgtgcataggtctaagcttcaatcttctcaaccagaacctgtactggagactcaactggctcatctggtttgaactcttcctgcgtggttgccgatacagctgttgatagtgattttactccactatttt

SEQ ID NO: 65916 - DNA, 306 bp, Glycine max
  Clone ID: PAT_MRT3847_30537C.1
ttttattttttttatttttaacttcactgatattgttttattggggtaaaagatacttttttttttttctctttgtttttttgaccaaccaaaaaccccacccttttcttccataattggggaaatgaaaataaaaacctcccccccaaagcattgatgagcaaaatgtccttaccctctctcgaacggaggcttatgaacccctctcttctgaaaactcggtgctctttatggatgggagccccccccgatattatcaaacaactgttttttgcccacctcttgtaccatcggttgaatgtggac

SEQ ID NO: 65917 - DNA, 381 bp, Glycine max
  Clone ID: PAT_MRT3847_30538C.1
gtaaaagctaaaacctttttttcctgttctcaccctcttcgccgaattcgccagtaagaagagagaatagaaaagagggtacccagaagagtcgaatcggaaagttcaaatctttgtgctttcaattccagattgatgggcgaaatggaagaaattggagctgatgtctggtgtgtctatcatgttttgttattttcagaacttcaattttgttccatgttttactgtcatatgtttcgtggttttctcttgttagtcttttcagatttttttttttgtggttttatgatttgtgaattgtgaatgctatatctttatttataatagccttgctccttgaacttctattggtttttgctaatcgtgacttagttggattga

SEQ ID NO: 65918 - DNA, 576 bp, Glycine max
  Clone ID: PAT_MRT3847_30539C.1
gccgaaatcaaagtgatatatataaataaatgcattttcttaaggtataaccaatcaatgttaagtagatagtacattgagaccaataggactcctaaccctttgtatgccattgttccatatcaaagcaccaaacacaaagcttccatcgctgttcttgaaagggaagaaatcaatcctgaaagttattttttccccagttttcacaaacttcaattctgcaggtgtaactttaacattcacaccagatggattttcaacgcttgcacgatataccgttggcccctgaccataataagtaactgtacgatacactgataaacttccattcaagctggacacaccaattgaagggtaattgaagttggaggaagctgtaagaggtttctgacattgactaataaccccagtgaggttcttaagttgtgccgggcttgccccattgctgcacagaaaattgagaacatcttgggaattaaaatcatatactaatccaggattgagtgatgcaaccggattaacatgtccagatccatagtcaaatggtgtggtttgtgttccattcggatcttttcc

SEQ ID NO: 65919 - DNA, 233 bp, Glycine max
  Clone ID: PAT_MRT3847_3053C.1
ccgtgcacgcaatgtgcgcacgcgtgcaatttataaagatagcagattgtgcttttttcaaaagaaacaataagcagatgtatcatgtgttacaggaacccaaggaggacaaagaaaatttattgtttaatgtttcctatgttctaaggtaaaaaaactcaatttctgaactttttataggctttctgatttttataactacaaaaagttattctacgtaacataaaaagcct

SEQ ID NO: 65920 - DNA, 377 bp, Glycine max
  Clone ID: PAT_MRT3847_30540C.1
cgaagctcggattcggagcgagagagagagctgttattctaggtctccaggggcctatttataattgaccgtggcctgggtttagataatccgacaattgctactgagtatggaatggactctccgtggtaccatgcccttcaccaacagtaccaccaccatcaccgagtgaaccttcttacttagacgagccacagatggagttcttcaaacaatagcactagcagcaccagctgcgacaaccatggactccaacactcccaattactgacagatatgactactaccaccgtgtctgttactacatctgctacatgaccctaccctccgaaattcgtgaccagatccgaattcggcaacccctacccgacaacctt

SEQ ID NO: 65921 - DNA, 743 bp, Glycine max
  Clone ID: PAT_MRT3847_30541C.1
tgtttatccaacatttgtggctcttccttaccttcatcaaagcaacggtcgtattatcatcaatgcatcagttgaaagttggttgcctatgccaaggatgagtttatatgctgctgcgaaggcagcattagtgaacttctatgagacactgagatttgagttgaaagatgaggttggaataacgatagccacacatggttggattggaagtgaaatgacgcggggcaagttcatgctagaggagggtgcagagatgcagtggaaggaagaaagagaagtgcatgtgatgggtggaccagtagaggagtttgcaaggttgatagtatcaggggcatgtagaggagatgcatatgtgaagtttcctagctggtatgatgtattcctactatacagggtgtttgctccaagagttcttaactgggcattcaggtttcttatttcgccacaagggacaagaagagcttcttcttatgtagggactggcaaacacattgaagctgtgggtatggtgagacctatggctatgctggagggaacctcacctacacacactggccagctgatcagccagcacaagctcgattaattccaacatcatattctctagaaaatgaagccatctacttttctagatatgtgcttttatcatttattgcattcttgctatcagcatgcttcgtggacttatgtcaatgttgttgaactttgttgtcaaaaacgaaaataaacttgtgttgattgcc

SEQ ID NO: 65922 - DNA, 668 bp, Glycine max
  Clone ID: PAT_MRT3847_30542C.1
ttttttttttttagtggattgtgtaaattgaattatgcggatgggagtacataactcaattcatctcattaggataagctaaatactttatctgtgagacccaacctattactccttttatctcttcccaaaatgtgtgttgaaacacattcgaccaaagagagttaacttcctctccattatggcatggtctagtaggagagacataaacacatttcacaaaacctatgtgcgtatctcttctactggtctctatagcaataaatgaagacaatccagttccaagcaaaaaacacgacataaaaacatgagaaaaggcatcctaatcttttcccctcatcatcatcactctatacatagattgtccctctgttcagcgtcaacttcactattatcagtgattgaagacgactcatccaatttcacatacttcacaagcttatgaatccatcatatttttttccacattatctataagttcctctttcaaacccattccgaaacacaccagtttagtagacgcggagttttatttgagcaactgcgtcttttaaagctcccgttgcttccttaatcattaaatacaaatttcaccgttgttattggtcgttgaatgttgcttcctcttcaacaagaatttgggctttctgtacctctttttcccaatc

SEQ ID NO: 65923 - DNA, 1352 bp, Glycine max
  Clone ID: PAT_MRT3847_30543C.1
aattcggctcttctctctcctctcttctctcttccatctcctcggttaaactgaaccaattcaatattcccagctagttcttcattgaagaagctatggactttcttaactttatgcttaacttgttggtccctccaggcagtatgctcaccttggctttctcatggccagcactttgcttcctcaatgtttgtgagtggctttataatagtatatatggtgaggatatcgataataaagtcgtcataatcactggggcatcttcaggcataggagagcaaattgcatatgagtatgctttgaggagagcaaatttaacgttggtggcacgcagagagcacaggctaagagggatcgctgagaatgcaaagagattgggtgcaagacatgtgatgattatggcagcagatgttgtgaaggaagatgattgtaggagatttgttaatgaaaccataaatgtctttggccgtgtagatcatcttgtaaatacagtgagtttgggacatacattctgctttgaagaagttacagacacatcagtattccctgttctcctggatattaatttttgggggaatgtttatccaacatttgtggctcttccttaccttcatcaaagcaacggtcgtattattatcaatgcatcagttgaaagttggttgcctatgccaaggatgagtttatatgctgctgcgaaggcagcattagtgaacttctatgagacactgagatttgagttgaaagatgaggttggaataacgatagccacacatggttggattggaagtgaaatgacgcggggcaagttcatgctagaggagggtgcagagatgcagtggaaggaagaaagagaagtgcatgtgatgggtggaccagtagaggagtttgcaaggttgatagtatcaggggcatgtagaggagatgcatatgtgaagtttcctagctggtatgatgtattcctactatacagggtgtttgctccaagagttcttaactgggcattcaggtttcttatttcgccacaagggacaagaagagcttcttcttatgtagggactggcaaacacattgaagctgtgggtatggtgagacctatggctatgctggagggaacctcacctacacacaatgccattggtcctcttaccttctctggccagctgatcagccagcacaagctcgattaattccaacatcatatcctccagaaaattatgaagccatctacttttctatacatatatatgcttttatcatttattgcattcttgctatcaccatgcttcgtgaaactatgtcatgttgttggactttgttgtcaaaaatgaaaataaacttgtcttgattgccaa

SEQ ID NO: 65924 - DNA, 936 bp, Glycine max
  Clone ID: PAT_MRT3847_30544C.1
ttttgtcctttgttattagactttaaatattgatatatgaaatcaagttcacatccacacaaaacaactgtgttacacatataatagccacatgcattccatttatttaatatagtatatagtaattgactattgcatgaagcagaattgagaaaatcatttatccaacctaggccagagcaagatgtacggtatcgcgattctattatgttcccacctaactattgttgtaccagaattgcttctgaaggtagtcgattacgtttttgcccacttgaaaagctttggcaagaacttcatcagagataggaggtttagatccaaacacagcatttgcaatggtaataactccagggttttggctactaagaccagcaatggccaaagcatttccataacctatgttttgctggaagtgaatgagcccaatagggaacacaaacacatcacccttgttcagcactttggtgaataaacggttatcgttttgattggacgcaacaaagccaacatagagggtaccttccaagactacaagaatctctgtccctcgagggtgagtgtgtggagggttcaaaccctttggtgcaaaatctatgcgtgccaaggaaatgccaagtgtgttgagccctaatatttcattaaccgtgacagctgtcacctttgagcctagggggtttgaagtgtttccgggtcccaatccaggaaagaagaaatcttcagccttagcaagctttggatccttgcaaaattttccattcacgaacacaccagttttggtatcattgatagccacacaaaagtcttgcagggggcttggatcataagcaaaggcaatggaggatgccaaagccaatagcacaacgaagaagtaaacaaccttcatttctccctctctcgctactaacttaattctaagtgtgagcaggctcgagg

SEQ ID NO: 65925 - DNA, 295 bp, Glycine max
  unsure (1)..(295): unsure at all n locations
  Clone ID: PAT_MRT3847_30545C.1
cttgatgacactgcngctgntggacttctgtttgagcatcctnnccctgtgcagctcctatatggaagtggcccacctaccttaacttcaagtccatgaaccacatgaattacctgccgagtcaggagggcatgccacgnagccagttcatcaacatgntgntcatcnttncagtggcctttatnaccgtgctcatcctgaaggtctacatgttcaagtgtgtttngactgctacagattcntgaagcacatggattcggccgtggaggacagcagttncnagctgttcctacag

SEQ ID NO: 65926 - DNA, 449 bp, Glycine max
  Clone ID: PAT_MRT3847_30546C.1
gtctactcgtactacgtcacctacgtctccccctcgcgcgtgcagctctcctactccctccgctcgcgcccgctcgcgcgccggcttggctacgacgaagcggacccgctgctcgcggcgaatgtaggatcgcgcgtcacatcggtgagaggaggaaaaggcgcgaggtgggtagtgtccatggccattaagatcgagctggagctgatcacgactgacctgaaggagaagaaggactccaacatggccaaccgtatacgacggttcgacaactaccacatcatctccgacgacgccagattacgcgccgtgattctcaccatctaacacctaatccataacggggccaaagttattctctccagccactagacgaggacgaagggtgtcactcgcaaagacagattggcacctcacgtgccctggctaccggagctcatcggtatgca

SEQ ID NO: 65927 - DNA, 166 bp, Glycine max
  Clone ID: PAT_MRT3847_30547C.1
caccttcaccgtccttatcgtcagtttctgtgagatgctcatcgacttcgtcctcaccgtctctggtgtgttcttggccgatgcttatttctttcataaggcccccgacggagttcctgctaacgtctacatcggcgtgtcgcgcctcgtcgttaagccgtctttt

SEQ ID NO: 65928 - DNA, 217 bp, Glycine max
  Clone ID: PAT_MRT3847_30548C.1
aagctcaagctcattcgttgtgtcacactaacactcatcactcgtaggatgtcatccccctgaaaacgggggacttctgtatacgcgcaccccctcactccccctttttaaccatcaccacctacattcaccaactttttttttgtacccatcactttactattaacctatcacctaccccttctatattcaccaactactttgctaccttattcac

SEQ ID NO: 65929 - DNA, 853 bp, Glycine max
  Clone ID: PAT_MRT3847_30549C.1
gagaaacatgagcagagattacaatttaatatataaaatatacgttcgtgttaaccagattataaactggaaagaacaagaggggagagagagatcatcatgatacatctaaattatagtggtaattattgcttcatattaatctacacatacatataacatatataaatatatgtaaattggtgttacttttgtatcatcaggtagaaatctaggaattggcagacccacctcccttgattgaaagaggagaaccacagagagaagtgttctcagtgagtttgggattgagaaacaccacaatcactgttatgtcatcatggatgtgtctcctcatcccttgctcaatcttttggaggtcagaaagtctcatttcacacttcttagctgcttctctaagtgcagctttcacaagtcttctagcaattccgttaggtggattgttgctgactatgctaacaacctcttggttggtaagatgctcccataagccatcagaagcaaatatgagaaattgatcatcagggtggagtgtgtgggatgatgttgatgggtcacaactaagaattggcctgaagaatgtttctgctagtctatacttggctggtagaggatccctgttgaattctgctttcttcagatatgcatcccctatggatcgtgaaacctgtatgaggcctttcacacgccaaacgttttgtctcaaaaccacgatttgtgaatcaaaggggtgctttgaccgaagttcatctctcaccgattcttggttaacattgtgttctgtagataactgtatagcttctatttcccttgttgctctctctaatcttcctaacaccacccgggaatctcc

SEQ ID NO: 65930 - DNA, 195 bp, Glycine max
  Clone ID: PAT_MRT3847_3054C.1
gtgttctaactcccagtttctaatttcctctgtattgtgggaccaaaaggaacaatttcagtaataaccttaatctgccaagggcaaacaaatatttcttaaataacagaattatcagcctcctaaaaacaaaaaacaacttaagggggcaaataaaaaaagggcccaacaccaaactaaggggacatcaaattc

SEQ ID NO: 65931 - DNA, 431 bp, Glycine max
  Clone ID: PAT_MRT3847_30550C.1
attataaacataccaattattaaactccagcttgtactggaaaattgtattaaaacttatttcaaggagaattcgtttttgtgtaaaaatgctctttacataagtaatttataattactgtacttaatttatacttctggtgtgatgcaggtgattgatagagtctggactgtcaacttagttaggatctcttaccttaaaatgatgttattgcatgcttattacttagaaaaatgattattagaaaattgatgtgatattacgtatagtggtgatatttttgtacagagtaaacaattgcgtataagttgttttttaaattggttatacaagaaatcaatctaaaaatatttttaaataacttttttttaacaaaatgatgatacaaaatgttgacattttttttaatgttgaaatccttgactagattt

SEQ ID NO: 65932 - DNA, 666 bp, Glycine max
  Clone ID: PAT_MRT3847_30551C.1
tataattataataacacgagagcaccgttattgtgggataattaattgctgggcatgtacccgtgtgaagtcatggcagttgagatgaattatgtcggtatgagcttatgtaactaaatcaattaaggtaaaattgtatttttggatcttgtttctaattttaattttagttattctttaaatttattcatgaatttagtttccaattatgtcaaatattataaatatgatccccaaacccaaatttaaacgttgattgttgattgtcacaaaggaatgttggttatgtgagtatcacgtaatgattaaatatgaaaaggtgcgtccaagagttaactctaacattgttctgtttatcgttcaatcagaacgtgacaattaacattcaaatttggactttgggatcatatttacaagattttacatgatttggagactaaattagtgaataaatttcaaggggactaaaatcaaaattagaaacaattagggggaccaaaaatataattttaccatcaattaattgtctactaacaagttattggtgtgaataatattatatttgattctgttaagcaaaatgttagattcgagttttgtgaatgtaaaaagtaattgaaaagaaaaataataattaggttactattaaaaataatcaccaataaa

SEQ ID NO: 65933 - DNA, 221 bp, Glycine max
  Clone ID: PAT_MRT3847_30552C.1
gagccgaggtttttgaagaagagtttacgcaggaggagaaggacgagggaaggaagggggagcacccaaggcacggtacacaggggagacccacccaggaagcgagcagcccaccacaggggaaaagagaaggcactccccaaagacgacccacccaaggaacccaaacagacgcgatccgagcggaacaaggccgaaatgacccacacaagcagagaggg

SEQ ID NO: 65934 - DNA, 370 bp, Glycine max
  Clone ID: PAT_MRT3847_30553C.1
gaccggcaaaatataattaatattattaataacagagagtcccaggggtactgcaaatacaaggtagaaaccagctaaactggcagaaccataaggtcctgataaccaggtgccagtctaaaaggagcataaaaaaccctgcactgttatcctagatggagaatgttactgataaattactagaccagaaattgtggggctgggcaaagccttttttcagctgttttaacccaagaccaaacttggaaaattgcatcctccattagcttaggaccattaaaagttttatttaggaaagacaatccggtttcgatgctttcaaattgaccagggaagtgccacccaccaacacttccatttagattgcgga

SEQ ID NO: 65935 - DNA, 433 bp, Glycine max
  unsure (1)..(433): unsure at all n locations
  Clone ID: PAT_MRT3847_30554C.1
nnncnntnntttttttttttttttttttttttttttttttttttttttttttttttggttttttgttttttgaaaaggggggggagataacataaaacccctaaaactttcggggaatttggggttttttcacctttgccccttttggccggaccccggacctttaacattcccttgaaaataactaacttcccgttctttataaaaaaaaaaaaatttcccctaacaaaagctgaattcccggtcacacttaaacgaattgtccccaattttaaggtgggtattttcgctttaatttttttggggaccctccactttccacctttttttgggcagattaaaattccccttcaaagggttcgggcatttgccccccaccatcctttgaaattggagatgagaacctgggatcaaagggggttttcccctcatg

SEQ ID NO: 65936 - DNA, 353 bp, Glycine max
  Clone ID: PAT_MRT3847_30555C.1
ttttggttttttatcaaggagtgaccaacttgatcttttttctagtattacattctttagatttcaagtcacaaattccccggtctttctgcagaaaattctcctatcccaggagattcctttaccacttccccattgcctttgagggaatacacttaaattttgggatacctatatcttaatccgcggcaattgggaggcttcccccttaagtttataaacaacagggtggggcaaaacctaattattcccagaactttgggcccttctagcgggggttaatcctaaaggtttttaaagggaaatgcttcaaaggcccaaggggagggattttaccccctaaaacgttggtg

SEQ ID NO: 65937 - DNA, 488 bp, Glycine max
  Clone ID: PAT_MRT3847_30556C.1
gggagaattaatttcctttttctccttgcttgagcagctacattcatttttgttttggcacacccagattacaccaaggtaaaatctggaaaaataaataaaatttataaatttacaaaattaaacactttgtagagttttaaggtctgtattttttttatcaaaaactgcaaatactcttgttacaatattagatgaacctcatacctgtaaaatttgttgagattggctaaatctttgtttttctaaaacaaaagagagtgagtgtgctacttccttcaaaagtagtgcagaatctatctcagtgacattgattcaacaccttcaacctcaagtaagtagtatttcattaaacaacttttccttcttcaacctcctcttcgccatagattttgcattaagcaaatacataataaggattttcaattttagagtagttcaggaatgggtggtaaaggaaagcggggatgtgtatggtgctggtggat

SEQ ID NO: 65938 - DNA, 326 bp, Glycine max
  Clone ID: PAT_MRT3847_30557C.1
tactcggtcctgggttccctggtagacccacgcttacgattgaattcaaaaacttaagttcattccttgtgttttgctttcttcctcaaagccaaacatgtgaaacagagggcggcaactgcgactgctctgacaagactagctgcaccaatggaaacagctatggtgttattgtagagactgagaagagttacatctagactgttgttatggatgtaccagcatctgaacatgatgggaagtgcatgtgtggcactaactgcacttgcacggactgcacctgtggccattaatgaatatgtatgtaaatgtaattgccatgtgtt

SEQ ID NO: 65939 - DNA, 595 bp, Glycine max
  Clone ID: PAT_MRT3847_30558C.1
gtttcttactacttactagagcatttttttgtaattaatatttgtatgccattggttgactttgtgtctttgttacttccatgaaccctctcaatgcatagcaatcaactattgtaaacttatgtccctttttgttttaaagttacaacatcaattcttgcactttccaatgtaaatatatgatactgattaatttaggcttggatttcaatcacatttaatttaatggttcaaattcagtctagccaacttcgaacctaacagacactaactcatgctcatgccatgccatcacatggagaagtttttctacttttgtgcagtgccattgatgctccatttgtttggtgtttatacatacataaagagaaattttgaatgtgtgtgggtgtgcttttggacactccagatgtttgagtcaatgtagacacaactgacatcacaaaactagtgatgagtttttccccccattttatgatactgatgatgatcctgcaatgttgggcaacatgcagttgtaatctatgtctaattgtccataaatggctatggtatttattgaagcactaaatggaactagataattgtttaaaga

SEQ ID NO: 65940 - DNA, 2628 bp, Glycine max
  Clone ID: PAT_MRT3847_30559C.1
ttgccggctgcgagaagacgacagaaggggaaatgcgaaattgaatttaaccttaataaacggcttggagaaaagtaacaaagcaaagtccatgttgtgttgctctcacatcacctgactttgtcgtgggatatttgatcattgcttgagatctgccttttctgcttcttctgggttcttcccagattatgaacattgaaaaacaccactcttcaaagccaagatataggagaagagtagaaatccttcgaatagttaatgcctatgttcctgaattgactttctgagagaaggcttgttcaacattctcaagagatgcaaagatggagaagaaaagaaagattgtgcagtatagggagaggctggataggactcttgcctcacctgatcttgcaaatgatgagatgctcaaaaagcttgtcggaagtcaactcccaccttcttcagaacctgaagtagaaggatttagagataaattagtagaaaccaagactgcggaggtgtctcactttcttgatatgttgaggagtgcttcttcagatgatagcggaagatcttatacatcacacactgattggaaattaaaacaagatgatgacgagtttcgtgttatgtatcgtgaaggaccagaaggaactccctttcatacaatgcttgtagaaggctttgtagatgggcctgttgatgtttgtttatgtatctcttgggagacatgcctttacaaaaaatggtggcctcagtctactattcccactttcaaaatcttatcagctgaatgtttgcaaaagacccggattggggaacaattatcactagtgaggttgaaggtttcatggcctctgtctctgagggaagctatagtgcactattatctgtttgagtactttcaagatgacttaattgttgttcttacaaattcggttccggattcaaagaatgccacaggaaccctttgtggtttcaacaatgaggcaattcctgaagcaagagaggttgtgagagttgatttggtgggaggctttgctttgcaaaaggtgacatcagaaagatgttactttcggacaatagcaaatatggatataaagttggattttgtgcctccatcccttataaactttatttcaaggcagctcattggtaatggtttcagactttatcagaagacggtgtcttctatgacaagccacgataaaggggaattcaataaggccttgggggatccattatatgttcgaattcgggaagctctatataacactagtggatcaaaggccatgaatggtgaagagcttcagcaagttgcaagtgttctccctgctgaagatcttgttgaaagtaagcagggtggggaaaaagatgcatctaaggaagatatgagtaatcaatatgcaaataatgtcatgccaatggcagtgaataacaaagtacaagatagtagcaaaacctttaatgagattgtagaagtagattgtgaagaaattgtacaaggtaaggaaaaagatgcatctaaggaagatataagttatcaatatgcaaataatgtgatgccaatggcaatgaatacaaaagaactagatggtaggaaaaaatttgctgagattgtagaaatagatattgaagaaattgtactaattgaggaggacaatgaagaagtaaaagacattcaaaataaggaagttgaaatgagtgttctaaggggcaagaggagtatatatatcagatcagaggtagaacatgctctagaaacattagaaaaagccatttcaatggttcgtgaacagcgacttcattctcgggtggtatcttctagcgttgccgacgaagagtcccattttatgaaaaatgatgataaagttgatacatattcctcaaaactcactcaaccaagttccaaaaatgaggttagtgttgaagtacctaatggagatatttcggagggagcttcgcaagaagcccttgggaataaccctggcatccaaaattcaaggtgtacaggaacagatcctaactcaaaggaagtaaattctaacaaagtagtaccaacttcatcagagcagaatgtttcaacatctattttgttaagccaggctgtttcacatcccttgggaaacggagcaattctggaccaaacaacaatcagcaacaagcaattaaacactgattcagtccaagacacgtctttagatcatgcagacaagtcaagcaggcagaaaaaactaaacaccattgtaactcaaagtatgaattcagatgtaccaaagaagttaagcaggcagaaaaaatttctgttgttttgttgttttctgcattgactaaagagaaaaggttaattggccatgaacagaggaagaaaacagggaatttgtataccttaattggtcgtgtatactgacagggttctcccttttgttttgttggaagaatcttctctctctctctctctctctctcttccctccctttctattttcatcctttagtgaaactaaaatgtacgacttattcagaatcttttcaaataagggatttcattgtgtatagttttatcctatttttaggatgaactaaacttgtaacaaatgttttatcccactgtaatatgtttattaaacaataccattatttcttc

SEQ ID NO: 65941 - DNA, 364 bp, Glycine max
  Clone ID: PAT_MRT3847_3055C.1
ctaggtcatatgtcgaatcgttcctctaggcttattgtggacacggcaaatacacttaatggcgagtgattcactcgcgtataacatctatttattctcaattaagtagccagttgggtggcatattacctttttggggctggcccctatatgatgcacacttacgtacgcgtgcctgcaacgttgtagaatgttctataaagtacctaaattgaattccctggtcgaggatccacaactacgtaaccgtgcaaaccacgtcatatccctactatatcgccttgtaaaacatattcacttgcccagctgttacaatatcgaaaatgcccaaaccgatcggccttccaaacaattgcgcatgctg

SEQ ID NO: 65942 - DNA, 226 bp, Glycine max
  Clone ID: PAT_MRT3847_30560C.1
gggcggcccttttttttttttttttagaagcaatgctggaagagccatatgttagtcagaattgccaacctggagtgaaggggtacagccttagcgacaactgtaagttgtgctcctatcggcaacagagcactggcatacagacactatagcttgagaccttactttgcctatatcaccgatcctcgcctttattgtagagtggacactagggaattttgcgggg

SEQ ID NO: 65943 - DNA, 480 bp, Glycine max
  Clone ID: PAT_MRT3847_30561C.1
gtgcagccggaccagaaactggctcgttgctagcgccgaccaacgtcaaggggtggaggaatgagcagcaggtccagacgaacagcgacacgccttgctccgtactctgttttacgctgatagcgaccacattcgtttacgtattgaacaggccatagatcttatacacatgtcatttgccaaatgaacagaaaacattaatcatgttagaaactatattgctgtatgagattcggatagtgactgttgaccctttcaacacatagataggattgacggattgaaaaactaacatcacatctatcttgcacatactgacctatgggatcacgacgagactagggagctcaaaaacctacagaacaagcagcatctcctcaacggaagattgatcacgtgttgcaggtaataagaataagctgtgtcattgaacacctgtgagcgtacttgaatacatgactatgttagccctacacctac

SEQ ID NO: 65944 - DNA, 354 bp, Glycine max
  Clone ID: PAT_MRT3847_30562C.1
cccggaaccaccataaaatggggttcgggggttctccattcaaggcctttctgggaaaatcacccggaaaaagcctaatggggggggaaggcaacttcggtccctgaccacctgggcaaaggggaacccaacccccaggggccgccttaaactaaggccccccccggcccattgttttcccccaagctaataggggctaacctaaccccaaaaaaacttggaatctcaattttccaccctatttattaaacccaccacacaggggtttgttcctcataacaggcaactaacacccaaacaggtggtttcccaacttcgatgagcaaaaaattcccaggcttcaaaaacaaaacc

SEQ ID NO: 65945 - DNA, 543 bp, Glycine max
  Clone ID: PAT_MRT3847_30563C.1
tttttcacccctacccgagtgtcgtgtggtaaaaataaataaaaagaaacaacaactaataattttgagatcaagtcctaaacatatatgtttattaaaatacttagagagagaaatttatacattttaatttcaaatttgttctcatatatatgtaacttaatctttttaaacatgcttataatttaactccactgtcactccatcagccatgtctataacactaagtcttcaatcatcaagtgggggaggatgaggggagaaaggataatgtatagggttaggccctggtccgggataatcttcttcattgatctgcatctttcggttccctagacgtggtggacgagaaatgcgaggatcgtattttggattggccccttgatagtgatgttcgtctatgttgtggttgctatttaggtccctcatcaaaggttgttccttgcaggtgactacagaggtgagcaaaagaaagagcaagcacacccgagcgatgaaagccatctctcaaactctagaaagtcaaattttgcggacgcgtgg

SEQ ID NO: 65946 - DNA, 430 bp, Glycine max
  unsure (1)..(430): unsure at all n locations
  Clone ID: PAT_MRT3847_30564C.1
cggaaccccgggcctcccactcaccgtgaaaggtaacccccgcccaccngaacaacgggcaagaggcaaatcaaagccaagacacccaccggccagacaaacacccaagaggcggagagcgcagacaccaaacagaaaggaaagcccaagacccaagacacggaagggaacccaccagaccagcaacgccagaccacggcaggcaagcaaccagaggacggacgcacacacgccgaacacaacaaacaaaaggagcccacaccacactcggggccccggcaacgcggaggaacgcaaaacacagccaagaccctgaccggaaagacaaacacacaagaggccgagagcaccgacaccacggacaaggcgaaggccaagaaccacgacaaagaggggatcccaccagacccacaaaagctcaacatagcag

SEQ ID NO: 65947 - DNA, 428 bp, Glycine max
  Clone ID: PAT_MRT3847_30565C.1
ggaaaaaatttttttggtttaaccattctaaaccccatttttttggggggaaatcccccctttttttttttccccaaaaaacaaaatttaaaaaattttctagttggatttagccggccgggaccggttttttccataaacataaatgacccccgggggaaaaacaggttcagtaccctttttaacagaattttttgccccccgatttactttgacggggggggtttttaagggccccccaggggggttttggtttattggtttacccccttggaaacccttttccatgggggacccctttcccccggggggttttttttttctccccaccttttggggcccataaaaaaacccgggcctaaaaatttcttctccttttgggaatttgggcgggggctttttttaaaaaacttttttgtttaataaaa

SEQ ID NO: 65948 - DNA, 540 bp, Glycine max
  Clone ID: PAT_MRT3847_30566C.1
caagtgtatttttattattttacctaaccctgaaggctatctttatctttctcccctacagagtgatttggtgactgtctgctttaatcattatagagattcagaaatttcctaggggcaaaactacaattcttacagaacagtgatacctggagtgctttttctattcaggactccagccctgaaagggagtctgagcaccagtgatagactgccatcctctgggccttgggaatggggacatgtctctctacccccttgtcctcagtcagcagctggctcagggacatcatgggtctagattagatgaagtaaagtgctttcaactctgttgcctctttctagcctgctttggtccacagccagctcagaaagctccctctttttactactactcaaacagccaccctggaaacccaaaaaggaatgacctacccacagccttgaaactagttatctagttttatcccaggagagctggggtttttttgttgttttttgttgttgttgtttttgagatggagtctcgccctgtcgccc

SEQ ID NO: 65949 - DNA, 696 bp, Glycine max
  unsure (1)..(696): unsure at all n locations
  Clone ID: PAT_MRT3847_30567C.1
tanngggtcttcctatctctatatcccctgcttctagtgctcttccttgtcacccaacttggtgtggtgtatgctattcatcatcatcatctaagatgctgagaaaactcatgaggctgctactgctgctgatgttctttctgtgtttctcatatgttctctctgtctctgctattcctgcaacaagaacccaaaatttgaaaggcgaagaagaagaattttcagccctgccttctttaactaggttggatcatgtggttggaaatggtgaggtggtgctcgttgacatgaatgaaggattcatggagaggagggtcgatttggaaacccaagactatgaagggactggtgcaaataaagatcatgatccaaaatccccaggaggggcttaattaaccttaatcccaaaaacgacaaagtgttttaagttagttgcacccgaaaatgtaatagaggatctatatgtatctatttttatatatttggtcttctcttgtaaaatcaaagatacggtttgctttcctttactttatttatatatttctgtttgcttgttcaaattgtctggtggtgttgttcaaaagtcataacattatagtctcatatatatgtaacaactggtatatttttctctcttccttcactgtcattttgttcaataatattaatttattattttttttcaaaaaaaaaaaa

SEQ ID NO: 65950 - DNA, 247 bp, Glycine max
  Clone ID: PAT_MRT3847_30568C.1
cccacgcgtccgcccacgcgtccgacactagagtgttggagcattctattgctagctaataatgggcttaataataatggtgagaaagaaaagaatggccaaggtaataaaattctttgagttgaacacaagggccaagattccttctggtgggttaggcacttggcaagctgagcctggtgttgtagccaaagctgtcaccacagacattctggttggatacacgcatattgattgtgctcaaacg

SEQ ID NO: 65951 - DNA, 631 bp, Glycine max
  Clone ID: PAT_MRT3847_30569C.1
aagtcatatatcagatccctgcttctagtgggcttccttgtcatccaacttggtgtggtgtatgctattcatcatcatcatctaagatgcagagaaatttcatgaggctgctgatgttctttctgtgtttctcatatgttctctctgtctctgctattcctgcaacaagaacccaaaatttgaaaggtgaagaagaagaagatttttcagccctgccttctttaactagggtggatcatgcacttggaaatggtgaggtggtgctcatagacatgaatgaaggattcatagagaggagggttgatttggaaacccaagactatgaagggactggagcaaataaagatcatgatccaaaatcccccggaggaccttaattaattaattaaccttaatcccaaaaacgacaaagtgctttaccttagttgcacccgaaaatgtaatagaggatctatatgtatctatttttatatgtttaggtcttctcttgtataatcaaagatacggtttgctttcctttatttatttatatatttctgtttgcttgttcaaattaattgtctggtgatgttactcaaaagttatatatataacattatagccacatatacaactagtatatttttctctt

SEQ ID NO: 65952 - DNA, 328 bp, Glycine max
  Clone ID: PAT_MRT3847_3056C.1
atatgggcagctgcaccgcgtggctgggccctggcgcgagaccgggggcgactattgcgagcgttcatgcatactaccgagggtaccagaaaccctggcctattttggaggatggaagtgctacaattcacacaccggaacgtactaaggctggggagccacttttgggtgggggggcaagctgactagagcgcagcaagggtgatgaactaaaggtgaaccgctgggtcacctaggttggagggacaagctgcgcagcaaaggatggatgcttctaagctgcccccatggtgaccagagggtgactgtgttcgatgaccatgagcac

SEQ ID NO: 65953 - DNA, 2435 bp, Glycine max
  Clone ID: PAT_MRT3847_30570C.1
actttatagtaataatataactggtaaaatcccagatgagcttggaagtttgagaaacttggtgagcttggatctttactcgaacaacattactggccccatttcagacaacttggccaaccttaaaaaactacgtttcctgcgtctgaacaataacagcttgtcaggaaagatccctgttcgtttgaccactgttgattcacttcaagttcttgatttatcgaacaacaacttaactggagacatcccaatcaatggttctttttcaagttttactcccatcagttttaggaatatccttcattgaataatacccttgtacctccaccggctgtcacaccgccacaaagttcttcaggtaatggtaaccgtgctattgtaatcattgctggaggagttgctgtgggtgctgcactgttgtttgcagctccagtaattgtacttgtttattggaaaagaaggaagccaagggactttttctttgatgttgcagctgaggaggatcctgaagttcaccttggtcagcttaaaaggttttcactgcgtgaactgcaagttgcaacagatacctttaataacaaaaacattcttggtaaaggtggatttggcaaggtttataaaggacgcttaacaaatggtgatcttgtagcagtaaaaagacttaaagaggaacgaactcagggtggggagatgcaatttcaaactgaagtggaaatgatcagcatggctgtccatcgaaatttgcttcgcctgcgtggtttctgtatgacacctactgaacgcttgcttgtgtatcctttcatgtctaatggaagtgtagcttcatgtttacgagatcgtccggaatcacaaccaccacttgaatggccaaaacggaagaatattgctctaggagctgctagggggcttgcttatttgcacgatcattgtgacccaaagattattcatcgtgatgtcaaagctgctaacatattgttagatgatgactttgaagcagttgtaggagattttggtttagcaaaacttatggattataaggatactcatgttactaccgcagtacgcggtacaattggccatatagcaccagagtacctctcaactggaaagtcttcagagaaaactgatgtttttggatatggtgtgatgcttcttgaactaataactggacagagggcttttgatttagcacgactcgccaatgatgatgatgtcatgttgcttgactgggtgaaagcacttctgaaagacaagaggttggagacactggtggatacagatttagagggaaaatatgaggaggcggaagtagaggagttaatccaagtggccttgctatgcacacaaagctcccctatggaaagaccaaagatgtctgaggtggtgagaatgctagatggtgaaggtttggcagaaaaatgggataaatggtggcagaaagaggatatgatccaaccaaacttcgacccctccaatctccacaatggttattggcggccattattagactcaacttcaaatattgcaccagatgaactgtcaggtcctagatgatctttgaacaatgaaacgtttagcaaagtaagagacgctttgtagaaacaaatatgtttccttcaaagctccaaaatgttggtttattaatgcaccgtataattagtatgccattattagactcaacttcaaatattgcaccagatgaactgtcaagtcctagatgatctttgaacaatgaaacgtttagcaaagtaagagacgctttgtagaaacaaatatgtttccctcaaagctccaaaatgttggtttattaatgcaccgtataattagtatgccatgcagtggtgataacagcttgtgtctaaatattccttagtctttgatcactgttacttcactgcatgttcaatgagtgttactacaacactttgaatacattctccatgaaccacgtagataccaggttatattggtgccatattttttacgtgtaaactgacactgatcattgcagaatatatatagtgatttatgaaacaaccagttaaaaggaatataatgatgacaccaatagcaacttatggtagcacaagtgaatacacaatactgccggctttctgttggaaagagatatacttctgatttgtgcatatgattttcgccccctctcccacgcgtccggttttcatccttgtgcgcagattccatgcccattggtcagttgtgattattaaagaaagaaaattgtaatttcttttgggttgtcaagttgcaggatcaagtgtatgttacaacttactagcaacttttgtcattgtaggtatgaaaaattagaatagagctttatggaaataaatacaattctattgtcgattgtattatattgacttttgtagttatttctggaggtttggaaatcaatactatttgagtcatgc

SEQ ID NO: 65954 - DNA, 341 bp, Glycine max
  Clone ID: PAT_MRT3847_30571C.1
cgggtctagctctaacacctaaaataagcacacctctcttaattgtcaatgtgaagagtgaagtgtgtgtaattctaatttgaagtttctaagatgaacttctccctacattaaatgtgcgcggtcgtcctctatagacctttggaacccgggattataacaccatccgtttcctggctcttaccacatttccctatcaggaggcagatattcactagacagatgcatggacatagttacaacatgaatgaaatacagatcggttaacaaatgcgcacaccataccaactgtaatcattgatgggaacccctgtttggcctctatagtgcacgaacttaca

SEQ ID NO: 65955 - DNA, 302 bp, Glycine max
  Clone ID: PAT_MRT3847_30572C.1
atttcatatgcttatggaagttcatgaacatatctcatttcatttatagaaggttcatatcaactgtcgaggcgattttccattcaatgacccattcctctaacacaaaattcaaatttgtttgtgtaaatcttttcttgtggaagcacaattacatgatttgcctgtgaggactgaatcatatctatgtggtggatatcttcattcctgcttcaacttacagtgatggtatacaaaaagttgtaatggtctggacatgacatttatatttatttttttcacgtatttttttaaactgatcc

SEQ ID NO: 65956 - DNA, 482 bp, Glycine max
  Clone ID: PAT_MRT3847_30573C.1
atgtaaacgctgattagtaattagtacagctatgacagtgaaagtgacatcataattgcaatggttgatgttgtgttgtattctgcatcactagagtttgatactttgccccaaagcacaaccttatttattgaactacaattgttcaggatgcaggtgtcaccattttgggaacagttccaagcttagtaatgcccgggatcggttcgctcgggccgctcggcttggattggacaaagataaagtaatatctctcgttagtgtaaatagtcaagttgctactaagtaaagtgaactgagctatggttatatgctgaacattttgttcctctggagaaacatcaaatgttgatgatgatatgtggctttcttcaaaagcttactacagtccaattgttgaattgtgtggaggcactgagctcgcatctagctacattgcaggaagtcccttgcagccatcaagcttttggagcatttagcac

SEQ ID NO: 65957 - DNA, 458 bp, Glycine max
  Clone ID: PAT_MRT3847_30574C.1
ggggaaaaatatcatgattttttttctgcgttaatttcacccgtcaactcataaaatcaaacagttttgctttttacattcagtttcagttcagcctaaaaaaaaccctggtttttaaataagacgaatttctcggggaaacaaaagaacaggccttaaacaacaaaacataatacaatccctttttaacagctttaaaacaaatgtaacaaaaactaagggggttggcatttgccccaacaacctttacacttagcacagattcatgtttttttttttcctcgattcatcctggaatggatcaaaaacctggaccagggggcccaggaggaggaggtcccccaaactttgggccggaacaacttttcgggggacaggggcaacccagacaattcaaaagggtttctttttccgctgcaaatacccccggaaggccctgccggtggaccccaaggggg

SEQ ID NO: 65958 - DNA, 266 bp, Glycine max
  Clone ID: PAT_MRT3847_30575C.1
gttaaaggacaatgtccaattaaattcaagggtcccatcctttccaacataatttgggtccatacaaataaacaatatttgcctgtttaacacttgccacagaaaatattttgccctaaataaatccggggcttgattcattaattttgaatttaaaaaactaaatcaaagaagggacatgaaacttatcatttggtggaattggttcatgatcagattccaccttgggcccctttttaatacgattaccagctttagttacctgt

SEQ ID NO: 65959 - DNA, 286 bp, Glycine max
  Clone ID: PAT_MRT3847_30576C.1
tacggctgcgagaagacgacagaaggggggtggcagtatgtgtgacacagaaattgaagctgagagcttcgatagtttcttccttcgttgtctcaactttccttcgtctcccgttcagaacaaagggaccaagaaaatacagtgtgtgagagagaggagagagaatttccaaaaccatgtcccacagtcatctaagtttcgcctttgggattctaggtaacattgcctccttcgtgtgctttctggcaccactaccaacattttatagagtttgtaagaagaaatc

SEQ ID NO: 65960 - DNA, 1334 bp, Glycine max
  Clone ID: PAT_MRT3847_30577C.1
ccacgcgtccggttgaattgaaggtttttgcgactgagagcttcttcgtgttctctttttttgcatgttcgtttttctcgactagatttgatggagtgcgtttctctgtgatctcgaggggaattcggcgatgtgtgagctaattcggtgcctggtgtttgattctggtttcgcttttgcgcatttgtttgctagagttatatgaaatgtttgattggaacgacgaagagctagctaacataatatggggtgaaggaggtgagagtgatgatcatattgtgccttatccagaggtaaatgaagatgttagcaacaaaaaagaatggaatcaagaagctgctgcgactaagctcactgagctgaagagaccggaggctaaaactgattttcatgaaagaaagctaggaagcagttccaaccttgataatagtggagaactactaacctcaggatatggaacaaatgcatggcctgacttgtctttatccacttcagctaacattgatcagggttccctgggtactgaagtatctaaaaatttaagtgaacttagcaaattcagttcatcaagagaagaaactacacaacatgaaaaggatgctgaaattttccaaactgctcatgaaggtaaagagcaaggtcattttgttgattatggatgggtcaacataggaagttttgatgaccttgatcaaatttttagcaatgatgaccctatatttggccatgcaagtcttgataattctaatgagctttggtcgtctaaagataaatgctttaacacttgaagcctctcaataaaaaaaaaggttgtcccgaaatcgaagggtaaatccttccttaatacatctatgcttattggtatgcttccctctttcaatatatatggatttggtaatgcaaatgttttattttattgtcagccattcggatcataagcaagtgcaactatcactgtagaatcctgggaaccagttttatgcatgcatgttatcagtattattaggttttctgctgttttaaaacatgacagagtatgtatatcagtatctgaccatacttaaggttgtgagtgctatgttgttttaatcataactacaacaaaagtgtctcgcaaagccagttatcagatgtcaaattttaagtctttgcctgactgacttagaccaggctttaaagttggtgttggatttctatatgtaccacttgccatacctacctacccctcatcataattcatgttatgtctatcattatttgagattcatacataaactagcgatttttaatttgaatttaagtatgttttgggtttccccggaaaatttaacata

SEQ ID NO: 65961 - DNA, 400 bp, Glycine max
  Clone ID: PAT_MRT3847_30578C.1
gttaaagttaatgtagcatgtgctgctgttggctggacattaagttacactacaactgcattgttggaatctggtttgcaaaaagacagagggttaatggcggagtattttgtaaggatgcattacgttgctgataacattaataagtcccaagagaaagatatgctggagggaaatttttcctttgatattaaatatagctctagatgggaaaaaggtttctctacataagcacaatttgttagtggaaagaccttgaaatatgacataattggcgctggttgacattttttaaaagattctgctgatatggcagatcaagatacaccctctgagattgacgccagattgagacagagaatacatcctcaatacaatgaggttcaggctcagatggaaa

SEQ ID NO: 65962 - DNA, 475 bp, Glycine max
  unsure (1)..(475): unsure at all n locations
  Clone ID: PAT_MRT3847_30579C.1
gaaanantnnttcnattatnnttanntngcngttgatcgggtggatattnctgcctgtgnananttgcccnngnngggtctgaatgtnngtntgtgctnagngttaggttggtnctngatntcggtgttgctgtctgatgctgcgtgtactngttctntnntgtgtntgatgngtcggcgtgaggtgantgttgcnngtgtgtgtgtnntntgatgtgtgtgngtggttanatctagtcatntttntgttctctntttgtagnnnnntcntncnatacntgtgtgtntgtttttgtgnngnntngtnntgggtnncnntgngtngtagtngtngttngtgtnnnncgnnttgttttgtttgtntgnnntggtttntgtnngngngttttgtgtggntgtngtngtgnttgggtgtnttggttgttagttntgngtgggtgtgtngtttggnngtgttncgtnttttgtnttgtng

SEQ ID NO: 65963 - DNA, 246 bp, Glycine max
  Clone ID: PAT_MRT3847_3057C.1
tcaatatcctagtataccttaataaataatttaagatactatgatgagagcacggttcccattactgttgctgggacttgtattcctggcttcagattctgtctcatttggcattgattactgggatcaagagaaccccagacactgcatgtgtctccagcgatgcaatagcgagtcagactcgtatagggaccatgcttgccacgctcgttgcaacctccttaaggtgcagatagaagaatgtga

SEQ ID NO: 65964 - DNA, 1435 bp, Glycine max
  Clone ID: PAT_MRT3847_30580C.1
aaaaaaggcattaaaatcctttttttaggagcaaaagtagtcaataaaaatgcattaaaatcctatatttaggagcaagagtattgaaaaaataacacaagctttctcacttgcgagtgagtacctatacttactgaccctttttgaggtcaaatcaaatccacatgccatttgctcccccatacttggaaccaaaagatgatgcatgaaaataactagactctctttcagaatggggaaacccccctctctgcctcattgacaagattacaaaatctttacaacctatacaaaatttaacagattcagtaactgaagttagaagatgagatcctccattctttctctgtggagtctggataatgaagccatgtaaatgaatgccattacttttttgagaaagtgagatatgggtcttgagcaatggtcaatacatctggtctctcagcctggttatatgttagacaccgtcgaataaaatcctttgcctcattagaaatggtaggtctagaaggaaattcaactttgcgtgccttcataattgtgtcttcgcgaagtattctctcttgtgtttggtcgtgcccaaaaggacgtcggccaaagagcatttgataatacaaaattccagcagaccagacatcaacctttgatgatataagaggtgccttgctgagctcaaagcattcaggaggtaaataccagtatgttccagctccctgggatgtaagttccatgccctgggatcccacatcatcctccactatcttactaagaccaaaatcagtcactttggcaacaccaagctcatcaaacagaacatttccaggcttcaaatcataatggataatcttctgtgctcttttattcatgtaaataaggccttgaaaaatttgaactatgatgaccttagcctccctctcgggtaatataggtgttgccttgaggacagcatcaagatctttcccactacaatactctagaacggtgcagaatgtgttttgatcaatctcaaaaatgtcccataaacgaacaatgtgacgatgtacaagagtcttgtgaatattatactcccgaattgcatggcgtatgtagctttgcttcttctcttcactccattgagcatttaaaccatgaagcttgcatgcaacatatctatgctctaccaagtcgaaagccttgtacacctcactgaatcctccctttccaagaaggttaagaagggcatagcgatgatttagaatctgaaagttgttaaaccgtgaaccatcttcatcccgtatacgtttcatttcacgaattaacctccccttctctatttcatatcgttccctctcccggaaaataatttcttcttctcttttaaggctagctaatcgagacttgtagatctcatcatgaattagaatatcttctggtaatccaacctctctcgtgc

SEQ ID NO: 65965 - DNA, 429 bp, Glycine max
  Clone ID: PAT_MRT3847_30581C.1
ccacgcgtccgaatatctctctgcagtgctattgcacatggcacattgctcactcgttccgtccttcgatgacctatggcagcgcttcaggaaactcaactctcttcttagaccacacttataaagagcgtgcagagccacacaccattgattgcccaacacacctcatgtgatactacgaaaacacctacttcgacttgggcttgattcggcttgctttttcacttacttgaacccacactctatgcgtgcctcattactctttcacaccggacctcgcacagcactcccaatagtctatatcaaacatggtactcttgcgtgtaacatggactactttcctgacataacctaagctgtgccccgtgagccctctttctacttactaatcgaccgttctagaaacacttatatagggatacgggcaag

SEQ ID NO: 65966 - DNA, 238 bp, Glycine max
  Clone ID: PAT_MRT3847_30582C.1
ttttttttttttttttttttttaggtattctcaattccattagttattctgtttctcaattccagagaaacacgagaagctaaacaaaagagagcaaaatgactaagtgtttttgtaatctaagactaatagatttaaaattgacttccttttttttctataaaagtcatatatagagttatatcacaataaaaaaaaggaccagcctttcacttttaactcttcaacctctatcaat

SEQ ID NO: 65967 - DNA, 263 bp, Glycine max
  Clone ID: PAT_MRT3847_30583C.1
aaacacaaacccccccaagcttacattaaaaaaatcgggtttttttaacagcctttttcaccccttcactaaaccgggggaaaaagggtcataatgttgggtggagaaacacaagacccgccccccttgggaaatcctaccagttttttcccgctgaataaaaccatgaaccccaatgggatttttttaagacattaaccaaggccttatgcactgggtgaccaggggcccttctttgggaaaaaaaaatggggtggccggtt

SEQ ID NO: 65968 - DNA, 837 bp, Glycine max
  unsure (1)..(837): unsure at all n locations
  Clone ID: PAT_MRT3847_30584C.1
gaattcgagctcggtacccggggatcctctagagtcgacctgcagaaataaattggaaattataataaaccagcaatcctggatcacctattcctagcttcctttaggtaaaagcaaatatgttggcaaaaggtaaaagtcacctttagatattccaaatatatctttcactttttttttttttctatttttctttaaaagtgcattcaatttatgactaagctacgtgatggagtaaactaacaattcatttgaaaataaagaaacgatttcaacatacaagtttctgagggttgtgatattggtgagaactttggggaatggccctgacaatttgtttcccattaaagagctgcacattcaattcacaagaatctttagtgtcactctcaagttgtttacagtatacagaagaaattgaagagacaatgtagagaaaccaaagggtgcaaagcagaaagttcttacagctcaaccaagcgcatggtaccccattgtggaggtatagaaccagtgatgatgttacgactaaggtctctgtttgaaagtgcaagacaaagttactggacttcaccattccatagggaacatcatgcagagcaaaaaaaaagtcatggtttcaaaaccgagatttgatatcttacaattttntggagataatgaagcttggaaaactctggtgagagactacctgacagattctgagctttccagtatctgttcatttagaatatgaaataaaaagcagaaattcagaatttataattatatgggccgtcaacatgattattccaaagatttccaatcaataaacaaataccgtacatgaaatgagca

SEQ ID NO: 65969 - DNA, 187 bp, Glycine max
  Clone ID: PAT_MRT3847_30585C.1
ctcaacaagaaatcactgactcatccctctccaacgagtcacgcacttccactccttctgaaggcccgccaggcaactcggaaaccctaattctccgctcatcgcatctgcatgaccttgccactcatatcacagggcagctctaccgcacgtaagggaggaaaagctgcgcataaggtgtctgctc

SEQ ID NO: 65970 - DNA, 267 bp, Glycine max
  Clone ID: PAT_MRT3847_30586C.1
ttggggtgattgatgtgcttgcatggtcgagataagtcatagagccgctcgtcgtgtgaagatgatcaaacgcgcagtgggcgtacacaagatgatagaggggcgtcgtccttacaagatgatagaagggggaaaaataaagttattcgtgtcaaatacaacctaaaaacgactaactactgtggctctctcacaggacttaagtccattcatgtgcgtacgtcatgctccagtctctttacagcgctattcaaacctaacctatcg

SEQ ID NO: 65971 - DNA, 480 bp, Glycine max
  Clone ID: PAT_MRT3847_30587C.1
ggacaagaaagatacaaatgataaaattgaagagggtactgccaatggtgaggaagaagagtcttctgagttttccttgttcagaagactatttcgcgtgcaccctgtagaggctaaaagtggtgtgttcaatgaaaacaagtataatggcggtttatttgaaagtagtccaggtacagagaattttttacgtaaattgctcagagaccgtgaccgttcaattgaagattcagagctattgggttcaaaaagacagaaagagaagcattctgtatccccaaagcagcagagtgaaaagtccagcacaaagcctccattaccaattagttagtctcagttccggaaaggggcttatcatgactcattggagtttgtgcagtcattatgtgatacatgatatgggttagaggatgtatttcccatagaagatcgcacaagtgctcttcgcgaggcacttgtagaaatcaatctacatgtagc

SEQ ID NO: 65972 - DNA, 222 bp, Glycine max
  Clone ID: PAT_MRT3847_30588C.1
gggtataactaccctttatttacttttaaatgggaatttgggatttccaataaatcccttggtctgggggtttaaaaccccccttaagggggggaccccaaaaacatatttggggcaaaaaaatacccaaaaattagatttaacatgggggcggactgtgaaaaaacaaagccaaatggggagggtggcccatttaaaggggcccctattttctttccgggg

SEQ ID NO: 65973 - DNA, 220 bp, Glycine max
  Clone ID: PAT_MRT3847_30589C.1
attccacggctcgacccaagccttcggtccggttacaaaagacaacacaacgtggagagcaaacacaccatgattgagacgattaggatccacagacgactactacgtgcattatagaaacatcagaagatacattaagatcacattcatcatcatctactactatcttcaagtattacacttactcagtatcatcgtatgtctctcaatgactctatat

SEQ ID NO: 65974 - DNA, 343 bp, Glycine max
  Clone ID: PAT_MRT3847_3058C.1
ggcctcgatcttatgcaggtaagacaggttaaattcacggactaacagttacaggggatggaccatcccgtgcacggactatgcatgaaccaatcggagtcacatcactgattgtaccttgcaacttcccactgattattacttcatgaacagcagcacctgcctcaactagtgaatattccttccaattgatgactgattatcagactcacattgtacacctgtatgtaccaaagacatcccttgaacctagactggctgctggaccactaaatgtacactctagctccgaccctactgccaaaacgactctggtgcggcccatacactataacatgctgag

SEQ ID NO: 65975 - DNA, 487 bp, Glycine max
  Clone ID: PAT_MRT3847_30590C.1
aaaacgaattttcttctccttttaaatttcaattatgcaagcaaaaatttacaatatgtatatacaatatacaacaatttttttatcctctttttcccaattacatgaatgctaagcaaataaatcgaattatgacggttttatatctcagctactccaacaatcattaaaaaaaatgggaaatcaaggggtaaaaaatgataccgggggacatcctatgacactaacaaccactgctaagggctaggaggaacaactgaactagtttcaagcaatttgccagcatcttcatccattggaatcttgctccaaccatttctcatggacaatattcttgctctttcaagcccatttcctctgaatccagtcattcttgatgacatcattggcatcacaagaaccgatgatgtgttgatggtatcctccccaaaaccaagagacagtgcacaagaagtctttgcctttaccaacaaatctgtaaccttta

SEQ ID NO: 65976 - DNA, 370 bp, Glycine max
  Clone ID: PAT_MRT3847_30591C.1
ccccaacaatcaatttaagttccaaaactcttccacagagatcgactgctgtcataaagcatgtgggttacatggttgcatttcaaccgaaagacgaaagatataagaaaactaataataaactacgcaattgcatgcatacttgttaaagacgagttttaccagggggcacacaaaatatttaaatcaaaggtaccttaacctactatttgactaacaacagttgtttgtgtttgagtagaaacaacccatgccaaagaatttggtggccttcttaatcaagaaattggggaactggatttttctaaaatccataaacttgaaccaactggtttgccaaattttttttgggatatttccttttagtttt

SEQ ID NO: 65977 - DNA, 368 bp, Glycine max
  Clone ID: PAT_MRT3847_30592C.1
ccacgcgtccgattttcttttccttaactttgaccgagaatattacaacacttttcactttcttgactaccttctgacttcgatatggttcgtacgaagcaaaccgctcgcaagtgcaccggtggcccggcgcacacttaagcatctgcgccaccaaggtcagtggcatagcacgtcgcggtcgaccgggaggagtgaagagacccccaccgctttatgccgagaaccgtggcgctgatggaactcacaaagtgccataggagcgcctatctttttattacgaagcttacattacacaggctcgagggagaagtcgttcatgattacgagaccgcattgcgataacggagcatctctgtttctatgct

SEQ ID NO: 65978 - DNA, 1024 bp, Glycine max
  Clone ID: PAT_MRT3847_30593C.1
aaaaagccaaagtgtaagattttaataaatgacctaaggcctaatctgtttaactagatagactttaatttacaaaaaaaattatcttgacctattttctaaaaagatttagtttaggccagatgtaggttaggccataggcttctaccgaacaatctaacctattttcattgctacttatacaaaattaaatagaaataacaaaaggtgcaatacatcaaggatttggataaggtaatctaataattttccattaataactgttagatattttttttaatgtcatactatcatatctaatacttattaacagaaacttatcatttaccatgctccataatactaccttatacatacccttaaatcaaagattatcttgctcttcaatctcaacctcattctcttccaaagaccttcccatggtttccctcgtgaaaaagtaggtgatcaccattcccaataagcacacccctccaagtataataagggacactttcatcccaattcccttagggtacccatcctccttctttctatgtgaagcccaaagaaaccccacagacccaataattgccccaaccttgccaacggccccagaaatgccatgacaacttgacctaaacctagcaggaaaaagctcagccgggactatgaaagtagtagtgttgggcccaaaattggcaaagaaaaaagcaagtccatacaacaccatgaacactttattcttatgatgttccttggtggtccaataagagtaatagggaattccaatggagaaaaaggccaatgccatgaagaaaaagcccatcattggatttttgacccttccccatttgtcaatgaaatacattgagaagaagtagccaggaattgtggaacaaacagcaataacggcttggatccatgcagcatggaaagtctcttgatacacatccacgtcctcctttttgtctaggtagcgtttgtatatttcactttggaacaaaacttggctatagaacacaatgtccacaaggaaccatgt

SEQ ID NO: 65979 - DNA, 258 bp, Glycine max
  Clone ID: PAT_MRT3847_30594C.1
atttactatagagatatgttatgtgatttcttttcttttggaagattgcttaatcattcggtcctcctattaattcatgatttatttttttgatttcaaatgtccttttcctttgattgtgtgattgatagattgtaagttatatttgggccccgtattgatatttttacttccaaatgagtgaggtgattgaaaagattacaagcactatagcgctgtggatgacaatcctctgcagttctctgcagagtgatcaaa

SEQ ID NO: 65980 - DNA, 548 bp, Glycine max
  Clone ID: PAT_MRT3847_30595C.1
agctcaaaatttattaagttgtttcacagccagcaagcaaacttcagctcaacaccctcgttccctttcggctccaaaacatgtcatccacaaccacggattcagattgttcatatttggaacaaattcaacaatatctccttcacaatgattcaacaattctaacaccacctcaagcttttccaagccctagccatgatagtagttcggatgcaagtgtccactttgagcacccttcggaagcgcatgacgtgaacgcgccacccaaatggaggcgctaccggggtgtgaggcgtaggccatgggggaagttcgcagcagagataagagatccaaagaaaaatggttctagggtttggctcggaacttatgttaacgaggaggaagcagctttggcttacgacaaagctgctttcaacatgcgtggccaaaaggctaagctgaattttcctcacctcattggctctggtgtgcagccggaaccaccgtgtctggcggtttctagaggagcttaccagagtcttctccccaacacaccatatgatagt

SEQ ID NO: 65981 - DNA, 681 bp, Glycine max
  unsure (1)..(681): unsure at all n locations
  Clone ID: PAT_MRT3847_30596C.1
ctttctctgtcttctgttttcctttttctcgagaaaattgtgttagggtttctgtgattgagcctgcaaacacttccttgagggcacaaaagattccattgtttgcttctttcagattaatttttttgtcagttcagatcttcaagaagaagaatccagagaagctatatatacatcatcgttgttctttgccaagacaaagaagaaaaatggtgagggggaaaactcagatgaagcgcatagaaaatgagacgagtaggcaagtaacgttctccaagagaaggaacgggttgctcaagaaggcctttgagctttcggtgctgtgtgatgctgaagtcgcactcatcatcttctctaccagagggaggctttatgagttctccagttcaagatgctccagtataaacaaaacagttgaacgctatcaaaggaagatcgaggacctgggtgtcagcaacaaaggaatccatgaaaatacacagcatctgaaggaagttgatatgagcatggcaaagaagatcgagcatctagaagattcaagaagaaagcttttgggagatgaattggataaatgcagtattgacgagttacaacagctagagaaccagctcgaacgcagcctggacaaaattagggcaacanagaatcaattgttcaggaagcgaatcgagaagctaaaag

SEQ ID NO: 65982 - DNA, 1137 bp, Glycine max
  Clone ID: PAT_MRT3847_30597C.1
ctctttctctctcttctgttttcctttttctcgagaaaattgtgttagggtttctgtgattgagcctgcaaacacttccttgagggcacaaaagattccattgtttgcttctttcagattaatttttttgtcagatcttcaagaagaagaatccagagaagctatatatacatcatcgttgttctttgccaagacaaagaagaaaaatggtgagggggaaaactcagatgaagcgcatagaaaatgagacgagtaggcaagtaacgttctccaagagaaggaacgggttgctcaagaaggcctttgagctttcggtgctgtgtgatgctgaagtcgcactcatcatcttctctaccagagggaggctttatgagttctccagttcaagaggtgcctaagaaacttttaattcgttgtctattggagatgctccagtataaacaaaacagttgaacgctatcaaaggaagatcgaggacctgggtgtcagcaacaaaggaatccatgaaaatacacagcatctgaaggaagttgatatgagcatggcaaagaagatcgagcatctagaagattcaagaagaaagcttttgggagatgaattggataaatgcagtattgacgagttacaacagctagagaaccagctcgaacgcagcctggacaaaattagggcaacaaagaatcaattgttcaggaagcgaatcgagaagctaaaagaagaggaaaagtgcttactcgaagtaaataaacgcttacgtgagcagtaccggattgaacgacaacgttgtttgagtgatcaggatgtcgaattcgccacaaaaaaggagggagaagaggtggagacggagttattcataggaagacctgagagaagaatgccgttaaagttgaaacctacaacatatagtgctcatgcatacatagcgtaatctaaagattaaaaattactaatgcccatacaaacgctgctagcttccttgcagactgttatattcatgtcttattaagatatgtaattcttgttgtaccccaaatcacaacggcggttgtgaacgcctacttaaataatttatgtacaacagtcattatttcaaaactgttcgttagagtactatatatatcagtttggaattttttt

SEQ ID NO: 65983 - DNA, 1517 bp, Glycine max
  Clone ID: PAT_MRT3847_30598C.1
gtaactgccttctcacccctgaggaagggtgctagtaatacccttttcctggcagggatctctgagcggcggttggggccacccaaggctatcacattatcttttcggtcaatcatcaccattcccccaacaagttaatagcattccgcaaaatggctgccaccaccttagtctctgaagtcactctcccctcctcctccggccagcggaagatgccgctgatgggcctcggcaccgcgccggaagcaaccagcgcggttaccacaaaagatgctgttcttgaggccatcaagcagggctacaggcactttgatgctgcttctgcttatggtgtggaacagtctgtgggagaagccatagctgaagcacttaagcaaggactaattgcatccagagatcaactcttcatcactaccaaattgtgggtcactgataaccatgcccatactattcttcctgccctgcagaaatctctcaggacacttcaactagaatacatagatctctttctgatccactggcccattgctactaagcctggaaaagttgtgtaccccattgaagtatcagagatagtggaatttgacatgaagggtgtgtggggatccatggaggagtgccagagacttggcctcaccaaagccattggagtcagcaacttctccatcaagaagcttgaaaaattgctctcttttgctaccatccctcccgcagtgaatcaagtagaagttaaccttgggtggcaacaacagaagcttagagatttctgcaaggaaaagggtattactgtaactgccttctcacccctgaggaagggtgctagtaggggtgctaattttgtgctggacaatgatgtaatcaaagaattggcagatgctcatggcaagactgcagcccagatttgtcttcgatggctatatgaacaagggttgacttttgttgttaagagctatgacaaagagaggatgaagcaaaacttggggatttttgattggtcactgactgaggatgattacaagaaaataagtgaaatccaccaagagaggctcatcaaaggaccaaccaagcctcttcttgatgatctatgggatgaagaatgagcagtcacctaaatttcatagtttgagtgttttctggttactcttgagagaataaagcaaagtgtcaccattctgttggtgccagatattgctcgagaattttaattaaataacccttgcgaatgttgattatagtgacactacgctattttccatgtgatgtggacgcaatccaaattccaatttaatttcaaaaaaaaaaaaaaaaaaaaaaaaaaaaaaaaaaaaaaaaaaaaaaaaaaaaaaaaaaaaaaaaaaaaaaaaaaaaacttggaaaaaaaaaaaaaaaaaaaaaaaaaaaaaaaaaaaaaaaaaaaaaaaaaaaaggggggggggggccccccccccacccccttttaagggatttttttccccccccccctgggggggtttttaaaaaaggggggggggggaaaa

SEQ ID NO: 65984 - DNA, 1570 bp, Glycine max
  unsure (1)..(1570): unsure at all n locations
  Clone ID: PAT_MRT3847_30599C.1
cgcccactgtcatcatccatcttttgttgttgttgttgatctccgcctccctcctcaactcactattccacccaaacgcaccgttttttcattcacattcctctcactcagaatcagatcacaccaccgcaaaaccctaaattcaatttttcgatcttgcccctcgcagccgttgtggaaatggggagcaggagggacgaggcgcccgccataaacagcaccaacgtcttcgccgccctcggaagcctcaagaagaagaagaagaagcccgagaaggaccaccagggcccgtccaagcccaaggacaagaaggacgtcttttgggcccccgcgcctctcacctccaagtcatgggccgatgttgacgacgaagatgacgacgactactacgccaccaccgctcctcccgaatctgtttgggccgcgccgaccgtcactcaaaacgacgccgctgctgctgaggaaagtgagagtgagttggaaggtcttgatgatgctgatgatgatgctgatgatgaacacgaaaatgaaactgaatgaagctgagcctatgaagcagaggctttctgcaggaagcgtgctgaacaaacagtggttaaaaaagaagctgaagggcaactttctgagaaggaatcaaagaaaaaggggcttgaagaacttgaagctgttttggctgagctaggatacacaccgaaggaacccactgtccaagaggatgattccaatggtgctgagaagaaagaagaggatcctaatggtgctgtggagatgaaggagaatgctacaggggaaagcaaaaatgctaaaaagaagaagtagaaggaaaaatcttcaaaggagcagaaagaatcacaagaccagcctcatggcttggatgctggaactggaaatgcaacttctgaaactgctgaaacggagaaggctgaggatgcatctgcaattgatgttaaagagaggctcaagaaagttgcttcaatgaagaagaagaaatcaagcaaggagatggatgctgctgcgcgtgctgctgctaatgaggctgctgcaaggaatgcaaggctggctgcatccaagaaaaaagagaaggcacactacaatcaacagccagtgcggtaaacggggtgtcttcaagtgactgtacttcttttggtgtttaattttttttttgtcctttttcatttgctatctgtctatatcatatatatgagcatatgctccaaaataaacactggagcggctttaggtaatttgactttgagtccttatagattcattgcttttacttatttatttggattgttgtttgtctttgaccagactgtggattggttcaactgcatggacatcactgctattccgaaatctgtgtttctatatctatctatctatgaaaattaatctgctataccaaaatctgtgttttctattagatttttattttctttaaaaaatgttctaattttgatggttattattaattgatgcagtatatagttctagttactcctgatgattntgtgtgccctttagtttctggtgtggatggttctttgtttggctctgtcttttcttt

SEQ ID NO: 65985 - DNA, 425 bp, Glycine max
  Clone ID: PAT_MRT3847_3059C.1
ctagcaaggaggctcgagaaaaaataggaaaacatcataatagacgaccatcaaacctttttgcctcattttaacaaaaaaagaataaagaaaatagacaagtgtccaagactatttaaagcacaaatgcacaatagcattatgaagctatctattattgagagtcagagatgcaaaccgataaagaaggttatcatccattccacctccattgcttataaatgctctagaaatctcttcctttactgtacttttctgtgttatagaaattgcccatctgctcttccttgggtcaaaatataatcatatgcagctgttgatgaaatatctccaccagaggaggaattagaggatggcaattcaacctgccattcatcaagggattatttgatcttacagcacctaaaaaggtgaatttggggaat

SEQ ID NO: 65986 - DNA, 646 bp, Glycine max
  unsure (1)..(646): unsure at all n locations
  Clone ID: PAT_MRT3847_305C.1
gaaaatnnnatttgcaatgctttgaattcacgtgccactaattccaacgtgcatcattgaaatgggacnnnttnntttgtcgttcgcaggcacctcacgactgagattcaaattctttggtaaaaggtatacaaatgagttaaaattaaaatcacgtcgtcagcatttgattctgattccatcattgctcccttgtgaacagacgatccaaattcttcaacaagtaatgaatggcgcacaaaaaagaaattatggagaccaaccaacgtaatccaaataaaccaccaccaccaccactttgttcagaagtagctgttctcgcactcacaccttcaccacttgtggttggatgatctttaatttttggtgttgctgctgctgttaatagggttagtggagctccaactatcccatgttcagaaacttttttaggccttgcttttgctgctggtcttctggatggagctggagcagaaggctttggcatttgtgttggatcttggggtctctcactaggaataggtacctgttttgccaagttcctgaattgaaggttatagaacatatggttgtatctctcctttgccaacttttgctccctgttcaatcttctccaaaagccataaattgatcccatattcaagac

SEQ ID NO: 65987 - DNA, 472 bp, Glycine max
  unsure (1)..(472): unsure at all n locations
  Clone ID: PAT_MRT3847_30600C.1
attcaccatatgcaggacacttcaactagaatacatagatctctttctgatccactggcccattgctactaagcctggaaaagttgtgtaccccattgaagtatcagagatagtggaatttgacatgaagggtgtgtggggatccatggaggagtgccagagacttggcctcaccaaagccattggagtcagcaacttctccatcaagaagcttgaaaaattgctctcttttgctaccatccctcccgcagtgaatcaagtaattagttaataattaagttaatcacacattagtttaattacgtgactgatccactgatcaaaatcactgatcgaactaaaccttaatcaatccttaacaggtagaagttaaccttgggtggcaacaacagaagcttagagatttctgcaaggaaaagggtattactgtaactgccttctcacccctgaggaanggtgctagtaggggtgc

SEQ ID NO: 65988 - DNA, 390 bp, Glycine max
  unsure (1)..(390): unsure at all n locations
  Clone ID: PAT_MRT3847_30601C.1
nnnnntacgggtgtgagaacacgtcagaaggggcttggtgttgattcttgacgatgaaacggcggggggtgattacatgcgctccgtcgtctatcgagctgacggggctgaatatatgactgccaaagctagaacgaagacattacaatctgcgcacaggttctaaaaaaaaacctgacgattcaatcgggtccttaatataccgatcaaagtgtgctgtttcaaccaaacaaacacttcttatgacaaagcgacatcatatgacatgatgaataatatactctttttggagctgcaatgaggcggtgggacccaataacggtggcgctgcttgccacagagtctgggcttgcagacattgagcaccaatttattaaagcaaacactggt

SEQ ID NO: 65989 - DNA, 1360 bp, Glycine max
  Clone ID: PAT_MRT3847_30602C.1
atctttttgttgttgttgatcacctcctcaacccactattccaccttcttctacgtttttctcttcccaccccttagtctcagaatcagatcacaccaccgcaaaaccctaaattcaattttctccatttccgatcttgcccccggactgcaaatggggagcaggagggacgaggcgcccgccataaacaacaccaacgtcttcgcggcgctcggcagcttgaagaagaagaagaagcccgagaaggaccaggaccagggcccgtccaagtccaaggcccaggacaacaagaaggacgtcttttgggcccccgcgcctctcacctccaagtcatgggccgatgtcgacgacgaagatgacgacgactactacgccaccaccgctcctcctgaatccgtttgggctgcgtctcccgtcactctaaacgacgccgccgctgctgctgctgctgaaaagtgagagtgagttggaaggtcttgatgatgcagatgatgatggtgaggaagaacatgaaaatgacttagaagtgacagaagaagctgagcctgttctccagaagcctcctgaacaaccagtggttacaaaagaagctgaaaggcaactttcaaagaaggaattaaagaaaaaggggcttgaagaacttgaagctgttttggctgagctaggatacacacgaaaggaacccactggtcaagaagatgattccaatggtgctgagaagaaagaagaggatcctaagggtgctgtggagaagaaggagaatgctactggggaaagcaaaaatgctaaaaagaagaagaagaaggaaaaatcttcaaaggagcagaaagaatcacaagaccagcttgatggcttggatgctggaactggaaatgcaacttctgaaactgctgaaacggagaaggctgaggatgcatctgcaattgatgttaaagagaggcttaagaaagttgcttcaatgaagaagaagaaatcaagcaaggagatggatgctgctgcgcgtgctgctgctaatgaggctgctgcaaggaatgcaaggctagctgcatccaagaaaaaagagaaggcacactacaatcaacagccagtgcggtaaacggggtgtcaaagtgactgtatcttctctttggtgtttaattttccttttgtcctttttcatttgctatctttctatgtcatatatatgagcatatgctctttgttcatttgcaaatgcaaaataaacactggagcggctttaggtaatttgactttgagtaagttttgtctaattttatacttggtggggaatagaagtatttattggtgtatgttgttcatctttcttcagtattgcctctaactagttgctggatcagcc

SEQ ID NO: 65990 - DNA, 507 bp, Glycine max
  Clone ID: PAT_MRT3847_30603C.1
gaaattaaattggaatttggattgcgtccacatcacatggaaaatagcgtagtgtcactataatcaacattcgcaagggttatttaattaaaattctcgagcaatatctggcaccaacagaatggtgacactttgctttattctctcaagagtaaccagaaaacactcaaactatgaaatttaggtgactgctcattcttcatcccatagatcatcaagaagaggcttggttggtcctttgatgagcctctcttggtggatttcacttattttcttgtaatcatcctcagtcagtgaccaatcaaaaatccccaagttttgcttcatcctctctttgtcatagctcttaacaacaaaagtcaacccttgttcatatagccatcgaagacaaatctgcaaaaaaaattgattaattttctgaacatgaaaacacagttcttcaaatatataaataaaacttatcagaaattaattagtatatagtatatacctgggctgcagtcttgc

SEQ ID NO: 65991 - DNA, 508 bp, Glycine max
  Clone ID: PAT_MRT3847_30604C.1
cttgacgcgtgggttgtatttctctgcaattattattataatgtgtttcggccggaagaagaaagggaagcgacagagttcgccggagtacaccaaagtgatgcccatttctccaacaacgcccccttattcgccgcccaagaagcctgatgatgctacattatcgcccctcgagcagaagccagttgataaatcgccgcttacgaagaaatcgaaggcaaaatctccgttcaagaagaagcttggcacgaaaccttcaaagaagaaggctggcgccaaaacaccgttcaagaagaagaagcttggcacgaaaccttcgctgaagaaggctggcgctaaaacaccactcaaaaaggagccggaggataaatcgccgcttaagaaggagccggaggacaaatcgccgcttaagaagaaactggaagataaatggccgcccaagaagcccgactattctcaccgtccaagaagcccgttcctctgccacgtgctgcaccgggtggcaaaa

SEQ ID NO: 65992 - DNA, 227 bp, Glycine max
  Clone ID: PAT_MRT3847_30605C.1
ctccaaaatgagagcaagttgtaagattttggagagtcaactaactggattaaaaggggtcactctaccttacaaataaatatcttccaactcctctttttctactcttccctataattaattacttaccttttcctacattcgtaccatctttccctataattattcattttatatcttttctttatcatattcatattcttttccttttttaaattgtttttctt

SEQ ID NO: 65993 - DNA, 498 bp, Glycine max
  Clone ID: PAT_MRT3847_30606C.1
ttatcggtttatgccaacgaaaacggattgtcagcctgacactagatcaaagcagattggtaatgcaaagaaagccgatcagaacactcaaactgtccacagagaagatggaagatctcatttgaaggacaagacaaagctggctaggcgctgatggattaggcctcatggcactccagcatccacagtttctgaaggtgtggaatcaacatcaacagatagaggctggttatctgttcgtgatactgctatattggagagagaagttactaacactggcagcacaagtaaaaatatgaggctggatagtgaagtactgaagatgaattctttacagaaagagtctacgcatgctagcactactgatatggcaaggggaatgcacgaaagagataaaaaatttgacgaaatgcggcaggtgatgtataatcattcttgattgagtgacacaggtgataatatgcatcaattcgatgggaaggacatggaaggaagaga

SEQ ID NO: 65994 - DNA, 575 bp, Glycine max
  Clone ID: PAT_MRT3847_30607C.1
ccacgcgtccggccttctatgagggaagaacatgcataggttctggtgtgattttggagttctgggatgatcagagttttccagtatgtacaaaagctttagaaattgctaggatggaagataaatcgaagattgggaatccggtaaaaataaaagttaaaccagataacccgcaagtgtgtgattctgcagagttagcaagtaaaacatcataaaggaataagaaattcaagagttgctggcactaaacaaaacaggctgatgtgtcaggggaatgcaacttccatcttccctttcaattggccacaacaaagcattcgcaaatgtgggtatacacgtagattttctgatcttttgttctgtagcgtttttatatgcatgtttagggaaataagaagtattttatagagagaaggatagctgtttaaggtgggtgagaaattagtagcttccattattctgtgtttccaattaaaatgtgtatataccttgtcatggtttgctttagactttattcagtttattcactatgtaccttaagatgcaattattaaatgaagaatttcttattttgg

SEQ ID NO: 65995 - DNA, 360 bp, Glycine max
  unsure (1)..(360): unsure at all n locations
  Clone ID: PAT_MRT3847_30608C.1
ggaccganacagagagtgctatcagtgattgatctgtattcacttgatctcatcacaagcgtcagcgtcgattgaagaagatgtcgatcagaaccatctccgtcggcatgcctgaataagccactcagaccgatacgttgaaggccgccttgacttaattcaactcatcattcatctgcatgttcgccggcgcacgcgccggcatcacctacaacaagctcaccgaggacggcgctgccatgcctgccggatttagcactgcatctatcacacatgcattcgccctcttcgtctccgtctccgtcggcgccaatatcgccggcagctacatcaagccctccgtcaccgtccgcgccttcg

SEQ ID NO: 65996 - DNA, 789 bp, Glycine max
  Clone ID: PAT_MRT3847_30609C.1
gtcttagtccacgccggccacccacctcattatttcaattttcccctctcttacgacctcttttctctcttcccttattcatcactcttccaaaataaaattaaaaaaaaaacccacctttttagttttctctcatagtctcatctcatcacgacaaacaacaatctaatctatgcaaccccaaagaaacccaattcaatagaaaaagaaaacaaaaaatcagatgagccagtggatacacgtggcggtggcagcatccgccgtgggatgcgtctcgacccttttgttggtctttctctggcgttggtgccataaaagaaatcatcgcagaaatttcgttgagccggctagtttgaccagagtggagagtgtccagggagggatttctgtttccaggcttcatcaacaacaacaaccttttcaattggatcagggaaacaagaacaacaacaagggcaattacaattactatgtttttcgcggtggtggcgtgtcggggaaaagaagtttgttcaattggggtgatcatccatctatggccgctgatgctgttgaaaatggatggtcacgatttgctttcacagggtacaagagttacacgccatctccttcgaaaagatcagcacttttaggagtttgcgctgcacctggtggaggaagtgattttggaagagaatcagaggttgagataagctgggaagtggcccgtggatctgctgagtttatgcagaaggtgaggttgaatcccgggatcaaaaaatctcatcatcacaacaaccataacaacgc

SEQ ID NO: 65997 - DNA, 220 bp, Glycine max
  Clone ID: PAT_MRT3847_3060C.1
acgcccacgcgtgcgaaaaggttcacatcactattgcggttattggccatgttgactctggcaagtgcagtaccactggccacctgatctacaagcttgcaggcattgacacgcgtgttattgagagatctgagaaggaagctgctgagatgaacaagatgactttcaagtatgcctggatgattgataagcttaaggcttaccgtgaaaaaggaatcac

SEQ ID NO: 65998 - DNA, 437 bp, Glycine max
  Clone ID: PAT_MRT3847_30610C.1
gcgagttttttttttttttttttggtaactcatttggtttttaattacactattaaaagttggactttcaatctaactaaatcttacaaaaccgaattgaaagttggggaaggtgtcaaccttgtaagtactaaatttaatacattggtcctatctctagtaaatgtgtgatatcaatactaataaaacctgcttttatattacttgtacaaacattgttcaatgaatttcattcctaatactagctaagaacaatctcagctccttcgctttctgcttgtgttcaacggacatgtcattttctgaatcactcaaattaatcacttcaatatgttggtcacttgattgctgacattttgaggataaattggatttcttaggtggggaagggctcagaagatctatgatctcatttttatctatactggaaaccacct

SEQ ID NO: 65999 - DNA, 520 bp, Glycine max
  Clone ID: PAT_MRT3847_30611C.1
tcgcttaactttggataaacttacatatcctaaacatttctcgcccagtatctacctaaggtcccccgagttgttgcatctccaagtattcctcgtcctgcacaacttcgatcagcatcatggccgatttcttcatcaagcaggagcccttcatcaaacccgatcctgaggcgtctggttctcctgcgcaagtcgacgaagaagatctgtatgaagatgccggcgacctcgaattctacgaaaaaaacgctggcgctttcgagcaactctacctcgcgcgcgttcctcgatacatgtgggaggcttggtctaaattgacggagcgactcggcgacgacgacgagattcaaattggcactctgcgaacatggaatgaacaaaagccggatggcagtctagacaccaaacttcgcatgcttctctccgccaactgcccagagcatcaggtgctgcctcgcgaatatgacctagtggtccaagaacacaacgttagcaaccacttcatttcagcgaggaggat

SEQ ID NO: 66000 - DNA, 393 bp, Glycine max
  Clone ID: PAT_MRT3847_30612C.1
aattcggcaccaggccatatttgtttgtcctctgcatggagcgtcttgctctatgcatacatgatctcacctcccaatgaatttggcggcccattttagtttcagatgataatcgactcgttccttaccttatgctcgttgatgacatttttctcttcattaatgcgataggagactaagcctatttggcatctttgaccctttagaactttttccaaacatttggactaaagcttaacttggataaatctagcatgtattgttcttaaaggatggctcctgtcttgagagacctcattagcaatactcttaatattgtgcatgctcctagtcttgggaagtacctttgcctgaagttcattcatggacgttctaaaatagtggactttctcc

SEQ ID NO: 66001 - DNA, 1547 bp, Glycine max
  Clone ID: PAT_MRT3847_30613C.1
aatgtcaagttctgagttttagaatttagtacaatcgtcctagtagagctacataggcacaaagctgttgtctgttgcacaagtgtaacaacatatagcagctgttgaaatgaacattgtcactttgtaattataattattacaatgacacatgacatccggaacagtcccttgaacataaaatcacaagcacacctcagtcaaagaaagattcttttcgggggtaggagatcggggagtaatactttttatagagatatgagaaaactgttattacaaacaaagaaaaacataaatatttccaggatattcattcctcaagcaatcgaattacttggtattttgtgctaacttcacttatgaaatctctttctgcagattcttccactgtttcttttctcaaaataaagaaccaaaaaaatcagagaataataaaagcctcattgttaaaatgctcatatatataatcagaaggctgcccatcctgaagctgtggtcgacccggaggtggtcgttgagggaagatttttctgaagttgagaaaaatctgataaagcgtcggtagaatgtttcacactttcatatgtccctttaggacctgtagcgcaaccggtggaagcaatccgagcagcaacgggatcatttggtgggggtggaagaggagacctgattttcccagccccacttggtgggggagcaagactcacggtttttggctttggtgttgcagcatgcccaccggttaggccagcagctgagagcatgccagttccactagttgatttgtgcttcacattaatcctaatggtttccccttccttgagcctgtgattgacggcggggtgaatgtcgatctgcgactcctcggcggcggcggcggcaccgtggccggcctccttctcgtgctcgcggcggacgtacttctcgtgatcggagagcgcgacattgaaatcgaaggcctcgttgcgctcgttgaaccctagcccgatgaaggcgtgcttgccctggccgtcctcgatcttgaggacgaagtatcgggaggagtcgaggacgggctcgacggcggtctcgcgctggccggggtagacgaagcacgcggcgaagagctcgccggagctcggatcctcgaggcggatctcgcagcggtcgcggcgggacacgacgcggatccggcccgaccagatcttgtcggactggagccactcgccgcacttgtagccgccggaggtgctgcgcggcgggatcttgtacaccgacacctcgcgcaccaccaggagcgtgtgctcgaacgcctcctcctcctcctccacctcgaacgacatccttttcggggagggaaaattagaattacttgagtttgagtttgagtttgagttttgggaaaatttaatgtgaatttgagacgctttgtgaattgcgatttgaggaatgaagaattgaaggtgccgtgtctgtgtctcacaaggtcaactgtttcgggagatgcactatccaaatcttctttctttccccttctgtcgtcttctcgcagccgtacggacgcgtgg

SEQ ID NO: 66002 - DNA, 300 bp, Glycine max
  Clone ID: PAT_MRT3847_30614C.1
aggtgtactgcaactttgctctctgtgaggcttcaatggctaattagcgataagcttacagtgaccagtaggcatgggagacattacctttgtagtacctaaatcctgccgcgaatggtgcgtcaagcaacattccgtcgacatcgaggcctacaccgattccaccttcgatctccaaccgaagctcgagcaagccgttatcgccgatgattactccggcggagtacagaactctatctataccgtgactgctacctacgctgtctttcacgtgatagagggtggtgcaacattcatacc

SEQ ID NO: 66003 - DNA, 306 bp, Glycine max
  Clone ID: PAT_MRT3847_30615C.1
tcgcccacgcgtccgaatacacagacatccctcttgatttgaaggctgatttgtgcttagtggataaaagttctgacaaatcaagaggagttctcagatcatagagtgtgtgtgtgtgttaaacaatggcttagatctacgctgctatcatcttggcactcattgccattttcatgcttcaaacagtggttatggctgctaatgagcaaggaggacacttgtatgacaacatgagcaaatatggaagtgggagtgtcaagagataccaatgcccatcacaatgctcgaggagatgtatgcagaccc

SEQ ID NO: 66004 - DNA, 279 bp, Glycine max
  Clone ID: PAT_MRT3847_30616C.1
gccacgcgtacgccacgtgccgtgacgaaaaagggacttctcttctctcaacacaatttcatctgggcgggcctcgattctaggagtaggatgtaggattgaatgagttccctaatcctcctcctgacaaaaacgatacggctgatctggaaatgctatgtatacctttaatgattgcttaaatgcatgcatacacagttcaaacgcattgcagaagttgactctcatgttcttgacaaaaagtccatgccttcttggcacctttgtgggagcaattct

SEQ ID NO: 66005 - DNA, 432 bp, Glycine max
  Clone ID: PAT_MRT3847_30617C.1
aaaaggataagataagaaaaataaaagattaagataaaaaaaataagtgataacttgctaaaaatctttttttttgatattttttcgatctttttctcttttaatctatcattttcagatctgaaagtcataaataataaaaatattaattcttatcatttaagccaaaaataattgttaaataaatatttttgaagatattttaatatatttttattataaaaaataactcatatcatatttagtaattgtagcaggctaagaacattttttctcctcacgtgtgcttaacaaatattgaactaggcttcttgttgacaatatatactaaaaattggttactagtatttgatatgcagggtaaataatatgtaataattattgtcttttaatcacttaacttgattttattctaatatttattattatttc

SEQ ID NO: 66006 - DNA, 282 bp, Glycine max
  Clone ID: PAT_MRT3847_30618C.1
ataatgaacacttggaaagctatataccatttgggcttagtgattaaaaatactgaacaatacataacattcacacacgatcttatcggcaggctggatgaaaacacttttcgcaataaacacagcttttgttgaaaaatttttgctatggccgaactgtacgaggatgttaacaatttgggctacaacaggattgcaataactgggttgctccatgtagtgtaagtccacatcatagcttatgcatggaatgaatcaactgctactggctgcgtgttttca

SEQ ID NO: 66007 - DNA, 259 bp, Glycine max
  Clone ID: PAT_MRT3847_30619C.1
ctttagttgcttttatgtgttgctggtaccatttaaggtgatgttttgagccacaggactaacaagataatttgcactaatcgctcagctttgaagacacaaactccaacagttaaaaataaatattgaaattatttatttttcactaaatgggttttttttcaagcttaaaataaatgtaaaaaagatgttgacacttttcagcgtgatcattctaaaattatgcaccaatatcatggtggtggttggagatttgcca

SEQ ID NO: 66008 - DNA, 635 bp, Glycine max
  Clone ID: PAT_MRT3847_3061C.1
atgaatggcaaagtcacactctcgtgtccacctgatatcaatttgcccctctcggccgagcgcagtccacctccacagccttggaatcctgatccttctgatactgtgtttgatattggtcttggtactcaaggactcgagactgagagtttcgtccaactccccaaagttggaaggaaatgcgccaaacggcttgatagcatatggggtgcttggtttttcttcagattttacttcaagccggcattggttgagaagtccaaggccaaggttgttagggacagcaatggtgtttcggggttcgataaatccgatatcaagcttgatgttttcatggttcaacacgacatggaaaacatgtacatgtgggttttcaaggagaagccggagaatgctttgggtaagatgcagttgaggagctacatgaatgggcattcccgccaaggggagcgcccatttccatttagtgctgaccggggttttgttcgatcccaccggatgcagcggaagcattatagaggactttcaaatccacaatgtgtgcacggcattgaggttgttccatcacccaatcttatgagtcttgataaggatgagcagaaaaagtggattgaactcactggccgagatttgaa

SEQ ID NO: 66009 - DNA, 621 bp, Glycine max
  Clone ID: PAT_MRT3847_30620C.1
ctcactctcttcttcttccttctccttcttcctttgcaaatccaaaaccctaatagtatttcttgttcttcttaaatctcaaaattttatgatccaccacatgtcatctattgcaaattcaaaatcatattatttttcacgacggtggtggtgatcacaacgttatatgttgagacttgtcgcccctaacgacaccggcagaggaaggaataatcccgtcagggacaatatctcgaacctataatgaagtgtgatcatcgcgctcatttacattagttttcgcaagctcacatttgtgactgttccactgtcattgaggatacaaatcctgtgctagtgatagcacgtgtagctgacaacaattatgaagaagtcgtagccactatcaacttcgaggatgtaggcatggaacgtgttggcgctttcttgtattataatgctcgccaactttgacttcttcttagacccttgagtaggccattgcaactgacaccccaccacgtggaggtatggtactagtactaggaaggagttagagttttgagattatgaatttgagggaatatttttggttcgcacaaatagaagatgaggaaggaaggaaaactaatacatacattt

SEQ ID NO: 66010 - DNA, 490 bp, Glycine max
  Clone ID: PAT_MRT3847_30621C.1
taggtgtctttatttctttaaactatgtatcatgttttccttgggatgatctgcatggttaaactttaaaatttgtatgtccggctcttcttaatttccttgcttaacaccatttttttctccgacatatgatgtcttgttttggatgtagttgagttgttgattttgaattattagagagtcttaatcattgattggagacacccaccaaccaatttgattgctttccttttgcatgttttagtttttcctgggtgctttactgcttttaagcctggaattaggtagacaattgattttattccatgatttatgttaaataatgcagatatgcttccatgcaattctgtcatgctagttactttagttttcaaataatcttttgacccttggtttcacctttttggttgaacacaacgattatgatctttagagaatattctcatcttgccttgggtttattaaattttataagtacatttaggcatgc

SEQ ID NO: 66011 - DNA, 149 bp, Glycine max
  Clone ID: PAT_MRT3847_30622C.1
ggtgtacctaaatggatgccggaatagctcatagtgagcgagggaaggatcgggctatttaactattacctgagcctcatctattgattaattaatcaacatttggagcctttggtttgggtaaaaaaaaaaaaaaaaagggccggccg

SEQ ID NO: 66012 - DNA, 153 bp, Glycine max
  Clone ID: PAT_MRT3847_30623C.1
acggctacgacaagacgacagaacgggctgtgcctcgattgcgcgaagcgcacacaccgggtgaggagcttcaggttcaggctgcagcagcaatgattagcatcgcagtggaccggaatctcccccggttaagtggcgtctgtatcactctac

SEQ ID NO: 66013 - DNA, 273 bp, Glycine max
  Clone ID: PAT_MRT3847_30624C.1
tacggctgcgagaagacgacagaaggggactactgattagtttctcactgcttaactatactaacttcaggcataatcaattgaattgtgatgtaagaaaattcaattccttccttctaggacatccaatgatataagaaagcaacattaattacaccgcatgaaaatcaaccttcttataagaagaagcgtatactacatacaattacgtcattgtgaggtatttcagcacttatagtaaccttcttctttaatttgtttatttaattactt

SEQ ID NO: 66014 - DNA, 224 bp, Glycine max
  Clone ID: PAT_MRT3847_30625C.1
ggctcgagggacgattatacagcatatgtggagaaacatgactacatgcgagatgctgcacttgactagaatgattccaatgatgatggaaagtgtcgacttagcgctgattgcatgggaatgctgtccattaggcaaaagatagcaatcttaaggctgcacggaatatctcgccaatgagatacttgattggtgatcgtagtacgtatgctagcgaaagtttg

SEQ ID NO: 66015 - DNA, 171 bp, Glycine max
  unsure (1)..(171): unsure at all n locations
  Clone ID: PAT_MRT3847_30626C.1
acancccgactgcncngttcaaagctncatttgactncccttnaagnccngatcctgcnacagatttngcctacacacaatgtgtacgacgnccagccnnaattncaggattcngcccttgccacctcagctgctacgtctgtntcnggagcgagtgccagaaggtgttcc

SEQ ID NO: 66016 - DNA, 494 bp, Glycine max
  Clone ID: PAT_MRT3847_30627C.1
tttttttttttttttttttttttttttttttttttttttttttttttttttttttttttttatttatttatatattttaaattttttttttataatgaataaaaaaataaatttaattaaaagaaggaacccgaaaatttctacaaaagggagaaaaaaaaaaaaaaaaagaaaatttaaaaaaaaaaaaaagaaacaggaacgaacccccggagaaaacaaaaaaaaaaggaccgggccctgcgggcaaaccaggtttacaaatggggaggaacacaagagcccgccggaaaaaaggaaaaaatggtggccgggggaaaaatgttatccgataaaaaatccaaaaaaaaaacgggcaggaaacaaaaaaaataaagcccggggggaaaaaggaaggaaccaacaaacattaaatgcgtggcgaccactgcctaaaatacagacgacaaaaccgtccaggcacacctgaaaaaaaaaaaattaacccaccggcg

SEQ ID NO: 66017 - DNA, 543 bp, Glycine max
  Clone ID: PAT_MRT3847_30628C.1
cttcactattttgcatgacagacaatattaaactgaaccagaaagcaaaagcatgcctaatgaagggtagaagtgtagaaccagaaagcttgatgtcagcatataaatatagattgtgcatatacaaccgagattaaaaaatatacaaaatatttatacaagctttaacaacgtcttgaacagattaccaacctaccctatacatccttttgataaggcacggtaccacaacggacacaaaatagtgaggtgtataaattataataaaaaaaattcatcttctgatgtgacatttttatattcttcgttgggactaatgaaaataaaactttgcagaagggccacaggttgtgggatggccaccaatttgatcttttggaaagaacgatgatgaagcagaggaaaaacaacggggtgctctctgtaaaactcaagttgaatggagaaccttatcattgaaaggggaatctgaaaacctataacaactatatgaaactttcttgaggtattgagaagatggtgaggtgctgtaccattaacatt

SEQ ID NO: 66018 - DNA, 1547 bp, Glycine max
  Clone ID: PAT_MRT3847_30629C.1
ttaaacaagaaccattggatactggatagagaaacttcaccttgtgcggttactcccaaactgcacaagatcctcttcccaaacaaagcctaggaatttgtgccgtcccagtaaacgtgtccgtacggctgcgagaagacgacagaaggggaatccaacagaacagaactagtaccatgttgctgtcacaagccaaactgcacaacaacaacaacatctccaatgccattaacatgattatgaagaagaagggtaataacaataacaacaatcattgttcacctgctatactttatcactacccttgccctgatggtgcttttgctgcccttgctgcacacctttactttaaggccacttcatcattctctcctcttttctttcccaacactgtcttcaaccccctcagtgctgaagatcttcctctgaatgaaattggtgatctttatctcttagattttgtggggcccgatggttttgttcaggaaatctccaccaaagttccaagggtgattgttttggaccatcacaaaactgctcttgagaggctaggcaatgaggcttcacttggtgagaatgtggttaaggttattgacatggagaggagtggggctactattgcttttgattacttcaaagataagatttttagtcctgatgttgcggttaagcacccctcaattctcgaagaattcgagcgtgtcaggaaactttttctgtatattgaagatggggacctttggaggtggagactcccgaacagcaaagcttttagaagcggtttgaaggatttggatattgaatttgatgccaggaaaaacccttccttgtttgatcagttgctttcactagacttggataatattattagtacaggcacggtgagcttatcggacaagcaaaaactaatcgatgattgtctcagaaagtcatatgaaattgcccttgggaatgctgaatttggttattgcctggctgtcaatgcggatactgctctttcagagttgagaagtgaattgggacatcaattagctactaaaagccagaaaatgaatttgaggggtattggtgctgttgtttataatgtaccagagcttgaaaatgatcaaaggctaaaaataagtctgaggagtgtggagaatgaagataccacgcctatctctcaggaatttggaggtggtggacatcgaaatgcgagctcttttatgttaacagcggatgaatttgaaaaatggaaggtgtgatccgatatttgcacttgacatggggagatgaaggagtatacaagatgtgtcgtgtgaaatgttagatagttctatcaattagtgtattatgcaactctcttaactattttttgggtatccatgtagtagttatttattctattatgtaatgcaaaataatgtttgaatagtccctccaatcatctagatatttatttggataatgttaagtcttgtccatgtaacattgtagcattagaaatcaattggtttcgaaattatttgactaaaaaaaaaaaaaaaaaactcgagactagttctcgt

SEQ ID NO: 66019 - DNA, 1497 bp, Glycine max
  Clone ID: PAT_MRT3847_3062C.1
gtccttataatgaccacgctcacactacccgcttctgtctcttctcttcacaccccacaccgtccgggcggactgggcacacctccttatacactcttctcctctatctaacaacacccaacaaaaataaaaaataaaaaaaattagggttttcaatttggggaaataaaaatagggggaaacattctagagagagtgtgtagaaaatatggttgtcgatgatatgacgctgtgcatcatcgtcggctatggaggttcctcttcttctcgtttctccgatgcttatcccaaaaggggtttgatggaggggagatatagtggggattgatatgatgaaggtgtttataaggttgttttgttgaaattgtgtttttgggatggcaatattgtacgaaccagcaataaaactcatcgaccagatgagctagcatgggcgattcttgtcttacttctttgtcaatggagaatcatcacccttccacgctcttgtcaatggactcaagtgcatcttctcacgaggaactggatttggagatgaatcgccaaatcatactcacccgtccgccggatattaatcttcccctctccgccgagcgcagcccaccgccacagccgtggaattctgagccctgtgatattctagatgttggtcttggtactcaaggctatgagactgagagttttctcaatctgcccaaagctggtaggaagtgcgccaaacggcttgatagcatatggggtgcttggtttttcttcagattttacttcaagccggcattggttgagaagtccaaggccaaggttgttagggacagcaatggtgtttcggggttcgataaatccgatatcaagcttgatgttttcatggttcaacacgacatggaaaacatgtacatgtgggttttcaaggagaagccggagaatgctttgggtaagatgcagttgaggagctacatgaatgggcattcccgccaaggggagcgcccatttccatttagtgctgaccggggttttgttcgatcccaccggatgcagcggaagcattatagaggactttcaaatccacaatgtgtgcacggcattgagtttgttccatcgcccaatctaatgggtctcgatacggatgagcagaagagggggatggaactcaccggccgagacttgaatttcacaagccctcctgaagcaagggatctcagttcgtggagaaaccttcctaacacagactttgggcttgaaaggccgcctgttccgatcaagagtgctcctaattctcatcctaagaaattgcttaatggaactgtgctgaatctgcctaaccatagcaatggtgatgccattgatctatctcctgtaaatggcaagaagaggaacgagttatttcttaatgatgaagactattacttgtctgctaatcctccatctgatcggattccagatatagagaagcaacccaccgagcatccctggttgaatgactttagtggggggatgaag

SEQ ID NO: 66020 - DNA, 1296 bp, Glycine max
  Clone ID: PAT_MRT3847_30630C.1
aaccaaaccaaaccactgaaccaggataatctgtcttcactcttcaatccgaacttagattgttttactgttaacaccattcctaggtaccatctgcaccaccctttctccttcttcttcaatcaatggcagcaacctcaacatcactcttcttctccaatctccattctctcaaccctcaacctttctcttcctcactctccttcttccgaaatgtccattccaccctctctttcccttcctcttctaaaccctcccgtggcgttgttgccatggctggctctggcaagttctttgttggtggcaattggaagtgtaatgggaccaaagactccatcagcaagcttgtctctgacttgaacagtgcaacattggagcctgatgttgatgttgttgttgcacctccctttgtgtacatcgatcaggtgaaaaactcaattacagataggattgaaatttctgcccagaattcttgggtgggaaaaggtggggctttcacgggagaaatcagtgtggagcaactaaaagaccttggctgcaagtgggttattcttggacattctgagcgaagacatgtaattggagaaaatgatgagtttataggaaagaaaactgcctatgctttgagtgagggtcttggtgtgatagcatgtattggggaacttctacaagaaagagaagctggtcaaactttcgacatttgtttccagcaattgaaggcttttgcagatgcagtgccaagttgggataatatagttattgcatatgagcctgtatgggcaattggaactggcaaagtggccacacccgagcaagcccaggaagtccatgcagctgttcgtgactggcttaagaagaatgtctcagctaaagttgcatctaaaacacgaattatttatggaggatctgtaaatgcaagcaacagtgctgagcttgcaaagcaagaagatattgatggatttcttgttggtggtgcttcattaaagggtcctgagtttgctaccattatcaattcagtcacttccaagaaagttgcggcttaattacttattatgtttttttaggagcgcattaaaaatatggcaatgacatgggtgtattatgagttttatttttatcacttctatagtcctatggctatgatgcatgcgtttagtttggtactttagcttgaagaaataatcgtttatttttgtcagcaccttaagagaataactttttgcaaaataaatgattatttctcaaaattcaagtgtttctaaacatgtaaggtatgagaaacatattccttttctc

SEQ ID NO: 66021 - DNA, 1208 bp, Glycine max
  Clone ID: PAT_MRT3847_30631C.1
cttcaatcaatggcagcaacctcaacatccctcttctcctcaaatctccattctctcaactcacaacctttctcttcctcactctccttccgaaatgtccattccaccctctctttcccttcttctaaaccctcccgtggcgttgtagccatggctggctctggcaagttctttgttggtggcaattggaagtgtaatgggaccaaagactccatcagaaagcttgtctctgacttgaacagtgcaacattggagtctgatgttgatgttgttgttgcacctccctttgtgtacatcgatcaggtgaaaaactcaattacagataggattgaaatttctgcccagaattcttgggtgggaaaaggtggggctttcacgggagaaatcagtgtggagcaactaaaagaccttggctgcaagtgggttattcttggacattctgagcgaagacatgtaattggagaaaatgatgagtttatagggaagaaggctgtctatgctttgagtgagggtctaggtgtgatagcatgtattggggaactgttacaagaaagagaagctgggaaaactttcgatgtttgttttcagcaattgaaggcttttgcagatgtagtgccaagttgggataatatagttattgcatatgagcctgtatgggcaattggaactggcaaagtggccacacccgagcaagcccaggaagtccatgcagctgttcgtgactggcttaagaagaatgtctcggctgaagtttcatctaaaacgcgaattatttatggagggtctgtaaatgcgagcaacagtgctgagctcgcgaagcaagaagatattgatggatttcttgttggtggtgcttcattaaagggtcctgagtttgctaccattatcaattcagtcacatccaagaaagttgtggcttaattacttattatggttttcaagagcgcattaaaaatgtggcaataacatgggtgtattatgagttttatttgtatcccttctatggctatgatacctgcgtttagtttgctacttcgaagaaataatcgtttatttttgtcagcacccagaggcttgagagaacttttgaaaaataaacgattatttctcaaaattcaagtgtttctaaacatgtaaggtatgagaaacattctccttttctcatcagccatgttttcttcatttcttggaacaattccatatacgaa

SEQ ID NO: 66022 - DNA, 362 bp, Glycine max
  unsure (1)..(362): unsure at all n locations
  Clone ID: PAT_MRT3847_30632C.1
nnnnnnnnngcnnggagcaaagcaaaaagagaacanaccggggggaggaggaaaaaaggggggacaaaaacaccaaccaacgnagcnanacccgaagaacagaaaacaagacccggggggggggagcgaaaaagccccagaaacaacaaccccgacgcacgagaccaggaagcgacaacacaccgcaaagacgacgaggacgcacggaaccccggacgcaaccggccggggaacagacaccccacagccaagccccagggaccgacacaggaaacagaacccacaaaaccggaaaacgggaaaagcaacaacgaccagcaccaacggcaccaaaaaggagaaagaacgcccgaggaaaccac

SEQ ID NO: 66023 - DNA, 544 bp, Glycine max
  Clone ID: PAT_MRT3847_30633C.1
tgctggaacgccggccggccccgggtcccgattcgcggttcccgccacgccccacgctttcggtttttgtgatacaccgagatcacagggtgtcggaccttaaaaccggaaacaaaagcgatcgatacttgatttcaagaatttctcaattgcttcctacttctttggggacgattttttaagggaaagaaaattcactctctgtgctggtcacagacttagtgaatcattctcttttccacgtcttagtttatttgctgaacactctcctatttgatataggacttcgtgacagatttaaacttcttctgtttctttctcaggtctctggtcaatttgaagttcaagctggtcttatttgaaaaacacttgggcgttggtgcaaatgactgcttcgttaattttctctggagacaacaggctcactgagaaaacaattcttacttgcagagatttggaccttcttggttgtttaatacacaatagcagctcaatttacaaaatttctaccggtttacatttggtgggatctggataccttggt

SEQ ID NO: 66024 - DNA, 667 bp, Glycine max
  Clone ID: PAT_MRT3847_30634C.1
gaattcggcacgagtgtcactggccacataatctccaccacaattggaggcaaaaatggggaacctaaagaggtgagaatgtgttctaactcccaacccctttcctcctgaacttacaatttttattaaaaaattcatttcataccctcataaatatatgttattgtatatactgattattgttgtgataatggttcacttccttatggggatagagtggaagtagagttagtggttggggaatctaaattaataaattgcctattatattcaaggccttccaaagatataatactggttgtcaatcagagtttggcttatttccccagtgcttacctcatctgataattcttattcgccaacaatatattagctcttacaagatgtataattttgaagaatttaattatgatggttcaataaatttatgcttaaaattggtgatatttatctgagtttccttatgtgggcttggttgaaggggtgggaaagggatttcaatgtcccttttctccagtggtcctcagcaatgtccttagcttttatttaatgcttcttggaagggcagggtttgtggtttgttcttgagatgtttgttatgtttttacagaagtattatattctatgtatcttttagtactactggtacttttcatgcgttaatata

SEQ ID NO: 66025 - DNA, 458 bp, Glycine max
  Clone ID: PAT_MRT3847_30635C.1
tgtttttttttttttttatttttttttttttttttttttttttattaaacaataattgtggcataataaattctttcggaataattatacaaataatgaccagggtaaaccccgactgatccttggccattgtatctaagcacaccacattttagtatgagctggaaagaagtcattgggatgatggggatgtaccatgtaattggccgcctttatccactccttaatccttatgccgtaaatggcaccctgcctttaaaattggaattgcttgttctgaaaatgaatgttgcaaaggtcattggaaattttattggccaaactattaatgtaaaaaccctttttccgaaacctagtaaggtcccaattgtatttacaagggtgggactagatattgtattgcaagtgccaccttggatacactatgctacataattggaaatgtgggctttcaatgg

SEQ ID NO: 66026 - DNA, 273 bp, Glycine max
  Clone ID: PAT_MRT3847_30636C.1
tacaacttgatagaaacaaccgacagaggatgttttttatacaacacaatctccaacgtttatcggtgaggtctttctaacgcggggctgcacaccatttctttgatgaagcaaggctatctcatgatggtgtaggactttgagagacgaccaatataccatccatactcttcgttcagggaaacaaatcatttcatgaaattcaccacacatctaataataaaataaaaatcttgatattatattggcctctctatatgatcctaacttaaa

SEQ ID NO: 66027 - DNA, 205 bp, Glycine max
  Clone ID: PAT_MRT3847_30637C.1
gagtttctttcagaagtgcatgccttacatagccatgatttatctgcaattctggttgtctggtatgaacataattgccaatgctttcctaaaccgtgggatgagccactgtgtacttgtggtttatatacactccttggctactgcatctattgctcctttcgctatggtgctagatatgaaagagacgcccaatattacattt

SEQ ID NO: 66028 - DNA, 901 bp, Glycine max
  Clone ID: PAT_MRT3847_30638C.1
ggctggcgcgcagtcgtttgattgtgaagtgagttccgattgagcacgtcttggaggcaacgacgtctacggcagctcctcgttggtggttaagtcgcttgtcctttcagtccctcgatgagtccgccaacccctaaaaagcacttcttagttctccctctcccactaaaaaccatagtaatctagataataattaacatcagccctcactccttcgcacaccaaacccttccttcctatctctcactaatctaatggaatccgcagcactgtcgcgcataggcctggcgggcctggcggtgatgggccaaaacctagccctaaacatcgcagaaaaggggttcccgatctccgtgtacaaccgcacggcctccaaagtggaccagaccgtagatcgtgcccgcaacgagggctccctccctctcacgggccaatacacccctcgcgacttcgttctctccctccagcgccccagatccgtcatcatcctcgtcaaggccggctccccagtcgaccacaccatcgccgccctctccgaccacctcgaccccggcgactgcatcatcgacggcggcaacgagtggtacgagaacaccgagcgccgcatgaacctcgtcgccgacaaaggcctcctctacctcggcatgggcgtctccggcggcgaagacggcgcacgccacggcccctccctcatgcccggtgggtcccaccatgcctactccaacgtccaggacatcctccacaaaatcgccgcccaggtcgaggacggcccctgcgttacctacatcggcgagggaggctctggaaacttcgtcaaactggtccacaacggaatcgaatacggagacatgcaactcatctctgaagcctacgatgttctgaagcacgtcggtggcttgac

SEQ ID NO: 66029 - DNA, 248 bp, Glycine max
  Clone ID: PAT_MRT3847_30639C.1
cactaataatcttaagcggccaaagtcaaacaaattttactgaaacaacagaattatcagtcctctaaagccaaaaaataacttagggggtcaatctaaaacagggcacaacaccaaactaaagggacaatcatttcggggaacaaaaaaaaaggggggctactgcctactacctggcaaatctgttacccctcaggggcctggttaaaacactgggttaagaccggacacgggggcggccccggggg

SEQ ID NO: 66030 - DNA, 138 bp, Glycine max
  Clone ID: PAT_MRT3847_3063C.1
tgggaagactgtctctagcatcagaagatcatctatgagatatcagaaaactcactgcagatatacactcgagacttaactaagatgtagttgtgcagtatctttcgctctcacattaccaagtttaagctcgtaagc

SEQ ID NO: 66031 - DNA, 1066 bp, Glycine max
  Clone ID: PAT_MRT3847_30640C.1
gctgaaattgttcccatgaaactgagaaaggaggcatgagtgacgcttcaagacaacctgatatcctcaacagaagggagttatcttctgaacatataaacagagaaacaggactatattctcttgatggaaatgcaaatcacagtgacattaaatcccgtatccagaatctggaatcggagctatcttctatacttcacttgttgaggtctagctcggataaaattacaatgcagatggtccagaagagctcttctgatgatctagcaaagctttccgatgcttgggaattccaggaaaatgagatcatgaatgctcaggacagattgcgttctatacgggctaagttgtcagtgttagaaggaaagatggcattggcaataatggatgcacataaggtagttgaagaaaagcagaagaagattaataatgcgcaaaaagctttgcaaattctgaagactacttgtgtagtttggcctaatagtgcttcagaagtacttttaacaggatcatttgatggttggtccaccaagagaaaaatggagaggttaagtagtggtatattttctttgaacttgcagctgtatcctggaagatatgagatgaagttcattgtagatggagaatggaaaattgatccattgcgccctgttgttaccagcaatggctatgagaataatcttctcatcatttatgattgatgtaaaagagagtaagcatgagataatatctgtagaagaagaggatgacatgctctaggttagtcagccattttttttccattttttcaccagtgtacaaaatattcagcgagtagttcattgattcttttacttagtccttgtaccacttctagatgtagatatcttgattgatggcgaactaatcccattcaatcatttttagcacgatcatgtaattgtgtaagtggtgcctcaccatatcgaatgatacgagtaaatgttggtaataaggttgcataaccacgtattctctgttttcaatattgttcttggcacactttctgatcaactgtaaaaggtgagaaatgattcggtttagcata

SEQ ID NO: 66032 - DNA, 328 bp, Glycine max
  Clone ID: PAT_MRT3847_30641C.1
gggaaaggccaaaaaagggacccttcccttcaaaataaaccgaaccttttttgggaaaaccccaccccctggggggggccccaaaaaccaaaaaaaaaaaccaaccccgggggggggggggaccccccctaaaacccgctgggtaagggccccttttatttaaataaccccccgcccgaaaaaacccccccccgggcccaaattttctttaaaaaaaaaaaaggggcctcgggcccccataaaaaacccatttgggggttgggggccaaccccggttttggtgcggggccaaaccccccttaatggcgccccccccaggggaaaaccc

SEQ ID NO: 66033 - DNA, 146 bp, Glycine max
  Clone ID: PAT_MRT3847_30642C.1
cagagaaatccttcatgttcaagctggtcaatgtggacaccaaattggatgcaagtgtttggatgagatgtgtgattagcaatggattgatgtcacttgatattacatatgatactagtcattacaatttgtgtgggttaacgtgt

SEQ ID NO: 66034 - DNA, 595 bp, Glycine max
  unsure (1)..(595): unsure at all n locations
  Clone ID: PAT_MRT3847_30643C.1
ggctcgagccgccccttctttctattcctccttattccatgtttagtgattaatcattcattttctaatttttatatccgcaatttgtgttaatctttaatttaaccaaactctttaagaaaaccgatgcatgtacttggatagatctataacagattcactcatcgattcatgcatgaatgcataaagcatatatattacaccaaccaattttacttcacccttaattattacatatatatggtgaaggaaaaaggaaggaaagaaatgcaacttgacatttctaataaaaataattattattgataaaaaaaactcaccatcaattttccaaacaaaaatgataataatacagatacttgattgtgtttatatttatagttgttaaaatttttaagaattaagttttaaaaagtcagagtgaataagacaaatgattgtttaatttccggttcttgagatatttttatacatattatttagaatgaaaaatgttacattttatacttaanacagatttgttaacaatgatgcattacttagttgatgagtattgtccgtgactatatatatatatttccaaaaataatctcat

SEQ ID NO: 66035 - DNA, 511 bp, Glycine max
  unsure (1)..(511): unsure at all n locations
  Clone ID: PAT_MRT3847_30644C.1
atagaagtagctanntgacgtcgcatggcaccgtcgtaancgtaagcntnncggaannttcggctttcgagggcaagtgatcatatattcctgggcttgttgaccaagnnttgtattctgacttaaggtnntaataagttgtgcgagaaaattatgannaccttagacaaaagtnngttgtttggtganntcttaaacnnttcttacttgatgggaaagttgtattgaagggtaaagcatttattcctgtattnnttaatattagtgcaagggnngaaaatcatgnntagttcaaataccccttaattggcaccaggagggaaattcttgtcttcttagtgcaaagtnngatttcagaacctgcaattggtgaaggtaaaaataagnncaaacctcnaagctttacttgcaattgcattgtgggaagctatttagaaattattcattgataggtttcgcaaggtcctgattgcaacaatagttggtgccaatgctttttggttgatactta

SEQ ID NO: 66036 - DNA, 312 bp, Glycine max
  Clone ID: PAT_MRT3847_30645C.1
gtgcgggggtggagcactcactcggtaaattgtcctttatgggcacgacttcacatatcttgcatcctctttttgggggaaggggcatttatggggccttaaaaccttctctcttataatccgttccggcttatcaacacagcaagaccgcttctttttgtatccccaataagatcacttccttcggggcatgttgcttttgtaaaaccactgcctgttttttcgcggcgcagcatttatgcaatggctagtttgaattcatgttttgttattcattgcctagtcactacttgtttctatcttcttaatttt

SEQ ID NO: 66037 - DNA, 322 bp, Glycine max
  Clone ID: PAT_MRT3847_30646C.1
gggtggataccatcttcctggatttggaaattaataaaatctttttttccaattggaatcctgaaatttggagcttgataattgggggaggaaggttttaatcaaagctgatgggggctccacatggaaggtttcaactttctgtactggaacaatctttatttatttttatttttttatgttattggcattcaatcctgatcactcataccgttgaggagagatctgaaggtcatagatacctcatctattggactatgatgatagctctgatgctgagagctaaatgcttagaaatacagttgatgagaatgatgctact

SEQ ID NO: 66038 - DNA, 281 bp, Glycine max
  Clone ID: PAT_MRT3847_30647C.1
attaagtgggtgaaggaatgaaaactattgatacaaagctaacataacatacattcttgagaccacgacggtaatggccgttccaagcatcgtcatgcgatcaaactttgagtgccgctccgatcccgatttctcgccccccgcgccgtgcttaagaaaactaacgccgccggaatttgggatactgcctatgatccggcgcgaggttgcacggcatctaccttctaatcctccaattctttacctacttagatgggccgataaacaccgaggtgcaccgt

SEQ ID NO: 66039 - DNA, 357 bp, Glycine max
  unsure (1)..(357): unsure at all n locations
  Clone ID: PAT_MRT3847_30648C.1
gatctgagacaagctcctagaatatgagcattgcccgaatatggtcaagtgtgcgtggcggagtatgggcaaataggccgggttaaggacaagattcttaccaaaaaggctgcgtccgatttgcctcgggcgcctattgcgatagcgtagaatagccaccagctggaaacaaatccaactacgacataagtacgctgtcccgctggcgtgcggggggcgggggcggggaccacggagaatcgagaatggctggcccaagtgacgaggagactggcttggngccttggatgggggaggaaggggggggggggagggagggagggcgcgggggcgcggggcacgggcgagagggggggg

SEQ ID NO: 66040 - DNA, 435 bp, Glycine max
  Clone ID: PAT_MRT3847_30649C.1
ctagacactacattcaaagacggttattacgtaataaccgtctttgaattggtctaaatttcaaagacggttattataataaccgtcgtaaaaagcagttgtgtttcaacgacgttatatacaacgacggtttacaaccgtcgttaaaagcacttaataaccgtcgtaaaaagctatttttctagtagtgaccgttgtaggaccatacatgtctaaacattaattattaataaaatacctaatctatgaagaaatatagtactactattttatgtttgataatcaaactgaaatatattatcatttcatggatataaatcataagagttcaatgagtatcaaagtcaacctattaaaaatcacagttatacgcgtaacttttaatataattattataaaaggtggtaaatttattaatcatataaaattatttta

SEQ ID NO: 66041 - DNA, 304 bp, Glycine max
  unsure (1)..(304): unsure at all n locations
  Clone ID: PAT_MRT3847_3064C.1
ccacgcgtccgcacaaacaaacactgatactaaaacaccaacactcactcttactcagttactcgtccctttcatttgaaaagaaaagaaaaacgaattgaaattcctgtgttcntggtcgtttcactcaaatcacgaatgcaatgaactcaaaaaaccaaacaccggnattagggggttttttggggggccagggggaaaaccaattttgggtttttaaaaaggtttcgcgaaattttttaccaaccaaaaaaaaaattttttttttttttagggggggagaacccaggaagaaaaaaaaaga

SEQ ID NO: 66042 - DNA, 136 bp, Glycine max
  unsure (1)..(136): unsure at all n locations
  Clone ID: PAT_MRT3847_30650C.1
cagcgttgcagcagtctgantggttagggctantcttataacatggttttaaaaaacggtccancccatcaaggcttggnaactgttcattaccgcaattggaagccgcaaacgtcacaanccanaacgcnacggg

SEQ ID NO: 66043 - DNA, 292 bp, Glycine max
  Clone ID: PAT_MRT3847_30651C.1
aatcaaaaaaaaaaacacacacttctcactttattacgacaacaaaaagaggtggggattttttcaaatgggcgaagcatacctcccaagagggtcatgcccactttcctttgttgaattaccccgccgaccccccggaagaaaacttattttccagatcttgcgggggattccggtttttcacataatctggcaggggcctgtggaacaaaaaatgctggcttaagagtattaccagcgatttcaaaatctggaggggttcccaggatattaccaaaaactgccaactgtt

SEQ ID NO: 66044 - DNA, 343 bp, Glycine max
  Clone ID: PAT_MRT3847_30652C.1
ggcccccgtccgtagcctggattcctttaaaggggcggttttttttttttttttttttttttttttgggccccaacaacctatttggtttaaccgggggagccaccggcaaaaagggcacccacaaggaccttacaaatgggttcctttttttggaaatgaattccaatatcttcattatttaattaaaaaagggccccctaacaataaccttaacccttgaaagttgaaaaaacgagttccacttggggcgaaaaaaaaacatgaaacccttacacccaaaggggataagggacttaacccgtttcccaccctctgaaacattttccaaaccgtaaaaggct

SEQ ID NO: 66045 - DNA, 361 bp, Glycine max
  unsure (1)..(361): unsure at all n locations
  Clone ID: PAT_MRT3847_30653C.1
ttttgtgattgagttagacccaaattcaaatcctaagagtaattttttttcttataatatgccntagtgtgtttaaatgataattcagagtgttggactgttttattcaatgctttatggacgtttgacctgggttgtgttgatgatctaagcagagttgatttggtttattttgaattattattattatttttgtaggtaggtattttcctagtcatgagcctcatactgtggaagtttgtcccccttgtgtaggatacctcttcctctatgggtgcttgatgagatacagaaagaatatagagttagcgtattgtgacaggtttggaagaagaaatattgaatacatttcccttgggat

SEQ ID NO: 66046 - DNA, 259 bp, Glycine max
  Clone ID: PAT_MRT3847_30654C.1
ctcattaattgcaagaatggcacttcgttgcgtggtgatgtccctttctgagatctgcagtcttggccgtgcgagagagagccatgccagagacgaagatttttggcatgcagtatggccaaacactcccattcgaaggtcattgcgagatcgtctaaagcctggccctggaagtgttgaaatcgatgatcacgctatgggaattgaagaaacacagtacccgagaaacttcttctatacagacgacttcatccaggca

SEQ ID NO: 66047 - DNA, 466 bp, Glycine max
  Clone ID: PAT_MRT3847_30655C.1
gcacgagctggtgccgtttgggattgtgaatgatgaaattattttttgttttgtgactcgttgttatctaaatatttttaacggtgtgatacagggtcaaataaatatttggcctatttcttatttaatatttttataaaataatagaaaactatagaaaaatgtgtagaaagatataatgctaatctgatcactgatagtagcattaagatatgaagtaccaaatatgcttatctggagtagtatttaaaacgaaaggaaatctaaagcttgaagcacatggtgggtgctatctcaagtttcgtggaggaagatgccacttggcagtgacaagctgtgtttccattggggaaatgataagggacactgctgtcagaaaaagatgtggctctcatgcatcttcaaattatatcaaaacaccaagaacctatctgatattttaataataatactattttgcagcctc

SEQ ID NO: 66048 - DNA, 375 bp, Glycine max
  Clone ID: PAT_MRT3847_30656C.1
ggacgggggggcccacgcgttcgcacaagcgtacggccacggcggacaacaggtgtgagaagaccacagatgggggggaggggaaacaagatgaagaaagacagccacatgcgctgtggcaacaagaaagaaaggcattcggggttgccgacgagacacaggggattccataattcctcatagaaagggggaggaaagaaggagaagccccacagacgcgggccggaacccgcgaaactctctgacagagacaccaagaatgaacccgacgggcgcaacggtccacaacgaggtggagtggaaaacaccgtggctataccaaagggagggcgggatctatcacgaacaaattttgcccgctgggggagaggcgaa

SEQ ID NO: 66049 - DNA, 274 bp, Glycine max
  Clone ID: PAT_MRT3847_30657C.1
ggctcgaggagaatgaaacacatgtttgtaattccatatgaacacgagagggaccagatgggtggtgactggtaaaagaagatgaccctaatgtgacatcccagggtgtcaaacaagacatagtcttcgtgcagacaaactagagatgcaaatatcctgtgcttcaagtggattgtgaagctcatatcggatctggtgggtgacatagtttctgcagccattggggaaattgttgtccttcagtttggtagcaaccggttactgcgggctatct

SEQ ID NO: 66050 - DNA, 1142 bp, Glycine max
  Clone ID: PAT_MRT3847_30658C.1
cacgcgtccgaccattttagagacagctttgcctctgatctaatactgaaacctgaaggtgaaattctatcaaggaaaattctatttgatgctgtactattggtggactacccttttctctatctaaatgccaagtacataaaaaaccttatcttgaccagattgattgttactctcaaggctgtggagtattttagggggcttggtgatcagaatagagctatctcttatattaaggcattttctgcttctcgattgccattgcaaataattaaatgggttacaagccagaatggtttggaggaaaaaactggcagagcaaatggatcctcccccagagctcttataaattggctgctgagccttgagaatcgagggatcagagttttcgaagatgatgttttaaaaagccatgctacatcaggtcttgatatttctcaaactgagcacccagctggtaacttggagggcaaggtagcagatgatgaccttttttatgtggataatattggggaagagggacatgcaggcgacaatgataagcaaaacaaattgattagtgatgcgtttgtagctgctgcccaaactatgaagttatccgataatggagctcgaaaacgaaaaggaaaacatagtgaaaagaaaattaaatttgtcaaatatgacctccatcaaaactctgagccagtcaaagccagtactttagccgcagatgatagttcaagtggtgagagtgaagttgaggatcctgtttcggatacagatgcataaagctagaataacaaactgttatctgtgtaatcatgttatttacctactccaactagataccacagtcccatgttattatgtagtgcattggagggatcctttacatgatgaaaggtctcaagaggtggtgagaagttgcatgctgcctcatcagttttgtcagcattatgtttccctggtttgtgaattcagttcagcagggctccaacaagtttagtgcagtcacgttgcagttgcactgacactttcttaagatgttgagtatttcattttatttgtatttatgttagtaatgtgttatacttaagactgaaatttcttatccacaatccacaatttggaagtggacacgtcttttccctttcaaaaaa

SEQ ID NO: 66051 - DNA, 1509 bp, Glycine max
  Clone ID: PAT_MRT3847_30659C.1
atgaacaaggcaggctgaggtttcattttcagtcatttgtgtctttcaatgttgcacacaggactatcatggctctctggaaggtcaggtccttgagtcctgaacagaaggttgagtttgtcgaagaacaatctgatagcaaaagtcttataagtgatgagagtggctcattccttggcctggatgatgttagcatgtctgagatttattcttgttctcttttaattcctgtaatctctctctcttaccacgcaacttgcacacatgtcctaatctatgcatgttgtgcattattgccatatttggaaattattggttccttattcaactttttcttacaagtttgcaaatgttcccattcttttattttgattaatttaggcaagttacctcatggagatatttagcgggggtgagttggaccgtcgggtcatggaaaagcttggttatcttaattattcttatactccttgggtatctgagaacctagatatctctgagagagcagtatattacaaatttgagaagcgtatttcaagttataaaggtgaagtgacaagtactcaacaaagatctccccttccggatggaaagggttggcttgtggaagagcttatgaaccttcatggagttcctcttggtgattatttcaatatacaccttaggtaccaaattgaggatttacccccaaaagcaaagggatgtagagtgcaagttttatttggaatggaatggctgaaaagctcaaagaatcagaaaagacttacaaagaacatcctagaaaatttgcttgaacgttttaaggtgacctttagtctagctgagaaagagcttttaccaaactagcaaaggaatcttcctggatttgacttaataaatattggagctagctgaaattctgttagcaaaaatgttatgtccattcacaggcttggactggagtttatgatgcatatcatatcataaggttcatgtgattgtgctatttttggggttggttttcatggcaatcctagcttcgttgagtgtctcaggaaagaaccttctagtggaagggaacttctatcagagctataatgatgctgaaaattgtgttcatcggttaacttgctaccaagtctactctttaaaccagattactaaatactaataggagaggttatctagttgttccattgtacatgattagtttgattctggcactagttactcactcagatttccaactgcagttgctagcaattgaaattttggatttgttgtgtagtagacacatcttattacaaagggtcagcaacatctcagtaattgattgttaaaagttgtgacagtttgacacttttggtcatatgagaaatgctgtaaacgattttttaggcctgggaccgttatgacattgaagctcaggctctttaactccttgtagattgatttgttcaaatttggaatacattcataataaaatggccttttctaaaaaaaaaaatattaaaagaaaggacaaaaccc

SEQ ID NO: 66052 - DNA, 702 bp, Glycine max
  Clone ID: PAT_MRT3847_3065C.1
acctgatcttcttctatcccccaccaccgtgcatgatcttcttctatcccccaccaccgtgcaccaccatctctccaccgcaggcaaccgcaccacgttaccgctaccaccactccactatgtcgccgtcaccgaccaaggtcacggcatctccacccacccctttcacaaaatatatagcgttacgaaatggggccccagttggaatcgctgaagatatgatgctccggccagatttcgacgtcgaatacttcgatggtgatgtcagatctgcagtcaatttctgaccagagatctgtgcgatgcagtacattgcctagatggtgcaggacatgccttccaccgacgccacagttgtcgtgaagtaacggcagagccagtcggagaagataaaggtggacgccatcgggaagtcgtcgtgccgaaaacagctccagcggtcagagaccttggagcgaagggagagttcacaggaaattttgtacccatctcctttctttgttcacgcagcgctgcttctctaaaagacctgaaacacgtctagggttttcttcatttttcctttaaaattatttctattacacgtctagggttgatattacatgtgtagtttctactctttgcttgattctttatggttgtattcaccaatactgaattgggtcaatgtagcattgtaatgattctgtttttttttcctac

SEQ ID NO: 66053 - DNA, 544 bp, Glycine max
  Clone ID: PAT_MRT3847_30660C.1
gggatccaaagtgagacaagagattttattgcgatcggggctcaattacatttagtctccatcttgcgtcttgggattttgcgatatctgagactcttttgggtgcgtcacatttctatagcgaaacgtgaaatagaaacatctaacgaccaattcgtgcacagggggcacgtgcaataacaacagtgggggaagaaattggggcctataaaaatacactgggagcggagcgagtgaagtatacataccacaagtgtgaataacatattctttattacactcattttaacacattttttatgagtaggttaaatttattaaaaactataaaatcacataaaaaaaataaccatgaattttccagatttaattttcaataaattttagtgaggaaatatttcatatgtgacttttgagaaattcatcactaaaggttttgtgactttaaaattaggggggaaaaggcgatacatcactaaattccggcactaataaacatatttaaaagagtgggttacaaaatatgtgattaacattgttcttg

SEQ ID NO: 66054 - DNA, 540 bp, Glycine max
  Clone ID: PAT_MRT3847_30661C.1
ggaaaaaaggatatggccccccaattaaacttatccctcccggaaacatataaaacattgggggttatgcaaagaaattcctagttcctttgggaaaaaaagcccaaaataacccctctttccattcacaggggggttttaaagctcccccactttgttattactgggcccctaaaaaaaaaaattttccttcccttggaccttagttggggggggaatcatcattcataaatctgttcaaggggcaggggcaggaaaatcccatgcagggggcccgcccagggcccaaaaaagcttaggggagggggaaaaaggcattttgggtggccccttttccctaaggtcacaagcaaatttgggcaatccatcaggggggggacacattctctcacctttttgggattacacatccttgctcaaattcagggcacccttttttattttgggcatgatggaaaccccaggcaaccttcctattggggatttaaccccaccagtctccaaaatcaacctttttatggcggctctgggggacttttt

SEQ ID NO: 66055 - DNA, 236 bp, Glycine max
  unsure (1)..(236): unsure at all n locations
  Clone ID: PAT_MRT3847_30662C.1
attttatntcaaatcgttgcgatgctggttgcgacagattctcctnttttttnnaataanacactngaaacaagaacaatcatggaatgaaattaactctacaaaatttctatagtggatgtgnagtctacttttatacaaatcatcnaacactaattaacatgngcaggnctcaaagtaatagttttctacaaaaaaattgaagtttggggggggatctacatctctatgggatt

SEQ ID NO: 66056 - DNA, 188 bp, Glycine max
  Clone ID: PAT_MRT3847_30663C.1
ggggccgggaaaattccaaggggttgtttgattaccggaagactaatggtctcctttaacaacctgggaaaaaaaaaacccatgctagagaagggttttacgggctattttaaagctgaaaccctgaaaaacaaagggaaccccccgcccccccattaaaaagggggtgggatgcaaatcctcgagcc

SEQ ID NO: 66057 - DNA, 127 bp, Glycine max
  Clone ID: PAT_MRT3847_30664C.1
gttgttcaaaagtcatctttgccatttatggagagggtcttctcaaccgaaacgttggtcccatgtgggctaaaaggacggtgggcgtgtgcacacttaacattccccccctattgttttttttatt

SEQ ID NO: 66058 - DNA, 194 bp, Glycine max
  Clone ID: PAT_MRT3847_30665C.1
tctgcgttcggctcgaggttcactcttattctcgatgcggatatggcctcagcgctttccttgtagcattcaatgacgatcggtcaggttacggttcacaacagtatcgtggtcattggccatgtcgaatctgggaattcctctctcactggtctcctgatgtggaagatccgatggtttgataggcgtgttat

SEQ ID NO: 66059 - DNA, 318 bp, Glycine max
  Clone ID: PAT_MRT3847_30666C.1
agagttatacgaggcacgcccgcgtacgctcgcccgccatttggcgtgagcgtcccgacactttggtaccactcgccaagcggcctgaggagcgacagggtggtacaccaccacatcggctgctgtatctgacaaaacattcgccctgacgaatagacgctgaaacaggagcaagcatgccatgccaaagcatggctgggaaggaccagagcaagtgatgtaaagccttaccaccctgatactcaatcattgcatgctttaacaacatgactctggccacgctcgacaaaggaccaagtgcgcaaggttggccactag

SEQ ID NO: 66060 - DNA, 493 bp, Glycine max
  Clone ID: PAT_MRT3847_30667C.1
gttcggatctcgcgtcgatcttttttccttattgttgctatgattgtggtctgtttagttccaaattttgaaattagcataggagcactgtgattttggatgactatatggtcttccagttatcccttggtaatatatgtgactttgtagatgcataaattttgtggctccaaggtgtcttaatgacactgcttctctctgtgtttggctttgcttgtagttgatttaacatgtcttttgcccaaattgcctgataatcagatttaagatggtttatcctttaaagaatttgagaggtcttcttagtaggttggatcatgataatagacttaggatgcgttttgaatttgcataggtgtttgggagcacttgtgaaaataacttatgatatgtctctaagctgctttcagcttatttcaatgaacacaactgacaacttatataaaaccaatttttatttgattatataaccaacttattcatgagggcttac

SEQ ID NO: 66061 - DNA, 334 bp, Glycine max
  Clone ID: PAT_MRT3847_30668C.1
cccacacgtgcgattgacttgcccgcaaagccatggtcaatgcagatggaattatagagaaagcgtgggcgtggattaggtactctatggaaataacccttgacatttacaaggactggagtggcactgatcaagcgttacctaatgatctaaggaagagaggagttgctgataagagaccaatctgctgctcatggagttcgtgcattgattgatgactattcttatgcttttgatgggctagagatatgggatgccatcaagtcctgggtgcctgaatatgactcattctacgtacacgtagatggggaactccaaagagaccctgaactgc

SEQ ID NO: 66062 - DNA, 1033 bp, Glycine max
  Clone ID: PAT_MRT3847_30669C.1
cccacgcgtccgattccaccaaatgacacatgcaatcccatcattgataattcaactttgaaaaatccaaccccttactactaaagcatccctcccataatcccaatataaataccccccacaaaattcggtggagcaagatagaaaaaagtagagaagaacacttaccttaatttcgccaaatcaaccaaagacaaaaaaaaagaatccaaaggaacagaagagaaagcttgaagctatggggaacaccatgggaaggagtaaaaaggccaaggtgatgaaggtggatggagagacgttgaagctgaaaacaccagcgagagcaaacgacgtcgtaaaggactacccgggccacgtgcttctggactccgaagcggtgaaacatttcgggcttcgggccaaacctcttgagccgtaccaggaactgaagcccacaaagatttactttctcgttgagttacccaagattcagcccgaagaggaaaaaacggcgctaccgaggagggtgcgatccagtgggatacgcggcatgaacgcctccgataggctccagcttctcatgctctccaaacgctccgtttcggacctcccgctctccaggcagagccccaatctgggctctgatgggcccatcagggttaagatgaggctccccaaggcccatctggataagttgatggaggagagcaccgacggctcccaggtggcccagaaaatcataagtttgtatatgggaaccaatgccggcgagggtgcttccttggaatctgcgtttaagtagaagcaaagtcgtgctcaaggcaatcatgaagaacgtgagagctagctggagttttaacactctcataggttcgttttggtgcgtcttaagcatgttaattttgttctgtaattaatgtgtaacctacttcactatgagagcagatatagatatgtatatacatgcatttatttgtagtgatatggttagaagattattgcttcgaaaaaaaaaaaaaaaaaaaaaaaaaaaaaaaaaaaaaaaaaaaaaaaa

SEQ ID NO: 66063 - DNA, 590 bp, Glycine max
  Clone ID: PAT_MRT3847_3066C.1
ccctgatcttcttctatcccccaccaccgtgcaccaccatctctccaccgcaggcaaccgcaccacgttaccggtaccaccactccactatgtcgccgtcaccgaccaaggtcacggcatctccacccacccctttcacaaaatatatagcgttacgaaatggggccccagttggaatcgctgaagatatgatgctccggccagatttcgacgtcgaatacttcgatggtgatgtcagatctgcagtcaatttctgaccagaggtcgcactagtttccgagacaaactatttagttagatatgtgttttattttgatagatttgagaatgaaagacaaatatatgtttaattttgttagatctatgttttgttttgttagatttatgcgatttgggttttatctttgttagatctgtgcgatgcagtacattgcctagatggtgcaggacatgccttccaccgacgccacagttgtcgtgaagtaacggcagagccagtcggagaagataaaggtggacgccatcgggaagtcgtcgtgccgaaaacagctccagcggtcagagaccttggagcgaaaggagagttcaca

SEQ ID NO: 66064 - DNA, 259 bp, Glycine max
  Clone ID: PAT_MRT3847_30670C.1
ccaggacagcttgggctcaaaggtcaaggacacctttaatggcaacctgcccttcctcttcaaagtgctctcagttgaaacacccctgtccatccaggcacaccctaacaaggagctggcagagaagctgcacctccaggctccgcagcactaccccgatgccaaccacaagccagagatggccattgccctcacccccttccagggcttgtgtggcttccggccagttgaggagattgtaacctttctaaagaaggtg

SEQ ID NO: 66065 - DNA, 159 bp, Glycine max
  Clone ID: PAT_MRT3847_30671C.1
tttaaattaatttgtggagctacagaatgaggatgaagcctgctatgtgggcagtggtggttgaagcactttttattctggccggatgtgggccccatgtgggcggctgtgtactgcatcccgactgggaaaacccctgggttacccccattaaatgcc

SEQ ID NO: 66066 - DNA, 878 bp, Glycine max
  Clone ID: PAT_MRT3847_30672C.1
aaattttcctttttatggaagcaataatcttctaaccatatcactacaaataaatgcatgtatatacatatctatatctgctctcatagtgaagtaggttacacattaattacagaacaaaattaacatgcttcagacgcaccaaaacgaacctatgagggtgttattgctccggctagcttcttgcttctgcatttttgccttggtcacgactttgcttctacttaaatactaattacaaggaagaaagtaaccttattgagaagctcctactacatgaatttcttcattttccattgggctaaaactcacccgtttcccacgtggtttgtgattgtgcacagttttccggccaccgtcctccggcgcagaaactccggcagcaccctcgccggcattggttcccatatacaaacttatgattttctgggccacctgggagccgtcggtgctctcctccatcaacttatccagatgggccttggggagcctcatcttaaccctgatgggcccatcagagcccagattggggctctgcctggagagcgggaggtccgaaacggagcgtttggagagcatgagaagctggagcctatcggaggcgttcatgccgcgtatcccactggatcgcaccctcctcggtagcgccgtttttccctcttgggctgaatcttgggtaactcaacgagaaagtaaatctttgtgggcttcagttcctggtacggctcaagaggtttggcccgaagcccgaaatgtttcaccgcttcggagtccagaagcacgtggcccgggtagtcctttacgacgtcgtttgctctcgctggtgttttcagcttcaacgtctctccatccaccttcatcaccttggcctttttact

SEQ ID NO: 66067 - DNA, 1074 bp, Glycine max
  Clone ID: PAT_MRT3847_30673C.1
tgacgccacgtaagctcggaattcggctcgagcaataatttccacctgaagccggacaatatattccgtagaaacaaaataaattaaccaaaaccatatctccatataccttagattgaaattgaaaccaatcaagcatgtctaaagacaaagatggtgaggagccacttggtataggccttcaggtgatgctagcagcagctttctcattatttggtatgatcttattaatcatcatcttccatttttgtgtaaaatatttcattagacgccaacaaaggagacgccaaaacgaccttctttatcaaatcagcactcaaattgcaccaattgatgtgagttctgtggagccacgcaactctggccttgaccctttgatcatagcttccctgcctaagctcttgtacaagcaaacggaccaattcaagcaaggtgaagaagttgtagagtgctcggtttgcttaggcactattgtggaagatacaatcagtagggtgttaccaaattgtaagcacatttttcatgttgattgtgttgataaatggtttaattctaacaccacatgcccaatttgccgcaccgtggttgacccaaaggtgcaaccagaacatggtcatttaggtgccacacggcttcacaaccaagtccaacccacagcaccaccagctgagggtggtgatgagctaccagatggtaatgaattggagagggtgggatgttcaggtttgagaataggatcttttcataggatggttagtaacagggaaagatccgggagaaggactcagagctgtgatggatctaccatagtagatatagaaagaccctaaattaagtagtgaatatattgttaattatttgttaattttctcctttcatttggatatattccttagtttaaattagtattggtatgttttcatttggatatattccttagtttgaattagtattggtatgttttttgtaatgagtgttggattgtttacgtcacaattttctcgcttgtttgtcaatgcttgtatttcaatttatttacttaggataccaaataatattatgtgaaatttgatt

SEQ ID NO: 66068 - DNA, 466 bp, Glycine max
  Clone ID: PAT_MRT3847_30674C.1
ggggcccaaaaaaaaagccaactttttgtttaatcccccccccatataaacactgctttaaaatttaaaaaccccgggtgggctaccgggcccccccccaaaaaaggccaaaaagggggattgaggtggtcttttcataaagggtgaaaaattttttttactaaccccagaagggggggtttttgattccgcaaaagggattttctcctggaggtaaaaaccttccgggggagggtgttggaaaatctggtcaaaaacccaatgaaattgccgcggttccaggacttaaggaggagttctgagccccggtcccagggaaaaatgcccaagcctttacacccccatggggcttgggccgggggatatggggctaaaaaaaacgccaaggagaagggcccccccggtttttttaaaaaaacaccaacggaaccctttttccctagagagaacccccccggctcccccg

SEQ ID NO: 66069 - DNA, 401 bp, Glycine max
  Clone ID: PAT_MRT3847_30675C.1
ggaagccatctacaatacaaagaacagttggagagtctgaatcaagaggatgacaccgaggcaattaccattcatttactgcgcacattgcggctacgctttgaactatctatgctctgtctgctatgctcactttctctggtgtgccggagccactgacacttgtacaggaagcacccatgtactaatgcctgccatgaagcatagccagaaacagcactcgatggcaaagctattactgccacaggctaatttattacttttttacaaaacatacactgatagtcattatcctatagcatgcataagacagcagactagcttccgctgatatcatcataacggcaactgagtctcttgactgggctgtatggcatgttcttacacagatgcctggctaa

SEQ ID NO: 66070 - DNA, 330 bp, Glycine max
  Clone ID: PAT_MRT3847_30676C.1
gggaagaccgaaaaatttaaaattgaccaaaccaactgttgcatttatttactattaactaaactttccgtttgtgtggttgtgacaccacacacacacatatgtagaattgcgtacatatcattcgggtgcagctgacacctttttacataccaatatatgtggacacgctcattgcacatggggaaacagtattccgggacttaagttgactaactatagtggcagccattggtgacattgatgaatatcttaccagcacacactttgcttgcggtaacttcttaataacatccaacactgaagcacttgtgcgtatatacagctcca

SEQ ID NO: 66071 - DNA, 704 bp, Glycine max
  Clone ID: PAT_MRT3847_30677C.1
tacaacgaggctataacagtactggtttacaattatattatgacacgtattctatgaaggaagataatattgtgtttaatttaaatcatgaacacacgctagcatacacactctacacacacgtacattgtaatattgttttacggtggtattatacattttgtattgtagatatgtagtggtgtaataatgttacatgatgtactgttttatatttagtttaatgagtaatgtaagtgccttaatgtgtttggaacccaggaagagtagctgctgctttggcaggaactaatggggatccctaataaatacaaacacaaatgaagtaatgtaactacaggtaccagcaaaatattgataggctaccagagcccagatttgacaggaggactgacattgtcctgggagttgaactaaagacattttaaatggtccattacctcaaaaagagccatgttattagcctgctttgatttcctgttgcagagagaatctgttgcatctcgtattggagaagagaaaacaggccatcctcctcctcctcgttgtaaatccatatgactagtagatcctctagagtcgacctgcaggcatgcaagctttccctatagtgagtcgtattagagctggcgtaatcatgggtcatagctgtttcctgtgtgaaattgttatccgctcacaattccacacaacatacgagccgg

SEQ ID NO: 66072 - DNA, 546 bp, Glycine max
  unsure (1)..(546): unsure at all n locations
  Clone ID: PAT_MRT3847_30678C.1
ctttacgcgtgggattgttttgggcatctctttattccttagtttggcctgttcgaatcccgtcatcctgttctcgacgcaatttaaacccatccctgccactcctctcaacaactccccgcgctatctttgcaccgagcacgcactcccctcaacgaaaagccgacagtatccttggaatccaccagactccatccaacctcttcgaaactgtacctagacgaaatcgattttctccttcgcaattgaatagtctaccaatttttttgcatattttgcgaccggtcgaaaacgttccacaacgcctagaatgagactgaacaaggctgctcgagttatcctctttggtgcacctggcgttggtaaaggaacccagagcgagcggttgctcgcgcgcttcccgcaactcaactctgtcagcactggcgacctcctccgtcgaaatgtcaaggaaaggacacctctncgcatcaaggtcgagactacgatgaagtctggcggtctcgtcgccgacgatctcatcttgcgactcatttncaacgagct

SEQ ID NO: 66073 - DNA, 352 bp, Glycine max
  Clone ID: PAT_MRT3847_30679C.1
agaatcaaaatgctagtgtgatcttggcttgggagctgcaagtgggctgtagctccaattgcaaccactagggcagatagcttgatgatgattgcatttccatcgatggtgggtcctcgtgctgatgattgcacgccatgagaggcaagattggccacagcactataacatagccctgcttctggcaatgggtacacactagcttcagtgagggaggatatggttaggcaagaggattccatcatttctggtcttatagcgagagccaagttgcctagcaatgctcacacctatgatgaagagtatgctcaatatcagcgttattgcggctcattgggagaatgtttggcta

SEQ ID NO: 66074 - DNA, 419 bp, Glycine max
  Clone ID: PAT_MRT3847_3067C.1
agggataaacacaatacggtacacactgatttggacttacaatcatcccacaaactacgttccttagcagagcgggtgtgtcattcaacgccggcatgggctaactacatcattttggaacatgcagtagaatgtcacgtgctctctgcactgtgtccactactttgcatcttgatggacgaactaccccagctattatttagccatcttgaccaacatataactgtactacttcctaagatggcttttctctattaatgcacctttcatttgagctccactcattctagtttaccccgcgatacacactcacactgagttcattacgtttacaacagtcttgctcagaattcagattcatgatcttttattagtgctaacactaacaacaattttcaaaatgtgcctgttccacatat

SEQ ID NO: 66075 - DNA, 228 bp, Glycine max
  unsure (1)..(228): unsure at all n locations
  Clone ID: PAT_MRT3847_30680C.1
acntaagtgagaaacaaagataggaaataattgatcttcgaaaatgcagggaggatagaaagctggagagtccatcaaggaaactgctgcaaacattgttgcttctgccaatgctggcatggtgaaaaccaaggtcactgtccaggtgaaggcagaaagtatgacggcacgtgatccgatgctaaaggagttggctacccagaagaatgaggcaaagatgagccaggc

SEQ ID NO: 66076 - DNA, 266 bp, Glycine max
  Clone ID: PAT_MRT3847_30681C.1
aaaacaaaaataattgaattaaataatggagaaaaaaaaaaaaaaaaaaaaaaaaaaaaaaaaaaagggccggcccccaataaaaaacctctcaaccccggaaataaattcggacccggtccttgaagggtaacaacttttccttatatgaggccgaataaaacttgggcttaataatggcaaaacttattccctggtgaaaatagttttccgttacaatttcaaaaaaaaatataacccgaaagaataaacttaaaaccctgggg

SEQ ID NO: 66077 - DNA, 305 bp, Glycine max
  Clone ID: PAT_MRT3847_30682C.1
ggctcgagctaaaattcttggttctcagcccaatggaccatcgctctatcttgatttgccacgatgtgcgggaacatggctagagccaccgttcagctgttctatcacagtctactcagttgctcatttccacactacgctcttgggtcctcctattctggaaggaaatggggcgacttgacaaattgctgaaagcgtagtcagattttatcgtgcagtactgatccgatgtaattcctgtttggtgtaccagcttgcaaatgatgcacaacctttgcatggattatctacgcaaagggattaac

SEQ ID NO: 66078 - DNA, 344 bp, Glycine max
  unsure (1)..(344): unsure at all n locations
  Clone ID: PAT_MRT3847_30683C.1
atcgagccggcttcgcagcggcttcnaangccttatncggctgtggttattcaacctttntttcttcctnctttanantnagcattcttcantctttcntnttaacgncnangcaacgnctcggacaaaacccatgggcncgcgnacaaaaangnncgaggggttcctnggcttattcgcgnnaattcgcattcttcgnggaaaactcaacctcnaattcttcggcgcttcgcgttgttntncgngcaaaacatttgaacacgggcgtntgtgnaaaattcntatgcgnncaaaacgnggcccanaacgggagagcacggnnaacncaanggntcggggctctt

SEQ ID NO: 66079 - DNA, 243 bp, Glycine max
  Clone ID: PAT_MRT3847_30684C.1
ctgtcccgcgggctccgaagaagatgagaggacttacctatagatgaaatgaacgaaccctttcttgatcgcgctcggactcctgtttgttgacccgataaatttttcaagctattcacggcaagctgatgtaatgagaatggatacactgaatgggggtattggaatttctacaagaagtagttcttacagcatgggcacttcttgggtgcgcagaaacaacactgtcgggtgaggggaggc

SEQ ID NO: 66080 - DNA, 197 bp, Glycine max
  Clone ID: PAT_MRT3847_30685C.1
atctagaataaaaggcaaatttagtgtctcaatccctctaacaccaccggtcccgtgcctattcttatcttgctttctcttcactccccactccctatagctcttccttactctacttgtatgtctaaacattccctttcaaaaacatgctcctatttgcatcttcctcccggttatggatgccgctgagctctcca

SEQ ID NO: 66081 - DNA, 324 bp, Glycine max
  unsure (1)..(324): unsure at all n locations
  Clone ID: PAT_MRT3847_30686C.1
cncgcacgcgtacgtaagctcggaattcggctcgagnttcacctgaaaaaaaaanaaaacaaacaancaaacaaaaaggagnggcaaccatgggcgatgcaattgatttnnccggcnacggcagaatcattaanacccttnncncaaaaannnaanccngttnnnntgggccnaanaaaaantttccccctngtngangtccattntnanggcacnntngcnnanccgggnnaanttttnnncnctacncntgangntaacnccatcttctctttcnannttgnaaagggcanngttatcaaggcttgggaattgcngtnaaac

SEQ ID NO: 66082 - DNA, 373 bp, Glycine max
  unsure (1)..(373): unsure at all n locations
  Clone ID: PAT_MRT3847_30687C.1
aaaaaatatanatagtttagttaattcgtacatttacattattcccccaaaccaattttagctagcggtgtagccagaccagaccagaccaaaaaactcttaacaaggcatctagctcttttaaacgaaataggcagcttcttcatctaactgtgaaaacaacaccgctacaagagttcgcaaaaattcgcatctaaaaatatcttcaggtgtgactttatttcttccaagctgttgcaacatattttactaatataagtataccaacatgcgaagtgctacaagaaagttgcattatatacataaccatgcagtgttacttgaacatggctttcactaagctttggatagatgactgcatacatatcaaact

SEQ ID NO: 66083 - DNA, 348 bp, Glycine max
  Clone ID: PAT_MRT3847_30688C.1
ggctcgaggaggaaataatctttagctcctcacttgtccaactccgatagaaaaaatatattacgaaaaagctcatctattcagagtttagacgttgcgagtttgatgagatcctttcgaagaattttgccagatggatctttgggtatggagtcggacaagagaggagataatctttagctccttttttgctgtaattatctggcttgcttacttttgctgcttttatattatctgttctttgttcaacagtctattgtaatttgtagagaacaaagtgctgtgagtacaccttataggctataagattgtctctttgtgagactataaattacatttacttaaatg

SEQ ID NO: 66084 - DNA, 2231 bp, Glycine max
  Clone ID: PAT_MRT3847_30689C.1
cgattcggctcgagcgatccttttcccataaagattgctgaaaatgcccttctgtctttcttacttctccttaagcactgtaaacttcaacaagatgaagagagagataatttgaatacatttaaatcagaaaaattggattctgttaaagatcggattctagagggtgtccttcgcctactattttgtactggtgtatctgaggctattgcaagtgcatgctacaaagaagctgcctcagttattgcatcatcacgggttgaatatacacacttctgggatttggtagcttctggagttgttaattcttcatcacaagctagagataaagcagtgaaatcagttgaattttggggactaaggaaagggtctattagctctttgtatgctatactttttacttccaagccaattccttcattgcagtttgcagcatattttgttctttcaaatgagcctgttttaagcattgctgtccttgaagataatgcttgtaactcaaacatatatgctgctagtgaagaggatatcagccgtcttgacttgccaatagaagaaaaagtccatctgaaagaggaaatatctttcatggtagaaagggcaccttatgaggttcttgatatggacttgcttgcagaccaacgagtaaatctcttccttgcatggtctttgttgatatcacatctacagtcattaccttcatcatcatctcaaagggagagactgatccagtacatacaagactctgctactccagttattttggattgcctttttcagcatattcctgtagagatttccacagttcagagtctaaagaaaaaagatgcagagctttctggtggcttatcagaagcttcaagtgctgcaacccgtgccaccacaactggttcactcttgttttctgtggaatctctttggcctgttgaattggggaaaatttcatctcttgctggagcaatatatggtttgatgctccaggttcttccagcctatgtacgtggctgggttagtgacttgcgtgatcgtaacacttcagctgttattgaatcctttacaaggacttgttgcagccctcctctcattgcaaatgaattgtctcagattaagaaatctgactttcgtgatgagaatttctcagttagtgtaagcaaatcagcaaatgagattgttgctacttataccaaggatgaaacgggaatggatctagtcattcgtctccctgcatcttatccactaaggcctgtagatgttgattgtacaaggagccttgggattagtgagaccaagcaacggaaatggttgatgtcaatgatgctatttgttcgtaatcagaatggagctttagcagaagctataggaatttggaagcgcaattttgataaagaatttgaaggtgttgaggagtgcccaatctgttacagtgtaatccacaccacaaaccacggtcttcctcggcttgcttgcaagacatgcaaacataaatttcattctgcttgcctttataaatggttttcaacttctcacaaatcatcctgcccattgtgtcaatctccattctaaggatacacctggagtgatgaattttaccaattttgcttgctggtgatatcttgaactgaaagtagtggatgaagagaacgtctcgacgtatgagaatcaacgctaatctccagcattgagaatcaatgctgattaaggcagggatgacttacaaactacaactggttaacgaaacaaacatgatttccagattcttttctccactaagattcattttaagcatatagctttcaactccttgaaattgaagaggaaggtgaacaatggttttgcggtaacaacatgggtgtatcatattttcctctcttgagaggtggatccgattcctttagcttgacaaatttatcctctctaattagatttttttccccatggttgtcataattattgttttgcagtgtttttgttctgttaagaggttagttcttatcaaaggaggttatcagaatcagagtggcttgtacatctagattatttatattggccatggaatcactcgagctaaggagcatgatttgcctaagtaagagtaattgttcatctagaaactatatctttattagccatgagaacattaaagagcagtatgctccacgaaatgcgtactatgcgttgtccacacaaatgatttttggtcagcaaaatttactaatcgaccattgatttgc

SEQ ID NO: 66085 - DNA, 319 bp, Glycine max
  unsure (1)..(319): unsure at all n locations
  Clone ID: PAT_MRT3847_3068C.1
gtaccggtnccggaaattcccgggttcgaaccaacgccgttccgggagtaatagccgtttgagacataagcttgaggtctaagagagtaaaacttctgaaacggcctaaagatccttgcctgggagcgggagacttgggaatctaatgtgcttgccaaggacctaagttcttgtgggctaagtttgtggttgaaagggatgtgaatgggtgggtggggtttttggtaaaggttgtcaaaggttttgttgcaaagccgagattgcttccgaggctttcctgggttgggaggaaagtgttgtatgtgttggttgttgtgtg

SEQ ID NO: 66086 - DNA, 754 bp, Glycine max
  Clone ID: PAT_MRT3847_30690C.1
ccacgcgtccgctctactattcgttttcttctcacggttactttcggtgatgatggaggacccgacaacgttgttgaacagcgaatattcgaggctgttcggcgaagacacggacttgtacaaccgcattgtgttgggcgccctattgccgcactctgtgtggggcccactcccgcgcttcctccagacgtggcttcgcaattacctcggcggcgttctcctctacctcctctctgggctcttgtggtgcttctacatttattattggaagcgcaacgttcatgtccccaaaggcgacgatttaaggtttgaatctcggttgaaagaggtacttattatattttgtgtctgcagtgtctcgaacatgattgtattcaaaagaggatatctgtggggaaactgaaattttttgttatgtttctctgtctgttttttgttaaagattgcatattttggctttgatgtgaaatgggttttgattagtttgttaatctggttccttcttgctttggttttaatcctctatttttttagatataattattttttgggcttttggtgtttttggattttgttcctgttttggggtttaagattatggggtggtggattcgaaagttcaattggatttggggtcttccagtgtgtgattttcagtggttgacttttttattgatttttttcttctaataatgttaaaacttgggctgttactttcccttttgaaatcaccacttatctttatgcattacta

SEQ ID NO: 66087 - DNA, 175 bp, Glycine max
  Clone ID: PAT_MRT3847_30691C.1
gttaagatgttataagagattatcgaaatgttggaaagcgtatattctacactgcaacacataatcaaagaagatttatgcatataactagggctgaaccaaaagctaaaaaatagcgcatcacgacacagggtcagtattttttgctcctgccgatggagccacagacgctggg

SEQ ID NO: 66088 - DNA, 295 bp, Glycine max
  Clone ID: PAT_MRT3847_30692C.1
ttttttttaatttaataatgcatttcaataatatatagtagtcagttgtcagtacaaaaacatgttctaagaatctacctggtgagaataagatgcaatcgtagaagaataacttgaaaccatcacactaattataaatccaaagctcctgaaaatttgattctaactgttcaggctcgatcaggctgcattaaaccatgaaacatcactctcattctctctctctctctctcatatgtcaaataaggaaatgatgattttgattctctatatctacttctctcggacgcgtggg

SEQ ID NO: 66089 - DNA, 489 bp, Glycine max
  Clone ID: PAT_MRT3847_30693C.1
tgccggtgccgtcacacacaaaaccgtaccactgcggggcatggttgcaccacaggctgaaacaaggatggaagacccatagattattgccaaatattcgggttaacagtattaactgattggtgggctaacagcagcccttgttaacgcagggtgagccaacggtgtgcatacacagacaacgacttcaacaccggtgatggtgaccccaccggggacggtgaccccaccggttctggtgacccattccacaccggggaaagttgtatcccctgcccagcgccaacatgttccgcagcatgggccgcagtaagttacgaccacaccgccgacaaaggggaaaatgcctaatactgccgtgtcactactaccgaaaactacgcctcagcaggcctgaaggccaacgccgacatcagtaactaccttggtagtagtacatacaggccacccattgcggggaagggctcccaagtgccctagtcgctagta

SEQ ID NO: 66090 - DNA, 275 bp, Glycine max
  Clone ID: PAT_MRT3847_30694C.1
gtcactcttcatagatcatgacgtcattactctaacatctcattatatgcaatcttactgggcagtctttgctctaacctgtgcataattagatgcacatgcttctggactgtctattacttaacgtgaatcattaccactttgctattacactttacgactagatgcaatcaaatatttagaaaaatgctctctaatactatatatatatcatgagatcactaaatctttaaattaagctacttaaaaggtgttctccatcttcaatcagagct

SEQ ID NO: 66091 - DNA, 852 bp, Glycine max
  Clone ID: PAT_MRT3847_30695C.1
ataaaaatctttaatagtatagatttaacaaaatatattactctacgaccacattgaaactacatctaattaaaaacatggaaataagcatattacaatattatgataggaaaccacgcatctgatgatcaattacaaatgggcatagccatttatatatgatccattttccttaatgaatgttgaagaagaaactctgggtatcctctagcatatgatccatttaatttcattaattaaattacagcaaagccatggacaaatttgcaattaattaagtggtcctaaaaatgggcatagccacttgtttcttcatggtccgatgcatttgaagaaacctccatgatgttactggaacttgaacatgatgaggatgtagaagaattggtcttccctaccatcataaaatcaaacattaatcttggacgactagtttgaactgtattattttgcctatgcttctgatgagtggcgctgccatcactttctagacttcttttcttcatcgataagcgacacagaacccaatctcctatctcgttcacatagttattatgggatgagttggcagcaccagtttctacactgacgagacgatattcgtgcaagacccagtgagttctggagccttttggtgatttgccttcataaaatatcaatgtttttcgtaccccgacaataccattgttacacgttgaagatgatattcttttgtctgatcctgttgccttccaatagccacactttgttgttcggttcatgcgattaccatttcgatattttgcttccttcgggctgaaaaagtgcctctcttgtagatcacaattccctggcaaatcccaaggatcatac

SEQ ID NO: 66092 - DNA, 879 bp, Glycine max
  Clone ID: PAT_MRT3847_30696C.1
cccacgcgtcgggggaggggagtggccagcgtaagaagaatggcttctcaaagtttgagtttaccaccaacacatattccttacaataggataattgggaagcttgattccaagtttttgttgtggccttcttgtgctcatatcaaacccagaagaatttctacctcaattcgggcaatgggttcctccgcttcttcccactcccagtcacaatatgcagacagcgttgaatctgaagcaggagctgatactattgactataaatctttaaccgatgaagagtggaagaagcggctcacaaatgaacagttctatattactcgtcagaagggaactgaaagagctttcactggggagtactggaatactaaaaccccggggatttaccattgcatatgttgcgacacacctttattcgaatcatctactaagttcaatagtggaactgggtggccatcctattaccagacaattgggaaaaatgtgaaatcaaagttggatttgtcaattattttcatgccgcgccaggaggttctctgtgctgtttgtgatgctcatcttggacatgtgtttgacgatggtcctccacccacgggaaaacgtttctgtatcaatagtgctgcccttaagctcaaaccaaagcagtagacagtgaaatacctacctatcactcggaagcagatggtataatattctaaatatgtgatatactttgtgctgtttttcctatttatggagaacaacaatgaatattgtcttgaactgttgatgtataaaacacaaattttatagaatctagaagctcaattactatagtgaagactcaaattctaatactaatgaagtgtcggcatgtacttgccattgtttcatgagact

SEQ ID NO: 66093 - DNA, 194 bp, Glycine max
  Clone ID: PAT_MRT3847_30697C.1
ctttttcactcccacacgacatacaatacactttcttctaaaccctactctacttaccgatattctacccacataattccactcatcactctcactttctctaaacactcttactattcaatcccttacttatctccttcaatcgccacctaacaacaaaactaaactatacccactctactttttttatctca

SEQ ID NO: 66094 - DNA, 272 bp, Glycine max
  Clone ID: PAT_MRT3847_30698C.1
acgcctccaaacgctgcgaaaacgacagaaggggacctacagcaatccattctcaattgcgaaagcaaaacgcatagaatcgaaagaggggaaacgacaacgaacagttacggttagggattttgagagatggcatcgactaagaagatcatcctgaagagttcggacggtgatgccttcgaggtggatgaagctgtggcgctggagtcgcacacgatcaagcacatgatcgatgacgactgcaccgacagtcgaatccctctcgccaatgt

SEQ ID NO: 66095 - DNA, 253 bp, Glycine max
  unsure (1)..(253): unsure at all n locations
  Clone ID: PAT_MRT3847_30699C.1
gcaatntggtgtttgttaatttgtgacatgaatgtgtcacatgcttgtgcaatggactgtaacccattaagtagtttaggtaatgataatactactagtgctggttcttctagccaagcagaaccacaatcanaagcngaaaccaaatgtcctgaactgagtcttctaagtcccagtaaatcaattcctgcaggttctcattattctcaatcaaagaaaccctttgtgactggnattcctgttgtgaacaact

SEQ ID NO: 66096 - DNA, 429 bp, Glycine max
  Clone ID: PAT_MRT3847_3069C.1
gcaacaacaaactggaaggagtatactagtcctgatggaagaaagtattactacaacaagatcacaaatgaatccaagtggtcaattcccgaggagctgaagttggcccgtgagcaagttgaaaaagcaattgtcagtggatctcgtcctgaagcattgctgaattcccatcctcaaccctctccgacaccttctgcaactgaagcaacacccaacacagataattcaactttacccagtcaaggagaaccatcaagtcctgtttcagttgctccagttgttactacatctataagtaatccacaatctgagatgccttctggaccatctctgtctacttctgcaaatgctataactggagcaaaagtggacgaacttgaggcacctgtaaatactgtcacaccatcagatacttgtgtgggaagtgat

SEQ ID NO: 66097 - DNA, 955 bp, Glycine max
  Clone ID: PAT_MRT3847_306C.1
gattcagatagctcctatgagaatgcagatttgagtcgttctaaaagaaaaaaggccaagaaacgggggaagtcccgttccaaagaaggagatgacagctcagagtgggcttcaaaagagcttttggagtttgttatgcacatgagaaatggagacaaatctgttttatctcagttcgatgtgcatactcttttgctagagtatatcaaaagaaataagcttcgagatcctcgccgaaaaagtcagattatttgtgatgcaagacttcaaaatctgtttggaaaaccaaaagtgggacattttgaaacgttaaagcttcttgaatcccatttccttctaaaagatgattctcaggctgaagatctgcagggaagtgttgttgacactgaaatgagtcattgggaaggtgatggcaatcccaattcatatacgaaagctggcaaagataagagacgaaagaaccgtaaaaagggtgatgagagaggacttcaaactaatgttgatgattatgcagccattgataaccataatattaatttaatttatctaagacgtaacttggtggaagatctacttgaagatactgagaagttccatgataaagttgttggttcttttgtgagaataagaatttctggtagtggtcagaaacaggatttgtataggctggttcaggttgtaggtacatgcaaagcagcagagccatataaagttggtaaaaggatgacagaaatcttgctagaaatcttaaatttaaacaagacagagattgtttcaattgatattatctcaaatcaggagttcacagaggatgaatgcaagcgtctccgccaaagcataaagtgtggcctcataaatcggctaactgtgggtgacattcaggacaaagcattggtgcttcaggaagctagagtaaaagattggctagaaacaaagacagtgcggctgagtcatc

SEQ ID NO: 66098 - DNA, 525 bp, Glycine max
  Clone ID: PAT_MRT3847_30700C.1
ggagtcatctttaagaattcaggcggttagtccgttgttcttttggaaaagggagaagagagacacaaaaagaattcaggcggttagtccttggcgaattctttttggcaaagggagaagagaataaaagatatatcacacttctgttttcaaggtttggaaaaccagaaaactttagaaagcttttgcaaaggaagaagaagaagaagaagaagttcaaagagattcaaaagttgtaaaagagtatgtggaaaagttgtttgtaaaggttgttaaagattgtaatgaatatttctaaatgcaagtcaaggtctttgctttatagactctttaagtttggtcaagaaaaccattagaagagttattacctttaaaaaaaatgaaaaccattgaaagagttacattttttggatttttgctcaaaacttggcactggtaattgtttaccaaattcttatattcgattacaccaaagattttttgtggaggatgtgacttttcaaatttgatttgaatttcacaatt

SEQ ID NO: 66099 - DNA, 731 bp, Glycine max
  Clone ID: PAT_MRT3847_30701C.1
cggaattaaaggcgtcgacccacgcgtccggccactttcaccctttggattctttccttctcaaaccacaaagcaattctgtccaatcttggatcacacactcagatacagccgtttagaaagaccttcgcatttcacttttctttctggctcgagccaaggccgataggattttctttcttctgctaccttcaaaacatcacaagaagcaacatccccctatacgagttaggtgagctcagttcaacacatcgtgtgaaaaaaacataaagggagaaaattactattttgtaatttgtatgtgataaagtgcccatcttgatgtatgtacttcttcacttctttgtatgtgtccctagtttgagtgtaatctaaaacattttgaagtgattaaggtgccaagatgtgactatgattgtgttgggtgaaggaacatggtttcatggttgtgttgttgcctttgtgatccgtgagatgaaatgagatgagatgtcagaaaacatgtatcctaggttgttgttttttgaccatacccattcgaagatggtatgggttaagcatcaaatccagcaaaaagatggttacttgagctactcaccaccccttttggcttcttcttcttcttcttcttcttcttcttcttcttcttcacccccttaccctcttggtgctactttccacaggaatcatcattgccttcttcacaccaccaccaccaccatctggcacca

SEQ ID NO: 66100 - DNA, 315 bp, Glycine max
  Clone ID: PAT_MRT3847_30702C.1
gggctcgagccaaaaccctttcttcattcaccctttttttttcctttataaaactcctcaccttgctttttaggctgaacaacagaaccgggtcaatctatctcaacaacttcacaattttttacctcaccattacattttttgatatcattatcaatacacattttaaaacatttaaactaactcttatattgataaacccaattactttttatcatctcattgtttctgctaacatccttccatattatattctttcttacatcttgaatcttttcactttactctttgaaaaggctcttaaaatcaatccta

SEQ ID NO: 66101 - DNA, 362 bp, Glycine max
  Clone ID: PAT_MRT3847_30703C.1
ccaagaagttgcatttcgagtcataacataaaaaataccttggggcttgggtccacaagaaaaaaggggggctttaacaatagtcacaaaaattgagggcatcctactttggccttccatttgtcggctaaacagggggaaattaaattattatgcccaagccgcccaccggatcaaaaagacacctttttaaacagcaaacaaggtggcgggcacataaccatccttttgttttagggggaacacaggggttgacaaaactttgcaaaccccatagtggttacttagctttctttttagcactccaactagttggattgctttgaactctccggttggattgctgtttaaaatggtattag

SEQ ID NO: 66102 - DNA, 275 bp, Glycine max
  unsure (1)..(275): unsure at all n locations
  Clone ID: PAT_MRT3847_30704C.1
attatcagtcctttttcattcggggtttttacctaaccctacaattcggcgatcgttccantttaaatttttcgctttcatcgaatagctgtttatatataaaccctattccccctattcaccatgggaattgaatatataaataagaaaaaagccaaaaaaaaagaagtttaaaaagttttattttaaataagtaattctgttatttttcctgtttcttgactcaggaacttatctttttccacggaaaatcatttacaatattaactctaaat

SEQ ID NO: 66103 - DNA, 308 bp, Glycine max
  Clone ID: PAT_MRT3847_30705C.1
tgccaaaagaccacagaaagggattcaattataatttcaaatttccgccattctgaacctcaacaatggggaaaccaaaggaatccccgcctccaactcgcaagtcaacctcctccttcaagccgaatccgaatcccctcctggtcctcaacctcctcggtctcaatcccctcggtctccggaacctccccaatcccaactcctccccccggaattttgccaaacctaacgatttcgcaaccaacggtccgaacacaatccaaacattcgacaattaccaaaagggggaacaattggtttaaataatg

SEQ ID NO: 66104 - DNA, 481 bp, Glycine max
  Clone ID: PAT_MRT3847_30706C.1
gttagggaaagggaaacaaaggccttccctttttggggggggggggaaaaaaaaaggtctttaaaaaccttgaaaagggggggggcccccccggggaaaacaaaggaaaggccccatttttgaaaaaaccaaaccgcggggggtttttaaggggggggccaaaaaacacccgggcttaaaaaggatgggggccccaggcccagtagggccaaaacccttttaattggggcccccccgggcattaaaaacctcggacaatcaacccggccgggggggtccccccggaaattcccacccggccccggggggccacccaattttccttaaaggggggaaattaaaacccgggccaaatccgggaaaaaagagtttccggggggaaaaggttaaccgcccaaagtgccaaaaagagggaaacccccaacaaaaaagggtaacccccgggggccccatgggggggacaaacccaaattgggggggg

SEQ ID NO: 66105 - DNA, 493 bp, Glycine max
  Clone ID: PAT_MRT3847_30707C.1
atgttacttgctttaactataacatttggtaatgatttttggttttactggctggggtaaaaaatcgccgaaattggcaaaaacttgcatttagctgaattcgggggcataaatgtaaattgaaaaaaaaatggacataaacactaggctggggtcaatacaaaggatgggcatccaaccctatattaaaaagatgaaaacccgtgtatcaagtttagaggaaaacatagagttctccccacattcttagaaatatttaaagattggggcgggtgccgccaatttaaatttgtaaagggatgaattaaaaatgacccagtcttgttttttgaaaaaacgaattggaccatttgcaaaaaagtcatacgggatttaaataacccccacctccacacggaccccggggatatatcggggttagaccccagaaatatgtgtctgtataaaaaggggatccaactttacttatagaggacccttttggacccagggg

SEQ ID NO: 66106 - DNA, 292 bp, Glycine max
  Clone ID: PAT_MRT3847_30708C.1
tgaaggtgaatgaacccaccatattgcaaatcaacttattgctagagcgtcaaaacggattgcacatgtcacttccgaaacactttcaatagtttcacgttcaacttggtctacgaaacggttttgtccatgttattgatgatgatgagcagttaatcatcagacttggattgattgtcataacaggcatgctacatttggcataggaggacatgtttaggcaacgacactactacgctgtggacgtacatgaactagcaagtgaaagcttttcgaccgagtgtgaacattt

SEQ ID NO: 66107 - DNA, 343 bp, Glycine max
  Clone ID: PAT_MRT3847_30709C.1
cgcgtgcggccggctctagggctgaccctcctgcagagtctgagttttacgacggagttcgacgtactagtccagggggagcttatcaacgctctactcctggtgattaaggcactgagggcattgacgaacctaacgctggacgatgctaccgactagaacgcatggatccctaaacacttcaaggaatggatttcatatgaccaagctgaagatgcgaagaagcaactggcagaatctattgccaatgtctaccattgtttaaacacatgattagctgacagcatctatcgaactgcttattctttagatatttgtacttgatttcagcacttcactgtaa

SEQ ID NO: 66108 - DNA, 194 bp, Glycine max
  Clone ID: PAT_MRT3847_3070C.1
caaaaacaaagtaagacttcactcaatctcactgtgttgtgagttgtgtgtgagaccaaccaacaatgcgtgtctctgactcgtatgttcttattactgtgatcgtgtgaacgaggcgacccaacggtgcgttaacggggtagaaaacttcaagatctatcgagcattggacatgagatgcaaaagtggcactt

SEQ ID NO: 66109 - DNA, 1012 bp, Glycine max
  unsure (1)..(1012): unsure at all n locations
  Clone ID: PAT_MRT3847_30710C.1
gagacacaatgatgtgttgagcgccacgagtaagttgagccagataatactactactagtaagtcgcaccggtttctgcttcctacattgccatggaagccaagctctgggaggctcgtctnttctctccaacactccctcttcttcctcctactcctcgtcttccttctctcaatcttcactttccctcatcatcaacttcaacgctccacctagctcgcaattctgtctcagataccgntcccattcaaaatgaggaaaaggaacaaactctgtcttctgtcaaacctacttactcccccaccggaattcatcgatcgacccacgcgtccgctagtaggtaccatttcgatgggactactcgcaaattcttcgagggttggtacttcaaagtctccattcccgaacggaggcagagcttttgcttcatgtattccgtcgagagtccctcctttcgtaagccactgacgccgctcgaactggcccaatacgggcccaggtttaccggtgtcggggcccaaattctcggtgccgatgacaaatatatttgccaatactctccccaatcacaattcttctggggaagtacgcatttcctttccactctgctatgctctttcaactttctttattattttttagaatgactcatggtaggcattctgtggatttcaacaatgcttaggtaggcatgaactgatgttggggaacactttcgggtccaaccaaaattctaagcctccaaacaaggaagtccctcctcagggttatactccatcttaaactgaatatttttctagacacatgacatgactattccgtgttaagttctcttcctaatctgttcaaccgataagttaactgtgtctattttatgattgctgagctttgagatggagattgatccctcactgactattgacggggctataatcatatataaaagtaggggacaaccttcaccttgtgaattagcttctgnggggtgctgagctagatgctaactcaaatc

SEQ ID NO: 66110 - DNA, 273 bp, Glycine max
  unsure (1)..(273): unsure at all n locations
  Clone ID: PAT_MRT3847_30711C.1
cttaaacgagaatcccgagaattattttgcggaagttgagcaagttgcatttaaccctgctcatcttgttcctggtatcgagccatctgccgacccagttctacagtcgcgtcttttctcataccccgacacccaccgccaccgtattggcgtcaactaccaacagctcccagtaaaccagccacgcgtaccttatcgcatgggtaacttccagcgcgacggcagcatggctttctacaaccagggtgcacgaccanactacctctcgtcgct

SEQ ID NO: 66111 - DNA, 281 bp, Glycine max
  Clone ID: PAT_MRT3847_30712C.1
acagacaaactaatcaccgagaattcattcgcaattaatgtacaataatagtacatgttaaccaaatcatgcactttaatcatcatcccttgccaacactagaaattaaaattaaggaaagggagaaccctagcttgatctccattaatgaaatttcaaattacatttttttccctcaccgaacggaaagaacgagagaaagaattatactattataacaacaattggcgaaattagggtttcttaccaagagtgctcttgttattgggcatccaaacttt

SEQ ID NO: 66112 - DNA, 848 bp, Glycine max
  Clone ID: PAT_MRT3847_30713C.1
gaggcctctctgttgggtgtgtctctgtttctctctcactgttgttgttgttgttgatccattgaagaggaacttgagaagcgagaagaaattgaatcctttggggtgaaactccgatacccaattggctgaaagctccaatgcggtgttgttggaggaggagaccctccttgaagaaggaaaatcgtggatctgatgatggtggggacatgggtgatgaagatggtttcaggtggttgtagggttgttgtggggggcaacgatccggtggtggtgcggcagcagcatagacgacgatgcagcttcacttctcgcctagcatgagaagcatcacgatatcgagcaaaaatgggtttattgacttgatgaagatcaaggtcgcagcttgccacatttcctatcgaaccctcttccacaccatcctcatcctcgctttcttgttgccctttgtcttcattctcactgctcttgttacccttgaaggtgtcaacaagtgctcctcattcgattgtttaggtaggcggttgggaccaaagcttcttggtagggttgatgatccggcgcagagactagttagagatttttacaatatccttaacgaagtaaagactagggaaattccatctgctctagagcttccggattcatttgatcaactggtttctgatatgaagagcaatcaatatgatgcgaaaacgtttgcattcatgttaaggggaatgatgcagaaatttgagagagaaatcagagaatctaaattttcagagctgatgaataaacattttgcagcaagttcagtttctaaagggattcattgtctgtctttgcgtttgactgatgaatattcg

SEQ ID NO: 66113 - DNA, 554 bp, Glycine max
  Clone ID: PAT_MRT3847_30714C.1
ggctcgaggtttcttctgaagccatggcggatctgaaatccatcgcggattgcatgatttccaacggttatgcgaaggaatgcgtcagcgtttacacgaccatgagaaaatcgatcgtcgacgaaggcatttatcgcctcaacgtggaggagtttagttcctcgaaggtgaacaagatgcactgggatgtgctcgagttgaaaatcaagagctggttggaggcggttaagatcgccgtgaggacgctcttcgcaggagagaggatcctctgcgatcacgtattcggtgcgtcgcaatccatcagtgaagcttgcttcgccgagatttctagaagcggagcaaatctgctgttcggattccccgaactagtcgcaaaaacgaagaaatcgccgccggagaagatcttccggatgattgatatgtacgctgcaatagccgggatgtggtcggagattgaatcgatattctcgctcgattcaacaacagctgttaaatctcaagcctacggtcttgttctcggactctccgagtctgtacgaacgagtttatcggac

SEQ ID NO: 66114 - DNA, 190 bp, Glycine max
  Clone ID: PAT_MRT3847_30715C.1
actccttatttaaaattcacaacatccacacatcctataaaatctcacaacatcctactatctactacaatttctcaataactcgtcacttctccacataaacacatacataactatcaatctatatctacctaccaatcatttatccaacaccctttcttttatacaatatacctccaacttcatccct

SEQ ID NO: 66115 - DNA, 424 bp, Glycine max
  Clone ID: PAT_MRT3847_30716C.1
attgaataaagctcagcgtaacgtcctcacgcacatcacattacaacacattgcaggcacctgaattatggataatgcaattgggggacacagagttctgattgaacatcttcaaccaatttcttacacgagaaatgtctcctctcaaacgcatcaatctacagatctctgagctatcattatgtaatgctgggaattctacgcatggtcaaacaagtggatcagatgaagaagtggagatagaacatgcatatcggactgacatctgcaaagcagagcgtgggggctttaaggatacccttccatatgacctgattgacacaactctcaacgctgtactacagaatacaaatgttgaccctgcagaagaaggagatattgtcgccggcacagtactggcacctgaatcagatagacgaatcga

SEQ ID NO: 66116 - DNA, 395 bp, Glycine max
  Clone ID: PAT_MRT3847_30717C.1
aagaaactaaacttacttattttttattaataaagcaaagggaccgaacccaaaatgtaaaaaacccaaaaaaaagggcaaacattttcctttaacgatctctactacataagggccaaagatcataacccactacataaaacccaacaaaggccgcaagaaaaatgagccctggaaaaccagatttccaaaaggggccctccaacgtgttccatgaaaaggaggaaagggagctaaagttgtaaaaaaagttcccttttcttgaaagcaaacataactgcggcgatttggacaaacagctcggtatacaccggtgctcgcagggatgaaaaagtctttgttgttgccttccccaaaagaaaaaatgggacctaaagcaggaaggtttccagggg

SEQ ID NO: 66117 - DNA, 244 bp, Glycine max
  Clone ID: PAT_MRT3847_30718C.1
gtttattgctgttgaatggctccttgagtattggttactgacgagggcctttgatgatcacagacatccttatctgccaaagcactttttttcctgtctgcttcctcatttctcagatggatttgactctggctgaattgatgtccttagtgctcatgctgatatacgtgtttctgtcgtgctgatgctcattgctgctaacattttccccttctactctccttccacttgtgccgccttctac

SEQ ID NO: 66118 - DNA, 227 bp, Glycine max
  Clone ID: PAT_MRT3847_30719C.1
atctcttctcatcttctcgattctgacctttaagattagcattccgtgtcaattgagcaacaatttcatcaccagtgcgatattttagattagcattatgggtcccttcattgctaagaatttggcttgctagttcatatacccgtatctcgtttccaagaaggtgtcatcagagttgttgaccaagcagttggatatcatggtatctctggtctctcgtcgtactg

SEQ ID NO: 66119 - DNA, 269 bp, Glycine max
  unsure (1)..(269): unsure at all n locations
  Clone ID: PAT_MRT3847_3071C.1
tgganancaattggatacnnagtggacaccnnggagaagttgatcagaaaggagaggcctttggaanagggattantaggacncaatgtctgaaactgattctnctttgatccaatgnctcactgnnaaancgacttgaagtcactgnagatcaaaggacagancctgtacanggtgcaaatgtgatgttgtgattgtggggtctggttgtggtggaggagntgcagatgnanttctgcaaattctggtccatanngtagtagcacntg

SEQ ID NO: 66120 - DNA, 1025 bp, Glycine max
  Clone ID: PAT_MRT3847_30720C.1
caggctactacttggctagggcaccaacaccgctaacactctgttcacagagagaaagagagtgagaatgctctcaggggatatacctcccaatcagaccatttacatcaaaaatctcaatgagaaggtcaagaaagatgaattgaagagatctctgtattgcttattctctcaatatggaagaattttggatgttattgctctaaagacacccaagcttcggggacaggcatgggtttgtttcagtgaagtcactgctgcaagcaatgcagtgcgacaaatgcaaaacttccctttctatgacaaacctatgagaattcattatgcaaaaacaaagtcagactgtattgcaaaagaagagggtagttttgttccaagggaaaagaagaagaaacaagaggagaaagctgaaagaaagcggcgtgttgaggaagcacagcaatctggtgtggctaatggaacacatagtgcaagtaatggtggtccaactgcatcattccgtcaaggacccggtgctcaagaagcagctgctcctaacaatattttgttcatagagaatctgcctcatgaaactactggtaggatgcttgaaatgctctttgaacaatacccaggttttaaggaagtgcgcttgattgaagcaaagccagggatcgcatttgttgattttgaagatgaggtgcaatcatccatggccatgcaggctcttcatggcttcaaaatcaccccccagaatcccatgattataacctttgctaagaagtagctaattggttttcagccgtctgtatttttgtagatcattgaaaaactaattgcaaacgtttttaagtttacaggaagttagaaaccagcaaggcggagtgagaattcaaccacatttgtggaaaagttgagatcgtgctgttataatgtttattgattgtattttattttatcaaaagagtttgtaaacttatgagagtttcatagactcaactcgtaagagttcactttatattgaaactcttataaaatataaaaaa

SEQ ID NO: 66121 - DNA, 608 bp, Glycine max
  Clone ID: PAT_MRT3847_30721C.1
cttggctagggcaccaacaccgctaacactctgttcattcattcttctccgtcagaagcagagagtaagaatgctctcaggggatatacctccaaatcagaccatttacataaaaaatatcaatgagaaggtcaagaaagatgaattgaagagatctctgtattgcttattctctcaatatggaagaattttggatgttattgctctgaagacacccaagcttcggggacaggcgtgggtttgtttcagtgaagtcactgctgcaagcaatgcagtgcgacaaatgcaaaacttccctttctatgacaaacctatgagaattcaatatgcaaaaacaaaatcagactgtattgcaaaagaagaagaaacaagaggagaaagctgaaagaaagcggcgtgctgaggaagcacaacaatctggggtggccaatggaacacatagtgcaagtaatggtggtccaactgcatcattccgtcaaggacctggtgctcaagaaacagctgctcctaacaatattttgttcatagagaatttgcctcatgaaactactggtaggatgcttgaaatgctcttcgaacaatacccaggttttaaggaagtgcgcttg

SEQ ID NO: 66122 - DNA, 766 bp, Glycine max
  unsure (1)..(766): unsure at all n locations
  Clone ID: PAT_MRT3847_30722C.1
ggaattcggcacgaggccgcttccttcccgtgaaggcaacttcagattgagtaaaagttcttcaattggaaactgcagctggtgcagcagtaaggttctttgacaaagctattggaattaatgtgcctcgatctcgcttccttcgcgtgaaggcaacttcagacttgcatcttgtccagtcggacctttacactttacaagatggattggttattaggaaccaacctagggcaaatcctgaaaatccttccattgaattggggccagaatttaagaaggttagcaatttcttgagccggttcaagtcaatccccagtattgttgagcttgacagtctaaaagtggcaggcgatgtatggtttggagctggtgtaatccttaagggaaaagcaagtattcttgcaaaaccgggtgtgaagctggaaatacctgacggagctgtgatcgcagacaaggaaattaatggccctgaggacctgtgagagaaagctgatgatgagttttgaaatccatgtgactgtgcaatctttgagtattgacagtcttaaactaaaatttgtgtattgcttctagtttggtaggggtaaaaataagaaggcagtttctactgagcatgtctgaagactaagctttgtatttctcataattttgtttttaaacatttcttacaaggactcaaggaggatccgatcatgtttcctttccatatcatattaagcgtttacgccttcatcttttgttgagtaaaaaaaaaaaaaanaaaann

SEQ ID NO: 66123 - DNA, 395 bp, Glycine max
  Clone ID: PAT_MRT3847_30723C.1
cggggtttttggctcacctggtgcgcttgttctctgtgcgacaacgaggtgttcgcacgtggtactctcgtgcttcgttctccgatgccttgccatctgccgcttatgaccctattgttatgagagacgccattgtgcttgctgtcatagaacggttcatgactgatgtgccttttgttgtcactactctgcggaggtttgtactcttctttggcggcgtgcatcacttctcgtgtacttaagcaacacaaaggctgttctgcagtggtgagcacagtctcgtgcgttcttgggagggcttgtggtctcaaccatttgcggctctgaagagctgttgactatctatgcactgtacgccatgagtctaccttgtctgtgcaggatggaacctatgc

SEQ ID NO: 66124 - DNA, 133 bp, Glycine max
  Clone ID: PAT_MRT3847_30724C.1
gtaacacaggccgttagtaattatttggaagaacatgtcttgaagtgtagattgttacatgaggagtgccaacagatgatgacctgaatattcgattcaaaacaatttgtaatagcttcctgactgcatatct

SEQ ID NO: 66125 - DNA, 704 bp, Glycine max
  Clone ID: PAT_MRT3847_30725C.1
aaaaacaaaattatgagaaatacaaagcttagtgttcagacatgctcagtagaaactgccttcttatttttacccctaccaaactagaagtaatacacaaattttagtttaagactgtcaatactcaaagattgcacagtcacatggatttcaaaactcatcatcagctttctctcacaggtcctcagggccattaatttccttgtctgcgatcacagctccgtcaggtatttccagcttcacacccggttttgcaagaatacttgcttttcccttaaggattacaccagctccaaaccatacatcgcctgccacttttagactgtcaagctcaacaatactggggattgacttgaaccggctcaagaagttgctaacctgcgaaggagactgggaaagtcaaactcatattcaccacctaacacaaagttaatagtaatatagctcttaaccttcttaaattctggccccaattcaatggaaggattttcaggatttgccctagcttggttcctaataaccaatccatcttgtaaagtgtaaaggtccgactggacaagaagcaagtctgaagttgccttcacgggaaggaagcgagatcgaggcacattaattccgatagctttgtcaaagaaccttattgctgcaccagctgcagtttccaattgaagaaactttactccatcaactttctttggattggg

SEQ ID NO: 66126 - DNA, 396 bp, Glycine max
  unsure (1)..(396): unsure at all n locations
  Clone ID: PAT_MRT3847_30726C.1
ngtgangngcgtagnagctcggaatcggctcgagnaaaaaaaaatcctgttgaatttaatcttattngctctgttttttcctcngtntctcacaagacataatggagtacaaagngaaaaccacaaccttcaagngccttcttccaaccaatgcccaattccattttacccanctantgntnnccaaaancttctacncccacatnctttncatnctttnctttacaactctnccctttacaacaaattcttccccaactnccctntttncccctttncaacccctncttncaggggggcttcttccccctnctnggctngggcttcccaaacgcggtncttcccttncccggcgcgggcnnggcccgggcanaacccccggtgggggtggggttt

SEQ ID NO: 66127 - DNA, 501 bp, Glycine max
  Clone ID: PAT_MRT3847_30727C.1
ctaccaattaatacaatgcaaccaaatcgtcaagttcacgcgtcggcaattattacgccagacatttccttgaaattcaaaaacatgggagcagaacagtgcaattattgattttggcatgatttggtgcttgcatctgatctctgtgttccaaaacaatactacgatgaagagatggggcatgcaaatggttacttaactaactgtttctttctaaatacccaacaacaccaacactgcactttcagcattttaggaacaggaacccccacactccacagtttctcactcagggtgtaacaagtttcgttcgggtgtgtgtaactattgctgctgaggaaacacctctatataattttatccttttgccatttcactgtgtctctcctgttggtgagaggcagacatgcacattggaatgatggtgatgatgactcgagcattgaagaccattatgtcatcctatcatgactatggcatgaattcccgtctatgtccttt

SEQ ID NO: 66128 - DNA, 106 bp, Glycine max
  unsure (1)..(106): unsure at all n locations
  Clone ID: PAT_MRT3847_30728C.1
ntcacgcgttctaatgatatgaattttgcttttgcaactgatggatcaattaatgggacgggtgaactatcataatgtctttctctactatgaatactgatcacca

SEQ ID NO: 66129 - DNA, 107 bp, Glycine max
  Clone ID: PAT_MRT3847_30729C.1
ggctcgagcgcaaacattccactccattctcacaagctcgaacatccggacacggcgatcagcagagacgggtactattttcccctaaccccaatccatgtccaaat

SEQ ID NO: 66130 - DNA, 295 bp, Glycine max
  Clone ID: PAT_MRT3847_3072C.1
cccacgcgttcgaccacgcgtccgcttgcggttcgggttttagcgcatcttcttgtagattggaggtagatgggtaaggaaaaggctcacatcagtattgtagttattgtccatgttgactctgggaagtccactaccactggccacctgatctacaagcttggacgcattgacaagcgtgttatagagagatttgagaaggaagctgctgagatgaacatgaagtcttacatgtatgactgtgtgcttgataagcttaaggcttatcgtgaatgaggaatcacatttgatattg

SEQ ID NO: 66131 - DNA, 314 bp, Glycine max
  Clone ID: PAT_MRT3847_30730C.1
ttgcatgcatgcatgcagactctagatgatcgattccctcaatgacaatcacacactcataagaaataaagaatgtttcatgtgtgtgtatgatttagaaggaattagtttgtcttattaatgacgatcctgctgccaccagaagtgatgtcagcggaactccagggggactaacaacaccacattaagaagtaatgaggaggcaaagatcatcaattattaataggtattagttgtcttattatgactattatgctgccacctgatgtgatgtcagcgttactccttggagaattactacacctcattatgaa

SEQ ID NO: 66132 - DNA, 1691 bp, Glycine max
  Clone ID: PAT_MRT3847_30731C.1
cttcccacgctacccaaacaacagagtttatttctttttggttccttggttcacgctggctgcaaggcttgtgtttggtgggagcagcttctcaccgtgacgctgctctacgaagacgacgacaacctcgtgtgacaacatcaaataatgggaaaaggaaacatggaactcgagacaaacaaggtctatgactacgaggatgcacgaggggacgttgaagtcccagataccgctcatcagataagcactgattcatggtttcaagtggcttttatcctcacaaccggaatcaacagtgcctttgttcttggatatccagggaccgtcatggttcccctgggttggatcgggggtgtgattggtctaattcttgctaccatggtgtcactctatgcaaatgctctaattgcttatctccatgaattaggaggccaaaggcacattaggtatagagatcttgctggatttatatacggtaagaaagcgtataatctcacatgggttctgcagtatatcaatcttttcatgataaatactggctacatcattttggccggttcagccttgaaagctacttatgttctattcagggatgatgggctgctgaaacttccatattgtattgccataggtggatttgtgtgtgcaatgtttgccatctgcattcctcatctttcagctctgggaatttggctaggattttcaacagtcttcagcctggcatatattgttatatcatttgtgttgtcgcttaaagatggattacaatcaccgcctcgagattacgagattccaggagatggtgtaagcaaaatctttacaataattggagcatctgctaaccttgtgtttgcatttaataccggcatgcttcctgagatacaggcaacaattaggcaaccagttgttaagaacatgatgaaagccttgtactttcagtttaccgttggagttctaccattgtacctggttgcctttacaggatactgggcttatggatcttccacagaagtgtatttgctgaatagtgtgaatggtccagtttgggtgaaggcttctgccaacatcacagcctttcttcaatcagtcattgcattgcatatttttgcaagtccaatgtacgagtttttggatactaaatatgggatcaaaggaagtgcactgaatgctaaaaacttgtcattccgagtcgtggtaagaggtggctacctagcctttaacacatttgtggcggctttcctgccattccttggagatttcatgagcctcacaggggcgatcagcacatttccccttacgtttattcttgcaaaccacatgtaccttaaggcaaagaaggacaaactaaacagctcacaaaagctctggcaccggttcaatattggtttctttgccattatgtctctggcagcaacaatttcagccatacggctcatttctgtagactccaaaacataccatgtttttgctgatttgtgattaaattcattgtattctttcagcaattgtagcaccagaggctttagtgtttcagatgctttcattttaaaataaaaattagtatagaatttcctagaagaacattgtgtcgtgttgtatcaatgcattaatgtatcctgttgcgtaaaccttgcacttttggtcaacaatggtttttcggatcagtaaaatacacatatttggcactatct

SEQ ID NO: 66133 - DNA, 340 bp, Glycine max
  Clone ID: PAT_MRT3847_30732C.1
ttggttctcctacttatttacgagttttcaagataaattcggcattcctaccgcggcctgccctgctttaagaggattgagagctgggatctttgcccttaatcttgctgcaacatcatataggagtgtgactaaagtggatgtattgctacgccctggtataattacttctacccctggattataggttctggctctctaggtactgctaaagttttgcttctgctctttgataggatctgagctagttggaggtctggatgctcctagtttaatgttacgtgccgctcatggtgctgcatgcggatagctcttcgctgaagttatttcttctgcaatg

SEQ ID NO: 66134 - DNA, 383 bp, Glycine max
  Clone ID: PAT_MRT3847_30733C.1
actttacgtgtcgattttttcctaaataagagaatgtttagtttcacctatttatgtgcgtttaccacttcggagtgcgacagaggtgtgagtgtcataggagaaaaaaaatgacagaggaacaaaccagaacggcagaggcagaatcagtaacaccaccacctgctgctggtggtgctttacaggatcctgctggtgctgaggctgaacatgtacctgaggctacaagggatgggactgaggagaaaagaggaattccagtgccttcttgtgatgacaagcctgatgaatccaaggctacagtcttggatgcgaagactcacgaagttgctgaagtgaaaccaactgagggctctattaacccagatgcggcgcttgcaaga

SEQ ID NO: 66135 - DNA, 284 bp, Glycine max
  unsure (1)..(284): unsure at all n locations
  Clone ID: PAT_MRT3847_30734C.1
taaaagagagattttgtggcaatctttataancattttaaattagtaaggaaatcggttatgcaatatgctagtcttgagggactaatgttcttgccgatngaagaagcacatttttccctggccccagaagggacatgatcccaatactgtcaaaaatgtccggtnccggattggnacggcctaaattggcnatccgnggcctnantgtttcntcngtgggttggtggtcaggtggcntngcttttccccannacacagggtgannnggggcgnccaaaggag

SEQ ID NO: 66136 - DNA, 219 bp, Glycine max
  unsure (1)..(219): unsure at all n locations
  Clone ID: PAT_MRT3847_30735C.1
cactattggagctgtcaacagatctccactgagcttgaacagctctgaagctggcgattcggctcccagcgccgncttcgttggcacacgctcgccgaaggcgaccgcctctttggtcccttttgtcccgccgncctctggaagttgtagaacccctgcggcggataaagagatggaggagcatcaacgggcggggggggtctgatggaaaggtcttgc

SEQ ID NO: 66137 - DNA, 261 bp, Glycine max
  unsure (1)..(261): unsure at all n locations
  Clone ID: PAT_MRT3847_30736C.1
gttacagaatagacacaatatacaataccgtatattgattggggtaggtgatggtgttgaggggcctaatcttaggtgctaaggttaggtgagagatggatggagccagcagatccctcttgttgactgaggccctgctccttcagttgggtgtacaccatgcagacctttagggtattctttccattttcccctcatatgtgaggtgttccacttaagttctcggtngctggtatgcctggcccatgttatcatcagttt

SEQ ID NO: 66138 - DNA, 247 bp, Glycine max
  unsure (1)..(247): unsure at all n locations
  Clone ID: PAT_MRT3847_30737C.1
ntctcatgctcnctctcncnngcacagnctgngtngngtgncnggcnnngtncgacncgntggngntngaacgtatngnnaaagaaccgggangtgcagngttanngagccaaggnanggnancttgattganntttngnngncnangnctgggnngttngnngacgagnngtggttgtggttgngnggggtnnggngcgttgnnnnngtnnngnggtgnngggtaggtagatgnnntggnngnntn

SEQ ID NO: 66139 - DNA, 238 bp, Glycine max
  Clone ID: PAT_MRT3847_30738C.1
ggcacccacaagtcattaaacttcgattgagtttcaaaggggtcacaggtagtgtggtacattggggtggtccagggttggaccaaagaagtttgtggcactattaaaggtggttgtgggcaaaggttcatctattctgaaagggacccaaaggtttaagcttctgtaccatgattaaaaatggatggaaggcttcaaggccctaatggcctaacccaaacccagttgacccatccct

SEQ ID NO: 66140 - DNA, 392 bp, Glycine max
  unsure (1)..(392): unsure at all n locations
  Clone ID: PAT_MRT3847_30739C.1
acgagggggaaggggagttgaacaagaaacagcagtgcctggcgaaaaagagaaagaaaacaatcatgagcttcattctgtttccaattctctttacatttacctttctatcctcacccattctctctgcttcagatctgatcctcaccaaagttaaccatcacattaatctaacttcacanattgtacacatcactacttcactaaaggtacagaatacaaaatctaatattatatctaagattttactatcctttcctaagaaccagacaagtaacttaacatacttaaagacaacacttagtaataaaaaaagaaaatcaaaaccatcttctagtgattatttacctatcgaagttgtccaaccgtgagatgtgccaccttccttaaca

SEQ ID NO: 66141 - DNA, 642 bp, Glycine max
  Clone ID: PAT_MRT3847_3073C.1
ttttttttttttttttttttttttttttttttttttttttttttttttttttttttttttttaacagaaaaggagcccgggggaactaaaaaaacggtttactttttatcaaaaaaacaacaattttcatggaaaaaaaaaattatacaagggccctctttttacaaaaaaggaaaaataaaccccaaggggaattccttgaaaaaaaaaaaaaaaaggtttacaattatttccgggttaatggggctaaggggaaaaaaaaaaaacccaaaacttggccttgctttggggctctgaaaacacattgtttgcccccccccccctttcctgagaatttaccgggggggggggccacagctgaaaccaggtatcaacaccctgctgataggatcgacaaaacatgaccctgaccccctgatttacaattttttaaacaaaaacatgacctcttggtgggaccaaaggagtccaagcaacggggcccgacaactttgggccaaatgactgacaactgttcaccatggcaatctccggggggatgcttctgccttaaaaagcaaccagttggaaatgaaaaggcccatccccttcctaattttccattccctcaacccaggcatacttaaatccacactgggatcc

SEQ ID NO: 66142 - DNA, 654 bp, Glycine max
  unsure (1)..(654): unsure at all n locations
  Clone ID: PAT_MRT3847_30740C.1
ccacgcgtccggtgaaggggaaagtgctttcttctctgagggggttcaacaaccaactacttttttttttcttcttggccacaaatgctgtttaatgaaccatcaattcatttatctcctctctctctctctgtctctctggctgctttttttttctttctttctaggttttaaaatttaagagaggtaatcccacacgctttgatcaaacgaaacacaactaaagaagaagggtactttcgttccatccacgaacccaccctttaagatacgatgtgccatcatcctattctgttgcctttgcaagtttaggaattaaccttctttggctcccacaatttttcacttggcagttcattctttctaatggcaatattctccactctactactttacttcggatacatcgtacatgtataaataaatacacaccctttttttttcttcttcgatcttcatccttctccgttcatttctgtactactcgaactcggtaagcctctctttgtttattgtgatctgcattgcatgcatatgcaaatggggtgtcatgggcaaggcaagaatccgttgcagcaacgagtgggagaatattgaacgaggcagtgagcttcgttgctttnctgcgtgctcgacccttgncgattttcttct

SEQ ID NO: 66143 - DNA, 277 bp, Glycine max
  Clone ID: PAT_MRT3847_30741C.1
attctcccttcatccaagtgtccgtacaacacatacaccctctccttatctccgaccaccaccgacgtcgggaaccgccgcacattaacctccacgttgtcgtacaccgttccctccgcccaactatcaatcctcttcaccaaccacaactccttcaacggcgacaccaccgccgccgccccgtccttcctcaccgcgatgtcgtcggcgccgacgaggtcctcgttcagcaacactttccttgccgtgccgtccaccgcgtccaccttgaaaacct

SEQ ID NO: 66144 - DNA, 223 bp, Glycine max
  Clone ID: PAT_MRT3847_30742C.1
gttcattttagcttatagagaaactgaatatgttcaatttagcttctcaagtacttatggaaaagtttttaagattcaaatattaaaagtttcttgtaacaaaacttaattgaactattcatttcacacccataatccattttcttcttagcgctgctgagttatttttgttttcacattggctttgtaaaaatttagaggataaagtgtagttataattgtc

SEQ ID NO: 66145 - DNA, 710 bp, Glycine max
  unsure (1)..(710): unsure at all n locations
  Clone ID: PAT_MRT3847_30743C.1
acgcgtccggccgatcaaggagtggaacagacacactttggagacactttcagtaaatacaagaaaatagaagaagatctaaataagctggaagaggagtcaactgatagggcgctaagccagcaagaggtggaagttagaagacagttgcagcagcagttatgggaggcagcccaggcacatgaatcattgttgagacaaaaggcacaatcaaagtggattaaacagggtgattgcaataccagattttttcacttgatgataaatgctaggaggagaaacaattgtttgaatggggtgttgattgatggtgtgtggagagatgagccttcaatagtcaaagaggaggtgcggtcttttttcaggcagcgttttcaagaagctgatcaggcaagaccaaaacttgatggtattcagttgcagtccattgatttccagcaaaaccaaatgctggtggagcgttttaatgaggaggaggtcaggagggcggtgtggagctgcggtagtgataaaagtccgggaccggatggactcaattttaaattcatcaagcttttttgggatatcatcaaacctgatttcctaagattcctagatgaatttcatgtaaatgggagtggtgcctaggggacttaatgcatctttcatagctntaatcccaaaggtactagatcctcaagtgntgaacgagtacaggcctatctcactga

SEQ ID NO: 66146 - DNA, 396 bp, Glycine max
  Clone ID: PAT_MRT3847_30744C.1
cctactcgtccactttgataaacacgcgatcacaggtgtgtgctccttaaaaccggaaacaaaagcaatcgttacttgatttcaagaatcttccaatttcttcctactttttggggtgcgatatcttaaggggaagaaaataactctctgtgctgtccacagactctgtgaatcatattcttttccactcttagattatatgctgtacactctcctatatgatatatgactctgtgtgagatataaactctttctgtgtctttctcagagctctgctcaatatcaagagcaagctggtgaaatcttggatttgagctctcactctcttatatggtatatgactctgtgggtagactcttctatatctgtgctctctttcactctcttcttctcact

SEQ ID NO: 66147 - DNA, 166 bp, Glycine max
  Clone ID: PAT_MRT3847_30745C.1
gccaaacagagcagatagttcaacgaccaattaatgagcaaactataggcgaagacggaactttcccgtgaaaggctcacccgggggcatggtaaacgacggaggactaatctgctggggacccacttcggaaaatcttggaaacattaacattttcaatggtaca

SEQ ID NO: 66148 - DNA, 238 bp, Glycine max
  Clone ID: PAT_MRT3847_30746C.1
atgaaaagtcattaacctcgggatttcgagattcctaagactgaaactcgccctgtacatcccaatcctcctcagggtgagtaactgatacaatagcaaaccttaatgatgcccacggggtcaccatctcttgtatcagttgctagcccccattccgaaaatgaacacgtgggtcaaaataactcccaatttgctaagaggtgtgtctttccaaccaactgttagtttgagcgagctg

SEQ ID NO: 66149 - DNA, 224 bp, Glycine max
  Clone ID: PAT_MRT3847_30747C.1
actggtaatttaaaaatattatgagtctaggataatatacaatcatacataacccaagtagcggggttacagaccaaccataccacagactaatagcactcgagttagcatccagatacacgcacaatttgtgacttttgattttctcactcataaatagatcacacgatagggaaaaaggaggaagagagcgagagagagagagtgggagagagagagagaga

SEQ ID NO: 66150 - DNA, 472 bp, Glycine max
  Clone ID: PAT_MRT3847_30748C.1
atcctccaaacaaatcaattgcatggatgtaccaaatgataatcatgtgctcacagatttaccagaaaatggatgtttcaattcccacccacaaatcctctgtaaaccatctgtggaagcctttgaagctgctattcggattgctaatgtggatccaaagaaaacagtgggccattcagatttggtccctggagctgatcatgccctgaacagcattcataatatcaaagaagcgttacctgaaatttgggagattgaagatggcaaccaacagcaaaagattcaacccccaacagttgaaaccatggtcctagcttaagttttacatcgataaaatgtttttagcagacttatcaagcaaatcaagagtttctacctctgcagtatgtttctatctaaatttacaataagtttgaaattgtctccacggcatggtgatgcttgaatatataaatcttgcaatttggcatcc

SEQ ID NO: 66151 - DNA, 255 bp, Glycine max
  Clone ID: PAT_MRT3847_30749C.1
tgtaaatattaaatataaatgccaacgctggagtgatggtagtttagggcggtgttactccttctcgcgttgattaggagctatagtcttttttcactcagcagttctcgtttgtgttcttcgctttcctgaaactagggttttcaatttcgattcattcgttaataattaaagatgtttgggatggcaccgaataatatcgataatacgaggtactacgaaatcctcggcgtctcgaataacgcttcgcaggat

SEQ ID NO: 66152 - DNA, 202 bp, Glycine max
  Clone ID: PAT_MRT3847_3074C.1
ctttttgctttcttgaaaatatctttacttttcgatctttaataaccttaacctcttctacatcacctataatgttaatcccccagtacatattggtttttggatctcgcatgtatattatgatcaaatcatatactctcttctgactgtttaatgacccttccaagctttccaattgtaactattattttttcatctcttt

SEQ ID NO: 66153 - DNA, 362 bp, Glycine max
  unsure (1)..(362): unsure at all n locations
  Clone ID: PAT_MRT3847_30750C.1
ccgggaaccgnaaaagggaggggcgagagcttacaccgacaatagccaacnaccccgccncaccaccnanagnngnngcnnaggcncgngcagggacagnagacaangacnnncaaaaggagccaanaggaacagggaaggacggaaagaacgcccacnnaagggacancnggccanccacncaagaaanngcagaggcngnccaanccagngcgnngccngacangcnccgaagnacaaangaagcnannaccaaaggcaacacnangnggaaccaacnacaagnnccngcagagacccngnacncaagggaccccaagncaacaaananncaagaaccnccatacnncaagggcangacc

SEQ ID NO: 66154 - DNA, 1281 bp, Glycine max
  Clone ID: PAT_MRT3847_30751C.1
gggatccgggccgcgacttcatcggtggtgtatttggtgtgttgatgttttattaaacttttgtactcttgctttgaaactagttggttaggcaagttttagttgacttctattttatttctgtttttatattcttgatcggtggtgtatttggtgtgttgatgttttattaaacttttgtactcttgctttgaaactagttggttagatttgaaattcttctaagatggatacttcttataggactggtggagtcaagtacgagtgcttgctttttgatatggatgacactctttacccattaagcttaggtctcaatttgttttgtcgcaagaacatacaagagtatatgttagaactcttgcatattgaagagagtgaagtgccaaaaatgtgtttggatttgtatagggaatacgggacaactatggcaggattaaaggtccttggttatgagtttgacaatgacgagtttcatgcttacgtgcatggaaggttaccatacgagaaactgaagcctgatccagtattaaggaaccttctgctttccatgcctcagcgtaaaataatattcaccaatgcagatcatgcacatgcagttaaagttctcaacagattgggtttggaagattgttttgagggcatcatatgctttgaaacgcttaatcctcccaaacaaatcaattgcatggatgtaccaaatgataatcatgtgctcacagatttaacagaaaatggatgtttcaattcccacccacaaatcctctgtaaaccatctgtggaagcctttgaagctgctattcggattgctaatgtggatccaaagaaaacaattttctttgatgacagtgttagaaatgttgaaagtgcaaaaataactggacttaacactgttttagtgggccattcagatttggtccctggagctgatcatgccctgaacagcattcataatatcaaagaagcgttacctgaaatttgggagattgaagatggcaaccaacagcaaaagattcaacccccaacagttgaaaccatggtcctagcttaagttttacatcgataaaatgtttttagcagacttatcaagcaaatcaagagtttctacctctgcagtatgtttctatctaaatttacaataagtttgaaattgtctccacggcatggtgatgcttgaatatataaatcttgcaatttggcatcacgaaacggatgtgaaattattaagtgtaaatcgcagaactaaaaatttgagagaaaaaaaaaaaaaaaaaaaaaaaa

SEQ ID NO: 66155 - DNA, 867 bp, Glycine max
  Clone ID: PAT_MRT3847_30752C.1
gctgccattgctgatcttgggattggacttgagaataaaatcattttacactttgaaaatgtgttttggcctaatgtggagttcttgggagtagttgcagatacaccttatgaatgtagctacttccttaatctccacaaggccacaggtcgtgctgttctcgtttacatgccttctgggcagcttgccaaagacgttgaaaagatgcctgatgaagcagctgtcaaacttcgctttcatgcagctcaagaagatttttccagatgcttcttcaccggtagccatactaattttgcttcttattagtttcacttttagcagtgcaagaaaaatgaatgctttcatcactaatacattgtctaaaatacataggccctaatataatttagcttaattgcaattttttgtcactagtacaatatgcaattttgatgatctatttttaaaatttttgcgatattggtctcattttttaaaatattgtgatcttaatctatctgttaatttgtcacccatcactcaatggagatgttgacatgttcatgtgtttggtatggtgtcaactccatgtgtaccactcatgtcagtatcttatcgacatgtgaactccatgtgcaattgctatgtcagcatcttcatcaagttttgaatgaccagttaacagatcaacaaaaaacatgtaatttttataataggggaccaaaattttgaaattaaaaatggggggattaattaagcatgcatattgcctatagggtaacagttttgaaaatgtgcctttttttttttaatttttaaaattggttatttgtttccaccatgcagattcaatatcttgtggtctcgtggggatcaaatataaattca

SEQ ID NO: 66156 - DNA, 372 bp, Glycine max
  Clone ID: PAT_MRT3847_30753C.1
cagtctgatgctgtcaatgctgcagttgctgatgtagatggtggaaatgatgatggtgaagagaaggatgaagttgatgacgacgatgaggatgatgttcaggtgttgcctcctcctgaatcttcccaccttaagaggaagagggatgatgatgaagaggacgaggacagtgacaatgatgatgatgaagatgtggtagcattcacgaagtcacccaagaagcatcattgacgacgtgttctaatatatcatgttgttgttctgtttcaggcttccatgtgttggaagcagggaaacctcctcagtttagatagaagaacgatggttagtttttaggaatttagctctctcatgaacagaggacatattagg

SEQ ID NO: 66157 - DNA, 509 bp, Glycine max
  unsure (1)..(509): unsure at all n locations
  Clone ID: PAT_MRT3847_30754C.1
aaccanggcgaagaagagaggagaggggaggagncangagagngnggangagcnaaggacngannnggcagacnangcngcggagnnancagaggcagcngngaaagagcgaggagncnnngccanngcnnnagcggggggggcncncannggcgnaaggggaaaacncngngaagcncccganaacaagacaggggaccgggccaagnggganannngacagggcggacgagcacggcgnggcgaaaaaccaggccgacagcaagcanaagcgggcgaaagagggcccnnngnccaaggagaggggcacaggggnagagaccaaagaccacacaagggggaaggcgcaaaaggaggcaggccagaaccgggcgggagnagaggaaaggacnangcngaaacnggaagggggaggggacgggacccgcaagcagggaaagggggagagccaaaagggagacaacgagacagggggagggggaggagaaaggagcaagccccgaacgaac

SEQ ID NO: 66158 - DNA, 131 bp, Glycine max
  Clone ID: PAT_MRT3847_30755C.1
aaatagactgtgaggttcttgggaaccagaccggagaaacttaatattttgcaaacaatgtggtcaacggttggcagggtgaacagagaccaaggatctaacttctggtttgacctaacaggagattttca

SEQ ID NO: 66159 - DNA, 217 bp, Glycine max
  unsure (1)..(217): unsure at all n locations
  Clone ID: PAT_MRT3847_30756C.1
gaacgtcttgccctactacccngcgagagagtncactctcgggggcgtcnnaaacaanattttgaccttaaccgaccagggtctactgtctcaactcgtcccggcgatgcaaaatgtccaaaatgccctctgagcggtctcactcgatggcaagatcatggtctcaacggagcactcgatggccgtgtttatttttttnaacccgccatcgtccgga

SEQ ID NO: 66160 - DNA, 217 bp, Glycine max
  Clone ID: PAT_MRT3847_30757C.1
ctaaatttgtgggtttttttaatttttttggtttttccacccgtaaacgcaaggcaagcctacacaaacggccgcgggcataggccgccagggcgaaacacaaacgtgaccaaaatgggggggagcggcccccgaaccaaaacgttaagaccgcgaccaacataggcgttgcccgcctaaagcagcaccagcagaacagcacacctacaccaggggg

SEQ ID NO: 66161 - DNA, 480 bp, Glycine max
  unsure (1)..(480): unsure at all n locations
  Clone ID: PAT_MRT3847_30758C.1
tacggctgcgagaagacgacagaagggggggaattcgcattttgtaaatgatatagtcaaaactaatttacacttaccatttgctatttgctaagtacatattttctttgcttgtttaagtttttggtctagcaggaaatacagctgacatggggatagaacaagtgatttaatgttgtctttgaaaaattaatcgatgttttcccttaggaattagcagttcattcatagattctgtaaaatttggggatgtttcttaaactctagcttcttaatgtgttttttaatcattggtctaccccatttatacagtttgcagatcacagtgaccatttgtgtatgaatttctaaggtcttgtcatggagtgtaatgcanaatctctcgggcaatgggactgggagcacttattcttcttcaatacanaagcagctgaaaatccaaggttacaaccaactgattgtagcggtgaagcagatcgg

SEQ ID NO: 66162 - DNA, 546 bp, Glycine max
  Clone ID: PAT_MRT3847_30759C.1
agatcataaagcgaaatatcagtatatttctctactttttaaaaataatattaggtttaaataattatagtagtagctcagaacatggcctccacgatgaagcttgaaagctatgatttccctttttccgaatccaagttgtaggcgaagaagacatgttgaataattatggtgttatcctagcaggctaccacacacattgtgttcctaatctgcactacagagactgcgattcagactgaagtaacaactctaagatccaccaaagccactaataaaatagaaatgagtggcaaagtgggatccaagacatgttatgttcactttgcctaatagaacaaaactagtaacatgtccaccctggccacaattcaagcatagagcatttggcaactagaaggagagaattcacggaaagcacgcggtgccttcacaaccttccacgtcacactcacttgctcattattactattcacacccaccttaattttcccaatggccacgttcaaatccaaagacgccacgtagattcggtcctccaccccg

SEQ ID NO: 66163 - DNA, 328 bp, Glycine max
  Clone ID: PAT_MRT3847_3075C.1
cccacgcgtgcgtcgacacttactccacaagatgcgggctacatacgtacgggtgctcttgctgagccaacaggcctgaacgacatgcagaagaccccgcattaaataggaatgccaatgttgattatgtagcactaaggaatcttacgctttatgcacccaataggaagctgagatagaacctactcgaaatgactctaatacgaatcctgatcctgggaacatcataagctatcgcacacgggcatctatgtgtagggaaatacccaaatggagcagtacattgatcatgaggatactgcacaaagcgtgcccaaagaaacctacg

SEQ ID NO: 66164 - DNA, 457 bp, Glycine max
  Clone ID: PAT_MRT3847_30760C.1
aattcggctcgagacgacagaagggggttgtgtgagtgcgagaaacacgaagagaggttcatgggtactagtacgaggagtacgttttcagtttgcagatcacagtgaccatttgtgtatgaatttctaaggtcttgtcatggagtgtaatgcaaaatctctcgggcaatgggactgggagcacttattcttcttcaatacaaaagcagctgaaaatccaaggttacaaccaactgattgtagcagtgaagcagatcgggaaatcaacgttggaatgttgcatccatcaggtggtagtgcttgttctggctctgaactaatacatgcttcttcatcaaggagctcaaaatcagcttccaacaattcatcatcaaatggggatagcaaggcatctatattgactctggaaggttctcatgatgattccactgggaagaaagaattgtgcaatggagag

SEQ ID NO: 66165 - DNA, 2557 bp, Glycine max
  Clone ID: PAT_MRT3847_30761C.1
gataattcccccctaagacgacatcaggttgggaattcgcattttgtaaatgatatagtcaaaactaatttacacttaccacttgctatttgctaagtacatattttctttgcttgtttaagtttttggtctagcaggaaatacagctgacatggggatagaacaagtgatttaatgttgtctttgaaaaattaatcgatgttttcccttaagaattagcagttcattcatagattctgtaaaatttggggatgtttcttaaactctagcttcttaatgtgttttttaatcattggtctaccccatttatacagacgacagaagggggttgtgtgagtgcgagaaacacgaagagaggttcatgggtactagtacgaggagtacgttttcagggctcgaggataattcccctaggggcatctcagtttgcagatcacagtgaccatttgtatatgaatttctaaggtcttgtcatggagtgtaatgcaaaatctctcgggcaatgggactgggagcacttattcttcttcaatacaaaagcagctgaaaatccaaggttacaaccaactgattgtagcagtgaagcagatcgggaaatcaacgttggaatgttgtatccatcaggtggtagtgcttgttctggctctgaactaatacatgcttcttcatcaaggagctcaaaatcagcttccaacaattcatcatcaaatggggatagcagggaatctatattgactctggaaggttctcatgatgattccactgggaagaaagaattgtgcaatggagagccggttgaaacttctccagcagcagtgccctctcctgtctctggtgaaccattgctcactctaaagcttggtagacgattgtactttgaggatgtctgcaccgcaagtgattccaagaaaccatcttcctttgaggttcccattttatcagggaagaaatataaaacaagtagtcaggctgtacagcatccaagctgccaggtggaaggctgtggccttgacctctcatctgctaaagatcaccatcgcaaacaccgagtttgtgaagctcattccaaatcccctaaggtggttataactggtttggaacgccgattttgccagcaatgtagcaggttccattgctctgtcagagtttgatgacaaaaaaagaagctgtaggcaacatcattttgccacaaattctagtcgcagcaaatctcagcctgattcaatcctattaaatccatcagctttgtctacatcaccctatgatgggaggcaaatagtgaatacatttgcattttcacggactcccattgatttagcttggcaagatatgaacccccagacataagaatatttcccgaagcgtgtaaatcccagtctgtcggtaccgagtatctttgcaacactttttcatcattccaatggccatctaccatcaagagccatggtaccgacgagtactgttcaagatgttacgcgtcatcaagatactattcgtttggctgatccaaacgatacaaaggatgttaaccgttctctctctcttctgtcatcgaatatcttcatcttcatggggtgcatatgagactaagtccctttctttggaacactccactcgggcaacacactcaatcactcagcatcacttaccacttccttcctcggcagagtattggcacactgatcatcaacaacattcaagcatgtgtatctcattcacggattgcgatagcagcaatcgctttcaagactttcagctgttgagctcaccctatgaatcaccttttccttgcaaccaactggattaacaacactatgcttctacttcaacaaaatttctagggtgctgtctttcatttgcttgctttttcaaatggagattaattaaaactgcatgttgattgcagttcgaatggtgtaagacctgttctcttgaaaactcccaagacattttcattttgtaccagactgcgctcatttcaattttaactttaatttctacttaaaaaaccatgtctccaccagcaacagttttttataccttagcttcttacctatgttacgcacatctccctacttcataatactatttactcacatcccaaaacaaataaaaaatttgattttttaatataaattcattattctatttcaggcgccgcaaaactcagcctgactcaatccaattaaatccatcagctttgtcttcatctccctatggtaaaacaggatcattcccctcccttggaaaatctattgcctgtcttgctcactggttaagtttcgcagtttattattttgggaggcatattatacaaatcataatatttcccccccaattttgaatgatcaaaactggttccagcaagtgactttgttttcctttagttttgctgtcgaactgtgcttagtatttgcagcttatttcaacttatgcttggaaacgtgtaacctgtgaataaaaagaattctagtgcactaaaaaaaaaaaaaaaaaaaaaaaaatcattttatttaatgaaaagcttggtcgattttttttatttttatcggtaaat

SEQ ID NO: 66166 - DNA, 301 bp, Glycine max
  Clone ID: PAT_MRT3847_30762C.1
tggcactcaccacacaatctcaaccggtaccgttaccataaaagcaaaccctttagtgatcttccacatcttcaccataaccaactggcttcacaaacccaaatcttaagcgatccaccaccacgacaataatggctcaaggcttcaaatgttcaatgttttcaccacatgttccccatttaatgactcatcaccaatgtcattgtaacagattttcataaagcgttaagcaattgagcactccaagatgcagtacctttcaaacattgtcggaaagatgtccattgtcgcaattgccatc

SEQ ID NO: 66167 - DNA, 181 bp, Glycine max
  Clone ID: PAT_MRT3847_30763C.1
gggcaacaggggtcaaatgcctactaataattcagcactcatggcgatgagtgcagacgaggagactgtagctggatttttgatggccggagagggacatgccgacctagcgcagaagaaaaactacctgattgtggagtcaaaagacaccgtccaacaaactggggaagcattcgaagaa

SEQ ID NO: 66168 - DNA, 981 bp, Glycine max
  Clone ID: PAT_MRT3847_30764C.1
gtttgcttgagtaagctactcagtctttccttttaacacaaacataggtttagagtttttaattcatccgttctgctctctggttctgtgttggtttaatgagatttagttgttgaagtatctgctctgcatttcctgttgttttaattttgctgctatccaggctttgctatggcaagatccattgtaggcttctttttccacattatgatgcaaatacagcaaggttttattttttcaatctttgtcggggcgagtggtactggtactgttgtcggatcgaaaaccctaaattgaattcgaatacacaacatgcagcaggggggaggatctgagacggaagtaacatgggaagaccagcagaacatcaacaaattcggaaggttgaataatcgctttcacgagcttgaggatgagatcaaaatcgcaaaggaaacaaatgataatttggaggatgcaagcaacgagttgattctcacagatgaagaggtcattcggtttcaaataggagaggtttttgctcatgtgccaaaggatgaagttgagaacaggatagaacagataaaagaggtgacaagccagaaattagcaaaacttgaagaggagaaagaatctattcttgctcagatggctgaactcaagaaaattttgtatgcgaagttcaatgactcgatcaatcttgaggaggattagtaactttcttcttgttgatagatttctagttgttgttttcttgttaatatgacctaatggacatttggcatttttgagtcatattgtctcttatcatttgattttaggatgtatgttatcttgcttgaacctctttcactccttggcctctgtttctgctttctttggcttcttgtgtgaatttcattttccctttattgtgtcctgaaaggggggaaattgcctttctggtttgagaatatcaagatgtttgacttctttttaaaaaaatagaaggtgggggggaaa

SEQ ID NO: 66169 - DNA, 180 bp, Glycine max
  Clone ID: PAT_MRT3847_30765C.1
ctcggatccacacgcacaacatcatggaagatgggttagagtttcgatgttagagacgaacttgtgagtttacaaatttctttagagtcacaagaaagatgaattgtattggttctgaaattgtatttggattaattctgttagtgtttatttggattgttgaataatgaatgattgttg

SEQ ID NO: 66170 - DNA, 1018 bp, Glycine max
  Clone ID: PAT_MRT3847_30766C.1
ccacgcgtccggcaaaagctaaggctaaacaaatgcaagaaccacataagagtgcggattctattataaagaaattatgggctaagattttaggaattggtccagcattcagaactataatgtcaatgagcagggatgactgggcaaagaagtttcgtcattggtgggatgaatttaaatctaccctgcaacactactggtttggtacaaaactactttgggctgatattaggataagctccagattattgttgaaacttgccggtggaaagagtctttctagaagggagaggcagcaactcacaaggacaacagctgatattttcaggacaagatgaaagaacaggcttaacttgtaggaggcattgaaaagaaggttaaatgcaagaatagaatatgccaagtttcttcaagatactgtaaaagaaatggcaaaggagattcagaactcacaaagtggagaaatgaagaagacagcagaagatcttgatgaatttatgaacaaggtcagaacaggtgctcgagtttctaatgatgaaatcttaggatttgccaaattatttaatgatgagctcaccctggataacattagcaggcctcgcttggtaaatatgtgtaaatatatgggcatcagcccatatggaactgatgcatatttgcgttacatgctccgcaaaagatgacaggagtaagattcatttattcattttccctttctgttaactctgggtcttctctggtaattttcattttatgctttatggtgaaaattttctttgtatggtggtttagataaggatttttgcaatttcttagatttcttaaatatttgtttcaccaatgtctggatgtctgcctcctcattcacttcttggttagtcatagtgcatgtgtcaattgaagaatacatgagggtcttaccttatcttattttgagagggggctggaagtagaacattatttcatgatggtggacttttctgtcatcattgaatagaatttgggtagagctgaatcg

SEQ ID NO: 66171 - DNA, 331 bp, Glycine max
  Clone ID: PAT_MRT3847_30767C.1
tagcacctcgaaggtgttctcctgccttcacgaagctaccagagctagcaacacaaaatcactaatgggtcactctgactgatcaatccctaccgccaaatgctcgtaaactagtgcaatgacactttagccaaagcaaaaggcttctcccagcatcttaatgcagaggggtcgaagctcgctcaactactagccaccccacagtaattcatacactcgaagatctgctgaggattcaacactggctgaccttatacctgtacccattcaatcaacctaagtatatgcacaaggtacaacagctgcacccacaaatgccacaaagtattat

SEQ ID NO: 66172 - DNA, 305 bp, Glycine max
  unsure (1)..(305): unsure at all n locations
  Clone ID: PAT_MRT3847_30768C.1
acggctgcnaaaagacgacagagaagcccaccctaatttaacatcgtgtgcactctatctcatgtngcatttatacctgccattatcatacactatggcgcagacgctcacctattcgaagccccctttctgtgctatccaatcctaccttttccctgttattaacaccactagaaactaatttgcgtacctcaccactttttacatacatagttgtcctaaacaccctcactctcaccagatgttccagaagaatacacaattaacagctactctatacaagaaagctatatttgctatgatcc

SEQ ID NO: 66173 - DNA, 151 bp, Glycine max
  Clone ID: PAT_MRT3847_30769C.1
gttacatcttctaacagctcaatcttacttacacaattcttgatcatccacacggtcgggggaaccttgctatacagctgactctcatcaggcactctgctgatcgtaacattgagatttccactccataaaactgtcactatgcaaaatt

SEQ ID NO: 66174 - DNA, 561 bp, Glycine max
  unsure (1)..(561): unsure at all n locations
  Clone ID: PAT_MRT3847_3076C.1
cccttacgctaagctcggagatctcgagtggttgcaaacttctccgattttgaagatcctccatcaccaccatcgagttatgataacacatacttaaatgaagaggagttcagcaagcccccgccagaattaccacctcaactaccagtggcaataagacatgaggcttcttcatccgcaagtggtagtcgttttgtccctaggcccacgcatttggaactgaatcatctatacatccacaaaactgataggggtcaatttgtggcactacgatcaacttacaagtttcaacacaaatatattactacggaactgtacaagtccttacgcagggaaagatgatgaagcattaagatttttgtctgctattgaacttgcctcgtctaagctgcccttatgagaacacttgttaaggtcattaatttaatgtgtagaaaatcgattggaataggtaaatgaaaaattgctttccatgtaaaaaacgtctgtaaatgttaattatttctggcagtccgcagtcaatatatacaatacatttcatactagtgttntttttaaaaa

SEQ ID NO: 66175 - DNA, 330 bp, Glycine max
  Clone ID: PAT_MRT3847_30770C.1
tttttatcacaaaacaaaatcattatatgggggcaaacaacaaaaaatttttaaccctttttaccaacttacaatgtcatgtgctacaattggtcactttgcaaaaacacagcatacataaaagaccatccttattcaattaaattttcccaaaaatttttactaaaaacaccttaattcttttttccgcacctttttcattatactctaagcaatataaatttaaagtttctctgaattgctttaattttttcgatacaacttgattatacaacttgaattcaacttcctgcacttcactcaatgttatacatataaaattttttttcg

SEQ ID NO: 66176 - DNA, 279 bp, Glycine max
  Clone ID: PAT_MRT3847_30771C.1
atgcaactcatttttttggcttatccatatgcactttcctctacatttttcttccactttaatttcactagccatatcataaaaaacacaaaagcctgctttgtccatataatgttttagttgcatttttaagtcaaggcgatgcaattattgggcatggtatggtaccatttctttgaattgtatttcatttatacaaatgcctgtgtgcccttctttatcctatttacgtgatacttgtttcttactatatgaaacacctacagcacaatttttacc

SEQ ID NO: 66177 - DNA, 491 bp, Glycine max
  unsure (1)..(491): unsure at all n locations
  Clone ID: PAT_MRT3847_30772C.1
ttccacgcgtccgctttcttcgtttcagaaacatacacgccctagctagcagccccgctctcctgcactgtccgtacccatttgacgtgccgcgcgctccgttcaatctttcgtcttttggctgagctccaaagaggtcttgaagacacccttcgtcgcagaagcaactttcgtggctgagctccgaaggtgtgcccttgctgctttgcttttcggcctcagagatagagattgttcgttttggactaatcatttcattattaatcattaaatccctccctttaagggaaagttgaaaaaggacaattagaatcccaaaacctgaactttctttttcttcccttcactcacgcctcaagaaagcgtaaacctgtccccttaatttcaggttcaaacatagggttatgtaattttatttttgtacaacattctntagcttccccttttttttgttcttaaattataagaaacttagatgattntagcgtcta

SEQ ID NO: 66178 - DNA, 449 bp, Glycine max
  Clone ID: PAT_MRT3847_30773C.1
ggctcgagagccgaatctccgttttcagtttacgtggacacaatatgcaccatcatggggtcacagatcaaggctaataccggacggtcatacagagcctacaactacactggacctgcaaacgccgagaacgcgctctacttgatcggcagcgatccacgactttcgagcgcagaattcgaagcagccagtccttcggacatcttctccagtgtcggccttatcacgccggtactgtaccggacgtggcttaccgagcgtctgactgagagcctaccatagagcatcaagaagatcgcggagctcgagcaaatcaagaggtagacaacggaatgccgcccaattgtgatcgatctgctcatgtctctcaaggccaagatacagggtgcttcgccactgagagtgggctatcaattgggttacatagcgtgctcaacagcgacacaagc

SEQ ID NO: 66179 - DNA, 617 bp, Glycine max
  unsure (1)..(617): unsure at all n locations
  Clone ID: PAT_MRT3847_30774C.1
gcaattatttcttaacattaattaggcttttactttctgtacataactctcatagcttgggtaaaaacaaatataaaatacaagattctatgtataacataaaaaaaaaaaatcaatcaatcaataataaacttgattttgacgcaatttacaaaggatttctcctaacttctatagtaattacttatatgatataccctgcattttcccaacaaataatccagcatttctatacaacattgctgtacactatacgtatatatacttgtttattacttaccatcaaaagaatactccatgaaggaaggacaccaagaggaagaaaggtataacatgaacagaaaaggaagatgtagctgaggcataataatagtaataaggatagttattaggtccagaaatcactgtaggctgtcctgaacctgatgaagaagggttgttggatttcaaaggtggaggaggagcagttcctaatggaggagtttgtgaaggctttgatggtggtggtagcactagtgatggtggaggttgtgaaggctttgttggtgnnngtagcacaagtgagggtggagggtatgttaggagtggagaaggtgnnngannntatnnnnnnnnna

SEQ ID NO: 66180 - DNA, 159 bp, Glycine max
  Clone ID: PAT_MRT3847_30775C.1
atcaggcctactctttgtctatttgaccaatttcaaacccagaacacagaataaaaatggggtgtgatgtgaaccataagctgctgataagaattaaggatgacgaataagaagaagatttagagttatcattgtccaataggctgtggaatgatatca

SEQ ID NO: 66181 - DNA, 188 bp, Glycine max
  Clone ID: PAT_MRT3847_30776C.1
ccgggaaaagaaaatattatacacgtaatgaatatgaagggtttgacatgtgacactaattttgacaaatttatgttacaaaatgtggaaaaatagttaaaaatgggaatgctcatttttttttacatgatatacttggatccagaacatgcataacagtaatactcacacatcacaacaacaacaac

SEQ ID NO: 66182 - DNA, 460 bp, Glycine max
  Clone ID: PAT_MRT3847_30777C.1
ggcaaacgtcaaaactaatgatggggcattgttaagccaagaagattttcaactaaaaatatacgtggtcatatgatatgtttggtagaccaagccctaacagtacaaatttctaaccttagaacaacaggagatttaaggaacattgtactacaaatacttcaagtaaaagcctggtcaagaaataaaacaacacgcccattccgactgacacgggaagagcaggcaaagctttctgataaaaagccaaaagcatcaaggttatgccaagacccgcaatgatagcaagatagcacgcatacaccgtcatataatcatacattgccgccctgccaaccaaaacactatagaagataaaatctcccagccctaacttgattgaaccagaagaagccaatccaattccctctagcatcaagttatcaatcgacacagtatcttcccccctaccgagctggac

SEQ ID NO: 66183 - DNA, 328 bp, Glycine max
  Clone ID: PAT_MRT3847_30778C.1
attcggtgtagttcgcgcctcctccttctttggctccttcgcatagtgaagagaaagagagcaaaagcaaatcgtcttgccataatgggttgtgtaagcaaaacatgggagcggttgctggtgttgttactgctggggcatttgttttggctctttttgctggtgccttgatttggttttactctaagaagtttaagcgtgttaaaaagtttgattcacttggttcggagatcattagaatgccgaagcagtttagctacaaggagctgaattctgctaccaagtgcttcaatgcgaataggatcattggtcatggcgcgtttgggac

SEQ ID NO: 66184 - DNA, 161 bp, Glycine max
  Clone ID: PAT_MRT3847_30779C.1
ctcggcgaatggatagtcattattgctatataatttatggattttggtgtgttttttggtctttgtatgatcctgaattctcatatgaatgtttccagctaattgtctaataagttatcatatcattctaaagtcaactgcactagaagcgcttcgaccaa

SEQ ID NO: 66185 - DNA, 279 bp, Glycine max
  Clone ID: PAT_MRT3847_3077C.1
aatatccgggctcgcgcacgcgtccggatgagcggaaatcgacgccataagaaactattgctgtcacacacccatgtcagcataggcgacttggtcacaatctccagacgtcagcttcacacgcaacacaaagcctatcccaacatgatggcgtatcgaaactggctaaacgcagactgaaaatggccaaaccgaacgggttgacaccaacaccgacaaaccatcgatatctactagaccatcagaacgtcatattgaagctagatttgaacatcacac

SEQ ID NO: 66186 - DNA, 297 bp, Glycine max
  Clone ID: PAT_MRT3847_30780C.1
aaaaagagaatttctaatgaaaaccacacgcagaatgaagccactggaatgccagaaagatatccctgcagatttggagacaaatctactggcatggccaataagagttcagatgtaatactggagaataaagttgaaaatctggttgagttgcatgctaactcaatgcgatgcagtctcagtaaggtgtcaacacaagtgatatctgtcacagggttaatccataaatatttttcaagtgtcaatggaattgacaattatagcagctcttcaaactcagatgttacatctaaagct

SEQ ID NO: 66187 - DNA, 459 bp, Glycine max
  Clone ID: PAT_MRT3847_30781C.1
acggctgcgagaagacgacagaagggtacggctgcgagaagacgacagaagggggtgtcagagagaaaaaaaatagactccaaaaatcactttcaactcagagatacacaatggcaaaagcttcaatgttgtttccttgcttaatagttttatttctcataacatatgcaacaggttttgtggatgcatgtaactacccgtgcaaattcccaagtgattgtaataatttacgatgtcttcgccctgattgcaaaaagtattgcctcaatggatgttgcctttgcaattgtcgtcttattccacctagtggaaatgtttgataaagaattataataaaagaaagttgagtctttcatgattcaaattaagatgcaaaaatttccatgactttgttgtgggatttatttgtaataatagagttgaaataataacgtctttaattcttcgtcaaaaaataaa

SEQ ID NO: 66188 - DNA, 1213 bp, Glycine max
  Clone ID: PAT_MRT3847_30782C.1
ggaccggccgaattccgggtctcgtacgcgacggctattcggcttccggcaaaagaaggaatatatcatatcaagagctttgtctagtgtctaccatatttatacaaagatcatcacatatataatatatgatatatttcttcttgatacaattttgataccaaaaaattaaacatgatggctgcagatcagcaaagaattcatcctgttcatgatgttgaggcaccacacagacctttggtgcctgaaaactatgcaaaatctgataagggtattcctcagcgcacttttcctgtgatgcattcaaagccacctaagagaagaagaagctgttgctgtaggttcatgtgttggacactaagcatattgctgattttgatcattgctattgccatcacaatagggatcctataccttgtgttcagaccaaagctccccaaatactcagtggaccaactgaggataagccagttcaatgtttcagacaacaacaccctctatgccaccttcaatgtggcaatcactgcaagaaaccctaacaagaagattggaatatactatgagggtggaagccacataagtgcttggtacatggacacaaaattgtgtgaagggtccttgccaaagttctaccagggtcacaggaacaccacagtgcttgatctgcctctaactggtcaagcacctgatgcaagtggtttggtgaatagaattcaggagcagctgcaacagaccaacaatgttcctctcaatcttaaggtgaatcagcctgtgagggttaagtttggtaagctgaagctcttcaaagtcaagttcagggttaggtgcaggcttgaggtggataattttggtgctagtaatgatattagaatttctagcagtagttgtaagttcaagctcaggctgtgatgaattcactagtacatatattattatcattattgattagtataatatatatgtgccattgttatattatattactattactatttcgtttcatctttttgtggtttgtttgattgagatttttcgtaagggatggaggatcagatgtggttttttctctccatctgcacgtactttgagttacatttcatgtacttcgattctattaattcagacgctatttcttattcacaaattagcatatattattatctatttcatatgtttaattaatgacaaatattgttagttttttctgcaccca

SEQ ID NO: 66189 - DNA, 328 bp, Glycine max
  Clone ID: PAT_MRT3847_30783C.1
cttaacctgggcgggggctttgtcaggttaaaaaacttaaccaccttaaaacttttggttgagggggccggtgccaggttgaaaaaaccgttgccattgccgccaccaccgccacccccgatgcttccaacgcttccaccgcccccgggttccggcctaaaggttgccacctttggggggagggttttccatcttgggggcacctccgcaccaaagcccatgggtgctaaaatgttggccaaacaatttccaaccattccaattgttaacgattggcgtgccaggggggggcccagagccaggcacggttgaagggttaggctaaaaa

SEQ ID NO: 66190 - DNA, 563 bp, Glycine max
  Clone ID: PAT_MRT3847_30784C.1
ctttgccaaaattctaccagggtcacaggaacaccacagtgcttgatttgcctctaactggtcaagcacatgatgcaaatggcttggtgaatagaattcaggagcagctgcaacagaccaacaatgttcctctcaatcttaagtgaatcagcctgtgagggttaagcttggtaagttgaagctcttcaaagtcaagttcagggttaggtgcaagcttgaggtggataatattcttggggctagtaatgatattagaatttctagaagtagttgtaagttcaggcttaggctgtgatgaattcactagtacatatattattattgttgattagaattatatatatacatatatatatatatatatacatatatatatatatatatgccattgttatattatattactattactatttcgtttcatctttttgtggtttgtttgattgaaatttttcataaaggatggaggatcagatgtgggttttttctctctccattggcacttttgagttacagttcatgtaatttgattctagctatttattattcagcctctatttctt

SEQ ID NO: 66191 - DNA, 337 bp, Glycine max
  Clone ID: PAT_MRT3847_30785C.1
gactggagtaaaagaaggattacgagggcacatagtggttgaattgagtgatttagacaatgaggtccttgttaaacttgtgggtggtgatcttgttgaaactgttgtagctcatgatgtcattggtcgcttgatgattcaatgtgctcgacagcctggacttgcacagatttgggaagatatacttggatttgaaaattgtgaattctacatcaaaagatggccacagttggaaggcatgcaatttgaggatgtactaatcagctttcctgctgcaattccttgtggaatcaaagttgcatcatatggcggtaaaattattttgaatccagatgac

SEQ ID NO: 66192 - DNA, 259 bp, Glycine max
  Clone ID: PAT_MRT3847_30786C.1
ctcacgcttttgtttcacactcacctaatgttcttacatttgcattaaacatatttcaatcggttaagtttattatgctcatcaagctctattcaatttttcttaaatacttaactttacacctttcatgatcttcactagttataaatcacccatatacatattgtatcatttattttttcacttacatatcattaattcttcctttttctttcactatatttgctatataaataatatccaaaacaacttctttcaa

SEQ ID NO: 66193 - DNA, 1477 bp, Glycine max
  unsure (1)..(1477): unsure at all n locations
  Clone ID: PAT_MRT3847_30787C.1
tttcccacgcgtccgcccacgcgtccgcccacgcgtccgctttttgacaggattattgccaagggccactacagtgaaagggctgctgcttcaatatgtaggcaggttgttaaggttgttaacacctgccattttatgggtgtcattcatagggatctcaagccagagaatttcttgctatctagtaaggatgacaagggacttctcaaggccacggattttggcttgtcagtcttcattgaagaaggaaaggtgtatcgagatatagttggcagtgcttactatgttgctccagaagttctacgtcgtagctatgggaaggaagcagatatatggagtgcaggagttatattgtatatcttacttagtggtgtacctccattttgggcagagacggaaaagggaatatttgatgtcatattgcaaggtcatattgattttgaaagtagtccatggccaagcatatcaaacagtgctaaggaccttgttcgcaaaatgcttataaaggatccaaagaaacgcattactgctgctcaggttctagagcacccatggcttaaagaaggtggaaatgcttctgacaagccaatagacagtgcagtgctttccagaatgaagcaattcagagcaatgaataaactaaaaaaactagccctcaaggtcattgctgaaaatctttgaagaagagatccaaggcttgaaggcaatgttcacaaatatcgacactgacaatagtggtacaatcacatatgangaactgagggcaggattgcaaagacttggctcaaagcttactgaaactgaagtgcgacagcttatggatgccgctgatgtagatggaaatggcacaattgactacatagaattcatcactgctacaatgcatagacacaggttagaaagagatgagcatctttacaaggccttccaatattttgacaaagatggcagcgggtatatcacaagagatgaactggaaatagccatgaaggagtatggtatgggtgacgaggccacaatcagggaaattatatctgaagttgacacagataatgatggtagaatcaactatgaagaattttgtacaatgatgaggagtggaacccaacaacaaggcaagctattctgatgtctctagattgagtgtcctgcagccaagacggggtgcttgcttcagagaaaggcttccaagagttaatatttatcttaggcatgtaaagcttgtagtttcgatttgttttgagttacatgctccgcgtgacttgttgtcaactcttatttctctttttggtttccttttccctttgaagtttattattgagtccaaatgtaatttattaggcaccctaataataaatggacttgcctagggaaggtggttttccaagttaaataaaaaaatttaaaaaataaaaaaaaaatccggtatcctttgttaagaattggattttccctgatgaaatatttattgggtgcc

SEQ ID NO: 66194 - DNA, 322 bp, Glycine max
  unsure (1)..(322): unsure at all n locations
  Clone ID: PAT_MRT3847_30788C.1
ggaagatgtcgagagaggacgcggtggttcggcggggaacaagttccggatgtcgctgggtctgccggtggcgggcgacggtgaactgcgccgacaatacgggggcgaagaactctacatcatatcggtgaaagggtcaaanggcgttgaaccgtctccctcggttgcgttggcgacatngtgatggcaccgtgaaaacgggaaaccgtntgaggagaagttttgcactgnatgtcgcagcgagccatgngcgaagacgcgttaatgatncgagatatctgngtatgnatccaagagaatgaagtctcatatgtccatgaag

SEQ ID NO: 66195 - DNA, 494 bp, Glycine max
  Clone ID: PAT_MRT3847_30789C.1
tgccagagtgccgtgcacaaaaaaaaccaaatttggtggactggactggtggtggtgttcagtaatacgtcttgttgtgttgttggaggggctcgtcttgtcttccaaacatgtaaaatacacacacacacacacacacacaacccgttcgagaaaggacccgggtgggtattgaatacacttagtcaattgacttgtggggggtggttgtgggtctacactcactcatgtctcaaaagaacagttgctgttgcagtgaccgtctaaaagtctacaagtaggtcaggggctcaggtacagttgcagggggatgattggcttgcgcaccaatcagcgggccggtcaatttggggccctacgtcgtcgtcactttgggtcctgtgtaagtccggggtccatacattaaggtcacgactaagaagttggggcttttgaacttagggccgacgatactgttagggccggtctaaattcgtccggttagagggccaccg

SEQ ID NO: 66196 - DNA, 176 bp, Glycine max
  Clone ID: PAT_MRT3847_3078C.1
ccacccttccgtccacgcttcctaccacccgtcctcccactctttcttacggttgcaaaaagcctacagaggggggtgtgttccggattgactttttctcctgttttttttcttttttccgctggctttcacacatttgactgaactcttattctttttcctttttacatcaactc

SEQ ID NO: 66197 - DNA, 502 bp, Glycine max
  Clone ID: PAT_MRT3847_30790C.1
gggaaaaaccgatcttcagcggagatcttaactttatgcttcccaaaccaggcttggcttccaaagattccattagaaacactggtctggttttaaaagcctaaaaaggcttgctcccatggattcccaacccggggataaaggacttttgaatgacccaggggccccccctccttttaggatttggggccccccaagggaaaaccatcctatctttgggccccttaaaggtttttccctttaagatggccacgcacccctggagcttctgcctttttagcattagggtcgggatatatttttgatgatttaaccccctcaaaaacctccctgtgaaagggcgtgtgatcaccccactataccccgggggttatctttttattgtgggaaaccaagggggaaagcgcttttgtgcgctatcaaaaagggggggctgcgggggcgttttactcgcccccctttggggatctggcgtcttttttttagcttgtggggggggggg

SEQ ID NO: 66198 - DNA, 484 bp, Glycine max
  Clone ID: PAT_MRT3847_30791C.1
ttaattttaaacttgattgggtatatagattaatcttgcaggatgcactgatgcgcgcactcctaattttcaatatatctcagaaattgtttgtccaaaaagaatgtaatatattatattttggatcgtgcttttgcagtaagctctcttctgagaatttttcctgaagctgtcttaggaacattgttgatgaatgttacccttcgcaattttttgaaaggtgcaacctgcttagcaataaacttctgaatttcttcttcagtcagtgaactattgggtgagcgaacaacataggcaattggaacctcaccagcctcatcatcaggatatggcacaacaacagcctctagtatttcagggtgagaaacgagaagcccttcaagttctgctggtgcaacctggaaacctttgtacttgatcagttctttgatacggtcaaccacataaagttgtccatcttcatcaaaatatccaagatctcctg

SEQ ID NO: 66199 - DNA, 2869 bp, Glycine max
  Clone ID: PAT_MRT3847_30792C.1
caggagatcttggatattttgatgaagatggacaactttatgtggttgaccgtatcaaagaactgatcaagtacaaaggtttccaggttgcaccagcagaacttgaagggcttctcgtttctcaccctgaaatactagaggctgttgttgtgccaaatcctgatgatgaggctggtgaggttccaattgcctatgtgttcgctcacccaatagttcactgactgaagaagaaattcagaagggttcgcagcactgtaacctcacacctctccaaaatccgttcccccttgctatctattctagggttagcagcactgtaacatcaaatcacctctccccacatccgttccctctttcaaacctttttttttttcgcgaccaaactcggcgatggcaacgacgtcggtggtgccggcgaaccgggctcgcgcggcgaaccccgcggaggagatggacttcgagacgacggagggcgtcaacgacatcggaagcttcgaggagatggggatcaaggacgatctgctccgcggaatctaccagtacggcttcgagaagccctcagccattcagcagcgggccgtcacgcccatcattcagggccgtgacgtcatcgcccaggcccaatccggaacggggaaaacgtccatgattgctctcaccgtttgccaggtcgtcgatacctccgtcagagaggttcaggcattgatattgtcaccaacgagggaactggcctcacagactgagaaagttatattggctattggggatttcatcaatatacaagctcatgcatgcgttggtggtaaaagtgtgggagaagatataaggaaacttgagtatggagttcatgtggtgtctggaactcctggccgagtttgtgacatgatcaaaaggtgaatatttcgcacacgttctatgatcaagccagcgcttgattaatcgcttgaaagttttatcagagagttcaatgatcaaaattgtgatgtatatagatatcccccccccgaccttcatgtgtgctggttttatcatagcactcctcgggatttacaggagatgacaaacaaagtgatggaatatcctgtaatgatccttctaagccgcgatgaattgtcatcgtgatgcatcaaatatatttgtgtgtccgtggaaagcgaggaatggtagttttgtaccctgtgtgatcgttatgatactctcactatcactcaagctgttatattctgttacactaagcgaaagggggactggttaactgaaaaaatgcgtaacaataatttactgtctcatcaagcatggtgacatgcctcagaaagaaagagatgctattatgggagaatttcgtgtggaacaacccgtgtactaacaacaactcatgtttgggctcgtggtcttgatgtacagccggtttctctacttatcaataatgaccttccagattatcgtgagctttacattgatcgaattggccgttctgggagttttggaagaaagggtgttgcgataaattgtgtgaggagcgatgacatcgggaccacgggagagatagttccagaagacgtacctcaaatagtgagagtggatacactgttgctgatccctcatagaagtcagggggtttctggtgaggggaaatttcccaaatctagtgtgggtaaacagtggtgggtacaggttgctgattagaataaattcgtgaggctcgggacgttctgcggttgttcgaaccagaaagatacttagggtgatgagcatcagaaggagccgatatatttgaaagggatgcaggttgctcaggcagaaatggaaggggttgttgttttcctttatcaaatacatgaggctggtgatgttccatatccttatgatgagcgtggtgccgatactatcgtcaatgttgttcgctcacccaatagttcactgactgaaaaagaaattcagaagtttattgctaagcaggttgcacctttcaaaaaattgcgaagggtaacattcatcaacaatgttcctaagacagcttcaggaaaaattctcagaagagagcttactgcaaaagcacgatccaaaatataatatattacattctttttggacaaacaatttctgagatatattgaaaattaggagtgcgcgcatcagtgcatcctgcaagattaatctatatacccaatcaagtttaaaattaaaacctgatcaaagcttttgagttgtgtgtgtcagcattagatccaatctctctctctctctctctcccaattcaaccctaactagccccaaacccatcgctctctcccgattcccctccctttcataattgatgcacctcgatctcctcactcactcgccaaatttccacaattctaaaagcaaaaacatcactctctgctccaaatcttcctccgccatcactgatttgaatccagcttcgccaagaaaggtttttggagcaataaccgatcccaatcttaaaatcgatttgatttttgctttttcctttttccttcttgcgtctattacagtgatgacagtagcagcatatatagagagagagagagaacagatggaggatatatcgaaatacgcgcacagtcctgcacacgtggcagtggcgagacgcgaccacgccgcgctgcgccatctcgtgtccaccatccctcggctcgcgaaagccgggggaggtcaacaccgaagccgaatccctcgccgcggagctcaaagccgacgaggtatcaacggccggcgcgacgttcctggactggagagaaaccacttgagagaaacccctctccaccttgcggtgcgcctcaaggatgtcgtctccgccgagattctagtgaccggcggcgcctactggagcctccataacgag

SEQ ID NO: 66200 - DNA, 345 bp, Glycine max
  Clone ID: PAT_MRT3847_30793C.1
ctcacactatattaaatcccttcctcctcttaaagggccaagtactgtttcctcacctcctacaccaacattctgatgcgctgccagtgccaccggggcgctatattcgcccaactcacgattgtcctaatatcaacgtgcccaaacgacctgcattcatccatctttgttctaacataatactcctactccgacaagctatcccagtctcacaacatatcttactactgtcatctcacgaaccattttaaatgcccagtgacgaatcattaccctaggcgtaactaacttcataatatatactgaatttgtgggatatatcaccacgatacaattgtatacaac

SEQ ID NO: 66201 - DNA, 298 bp, Glycine max
  Clone ID: PAT_MRT3847_30794C.1
tttttagcttcaaattcgaactcagatttctgaacacttagaacttagttacagcaaggctttggatagagaaactaacaagcccttgataaggtgaaataaacaacaaattatggctaactaaaactatacataattagctaacagctgcaagttgctttttctgagcacaaacaacctttaaccaaacttacaagcagtcataaaatctgcaaagatattttatgacaacagaaaaatctcaaactgttaacactccccctagagatttttcttcgacacttcaaactgatcttaa

SEQ ID NO: 66202 - DNA, 1541 bp, Glycine max
  unsure (1)..(1541): unsure at all n locations
  Clone ID: PAT_MRT3847_30795C.1
tgacaatgctttttcatgcacctataaaatgcacatatttgtgtagcaatcgatagccgactcaatctgtgtgttattaccttaggagttaggtaaatatggcatactctcaacttcaaaagctggaagctaacgtgagtatcaaggcttcagctgaacagttctatgatgttttatgccacaagacacaccaaattcccaaaattttccctgaaaaagcactgtctgttgaaattctgaaaggtgcatggggcaccgagggatctatcatctcctggaattatttatacgagggaaaagtttgtgtggctaaggaggtgattgaaggcatagacaagaaaaacaaaaaaatgagcttcaaggttatagaaggagacgtgctgggacattataagagcttcaagtttataatgcaagttactccaaaggaaaaaggcagcgtagtgcaatgtgtcgtggaatatgagaaacagaaagatcacattcctgaccctcataccttattgcaatccactgttgagttgtgcaaaaaaattaatgcttaccttactcaggacaacaactaaatcaatatcaatagaaagctcatgctctatgctattgctatctaaaataaaaattgatatcttatggggcataatttccccttactttcatcaattataaattatattaaactcttaataaattgcattatctacaattaggcatgagttgggcacgtacgtactttatgtcgttgcattatttattttccgtgtgaacttgtcttcttgtaacctatgggattgaaagtttgttttgaaattaatctcctttaccttttgtgttgaatacagtaggtgattntgggtttgtcacaatcttttatgtaccttgtcacatgaaccgtgttgtttccttcattagcgactaagggaggatggaaatcagttagagtgaatccagcacctccatccgatgcccttgtaaacttccttggtactggagagagcgagttagcgagaactgatgtcataaaaagaatgtgggattacattaaaggaaacaaccttcaggatccttctgacaagaggaaaataatatgtgacgagaagctgaaagaactctttgatgtcgacaccttcactggcttcactgttacaaaactgctggctcctcattttataaagacagagcagtgagttgcttgtacattgttattcggtcaagcatgggaaggttggggaattttgtttatcaagttagttttttaaggttctttttgtgtcctgttggcaatagaaattagcaaaatgacacattttcagtaaatttttctcgaagattttttatgttatgtgaccttttattttgttttaaattatcctgttttgccacttggcagttgaaaattttgtatatttggttcctgaagctgcaagcacaatattgacttcatattctactctgctgtcatttggcaaaataggagaatactgatattgtatgaagaaaccatgtattttacttttgactcaaagttttaacatgttttatac

SEQ ID NO: 66203 - DNA, 3160 bp, Glycine max
  Clone ID: PAT_MRT3847_30796C.1
tccccacgcgtccgtacggccgcgagaagacgacagaagggggagtcacccgctgcaaatccaactcgtgcatttgaagaaagaaaaaaaaaaaagggttggtttttggttttggtttggttaactccttccacttccacccatggtctccgaatccgaactcatcggccgcctccgcgagttcctccggagctccgacctcaacaccaccaccaccgccaccgtccgccgccagttggaggccgatttcggaatcgacttatccgaccgcaaggcattcattagggaacaggtcgacttgttcctccagactgagcacaaccaatcacaacaagaagaagaagaaaaggaagaaaaacaccaaaacgaccacgtagaggaacaagaagaggatgcgcctaataatcccgaacaaagccaaccctccgattccaaggaagtaaccgatgaagacgaagaagaagaaggcgaagaggaagaagataaacctgaacaggccaaaaatgccaagaagaataaaggacgatcgaacacgttaggtgatgaggtagtaaagaaaagaggtggtggtttttgcaaattatgtagcctgtctccgcaacttcaggaattcatggaagctccagaaatggccagaactgaggttgttaagcaattatgggtctatattagggagaaaaatttgcaagacccgaacaacagacggaatataatttgcgatgagcgattgcgttccctttttaatgtcaattccatcaacatgttccaaatgaataaagcattgtcaaagcatatctggccattggaatcagatgatgttgtccaggtgaagtccacaccaaaggaaaagcagaagaagcaagagagagatgatgattcagatgaagcaaaaaaaaaggaaaaacggcagaagggaggagggaaatcaggttttcttgctcctcttcagctatctgatgcccttgtaaacttccttggtactggagaaagcgagttagcgagaactgatgtcataaaaagaatgtgggattacattaaaggaaacaaccttcaggatccttctgacaagaggaaaataatatgtgacgagaagctgaaagaactctttgatgtcgactccttcactggcttcaccgttacaaaactgctggctcctcattttataaagacagagcagtgagttgcttgtacattttattaaggttttctttttgtgtcctgttggcaaggtctggcaacaggaggaatagaaattagtaaaatgacagattttctgtaattttttcttgaagattttaatgttatgtgaccgtttattttgttttaaattatcctgttttgccacttggcagttgaaaattttgtatatttggttcctgaagctgcaagcacaatattgacttcatattctactctgccatttggcaaaataggagaatactgatattgtatgaagaaaccatgtattttacttttgaaaaaaagttttaacatgttttaaaaaaaaaatgataaaaaacggggggtgagcttacgcacggaatttaccccaaaataagggacataaggaaaaaccctaccacccaaaagataatatattatattttttatttattaatttaatatttcacttttgtataaacaaaattctgcatcactcatgcagagtcaaaatatcaatgaaaagcaacaaatccaaaccaaaacatgtttagagaaacagcttggaaggttctgaagctgccacaaattattagacaaaccatgggactctaattattcattctaaggggggcccaagtttggactgaactccaaaggtataaatgctacactgacttaccaaggcatatgaaaaatgggggaaagctcactcctcttatataactttgaacaagtgtaaggatttttggtggaaaacttaaaaagcatagaatgcttgaaaggctttaaaagggtcacaattgttgatggaaaattaggctgattcactgaatcaaagaatgcttgatacaccaaacaaagtcctgcatgagaataatacacataaccgccatttcccttgaaattcgtgaaatagttagcagtgtaaactgacaaaccaggagcatttgtgaacaacttcatcactttcccagatttcttatccagcactatagctgctagcatgacttttttggtctcaccatcaagaacatgatagttgatgtcataacctttggtttcagccaattgattgccaatcctgctaacagtttgtggtcttaaggaaatcataagctgttcctttcactgaagcaaatttgcctgttggaatgagtttgctgtccacaggtgtgattttggcaaccaaagatctgcaccacttcatttaggactgttgccactgttgtggcctcctaggtttccagtaagcatggtttgccaaattcactggtgttggcttgtttagagtttttcctttcataagtataaccaattggtttttcccagttagaatgtagctcacagttactaggagatcaccagggaatccttgttcaccatcaatactgtggtaactgaaggtaatgctgggacttggaccttctttttgataccttttcactttccaaagaacatcactaaatcctctggctccaccatgaagtgtattgtttccttcattagcaactaatttgtaatggattccatttagagtaaactgagctcctccaattctgttagcaacccggccaacagttgctccaaaatatgttgtatcattagtgtaatccttaacagaatcatatccaagaacaacatcactcaactttccattcttatcaggaatcaccagggacaaaattgaagcaccccagttggtgaccttcaaagaaaggtcacctttattgagctcaaatattccaatcttttccttcttttcaacatcaaagcaattcacaaacccagaagaagctgctatgatcagacatagcagcaatacaaagaagatcttggtcattttttccttgcactggaatttgctatgtcctaaagccagctaaataatgatttatatgaggggataggaatagagattgattgaggggaaacaataatgaaggggtaaatgggaataatgaaaggcagtgggtaagaatgtaacgcggacgcgtgg

SEQ ID NO: 66204 - DNA, 208 bp, Glycine max
  Clone ID: PAT_MRT3847_30797C.1
gtatacatccgttaatgggcgacctggggagggtgtgcttttttgaagatataaacaccgtgccccattccgctgataaactctcgttggggagcactgacgaagtacatacgggaaccagcgcagcgaggtatcgctaaccaagtcaaatagaatgtccttatggcaacatggcgaatgacctaataagatgtggcccattatgaaa

SEQ ID NO: 66205 - DNA, 533 bp, Glycine max
  Clone ID: PAT_MRT3847_30798C.1
attagttgggctatatgcatttcatatccattgtttgttaaatagcagccatggtgctatagcatagtgggtttcccgctaaacaccattttatggctatgatttttgattttctgatggcagccagttttattcaaatgagttaggggccctatgttcctttgaagttacttttaaaaacatagctactatactttattatttcactttggtgatttgcattctttttccaatctattgtcttgagcctaggctataagaggtaaaggtcaatgaaaagatcttttggcatgcaacccagttcttaaaccattatagctttagtactgtacatctgagtacactagtcatggaacctagaagaatgaaaagaaagtgaggatgatgaacactctgaagaacatggaagtgagacaaaagctaaacagttagaatagttatagttgattgggaagttaaagttgttaggttggttaggcagttgatgttgttaagagcagcgaattagcttgaatagaaggggagactagaga

SEQ ID NO: 66206 - DNA, 302 bp, Glycine max
  unsure (1)..(302): unsure at all n locations
  Clone ID: PAT_MRT3847_30799C.1
nananngaaaatgtcagtaaanaggaantnagctagnaactnggnaangcgaacaaaggnngaaaagnnacaanangnatctnatcggtgnnacaaaaatggnnanaacncgatgccatnggaaaganangntnnangncgaatggagantngntannaagaggaantccggacacganntagaantaanaggntacanntaannaaaaacacatnggnnnnagagnagtnnngaagagnggtngaannannaaatgtanaanancnaaagagaacanaatagngnagagttnaaaacagtt

SEQ ID NO: 66207 - DNA, 374 bp, Glycine max
  Clone ID: PAT_MRT3847_3079C.1
ctcattcattagtatataacctttaatcaaatggatttccataagtacactaaggaattttaacaaaattatttgatttaataatacgaagtacatgtatacaagtcatcagaaatgagactactgttttaggatgaattacattttatcccttaatagtttcactgttttttaaaataactcgtaaccttatttaaacatcacggaagatctatttgttcaagtttttcaaaaacatttttataatacgattttcagaactttttttttatatcttaatctattattttttatttttgaaaaatgcaatgcaatatattgttttttaatgcataactatataaaataaaagtaccattttatatcatctaaaa

SEQ ID NO: 66208 - DNA, 421 bp, Glycine max
  Clone ID: PAT_MRT3847_307C.1
acaaactaaatatccggtcagaaagccctgggtacctgtcaaatgaccagaacctcaatttttttggggaaccagcaaaccagaagccctaagccataaccgaaattcccgaaagggtacctttttggaaaggcttattttttaaggccattaagaccccacatttggttccggatgcctccaatggtctcactttgaacctaccagtaccaggattggccaagggggtttttttggaaaccttatggggccaggaaccgggaggcagaaccagataattcgggatttttacccggacccagtttctgggtttaaccaaacccatttctttaaccagctcctttggcttaaaatagacctggtttggctggtccaaaaccatcactctcaaacctaatataaaagtcattcactttctcca

SEQ ID NO: 66209 - DNA, 354 bp, Glycine max
  unsure (1)..(354): unsure at all n locations
  Clone ID: PAT_MRT3847_30800C.1
agcncagaancggctcgaggcgcgccgcaccccgccgcgctcgaagaaatccgtctacatcatctcactctcgcgccagctccaaacnncacggctagggacctactcgctcaccttcgggggcctcnccnnctttatcntaatcgttctcaacaacttccaagaccatctcgtcttctacatcaccccaaccgaagccctctaaaaatactccaacaatccaacaaaaactcggtttctgctaaactttcttgtcctataaggcaacgttttgtacccatcatcctctccagaagttgagttcgtcctcaccaatctcatctcctacatctttttactatacgatggatcttt

SEQ ID NO: 66210 - DNA, 145 bp, Glycine max
  Clone ID: PAT_MRT3847_30801C.1
tgggaattgcttagacttttttcagactcattcatctcaatgagttttgacgaaaatggcgtatcctcatgggagagtatcaccagcaccagtgcgatctcaaatatctccaccatcaacgtgtgtgtcgataggcacgtcctat

SEQ ID NO: 66211 - DNA, 186 bp, Glycine max
  unsure (1)..(186): unsure at all n locations
  Clone ID: PAT_MRT3847_30802C.1
ctacttcctantcnaaccgcacttctgctccgcaattntcatgggnaaggtcaagntcggaatcaacgganttggaagnnttggccgtttggtagccagngtggctctgcagagagacgatgttgaactcgttgccgttaangacccttnnatcacnaccgatnacntganngncatgtttaanta

SEQ ID NO: 66212 - DNA, 323 bp, Glycine max
  Clone ID: PAT_MRT3847_30803C.1
cccttcagcgcatctctctctacatttaaatcaaaggtgtgcctaaaagattagtactactattactaccacattccatgtctactcccatataatcactacctatactcaccatatttacaaccttccatacactcacaatctatttattcactattcacagatactagcttcatacattaacaatattatcataacttatacctagcctctagacaaacctaaacctgaccttctacaacaactcatccttacataccccttcatgcaatcttctaacaacaaaatactatcacctacatctatttctaccaccacatatt

SEQ ID NO: 66213 - DNA, 280 bp, Glycine max
  unsure (1)..(280): unsure at all n locations
  Clone ID: PAT_MRT3847_30804C.1
gatatattcgagactctgcttttgaaccacgccgttgggttgctccaggacagcgttctataacaccttgtttnttgtgattgtgggttggaaacccttnaagtgcctttagatgcaaaattccatactgaagatccaanagttgtggttgggaagttttgcgacagaggtacactgcnggatgtgttctaagactattgctgactgtgttgaagctctgataggngcatactatgtagatggtggacttttgctcactaatgtgatgaaatggcttggg

SEQ ID NO: 66214 - DNA, 236 bp, Glycine max
  unsure (1)..(236): unsure at all n locations
  Clone ID: PAT_MRT3847_30805C.1
ctcgagcgcaatggntaaagnctgnggctgggaataatttgggggaaaattggagaatgcanaaactgtnncntctngacctacaggtnttttggaacctgttgntgtncatnccaangagtaaantgggctagagaaattacaagctgaagnngnnagagcagtttctcngggntagcntnattggaccngaattcaagagagaccttggnctgnttnaaaanagggntctgaaa

SEQ ID NO: 66215 - DNA, 254 bp, Glycine max
  Clone ID: PAT_MRT3847_30806C.1
tgcgagaagacgacagaagggtcagatagtggagataggttacttgcagttgaaagtgatatgcgtaaattaggtggctgggagatgaatgaatgtgagctaagccgtttcgattcatgttcatcttctttagttatggaacttgatcaattcaagaatgaaaagggtaacggaaaaaatctgggtccttcaactgagatcatctcatggagatccctgaatggaaaggctgtgcttgccgtgggaaagtggag

SEQ ID NO: 66216 - DNA, 277 bp, Glycine max
  Clone ID: PAT_MRT3847_30807C.1
tttcattcgtgcacattaatcagccccaagagaaagatttgaaggagggaaatttttccttcgatattaaatctggctctagaagggaaaaagtttcctctacaaaagcacaatttgtaggggaaagaccttcaaatataacataattggagctggttcacattcatcagaagatttttctgaaaaggaagatcaagaaaaacccataaagagtgatgccagatttgagacaaataatagatcccttatttcaaagaggttcaggcttaaatggaaa

SEQ ID NO: 66217 - DNA, 501 bp, Glycine max
  unsure (1)..(501): unsure at all n locations
  Clone ID: PAT_MRT3847_30808C.1
aatgactatgtcatttaatgggaattttttttctgatgcacggcgttttttcccctcgaagcgtaccggtttttatcgtgctatcatttgtgccactggttggacctgccaccccaatgcaggttgttcagggtacaattgattggctcattccctctcaggaatgtgaccccaggacctattgtgtttgaaatccacaaaaaccttttgtgttaaaaggcgtattgggaaactgtcttttccccaaggcacttcccgcaggtgtttggattagcgctcctactttgggggcggggcttggagcttagaaggcagaattttctatttctgtcctttctttcactctcttcttgtcactgttccgcgttgcccgtcaaagtggtcttatttgaaaaacccttgggcgttggtgcaaatgtttgcttcgctaattacctctggggacaacaggctcactgagaaaacattnttacttgcagagatttggacatcttggttgtt

SEQ ID NO: 66218 - DNA, 314 bp, Glycine max
  Clone ID: PAT_MRT3847_30809C.1
gtgttcgagtcttagcatcatccagagtttaagaggatattaaatccgaagccacagagatcctcttccgctgcaacatatatatgctcacttctaccactcggtcgaaagaccaaacgatgcttttgcagctgattttgagggaagggtaaaacaacagaaattggtccaacctcctcgttgtatgatgagctcacctaaaagacttgtggtctatgttttagaaaatacacatgccaaaaaggtgtctaaaatgttaaaggatatagtaccagctgctaactcaaataaaagaaaccatgggtttatgccga

SEQ ID NO: 66219 - DNA, 418 bp, Glycine max
  Clone ID: PAT_MRT3847_3080C.1
gacgtggattaaccttaagcacaactgttgaaccgaaagaagtaatgcgcgcaactaaatatctaaatttacatttagtccgttcaaatacatgacaaaaccaaagatgaggaaaagagaacaggaccatatatgtcaaaaaaaaagagagaacacttgatggtttctacctaaattatcaagttctgtgagggttgttgtagcacccagtcatctaagattgaatctgaatctgaatattatgattgcccaactttattttgtttgatacaagccggtgccttaaactcctggcatttgcatgttgtaggactctcagattgggatcaccctatcactggagggctccatcggaaacaagggggtgttaccgacagcatgagtgccaccagtgtgtcatctcaatcaatggaacact

SEQ ID NO: 66220 - DNA, 240 bp, Glycine max
  Clone ID: PAT_MRT3847_30810C.1
ctgctgcacctacggggggggggtttctttgtactactcccctttccttcccagcagacaacgggagctcctggttgtgtactgaactcgatacagaggtagctacgcccgccgatgacacgatgtgcgggaccagaacgggacagccactctgcttgatggacgtgcacagctctgcgacatgaattgagagcagcaatttgctaaggaaagcctaaaggaccaaactcctagtgtgga

SEQ ID NO: 66221 - DNA, 172 bp, Glycine max
  Clone ID: PAT_MRT3847_30811C.1
gattgaagattcacatgcacgtgatatctgactggctgggattttcatggaggcagggtgatacatagatgataactcaatgggaacctcatgctattcaacgcttcaaagagttcaacagcacttgacccagcgagtattaaggaattcccttgaagtccatttggcttgg

SEQ ID NO: 66222 - DNA, 627 bp, Glycine max
  Clone ID: PAT_MRT3847_30812C.1
cggctcgagaaagatgagtgatgatcaaacggcagtgcgttttggtattcttggatgtgctaacatctccatcaagctatgcaaagccctaagcaaagcaccaaatgccaagctccatgccataggcagccgttccctcgagaaggcgacggcgttcgcggctgagcacggccttcccgaggctgttagggtttacgggagctatgagggtgtgttggaagatgaggaggtggacgccgtgtacatccctcttccgacgggtttgcacgtgacatgggcggtgagggccgcggagaggcggaagcacgtgctgctggagaagccggtggcgatgaatgtggcggagcttgaccggattcttgaggcttgcgaggctcatggggtgcagttcatggatggcaccatgtgggtgcaccaccctcgaacggctaaaatgaaggaggctttgtctgatgctcaacgttttggtcaactcaaatggatacactcatattaatcgtacaaccctggtactgaatttctcaaaaacaacattcgtattaagccagatttagatggtcttggtgccctgggtgacactggttggtattgcataagagccattttatgggctgtgaactatgaact

SEQ ID NO: 66223 - DNA, 256 bp, Glycine max
  Clone ID: PAT_MRT3847_30813C.1
attggtaattaattttcttttaggattaacaatgatgcatactgaaatttaatgttactacgtgcgcataaacaaccgtcggacatgagacctagacgattgctgttacttacgcacacgtactgacgacaatggacatagacaaggataaattaaataggctatggacgctgagagttaattggcgtcagaaatgcagctaattacgcgtgcaaatactctagatctacattcgcctgtacagggtacttatacc

SEQ ID NO: 66224 - DNA, 540 bp, Glycine max
  unsure (1)..(540): unsure at all n locations
  Clone ID: PAT_MRT3847_30814C.1
attccgttccaggaaggtttcccgtcatcactgtatgacgtcctccttctttggggggggggggggggggacatacccaatgacgggtgcaggtgaagaaatagataggagcaccaaatagggggatgagcgtaacaagggaacaaaagaaaatctactaccaaaacccacncgtaaccggtgaagaataaagagaataaacgcagaaatgcagaagatagaaatattgaaatagaggcgcacgtttggggtgatacgcaaatagttgaaacggattgtatttaaaaaaacacaacgaaaagaggtaaaattttatatcataccaaacagatagtttttgtaagacctttgcgtcaataccaaaaaggagtgaaatgggttaccgaaaaaaagaaagtaccaattaatggtagcggcgcgctggcgtgacagctttgtctggagcgggatcgtcgctagccgcaggcaggttagggtcagtaccgggaggtatggggggctgatacaaaatactgcaaaatatgtgactttgaaaagaag

SEQ ID NO: 66225 - DNA, 390 bp, Glycine max
  Clone ID: PAT_MRT3847_30815C.1
tgaagagagaaggcttaattaataagcaaatggaaaggctaaattttattaaaaatggagtgagtagattgcctccaggttttcgtttccagccaacagatgaagagcttgtgtttcagtacttgaaatgtaagatattctcgtgccagttgccagcttcaatcattcctgagattaatgtcagcaaaaatgatccttgggatttgccaggaaattgtgatgagcaagagaggtactttttcagctccaaggaagccaagtatcgaaacggcaatcgtatgaaccgaacaactaactctggctattggaaggcaacaggatcagacaaaaaaatttcatcatcaataagtaatattggttttgcggggcttagaaaaactctaatattta

SEQ ID NO: 66226 - DNA, 386 bp, Glycine max
  Clone ID: PAT_MRT3847_30816C.1
atagctaataagcataccaatcatcggacactgtaattagtcctgaattcacattggtggcctatacttaggcactaaaggcattaaaaacgctactaagcctgaaacgcatgatatttgactttaatcaacactctacatcctgctgccctcagcatcagtcctcgtgctcctccagtgggggcatgtcagtatcatcttcacctgcattcactggaacgctgagctcaagcttgaacattctggggatcccgttcacaaaagcgatgggctaccataggctgataccagaactgatactagcagtatctatctgtaccggtgcagggatcttcacgggattggcatacacggctgcatgagcgctcttactgagctccttcatg

SEQ ID NO: 66227 - DNA, 403 bp, Glycine max
  Clone ID: PAT_MRT3847_30817C.1
attctttctatatgctcaacctttttttgtattatctcgtcctggatggttccatttcaaaaatttgttccataatgccataaatttcttggcatgttcattacttaccagcgttatctatgtttttctgtactctgtacattaatcaccatgaacgaaatttgaggttaccatgaaaaaaaaaaaaaaaaaaaaaaaaaaaaaaaaaaaaaaaaagaaaaaacctaaaaaataaaaacccgatccgggaagctttaaaaaaaaaaccttaaaccttcctggagcgccgcctgtttcaaattacgagccttccgttccctggcgggaactggttaactttttaaaagggccccaaaaaaaaaccccgggcccaaaatttaaaaacgcgggggcgggaaaaacc

SEQ ID NO: 66228 - DNA, 155 bp, Glycine max
  Clone ID: PAT_MRT3847_30818C.1
cacgcgcacgcagcacggaactcggcccgagcgcaacgaacaacagacgggcctgcgttaccgaccaagaccagcccaccaggcagggcagggcacacacgagagccaacggacagcagacaacccgacaacgggccgagacaccggaacccacc

SEQ ID NO: 66229 - DNA, 268 bp, Glycine max
  Clone ID: PAT_MRT3847_30819C.1
aactgttatgtaaagaggagagcacctctgagtctggggatggggctgagagcagaagggagcaaggggaacacctcctgtcctgcccgcctgccctcctttttcagcagctcggggttggttgttagacaagtgcctcctggtgcccatggcatcctgttgccccactctgtgagctgataccccaggctgggaactcctggctctgcactttcaaccttgctaatatccacatagaagctaggactaagcccagaggttcctcttt

SEQ ID NO: 66230 - DNA, 1916 bp, Glycine max
  Clone ID: PAT_MRT3847_3081C.1
cttcagtcaatgtctctgtatccatatttcaggttggtaaaaacgctgcaataatattctattttcaaagggaaacccaaaaactgaagcgcgaggaagctaaaagtagcaacgagggatgagagaacaagaggattggaggattacgacagcgctgttaacgttgttgttggtgtttgtttcttcttttccggcgttgagctacggagttgttcctcctcgtactctgctcaataagctgtctcagggcagttatctcaccactcaggagcaatggttcaatcaaaccctcgatcacttctctccctatgatcaccatcaattccgtcaacgttacttcgagtttctagactatttccggattcctgatggaccaattttcttggtaatcggtggtgaaggtccatgtaatgggataacaaatgactatattggtgtactggcaaagaagtttggagcagctatggttactcttgaacatcgctactatggaaagagttccccatttaattctttggagacagaaaatttgaaatatctttcatccaagcaggcactctttgatttggctgtttttcgtcagtattatcaggattccttaaatgcaaagcttaatagaacaaaaactgaaaacccctggttcgtttttggtggctcatatgctggagcactcagtgcatggttccgtctcaagtttccccatttaacatgtggaagtctggcaagttctgcagttgttcttgctgtttataacttcacagaatatgatcaacagattggtgagtcagcaggtgctgaatgtaaagcagtattacaagaaactactcaactcattgagcacaaacttgcaaccaatggaaaggaactaaaggcatcttttaatgcagatgatctcgaaaaagatggagactttatgtatttaattgctgatgctgctgctgtagcatttcaatatggtaatcctgataaagtatgcaagcctatggttgaagcaaagaatgctggagaggacttggtggatgcttatgccaaatacgtcaaagagtactacattggaacctttggtgttaatgtgcagacttatgaccaggagtacttgaaaaaaactgctatcaatgaagacagttctactcgattatggtggtttcaagtttgcactgaagttgcattctttcaggtggctccatcaaatgatagtatacgctcctcagaaattgatgcaaaataccatatggacctttgcaaaaatatctttggagagggcatctttcctgatgttgatgcaactaatttatactacggaggcacaaaaattgctggttcgaaaatagtatttgcaaatggctcacaggatccttggcgtcatgcgtccaaacaaacttcatctcctgatctgccttcctacaccatcacatgtagcaattgtgcccattgtactgattttcgaggatgtcctcaatctcctttggtccttgaaggtaatgagaagaactgctcctcacctgatgcagttcacaaagtaaggcaacagattacagaacatatggacttgtggctatctgagtgccaagaaggcagcagttatatatgatcactagtatgttaacccacgcactgaaatgaataaagtaataaattagtatacactaatttcatccttcatgatcattatatatttaaaaatagatatggaaacatgtgccactttatttatttggggattgttgatggcgagggtggttcgtaaattatagaaacttggcaaaatcgactagtacagaaggtcatgctatagtttatgaaaaagtttcaataaaaaaaaatcattttaatagtgtactatacccccgcatgccttttggtattccttcccttcataagctaattatgcccccgcaaaaaaaaaaaaaaaaaaa

SEQ ID NO: 66231 - DNA, 508 bp, Glycine max
  Clone ID: PAT_MRT3847_30820C.1
caaacaaatcaaaagaaaaaaccccccaaaggcacacattttttcaaacaaaaaaaacccaccaccaccaaaaaaaaaaaaaaccaaggcaaaaaaaaggaaaaaaatccaaccagtaaggcccatggaaggggaaaaagtcccaagtagggcaaaaaagggggccccctttccccattccaaaaaaacattaaacccgccctggaattggccctttccttaaaatcaaaccccaaaggcgaaacaaagaaagggccctttttttggttgggaaaaatctggcaacccaggaaagttctaaggaaactggcaacacccaaatcccagggggaaggctctggaaaagttggccccaaaaaaaccaaaccttttttggaaataaaatccctgggggccctggcccccctaagggaaatcttaaaggaccccaccttgggaaaaaaaatggaaacctgcaaagggaaaaggggaacctgccaaaaaaaaagggcccctctccttcctcctt

SEQ ID NO: 66232 - DNA, 393 bp, Glycine max
  Clone ID: PAT_MRT3847_30821C.1
caagtattttggcttttatactcttgccattgctcggtatctcaccctgtctcactagctcgcatcctctcatagtctctttgcgccctctctcgctcgtgtcgccgacgaaggtgtccaacgccgctgttgaaggtgatcactgccgccgtcgaaggtgtccagggcagccgttgaagcttccttccggagaagaaggttattggttacatatgggtgacgattctcgcaccattgagaacacgagggaacacgacgagaccgtttgcaagcccgacgatgatgaggaaccaggctataacgcttcaggttttgctgccgcctctacaccaggagaagcgaagcttggtgtcgtgtcgccattgatcgaaggcatgccgctttcggtgttgg

SEQ ID NO: 66233 - DNA, 554 bp, Glycine max
  Clone ID: PAT_MRT3847_30822C.1
gtacaaaattccaatatcatattataagttcacaaggcaaaggatttgcacatttctggaaatgagggggaaaaaatcatttacatgtcataagcatggagttgacgacatgcaataaaagacggatacttgagagatcaactccagtcattgtaggcaagctacgttgatgattcagtatctgatagacttgctcaaagatggatcgcgtgtgcatcgcaatcgttgggtctgacgggtttatggcagcagccacatcagtcaaccacacaatctttcgcggtgtatcattgttaatatcacaagccaattgctgaagaagtgaaagcagtacaccttggcttaaaggaagaggaaccattgacaaaagtccgtgtaaattaacctgcttagcagaaatggagtgattccgttaatacttggtggtcaataattatttgaataagatgagaaaaatctaaacacacaccagtaagaatttcaattaatgcttataaaagcaacataatgttataaattaagttaatgctccttcaactcaaggcgacgcgtgg

SEQ ID NO: 66234 - DNA, 444 bp, Glycine max
  Clone ID: PAT_MRT3847_30823C.1
cgtccgctcggaattcggctcgagcggcgaatcgtatacggagagccttaccgatttctagactacttgaagttacaacggaaagcatgatgactgcttgacgaaagcaccgaaccctatgggatagtgttactttatcaacacatgagatcctaaacgtcctgcgtctctctatgtcgcatcaccgcgatacagcaattaaattgtcataaatacctatcatctactgaatcagatgaagggagtgactgcttctattattttattcttacacacacccatttactcattacctgatggctgagcaatcttgcaactgcatatacaattccactgtcaaggacatgagtgataatgaagagagcctgaacgatctcagcggtaaaggtctactgattgtgaatgtcgcctctcaatgtgggtcgacacacacctattacaaag

SEQ ID NO: 66235 - DNA, 1074 bp, Glycine max
  Clone ID: PAT_MRT3847_30824C.1
ggctcgagaaaaattctcaaccagcaggcccatcttcctcatttccaagtgcgtgcaattcaactgattcattcaatgaaccaattggaaattctagcctcccatctgctgaaaatgctttccctcaaattctggcaatgcaagaatcgctcaatcagttattgacaatgcaaaaagagatgcagaagcaaatgacaatgatggttgctgttccagtgacaaaagaaggtagaaggcttgaggctgccctagggagaaacatggaaaaagctgtcaagtccaacagtgatgctttgtgggctcgaattcaggaggagaatgcaaaaagtgaaaagttgttacgagaccgtatccagcaagttacaggtttgattagtaactttatgaataaggatctaccagtgatactggagaaaacagtaaagaaggaaatggcttcagttgggcaagcagtagtacgtgcaatgtctcctgctgtggagaaaataatatcttcttctattgtggagtccttccagagaggagtgggtgataaggcagtgaaccaacttgatagatcagttaattcaaaacttgaagctactgtagctaggcaaatccaagcgcaatttcagacaactggcaaacaggtgcttcaggaggcactcaaatccagttttgaaacatcagtggttcctgcatttgagatgtcgtgtaaagccatgtttgagcaagtggacgctacatttcagaaaggcatggttgaacattcaactgctgtgcagcaacgccttgaatctgcacccacttcgttggcaatgacactaagggattctattaattcagcatcatcaattactcaaaccttgagtagagaagtgcttgagggccagagaaagctagtgacgctcgcagctacaagaacaaactctggcacattaaatactctgcctgtccagctaaacaatggtcctttacttcatgaaaaggtcgaggtgcctctagatcccacacaagagctagctatgtttgatttctgaacggaaatatgaggaggctttcattggagctctacataagagtgatgtatccatt

SEQ ID NO: 66236 - DNA, 2042 bp, Glycine max
  unsure (1)..(2042): unsure at all n locations
  Clone ID: PAT_MRT3847_30825C.1
cggattcccgggtcgacccacgcgtccgctttcccctttgttaggaacaacaccacgccaccacctttgtttacgaactcgtcagacttgatgactcatcacaacgtcaccaccaccgcctaacgacgtagagcaccttctctctcctcaattggccattgcttaagttgacttgctgcgaaggttgctttgatcatttgaagcgcctgagggttttgttcttggaatccgaaaatggccgcagttcggaggcgggtgtggcagttatcttcaattccaggtttcggggcttcgaaattggaagtgtcgtcgtcgttccaaagagcaattctcgatccatttcctgtttcggggaccagacacttttcccaagtggtgaaatccaacggcaaacactcgttccaaagagcaattcttgattcatttcctgtttcggggaccagacacttttcccaagtggtgaaatccaacggcaaacacctgttcctcgttgacaccttggcccttgttaggagactggaaggcgaaggagtgccctcaaagcaagccgaggcgataaccgctgccataactgaggttttgaatgacagtctcgaaaatgtgtctcagtcgttggtatcaaatggtgagatgcagaaaaatgaaatgatgcaagaatccaacctgtctaagtttaaagcggaggtgcagagctcacagggacaccatttttctctcttacaacatgagactgaaaagctttagatgatatagagaagatgcgtagtgagctgaagcatgagatagacaaagtcactgctgggcagcgattagatttgaaccttgaaagggggtaagagttaagaattaatatgctgattgtcaatgattatagaacttttgttagactgaaaatccctctttttatctgttaatgctgatgagtcactacaaatgcaggagaataagggaggaattgtctaatcagaatgctgaaactaacaacctgacaaacaaacttgatagagtaagcaattatggatctgtttgggtaagctcatccaaaagcacttctaggaaaagaaaacaagaaaaaaaaattaaatgagtttcttcgtaagctcataagctaatttgtagaattctctatgttttagagactttatatgagagaacttctacaaattagcttatgtacaaactcatttcattttttacttattatttttttcccttgaagtgcttttggataagtttataaaacaagtcttatgtgacatttagaagttatttcatcccatggaaacttggctatttgcattntaaaccccctttgctataattcatatttcaggaaatccattctttaagagcacaactggaagcagccaaatatgatgtcataaaatactgcataggaacacttgtttcgatctctgctgttggtcttgctgttttacgcatattgatgtaaatggactgtattccaattaacatccacaaagaggaggtggaaaagaataagggtaactccgtagctgcattgaagatttatcttctgtcagagaaacaagtgcaactttttattttggtccataccagtggagctgaaaggaactagctccaatcaggcatgaattgggcctattttttaagccccattctatattcttttgttaatttatttgccatgccctttgggatatttgtgcaatttgtgcgtggctgtatggtatgaatacaatacaagcaccttggattataatgcctcgacccttctaccaaagtggaaggatcaaaatgcttattggctccaagtctatgcgaattaggttcctttattcgcttcaaattcacgatgttgtacaatcgatttataggcatagtaatacataatattataaccaatgaagaataaagagaatatattctcatatattggttaattgctcatacctgtccatagaattgactgtaaccagggtttttaaaactactgaaccgatcaaaatattaaaggttcatgacaacctctagcctgtgtcctgtgtccctttaaatgt

SEQ ID NO: 66237 - DNA, 480 bp, Glycine max
  Clone ID: PAT_MRT3847_30826C.1
aaggaaatggcttcagttgggcaagcagtagtacgtgctatgtctcctgctgtggagaaaataatatcttcttggattgtggagtctttgcagggggatacactttttttttatctaatagaaactagaatgaacttaataaattgtcttgctgggatctaattggtactttttgccatagagaggagtgggtgataaggcagtgaaccaacttgataaatcagttaattcaaaacttgaagctactgtagctaggcaaatccaagcacaatttcagacaactggcaagcaggtgcttcaggagacactcaaatccagttttgaaacatcattggttcctgcatttgagatgtcatgtaaagccatgtttgagcaagtggatgctacatttcagaaaggcatggttgaacatttaactgctgttcaacaacgcctttgatctgcacccacttcgttggcaatgacattaaggggattcca

SEQ ID NO: 66238 - DNA, 560 bp, Glycine max
  Clone ID: PAT_MRT3847_30827C.1
ggctcgagccatcattcctttttgtttacgctgaaacaaaaacacaaacttctgcgctctcttcgtgcggatataataataaatcgtcggttgtcgttgtttgttcgatttgtagttgacttgctgcgaaggttgctttgatcattcgaagcgcctgaaaatcgtcaattgggttttgttcttggaatccgaaaatggccgcagttcggaggcgggtgtggcagttatcttcaattccaggtttcggggcttcgaaattggaagtgtcgtcgtcattccaaagagcaattctcgatccatttcctgtttcggggaccagacacttttcccgtgaaatccaacgaacactcgttccaaagagcaattcttgattcattttctgtttcggggaccagacacttttcccaagtggtgaaatccaacggcaaacacctgttcctcgtagacaccttggaccttgttaggagactggaaggggaaggagtgccctccaagcaagccccaggcaataaccgctgccataactgaagttttgaatgacagtctcgaaaatgtgtctc

SEQ ID NO: 66239 - DNA, 2561 bp, Glycine max
  Clone ID: PAT_MRT3847_30828C.1
ttcccggggcgacccacgccgtgcctggaggtgaaggaggattaacttaatttataacattatgtggcttttataagcgttaattgagattcttactggggtgtgtgtagatttttctcatcttattcaaataattattgagcaccaagtgttaacggggtcactccatttctgggagggttacagttccacacctgcagttgagcccaaggttatctaggaaactctctgatatcagaagtccacaatccaacttgagtgatcatgttggggaccatcccgttaatgattattcaatagacagacaaatggatacaattcacaggaacttgtctgacccattgaatagtgattcaaagaatgatgagaagaaaatgaagcaggatgacatttctagtgtacttaatccttctgtcttgtttaagcaaccaactcatctaattacaccatctgagatcaccaaagctggttcctcctctgagactaatataattgataggaaaaatgagggagaagcaaagatccaggatgttgttgatgtaggtaatgctgaagtggaagtgaaagtggtgggtgagacaagatctaatcaaagtgatgaatttggtgggcaagggtctcaacaaccttcagttgctgatagtaaagaaaaattattttgctctcaggcttcagatcttggtattgagatggcccgggaatgctgttcgatatctgaggatacataccttatggaggaacctgggcaacttgattcaacaacaggaggggactcactggctcaaccgcttgatgccagtgaggatggactccaagactttgcaaaagatgcccatgaaaaggtttctgactcatctacatctgtggcagtgccaccatctcctgcacctaatgcaaaagggaaaaggcagaagggtaaaaattctcaaccagcaggcccatcttcctcatttccaagtgcgtgcaattcaactgattcattcaatgaaccaattggaaattctagcctcccatctgctgaagaagctttccgcttgattctgggaatgagcgagtgacgctctcagctattggcactaactcaggagcattaaatactctgtgacaatagctgtacaatggtcctgtacttcatgaaaaggtcgaggggcctctacatcccgcacaagagctagccatccttgatttctgaccgtgatgctttgtgggctcgaattggggaggagaatagaagtgatgtataaattgtatcttggttatgtactcaggttgattgacacggacttttgtcaataaggatctaccagtgatactggagaaaaccagtaaagaaggaaatggcttcagttgggcaagcagtagtacgtgctatgtctcctgctgtggagaaaataatatcttcttctattgtggagtctttccagagaggagtgggtgataaggcagtgaccatccttgataaagtctatcagatactacttgaaccacgtagcttgcctacaatgactgcagcttttctctctactatccgtcttttattgcatgtcataaactccatgcttatgacatgtaaataattttttttcatctcgttttccagaaatgtgcaaactcttcgccttgtgaacttataacatgatattggaattgaacattcaactcagtgtgttccgcgccttcatgttacacccgattctgtggcattcggcttgagggattctattaattcagcatcatcaattactcaaaccttgagtagagaagtgcttgagggccacagaaagctagtgacgctcgcagctacaagaacaaactcaggcacattaaatactctgcctgtccagctgaacaatggtcctttacttcatgaaaaggtcgaggtgcctctggatcccacacaagagctggcaaggttgatttctgaacggaaatatgaggaggctttcattggagctctacatagaagtgatgtatccattgtatcttggttatgtactcaggttaatttacacggacttttgtcaatggttcctcttcctttaagccaaggtgtactgctttcacttcttcagcaattggcttgtgatattaacaatgatacaccgcgaaagattgtgtggttgacagatgtggctgctgccataaacccgtcagacctgacgattgcaatgcacacacgatccatctttgagcaagtctatcagatactgaatcatcaacgtagcttgcctacaatgactggagctgatctctctagtatccgtcttttattgcatgtcataaactccatgcttatgacatgtaaataattttttttcatctcgttttccagaaatgtgcaaacccttcgccttgtgaacttataatatgatattggaattttgtacaaagctcagtgagtttcgttgtaacttgtaaggatggaaatcgagtagtcagtgttgacaggtagttcatctttgaaaatattctgcagcaacaaaattagttttgactgaatttaaatgctccactccatacggaagcaataatttcaaaatgtgatttataattgacctatc

SEQ ID NO: 66240 - DNA, 264 bp, Glycine max
  Clone ID: PAT_MRT3847_30829C.1
tgttcaatctcgagcctgtggacatattatgcgcccgaatcggacatccgagtgaatagagattactatttgtatttcctgagagtttctgatgttgtattttgagcgaatcgatatatgataaagctaggatcggccattcacgtggataggtatgaccataacaatgtctcatgaggttccaaagttcaccttggcgcatatctgattattataatgccatatcgtgcataacacatggaggatgtatccgcttgaaattct

SEQ ID NO: 66241 - DNA, 223 bp, Glycine max
  Clone ID: PAT_MRT3847_3082C.1
gaacctagagaccttggatatcagaaacacgttggttcatgagttaccaagtgaaataaacatgctcaaaaagttaagatatcttcttgctttccatcgaaactatgaagcagattattctcttttgggatctacaactggtgtgctaatgaaaaaaggtattcaaaatttgacttccttacaaaacctttgttatgtggaggcagatcatgggggcatagat

SEQ ID NO: 66242 - DNA, 440 bp, Glycine max
  Clone ID: PAT_MRT3847_30830C.1
taggaacacaccacgccacctttgtttacgaactcgtcgacttgatgactcatcacaacgccaccaccaccgcctaacgacctagagcaccttctctctcctctaattggccattgcttaagttgacttgctgcgaaggttgctttgatcatttgaagcgcctgaaaatcgttgtgcgaattttgagggttctgttcttgtaatccgaaaatggccgcgattcggaggcgggtgtggcagttatcttcaatcgcaggtttcggggcttcgagatcggaagtgtcgtcgtcattgtcgtcgtcccaaagagcaattttcgatccattttctgtttcggggaccagacacttttcccaagtggtgaaatccaaccgcaagcacttgttcctcgttgacaccttggcccttgttaggagactggaagggggaggagtgccctc

SEQ ID NO: 66243 - DNA, 487 bp, Glycine max
  Clone ID: PAT_MRT3847_30831C.1
cccctagcgataattctaagtcctgtaataaaattccacagccaattagcctaaattgtagcctcaaaacatgctacaaattctgcttccatggtagatgcaacaacaactgatgcatatgaaattggttccatttgttttcgctccaaatcatttttaggacattgtgcaagactaaatttttttcctttctaaattggaataggtaatgctgagcacttttccatcctgaatttctctagtactttattgatatattctttttgagacaaacctaacaatccttgtgatctattttagaatatttctatccctatcacatagcttgtctcacccatatctttcatttcaaagttgctaaagagaaacttcttagtctcatgaaaaagaccaaaatcattagttgcaagcaagatattcatcaacatacaaatttagaaaaataaccttacttacaatgaccttcaaatatatatgccattcaaca

SEQ ID NO: 66244 - DNA, 345 bp, Glycine max
  Clone ID: PAT_MRT3847_30832C.1
ctccaaccaattacaatctttctcaattctctatagacataaaaggtggaggaaatagagaggggatatctgtagacaggatcacacacatacaaaaaacttcatttagatgctttgaaaagagttgccacttgggaataacgcttatgtattaggttaacattgtgatgtctggaaatgcatctgtcacaacagtagatcgggcctcatagcaacaagacgtttttaacaaaccagcatctttccagaacgtttcgtcgcatgtaattgttctatatctgttccacttccctagtgaatagatctttccaatagatgtctcgtggacctaataattgtttcgaa

SEQ ID NO: 66245 - DNA, 264 bp, Glycine max
  Clone ID: PAT_MRT3847_30833C.1
ctttcctcccgccaacatgaaagaagacagaggacgttgatgactagacagccgctaacagagactgaagctctattttacatcgataagacattcataacctgaactagaacaaagggcacaagggaaagatgggcaggccaccatgttgggattaaggggtgaagaatggacctcggactcctgaagaagacatcattccggtgtcttacattcaagaacattggcctgccaatcggaaagctgcaactgccaacactgtgt

SEQ ID NO: 66246 - DNA, 367 bp, Glycine max
  Clone ID: PAT_MRT3847_30834C.1
atacatggacataaaccgcaaaatatacatgtactatgctatcaaaaatctaagctgatggaaatgctgcataggcatcttgggctaatcaatcaaactggctggactgcggcactgaattgggcaccagcatacacagctactaaaccaattacctactaacttctcaggagctgcatggacttggcaagcctttcagatcggctgggaactccagtcacggtccaaccagctgcatattcaactggacggcctaccttgagcgcgtcctacgagatagcactactggggatagccatgacaccaaagccagcttggggaaacattctcacagctccgatactgtgagtcacgctaccaatttgaa

SEQ ID NO: 66247 - DNA, 261 bp, Glycine max
  Clone ID: PAT_MRT3847_30835C.1
gtgatctctaactcactgttgagctagtcatacatcttcaagtgattgacgcattgttctatactcatttaattacattcgatgtacgtaatcgtgatggatatgccccgtttgttcaataaacttcaaccaacatttccggccgcacgagacgattcaagcttacgtccgcgtgcatgcgatgtcatacctcttcaatagcgtcaccctccctcatttccatggctcgtctttttacaccatctcgactgggaaaatcct

SEQ ID NO: 66248 - DNA, 325 bp, Glycine max
  Clone ID: PAT_MRT3847_30836C.1
tcatccaaaaatttttttttggaaaggggacaaagggggatgggaatccctgaccctacaaattgtggccctcacatcctttcaaagacaattgctttacatggggaaaggtctcccaaataaaaaaaaatacatatttgttcccggtcatgttgggccccttttaggggggtacttttttataagaaaaagaggggtttggattacgaaccctcttactaacgctaactttttttattgagagagacaaaacttttttggttccaacctaccccccaatacccccaaagaaacaaaattttataatagacgttttttttttttt

SEQ ID NO: 66249 - DNA, 1319 bp, Glycine max
  Clone ID: PAT_MRT3847_30837C.1
tttggaaatttttctggaattttttttttcctggaaatggagctaaacctaattttttttttggacccaaagctggaaggccccaggaattaggaccaggaccaaaagacacaaagtgtgaaatacacaagcaacaagcacaagaatgtgacaagaacaagaacgcaaataacaaaacacaagacgcaaacaagaacgaaacaagatgtaaacaagaacacaaataacagaataaggacaaaaacacaaacctgaacagaatacaaagaaaaagatttggataggataaaacctgtatcaagagccgaagctctgatactagatgatgtgaaccttacggggtggatcgttttatacaggctacggagatttggatgacgccacttccggtgaaggaagataagtcagggtagacgccacttcctgtgaaggaagataagtcagggtagacaccacaaggattaccttgataagtctgagattggttcaacaaggaacccagagagaaactctcaccaaattttatcaaatgccaaaagtctcttttattgaaaacaaaaaccaatacttatagtgtatcttaacaaaaagataaaaatagacatgggccttctaaacagtttgggccaaaattacaataaataaaaattataactaaaaaacaatttagtatgggccttcaaattaatctgggccttcagcaacaattgtcttggtagtgtctctgcctctgggccttcatccttctccacttgggccttcatctttctccactcgggggctttgtccttctccacttgggcctttagcctgtatttggccagtttcaagattctcatcagttcaagttgatgaagaaaaggttaaaggctatccaagagtggcctacacctaaaagtgtgaccgaggtgagaagttttcatggcctagcaagtttttatagacgatttgtgaaggattttagtaccttggcagcacctttgaatgaggtaattaagaaaaatgttgttttcaaatgggggagaaacaagaagaagctttcaatgctcctaagcaaaatttaacctttgcccccatacttgctttgccaaatttttcaaaatcttttgaaattgaatgtgatgcttcaaatgttgggattggggctgtattgttacaagaaggtcatccaattgcttattttagtgaaaaattaagtggtcctacccttaactattctacttatgataaggagttgtatgccttagttagagcgttgaaaacatggcaacactatctttatcccaaggagttcccttctgtcgtcttctcgcagccgt

SEQ ID NO: 66250 - DNA, 474 bp, Glycine max
  unsure (1)..(474): unsure at all n locations
  Clone ID: PAT_MRT3847_30838C.1
gcagctagcacatcaaacaagtggcgacagacaaagatttgtgagggtgatccgcgctgagaagagatggctaagatcgccgcggcggcggcggcggcgctgtgcttcgcggccctggtggccgtggccgtctgccaaggcgaggtcgagcggcagaggctcagggacctgcagtgctggcaggaggtccaggagagcccgctcgacgcgtgccgccaggtcctcgaccggcagctaaccggcggcggcggcggcggcggcgttggcccgttccggtggggcaccgggctccggatgcggtgctgccagcagctccaggacgtgagccgcgagtgccgctgcgccgccatccggagcatggtcaggggatacgaggaggccatgccgccgctggagaaaggctggtgcccggggggggcagancccatcctcaacattcctgcatatatacaatggcctcttctacagccaaaa

SEQ ID NO: 66251 - DNA, 1650 bp, Glycine max
  Clone ID: PAT_MRT3847_30839C.1
attttcagacatagggatcttggatggagttttgatccagaaaagcattcagagtatcaatttgaatatgtggaagttctatctgattttgataaaaatgttggcgttaaagttgcttatcttagcaaactaaaagggtttgttagtctctttcagcgaactgtgctaaacagaattagcttcttttgtattttgcctaatgagctatataagttctctcatcacattccttcatataagatgacaggtgctgaaaggcaagatgttccaagaggatcttttgaacttgatcctgctggtctgcctaatagtctttttgaagtcggtgatcctggtgttgtgaagatggatggtgtcaattgttcgcaccacgaatactcgaagtgtaaagttgaagaggcaatgtctaatgatagtattcacaaagcaaagttgcgagagagtattggttctgaaagagtagcacaaatcctcagaagatcaccaaggtcaagtaaaaaaagtatggacaatggtcaagcaagcactagtcaatatatagtcagaaaggatgacataaacattggccacagggatgacagtccaccagagggaaacactgctgcatttcagactattaagaggaaggtcaagacacctcagaaacatgagaaaaataattatgaaggagaggcattgaaagcccgaaagtcacctagagatttaagcaagaaaaatgctcaaggagatgcaggtgaatggacagcaggcaagaagactgataaccattcaagcaacagcaaaaatgtgaaggtcagcaatattcctcagtcagtgggagcatcatgttatggctttaagaaggaaaaatctgaagagatgtttcagtgtggtcagatatgggcaatatatggtgatagggatcatatgcctgatacttatgctcaaattaggatgattgaatgcactcctaattttagattgcaggtgtacatgcttgaaccctgcccaccaccaaatgacttaaaaagaacaatatcttgtggcaccttttcagttaaagaagccaaattacggatgctttctctctctgcattctctcatcaattaaaagctgaacttgtggcaaataatagatatgaaatttatcctagaaaatgtgagatttgggctctatacaaggaccagaactatgaactgacttcttcaaatcagggcagaggtgaatgtcatatagtagaagtattagctgatagttaccagagtatccaagttgttgttctagtgccgcatggcaactctgggacaattttcaaggctcctagaatccagagatctaaaactggtgtaattgaaatattaagaaaagaggttggcagattttcacatcagattcctgcttttcagcacagcgacaatgttcatctcagagggtgttgggagcttgatccttcatcagttcctggttctttcataccaatagactgaagtatagcatttttagacccccttgtcctcttagttcgtggtagtgaacctatgttttcttatatgatttaaccagctattctgtgaagcagcaatgtatggaaatatgttcaagagatttcctcaatcattctatgtttcttgatcagttatcacattctggctatattttttttctctctc

SEQ ID NO: 66252 - DNA, 549 bp, Glycine max
  Clone ID: PAT_MRT3847_3083C.1
caaatatcggtgcactcactctagaattttttgccctcaatacatatttttctgcttaatatgagttttttagtttatagttttactacgaaagttagtatatttaattttctaattaatttctctcattttacaacgaattttagccatttgtcaaagcatcctcctcatattatagtatatgcatatgattatttggtgggttgcgtttctggaatatgaagtatcagaaaagtaattagccccaatctttgattataatcctgatagtaatgacctgctaatcaaagcagattagcaatataataacacggtctgaacggtgttagttattacatatattttatttattcagtgagcgtccagaaattataatactgtcaatttgaagtggatgataagattttgactgatgttgccgtatgtgaaggcattgctctttgaatttactcgtttttggtttaagtcattaatctgggtagatgtaacttgccctaaagcaactgttcatattcatccctgcctaaagcttttccatcaatgatacca

SEQ ID NO: 66253 - DNA, 253 bp, Glycine max
  Clone ID: PAT_MRT3847_30840C.1
atcagggtttgcatggttcttagtttttggtgaaaggctttcgtttctttaccctttcactgtatgagggatctttactgacttgttgaagttttagtttcccgtgtgttccttttctgcactgtgcagggtgttgcccttcatcaagtttggttaaattggtttctgcttagctctggatttttctgtggcattctatttgacatcatgatttagttttacaagttttgtaaattgttccattcatgacatt

SEQ ID NO: 66254 - DNA, 355 bp, Glycine max
  Clone ID: PAT_MRT3847_30841C.1
actggtgggcggcctttctttttttttttttttgacacgaagacatcgctgactcatgataaatgtggcggccgtggttccatagctgtaaaaacttaaaaccagggcacaagtatgcgggttcccccctaacaaaagttcaacgatagagattatcgccagtttttctcaagcatggaacactgtattcgaaacacgcagacaccgtggctttggatacttacaagaccatcacactgttatggaagaaacccagttcaggctgatgcagaaacttgttcagaaggcaatgaaatatgcgcgattgcaagacattcagctatgattatagaccctgctcaatgagatgatgacc

SEQ ID NO: 66255 - DNA, 220 bp, Glycine max
  Clone ID: PAT_MRT3847_30842C.1
tgcagcgtggaaactcagtagctttgttctagagtttaagagaaagaacaagaaggacataagtgggaacccccaagcacttataatgttgaagactgcttgtgagagggcccacagaacattgtcatccactgcccacaccaccattgaaattggttccctctattagggaattgatttctactcccctgttactcgtggccgaatccaggaactgaac

SEQ ID NO: 66256 - DNA, 493 bp, Glycine max
  Clone ID: PAT_MRT3847_30843C.1
gcattgtccaagttcaagacactgcttcagttactgtcttcatcctccatcttcttcgtgttagggttttcaaagttacagtgatttcgagcatcgaacgaacgtctactaatgcgttttcagtaaccaagtctcgaagaagatcgcgattcccccaacgctttgttgccataactcgcggaatcgacatcatatttcgacaaagtggtaatggcttatttggaggatgatggtacttctggctctggtgaagatgtgcatacgttggagggacacaagcgtcaccctgttgttgtgccgtctggttccggtggccggaagcgaagccgaaaggctaacggcgacgccatcgtggacgccatgctggagattgctgctgcttcaaagatgagggccaatgcaattttgaagaatgaggacaggttctccataagcaagtgcattaaggtgttggatgagttgcaaggggttgatgaacggctctactttcttg

SEQ ID NO: 66257 - DNA, 335 bp, Glycine max
  Clone ID: PAT_MRT3847_30844C.1
ccaggaggaggggggccccccaagaaattcgagaaagccggggggagggttcataattttttaaaaaggagggaaattaataatgggtagtgaattatgaaaaacacatttcaggtggtaaaaagaaaaaccttttggaattaacaaaaaaattcaaccgtgaaaataaaaggattaaccggggtggccgaaagggggatgctttccatatttaatggggttggcatgctttccatttttaaaaataaaaaaccctggcagcttgtattttaaatgaacccccaaaccaccgggagaaggtgtgttattataggcacgcagggggggtttttttt

SEQ ID NO: 66258 - DNA, 184 bp, Glycine max
  Clone ID: PAT_MRT3847_30845C.1
tttccttttttttttttttttttatataagaacccccagaaggtggcaaattttgttgttattggcaaccattctgttaaaagaaagtttttggtccactcacacaactaacggccctcacgattccaccatacagccctgcatatatatcgctacaattgttctcttagaacaaatcatatat

SEQ ID NO: 66259 - DNA, 577 bp, Glycine max
  Clone ID: PAT_MRT3847_30846C.1
cggctcgagtacggctgcgagagacgacagaaggggagggaaggaggcaaaacaaattaaccaacaacaacaaaagcaacagatcgaaaacatcaaaagatggcaaacaaaaacgttgcgttgttgttgttggtgtgccttgtagtcgctgccggggttgaggcgaggaggccctacgccgttgtccgagatgaatgcttcggttattgctggcatggttgcatattcccctcatcatactgcaattggtggtgtgataaagtgtgcaaatacccaatagacttcggtgacgatggcctgaatcatgtggatagtgttggtcatggtggtggtcatcggtatcctgtaccaactgaggaagactacgaacaccgcccggccgccctatcacctgagagcccggtgtggagaaagccagaacaagacatgaatattggcggagcgatttaattaatgtaaatccacagtacagggcattctcatgaattaggacgcattatacttgtgtcctttttcggtctctttccttctattttgcaataatgataataaaattccctttaaaatattctggttc

SEQ ID NO: 66260 - DNA, 819 bp, Glycine max
  Clone ID: PAT_MRT3847_30847C.1
tgccggaatacattacttttgtttccgtgttgtcggcttgcagccatacggggaagattgatgatggttttaagtacttcaattccatggctaatgttcataacattaaacccgggcttgagcattatgcttgcatggttgacttgcttggtcgtgttggtcgattggaggaagcatgtaggttcattgaatccatgccattcgagcctgactcgttggtttggggggctttgcttggggcatgtggaaaacatgccaatgttgaaatgggaagagaggtcgcagagagacttttcaagttggaaccggataatccaggaaactatatgctgctttcgaatatctatataagacacgggatgttggaagaagctgatgaggtgagaagattgatggggatcaatggggtgaggaaagagagtgggtgtagctggattgatgttaagaacagggacctttgttttcaatgcgaatgataggtcacattcaaggacacaagagatttatggaatgctgcaaaagttgaaggagttgataaagagaagagggtatgtggctgagacccagtttgcaactaacagtgtggaaggctctgaagagcagagtttgtggtgtcacagtgagaaattggctcttgcatttggtcttctggtcctcccacctgggtctccggttaggataaagaagaatttgaggacctgtggtgattgccatactgttatgaagtttgcttctgagatttttcagagagaaattattgttagagatatcaataggtttcatcgattcacaaatggatcgtgctcttgtatggattat

SEQ ID NO: 66261 - DNA, 245 bp, Glycine max
  Clone ID: PAT_MRT3847_30848C.1
gaagacgacaaaaggggaaatagaacaagagaggataagagaaataacttgtgcatacaacagtacagcgtcccgttgtctttttctcagatggctcgaacgaagcatgcggcacgcaagtctaccggcggcaaggcgccgcagcagcagctggagactaacgcggctcgcaagtccgctccggagacccgcggcgttaagaagccgcacaaattcaggccgggaatcgtggcgccacgctagat

SEQ ID NO: 66262 - DNA, 491 bp, Glycine max
  Clone ID: PAT_MRT3847_30849C.1
ggctcgagagctgctacaccgcaacaaaatccttcaggtaatggtatcaaagccattggagtcattgctggaggagttgctgtgggtgctgcactgttgtttgcatccccagtaattgcacttgtttattggaatagaaggaagccactggatgattactttgatgtcgcagctgaggaggatcctgaagttagccttggtcagcttaaaaagttttcactgcctgaactgcgaattgcaacaaataactttagtaacaaaaacattcttggtaaaggtggatttggcaaggtttataaaggacgttcaaccactggtgatgatgtagcagttaacagacttaaccctgaaagcattcggtgagacgataagcaatttcaaatagaagtggacatgatcagcatggctgtacatcgaaatttacttcggctgactggtttctgtatgacatcttctgaacgcttgcttgtgtatcctttatggctatggaa

SEQ ID NO: 66263 - DNA, 182 bp, Glycine max
  Clone ID: PAT_MRT3847_3084C.1
ggtatcatcgtgccaaggcgctttttggccttgtgacagggtacctaaaaggccttttggtcgtggcacgagttatggcgcccatatgtgttagaaggaggttttgggatcaatcactgaggcttaacacacttgataccttacaggctggtccgttgaaactgaacaaaccttgggaaggg

SEQ ID NO: 66264 - DNA, 358 bp, Glycine max
  Clone ID: PAT_MRT3847_30850C.1
gttcgccaggccggccgtttagggaaaacagggagcctaatgaactgaagtatgctctgggcaaaggagccattgaatagtgaggaataaaggacacgcggtgaacctgagcatgcatggaaaccctaataggaagaggggcagagcattgtatagggttacaaatccacaaccactgatacaacggagggtgaggaaggacactagctgggagcttatcgcatgtttgtgagggtatcacgttacaggagaaagacatgggggcagcatgtgtatagttggacaatatgcatgcttaatagctaggggagaggctacacatggacacaagcggggctgagtggtactaacatatgcc

SEQ ID NO: 66265 - DNA, 388 bp, Glycine max
  Clone ID: PAT_MRT3847_30851C.1
atccatccttgtagaatggccggaacactttccaagattttttttattgaatattcttctatcacctccaaatgcataaatccatcattttttaatttaatatcatatggatatgaaaaaaaaaaaactcctccaaaaaaaaaaaaaaaaaaaaaaaaaaaaaaaaaaaaaaaaaaaaaaaaaaaaaaaaaaaagggaaaggccagccaaaaaaaaaaaaaatagggggcccccctttaaaaaaccaaactttttttcccggggggccaaagttaaatgcctttttttgggggcccccatttttataccgggacccccttttttaaacccagctaatgggaaaaccccggggtgccccctcaaaaaaccgctggaaaaaaaacccttt

SEQ ID NO: 66266 - DNA, 102 bp, Glycine max
  Clone ID: PAT_MRT3847_30852C.1
taatgttacattctctaatctcaatcacaaaattgagaactgtttacattcttatatactacaaccaaatcattacatacaatcatcattcatactattatt

SEQ ID NO: 66267 - DNA, 147 bp, Glycine max
  Clone ID: PAT_MRT3847_30853C.1
cttatacactcttctcctctatctaacatcacccaacaataatcatcgctgagaacaattagggtgttcaatttggggacataacaatcggggtgaactgtctagagcgcgtgtgctcgacatatggttgtcgatgatctgacgctg

SEQ ID NO: 66268 - DNA, 249 bp, Glycine max
  Clone ID: PAT_MRT3847_30854C.1
gcttcgagacggatacttgatagaattgaaaacccacaagcaggaaacacttcacaagcctacttgcgaaaaccaggacaagagccggactcaacagagacgcggaccatcacatagtgatattacttcatgccaagaatttgaatgccggaggacccaatctaggataccaataggtaataaaccagccaccaacctaagagggaataaagccttcacctagcaggtcaatttctatgcggggggggg

SEQ ID NO: 66269 - DNA, 339 bp, Glycine max
  Clone ID: PAT_MRT3847_30855C.1
gcccacgctcgatcgagataactgaaacaggggaaaagaagcctgttttgtgtacaattgtgatggaatgccatgctcattgtccttcaatgaacactgcttggcccgactcaggaaagccagtggagtgctggaaccaccatttggttgaaatcctggagggtgacacaaagatctcatgcgaacattataactcaacgtaccaacagtacttttatgccaaacctaatccatcaaggacacattggtagataaggaccgactttattcatctcaaacaggttggggggaatactgactgtgagaaggtaacaagcaatgacgcctgccaattaaata

SEQ ID NO: 66270 - DNA, 567 bp, Glycine max
  Clone ID: PAT_MRT3847_30856C.1
ggcccgccctctccctcactttctcttttcttctgcaacaaaacaataataataccacacactcactcacatacaaaacttcccttcaacaccatcctagctagctcctcactcttcaacaccatgggcgtaatgcgccgccgcagacatcaccatcacttccgttggttacaaaccttcaccaccttctctcttctcttcttctcttccacttcagccattaccaatctcgccccacatcccagtggtggggcagtgaagcagcttaaccaggaagagaagcaaaatgggtcgccggtggatagggtggtggcggaggagaagaggttcggcgggccagggtcgtcgccgccgtcgtgcagatccaagtgcggttggtgcagtccttgctttccggttcacgttccggtccaaccgggtttgatcattcgcctcgagtactaccccgaagcgtggcgttgcaagtgcgggaacaagcttttcatgccgtgacattaattaataataatagtagtatatataaaaatcctagtacaaaaagaagaacacaaacgttgttgttgccag

SEQ ID NO: 66271 - DNA, 894 bp, Glycine max
  Clone ID: PAT_MRT3847_30857C.1
caacaatcccccccccctctgcctcttttcttctagcatcccacccactctcatacctacccctccccacgcgaccaccatcctagctactttctcactcttcaacactcatgggcgtaacgcgccgccgcagacatcaccatcacttccattggttgcaaatcttcaccaccttcacttttctcttcttctcttccacttcagccattaccactctcaccccacatcccagtggtggggcagtgaagcagcttaaccgggaagagaaacaaaatgggtcaacggtggtgccggtgaacagagtggtggtggaggagaagaggttcggcgggccggggtcgtcgccgccgtcgtgcagatccaagtgcggctggtgcagtccttgttttccggttcacgttccggtccaaccgggtttgattattcgcctcgagtactacccagaagcgtggcgttgcaagtgcgggaacaagctttttatgccatgacgttaattaattaatagtatatataaaaatcctagtacaaaaaaaagaacacaaacgttgttagttgccagaaccgaacaggagaacattgcaggcactaccagcagccatcttaaattttccccttttgggttttttcttcttttttttttgttttttttttatctcagtgttgggatgtttatgagtactatgtttatagtattattaatgtttatagttattgatttttgggttaacctttcgagggagggtcagacaggaagggagtgttgggaatgtaagatatatgttcaggtgtgattaccgagaggaatatcttaaacctttctctgctttaacacacactacactactacttttctctatatttgtatatgatttcatttcattccctttttggttt

SEQ ID NO: 66272 - DNA, 433 bp, Glycine max
  Clone ID: PAT_MRT3847_30858C.1
aaaaaaaacagggaagggccggggggccccctatcaatcttaaaagggaaggacccggtttaaccggccaaaaaaaaaaaaaaaggccgggggaaaaaaacaaaacccccccggccaaaaacccggacatacttttgggaaaaaaaccgcttttcccccacatttgggggggccaaattggaaatccccctttgggattgggaaaccaaagcccccgggggttttaaaaccctccaaaaaaaatccgggggggcccccgcccaaaaaccccccaaaaacctggaaaagcaaccctttgcaacccaaaggggcccccctcaaaattttccgcgggccggccctgattatccccggtggtgggcaaaaaggggccagttttccccaaaccaagggccccccccgagaaaaaaccaccccttaaaaatcccccaaa

SEQ ID NO: 66273 - DNA, 569 bp, Glycine max
  Clone ID: PAT_MRT3847_30859C.1
ctaatgtaatgtgtcatgcccctaatgaactacaagaccggaagctgtgtgttctattagactgggatgtgcgcttcaagattattttggggattgctcgagggctcctttatctacatgaagattctaggttgaggattattcatagggacttgaaaacaagcaacattctactagatgaagagaagaatcctaaaatctcagactttggcttagccaggatatttggaggaaaagagacagtagccaacacagaaagagtggttggaacttaattatcaagacaacttaaattctgattggagaactacaccaaaattacctaaggagctgtatctatgtgttgtccttattagtattttctcacactttacaaaatgataccagtcagatctcttatttgttctacacttcacaatttttgtaatgcagtgggtatatgtctccagaatatgcacttgatggacatttttcagtcaagtctgatgtctttagctttggtgttgttgtacttgagattattagtggaaaaaggaacacaggattttatcaagcagatcatgaattga

SEQ ID NO: 66274 - DNA, 327 bp, Glycine max
  Clone ID: PAT_MRT3847_3085C.1
gtttgttctaagacaattgactcatcctttcttatgagaataccctcgccaactgaatccacaataatggagtgaagccaggggattcaatatttctggctgagcactttacccctccaatgggacagtggactcaagtgtaaaacggcttaatcgaacagttccaagaatgtactctggcagctccgcctcttgttttgcctctatcaagattggaggggcaacacctaaccttggaacacctcccaggacaactccaatgaccctcctggctgcaaatcatgacccattgcccacatcaacgctccaaaaatttatcattgccta

SEQ ID NO: 66275 - DNA, 490 bp, Glycine max
  Clone ID: PAT_MRT3847_30860C.1
tgaaaatttcaagccttatctcatagcataagcagagccccaagttacacccacgttcagtgagtgacattcctccgtttcaaaggtttccaaccgcattcccaatggatcctcaagctccggcgacgggcaccaccgttcggagcgccgcggaaccatctcaacctcagccaccaaaaccatcccctcctctccctctccctccaccttccacatcatcaacccctccacaccctcccccaatccctaaccctaaccctaaccctagcccaggcccaggcccaggcccgggcccaattcaagccccgagccccaaaccccccactcccactcccacgcctccccaaccccgccctccccagcccttcaaccgcgctttaccacctccgtcgcagcctcagttcccgcacttctcctccccctctccgccgtcctcagctcccagcgccgccccgcctccgcggggtggtatggcgatcggtgtgcccgc

SEQ ID NO: 66276 - DNA, 355 bp, Glycine max
  Clone ID: PAT_MRT3847_30861C.1
atagcgctgattcttgatgttcattctcaccaattaattcattggcatgaacaacaaagcggcctaggattccgctaatatacgaaaggtccttgggacaattcccacaccaatccttagtcatacacaatcggctctgcaaacctttttggcctgtacggaccctccggaccctgcactttgcactctggtctggatttaatacatatttcacttgcttttccagaccaagttctttctccatctggaatatgtgttctttccagggacagcctccgtagtccaagacaatcacctcaccgctctcatctgcctgaattctttccctgatttgccttgtctccaaagctcgtgc

SEQ ID NO: 66277 - DNA, 287 bp, Glycine max
  Clone ID: PAT_MRT3847_30862C.1
aaaaaaacttcttaagggccgctggcccgctatttatcttgggggttatctgaaaaataccctctggtaatcgattaccatttttgggtaatcaattaccgggtttaaaaattgatacaggatgttttgttgcttctggtaatcgattaccaattgtgtggtatcgattacacaatgtgatatgcttctggtaatcgattaccaattgggtgtaatcgattacatattgttacctgctactggttattgatttccatctatttgtaatcaattacaccctggaactt

SEQ ID NO: 66278 - DNA, 695 bp, Glycine max
  unsure (1)..(695): unsure at all n locations
  Clone ID: PAT_MRT3847_30863C.1
aaaaaaaagtaactttcctattaccatatgttgtcagaatatatccaaaagagcaagactttggaacattgaacatgtcatcatctctaattcagatttacatggtatattggtataaaataaaaattatcttgaaaatagaacttgtagcaaatagttaactatgccactaaaatctgaacagcaagttgaatggtcaccaattgcagttaacaagttgagggcaaaactcatgctatccaatgttaaactcaatcctcctttccccggtggatgtcaactagatatctatttagatgctggccaaatgactttgtagagaatgactcaacaacatgcctcctagcttctctccccatgttatctgcctcctggggatcacttatgagcttagccattgctaaagaaaactccagtggtgtaggatcacaaaggaatcccgttacaccattcttaatcgactccacagggccaccactattgcatgcgataacaggtttataagctgccattgcctccaaaggaacaatgccgaagtgctcatcctttggtgtgtaaaggacacacaagcattcagaaagaagttcattcctttcagctgttgagcaagatgtgatgaattttatgttattggagaccccttnctttcagctaaatctttaagctcttctaagtattccacattctccttcaac

SEQ ID NO: 66279 - DNA, 1287 bp, Glycine max
  unsure (1)..(1287): unsure at all n locations
  Clone ID: PAT_MRT3847_30864C.1
ccaaaaccagcaccacccccccacccctctctatctcttttctcccaaactccaatccgacccgaatacttcactcatgtccaattctatctccgacccgacccgaataattcactctcaggatccgaataccaccgcggaccctcaggttccgcttcggaacctttcccaggttcggaacagaatggattctctacaacacttcctatctcaatccatcaataccaacactcccctcaccgtcgatcaaatcgccatggtctccagccagatcctctcctccatccaccaagtcatcgtcaacggcgccgccctcgtctcttactctcagaattccatcgccgccggagcaccggatccaccgccgtatccgaagaagccgaagccggaaccttcagttgccgataaagcgaagcaaacactcgattccaaactcgagcctctcgaaggcgacgacagcgaaatcgtggagctcgacgccgtcgaaatcctcgcggagcacatgcacttttgcgagatctgcgggaaaggcttccggcgcgacgcgaacctccgcatgcacatgcgcgcgcacggagaacagttcaagacggcggaggcgctggcgaagccttcggagaaagcctcgtggctgcgtgcgacgcggttctcgtgtccgttcgtaggctgcaaccggaacaagctccaccggcggttccggccgctgaaatcggtgatttgcgtgaagaaccacttcaagcgaagccactgcccgaagatgtacacgtgcgagcggtgtcgcaagaagcacttctcggtgctctcggatttgaggagccacttgaagcattgcggaggagaggccaggtggaagtgcacgtgcgggaccacgttctcaaggaaagacaagttgtttggccacattgcgctgtttgagggccacgcgcctgcgctcgcgtgtgacgaagagggtaaagggaaacaaatggtggaggacgacgaagatccaatgttgatgagtgaaagtggatttgaattggatgattgttttttggatcaagagtttcccgaaggcttctttgatgattttgggtccattgatgactactgttaaaggaagtgttaggttttcctagtaattgactttgcatatctatttttaggaaatactgtattcatattatactattgctagatttgtatttatgtctttatgttgttgagggattaaaattaaacagtgtttataggatggaataaaacgattaatttcattaccaaaaaaaaaaaaaaaaaaannnnnnnnna

SEQ ID NO: 66280 - DNA, 113 bp, Glycine max
  Clone ID: PAT_MRT3847_30865C.1
tggttcggctgttataagacggggggagggttcagctgcgggaacaccacctacgggtacggatgaacaaagacaacatatgtgtactgatgacaaaaaacgacagaaaggtt

SEQ ID NO: 66281 - DNA, 287 bp, Glycine max
  Clone ID: PAT_MRT3847_30866C.1
gaaatgcacaagttgaggaagacagctactaggcggtgcctcaactgcttgagtccctatagggatcagaaccctggtgggggtaggtgttatgtgttttaactgtggccatgtatctaagagaccggctctagacttgcctgtaccgccggtgttgtggatttttaattccagcatagttaacgacttgactgtaaaaaggtgcacaatattgaatagcaaggtttggtcctaaaatggatggatgtgcggtcaggactgtttagagaatggtaattgggttgggg

SEQ ID NO: 66282 - DNA, 1250 bp, Glycine max
  Clone ID: PAT_MRT3847_30867C.1
cccacgcgtccgtacggcttcccatgtccaattcaaactgcaatccgacccgaatacttcactctcagtcccaggatccgaatactaccaccgcggatcctcatgttctgcttcagaacctttccctggttcggaccagaatggattctctacaacacttcctatctcaatccatcaacaccaacactcccctcgccgtcgatcaaatcgccatggtctccagccagatcgtctcctccatccatcaattgatcgtcaacggctcagctctcgtctcttactctcaaaattccaccgccgcctccggagcaccggatccaccgttgtatccgaagaagccggagccggaaccttcagtcgccgataaagcgaagcaaatactcgattccaaatttgggcctctcgaagacgacgacgacgacgacggcggcgccgaagacttcgacgacggtagcggaatcgtggagctcgacgccatagaaatcctcgccgagcacatgcacttctgcgagatctgcgcgaaaggcttccggcgcgactcgaacctccgcatgcacatgcgcgcgcacggagaacagttcaagacggtggaggcgctggcgaagccttcggagaccactgcgcagcggggcgcgacgcggttttcgtgtccgttcgaaggctgcaaccggaacagctccaccggcggtttcggccgctgaaatcggtgatttgcgtgaagaacacttcaagcggaccactgcccgaagatgacacgtgcgagcggggcgcaaaaagcacttctcggtgctctcggatttgaggaaccactcgaagcactgcggaggagaggccaggtgaaagtgcacgtgcgggaccacgttctcaagtaaagacaagttgtttggccacattgcgatgtttgagggccacgcgcttgcgctcgtgtgtgacaaagagggtaaaggaaaacaaatggtggaggacgacaaagatccaatgttgatgagtgaaagtggatttgaattgaatgattgttttttggatcaagagtttcccgaaggcttctttgatgattttgggtccattgatgactactgttaaggtaagtgttttagggtttcctagtaatagactttgattatgtatgtgtatttagggaatattcatattcaattgctagatttgtatttatgtccctatggtattgaaggattaaaattaaacagtgtttataacacaggatggaaatgtacgattaattttatttt

SEQ ID NO: 66283 - DNA, 328 bp, Glycine max
  Clone ID: PAT_MRT3847_30868C.1
cccactcgtacgttcactcgttcgaacataaataatgggtgcccttagatcacattggggaatggtgaaggctaaggccagctaatggctacaccaaatccaacactggaactttacactgccttcatattgacagagatccaaccactgtagctcgataaattgcttgtacctatcctggtctcaatgcttttcatgttaatacatcgggggactctaccaatgattctctttcaagtggatcacacctcaatcatcttcaccctgagcatgctgcccctgacgattcgaatctgcatgctgatgatcctcacaatattcatatggg

SEQ ID NO: 66284 - DNA, 1039 bp, Glycine max
  unsure (1)..(1039): unsure at all n locations
  Clone ID: PAT_MRT3847_30869C.1
ggaatccagcattgagcatcctgtaaatggacagatgcttgagggaaaacatccttcaatgcctgatttcgaaggaaaacctttctttggttctgctggagtaaggctcagtgctcccttcaacatccgtaatcaggagcagaacgcccaatccaggatgttaggcaagtctgagaaaaatggtttgaaacaagtggaattgaattctttaccctcaagtaatcaaaataataatggtctggttgcaaagtttacaagtcatgctcctgcagctaattctcttgcagcagagtccaagcccagagaaatggtgccaaggaacatgttcaaacagccagatactaatggagttgttggtggagagtcagctaatggaaaagtcaggaatacaagtttgaatagacaggtgactggttcatcacctganagcacattgcatcaatcaagcagagctgctcctgcctgttgtccatggacaggagcagggtcttggtgaccagttcagttgtgagaatgttcgcagaaaggctcatnagcacacacttcttccatagcgggtggacgcggcgtggaggcgtgccccgctgcggacgcggaccacatgccgtgcgaggatccgaggctgaacagccagctgagcagggagatgaactactacagggagaggcactgccccaggccggaggactcgcccctatgcttgattccgccgccccatgggtaccgggtgccggtgccgtggccggagagcttgcacaagatatggcacagcaacatgccatacaacaagattgctgacaggaaaggtcaccagggatggatgaaactagaaggtcaacactttatattccctggtggtggtacgatgtttccagatggagcagagcaatatattgaaaaacttggtcaatacattcctataagtgaaggtgttctgaggactgcgcttgacatggggtgtggggttgctagttttggaggatatatgctatctaaaaatattttaaccatgtcttttgctccaagagattcacataaa

SEQ ID NO: 66285 - DNA, 425 bp, Glycine max
  Clone ID: PAT_MRT3847_3086C.1
ctgtgttgcatcccttgaagaagccttatccaagtgtcacccaccacccaccaaccttgaagaccttgtgggcatgtcaattaatctatccaaatccaacgtaaccaacatggtttccatcatttcaaacctattgaagaacaaaacttttgatcaatacactaaggcttgcctaaaagattgcttcgatctttactcggattcgctttcggctttagatgatgctgtggttgctttcaagtccaaggatttggacacggctggtataaacttgagtgcttccttggataattctgttacatgtgaagatcaattcaaggataagaaaggtgaaacttctcctataacaaaggagaacaacgtgtacttccaactcaatgtaatatctctagccttcatccaaatgtttcgtcaacattattgag

SEQ ID NO: 66286 - DNA, 363 bp, Glycine max
  Clone ID: PAT_MRT3847_30870C.1
gcatatctatcggacgcatgttcaacctcattccaacattcttgcgatctcatcttcgtcttgtgattcttcttgttagaaggtcaaaccaatgcgaggaggaggagcggaggacgcccaatcatggaggtggtacctgacggagagagcatgactaccaccgttaaggcctacggaaaggtataatgtactatgaggaagtcgaccagtaccaccgaaagctgtgttcaggctgtaaggacaaccgatgtaaagacgagggtggtttctcgtgcacagagaagacgctggcggaggtgaaggcgtccaccaacaatgtgctctctaggcgtatgagcgcacatagcctggagagcgctccca

SEQ ID NO: 66287 - DNA, 396 bp, Glycine max
  Clone ID: PAT_MRT3847_30871C.1
aattcatacaggaggttttaaaaatgttttaaggggggtttatttttcccatccttgaaaattgggtttcatcggctttaggggagcccaaattcaaaaaagtaacaacgggtttgggctccttcatcattcacatttttaaaaattttttttaaaattcaaatcttaggcggagacaaaacaaaaaaaaaagggttttttttttgaaacttattttaagctttaacattttccttaggggccgaaaaacccaaaataagcgggggttttttctttccaactccaaacgttcaataaatgggattgttcctacccaaagcttttaacgccaaatgagccgctttttgccctgttttttttaaaaaagcgggggtattttgggggctttacaagctg

SEQ ID NO: 66288 - DNA, 359 bp, Glycine max
  Clone ID: PAT_MRT3847_30872C.1
acacatattgctccgctgtggagaaggatttgcgtttggagaggggaatgttaggcaatatgatggtgttcctcttcttaagaattcaaaatgggagagtactttggatgctgttgacaatgatagtgatagtgactagatgatagtcctcatcaacacttataacaaaccaaacatattattggcttcgtagaacgtagaaagtggaatatagcagtataaaagcatggttttgaggcagtgtttgtgatttgtgaggttcattttcctagtttgatatttctcctttttccgcccttttctcaataatattataaatcaaatggtatggtggtactgtagtgtagttccaatatcac

SEQ ID NO: 66289 - DNA, 245 bp, Glycine max
  Clone ID: PAT_MRT3847_30873C.1
agtgactcagatattatgctcagaggagaagtattctgtttctaaaccatcaaacacatcgcaagatacattttgagaatccttaaaacctacgcactcctacacaaagcatgaagttcggtactttcaacagcctttgatgtactacacaaatactatctagttgaaaagccaacaaagatcaatacggctctgtggctattaaaatccaacattaacctactcaatgacgaacttctttatta

SEQ ID NO: 66290 - DNA, 474 bp, Glycine max
  Clone ID: PAT_MRT3847_30874C.1
gagctggcctactattgacgctagattgaaaacacactgcctattcgctcatccatattaaggactccatccttccacgtgccgttgaaactcacccttttgacgcagatgatcctagtcaccgacaatctttgttagatcaatattgtccctcattatttgaactaaatactcatgctgggaaacactaccctgatatgcttgttaaactatatgcgctctatctatccaaaagatgcatgactaccgttgttctcctgtagacacatgagcactacgaccctcgagaaggatcacgataattagcattatactatacctattgaaggaccattttttctttctatgaacgatcgaagactcaccatactatctatgtgtgattataaacacccagttggatttagatgatgcttcttagattgtatccataccgaaagatgactatctatgtgaataattaatcaaacgatg

SEQ ID NO: 66291 - DNA, 695 bp, Glycine max
  unsure (1)..(695): unsure at all n locations
  Clone ID: PAT_MRT3847_30875C.1
cgccggcgagtgtgttcctttgtaccccgtttcctccctcgttggctctgcttctctgctggttgtcttccagggcgtccgggctacggttggcgggtgcctcggtcggctcttcgtgcttatgccggcgtggtggccagcgaggtcggcacaatgccggccctaggaacttcaagatgccaaagaagggtcgaccactttccttgcagaccgtagagctgaaagtaaggatgtgctgcactggctgcgagagagttgttaaaaacgccatttacaaactcaaaggcattgattcagtggaggtggacttagagatggaaagggtgagggttggtgggtatgttgacaggaacaaggtgcttaaggctgtgaggagggccgggaagagggcagaattctggccttaccctaatcctccactttacttcacaagtgctgaccattacttcaaggacaccacccatgagttcaaagaaagctacaactactatagacatggctacaacctcccagagaggcacggcaccatgcatgtgtctcaccgtggagatgacaatgttagcaacatgttcaatgatgataatgtcaatgcctgccatatcatgtaattcatttataccttattattatatgtgtgtgctagctaatgtggaaaactttcatgaccatatgtaaattaatttgcagtnnnngct

SEQ ID NO: 66292 - DNA, 774 bp, Glycine max
  Clone ID: PAT_MRT3847_30876C.1
ccctctttagatttctcctcttctccaattttaaacgaaacttccatatttttcttaaatttatttgatcgttttgctcgtggctgaggagctcctttatgcagaaatggccaacacctacaagccaaagaacattctcataacaggagcagcaggcttcattgcatcccatgtatgcaacaggatagtgcgaaactaccctgactacaaaatcatagtccttgacaagctcgattactgctcaaatctgaagaatctcattccctcgcgttcatctccgaatttcaagttcatcaagggagacattggaagtgcagatttagtaaactacatcctcctcacagagtccattgacaccatcatgcactttgcagcacaaactcatgtagacaattcctttggcaacagttttgagttcaccaagaacaacatctatggcacacatgtgctcctagaggcttgcaaggtctcaaagggtcaagtgaagaggttcattcatgtgagcactgatgaggtttatggtgagacagatgaggatgctgtggttggaaaccatgaggcttctcaattggtacctaccaatccatattctgccacaaaagctggtgctgaaatgcttgtcatggcgtatggtagagcgtatggtttgcccggttatacgacgagagggaacaatgtttatgggcctaatcagtttcctgagaaggttgatttcaaagtttctgctcttggccatgaaaggaagactcttccattcatggggatgggtctaat

SEQ ID NO: 66293 - DNA, 180 bp, Glycine max
  Clone ID: PAT_MRT3847_30877C.1
gtacaaaaacaaaatcagaggtgttttgctgactcaaatcccaatcactcccccaaaggcggggactgtaacaacaaaacccgtttctaccatatctttgggggtgcccaaaacactgtggaacatggggggatttaccttttttttacggagtattttgtgcccaggcaccccgaaaaa

SEQ ID NO: 66294 - DNA, 1137 bp, Glycine max
  Clone ID: PAT_MRT3847_30878C.1
aattcggctcgagaaaggtgttccgccagaaatttcatcttcaatggtttcacagacatttgaagtccctgatatgagcttcaattcaattgattctacaatagatggtagtggcttcttgaataggggtccatgggatctgccaccaccacctccaccacaacaacaacaggttcaacggattagaacatacaccaaggtatataaacgtggagctgtgggaaggtccatagacataacacgatattcaggttacgaggaccttaaacaggatctggctcttaggtttggtattgagggacagctggaggatctacaaaggattggttggaaacttgtatatgtagatcacgagaatgatgttttacttgtgggagatgacccttgggaggagtttgttaactgtgtccgctgcattaaaatactttctcctcaagaagttcaacaaatgagcttggatggagattttggcaatggtggccttccatatccagcaggcagcagctctgatggtgggaatgcttaaatggcatccaggaatctgctaattattcttccatgttagtaacttacatcgtttttaggacatattcatcagtgttgtccaaaaggttgtggggtcggtcggcagatgattttgtcctgctgcagcaggctgggtaatatttgcggttataacttattaggagaaatttgtctctgccatgtacaggcgaatttgaagagccaaaagaagaaaaaggtggaaaaatttgctgccctcaatctacgacttacatttaaggttgttaacctggtgatgaatgagatacttggaccacacgcacatggcacatcccaacaaagatgtgttaagccatatgcatgtgatgacgttgaaaagttgagcagaagttctcttggcagcgtttgaaatatgtattaaatgcagcgtactgtagaaagaaaggctgaaatatcacggcatagttcagtgtataaaagtaggtttcttgtgcggtctttaaaaggagttattgacatctgaattgaaaggtggctttttggttttttgtaaaacactaggcagctagatatgtattgtatggccaactatatattgaagcatcaaatacagaatgcattgttttgctgccc

SEQ ID NO: 66295 - DNA, 317 bp, Glycine max
  unsure (1)..(317): unsure at all n locations
  Clone ID: PAT_MRT3847_30879C.1
aantnncntgcangtgtacagtanacatcngnanancnggnncagagctnaaagcngtatattnaanccagaangggatacatctggtttggcctggnatgaccccccgacggatnacccttccatcttngctacctccancnnggtttnaaatgcangctgagattgnacatngagcntcccntcgagcacgggtnacnnntggacaancttttggatctngctcatnccccttttncttcacattcaactnttgctaagggtancgtgtnaccagcttgagtncatttttganaccagcannggncnaccagggt

SEQ ID NO: 66296 - DNA, 630 bp, Glycine max
  Clone ID: PAT_MRT3847_3087C.1
ggctcgagcatttttctttccttttctttttactaacatcattattctactttgttgtatctgagctgctgaacttcagagtgtggcagcagatcctgctcttcttcttcaccatcagacttgtgctggaaatgggattggtgacagtacctccttgattccagaatcctccagaagaccaagcctctcctctctgcaaataccagcgttgtcagtggaaaatgcattatcttcttttaacaagacagatggtcctatattgatatcaagtccaggttccagtagaggactgcccccaaggccaaattcagccagagtcatcaagtccactatgaaaactttactctctgaaaggagctttagggctaagaattcttcaatggatagtgaaaggacagttctcattattcctgatggctcaccatcagatggtcctgtggataataagccttcgacttcgcggtccctttctcttaacaagattttgttctcttcctcaacaaaagcagcacattcattgccggttactccaactgcaaattcaggtccagagaatgtacatggaagacatctagggtgtgattctgatttaagtaaaatgaaagtaaatcagcacatgacttcgatcag

SEQ ID NO: 66297 - DNA, 701 bp, Glycine max
  unsure (1)..(701): unsure at all n locations
  Clone ID: PAT_MRT3847_30880C.1
ccacgcgtccggatccattgttaggccacttgcattgccatgctccagcttatagccctggctatgaacggtgtgtgttggaaagtcaccttaattatggtcactcttaatccacctcaattgcagcctattagaattggttgccgctatcttggaagggctacttatggaggaggtgataagaaagaaaggttgagtgaagtgtcatagagtggagccacttggatgtcggctctttggaagttgagatcctacattgactagagttatgggcaaagtagtgcttataatgcttgggcagtcttcaccttacaagtttgttttatggggttgaattaggccataagctcaaattctatgaattgtttatttaaagatataaacaaggctcatgtatgcaactttatattatatttcacctctgggtgttttatttgtaaacttcttgtgcaaatttatttgactgaggttagcttttgttgtaataagatgctctttgaacaatgattgtagaaatgcaccagagggtttggtcagaactctgaaggatctagcanacagtccttattcaccagagtatgatactggctggtttcacagacccttttctncatatcagattgcttagactggctgcggtattggngtggaagatcatgctgatgctagtgactctatgaatgacatacttgcccaggtca

SEQ ID NO: 66298 - DNA, 193 bp, Glycine max
  unsure (1)..(193): unsure at all n locations
  Clone ID: PAT_MRT3847_30881C.1
nnangcacgcgtangnnaagancggaattcggactngagnggaaattnacacnaatgcaagananacactggangcaagnaagggngttgggaaggctttcannacggnttttagntcnnntgcagttatgggtttnctccaagntnncaaatggncaatnggtnntgnacannganatnanntngaagnagn

SEQ ID NO: 66299 - DNA, 409 bp, Glycine max
  unsure (1)..(409): unsure at all n locations
  Clone ID: PAT_MRT3847_30882C.1
tcgatggtgcacttcgtgtgattgaatgcgctttggggtacccggtgacggtgggacttctgtccgtcggctgaaaccggtggtgtgccctttccgtttgggcgacgagttgggacccgcgtgcagtcgtggtcgaaccgcgccagtctctttaaccagggaacctgtgtgaagcatcctggctgacggggaagtggaacccgccattgattgccaataccgaagctttcgagtacttaccatcttcgcgccttcttcaatgagaaccaaaagncccgtgcccaatatgccgaaccgcaacttgtgggcctcttccaagcctgatttcacttcccgtctaccgactccggaatcctccgcaacggacaggcagttacacctgcaagacctacacctacaagacctgcag

SEQ ID NO: 66300 - DNA, 256 bp, Glycine max
  Clone ID: PAT_MRT3847_30883C.1
gcacaaggaaacacacttttactgaaattacacaaaatagtgacggaatcaaaataacatggctagagagtgcctaaaacggcataaactcatttgagaccaactgcggttactaggaagacacaggatctcgacccgaatcgtaaaaacatatatgctctaaatgggccccagtgcaggagcggctgtctgaacaccttcgtattggcctaagccttgctcgtatggactggtctgatcccacggccagaactat

SEQ ID NO: 66301 - DNA, 2329 bp, Glycine max
  Clone ID: PAT_MRT3847_30884C.1
caatttcaatggccgcagaaatttgtggcgggtctctattcttatccgttaaaactcaactgcaactgcagcagcgaaaccagcaaaacgtgttcttccatgctcaacgtagcagaacgcgaagaagcactaccagattccactcatccaaacgctgctttagttcttccgcctttccaaatgcgtccgcgtttcgccgcggcgccgtgtgccaggtcgccagcaccgacttcgaatccgccgccaaagccggagaggatcgtctctctaaggtgccggtgcgtaatataaggaacttctgcatcattgcgcatattgaccacgggaaatccacgttggcggataagttgcttcaggttaccggcacggtgcaccagcgagagatgaaggatcagtttctcgataacatggatttggagagagaaagaggcatcactattaagctccaggcagctagaatgcgttatgtgtttgaaaatgaaccttattgcttgaatctaatagacactccggggcatgttgacttctcgtatgaggtttctcggtcactcgctgcatgtgagggtgctcttctagtagtagacgcttctcagggcgttgaagcacaaacactagctaatgtttatttggctttggagaacaacctggaaattatccctgttttgaacaaaatagatctcccaggtgcagaaccagatcgagttatcaaggagattgaagagtctgtaggtctagattttagcaatgcgattctctgctctgccaaggtataattgaaattctcaatgcaattgatccaagaattcccccacctgaagatacatctaaaagacaattgaaggctttattatttgacagctacaacgatccatatagtggtgttcttctatattttcaagttgtggatggcgctttacagaagcgccgcatagtttatcgtatgcctcgtctgaaagattactgtgctgatgaaattggagttttacctcacagtgcactacaagattaagaagtgtatgctggtgatggtgggctatctatctgcatcaataagaacagtaggtgatgctagagtgggtgacactattactcactatggcagaaaggctgacaattctctccctagatatgaggaagccagtcatatggtgttctgtaggttgtttcctgttgatgctgaccattatcctgatctgcgtgatgcttttgaaatgctacaactcaatgatgctgcacttatgtttgtacctgagacatcaagtgccatgggatttggctttagatgtgggtttctgggccttcttcatatggaaattgttcaggagaggcttgagagagaatacaatttgagcctgataacaactgctccaagtgtcgtgtacagggtacactgtgtaaatggtgatactgttgaatgctcaaatccatctttacttcctgagcctggaaaaaggaaatcaattgaggagccatttgttaagattgagatgcttacaccaaaggactacattggttcacttatggaactggcacaagaaagaagagggcagttcagagaaatgaaatttattgctgaaaatagggcatcaatcacgtatgaattaccattagcagagatggttggtgatttctttgaccagttgaagtcgagaagtaagggttatgctagtatggagtatacctttgtcgggtacactgaaagtaatttaattaaacttgacatacggataaatggtgactgtgtggagccattggctacaattgtgcacaatgataaggcatattcggtgggaagggctttgactctaaagttgaaggagctcataccacgacaaatgtttaaagtaccaattcaagcgtgcataggatcaaaagtgatcgctagtgaagcgatatccgcaataaggaaggatgtactagccaaatgctacggtggggatatttcgagaaaaaagaaattgcttaagaaacaggctgaaggaaagaaaaggatgaagtctattggtaaagttgatgttccccaagaagctttcatggcagttttgaaacttgaaaaggaggtaatatgatcgtgtttacgtgtaagttgcaacatgatatgaaattgtaaatatattaagaaaatattagaaccttgatctccttttgctcggtataattattcaaatgttgttattgtatgattcatagttgcatacaagattctggatcattgataggatctctttaccattaaaaattgaaatattgtttgtcaagatctagttaatgccttaatggtcaagacttcgacttatttattggcagaattcgggatcttcaattggaa

SEQ ID NO: 66302 - DNA, 1456 bp, Glycine max
  unsure (1)..(1456): unsure at all n locations
  Clone ID: PAT_MRT3847_30885C.1
cccacgcgtccgcacgcctctccctccattctttaacagtcaccaacttctttctctctctctctctccctcgcacacaaatggccttagcttccttctccaatctctccacacaacacttgttctctcactacaaccacccctctctacaaacctgcaccatcacaatcccccatggaactctcatcttcttcccttccaagctcaaacattgcactttcatcacgtccaccgctcatttcttccccactacagtcacagccatctccagggttggtcctaggatcgggccgcccttggccatctcctcagctggggatggtggcaggtcgtcggggagaggcggcggcggcgaaagtggcggcggcggtgatgaagaggaggaggagagggaccgcaatcgggaagaggtgatggtggcgctggcggaggctggcaggtcgctggagagtttcccggaggatttggcggcggcggttacggcagggagggtgccgggttcgatagtgcggaggttgttccagttggaggaatcagctgtgttggggtggttgctcaagttcggaggcttcagggaaaggttgctggcagatgatttgttcttagctaagcttctcatcgagtgtgttgttatcatcttcaccaaggctgctgcagaattggagcgccgtaaagaaaaattcactaaggagctgaattttgttgttgctaatgtggtaacaggcattgtnacaggttttgtgcttgtgtggtttcctgcacccactatttctctcaaacctcctcttgcagtcagtgctgggcccattgctaaattattctatggttgtcctgataatgcttttcaggttggccccacgcgtccgaatgcattgatcaatgtacagaaggctgttaataaaacatttactgccgaggctgagaatttacctataatatcaaccagtgtagcatttggagtttacatggttgtaattagcaacctcaggtaccaagtacttgcaggaattattgaacaacggattctagaaccactactacaccgaaacaagcttatactaaccgcaacatactttaccattagaactgccaatacctactggggttcgctattgtgggtggattttgctcgatgggttggagtccagaagataaaggattgaacattattttttgccatactgcaaaccttaaactaattctccattgttattagaatttgacaggagagactgaaaatctaatgccaggtgtcaattaaaacttgacgtgttgatacgttaacattgacgtgtagcctcgaaattaccgaatccagctccaagtcaaagtatcatacatttatattttacaaggacaaaaaacatatttgaaattttactgagacatattcgaaccatttcaatatttatggggatagaaaacatattttagccatctataaaaaaagaaaacc

SEQ ID NO: 66303 - DNA, 235 bp, Glycine max
  unsure (1)..(235): unsure at all n locations
  Clone ID: PAT_MRT3847_30886C.1
cgtccggcgaggcgtgtatacaatcactatatccacatatatacacttagtagtactttaagtcttaaatgttanaagaacatcagtgatggagagaaagttcatttcagtacttgttttgtgagtatgttttgtgctgtgaatgtcccaatatgttgatgcaaggtacttggataaaaaatcaattgatgacgtgaataagccacaatcgtgcttagattgacgttccatttgt

SEQ ID NO: 66304 - DNA, 235 bp, Glycine max
  Clone ID: PAT_MRT3847_30887C.1
gttataaatgggcttttggtttggtggatgatagagggttatttttgttctaatgttggtcatacgatagagttccctattttactttctttcttgactttgtgaacattgattcgatttgggggtgtggatttttcttctgatttcttcgccaagttcgggttttgaccaattgggtcgctgattctcgcctcactttgatctgggtcgttcccttttcttcaatctcagttgt

SEQ ID NO: 66305 - DNA, 247 bp, Glycine max
  Clone ID: PAT_MRT3847_30888C.1
ctcaggtactcgtagtagtttcactagactgtctagacgtacgactggacaaattctcaggggcattaacaactccgcctccgatgagcatcgacacaccatattcgacttgagtgactataccatttcaatggaccgcttcaattcgttacagcaccccttaatttcgcttgcgagggatttgtagtactgaattaataattaaggcttcgtctttggggtcgcaaccatgcttgacatcggtctt

SEQ ID NO: 66306 - DNA, 318 bp, Glycine max
  Clone ID: PAT_MRT3847_30889C.1
caaacccgcctttttttttttttccgggggaataataaagccgattttctcctcaaactgggcggggcaatgtttatgtgcttagcggggacacccaaataatgggaccaagcgcggcttccgcctaaccctaaagggcttgacccaaattttcttttttgaacaaatgggaacctgcactgggacatgtgacactcatccaaagacttgcctttaccatgattctaaagaaaagaaaaagaccttgcgggcccaggaaaaaaaacctcaatatgttggaagtttaaaggtgggacaaggactatcaagcaatgttgg

SEQ ID NO: 66307 - DNA, 1778 bp, Glycine max
  Clone ID: PAT_MRT3847_3088C.1
ggaaggcatgtgcttctttagaatttatttatcaacctccagtaactttcgtgggtgttcaaaaaagacaccatacccggttgtttgcaaataaccacagggacaggaacagtacagataagagtggaaatatattgcctgggactgttgttgattccaaaatctgtcatccaacagaatttgatttttatctgtgcagtcatgctacctgagcatgtggagaaagctttgaagcatgtttaccatgcgtcaacaaacaaaaccaatggaaaggaattggagcttttgttagcaatattgccggacaacaatggttctctctatggtgatctcaagcgtatttgtgaaaccgaccttggtttaatttctcaatgttgtttgacaaagcatgtctttaagatcacaaagcagtatttggctaatgtgtctctgaaaatcaatgtcaagatgggaggtagaaacaccgttcttgttgatgctgtaagctgtagaataccattggttagtgacataccaactataatatttggagcagatgttacccatcctgaaaatggagaagaattcagcccttcaatagcagcggtagtcgcatcccaagactggcccgaagtgacaaaatatgccggtttaatatgtgctcaagctcatacgcagaaacttatactagctggcaacgaattttggcaagagcccgttctccccatcgtcaatggcggcactatacgggaggtgctggctcgagaacatgtttaccatgtggcagggagcaaaactaaagcaaaggaattggagcttttgttagcaatattgccagacaataatgggtctctctatggtgatctcaagcgaatttgtgaaactgaccttggattaatttcacaatgctgtctgacaaagcatgtcttcaaaatcactaaacagtacctggctaatgtgtctctgaagatcaatgtgaagatgggaggtagaaacactgtacttcttgatgctgtaagctgcagaataccattggttagtgacataccaaccataatttttggagccagtcatgcccgcatccagggtactagtcgcccagctcattatcatgtcctgtgggatgaaaacaacttcacacctgatggaattcagtctctgacaaacaacctttgttatacatatgccaggtgtacacgctcagtatcagttgttcctccagcatattatgcacatttagcagcgtttcgagcacgtttctatatggaaccagatatgcaagacaatggctctgcaggtgacggtaatggtcatggtgccaaagcaacacgagcagctggtgattatagtgtcaagccattgccagacttgaaagaaaatgtgaagagagtcatgttttactgttagactgcttagtggcttggccttggtagaatgatagatatatggggcaagcatcaacatgataagcaagttttcaaatcatggagtgcaatgttcacctcacattactttgtacattagtcgtgtaggttttgctgtggtagatccatgattacagttcttgagccatagtttagaatgaatttctacaagcattattaggttttatatagatgccaaatttagcattgtaaaaaatattctctgtcaatctttgtagaaaattttgccataaggcctttacagatgctggagtagaaatttccttcatctttgcaaggaggggaagttttttcctacgcacatttagcagcttttcgagcacgtttctatatggagccagacctgcagcagga

SEQ ID NO: 66308 - DNA, 618 bp, Glycine max
  Clone ID: PAT_MRT3847_30890C.1
gggacccgtgccggaaccgccgggtagtacccacgcgtgcgccacaccttccgtgtggacttccttgtcgctcctaaagtgaccagataccgaagccgcacttagagtctggacctacattaggctgcgcaatcttgatatttcgggtaatacataaggagatcttttgtgatgaagagagatgatgaccgtctttgtggggagagaccacagcgtgtgcacagatatcgcgagctgggtgttttacgcctctagagaataaacttgatgttgcgtcatacgtccgatactgtggaactggtcacagatcatgctatcctgattttggagaacatacatggtctgtgaccaaccgttgagaaacagtggtgataactggaaagatacgccgttatatgctgatataagtgaaggaggatccaatctgtacggaaagaatatcagtgccacgtcgagataacagatcaccaatttcagcatgaatggctgaacagactaaatatgacttaatgttcacatttaattcatattctaatgaacatgtgcgagatgttaccatactatatatggtggccactggtttacaatcatcaattgcgttgccttaatgttctaaac

SEQ ID NO: 66309 - DNA, 425 bp, Glycine max
  Clone ID: PAT_MRT3847_30891C.1
gccgccgtggccaccgccgcgatggagatggccacatacgacgccaactacatcctgatccgacaggtggtgccagatgtatgcgacgacgaagaggaggacgaccctgctgaactccgagcaccactatctcgagcttcaaagcacacggcgccaagacctacgccaccaaggaggagcacgatcatggcttcagcggtatcaagtccaaccataccagagccagactgcacgccgagctcgaccctgccgccgtccacgacgacaccaaattattcgatctaactccggccgagttccaccggcagtttctgagcctcaagccgctccggttcccgactcactgcccagaatgcgcccatgcttcccaccatggatctccctaacgattacgattgccgagacaaaggagtcgacactaacat

SEQ ID NO: 66310 - DNA, 793 bp, Glycine max
  Clone ID: PAT_MRT3847_30892C.1
cggccgctcgggccggccgggccgggaataccgttgctctcttgtttcactctttcctctttggacccttttgtgtgtttatttcctaattgttcccagccatgttggattctgtgttggacttcatcactcaagctgcttccagctccgcattcattttctgcttctgcaatttgatcatagtcattatcctagtggacttgaagcctagcctcagcattcaccaagaaagtgaaatccctctctccaagggtgagaatcagaaacaagaagcaaagtactctaagtctcttgtggaaaaagagacagcatcattgccacaagctgtggaagtgtcacatgatcaggaagcagaaacagttgaaagcattgaaattgaaggcaatgatgattgcagcaatgaagaagaggatgatgatgacgacaacaacatcaacgatgaggatgagctgaagagaagagtggaagagtttatagagaaagttaacaaagggtggaaggaagaattgttgagcacatcaaacttggtataggattcaaataataaggaaagttaggcctttaactttgggttattaaacttacaacaacaacgccttatcccactaggtggtttaactttgagttattaaacttaggcttgaaaaatttgagtcttgtgttgaattttgttatattgtaccattcaagaaaataacatagaaatagttgtttatatgtgcatagataaaatgtcttcggttcggactagaaatcaattcctcttgcttttgtgttttgggaggcaattggt

SEQ ID NO: 66311 - DNA, 478 bp, Glycine max
  Clone ID: PAT_MRT3847_30893C.1
ggaaattgggtgtggagaagaagagcacgtccaacgccaacggaaattcctgctctttgattcgtagacaaagacagacgtggtggtatttccaacgattgatagatggatcaagggaggcaggtattcacagtggaccttcttgaacgatatgctgcaaaagggcgtggagttatcacttgcatggctgctggaaatgatgtcattgtgattggaaccagcaaaggatgggtcatcaggcatgattttggggttggcaattcaaatgagattgatctctctgtgggtcgtcccggagaccagtcaatccatagggtttttgttgatcctggagggagtcactgtattgccactgtagtgggtcctggaggagctgaaactttctatactcatgccaaatggaccaagccacgaattttaagcaagctgaaaggtcttgttgtaaatgctgttgcatggaacaaacaacagataactg

SEQ ID NO: 66312 - DNA, 668 bp, Glycine max
  Clone ID: PAT_MRT3847_30894C.1
aattacttgctctcttgtttccaccctatctcactctctctttgtgtttgtttcctaattgttcccagctatgttggattctgtgttggagttcatcactcaagctgcttccagctcaacattcattttctgcttctgcatttgatcatagtcattatcctagtggacttgaagcctagcctcagcattcatcaagaaagtgaaatccctccttccaaaggtgacgagaatgagaaacaaaaagcaaaatactctaattctcttgtggaaaaagagacagcatcattgccacaagcagtggaagtgtcacatgatcaggaagcagaaacagttgagagcattggaattgaaggcaatgattattgcaacaacgaagatgaggaaaaagtggaagaggaggatgacgacgacgacaacaacgacgacgacgacgacaacgatgaggatgagctgaagagaagagtggaagagtttatagagaaagttaacaaagggtggaaggaagaactgttgagcacatgcataggactcaaataaatgataaggaaagttaggccttaactttgggttattaaactcaggcttgaaacatttgagtcttgtgttgaattttgttgtattgtagcattcaagaaaataatatagaaaatagttgtttatatgtgcac

SEQ ID NO: 66313 - DNA, 488 bp, Glycine max
  Clone ID: PAT_MRT3847_30895C.1
tacagctgcgagaagacgacagaaagggtgacttggaataagtggaaacaaaatgtattctttttttttccctccctgtttttttgccataatgtcaactactttccccacatagtcagtgagatttttaagttctgcatgcttattgttctattgcagtgaatagttcagaatttggcctagacgttgaagattacttaataggtgagtcttctaaacatgtacttgcattaattgtttatgtgtaatgatcattaatggagatgaatatgattctattgcatgttttcttaagctagcttccttcaagaagtgttgactaatttaaatatgattgtcattttgaagaacatgggtgtggcagttagaatcagtagggtttccaaggcaaaggagctcaataaccaaatgcgttatgttatactgttagttatatttagccattgctcattagtacaaatgattcttaagttttttactctgattaa

SEQ ID NO: 66314 - DNA, 1152 bp, Glycine max
  Clone ID: PAT_MRT3847_30896C.1
tcgacccacgcgtccgaggcttttagcttttctccgtcttcctttgttccttctttccctctctttttccgctccttattactggaaatgctgctttcttcttctcgcgctcatcttcactgactacttctctctctgcaatttccattgttgaagaaggagagaggttttgaggtgtggggtcggtgatggacggtggtggagtgaactacaaccctcgcaccgtggaacaggttttccgggacttcaagggccgtagagctggcatgatcaaggctctcaccactgatgttgaagaatttttccagcagtgcgatcctgaaaaggataatctttgtctgtacggattccctaatgagcaatgggaagttaatttacctgcggaagaagttcctccggagcttcctgagcctgcattgggcataaactttgctagggatgggatgcaagacaaggactggctgtctttggttgccgttcacagcgatgcatggttacttgcagtggctttctactttggggcacgatttggttttgataatgctgacaggaaacgcctgttctctatgattaatgatttaccaacaatatttgagattgtgactggaagcgcaaaaaaacagacgaaggaaaaatcatccatttcaaaccacagcagtaacaaatcaaaatctggttcaaaagggcgaggatctgaatcagggaagtattcaaaggaaacaaaggacgaggaggaagaggtactggatgaagaagatgacgaggagcatgaggagaccttgtgtggggcatgtggggagcactatgcatccgatgagttctggatttgttgcgacatatgtgagaagtggttccatggcaagtgtgtgaagatcactccagccagggccgaacacatcaagcagtataagtgcccctcatgcagcaataagagagcacggccttgatatagttgagaagtgggtcagtcctcaccccttgtaactaaatcatgttggacttctaacttgttagtggcttaggcttcctttgtcatgccatgatggtgtggaatatgtattcagtactttgggtcttgtgaacctttcagtggatatatttattaatattgatagtttgcaggttctgaacatgtctccaaaaaaaaagaga

SEQ ID NO: 66315 - DNA, 185 bp, Glycine max
  unsure (1)..(185): unsure at all n locations
  Clone ID: PAT_MRT3847_30897C.1
cgtgaatatcatcatttctactgatcaatataacagggnggattcctgtcaattatgaaaatgcaaagttntttgtatanaatcgnaatgaagagagtgcnaanacataattatggtgtacacataggaacagngtgagatagagngtaggaacttgnttgagtgccactcntctcgtagatgca

SEQ ID NO: 66316 - DNA, 268 bp, Glycine max
  Clone ID: PAT_MRT3847_30898C.1
ggaatgcggctcgagaagaattgcagcagaatcgtggaggagttgtcttctaatatggaaaggcaagagcaatcataagaatctctagagaacaatgatgagaatattgaagaagactttaaggtatcagatgcatgcttctctttgatagattccctgaagtgagtaactgactgcacttcccaggcactattgatatcaaagatgggtacgtaaatgtaggggattttaatatctttgacaaggtagcaatatgtcactattttca

SEQ ID NO: 66317 - DNA, 723 bp, Glycine max
  Clone ID: PAT_MRT3847_30899C.1
atgacaaatgatgtccaaattttaaataacggttatccaatgcctgcagttggattaggagtttataagatagcggatgagcagatggaagaggttgtccgtacagctttagatgcaggatatcgtgcatttgatacggcatacttttatggaaatgaaaaagccttaggtagtgcattaaaacattcaaatgttgagagggacgagttattcataacatctaaactttggaatgattatcaaggttatgaccaaacaatagagtactttaataaatcattggacaatttagggttagactatttagatttatttttaattcattggccttgtgaaaatgatcaatggtatattgaatcatataaagccttagaccttttatatgaagaaggtaaaataaaagccattggtgtatgtaactttaagatacatcatttagaaaagttaatgaaagaaactaaaattaccccacaggtgaatcaaattgagttacatccgtactttaaccaacaagatgtacaagacttttgtgatgaacatgatattaaagtaacagcttggatgcctttaatgcgcaataaagggttgcttgatgaccctgtaattacagatattgctcatcgttatgataaaacacctgcacaaattgtcttacgttggcatcttgcacataatcgtattatcattcctaaatcacaaactgatgaactactgcatggaacc

SEQ ID NO: 66318 - DNA, 1839 bp, Glycine max
  Clone ID: PAT_MRT3847_3089C.1
tatggtaaaggtgacaagttagcgggtgacaataatggccggagcatcaatccttaaatagtttttttcttcttcggagcaattctaactaaaacaccgggtcgacccacgcgtccgtgtatctgagctgctgaacttcaaagtgaggcagcagatcctgctcttcttcttcgccatcagggacttggataatgcaaagttcaattttttagcaaatggacttgtgctggaaatgggattggtgacagtacctccttgattccagaatcctccagaagaccaagcctctcctctctgcaaataccagcaaggttccagtagagggctacccccaaggccaaattcagccagtgccatcaagtccaccatgagaactttactctctgagaggagctttagggctaagaattcttcacaggatagtgaaaggactgttctgattgttcctgatgcctcaccatctgatggtcctgtggataataagccttcgacttcgcggtccctttctcttaacaagtttttgttcgcttcttcaaccaaagcaggacattcgttgccggttaccccaactgcaaattcaggtgtagagaatgtacatggaagacatctagggtgtgattctgatttaagtaaagtgaaagtaaatcagcacatgactcgatctgtttcggttccagttaatatcaaaactgctaatttaaggcatacagattctagaaggctggttcgtgtaatttctgtaagatcacttccaggcactagtggtggcatttcagctgacaatgctttgggatcagagattgtcaatgaagatgcttctgaggatattccggaggaagatgcagtttgtaggatttgtttggtggagcttgtggaaggagggaatactcttaggatggaatgcagttgtaaaggtgagcttgcacttgctcaccaagactgtgcagtaaagtggtttagtatcaaaggaaacaagacctgtgatgtctgcaagcaggaagtccaaaaccttccagtaacactcttgaaaatttctaatccccaaactgttactcggcagccattgaatgcaccagaaccacaacagagagaagtaacttcttacaggatatggcaggatgtatcggtacttgtcttggtcagcatgcttgcatacttttgttttcttgaggagctactggtttcagttttgggcactcgtgctcttgccatttcattacctttctcctgtgttttgggtcttctttcatctatgattgcttcaaccatggtgagcgggagttacatgtgggtttatgcttgcttccagtttgcaattgtcatcctgtttgctcatgtgttttatactatacttaatgttaatgccatcctctcagtccttctctcctcattcactggatttgggattgcaatcagtttgaatactctactaatggagtatgttaggtggagaacaagaagactgattcaagcttctatgacacaatagcatcgtcgtgatcatgcactgtagtagcaagaacatcaatgacactgtcatcaactgcaaaggctgcaataagagcactctaacaccctgaaattttcttaatttattttttacatgtgtaacattgcactgttaaggactagacagtgaaaattatgccccgtgtaatttaattatatgtttgtctgatttaatttattctttgccctccagcaatagttgaacaccagtattttgcaaacatgaagcattttttggtctcttatttgtttatagtttagaaactacaaagatttggcctttccaatctggtgtgaaccaaaatatatgaggaatgaatgaatccatca

SEQ ID NO: 66319 - DNA, 250 bp, Glycine max
  Clone ID: PAT_MRT3847_308C.1
ctgtatctatttctcacactcgcaactctttagcaaatcacacttgacgcggcatacaaagcgcacaggaagtaacaatcggagattaagcagcggtggtgacggtggtagtgaatagatacaagcagcaccataccatggggggagaacaagtagcaagagtcagagcagagttagttcgacgacgactatagcgatcgccacgacgacgacgtgttgagcgaaacaaggactcggcgagtgacgacgg

SEQ ID NO: 66320 - DNA, 158 bp, Glycine max
  Clone ID: PAT_MRT3847_30900C.1
gagggaatccgaggcagatcttcgagtggggttcgcacgtatgggggcttaaagacgtcagctagcccaaaaagtgagtgctggctgctctaggcatgaaatcggtcctgagatgcgcctggcaaatttggagcccaaggcactctgcataaccttga

SEQ ID NO: 66321 - DNA, 584 bp, Glycine max
  Clone ID: PAT_MRT3847_30901C.1
aggggaatggtccggaaaagtgttgggagtgcggcaacgtgagagaaccgagcgcatcggctcgagtacggctgcgagaagacgacagaaggggagggaaggaggagaagacaaattaaccaccaacaacagcagaagaaaataaaggagcaaactaaaatggcagcaaataaatacgttgcattgttgttggtggtgttccttatcgctggaagtgctaatgccagaccaaaagaagtcagctgcgcaagtatttgcatcgacaaagaatgcaaaagtgactttaacagttggtgtgcaatattcaattgtggtatcaaatgtgcactcataggaccacaaaagaaaactgaaacagttcaacgacaaatggtaaaagagcaaggactaacatcatcaaggaagattcaacaataaatgatgaaagaagaggcgaagcacaattggaaaaatacacctactcaagttttttaatacgtggctttctcatgaacaaggacatgcattttatacacgtccttgtcctcctttcctctgagtgttattaactatcacaataataataccatcaaaatattatccat

SEQ ID NO: 66322 - DNA, 558 bp, Glycine max
  Clone ID: PAT_MRT3847_30902C.1
gtttgctaagtcaaatgggtgatgctgtgaaagtatttgagttgatgattcacaagggcttcttgccaaatcttgtaacttatagttcattaatccatggatggtgtaaaactaaaaacataaataaggctctctttttgttgggtgagatggttaatagtggactaaatccagatgttgtcacttggagcactcttatcgggggcttttgcaaagcagggaaaccagaagctgccaaagaattgttttgtacaatgcatgagcatgaccaacatcccaatctccaaacatgtgccattattttggatggactattcaagtgtcaatttcattctgaggcaatatcattgtttagggagatggagaagatgaatttggaacttaatgtcgtaatatacaacattgttctggatggaatgtgtagttttggaaaacttaatgatgcacaagaactcttttcttgtttgccaagtaaaggcataaaaattgatgttgttgcttatactacaatgattaaaggtctatgtaaagaaggactattggatgatgctgaaaact

SEQ ID NO: 66323 - DNA, 338 bp, Glycine max
  Clone ID: PAT_MRT3847_30903C.1
agagctgtgaaacaaggcttgccatttcaatattaccatgaatgctacaacccccactgatattccttcggattaccgtattaagaaaatcgggcgttgtacatataatctcataaaccttcactaaacataccattaaaacaactccttcttccatcatgactgaaattgacaacgtcatttatctttttgttgctggtgaaaagcctaatgaggttaccgaggatgctcatgaaaaactgagccaaatactgttcatactcagaccacaagcaggttatgcaccacaactaaggattgtcctccatgatattgaaaacgaaaaaaaaaaaaattca

SEQ ID NO: 66324 - DNA, 178 bp, Glycine max
  Clone ID: PAT_MRT3847_30904C.1
ttttacacttttttatgcccaaaggcttgcggcgggggtgggaggtaaatttttgcctacccatccaaacgtgccatctgtttgtgactgacaacgatgacggtatatgaataccgtggctgctatttggtactgcttccaagatttatcctctgacactcctggtgctaaaattcta

SEQ ID NO: 66325 - DNA, 401 bp, Glycine max
  Clone ID: PAT_MRT3847_30905C.1
aacaagggccctttttttacctaatttacataacaaaaaaccgggaaaccttttaaagggaaatggcccccacggccatttttggaaaccaaacaaattggttttgaaacaaaaaattttccttaacttggaagagggtggaaaaccaaataaaaatttgggaagaattatcaacccaccttttttgggtttggggcatctgggggccaaattacttgtttcattagcccgtccctcattaacccccagtttttatcaaaaatttcttgatttatctcaacaggggtaccttttttgacccctttaccataaaggggaaggggagttaccatcactctttcaaaaagcttttggtggttcttccccaggggacgaataaaacgtttcccatttggtgggtt

SEQ ID NO: 66326 - DNA, 241 bp, Glycine max
  Clone ID: PAT_MRT3847_30906C.1
cggatattgctctgaggattgtggccccaggcaagggcattctggctgcagatgagtccgtgggcagcatggccaaaaggctgagccaaattggggtagagaacactgaggagaatcgccgactgtaccgccaggtcctgttcagtgctgatgaccgtgtgaaaaagtgcattgggggggtcatcttcttccacgagacactctaccagaaagatgacaatggtgtcccctttgtccgcac

SEQ ID NO: 66327 - DNA, 241 bp, Glycine max
  Clone ID: PAT_MRT3847_30907C.1
aagggccggtgtacgttataagaacaagccagaacggacacatgtaaacgtgaaacgccgaacgcaaaggacggaacaaaagaataacagggaacatggcaccaagaggaacagcccggggccaatatacatgcggagaaggcgagccctggaacttacaaacagcgaccgaaggcaagataggcggctaagctggacgcacccggaaaatcaaatacaggccaaagtgagggagaagacg

SEQ ID NO: 66328 - DNA, 159 bp, Glycine max
  Clone ID: PAT_MRT3847_30908C.1
cgcacgaagaagagcgtggagacctacgggatctacatcttcaaggtcctcaagcaggttcattgcgatgttggtagttccagcggggtcatggggcatcctgagcggcttcgagcacgacatcttcgagaagctcgctgaggaggcgtcgcgtttggg

SEQ ID NO: 66329 - DNA, 772 bp, Glycine max
  Clone ID: PAT_MRT3847_30909C.1
tcaatcatcatcatcatccatattttaacatagggtcaaaactttttatataggcagatgacttagcaatctatagaaatgcaggtctgggaaatgcttgcactgtcaggtctgctgataaaagggttaatcttgacccaaaccagagagaaaacagaagccaacaactctgaccacagaataacaatggttggggtgcggttttggcgacccatgagacccttgaggaatggatagagatggaaaatgacccagaaggcaaagaaaacctttccaaaaagtggtccccaagactcatatcctccattgagtgcatcagaaaatccagcaacaacaccaaccatattaataatgataagggttgttggaggaattaagagtgtggtccacttgattatgtatagatcaccaaactcggtgtcatcagcagctttggcagtgacagtgaagttggtgtcaacacctgccaacatcttcaggaatccttggaacacggcaaatagatgcgctgaaactcctccaataacccagaattgttcattacgccacaaagcttcaatggtcacaccactccaccgcagctcgagcacactagtgactataatggacaggaaaagtccaagaaagagggcacttgcaaggtttgaaagcgttggtatgatgaattttcctgtgagaaggcaaattgcaggcaaagtacaatatgcaacaagaggaagggatgtaaaggggtagacaatggtgtttatgtaagcaagtctctgctcgagcc

SEQ ID NO: 66330 - DNA, 737 bp, Glycine max
  Clone ID: PAT_MRT3847_3090C.1
gtatcatagttgttgagttcagtcttgcccgtcctcttgacaaatagtatttttcttcttctgagcaattctaactaaaacacattctaccaaaatcatctgatttcatttatttaaatatattccaaacttcaatccactcacattgttcatgcaaccgttattcatttttctttccttttctttttactaacatcattattctactttgctgtatctgagctgctgaacttcaaagtgtggcagcagatcctgctcttcttcttcaccatcagaatcctccagaagaccaagcctctcctctctgcaaataccagcgttgtcagtggaaaatgcattatcttcttttaacaagacagatggtcctatattgatatcaagtccaggttccagtagaggactgcccccaaggccaaattcagccagagtcatcaagtccactatgaaaactttactctctgaaaggagctttagggctaagaattcttcaatggatagtgaaaggacagttctcattattcctgatggctcaccatcagatggtcctgtggataataagccttcgacttcgcggtccctttctcttaacaagattttgttctcttcctcaacaaaagcagcacattcattgccggttactccaactgcaaattcaggtccagagaatgtacatggaagacatctagggcgtgattctgatttaagtaaaatgaaagaaatcagcacatgactcgatc

SEQ ID NO: 66331 - DNA, 701 bp, Glycine max
  Clone ID: PAT_MRT3847_30910C.1
gttgccagcttcttggtggtgaatgttaagaagttacatgcttgatacttttgactttcaaaaaaaaaaaaaaaaaaaaaaaaaaaaaaaaaaaaaaaaaaaaaaaaaaaaaaaaaaaaaaaaaaaaaaaaaaaaaaaaaaaaaaaaaaaaaaaaaaaaaaaaaaaaaaaaaaaaaaaaaaaaaaaaaaaccaaaaaaaaaaaaaaaaaaaaggggggggcccttttaaggaaccaaattttaacccccgggggggggaaaaaaaaattttttttttggggcccccaaatttaatttcgggggcggggttttaaaaaggggggggggggaaaacccggggggtcccccaattaaaggctttggaaaaaaacccccttttcccagggggggaaaaaaaaaaaaggccccccccaaagcccctttccaaaaattggccccccttaaggggaaaagggaccccccctttggggggcctttaaagcgggggggggggggggtttccccccagggggccctttttttttggagggcccttaggcccccccttttgggttttttccctttttttttagacaagtttgggggttttcccccgaaagttttaaaaggggggcccccttttggggccccaataaaggtttttagggccccttcccccaaaaaattttttttggggggggggtccaagagggggccccccc

SEQ ID NO: 66332 - DNA, 2097 bp, Glycine max
  Clone ID: PAT_MRT3847_30911C.1
ccaggggaagagtcctaaaggtgtaagcagtgtagaggaagtaaaagaggccaagagaagggggaggacgatggaaccgaggagctgactgttaaataaaaaatgcagggacggaggtgatgtgccaccgccgaaggcgccaaaggtaacgtcgaggttgacgtgaccgccgaagatgttggcgccgacggatacgctgcgaaaagggcgaatgcattgaatttataacttataagagagtaaaaacatattattctaatctttattttctgcatatcattccaaattctaaatggaaagaaaaatcactattttacattgatataatgagtcaacggttgatctttacacaggaaatttcatccaatgcatggaaaagaagtaacaaccatgtttgcaaccttacatttaaagtgcttacacatttcaactgcggctcaaatcacaatcaatcatcatcatcatccatatttttaacatatggtcaaaactttttatataggcagatgacttagcaatctatagaaatgcaggtctgggaaatgcttgcactgtcaggtctgctgataaaagggttaatcttgacccaaaccagagagaaaacagaagccaacaacactgaccacagaataacaatggttggggtgcggttttggcgacccatgagacccttgaggaatggatagagatggaaaatgacccagaaggcaaagaaaacctttccaaaaagtggtccccaagactcatatcctccattgagtgcatcagaaaatccagcaacaacaccaaccatattaataatgataagggttgttggaggaattaagagtgtggtccacttgattatgtatagatcaccaaactcggtgtcatcagcagctttggcagtgacagtgaagttggtgtcaacacctgccaacatcttcaggaatccttggaacacggcaattagatgcgctgaagctactccaataactgatttctgatcattagatagtatagcagattaaaaggtttcactctgacaacatggaaaaattaaactcttgaattaataacgaatatctttgttatatgaaaatacagctgaggaaattaccgttggtatgatgaattttcctgtgagaaggcaaattgcaggcaaagtacaataagcaacgagaggaagggatgtaaaggggtagacaatggtgtttatgtaagccagtctctgcagccatttgaggcgaccccctgcaaaaccataccagagggggcaatgtctgctaaagaaaatttcaactgatccaagggcccaacgaagaacttggtgcaatcgatcagaaagattgattggtgctgatcctttgaatgcaggccttaggggcatgcagtaaactgacctccatccacggcattgcatcttgaaccccgttaagatatcctcagtaactgaaccatagatccaaccaatctcttttccccatgcagttttctcttcatatccacagctaataacatgaatggcctctttgatcagcattgagggatcagcagattcaggaagccctccattctccattagtgtagattcaatgaaaacagtggacaaaccaaatgttttctcaaagctcatttgtgaaatcagcattgacctctcgtattcatcatagttgtcaatctccctgagattaaaaatggcggcatcaagttcttccctctttgcatctctataaagctctgagacgtctttggtttgcttctttgaggggcagcaacagcaggatgatgattttggtaatttgggcatagatggtggactgtagccataaagtgcttgtctattgaaaacacatccagttcccacatacataggtccttgaatgccatcaagtcctttcatgttaacatcaaagaaaactgtgtttcgattggcatatcgatcactacgatctataccatcaaatctctggggaaactgcacataacacaaatctctgccaactactggatccatcagaaaacacattgcttcccgtacagccttgctattgttcacataatgatcacagtcaagattagaataagggagcatttgtagaactgcaggcatgcaag

SEQ ID NO: 66333 - DNA, 368 bp, Glycine max
  Clone ID: PAT_MRT3847_30913C.1
gtgtttttttttttttttttttttttttttttttttttgttattgtttgaatgcttgatctttttcttttatttccccacccccgccccccaaggggaaatgcctttttttttcaaaaaaaaaaaaaaaaagcgctgtgtttttttttattgaagggctagtaaaaaaaggggttttttgtatttgcccgccaataaacaaaaaaaaaaccccttttttttccttttgtcccccccatttttattaaaatttaaagactggtgggtccaaattgggggacctaaacaaaccttcaaacctttcccttttttacctgaaagaatgtgaaggcccaaaacccaccttttaaggccggccccaaatccaag

SEQ ID NO: 66334 - DNA, 330 bp, Glycine max
  Clone ID: PAT_MRT3847_30914C.1
ctcttgtttcaagacctagatgaactctatagaggcatacattgggatgtttttctctatggtagctgagtcatagatctacatatatcacgccgttgctggagatgttatactccttaacattgtgtgatcaagtacttgctattggtgactctatcactgtgcattttaatttctgtagacttaatttacacagatttttcataacatgattatcctgaaaaatctagagaaccttttttgatatatggatttcaattggctcatcctagactttctatgattgttaaatttgctgatattaatactctatggaatcttcttatgtcc

SEQ ID NO: 66335 - DNA, 368 bp, Glycine max
  Clone ID: PAT_MRT3847_30915C.1
gcttatgttgagaagaagaagatatgtactcttgaagatctatgggatgatgagaagaagaaggcgcaacttcattggacattcatattctgaaaccttattgtgcaatgggctcagcggatagcaaatttcgtgttaggatctggatctatgcacgggcgtctaatatcatgtccttatgctgcactaaatatgcgcaacaataggatgtttgctccatctctaagccatctgactgaagcacgactgagagatctacgacggccgctagaagttgcatatgatggtgctaaagcttagcaccaagacgcacttgaacaatcgtggaaattggcttacccggacagtgagcttgcttgacttaaatc

SEQ ID NO: 66336 - DNA, 326 bp, Glycine max
  Clone ID: PAT_MRT3847_30916C.1
acctcgaattcggctcgaggtccatgcatgtgcgtggaagtgattttggattgttaaaatgaaagtggaccccaaggggcgggatatattaattcactccctcacgtgacccacatcgatgtcatcacaaaccgcccttattaaagagtgtgctcttagttcctaccaaagtattttcaattaaaattaaaaacatgggatcttcacctgacaccagcaaaaccatacagctggtgcgttacaacagctacctccgaagacttaacatatccttcaaaatccttttacctccttcctgggccttcctcaacctttaccctctttcc

SEQ ID NO: 66337 - DNA, 1294 bp, Glycine max
  Clone ID: PAT_MRT3847_30917C.1
acgagaatgatagctgtggagattgcggactatatagttcttaaaaaaattattcttgttttgttttgtattattttgttttgtaagattgttagatacatgttcagtcttctcaaagaagagaaagaaccaatcacaatattagtcaccggtgcagcaggccaaattggatatgctcttgttccaatgattgcaagaggggcaatgttgggcccaaatcaacctatgattctacacatgcttgacattgaaccggcaacagaatccttaaaagggctgaagatggaactaattgatgctgcttatccacttctcagaggtgttgttgctactacggatgttgttgaagcttgcaaggatgtcaatattgttgtaatggttggtggattcccgcgaaaggaaggaatggaaagaaaagatgtgatgtctaaaaatgtatcaatttataaggctcaggcttcagcactagagcagcatgctgcaacagattgtaaggtactagtggttgccaatccagcaaacaccaatgctctcattttgaaagaatttgctccttcaattcctgagaaaaacattacctgccttacacgacttgatcacaatagagcattaggccaaatctcagagaggctaaatgttcttgttagtgatgtgaaaaatgtcattgtttggggcaaccactcctcaacccaatatccagatgtcaaccatgccaccgtcactaccaatagtggagaaaaaccagttagagaattagttgtggatgataattggctaaacaatgagtttatcaccactgttcaacaacgtggggctgccattattaaagcaaggaagcagtctagtgcattatcagcagcaagtgctgcttgtgatcacatacgtgattgggtactaggtactcctaagggagaatgggtatcaatgggagtatattctgatggatcttatggtatcccaactggcctcatttactcttttcctgttacgtgtgagagaggagattggaacattgttcaaggactcaagattgatcaattttcaagggaaaagatggacaaaacagcccaagagcttattgaggaaaaaacattggcaaagtcatgtcttaattgacaacacgtgttttcttggaattattcttcaataattgtgtcttttaacaaaaagggaaaacttatctagttacctctatccaaaaaacaaaggatagtttcattctctatctaaattcatgatcaaattaatttatttttattgtatgcttatatgaaatttagttcctaaacaaaca

SEQ ID NO: 66338 - DNA, 476 bp, Glycine max
  Clone ID: PAT_MRT3847_30918C.1
acggctgcgagaagacgacagaagggtctagcgtgttgtcgtactattgcattgtgatggtttgtctgaaaaaaaaaatagggtcttgtgtatggtttcttttcattcacacgccttttgttcctttgataaagtgtcatctcgggtaataactttgcctaggttacaaactttttcttaaaaaaactgaaaagaaaaactaaaaaccaacatgcttttgaaaaagatgaccgccaatattatttggaaaattcataaatcaaaacgcaaaaggtttttgaaaaaaaagaaatgtgcacctagagggtgaacacaacgaaagattttcccgaatgccaaaatggactcggatgtttgtataacttgataaaaagagcaatcattgaaacactagtttgatttgaatgaggaaacaaacccttagccttagtgtttgcatggccacaaagccttatgttcgagtgtgatgaggacat

SEQ ID NO: 66339 - DNA, 345 bp, Glycine max
  Clone ID: PAT_MRT3847_30919C.1
actcgataatactatatacacataaatatgtgagggggttttattccaggttaggttttacgggactcacttattcgtatttgttctaacaatgaaattaagtgccattttacttagagcaagatttatcatcaccctaccgttttgaacatacactttggctttatttgaagatcttaggctattcagagggaaaagtagatagttggtgaaaggtgaaaacttttggagtattttatcgacgttcccattaatttaatttaacttgcggaagagactggatcctctctttaagaattttgaaggggtctgatcttgtgggtgcatgatattgctgtttggaca

SEQ ID NO: 66340 - DNA, 274 bp, Glycine max
  Clone ID: PAT_MRT3847_3091C.1
atactcacagagggtacatttggcaggagagacatcgttcggcaacaattgataagtagttacaaacaatattataaaaatggaagcaaacggaaaagaaaagagcccgcatttctgaatcatgattcttcaggtggtggtaccttactcaaatccagtccctgttcaggcaagtttgaagtaaatggtcccagggtcccatgaccggtgataggcaatccactcttatgctggaaccttaacatgttttgacgaaccataacttttggttggg

SEQ ID NO: 66341 - DNA, 194 bp, Glycine max
  Clone ID: PAT_MRT3847_30920C.1
gactgataagcaaattgatattagtagttctgattggtgttagaggtgttctttttccccagttaaatgattttacactgttgtctgttgttgtaacacatgttgctttttggattctccgtacaaatagatttggctactgtttacgttttcaatgttgtattatggtccgtctgtttcgataaagtgttccc

SEQ ID NO: 66342 - DNA, 343 bp, Glycine max
  unsure (1)..(343): unsure at all n locations
  Clone ID: PAT_MRT3847_30921C.1
nnnnnnaaaaattttaaacactgtccacagcggccccaacaanannaaaggggccaggggggcaaggccaaaggacgaccaaccccccccaaaaaacgagcacacaaaanccacagcagcgncacanccagaacaaaaggggaccccaagaaccanaactaaggcaaaaagagaaacaagcaagcnacccgggncnaaccaaacaacaagagaccgcngaanacgaaccgaaacagacannangcaaccccacanaacancacaagcaacaaaaccaagnggaaaaaaaaccaaaccaaccgacccagaaaacacaacancccaaccaaaaccagagaggaca

SEQ ID NO: 66343 - DNA, 1655 bp, Glycine max
  Clone ID: PAT_MRT3847_30922C.1
attttattcgcttataatagctttgatcctttttgtgattaattggccgaatattgttatttgttattaatgtttacgcaaatgcctcaattataagatgcaccacgttctgtgaacttttcaccttcactctgtatcactaatccttctctgcttggaggcttttttttttttttttgatggatccggcaaagggattggaagcttcgggggagaagacccttcaagcagaagtgaaagcttttttcgattctgctcctcctttgcagaaaagtgatgagataactcagaagttgaatcagttcattcaacgcatttcttctccatcagcgaatgggaaagttaggagaattgtttgtgtgacttctggtggcaccaccgcgccattggaacaacgatgtgttcgctatgtggacaatttcagttcaggtcacagaggggccacatccactgagtatttcctgaaggctggatatggtgttatctttctgtaccggaagagaagtttccagccattttgtagatcccttcctgatgatcccttacttgaatgcttcaagcccaccgatgaggcgaacattcaagtttgcgaggcttattctgaagcagtgaagagggctatcgtggatcatcatactgcagtggcaggcggtctcttattgaaacttcctttcaacaccatatttgagtatctccagatgttacaaataattgcaatgtcaatgaggtgtattggtccccatgcaatgttctatcttgctgctgcagtgtctgactattatgttccttggaaggaaatggtagagcacaaaattcagtcaggatcatctcaccttttggatgtgaaactagttcaagtgccaaaaatgttgtcagtgcttaggaaagattgggctcctctggctttctgcatatctttcaagttagagacagattcaaacattcttctaaataaggctggtgcagctcttgaaaagtacaagatgcatgcagttgttgcaaatgaacttgcaagtcgaaaggagcaagtagtggttgtcactagtgccgagaaggttaccgttcagcgtgataatagtcagtctgataatgatgttgagaatcccctgattaaacttctttcggagaaacatgccacttacattgaggattctggtagatgagtctagggaatgactttggcttctcctcgttacagttacagttttggacactacaactaattgcatcaataagtcatgatcatgaataaaaaggagaagaattagacagtatggatacggggtctaaagaagaaaagaaatgtagcggagacgacagttctaaccatacatttgacagacttaggccatatatgaatgttgtatttcacttgtccttcttatcattgttaattgggataccccgtttgtcatattaatttataatatcgaagttaagatgtgtgtggtgaaactttggtacgtttttttggttttactggaattggtagtttaagatgaacagataccattaatcaacagcaaaaggatgatgtataggtaaatattaacccagggtctgagatgtgtaatttaccattatgaacacaaagttgtaatgtattgtaatttgtaaggttaaaaccacagaagaattttattactctattgatc

SEQ ID NO: 66344 - DNA, 1750 bp, Glycine max
  Clone ID: PAT_MRT3847_30923C.1
caggacattgcagtgattctctaatataaatggcaggaataatctcagtattctgtacatactatggataagtttgttccatttccaattttccatggaaaagagaaacatgctgctaggcaatgcctatctgagtatcgataacaaccatccctacattcaaaagcaagctgcctggcgacaataagcacccaataactgcacaaaaatcagacagaccaaccataaaaagaattgatatcacataagaatatgaaaatgtagtaaaatggtttccctatgatcacagtcattcatgcagattaacagccctcaattctagctaatgcatgtacatattttactgatctattgttgtgcatcaacactgcacaatgattgcagtattttttttcaaccatgaatataattgcaccacatatcattttgtaaattttgtccagtcttctccctctaatgtaaaagatgctggtattcttatctactatactgatgactcccagaacatgtttgctactagaaatttcacccacttgcataatcacctccactatccatccgcattcttttgcttacataaggctttatcttgattgccatctcagattgagtttcaacatttaacttctgtttctccctctcaaactcttttctggattctcttctgctaccagattgccagactctaccaaaattaggaagccagttggaatcacactcattccttatagactcccccctcctttccttctccatttcaatcttcctcttttcaacccaagctgctccaacccgttttgaattcaactttttggacttccctaacttgtttgaagaacgcatctgaacttcatcagttgttccaagccatggtggaggttcttcagaaaaaacctttcccccagcacttccagtagatatctgagtgaccatttgtacaccctgatgactgctctctccgcttaccattcttccattttcacgcacctttttattacaggagtaaccattacttgaccgttgtctaccatcatgagggagagaaaggctactacgtccaactgcaaaatcttgcaaagaaaaattatttgcaccagagcaaacttctgaagaggtagcaccagtggcaaccccgcagagtcctgaacaagatacctgatactcatttcatcacttgaaggaccaatcactgttctgcgacttccctcactcgcttcatcctttcgagccgtgcacttcttctcccacttatccacgtcatcgtcagaaaccataaacgcgtccaattgatccgcggcaccaccgtatttccagaagaattgcttcaaattcttcacgtgttccgcactcgcgaggtgacgaatcgcgttagcgcaggcaaaggaactgttgagttcgtcgatgtgctggtcgcagaagacgcaccagaagcgattgcgagaagcgagttggggattgagagggattggggcgttgaggaagaagcgaacgtcggagagttttttgcggaagcgggagaggaaggtggagagggatttcttgtgattaggaaagtacttgtggcggagaccttggtcgtggtttatgttgcacgctttgcagaactcgaactcgcttttcttcttcttcttcttctgctgatgctggttctttgttcccgttctcccattctcgttctcgtgttgctcccccatgatccaccacgaatggactcgttaccccgtgcgccgagccgaattccgagctgacg

SEQ ID NO: 66345 - DNA, 278 bp, Glycine max
  unsure (1)..(278): unsure at all n locations
  Clone ID: PAT_MRT3847_30924C.1
tggtgttccagacaacagaagaattngctcaanagtantcttggtctgcatccaattcaggttgcnntcaagtngntctgccagagtagatggaggnatgnaggcaattgcattcgctggtcgannnctannacagganaatctcatgctctncataagagagtggaacagtctctgcatcaggggcaatcagatgggctgnnttgagctagaaaatnagaggaagagnngacactagnantcatgtcttcagtttccctccagacaaaggaaagtgg

SEQ ID NO: 66346 - DNA, 358 bp, Glycine max
  unsure (1)..(358): unsure at all n locations
  Clone ID: PAT_MRT3847_30925C.1
ctgttctggacgcacgggcttggcttttaccaaaccaggaaacggatgaggcttcacttcttctattaccgttatacaattttgttctcttaccatggtgaggctgggggaatcacttggggataggtggttgaataaggaattcttgggctgatgagcccatactatatgcgctggctctaccactttttctgagttttgctctgcactcctttgctagctaccctctctatcgcggtatttcattcctcattctccgagaactcttcnaattaccttcccttttctggtgccttatttttattgaactggtcaaacgattaatgggatctttgctaattccgggcagatctgcatt

SEQ ID NO: 66347 - DNA, 163 bp, Glycine max
  Clone ID: PAT_MRT3847_30926C.1
attatattcaggaacagaagaaaagataacggtcaacgaagcaagaaaaccaggatagacactgaaggaaactggacactcacaatgcaagtcgaacgcacgacaaatggacagacgtcgacaagaccgtaggcaagagccaaagaccgactcgtggagatct

SEQ ID NO: 66348 - DNA, 272 bp, Glycine max
  Clone ID: PAT_MRT3847_30927C.1
attatagacgcctaggagcggcactgattagaaggccgatataaaccgatccaacgtggatgatacacgagactatagactgagcgtttgattactactacagctcatatgcaagaataacgctagtgaatacttatacgctgggccagactacaacgagggaatcctgtagttcggaggttaggaccaaggggagcccggacgtgctaattcgatgcataatacagcactctatggacctgggcttcctccagattaatttggtccaatgg

SEQ ID NO: 66349 - DNA, 342 bp, Glycine max
  Clone ID: PAT_MRT3847_30928C.1
ccgggaaaaggaaaaattttaaaccggaaaactttacaaaagcttcaaaaaaaagggggggccctgcccaaagccccctttaagggcttccctgggctactaaggggggggcgtacccgatccccttttaccaggggtgtttttttttaatttacaacacccctaaaaacaggtttttttttagctggctaacataaactttaccattggggggtagccccgacaagggaaaacctgggttttaactttttaaccatgggaaggaaagtcccactggattatggggccaaaccctgccctagtacccaaattaaagggccccctttacatttttttttttgg

SEQ ID NO: 66350 - DNA, 376 bp, Glycine max
  Clone ID: PAT_MRT3847_30929C.1
cccacgcgtccgttttcctctctttcttggttcttttgtttactaagcttagatgcaggggcttaactgtcttaacttttcaagtgtggtttttcaatcagaattagagttttacatcgataataccgataacaaatgtttacgtgaaatgtctaacttagatttccgaagtaaaactctaattttgatcggacaacaatattaaaaaaaacttacaagaactgcttttctcttcccatgaaaaatgactgttactattcttttggggaacgtgcgtgtgtgtgctcgcactcacgtgctcttctattgatgatctggatctcggaatttgaactactgtgtcaagaagtttctgtttttaagctgcggagaaaaa

SEQ ID NO: 66351 - DNA, 188 bp, Glycine max
  Clone ID: PAT_MRT3847_3092C.1
ttaaagggggcggcctctcgtttttttttttttttttttttttttttatctgaagggcgaggaggcaggagtgaaatttagcctactcctcttcacgaggaagacagagagttggcatggcctgcatagttgaccattatccttgaggttctctagtagcaccttttgttaaatagaagagggggagg

SEQ ID NO: 66352 - DNA, 598 bp, Glycine max
  Clone ID: PAT_MRT3847_30930C.1
tgagtgggtttttggtgaggtggttggtggaggagccgtttcagatgaggcaggttttgaattttgattacaccaagcagagtcctgttgcatttgtacctgtgatgtcttgtgatggtgttgggggtgcgcatgattctgagaagggcattgctgttagagagtggatgggtagaagggttatacctgctaaccaaaaggtgcaggtcactgtttcattggttgtgccagagtcagaatacaacacaaatcttggcatctttcaggtacttatgacttatctcagtcattttaatccagagaatgacatgaactgcttgcatgatgttttactagttctaatagtaatgtgtaatgttactgtgctagcataaggacctttgatggtggatgggctatttgtggtcacttctcagtagtgtacgactttaaagggtttgagtggcaagttggtgctagttttaactctcaatatctttttatttgctttatttgagtattgtcgtagtttggttagaagaaatgatgaaaacatgattctagaatatcatgaattaggggttcaaatgttcaatagcttctatacgccaagtgtcgc

SEQ ID NO: 66353 - DNA, 321 bp, Glycine max
  Clone ID: PAT_MRT3847_30931C.1
cgagttcgagaccaaaagcactacctcaactggctgaagaaaggtgaagcaccatttgtggcagtttacatgtcattcacgcaatcatcacagacataatcttgatcaatgtctactcacattcttactcaatgtttttgtgacttccgaacatgagtaggttttccgataactacactgactagtgaaatgtcaagtaatgtttcgtactttcatttgtagctgatatgcacctcacattttgtagaagctagataagataacttctatagcacttaactgcatacgttgattttaaaaatcgacgctcaggtcagacgt

SEQ ID NO: 66354 - DNA, 489 bp, Glycine max
  Clone ID: PAT_MRT3847_30932C.1
aagattttctcatttagttttaatagaaatttctcatttacttaaattatttaccacattaaattatctaataagagcaatgtggtatttttaccaaagtaaaacttttttctctacttggaaaagttagattctcacctcccctcagggacaatttgtgggaaacacaagtaaaaaaagtcctaggtaacaatattttctgggaatgttatttttaaataataaaccaaacatgggaaacaaatattcccaacttcagattcctgggaaactaaaatttttccttgcaccaactgcccccttaaattaattcttgcagcatggattccaatactctggtattgctgctgcctacggaaaagatacaaatgtgaacatgggatataggagacagtgagataacgacttatcttcggttacctatattatatgtaacatgtctggtgtttcgaatacagtttctggatatgggttctttgcaagctgcac

SEQ ID NO: 66355 - DNA, 153 bp, Glycine max
  Clone ID: PAT_MRT3847_30933C.1
tttgtgaaaagaaactgaccatttaaaaagaccgctgatccggaaaacggagcaacataacccatgaaagacaatctaactgaccttaaaggcctatcacatggagctcaacacaatccacactaccagtctgaatgcgaagaaataaatcct

SEQ ID NO: 66356 - DNA, 210 bp, Glycine max
  Clone ID: PAT_MRT3847_30934C.1
ggagcgaataatatgtgaaggggtttgagtgcagtgcggcgatgctagcactctcttttgcagctttcgccgacagcttcattcaccatggctgagtaaaccgagaaagcttttttgaaacaaccaaaagtgtttttcagctcgaagaaaactggcaagggaaagagacccccaaagggtgtggaaccgcttttggaaatccattgggct

SEQ ID NO: 66357 - DNA, 880 bp, Glycine max
  Clone ID: PAT_MRT3847_30935C.1
aaacgacgtcgcttccttcgaccgccaaacttcttctagaatatacttgcactcctcctcttccgacgacgacgtttcgccctcccactctatccaatccaccaaccgccgtctcgattacatgctccagttcctcgaccggaagctctcctccgaccacgcccaccgccgccactcatccggctcccgcgccgcgcaactgccggagttcgtcgcgaagggcggcggcgctggcatcttccgcctccctgctcgcggcgcggtgcacccggcgcggccgccgagccctcgagccgctcgagccgcgctgcgagagactcagattggacgtttcctgaggaacattgtttccaccgagtcgcagctatgggcggcttcggagtgcggggtaagattctggaacttcaaggatctgtacgcgtcgtggtgcggcgaagaagaagaagaaggagtggttgcgaggaacggcgacgaggagagtgcgccgtttcgagagtcggtgtggacctcaccaacgttgtgtttggttgcggatgaggggaacaggttggtttggagtggacataaggatgggaagattaggtgctggaagatggatgatgatgacgatgataacaacaacaacaactgcgattggagcaatcggtttacggaaagcttgtcttggcatgctcaccgtggacctgttctttcccttaccttcacctcatatggtcattcttcactcttcactgttaactttactgctctactattattagacttaggctttatttagattatggataaatttaggcttgtttagattaggataaatttaggctgttatctaccctagcttggtgtataccttgatttttttttccttcacttagagcat

SEQ ID NO: 66358 - DNA, 333 bp, Glycine max
  Clone ID: PAT_MRT3847_30936C.1
ggcagatacgctaatttctaatattgttttattgaccaggaatcaccctactgtacgggtcttattggggtaggtggtatcccataaaacatcctccacataatctcatcttatagagagagaagcgtcagctcaacttatgctaggtcacactgttccctacaagacactcttggacgcacacaacgagagctccctacatcatatcaaaagatagcacctatcaactacatatgtaagccatgacacgattacattacaagcttgcaacactacactggaaaactgccttcaacgctttctacctgctaaaatgaacgtcatcgtgttaag

SEQ ID NO: 66359 - DNA, 322 bp, Glycine max
  Clone ID: PAT_MRT3847_30937C.1
acaaattaaatttaacaagccatccattcagagtgggacaaataccatcaagggactaaccatgtaataaattacatccatacaatggctcataacataaacacccacattattgtgcaaagggtgaaagacccccacatacacttgtaacaactcataccagcaagcacattccaaaacaagagcctaaccccttgtcttgaaagggatggctcagatcactatccggtgatacacaacacccagggcaagtccaatgaaaggtccagagccacaaaatccattggttatcccatgcatagtctatgttgtagaggatggc

SEQ ID NO: 66360 - DNA, 137 bp, Glycine max
  Clone ID: PAT_MRT3847_30938C.1
gcatattcggtttttgttatggggagagaaaccgacccagtcgtgctactgccggtgttccgtgcaaaccgaagggaacgaccgaacaagggcccagaattagggtcctaaaacaactcaaccaactttgtgggcaa

SEQ ID NO: 66361 - DNA, 1400 bp, Glycine max
  Clone ID: PAT_MRT3847_30939C.1
tggaagctgcgagaggaggcggaacctggagtggaagtgcgatcccgtgcgatccagtgttagtgtgtatttcctctcttctcactccgggatcgatattttcaagaacagatcgaaaagccgttcatcgatttgttggatctgtgagtgagaagatggttactaagacagaggagactcaattgaacaggctcgaaaaccaggtcgataacggcggcgacggcggcgtgggagtacggatgccctctgcctcgtgcgaaagctgaaagttcggcggtcggagaaagttctgaagcacggtctctctatccttaacgaccccaaacaccgatcctctctcggctccgatgaatggaccttgtatgagcaggttgctgttgctgctatggattgccaatgtctcgacgttgccaaggactgtacaaaggttcttcagaagagattcccagagagtaaaagagttggtaggctggaggcaatgttgcttgaagcaaaaggatcctgggaattggcagaaaaggcttacacaagccttttagaggacaatcctcttgatcaagccatccataagaggagggtggcaatggcaaaggcacaaggcaaaatttctgtggctattgattggcttaataaatatctggaaacattcatggcagatcatgatgcatggagagaattggctgaaatatacatctccctgcaaatgtataaacaagcagcgttttgctacgaggagttgatattatctcagcctactgttccactctaccacttagcatatgctgatgtactttatacgcttggtggattagaaaacctccaaactgccaagaaatactactcatctactattgacttgaccggaggcaaaaataccagagcactctttggtatatgcttgtgcacctctgctgttacacagcttacgaaagggaaaagcaaggaggacaaagaagggtcccagttacaatctctagcagccaaagtattagagaaagattacaagcagagagctcccgacaagcttcctcaacttacaactgccttgaagagtttaacattgtcatcatgatgcagcatctcttaaagattattatttagttacttttgacattttctcagattgttgcgagctttaatcaacatatttagatttcctcaatcattttttccccaatattagaatgaaaattcatattgttctgcattttagcttcgataatgaatatttattgaaagacataaagtttcagatagccctgtactgtagatctaaaaatattgtcatagctttcctaatgcataggacggggcataatttgtttttgacataaaccatttgtttttcattggctatacaaattaagttagaagattaccccctccccccctttttaata

SEQ ID NO: 66362 - DNA, 1045 bp, Glycine max
  Clone ID: PAT_MRT3847_3093C.1
ctctttcatctaaaagtcccaacgtcacaaccacaataatttcataaaggagtccacttacaaaaacccttgttctctctacgtctctctatcctcatctcactccgcatcaatcccctctctctctctcccaaacgcaaaacctaagcatggctcagaaggcccatcccttcatctctctctctctattctcatttcaatccccttcttcaacccctctctctctctccaaaacgccaaaccaaaaaatggctcagaaggccgagaaaaacgacaccgactttaaggtccccgaaaccatcatcaccccctgcaccaccaccaccgccacctcgattaccgaaccttctagattcttcgacgcaaccacccccgccacgtcatcgcgctcccccaagcgatccctccccctcgacgacgaatctcagacggaccaaacggcgtcgtcggagcccaaacgcgtcgtgagccgctgctcctgctgtcggcggcgcgtggggctcactggattccggtgccgctgtggcgacctcttctgcgccgagcaccgctactccgaccgccacgactgctcctacgactacaaggccgcagggagagaggccatagcgagagaaaaccccgtcgtgaaggccgcgaagatcgtcaaggtctgaaaaccctaaatcggagaacaaaaatctcccaagagatcgaacaaatcgctgagaagaagaaggggataacacgaaacgacgtcgtttccacgcgatcgcggttcggtgattgattgattaattaattaattaattactcgcgtcgcgtcttttctccgagacgcgactcggcgcgtgggtggaaatctgggaatttgtataatttctaaatttttatgcctttttttgtttaatttgggttggaaatttataaattattatcgtggttgttatgtgaatcagtggaatgaatggtttttcgttgcctaaaatatactgtactgttcgcccttttcttaatttttaattttagtttgttttcttaaatttttttttttaaagagacaaaa

SEQ ID NO: 66363 - DNA, 227 bp, Glycine max
  unsure (1)..(227): unsure at all n locations
  Clone ID: PAT_MRT3847_30940C.1
caacaaccgacaacaacaactaacgtgagnataacatcatcatcatctacgttgttgttgttgtcggttgttgttggcgcaggaagaagtgcgtgggtgccctttcatgcttcctactgctccaacaatcgataacaacaacaacgttgatgatgatgatgttatcctcaacgcggatacacttttcggtatatctacgaccgctcataagcattcaatttctccta

SEQ ID NO: 66364 - DNA, 443 bp, Glycine max
  Clone ID: PAT_MRT3847_30941C.1
gggaacaaaatgattcagggggaaggatcccttttccccttgggccttttaaaccccacttaaaaaaaagctttgtttttacccaaaaaatttggctaaggaaatcccgtttccaggccccacttaaaaagaggggaaaatgggtaaaaaaatgccctttacccgggccctccataaatttattggattttttaactttagcactaaacctagcttgttggaaattcccaaaaaaggggggaaaagaaccgccgctttatcgtgggggcaaatttacccttgaaaaaaccatttatggggatacaacttccgcattattttaataccctttttcccttatgaaccaatttgatcagcaggccgaatcccccccttgagtttccccaatttgggccccggaatttttttttttttggataaacccctggccccaggcaatgtgg

SEQ ID NO: 66365 - DNA, 422 bp, Glycine max
  Clone ID: PAT_MRT3847_30942C.1
ccctgtatggattccttgagcctcaatcaatacacaatgcaaaggacagacgtggacaatgtgaggaatatattgaaaaatggcttaaggaatcgcagcgacaagtgtacttaggagcttatttgaatcaggctcattggcagctgattgttttatgtcctaaaaacaatgtggtggtatggttttgttcgttgcgtaaaaggcctgatgttcatataaaaactgcaattaacaatgcatttaagacattaaacaccacaactgacgacaaagttcagcaaactacaccccagtggattgaactcaagtggttcggtgatggcacaccacatgacaccgacaccatcacaacattacgtcaaaattgggcagcctattttttaaaacttagagccatccaacgtaaaaagctttaatttatt

SEQ ID NO: 66366 - DNA, 489 bp, Glycine max
  Clone ID: PAT_MRT3847_30943C.1
tgcggctgcgagaagacgacagaaggggacagaaaagaccgttgaatttcaaacctcagccatgcccgctctcagaagagcgaaatcgattgtcggagtgcgaggccatatccaaccacgacacacctcatgaacagaagaagaatatgtctgagtacgagctgtcgagagagcagagaatccgcgaaaaccgcgagagaatgggaaagctgggaatcttggacctttccctcactctcaagctcaacaacaaaaacaaaagatcctattcctctcacaaaccccaaacccctccttctcttccaaactcctccgtccccgttcgccgctcttccaggttgcagaatgtgactcctgttagttactccgaagttcccccaaagaaagacgagtttaagaaaaatggaagggtggtcattgaacaaagtgccaagccagaggtgtactctgaagaacacgagaagctgttgggaaacaccgacaagccct

SEQ ID NO: 66367 - DNA, 201 bp, Glycine max
  Clone ID: PAT_MRT3847_30944C.1
tgctatcaaggactattatactatgcttgaagtgttaggctgaattcagtgagctgcactgattgtattcaaagcacactctttaagctaaatgataagatgactctatcaattggaaatgattcaaactttgtcggggatgattttactacattcttagattctattgactgcagaactgagatttctttataatctaaa

SEQ ID NO: 66368 - DNA, 1164 bp, Glycine max
  unsure (1)..(1164): unsure at all n locations
  Clone ID: PAT_MRT3847_30945C.1
tttttntttttcaaggatcaggaaaatgacgagtggggatgtgcactatagttttgaatgtgctggaaatttaaacgttataagggatgccttcttgtcagctcatatggtatatatattcatgtaactattttgctaagattttaaattgtacgtaattgtcatcacaattgcagactcattgctatcattccttagtatagcgggcataaaatttcaaaattatcattaatgtggctataattacagatggaaattctgatattcttataattaaccaggattggggattgactgtgatattagggattcatccatcaccaaaattgcttcccatccacccaatggagttgttccaaggtcgcaaaataataggatcggtttttggaggcacttcaactttcacggagtacacggtggtggattcagcatgcgtcgtcaagattcacgttgatggcgatggcgacctcaatccctacattaaaagacttaccttactcagttgtggtgtatctacgggtgttggagctgcttggaataccgctgatgtgcattttggttcacctgtagctgtctttggtttacgtgctgtgggtctctctgtagcagaaggggcacgagccagaggtgcatccaaaataataggcgtggacatcaattctgacaaatttatcaaagcccgagcaatgggcatcactgacttcatagatccaagggatgatgagaagccagtatatgagaggatcagggacatgactcgcggaggtgtgcactctagctctgagtgtgctggcgatgttcacgttctatcggaggccttcttgtcagctcatgccggttgcggactgactgtgatattagggattcatccatcaccacaattgcttcccatccacccaatggagttgttccaaggtcgcagaatagtaggatcagtttttggaagcttcaaagggaagactcaattgccacgttgtgccaaaaaatgcatggatggagtggtgaagttggatgaatttatcacttcacaacctcctatcgagggaattaacaagggactacgattctttacatgtgttctttagggttcaattcaccacttatttcaaaataggaatacctcatataaccttttctaaaatggaataaaatttaaaatctaat

SEQ ID NO: 66369 - DNA, 261 bp, Glycine max
  unsure (1)..(261): unsure at all n locations
  Clone ID: PAT_MRT3847_30946C.1
cgggccggaccaggctgcacaggctagtgcctttttttataaaaaaaattatggagctcngaaatggctcaaacgtttggcagtccaantagtccaancgcatgcaagctagacaagaccctcanagcctcttgaattgaatctcatttactnattactcttnaatctctnctctngagccctctctgtcnagacccttacccttgactcgaggcctngagccttctatttcgattgnnaaccccattagccnnaagtttc

SEQ ID NO: 66370 - DNA, 486 bp, Glycine max
  unsure (1)..(486): unsure at all n locations
  Clone ID: PAT_MRT3847_30947C.1
attagtcaatagtcataaagacatatacataagagaaacagtgaatgctagtgatataaagagggaaaagagaaacaaataaaacaaagcaactttagcaagttaaagaaaccatgagccacctcatttccctctaccactccctctcggacgaggaaatcatcaagcttcgaaaagaggtgatcaaatccaaaggggtaacatacttgaattcccaacatgaatgcttccttctcaacctcgccgcagcagagcgccttgaggagcttgacacagcagccgacactgtcttcgcggctcggccggaaatgctccgatccgagcctcagcagcttcgaccttgtctacgccgacctcaagcttggcctcatcgaccttcgaaagctgagttacggtactcgcacaccccgaagattatctncaaaattgagaagcttgtctcttcaccaaaagtcttcattctgccatgcattgcatggcggaaca

SEQ ID NO: 66371 - DNA, 661 bp, Glycine max
  Clone ID: PAT_MRT3847_30948C.1
aacaaaacaaaagggtttcccattcgattcgaccccaccaccgctgttccatactctgccttcttcaaatcgccatctcttcctttctcaccaaccaattacaaagactatggggagcaaggcaccaagttggtctgaccaatggggaagtggagggtttgccagtgaccactatgaggaggaggaagaggagaagacgaagatgaagaagagtgggagcagcaagaagatggcagatgcaaaggctgtggcatcagctgggatggacaaggccaaaactgcagcagttgtgggtgcccagaaggtgaagagtggaacctctgctggcctcaaatgggtcaagaatcagtaccagaaaaggacttccaagtgaaaactcactcacttgcttgcttcttggacagacagtttcatttcaatagctttggtaaataatacatacatgatgatgctctagtaaaagtgttttgcttgtttcttaaattattattacagtattatgctttggtttttctttctagtacaacagtccagattaacttgttatttttatatttttacattttttatagaaaaatgttggatgttaatcatgttataaatttttaccctccatatctatctttctgttactgctctcggtgaacaaattttacagttt

SEQ ID NO: 66372 - DNA, 598 bp, Glycine max
  Clone ID: PAT_MRT3847_30949C.1
cacattcgaccccacaaccgctgttccatattctgccttcaaatcgccatttcttcctttctcaccaaccaattacaaaggctagagatatggggagcaagggaccaagttggtctgaccaatggggaagtggagggtttggcagtgatcactatgaggaggaggagaagatgaagatgaagaagagtgggagcagcaagaagatggcagatgcaaaggctgtggcatcagctggaatggacaaggccaaaactgcagcagttgtgggtgcccagaaggtgaagagtggaacctctgctggcctcaaatgggtcaagaatcagtatcagaaaaggacttccaagtgaaactcactcactcacttgcttcttggacagtttcatttccatagctttggtaaataatacatgatgctctagtaaagtaaagtgttttgcttgtttcttaaattattacagtaattatgctttggtttttctttctagtacaacagtccagattaacttgttatttttatatatttttcatttgcttatagaaaaatgttggatgttaatcatgttataaatttaccctccacctaaaaaaaaaaaaaaaa

SEQ ID NO: 66373 - DNA, 911 bp, Glycine max
  Clone ID: PAT_MRT3847_3094C.1
cgggccgagctttcattaccaacctcacaacacaacccctttctcttctcttccaattacaaatcccttcttctctctctctctctttattctcatttcacaactcatcaatcccctctctctctctcccaaacgcaaaacctaagcatggctcagaaggcccagaaaaacgacactgagtttaaggtccccgaacccatcatcaacccctgcaccaccaccaccaccaccaccacctcgatttccgaaccttctagattcttcgatgcaaccacccccgccacttcatcgcgctccccaaagcgatccctccctctcgacgaggaatctcagacggaccaaacgacgtcttctgagcccaaacgcgccgtgaaccgctgctccggctgccggcggcgcgtgggactcacgggattccggtgccgctgcggggaccttttctgcgcagagcaccgctactccgaccgccacgactgctcctacgactacaaggccgcggggagagaggccatcgcgagagagaaccccgtcgtgaaggccgcgaagatcgtcaaagtctgacaaccctaaatcggagaacaaatctagaagaagaaggggcaaaaaggggataacacaaaacgacgacgtttccactcgatcgcggttaggtgattgattaattaattattaattactcgcgtcgcgtcttttcttcgagacgcgactaggcgcgtgggtggaaacccggggaatttgtaaccggaaagatgaatttctcggtgatcctttttctttttcttatttttaatgtataatttttaaatttttatgccttttttttaatttgggttggaaatttataaattgttattgtgattattatgtgaatcagtttaatgaatggtttttcgttgcctttttttttattt

SEQ ID NO: 66374 - DNA, 682 bp, Glycine max
  Clone ID: PAT_MRT3847_30950C.1
gcaaaattcctttgggccaacccgaggagtgatagccacatgctccaatcaagattagtctctaacccagcaccaaaaggcaaaaaaagaagagtcaattcttcaatgtgacaccaaacatgtaaacatttacctaacatgatgctagactatggggagcaaggcaccaagttggtctgaccaatggggaagtggagggtttgccagtgaccactatgagaaggaggaagaggagaagacgaagatgaagaagagtgggagcagcaagaagatggcagatgcaaaggctgtggcatcagctgggatggataaggccaaaactgcagcagttgtgggtgcccagaaggtgaagagtggaacctctgctggcctcaaatgggtcaagaatcagtaccagaaaaggacttccaagtgaaaactcactcacttgcttgcttcttggacagagagtttcatttcaatagctttggtaaataatacatacatgatgatgctctagtaaaagtgttttgcttgtttcttaaattattattacagtattatgctttggtttttctttctagtacaacagtccagactaacttgttatttttatatttttgcatttttttatagaaaaatgttgaatgttaatcatgttataaatttttaccctccaaaaaaaaaaaaaaaaaaaaaaaaa

SEQ ID NO: 66375 - DNA, 1920 bp, Glycine max
  Clone ID: PAT_MRT3847_30951C.1
gtcgactttaaccttcagatataacagcagacactacctgcggaagacgatccggagccgccacctattcttttgttcatcacatattcaatggcttcctctcttctctctccatcatttacatccttcctccgcaccaaggatctctctctctctgctttcacttctcagcgatgcttcaaagcggtgccaaggaaaataatccgttgtgctattgcggcgcctcagcgccaaccttccaccactggatcagtgaggactgcaatgaccatgactgagaagatattggccagagcttctgagaaggcacagctgacccctggggataatgtttgggtcaatgttgatattttgatgacacatgatgtgtgtggccctggttctattgggattttcaagagggagtttggcgaggatgccaaggtttgggaccgtgaaaagcttgtaataatacctgaccactatattttcacaagtgatgaacgtgccaatcgcaatgtagacatattaagagatttctgccatgagcagaatatcaagtacttttatgatattaaggatcttagtaattttaaggtaaatccagactataagggtgtttgccatgttgctcttgctcaggaaggtcattgtaggccaggagaggttctcttaggtactgattctcacacttgtactgctggagcatttggtcaatttgctacagggattggtaatactgatgccggctttgtgctgggaactgggaaacttctgctcaaggtgcccccaactttgagatttgtaatggatggagaaatgcccgattatttgctttctaaggatttgattctgcaaattattggtgaaataactgtggctggggcaacatataaatcgatggagtttgttggtacaaccgttgaaagtttaactatggaagaacggatgacattgtgcaacatggttgttgaagctggtggaaagaatggtgttgttcctgctgacagcactacatttaaatatcttgagggcaagacatctctgccatatgaacctgtttatagtgacgatcaagcaagatttctcgcagagtatagatttgatgtctcaaaattggagccagtggtggccaagcctcattctccggataatcgtgctttggcaagagagtgcaaggatgtgaaaattgacagagtatacataggatcttgtacaggtggcaaaacagaggatttccatggctgcagcaaaagtttttctggcatcaggtaaacaggtcaaagttcctacatttcttgtgcctgcaacacaaaaggtttggatggacttgtactccctccctgtccctggatctggtggtaagacatgctcacagatatttgaagaagttgggtgtgacacaccagctagtcctagttgtggtgcttgtttgggtggcccaaaagatacttacgcacgcatgaatgaacctaaggtttgtgtttcaactacgaacaggaacttcccgggccgaatgggacacaaggaaggtcaaatctatttggcttccccttatacagctgctgcatctgcattgaccggttatgttactgatcctagagagttcttgtagtagaatgttgttacagtcatcccattggtgttgtacacgttgttggttagttgtgtattctctactctctactagtcataagttaaaactgacaactatttaagcttaaccaatcttttagtatttctaagttgatctttagaatcattcatatatgtgggttaggtcaattcagatcaacatgaagttcaatttcaaatttagtagtgtttggtctttatatatatatatatatagcttctcttggtcttaaaaaaaaaagctcctttttaaaagttttattttttgggttttgttcatttgaaaaaaagatacttttactttta

SEQ ID NO: 66376 - DNA, 226 bp, Glycine max
  unsure (1)..(226): unsure at all n locations
  Clone ID: PAT_MRT3847_30952C.1
gcaaatcctgcttccacctctcatatctgattttaccgtctccggaatccaactcgacctgggtcanaattcttgggtgtcatggcatctccattcgttttatccattcaataacagattttagttcgcttcaaattccacgcttcatcttaacatcacaaccctaacttctgatctcttctcaagcacaacccccacacgccatcttggcacgctacgaccacac

SEQ ID NO: 66377 - DNA, 1203 bp, Glycine max
  Clone ID: PAT_MRT3847_30953C.1
aaactaagtaaactgcatatcttatcttaatatatacaaaaggcttggaacctgaagaccaaaagtataagatatcttatcttaatacatacatacatagattgaaaagatctaacagcctccattggttgaggaggcaatctagtaccattcttctcctacattgccagttgtatggttctatggtgatgaagttcaataatataagttgaaagaaaagtaccataaacaggaggttgggagacaactgacctcgaaagatggaaaaatgaattaattaattatcaaagtgaaagacattgtaccctgtcagggagatttctaggcattggaactgcagttacatatttctgggggcatgatttctgagcatttgcagttgcatcagacgatgaggtttctgccccatcattttgcccccgaccatggaacttggcaaatcgattgatgacagaaaatctttctaaatcctgacattccagtcttaagtccaaaactgaggctctgctatccaatctgaataatccattttccagtttcctcgctctatcaacaaagtcttccaccttcaaaatgtactgatcaattttctcagatgctttgggcttatcaggcaggaggtttttgctgccaggggacataatgaaagtgtcatttccagaccgagagacagaactgcatgcatcacctaacgctaatctagcaacagagtagaccacactttcatgatgcaacttcacatccgcagagagaattgcagctggaggggggttaagtagttgctgcataagctgtgtcgttaacacaagtcttctttttgacttcatcattggcaattcttcaactacctcagcatcatcctcaaccttctcaaccaatctatttgcagcttgtgcccagtctaattctgccacactgatgtcttgaagcctttcagaaccctgactcagctctttatgccatggtatgagtttagatgtggacgttttacgcttctttggtcgcatactagacagatcaggttcaactgcaggaggaagcaataacttggaaggcagatgctcacttgcaactgaaacaagcattggattttgcccagcctcactgagactattagcttgctccattgaattagcaagatgcaaactaccagattggttccttataattaaaggatgctcccccttctgtcgtcttctcgca

SEQ ID NO: 66378 - DNA, 524 bp, Glycine max
  Clone ID: PAT_MRT3847_30954C.1
tacggctgcgagaagacgacagaaggggatgcaacaccagcaacaaaactatccatgtgtggtgcctaacaccaattctcaaagtgaaaaatgcacatatgttggtatggagcagtttcttcacaatcccagcaagttctcctctgatgtccagcctgtactgcaatcatcagggtatacgcctccactatatgctacagcagcagcagcttatatgacctcagcaaatccattttacactaatttgcaggcttcgggtatatattctccgcaatatataggtgcatacccttttagtcccacagctgttcctccatatattgctgcataccctcctcatggttctgtaccacttgttgacggggctactggttctagttttactccccaagcaccagggatttcttctactgcaagaaacatttcacacggagctgaaatgatgcatgcaaacaagttttttggacaatttggatttcctctgcagccttcttttagtgatcctatttacatgcaatatcatc

SEQ ID NO: 66379 - DNA, 551 bp, Glycine max
  Clone ID: PAT_MRT3847_30955C.1
taattcccggttcgactttttgacagttaaatatttttgaaactacaacaatcttcaataaaatctttatgtcccttatctgtattaaggtaataataaaaaatcaactacaaaaccaagagtaaattacatatgctcttgatcacatcctaaaatggccgttggaatcctcctaaactgaatagagaatgaatgaaggctgattcactaacaagagggattctcacaaatctaccgagaagggccgaccttatgcacattatcattgtaaaaatatatgccaatgccacaccagtccagtaatacatccccaatgttccccctgggaagtgtatgagtggcatgaaattgcttgaagtatacactatctgcagagcaagttccaacagcattcccatcattacatggaatctgaagataaggggcaagtccttgttttttaccacccatacaatagccacatagcaatataacatagggaaccagattggtaatcggttgacacctcctgggatataaaaaatcaaattctgaaagaaaggaaatttttg

SEQ ID NO: 66380 - DNA, 1050 bp, Glycine max
  Clone ID: PAT_MRT3847_30956C.1
acgaggattaaagctccgcatggaaccaccctggaagtccctgatcctgaggaagctgtagactatccgcagagaagatatagaatcattcttagaagcacaatgggccccattgatggctaccttatcagtcattttgaagagaaatttgaagaggttaatggtgctgagcccccaatgatcccacttgcttccagttctggttccaatgagcaactaatgacagaaatggttcctgctgaatgcagcggaaaagaacttgaacctcaaactcagctctcttctcatgcattctctgatagcttcacaggagtttgctggtggcatgctgaagggacaatcttcagatgttgataatgatgcagattattggcttctatcagatgctgacgttagtataacagatatgtggagaacagattctactgttgattggaatggtatagacatgcttcatcctgattttggaatcatttcgaggcctcaaagtccatcatctgggcttgctgaagtgccatcaacaggagcaaactctattcagaagtgatttcggtttgcctatgcagaaagtatggatggccttcatcctttgcagagggaaactacttcaatagagtgattgttagccttgaggatgtaaacagccgttgaatgtcaagccgagagtggttgatttacctaagttaaataattgactctgacaaataaacttagttacagtagacatactatgctcgtagatgatttagcttggaaggtagagcagttgtgtttacagaaaatgttcctgctgtgatatgtaaacaaagcagtctcataatcagtatatattgtcatatgattagccatatttgaagtatggaatcgtggttccagttttttgaagatgagagtttttacatatatgctgactgcaaacgaactagaagggtgtaccggataatgttaggactgaaccccctcgttattgaattatcattcatgttgcttgtaaacaatttcataatcattaattagtctaatgataaaattatgtcaattattttcccc

SEQ ID NO: 66381 - DNA, 564 bp, Glycine max
  Clone ID: PAT_MRT3847_30957C.1
ctttttcttttttcttttttttttttttttttttttcttttttactttggggggcatgaccgatttgtctaccctcgtttgctcacagttggtgttatctctccgccgttggttccgtccccagcgcacccaccaggggcagccccaaagggggggcccgcccccacaccccagaagacccccacgccaaaaaggggggaaaagggccccccccccggggagaaaaaaccccccccaaaggggggagggaaaaaccccccccgggccgcagcggggcaaaaaaaaaaaaaatagaaacagcccgcgggacccccccctggggttcctcccgagcacacaggcggagggaaaccacccccccccggggccaccggcccctgggatttctgtggggcgcccccttgaggaggggggcccggcccccccggggggggggggggacatgtgacagggtgccgcggggaaccccccctggggcccccgcgccccacacgggggagaggcgccaacaccccccggttttgacgcggaacccagtccccccccccggcggggggggggggc

SEQ ID NO: 66382 - DNA, 290 bp, Glycine max
  Clone ID: PAT_MRT3847_30958C.1
tttttgtgatatttaaacacacttagtggacatagaaatgcgctttatttaagagaataaaatattacatactagttgacaaatgctaaaggacacttgtaaaccagatatttgagactttgacagatctgaagacgattggtgagtatatgattagtggaaagtgaactaaaaatgtcattattaacaccaaaaagaacacccaggaaagctactggaaaaggattaactttagtgagaaaaacaattatcttacctttcccaagggctgggcgaattttttttgtgga

SEQ ID NO: 66383 - DNA, 347 bp, Glycine max
  Clone ID: PAT_MRT3847_30959C.1
tttcaaatcctttttttttttttctaacaaaccaccccctccatttaacctacccgcttctttcaataaggcccctcacaaattactcattcatctcttctccctaactttatcacacttaaaccttcaaccccaaactcatttttgtcttaccctctacccccaaattatcttacccatttcaccccaacaatacatccctaacaacttacaattcccacattcaatcacacaatcgactttcctttctctattttcctccctcaaaccaaatattattgatacaaaaaatcatactaaatccactgccttcaaataatctgtaacaatatagcttaaacaatcaa

SEQ ID NO: 66384 - DNA, 334 bp, Glycine max
  Clone ID: PAT_MRT3847_3095C.1
gcgggctgcagcatccatgttttggaattgtgaaccgatcacaagctgatattaatagaaatgtagacatgattgctgctcgtaggaaggagcgtgaatattttgagacaagtcctgaatatggacatttggcacataaaatgggctcaaaatatcttgctaagcttatatcccagcatttggagcaaggtatcaggcagaagatacctatgatcattgccttaataaataagactattgacgagcttaatgcagagttagaccatattggcaggccaattgctgtggactcaagggcccaactttacactattttaaagatgggtcgggcatt

SEQ ID NO: 66385 - DNA, 186 bp, Glycine max
  Clone ID: PAT_MRT3847_30960C.1
caatgctctattttccatttttatctattccggggcaatgaggaatattgttccaggaaaacccggtttctacataatttcaaaaaaacaattggtggggaagctcatctatttttttcccgcccccccttacctaaaattttgtgtgttccaaacttccaaggatttttatttgttccttgaaaa

SEQ ID NO: 66386 - DNA, 283 bp, Glycine max
  Clone ID: PAT_MRT3847_30961C.1
gccttgaacgtcctaagattcgctatttggattctgccctgcaggaacccttgacttttatataccatgccacattcggcacgtgcataacacctggaggctcaaagggggaggcagctgaggctctataagccaataactttgagtgtgaatatcttctaagaaagtttgttggggaataactttttttgcataaccaatgtttcttgtggagctatggataatgtacataacttgggttacccttgtggtatttccatacctcagagaccctattattggg

SEQ ID NO: 66387 - DNA, 431 bp, Glycine max
  Clone ID: PAT_MRT3847_30962C.1
ggatggcaagcatatgtagcatacatgaatataggatgctactaccttatcgggctcccctcggaattatcatgggctgggtcttcaaaagtggtgtaactgtaagtataatccgctacttaattatcacatctaaacactgattttgggtttgaataattcttaagtggtgtgctgacatgggaatgatatgcatggcagggaatcttgggcgggcatgatcttcggtggcacagcaatccaaacgctgatactgattatagtaacgatacgatgtgattgggaaaaagaggtatagttttactgttacataaataatccggagcttattccaaatccttatcagcatcacttggcatattgacaaacttgaaattaagatctccacataataagttattcatatcaatagcgtaaatatgcatgttcta

SEQ ID NO: 66388 - DNA, 474 bp, Glycine max
  Clone ID: PAT_MRT3847_30963C.1
cttctttttttttttttttttatttatttttgccttttttttttaaatatttttggaattgtttttttattcaatataaatcatgcctaccttcatttattacatgaaaagtgaggggggagaaccttaaaaggtccataaaaaagaaacacctttatctagccccggcctccaaagaaaaaatcacaacggggggggcctattccaagaaaaagactatgaccattccatgtgggaaaaaacaaattccccccgacaccgcgggggggagcacccccattcaaaataaatgcgattgcctccaggacgccaaccccataaataaatgagtcaaaaaaacatcccttaacaacaccagaaaattaactattaacaaaagcaccacgccttctgaaaagaccctatataccagcccccacctcaaattttcccctttaaaaggaggaggcggccacacccccccagaatttttta

SEQ ID NO: 66389 - DNA, 1593 bp, Glycine max
  Clone ID: PAT_MRT3847_30964C.1
gatgtccaaatttgtgtttttgaaaatttgttgttataagcaaatctgttatgcaaatcaaatctaatctgttatcctatctaaatccaatctgttatccaaatcaagtaaaagttgcaaaaaaaatcaaatctataagtgggtgtttgatctttgaacacggttatcgagacatttagaggtgttctttttttggaaataaaatagtggatcaaatccctttatctagattctcctctgaattctgagcgttttgatatatagtgggccttaaatagacaactgtagcaaaagttatgagcatttgaagtttacttgtcatatatgttatcttatctgttatcctatatgttatgttatttgttatcatatctgttatccaaagttaaatctaatttgttatccaaatctgatctgttatccaaatcaaatcaaatcaaaatttgttatccaaatcaaatttgttatccaaatcaaatccaatatgctatccttatcaagtccaagttgttatcgccaaatcaaatctgttactgctgataattatattgtcttttattttattttatattaccttgtgtgtctaattcgatccatccaggaacttaagagggagtgagtggtaaaaggcaagagtgaaaacatcacacaaaagcctatattgagagcatcaaacacgagtgaactaccatcaaagagagaaacacgtgagtagagtgtggtgaggtcctgaattttttttttaattactgcaaaattctttgttccttaatcatggcaggagctggtgacaatggtggtgtatatcatcaactggacggatttcaacgcttgttactggatgcgatgactacacaaatgcaacgtttgttgaaccgtaataatgaagtgctctacaggcgaatagaacgactagagcaccaaatgaatccaaatgctgggagaccttatggtggcaacagaagggtcaatgatggatcgaaccgaatagaggggcaagacagaattgagggagtaaaactcaatgtatcctcttttaaaggcaggagtgacccagacgcctacgttgacttggagatgaagattcaacatgcattctcatacaatgattatcctgaagagcagaaggtgaagttagcagcagctacattctcaaactatgcccttgtttggtggaagaaaaatcaaagagaaatgaagagagaagaagggcgagagatagatacatggactgagatgagaagggttatgcgaaagaggtatgttccaactagctacagtagaaccatgcgacagaaactccagaggttatcccaaggaagtttcactattgaggacaaggagatggagatgacactagtgagggccaacattgaagaggacaccaaagcagtgcatgatggcttcaccaacaagatttctttccagcaccatgactagaaaattattcataaacctctatcccttagagaagtgtgtgatagccaaatcagaaggagagaaaagacagaacaagagagagacaatagtgaggcatcacaatgactcgttttatgagtggcctaaatcctgacgttacagatgttgctcact

SEQ ID NO: 66390 - DNA, 267 bp, Glycine max
  unsure (1)..(267): unsure at all n locations
  Clone ID: PAT_MRT3847_30965C.1
gttgagacaaattcgccctaagcatcttcaagatgtgttgaagataagttatgatgcattanatgaagaagagaagtgcatattccttgctatggcttgtnctgctctgtccaaatgggaatgaagcgtgatgatgtgattgatgtgttaagaggttgtggttttaggggtgagatagctantacggtgctgtgcagaaatgctaatcaaaatcaccgatgaggacaatacactgtggatgcatgatcaaattagagacatggggag

SEQ ID NO: 66391 - DNA, 348 bp, Glycine max
  Clone ID: PAT_MRT3847_30966C.1
attcttttttttgtttgttttttttttttatgatttaagtttttttcttttttgtgttatgttatattttttttatagtgtatttaattaaaaataaatggccggcgatatacaactttatgactgggaaaaaaatgtcgaacccaacacatacgcgttgaagcacattcctataaagaaagttgtgaaaaaaaaaaaaaggccaggacagaaagaccttccaagacagaagggcaacctgaaagaaaaacgcaacaagcaatgagggggggcattaagccccccgggggggggggcgacagagaagaaaaaccaaaaaaatttgccaggttttttaaggaggggaag

SEQ ID NO: 66392 - DNA, 179 bp, Glycine max
  Clone ID: PAT_MRT3847_30967C.1
tttaatcttacatgtttcaagagacaatgtaagattaaattactcctcgttgtatatgtcgcacatgagcaatgaataaggcctcaaaatcaataagtcctatatattgctccaaaattcgatatgaactacaaagtactaatccttaaacctgagattttagtcttgcatagagtaaa

SEQ ID NO: 66393 - DNA, 748 bp, Glycine max
  unsure (1)..(748): unsure at all n locations
  Clone ID: PAT_MRT3847_30968C.1
ggggnataaaaagaacgggaactagttccaaagatattgggaacgaaactgagaaaggtaaagatggtgtttaggtagagactacaaaaatggcgtcgaaggcttcttcctctgcttctcaaacccaaacactctcttcaatttccgaccaaaaggagtttcctcaacatgtttctatgacccgcacttggcttaacaaattgggcatcgacaaacccattcctcagagttgcgaaacccgcggcttctactcccacttctttggaagcttcatcaaactcaacgatatcaagaggggacgaatctcttgcactattgctgtcaaaccccaaatcattaatgcttttggaacactgcatgggggatctcttttgtctttgattgagttgctgtctattgcttgtgctagaactgttattgctgaggacaaggaactttttcttggggaaattagagcgtcttacctctctgcagctctaaatcattcagaagttctagctgaagcctctgtggtgaagagtggaagaaatgtgaccatggttgcattagagtttaagctgaagaagactgggaatttgatgtatattgctcataccaccttctataacatcccggttgccaagttatgaacatacattgctttctggttattttattgttcattcggattcataatttctacaagtgttgtactctgttaataatgttatgattgttgccttatcctttatattgaatttagatatgt

SEQ ID NO: 66394 - DNA, 217 bp, Glycine max
  Clone ID: PAT_MRT3847_30969C.1
atataaacaatccccagaccctctacttaacgacaggattcttccatacatttacaacaaacacgttgactgccacacgtggcacaatcttgcgataagaccctaaactacaaaaatcttcaactgtatgatcgaaatatggaaaggaaccaaggagaaatgtgaacttgacaaacaagctgaacttattatagatgatcatatactttactcatcc

SEQ ID NO: 66395 - DNA, 217 bp, Glycine max
  unsure (1)..(217): unsure at all n locations
  Clone ID: PAT_MRT3847_3096C.1
gtaatgataacctganntaacatagagaaganngtgggagaaggaagcccttagtgagtgtgaagaattanngaaaagaagaaacatgaataanannttggtaatgnnaatttccttgggtcaccgaagggccttatgttgaagctgcttgagaaaaatttcgaaattggaagtctggaaccttgaaccaagaccataagaatcttnnngcaacaat

SEQ ID NO: 66396 - DNA, 277 bp, Glycine max
  Clone ID: PAT_MRT3847_30970C.1
ggatccctacaagcaccagccattcaacgcctttaattctcccttctggactacaacttctggtgctcctatttggaacaacaactcctctttaaccgttgtagctagaggtccaattctgctggaggattatcatcttgtggagaaccttgcaaattttgatagggaacttatcccagaacatgttgtcgatgccaagggctctattgcgaagggtttctttgacgtcacccaagacatatctcacctgacatgtgcatatttccttcgagcccca

SEQ ID NO: 66397 - DNA, 1332 bp, Glycine max
  unsure (1)..(1332): unsure at all n locations
  Clone ID: PAT_MRT3847_30971C.1
tgagggctaataaagatgttttcgagagtatgaggaaaaacccaaaagtaaaatatgatggggaaagattctcttacaagtcgaagcatgccgttagggacaaaaatcagctgcttttcctggtacgtaagtttccagagggcattgctgtggttgacctaaaagattcttacccaaatgtgatggaagacttgcaggctttgaaagctgcaagggagatttggctgttatccaactttgactctcaagaggacattgcctacccaaacgatcctaaagtgcccattaaggtggatgatgacctaaagcagctttttcgggggattgaattgcctcgtgatatgattgacatagagagggatctacaaaaaaatggaatgaagcctgctaccaacactgcaaagaggaggagtgcagcgcaaatggaaggcatttcatccaagcctaaacctaagaagaagaaaaatgaaatcactaagaggaccaagctgactaatgcccatcttccggagctttttcagaacttaaagtaaacaattcctgacttaaggaactcgtggcaagtggtgaatgaattcacatagctcatttgttgacataaaacatgcagttagaatgtcttcatgtctttcagatggatatggcctttttattgtattagcatactgcttctgttatggatgtacccaataggatggaaacggtggccattgcaaattcaggtcattccttctatctaggcttctaaagcaaaagggcaaggatggtcagaatccatcttctggtgatttttctaaagactaaacaaaagggcagatggcgaaccatgttagcgaacacggtcaattagcagagtgaaaaatattgacgaggttcatcatttggggtttattgctcagcctaattggatgttatcacctattgctactttttatacatatacaaagagtcaaatgcatattgcatagctgaaaattgactcattttcaccttttaatgcgcaaaaatgatctattgctacatgtagcaaaagtgatacttcaactttttacaagaagttttcgtttttaaaaaattcaggtcattcgttatatctaggcttctacacgattctaaagcaaaatgggaaggatggcccgagtccatcttcagatggtttttctaaactaaagactaaacaaaaagggcagatggagaaccatgtcaatgttagcaaacacacgatcaatttgctgagtcaaaaatatttatgaggttcatcatttggggtttactgctcaaatagaatgttatgacctattgctactttttatatacnnntaaagagtnaaa

SEQ ID NO: 66398 - DNA, 844 bp, Glycine max
  Clone ID: PAT_MRT3847_30972C.1
attagctacctagttgataatttgatagtatataaggtgaaaatatttattattatttgcttgtcttttaatgacattgatatcacttgcattagaatgttgctgtaagtgattaattttataaataaaatttctaactatactctgtcttttttaaaaatttattgcagcgattattttagtattgataatggaagacagtctttaataacaagacattctgtactagattctgcccaagcctctctaggacctgaaccctcaatgacaggaatgagcaaaggatgtctttcaatggcagacattgtaagaatgggtacaacatcgtcacaagacactgtttcacataactgtaatacctcgggaggagtttctgcatgtggaaattcagagtcaagcttaccacttcccagtcaaaaccattctgagcaacaagtttttcatgatgagtggccagcaactgaacaaccaattgctagaaatgcacagtaactaaacatgtctgcttcttctaatgccaatgggccatttgagcatcctagcttgcatgtaaatgcaattggtttacacaggaactgtgaattagacacagccccagtttcatggggggatgttgcttgtgataatgatgcttttgaaaaaaatgaatctgcttctatatctagagaacatactgttttgagcagcaacactggactacgatcccattccaactctaacttaaggactactatttcctctgatcattgtagttcttatgggcatggtgaagacgtgtcatcagccgcttcaattttccagcggctaagtataggagaatccaaacagaaagtgccaacatttg

SEQ ID NO: 66399 - DNA, 2221 bp, Glycine max
  Clone ID: PAT_MRT3847_30973C.1
cacgcgtccggttctctctgccccctactctactcactttccatttcccaattcccaatccatctaatctacccttcaagggttttgttttttttttttttttttaattttttttatttacttactaatgtgatctgttacttttgccctttttcagtttcaatttctggggtttgtgggttacccggtttcaagggttgttggcatgtaaagttgtgatttttaggtttcatctgggaatttcccatctgggggttgtggtctttggtatttgatggtatctgggtttctagggattgattgatcattgattggtagagataatagatggggttgggtgctgagaatggcaaggtggtggagtcttgggatgtgtgtaaatcaaaggggaggaagaagaagaagggggatgaagggggtgaggctgaggcctgggtgttgggttaggttgaggttcattgggagctgcatttcttcaagatccaaggttgatacctcagtcagtggcaccagtactcattatgctgaaagtaaatcaactaatgatactagtagagaccaaccaacagcccccagcagtctcttctacaaccactagtaatggctgaaagcaattcatcatccacttccaagcttgaagaggagcttaaaattgcttccaggctgagaaacttctctttcagtgaactcaagttagcaaccagaaatttccgacctgaaagttttcttggtgaaggtgggtttggttgtgttttcaaggggtggattgaagaaaatggaactgctccagtgaaacctggcacaggacttacggttgctgtaaaaaccctaaaccatgatgggctccagggtcataaagaatggctggctgaagtgaattttcttggtgacctagttcatccaaaccttgttaaacttgtaggttactgcattgaagatgatcaaaggttgctagtgtatgaattcatgcctcggggtagcctggaaaaccacttatttaggagatccattcctcttccatggtccattagaatgaaaattgcactaggagctgctaagggtcttgcttttcttcatgaagaagctgaacgaccagtaatatatagggattttaaaacttcaaacatattactggatgcagagtacaatgccaagctctcagattttggtcttgccaaagatggtccagaaggtgataaaacccatgtgtctactcgagtgatgggaacctatggttatgcagcaccagaatatgtcatgacgggtcatcttacatcaagaagtgatgtgtatagtttcggagtggtactacttgagatgttgactggcagaagatctatggacaaacaccgacccaacggtgagcataaccttgtggaatgggctaggccacatctaggagagagaagaaggttctacagattgatagaccctcgcttggaaggccacttttagataaaagaggcacagaaagcggcgcaacgggctgctcactgttgtggaatgggctcaaccagcacgacgtttcaggagaaggttctacaagttgctagaccctcgcttggaacttcatttttcggtaaaaggagctcagaaagctgcccagctggctgctcactgccttagtagagatccaaaatccagacccctaatgagtgaagttgtagaagctttaaagcctttgccaagcctcaaggacatggcaagctcttcatattatttccaggcaatgcaagctgaccgatttggagcgagcccgaacacaagaaacgggcgaatgcaaggtgcattgctcacccgcaatggacagcagcaaaggagcctttcaataccaaatggtacttatgcatctccatatcaccatcagtttccccaaccatcaccaaaacccaatggcaaagcatagagctgatgaaaattttctttttctttttctctttcaccctttacaccatttcttagtttcttcttatagatgtaccttctcttaaagcatagcatatgctgctttatgatgttatgttaacttatgggtgttgaccccctttatcttgaaagaatgtgagggtgagagcaagtgaagcttattgagctactatgtcttatctcaaattgtcattcaatattttcttcaggttgcttggaaatattgaaaaccatcaaaaaaaaaaaaaaagttccgatcctcatccttatttttattttgtttttcacatttgtc

SEQ ID NO: 66400 - DNA, 434 bp, Glycine max
  Clone ID: PAT_MRT3847_30974C.1
ggctcgagtctagatcgcgagcggccgcccttttttttttttttttggttgtactcaaggaggcacacatccactagactcatcaaaactaagaaaggggatgcactctatacataagacaatatcacgcgatccttggtgcagcctgataatcatgaccatgatggaccgtatcttagatgcctgggcctggatgatgactgacggagaggatctgatactgcctgctgccgacctagactaccaacatcgatcatcaattgcatggactagcgcccctcaagtgatgacagaggtgataatagagacttcaaaggataacatggctgagtcgataagcctagcatgtcgaaacatcgtgggactctatatcgtaagctcgatcgggaggcaaatgaatgtactaatgaagacactgtggccatgcacaatgc

SEQ ID NO: 66401 - DNA, 117 bp, Glycine max
  Clone ID: PAT_MRT3847_30975C.1
ccctctttgcattccaaatggccactgttgtggttgcacagccaagatccaaacactgtgatagataatgaaataacgactgatgtaaccaatgttgatggaactagcccagaacat

SEQ ID NO: 66402 - DNA, 504 bp, Glycine max
  Clone ID: PAT_MRT3847_30976C.1
tagattgcagaaataagacagggattgtccttttaacacaggcttttattccctacataataattggttctagtcttctggtgcttgattttggtgaataatgaattatgttacatttagcactaatgcctaagatgggttttacagatttggtagatgactgagatgaatgtctttgatcattaggcattagccattcaattaaatcttaagagttaaaatgcttcaaagttcatatgctgtatgcatgtacctccctccctggatgagatagttaaatcttacagttgatatttatttcaatatgcgtgagtttgtttttctatcaaattcaattttcctcacaagtgtgcatcctttttccatttttaccttaggtcttgctaagctccttataacagatcctttcttgatttgattatactgatgatatctgatatctaacttgaaagatttttttcctataaacagacgtggatggcgtgtcagactttcctgcttttg

SEQ ID NO: 66403 - DNA, 239 bp, Glycine max
  Clone ID: PAT_MRT3847_30977C.1
cacttctttccttcaacttcagcctctacctcaaccttaacccccacttaacagttttcccaaattttcgtacttttttccttgccatgagtagatgcatctttttcaagctaccttaagcttgaactagctggtagggctttttaaatacgtcgataagttaacagtgttctgcttgtggcctctagtgtattttggttgcagattcaggtacaggtgtgtgacgagttgattgcttg

SEQ ID NO: 66404 - DNA, 508 bp, Glycine max
  unsure (1)..(508): unsure at all n locations
  Clone ID: PAT_MRT3847_30978C.1
tacaagtctaatctcattccgaaatccccaaannccccnnttnnnnnnntaananncnaananaaccanaannaanannaanattaaaaaaaaaaaaaaaaaaaaaaaaaaaaaaaaatttttatattattttataaantataatattaaatattatatttgggggtataggtttataatttataaatatattatatattattattattaattttattataaaaataatattttataaatttttcccacccccattgctcttatttcaccacttctaaaactaaataaatttaagtctcaaaatacattaaccattacaatttcttccccagacaaaacacccccaaatctcccaacaaaacccattcaaaataatcccatacccctaataaaaatatccaaatcatttaaaggcccccaaggcaaaatttccaagctaatggcctatttactgcctcccccttttacccttttttaaaaatttttcgacaactttctcttcaaacaa

SEQ ID NO: 66405 - DNA, 294 bp, Glycine max
  Clone ID: PAT_MRT3847_30979C.1
tatcaacaaaaccgattcccacgagggcttgctttaagtaagagaaattgttttatcttactatgagttgatcctctttccattatgctttacttggctgtctctttttgtgcgttatagaatgataattctgatttctaacgaccactaatacctatgcatgacgcgactctcttgagaacttgtaaaagtctcaaatatctgcttgatgagcgtccttttgcatttgtcaactagtatgtattattttattcacttaaataaagcgcattactacttgcaatgagtgtgttt

SEQ ID NO: 66406 - DNA, 463 bp, Glycine max
  Clone ID: PAT_MRT3847_3097C.1
ctatctcgatcgaactgtccaaggtcctgtcactgtgtgtgtgtgtgtgtgcactgtcgtcaaggtcaaagtgcagtgttaatcaggcagtgtccgacacctgacggtatgtgttaagtgctaaaaagcttgtgtacatgtcaaagtaactctaactggctctaaacagtacacacacgcaaaacgcgcccagtgctagttaatacaattagccaggtgcctcacgggagatgtgccaatgcgtgctagtgccaatgattaagtgtacattagccttaaagtggggcaccggattcacggattacggacagtcgttaacgggaggctatgtaaatcacccggcggctgccagtacagcagagcgggaggtcgcgagagaaggataatataagccagaaacgtaaacgagggcaactatagatgcaggataggaccgcgcgcctacggtagttgatttggttgg

SEQ ID NO: 66407 - DNA, 251 bp, Glycine max
  Clone ID: PAT_MRT3847_30980C.1
tgctttccctctaaatacacattgtcccttcctctcgtcatgtcatatacaaactcacaacacactttgcatgctccgtcactcttccctgtctctcacatggcttcccggacgctaactttcatgtccctcgtctctctgcgcaatctagtacccggtaacagggtctcccagccaagcgcagtttccctctcaattaaggacggaaggatttcccatccgatagatggctgaccaggtgatgtcagctt

SEQ ID NO: 66408 - DNA, 427 bp, Glycine max
  Clone ID: PAT_MRT3847_30981C.1
tattgggaaggttcatgactttcttgtgagctagaagctacgttatcgttaagagaatatcaccgctcctccctttctttgttgctgcagaatttattggtagcatggccatgccatggcgcatgctaccaaaggttccctctccaaatgaaaactgcctattgttagcgttcttcggaggtaaaatgcgcaacttttatgcttgctgtggaaccacacatcattctatcctttaaaaccattcctgaatagtgctttgaaccaacaaatgactacattaatgtccaacaatttacatcacactctaaaacagttaaccaacaagctttcttttatgctcgtgaacgcgaagttcatctcaactacatatttttattttttcattatataacacctttctttcttatattccattctattaaaaaca

SEQ ID NO: 66409 - DNA, 251 bp, Glycine max
  unsure (1)..(251): unsure at all n locations
  Clone ID: PAT_MRT3847_30982C.1
cccttgaaaactttgacgcgaggacagacgagggggcagattggaggggttaaaacgcggnaacccgaagaaaccacnnagggaaacganagaagccgaaaagaaacaggcgccaagaggaacaagcaaggacgaccacagaaagaaaaaaagatacgaagagaaggaaacggcaaagcgcaaagaaaaaacaaccggggaaggaggagatacacgcagaaacaaaagaacagccactaggaaacggcacc

SEQ ID NO: 66410 - DNA, 171 bp, Glycine max
  Clone ID: PAT_MRT3847_30983C.1
aacccaaaaaactgaaacacaaaatgggtcataaaatcaactaacgaatttaaagatcgagtacaacacaagcggaaccagagaaatgcctacttgataggcataaacagaccatatgctcaaaaatctaatacaacatggaacatgctttggactatacagtgaaaagca

SEQ ID NO: 66411 - DNA, 1032 bp, Glycine max
  Clone ID: PAT_MRT3847_30984C.1
cccgcgtccgtgaaaacagtgttgagaagattgatgatcatcttaatgttggtggacttggcgacaaatttctttgggaatgtccagaaacattaccagatagattaacacagacaactcttgctgccaagaggaagcttccatcaatggatggtcctgtaaggcgagctagaggagaaagttttcaggctgatatgtcttctcaaaatgctttttcacggggtgtagcacagtctgctgtctcttctggtcctacacgtagggatgccttccggcaacgcaagccaaatacaagcagaccaccatctatgcatgtagatgattatgttgcaagagagaaaaatgttgaaggggttactaatgtaatatcagtgccacgagcaggatctactggtgggagacctccatccattcatgtagatgaatttatggcaagacagagggagcggcacaacccttcagcaacagtagtgggagaggctgttggacacccaaaagatgcttctcctgtaaaacccacagatacggagaagttaaacaaatctaagcgattgaaaacagatctttatgatgatcttcaaggaattgatatagtttttgacggagaggagtctgaccctgatgacaagttgccattccctcagctggatgatgacttacaacagcctgccccagttattattgagcaaagttctcctcactcgattgttgaagaaacagaaagtgatgtcgttgatagtagtcaattttctcaaatgggtactccattaggatctaacatcgatgaaaatggccaaactgaattttcttcaaagatgtctggtttacgtcctgatatgtcattaactcgggaatcaagtgtttcttcagacaggaagtatgttgagcaggctgatgacacgaaaaacgttcaagctaggccctctggcagatatgattttgtttcatcaaatacttcgtttccaatgtctctttacaataatccatccacatctatgcaatcaccagctgattcaaggatggttttccaaa

SEQ ID NO: 66412 - DNA, 427 bp, Glycine max
  Clone ID: PAT_MRT3847_30985C.1
cttattgggggggtttgcaaagcagggaaaccagtagctgcaaaagaattgtttttagtaatgcacaagcacgggcaacttcccaatctccaaacttgtgctattatattggatggcctatttaagtgtaattttcattctgaggcaatgtcattgtttagggagttggagaagatgaattgggatcttaatattataatttacaatattattttggatggaatgtgtagttctggaaaactgaatgatgcactggaactcttttcttatctgtcaagtaaaggcgtcaaaattgatgttgttacttataacataatgattaaaggtctatgtaaagaaggactgttggatgatgccgaagacttattgatgaaaatggaagagaatggttgtcccccaaatgagtgcacttataatgtctttgtcc

SEQ ID NO: 66413 - DNA, 580 bp, Glycine max
  Clone ID: PAT_MRT3847_30986C.1
cacaacataacaaaagcttccatttcatttattcattccttcccctctgttttctgcatgtgattgcaacaagaagaaggcttttccacttttcttcagtgttccgttctctctttcttagggtttacgagcttcgataaaagttgaacaaacccagagaaacggaacagaacaccattgattctgtttcttctgggtttgaaaaaaaatgaagaggggtagtagtactagtagtaaagtagagccatttgtgctacccaacaggctcacactgcttcagattttcatggtggtgatgctcctttaccttctcttcatgagcttcgaaatccctctcgctttcagagccgaaaacggggtcgttttcctcaccgacgcattgcccatgcccatgccactcatgctcgaagaatcacgcaacagtgtcaaaatcagagcacccacagggttaaagttggagaaagtttccaccttgaggttcaacgagagcttcacggagggttcggagctgcacaaggtggcgcggcaccgtgggttgccggggagaagctctggggggaagtggagagcggcaaagtga

SEQ ID NO: 66414 - DNA, 272 bp, Glycine max
  Clone ID: PAT_MRT3847_30987C.1
attacatgctactttttaattttttaggggactattgtaaaattagtagattttttgattttaaattcttttttaaggtgcatatctgttgttgtttttaaaaagaactacacctagatgtgaatcccggctatttttatttgggggaaaagtacactctttttttgggacatatataacatttaaaaacaaaccctatttcggaacatgggtgttgctattatcaaaaatactttgaactttctccctacatattttcaggagctggtatt

SEQ ID NO: 66415 - DNA, 573 bp, Glycine max
  Clone ID: PAT_MRT3847_30988C.1
ggcggtgccaaaggggcacttggcggtgtacgtgggggaggaggacggccagttccggccagtgttgattccggtgatttacttcaaccaccctttgttcagtgatttgctgagggaagcagaaaaaaagttcgggtttgaacaccccggtgggatcacgattccgtgtcgactcaccgagtttgaacgggtcaagacccggatcgcgtccgggtcgggtcagcgcgggaggacccggagattggggtggcggctacattattaaggacccggagggtggtcaattgcgatgacacgacgataactagttatggtgaatgattaatggtttcggaatttttgtttgtttttaacttatattaggttgtagttattgtttttggtgggaattcctgggtaggtgttaggctttggctgtttgggtatatctgatggtacacctggtgtaaatggtggtttgaacataaaagtataattagggataccttatgtatagattaaattctgaaaatatcaattaaagaaatgtttttttttttgaataataatgcagatgagtttcattttttttcc

SEQ ID NO: 66416 - DNA, 101 bp, Glycine max
  Clone ID: PAT_MRT3847_30989C.1
gttgccactgcatgagactcgcaataagtaacatgccaggacgtgtctagatccttggaaggatatagcaccgagatttgccagggtctacataagctctg

SEQ ID NO: 66417 - DNA, 1917 bp, Glycine max
  Clone ID: PAT_MRT3847_3098C.1
gcgtgattgtctttggtaaaaagatcgtccctttccgtagaaaaacgttgtctgcactctccagtgcttcatcttctctgacaatggtactttctctctctacattagggttttcttcagcactttcgcgcctaaacttcttcccaaagccaccaccttctcttttctccgcactcaccactttccgcagaaaccaacttccactcaaatcgtcgctcgccgcatcgaaacgtgacggcgatgttgtcgttttgggcatcgaaaccagctgcgacgataccgccgctgctgtcgtgagaagtgacggtgaaattctcagccaagtagtgtcttctcaggcagacctgcttgcgaaatatggaggtgttgctccaaaaatggcagaagaagctcactcaaaagttatagaccaggttgtgcaagaagcccttgataaagcttatctgaccgagaaggatcttactgctgttgctgttactattggtcctggtttgagtctctgccttcgtgtgggggtgcagaaagcccggaaaattgctggcggatttaatttaccaattattggcatacatcacatggaagctcatgctctggttggcaggttaattgagaaagatttgcagtttccattcatggccctacttatttcagggggacacaatttactcgttcttgctcgtgatcttgggcagtacatacaacttggaactacgatagatgatgctatcggtgaggcatatgacaagacagcaaaatggctcggactggatttgaggagaagtggtggtcctgctattgagaagcttgctatggagggtaatgctgaatcagtcaagttttctattccaatgaagcagcacaaagactgcaatttttcctatgctggtctaaaaacccaagtacgtctggcaattgagtccaaaaagattgatgccaaaattccaatttcttcagcaagtaatggagatcgactgtcacgggctgatattgctgcttcttttcagcgaattgctgtgttacatcttgaggagaggtgtgaacgagcaatacagtgggcattgaagatggagccttccataagacacttggttgtctctggtggagttgcatcaaatcaatatgtccgagcccggcttgatatggttgtgaagaagaatggcctgcaacttgtatgcccacctcctcggctctgtactgataatggtgtaatgattgcttggactggtattgagcacttccgcatgggaagatatgaccctcctcctcctgcagaagaacctgaagactttgtgtatgatatacgcccaaggtggccgctgggggaagaatatgctgaaggaaaaagtgtagcacgttcgttaagaacagcccgcattcatccttctcttacatctataattcaagcatcattgcaacaatgacactgcttgaacttccatgttgcttcagcctctcatgaagatttgcagggcaagcctctctcttttggacttatctatgatttgccaaaatgacgtctgggctgaattttcaaaaatacatgaaaaagtgggctgaagtttgctgtggaaactgaccattggcatcaagcagtagcacgagaaaatccagcaaagcaatgtcacggcaaggagaaacattataatggtatggtggttggtagaagtgaaaaaaggagtgggatgggaagagatcaaaattcattgtgctattaacaaaaaatttcaacttaagagtaaaagaaaagaaaaggctaggaaattttgtatttatgtattattattgacatattttgtcaatggaattgattaacaaaatattagttattaattggcacaaattgtaaaatatttgttattattggcacaaatttgatggccatttaaaataatagatcttacatgattaaccccctgt

SEQ ID NO: 66418 - DNA, 396 bp, Glycine max
  unsure (1)..(396): unsure at all n locations
  Clone ID: PAT_MRT3847_30990C.1
tggaacttcccaaaactgtaaactctgaaattaacgagattgagccactgtctgcagcgagatgccgtgtgttcataaggccttcccgtaagaaggatgaagtgccaatcattcacttgcttgggaggacaaaccttncattctttaagtgcaataactcaattgaacagcaataaggatgctcaagtattttcatctcttaaggaacgtcttcaccatttacagaaaacagaaaaccaaaaagtttgcttaggaaaatcaggtattcatggatggggcctctttgctcgtagagatctggaagaaggagaaatggttgttgaatatcgtggcgagcagttacgacgtagtatcactgacctaagggaagcacagtatcgttcagaaggcanagat

SEQ ID NO: 66419 - DNA, 941 bp, Glycine max
  Clone ID: PAT_MRT3847_30991C.1
gaactcagcttcggctacgtctccgacgacaccccaaacccaccttgttcccttaacgccacactcaatcaatttcttatctttaccctttcccttccccttcttcaacacacacacaatatctcttccaattttctcctccaatttcaatttctcgtcgtccctcattatggctcgtctctcgatcgtcgccatcgtcgccgccgtgctcctcctggccctctccgccacccccgcgacggcgcgtccctgcaggagcttcataatctcctcctactccttccgcaaccctaactccaacacgttcgccaccatcaccgagatccgatccttcacccctctctacatcaccgacaaacccccctcctatgcccttttcttcccccacgcgactcagctccctcagcatgagagcgtgcgcccacgcgcccctctagggttcgcctccgcctacgatttctcttccctccgcgaccgcaccaaggacatcctcagcgtcgccctagccctcctcttcggcgtcggctgcggcgccctcaccgccgccaccatgtacctcgtctggtccgtcttctccacgcgccaccgcgcctcctccttcgacgacttctcctccgacgacgaagacgagatcgagagccccaagaagcttggctacgtcaagattccggccattgagaccactaccgccgtcgcccccgcagctccggctccagccaagggttcggtatgagaatgtctccgactccgtaacggtgtggcttatgtggattgttaataattattattataggtgaaattgaatagtgaaaatgtcaaatggtgcaaacttttgccctggatttgtgtttatgtttactttcttaatttgatggatttgcgtttatcttaattctaattgccaaaccctggcgctcaaaaaaaaaaaaaaaaaggcccta

SEQ ID NO: 66420 - DNA, 306 bp, Glycine max
  Clone ID: PAT_MRT3847_30992C.1
gaattcggctcgagcaagtggtgggcgaggaacgggctcaatcttggtgtcggcacaagcgagtggatgaagacgaagaccctgaacaattcttagataacctagcgttttttgtgtgttttgtttattggagcgatgcatggcgtctgggtttgttatcaacggacggacggatggacggacgggtttaggaacagctggaaacgagcattgatgtttttctcatttggcactttgaaacagcatattgggtagcttgttttgtggcgctggtctacgacctaatgaacgaatattccactcgca

SEQ ID NO: 66421 - DNA, 223 bp, Glycine max
  Clone ID: PAT_MRT3847_30993C.1
gggcccatcacccccataagtggtaagggtgagcatgaggaacaccgataccaagcaggtttccttatgaatcccttggtacggcccacaccgagtcaagttcttgggcccattctatggctagcccccttcctacctaacctgtgagttcccatgcgactactgttgggacactgctgggatttccgcagaccctgaaacctttgccaagaaccgcgaactc

SEQ ID NO: 66422 - DNA, 352 bp, Glycine max
  Clone ID: PAT_MRT3847_30994C.1
gcccgctttttttttttttttggttttttttttgggcttatcccaaaccctaataacattggggaggtttttattttttttagaccttttaaaaacccgcttttaattttacctcaaaaaaaaaaccccccaccctactcgcctaaaaattctaaaaaaaatcccccccccccttttttcgcataaccttttcaatacccttgggccaaacccttacaaaaaaaacttttcttccccaaaaaccagttttttcaaacctaccgaccccaaaggcctcccctgaaatttggaccgcgaccttcaattccaacacaattccccaaaaagagtccaatattaacttgggcttatt

SEQ ID NO: 66423 - DNA, 299 bp, Glycine max
  Clone ID: PAT_MRT3847_30995C.1
aaactttcctcccaccttgagttttacctactatgaatcacataatggctcagctgcacatacaacaaacctccttctttccccttcctctatttgtgacactccttataacttatactctataagcttttataaatagcttccaacataactacaatatttcataatgaaagcatcataccttctttctacatcatcttcaataacatcaactctcaatttataatacttcaggaacttgtttcatatcaaaaatctaatattcctctgtattctttccaatcagaataaaaattccc

SEQ ID NO: 66424 - DNA, 119 bp, Glycine max
  Clone ID: PAT_MRT3847_30996C.1
tcgcgtgtagacaacacaaatgggagagatagaagccccctctcaacatttgtgcctaactgtgcatcaaaatggcacaaactctcgcaattttcccattaattcccatcaaatgcacc

SEQ ID NO: 66425 - DNA, 806 bp, Glycine max
  Clone ID: PAT_MRT3847_30997C.1
tacggctgcgagaagacgacagaagggggcattagaatgagtctttattcatattctactaggctgcgagaagacgacagaagggggagccacacaaaaaccaatccacaccctataaaaaaacactctttgtgtgtctgcatttggattgattccctcattcttcatccatagacatggccaccgtcacttctgcagccgttgctattccctcattcactggcctcaaggcaagcgcaggcaaagtgagtgccgcagttaaagtctcagctccccaagccacaaggttgggcatcaaggcttcgctgaaagacgttggagtcgctgttgtggccactgccgcgagtgcagtgctggctagcaacgccatggccattgaagtgttgctgggtggtgatgacgggtctctggctttcgttcccaacaatttctccgtggcctctggggagaagatcgtgttcaagaacaacgcaggtttcccccacaacgttgtgttcgacgaggacgagattcctagcggcgtggatgcagggaaaatctccatgagcgatgaagaccttctcaatgcgcctggtgagacttacagcgttactttggatgctaagggaacctacagtttcttctgttcgcctcaccaaggagctggtatggtgggaaaagtcactgttaattaattattgtctcaagggctcgtctcctacgtctaagttctcatatggttccttcttcaatatttttgttttttctagaagagcttggttgatctttcttgttatggcctatgggatgaatgaacgatataatgc

SEQ ID NO: 66426 - DNA, 314 bp, Glycine max
  Clone ID: PAT_MRT3847_30998C.1
gattgattgctaataaaacgcaagaccagagctcttatgaaacgtctaaagccggtgtgacgatgctgactaaaagcttagctagagaatggtctagatatggaattaaagtaaatgcaattgcccctggttacatgagaacaatcgaaacggaaaagatactaaatgataatactgaaacaaatacaacgcctatggaacgagtaggtgagcctgaagaattagctggaataacagtttatcttgcttctgatgcatcatcgtttactcaaggtagtgtatttaatattgatggcggttattcagcattataa

SEQ ID NO: 66427 - DNA, 315 bp, Glycine max
  Clone ID: PAT_MRT3847_30999C.1
gggcccaaaaatagaacaacaatttttttttcaagccccaagctaaatttttaggggcacccggaaccctcatgttttggaaaaaaaaaaatgacccaggggggaacatagagggccaaaactttgtttaccggaaatttcatttcacgttgacatgccccatggcagctttaacttttatttccaataaaaaactacttccgtgggaataaaagggaaaaactaaaacctcgggccaaaaaattttggaaagaatacaacatccatttgttactttcacatgggtgacagggggttaaaaaaaaatgttgacat

SEQ ID NO: 66428 - DNA, 798 bp, Glycine max
  Clone ID: PAT_MRT3847_3099C.1
cgcaagtccaaacacagtttcaattccaccatctttcttcttctattcctcttttcgttttttcgtttataaattctaaaattccaaacacagttattcacacatgacatttcaccaatctctcactctgcgtcttcgagctacatatgcctcatcctctctcactctgcgtgttcttcctcgctaatctcaccggcaactacgtcaccgcccaatcgaaaagagactctttccgcgatcgcactctccgttgttactttccacgcgcccccgcggcgcgtcgcgttgccttcgctggataaatgcgtgtcaccatcgatctagggttctggagcctggtcgtcgtcgcggtggtcggcctcatcgtgccggtgatcgccttcgtcgtccagcgccagtgccagcgggcggctgccagggcagaggagattaagaggctcctcgttctcgctgaggaggagtccgtgagggccgagtcagagtcggaggcttcggtctaccagcaaaacagcatcgtttcagcaccgccgaagaacaaagtatgcgcagtgtgttactctcccaccaccacgcgctgcgccaggtgcaaagcggttcattactgttctggaaagtgccaaattgttcattggcgccaaggtcacaaagataaatgtcatcctcccagtccaacttgccagactgaggatctggtaagtgatcttggaaagaaggtagcagaaccagactatcgtggaatccatgatgagaagtctcagactaaaagcacagagtatgcaacatcatctgagaaacccc

SEQ ID NO: 66429 - DNA, 288 bp, Glycine max
  unsure (1)..(288): unsure at all n locations
  Clone ID: PAT_MRT3847_309C.1
accctcaaacctcggagaagcaaacccanaagaggggcgctgtgaacacttacagcccgnaacccgcgcccgaccacccgaaaccggacaaaggccccacccccgggcgagagacacaacaccagccacagccgggggagcgaagggcaggccgcgagcacnaaaccgccagaaggagggcccgcgaaacgaaccggcaaaaagggcccccgcccaacgggaaacaccaaacggagccaaccgggaccaaagaaacccacacagaaaggaaaagggggaagaacaagg

SEQ ID NO: 66430 - DNA, 606 bp, Glycine max
  Clone ID: PAT_MRT3847_30C.1
acgcgtcagggtgactctcgggttttacaacgcagcttttcatcgttcagtctaaggcacacgcacaccatcaagtcatcttctggtctgctgatatctatggcatattacagagatgatcgatttgcaacatttgaacagttttatcgttgttaccctgtctccttcattgagaagccagatctggaaaagggtgataaaattatcatgcctccctcagcccttgatcgccttgcgtctttgcacatagagtaccccatgttatttcaaattaaaaatccttctgctgaaagagttgtacgatcactgatttagccttatgtcaataataacttcctttgctagtttctttcagaggaaataaaagaagaggtgagaaaattttgaaatttgaattgaggagaaaaattttctcttctatcctcctattttctttcctctcatccaaacatgtcataaactatttctattcacaaagtcaacatattccttgggatttatatttgggcctgtgattgatcaaaggggtctgatctgtgatcactggctatagattgtgccgaccaaaaaaaactggctataccttctgacttatgcggttttatg

SEQ ID NO: 66431 - DNA, 1271 bp, Glycine max
  Clone ID: PAT_MRT3847_31000C.1
ggatggctggtatcgcccgcgtgtacgggcccggactgactgggtcgaccgacgcgtgcgtactgctgcgagaagacgacagacgggggcattagaatgagtctttattcatattctactactttcactttagaaaccatatcttgagcctgcagggaatccaaaggaggagggagaaaaaccaatccattcacccaccctataaaaaacactctgcaattttgattgattcccctattccacacacaagaagactcctcaatcatccatagacatggccaccgtcacttctgcagcagtttctattccctcattcactggcctcaaggcaagcgcaggcaaagtgagtgccgcgcagttaaagtctcagctccccaagccacaaggttctgcggcatcaaggcttccctcaaagacgttggagtcgctgttgtggccactgctgcgagcgcagttctagctagcaacgccatggccattgaagtgttactgggcactgatgacgggtctctggttttctctcccaactctttctccgtggcccctggggaaaagatcgtgttcaagaacaacgcaggtttcccccacaacgttgtgttcgacgaggacgagattcctagcggcgtggatgcagggaaaatctccatgagcgaagaagaccttctcaatgcggctggtgagacttacagcgttactttggatgccaagggaacctacagtttctactgttcgcctcaccaaggagctggtatggtgggaaaagtcaccgttaattaattattttttgtctcctacgtctaagttctcatatgttgttttcctgaagagcctaattcatcttcttgttaggcccttggaatgaatcaacaatataatgccttgtgttacttctaagttctctatggttccttcttctaatatttttgttttttctagaagagcttggttgatctttcttgttatggcctatgggatgaatgaacgatataatgcgtttctgtaattcatttacttctttcagatccttgatgaagtcttatatcgattaataaataagctaatgcattatcctgctgcaaaaaaaaaggtgggctccggccccatgttccgcttatgatgttatcattactccgctctcatgccggcttgttaccacgtcggaatggaaaacgctgcggtacccactttatctcatagtgcactacctctttcccaggtggcgtatctcgaaaaggcagaacagacgccttcccacagttgggcgcctgaaa

SEQ ID NO: 66432 - DNA, 349 bp, Glycine max
  Clone ID: PAT_MRT3847_31001C.1
ctgttgtggccactgccgcgagtgcagtgctggctagcaacgccatggccattgaagtgttgctgggtggtgatgacgggtctctggctttcattcccaacaatttctccgtggcctctggggagaagatcgtgttcaagaacaacaccagtttcccccacaacgttgtgttcgacgaggacaagaattcctatcggcgtgcatgcagggaaaatctccatgagcgatgaagaccttctcaatgcacctggtgagacttacagcattactttagatgctaaaggaacctacaatttcttctattcgcctcaccaaagagctagtattagtaagaaaagtccctattaat

SEQ ID NO: 66433 - DNA, 232 bp, Glycine max
  Clone ID: PAT_MRT3847_31002C.1
catcactcccatctttataacctatatttcccacctacattaacctacaactactttacatactcctaacacttttcttatttaatatatcacttattttatttgcttatcacatattattccaatactcttccaaaccatactctatatacaaacaatacttacaattactaaataattttctttgatattcttattatccatcttactcatttataccttactttaatct

SEQ ID NO: 66434 - DNA, 118 bp, Glycine max
  Clone ID: PAT_MRT3847_31003C.1
actcttcaaataccactttaggattcaactactccaccatctcaacatgcgatagtactttcatttgtcttaatcccagctcccaaatcaatctccactaccactcctcatatcttat

SEQ ID NO: 66435 - DNA, 896 bp, Glycine max
  Clone ID: PAT_MRT3847_31004C.1
attcttacggctgcgagaagacgacagacggaggcattagaatgagtctttattcatattctactactttcactttagaaaccatatcttgagcctccagggaatccaaaggaggagggttatctatataaagaagccatgatccagtagtattcataatcatatatactaaagccaagccaaatatttgtacccaaaaacaaaccatatacatgtcgagtttgagtttcctaaagttcaattatagcttctcatggaagccctccgcttcacgcaaaaatgtagtcaagaagaacagcttcatatcaagacagacatcgaatgaaggacaaagtttccttccaaaagaagaggaaatgaaatgggtgttccagaaatttgacaccaacaaagatggccacacgcgtccgatcgtgttcaagaacaacgcaggtttcccccacaacgttgtgttcgacgaggacgagattcctagcggcgtggatgcagggaaaatctccatgagcgaagaagaccttctcaatgcggctggtgagacttacagcgttactttggatgccaagggaacctacagtttctactgttcgcctcaccaaggagctggtatggtgggaaaagtcaccgttaattaattatatattgtctcctacgtctaagttctcatatgcttgttttcctagaagagcctaattcatctttcttgttagggcctatgggatgaatcaacaatataatgcctttgtgtaattcatttacctcctttgctttcttgttttatatcggactgtttttttttttcttttcatattttgtaaaaatcttttagtttttattaatctttttactactatttttctacaaaaaaaaaaaaaaaagagggagggagggggggaggg

SEQ ID NO: 66436 - DNA, 327 bp, Glycine max
  Clone ID: PAT_MRT3847_31005C.1
acgcgaacggaagctcggaattagggtatcgaccaccccgcagcgagaggccgtgtgcttattgctcgcgctgacgctgccgcggttgctggctaccatggctcggtcgctacgctgtagaaagctgattaccctaaataaaaggcggacttgctgaaccacacacaaactgggaatttcgcaggagacaacatagctgctaattgccatcaagacgcatggaaccccaagacggctgcgtcgtcatatatttatatacatgcataacctataaccctcattattgaaacaaactctgattcaagaggatgtgaaaatcaagaagac

SEQ ID NO: 66437 - DNA, 502 bp, Glycine max
  Clone ID: PAT_MRT3847_31006C.1
gtgtggtgggtaatgggtcatccttttataacccatgttttattttggtattggccaaatgacatatttgatcatttatcttttttttgttcagtttggtccttttagaaagttcattttcgttctttttctttttgaaaaagttcaaaatagtcctttcgtccatataacattaacattgttgatggaataaagatatcaacactattaatggaataaagatattaacaactaaaaaccaccacaaaatgtaagtttcttcttccttctcctcttctttacccatcaccaccacccacccaaccgccatagccttctaatccgcacaaccaagccagacaccaccacaatgaactagagtgccaccatctcccaccaaaacgtcgacgcgcacccaacgatcaccatagcaattcaaactctgacgaccctaaggaccatccaaaccaccacattacaagcaccatcaatcttagccgcatagatctgccctataaatagc

SEQ ID NO: 66438 - DNA, 463 bp, Glycine max
  Clone ID: PAT_MRT3847_31007C.1
atgagctcacagaaattatataaattgtactgaaataatataatttttaggtcaaatttgcagtacaagacataaactacttacactgagtttcccccaaacaaggaatctcctccaacaacacacaacactataatggtctcaatctgcttaccattccttctcacataaaaggcctataaaaaaaaattcaatttcacatcatagacgcatctttagggttatactgatacaccacttataagagcctatccatgtctaaacatgttatataaattttacagcggcactttgacactctattttagatccttgtgaataaatttccgagagtttagttacgagggacttatatcttacataaagtaataaaggaacaggtaaagcaagttgcttcggaacttatattttaccaggcagactattcatgatagcttacttatttatacaagcaaatgtggaa

SEQ ID NO: 66439 - DNA, 367 bp, Glycine max
  Clone ID: PAT_MRT3847_31008C.1
tacggtgcattggcttaccttttgatacacttcttattgtcaatcaatatgaggtatgggaagtagccttgactgcattggaggcatatcaatcttatgtctgattcatataatatcacacatataatatggaatattatattaatctagtttatctatttatgaactttataatatggatctcatatgaacctaatatttgcatcaaattagatcaaacgctcttcttagaaacctgactgaatgctattatacgttccagcattataaaaacattcatcttttcaagttgatctaacttagattgattcggaacgcaattgatcctatcaaggaaatattcatggttaaacatagtcaacataat

SEQ ID NO: 66440 - DNA, 986 bp, Glycine max
  unsure (1)..(986): unsure at all n locations
  Clone ID: PAT_MRT3847_31009C.1
aggtttttgctcacaaggtgtcattttgagtgaggtaaattatttcatgtctaagctttatttcgtctaacatactaggccctaataactcgccgtgtgtgcaaaggtgtacatgccatgtgcatataaacaagtatttatagacattcatgtaataagtaaaacagccacaccaaaaagcttcaaaagagttatctgaccacaagaatattgttagtcggtgaatacgactaacttttgtgtataaaacttgtgtaaattgtatcaaactcttccaatttatggttattttgtagtgttataagtattttctattaagtataggtaataaatacttagtacttccattttgtgtgtttaataatcattttctctcaatttcaggttaattaggcaagctttgaaaagtgttgtttttcgccttctcgctaagccaatctgctggcttagcgagcgtccgctaagcgcaacactcattggctaagcgcgaggaagactctagaagaagatgagctgtcaagttcgctaagcgcaccggtccatgtcatcaagcgcactgcttcagctcatccgctaagcgaaacaagcgcgttaagccaaaatccacttatgcgcgctaagcgatccagatctgcgctaagcgcatgagcacaaacaagaccacctatttaagcctgaaatcagatttgcaaagggagtttggcactcttctcgagaagctctgcatgcacgaaggttcttgagagagaaaggtcgaagttccaaagagttctgagagattttgttatgtgaagatctgcagagacgcgagttcgaagcggaagccattttgagagcttgagatgagttgtgagtgattgtgagatcctagaggtgaaggagacatcctcaccacttgtgtttttgcagnctttcatcttgttcttctctttgttgtaaaggaggttttcagactatggaaagctaaatcctctgttggatcttcc

SEQ ID NO: 66441 - DNA, 331 bp, Glycine max
  Clone ID: PAT_MRT3847_3100C.1
aaaaaagaaaaaaagtcctttgatcccccccttggaaaagtttaataaatgggttgggggggtaaacattttccccctggggaaaaatttcagggggggtttttttttttaaaaacccgatggattttcccctttccattcaaaggaataaatttttgccctcccggggggaaaaaaatattgggttgtttttgaccaacgggggaattgttggattttttgggatggaaccctttttgttttttgtttaaaagtttttaaaatttccctaggggggttcttggggaactttttttccttggattaaaataaaacaaggtttttacaattt

SEQ ID NO: 66442 - DNA, 424 bp, Glycine max
  Clone ID: PAT_MRT3847_31010C.1
tccactcctacgtccactcgttcgaccaccttcctatgcttcttcttcatccgtggtgggccaaatgcccaatcttgtcgaccctgaaatgttggcctgcatgacccgcgccatctgcgacgtattccagacccgatccgcactcaagctaatcgtagcaccgcccacccacgagcaggtggactacgcctatgccagactcgacgacctctatgaccatctctgccgtcagctccaacagatcgtggacctgctcatgccccacgagatcgacgagctccgctggcggtcccatgatcacgagaaagataatgccattaaagaatccacggagcaagagaagcgcgttctcaaatcactgattcaactcgtccagatgcacgattactacgagaagctgctgaaggacgcccttaagcgactc

SEQ ID NO: 66443 - DNA, 244 bp, Glycine max
  unsure (1)..(244): unsure at all n locations
  Clone ID: PAT_MRT3847_31011C.1
gtggtgtgtttttttttatttggtttggggaaacccaaattaatatatttatatttgggacttttaaccccttttatatgcaacctaaaattgaagttggccatataacataaaacaacattatcctggttttttgttaaaaatggcaatttttaccctgggggagngtggcttacatgcttctaatgaaccttgttatttgcagcgcaaaatcttccatgggcaaaaagtccaatcctacacc

SEQ ID NO: 66444 - DNA, 1860 bp, Glycine max
  Clone ID: PAT_MRT3847_31012C.1
cctcgagccgcccaatccctacccagacaactcccaacttctctcagtactcactcactaacatcacaacttctctctttctacacaaataactccttctcagtgtgagcagttgataagagagatgatgatcaacgtgaaggaatcgaccatggtgcggccggcggaggaggtggcgcggcgggtggtgtggaactccaacgtggacctggtggtccccaatttccacacgcccagcgtctatttctataggtccaatggcgcccccaactttttcgacggcaaggttatgaaggaggcactgaccaaggtgctggtgcccttctacccaatggctgggcggctcctgcgagatgacgacggtcgcgtcgagattgactgcgacggtcagggggtgcttttcgtggaggccgacactggcgccgtcatcgacgatttcggcgatttcgctcccacccttgagctccgccagcttatccccgccgtggattattcacaaggaatagcatcctatcccctgttggtgttacaggtaacacatttcaaatgtggaggggtttccctgggagttggtatgcaacatcatgtagcagatggagcctctggtctgcacttcatcaatacatggtcagatgtggctcgtggcttggatgtttccattccaccattcattgatcgtacaatacttcgtgcccgtgatccacctcgacccatttttgatcacattgaatacaagcccccaccagccatgaagactcaacaagctactaatgcatcagcagctgtctctattttcagactcacgcgtgaccagctcaacacactgaaagccaaatccaaagaagatggcaacacaatcagctatagttcttatgagatgttggcgggtcacgtgtggcgaagtgtaagcaaagcaagagcacttcctgatgatcaagaaaccaaattgtacattgcaactgatggaaggtcaaggttgcaacctcctaccccacccggttactttggcaatgtgatattcacaaccacacctatagctgtggcaggtgatctgatgtcaaaaccaacatggtatgctgcaagcagaatccacaatgcattgttacgaatggacaacgattatttgagatcggctcttgactatctagaactgcaacccgatctaaaagcgctggttcgtggggctcatactttcaagtgtccaaaccttggtatcactagctggactaggcttccaatccatgatgctgactttggttggggaaggccaatattcatgggacctggtggaattgcatacgaggggctatctttcataattccaagctcaaccaatgatgggagcctatctgtggccatagctcttcagcctgaccatatgaagctgtttaaggatttcttgtatgacatttgaagaatcattgccttcaagccatatggaacgccacaatgtttctaggtggtgttttctttccccccgtacctttgttatctttcgatgcttttgacaaacggtatgcaactgttaatgggactcctttcagttttatatggactacattaagtgttgtaaatttttataatctgtaaacataaacgaactttaacaacagttgatttgatattacaagtttctgttcctaaatataatgccataactgagaggtgtatttttacaattcttctaattggaggaaatttgaaaggtagttgttagtctatgccttggcaaagcgtgataatcagtaagcacaaatgaactttgaatcaagtgtatcatcgacttgatgtcacatttgtggacaagatttgtgagtcagtgcaagccgtctccccttcaccaaaaaaaaaaaaaaaaaa

SEQ ID NO: 66445 - DNA, 704 bp, Glycine max
  Clone ID: PAT_MRT3847_31013C.1
ggctcccgcacccaatccctacccagacaactcccaacttctctcagtactctcatcaggatccgtgtgagcagtcgagcagagagatgatcatcaacgtgaaggaatcgacggtggtgcggccggcggaggaggtggcgcggcgggtggtgtggaactccaacgtggacctggtggtccccaatttccacacgcccagtgtatacttctataggtccaacggcacctccaactttttcgacggcaaggttctgaaggaggcactgagcaaggtgctggtgccgttctacccaatggctgggcggctccggcgagacgaagacggtcgcgtggagattgactgcgacggtcagggggtgctcttcgtcgaggccgacaccggcgccgtcatcgacgatttcggcgacttcgctcccacccttgagctccgccagctcatccccgccgtcgattattcacagggaatagaaacctatcccctgttggtgttacaggtaacacatttcaaatgtggaggggtgtccctgggagttggtatgcaacatcatgtagcagatggagcctctggtttgcacttcatcaatacatggtcagatgtggctcgtggcttggatgtttccattccaccattcattgatcgtacaatacttcgtgctagagatccacctgaaccttgttttgatcacattggatacaagccccca

SEQ ID NO: 66446 - DNA, 831 bp, Glycine max
  Clone ID: PAT_MRT3847_31014C.1
aatgcattgttacgaatggacaacgattatttaaggtcagctcttgactatctagagttgcaacttgatctaaaagctctcgttcgcggggctcatactttcaagtgtccaaatcttggtatcactagctggactaggcttccaatccatgatgctgactttggttggggaaggcctatattcatgggacctggtggaattgcatacgagggcctgtctttcataattccaagctcaaccaatgatgggagcttatctgtggccatagctcttcagcccgaccatatgaaggtgtttaaggatttcttgtatgacatttgaggaatcattggctgtcagccatatggaacgccacaatgtttctaggtggtgtttttatcccccccggtaccttttgttatctttagatgcttttgaccaacggtatgcaactgttaatgggactcatttcagttttatatggactacattaagtgttatacatttttataatctgtaaaacataaacgaactttaacaacagttaatttggtattacagtttgtgcatatgaattgtttaaggattgtctgcacaatcttttgctcctaaatgtaatgccataactgaggtgtattttatctggacacatctgcattgcattctgtgaggaatttttccaattcttctaattggaggaaatttgaaaggtaattgtacaagctggttttgtcccaagatataggttgttcttgctacttgcactagtactccagtagaagaaatccttcctttctccttgtctaaagatttcccttgagtcagctttatgaataaggatgagattattgt

SEQ ID NO: 66447 - DNA, 365 bp, Glycine max
  Clone ID: PAT_MRT3847_31015C.1
atgcacgcgtgcgcacgctcgtgaatctggctctgagggatcgagcccaacttctctgacctgatatatgaaagtctaggttaatttctttgatggatcaggggggcaagttgaggagcacggctcatggacccattacgagaacatatatttcgtctggcctaagaaaaaatatgacgcatgttcttggcactaagagctcttcacatgattcagagctgatactttaagctgtaaccttcatggtagtatgtgaggatggcacgcacaatgctgtgcttgtactttgttgataccaggataggggatgatgtccatagatgatggctcatagtcatctgcattcacactgttacgaacaatgc

SEQ ID NO: 66448 - DNA, 1140 bp, Glycine max
  Clone ID: PAT_MRT3847_31016C.1
gtttaggtggttacaatgctaatggtaagtcagatggttcctcgattactgatgcaacattattggagtatgtgttgaatggtctccactggaataagttcggtgatgagaagctttttgatcttgtgaataatggtagagtattaggaaatggtttaactgctacgcctaatcaaatcaagaaatacacactggttggtttgccacaagatgcaagcccacttttggtgcttcatcaatgccaggagtggtgggcagcttgggccttctcttcataggagattgaatatgctactaaatcctgttcagatatttgaattgagtgcttctcaaggccctgaagtgggcttggaattcttcaaaagtgtacgatattttaaagtgctggtatgtggtggggatggcactgttgcatgggtccttgatgctatagaaagacacaattttgagtcacctcctcctgtggcaattcttccccttggcaccggaaatgatttgtccagggtacttaactggggaagaggcttctctacacttgatggacaaggcggattgactatgcttttgcatgacattagcaatgcagcgatctagcatagtaactgctgcgaagtaaaaatcgtagaagaaagttctgaaggaaaatcaaataaagtgaaaactaaatctatgatgaactatcttggcattggatgtgatgcaaaggttgcatataaatttcatattactcgagaaataaatcctgcaaagatctgtagtcagtttttgaataaattgcgatatgcaaaagaaggcgcatgggatattatggacagaacttgtgctgacttgccatggcaagtgtggcttgaagttgacgggagagacatagagattcctagtgattctgacggcttaatagtgctcaatattgggagctatatgggtggagtagatctttggcagaatggttatgagcatgatgatgatgttcgtcgtgcgtccatgcgtgatacattgctggaggtggtatgcgtatgtggtgcatggcatctgtgaaaacttcaggttggactttcacaagctataaggcttgctgagcgtagaaccgtctagatgagctgggacggtccttacgctaggtatattggtggagaaccc

SEQ ID NO: 66449 - DNA, 378 bp, Glycine max
  Clone ID: PAT_MRT3847_31017C.1
gacagatatcagcttcctgttgttggagataacctctggcttccggaacatcggcagactttcaggtccatatgtccaagcgttcacaccatcgcccgcagacttcagttatggtgcaagatattcaggtacacgcgactgaatccgtatcttccaccatcaatagctacaaactaattcatgaaaacattcagcgccacctcaatgctattgtttcatcctctggtgagtatcaagtcagcatcgttgactacatcgctgatcccacctaggtatcacacggtcgtgcctctcctatctggcccagtccatatttgggacatcgacatcagcactgtagccatcaggcctagatcctttaaattcagcatcttcgca

SEQ ID NO: 66450 - DNA, 244 bp, Glycine max
  Clone ID: PAT_MRT3847_31018C.1
cacgaatccagctaaatgcgcgtttaaaccgaggcagacgaggtgacaactgctaacaggtggcatgatcaaattctggatgcaatgtattgagggcatggtatcgtctcctgatatgttaaggattcgaggattatgcgtttgggtgtttccgtgagctgaagtgcgaatgatcattagctgtacatcagatagctctcatagtattggtgaccgtagtagtcaccactctatagtcatcctt

SEQ ID NO: 66451 - DNA, 236 bp, Glycine max
  Clone ID: PAT_MRT3847_31019C.1
ggaacctttggattctagtcattccacattcagcagctgcgttttggaaccagagaccgaaatacttcgacatggcccgtagaaagcagactactcgtaagtcaactggaggaaaagctcccacgaagcagcttgcaatcaacgctgcacgtaagtctgcagcatcaactggtggtgtcaacaacgctcatcgttatcgccctgtaatctgttgctcttcgtgagattatgaaata

SEQ ID NO: 66452 - DNA, 252 bp, Glycine max
  Clone ID: PAT_MRT3847_3101C.1
gggaagggggaaaacagcccacccatttattcaaacaaaaataacctttttgggaaattgggatggccaaacacagggaaaaaacattttaaaacaaattcctaaagggccacaggggcagcccgggcaagggcaattagggccaaactggcacttcccaaaaggccaaggggggggaaaaaccaagaaaacaggctgaaagaaacctttttaaagctttaaaaaaaaaccaaaagcgggttcccttggggc

SEQ ID NO: 66453 - DNA, 389 bp, Glycine max
  Clone ID: PAT_MRT3847_31020C.1
ctcgagccgcatgaactgaataaaaggatgcctcatgcttgggctaaaaaaaaaaaaaaaaaaaaaaaaaaaaaaaaaaaaaaaaaaaaaaaaaaaaaaaaaaaaaaaaaaaaaaaaaaaaaaaaaaaaaaaaaaaaaaggaagtaggaaaaaaaaaaaaaaaagaaaaaaattaaaaaaaaaaaaaatgaaggaaaaaaaaattaaaaaaaaaaagggggtggttagaagcttggagaaatcatggcaataaaaataataatgggtgaaatgtgtaaaagggtcacaattttacaaaatatacgagcataaaacatagggggcataaacttggaaagcctaaggggtgaataaattaaaataaattgcattatttctaaatgcctgat

SEQ ID NO: 66454 - DNA, 326 bp, Glycine max
  Clone ID: PAT_MRT3847_31021C.1
tttaacaacaaatgtaaatttatattataccccacaggtaaaaatacaatgatttcccaaattacacatgatttgtgaatacacgacagctagaaagacaccacaccaatcctcttcatattttgttttttttacattctacgaaaccagaagactacaactgagattttattccacttttttacacatgctaactttaggacaaagatgaatcgcaaaacaatgggggggtgtttatagatatcaagttccaacaaatgaatggtacagaaaacaattgggttaatttacacgaatcaacaagtccaaatgggggtgccctaaaa

SEQ ID NO: 66455 - DNA, 232 bp, Glycine max
  Clone ID: PAT_MRT3847_31022C.1
cgcgttcggacggctgatagaatacaaccgacaactgctctgaatgtttaaaatccaatacccctcacggggggctgcccttgccctttcttggtttataaaccaaccagctatttacaacaaacaagtctttcctcttcctatagtcgagatactaccaacctcatttgtcttttttaaggggagcatagctatttcttacagttacctcatgttgaataacatattaact

SEQ ID NO: 66456 - DNA, 448 bp, Glycine max
  Clone ID: PAT_MRT3847_31023C.1
gacaaaagttagacacatatacttttgtcattttactttttgtcttcctggtctctccggacatgtgtgatgtattttctgcaggtcgtaatcttgtgaaattggttgtgaggaacgcgtggttatccgtggatggtttgtgtttgatgccaacgctgacatatttgacccttgagtttgtgagactagatgatgaggacttaagcaggattaatgcctgtttccctaacttgacacaactcaatcttattggggttggtggactaaaggagcctaagattaatctcttacacctcaccacttgtcaatggtcagtctcaaatgctccactttctttgattatatgtgcaccttgccttgttgattttgatctcagatgcatcaaaccaaggttggttgtccttgaagccccttccctgtccaattttagtctatcccttgagaatac

SEQ ID NO: 66457 - DNA, 472 bp, Glycine max
  Clone ID: PAT_MRT3847_31024C.1
gtctatcatgatcaaatagcgattcatctatcagatggacaattggacaactccccattgccacgctaaccactatcacacccatatctcacaacatctgtgtccacacgcaacccaacctttgtaccatcaccgatgctcactcggattaccaaacacagcacactttccctcgaataggtaccatggagtccaagtcacgctccagctaccgtgttgatacaaacaccggccacctccatccgcatagataggtccatgaacgcacgatgcatctcgaacgccctgcaacaggtgaagtctcctgatacactggggccactattctagcctcacgatgcatatggcaacctaccgcgatgatggtgaggaggaaggcactcatatgactgtgtacactttactagagtgcctacacccgtgacaacactactgctacctgtcactatgacacgatctctgtcgatctacg

SEQ ID NO: 66458 - DNA, 135 bp, Glycine max
  Clone ID: PAT_MRT3847_31025C.1
atcctttttagacagaagatcagatgcatgcattaactttgaaggaaagcaatacgtcaaattggcgctgtacaaaaagactctcatctctaagaacgactccatagcaaagatagcttaaactacacacggaag

SEQ ID NO: 66459 - DNA, 281 bp, Glycine max
  Clone ID: PAT_MRT3847_31026C.1
ttcacttctctagtctgttcataacatcactaaaaacagcttccgaaagatttaccataatcgtctcttctcgatctcaaggcatccatctctgtatcacataactcatgctctgtatcacagtactattcccatcaacacttttctctcactatgactcatgttctcgacgccaccaccaccctcggtgccgttccaccaacagtacgacttcaccgaccgcaatattcggtttgatacctacttctacatggccataggtaattctaccagtccatcta

SEQ ID NO: 66460 - DNA, 1663 bp, Glycine max
  Clone ID: PAT_MRT3847_31027C.1
ttggtgactactacttggatgagctggtggatcgcagcctggtgcaagtggcgagtaggaggagtgatggtggtgtcaagacatgtcggattcacgatcttcttcgtgacctctgcatatcagagagcaaatcctgtaagtttttggaggtttgcacggaggtaaacattgatactctatccttgagcaatcctcgtagattgtccttgcaatgcaaagcacggcctaatatctgtacaaaaaaatttaatcaatcatacactcgttccttgttcttcttttctgaaattatgcacacacgtggcattccaaagagcatcaagaatgctcgtgtgctgtattcaaaatccaaaggagcaatgaattactcactgcatagtacttttaagacgatgatccatctaaggtatttgagaatagacacaggtgtcagccacattccagcttctataggcaaccttaggaatttagaaacgctagatgtaagatacaaagagactgtctccagtgaaatttggaagttgaagcaactgaggcatctttatttgagagggggtgcaaaattgccagaagtagctagagaaagaaaggtgaatcttcaaactctgtggttaagggcttttgatcgacaaatggtgtccatgatgaacaaggacatgtatgtcaatgacatatttcccaggttgagaaaattagttttgcactatccatttcatcgtccttctcacgaacaattaccaactgtaaggttaccaagtctacaccacctatgcaatctccatagcctaaaaataattgactttctagaacttccacctgacaaaaatgcctttccatcacatctcaccaagataacctggaaacaaatacatgtcggcagtgacttctctttgatgagtactttaggatggctaaccaacctacaaattttgaaaatgggaaggcaatgctctgacgtgttgttcgaccttaatgttggtgcaggagagttcccacagcttcaagtatttcagatgaggggaatgaaactcagaagctggagattggacaaaagtgcaatgccacatcttcaacatctgctcattgaaggctgtgaatacttgaatgatcttcctgaagaagtatggtccttgactaccttacgaaaagtgcatgttttgtggccttctgaaagattggcaaacagacttcaaaatgtgaaattaaagaatggctgtaagctcataatctctaatgctcctccaaatggtcaatcagatcagaatgcactgacacattctgtatcagttgatgcctgaaacaggatcattcactaaagaatatcgttaggagccccacattggattgaataagaagctccatatggtacttaagccactaggctctcccatctaatagactagtcttttgggttggactttcctcttgtgcttagttttttattttatttcattctttgagagaccacagtggcttccctctactttaaggagttaatgtccatatttttatgaagatatgttctgtaacaactggtttcaagtatggtttaagtcttgttgaaacctaaactttctttgttttgttgtttttttatctgttacagtactttgatgactttttctctttcgttttatctaatatatttctttggttttctttt

SEQ ID NO: 66461 - DNA, 333 bp, Glycine max
  Clone ID: PAT_MRT3847_31028C.1
aattcccggttcaggtaattgaataatcattgaattcggcatatattgagagagttcactatcaatggtgtgaaggatagattcagacttagctatcatgttcgaatcaagcaattctccatagaatacactacactttccaatctatcactgactaaggtccatgatattatgagctaccattatgctatataccatagcaccattaccaatcaagttattagctagatcacctacatgatcctcagcctttgtggtgacgaccaacaatacatgcatgaatccacgcacctactgtaggattgaagaacacagatggcaatacttaacaac

SEQ ID NO: 66462 - DNA, 764 bp, Glycine max
  unsure (1)..(764): unsure at all n locations
  Clone ID: PAT_MRT3847_31029C.1
ttaccgtgttagcttaccgtgtaaggcagagcaattgggaggggaaaggaaaagaaagtgaattgaagcttagcttaagcttacagcaggagaaaagaaaggaagcaaaaccacctaaaagcaacctagccacctatttgtggctggtgtctcttaattaatgagagaaggaagtgagagattgtaatggaaaaagataatcagatgctgtccaaggaacatagcgattcttcagaattttgtttgcttatagtacttattcatcatctatctcctccttcttcaattctcctctccaatgattttgatcttcagtgcaagggagaagaatagaacaagatcttgattagggttgtggagcccatttattgtgtccattcatgcactgtggaacattgattttttgaagagtagatggagactggtgaaagcaacagtactagtagtaaccaaagttgtgcagtgatgaaggattctaaatggtacactcaattcagaaatgtatccaatccttggatggcaagatatgtttatggcttgattttcctagtggccaatctgttggcatgggctgcccgtgatgaactttctactctttgtgctttaacagaaatgaaggggttaaagggatgcaaggttggaaaagactgtttgggtgcagatggtgttctgcgtgtgagcatgggttgctttttattttatatgataatgnntttggtcgactgctggcacttctaaattgaagaangcagagatgaatggca

SEQ ID NO: 66463 - DNA, 437 bp, Glycine max
  Clone ID: PAT_MRT3847_3102C.1
ccacgcgtccgcaagaagcccttgataaagcttatctgaccgagaaggatcttactgctgttgctgttactattggtcctggtttgagtctctgccttcgtggtaatgcatgaagtcaagaaactttaagaataggcttgcaaattgtttgatgggggtgcagaaagcccggaaaattgctggcggatttaatttaccaattattggcatacatcacatggaagctcatgctctggttgccaggttaattgagaaagatttgcagtttccattcatggccctacttatttcaggtatcattcctagttttggggtttaggtttgttaggcaagaagcactcatgctggaatttttcttcctcacacctgatctatctttattccttggatcataaaaacattggttctttggtctagatcttttttcatgggttaaa

SEQ ID NO: 66464 - DNA, 889 bp, Glycine max
  Clone ID: PAT_MRT3847_31030C.1
ttttcgattatagtttaccgtgaaaggcagagcaattgggaggggaaagtgcattgaagcttagcttaagcttacggcgggagaaataaaagaaaggaagcaaaaaagctaagcaaaaccaccgaaaagcaacatcgccacctatatgtcgctgtctcacaacaagtctaagtgtgtctctgagagagagagacatctttatcatcatttttaaacacaccaacaacacatgttgcaccaccaaccattctctttctctctctctctgtgttttcttgtttttattgtgtctctcaatgagagattgtaatggaaaaggatcatcaaagtctgtccaaggaacatagtgactcttcagtgtgttgttggcttataggagtagtacttattcatcatctaactccttcaattctcttctccaatgattaactccttcttcaattctcttctccaatgattttgatcttcagtgcagaggagaagaatagaagaagatcttgattagggttgtggagcccatttattgtctgtgatccattcatgcactgtggaacattgattttttgaagagtagatgcctagatggagactggtgaaaacaacagtactagtagtagtaaccaaagttgtgcagtgatgaaggattctaaatggtacactcaattcagaaatgtatccaatccttggatggcaagatatgtgtatggcttgattttcctagtggccaatctgttggcatgggctgcccgtgacgaactttctagtcttagtgctttaacagaaatgaaggggttaaagggatgcaaggttggaaaaaaactgtttgggtgcaaatggttgttctgcgtgtgagcatggggttgctttttattttaatatgacaaatgtt

SEQ ID NO: 66465 - DNA, 325 bp, Glycine max
  Clone ID: PAT_MRT3847_31031C.1
agccttccggttaattccaatttgaccttaatatgttcggatggattttttttaacgggcccccccaccgggcttaattcctaacccaatcaattcaaaatttggttgaaattagtcgggccccccgcatttcaatcccggtacctttgccattattggcccaactatgctagttaaatggtgtggaagtaataataatggtcatcttttgtcgatgggaataaaatcttcaagtactcaactgacttggcctttttgctctatcattcaagtcaattattgtgcagtagcctgctgcagctacaaattgcatgcttagatactg

SEQ ID NO: 66466 - DNA, 435 bp, Glycine max
  Clone ID: PAT_MRT3847_31032C.1
gtggacggggaacaaatcttgcctaaatgatacagaatcaaaacccgggtcccgcatgtacaaccatgccttttttttaattaaaaatcaatttggcaccaaaaaagtaaataactttccccaaaggggccaaaacccgcccccaatttttaaaacaggaataatcatcccggggtttgcccttggcatttgaaacactagcaaggggaccaccttgcaaattaattctttcaggggggctaaaagcgaccccccaaacctgggctgaaagaatgtttattgggtggccaaatgcccttatgttaaaaacccatagccttacaaattttttatttgaacctgtagcaaggggtgccccatttggggtcaagtccacacccaggacccaatttgggtgacctggcatgggcccaaataaaggttttccctcaaaaa

SEQ ID NO: 66467 - DNA, 365 bp, Glycine max
  Clone ID: PAT_MRT3847_31033C.1
cctgcccacgcgtccggggagattgaaaccaggggaagctgtgcaggctacactttcttctctccctgatgaggttgtagatactatacaggttacatctttaccctctgaggattctgtctcagagaggaggaggaaattggagttccttgaaatgcaagattaaaaaaaaaaaaaaaaaaaaaaaaaaaaaaaaaaaaaaaaaaagggcaaccgaatcaagcgatccaatgcaaaacgtgcagcgggcacccgatcacaagactctcctatactgatacctaaatttgattcactggccatgtttttacaccttcctgactggaaaaccccgggcgtttcctaatacaatggcggagaagaac

SEQ ID NO: 66468 - DNA, 306 bp, Glycine max
  Clone ID: PAT_MRT3847_31034C.1
cccaaaaccagggcactctataaatgactttgttacatccaaaacagggatcatgcgtggcttggggtaaccattgtattggtgtttattgaataaggcagtggcaatacaaatgggcgtgttcccataacatgatgtaggtatgaaataaattccatgaaacttccatgggaaacaacttgggggccatggttttctagcaatgagggaacgaattaagctttattatttactatgcaaaacttacaagcaacccctaaggtattgtactggttacaatatggaggtgggaggatccctggggtg

SEQ ID NO: 66469 - DNA, 638 bp, Glycine max
  unsure (1)..(638): unsure at all n locations
  Clone ID: PAT_MRT3847_31035C.1
ctcgagccgtgtgtcaagagcaaagagccaagagggtgcaattacatgagctgaaagaagtaacgcaaaagcccctttatttttaatggttagaacttagaagctgattgtgacaatggatgctcgtggagaagggtcttctacttcttactacaacgttcttggtgttagctcagattctaacgtggatgagattagacgtgcttataggaagctggctatgcaatggcatcctgataagtgcacaaggtcgccttctttgctgggtgaagctaagcgcaaattccagcaaattcaagaagcctattcagggaaagcattacggtttggaagagttgcagggcatgttaatggaaatggctaaaggattcgagtgtccttcaatgtattgtggggtgaactctgtgattgatgagtctccatgcgtaaagagaacgcgttttgacacaaacatgatggagaataaggggtcacatttccaagtacctgatcttaacctctattgcagttaagatgttnttcacggatcgatatcaagaaaaaacagatgggtagtgatgatgaattttggtagttattttcaacatttttgacatggatatatctgtacatattccttgtatggtgctaaattccca

SEQ ID NO: 66470 - DNA, 564 bp, Glycine max
  Clone ID: PAT_MRT3847_31036C.1
gggggaccaagaaaaaaaaacaaactttcaaaaaaaaaattaaggggaaaacataaaaacaaaaaaaaggcggggggcaattccaaacaaaatttctctaaaaaaacaaaactaggggccccaccccacaaaatcaagcccgcttattcccccaacagggggaaggaacgggttttggggcctttttaaaaaaaaaagccggggaggggtccaccatcggggggggggacccccttagggggggggacaagatttcatggggggaccccaaaagccccccttgggccgagcccaagagttccaaaactgggccccccaacgggggggaacccacaaacccggttttggttgggttcaccgccaaacccacctttttttccccccccaaaaaccccttattcaccttcggccctgggaagaagggccccccccccatgggaacaccttaaaaaacgggctcaaaaaccgagttccacccgggggggggcccaacccccccccccggggcatgacccaatatcccccgcgggggggcccagcccctcaccaaaacccccttttcct

SEQ ID NO: 66471 - DNA, 1256 bp, Glycine max
  Clone ID: PAT_MRT3847_31037C.1
cggacgcgtgggtttcaaaccttccctcgttcattgttcacgtactgtgtcaagagcaaagagccaagagggtgcaattacatgagctgaaagaagtaacgcaaaagcccctttattttttatggttagaacttagaagctgattgtgacaatggatgctcgtggagaagggtcttctacttcttactacaacgttcttggtgttagctcagattctaacgtggatgagattagacgtgcttataggaagctggctatgcaatggcatcctgataagtgcacaaggtcgccttctttgctgggtgaagctaagcgcaaattccagcaaattcaagaagcctattcaggtatgtatgtatgtttgtatgtttcaagttcttgtttttatttatttattttttatatctaggaatcgaacacataaattagaatataagaatgagttgattatttttgcactctgtcattatcaactaatcataaattacgaatcaacggagttggtgttggtctagtggaagggctaatctcacaacgtggtgaactgggttcgaatctccctcggaagagtgttgtctgatagtaagaaaagaactatgtatgatgcgggcttgtatgatcctcaagaggaagaggatgagggcttttctgattttgtggaagaaatgttgtcccatatggctcaagtgaggcgagagggaaagcattacggtttggaagagttgcagggcatgttaatggaaatggctaaaggattcgagtgtccttcaatgtattgtggggtgaactctgtgattgatgagtctccatgcgtaaagagaacgcgttttgacacaaacatgatggagaataaggggtcacatttccaagtacctgatcttaacctctattgcagttaagatgtttttcacggatcgatatcaagaaaaaacagatgggtagtgatgatgaattttggtagttattttcaacattttgacaatggatttatctgtacatattccttgtatggtgctaaattcccagggctttgtctcagtttttctagttgtaaatgatatatatcttctgaaggggaagagaggagaaaataatgattgagtagtttggaaattatgttttgagtaaggattttctgccacgggattgttcactttttgtatttctttgatttggataagaagttttatggacatgtttgagaaattaatgatttttttgaagtagtattatatataaaaaaaaaaaaaaaaaaa

SEQ ID NO: 66472 - DNA, 457 bp, Glycine max
  Clone ID: PAT_MRT3847_31038C.1
aaaaaaatcgggagatgctctatcttatttgattaatgcgaatcaagtgctgggatgggaaaggggtaaacatgggtaagaaaccatggaactatatcggagatgcattaaataggcgtgcaacgtgaaaaaaccggtggctcttatcagctgagcataaataattttaattcctaagcttaattggtaacaatgcaggacgcataccaacgagcacattgggtatcataggcgtctcttgcaatcttcttgggaaaattgagacagcatagtaaaggtggtgattaccccgagccaaggcttcatagcttaccatggccactctgaacaaatggaggagtgtccggttgaaaagattgcgtggtagtaacaagtgggagaacatctgaactaacatgatgaactgcgcctgcactctctttactaggagaacccccaatggcattctcttcaacag
